United States Patent Application Publication US 2006/0257851 A1 - sequence listing, part 11

SEQ ID NO: 349136 - RNA, 32 nt, Homo Sapiens
uagggaguaguuuuuucccuuaggacucugca

SEQ ID NO: 349137 - RNA, 28 nt, Homo Sapiens
cucaggaagauuuaacauuugcuuggga

SEQ ID NO: 349138 - RNA, 32 nt, Homo Sapiens
aauucagaucuuccugauuauuuuuucuguug

SEQ ID NO: 349139 - RNA, 32 nt, Homo Sapiens
gccccggcggagaaugagccggagccggaggu

SEQ ID NO: 349140 - RNA, 32 nt, Homo Sapiens
cacuccauacuuucccacagcacuacgaugug

SEQ ID NO: 349141 - RNA, 32 nt, Homo Sapiens
uguucuccaaaaauaaggaccuucaaauagga

SEQ ID NO: 349142 - RNA, 32 nt, Homo Sapiens
ucagaggacacaggaaaacacacacacacaca

SEQ ID NO: 349143 - RNA, 32 nt, Homo Sapiens
gggccucccuggcuaugcgcuccagcugcaca

SEQ ID NO: 349144 - RNA, 32 nt, Homo Sapiens
uuuaagcuguaaauaaaaaacaaauaugugaa

SEQ ID NO: 349145 - RNA, 30 nt, Homo Sapiens
aauaauagaauccaugaugaguucuguaca

SEQ ID NO: 349146 - RNA, 32 nt, Homo Sapiens
cccucugcagcaucuggcaucuccauggcagc

SEQ ID NO: 349147 - RNA, 32 nt, Homo Sapiens
uuaacccaaucuuugauaacucuuccagaacc

SEQ ID NO: 349148 - RNA, 32 nt, Homo Sapiens
gugccagcugaauuuaaaauauaauacuuuua

SEQ ID NO: 349149 - RNA, 31 nt, Homo Sapiens
aaaccuuugguggcugggauaugauggguua

SEQ ID NO: 349150 - RNA, 32 nt, Homo Sapiens
gccgggcugccuuugccccagcccccagcaag

SEQ ID NO: 349151 - RNA, 32 nt, Homo Sapiens
cucuguaaugcccuucccuaucuccaaggaga

SEQ ID NO: 349152 - RNA, 32 nt, Homo Sapiens
uucaaagcuggguguugggaccaacaucacca

SEQ ID NO: 349153 - RNA, 31 nt, Homo Sapiens
gcauguacguacugccugcccggggcuuagg

SEQ ID NO: 349154 - RNA, 32 nt, Homo Sapiens
uauaaccaacuuuucuauuaaaagugggaauu

SEQ ID NO: 349155 - RNA, 32 nt, Homo Sapiens
uguugauuuugccuuaagauuguuaugacaac

SEQ ID NO: 349156 - RNA, 32 nt, Homo Sapiens
ucaagacuucaguggaggaaguaacugaagau

SEQ ID NO: 349157 - RNA, 31 nt, Homo Sapiens
acgugugcaaggugguuggggcacagcuugg

SEQ ID NO: 349158 - RNA, 32 nt, Homo Sapiens
acauagugacugaguggggggugcuggcaagu

SEQ ID NO: 349159 - RNA, 32 nt, Homo Sapiens
ucuacccucuccaacuucuccuggucuucaca

SEQ ID NO: 349160 - RNA, 32 nt, Homo Sapiens
auggaaaaacgaaugcucuuacacugaaugua

SEQ ID NO: 349161 - RNA, 32 nt, Homo Sapiens
uuuaaacccaagugcugcacaaaagcagauac

SEQ ID NO: 349162 - RNA, 32 nt, Homo Sapiens
acuuuucagaacgauugugaguuuacaccccu

SEQ ID NO: 349163 - RNA, 32 nt, Homo Sapiens
cugcugccuggugcucccgccggcccacaggg

SEQ ID NO: 349164 - RNA, 32 nt, Homo Sapiens
guuuuccuuuuggagauucagcucuuaaggga

SEQ ID NO: 349165 - RNA, 32 nt, Homo Sapiens
ccuuggcccgucugggccuuggcuuccucacu

SEQ ID NO: 349166 - RNA, 32 nt, Homo Sapiens
augaaccguccuccugccucuguugccaacac

SEQ ID NO: 349167 - RNA, 32 nt, Homo Sapiens
gggggccggccgagggucuucgggagcaggcc

SEQ ID NO: 349168 - RNA, 32 nt, Homo Sapiens
gaaaggacuauacucagagggcgccuuccuug

SEQ ID NO: 349169 - RNA, 32 nt, Homo Sapiens
ccaugaggagaugcugggaacuuugggacuca

SEQ ID NO: 349170 - RNA, 32 nt, Homo Sapiens
ucacagguauuuauguguuuuacaaagaccua

SEQ ID NO: 349171 - RNA, 31 nt, Homo Sapiens
ucuuacaacucgggcuugacggccuuugaau

SEQ ID NO: 349172 - RNA, 32 nt, Homo Sapiens
aggcaggugaggaaacagaaaaggucucuuug

SEQ ID NO: 349173 - RNA, 32 nt, Homo Sapiens
ccuuggcucuaccccaggaaccucccggccug

SEQ ID NO: 349174 - RNA, 32 nt, Homo Sapiens
gaucuagaaacacugaugagaugguugaauua

SEQ ID NO: 349175 - RNA, 32 nt, Homo Sapiens
uuaauacaccaauuguaaguucuggucugaau

SEQ ID NO: 349176 - RNA, 32 nt, Homo Sapiens
gcuggcaggggagggggcagacagccucgccu

SEQ ID NO: 349177 - RNA, 32 nt, Homo Sapiens
agcgccgcgggaaggagcggcuccgagcaaca

SEQ ID NO: 349178 - RNA, 32 nt, Homo Sapiens
ugaucacgaagauacauguguuugacuguuua

SEQ ID NO: 349179 - RNA, 32 nt, Homo Sapiens
agugcccgugccuggggucccgcggccgcuuc

SEQ ID NO: 349180 - RNA, 32 nt, Homo Sapiens
guguccucggagccccgcccugcauccuggac

SEQ ID NO: 349181 - RNA, 32 nt, Homo Sapiens
cuaauuuuacuucuaagucauucauaaaccuu

SEQ ID NO: 349182 - RNA, 32 nt, Homo Sapiens
ugguuucuacccgcauggguagaguucugccu

SEQ ID NO: 349183 - RNA, 32 nt, Homo Sapiens
aguauuucaagcauauuaaccaaagaguugug

SEQ ID NO: 349184 - RNA, 32 nt, Homo Sapiens
aggucagaacagccuggggucuguggguaaaa

SEQ ID NO: 349185 - RNA, 32 nt, Homo Sapiens
agcaggauagauuugaagugcaagccggaggc

SEQ ID NO: 349186 - RNA, 32 nt, Homo Sapiens
aagggagagcuguguccccgccggcgcccccc

SEQ ID NO: 349187 - RNA, 32 nt, Homo Sapiens
ggaggggaaaauuuagcucuggguagcucuua

SEQ ID NO: 349188 - RNA, 32 nt, Homo Sapiens
uaucgcaucaguacuuuuaugcaggucucauu

SEQ ID NO: 349189 - RNA, 32 nt, Homo Sapiens
guuuauggaggcaauuccauauccuuucuuga

SEQ ID NO: 349190 - RNA, 32 nt, Homo Sapiens
gucugagcugggcgucgggagagagcgcggag

SEQ ID NO: 349191 - RNA, 27 nt, Homo Sapiens
acauggcgacgucucugcaugagggac

SEQ ID NO: 349192 - RNA, 32 nt, Homo Sapiens
augggccggucggggagggggaggcgggaugg

SEQ ID NO: 349193 - RNA, 32 nt, Homo Sapiens
guggcuggugcauucagcuucuccauggagag

SEQ ID NO: 349194 - RNA, 32 nt, Homo Sapiens
ggagcuaauucccacaaggaauguagacugaa

SEQ ID NO: 349195 - RNA, 32 nt, Homo Sapiens
uauacugcugaaaaugcaggcuuuuguaacag

SEQ ID NO: 349196 - RNA, 32 nt, Homo Sapiens
uuugccaucuucugcaacgccuccacagcccu

SEQ ID NO: 349197 - RNA, 32 nt, Homo Sapiens
ugagcggcugcuccgagaaagggccauauuca

SEQ ID NO: 349198 - RNA, 32 nt, Homo Sapiens
uaauacccuauugauauuaugcacuuuaauca

SEQ ID NO: 349199 - RNA, 32 nt, Homo Sapiens
uagcuccucccauggccaguggucagugggag

SEQ ID NO: 349200 - RNA, 32 nt, Homo Sapiens
ucuaccuaucucuucuuuuuuauccaucugcc

SEQ ID NO: 349201 - RNA, 29 nt, Homo Sapiens
cuuuguuauuauuucagagggaauggcga

SEQ ID NO: 349202 - RNA, 32 nt, Homo Sapiens
accagacccacccacgcucugacgagaggcuu

SEQ ID NO: 349203 - RNA, 32 nt, Homo Sapiens
uuggagugccuuaauuuuuaaccaguuuccaa

SEQ ID NO: 349204 - RNA, 32 nt, Homo Sapiens
agaacgaggcgguggcgggcggaggcggcggg

SEQ ID NO: 349205 - RNA, 32 nt, Homo Sapiens
cggcgguggaggugugaaggcacgcgaacacc

SEQ ID NO: 349206 - RNA, 32 nt, Homo Sapiens
gcggcacaaaguugggggccgcgaagaugagg

SEQ ID NO: 349207 - RNA, 32 nt, Homo Sapiens
ggacggcggcgguggcgccguaggcagccggg

SEQ ID NO: 349208 - RNA, 32 nt, Homo Sapiens
acccucuccagaugagaguacaccccaacagc

SEQ ID NO: 349209 - RNA, 32 nt, Homo Sapiens
uggauccuggacggcaucaaggugcugaagcu

SEQ ID NO: 349210 - RNA, 32 nt, Homo Sapiens
augccagugucugcucucuuuaccaccgaaau

SEQ ID NO: 349211 - RNA, 32 nt, Homo Sapiens
uugaacauuuuucuaaugauuuggagagaaaa

SEQ ID NO: 349212 - RNA, 32 nt, Homo Sapiens
ggucucaaacuccugaccucaagcaauuugcc

SEQ ID NO: 349213 - RNA, 32 nt, Homo Sapiens
guaguaguacucaagaaucaccugauguuuuc

SEQ ID NO: 349214 - RNA, 32 nt, Homo Sapiens
ccagcuuauguggcagauggucucaguuacaa

SEQ ID NO: 349215 - RNA, 32 nt, Homo Sapiens
gauucagagucugaaauugaagaugagacuuu

SEQ ID NO: 349216 - RNA, 32 nt, Homo Sapiens
gggcuugcgggcuucgccaugaccagugagcu

SEQ ID NO: 349217 - RNA, 32 nt, Homo Sapiens
guguauccccccaccccaguacccucagacau

SEQ ID NO: 349218 - RNA, 32 nt, Homo Sapiens
guagucauucuagaugaauugggaguaucucu

SEQ ID NO: 349219 - RNA, 32 nt, Homo Sapiens
ugguuguuggcaugaagugaaggaugaagagu

SEQ ID NO: 349220 - RNA, 28 nt, Homo Sapiens
cuccacggguggaccaggauggagucuc

SEQ ID NO: 349221 - RNA, 32 nt, Homo Sapiens
guagcggcucucugcgcaggccgagugggccc

SEQ ID NO: 349222 - RNA, 32 nt, Homo Sapiens
guuaaaugcaagauugcagaaggcauuggaaa

SEQ ID NO: 349223 - RNA, 32 nt, Homo Sapiens
guagucuugggguuggcuuggugcagcugggg

SEQ ID NO: 349224 - RNA, 28 nt, Homo Sapiens
cuuugggggcggcacuugggguuucugg

SEQ ID NO: 349225 - RNA, 32 nt, Homo Sapiens
acucacauucuaugacaucaugaggucuccuc

SEQ ID NO: 349226 - RNA, 32 nt, Homo Sapiens
ggugcagaugaccccguguacucggggcuugg

SEQ ID NO: 349227 - RNA, 32 nt, Homo Sapiens
cugauacguguaugagacuaugcaaaaguaca

SEQ ID NO: 349228 - RNA, 32 nt, Homo Sapiens
gcgcuccggccgcucccgcggcccguggaugg

SEQ ID NO: 349229 - RNA, 32 nt, Homo Sapiens
uauuuuuaaaauguuuauacauaaaaccacca

SEQ ID NO: 349230 - RNA, 32 nt, Homo Sapiens
ggccaggagccggcgucccgcggccagggcca

SEQ ID NO: 349231 - RNA, 32 nt, Homo Sapiens
gcaggucccaggacgcgccgcucccucaugcu

SEQ ID NO: 349232 - RNA, 27 nt, Homo Sapiens
ccugcguccuucugucagcauaucccu

SEQ ID NO: 349233 - RNA, 32 nt, Homo Sapiens
augucauuaauccauauguggacuagugauga

SEQ ID NO: 349234 - RNA, 32 nt, Homo Sapiens
cccugcccuccccucccgaucccggagccaug

SEQ ID NO: 349235 - RNA, 32 nt, Homo Sapiens
uauguggaaagauagacuucuuugguccguca

SEQ ID NO: 349236 - RNA, 32 nt, Homo Sapiens
gagacauggaguguuacugaucauaaaacuuu

SEQ ID NO: 349237 - RNA, 32 nt, Homo Sapiens
uacagaucucuuacacucguggugggaagagu

SEQ ID NO: 349238 - RNA, 32 nt, Homo Sapiens
gcggcgucagcgcccaccuggacaaggccucu

SEQ ID NO: 349239 - RNA, 32 nt, Homo Sapiens
cagguuguggagguuguagugagccgagauug

SEQ ID NO: 349240 - RNA, 32 nt, Homo Sapiens
gcccugggcccggagucugcaggccgcgcucc

SEQ ID NO: 349241 - RNA, 32 nt, Homo Sapiens
gcaccggauuguagaacuuggugcugauuuug

SEQ ID NO: 349242 - RNA, 32 nt, Homo Sapiens
ucucuguagagcuccuguguguaauacccaua

SEQ ID NO: 349243 - RNA, 32 nt, Homo Sapiens
caggacccugguuuuaaaucccuccacaagcc

SEQ ID NO: 349244 - RNA, 32 nt, Homo Sapiens
uuacaucugaaauaaacuuaugugauguucug

SEQ ID NO: 349245 - RNA, 32 nt, Homo Sapiens
uggggaugcaagcagcuguggccaucaaacug

SEQ ID NO: 349246 - RNA, 32 nt, Homo Sapiens
ugcagagccguccaaccccaguccugugaccu

SEQ ID NO: 349247 - RNA, 32 nt, Homo Sapiens
ugcuuuccaucuuuucucccagccccaggaca

SEQ ID NO: 349248 - RNA, 32 nt, Homo Sapiens
cuucauuggucuucuuuuuuaucugguucuau

SEQ ID NO: 349249 - RNA, 32 nt, Homo Sapiens
gcccuugagguuauggguguugguaggucugu

SEQ ID NO: 349250 - RNA, 32 nt, Homo Sapiens
guguguccaccgagcacuuggauucagcuucu

SEQ ID NO: 349251 - RNA, 32 nt, Homo Sapiens
gcgucucugaagauggcucgggcuucucuuug

SEQ ID NO: 349252 - RNA, 32 nt, Homo Sapiens
agaaaacaagcaaagauagguaggacagaaag

SEQ ID NO: 349253 - RNA, 32 nt, Homo Sapiens
aacguucuaaauauagaagugauucauaucac

SEQ ID NO: 349254 - RNA, 32 nt, Homo Sapiens
gcgguggcugccccggccuccucggagagcag

SEQ ID NO: 349255 - RNA, 32 nt, Homo Sapiens
aaauuacauacgcuuuuuacugcacaauuuuu

SEQ ID NO: 349256 - RNA, 32 nt, Homo Sapiens
uuucagcauuaaauaaaacauuucaaauauau

SEQ ID NO: 349257 - RNA, 32 nt, Homo Sapiens
cuccccccaucccgggucccacccccaaaccc

SEQ ID NO: 349258 - RNA, 32 nt, Homo Sapiens
gggccgguccgcccgcgcgcaggugagugagc

SEQ ID NO: 349259 - RNA, 32 nt, Homo Sapiens
ccuuauucauucucuguacuuaccacaguauu

SEQ ID NO: 349260 - RNA, 32 nt, Homo Sapiens
uaaaggugcccggcgccggcuucccggacacg

SEQ ID NO: 349261 - RNA, 32 nt, Homo Sapiens
ggccccgccccggcucggccuggcagauagca

SEQ ID NO: 349262 - RNA, 32 nt, Homo Sapiens
cgcccgccgcccagcccucgccucccugccca

SEQ ID NO: 349263 - RNA, 32 nt, Homo Sapiens
gaggcugguggugaaagcuggucaggcugggg

SEQ ID NO: 349264 - RNA, 32 nt, Homo Sapiens
gaggaagauagauuuucuaaccaagcagaugg

SEQ ID NO: 349265 - RNA, 32 nt, Homo Sapiens
ugaagcugcaccggggcauggacugcugccag

SEQ ID NO: 349266 - RNA, 32 nt, Homo Sapiens
ugcgccuggaggggcggagggcagggugggcc

SEQ ID NO: 349267 - RNA, 32 nt, Homo Sapiens
agcuccgccggcgaccggugugccaaagugcg

SEQ ID NO: 349268 - RNA, 32 nt, Homo Sapiens
gggaaaugugugacuuaaccguggugagggcu

SEQ ID NO: 349269 - RNA, 32 nt, Homo Sapiens
caaccuuuuuauuuucacuccuuuuauuucug

SEQ ID NO: 349270 - RNA, 32 nt, Homo Sapiens
agugccccgagugccccgcgggccccgcgagc

SEQ ID NO: 349271 - RNA, 32 nt, Homo Sapiens
ccaagaagaagugcgcuggagccccggguccu

SEQ ID NO: 349272 - RNA, 32 nt, Homo Sapiens
uuucuagcacuggccugcacggugggccuugc

SEQ ID NO: 349273 - RNA, 32 nt, Homo Sapiens
uaaccuucguaacuaauuacauaucgcugagu

SEQ ID NO: 349274 - RNA, 32 nt, Homo Sapiens
cuugcuuauucuuuucaguucuaaaaccugua

SEQ ID NO: 349275 - RNA, 32 nt, Homo Sapiens
guauuuuaauauuuuauuaacauggaacucuu

SEQ ID NO: 349276 - RNA, 32 nt, Homo Sapiens
gguucgcaccauccagcugcagcccucggggu

SEQ ID NO: 349277 - RNA, 32 nt, Homo Sapiens
ucugccacagaaaagaaggggagagauguuca

SEQ ID NO: 349278 - RNA, 32 nt, Homo Sapiens
cccaagugucaugcgggagguacgcgggcacg

SEQ ID NO: 349279 - RNA, 32 nt, Homo Sapiens
aagcaggcucuuuccucauccgagaugcggac

SEQ ID NO: 349280 - RNA, 32 nt, Homo Sapiens
uguucccauagcuuaaauuuuuuuucuuauug

SEQ ID NO: 349281 - RNA, 32 nt, Homo Sapiens
acaggucauaauguauuucacaauuaaaaaac

SEQ ID NO: 349282 - RNA, 32 nt, Homo Sapiens
uuuagagaacuaauuuuguuuuagcauuaaac

SEQ ID NO: 349283 - RNA, 32 nt, Homo Sapiens
ggaggguccccgcaccuaccacuucuguuugc

SEQ ID NO: 349284 - RNA, 32 nt, Homo Sapiens
cagaguggaaaagccagagggaccaugaagcg

SEQ ID NO: 349285 - RNA, 32 nt, Homo Sapiens
ugaaguccaagcauuuagauguauagguugau

SEQ ID NO: 349286 - RNA, 32 nt, Homo Sapiens
ugguuuuuauuacucauaaauguuuaaauuag

SEQ ID NO: 349287 - RNA, 30 nt, Homo Sapiens
uagaggggaggugugcaggaaccagcaaug

SEQ ID NO: 349288 - RNA, 32 nt, Homo Sapiens
cccugccugcagcuggcuuccaccuggcacgu

SEQ ID NO: 349289 - RNA, 32 nt, Homo Sapiens
gaugucugcucucuucucuccccucugucccu

SEQ ID NO: 349290 - RNA, 32 nt, Homo Sapiens
guggcccaggucugcaccgcggcggccucggc

SEQ ID NO: 349291 - RNA, 32 nt, Homo Sapiens
ccuccccuucccaguuaccaaagagucgaauu

SEQ ID NO: 349292 - RNA, 32 nt, Homo Sapiens
uaacugggaagcccagaguccuguccggccug

SEQ ID NO: 349293 - RNA, 32 nt, Homo Sapiens
ugccccacccucaaacccuguggggccugaug

SEQ ID NO: 349294 - RNA, 32 nt, Homo Sapiens
ggucucaaacuccugaccucagaugauucagc

SEQ ID NO: 349295 - RNA, 32 nt, Homo Sapiens
uaccauuuuuaaacuacuguagcuuuaaaauc

SEQ ID NO: 349296 - RNA, 32 nt, Homo Sapiens
uuuaucaccaccucccucccagccccagcgcc

SEQ ID NO: 349297 - RNA, 32 nt, Homo Sapiens
uuuuuuaaauucuuucucucuuucauguuuug

SEQ ID NO: 349298 - RNA, 32 nt, Homo Sapiens
ccugagggcuggagaggcaggggagcagggug

SEQ ID NO: 349299 - RNA, 32 nt, Homo Sapiens
uuagguccagcaucugcauguguaacgagcuc

SEQ ID NO: 349300 - RNA, 32 nt, Homo Sapiens
uccugggccugcugugacccagguuguuacuc

SEQ ID NO: 349301 - RNA, 32 nt, Homo Sapiens
acuggcagaauauuuuuuaaguacuaagacuu

SEQ ID NO: 349302 - RNA, 32 nt, Homo Sapiens
acaugugcauuuucuuuuuagcuguuaaaugu

SEQ ID NO: 349303 - RNA, 32 nt, Homo Sapiens
cgaagcugcugugacuguguccccuuacugag

SEQ ID NO: 349304 - RNA, 32 nt, Homo Sapiens
ucuagcauuguuaacuuuaaauuuuuugagcc

SEQ ID NO: 349305 - RNA, 32 nt, Homo Sapiens
caguccuagcuaaacuucgccaacuccgcugc

SEQ ID NO: 349306 - RNA, 32 nt, Homo Sapiens
ugugaggggagccaccugagggcuguggaacc

SEQ ID NO: 349307 - RNA, 32 nt, Homo Sapiens
ccuccagccugccccuugcugccgugugcucc

SEQ ID NO: 349308 - RNA, 32 nt, Homo Sapiens
ggcaugcgcccuuuccucuucccugccccacc

SEQ ID NO: 349309 - RNA, 32 nt, Homo Sapiens
cacugagugaauuguuaauacuauaaugagag

SEQ ID NO: 349310 - RNA, 28 nt, Homo Sapiens
uacuugggagauaggccaagcgagaggu

SEQ ID NO: 349311 - RNA, 32 nt, Homo Sapiens
cuuccugcuucuaagaaaaacaucuuuaaaca

SEQ ID NO: 349312 - RNA, 32 nt, Homo Sapiens
gcuagaguuuugggagaacaguucuucacaau

SEQ ID NO: 349313 - RNA, 32 nt, Homo Sapiens
uugguuuuagauguucauuucauuuguaucca

SEQ ID NO: 349314 - RNA, 32 nt, Homo Sapiens
aaaaaguacacaucgugccuucucuacuucgc

SEQ ID NO: 349315 - RNA, 32 nt, Homo Sapiens
gauucuccuaccucggccucccgaguagcugg

SEQ ID NO: 349316 - RNA, 32 nt, Homo Sapiens
aggcagcagcuggcaccaucagagccaggaga

SEQ ID NO: 349317 - RNA, 32 nt, Homo Sapiens
acagccaaagaggcuaguaagcaagaaaggau

SEQ ID NO: 349318 - RNA, 32 nt, Homo Sapiens
auuugcugcuauguugaaauucuuauuuugac

SEQ ID NO: 349319 - RNA, 32 nt, Homo Sapiens
guaguauaguaugauucucaccauuauuuguc

SEQ ID NO: 349320 - RNA, 32 nt, Homo Sapiens
uccuuuuccuguucauacacuaaccaaaucuc

SEQ ID NO: 349321 - RNA, 32 nt, Homo Sapiens
cauguagcauauaaauguuuauauuguuuuua

SEQ ID NO: 349322 - RNA, 32 nt, Homo Sapiens
uggauuugauuuuuccuguaaaacagaugcag

SEQ ID NO: 349323 - RNA, 32 nt, Homo Sapiens
uuaucucaucucugggcuuuucugggaauuga

SEQ ID NO: 349324 - RNA, 32 nt, Homo Sapiens
ucuaguggccugagggcggggcgggcgcgggg

SEQ ID NO: 349325 - RNA, 32 nt, Homo Sapiens
auauguguuuaaauauuauauuagcuuauuuc

SEQ ID NO: 349326 - RNA, 32 nt, Homo Sapiens
gugacucuuccacuuuuugaacugguguuucc

SEQ ID NO: 349327 - RNA, 32 nt, Homo Sapiens
gacaacaauguacaguuuuuacuauguggcca

SEQ ID NO: 349328 - RNA, 32 nt, Homo Sapiens
uagcccaggcccgggggccaguccucagcauu

SEQ ID NO: 349329 - RNA, 32 nt, Homo Sapiens
aaugcugggaaagguugggagaaauuuuauuu

SEQ ID NO: 349330 - RNA, 32 nt, Homo Sapiens
uuuuccauuuccaggaaggacuuguaaggacu

SEQ ID NO: 349331 - RNA, 32 nt, Homo Sapiens
ugccuuccaccgaugcucagggcucccucugg

SEQ ID NO: 349332 - RNA, 32 nt, Homo Sapiens
cgucucuaacuggcagaguggucaaugaaaaa

SEQ ID NO: 349333 - RNA, 32 nt, Homo Sapiens
guguucggguuuccuuucccaagccagcagau

SEQ ID NO: 349334 - RNA, 32 nt, Homo Sapiens
caaacauaucaccuuaaaauuguauaaggcug

SEQ ID NO: 349335 - RNA, 32 nt, Homo Sapiens
cugcugaauuuaauggagcauguuuccagguu

SEQ ID NO: 349336 - RNA, 32 nt, Homo Sapiens
acuccuuucuauuuuaaagagccaagccucag

SEQ ID NO: 349337 - RNA, 32 nt, Homo Sapiens
aagaaguagcuucagcugggacugccagggcc

SEQ ID NO: 349338 - RNA, 30 nt, Homo Sapiens
agggggcacucaccacacaagaguucccuu

SEQ ID NO: 349339 - RNA, 32 nt, Homo Sapiens
augaggaaaaucaaaccauauccugggugucc

SEQ ID NO: 349340 - RNA, 32 nt, Homo Sapiens
guucgucagaacuuaaauacugaggaagaagu

SEQ ID NO: 349341 - RNA, 32 nt, Homo Sapiens
gcgauccgaggggcugacacacacucgcagac

SEQ ID NO: 349342 - RNA, 32 nt, Homo Sapiens
ucucauguauaaauuaaaauguuugcugcauu

SEQ ID NO: 349343 - RNA, 32 nt, Homo Sapiens
caugcagagacuacacagaaaacuacaagaug

SEQ ID NO: 349344 - RNA, 32 nt, Homo Sapiens
uuugaugauauuugggaauuacuguuaauuuu

SEQ ID NO: 349345 - RNA, 32 nt, Homo Sapiens
uuuauuacuuuuuuauauauagaauuugacac

SEQ ID NO: 349346 - RNA, 32 nt, Homo Sapiens
ccccgcggagacggagcggcuugaggacgagg

SEQ ID NO: 349347 - RNA, 32 nt, Homo Sapiens
gucgucauuguuaucgugguugcugauggggg

SEQ ID NO: 349348 - RNA, 32 nt, Homo Sapiens
uuguuuucucccucagcaccaccaugcccagu

SEQ ID NO: 349349 - RNA, 32 nt, Homo Sapiens
augagccaggcugcuaggagccagguaccccc

SEQ ID NO: 349350 - RNA, 32 nt, Homo Sapiens
gguaacaugcacauccuguuuacaccuucauc

SEQ ID NO: 349351 - RNA, 32 nt, Homo Sapiens
gccugccacuguuccuucagaagcgaccuuug

SEQ ID NO: 349352 - RNA, 32 nt, Homo Sapiens
auuuauauuuuuaauuuuuuuaacagggucuu

SEQ ID NO: 349353 - RNA, 32 nt, Homo Sapiens
ugaauuaggaccagcgcaaugaaugcucaagu

SEQ ID NO: 349354 - RNA, 32 nt, Homo Sapiens
acccccaccgccuuccuccccagagcgcgagg

SEQ ID NO: 349355 - RNA, 32 nt, Homo Sapiens
ccuccuccugcccuccucuccccuagagcccu

SEQ ID NO: 349356 - RNA, 32 nt, Homo Sapiens
ggcagcuuggcaguggccugcagacgccccuu

SEQ ID NO: 349357 - RNA, 32 nt, Homo Sapiens
ggcucugaaagaaaaggcuuugguuuuugaac

SEQ ID NO: 349358 - RNA, 32 nt, Homo Sapiens
gcagcauacgucagcauuuucuucucugcacu

SEQ ID NO: 349359 - RNA, 32 nt, Homo Sapiens
cggagggggucuugucuucccagccgcagucu

SEQ ID NO: 349360 - RNA, 32 nt, Homo Sapiens
uagcgcagcgccccguccuuccgcagcccaac

SEQ ID NO: 349361 - RNA, 32 nt, Homo Sapiens
guggaguugauuggaagaaaggaagucgcagc

SEQ ID NO: 349362 - RNA, 32 nt, Homo Sapiens
augggagagcuuguaaagcaucuccuaaaugc

SEQ ID NO: 349363 - RNA, 32 nt, Homo Sapiens
uccggagccggguuccgccgcggccgcagcga

SEQ ID NO: 349364 - RNA, 32 nt, Homo Sapiens
gaaaaacugauuaugaaaguuguugccucucc

SEQ ID NO: 349365 - RNA, 32 nt, Homo Sapiens
agcuaagaacagugguaaaaacuuguuuacag

SEQ ID NO: 349366 - RNA, 32 nt, Homo Sapiens
gaaccagcgggugggcaucuuccccagcaacu

SEQ ID NO: 349367 - RNA, 32 nt, Homo Sapiens
ucuuaaaaaauaaaaaauaaaaagucuaagag

SEQ ID NO: 349368 - RNA, 32 nt, Homo Sapiens
aauggauaccagaauuuuauuuuuguauuuau

SEQ ID NO: 349369 - RNA, 32 nt, Homo Sapiens
uauuucugcaagucuguaaagauuuuguaagu

SEQ ID NO: 349370 - RNA, 32 nt, Homo Sapiens
aggacaagaaugaugugccuuuuuguacugcu

SEQ ID NO: 349371 - RNA, 32 nt, Homo Sapiens
aaauuccucuuacuguaauaaaaacaauugaa

SEQ ID NO: 349372 - RNA, 32 nt, Homo Sapiens
caacauaugugguacaaauuuauauugaagau

SEQ ID NO: 349373 - RNA, 32 nt, Homo Sapiens
agaguagagaguuuaaucaaaacuaccagugg

SEQ ID NO: 349374 - RNA, 32 nt, Homo Sapiens
cauuacucagaacaggcauauaauugaaaacu

SEQ ID NO: 349375 - RNA, 32 nt, Homo Sapiens
aggcugcaggccccggcccuggggguggcuuu

SEQ ID NO: 349376 - RNA, 32 nt, Homo Sapiens
accauccaccgccccacauuccuccuucucag

SEQ ID NO: 349377 - RNA, 32 nt, Homo Sapiens
augaagggguuaaauaaguuagacauuugaaa

SEQ ID NO: 349378 - RNA, 32 nt, Homo Sapiens
cgagggcgaccgugaugcugcagaaccggcgg

SEQ ID NO: 349379 - RNA, 32 nt, Homo Sapiens
gagaaggguggggauuggggucagggugugga

SEQ ID NO: 349380 - RNA, 32 nt, Homo Sapiens
aaaggaaauguuuuuucuuuuuuuuuuguuuu

SEQ ID NO: 349381 - RNA, 32 nt, Homo Sapiens
auuugauugugaacaaggacugacugcagaaa

SEQ ID NO: 349382 - RNA, 32 nt, Homo Sapiens
uaggacaggguggaaaggguggcguggcuaca

SEQ ID NO: 349383 - RNA, 32 nt, Homo Sapiens
acgcagaggagaaauggucuuaugggugguga

SEQ ID NO: 349384 - RNA, 32 nt, Homo Sapiens
aaccuucggggaggaggagagggcgcacgcug

SEQ ID NO: 349385 - RNA, 32 nt, Homo Sapiens
cccucacucugaaauggcauccagguccaucu

SEQ ID NO: 349386 - RNA, 32 nt, Homo Sapiens
gguggcggaggcgauugaagcugcuggcccag

SEQ ID NO: 349387 - RNA, 32 nt, Homo Sapiens
uaucaugucagggauuuuuagggcggcaagcu

SEQ ID NO: 349388 - RNA, 32 nt, Homo Sapiens
uccccagagcccccaaccagugccagcauacu

SEQ ID NO: 349389 - RNA, 32 nt, Homo Sapiens
uuagccucccagccuacaucuuucucccgugc

SEQ ID NO: 349390 - RNA, 32 nt, Homo Sapiens
uuguccccaacaccccacagaagugcuuucuu

SEQ ID NO: 349391 - RNA, 32 nt, Homo Sapiens
augggucucagagagcaaccuccucccucgua

SEQ ID NO: 349392 - RNA, 32 nt, Homo Sapiens
aucugguggcugcugucaucuguccccagggu

SEQ ID NO: 349393 - RNA, 32 nt, Homo Sapiens
ugcacaucuacacacaaacaaacaaugcauag

SEQ ID NO: 349394 - RNA, 32 nt, Homo Sapiens
ggcccccucaggcaccuuuccuccccuggaca

SEQ ID NO: 349395 - RNA, 32 nt, Homo Sapiens
agguucauucucccuaccaaaucuucagcuuc

SEQ ID NO: 349396 - RNA, 32 nt, Homo Sapiens
gggaaaguuggggacaugcugcuacaauacgg

SEQ ID NO: 349397 - RNA, 32 nt, Homo Sapiens
cuuggcccccuggguuugggggugcugcccua

SEQ ID NO: 349398 - RNA, 32 nt, Homo Sapiens
agacuuaaaaauuguguuuacagaugguuuau

SEQ ID NO: 349399 - RNA, 32 nt, Homo Sapiens
acacaagcuuuccuagagaauaugauguuuuu

SEQ ID NO: 349400 - RNA, 32 nt, Homo Sapiens
aguagggcgcacuuggcggggaggcgcuuggg

SEQ ID NO: 349401 - RNA, 32 nt, Homo Sapiens
augcuggcuacuuuggaggugugucaggccug

SEQ ID NO: 349402 - RNA, 32 nt, Homo Sapiens
ggacagacuggaaagcacuuagauguuuaagg

SEQ ID NO: 349403 - RNA, 32 nt, Homo Sapiens
acaaagaguccucccucucucccuuuucaaau

SEQ ID NO: 349404 - RNA, 32 nt, Homo Sapiens
cggagauuuuucccggaaucaagaaaccccuu

SEQ ID NO: 349405 - RNA, 32 nt, Homo Sapiens
auuagcugggcauggcggcaugcgccuguagu

SEQ ID NO: 349406 - RNA, 32 nt, Homo Sapiens
gauuucaccauguuggccaggcuggucuugaa

SEQ ID NO: 349407 - RNA, 32 nt, Homo Sapiens
gguuucaccguguuggccaggcuggucuugaa

SEQ ID NO: 349408 - RNA, 32 nt, Homo Sapiens
caaauaucuauuuuccuguuuuaauuucucaa

SEQ ID NO: 349409 - RNA, 29 nt, Homo Sapiens
gauugucugagugagugaaacuacaagag

SEQ ID NO: 349410 - RNA, 32 nt, Homo Sapiens
cugccagaucccgugcaguccuggggacccug

SEQ ID NO: 349411 - RNA, 32 nt, Homo Sapiens
cuucuuuccuuccugcaguucccagcccucgg

SEQ ID NO: 349412 - RNA, 32 nt, Homo Sapiens
auauuuuguaagcuauaacauauuuauugugc

SEQ ID NO: 349413 - RNA, 32 nt, Homo Sapiens
ccucgcggacaguuggacguggccuggggccc

SEQ ID NO: 349414 - RNA, 32 nt, Homo Sapiens
aggaggagccaacugcgccggaggagggguuu

SEQ ID NO: 349415 - RNA, 32 nt, Homo Sapiens
cuuaucucacaauuggaccuaauagcauuucu

SEQ ID NO: 349416 - RNA, 32 nt, Homo Sapiens
aaaauaaaaaauaccgagacucacacucauac

SEQ ID NO: 349417 - RNA, 32 nt, Homo Sapiens
uagaaaaugaauuugcuagaacacacauuuuu

SEQ ID NO: 349418 - RNA, 32 nt, Homo Sapiens
ucuguagucaguuuucauauuccuuuuggcuu

SEQ ID NO: 349419 - RNA, 32 nt, Homo Sapiens
aucuuuucacaaaacgugggcuuuuaaaaaau

SEQ ID NO: 349420 - RNA, 32 nt, Homo Sapiens
cugcagcccaccuuccugcagugucguggcag

SEQ ID NO: 349421 - RNA, 32 nt, Homo Sapiens
uuguuacuguuaaaaugucaaauaccaaugcu

SEQ ID NO: 349422 - RNA, 32 nt, Homo Sapiens
acaagaugaaagacaauuugguugcugagaug

SEQ ID NO: 349423 - RNA, 32 nt, Homo Sapiens
cugcuaugauauauuuauuauaaaauagggaa

SEQ ID NO: 349424 - RNA, 32 nt, Homo Sapiens
agguuucucuuuguuuuuuuuaaagugaugau

SEQ ID NO: 349425 - RNA, 32 nt, Homo Sapiens
uucugugcaacacucacacuaggcaaugccau

SEQ ID NO: 349426 - RNA, 32 nt, Homo Sapiens
uauacuauaaaauuauuaaaaagucaaucagu

SEQ ID NO: 349427 - RNA, 32 nt, Homo Sapiens
agcccucacagcagucagucacguuccuggac

SEQ ID NO: 349428 - RNA, 32 nt, Homo Sapiens
cagcagcagugccacgcaguuccuccucuccc

SEQ ID NO: 349429 - RNA, 32 nt, Homo Sapiens
cgcgccuucccgcuccccgucuuccucucuca

SEQ ID NO: 349430 - RNA, 32 nt, Homo Sapiens
uguugaaaaaaguuacaaaaauaaaucuuaaa

SEQ ID NO: 349431 - RNA, 32 nt, Homo Sapiens
guccuucugccuccccggugggucauucugug

SEQ ID NO: 349432 - RNA, 32 nt, Homo Sapiens
ccccuggggcugcuggagcugcugccucuguu

SEQ ID NO: 349433 - RNA, 32 nt, Homo Sapiens
ggcggaugcagagcccggggcccccaccggaa

SEQ ID NO: 349434 - RNA, 32 nt, Homo Sapiens
aagaaaacccaccccguagauucccaucauac

SEQ ID NO: 349435 - RNA, 32 nt, Homo Sapiens
uugucaaaauauauuuuaauuaucuauugcua

SEQ ID NO: 349436 - RNA, 32 nt, Homo Sapiens
cucuuaacuuugucucucuuugacauguaguc

SEQ ID NO: 349437 - RNA, 32 nt, Homo Sapiens
ccccagaagucauuuucagccuuaauucucau

SEQ ID NO: 349438 - RNA, 32 nt, Homo Sapiens
uaaccugcuguggucagcauagcuacaggaaa

SEQ ID NO: 349439 - RNA, 32 nt, Homo Sapiens
ggggacaagaguucuacccaccccaguuuaga

SEQ ID NO: 349440 - RNA, 32 nt, Homo Sapiens
gauucaagguggagaaugucccucguuuccau

SEQ ID NO: 349441 - RNA, 29 nt, Homo Sapiens
acacuucggggaccagaggcagcacgagg

SEQ ID NO: 349442 - RNA, 30 nt, Homo Sapiens
cuggaggcugcgcagcagaacagucgaauc

SEQ ID NO: 349443 - RNA, 32 nt, Homo Sapiens
aaauauguuuuaauguaucucuaaugcauuug

SEQ ID NO: 349444 - RNA, 32 nt, Homo Sapiens
uccaacucagaagggagcuagccagaggacug

SEQ ID NO: 349445 - RNA, 29 nt, Homo Sapiens
aauaagggaaguuuauuuucugcgguuuu

SEQ ID NO: 349446 - RNA, 32 nt, Homo Sapiens
guuccuucucuuaaacuaagggugggggaucu

SEQ ID NO: 349447 - RNA, 28 nt, Homo Sapiens
gucuugugagauuaaccuugggacacag

SEQ ID NO: 349448 - RNA, 32 nt, Homo Sapiens
aaauaaacccaauggcauguguuuacaggaag

SEQ ID NO: 349449 - RNA, 32 nt, Homo Sapiens
agaauucaucaucaaagugcaggauauuaaug

SEQ ID NO: 349450 - RNA, 30 nt, Homo Sapiens
cggaggaggggaaugggggagacagccuga

SEQ ID NO: 349451 - RNA, 27 nt, Homo Sapiens
gcaguccuugcccucagccccagacca

SEQ ID NO: 349452 - RNA, 32 nt, Homo Sapiens
aagucaguuucuaucauucugcucuuugauuc

SEQ ID NO: 349453 - RNA, 32 nt, Homo Sapiens
ucaacguuccuuuuaugauaaaaacccucaac

SEQ ID NO: 349454 - RNA, 32 nt, Homo Sapiens
ccgugucccaaccggugccgccgccggagcuu

SEQ ID NO: 349455 - RNA, 32 nt, Homo Sapiens
gccgcccugugcccggcccaccuuccucgaac

SEQ ID NO: 349456 - RNA, 32 nt, Homo Sapiens
aaugcuagauaaacuuuucuuuuaucuucccu

SEQ ID NO: 349457 - RNA, 32 nt, Homo Sapiens
agcaauuccauucugcaucuccucuggacacc

SEQ ID NO: 349458 - RNA, 32 nt, Homo Sapiens
aaaccucugugcuaagagaugaucagagucua

SEQ ID NO: 349459 - RNA, 32 nt, Homo Sapiens
uugaugagcuugucacauucuaaucccucucc

SEQ ID NO: 349460 - RNA, 32 nt, Homo Sapiens
uucaauguaauagcuuccuuuaagaguacagg

SEQ ID NO: 349461 - RNA, 32 nt, Homo Sapiens
uucgaguaggugaaucuuaaagaaauaaaauu

SEQ ID NO: 349462 - RNA, 32 nt, Homo Sapiens
uacuuuaaaaauuuggccaaaauuuaaacugu

SEQ ID NO: 349463 - RNA, 32 nt, Homo Sapiens
uguggucgcggggugggggccggagcggcgag

SEQ ID NO: 349464 - RNA, 32 nt, Homo Sapiens
ucaagugguuggaacacuguuugacuuuuauu

SEQ ID NO: 349465 - RNA, 32 nt, Homo Sapiens
ggucacugcugagacuucagagaucgcagcug

SEQ ID NO: 349466 - RNA, 32 nt, Homo Sapiens
auauuaacauuauuauggauauuuggcuuuca

SEQ ID NO: 349467 - RNA, 32 nt, Homo Sapiens
gccggugccugcgcugccgucucuggcaccua

SEQ ID NO: 349468 - RNA, 32 nt, Homo Sapiens
uugcuccucccugggacuuugggcucuauagg

SEQ ID NO: 349469 - RNA, 32 nt, Homo Sapiens
ucuggaagcaccuugaaaaugugcauuuucaa

SEQ ID NO: 349470 - RNA, 32 nt, Homo Sapiens
auagaguuagacaauaaggccgccauguacuc

SEQ ID NO: 349471 - RNA, 32 nt, Homo Sapiens
augaauaguuuauacugugguuuuucagagac

SEQ ID NO: 349472 - RNA, 32 nt, Homo Sapiens
cgguuucuuuugauccuucucucuugaugucc

SEQ ID NO: 349473 - RNA, 32 nt, Homo Sapiens
gcggugcaacagggcggggaggcggccgcagc

SEQ ID NO: 349474 - RNA, 32 nt, Homo Sapiens
aucacgccccagccgcaccggaccuugcgcuc

SEQ ID NO: 349475 - RNA, 32 nt, Homo Sapiens
gagucucuaccccuuucuguuugaaauucauu

SEQ ID NO: 349476 - RNA, 32 nt, Homo Sapiens
ggggcccucgcgagccucucccggccccugcc

SEQ ID NO: 349477 - RNA, 32 nt, Homo Sapiens
uccaaaugucccagcccacgccgugcccagag

SEQ ID NO: 349478 - RNA, 32 nt, Homo Sapiens
ugagaaggcagacaugggugauaagccagaug

SEQ ID NO: 349479 - RNA, 32 nt, Homo Sapiens
ggccccaggaccaggccuagggugugccucca

SEQ ID NO: 349480 - RNA, 32 nt, Homo Sapiens
acuucaaaugccauuguaaaaacuacucagcu

SEQ ID NO: 349481 - RNA, 32 nt, Homo Sapiens
ccaggcgccucggaggcuuuggcagucagagc

SEQ ID NO: 349482 - RNA, 32 nt, Homo Sapiens
ucuuaaucuucagacacucacuauuuucauga

SEQ ID NO: 349483 - RNA, 32 nt, Homo Sapiens
aggccgcaggagaccuucccgacgaccccugc

SEQ ID NO: 349484 - RNA, 32 nt, Homo Sapiens
ugacggaugccagcuugggcacugcugucuac

SEQ ID NO: 349485 - RNA, 32 nt, Homo Sapiens
uaccugaaauaaguauuuugaaauuaagauuc

SEQ ID NO: 349486 - RNA, 32 nt, Homo Sapiens
gagagaaaucaagggagggcuggggcugggaa

SEQ ID NO: 349487 - RNA, 32 nt, Homo Sapiens
uauuagaaaagacaagcaagaaauguacauaa

SEQ ID NO: 349488 - RNA, 32 nt, Homo Sapiens
uuggccgagguccgcuguauccauggcucucc

SEQ ID NO: 349489 - RNA, 30 nt, Homo Sapiens
cacgugccuguggcugcagacucccagaga

SEQ ID NO: 349490 - RNA, 32 nt, Homo Sapiens
cugguucgcgacgcagccccccggccguggau

SEQ ID NO: 349491 - RNA, 32 nt, Homo Sapiens
uucuguguuugugucuucaaaacagcugcuau

SEQ ID NO: 349492 - RNA, 32 nt, Homo Sapiens
acacauuauuuuuucauaugugauguauucau

SEQ ID NO: 349493 - RNA, 32 nt, Homo Sapiens
ggacaaauugcagggaggggagggagcgaggg

SEQ ID NO: 349494 - RNA, 32 nt, Homo Sapiens
agcgagugcgcaggugugaguguaaguucaug

SEQ ID NO: 349495 - RNA, 32 nt, Homo Sapiens
gagggugggcgacccaggauucccccuccccu

SEQ ID NO: 349496 - RNA, 32 nt, Homo Sapiens
uggguggcgccgggcuugguggggucuuccac

SEQ ID NO: 349497 - RNA, 32 nt, Homo Sapiens
agcugauucucuuuccucuccacuccuaagaa

SEQ ID NO: 349498 - RNA, 32 nt, Homo Sapiens
guguuggcgggggcggagggcaggggaacggg

SEQ ID NO: 349499 - RNA, 29 nt, Homo Sapiens
gggauuucaugagucagaggcaccacccc

SEQ ID NO: 349500 - RNA, 32 nt, Homo Sapiens
uuucagcccagcguuucugcaaugcagaguga

SEQ ID NO: 349501 - RNA, 32 nt, Homo Sapiens
ugggguaagcaaacagcauaaggaauuaugac

SEQ ID NO: 349502 - RNA, 32 nt, Homo Sapiens
uuacggagcugagacugcacuagggucugggg

SEQ ID NO: 349503 - RNA, 30 nt, Homo Sapiens
ccuacaagucacuugacccaucuuaggcug

SEQ ID NO: 349504 - RNA, 32 nt, Homo Sapiens
aggacacagggugaacuuuucucugacccccg

SEQ ID NO: 349505 - RNA, 32 nt, Homo Sapiens
agcaagguaaagccuuuuuuuuucaccuugca

SEQ ID NO: 349506 - RNA, 32 nt, Homo Sapiens
uggaggaccugagugaagacuccauuguggga

SEQ ID NO: 349507 - RNA, 32 nt, Homo Sapiens
gugggcaccgcggcgguaguuggaggcgggag

SEQ ID NO: 349508 - RNA, 27 nt, Homo Sapiens
ggucauuccuucuuuucuucuccgauc

SEQ ID NO: 349509 - RNA, 32 nt, Homo Sapiens
cagggccugugcugcuggagcgggcaguuaug

SEQ ID NO: 349510 - RNA, 32 nt, Homo Sapiens
gcaucugcuguaauaauauuuuagaaaauguu

SEQ ID NO: 349511 - RNA, 32 nt, Homo Sapiens
uguuaccuuguuaaguuuguaguucucuacau

SEQ ID NO: 349512 - RNA, 32 nt, Homo Sapiens
gagaccugacagaugccaaaacaaaggaacag

SEQ ID NO: 349513 - RNA, 28 nt, Homo Sapiens
gcugaagguuagagcauuauaaaaugaa

SEQ ID NO: 349514 - RNA, 32 nt, Homo Sapiens
cucuaucuuuuuuuuuuuuuuaauuuuauaaa

SEQ ID NO: 349515 - RNA, 32 nt, Homo Sapiens
auaaaggugagcacuagacugcucuuagaagc

SEQ ID NO: 349516 - RNA, 32 nt, Homo Sapiens
agaugaaagccgugagccuccuggacuccacg

SEQ ID NO: 349517 - RNA, 32 nt, Homo Sapiens
aggguaucccauuggcagacccuaacaggaaa

SEQ ID NO: 349518 - RNA, 32 nt, Homo Sapiens
ucugcuaaauuaauggacuuguuaaacuuuug

SEQ ID NO: 349519 - RNA, 32 nt, Homo Sapiens
uccuccugcuucagcacccccacaccaggcaa

SEQ ID NO: 349520 - RNA, 32 nt, Homo Sapiens
gcguccugcagccggagccugccucgccuggc

SEQ ID NO: 349521 - RNA, 32 nt, Homo Sapiens
uucucugacaccuguagcagugucucaugcac

SEQ ID NO: 349522 - RNA, 30 nt, Homo Sapiens
accuuggagaagcugagccauucugaggac

SEQ ID NO: 349523 - RNA, 32 nt, Homo Sapiens
ugucaucccgcacuaugggaauccgaaguggg

SEQ ID NO: 349524 - RNA, 32 nt, Homo Sapiens
gacccugaugaagaagaaagugccaagaaaaa

SEQ ID NO: 349525 - RNA, 32 nt, Homo Sapiens
aggaggcagcgggugcagccaggugucugcag

SEQ ID NO: 349526 - RNA, 32 nt, Homo Sapiens
uuuuuuuuucuuuuuuuuuucuuaaagaaggg

SEQ ID NO: 349527 - RNA, 32 nt, Homo Sapiens
ucagacaucauucccagacagcagggauuuau

SEQ ID NO: 349528 - RNA, 32 nt, Homo Sapiens
ugagaacugcuugacuccaugaucuccuagaa

SEQ ID NO: 349529 - RNA, 32 nt, Homo Sapiens
uacuucauuuuuccuuuuagagucaaaggaua

SEQ ID NO: 349530 - RNA, 32 nt, Homo Sapiens
cggaugaguggacuuuuuucucucuuuugggg

SEQ ID NO: 349531 - RNA, 32 nt, Homo Sapiens
caagugaaagagaaguuauuuuaaauaaaucc

SEQ ID NO: 349532 - RNA, 32 nt, Homo Sapiens
gggaacugcaagugccugaggaccagaguggc

SEQ ID NO: 349533 - RNA, 32 nt, Homo Sapiens
cagcgcacacggccagcuccgcgcaggcagac

SEQ ID NO: 349534 - RNA, 32 nt, Homo Sapiens
cacugagacuagcaauagcuauuguuaauaca

SEQ ID NO: 349535 - RNA, 32 nt, Homo Sapiens
acacugggucgccgcuagcugcaccuucgcac

SEQ ID NO: 349536 - RNA, 32 nt, Homo Sapiens
cuaccauagaaucccacuggaauaccacauag

SEQ ID NO: 349537 - RNA, 30 nt, Homo Sapiens
ggaggcggcggcggcggcggcgggaagaug

SEQ ID NO: 349538 - RNA, 32 nt, Homo Sapiens
uauaauuuaagguaaacaucugaaagcacauu

SEQ ID NO: 349539 - RNA, 32 nt, Homo Sapiens
ugaauaauaaauuacugcaacauaucuacaag

SEQ ID NO: 349540 - RNA, 32 nt, Homo Sapiens
ucuaugcaaaugcaauuuuacguaaaugcugu

SEQ ID NO: 349541 - RNA, 32 nt, Homo Sapiens
cuggagcgcagcuuccucuacugcaaccaggc

SEQ ID NO: 349542 - RNA, 32 nt, Homo Sapiens
uuuguuuuguuuuccuuuuucuuuaaaucuug

SEQ ID NO: 349543 - RNA, 32 nt, Homo Sapiens
gaggugcccugacggcacuuuggugccagcau

SEQ ID NO: 349544 - RNA, 32 nt, Homo Sapiens
cacauacaauuaaaaguaauugaaagacauuu

SEQ ID NO: 349545 - RNA, 32 nt, Homo Sapiens
cuguuaauucuuauauuuuucuuuacuaauuu

SEQ ID NO: 349546 - RNA, 32 nt, Homo Sapiens
cauucgccccgguuccggggcccagggagugg

SEQ ID NO: 349547 - RNA, 31 nt, Homo Sapiens
caaucuuucuggagaaaguuugccacauauu

SEQ ID NO: 349548 - RNA, 32 nt, Homo Sapiens
aaagcuggcgggagaguagggcggcgcuggag

SEQ ID NO: 349549 - RNA, 32 nt, Homo Sapiens
uauuuaacaaaauaauauauaugcuguauuac

SEQ ID NO: 349550 - RNA, 32 nt, Homo Sapiens
ccgagagcaugccgcugcacuccagccuggga

SEQ ID NO: 349551 - RNA, 32 nt, Homo Sapiens
guuaauuaguucaacugauccauuccacaaug

SEQ ID NO: 349552 - RNA, 32 nt, Homo Sapiens
agguuuuugcuaguguugaauuuucuucuucc

SEQ ID NO: 349553 - RNA, 32 nt, Homo Sapiens
acugcaagaaaagaagucaaucagcagaggag

SEQ ID NO: 349554 - RNA, 28 nt, Homo Sapiens
ccacagguuccaggaccauuugagauug

SEQ ID NO: 349555 - RNA, 32 nt, Homo Sapiens
acguucacaguuauauauaugguauuuugcaa

SEQ ID NO: 349556 - RNA, 32 nt, Homo Sapiens
ucuccccauccacaauggagaaggugaaaaga

SEQ ID NO: 349557 - RNA, 32 nt, Homo Sapiens
gcgucagaauccaccuugcgugcugugcguau

SEQ ID NO: 349558 - RNA, 32 nt, Homo Sapiens
cguccccgcgcgccuccgagcgccccugugcg

SEQ ID NO: 349559 - RNA, 32 nt, Homo Sapiens
auaacugccucguuuaaauggucacaagaaau

SEQ ID NO: 349560 - RNA, 32 nt, Homo Sapiens
uaagugagaaauuguuacauaggcuuagaaga

SEQ ID NO: 349561 - RNA, 32 nt, Homo Sapiens
gcccuagggcugggguucucaagccccuggcc

SEQ ID NO: 349562 - RNA, 32 nt, Homo Sapiens
agggucucagggugucccagaccccgacaccg

SEQ ID NO: 349563 - RNA, 32 nt, Homo Sapiens
acacacacacacacacacacacacagagagag

SEQ ID NO: 349564 - RNA, 32 nt, Homo Sapiens
gggcuggcuaaugugcaguggagcggggauga

SEQ ID NO: 349565 - RNA, 32 nt, Homo Sapiens
ggacauaaaaauucugcuuguuaagaacaagu

SEQ ID NO: 349566 - RNA, 32 nt, Homo Sapiens
cuugaccuggggcacgugcuccagguucucua

SEQ ID NO: 349567 - RNA, 30 nt, Homo Sapiens
cgaguggcgcccguaugcccugcgcuccuc

SEQ ID NO: 349568 - RNA, 32 nt, Homo Sapiens
cccaccuccuccccgcggcccgcccgggccau

SEQ ID NO: 349569 - RNA, 32 nt, Homo Sapiens
ggcucagcuucucuuccaaccuguccauaaac

SEQ ID NO: 349570 - RNA, 32 nt, Homo Sapiens
ugaaauacaaauaaugucaguggauuguauug

SEQ ID NO: 349571 - RNA, 32 nt, Homo Sapiens
gacucucacuucucuguagaaaugagaaauaa

SEQ ID NO: 349572 - RNA, 32 nt, Homo Sapiens
uacacaaacaacauguacagaaauagaagaaa

SEQ ID NO: 349573 - RNA, 32 nt, Homo Sapiens
ccccagcccacccaccacaggcaauuacuagc

SEQ ID NO: 349574 - RNA, 32 nt, Homo Sapiens
auguaucaaauguuguaguaucaucaugaaga

SEQ ID NO: 349575 - RNA, 32 nt, Homo Sapiens
aggggaagguccggcgucccagccgccuaccu

SEQ ID NO: 349576 - RNA, 32 nt, Homo Sapiens
auacuaucuuaccaacggaucacaaaguucuc

SEQ ID NO: 349577 - RNA, 32 nt, Homo Sapiens
gcuguggcuccuguuuccacucagcucaagga

SEQ ID NO: 349578 - RNA, 32 nt, Homo Sapiens
ggacaguucucauggaggaagaugcucagcug

SEQ ID NO: 349579 - RNA, 32 nt, Homo Sapiens
ggguggggggccuggggaucucucauggaacu

SEQ ID NO: 349580 - RNA, 32 nt, Homo Sapiens
gccagagaggccgguggggacagagggccaau

SEQ ID NO: 349581 - RNA, 32 nt, Homo Sapiens
ccaccggagacgggcuugcugaccggcacaag

SEQ ID NO: 349582 - RNA, 32 nt, Homo Sapiens
uaagauguaaaaagagaaaucauaguuuuaua

SEQ ID NO: 349583 - RNA, 32 nt, Homo Sapiens
uaaacaucucaguauuugauaaaaaaaaaaaa

SEQ ID NO: 349584 - RNA, 29 nt, Homo Sapiens
cauucaugcuguuuauauuuuuugguuau

SEQ ID NO: 349585 - RNA, 32 nt, Homo Sapiens
gauggcuucugaaacaggaaaagagagaagga

SEQ ID NO: 349586 - RNA, 32 nt, Homo Sapiens
ugccuccccugccugccugggacccaucaaag

SEQ ID NO: 349587 - RNA, 32 nt, Homo Sapiens
uucuuguuaauaucgugccaagccucaaaaau

SEQ ID NO: 349588 - RNA, 32 nt, Homo Sapiens
ccagcugugaaguccucauaacagccaacuuc

SEQ ID NO: 349589 - RNA, 32 nt, Homo Sapiens
acuuauguuuuaaaauuaugauuuuuaagcau

SEQ ID NO: 349590 - RNA, 32 nt, Homo Sapiens
gccacuuuuuauuuacuuucucuagggauaag

SEQ ID NO: 349591 - RNA, 32 nt, Homo Sapiens
agggugagcagaggagagcggcagcugggguu

SEQ ID NO: 349592 - RNA, 32 nt, Homo Sapiens
uccuggacaccggguccgcggcguggggacga

SEQ ID NO: 349593 - RNA, 32 nt, Homo Sapiens
uacuucauauauauguggcagaauuggugcag

SEQ ID NO: 349594 - RNA, 32 nt, Homo Sapiens
ggguaggaauccagacaaaagcaggugcacug

SEQ ID NO: 349595 - RNA, 32 nt, Homo Sapiens
gaagcaagacgcaauuuuaaagcuuuaguucc

SEQ ID NO: 349596 - RNA, 32 nt, Homo Sapiens
cuccccuuuuuauauauagacacacacaggac

SEQ ID NO: 349597 - RNA, 32 nt, Homo Sapiens
ggacggccagagcgagcugugcaagcuggaag

SEQ ID NO: 349598 - RNA, 32 nt, Homo Sapiens
uagaaaguuuggaguauuuucuuaaaaaauuc

SEQ ID NO: 349599 - RNA, 32 nt, Homo Sapiens
acaacugauggccuugcagcacucacacagga

SEQ ID NO: 349600 - RNA, 32 nt, Homo Sapiens
ccgcugcgcgcccugccgcgcuaccgccugcu

SEQ ID NO: 349601 - RNA, 32 nt, Homo Sapiens
gauucuuacaauaacgauacaaauuuggccuu

SEQ ID NO: 349602 - RNA, 30 nt, Homo Sapiens
gucaggggaggugcuggugcagacgggcuc

SEQ ID NO: 349603 - RNA, 28 nt, Homo Sapiens
uuauuuugagacggaguuucgcucuugu

SEQ ID NO: 349604 - RNA, 32 nt, Homo Sapiens
gaaguggcucgccguccaccggagaguccccg

SEQ ID NO: 349605 - RNA, 32 nt, Homo Sapiens
ggccuggucccugggaggaaauuugaaugggu

SEQ ID NO: 349606 - RNA, 32 nt, Homo Sapiens
ggagaaacccuucacaccccaggcccuucagg

SEQ ID NO: 349607 - RNA, 32 nt, Homo Sapiens
gggccccgcgcccuccccgccccacuuucccu

SEQ ID NO: 349608 - RNA, 32 nt, Homo Sapiens
ggacguccuccaacggguggcgcuagaggcca

SEQ ID NO: 349609 - RNA, 32 nt, Homo Sapiens
gcucuuugaagaaggggagaauuguguguuuu

SEQ ID NO: 349610 - RNA, 32 nt, Homo Sapiens
uaaaggucugcacuccuuuaucuguaauugua

SEQ ID NO: 349611 - RNA, 32 nt, Homo Sapiens
ugggguugaugaugcuaaaaaguugaaagcca

SEQ ID NO: 349612 - RNA, 32 nt, Homo Sapiens
gagaggugaucuccagagaugaugucugagaa

SEQ ID NO: 349613 - RNA, 32 nt, Homo Sapiens
uaucaaaugccuucaugaaucuuucauacaua

SEQ ID NO: 349614 - RNA, 30 nt, Homo Sapiens
gcugaggcgcccgcgucccggagugcaccg

SEQ ID NO: 349615 - RNA, 32 nt, Homo Sapiens
ugguggguguagggugaugaaaggaggcccag

SEQ ID NO: 349616 - RNA, 32 nt, Homo Sapiens
ucaccuugagacagaacaaaacagggaccugc

SEQ ID NO: 349617 - RNA, 32 nt, Homo Sapiens
agcccgcggccgcgaugccugacgagcugacg

SEQ ID NO: 349618 - RNA, 32 nt, Homo Sapiens
cuacugcagcaccuccaggccuguugcuauag

SEQ ID NO: 349619 - RNA, 32 nt, Homo Sapiens
ugguaccuguugugucccuuucucuucaaaga

SEQ ID NO: 349620 - RNA, 32 nt, Homo Sapiens
uuccuguguacaaaguuuuauuguaaauguuu

SEQ ID NO: 349621 - RNA, 32 nt, Homo Sapiens
aacuacaguggucccaggaucugccaagaguc

SEQ ID NO: 349622 - RNA, 32 nt, Homo Sapiens
ggcuuaagagguuugucuuuuguuuuuguaca

SEQ ID NO: 349623 - RNA, 32 nt, Homo Sapiens
cccuacuuuuucucacuggccucguuuugacc

SEQ ID NO: 349624 - RNA, 32 nt, Homo Sapiens
ugugagggcagagggaggguugccaugaagga

SEQ ID NO: 349625 - RNA, 32 nt, Homo Sapiens
ggggcuucacugcugugacuuccuccugccag

SEQ ID NO: 349626 - RNA, 32 nt, Homo Sapiens
gccuauuuuggagcuuccccuguuaggaagga

SEQ ID NO: 349627 - RNA, 32 nt, Homo Sapiens
uagugaagcagucauugggguaacaaugcuac

SEQ ID NO: 349628 - RNA, 32 nt, Homo Sapiens
ggaggccugaaaccucugucggccagagaaca

SEQ ID NO: 349629 - RNA, 32 nt, Homo Sapiens
gucuauuauacauccccauacacuccacgccu

SEQ ID NO: 349630 - RNA, 32 nt, Homo Sapiens
auggugagguguggauaaggcuuaggugccag

SEQ ID NO: 349631 - RNA, 32 nt, Homo Sapiens
auuuauaaguuauuauuuuuaauuuucuaaau

SEQ ID NO: 349632 - RNA, 32 nt, Homo Sapiens
guuaaaaaacaaaauuugcuaacaaugugaua

SEQ ID NO: 349633 - RNA, 32 nt, Homo Sapiens
cgcugcucguucuccuuuucuguucaugcaca

SEQ ID NO: 349634 - RNA, 32 nt, Homo Sapiens
ucucaauagauaugccucagcugcuuaaaaac

SEQ ID NO: 349635 - RNA, 32 nt, Homo Sapiens
guucugaggucagaguggaccccgucaugggg

SEQ ID NO: 349636 - RNA, 32 nt, Homo Sapiens
uaaaauuaggugguccugucacuuucuagaga

SEQ ID NO: 349637 - RNA, 32 nt, Homo Sapiens
cuggaagaaggaggcgggcggcccgggccuca

SEQ ID NO: 349638 - RNA, 32 nt, Homo Sapiens
agauuagaaaauuaacauaggauacuuucugc

SEQ ID NO: 349639 - RNA, 32 nt, Homo Sapiens
uuuuugugugauagaaagaauggagcaaguug

SEQ ID NO: 349640 - RNA, 32 nt, Homo Sapiens
ccagaguguauauaugaaauaaccuuauaccu

SEQ ID NO: 349641 - RNA, 32 nt, Homo Sapiens
ccuacacucucaccagcuuuggcacccaccaa

SEQ ID NO: 349642 - RNA, 32 nt, Homo Sapiens
agccggccugcccacacccccggccaucgcuc

SEQ ID NO: 349643 - RNA, 32 nt, Homo Sapiens
ucaguuuggccaguggguggguuugggcaucu

SEQ ID NO: 349644 - RNA, 32 nt, Homo Sapiens
agucgugucugucauagcauuuuuacuaccag

SEQ ID NO: 349645 - RNA, 32 nt, Homo Sapiens
uccacuucccguguccucuggaaguugucagg

SEQ ID NO: 349646 - RNA, 32 nt, Homo Sapiens
uuuccuuguaucuuuacccauaccuguucuca

SEQ ID NO: 349647 - RNA, 32 nt, Homo Sapiens
uccaaaauaauaaugaaaauaaaggcaauggc

SEQ ID NO: 349648 - RNA, 32 nt, Homo Sapiens
gccagagacaccuugguagugcccaucggcaa

SEQ ID NO: 349649 - RNA, 32 nt, Homo Sapiens
aaacuauaaaauugugcuauauacuuuuuaaa

SEQ ID NO: 349650 - RNA, 32 nt, Homo Sapiens
gggucagucuggcucgagcuguuuacagugau

SEQ ID NO: 349651 - RNA, 32 nt, Homo Sapiens
ggcccgggaagcgcgaggagcgcgcguagccg

SEQ ID NO: 349652 - RNA, 32 nt, Homo Sapiens
acuucaaacagugcugggcaagggcagucguu

SEQ ID NO: 349653 - RNA, 32 nt, Homo Sapiens
gccugggacacacacacacacacacacacaca

SEQ ID NO: 349654 - RNA, 30 nt, Homo Sapiens
cccagucuggacucucugcccucugggucc

SEQ ID NO: 349655 - RNA, 32 nt, Homo Sapiens
uguaaccuauuaucauggaucuaauguacugu

SEQ ID NO: 349656 - RNA, 32 nt, Homo Sapiens
gaguuuuauuuugaguuuuucuuuuugugcau

SEQ ID NO: 349657 - RNA, 28 nt, Homo Sapiens
gggcugaaagauuccagcguuggaugua

SEQ ID NO: 349658 - RNA, 32 nt, Homo Sapiens
cugagagugaguuuacauuaguagcaagaguu

SEQ ID NO: 349659 - RNA, 32 nt, Homo Sapiens
acaauuggagggagcccucagagccuucuggg

SEQ ID NO: 349660 - RNA, 29 nt, Homo Sapiens
ggccaacucuaucaagaccacaaauacca

SEQ ID NO: 349661 - RNA, 32 nt, Homo Sapiens
cugacucuuguccccugggggacccagacaaa

SEQ ID NO: 349662 - RNA, 32 nt, Homo Sapiens
uguacauaacuuguauuuuguguaaguuaaac

SEQ ID NO: 349663 - RNA, 32 nt, Homo Sapiens
ggugggcguggguggggaaggcagagaucucu

SEQ ID NO: 349664 - RNA, 32 nt, Homo Sapiens
guaauauugcuguuuauuaaugcugaagugug

SEQ ID NO: 349665 - RNA, 32 nt, Homo Sapiens
gguaguagggggcaccugaggagcagggucug

SEQ ID NO: 349666 - RNA, 32 nt, Homo Sapiens
uuaugugaaacuuuauaagagaauuaauuuuu

SEQ ID NO: 349667 - RNA, 32 nt, Homo Sapiens
uauggcuuugggggcugaaaaagcagauguag

SEQ ID NO: 349668 - RNA, 32 nt, Homo Sapiens
gacgcccucccggacacccccgcugcaggguu

SEQ ID NO: 349669 - RNA, 32 nt, Homo Sapiens
acauauuaaaagacauaacuaucaaaacaaaa

SEQ ID NO: 349670 - RNA, 32 nt, Homo Sapiens
gccauuagcucuugcuuuugauggcauucucu

SEQ ID NO: 349671 - RNA, 32 nt, Homo Sapiens
uuaccagaaaaauaauauuugccaauaugacg

SEQ ID NO: 349672 - RNA, 32 nt, Homo Sapiens
cacuccuggcgugcuggcuccucggauugaaa

SEQ ID NO: 349673 - RNA, 32 nt, Homo Sapiens
aaaaagcauaaguaaaaauauuugagaaaaau

SEQ ID NO: 349674 - RNA, 32 nt, Homo Sapiens
cgccagggccagcaggcagcgccuguccccuc

SEQ ID NO: 349675 - RNA, 32 nt, Homo Sapiens
uugugagagaaagacuguacuccauaacugac

SEQ ID NO: 349676 - RNA, 32 nt, Homo Sapiens
aagaacugccccggagcgcagcagccacccuc

SEQ ID NO: 349677 - RNA, 32 nt, Homo Sapiens
ggugagcgacugcaggcaaacccggcgacagc

SEQ ID NO: 349678 - RNA, 32 nt, Homo Sapiens
gcaagaagaauauaaauaaauaaaauaucuca

SEQ ID NO: 349679 - RNA, 32 nt, Homo Sapiens
agaccucaccaucuuugacagcccuugaaggu

SEQ ID NO: 349680 - RNA, 32 nt, Homo Sapiens
gagaacaucauucaaggcaaaggaaacagacc

SEQ ID NO: 349681 - RNA, 32 nt, Homo Sapiens
gcugcugagauggggcgggccggggcugccgc

SEQ ID NO: 349682 - RNA, 32 nt, Homo Sapiens
auucucccacuuucuuuuuucuuuccuggaau

SEQ ID NO: 349683 - RNA, 32 nt, Homo Sapiens
cuuucccaaacaccuccuucccagacaccucc

SEQ ID NO: 349684 - RNA, 32 nt, Homo Sapiens
gugugcugccagcacagggcuguaaaugcaga

SEQ ID NO: 349685 - RNA, 32 nt, Homo Sapiens
uggcguaagaccggggggacgcggcgguagcg

SEQ ID NO: 349686 - RNA, 32 nt, Homo Sapiens
gcguuggacuggagauccgagcagaagcagaa

SEQ ID NO: 349687 - RNA, 32 nt, Homo Sapiens
uaccaagcucacagcacugaggcgcuggggga

SEQ ID NO: 349688 - RNA, 32 nt, Homo Sapiens
guucucaucgccauaagggugcacuuaccgug

SEQ ID NO: 349689 - RNA, 32 nt, Homo Sapiens
acagggaagcuacucaccccaaccuucacuuc

SEQ ID NO: 349690 - RNA, 32 nt, Homo Sapiens
uuuccaaauuuaauauauguagucaugcauuu

SEQ ID NO: 349691 - RNA, 32 nt, Homo Sapiens
accugacgauggcgucgggcccgggcucccag

SEQ ID NO: 349692 - RNA, 32 nt, Homo Sapiens
gaucugggaggggucaggagccacuaaguugc

SEQ ID NO: 349693 - RNA, 32 nt, Homo Sapiens
cccacaaaggcuguugaaccacagcaccagga

SEQ ID NO: 349694 - RNA, 32 nt, Homo Sapiens
aaucuucauuaugccugagacuugucuuacaa

SEQ ID NO: 349695 - RNA, 32 nt, Homo Sapiens
ucgucuuccugaguuucccugggaggcccaac

SEQ ID NO: 349696 - RNA, 32 nt, Homo Sapiens
cccgccgcugcuuucuggcccuggacgacgag

SEQ ID NO: 349697 - RNA, 32 nt, Homo Sapiens
auacagcaucuaggcaaccccuuugucauguu

SEQ ID NO: 349698 - RNA, 32 nt, Homo Sapiens
acaggagcacuccaucaugaaaacagacuuug

SEQ ID NO: 349699 - RNA, 32 nt, Homo Sapiens
uuaaacaauauuaugaaauuuucauuauguuc

SEQ ID NO: 349700 - RNA, 32 nt, Homo Sapiens
uggggaccucaauagccuuuuccauuaaccuu

SEQ ID NO: 349701 - RNA, 32 nt, Homo Sapiens
aggccggacaccugggguccugccgggccccu

SEQ ID NO: 349702 - RNA, 32 nt, Homo Sapiens
auuuuuauaugauugaaugaguucuguaugaa

SEQ ID NO: 349703 - RNA, 32 nt, Homo Sapiens
gaguaccgugagggaggcggggaccagccaga

SEQ ID NO: 349704 - RNA, 32 nt, Homo Sapiens
gcuccacgcuggcggcgcagcugcucccgcug

SEQ ID NO: 349705 - RNA, 32 nt, Homo Sapiens
uuugucucacucccuguagccccgucacguuc

SEQ ID NO: 349706 - RNA, 32 nt, Homo Sapiens
guggggaauuuucuccucucccuuuccuacua

SEQ ID NO: 349707 - RNA, 32 nt, Homo Sapiens
agccaccuguccgcaagcaauauccuauuuug

SEQ ID NO: 349708 - RNA, 32 nt, Homo Sapiens
cuggggcccaaccgccggagaguagcgccauu

SEQ ID NO: 349709 - RNA, 32 nt, Homo Sapiens
gacccuagugaaaauacagcaggcagaacucu

SEQ ID NO: 349710 - RNA, 32 nt, Homo Sapiens
gaguaacccgcggagccagaagagggaggaaa

SEQ ID NO: 349711 - RNA, 32 nt, Homo Sapiens
gacaacuugaugaagcucccugggcuggcccc

SEQ ID NO: 349712 - RNA, 32 nt, Homo Sapiens
ccacaagcauaucuuucuuuucugcucaucca

SEQ ID NO: 349713 - RNA, 32 nt, Homo Sapiens
gccuauaucaaauuauuggaaauacaaaugua

SEQ ID NO: 349714 - RNA, 32 nt, Homo Sapiens
uugcaguuuguuugaggccucguugccaauga

SEQ ID NO: 349715 - RNA, 32 nt, Homo Sapiens
gucuuuccuugacaaguugauuuugcaauugu

SEQ ID NO: 349716 - RNA, 32 nt, Homo Sapiens
ccccagccugaggugaucuuucccuccucuga

SEQ ID NO: 349717 - RNA, 32 nt, Homo Sapiens
uguguuacugaagaacagcauaaaaauaugau

SEQ ID NO: 349718 - RNA, 32 nt, Homo Sapiens
aaacggccuccucauugaguaugaagacaugu

SEQ ID NO: 349719 - RNA, 32 nt, Homo Sapiens
gagcuguaacacucacugggaaugucugcagc

SEQ ID NO: 349720 - RNA, 32 nt, Homo Sapiens
gagccgugcgucugcuccuggcuggcccggcc

SEQ ID NO: 349721 - RNA, 32 nt, Homo Sapiens
aacuccauuucccccacgauucuucaccgcug

SEQ ID NO: 349722 - RNA, 32 nt, Homo Sapiens
cauuuuugcuguccuuuuaacauuugcgagga

SEQ ID NO: 349723 - RNA, 32 nt, Homo Sapiens
ugauagucacaaaaguaaauguuccauuuuua

SEQ ID NO: 349724 - RNA, 32 nt, Homo Sapiens
caugcucugcacccggcccucagcagccagau

SEQ ID NO: 349725 - RNA, 32 nt, Homo Sapiens
cugucgugaggauugaugagcuaacauuccua

SEQ ID NO: 349726 - RNA, 32 nt, Homo Sapiens
gguuacugccuggccgauccaaggcuguggag

SEQ ID NO: 349727 - RNA, 32 nt, Homo Sapiens
aacacugaugccaugaugugggcuccugacug

SEQ ID NO: 349728 - RNA, 32 nt, Homo Sapiens
ccuggggcauggacuuuguuaagcagagucag

SEQ ID NO: 349729 - RNA, 32 nt, Homo Sapiens
aaaggaaagucaagaagaaugaacuaugucga

SEQ ID NO: 349730 - RNA, 32 nt, Homo Sapiens
ggugacaacgacggcgguggugacgggcaccg

SEQ ID NO: 349731 - RNA, 32 nt, Homo Sapiens
gauuuucucaaaauauuguaaaacuuuugaca

SEQ ID NO: 349732 - RNA, 32 nt, Homo Sapiens
aaaauguuguaugguguaaauaaacuuuuguc

SEQ ID NO: 349733 - RNA, 32 nt, Homo Sapiens
cacuagaggauaccuuuuacauguacuucucu

SEQ ID NO: 349734 - RNA, 32 nt, Homo Sapiens
gcgacggagccaugucgccgcugcuggggcuc

SEQ ID NO: 349735 - RNA, 32 nt, Homo Sapiens
uuaaaugcuuuaucuuuuuuuuuaaagauuua

SEQ ID NO: 349736 - RNA, 32 nt, Homo Sapiens
ucauuucuuguacauuuauuaguuggcauugu

SEQ ID NO: 349737 - RNA, 32 nt, Homo Sapiens
gagcuggccaagcggcagcgccugccguccgu

SEQ ID NO: 349738 - RNA, 32 nt, Homo Sapiens
uuaauucucccuuguugcaacucuguguacca

SEQ ID NO: 349739 - RNA, 32 nt, Homo Sapiens
cuucguggcccccgggggcacaagacaccggc

SEQ ID NO: 349740 - RNA, 32 nt, Homo Sapiens
gcucuuugaaccugagcccgcgcagaccagaa

SEQ ID NO: 349741 - RNA, 32 nt, Homo Sapiens
gaucauucauuaaauguaaccaaaaagugaac

SEQ ID NO: 349742 - RNA, 32 nt, Homo Sapiens
gagccacuguugucuguaaaagguaauugucc

SEQ ID NO: 349743 - RNA, 32 nt, Homo Sapiens
cuuucugcccggaucucuggcuccucaucucu

SEQ ID NO: 349744 - RNA, 32 nt, Homo Sapiens
uugaggagggcuuuugucaaaaaggagguaua

SEQ ID NO: 349745 - RNA, 32 nt, Homo Sapiens
cuauauacuggauacaucuauuaugggaacuu

SEQ ID NO: 349746 - RNA, 32 nt, Homo Sapiens
uccagucgcuaccuuccacccaucauucucac

SEQ ID NO: 349747 - RNA, 32 nt, Homo Sapiens
ccuguauuaaccccaagccuuuugaugauaaa

SEQ ID NO: 349748 - RNA, 32 nt, Homo Sapiens
ggaaauaugcuuugauuuuguguuauuaauau

SEQ ID NO: 349749 - RNA, 32 nt, Homo Sapiens
uucucugccucuguuuagaaaucuucacacac

SEQ ID NO: 349750 - RNA, 32 nt, Homo Sapiens
uguguaaugaauucuaacaacucaaauuuugc

SEQ ID NO: 349751 - RNA, 32 nt, Homo Sapiens
uugaagugaucuuuuucccuagucagacaggc

SEQ ID NO: 349752 - RNA, 32 nt, Homo Sapiens
gcaagagcacugccucuauaggguaaccugga

SEQ ID NO: 349753 - RNA, 32 nt, Homo Sapiens
caugccuguguuucuagcuacgcaggaggauu

SEQ ID NO: 349754 - RNA, 32 nt, Homo Sapiens
uucaguuauuuccgcuccccagccccacacuc

SEQ ID NO: 349755 - RNA, 32 nt, Homo Sapiens
ugccauguuucugaaucugguuuucaaaucca

SEQ ID NO: 349756 - RNA, 32 nt, Homo Sapiens
gcagcuccaggucuauacauuuagguaaugaa

SEQ ID NO: 349757 - RNA, 32 nt, Homo Sapiens
caugccguugugaauuuuguuguucaacccaa

SEQ ID NO: 349758 - RNA, 32 nt, Homo Sapiens
agagagcagcuauaguccucauuccauguagu

SEQ ID NO: 349759 - RNA, 32 nt, Homo Sapiens
ccgccguucccaucuguguuccgggugggauc

SEQ ID NO: 349760 - RNA, 32 nt, Homo Sapiens
uaagaagagagaccguugcugcugucaugacc

SEQ ID NO: 349761 - RNA, 32 nt, Homo Sapiens
uaauucacauugccgauaugcauaugcaacuu

SEQ ID NO: 349762 - RNA, 32 nt, Homo Sapiens
aagauaacacaccagcacauugacucucucuu

SEQ ID NO: 349763 - RNA, 32 nt, Homo Sapiens
cggaggaguucgcgaagcgaccaggagcgugu

SEQ ID NO: 349764 - RNA, 32 nt, Homo Sapiens
cguggucugccagcugagaugcuccucgggcu

SEQ ID NO: 349765 - RNA, 32 nt, Homo Sapiens
gagaaacaaaaauaaucuugggggaaauauuu

SEQ ID NO: 349766 - RNA, 30 nt, Homo Sapiens
ggcgcgggacuuucggcgggucccggccgg

SEQ ID NO: 349767 - RNA, 32 nt, Homo Sapiens
cccaacuccagcauccucuccagcucccguag

SEQ ID NO: 349768 - RNA, 32 nt, Homo Sapiens
ugguggagucuggguuuguguauuugauuccu

SEQ ID NO: 349769 - RNA, 32 nt, Homo Sapiens
gcacuauccaaucaccugagggcccagaugga

SEQ ID NO: 349770 - RNA, 32 nt, Homo Sapiens
accuccaagcuguuuuaaaucuaguagauaag

SEQ ID NO: 349771 - RNA, 29 nt, Homo Sapiens
gugaaguagaaaaauuauuuucuuuaguc

SEQ ID NO: 349772 - RNA, 32 nt, Homo Sapiens
uuugaagcugucuuuauucugcccccauccca

SEQ ID NO: 349773 - RNA, 32 nt, Homo Sapiens
auggggguauugggugggacagacggggucag

SEQ ID NO: 349774 - RNA, 32 nt, Homo Sapiens
cacuucuaaauagaaaaugacaguguuauaaa

SEQ ID NO: 349775 - RNA, 32 nt, Homo Sapiens
uucggagaagcacuguugaaauuuauacacac

SEQ ID NO: 349776 - RNA, 32 nt, Homo Sapiens
auccagcccaugccgacggggacugcuucgug

SEQ ID NO: 349777 - RNA, 32 nt, Homo Sapiens
uacccuuuuaaaugucaguguucgaggcugua

SEQ ID NO: 349778 - RNA, 32 nt, Homo Sapiens
acccgcuccgucccuccccacccaggguccgc

SEQ ID NO: 349779 - RNA, 27 nt, Homo Sapiens
cccucguccuucugccccuggccgcac

SEQ ID NO: 349780 - RNA, 32 nt, Homo Sapiens
augccauuacaauuauguugacuagaaacugc

SEQ ID NO: 349781 - RNA, 32 nt, Homo Sapiens
aaagcaacccaugcccucgaggaugcugacgg

SEQ ID NO: 349782 - RNA, 32 nt, Homo Sapiens
cccagcugcuccaugccaggaggaggaggaga

SEQ ID NO: 349783 - RNA, 32 nt, Homo Sapiens
gacccucucucuauucucccagcccugcacug

SEQ ID NO: 349784 - RNA, 32 nt, Homo Sapiens
gcagugaaaaggauaacauuuuuccauaguaa

SEQ ID NO: 349785 - RNA, 32 nt, Homo Sapiens
auuguauuuaggaaaagggacaacuuuguggc

SEQ ID NO: 349786 - RNA, 32 nt, Homo Sapiens
ccaggauggacggccaggggccaggcacaccg

SEQ ID NO: 349787 - RNA, 32 nt, Homo Sapiens
uucuugauuaccuaguuuauagauaacugcug

SEQ ID NO: 349788 - RNA, 32 nt, Homo Sapiens
agugggggcgaccggacuugggggguggagcc

SEQ ID NO: 349789 - RNA, 32 nt, Homo Sapiens
aaggccacaggcuggcacuacugcauucuccu

SEQ ID NO: 349790 - RNA, 32 nt, Homo Sapiens
gagggggcugcgucucggcuccccacggccug

SEQ ID NO: 349791 - RNA, 32 nt, Homo Sapiens
aguggaugcuaaggugagagggaugcaggcau

SEQ ID NO: 349792 - RNA, 32 nt, Homo Sapiens
cagcaucuggccaacauaguggagagacucaa

SEQ ID NO: 349793 - RNA, 32 nt, Homo Sapiens
ccaucccccuccccgcccuggcauccacccuc

SEQ ID NO: 349794 - RNA, 32 nt, Homo Sapiens
ccaaaacaagguggaagauguccugaauuaag

SEQ ID NO: 349795 - RNA, 32 nt, Homo Sapiens
ccccuacaucucagcugaaucuccagggaggc

SEQ ID NO: 349796 - RNA, 28 nt, Homo Sapiens
aagucgguuguguauauguguaacuaau

SEQ ID NO: 349797 - RNA, 32 nt, Homo Sapiens
acaugugcaauucagaauaauuuuauaacagg

SEQ ID NO: 349798 - RNA, 32 nt, Homo Sapiens
cccgcagcccaccgugcaaacaugcuuagaca

SEQ ID NO: 349799 - RNA, 32 nt, Homo Sapiens
ccgcggcagccugcgccgcgccauggccaccu

SEQ ID NO: 349800 - RNA, 32 nt, Homo Sapiens
guguacaaaagcguugauaaauacuaaucuuu

SEQ ID NO: 349801 - RNA, 32 nt, Homo Sapiens
cuccccagguucuggaacagcuuuuuguccug

SEQ ID NO: 349802 - RNA, 32 nt, Homo Sapiens
cagagaagaaagcagaauaaugagcagaugga

SEQ ID NO: 349803 - RNA, 32 nt, Homo Sapiens
ucauacgcucuagggauugaaaagcagaaaug

SEQ ID NO: 349804 - RNA, 32 nt, Homo Sapiens
auaauauagaaaguauauagcaaaguaauuuu

SEQ ID NO: 349805 - RNA, 32 nt, Homo Sapiens
accaccccgacccagggcugccuggcucuguc

SEQ ID NO: 349806 - RNA, 32 nt, Homo Sapiens
caugcaguggguggagagucggccaccaaagg

SEQ ID NO: 349807 - RNA, 32 nt, Homo Sapiens
ugacgacuucccuccuucccgccuaugugagc

SEQ ID NO: 349808 - RNA, 32 nt, Homo Sapiens
uucaacuccccugguuuuaucaucucuacucu

SEQ ID NO: 349809 - RNA, 32 nt, Homo Sapiens
cacacaugcggucuuggugcccccagguucaa

SEQ ID NO: 349810 - RNA, 32 nt, Homo Sapiens
ucaguuuguucauuuuuuuuuagguuagacau

SEQ ID NO: 349811 - RNA, 32 nt, Homo Sapiens
uauuugcccacuuuccuucccugaagaaauau

SEQ ID NO: 349812 - RNA, 32 nt, Homo Sapiens
ucauaccacacugaaauauaacaaagaguugu

SEQ ID NO: 349813 - RNA, 32 nt, Homo Sapiens
cccaggcagucgcugcugcccggcgcccacgg

SEQ ID NO: 349814 - RNA, 32 nt, Homo Sapiens
auuuucuuuuuuuuuucuuuuaaauuuuagag

SEQ ID NO: 349815 - RNA, 32 nt, Homo Sapiens
aaaacggaggcacaauucugucuucucuugaa

SEQ ID NO: 349816 - RNA, 32 nt, Homo Sapiens
caccugcuggaucagcuccacccucgagcacu

SEQ ID NO: 349817 - RNA, 32 nt, Homo Sapiens
cccugguguguaucuuuuuuccuuguugcuuu

SEQ ID NO: 349818 - RNA, 32 nt, Homo Sapiens
gcaucccccucuauuuccaaugcuccucucca

SEQ ID NO: 349819 - RNA, 32 nt, Homo Sapiens
guguuuauuaaacccuuauggucgauauuucc

SEQ ID NO: 349820 - RNA, 27 nt, Homo Sapiens
auuauuuccuucuugagcgaucuaaug

SEQ ID NO: 349821 - RNA, 32 nt, Homo Sapiens
uacaaucuuuucgagaucuuuucccuugcuaa

SEQ ID NO: 349822 - RNA, 32 nt, Homo Sapiens
cuuuguggauucugaggcccugcccaaugaga

SEQ ID NO: 349823 - RNA, 32 nt, Homo Sapiens
auuuuaucaaggaaguguagaucgugaaaaga

SEQ ID NO: 349824 - RNA, 32 nt, Homo Sapiens
aagccugcggccucgcuugaaggagggcgucg

SEQ ID NO: 349825 - RNA, 32 nt, Homo Sapiens
uagcuucaaaaauucuaucuuuagaaugggcu

SEQ ID NO: 349826 - RNA, 32 nt, Homo Sapiens
ggugaaggcggcccggggaggcggggacggug

SEQ ID NO: 349827 - RNA, 32 nt, Homo Sapiens
uuuuguguuauaaagguuuaauuuuacauaag

SEQ ID NO: 349828 - RNA, 32 nt, Homo Sapiens
uaaguuauacuucuuuuauaaccuuuugggca

SEQ ID NO: 349829 - RNA, 32 nt, Homo Sapiens
cgcaucugccccaccauccauccuggugaaac

SEQ ID NO: 349830 - RNA, 32 nt, Homo Sapiens
ggggaccgccuggccgggggcuccaagggcuc

SEQ ID NO: 349831 - RNA, 32 nt, Homo Sapiens
cagucacccucuaucacccauugaauggccac

SEQ ID NO: 349832 - RNA, 32 nt, Homo Sapiens
auacauguaaaaauguuuccuuuuaguuguug

SEQ ID NO: 349833 - RNA, 32 nt, Homo Sapiens
gaggucucagcgcgcucuccugucccugggac

SEQ ID NO: 349834 - RNA, 32 nt, Homo Sapiens
uauuacuugggggaggacauguugcagaagac

SEQ ID NO: 349835 - RNA, 32 nt, Homo Sapiens
uuacuauuugcaaagcacucuguagcucccug

SEQ ID NO: 349836 - RNA, 32 nt, Homo Sapiens
gugagcauacgaggcugaugacugcccugugc

SEQ ID NO: 349837 - RNA, 32 nt, Homo Sapiens
cucaggaaacuuacaaucaugguggaaggaga

SEQ ID NO: 349838 - RNA, 32 nt, Homo Sapiens
ccccagcgccgccgcuccuccgcucagagcua

SEQ ID NO: 349839 - RNA, 32 nt, Homo Sapiens
gcccggcccugagccuccucugcugagccagc

SEQ ID NO: 349840 - RNA, 32 nt, Homo Sapiens
acuugccugaaaugaaugaauauuuuucuagg

SEQ ID NO: 349841 - RNA, 32 nt, Homo Sapiens
gagaacaucauuacuuaugaugaugaaggggg

SEQ ID NO: 349842 - RNA, 32 nt, Homo Sapiens
gcaggaagcccccagucccagcccuuugggac

SEQ ID NO: 349843 - RNA, 32 nt, Homo Sapiens
acgaaccucacccaccguggacaagagaaaca

SEQ ID NO: 349844 - RNA, 32 nt, Homo Sapiens
ucuuaaggccaugcagauggcuuauuuccuuu

SEQ ID NO: 349845 - RNA, 32 nt, Homo Sapiens
uggagcagugccugucagagcccugggggugu

SEQ ID NO: 349846 - RNA, 32 nt, Homo Sapiens
ggaagaaaaaauuuauguaagaugcaucaaau

SEQ ID NO: 349847 - RNA, 28 nt, Homo Sapiens
aauuuuggccagaacauuacaaaaguuu

SEQ ID NO: 349848 - RNA, 32 nt, Homo Sapiens
ucagaugucaaccacgcaaaacaugaauauaa

SEQ ID NO: 349849 - RNA, 32 nt, Homo Sapiens
gcugggagcgguugcgcgugcggggagcugag

SEQ ID NO: 349850 - RNA, 32 nt, Homo Sapiens
ucuuuuugucuccuauaauaccagggaauuug

SEQ ID NO: 349851 - RNA, 32 nt, Homo Sapiens
gcacugaucucccaagcuuuugucaugauguc

SEQ ID NO: 349852 - RNA, 32 nt, Homo Sapiens
uuaucauuucucccccgccgccggcgaguuga

SEQ ID NO: 349853 - RNA, 32 nt, Homo Sapiens
uuggcaauuguccccagggacaaaacacugug

SEQ ID NO: 349854 - RNA, 32 nt, Homo Sapiens
accguggccuccuggggcaaugcuccucccuc

SEQ ID NO: 349855 - RNA, 32 nt, Homo Sapiens
ccccugccgcgaugcccucccuucggggcccc

SEQ ID NO: 349856 - RNA, 32 nt, Homo Sapiens
caugcgucucagcagagcugucuucccaagcc

SEQ ID NO: 349857 - RNA, 32 nt, Homo Sapiens
cccccgcaugccuguaccccagaugggugggg

SEQ ID NO: 349858 - RNA, 32 nt, Homo Sapiens
ggaguggaaugggaaggcccuugacagccagg

SEQ ID NO: 349859 - RNA, 32 nt, Homo Sapiens
gcugcuguacuuacucccugagguagggaaug

SEQ ID NO: 349860 - RNA, 32 nt, Homo Sapiens
uuccuauacucucaaugaagagguauuuccua

SEQ ID NO: 349861 - RNA, 31 nt, Homo Sapiens
aagccaccacccucagccacaauuuggcaga

SEQ ID NO: 349862 - RNA, 32 nt, Homo Sapiens
caaaauccuggagcacaggggggcagggcugu

SEQ ID NO: 349863 - RNA, 32 nt, Homo Sapiens
cgcgggcgugggcuugagcgcgugccuucugc

SEQ ID NO: 349864 - RNA, 32 nt, Homo Sapiens
cugugugggaccagcccugccaacuuccaucg

SEQ ID NO: 349865 - RNA, 32 nt, Homo Sapiens
cgccagggcgcuaaucccggcgcggguuccgc

SEQ ID NO: 349866 - RNA, 32 nt, Homo Sapiens
gaagcccuggaaauccugucucccucugcccu

SEQ ID NO: 349867 - RNA, 32 nt, Homo Sapiens
uucaagaaucaauacuuucaacccaaguagcc

SEQ ID NO: 349868 - RNA, 29 nt, Homo Sapiens
aaggaugguggcggccguccugcuggggc

SEQ ID NO: 349869 - RNA, 32 nt, Homo Sapiens
ccugagggguucccggggcgccagacgcugaa

SEQ ID NO: 349870 - RNA, 32 nt, Homo Sapiens
gcauggccucugcgggcuucgucaucgcaugc

SEQ ID NO: 349871 - RNA, 32 nt, Homo Sapiens
auaaauggaacacuuaaauguauauuaccgau

SEQ ID NO: 349872 - RNA, 32 nt, Homo Sapiens
ccuagguccuggcuccucucccuacuuguucu

SEQ ID NO: 349873 - RNA, 32 nt, Homo Sapiens
uuguguuaacacuucagaaagauucaaacuca

SEQ ID NO: 349874 - RNA, 32 nt, Homo Sapiens
caggcacucaugguaccggcgccggcgcagcu

SEQ ID NO: 349875 - RNA, 32 nt, Homo Sapiens
gugauagaggggaucgauccuuccucauguca

SEQ ID NO: 349876 - RNA, 32 nt, Homo Sapiens
uuggguucauucaguuccauucccuauaucua

SEQ ID NO: 349877 - RNA, 32 nt, Homo Sapiens
caauaaagagggagacaaggcuaaauuuuuau

SEQ ID NO: 349878 - RNA, 32 nt, Homo Sapiens
uugugccccccgcuggugacccucugcuuccc

SEQ ID NO: 349879 - RNA, 32 nt, Homo Sapiens
ucuuuacaaacacaacaaugacucacagcgac

SEQ ID NO: 349880 - RNA, 32 nt, Homo Sapiens
gcuggaaaaugaagcgugcaagugacaaagug

SEQ ID NO: 349881 - RNA, 32 nt, Homo Sapiens
uguaguuuaaggaaaccaagcauauagaugca

SEQ ID NO: 349882 - RNA, 32 nt, Homo Sapiens
cguguggccucggccuggcuggccaggacaca

SEQ ID NO: 349883 - RNA, 32 nt, Homo Sapiens
cucagacauugauguagacuugucagauuauu

SEQ ID NO: 349884 - RNA, 32 nt, Homo Sapiens
caaaaaucaaagugaaauaauaccauccagca

SEQ ID NO: 349885 - RNA, 32 nt, Homo Sapiens
agagucucauccuggcaucccaggugcugagc

SEQ ID NO: 349886 - RNA, 32 nt, Homo Sapiens
uuccauugaguugugucacuaugugaguccua

SEQ ID NO: 349887 - RNA, 32 nt, Homo Sapiens
uuccgacuugucccucucucagcccuccaugg

SEQ ID NO: 349888 - RNA, 32 nt, Homo Sapiens
cuuggggccaugugucuggagagagggcauag

SEQ ID NO: 349889 - RNA, 32 nt, Homo Sapiens
cgccgggccggccaugggcgaucgcgagcgca

SEQ ID NO: 349890 - RNA, 32 nt, Homo Sapiens
guuggcaagcaguggaauaagauuuuuguaaa

SEQ ID NO: 349891 - RNA, 32 nt, Homo Sapiens
agugugcauguuccuuggacaccugccucagu

SEQ ID NO: 349892 - RNA, 32 nt, Homo Sapiens
gagaggcccuccccgggcagaaucggagcuuc

SEQ ID NO: 349893 - RNA, 32 nt, Homo Sapiens
ugacugcccuuuucuagcuggaccuuuaacaa

SEQ ID NO: 349894 - RNA, 32 nt, Homo Sapiens
gugcuguauuuauguuuauucaccagucuuug

SEQ ID NO: 349895 - RNA, 32 nt, Homo Sapiens
ggugucccaucccauugcagccuccaccaccu

SEQ ID NO: 349896 - RNA, 32 nt, Homo Sapiens
auggaauauuuuugaggccuggaugaacuuug

SEQ ID NO: 349897 - RNA, 32 nt, Homo Sapiens
cgacucggccccaggcuuccggcgccgguggg

SEQ ID NO: 349898 - RNA, 32 nt, Homo Sapiens
ugcugggagagauggagaagcuagaaggcaaa

SEQ ID NO: 349899 - RNA, 32 nt, Homo Sapiens
auugcgccccgcgccccuccccucgcgccccc

SEQ ID NO: 349900 - RNA, 32 nt, Homo Sapiens
cccuuaagcaagggcuccauggaggcuggccc

SEQ ID NO: 349901 - RNA, 32 nt, Homo Sapiens
gcgggccauaggcacuucuuuccccgcccguu

SEQ ID NO: 349902 - RNA, 32 nt, Homo Sapiens
gaauccacaggugaaagagaaguacggccgug

SEQ ID NO: 349903 - RNA, 32 nt, Homo Sapiens
cccccuguuuuuagagcuuccaaaugugucag

SEQ ID NO: 349904 - RNA, 32 nt, Homo Sapiens
guaggaaacugggaaauaaaaaccuggggaac

SEQ ID NO: 349905 - RNA, 32 nt, Homo Sapiens
acagauuuuaucaauaaauuacauuugggggc

SEQ ID NO: 349906 - RNA, 29 nt, Homo Sapiens
aaaugaggaguuauauauuuuacuaggac

SEQ ID NO: 349907 - RNA, 32 nt, Homo Sapiens
gucuucacuuaauccauuuagcacuauuuaaa

SEQ ID NO: 349908 - RNA, 29 nt, Homo Sapiens
aauaaaugguuagagucuauaaagcuaaa

SEQ ID NO: 349909 - RNA, 32 nt, Homo Sapiens
uggucacuuaaaggccaguauaagucagcugu

SEQ ID NO: 349910 - RNA, 32 nt, Homo Sapiens
cugccucgaggaugaagugcaaacccaaccag

SEQ ID NO: 349911 - RNA, 32 nt, Homo Sapiens
acuuccuuauugggacuuuucuuucuuagucc

SEQ ID NO: 349912 - RNA, 32 nt, Homo Sapiens
ucccuaauaccccacacccaaccugucguaau

SEQ ID NO: 349913 - RNA, 32 nt, Homo Sapiens
uuuccauuaguuguauuuuuuauuuauuuuua

SEQ ID NO: 349914 - RNA, 32 nt, Homo Sapiens
cauugccagaaagcaccaguagccuccuaucu

SEQ ID NO: 349915 - RNA, 32 nt, Homo Sapiens
aaacaacaaccugcaugcucacaauacccaga

SEQ ID NO: 349916 - RNA, 32 nt, Homo Sapiens
auacuugguguugggguguucuuucuguuuug

SEQ ID NO: 349917 - RNA, 32 nt, Homo Sapiens
gcugaauuugauuccaagagagcuuaggauga

SEQ ID NO: 349918 - RNA, 28 nt, Homo Sapiens
gugguaauuacaggaaccagccgagugg

SEQ ID NO: 349919 - RNA, 32 nt, Homo Sapiens
guagcacugaggcgugucuggaugcuuuaagu

SEQ ID NO: 349920 - RNA, 32 nt, Homo Sapiens
cuguuccagcagcuccuccaccuuguccagca

SEQ ID NO: 349921 - RNA, 32 nt, Homo Sapiens
gcucgguccuucccucauccacagcuucucac

SEQ ID NO: 349922 - RNA, 30 nt, Homo Sapiens
ggccgcaagcaggcaucgggucccaucuga

SEQ ID NO: 349923 - RNA, 32 nt, Homo Sapiens
ccucuuucauuuccagaccuuggagaauuuuu

SEQ ID NO: 349924 - RNA, 32 nt, Homo Sapiens
gugacacgucccacucuuucugauggaggggc

SEQ ID NO: 349925 - RNA, 32 nt, Homo Sapiens
agccaggugggaaguuagggaaucaacuccaa

SEQ ID NO: 349926 - RNA, 32 nt, Homo Sapiens
ucuucuuccugguugcgucuccaggcccgauu

SEQ ID NO: 349927 - RNA, 32 nt, Homo Sapiens
gggcucugaucuaacaaaauaagguuauauga

SEQ ID NO: 349928 - RNA, 32 nt, Homo Sapiens
ugggaucugccccucccugcuucaauacccaa

SEQ ID NO: 349929 - RNA, 32 nt, Homo Sapiens
gccuuauggccagcauauucucuuacaaggga

SEQ ID NO: 349930 - RNA, 32 nt, Homo Sapiens
gcucagcagcccugcauagauacaggcaucgu

SEQ ID NO: 349931 - RNA, 32 nt, Homo Sapiens
guaaguaguuuauuuuuaauaacugcaaaaau

SEQ ID NO: 349932 - RNA, 32 nt, Homo Sapiens
agaggaagagagagacccucacugcuggggag

SEQ ID NO: 349933 - RNA, 32 nt, Homo Sapiens
gacagcccaucccagcccucagaggcucagag

SEQ ID NO: 349934 - RNA, 32 nt, Homo Sapiens
uugccgccgccgcucgcccgccgcccaccaug

SEQ ID NO: 349935 - RNA, 29 nt, Homo Sapiens
ggucaugccgggguuccugguucgcaucc

SEQ ID NO: 349936 - RNA, 32 nt, Homo Sapiens
caugacccaagcaaggggccugaggccucagu

SEQ ID NO: 349937 - RNA, 32 nt, Homo Sapiens
gcccauccccggggcgcacaucuccgucaacu

SEQ ID NO: 349938 - RNA, 32 nt, Homo Sapiens
ucgccggccccggucuccaggggccucacccg

SEQ ID NO: 349939 - RNA, 32 nt, Homo Sapiens
acacauacaguuaauuugauaaagaagaguau

SEQ ID NO: 349940 - RNA, 32 nt, Homo Sapiens
cuucaaauauauuaaguuguauaaacuaucaa

SEQ ID NO: 349941 - RNA, 32 nt, Homo Sapiens
gauggccugaauauaugucugcacuuuuaaug

SEQ ID NO: 349942 - RNA, 32 nt, Homo Sapiens
gauguuuguauuauccuucuuauauuauauua

SEQ ID NO: 349943 - RNA, 32 nt, Homo Sapiens
cuccuaugaagaugaaaauagggguuaaguuu

SEQ ID NO: 349944 - RNA, 32 nt, Homo Sapiens
guuuggcguuuguuuuccauuuucaugucaau

SEQ ID NO: 349945 - RNA, 32 nt, Homo Sapiens
gcccggcccucccuggcaaucccugggcucuc

SEQ ID NO: 349946 - RNA, 32 nt, Homo Sapiens
aaggugccacuacugauaauggcauccaaaug

SEQ ID NO: 349947 - RNA, 32 nt, Homo Sapiens
gugagagaaucaguaagaagaaauccagccuc

SEQ ID NO: 349948 - RNA, 32 nt, Homo Sapiens
ugugaaggggagagacaggggccgcccuuggc

SEQ ID NO: 349949 - RNA, 32 nt, Homo Sapiens
aucauuccauuuguuccuuuagcaaucaaccc

SEQ ID NO: 349950 - RNA, 32 nt, Homo Sapiens
gcacuggacagcuuuuccuucuucuccagugu

SEQ ID NO: 349951 - RNA, 32 nt, Homo Sapiens
gcuuuaucuucaguguaccuccuuaauccugc

SEQ ID NO: 349952 - RNA, 32 nt, Homo Sapiens
gguuucgccacguuggccaggcuggucuugaa

SEQ ID NO: 349953 - RNA, 32 nt, Homo Sapiens
aguggugcgaucucagaucaguguaccauuug

SEQ ID NO: 349954 - RNA, 31 nt, Homo Sapiens
agugccugguggggcugcggaguccacucau

SEQ ID NO: 349955 - RNA, 32 nt, Homo Sapiens
accucagguauuucuuuauaucagugugaaaa

SEQ ID NO: 349956 - RNA, 32 nt, Homo Sapiens
ccugggacucggccucccuucuccgcccccuc

SEQ ID NO: 349957 - RNA, 32 nt, Homo Sapiens
aaagaucaaauuuaguauuugcuggauaugca

SEQ ID NO: 349958 - RNA, 32 nt, Homo Sapiens
aaccgccccuggacguuucugccgcagugucc

SEQ ID NO: 349959 - RNA, 32 nt, Homo Sapiens
guuagaaugaaagaacauauuuuuagugauau

SEQ ID NO: 349960 - RNA, 32 nt, Homo Sapiens
cagcgcagccuggcgccgcgggacugaagcuc

SEQ ID NO: 349961 - RNA, 23 nt, Homo Sapiens
gccguuugcugaagacaagaccu

SEQ ID NO: 349962 - RNA, 29 nt, Homo Sapiens
cgcgaugcuggcgcugcgcugcggcuccc

SEQ ID NO: 349963 - RNA, 32 nt, Homo Sapiens
uccaggcucccuccccugccuaggggcaaagu

SEQ ID NO: 349964 - RNA, 32 nt, Homo Sapiens
uggugugguuuuccucauagucucucuaccua

SEQ ID NO: 349965 - RNA, 32 nt, Homo Sapiens
gcguuuuccacuuuuuucuuuuuuaagaaaaa

SEQ ID NO: 349966 - RNA, 32 nt, Homo Sapiens
ggcagcucaggucagccuguugguagaugcug

SEQ ID NO: 349967 - RNA, 32 nt, Homo Sapiens
gguuaucauuuuccuucuaacaaguagguaca

SEQ ID NO: 349968 - RNA, 29 nt, Homo Sapiens
aaacaugcuaguuucagagccaagauugg

SEQ ID NO: 349969 - RNA, 32 nt, Homo Sapiens
ucauagaugaacgauuauuaauguauucauuu

SEQ ID NO: 349970 - RNA, 32 nt, Homo Sapiens
auuuacccacuuugugaaugggcugccugccc

SEQ ID NO: 349971 - RNA, 32 nt, Homo Sapiens
uugagugaaugucaaggcaggaaggguuccag

SEQ ID NO: 349972 - RNA, 32 nt, Homo Sapiens
gaggggcuugaugccccccaccccucacacgg

SEQ ID NO: 349973 - RNA, 32 nt, Homo Sapiens
caaugugacaaggccuuaacguuguccuaguu

SEQ ID NO: 349974 - RNA, 32 nt, Homo Sapiens
ugcacaccuaagcccaaauauaaaaacagacu

SEQ ID NO: 349975 - RNA, 32 nt, Homo Sapiens
ccucagcccgguguuccccgcguccggacgcc

SEQ ID NO: 349976 - RNA, 32 nt, Homo Sapiens
ugaaacuccgggugggcguccauggugcugcu

SEQ ID NO: 349977 - RNA, 32 nt, Homo Sapiens
gccauugccugcggcuuucucgguuugucggu

SEQ ID NO: 349978 - RNA, 32 nt, Homo Sapiens
cgcguuccgcgcggcccggcgccugagcgccu

SEQ ID NO: 349979 - RNA, 32 nt, Homo Sapiens
ccuagacucacuuguucucacugucuguuuua

SEQ ID NO: 349980 - RNA, 32 nt, Homo Sapiens
ccugccuugguagcugacgucacgaacgcugu

SEQ ID NO: 349981 - RNA, 32 nt, Homo Sapiens
ugaaaaggaaaugaacucauccuuuuuuaugg

SEQ ID NO: 349982 - RNA, 32 nt, Homo Sapiens
ucuguacucuuuucuuuuuucuugugcugaga

SEQ ID NO: 349983 - RNA, 32 nt, Homo Sapiens
ggugcuggaaccagcucucuccuaauauucca

SEQ ID NO: 349984 - RNA, 32 nt, Homo Sapiens
ugacuaaucuucagugauaauauuucaucuac

SEQ ID NO: 349985 - RNA, 30 nt, Homo Sapiens
gccccugauaaaaggccgaggauucgcgau

SEQ ID NO: 349986 - RNA, 32 nt, Homo Sapiens
cauacauaauugagaaauauaagauuuggucc

SEQ ID NO: 349987 - RNA, 32 nt, Homo Sapiens
uggagccagaaagguaugcaugugggugucuu

SEQ ID NO: 349988 - RNA, 32 nt, Homo Sapiens
gucccaucgggcccgcccucgcacgucacucc

SEQ ID NO: 349989 - RNA, 32 nt, Homo Sapiens
uaggcaugugaccagggucucccgcggaguuu

SEQ ID NO: 349990 - RNA, 32 nt, Homo Sapiens
acauuguagaagagaaacuacuuucugaagaa

SEQ ID NO: 349991 - RNA, 32 nt, Homo Sapiens
aaucuugguucuuuuuaaauuguuuguaacuu

SEQ ID NO: 349992 - RNA, 32 nt, Homo Sapiens
ccugccuccccuagcccauaccucugcuggca

SEQ ID NO: 349993 - RNA, 32 nt, Homo Sapiens
ugccaggccuccugggucugcagugagucugg

SEQ ID NO: 349994 - RNA, 32 nt, Homo Sapiens
ccucccuccagggcccggggcgcugucagacg

SEQ ID NO: 349995 - RNA, 32 nt, Homo Sapiens
aauauuuucuaugugagaauuuuuuagaugug

SEQ ID NO: 349996 - RNA, 32 nt, Homo Sapiens
uauggaccaaauaaauggcaucugcauucuug

SEQ ID NO: 349997 - RNA, 32 nt, Homo Sapiens
agggccaggggaggagccuaaggacccggacg

SEQ ID NO: 349998 - RNA, 32 nt, Homo Sapiens
ccaggcucugccagcuacccgcgcucugagcc

SEQ ID NO: 349999 - RNA, 32 nt, Homo Sapiens
accuccuaauuccacacccucacugcuguaga

SEQ ID NO: 350000 - RNA, 32 nt, Homo Sapiens
uuuugguggaaauaggcuuuguuguaaacauu

SEQ ID NO: 350001 - RNA, 32 nt, Homo Sapiens
cuugugguauuugguacuauuagaggaaaaac

SEQ ID NO: 350002 - RNA, 32 nt, Homo Sapiens
ugccuguccucaugccucuccuccucuugcug

SEQ ID NO: 350003 - RNA, 32 nt, Homo Sapiens
cagauuaaccccagccccucugucuucuguua

SEQ ID NO: 350004 - RNA, 32 nt, Homo Sapiens
uauaaagcauuuguauugugauuugauuaagu

SEQ ID NO: 350005 - RNA, 32 nt, Homo Sapiens
guacaauacaguauuacaucccagaaacuuga

SEQ ID NO: 350006 - RNA, 32 nt, Homo Sapiens
agggugaauggucugcuccagcuccugaguuc

SEQ ID NO: 350007 - RNA, 32 nt, Homo Sapiens
ucguccccaagcccaccaggccaggaugcagg

SEQ ID NO: 350008 - RNA, 32 nt, Homo Sapiens
ugaaaagacuccgccccucccccucccccucg

SEQ ID NO: 350009 - RNA, 32 nt, Homo Sapiens
uugugacagugcugaggccgggauggcaucag

SEQ ID NO: 350010 - RNA, 32 nt, Homo Sapiens
agagccauguuucuucaugguuuaaccuccau

SEQ ID NO: 350011 - RNA, 32 nt, Homo Sapiens
gugguuuugacaaagaccaaaaucccaacuca

SEQ ID NO: 350012 - RNA, 32 nt, Homo Sapiens
agacaaggagggcacaggugucugcccccucu

SEQ ID NO: 350013 - RNA, 32 nt, Homo Sapiens
gugcacccacucggggaucucguccacgucgc

SEQ ID NO: 350014 - RNA, 32 nt, Homo Sapiens
agccaggcgcgguggugcaugccuguaauccc

SEQ ID NO: 350015 - RNA, 32 nt, Homo Sapiens
aaaaugaaaugaauucaaacuguccggcagau

SEQ ID NO: 350016 - RNA, 32 nt, Homo Sapiens
cgguuccuggaaagguuaccggagcugcgauu

SEQ ID NO: 350017 - RNA, 31 nt, Homo Sapiens
gcgcacgcgcggagaaacccgcgcccuccga

SEQ ID NO: 350018 - RNA, 32 nt, Homo Sapiens
gaagaauuccaaggguagaaugaaaugcuuua

SEQ ID NO: 350019 - RNA, 32 nt, Homo Sapiens
gguuaaggaggcaaacagaacagucugcuaca

SEQ ID NO: 350020 - RNA, 32 nt, Homo Sapiens
aagcugagugguuuuuuguuuuguuuuguuuu

SEQ ID NO: 350021 - RNA, 32 nt, Homo Sapiens
cucacccccuucccugucccaggcccugcccu

SEQ ID NO: 350022 - RNA, 32 nt, Homo Sapiens
aguggcauaaaaaaguagcaucagggucuuuu

SEQ ID NO: 350023 - RNA, 32 nt, Homo Sapiens
cuaaguagcugagacuacagacgugcgccacc

SEQ ID NO: 350024 - RNA, 32 nt, Homo Sapiens
ucucauccugcagcuggacagacgugaucuuc

SEQ ID NO: 350025 - RNA, 32 nt, Homo Sapiens
gucccugccaauggacuaacuugucuuuggac

SEQ ID NO: 350026 - RNA, 31 nt, Homo Sapiens
cagucccgcgucuggaugccccgcgcccccu

SEQ ID NO: 350027 - RNA, 32 nt, Homo Sapiens
ggaagagaggaguguuuuuaacuuuuuauagu

SEQ ID NO: 350028 - RNA, 32 nt, Homo Sapiens
ugauguuguccgggccacuccucccuuccuuu

SEQ ID NO: 350029 - RNA, 32 nt, Homo Sapiens
ucuggccccugugcuccccuguguguacccug

SEQ ID NO: 350030 - RNA, 32 nt, Homo Sapiens
uugcccaggcuggucucaaacuucuggcuuca

SEQ ID NO: 350031 - RNA, 31 nt, Homo Sapiens
gaguuaauuuugacuuuguuagaugagggag

SEQ ID NO: 350032 - RNA, 32 nt, Homo Sapiens
uauagaccccgccagcagcaguggggcuuggc

SEQ ID NO: 350033 - RNA, 32 nt, Homo Sapiens
ugagagaccguguugcaauguuccguucagcu

SEQ ID NO: 350034 - RNA, 32 nt, Homo Sapiens
ccaaauaguuucaaauacaacaaaauucccuu

SEQ ID NO: 350035 - RNA, 32 nt, Homo Sapiens
gugguuuugcugucauuucucuugaugccaua

SEQ ID NO: 350036 - RNA, 32 nt, Homo Sapiens
gaugccccaguuuuugagugcaugcaggcagg

SEQ ID NO: 350037 - RNA, 32 nt, Homo Sapiens
uuugugggauaaaacuugggaaugaguguggu

SEQ ID NO: 350038 - RNA, 32 nt, Homo Sapiens
ugaggucagaagaucaagaccauacuggcuaa

SEQ ID NO: 350039 - RNA, 32 nt, Homo Sapiens
uucuuuuuucuuuuauauuuaguucagaccua

SEQ ID NO: 350040 - RNA, 32 nt, Homo Sapiens
acauagugaaagauuacuucugacauuccauu

SEQ ID NO: 350041 - RNA, 32 nt, Homo Sapiens
cucaggcccugggaaaccucccgaccccugca

SEQ ID NO: 350042 - RNA, 32 nt, Homo Sapiens
auaucuaagauagaaaauguacaguaaaaaua

SEQ ID NO: 350043 - RNA, 32 nt, Homo Sapiens
cuuuugucacucugccaugaaaagcauccagg

SEQ ID NO: 350044 - RNA, 32 nt, Homo Sapiens
gccagcgcuccagccaaagcggcggccccagg

SEQ ID NO: 350045 - RNA, 32 nt, Homo Sapiens
cagagauaacuugggaaagauuuuaauauaaa

SEQ ID NO: 350046 - RNA, 32 nt, Homo Sapiens
caaagauccccccagacccccauucugacauc

SEQ ID NO: 350047 - RNA, 32 nt, Homo Sapiens
ugggcucugaagaaucacagaaacacuuuuua

SEQ ID NO: 350048 - RNA, 32 nt, Homo Sapiens
agcagacgggaguuucuccucggggucggagc

SEQ ID NO: 350049 - RNA, 32 nt, Homo Sapiens
ugaugccuuucugcacugcaacugugugauug

SEQ ID NO: 350050 - RNA, 29 nt, Homo Sapiens
auucugucuuaauaaagaaagcuacuucu

SEQ ID NO: 350051 - RNA, 32 nt, Homo Sapiens
ccagagccauucucucuacucuuuucuuaauu

SEQ ID NO: 350052 - RNA, 32 nt, Homo Sapiens
uugaguaauguuuauucucugcaugaaccaug

SEQ ID NO: 350053 - RNA, 32 nt, Homo Sapiens
agaucuagacauuccugggggaaguuugucua

SEQ ID NO: 350054 - RNA, 32 nt, Homo Sapiens
cugagagaggcucuagaacuaauuuauccuau

SEQ ID NO: 350055 - RNA, 32 nt, Homo Sapiens
gguuucaccauguuggccaggcuggucuugca

SEQ ID NO: 350056 - RNA, 32 nt, Homo Sapiens
auccaccgcaagagcuggccuggggugcggac

SEQ ID NO: 350057 - RNA, 32 nt, Homo Sapiens
caccagaugaccacggcagggcccgugcuggg

SEQ ID NO: 350058 - RNA, 32 nt, Homo Sapiens
cuggaggccugccugugucuagagcucugggc

SEQ ID NO: 350059 - RNA, 32 nt, Homo Sapiens
uaugcaguuuguuuaccgugaacauaaaagua

SEQ ID NO: 350060 - RNA, 32 nt, Homo Sapiens
ucacaagacagagaagacaacaugcugagacc

SEQ ID NO: 350061 - RNA, 32 nt, Homo Sapiens
uguguauuauccuugguuguguuuccuuggcc

SEQ ID NO: 350062 - RNA, 32 nt, Homo Sapiens
agguguucaaacaaaagcgugaacaugaaugu

SEQ ID NO: 350063 - RNA, 32 nt, Homo Sapiens
aucauaagaaugcuucugucguuagccgggug

SEQ ID NO: 350064 - RNA, 32 nt, Homo Sapiens
ugugacgccaaaaucacgucuccggagacccg

SEQ ID NO: 350065 - RNA, 32 nt, Homo Sapiens
uagcauggcacccagagccuccccucuucuug

SEQ ID NO: 350066 - RNA, 32 nt, Homo Sapiens
auucaagaagacgaggcccauuccccucaggc

SEQ ID NO: 350067 - RNA, 30 nt, Homo Sapiens
gcccgggagaacccugccugaagcucugga

SEQ ID NO: 350068 - RNA, 32 nt, Homo Sapiens
cauaucaauuuaaugauuaacauauucaaacu

SEQ ID NO: 350069 - RNA, 32 nt, Homo Sapiens
uuucuuacaaaacaaccguauagggguuaaag

SEQ ID NO: 350070 - RNA, 32 nt, Homo Sapiens
ccagccccuccuguccaccucuccaggucuca

SEQ ID NO: 350071 - RNA, 32 nt, Homo Sapiens
cucaccuuaaaggucaaggaaggaaaauacua

SEQ ID NO: 350072 - RNA, 32 nt, Homo Sapiens
gcgcccgggcggacaucgcccgggccccgaug

SEQ ID NO: 350073 - RNA, 32 nt, Homo Sapiens
uggggucuguugucacauacuguggcggcucc

SEQ ID NO: 350074 - RNA, 32 nt, Homo Sapiens
gcgaaggcauuugguggaucggucacuagaga

SEQ ID NO: 350075 - RNA, 32 nt, Homo Sapiens
uuaagaaguaauuuuccaaccuuuggaaguca

SEQ ID NO: 350076 - RNA, 32 nt, Homo Sapiens
aauagaaggggaggggggcacacauaaugacu

SEQ ID NO: 350077 - RNA, 32 nt, Homo Sapiens
uaucauuuuuauuuuaaauauauucaugguug

SEQ ID NO: 350078 - RNA, 32 nt, Homo Sapiens
ugcauaauuuauuuaauuuaagccucauucuc

SEQ ID NO: 350079 - RNA, 32 nt, Homo Sapiens
uuuuuucaagacaggaaucaaaauguuaggaa

SEQ ID NO: 350080 - RNA, 32 nt, Homo Sapiens
gaaugagacagagaucagaauacauugacugu

SEQ ID NO: 350081 - RNA, 32 nt, Homo Sapiens
acguugucuugcgcgcuuugcccgccuggccc

SEQ ID NO: 350082 - RNA, 32 nt, Homo Sapiens
aucagaauauuuuggaauuucucuuuugguau

SEQ ID NO: 350083 - RNA, 32 nt, Homo Sapiens
guagcucauguucuuuguuugcauuagugagu

SEQ ID NO: 350084 - RNA, 32 nt, Homo Sapiens
uuuccuuuaaauauauacuaacuguuaaggcc

SEQ ID NO: 350085 - RNA, 32 nt, Homo Sapiens
cucucugcagugcccuccucgccugugcagcc

SEQ ID NO: 350086 - RNA, 32 nt, Homo Sapiens
ucauaauaaaaaguuaggagggaaacauuuua

SEQ ID NO: 350087 - RNA, 32 nt, Homo Sapiens
cuccgcggguggcccauggcaaaauuucaugu

SEQ ID NO: 350088 - RNA, 32 nt, Homo Sapiens
guccugggccccaacccuuaucuuuuuccgag

SEQ ID NO: 350089 - RNA, 32 nt, Homo Sapiens
gaaaagauuuaaaaacacaaaucuaagccuug

SEQ ID NO: 350090 - RNA, 32 nt, Homo Sapiens
ucaguggaaaucaaucagaagguauucugacc

SEQ ID NO: 350091 - RNA, 32 nt, Homo Sapiens
cugcgcgccccgagccccgagagccaugcaga

SEQ ID NO: 350092 - RNA, 32 nt, Homo Sapiens
ggugagggagggcagaaagggagagugcuggg

SEQ ID NO: 350093 - RNA, 32 nt, Homo Sapiens
cgcacuggccguuuuucuugguugcuugccug

SEQ ID NO: 350094 - RNA, 32 nt, Homo Sapiens
cuuaccaggaagcagauacauaugagugugga

SEQ ID NO: 350095 - RNA, 32 nt, Homo Sapiens
gucuuggagugcauuuucagugguuaagguga

SEQ ID NO: 350096 - RNA, 32 nt, Homo Sapiens
ccagcccagucggcccggcccgggggccaugg

SEQ ID NO: 350097 - RNA, 32 nt, Homo Sapiens
gaagcucgccgacgcucuaggcucugcggcgc

SEQ ID NO: 350098 - RNA, 32 nt, Homo Sapiens
aagggagccuggagagcggcggugcugggagg

SEQ ID NO: 350099 - RNA, 32 nt, Homo Sapiens
gccuguaaucccaacacuuugggaggaauuac

SEQ ID NO: 350100 - RNA, 32 nt, Homo Sapiens
ucaaaaaauccuucagggaaaaacagagaaac

SEQ ID NO: 350101 - RNA, 30 nt, Homo Sapiens
gcgcccgcgacccaggucgcccugaaaucu

SEQ ID NO: 350102 - RNA, 32 nt, Homo Sapiens
uuaaguugauaaaugaugcauacgacauccua

SEQ ID NO: 350103 - RNA, 32 nt, Homo Sapiens
guuuuuaaaauaagaguuuagagcaguaaaca

SEQ ID NO: 350104 - RNA, 32 nt, Homo Sapiens
cugccugaacacugcuucuccuggacccugga

SEQ ID NO: 350105 - RNA, 32 nt, Homo Sapiens
cggggcggccgccggauucgcggccgcaggga

SEQ ID NO: 350106 - RNA, 32 nt, Homo Sapiens
gaucuugcugaccuuguccccagccccaccug

SEQ ID NO: 350107 - RNA, 31 nt, Homo Sapiens
agugccaugucccagacaggcucgcaucccg

SEQ ID NO: 350108 - RNA, 32 nt, Homo Sapiens
uuccuuggcuuuugggcuuauuuucuugcacu

SEQ ID NO: 350109 - RNA, 32 nt, Homo Sapiens
ugaauuuuccaacccacccccaaacuaaacac

SEQ ID NO: 350110 - RNA, 32 nt, Homo Sapiens
uccugugaauaaaauggcgcagacgugcuugu

SEQ ID NO: 350111 - RNA, 32 nt, Homo Sapiens
ugugccuagaaucgcugcuugcggccuuucuc

SEQ ID NO: 350112 - RNA, 32 nt, Homo Sapiens
ggugggggcgcuuccuguggacgcugcgccuc

SEQ ID NO: 350113 - RNA, 32 nt, Homo Sapiens
cugcggucgccugggagcugccgccagggcca

SEQ ID NO: 350114 - RNA, 32 nt, Homo Sapiens
cauguaacuggccuuacgauggcaauuggcau

SEQ ID NO: 350115 - RNA, 32 nt, Homo Sapiens
ccacagcacccaggcuccauggggaagugcuc

SEQ ID NO: 350116 - RNA, 32 nt, Homo Sapiens
uaauacuucuaaaaauuuucuguuaugaaaac

SEQ ID NO: 350117 - RNA, 32 nt, Homo Sapiens
cuguagcacagagaauguggugucacagauac

SEQ ID NO: 350118 - RNA, 32 nt, Homo Sapiens
ccucaccagaagcucaucagaagcagaugcug

SEQ ID NO: 350119 - RNA, 32 nt, Homo Sapiens
guggggcugcgcgcuggcgcugcagggcggga

SEQ ID NO: 350120 - RNA, 32 nt, Homo Sapiens
cugggccuccucccgggcgcugccggucccuc

SEQ ID NO: 350121 - RNA, 32 nt, Homo Sapiens
caggaagggacccggguccacgaacugcccac

SEQ ID NO: 350122 - RNA, 32 nt, Homo Sapiens
uucagauucugcuggccaaggcaaauugaacu

SEQ ID NO: 350123 - RNA, 32 nt, Homo Sapiens
ccuaaguaguuuggaagaaaaaguaggguuuu

SEQ ID NO: 350124 - RNA, 32 nt, Homo Sapiens
ugagcagaggcuuuucagugcugggccuggau

SEQ ID NO: 350125 - RNA, 32 nt, Homo Sapiens
ugagcuaggaggagguggcccagccacuucug

SEQ ID NO: 350126 - RNA, 32 nt, Homo Sapiens
gauuugaagaacucgacuuuaugugaucaugg

SEQ ID NO: 350127 - RNA, 32 nt, Homo Sapiens
gugauuuccaucuccuucuccauuauuccccc

SEQ ID NO: 350128 - RNA, 32 nt, Homo Sapiens
ugcucugugaugcacacaccaagugguagguc

SEQ ID NO: 350129 - RNA, 32 nt, Homo Sapiens
uugcauuaauaucaaggcaaaaagcauucaua

SEQ ID NO: 350130 - RNA, 32 nt, Homo Sapiens
agaucugaugaaaauacaaccucuuauuguau

SEQ ID NO: 350131 - RNA, 32 nt, Homo Sapiens
acuaaggcggcagaggagcggcggcgguggcg

SEQ ID NO: 350132 - RNA, 32 nt, Homo Sapiens
aggguaaagcuacugucuuucuuaagagugua

SEQ ID NO: 350133 - RNA, 30 nt, Homo Sapiens
ugucagaugcuaaugugcugaaucaacagu

SEQ ID NO: 350134 - RNA, 32 nt, Homo Sapiens
aucaugcagucuuuuuccuuucugaugagaau

SEQ ID NO: 350135 - RNA, 32 nt, Homo Sapiens
aucggucagcggggcagcggggcuggccauga

SEQ ID NO: 350136 - RNA, 32 nt, Homo Sapiens
cuuuaggacuggaucccauaaaaguuauaagu

SEQ ID NO: 350137 - RNA, 32 nt, Homo Sapiens
gaugggcuguagaauggggucuggccaccugg

SEQ ID NO: 350138 - RNA, 32 nt, Homo Sapiens
gaaggcuacuuacuuucucuacucauuaaaau

SEQ ID NO: 350139 - RNA, 31 nt, Homo Sapiens
gggacagaacgcaaagggcgauauuaaaagc

SEQ ID NO: 350140 - RNA, 32 nt, Homo Sapiens
uuuuauuccuuccuucauucaacagauaucca

SEQ ID NO: 350141 - RNA, 32 nt, Homo Sapiens
cuguugcuggaggaacaaaacauugugcccau

SEQ ID NO: 350142 - RNA, 32 nt, Homo Sapiens
gcaggagauccccgucaguuuaugccucuuuu

SEQ ID NO: 350143 - RNA, 32 nt, Homo Sapiens
uuucggagccucgguuuucucaucugcagaau

SEQ ID NO: 350144 - RNA, 32 nt, Homo Sapiens
cuugcagcauggacaccaacuaugcugacucc

SEQ ID NO: 350145 - RNA, 29 nt, Homo Sapiens
uuccaugugacuucagugccugaguugau

SEQ ID NO: 350146 - RNA, 32 nt, Homo Sapiens
auaaacaaguugaauagagaaaacacugauug

SEQ ID NO: 350147 - RNA, 32 nt, Homo Sapiens
aaaccacuucaggucucaguuuucucaucuua

SEQ ID NO: 350148 - RNA, 32 nt, Homo Sapiens
ccagccaaugaucuuuucaaugcugcgaaagc

SEQ ID NO: 350149 - RNA, 32 nt, Homo Sapiens
gaaugaaaacaauauguuagauuagguguaag

SEQ ID NO: 350150 - RNA, 32 nt, Homo Sapiens
gcaguguuugaaccugaggaaaaguuaaagug

SEQ ID NO: 350151 - RNA, 32 nt, Homo Sapiens
cuggcaagggaggaggcugagcagaaggaguc

SEQ ID NO: 350152 - RNA, 32 nt, Homo Sapiens
gccacgccgaagcucaccuggucagcgcacag

SEQ ID NO: 350153 - RNA, 32 nt, Homo Sapiens
ucguuguugcugugaaauauguccaugggaca

SEQ ID NO: 350154 - RNA, 32 nt, Homo Sapiens
cuuauaucucugcucuuugaccucaaggucua

SEQ ID NO: 350155 - RNA, 32 nt, Homo Sapiens
aaaacucuccaaguguauuuauuuauauuuuu

SEQ ID NO: 350156 - RNA, 32 nt, Homo Sapiens
acuguauuaaauauugccauguuuacaauaug

SEQ ID NO: 350157 - RNA, 32 nt, Homo Sapiens
ggagaauuuuuggauggugauuaaugacuuga

SEQ ID NO: 350158 - RNA, 32 nt, Homo Sapiens
aguggguagaacaaauggaaauuugguuucag

SEQ ID NO: 350159 - RNA, 32 nt, Homo Sapiens
uguaauaugcucuaauaaucugaguagaaaug

SEQ ID NO: 350160 - RNA, 32 nt, Homo Sapiens
gagcucuccaagcccaggauucuggcaagaga

SEQ ID NO: 350161 - RNA, 32 nt, Homo Sapiens
cugggggacugcuuucagugccugcuguucgu

SEQ ID NO: 350162 - RNA, 32 nt, Homo Sapiens
gaagagguuaucaaggacauuuaggaauccug

SEQ ID NO: 350163 - RNA, 32 nt, Homo Sapiens
gggacugugcacgguggccgacacccgcaggg

SEQ ID NO: 350164 - RNA, 32 nt, Homo Sapiens
gccccccgccccacuucuagcugcuucuccuc

SEQ ID NO: 350165 - RNA, 32 nt, Homo Sapiens
cauugaagccccagccuccaguaauucagaac

SEQ ID NO: 350166 - RNA, 30 nt, Homo Sapiens
uucugugugggugcugcaguugcuuuuguc

SEQ ID NO: 350167 - RNA, 32 nt, Homo Sapiens
aaaggccgggagaggagggcgcaucucuuuuc

SEQ ID NO: 350168 - RNA, 32 nt, Homo Sapiens
gccaagcuccucaaccuucucccaggcccaau

SEQ ID NO: 350169 - RNA, 32 nt, Homo Sapiens
cagcgggaacagaguacccucuucaagccccg

SEQ ID NO: 350170 - RNA, 32 nt, Homo Sapiens
ccgccucaacacaguucucaacugcgaucacg

SEQ ID NO: 350171 - RNA, 32 nt, Homo Sapiens
ccaaaugccccacgcugggccgcggccucugg

SEQ ID NO: 350172 - RNA, 32 nt, Homo Sapiens
ggcuccccgcagcugcccggaccucccccugc

SEQ ID NO: 350173 - RNA, 32 nt, Homo Sapiens
augugcaugaagacauaauagcucaaccucua

SEQ ID NO: 350174 - RNA, 32 nt, Homo Sapiens
aaauguggaaauguauuugccagugagauagu

SEQ ID NO: 350175 - RNA, 32 nt, Homo Sapiens
accaggaaggcacaccacuguauuaguuuuau

SEQ ID NO: 350176 - RNA, 32 nt, Homo Sapiens
cugagcuuuccacuaggcacgccagccagacc

SEQ ID NO: 350177 - RNA, 32 nt, Homo Sapiens
cacugugcauaggcuucucugcucuccaucaa

SEQ ID NO: 350178 - RNA, 32 nt, Homo Sapiens
uucugccccuggacauguuuccuaccaagcau

SEQ ID NO: 350179 - RNA, 32 nt, Homo Sapiens
aggaccucgccagcaaggcggccaccaagaag

SEQ ID NO: 350180 - RNA, 32 nt, Homo Sapiens
cuggcugauuguugugcagccggcgccauguc

SEQ ID NO: 350181 - RNA, 32 nt, Homo Sapiens
gauauaagacauauaauuaaguuuacaaauua

SEQ ID NO: 350182 - RNA, 32 nt, Homo Sapiens
ucugcuucauugcauuuucagaauuaaccuga

SEQ ID NO: 350183 - RNA, 32 nt, Homo Sapiens
gcccuccucacaggauucuggcaucaagugag

SEQ ID NO: 350184 - RNA, 32 nt, Homo Sapiens
ucagguacccgcagggccuagcaagagacuua

SEQ ID NO: 350185 - RNA, 32 nt, Homo Sapiens
uggugccugggagcggcuggcgcggcggaauc

SEQ ID NO: 350186 - RNA, 32 nt, Homo Sapiens
uuuucuacccuuggaaagaaauguagaugaua

SEQ ID NO: 350187 - RNA, 32 nt, Homo Sapiens
guggcaggagaaagaaagaaaacgggccgacc

SEQ ID NO: 350188 - RNA, 32 nt, Homo Sapiens
aaaacaaagcaaaugcaaacaucucugcuucu

SEQ ID NO: 350189 - RNA, 32 nt, Homo Sapiens
gucgcggagagcccccgaccccgcgcgcccag

SEQ ID NO: 350190 - RNA, 32 nt, Homo Sapiens
uccuaccuuuugcuguagauuuaccauggcug

SEQ ID NO: 350191 - RNA, 32 nt, Homo Sapiens
gaaucaaacaacauggggacugagggagggau

SEQ ID NO: 350192 - RNA, 32 nt, Homo Sapiens
uuuuaagucaacggcagaaguauguugaauau

SEQ ID NO: 350193 - RNA, 32 nt, Homo Sapiens
gacugaugcacagacugcugcagaggcugccg

SEQ ID NO: 350194 - RNA, 32 nt, Homo Sapiens
ccacagucucugucacacccccacuaccgcug

SEQ ID NO: 350195 - RNA, 32 nt, Homo Sapiens
gucugguucauugucuugaacucugccuuaca

SEQ ID NO: 350196 - RNA, 32 nt, Homo Sapiens
caguauauacuuccuuucuagaacccgacuug

SEQ ID NO: 350197 - RNA, 32 nt, Homo Sapiens
cccauuuucuuccuauuacuuuauugacucau

SEQ ID NO: 350198 - RNA, 32 nt, Homo Sapiens
acuauuuguccgcauuucuucuccuucccgga

SEQ ID NO: 350199 - RNA, 32 nt, Homo Sapiens
cgagccauauaaauaaaaccuguacuguucua

SEQ ID NO: 350200 - RNA, 32 nt, Homo Sapiens
cccccaccgugcgcuccgccgcugcggucccg

SEQ ID NO: 350201 - RNA, 32 nt, Homo Sapiens
acggccagccgcugcgcuccuccccuggcggc

SEQ ID NO: 350202 - RNA, 32 nt, Homo Sapiens
uuauagcagacacgccauucuaacagguauuu

SEQ ID NO: 350203 - RNA, 32 nt, Homo Sapiens
acagauuaaccaaaaaugccccacacagguuu

SEQ ID NO: 350204 - RNA, 29 nt, Homo Sapiens
guaugguggcucaugucuauaaucccagc

SEQ ID NO: 350205 - RNA, 32 nt, Homo Sapiens
ggggacugacauuugaggacagggagauggag

SEQ ID NO: 350206 - RNA, 32 nt, Homo Sapiens
auacuaaguguuugacauacaccuggauuuuu

SEQ ID NO: 350207 - RNA, 32 nt, Homo Sapiens
ccaucugugugcaacuaacugacucuguuauu

SEQ ID NO: 350208 - RNA, 32 nt, Homo Sapiens
auauaaaccuaaaaaugccuuuuacugcuaag

SEQ ID NO: 350209 - RNA, 32 nt, Homo Sapiens
uacucuagaugaugaauguguuugcuuugugu

SEQ ID NO: 350210 - RNA, 32 nt, Homo Sapiens
gcaagaaaauuugaugcaguaaguugucagca

SEQ ID NO: 350211 - RNA, 32 nt, Homo Sapiens
cgugaaagcagggguuugcaugugcuaccaac

SEQ ID NO: 350212 - RNA, 32 nt, Homo Sapiens
aggacugugggaaugugucaaaggagaaccga

SEQ ID NO: 350213 - RNA, 32 nt, Homo Sapiens
uauuggccuagauuuugcugcagauuaaaucc

SEQ ID NO: 350214 - RNA, 32 nt, Homo Sapiens
uuucuuucugccucuggugggaucucuccaua

SEQ ID NO: 350215 - RNA, 32 nt, Homo Sapiens
ugccuuaauuaacuuuuuuuuauaaugaugau

SEQ ID NO: 350216 - RNA, 32 nt, Homo Sapiens
ccccuccgugaagucagacccacucugcgggc

SEQ ID NO: 350217 - RNA, 32 nt, Homo Sapiens
acaagcagccucuggaggaaucacuggaagac

SEQ ID NO: 350218 - RNA, 32 nt, Homo Sapiens
cgcccucuccgcacguccgccggcgccucagg

SEQ ID NO: 350219 - RNA, 32 nt, Homo Sapiens
uaaugugagauuggcaaugcaaaugcaggugc

SEQ ID NO: 350220 - RNA, 32 nt, Homo Sapiens
uuuaagaagcagcuccaauauuuuuaaaacgu

SEQ ID NO: 350221 - RNA, 32 nt, Homo Sapiens
ccucuucugcaaguuuguugaccuacaugggc

SEQ ID NO: 350222 - RNA, 32 nt, Homo Sapiens
uauuauuauuuuuauuucacauagcagggaug

SEQ ID NO: 350223 - RNA, 32 nt, Homo Sapiens
aaaggagcagcuugaccuggagggaugaggcc

SEQ ID NO: 350224 - RNA, 32 nt, Homo Sapiens
ucacuggggacccuccuccccuucccaccugc

SEQ ID NO: 350225 - RNA, 32 nt, Homo Sapiens
cgggucugucuccaaacccucuuuccuaagag

SEQ ID NO: 350226 - RNA, 32 nt, Homo Sapiens
agcuguacuagaaugaauaaauuacugauaag

SEQ ID NO: 350227 - RNA, 28 nt, Homo Sapiens
agaaagagaaacuaacauuuacaagaau

SEQ ID NO: 350228 - RNA, 32 nt, Homo Sapiens
ucaugauaugguuuuuaaucaugaugaauugc

SEQ ID NO: 350229 - RNA, 32 nt, Homo Sapiens
ugcccacaacuaggagagaaagggcagcuccc

SEQ ID NO: 350230 - RNA, 32 nt, Homo Sapiens
gccagggagugaagccuuuguccccaagcaac

SEQ ID NO: 350231 - RNA, 32 nt, Homo Sapiens
uucccggagaaccugggaaugggccugaucag

SEQ ID NO: 350232 - RNA, 32 nt, Homo Sapiens
cccagccaccuccacuugcuuccuccuccuuc

SEQ ID NO: 350233 - RNA, 32 nt, Homo Sapiens
cuuucaggcagacagcagaugcucucagauuu

SEQ ID NO: 350234 - RNA, 32 nt, Homo Sapiens
agguaagaaaacugaggcucagguugucauuu

SEQ ID NO: 350235 - RNA, 30 nt, Homo Sapiens
gcggaggggacucgcguccguccgcgucgc

SEQ ID NO: 350236 - RNA, 32 nt, Homo Sapiens
uauaacugagacuagacggaaaaggaauacuc

SEQ ID NO: 350237 - RNA, 32 nt, Homo Sapiens
ccgaccccaucccccagccgaccaguuuccuc

SEQ ID NO: 350238 - RNA, 32 nt, Homo Sapiens
acuggagccugugcaguggcgccgggcugggg

SEQ ID NO: 350239 - RNA, 32 nt, Homo Sapiens
agguaccauggauguggcugcaaccaagucug

SEQ ID NO: 350240 - RNA, 32 nt, Homo Sapiens
ggcccuugcccuccccggcacaggccaccaug

SEQ ID NO: 350241 - RNA, 32 nt, Homo Sapiens
uuaagauagaaaguaggaaaacugccaguaag

SEQ ID NO: 350242 - RNA, 32 nt, Homo Sapiens
guugugggagggaccuggugggaaauaauuga

SEQ ID NO: 350243 - RNA, 32 nt, Homo Sapiens
cgugaggccagcucccggggccccuguaaccc

SEQ ID NO: 350244 - RNA, 32 nt, Homo Sapiens
uuacagagcaaguggaauuugacuugaggcuu

SEQ ID NO: 350245 - RNA, 32 nt, Homo Sapiens
ggaacauuugaaagaaaauguggguagacaau

SEQ ID NO: 350246 - RNA, 32 nt, Homo Sapiens
uauacauaaaacaaaauccaguuuuauaauuc

SEQ ID NO: 350247 - RNA, 32 nt, Homo Sapiens
cauugugcagaugcugccauuccuccuaggua

SEQ ID NO: 350248 - RNA, 32 nt, Homo Sapiens
uguggaguauuuuuauaauuuuaucuguauaa

SEQ ID NO: 350249 - RNA, 32 nt, Homo Sapiens
ccgggcguucgcggccccgccggcccgacucu

SEQ ID NO: 350250 - RNA, 32 nt, Homo Sapiens
cgcgcguggggagggaugcggcugggggcuga

SEQ ID NO: 350251 - RNA, 32 nt, Homo Sapiens
ugcugggaauagaaagcagcucugggaccagu

SEQ ID NO: 350252 - RNA, 32 nt, Homo Sapiens
cacggcgcggagccggccggagcucgaggccg

SEQ ID NO: 350253 - RNA, 32 nt, Homo Sapiens
uuuucaggaaauggugucacaauuugugaaga

SEQ ID NO: 350254 - RNA, 32 nt, Homo Sapiens
ucugauguggaggaggcgguggcagaugccuu

SEQ ID NO: 350255 - RNA, 32 nt, Homo Sapiens
ucugagccuagacccuggccccugccuggcuc

SEQ ID NO: 350256 - RNA, 32 nt, Homo Sapiens
caaccagcaccacuuccuugcuuuuuccagcc

SEQ ID NO: 350257 - RNA, 32 nt, Homo Sapiens
uacuaggagagggagcugagguccuggugcca

SEQ ID NO: 350258 - RNA, 32 nt, Homo Sapiens
caagaacaggaugucaccauagauaaaagccu

SEQ ID NO: 350259 - RNA, 32 nt, Homo Sapiens
gaaaaaaaauguucuguaaaauuagucuguug

SEQ ID NO: 350260 - RNA, 32 nt, Homo Sapiens
cuaggugaaaaguuuuuaauaaauguguugaa

SEQ ID NO: 350261 - RNA, 32 nt, Homo Sapiens
guuaccagugguggcaaaccacuuccuaauuc

SEQ ID NO: 350262 - RNA, 32 nt, Homo Sapiens
guaguauuuaggauguaugcauguuuguuuau

SEQ ID NO: 350263 - RNA, 32 nt, Homo Sapiens
uggucucuucaugcucuccccaucccaguuuu

SEQ ID NO: 350264 - RNA, 32 nt, Homo Sapiens
cccuuccgaggcugcagggccaggcgcgggac

SEQ ID NO: 350265 - RNA, 32 nt, Homo Sapiens
gcucccgccgacgccgcuggggggcccgacag

SEQ ID NO: 350266 - RNA, 32 nt, Homo Sapiens
aagaggagguucagaguggugaacuaacgggc

SEQ ID NO: 350267 - RNA, 32 nt, Homo Sapiens
aguuggucucccuggaggggacuuccacaccu

SEQ ID NO: 350268 - RNA, 32 nt, Homo Sapiens
gggaguggggguggagguaggggccaaagagg

SEQ ID NO: 350269 - RNA, 32 nt, Homo Sapiens
ggguuuuauuuuauuuuauuuuuauauuuaag

SEQ ID NO: 350270 - RNA, 32 nt, Homo Sapiens
guauuuguguaauuuauagaaguaaaaucuag

SEQ ID NO: 350271 - RNA, 32 nt, Homo Sapiens
gaccuuuuaacuuuuuucaguggccacauuuu

SEQ ID NO: 350272 - RNA, 32 nt, Homo Sapiens
aaaugcuuguacucagaagagaguguaaaauc

SEQ ID NO: 350273 - RNA, 32 nt, Homo Sapiens
acauagaaagggaagacauaagagacuccauu

SEQ ID NO: 350274 - RNA, 32 nt, Homo Sapiens
aaaaggaaauuugaguuuaaauagaaacauga

SEQ ID NO: 350275 - RNA, 32 nt, Homo Sapiens
ucacuugacuccagcuaggagcugaugcugca

SEQ ID NO: 350276 - RNA, 32 nt, Homo Sapiens
auuuguggggggacauuagcaacaucacucag

SEQ ID NO: 350277 - RNA, 32 nt, Homo Sapiens
agucacaucuuuugagcuuucgauuaucagug

SEQ ID NO: 350278 - RNA, 32 nt, Homo Sapiens
ugguggcugguggucaugaauucauacucugu

SEQ ID NO: 350279 - RNA, 32 nt, Homo Sapiens
gugcagugggacagcgcuggugcggagacugc

SEQ ID NO: 350280 - RNA, 32 nt, Homo Sapiens
aagccggguuccccggccaggccuccuccccu

SEQ ID NO: 350281 - RNA, 32 nt, Homo Sapiens
ucagugaccuuuucuucacgugacggucaacu

SEQ ID NO: 350282 - RNA, 32 nt, Homo Sapiens
uuuuggagcaaggcccugccaucuucugaaga

SEQ ID NO: 350283 - RNA, 32 nt, Homo Sapiens
ucagguggcuguucuggcccagccccuuccca

SEQ ID NO: 350284 - RNA, 28 nt, Homo Sapiens
gagaggccgcggccgccagcguggggau

SEQ ID NO: 350285 - RNA, 32 nt, Homo Sapiens
ccagguacuuggggggccagcuacccuucugg

SEQ ID NO: 350286 - RNA, 32 nt, Homo Sapiens
uguauaauuuaacagugcccuuuucaucucca

SEQ ID NO: 350287 - RNA, 32 nt, Homo Sapiens
ccccucagccccagcccaucacccucccuggc

SEQ ID NO: 350288 - RNA, 31 nt, Homo Sapiens
uuuuaaucaaagaaauaagaugguauuaggc

SEQ ID NO: 350289 - RNA, 32 nt, Homo Sapiens
ucuucuauuuuuugauaacugcuuagguuaau

SEQ ID NO: 350290 - RNA, 32 nt, Homo Sapiens
ggaggaggggguaagguaggagcaaguguauu

SEQ ID NO: 350291 - RNA, 32 nt, Homo Sapiens
acugagauacugcucccaggggccuagguagc

SEQ ID NO: 350292 - RNA, 32 nt, Homo Sapiens
uuuuaaaacugggaacauaaagugccuguauc

SEQ ID NO: 350293 - RNA, 32 nt, Homo Sapiens
aaggucauguggcaucagggaaagggcauggc

SEQ ID NO: 350294 - RNA, 32 nt, Homo Sapiens
gggccgggccgcgcgugacccgccgcagucac

SEQ ID NO: 350295 - RNA, 32 nt, Homo Sapiens
uauaucuaagauagaaaauguacaguaaaaau

SEQ ID NO: 350296 - RNA, 32 nt, Homo Sapiens
gguagcccguucgcuccgcgccggcggccugu

SEQ ID NO: 350297 - RNA, 32 nt, Homo Sapiens
gcagcagaaucagauuuggaauuuagaaagau

SEQ ID NO: 350298 - RNA, 32 nt, Homo Sapiens
ucacaacaccccuaugagguagcuacaauuau

SEQ ID NO: 350299 - RNA, 32 nt, Homo Sapiens
ccaguuuugacaggucagauuuucauauguau

SEQ ID NO: 350300 - RNA, 32 nt, Homo Sapiens
uauccuuggagcuuauguuucagacaagaauu

SEQ ID NO: 350301 - RNA, 32 nt, Homo Sapiens
gcauccggcucgccgccgcccgggcugccguc

SEQ ID NO: 350302 - RNA, 32 nt, Homo Sapiens
acgcccuccccuccccggcccuccacagcugc

SEQ ID NO: 350303 - RNA, 30 nt, Homo Sapiens
ugccuagugucugugccgccuaccaggcag

SEQ ID NO: 350304 - RNA, 32 nt, Homo Sapiens
cagcccuaguccccuugugaccucagagcacu

SEQ ID NO: 350305 - RNA, 32 nt, Homo Sapiens
ccacugccagauuuaugggaugccuggaucau

SEQ ID NO: 350306 - RNA, 32 nt, Homo Sapiens
uggucucucugcugugccacauugucuucccc

SEQ ID NO: 350307 - RNA, 32 nt, Homo Sapiens
ugagguagagugcuguugaaaaaauugcagug

SEQ ID NO: 350308 - RNA, 32 nt, Homo Sapiens
ccuccccagcuucuccuccccaguuguaaaua

SEQ ID NO: 350309 - RNA, 32 nt, Homo Sapiens
aauuuacuugaauauucaguaccugaaacuau

SEQ ID NO: 350310 - RNA, 32 nt, Homo Sapiens
aaaugacauuuuaaauaaguuuauguauacau

SEQ ID NO: 350311 - RNA, 32 nt, Homo Sapiens
gugcucccuggccccaggguggcgucugguua

SEQ ID NO: 350312 - RNA, 32 nt, Homo Sapiens
uucugcgcuucaguaacaaguguuggcaaacg

SEQ ID NO: 350313 - RNA, 32 nt, Homo Sapiens
aggaucuacagaugaauauuuaacucaauaga

SEQ ID NO: 350314 - RNA, 32 nt, Homo Sapiens
ucgacauaucuagacagggguuaaaggguuuc

SEQ ID NO: 350315 - RNA, 32 nt, Homo Sapiens
caggccagagggaagcgcuuuguuccgcgcgu

SEQ ID NO: 350316 - RNA, 32 nt, Homo Sapiens
ccuaggcgacagagccaaacucgucugaaaaa

SEQ ID NO: 350317 - RNA, 32 nt, Homo Sapiens
aagauagucgaacuuaaaaucauaccuacccu

SEQ ID NO: 350318 - RNA, 32 nt, Homo Sapiens
uguuauaaaugcaguauguuugugaaaguauu

SEQ ID NO: 350319 - RNA, 32 nt, Homo Sapiens
ucugagucucaguuuccccauccaugaaauga

SEQ ID NO: 350320 - RNA, 32 nt, Homo Sapiens
uuagagaaaaggaauggaaaguacccagaacu

SEQ ID NO: 350321 - RNA, 32 nt, Homo Sapiens
aggacaggccccaacugauaaccguugcuuuu

SEQ ID NO: 350322 - RNA, 32 nt, Homo Sapiens
aaacugaauuugauugugagugaaccuagaac

SEQ ID NO: 350323 - RNA, 32 nt, Homo Sapiens
ugccuccuggguuuuccugggggccgcaaucu

SEQ ID NO: 350324 - RNA, 32 nt, Homo Sapiens
uguugauauaacugauuuuauagaaucugucu

SEQ ID NO: 350325 - RNA, 32 nt, Homo Sapiens
ucaauaaauauauaauuuuuuacaaauguaaa

SEQ ID NO: 350326 - RNA, 32 nt, Homo Sapiens
guggccccaucuuauuucuccucauuucuucc

SEQ ID NO: 350327 - RNA, 28 nt, Homo Sapiens
aguaagaaauaaaaguucauugugucuc

SEQ ID NO: 350328 - RNA, 32 nt, Homo Sapiens
ccuuucugugaauuauugaauuuaagagcccu

SEQ ID NO: 350329 - RNA, 32 nt, Homo Sapiens
ggauauuuaagugagcauuuucuaguucauau

SEQ ID NO: 350330 - RNA, 32 nt, Homo Sapiens
ccaccuuuuguuaucauuuucauuucauuucu

SEQ ID NO: 350331 - RNA, 32 nt, Homo Sapiens
aaacaaauacuucuacuguuugggugugugau

SEQ ID NO: 350332 - RNA, 32 nt, Homo Sapiens
uggcaugcaauacaaggcugcagacggugacu

SEQ ID NO: 350333 - RNA, 31 nt, Homo Sapiens
ccuggggcacuuuccagagccuggccauccc

SEQ ID NO: 350334 - RNA, 32 nt, Homo Sapiens
uaccuggauucacuaaauuuguuuguuguugu

SEQ ID NO: 350335 - RNA, 32 nt, Homo Sapiens
augauaaccaaauguaagaugaaaauaaaaga

SEQ ID NO: 350336 - RNA, 32 nt, Homo Sapiens
cccacuccgcggggugggccugugauuagcuc

SEQ ID NO: 350337 - RNA, 32 nt, Homo Sapiens
uggcggcuccaaguucccuucucuuugccagc

SEQ ID NO: 350338 - RNA, 32 nt, Homo Sapiens
gcugcucuucuucacuauucuuguuuugagcu

SEQ ID NO: 350339 - RNA, 32 nt, Homo Sapiens
acucugcuccacguggggccaggcgugugacu

SEQ ID NO: 350340 - RNA, 32 nt, Homo Sapiens
augaaaauggucuaaacuuauugugguaaugg

SEQ ID NO: 350341 - RNA, 32 nt, Homo Sapiens
ggcuucaccuucuccuucucucuucguugcug

SEQ ID NO: 350342 - RNA, 32 nt, Homo Sapiens
caggcagagagagaugcuggggaccaggugga

SEQ ID NO: 350343 - RNA, 32 nt, Homo Sapiens
uccuccucuuaacuuucuuaauauuuggacau

SEQ ID NO: 350344 - RNA, 32 nt, Homo Sapiens
gggucuggcaaggggaaucugucaucauucau

SEQ ID NO: 350345 - RNA, 32 nt, Homo Sapiens
cuaauugcucuggugugggaaugcaggccuaa

SEQ ID NO: 350346 - RNA, 32 nt, Homo Sapiens
agagcaagggcuuagggguuggagguggcaga

SEQ ID NO: 350347 - RNA, 32 nt, Homo Sapiens
aaucaucuccaaguaggacucccacuuguaaa

SEQ ID NO: 350348 - RNA, 32 nt, Homo Sapiens
caacccuguccucccgagcuccucuuccaugc

SEQ ID NO: 350349 - RNA, 32 nt, Homo Sapiens
cuuaagcagucuucccaccucagccuccccag

SEQ ID NO: 350350 - RNA, 32 nt, Homo Sapiens
gcucucacugucagcucucauauucuuccagg

SEQ ID NO: 350351 - RNA, 32 nt, Homo Sapiens
caguguggggacggccccugccggauaggccu

SEQ ID NO: 350352 - RNA, 32 nt, Homo Sapiens
aagccauucuucugccucagccucagcgagua

SEQ ID NO: 350353 - RNA, 32 nt, Homo Sapiens
aaugcuaccggggaccgggacccggcggcccu

SEQ ID NO: 350354 - RNA, 32 nt, Homo Sapiens
agaagagcaguuucaagaagauauacucagag

SEQ ID NO: 350355 - RNA, 32 nt, Homo Sapiens
aucauugaauagagugcagagaaaggaccgca

SEQ ID NO: 350356 - RNA, 32 nt, Homo Sapiens
ggaaaaggagaaucccaccuccuugcacuaca

SEQ ID NO: 350357 - RNA, 32 nt, Homo Sapiens
gaccgccguguccucccgccggaccguuaucc

SEQ ID NO: 350358 - RNA, 32 nt, Homo Sapiens
gcccagucugcaccaggcgucuggucaacuua

SEQ ID NO: 350359 - RNA, 32 nt, Homo Sapiens
uacauuguuucaucauaaaaauuauggcuuug

SEQ ID NO: 350360 - RNA, 32 nt, Homo Sapiens
aaagagaaaauggcggaaugggccuucgccuc

SEQ ID NO: 350361 - RNA, 32 nt, Homo Sapiens
auuuacuacauauuuuccaucuguaguuucuc

SEQ ID NO: 350362 - RNA, 32 nt, Homo Sapiens
cucauggauuugaaugaaaugccaauaacacg

SEQ ID NO: 350363 - RNA, 32 nt, Homo Sapiens
cuccuaaugagguuuuuuuucuuucggaccug

SEQ ID NO: 350364 - RNA, 32 nt, Homo Sapiens
acguggagaagcugcagcucuggaaagagggu

SEQ ID NO: 350365 - RNA, 32 nt, Homo Sapiens
cacaaauauaaaacuauaaguaauaaauuguu

SEQ ID NO: 350366 - RNA, 32 nt, Homo Sapiens
gcagggccaguacccuuggagggucaggccac

SEQ ID NO: 350367 - RNA, 32 nt, Homo Sapiens
ugcugcuggcuucuccucuccaccccucauau

SEQ ID NO: 350368 - RNA, 32 nt, Homo Sapiens
auccccucaaaguggggaccugucccaaggac

SEQ ID NO: 350369 - RNA, 32 nt, Homo Sapiens
uaguucauuauguggccgaaaagcauacacug

SEQ ID NO: 350370 - RNA, 32 nt, Homo Sapiens
ggaggaagaggcccugaguccugggaucagac

SEQ ID NO: 350371 - RNA, 32 nt, Homo Sapiens
uaggaucuacagaugaauauuuaacucaauag

SEQ ID NO: 350372 - RNA, 32 nt, Homo Sapiens
ccauauuuaaaaaucugaauuuuuuagaagaa

SEQ ID NO: 350373 - RNA, 32 nt, Homo Sapiens
uucgccuuuugucucuuaaugacgaucacacc

SEQ ID NO: 350374 - RNA, 32 nt, Homo Sapiens
gccaccuccgucaucugggcccggggccucac

SEQ ID NO: 350375 - RNA, 32 nt, Homo Sapiens
uaccucaucuguucuuuuuaauauuuuaucuc

SEQ ID NO: 350376 - RNA, 32 nt, Homo Sapiens
cccaaucugccagaaccuaagaugccauuuug

SEQ ID NO: 350377 - RNA, 32 nt, Homo Sapiens
cagaagggucuucuuuuuuuuaugucggaaua

SEQ ID NO: 350378 - RNA, 32 nt, Homo Sapiens
uggaugcagugcucucccaggaccucauugug

SEQ ID NO: 350379 - RNA, 32 nt, Homo Sapiens
cgcucucccccgcuccucucaucuggucuggg

SEQ ID NO: 350380 - RNA, 32 nt, Homo Sapiens
cagauauucuggauauuaccucuucuugguca

SEQ ID NO: 350381 - RNA, 32 nt, Homo Sapiens
uuaaaggagcagcuagcugcuuuucugucagu

SEQ ID NO: 350382 - RNA, 32 nt, Homo Sapiens
aaaaaauauccaggguacuccuggacaguguc

SEQ ID NO: 350383 - RNA, 32 nt, Homo Sapiens
uaauguggacagcagacuuuaucccuccuucu

SEQ ID NO: 350384 - RNA, 32 nt, Homo Sapiens
caggaggacauugaaaauaagauggaacccau

SEQ ID NO: 350385 - RNA, 32 nt, Homo Sapiens
ccuccaagggaagcagugaggaaagaugaggc

SEQ ID NO: 350386 - RNA, 32 nt, Homo Sapiens
ccucacugggccucucccacuccgcugccugu

SEQ ID NO: 350387 - RNA, 32 nt, Homo Sapiens
ugcugcggagaauuggagauggggaccgcccu

SEQ ID NO: 350388 - RNA, 32 nt, Homo Sapiens
gccacacagcccaaagauuagcuucaugucca

SEQ ID NO: 350389 - RNA, 32 nt, Homo Sapiens
gacaacaggaccaaccugcgcugccuuugacu

SEQ ID NO: 350390 - RNA, 32 nt, Homo Sapiens
cuugagccaaacuguuugggucucguugcuuc

SEQ ID NO: 350391 - RNA, 32 nt, Homo Sapiens
uccgugcuacaucuucacaguuccuccgaaua

SEQ ID NO: 350392 - RNA, 29 nt, Homo Sapiens
cugaauucuauccuacuccaccuucagcc

SEQ ID NO: 350393 - RNA, 32 nt, Homo Sapiens
gugcuccugggccuggcgguugagcccgggga

SEQ ID NO: 350394 - RNA, 32 nt, Homo Sapiens
gggcccagcucuucuuccugguugggucucca

SEQ ID NO: 350395 - RNA, 32 nt, Homo Sapiens
cccuacacugaccccuugacauaccugggcaa

SEQ ID NO: 350396 - RNA, 30 nt, Homo Sapiens
agcucuucaggcugcauccucuggugagcu

SEQ ID NO: 350397 - RNA, 32 nt, Homo Sapiens
ucauguuuuaagauauccuugcauucuaagaa

SEQ ID NO: 350398 - RNA, 32 nt, Homo Sapiens
uuucuuugcugcgucuacugcgagaaugaaga

SEQ ID NO: 350399 - RNA, 32 nt, Homo Sapiens
caucgcgggauggugcagacgcggcggggacu

SEQ ID NO: 350400 - RNA, 32 nt, Homo Sapiens
cuuuauuggcuacauaaucacuccaugcggug

SEQ ID NO: 350401 - RNA, 32 nt, Homo Sapiens
ggaaggaacaagaucaaggaugaggauuagca

SEQ ID NO: 350402 - RNA, 32 nt, Homo Sapiens
guuugagaccacccugaucaaaacagagaaac

SEQ ID NO: 350403 - RNA, 32 nt, Homo Sapiens
uuggacaacugacaauaugauuuuaaauuuga

SEQ ID NO: 350404 - RNA, 32 nt, Homo Sapiens
caaauguaugaugauaucuacaauuauagaau

SEQ ID NO: 350405 - RNA, 32 nt, Homo Sapiens
ccccugcagucacuuccagaugccugugcuua

SEQ ID NO: 350406 - RNA, 32 nt, Homo Sapiens
gccuggauguuuuuucccuguuuaaugauuga

SEQ ID NO: 350407 - RNA, 32 nt, Homo Sapiens
cuggcgagaaucaccagcuguuccuaguggcu

SEQ ID NO: 350408 - RNA, 32 nt, Homo Sapiens
ucaguuucugaguaaaaccagucugaaauagg

SEQ ID NO: 350409 - RNA, 32 nt, Homo Sapiens
aaaucuuuauuucucucuucgccuggugcagc

SEQ ID NO: 350410 - RNA, 32 nt, Homo Sapiens
agagggaggaggggaaggacuccaugggccau

SEQ ID NO: 350411 - RNA, 32 nt, Homo Sapiens
acauugcuuuugucccuucucuucaucugguc

SEQ ID NO: 350412 - RNA, 32 nt, Homo Sapiens
gcagccacuccagcuuguccugugcugccucc

SEQ ID NO: 350413 - RNA, 32 nt, Homo Sapiens
gcugccggccccacugggcucggauccggccc

SEQ ID NO: 350414 - RNA, 32 nt, Homo Sapiens
gaagcacucauuucugaccaccaggcuaugac

SEQ ID NO: 350415 - RNA, 32 nt, Homo Sapiens
caaacacucccgcuccagaacacacaucuccg

SEQ ID NO: 350416 - RNA, 32 nt, Homo Sapiens
uucccucuucagaugccugaagggagugcuuu

SEQ ID NO: 350417 - RNA, 32 nt, Homo Sapiens
gcaccagcagugccccagugcccacgguaccc

SEQ ID NO: 350418 - RNA, 32 nt, Homo Sapiens
cuugcgcuccccaacagcggcgcgggcgggug

SEQ ID NO: 350419 - RNA, 32 nt, Homo Sapiens
cccagagggcugccugcugugcacuugggucc

SEQ ID NO: 350420 - RNA, 32 nt, Homo Sapiens
aagcacacagaauuauccuuguccuccuaaua

SEQ ID NO: 350421 - RNA, 32 nt, Homo Sapiens
gcacaguggggauaagaaagccuaccucacgu

SEQ ID NO: 350422 - RNA, 32 nt, Homo Sapiens
cagguugacagauaauuagauacaggggacau

SEQ ID NO: 350423 - RNA, 32 nt, Homo Sapiens
uaaauauuggacaaaauggcuggcuucaaaau

SEQ ID NO: 350424 - RNA, 32 nt, Homo Sapiens
aaacacugauauuuuacuaacaggagaaauga

SEQ ID NO: 350425 - RNA, 32 nt, Homo Sapiens
caguucuuuucuacccugcgggcccgcacguu

SEQ ID NO: 350426 - RNA, 32 nt, Homo Sapiens
ggaaaggccuguauccugccagugucccuccg

SEQ ID NO: 350427 - RNA, 32 nt, Homo Sapiens
aggggcucuuugucauccaucugcgcagcaac

SEQ ID NO: 350428 - RNA, 32 nt, Homo Sapiens
ugugcaggggugagaaucuggcagauggugcc

SEQ ID NO: 350429 - RNA, 32 nt, Homo Sapiens
ggacaccgagugugccgcgcccgggggaugcc

SEQ ID NO: 350430 - RNA, 32 nt, Homo Sapiens
uucuuuucaguuuuuccaaagucaagagucuu

SEQ ID NO: 350431 - RNA, 32 nt, Homo Sapiens
acauuguauuaagauaacaaaacauguucagc

SEQ ID NO: 350432 - RNA, 32 nt, Homo Sapiens
gugucccuaagccccaaggcccggagugggag

SEQ ID NO: 350433 - RNA, 31 nt, Homo Sapiens
uuuauucagaauaaauuuuuugugcuuauga

SEQ ID NO: 350434 - RNA, 32 nt, Homo Sapiens
guggcacucaacaugagucaagagcauccugc

SEQ ID NO: 350435 - RNA, 28 nt, Homo Sapiens
cucaguuguacaggacuuggugaucagg

SEQ ID NO: 350436 - RNA, 32 nt, Homo Sapiens
cuggcuuuuuaaaguuguauaucuccagauag

SEQ ID NO: 350437 - RNA, 32 nt, Homo Sapiens
ggagcagagccaggugggcccuggacauuuuu

SEQ ID NO: 350438 - RNA, 32 nt, Homo Sapiens
gcuaauuugccuuugccugggguguucagcuu

SEQ ID NO: 350439 - RNA, 32 nt, Homo Sapiens
ggcguguuccuccggaguuuucuuuuucgugc

SEQ ID NO: 350440 - RNA, 32 nt, Homo Sapiens
augguuuuuagcucuauuuucaccuuacucaa

SEQ ID NO: 350441 - RNA, 32 nt, Homo Sapiens
ucaagggaguuauuuuuuuucuuaauguaacu

SEQ ID NO: 350442 - RNA, 32 nt, Homo Sapiens
uaaugauacuuauguuagaagauuguuuugag

SEQ ID NO: 350443 - RNA, 30 nt, Homo Sapiens
uuuauugucugugucagacguacagccaga

SEQ ID NO: 350444 - RNA, 32 nt, Homo Sapiens
uucggagauuguguugucuaaggguuugucug

SEQ ID NO: 350445 - RNA, 32 nt, Homo Sapiens
guggggggacagguggacguggagagcucuuu

SEQ ID NO: 350446 - RNA, 32 nt, Homo Sapiens
uuuggaucucaacuaauuucuacauugccaga

SEQ ID NO: 350447 - RNA, 32 nt, Homo Sapiens
aguuuuccaaguugucccacugccauucaaag

SEQ ID NO: 350448 - RNA, 32 nt, Homo Sapiens
ggaagaacuuccccacuccccccgccucuuuc

SEQ ID NO: 350449 - RNA, 32 nt, Homo Sapiens
agggaagugucugcuacuuaguugccagucaa

SEQ ID NO: 350450 - RNA, 32 nt, Homo Sapiens
gcggaccgcacgucucaacgcgggaaaacagu

SEQ ID NO: 350451 - RNA, 32 nt, Homo Sapiens
acagaaugaaacuccaucacuccaucucaaaa

SEQ ID NO: 350452 - RNA, 32 nt, Homo Sapiens
agccgggcuccggcugcagaagugcuguuggc

SEQ ID NO: 350453 - RNA, 32 nt, Homo Sapiens
gaaaagaggagcuugcggaggugcggcugcag

SEQ ID NO: 350454 - RNA, 32 nt, Homo Sapiens
gcccgagccuguguccuccccaccucgcccac

SEQ ID NO: 350455 - RNA, 32 nt, Homo Sapiens
aaguccuuaggacagacugaauuaucauaacu

SEQ ID NO: 350456 - RNA, 32 nt, Homo Sapiens
cgagaaaguaucuauuuuuggcuaaauaaaug

SEQ ID NO: 350457 - RNA, 32 nt, Homo Sapiens
cugcaucccacuuuucccugcucugaaucgaa

SEQ ID NO: 350458 - RNA, 32 nt, Homo Sapiens
aucucuucucccuggccccagccauccugacc

SEQ ID NO: 350459 - RNA, 32 nt, Homo Sapiens
uauguagcaaggaaaaggugcuuuuuaauuuu

SEQ ID NO: 350460 - RNA, 32 nt, Homo Sapiens
gacuguauugaaaaaacccucaccuuacucug

SEQ ID NO: 350461 - RNA, 32 nt, Homo Sapiens
ccgcucgugcucuccgcccagccacggcuccc

SEQ ID NO: 350462 - RNA, 32 nt, Homo Sapiens
gugaauccuucccacacuccuccaugguugcc

SEQ ID NO: 350463 - RNA, 32 nt, Homo Sapiens
aacacaucuuuaauaauguuaaagguuuuuuc

SEQ ID NO: 350464 - RNA, 32 nt, Homo Sapiens
uuacuuauucagacugauaaucauauuaguga

SEQ ID NO: 350465 - RNA, 30 nt, Homo Sapiens
gcgccccgcaggcgcacgguacccgugcug

SEQ ID NO: 350466 - RNA, 32 nt, Homo Sapiens
cuaauauugcugugcuccccaccacccccaug

SEQ ID NO: 350467 - RNA, 32 nt, Homo Sapiens
acccggggcgggauccugguguccugaaaggg

SEQ ID NO: 350468 - RNA, 32 nt, Homo Sapiens
gcuguccuccaaguauuccgaugauucugugg

SEQ ID NO: 350469 - RNA, 32 nt, Homo Sapiens
gcugugugcuugagaguaacacugcacgcugc

SEQ ID NO: 350470 - RNA, 32 nt, Homo Sapiens
agacacuggccauaccacuggacaggguuaug

SEQ ID NO: 350471 - RNA, 32 nt, Homo Sapiens
cucccuucaccucggugccucaguucccccag

SEQ ID NO: 350472 - RNA, 32 nt, Homo Sapiens
acugaauagauauagccaaauuccuuccccca

SEQ ID NO: 350473 - RNA, 32 nt, Homo Sapiens
aucgagggcagcgcccccggcgcggaucugcc

SEQ ID NO: 350474 - RNA, 32 nt, Homo Sapiens
cccuggcagcgggagccgcgggucgagguuau

SEQ ID NO: 350475 - RNA, 32 nt, Homo Sapiens
cuagcaaacuaaaaccaucugcauuagucaag

SEQ ID NO: 350476 - RNA, 32 nt, Homo Sapiens
cucccaaccccauugagagauuuugggagcuu

SEQ ID NO: 350477 - RNA, 32 nt, Homo Sapiens
aacauuugacuuccuugggacucuuaagugca

SEQ ID NO: 350478 - RNA, 32 nt, Homo Sapiens
auagcucauuggcuuagcaaugggcacuuaac

SEQ ID NO: 350479 - RNA, 32 nt, Homo Sapiens
gccugggguagguggcagcugcugacuacaga

SEQ ID NO: 350480 - RNA, 32 nt, Homo Sapiens
cagccgcuggccuacccggcccgcgggugaga

SEQ ID NO: 350481 - RNA, 32 nt, Homo Sapiens
gcgagcaggugagggccagagaagggguucuc

SEQ ID NO: 350482 - RNA, 32 nt, Homo Sapiens
gaacgaaacuuccaauggacaccagaaccuuu

SEQ ID NO: 350483 - RNA, 32 nt, Homo Sapiens
ugaggucgggaguucaagacuagccuggccaa

SEQ ID NO: 350484 - RNA, 32 nt, Homo Sapiens
acaugucaguuuuaucaauuauauuauguuua

SEQ ID NO: 350485 - RNA, 32 nt, Homo Sapiens
auauauaguguuucaugagguguauauaaaau

SEQ ID NO: 350486 - RNA, 32 nt, Homo Sapiens
uggauuugcacuugaggauauugacacucaga

SEQ ID NO: 350487 - RNA, 32 nt, Homo Sapiens
aaaaaacacaucacuauauguaggaaauauac

SEQ ID NO: 350488 - RNA, 32 nt, Homo Sapiens
aguguaaagucuguuuaaaauaaaaaagaaug

SEQ ID NO: 350489 - RNA, 32 nt, Homo Sapiens
uuugggacuuugcgguccccuaaguagaaaau

SEQ ID NO: 350490 - RNA, 32 nt, Homo Sapiens
cuauaguaaccucaggggccggccacgccccg

SEQ ID NO: 350491 - RNA, 32 nt, Homo Sapiens
uugugcuuggaaagaucauggccugguucuuc

SEQ ID NO: 350492 - RNA, 32 nt, Homo Sapiens
aaauuuugcuuauguuauuugguggugucacc

SEQ ID NO: 350493 - RNA, 32 nt, Homo Sapiens
caaccccacccccgauuucugcucugcugacu

SEQ ID NO: 350494 - RNA, 32 nt, Homo Sapiens
ugcuuugcauucuucaaaaccauuccugauag

SEQ ID NO: 350495 - RNA, 32 nt, Homo Sapiens
ucaaacuaaauucaaagaaguacuuuauugca

SEQ ID NO: 350496 - RNA, 32 nt, Homo Sapiens
agacggggcuccuggggugguuaaggacgcgg

SEQ ID NO: 350497 - RNA, 32 nt, Homo Sapiens
cucucgcucccucuacccucuauccccuaggg

SEQ ID NO: 350498 - RNA, 32 nt, Homo Sapiens
aaacuuuaauaaaacaguuuuuaauuuuuugc

SEQ ID NO: 350499 - RNA, 32 nt, Homo Sapiens
uagggucgguguuccuuggacgggaagagaca

SEQ ID NO: 350500 - RNA, 32 nt, Homo Sapiens
cgaccaccgcgugcgcccuuccccagggcggg

SEQ ID NO: 350501 - RNA, 32 nt, Homo Sapiens
cuuuuguuuuuccauuuuuuuaaauaauaaaa

SEQ ID NO: 350502 - RNA, 32 nt, Homo Sapiens
uuuuggcccucccucagcagcucucacacccc

SEQ ID NO: 350503 - RNA, 32 nt, Homo Sapiens
uuaaucuggggaagaacagagccagggaaaga

SEQ ID NO: 350504 - RNA, 32 nt, Homo Sapiens
uugcaggccauggaggagggaccuccacucca

SEQ ID NO: 350505 - RNA, 32 nt, Homo Sapiens
uguacugccuucuauggguugugagugagucc

SEQ ID NO: 350506 - RNA, 29 nt, Homo Sapiens
ugagcuuugaagauuaggaggagaaaaag

SEQ ID NO: 350507 - RNA, 32 nt, Homo Sapiens
ugcacagugccgugagacuuagcuccauggcc

SEQ ID NO: 350508 - RNA, 32 nt, Homo Sapiens
cugcagcagccacauccauacacacacgcucg

SEQ ID NO: 350509 - RNA, 32 nt, Homo Sapiens
agacucacucccugccaccuagugcaucagau

SEQ ID NO: 350510 - RNA, 32 nt, Homo Sapiens
uaaccuucauuuuuaagacuguaauguguacu

SEQ ID NO: 350511 - RNA, 32 nt, Homo Sapiens
aaauaguaacaaggacuauuuucuauuguugu

SEQ ID NO: 350512 - RNA, 30 nt, Homo Sapiens
gcaaccuccgguagguacgauacagaaugu

SEQ ID NO: 350513 - RNA, 32 nt, Homo Sapiens
gggagugcaaagggcuggcugagagccgcagg

SEQ ID NO: 350514 - RNA, 32 nt, Homo Sapiens
gcagggacggguggagaggcgcagggacccca

SEQ ID NO: 350515 - RNA, 32 nt, Homo Sapiens
ugaauggucuucugccagcccauuuugaggcc

SEQ ID NO: 350516 - RNA, 32 nt, Homo Sapiens
gccuguuguggggcuccuccccuuuggggaua

SEQ ID NO: 350517 - RNA, 32 nt, Homo Sapiens
gguccuccgcccccggcccuccccucucaggc

SEQ ID NO: 350518 - RNA, 32 nt, Homo Sapiens
agagaggaaaaauugccaaaacaaagaaaauc

SEQ ID NO: 350519 - RNA, 32 nt, Homo Sapiens
ugcuccagccccagcucugcauaccugcaccu

SEQ ID NO: 350520 - RNA, 32 nt, Homo Sapiens
gcagcugccucugagaaaucagagcgggacac

SEQ ID NO: 350521 - RNA, 31 nt, Homo Sapiens
aacaccuuaggaagaaaguccaugagacuuu

SEQ ID NO: 350522 - RNA, 32 nt, Homo Sapiens
aaacugggcugauguaaauguuuuacuuucaa

SEQ ID NO: 350523 - RNA, 32 nt, Homo Sapiens
augcuucaaaaauuguccuguuagaauuucca

SEQ ID NO: 350524 - RNA, 32 nt, Homo Sapiens
ggugaaguucacuguauugcuauauuuuugua

SEQ ID NO: 350525 - RNA, 32 nt, Homo Sapiens
gaguugaaggcacaaaugcgugacaguuccug

SEQ ID NO: 350526 - RNA, 32 nt, Homo Sapiens
cugagcgcccccagccgcgccgggcagccugg

SEQ ID NO: 350527 - RNA, 32 nt, Homo Sapiens
auacacuucacagauaaagacugugaaacaca

SEQ ID NO: 350528 - RNA, 32 nt, Homo Sapiens
accacugcaggcagguggauagaagugcggcc

SEQ ID NO: 350529 - RNA, 32 nt, Homo Sapiens
aucgggaaauuugagugucaguaacuguggua

SEQ ID NO: 350530 - RNA, 32 nt, Homo Sapiens
cagguugaaucaaugucuucucacuuaaucag

SEQ ID NO: 350531 - RNA, 32 nt, Homo Sapiens
cuacuaguggagaggaguggggccugccccuc

SEQ ID NO: 350532 - RNA, 32 nt, Homo Sapiens
cugggccuguguugggguguugggggaagcug

SEQ ID NO: 350533 - RNA, 32 nt, Homo Sapiens
cuggcuggagagcgggacguggcagaggagcc

SEQ ID NO: 350534 - RNA, 32 nt, Homo Sapiens
gaccuuggccccaaagauauuccucaauagau

SEQ ID NO: 350535 - RNA, 32 nt, Homo Sapiens
uuuuaguuaugugaaagacaguuucauggaag

SEQ ID NO: 350536 - RNA, 32 nt, Homo Sapiens
uccgcgcggccgggcgggagggaggucgagga

SEQ ID NO: 350537 - RNA, 32 nt, Homo Sapiens
uuuguuaugacagugaauauugcuuuuauuau

SEQ ID NO: 350538 - RNA, 32 nt, Homo Sapiens
uucaaggaagacucuacaagcuuuuguucaca

SEQ ID NO: 350539 - RNA, 32 nt, Homo Sapiens
gcuccugcuggggccugcccacgccaaggacc

SEQ ID NO: 350540 - RNA, 32 nt, Homo Sapiens
guguugagggcaccucuccuccccucuuacac

SEQ ID NO: 350541 - RNA, 32 nt, Homo Sapiens
guaaguuauacuggagaaaacuucuacaugug

SEQ ID NO: 350542 - RNA, 32 nt, Homo Sapiens
acaacaaagauaaagaaaagguugacucugcu

SEQ ID NO: 350543 - RNA, 32 nt, Homo Sapiens
ucccuucguuugcauguguuacuucuucagcc

SEQ ID NO: 350544 - RNA, 32 nt, Homo Sapiens
accggcccgccgugcacccccgcuacgcccca

SEQ ID NO: 350545 - RNA, 32 nt, Homo Sapiens
cuggaaaacucuaaagauuuccaggucccauc

SEQ ID NO: 350546 - RNA, 32 nt, Homo Sapiens
cagaaaugaaaauaaaucauguuuuuuauuuu

SEQ ID NO: 350547 - RNA, 32 nt, Homo Sapiens
ugucaauugcuacuucuaucuagccuccugcc

SEQ ID NO: 350548 - RNA, 32 nt, Homo Sapiens
accccuccugcucccuggggcuccucagggag

SEQ ID NO: 350549 - RNA, 32 nt, Homo Sapiens
auaaauacauaaauagagaugcuacagauaca

SEQ ID NO: 350550 - RNA, 32 nt, Homo Sapiens
gagaaugauuauuuaaauuacaauuaaggaaa

SEQ ID NO: 350551 - RNA, 32 nt, Homo Sapiens
ggggugucgggggcuccugugcaggcucaugc

SEQ ID NO: 350552 - RNA, 32 nt, Homo Sapiens
uaaaugacugguuuuuguuugcuugcagugcu

SEQ ID NO: 350553 - RNA, 32 nt, Homo Sapiens
gccgcugccacauggauuuucuuaaucguuuu

SEQ ID NO: 350554 - RNA, 32 nt, Homo Sapiens
ggagccggcgcgcgcucccaccuuugccgcac

SEQ ID NO: 350555 - RNA, 32 nt, Homo Sapiens
ugcccagaggggcagcagcucucccugguucu

SEQ ID NO: 350556 - RNA, 32 nt, Homo Sapiens
ucucuacccuccugggcugggcuugggcacaa

SEQ ID NO: 350557 - RNA, 32 nt, Homo Sapiens
ggagaacuaagagcuuccuaaauuacuaugca

SEQ ID NO: 350558 - RNA, 27 nt, Homo Sapiens
cugccuccugcauccagcccccaacau

SEQ ID NO: 350559 - RNA, 32 nt, Homo Sapiens
gcuuguauuagaaaggcaaaauguaagacuuu

SEQ ID NO: 350560 - RNA, 32 nt, Homo Sapiens
ccuggcgucaguccggccucccuggacaccac

SEQ ID NO: 350561 - RNA, 32 nt, Homo Sapiens
caauccugucaucacccuccuguggauguaca

SEQ ID NO: 350562 - RNA, 32 nt, Homo Sapiens
ugagagaggagggagagggagucuggcaugag

SEQ ID NO: 350563 - RNA, 32 nt, Homo Sapiens
gcgaggcccuccccuucauccagcgugucuac

SEQ ID NO: 350564 - RNA, 32 nt, Homo Sapiens
ccucagccacauuauuggggccccacagcaag

SEQ ID NO: 350565 - RNA, 32 nt, Homo Sapiens
gcauaaacugggagacugugggaaaugcauuc

SEQ ID NO: 350566 - RNA, 32 nt, Homo Sapiens
cgcccgcccccggccgggucgccggcaugaag

SEQ ID NO: 350567 - RNA, 31 nt, Homo Sapiens
gccgcgaugcuguuccacagucugucgggcc

SEQ ID NO: 350568 - RNA, 32 nt, Homo Sapiens
ucccaauaccucuuccccacucccuucuuuuu

SEQ ID NO: 350569 - RNA, 32 nt, Homo Sapiens
guagaacucuccucaauuuacacugacuuuuu

SEQ ID NO: 350570 - RNA, 32 nt, Homo Sapiens
aauuaauuauagaugucaaaacauuaaccaga

SEQ ID NO: 350571 - RNA, 32 nt, Homo Sapiens
ccgcuggcucugccugcuccugcaacagugcg

SEQ ID NO: 350572 - RNA, 32 nt, Homo Sapiens
gcaguucacguccaggcucuuccacuguggaa

SEQ ID NO: 350573 - RNA, 32 nt, Homo Sapiens
ccagcagcccuucgugaauccugcacugccac

SEQ ID NO: 350574 - RNA, 32 nt, Homo Sapiens
uccaugugucugccuccauaugcaucugggca

SEQ ID NO: 350575 - RNA, 32 nt, Homo Sapiens
ccuugcccauucucuaagccuggcuuagaagg

SEQ ID NO: 350576 - RNA, 30 nt, Homo Sapiens
cccagguggggcgaucaccugagguuagaa

SEQ ID NO: 350577 - RNA, 32 nt, Homo Sapiens
ugugacagacggagcuggagcggcggggcggc

SEQ ID NO: 350578 - RNA, 32 nt, Homo Sapiens
ccuucuucgaagucuguaaauuuaaaauccua

SEQ ID NO: 350579 - RNA, 32 nt, Homo Sapiens
caagcaggccuccuggugaccggagagaaaga

SEQ ID NO: 350580 - RNA, 32 nt, Homo Sapiens
auauauauagaaaaaaguuuaacucggggcgc

SEQ ID NO: 350581 - RNA, 32 nt, Homo Sapiens
cgcggagccggagcuggacgccgccgccgcca

SEQ ID NO: 350582 - RNA, 32 nt, Homo Sapiens
ccaggcuccucucccaagaaauccaggugcuu

SEQ ID NO: 350583 - RNA, 32 nt, Homo Sapiens
agaauaaauaauccugccugucauaaaacagu

SEQ ID NO: 350584 - RNA, 32 nt, Homo Sapiens
cagcauugacauuuuauuuuuguuaucucucu

SEQ ID NO: 350585 - RNA, 32 nt, Homo Sapiens
ccuggggcccuggccuucugccugaaggccgu

SEQ ID NO: 350586 - RNA, 32 nt, Homo Sapiens
ccuugaaaaaagauuagacaaaauggcuaacu

SEQ ID NO: 350587 - RNA, 29 nt, Homo Sapiens
aaugaaauagugauuaugaaaauacagug

SEQ ID NO: 350588 - RNA, 30 nt, Homo Sapiens
aucaaguggggcgaugcuggcgcugaguac

SEQ ID NO: 350589 - RNA, 32 nt, Homo Sapiens
ugaaaucagaucugggaccuauauagcguggc

SEQ ID NO: 350590 - RNA, 32 nt, Homo Sapiens
auccaccccagccccaggcacugaaccacgcg

SEQ ID NO: 350591 - RNA, 32 nt, Homo Sapiens
caagggcagcggggcucggcgagcgaggcacc

SEQ ID NO: 350592 - RNA, 32 nt, Homo Sapiens
gcaggcggagagcgcagggcggggagaggcgu

SEQ ID NO: 350593 - RNA, 32 nt, Homo Sapiens
augagagaacagagacggccucucccuccagu

SEQ ID NO: 350594 - RNA, 32 nt, Homo Sapiens
uuggcuuccugcaggacagccauggaccuacu

SEQ ID NO: 350595 - RNA, 32 nt, Homo Sapiens
auauguuguguacacugguuagauaaaacuua

SEQ ID NO: 350596 - RNA, 32 nt, Homo Sapiens
uacuuuuaaguacuuacgugugaguaagugua

SEQ ID NO: 350597 - RNA, 32 nt, Homo Sapiens
uugcuuacagcuuauugauuuagguaacuauu

SEQ ID NO: 350598 - RNA, 32 nt, Homo Sapiens
uuuguaagggaagccaggcuggggaaucagag

SEQ ID NO: 350599 - RNA, 29 nt, Homo Sapiens
agagauagauacauguaugugaacagauu

SEQ ID NO: 350600 - RNA, 32 nt, Homo Sapiens
aauguacuuucauucccuuucaugauuugcaa

SEQ ID NO: 350601 - RNA, 32 nt, Homo Sapiens
cccccaagccccacugaggccccuacugaggc

SEQ ID NO: 350602 - RNA, 32 nt, Homo Sapiens
aguuuggguaauuuauaacaaaauuugcuaag

SEQ ID NO: 350603 - RNA, 32 nt, Homo Sapiens
agaacagaaggggaaagggucuuaacugggaa

SEQ ID NO: 350604 - RNA, 32 nt, Homo Sapiens
uauauucucuaccacugcucuuucucaugauu

SEQ ID NO: 350605 - RNA, 32 nt, Homo Sapiens
cagccucgcucuuuccacccuguuauggcuuc

SEQ ID NO: 350606 - RNA, 32 nt, Homo Sapiens
uauacugagguggucguaagucuuaacuucua

SEQ ID NO: 350607 - RNA, 32 nt, Homo Sapiens
ucacuauuguguuauuucuugacuuuuguacu

SEQ ID NO: 350608 - RNA, 32 nt, Homo Sapiens
ggcucgcgcgggggccccggcgcgccgggcgg

SEQ ID NO: 350609 - RNA, 32 nt, Homo Sapiens
cuguuggucaugugggucuuccagggggaagg

SEQ ID NO: 350610 - RNA, 32 nt, Homo Sapiens
uccagugucacuguucuguuuccacgggaugg

SEQ ID NO: 350611 - RNA, 32 nt, Homo Sapiens
caguccugaauucaaauccuuguuuuugcacu

SEQ ID NO: 350612 - RNA, 32 nt, Homo Sapiens
uucaagauucagagcucauuuuuucuguguca

SEQ ID NO: 350613 - RNA, 32 nt, Homo Sapiens
uaaaugcguuuuuggaagaacuuugcuauuag

SEQ ID NO: 350614 - RNA, 32 nt, Homo Sapiens
gcugcuggaaaggggccagugggauccuagau

SEQ ID NO: 350615 - RNA, 32 nt, Homo Sapiens
gcaucuuaccaauaaggauaaauaucauauac

SEQ ID NO: 350616 - RNA, 32 nt, Homo Sapiens
agcuccuucucgccucagccgcgccagaaacc

SEQ ID NO: 350617 - RNA, 32 nt, Homo Sapiens
aguaacgacuuccaucuuuacaucaaaagaaa

SEQ ID NO: 350618 - RNA, 32 nt, Homo Sapiens
uucauaguuugacuuuucauaagcaaauaaau

SEQ ID NO: 350619 - RNA, 32 nt, Homo Sapiens
uuaugcuuuaucuugaaggaaccauuagauau

SEQ ID NO: 350620 - RNA, 32 nt, Homo Sapiens
accuuaaugugacaccugagaccuuuagacag

SEQ ID NO: 350621 - RNA, 32 nt, Homo Sapiens
aaaugaauuuuuuuuucuuuuuugagauggag

SEQ ID NO: 350622 - RNA, 32 nt, Homo Sapiens
agcccccggggagaggcggagggggucccugg

SEQ ID NO: 350623 - RNA, 32 nt, Homo Sapiens
aaauuuaucuucuguuuuggucucuggugaua

SEQ ID NO: 350624 - RNA, 32 nt, Homo Sapiens
uauggaggucuuuuuuuuuuuauuuaacaugu

SEQ ID NO: 350625 - RNA, 32 nt, Homo Sapiens
aaccccaccccucguccucucggccuucugua

SEQ ID NO: 350626 - RNA, 32 nt, Homo Sapiens
cauguaccaaaauaaaccucuauucuauuggc

SEQ ID NO: 350627 - RNA, 32 nt, Homo Sapiens
ccauugugguuuugugcuuccucugugccugu

SEQ ID NO: 350628 - RNA, 32 nt, Homo Sapiens
cccuggggccuauggcagcugcccuaaagccu

SEQ ID NO: 350629 - RNA, 32 nt, Homo Sapiens
aggacaccaaagagaaaagaaccaucauccau

SEQ ID NO: 350630 - RNA, 32 nt, Homo Sapiens
auagagacuuaauuuuagauuuagacaaaaug

SEQ ID NO: 350631 - RNA, 32 nt, Homo Sapiens
gcuuauaaaugucagagcauuuuuuaaaggua

SEQ ID NO: 350632 - RNA, 32 nt, Homo Sapiens
ccucuaccaagagcuucgccagugucacugaa

SEQ ID NO: 350633 - RNA, 32 nt, Homo Sapiens
uguaauuuucuuuaaauaauaguaggugaggg

SEQ ID NO: 350634 - RNA, 32 nt, Homo Sapiens
ccucuccccccgccgccccaccaguuaaacgg

SEQ ID NO: 350635 - RNA, 32 nt, Homo Sapiens
cuagcugaguggcauccaggacgggggagugg

SEQ ID NO: 350636 - RNA, 32 nt, Homo Sapiens
ugcugucucccugaagagugaacccucuuuag

SEQ ID NO: 350637 - RNA, 32 nt, Homo Sapiens
auacacagaaauuuuuaagugguuaccuccac

SEQ ID NO: 350638 - RNA, 32 nt, Homo Sapiens
uuaguaauauuuuugggauuauacuuccuuuc

SEQ ID NO: 350639 - RNA, 32 nt, Homo Sapiens
gggaugggauuuuggcugaaaaagaaagucuu

SEQ ID NO: 350640 - RNA, 32 nt, Homo Sapiens
aauaacaauaauaaauaaaauaaaguggaauc

SEQ ID NO: 350641 - RNA, 32 nt, Homo Sapiens
uuaugcuguguacaaauagaauuauuacuucu

SEQ ID NO: 350642 - RNA, 27 nt, Homo Sapiens
uaaccccaguaauucuguaauguugua

SEQ ID NO: 350643 - RNA, 32 nt, Homo Sapiens
gaggaucagaaagccagcuuguaugacgcuga

SEQ ID NO: 350644 - RNA, 32 nt, Homo Sapiens
aguugagaggacaaaacugaauaaagugaaug

SEQ ID NO: 350645 - RNA, 32 nt, Homo Sapiens
caagugacaugcugugcucaguauugugugga

SEQ ID NO: 350646 - RNA, 32 nt, Homo Sapiens
gaccuaguauuugauagcacaaccgggugagu

SEQ ID NO: 350647 - RNA, 32 nt, Homo Sapiens
gugcuugucgcagaacugucagagcaugagga

SEQ ID NO: 350648 - RNA, 32 nt, Homo Sapiens
gaauuucuuccacaguaaaaauacguuuuuug

SEQ ID NO: 350649 - RNA, 32 nt, Homo Sapiens
gggagggaguugucggcgccgcggccgcugcg

SEQ ID NO: 350650 - RNA, 32 nt, Homo Sapiens
ucuguuagccccuaacucuacugccuuccaca

SEQ ID NO: 350651 - RNA, 32 nt, Homo Sapiens
gguggcucaugacuguaaucccagcacuuugg

SEQ ID NO: 350652 - RNA, 32 nt, Homo Sapiens
guguuccuaacaauuagcguuaccaaaauuaa

SEQ ID NO: 350653 - RNA, 32 nt, Homo Sapiens
agcuuuuuuuauuauuuuuuuauuauaauuau

SEQ ID NO: 350654 - RNA, 32 nt, Homo Sapiens
ugucucuauuucugucucuccucugcuguguc

SEQ ID NO: 350655 - RNA, 32 nt, Homo Sapiens
cuggggguccagcacaggcuguaucugcagag

SEQ ID NO: 350656 - RNA, 32 nt, Homo Sapiens
ucccauggccagcagagccucccccagcugga

SEQ ID NO: 350657 - RNA, 32 nt, Homo Sapiens
gauaguaauaucuauuuguuuuguacauguau

SEQ ID NO: 350658 - RNA, 32 nt, Homo Sapiens
uacccucugaagaaauacucacugcaugaaca

SEQ ID NO: 350659 - RNA, 32 nt, Homo Sapiens
agcuggagaacaggcccuacccugcccuccac

SEQ ID NO: 350660 - RNA, 32 nt, Homo Sapiens
ucuuuaacacuuuuacugauugcaauauuuuc

SEQ ID NO: 350661 - RNA, 32 nt, Homo Sapiens
gagcgcccggcuucccacgccauggcccccau

SEQ ID NO: 350662 - RNA, 32 nt, Homo Sapiens
accuugccuccccuccucuccugcccagcucu

SEQ ID NO: 350663 - RNA, 32 nt, Homo Sapiens
cuagaauucagauaugucaguuuucugcaaaa

SEQ ID NO: 350664 - RNA, 32 nt, Homo Sapiens
ucauuaugaauuuaaauuguaagguaugaaug

SEQ ID NO: 350665 - RNA, 32 nt, Homo Sapiens
cccaaagaaggcaaaaagauaagauuuacuca

SEQ ID NO: 350666 - RNA, 31 nt, Homo Sapiens
uucucuuuaggugaucgucuuugaaguucag

SEQ ID NO: 350667 - RNA, 32 nt, Homo Sapiens
uacaggcgcccaccuccacacccagcuaauuu

SEQ ID NO: 350668 - RNA, 32 nt, Homo Sapiens
guggggucuuguacaagcugcuuugccuccag

SEQ ID NO: 350669 - RNA, 32 nt, Homo Sapiens
uguauaaaggggcaagagcagcuccuuuggac

SEQ ID NO: 350670 - RNA, 32 nt, Homo Sapiens
gccguccgccgcgcccgagcugccuucgcgug

SEQ ID NO: 350671 - RNA, 32 nt, Homo Sapiens
cauggugguuugcugcaccuauugaccuaucc

SEQ ID NO: 350672 - RNA, 32 nt, Homo Sapiens
uuuauuacaucauuauuuuguugucuucccuc

SEQ ID NO: 350673 - RNA, 32 nt, Homo Sapiens
guggccuaaacucuccuuuucuagguaaagcg

SEQ ID NO: 350674 - RNA, 32 nt, Homo Sapiens
agaaaucuuuacuuuccuuguuuuaucauuau

SEQ ID NO: 350675 - RNA, 32 nt, Homo Sapiens
agccccugccuggcugcccuuuccccccugcu

SEQ ID NO: 350676 - RNA, 32 nt, Homo Sapiens
ucaagcacauuuuaaaaagagcuguacuguaa

SEQ ID NO: 350677 - RNA, 32 nt, Homo Sapiens
caccuggcuaauuuuuuaaaaauauuuuuagu

SEQ ID NO: 350678 - RNA, 32 nt, Homo Sapiens
ucucaaaagaagacauacaugcagccaacaaa

SEQ ID NO: 350679 - RNA, 32 nt, Homo Sapiens
uuucuucucuuuucuuuuuuuuuuuuuugaga

SEQ ID NO: 350680 - RNA, 32 nt, Homo Sapiens
aguguuccuuaccuuucaugggcccagcgagg

SEQ ID NO: 350681 - RNA, 32 nt, Homo Sapiens
ugagaggcucugcuucugcugccgcucugcag

SEQ ID NO: 350682 - RNA, 32 nt, Homo Sapiens
aagcaucuuaaagaaggcaacccuaauugaga

SEQ ID NO: 350683 - RNA, 32 nt, Homo Sapiens
uuguaacuaugaaaugcuuaucugaaaguagu

SEQ ID NO: 350684 - RNA, 32 nt, Homo Sapiens
cgaggacugcccaggccacaugagauggugag

SEQ ID NO: 350685 - RNA, 32 nt, Homo Sapiens
ugcuucaugaaguccaucacacauaaggcaaa

SEQ ID NO: 350686 - RNA, 32 nt, Homo Sapiens
gagugggcagguuuggaggagcagccagggag

SEQ ID NO: 350687 - RNA, 32 nt, Homo Sapiens
uugguagagucuuuauuugcauagccucaaaa

SEQ ID NO: 350688 - RNA, 32 nt, Homo Sapiens
uuuucgugaaauagauuaaauauuuucucucu

SEQ ID NO: 350689 - RNA, 32 nt, Homo Sapiens
gcucaugcauauaacuaucugcugcugaugua

SEQ ID NO: 350690 - RNA, 32 nt, Homo Sapiens
caggauguuucuguacaguccuuguaucugcu

SEQ ID NO: 350691 - RNA, 29 nt, Homo Sapiens
acagggacuguccggguguggguucccag

SEQ ID NO: 350692 - RNA, 32 nt, Homo Sapiens
gccauauauaaauucuaagccauaugaggacg

SEQ ID NO: 350693 - RNA, 32 nt, Homo Sapiens
uuaggugcgauaacccagaaagggcccguugg

SEQ ID NO: 350694 - RNA, 32 nt, Homo Sapiens
ccaaaauacugaguaaucuguagcacuaggaa

SEQ ID NO: 350695 - RNA, 32 nt, Homo Sapiens
cuuggaauauuuuuaccaccuauccugaucuu

SEQ ID NO: 350696 - RNA, 32 nt, Homo Sapiens
gcucaggagaccuggaggagcagaggauaauu

SEQ ID NO: 350697 - RNA, 29 nt, Homo Sapiens
ggaggaagcggacagaggaagcugugugu

SEQ ID NO: 350698 - RNA, 32 nt, Homo Sapiens
cagggccagcgccgaggcgcccccucuccgcc

SEQ ID NO: 350699 - RNA, 32 nt, Homo Sapiens
gucuccucaccccucccugugcuggagccugu

SEQ ID NO: 350700 - RNA, 32 nt, Homo Sapiens
aaagccauauccuuuugcaguggggucgagag

SEQ ID NO: 350701 - RNA, 32 nt, Homo Sapiens
ugauauguugaugaaauucuggaucaggaggg

SEQ ID NO: 350702 - RNA, 32 nt, Homo Sapiens
cuggaauauugcagcuuuugguuaaacuuaau

SEQ ID NO: 350703 - RNA, 32 nt, Homo Sapiens
gaccugggacugggcuggggcccuggcggaug

SEQ ID NO: 350704 - RNA, 32 nt, Homo Sapiens
ccccugcugucaugaaggggccaggcauuggu

SEQ ID NO: 350705 - RNA, 32 nt, Homo Sapiens
uuuuauuuugauauacauaauuuuauggccug

SEQ ID NO: 350706 - RNA, 32 nt, Homo Sapiens
uucuuuuuucuuuuucucgucacacagguaac

SEQ ID NO: 350707 - RNA, 32 nt, Homo Sapiens
ggucugguagauuauccugaugaugaugaaga

SEQ ID NO: 350708 - RNA, 32 nt, Homo Sapiens
gguccaggaaauaagauagaaacuaaaaaaca

SEQ ID NO: 350709 - RNA, 32 nt, Homo Sapiens
ccugcugggaggagguggcccagagugggcga

SEQ ID NO: 350710 - RNA, 32 nt, Homo Sapiens
uguacaauaagaacuucuauaauuguauauau

SEQ ID NO: 350711 - RNA, 32 nt, Homo Sapiens
agugcuuaagccauauuuuaucacuaacccug

SEQ ID NO: 350712 - RNA, 32 nt, Homo Sapiens
gcauggcacggcauggauuaacacggcagagg

SEQ ID NO: 350713 - RNA, 32 nt, Homo Sapiens
ugcuggccauuugguggcgugaggagugggca

SEQ ID NO: 350714 - RNA, 32 nt, Homo Sapiens
ucuugcuauaugauuuagcaaguucuagaagg

SEQ ID NO: 350715 - RNA, 28 nt, Homo Sapiens
uucugaaaaugguacauuauaggguggg

SEQ ID NO: 350716 - RNA, 32 nt, Homo Sapiens
cuuucugugggagagggggcaggggugggagg

SEQ ID NO: 350717 - RNA, 32 nt, Homo Sapiens
acacaacggcaacugggagauuugugagugaa

SEQ ID NO: 350718 - RNA, 32 nt, Homo Sapiens
cccacaagcaggggccuguuuccugacucguu

SEQ ID NO: 350719 - RNA, 32 nt, Homo Sapiens
gggcgcugccuucccagaguccccucaagcug

SEQ ID NO: 350720 - RNA, 32 nt, Homo Sapiens
ucaaagaacuauuugcgcaaucugugggucug

SEQ ID NO: 350721 - RNA, 32 nt, Homo Sapiens
agugguaucuucugguaaaccaucagucugug

SEQ ID NO: 350722 - RNA, 32 nt, Homo Sapiens
gaaaaacuacuccauuugaggauuguaauucc

SEQ ID NO: 350723 - RNA, 32 nt, Homo Sapiens
gaggagucgcugcugcagccgccacucgguac

SEQ ID NO: 350724 - RNA, 32 nt, Homo Sapiens
ccccacugcucgccgcgcugcucuuugaccuc

SEQ ID NO: 350725 - RNA, 32 nt, Homo Sapiens
agcccaguucgguggcggcccggggcggauuu

SEQ ID NO: 350726 - RNA, 32 nt, Homo Sapiens
uaauaaaugggccaccucccucuucuucaagg

SEQ ID NO: 350727 - RNA, 32 nt, Homo Sapiens
ccucuuuucuucaauacaaaaugagauaauag

SEQ ID NO: 350728 - RNA, 32 nt, Homo Sapiens
cugucucucugacaccagugguaaaaaagcaa

SEQ ID NO: 350729 - RNA, 32 nt, Homo Sapiens
uuguugcuuuugggaguuauuuucauuaguga

SEQ ID NO: 350730 - RNA, 27 nt, Homo Sapiens
aagaccuguucacacugguauauuggu

SEQ ID NO: 350731 - RNA, 32 nt, Homo Sapiens
aggccagagcaucccccuccuccaccaugaaa

SEQ ID NO: 350732 - RNA, 32 nt, Homo Sapiens
uggggacuucagccuuccuuccagucugggcu

SEQ ID NO: 350733 - RNA, 32 nt, Homo Sapiens
cagcagcugauguugccuccucuccuguccug

SEQ ID NO: 350734 - RNA, 32 nt, Homo Sapiens
uuauuacaauacugagucauauauaaauuuuc

SEQ ID NO: 350735 - RNA, 32 nt, Homo Sapiens
ccuaccuugcgugccuggagucugccccaggg

SEQ ID NO: 350736 - RNA, 32 nt, Homo Sapiens
uuggcucggcgguggcucacgccuguaguccc

SEQ ID NO: 350737 - RNA, 30 nt, Homo Sapiens
uuaguauguggaggcggcggcgggagugcg

SEQ ID NO: 350738 - RNA, 32 nt, Homo Sapiens
aguaguccuuggagauuuuauggagaugguga

SEQ ID NO: 350739 - RNA, 32 nt, Homo Sapiens
cugcccaucaguuuuucuuguaaauuuuuaga

SEQ ID NO: 350740 - RNA, 32 nt, Homo Sapiens
cuagugaaagaaauguaugauauuuuaaccaa

SEQ ID NO: 350741 - RNA, 32 nt, Homo Sapiens
gaaaauggacauucuguuaaguuaaauguaua

SEQ ID NO: 350742 - RNA, 32 nt, Homo Sapiens
caccuguaaucucagcacuuugggaggcggag

SEQ ID NO: 350743 - RNA, 32 nt, Homo Sapiens
acuuuugauguuucaauaugcauugaacugga

SEQ ID NO: 350744 - RNA, 32 nt, Homo Sapiens
uuucacuguagacuguuuuaaauugccaagac

SEQ ID NO: 350745 - RNA, 32 nt, Homo Sapiens
aaguuccauuuuccgucgcgggcaucuuggaa

SEQ ID NO: 350746 - RNA, 32 nt, Homo Sapiens
cuauuauccaacagauaacagugguuacccau

SEQ ID NO: 350747 - RNA, 32 nt, Homo Sapiens
uuggauuggccugggaauaucaucauuuucua

SEQ ID NO: 350748 - RNA, 32 nt, Homo Sapiens
aaaagucaugcaacauguuucuggacacguuc

SEQ ID NO: 350749 - RNA, 32 nt, Homo Sapiens
aggaggagcuccgacuacauucuguccuugug

SEQ ID NO: 350750 - RNA, 32 nt, Homo Sapiens
cauauguuucaguucuaccaaucuuguuucca

SEQ ID NO: 350751 - RNA, 32 nt, Homo Sapiens
gucggcagucggcucccucguugaccgaauca

SEQ ID NO: 350752 - RNA, 32 nt, Homo Sapiens
ucugugucugugcuccuccuucccucucagac

SEQ ID NO: 350753 - RNA, 32 nt, Homo Sapiens
uggcuucaugcaauccuuccaaaugagccaca

SEQ ID NO: 350754 - RNA, 32 nt, Homo Sapiens
cacuuaaggugauuugauggugaggaaaauga

SEQ ID NO: 350755 - RNA, 32 nt, Homo Sapiens
uaagcaagaggggacuacgaacaucauuuaca

SEQ ID NO: 350756 - RNA, 32 nt, Homo Sapiens
uucugccccagcuguuccuccuccccugggga

SEQ ID NO: 350757 - RNA, 32 nt, Homo Sapiens
cuuacccaccucagcaccugagagggugaaau

SEQ ID NO: 350758 - RNA, 32 nt, Homo Sapiens
uuauuucugaagacuucauuauuggaauucua

SEQ ID NO: 350759 - RNA, 32 nt, Homo Sapiens
ugaugaagaaacugaggccacagagcuaaagu

SEQ ID NO: 350760 - RNA, 32 nt, Homo Sapiens
uguuuacaagauggcgaccaccaaagucaaac

SEQ ID NO: 350761 - RNA, 32 nt, Homo Sapiens
uuucgacccuucgccucggcccggcccaaucc

SEQ ID NO: 350762 - RNA, 32 nt, Homo Sapiens
ugaagaagugaaccuuucccuuuucccaucug

SEQ ID NO: 350763 - RNA, 32 nt, Homo Sapiens
aggauccugcuaaccccuccccggugaugccu

SEQ ID NO: 350764 - RNA, 32 nt, Homo Sapiens
ggauuaacaggaaggcugagggugugggcaag

SEQ ID NO: 350765 - RNA, 32 nt, Homo Sapiens
uggauacuaauaaaccucuuggagcacacucu

SEQ ID NO: 350766 - RNA, 32 nt, Homo Sapiens
uuuuuucagaagaucucaguccacgucccgag

SEQ ID NO: 350767 - RNA, 32 nt, Homo Sapiens
agucggagccgcagccugcugcaccguuuccg

SEQ ID NO: 350768 - RNA, 32 nt, Homo Sapiens
ugacuccaagcugcauggcaaguucugugguu

SEQ ID NO: 350769 - RNA, 32 nt, Homo Sapiens
ccaaauacugaauaaacaguugaaggaaagac

SEQ ID NO: 350770 - RNA, 32 nt, Homo Sapiens
ggcggggaagggaccugcugcagcugcagccg

SEQ ID NO: 350771 - RNA, 32 nt, Homo Sapiens
ggaguuucacuguuguuccccaggccggagug

SEQ ID NO: 350772 - RNA, 32 nt, Homo Sapiens
aaggcuuuuccacauccuuuacacuuguaugg

SEQ ID NO: 350773 - RNA, 32 nt, Homo Sapiens
aauugggcauggugguggacaccuguaauccc

SEQ ID NO: 350774 - RNA, 32 nt, Homo Sapiens
uaaggguaugauuaacucuaccugcacacugu

SEQ ID NO: 350775 - RNA, 32 nt, Homo Sapiens
cuuguuccuuguggccaugugaggauacgggg

SEQ ID NO: 350776 - RNA, 32 nt, Homo Sapiens
acccuggaauggggaaaaugcggacaugccac

SEQ ID NO: 350777 - RNA, 32 nt, Homo Sapiens
cuucauguuaucuauuuguauuaucauguuua

SEQ ID NO: 350778 - RNA, 32 nt, Homo Sapiens
cucaaucgcacuuuucaucuauaaaaagggug

SEQ ID NO: 350779 - RNA, 30 nt, Homo Sapiens
cucucacaugucccugccuaaucuugcagg

SEQ ID NO: 350780 - RNA, 32 nt, Homo Sapiens
acauacaaucuggguuaucuuugugcuauaua

SEQ ID NO: 350781 - RNA, 32 nt, Homo Sapiens
gaggauaugaaaaucugucucuggagaaacaa

SEQ ID NO: 350782 - RNA, 32 nt, Homo Sapiens
uguggauuucuguauucugaugaugagucucu

SEQ ID NO: 350783 - RNA, 32 nt, Homo Sapiens
acccuucccggcugcccucccuccccagcuua

SEQ ID NO: 350784 - RNA, 32 nt, Homo Sapiens
uggccaggcccaaggacccagccaucaaaacc

SEQ ID NO: 350785 - RNA, 32 nt, Homo Sapiens
acuucauccccucccagauguuggaccaacac

SEQ ID NO: 350786 - RNA, 32 nt, Homo Sapiens
gguuacggggucgggcaaagggcagaggucac

SEQ ID NO: 350787 - RNA, 32 nt, Homo Sapiens
agggcgacagcauucugugccgcuggccgcgc

SEQ ID NO: 350788 - RNA, 32 nt, Homo Sapiens
auggaauggaaaguacauugggcugaacuaau

SEQ ID NO: 350789 - RNA, 32 nt, Homo Sapiens
ugggcgcccagcuguccaugcugcuggaaggg

SEQ ID NO: 350790 - RNA, 32 nt, Homo Sapiens
cuguaagauacugucuaaaaaauguacauuug

SEQ ID NO: 350791 - RNA, 32 nt, Homo Sapiens
uacagacccagcuguccccacgccucugucuu

SEQ ID NO: 350792 - RNA, 32 nt, Homo Sapiens
gcaucuuggacgcccucuguccagucagaagc

SEQ ID NO: 350793 - RNA, 32 nt, Homo Sapiens
cggaauccuguccucagcuucuuaauauaacu

SEQ ID NO: 350794 - RNA, 32 nt, Homo Sapiens
uugccuuggcccggcguuugcuccacagccuu

SEQ ID NO: 350795 - RNA, 32 nt, Homo Sapiens
agaugguucacuaccacuggguagugccauuu

SEQ ID NO: 350796 - RNA, 32 nt, Homo Sapiens
auggugauauaaaaaucccuuuccucuguguu

SEQ ID NO: 350797 - RNA, 31 nt, Homo Sapiens
uauaacuauugaguuacaggggauuuuauua

SEQ ID NO: 350798 - RNA, 32 nt, Homo Sapiens
cggguccaaagcuuuuggcuccuccuuguucc

SEQ ID NO: 350799 - RNA, 32 nt, Homo Sapiens
caggaugggggcaaugggaggggaugcuacug

SEQ ID NO: 350800 - RNA, 32 nt, Homo Sapiens
cauuguuuccagucuguuccuguccacagcuu

SEQ ID NO: 350801 - RNA, 32 nt, Homo Sapiens
acugccaagcuaccccaccccuucccccaaac

SEQ ID NO: 350802 - RNA, 32 nt, Homo Sapiens
uaaggccccucuacucauccaacucccucuuc

SEQ ID NO: 350803 - RNA, 32 nt, Homo Sapiens
ccgcccagcccagagcgggcccgccccgcugc

SEQ ID NO: 350804 - RNA, 32 nt, Homo Sapiens
acggugaccucuggguaguccuggcaugccaa

SEQ ID NO: 350805 - RNA, 32 nt, Homo Sapiens
guuucugcuguaaaaacguaguuacuguaugg

SEQ ID NO: 350806 - RNA, 32 nt, Homo Sapiens
aggcacucugugaguuagucuaccacccuauu

SEQ ID NO: 350807 - RNA, 32 nt, Homo Sapiens
gccucagucccguggacccagccuuugucagu

SEQ ID NO: 350808 - RNA, 32 nt, Homo Sapiens
ucagccaccaaaauauauuucacucaaggcuu

SEQ ID NO: 350809 - RNA, 32 nt, Homo Sapiens
aaccagucaucaguacauuucuguaaagcaaa

SEQ ID NO: 350810 - RNA, 32 nt, Homo Sapiens
cagcugcaugagugauggccacagcaaugcau

SEQ ID NO: 350811 - RNA, 32 nt, Homo Sapiens
uuucuuuucuuuucuuuuucucucucgccaug

SEQ ID NO: 350812 - RNA, 32 nt, Homo Sapiens
guaucauccauuucuauguucucuagcaaaag

SEQ ID NO: 350813 - RNA, 32 nt, Homo Sapiens
gccgaggcggguggaucaugagaucaggagau

SEQ ID NO: 350814 - RNA, 32 nt, Homo Sapiens
aauaggcaaccucuagcgauuaccauaauuuu

SEQ ID NO: 350815 - RNA, 32 nt, Homo Sapiens
ucucacccacccaguucagcagcgaggacacc

SEQ ID NO: 350816 - RNA, 32 nt, Homo Sapiens
caccuguaaucccagcacuuugggagacugag

SEQ ID NO: 350817 - RNA, 32 nt, Homo Sapiens
ugggggcaggguggaguggagggggagcuacu

SEQ ID NO: 350818 - RNA, 32 nt, Homo Sapiens
cacucuccauuuccagagacuaaaggaugucc

SEQ ID NO: 350819 - RNA, 32 nt, Homo Sapiens
ugaagcacauggacaaggaaggguugugcauc

SEQ ID NO: 350820 - RNA, 32 nt, Homo Sapiens
gaaauuagugaaaucuuaguaccuuaacuuca

SEQ ID NO: 350821 - RNA, 32 nt, Homo Sapiens
uuuugucugaagaucaguggccauauuacugu

SEQ ID NO: 350822 - RNA, 32 nt, Homo Sapiens
gccaggcaugugccgucuggacuuccaccucc

SEQ ID NO: 350823 - RNA, 32 nt, Homo Sapiens
gguagucuguccuauuuucagacggcucugac

SEQ ID NO: 350824 - RNA, 32 nt, Homo Sapiens
ccgacccccucccccuagcccagccccaguca

SEQ ID NO: 350825 - RNA, 32 nt, Homo Sapiens
cucagcggggccgggcgggagcuggagccugc

SEQ ID NO: 350826 - RNA, 32 nt, Homo Sapiens
agcuccgagcagcccgggggccccgcuguugg

SEQ ID NO: 350827 - RNA, 32 nt, Homo Sapiens
uccccuugccagcagaggaaccuguaguuuuu

SEQ ID NO: 350828 - RNA, 32 nt, Homo Sapiens
auuauguguguauguaugggacagggucucac

SEQ ID NO: 350829 - RNA, 32 nt, Homo Sapiens
auugaagacugcaauuaaugcagcaagaaugc

SEQ ID NO: 350830 - RNA, 32 nt, Homo Sapiens
uggccagggucucagaaguguguguggccugg

SEQ ID NO: 350831 - RNA, 32 nt, Homo Sapiens
ccaggagucagacgucacacccgggggcuccc

SEQ ID NO: 350832 - RNA, 30 nt, Homo Sapiens
uacaugcaaaauggcaugcaaaugaggccu

SEQ ID NO: 350833 - RNA, 31 nt, Homo Sapiens
cagugccagcgcagcguucugggcuccucag

SEQ ID NO: 350834 - RNA, 32 nt, Homo Sapiens
agaaacauuuauuuucuaucucucuuaaacac

SEQ ID NO: 350835 - RNA, 32 nt, Homo Sapiens
gacacuauaaauagguucaagaaacuaauaaa

SEQ ID NO: 350836 - RNA, 32 nt, Homo Sapiens
caggagaaguauuuuacccauucuuaaagcuc

SEQ ID NO: 350837 - RNA, 32 nt, Homo Sapiens
gccucuccgucccaggcccauuuuugacagau

SEQ ID NO: 350838 - RNA, 32 nt, Homo Sapiens
gcagcagcuccggcggcgauuccuccuccugc

SEQ ID NO: 350839 - RNA, 32 nt, Homo Sapiens
guuaucuuuccacuauccuaacugccucaugc

SEQ ID NO: 350840 - RNA, 32 nt, Homo Sapiens
uuagagccuauagguacgucuuucuuguagca

SEQ ID NO: 350841 - RNA, 32 nt, Homo Sapiens
guuaucaauauuuuaagaucauucuguauaua

SEQ ID NO: 350842 - RNA, 32 nt, Homo Sapiens
ggccaagacaccagcccuguccuagcccuuca

SEQ ID NO: 350843 - RNA, 32 nt, Homo Sapiens
uuuuuauuucuguggcuuuuucuauucuggau

SEQ ID NO: 350844 - RNA, 32 nt, Homo Sapiens
gcucucuccccgccccucccccuaaccacaag

SEQ ID NO: 350845 - RNA, 32 nt, Homo Sapiens
guuucagagacgcuucgggccuuuuuauuuuu

SEQ ID NO: 350846 - RNA, 32 nt, Homo Sapiens
cggaauccugcaaagauggagaaggaggagga

SEQ ID NO: 350847 - RNA, 32 nt, Homo Sapiens
gagaggcagcauuauuuagacagccggcuacu

SEQ ID NO: 350848 - RNA, 30 nt, Homo Sapiens
cgggggcgcgcgcucugcgagcuggauguc

SEQ ID NO: 350849 - RNA, 32 nt, Homo Sapiens
uggagaccaggcaucuuaauuuuacuucagcc

SEQ ID NO: 350850 - RNA, 31 nt, Homo Sapiens
aagcagagagcagguagaagcuguacgcucc

SEQ ID NO: 350851 - RNA, 32 nt, Homo Sapiens
caggcccgcuucacgaguuagaguugagcucc

SEQ ID NO: 350852 - RNA, 32 nt, Homo Sapiens
uucuguaauuuucuguuaagcuccauuugcca

SEQ ID NO: 350853 - RNA, 32 nt, Homo Sapiens
agacugugggcuguuuucagucagggagcaug

SEQ ID NO: 350854 - RNA, 32 nt, Homo Sapiens
aagaccaccuucccuuccucagcaggccaaac

SEQ ID NO: 350855 - RNA, 32 nt, Homo Sapiens
gccccggaugcugagagcuugguuucauuuga

SEQ ID NO: 350856 - RNA, 27 nt, Homo Sapiens
auauagucgcucuucagccaugccuuu

SEQ ID NO: 350857 - RNA, 32 nt, Homo Sapiens
ugaagaagaugaugaauaguugguucuagcgc

SEQ ID NO: 350858 - RNA, 32 nt, Homo Sapiens
ugagcaugccagcuaugugguagggccagccc

SEQ ID NO: 350859 - RNA, 32 nt, Homo Sapiens
ucaccugaguaguuaagaauuaucuugcuucu

SEQ ID NO: 350860 - RNA, 32 nt, Homo Sapiens
guuaaguuuggagaaaauaccacacaaaacaa

SEQ ID NO: 350861 - RNA, 32 nt, Homo Sapiens
cgcccaaaguauuuuuucgagucaaauuaaaa

SEQ ID NO: 350862 - RNA, 32 nt, Homo Sapiens
ccucuuuucacugcaccugaggcucaguugug

SEQ ID NO: 350863 - RNA, 32 nt, Homo Sapiens
ggcugugucagggcuacugccauugauuuucu

SEQ ID NO: 350864 - RNA, 32 nt, Homo Sapiens
ccucccugcagacucccuccccuccagcccac

SEQ ID NO: 350865 - RNA, 32 nt, Homo Sapiens
agcacagaaaaaggaagugcuggugcauauuu

SEQ ID NO: 350866 - RNA, 32 nt, Homo Sapiens
auccauaccaaaacaacgacaacaacgcccuc

SEQ ID NO: 350867 - RNA, 32 nt, Homo Sapiens
uccccuuggugcucuguccccauccaccuccu

SEQ ID NO: 350868 - RNA, 32 nt, Homo Sapiens
augaacaaaaauuuauuuggcucacaguucug

SEQ ID NO: 350869 - RNA, 32 nt, Homo Sapiens
ucuuaacgaaguuugaauguuaaguaaauugu

SEQ ID NO: 350870 - RNA, 32 nt, Homo Sapiens
auguagucucacauguggggucggccuacaga

SEQ ID NO: 350871 - RNA, 32 nt, Homo Sapiens
ccccgcugccagcccauuuuccggacgccacc

SEQ ID NO: 350872 - RNA, 32 nt, Homo Sapiens
auaacagacccaagguuuauguguguaugaag

SEQ ID NO: 350873 - RNA, 32 nt, Homo Sapiens
cggugcccgcgaacuuccccggcagcggacug

SEQ ID NO: 350874 - RNA, 32 nt, Homo Sapiens
guuagacggccacaaagaaguagcaccucaua

SEQ ID NO: 350875 - RNA, 32 nt, Homo Sapiens
ccagggcccaggucuacuuuccggugggccaa

SEQ ID NO: 350876 - RNA, 32 nt, Homo Sapiens
gagcaggcugaggccaccauggagcagugugc

SEQ ID NO: 350877 - RNA, 32 nt, Homo Sapiens
ugguugcgucauuuggagaagugagugcuccu

SEQ ID NO: 350878 - RNA, 32 nt, Homo Sapiens
ugcccucccacuccugccccagcuguucucca

SEQ ID NO: 350879 - RNA, 32 nt, Homo Sapiens
gcagccaccagagcagagagccuugaguacac

SEQ ID NO: 350880 - RNA, 32 nt, Homo Sapiens
gcaucuuguuuacucuggauuccuccucuacc

SEQ ID NO: 350881 - RNA, 32 nt, Homo Sapiens
aagugaggacaaagugugggaaggccgugagg

SEQ ID NO: 350882 - RNA, 32 nt, Homo Sapiens
ugugugucugugcucguggggaccccgugugu

SEQ ID NO: 350883 - RNA, 32 nt, Homo Sapiens
agguuguugggucccuucucaguggccaaaga

SEQ ID NO: 350884 - RNA, 32 nt, Homo Sapiens
cuggaaagaggcucuggacagcagaagccucc

SEQ ID NO: 350885 - RNA, 32 nt, Homo Sapiens
cuccagcccccugcccucuccucggcgcuccu

SEQ ID NO: 350886 - RNA, 32 nt, Homo Sapiens
gcuuuuggauuucaaagcucacaaauuccugc

SEQ ID NO: 350887 - RNA, 32 nt, Homo Sapiens
aagagaacuuaauuuuuuguauuuaaaugcag

SEQ ID NO: 350888 - RNA, 32 nt, Homo Sapiens
ccucuacaccuggccugcugggggcccaguuu

SEQ ID NO: 350889 - RNA, 32 nt, Homo Sapiens
cguuuuugcugugauaaaugaauacgguacuc

SEQ ID NO: 350890 - RNA, 32 nt, Homo Sapiens
agaccagcacccagcaagauuauagaggaaga

SEQ ID NO: 350891 - RNA, 32 nt, Homo Sapiens
aguucauccccccacacccccgccgccccgug

SEQ ID NO: 350892 - RNA, 32 nt, Homo Sapiens
uacauuuccacucacaugcaccucugagccuc

SEQ ID NO: 350893 - RNA, 32 nt, Homo Sapiens
acgaaggggagcucguccauccauugaagcac

SEQ ID NO: 350894 - RNA, 32 nt, Homo Sapiens
uuuuguuuaaacaauacuaccuugccaaaaau

SEQ ID NO: 350895 - RNA, 32 nt, Homo Sapiens
uaacguugagaaauguaacugugaaaucagcu

SEQ ID NO: 350896 - RNA, 32 nt, Homo Sapiens
ucgcggucgccaguccagucgggagagugggg

SEQ ID NO: 350897 - RNA, 32 nt, Homo Sapiens
uuccccaaggccagcgggaugugugccccucc

SEQ ID NO: 350898 - RNA, 32 nt, Homo Sapiens
agcguuaacccuggagcuuucugcacaccccc

SEQ ID NO: 350899 - RNA, 32 nt, Homo Sapiens
aauguuuuugaaaagcuaaugaagcuauugag

SEQ ID NO: 350900 - RNA, 32 nt, Homo Sapiens
cgcucuggcucuguaccuggacagggcugcgg

SEQ ID NO: 350901 - RNA, 32 nt, Homo Sapiens
cagucugcuaaaaggggaggacguugaggacg

SEQ ID NO: 350902 - RNA, 32 nt, Homo Sapiens
gacacagugggggcuccucacuugcugcagug

SEQ ID NO: 350903 - RNA, 32 nt, Homo Sapiens
gcagguguccaccagcagcucagccccugcag

SEQ ID NO: 350904 - RNA, 32 nt, Homo Sapiens
ucgucccuuccagcaccccauccagcagugac

SEQ ID NO: 350905 - RNA, 32 nt, Homo Sapiens
auauuaaucuuauuuaacuaaguuuuauccaa

SEQ ID NO: 350906 - RNA, 32 nt, Homo Sapiens
ugcccggccggucucggccccggcgccaugag

SEQ ID NO: 350907 - RNA, 32 nt, Homo Sapiens
aucccacugaaaugccagugucuucaucucuu

SEQ ID NO: 350908 - RNA, 32 nt, Homo Sapiens
ugcuaggagccucacccgcugggaggcacagg

SEQ ID NO: 350909 - RNA, 32 nt, Homo Sapiens
agccgagauugugccacugcacuccagccugg

SEQ ID NO: 350910 - RNA, 32 nt, Homo Sapiens
aggucgaguuccuuguuuuuuauccgaguggc

SEQ ID NO: 350911 - RNA, 32 nt, Homo Sapiens
gaacugcgguggcgggcgggcgcacggucucc

SEQ ID NO: 350912 - RNA, 32 nt, Homo Sapiens
aaaaacaggaagaugcgggacaggugaggagc

SEQ ID NO: 350913 - RNA, 32 nt, Homo Sapiens
ucuccugaauucacaaucauggacuuguagac

SEQ ID NO: 350914 - RNA, 32 nt, Homo Sapiens
uugauaacagagcuaugacuugucugagccuc

SEQ ID NO: 350915 - RNA, 32 nt, Homo Sapiens
ugcauuuucuucauugguuguauuuaauaaau

SEQ ID NO: 350916 - RNA, 32 nt, Homo Sapiens
aguaucuagaaauuacguauauuuugugcuac

SEQ ID NO: 350917 - RNA, 32 nt, Homo Sapiens
accagcugcuggaagcgcugcuuuugagucuc

SEQ ID NO: 350918 - RNA, 32 nt, Homo Sapiens
accccuaggcccucauccuaccuaggacugag

SEQ ID NO: 350919 - RNA, 32 nt, Homo Sapiens
cuccuucucccucuccugggucgaucccaguc

SEQ ID NO: 350920 - RNA, 32 nt, Homo Sapiens
aucaaaucugaauucuaagcgccauggacgaa

SEQ ID NO: 350921 - RNA, 32 nt, Homo Sapiens
ccacuagcaacgaccucugugaaguuggagag

SEQ ID NO: 350922 - RNA, 32 nt, Homo Sapiens
ccuggcucgguuccccgcaccccggggcucac

SEQ ID NO: 350923 - RNA, 32 nt, Homo Sapiens
uuuuguaaaagacuauaaguuuagacaucuuu

SEQ ID NO: 350924 - RNA, 32 nt, Homo Sapiens
cuuccuucaaccccaaggccagcucccaucuc

SEQ ID NO: 350925 - RNA, 32 nt, Homo Sapiens
cccucucaccucagccucccaaguagcuggga

SEQ ID NO: 350926 - RNA, 32 nt, Homo Sapiens
cagacaaggaccagcgucuccccuucaaccgc

SEQ ID NO: 350927 - RNA, 32 nt, Homo Sapiens
aaacacacagaaaggaaugaggcagucuguac

SEQ ID NO: 350928 - RNA, 32 nt, Homo Sapiens
uccuuaucagcaugcccacaguuuauuucuuu

SEQ ID NO: 350929 - RNA, 32 nt, Homo Sapiens
guggugaugcuggaaugucaagcgccgucgug

SEQ ID NO: 350930 - RNA, 32 nt, Homo Sapiens
acaccuugagcuuuuuacuuuccugggagugu

SEQ ID NO: 350931 - RNA, 32 nt, Homo Sapiens
ccuccgggaaauggaugaaaagaggcugcugg

SEQ ID NO: 350932 - RNA, 32 nt, Homo Sapiens
aaguggaggaggaggcgcggcggcggcggcgg

SEQ ID NO: 350933 - RNA, 32 nt, Homo Sapiens
cgagagaucuguuuuccaauuaugaagccggu

SEQ ID NO: 350934 - RNA, 32 nt, Homo Sapiens
uguccuuaaguacuuccugaagaugaagcaaa

SEQ ID NO: 350935 - RNA, 32 nt, Homo Sapiens
cgggcuccgaguggccgggaucagcgccccga

SEQ ID NO: 350936 - RNA, 32 nt, Homo Sapiens
auuuccaccuaugauucguguuuaccugguau

SEQ ID NO: 350937 - RNA, 32 nt, Homo Sapiens
auaaaaaugaauugggaacauuaucacaauuc

SEQ ID NO: 350938 - RNA, 32 nt, Homo Sapiens
acagcuuccgcguguggccaucugucuuucag

SEQ ID NO: 350939 - RNA, 32 nt, Homo Sapiens
cuucaccuuucuugcgcccgcaggggcaugac

SEQ ID NO: 350940 - RNA, 32 nt, Homo Sapiens
auuuuaguuauuuggucuaaucaagcauaacu

SEQ ID NO: 350941 - RNA, 32 nt, Homo Sapiens
aucagaacagcuuuacuuuagauaggguucca

SEQ ID NO: 350942 - RNA, 32 nt, Homo Sapiens
ggaauuguuagaauauuugacuuuuuauaugc

SEQ ID NO: 350943 - RNA, 32 nt, Homo Sapiens
gauuccacaccugucacaggcgcugccccacu

SEQ ID NO: 350944 - RNA, 32 nt, Homo Sapiens
ggaacuucuggaggaaagcacucauugaucuu

SEQ ID NO: 350945 - RNA, 32 nt, Homo Sapiens
aggagccgugggaccgggcgccagcacccucu

SEQ ID NO: 350946 - RNA, 32 nt, Homo Sapiens
cuccuccuccugggccggaccccgcccaggca

SEQ ID NO: 350947 - RNA, 32 nt, Homo Sapiens
ggggacgcgggcccucuaguuucgcccacggu

SEQ ID NO: 350948 - RNA, 32 nt, Homo Sapiens
aucucuccagggcgagagccugcccuggcauc

SEQ ID NO: 350949 - RNA, 32 nt, Homo Sapiens
ccgagacguuccgaagucaacgcaagcaaagg

SEQ ID NO: 350950 - RNA, 32 nt, Homo Sapiens
ucuuaagagugccuuauuaaaguauagaugua

SEQ ID NO: 350951 - RNA, 32 nt, Homo Sapiens
ccaccccacagugcuugauauuucagagucag

SEQ ID NO: 350952 - RNA, 32 nt, Homo Sapiens
uuucuguauaguauaauucugauaaaguuauu

SEQ ID NO: 350953 - RNA, 32 nt, Homo Sapiens
aucuggaguguuuuaaagucaauuauuuuaag

SEQ ID NO: 350954 - RNA, 32 nt, Homo Sapiens
cgccuguaaucucagcacuuugggaggccgag

SEQ ID NO: 350955 - RNA, 32 nt, Homo Sapiens
cgccuguaaucccagcacuuugggaggucgag

SEQ ID NO: 350956 - RNA, 32 nt, Homo Sapiens
cgcuuguaaucccagcacuuugggaggccgag

SEQ ID NO: 350957 - RNA, 32 nt, Homo Sapiens
acagcuggagucagcccucgugucccgggcuc

SEQ ID NO: 350958 - RNA, 32 nt, Homo Sapiens
gauccuguggaaccucuucuaguucaggggug

SEQ ID NO: 350959 - RNA, 32 nt, Homo Sapiens
uccucucccugaauuuucuccucuccucucag

SEQ ID NO: 350960 - RNA, 32 nt, Homo Sapiens
ccucucggccccaucgccccaccgcagcuacu

SEQ ID NO: 350961 - RNA, 32 nt, Homo Sapiens
uuuuguauuuuuaguagagauaggguuucacc

SEQ ID NO: 350962 - RNA, 32 nt, Homo Sapiens
uuuggaauagcauuuuaaaaguugcaacaugg

SEQ ID NO: 350963 - RNA, 32 nt, Homo Sapiens
uuggacugacauuugagggaggaggaggcugg

SEQ ID NO: 350964 - RNA, 32 nt, Homo Sapiens
gcugugcugcaggaacccaucuccagaugcca

SEQ ID NO: 350965 - RNA, 32 nt, Homo Sapiens
agaaaauauaaugaucuguguuuaucauuagc

SEQ ID NO: 350966 - RNA, 32 nt, Homo Sapiens
ccccaucucccauagacuguaagcuccaugug

SEQ ID NO: 350967 - RNA, 32 nt, Homo Sapiens
accuugaggcagccuaucccaaugcauccccg

SEQ ID NO: 350968 - RNA, 32 nt, Homo Sapiens
caagcaguucuccugcuucagucucacaaaua

SEQ ID NO: 350969 - RNA, 32 nt, Homo Sapiens
ccuuccucauuucacagauaaggaaucuuugg

SEQ ID NO: 350970 - RNA, 32 nt, Homo Sapiens
augggaugaagauagauagugagcagguucuu

SEQ ID NO: 350971 - RNA, 32 nt, Homo Sapiens
guaucccugauccaggaaacugcagugagacc

SEQ ID NO: 350972 - RNA, 32 nt, Homo Sapiens
ucagagcucucacccucugcuugaacuuuuuc

SEQ ID NO: 350973 - RNA, 32 nt, Homo Sapiens
aggcagguagcaugguuaaacagugcuccauu

SEQ ID NO: 350974 - RNA, 32 nt, Homo Sapiens
auuaggauaauuaaaaauaauguaaugugccu

SEQ ID NO: 350975 - RNA, 32 nt, Homo Sapiens
cagacacuuccaccccucucuggccacgucac

SEQ ID NO: 350976 - RNA, 32 nt, Homo Sapiens
ccuggccccgccgcgcccggcgcgcccgccgc

SEQ ID NO: 350977 - RNA, 32 nt, Homo Sapiens
gagcgcaaaaaggaagacacagacggucaaaa

SEQ ID NO: 350978 - RNA, 32 nt, Homo Sapiens
caaagaaaccauacaagauaagaucaauaaau

SEQ ID NO: 350979 - RNA, 32 nt, Homo Sapiens
acaagggccgcacggugcugcagaagguggug

SEQ ID NO: 350980 - RNA, 32 nt, Homo Sapiens
gauuucuaacauuuaguagaaacuacuucaua

SEQ ID NO: 350981 - RNA, 32 nt, Homo Sapiens
gaugaucaauguuuuucuuuuuuagucugcua

SEQ ID NO: 350982 - RNA, 32 nt, Homo Sapiens
guucugguuagcucagccccagcccagcccag

SEQ ID NO: 350983 - RNA, 32 nt, Homo Sapiens
ccgaaccgccggcgcccggccauggcggucuc

SEQ ID NO: 350984 - RNA, 32 nt, Homo Sapiens
gugucugccguggcaccacucacccugcaugg

SEQ ID NO: 350985 - RNA, 32 nt, Homo Sapiens
gcugaagcuccagcccuuccuggugcccugau

SEQ ID NO: 350986 - RNA, 32 nt, Homo Sapiens
gagauaaaggccagcucagccgugcugugccu

SEQ ID NO: 350987 - RNA, 32 nt, Homo Sapiens
acugcaaucaccugguaaccaaucaugaaucu

SEQ ID NO: 350988 - RNA, 32 nt, Homo Sapiens
aggccugauuggccauuccuucugggacagac

SEQ ID NO: 350989 - RNA, 32 nt, Homo Sapiens
gcagauauuggaaaaauauuuugugaaaagcu

SEQ ID NO: 350990 - RNA, 32 nt, Homo Sapiens
uccucaaugggggccccagcaguuacagggcc

SEQ ID NO: 350991 - RNA, 32 nt, Homo Sapiens
aggcagcaugcgccugggcuggaagagccacg

SEQ ID NO: 350992 - RNA, 32 nt, Homo Sapiens
uugcaaugaaaaacagaagcaagaaaagcaaa

SEQ ID NO: 350993 - RNA, 32 nt, Homo Sapiens
agugaaaauaauuuguuguacuuuuuauucaa

SEQ ID NO: 350994 - RNA, 32 nt, Homo Sapiens
ugacucaaaugcagaggaagccaggccugcug

SEQ ID NO: 350995 - RNA, 32 nt, Homo Sapiens
gugucaccuuggcuggcuggcuggccaggguu

SEQ ID NO: 350996 - RNA, 32 nt, Homo Sapiens
gggcccggggccgagacgauggcugaccacaa

SEQ ID NO: 350997 - RNA, 32 nt, Homo Sapiens
uucuuccaguugucacuauccuugacucauug

SEQ ID NO: 350998 - RNA, 32 nt, Homo Sapiens
aauuaauuaauaccaguagaaacuauucaaga

SEQ ID NO: 350999 - RNA, 32 nt, Homo Sapiens
ccacugcacgaccaucuggcucucccaaaagc

SEQ ID NO: 351000 - RNA, 25 nt, Homo Sapiens
auggcagcggcuaccaucgugcacg

SEQ ID NO: 351001 - RNA, 32 nt, Homo Sapiens
gaggccccaugcacggggagccaggugggcug

SEQ ID NO: 351002 - RNA, 32 nt, Homo Sapiens
aaauagcccucauaaaaccuaagcacuuggaa

SEQ ID NO: 351003 - RNA, 32 nt, Homo Sapiens
ugucugccagcauaugcagagccccaaggcca

SEQ ID NO: 351004 - RNA, 27 nt, Homo Sapiens
ugaugcuccucggaggcuggcuccugu

SEQ ID NO: 351005 - RNA, 32 nt, Homo Sapiens
uuaacauuuuuuucuuuuuuaauguuaugaua

SEQ ID NO: 351006 - RNA, 32 nt, Homo Sapiens
cugagcagggcacagucugcgaggccguccug

SEQ ID NO: 351007 - RNA, 32 nt, Homo Sapiens
cugccucucucagggaccucccugccccaacg

SEQ ID NO: 351008 - RNA, 32 nt, Homo Sapiens
uaguaccuggcaaagaaaguaaaauuguuuuu

SEQ ID NO: 351009 - RNA, 32 nt, Homo Sapiens
acgaaggagcagccagccucuucuccacaggc

SEQ ID NO: 351010 - RNA, 32 nt, Homo Sapiens
aggaacugcgguguugggagagucuuuguguu

SEQ ID NO: 351011 - RNA, 32 nt, Homo Sapiens
aauccuucugucagcagucacaucucauugga

SEQ ID NO: 351012 - RNA, 32 nt, Homo Sapiens
ucgguuugaugaugaauuaguaaugaaaacuu

SEQ ID NO: 351013 - RNA, 32 nt, Homo Sapiens
cagagucucccucugucaccaggcuggagugc

SEQ ID NO: 351014 - RNA, 32 nt, Homo Sapiens
ugccuguaauccuggcacuuugggaggcugcg

SEQ ID NO: 351015 - RNA, 32 nt, Homo Sapiens
aaacccaagaggaagugccaucaugaggaauc

SEQ ID NO: 351016 - RNA, 32 nt, Homo Sapiens
ccacacucggcuuuuugcccaguggcagaaga

SEQ ID NO: 351017 - RNA, 32 nt, Homo Sapiens
ggauaccagcucagccacagcagaauagggca

SEQ ID NO: 351018 - RNA, 32 nt, Homo Sapiens
ggggagggguagcgggggaggggggcuucaga

SEQ ID NO: 351019 - RNA, 32 nt, Homo Sapiens
aagaaaaaaaauuuggaaaaaaaaaucaggcu

SEQ ID NO: 351020 - RNA, 32 nt, Homo Sapiens
gcaauuaauuaacuuuaugucuucccaugacu

SEQ ID NO: 351021 - RNA, 32 nt, Homo Sapiens
caugggcagggccggcuccccaccccaccuuu

SEQ ID NO: 351022 - RNA, 28 nt, Homo Sapiens
cccuggcggcggccgcggguggggaaau

SEQ ID NO: 351023 - RNA, 32 nt, Homo Sapiens
acugcucaauaaacguuuauuaaacuugaucc

SEQ ID NO: 351024 - RNA, 32 nt, Homo Sapiens
ugaugaccuuggaucaugcuggguaugauugg

SEQ ID NO: 351025 - RNA, 32 nt, Homo Sapiens
cgugaggaaugggcauugucaguauccguccu

SEQ ID NO: 351026 - RNA, 32 nt, Homo Sapiens
ggccuucccuccccacaguccucacagccucu

SEQ ID NO: 351027 - RNA, 32 nt, Homo Sapiens
guggcugccugccuccgggagggaaggagagg

SEQ ID NO: 351028 - RNA, 32 nt, Homo Sapiens
ugugaguuucuuuguaauaaaauguaucaaua

SEQ ID NO: 351029 - RNA, 32 nt, Homo Sapiens
uuaaggagaggagagcaucugcucugagacgg

SEQ ID NO: 351030 - RNA, 32 nt, Homo Sapiens
uuucuuucuccagcccccauuccguugggcua

SEQ ID NO: 351031 - RNA, 32 nt, Homo Sapiens
uuguaugauauccacaaauaaauauuuucaug

SEQ ID NO: 351032 - RNA, 32 nt, Homo Sapiens
cgccauagccucuauaaggaacguauguauua

SEQ ID NO: 351033 - RNA, 32 nt, Homo Sapiens
cuuuauuaagcuaauaaugaauguuaaagagu

SEQ ID NO: 351034 - RNA, 32 nt, Homo Sapiens
accgccacuauuaccgcggggaccacaucaag

SEQ ID NO: 351035 - RNA, 32 nt, Homo Sapiens
uccccagauuguguggcaagcccugcagaugg

SEQ ID NO: 351036 - RNA, 32 nt, Homo Sapiens
guccuuuguuuuauuagaaccauggaagaagg

SEQ ID NO: 351037 - RNA, 32 nt, Homo Sapiens
gccagcaguggccuuugcaauuguggaucuua

SEQ ID NO: 351038 - RNA, 32 nt, Homo Sapiens
cgaugccuuuugguaacauccgucauugcaga

SEQ ID NO: 351039 - RNA, 32 nt, Homo Sapiens
uuaagaaugguugccaaaaacaacagccaaaa

SEQ ID NO: 351040 - RNA, 31 nt, Homo Sapiens
ggcacgagggcggcggcggcgguagaggcgg

SEQ ID NO: 351041 - RNA, 32 nt, Homo Sapiens
aaguuauaaacuugaagugauuguaguuaaca

SEQ ID NO: 351042 - RNA, 32 nt, Homo Sapiens
caaaagaaagagaaaugaaauauuuuugaaug

SEQ ID NO: 351043 - RNA, 32 nt, Homo Sapiens
gaugagggggaggcauggggcugggccagcuc

SEQ ID NO: 351044 - RNA, 32 nt, Homo Sapiens
gaggugcagcgaaggacccaggggcagagccc

SEQ ID NO: 351045 - RNA, 32 nt, Homo Sapiens
gugcacuacuguuacgugaacacacaaacacc

SEQ ID NO: 351046 - RNA, 32 nt, Homo Sapiens
ccugcacaacucucaugguuuuaauuguaccc

SEQ ID NO: 351047 - RNA, 32 nt, Homo Sapiens
ucaaguguuuauauuauauauuagcuuaauau

SEQ ID NO: 351048 - RNA, 32 nt, Homo Sapiens
gugcccgaggggcucauaugcugcugcagaau

SEQ ID NO: 351049 - RNA, 32 nt, Homo Sapiens
uggaacgaucucagccaaauauuuuaggugua

SEQ ID NO: 351050 - RNA, 32 nt, Homo Sapiens
aggaccuucugcaguggaagugccacauccag

SEQ ID NO: 351051 - RNA, 32 nt, Homo Sapiens
agaagacucugcaucagugaaguccuuagauc

SEQ ID NO: 351052 - RNA, 32 nt, Homo Sapiens
uuuggagacccuuuguuauccaaauaaaauug

SEQ ID NO: 351053 - RNA, 32 nt, Homo Sapiens
cucugagcacaccuaguugguuucauguaugu

SEQ ID NO: 351054 - RNA, 32 nt, Homo Sapiens
uauucugcacccccggccccgcccaugcugag

SEQ ID NO: 351055 - RNA, 32 nt, Homo Sapiens
guaaguaauauagaaagcgagauacaagauga

SEQ ID NO: 351056 - RNA, 32 nt, Homo Sapiens
auggacucuacucuccuucucugguucucagc

SEQ ID NO: 351057 - RNA, 32 nt, Homo Sapiens
cgggcuugggagaggggcgcagcuaagacugg

SEQ ID NO: 351058 - RNA, 32 nt, Homo Sapiens
uucuguuuaccagcuacuucaaucccaaaguu

SEQ ID NO: 351059 - RNA, 32 nt, Homo Sapiens
uaaauggggaggcuaggcucuccccagcccua

SEQ ID NO: 351060 - RNA, 32 nt, Homo Sapiens
uuuuuagguuaaaauuauugagauauaaagca

SEQ ID NO: 351061 - RNA, 32 nt, Homo Sapiens
aagcuuccacuuuucugcuuucuggggaagcc

SEQ ID NO: 351062 - RNA, 32 nt, Homo Sapiens
aaagauugcacagacuguuuccucuccggugc

SEQ ID NO: 351063 - RNA, 32 nt, Homo Sapiens
cccaguguuggccccaggaccugaucugaguu

SEQ ID NO: 351064 - RNA, 32 nt, Homo Sapiens
cauauuguuaguacuuugaauuuuugcugaug

SEQ ID NO: 351065 - RNA, 32 nt, Homo Sapiens
gacucuaaagcacugggguacucuaagguacc

SEQ ID NO: 351066 - RNA, 32 nt, Homo Sapiens
aaccgucaguucggaaggcugguuagaacaug

SEQ ID NO: 351067 - RNA, 32 nt, Homo Sapiens
caccgcugggucugcggccuaagggaccuccc

SEQ ID NO: 351068 - RNA, 32 nt, Homo Sapiens
ucugaagugaagaucuggaagacuuucuuuuu

SEQ ID NO: 351069 - RNA, 32 nt, Homo Sapiens
uccugccccacuuucccacucaccuuucucca

SEQ ID NO: 351070 - RNA, 32 nt, Homo Sapiens
ucccaggcccugcccaccuggggccccacauc

SEQ ID NO: 351071 - RNA, 32 nt, Homo Sapiens
uuugcccaaaauuuauuuuauaagaaaaacuu

SEQ ID NO: 351072 - RNA, 32 nt, Homo Sapiens
ugguccagacauugcagaugcuucaaccguga

SEQ ID NO: 351073 - RNA, 32 nt, Homo Sapiens
aggcacggaccaguggcccagcccuggguguc

SEQ ID NO: 351074 - RNA, 32 nt, Homo Sapiens
cagccagugccuuuggaguacugaggcgcgca

SEQ ID NO: 351075 - RNA, 32 nt, Homo Sapiens
aaagguuccuagaccacuuuggccuucaucuu

SEQ ID NO: 351076 - RNA, 32 nt, Homo Sapiens
gggaggcccuggacaugcugcagagggcugaa

SEQ ID NO: 351077 - RNA, 32 nt, Homo Sapiens
cuaggucugcaccgccaccgccgcccucuccc

SEQ ID NO: 351078 - RNA, 32 nt, Homo Sapiens
aucagagcugcgggcgacgcaacgaagcccgg

SEQ ID NO: 351079 - RNA, 32 nt, Homo Sapiens
cauccaaaacccgugcgccacugcagugagug

SEQ ID NO: 351080 - RNA, 32 nt, Homo Sapiens
gaccugaucuguccuuccuccuccuucccgcu

SEQ ID NO: 351081 - RNA, 32 nt, Homo Sapiens
gguccuuguucuacccuaaacuuuguaucacc

SEQ ID NO: 351082 - RNA, 32 nt, Homo Sapiens
uucuccuuuuaacuuacaugcugaauaauuuu

SEQ ID NO: 351083 - RNA, 32 nt, Homo Sapiens
auuuucuuuuuuuuuuuuuuuacaauaaaguu

SEQ ID NO: 351084 - RNA, 32 nt, Homo Sapiens
cugcugccucauggcggccaucggaguucacc

SEQ ID NO: 351085 - RNA, 32 nt, Homo Sapiens
cugucgccgcuaugccuccgcgcgcgccgccu

SEQ ID NO: 351086 - RNA, 32 nt, Homo Sapiens
ucaucaaaacugccuguaaauaagguguuuag

SEQ ID NO: 351087 - RNA, 32 nt, Homo Sapiens
cagguaaccuuuauggcucuuucaggaaaagu

SEQ ID NO: 351088 - RNA, 32 nt, Homo Sapiens
ugugguacaaauuuauauugaagaucuaaaua

SEQ ID NO: 351089 - RNA, 32 nt, Homo Sapiens
caacauccugcgguuccguuucugggaacuuu

SEQ ID NO: 351090 - RNA, 32 nt, Homo Sapiens
auuuuacaaaaauuuauuuucuuuuuugauaa

SEQ ID NO: 351091 - RNA, 32 nt, Homo Sapiens
agugugggugccacagguaaccccaauuucug

SEQ ID NO: 351092 - RNA, 32 nt, Homo Sapiens
cccuuaauuuggugcauuauacuaguaacuuu

SEQ ID NO: 351093 - RNA, 32 nt, Homo Sapiens
cucccucgccgcgaccccggauggaugcgcgc

SEQ ID NO: 351094 - RNA, 32 nt, Homo Sapiens
gcuuugauaaaacugcuagaggauggcuaugc

SEQ ID NO: 351095 - RNA, 32 nt, Homo Sapiens
uuuuggucuaucuacucguggucaacaaaagg

SEQ ID NO: 351096 - RNA, 32 nt, Homo Sapiens
gccgucggguuuugagccgcgcggcuggccag

SEQ ID NO: 351097 - RNA, 32 nt, Homo Sapiens
aguguacguuccauuucuaauuagcucaaauu

SEQ ID NO: 351098 - RNA, 32 nt, Homo Sapiens
cgugucacccucgugugggagccucugggcuc

SEQ ID NO: 351099 - RNA, 32 nt, Homo Sapiens
aaugguuuaaacaauuuaaaauuuuggaaaac

SEQ ID NO: 351100 - RNA, 32 nt, Homo Sapiens
cgcggcgccggagacauguccaggcggaaaca

SEQ ID NO: 351101 - RNA, 32 nt, Homo Sapiens
cuauaguagccacuagggcaaaaacugugugu

SEQ ID NO: 351102 - RNA, 32 nt, Homo Sapiens
gggccgccugcgcugggcugaagggagggaaa

SEQ ID NO: 351103 - RNA, 32 nt, Homo Sapiens
aaggcagucuuucuauagaaauccagucgagu

SEQ ID NO: 351104 - RNA, 32 nt, Homo Sapiens
agcugguuuccccuacuuguccuuccgggccu

SEQ ID NO: 351105 - RNA, 32 nt, Homo Sapiens
aagccauuugucuguguuuucuucuugugguu

SEQ ID NO: 351106 - RNA, 32 nt, Homo Sapiens
ugauaauauagagaugacuuugaaacuuucaa

SEQ ID NO: 351107 - RNA, 32 nt, Homo Sapiens
uuggugaugguuuuuucuuccuuguuggacca

SEQ ID NO: 351108 - RNA, 32 nt, Homo Sapiens
acuuugggaggugcaggcaggcagauggcuug

SEQ ID NO: 351109 - RNA, 32 nt, Homo Sapiens
caccuuuugcugucucauggggcagcuacaag

SEQ ID NO: 351110 - RNA, 32 nt, Homo Sapiens
gccacuucugcgggcucccuccucuggcaggc

SEQ ID NO: 351111 - RNA, 31 nt, Homo Sapiens
cugccggcaccgcgccugcccucugccgcgc

SEQ ID NO: 351112 - RNA, 29 nt, Homo Sapiens
agauaaaguaacauuagcauuguacaaug

SEQ ID NO: 351113 - RNA, 32 nt, Homo Sapiens
gcuagggauugugacuccuaaauccuccucua

SEQ ID NO: 351114 - RNA, 32 nt, Homo Sapiens
cacacguaaacacuugacuauaaaaacugccc

SEQ ID NO: 351115 - RNA, 32 nt, Homo Sapiens
ccaccuuuagauaaguuucucuagcuaauuuu

SEQ ID NO: 351116 - RNA, 32 nt, Homo Sapiens
uacaauggauuuuuaaauguugaucuuguauu

SEQ ID NO: 351117 - RNA, 32 nt, Homo Sapiens
ucuagucacauaaauggauuaauuacuaauuu

SEQ ID NO: 351118 - RNA, 32 nt, Homo Sapiens
uguguucagguggggauucuucaguucccuuc

SEQ ID NO: 351119 - RNA, 32 nt, Homo Sapiens
gcugccgaggcucggggcgcgcgcaguuggcg

SEQ ID NO: 351120 - RNA, 32 nt, Homo Sapiens
gcgcgggcgauggcccggggcucgcguucggc

SEQ ID NO: 351121 - RNA, 32 nt, Homo Sapiens
ccuuagccgggcgggaggcagcaagcgcgcgc

SEQ ID NO: 351122 - RNA, 32 nt, Homo Sapiens
cgguugcggcgaggcgaggcgaggcggggagc

SEQ ID NO: 351123 - RNA, 32 nt, Homo Sapiens
gcaggaaggugcccuuccuggaggauggucgc

SEQ ID NO: 351124 - RNA, 32 nt, Homo Sapiens
gccgcccgccgggagccggagggaaaggaagu

SEQ ID NO: 351125 - RNA, 32 nt, Homo Sapiens
uacauaaacuguuuacuguugaaacaguguaa

SEQ ID NO: 351126 - RNA, 32 nt, Homo Sapiens
agcauccuuuucugcagaggggcuuucuggag

SEQ ID NO: 351127 - RNA, 32 nt, Homo Sapiens
cuuucaucucguuuccuccacuccgccccauc

SEQ ID NO: 351128 - RNA, 32 nt, Homo Sapiens
gaaguggaauauugagugauaagaaguuuggc

SEQ ID NO: 351129 - RNA, 32 nt, Homo Sapiens
uuaagugugaacagguguuuguagcuuaucug

SEQ ID NO: 351130 - RNA, 32 nt, Homo Sapiens
augagcuggugcccaucaccacugagaaugca

SEQ ID NO: 351131 - RNA, 32 nt, Homo Sapiens
aaagagauagguaaugggggaauggacagagg

SEQ ID NO: 351132 - RNA, 32 nt, Homo Sapiens
ccauccucaaggaccugguacucauugaggug

SEQ ID NO: 351133 - RNA, 32 nt, Homo Sapiens
uagaauacuuucuguguuuuuaucuuauacac

SEQ ID NO: 351134 - RNA, 32 nt, Homo Sapiens
gauaauuugaagcagucuuugaaaauaacaaa

SEQ ID NO: 351135 - RNA, 32 nt, Homo Sapiens
ggagcggguggggccagggcgguggugggaac

SEQ ID NO: 351136 - RNA, 32 nt, Homo Sapiens
gagccccagagcugguguugcccgccaccgcc

SEQ ID NO: 351137 - RNA, 31 nt, Homo Sapiens
uggcugaccgucugcgcuccaagugggaggc

SEQ ID NO: 351138 - RNA, 32 nt, Homo Sapiens
uggcccagauaaaggucaugucuccuagcucc

SEQ ID NO: 351139 - RNA, 32 nt, Homo Sapiens
caagaacaauggcaaacugaacagaggcaguc

SEQ ID NO: 351140 - RNA, 32 nt, Homo Sapiens
aucauagcucacuacagccuugaacuccuggg

SEQ ID NO: 351141 - RNA, 31 nt, Homo Sapiens
gaagugugaaacauagccauugauugaucag

SEQ ID NO: 351142 - RNA, 32 nt, Homo Sapiens
aauggugugcaguuauuuuaaaaacuacagau

SEQ ID NO: 351143 - RNA, 32 nt, Homo Sapiens
gcacucggcacaauccgcuuaauagcucucau

SEQ ID NO: 351144 - RNA, 32 nt, Homo Sapiens
ggagcugcugcagcuccuggcaacuggucaag

SEQ ID NO: 351145 - RNA, 32 nt, Homo Sapiens
gaagugggggaugucauucuuauucaccugaa

SEQ ID NO: 351146 - RNA, 32 nt, Homo Sapiens
ggaucuauauuuucagagcuuaucucugaaga

SEQ ID NO: 351147 - RNA, 31 nt, Homo Sapiens
gcugggccaaguacgacaggaguccagauaa

SEQ ID NO: 351148 - RNA, 32 nt, Homo Sapiens
aacuuccuaccuuuuacuugaaugcuuugcca

SEQ ID NO: 351149 - RNA, 32 nt, Homo Sapiens
gcacaacaggaaagccugggaggguuguuggg

SEQ ID NO: 351150 - RNA, 32 nt, Homo Sapiens
auuuggccagggugggggguugagucagccuc

SEQ ID NO: 351151 - RNA, 32 nt, Homo Sapiens
agacuugaccauucaccuccaguaccugauug

SEQ ID NO: 351152 - RNA, 32 nt, Homo Sapiens
ccccauaacacggcuuccugugcucucccucc

SEQ ID NO: 351153 - RNA, 32 nt, Homo Sapiens
ugggccaacuguacagcucauuuugagauagu

SEQ ID NO: 351154 - RNA, 32 nt, Homo Sapiens
aaaacaucuucagaucauagguccuaaaaaua

SEQ ID NO: 351155 - RNA, 32 nt, Homo Sapiens
gcacuggguucucuccuucuucuuccugcugu

SEQ ID NO: 351156 - RNA, 32 nt, Homo Sapiens
aauguauguauuauuagaguccgaaaguauuu

SEQ ID NO: 351157 - RNA, 32 nt, Homo Sapiens
uggccccuuccuccccccaacaucagucugcu

SEQ ID NO: 351158 - RNA, 32 nt, Homo Sapiens
ccucgggccaccugggcuuccuggacacgcug

SEQ ID NO: 351159 - RNA, 32 nt, Homo Sapiens
cgcagccccgguucccgcccgugccucucccu

SEQ ID NO: 351160 - RNA, 32 nt, Homo Sapiens
uggcuuacaccugugaucccagcacuuuggga

SEQ ID NO: 351161 - RNA, 32 nt, Homo Sapiens
uggcuugcaccuguaaucccagcacuuuggga

SEQ ID NO: 351162 - RNA, 32 nt, Homo Sapiens
aggugggcagaucaccugaggucaggaguucg

SEQ ID NO: 351163 - RNA, 32 nt, Homo Sapiens
auguaguauuucuauuuguacuuuaagucaaa

SEQ ID NO: 351164 - RNA, 32 nt, Homo Sapiens
caccacuugaugucugaggauaccuuccaucu

SEQ ID NO: 351165 - RNA, 32 nt, Homo Sapiens
aauaguaaaagauaacaagaucuuucaggaaa

SEQ ID NO: 351166 - RNA, 32 nt, Homo Sapiens
ccaauccauccaugcauacacagacacaagac

SEQ ID NO: 351167 - RNA, 32 nt, Homo Sapiens
uacgccaugccuuuuccaugucccuccuaucu

SEQ ID NO: 351168 - RNA, 32 nt, Homo Sapiens
uuuuaggcauuaacauuuauuaucacauccau

SEQ ID NO: 351169 - RNA, 32 nt, Homo Sapiens
gcacauuuuccacaauacauugcuaaaauaaa

SEQ ID NO: 351170 - RNA, 32 nt, Homo Sapiens
gagcaaucuggaaggaacaaaaauguuuucug

SEQ ID NO: 351171 - RNA, 32 nt, Homo Sapiens
agaccaugaugauguugaugaugauucuggua

SEQ ID NO: 351172 - RNA, 32 nt, Homo Sapiens
auuaaaaaaaaauuauucuccaguccccuccc

SEQ ID NO: 351173 - RNA, 32 nt, Homo Sapiens
acugccccccaaacugccccccgagcuucuuc

SEQ ID NO: 351174 - RNA, 32 nt, Homo Sapiens
aaaaugucaccauggcuuucauccaauggaau

SEQ ID NO: 351175 - RNA, 32 nt, Homo Sapiens
uagguguucuuuguucaugcaggcagguuucu

SEQ ID NO: 351176 - RNA, 32 nt, Homo Sapiens
ccucuugcaaugacagcugaucugucggaacc

SEQ ID NO: 351177 - RNA, 32 nt, Homo Sapiens
acggucugacuucuugagcccauacucaauaa

SEQ ID NO: 351178 - RNA, 32 nt, Homo Sapiens
uccucaacacugggcugauccugaauggcaca

SEQ ID NO: 351179 - RNA, 32 nt, Homo Sapiens
uuuuaucagagguaggauucuguuuuauagua

SEQ ID NO: 351180 - RNA, 32 nt, Homo Sapiens
aaaucuagaaaccauuaguuugagaucucuca

SEQ ID NO: 351181 - RNA, 32 nt, Homo Sapiens
uguggcccgagcucuucuccguaauucaaaga

SEQ ID NO: 351182 - RNA, 32 nt, Homo Sapiens
ccgcuccgggcucggaugggaaguggugggag

SEQ ID NO: 351183 - RNA, 32 nt, Homo Sapiens
caccaagacaggccaaucccagccccagacuc

SEQ ID NO: 351184 - RNA, 32 nt, Homo Sapiens
uugcccgcgcguugccagacucagaggcggcc

SEQ ID NO: 351185 - RNA, 32 nt, Homo Sapiens
uaugccaccugccugggccccuccugggacuu

SEQ ID NO: 351186 - RNA, 32 nt, Homo Sapiens
acagaccuucaagaagcagaaaggacauucag

SEQ ID NO: 351187 - RNA, 32 nt, Homo Sapiens
accccaauaaauuuauauaaauuguggacccu

SEQ ID NO: 351188 - RNA, 32 nt, Homo Sapiens
ucugugcuauaaucagaauuguaauuauguuc

SEQ ID NO: 351189 - RNA, 32 nt, Homo Sapiens
acucauuuuuuccauuugauaauuggaaccaa

SEQ ID NO: 351190 - RNA, 32 nt, Homo Sapiens
cuaggcauugauuagauuaagugugaucauug

SEQ ID NO: 351191 - RNA, 32 nt, Homo Sapiens
cuacagauggaggugacucgagcagugaugag

SEQ ID NO: 351192 - RNA, 32 nt, Homo Sapiens
ggggcuaggccggcuugaaaagagauuaugac

SEQ ID NO: 351193 - RNA, 32 nt, Homo Sapiens
ucaugcauauuuagaugagacuucuaccuucc

SEQ ID NO: 351194 - RNA, 32 nt, Homo Sapiens
ggcgugggggccucgaggggcuggcgcggucc

SEQ ID NO: 351195 - RNA, 32 nt, Homo Sapiens
ggcaccccaggguggggcagcaagcaggcagg

SEQ ID NO: 351196 - RNA, 32 nt, Homo Sapiens
gccggccagccccuggccccaggaccuggcug

SEQ ID NO: 351197 - RNA, 32 nt, Homo Sapiens
ggcgggccagcuggacgggcugccggccgugc

SEQ ID NO: 351198 - RNA, 32 nt, Homo Sapiens
gguccuaaauggaguuuccaaucuuucccccu

SEQ ID NO: 351199 - RNA, 32 nt, Homo Sapiens
uucccucucacguauugacgguuuauuucuuu

SEQ ID NO: 351200 - RNA, 32 nt, Homo Sapiens
gcuaugugugagggaggcccgcggcgguggag

SEQ ID NO: 351201 - RNA, 32 nt, Homo Sapiens
aaaacaugcucuucuaauuugaucaaaacauu

SEQ ID NO: 351202 - RNA, 32 nt, Homo Sapiens
agugcagagugcagggaagcagaugggcuaaa

SEQ ID NO: 351203 - RNA, 32 nt, Homo Sapiens
caucauugaauauuuugauaaacuuuaccgac

SEQ ID NO: 351204 - RNA, 32 nt, Homo Sapiens
aaagggccgagggaguuggggaggccgccacc

SEQ ID NO: 351205 - RNA, 32 nt, Homo Sapiens
ggauugaagaucuuacugaguucuuggaugga

SEQ ID NO: 351206 - RNA, 32 nt, Homo Sapiens
agcucauaaaagacaaguaagauugaaaucca

SEQ ID NO: 351207 - RNA, 32 nt, Homo Sapiens
uguuagauuuaaaauaagagucuaaugcugga

SEQ ID NO: 351208 - RNA, 32 nt, Homo Sapiens
ugacaagugaaauuuaaaugugagauugaacu

SEQ ID NO: 351209 - RNA, 32 nt, Homo Sapiens
caaagauaaacuauauguugagaucauuuuau

SEQ ID NO: 351210 - RNA, 28 nt, Homo Sapiens
cucugggaaggugaacauuuguagcauu

SEQ ID NO: 351211 - RNA, 32 nt, Homo Sapiens
agggggaaggauucucuauucuuuuuugcgac

SEQ ID NO: 351212 - RNA, 32 nt, Homo Sapiens
uccucgggggauguuacuccuaaugucacacg

SEQ ID NO: 351213 - RNA, 32 nt, Homo Sapiens
uguagacuuuaaaagauguuaucuaaauuaau

SEQ ID NO: 351214 - RNA, 32 nt, Homo Sapiens
gggcagugggagaggugguguguggauaccuc

SEQ ID NO: 351215 - RNA, 32 nt, Homo Sapiens
cauuugcucagacccauccucuuuugcaaaag

SEQ ID NO: 351216 - RNA, 31 nt, Homo Sapiens
gcacugcggcacucagcccgagcugccguuu

SEQ ID NO: 351217 - RNA, 32 nt, Homo Sapiens
aagugggugaauuauuugauaauuuugaggaa

SEQ ID NO: 351218 - RNA, 32 nt, Homo Sapiens
agacucccauucucccccucucccugagaguc

SEQ ID NO: 351219 - RNA, 32 nt, Homo Sapiens
caaccugugggaagggaagcggguucauggcu

SEQ ID NO: 351220 - RNA, 32 nt, Homo Sapiens
agcugagguuuccuaccugaaaaaugauuucu

SEQ ID NO: 351221 - RNA, 32 nt, Homo Sapiens
cgccccgagccgacugcccuucugcccccaag

SEQ ID NO: 351222 - RNA, 32 nt, Homo Sapiens
aggugggcagaucaccugaggucaggaguuca

SEQ ID NO: 351223 - RNA, 32 nt, Homo Sapiens
uauuuaaaacaaaaacaaaagcaaaaacaaac

SEQ ID NO: 351224 - RNA, 32 nt, Homo Sapiens
acuuccgucacaucccaccccauccuccaggg

SEQ ID NO: 351225 - RNA, 32 nt, Homo Sapiens
aaauguaaaaauuuaauuucugaaaagcacca

SEQ ID NO: 351226 - RNA, 32 nt, Homo Sapiens
agaaacggcgcaccacaagacuauaucccaca

SEQ ID NO: 351227 - RNA, 32 nt, Homo Sapiens
augguggccgccgggacgcccggagcccggcc

SEQ ID NO: 351228 - RNA, 32 nt, Homo Sapiens
gcagacucguauuuuguccugagagaguccaa

SEQ ID NO: 351229 - RNA, 32 nt, Homo Sapiens
gagcuggcagccagcucugccuuuccacugcc

SEQ ID NO: 351230 - RNA, 32 nt, Homo Sapiens
uuuucuucuuuuuuauuuuuuauauauauuuu

SEQ ID NO: 351231 - RNA, 32 nt, Homo Sapiens
ccaagaagaggaugacauuagauccaggagau

SEQ ID NO: 351232 - RNA, 32 nt, Homo Sapiens
cucuucucaucccacucucuggucccucaucg

SEQ ID NO: 351233 - RNA, 32 nt, Homo Sapiens
ugggccccagggcgagacaggcguggaaggug

SEQ ID NO: 351234 - RNA, 32 nt, Homo Sapiens
ugucuauuuacauccguccuuacaaccauccu

SEQ ID NO: 351235 - RNA, 32 nt, Homo Sapiens
gggauaaaguagaguggaaauaauguagaguc

SEQ ID NO: 351236 - RNA, 31 nt, Homo Sapiens
ccuccacaggacagguuaccauagacuuggg

SEQ ID NO: 351237 - RNA, 32 nt, Homo Sapiens
uucaaucuaaucugauauugacauauuagaag

SEQ ID NO: 351238 - RNA, 32 nt, Homo Sapiens
gaugauacuuuaaaaugucaucuuugcuugua

SEQ ID NO: 351239 - RNA, 31 nt, Homo Sapiens
ccccugcugccggccgcgccaugcggugagc

SEQ ID NO: 351240 - RNA, 32 nt, Homo Sapiens
gggggcuuuucugcauguuuauaugccuccaa

SEQ ID NO: 351241 - RNA, 32 nt, Homo Sapiens
auugacauacuaguucuugagauguauaauaa

SEQ ID NO: 351242 - RNA, 32 nt, Homo Sapiens
aacgucuugguaguuuguuccuuuuauugcug

SEQ ID NO: 351243 - RNA, 32 nt, Homo Sapiens
uuuacauccccuuugcuguccucccccgguac

SEQ ID NO: 351244 - RNA, 32 nt, Homo Sapiens
cguggcaccagcugcguccaccccagccacug

SEQ ID NO: 351245 - RNA, 32 nt, Homo Sapiens
aaaagccacuucuggagggaaugaggcagucu

SEQ ID NO: 351246 - RNA, 32 nt, Homo Sapiens
aagacaguagagaguacagagcccuggacugu

SEQ ID NO: 351247 - RNA, 32 nt, Homo Sapiens
guggugcgaccucagcucacugaaaccucugc

SEQ ID NO: 351248 - RNA, 32 nt, Homo Sapiens
guccagagauaaaaaucauauagaccaauuga

SEQ ID NO: 351249 - RNA, 32 nt, Homo Sapiens
guggaaagauaagaagcagagggguccuuggu

SEQ ID NO: 351250 - RNA, 31 nt, Homo Sapiens
cauugcaagccccagaaggcaagacuaacuc

SEQ ID NO: 351251 - RNA, 32 nt, Homo Sapiens
uauucuaaugucuuuuccuaauaaaaaacuuc

SEQ ID NO: 351252 - RNA, 32 nt, Homo Sapiens
gccuuuguaucuuuucugagggcuuugucugu

SEQ ID NO: 351253 - RNA, 32 nt, Homo Sapiens
cgugccccgccuccccgaaacaggcuacucuc

SEQ ID NO: 351254 - RNA, 32 nt, Homo Sapiens
aaagaauggcagaaaaguuuagccccugaaag

SEQ ID NO: 351255 - RNA, 32 nt, Homo Sapiens
cacuuucaggccuggaggaagcaugcacacau

SEQ ID NO: 351256 - RNA, 32 nt, Homo Sapiens
aucgggcuaaggucccugggggugcagauggu

SEQ ID NO: 351257 - RNA, 32 nt, Homo Sapiens
ccaggauuaaaaguuuuuaaaaauaugguaga

SEQ ID NO: 351258 - RNA, 32 nt, Homo Sapiens
aggaaaccaauauaaucucauguauaaaaacu

SEQ ID NO: 351259 - RNA, 32 nt, Homo Sapiens
ggaguguuguuuucaugguuaugccuuguuug

SEQ ID NO: 351260 - RNA, 32 nt, Homo Sapiens
uucucccgcguccgccauuuuguugcuguggc

SEQ ID NO: 351261 - RNA, 32 nt, Homo Sapiens
gggcccugcccccaacucugacacugcaguua

SEQ ID NO: 351262 - RNA, 32 nt, Homo Sapiens
ggaagccgugcagagcgagcacagcgacgcca

SEQ ID NO: 351263 - RNA, 32 nt, Homo Sapiens
auucaccguauuccaaaccagagauguucaaa

SEQ ID NO: 351264 - RNA, 32 nt, Homo Sapiens
aauguucuugguucccauugugacgauuauuu

SEQ ID NO: 351265 - RNA, 32 nt, Homo Sapiens
uuucucaucuucucucuacggccucugaguug

SEQ ID NO: 351266 - RNA, 32 nt, Homo Sapiens
uaaauuugccagcauauguucuagccucuggg

SEQ ID NO: 351267 - RNA, 32 nt, Homo Sapiens
auacuuaccaucauagguuucuuaaaaugcuu

SEQ ID NO: 351268 - RNA, 32 nt, Homo Sapiens
uauaucaugcagauaacauacaaaaucuuuuu

SEQ ID NO: 351269 - RNA, 32 nt, Homo Sapiens
aacgcggccuccgggggcgcacggcagcugca

SEQ ID NO: 351270 - RNA, 32 nt, Homo Sapiens
cugcguuccagccccaguuccccggcagcggg

SEQ ID NO: 351271 - RNA, 32 nt, Homo Sapiens
ccaccgcugcugcggcagccauggcggaaguu

SEQ ID NO: 351272 - RNA, 32 nt, Homo Sapiens
gccaagcaaccuggguccaaauaaaaacuaaa

SEQ ID NO: 351273 - RNA, 32 nt, Homo Sapiens
uuggacacugugugcuuuuggugggguggaga

SEQ ID NO: 351274 - RNA, 32 nt, Homo Sapiens
uaugucugaaagucuuuuuugucugucuucac

SEQ ID NO: 351275 - RNA, 32 nt, Homo Sapiens
aagcuguccccgcuccugagccccuugcaaga

SEQ ID NO: 351276 - RNA, 32 nt, Homo Sapiens
ggaagaagugaacuggacuacuuuaaaacuuu

SEQ ID NO: 351277 - RNA, 32 nt, Homo Sapiens
agcggcggcagagcgaggggcaucagcuaccg

SEQ ID NO: 351278 - RNA, 32 nt, Homo Sapiens
gagaccucaugugaagccucccugccccagca

SEQ ID NO: 351279 - RNA, 32 nt, Homo Sapiens
acuaugcagggccaaagggcuuuuuagucagu

SEQ ID NO: 351280 - RNA, 32 nt, Homo Sapiens
uuaucagacuugaaauuauacugaguggcauu

SEQ ID NO: 351281 - RNA, 32 nt, Homo Sapiens
cucccaggcggcguaguagggcuuccguguua

SEQ ID NO: 351282 - RNA, 32 nt, Homo Sapiens
aguaguguuguccaggaagucagaauuuuuaa

SEQ ID NO: 351283 - RNA, 32 nt, Homo Sapiens
caaccuaauguuacaacuacuuugagguggcc

SEQ ID NO: 351284 - RNA, 32 nt, Homo Sapiens
cccauuuucccccugcacaaucuccuaauccc

SEQ ID NO: 351285 - RNA, 32 nt, Homo Sapiens
agugcugucugcuucuccguaagaaguuagaa

SEQ ID NO: 351286 - RNA, 32 nt, Homo Sapiens
cuugcugggaacacucugaggacaguguggcu

SEQ ID NO: 351287 - RNA, 32 nt, Homo Sapiens
cauuguguuuuuuaaaaagaguaucuuauaca

SEQ ID NO: 351288 - RNA, 32 nt, Homo Sapiens
aguucccgugggugggggcgggccuggcuucc

SEQ ID NO: 351289 - RNA, 32 nt, Homo Sapiens
uaccugucaucuccacaaguuuccuccugccc

SEQ ID NO: 351290 - RNA, 32 nt, Homo Sapiens
ggaaucgggaggaggggccggcacccaccccu

SEQ ID NO: 351291 - RNA, 32 nt, Homo Sapiens
acucugagggguuccgccuccuccgcuugggg

SEQ ID NO: 351292 - RNA, 32 nt, Homo Sapiens
auggauaaacaaaugugcuauaauacauacaa

SEQ ID NO: 351293 - RNA, 32 nt, Homo Sapiens
ucucacuacuaaaaauacaaaauuagccacgc

SEQ ID NO: 351294 - RNA, 32 nt, Homo Sapiens
gagaggucuccauggcaacaggacaccagcaa

SEQ ID NO: 351295 - RNA, 32 nt, Homo Sapiens
uccacagggcuuuuucaguaaacacgugaugu

SEQ ID NO: 351296 - RNA, 32 nt, Homo Sapiens
uaccauauuaucacccaucuaguuaguuacuu

SEQ ID NO: 351297 - RNA, 32 nt, Homo Sapiens
gagaguugccccacccuaccugccuuuuauag

SEQ ID NO: 351298 - RNA, 32 nt, Homo Sapiens
agcuguguggacuuugagucagauagacuugg

SEQ ID NO: 351299 - RNA, 32 nt, Homo Sapiens
cgcugcauugugggguggcggcggcggccgcg

SEQ ID NO: 351300 - RNA, 32 nt, Homo Sapiens
cucucauucuuaaaagacuuuggacuuaaauc

SEQ ID NO: 351301 - RNA, 32 nt, Homo Sapiens
uccgcacggcuggcagagggcaggcugcaugc

SEQ ID NO: 351302 - RNA, 32 nt, Homo Sapiens
auaaaugguuaauguucacuuaaaagacagau

SEQ ID NO: 351303 - RNA, 32 nt, Homo Sapiens
gaagauuuuuaaaaauguuuuguuucuucuua

SEQ ID NO: 351304 - RNA, 32 nt, Homo Sapiens
agaguucaacauaugcuauaauuuagaauuuu

SEQ ID NO: 351305 - RNA, 32 nt, Homo Sapiens
gccuggcccuccccaggcggcucaguggcuca

SEQ ID NO: 351306 - RNA, 32 nt, Homo Sapiens
cuuauaaugccuccuccuccugccauucucuc

SEQ ID NO: 351307 - RNA, 32 nt, Homo Sapiens
ugucuuugauaaauaaaacaguuuuguuuugc

SEQ ID NO: 351308 - RNA, 32 nt, Homo Sapiens
auaggcuucucaccgcgaccaauaaacagcuc

SEQ ID NO: 351309 - RNA, 32 nt, Homo Sapiens
caucuauugucaacauguacaucuaccuuagu

SEQ ID NO: 351310 - RNA, 32 nt, Homo Sapiens
uuccccagccucagcccugagcggcauaauau

SEQ ID NO: 351311 - RNA, 32 nt, Homo Sapiens
cagaaccccggggcccuccugcucuccacaac

SEQ ID NO: 351312 - RNA, 32 nt, Homo Sapiens
gggcuccgggcgggcucgcgucauccugcccc

SEQ ID NO: 351313 - RNA, 32 nt, Homo Sapiens
aaaauauaaaauguaacaugacaagagauuuu

SEQ ID NO: 351314 - RNA, 32 nt, Homo Sapiens
uuuggguuuuguuuuuuuuuuaagaaaacauc

SEQ ID NO: 351315 - RNA, 32 nt, Homo Sapiens
cauuucuuagauggagaaguugugaaagaugu

SEQ ID NO: 351316 - RNA, 32 nt, Homo Sapiens
accuuagaugagaagagaaugagccauguguu

SEQ ID NO: 351317 - RNA, 32 nt, Homo Sapiens
cagcccucagcagggacaagacaucagggaug

SEQ ID NO: 351318 - RNA, 32 nt, Homo Sapiens
uaugcaugacauuuuuggacaaugcaauugug

SEQ ID NO: 351319 - RNA, 32 nt, Homo Sapiens
cugggaaauguauuuuuguagacuuuaauaga

SEQ ID NO: 351320 - RNA, 32 nt, Homo Sapiens
agggcugccugcccaucuagguccccucuccu

SEQ ID NO: 351321 - RNA, 32 nt, Homo Sapiens
agagauuuugaucgucaggagcucugggaaua

SEQ ID NO: 351322 - RNA, 32 nt, Homo Sapiens
cacgcccaccugguccucucccaucgcccaca

SEQ ID NO: 351323 - RNA, 32 nt, Homo Sapiens
gcauuauuuacgaaagccaugucuauaccaac

SEQ ID NO: 351324 - RNA, 32 nt, Homo Sapiens
auggagaaaguaacacaaacaucauuuuacuc

SEQ ID NO: 351325 - RNA, 32 nt, Homo Sapiens
cauguaauuuggauugacuuuggaaaaucuac

SEQ ID NO: 351326 - RNA, 32 nt, Homo Sapiens
gggaaguuugaacuggguggagcccacugcag

SEQ ID NO: 351327 - RNA, 32 nt, Homo Sapiens
gcaaaguuggcccuuggcuggcaucuggggga

SEQ ID NO: 351328 - RNA, 32 nt, Homo Sapiens
cagacgggaaagggucugaaugcucuggcaau

SEQ ID NO: 351329 - RNA, 32 nt, Homo Sapiens
agaccuucacuuggugggcccgaguguacugu

SEQ ID NO: 351330 - RNA, 32 nt, Homo Sapiens
uugaaugugggaagaagggagaacgcauguuu

SEQ ID NO: 351331 - RNA, 32 nt, Homo Sapiens
uuuugccccccgccccauccuggagugugagg

SEQ ID NO: 351332 - RNA, 32 nt, Homo Sapiens
uguuaguuugccugggucugucugaggaagga

SEQ ID NO: 351333 - RNA, 32 nt, Homo Sapiens
ugggauugcagagcugcagaguacaguguaac

SEQ ID NO: 351334 - RNA, 32 nt, Homo Sapiens
aaguaagauuguuuuuagucuugcuugaggaa

SEQ ID NO: 351335 - RNA, 32 nt, Homo Sapiens
aucaguauuacuaccguucuguacuggcuuac

SEQ ID NO: 351336 - RNA, 32 nt, Homo Sapiens
gaauuauguuuuuauaaaucugacuaggcaaa

SEQ ID NO: 351337 - RNA, 32 nt, Homo Sapiens
auauaaagacuuuuauacuguacuuauuggaa

SEQ ID NO: 351338 - RNA, 32 nt, Homo Sapiens
ucaagacccguccacacugcaccucagggacc

SEQ ID NO: 351339 - RNA, 32 nt, Homo Sapiens
cccugcacgccugcccccuugggugccucuug

SEQ ID NO: 351340 - RNA, 32 nt, Homo Sapiens
uuaucuuaagugaaaguugcugucccaaagau

SEQ ID NO: 351341 - RNA, 32 nt, Homo Sapiens
aaaacuacauacuuggacaucuguaaaucuuu

SEQ ID NO: 351342 - RNA, 32 nt, Homo Sapiens
cucaggaaagagaaacaaagacaacacuggcc

SEQ ID NO: 351343 - RNA, 32 nt, Homo Sapiens
uuauuuaagcuaaaacagagcacauguauaug

SEQ ID NO: 351344 - RNA, 32 nt, Homo Sapiens
cacaucagccaccacuccugcuucugagcaca

SEQ ID NO: 351345 - RNA, 32 nt, Homo Sapiens
uccggaacgucuuuuugcggacgcccucggag

SEQ ID NO: 351346 - RNA, 32 nt, Homo Sapiens
gaaaagagaaaaucaauaaaacccaaaacugu

SEQ ID NO: 351347 - RNA, 32 nt, Homo Sapiens
accaccaugagcaguccuccgaggacaucugg

SEQ ID NO: 351348 - RNA, 32 nt, Homo Sapiens
ccaccggccgcucccggcaccaggggacgccg

SEQ ID NO: 351349 - RNA, 32 nt, Homo Sapiens
uugugucuaaaacuguggucuuugcuuuucuc

SEQ ID NO: 351350 - RNA, 32 nt, Homo Sapiens
ggcugggcaugguggcucacgccuguggucuc

SEQ ID NO: 351351 - RNA, 32 nt, Homo Sapiens
acucacuuuucucuuccugaauuugaaccacc

SEQ ID NO: 351352 - RNA, 32 nt, Homo Sapiens
gugugucacacgcguccaguccuggcccccua

SEQ ID NO: 351353 - RNA, 32 nt, Homo Sapiens
ugaugaagcugauaauccaugcucagcuuccu

SEQ ID NO: 351354 - RNA, 32 nt, Homo Sapiens
uucugcuuuuuuuuuucuuagaaacaagaagg

SEQ ID NO: 351355 - RNA, 32 nt, Homo Sapiens
uuauaauuuacuaucugccaagaguagaaaga

SEQ ID NO: 351356 - RNA, 32 nt, Homo Sapiens
ucaaagguggcuccgcgccgagcgcggccggc

SEQ ID NO: 351357 - RNA, 32 nt, Homo Sapiens
ggaugguuauuuauagcucaugauucauccaa

SEQ ID NO: 351358 - RNA, 32 nt, Homo Sapiens
uauaugaguacuaaguuuuuauaauaaaaugc

SEQ ID NO: 351359 - RNA, 32 nt, Homo Sapiens
aaaugaagagaaugaggaugacugcacaguag

SEQ ID NO: 351360 - RNA, 32 nt, Homo Sapiens
cugggcagagcccuuccgccuuuccagcuccc

SEQ ID NO: 351361 - RNA, 32 nt, Homo Sapiens
uggauucaagaagacgaggcccauuccccuca

SEQ ID NO: 351362 - RNA, 32 nt, Homo Sapiens
caaaauccagcuccuggaucucccagguauua

SEQ ID NO: 351363 - RNA, 32 nt, Homo Sapiens
aaaaagcuuuuaugagcucaucuagcaaucag

SEQ ID NO: 351364 - RNA, 32 nt, Homo Sapiens
aacaaagugucugcugcucuagaugagaagaa

SEQ ID NO: 351365 - RNA, 32 nt, Homo Sapiens
uuggccaaacugaguucucuucucuuguaaaa

SEQ ID NO: 351366 - RNA, 32 nt, Homo Sapiens
uguguauucgccccacucaugaucaccauuuu

SEQ ID NO: 351367 - RNA, 32 nt, Homo Sapiens
gaaguaagagcaaugggaauggcauuauugua

SEQ ID NO: 351368 - RNA, 30 nt, Homo Sapiens
cauaaaagagaauugugugagucugggauu

SEQ ID NO: 351369 - RNA, 28 nt, Homo Sapiens
accauggcccaccgauuuccagcccuca

SEQ ID NO: 351370 - RNA, 29 nt, Homo Sapiens
ggggcucggguccgggucgccuuccaggg

SEQ ID NO: 351371 - RNA, 32 nt, Homo Sapiens
uggaauacuuuuuuuuuuuuuaaagaaagcaa

SEQ ID NO: 351372 - RNA, 32 nt, Homo Sapiens
gcuuuuaaacccgggaaggcgcggcggcggcg

SEQ ID NO: 351373 - RNA, 32 nt, Homo Sapiens
caacauacugaaugcagggcuacacugaaccu

SEQ ID NO: 351374 - RNA, 32 nt, Homo Sapiens
auuaucugucuccuuuccuugugucccaaaac

SEQ ID NO: 351375 - RNA, 32 nt, Homo Sapiens
gaccuccucggguccuccggcgcuucggucuc

SEQ ID NO: 351376 - RNA, 32 nt, Homo Sapiens
gcccggcugcagagagcugacccggcauccug

SEQ ID NO: 351377 - RNA, 32 nt, Homo Sapiens
acaauucauuggcauuaacuacauauacaaug

SEQ ID NO: 351378 - RNA, 32 nt, Homo Sapiens
uucaaacggauuauauaacugguuacaguauu

SEQ ID NO: 351379 - RNA, 32 nt, Homo Sapiens
guugaaaauuauugccgucauuauuuacauac

SEQ ID NO: 351380 - RNA, 32 nt, Homo Sapiens
uuaugccucacaugcuagcaucagguaaugcu

SEQ ID NO: 351381 - RNA, 32 nt, Homo Sapiens
gucucucaguugaagaaagagcuuggaggaca

SEQ ID NO: 351382 - RNA, 32 nt, Homo Sapiens
ccggccgcagugccgccgccaucauggacuuc

SEQ ID NO: 351383 - RNA, 32 nt, Homo Sapiens
ccagaaugugucugcugagguccuguggucca

SEQ ID NO: 351384 - RNA, 32 nt, Homo Sapiens
uauagaugucuuuucccauuuaucuaaauaug

SEQ ID NO: 351385 - RNA, 32 nt, Homo Sapiens
ccugauuccacggcugccucaggcaggcaggc

SEQ ID NO: 351386 - RNA, 32 nt, Homo Sapiens
gcaucauauucuguuauauguuugugucauag

SEQ ID NO: 351387 - RNA, 32 nt, Homo Sapiens
ccaagcuucuauuuaucuaauuuaaaacuuga

SEQ ID NO: 351388 - RNA, 32 nt, Homo Sapiens
cccggaggcggccgcgcguggaugcggcggga

SEQ ID NO: 351389 - RNA, 32 nt, Homo Sapiens
ggacgaugcacucacaugccacagcaacccau

SEQ ID NO: 351390 - RNA, 32 nt, Homo Sapiens
gccccguuuccaguuucuuauagugcaugcuu

SEQ ID NO: 351391 - RNA, 32 nt, Homo Sapiens
guacgugcgcgucucccugccgccgccgccgc

SEQ ID NO: 351392 - RNA, 32 nt, Homo Sapiens
uacuugugugcugacuaacaaggcauuuaggu

SEQ ID NO: 351393 - RNA, 32 nt, Homo Sapiens
gaagacagagcuaauggauaaauaucauaaca

SEQ ID NO: 351394 - RNA, 32 nt, Homo Sapiens
cagcucagcuucaggcuucuuauguuucugaa

SEQ ID NO: 351395 - RNA, 32 nt, Homo Sapiens
cuuguuuugagcucucagaaucacucagacaa

SEQ ID NO: 351396 - RNA, 32 nt, Homo Sapiens
caugcccugcagccccaccauccacacuacau

SEQ ID NO: 351397 - RNA, 32 nt, Homo Sapiens
guguuaacugaauggaaugauacguguaaggg

SEQ ID NO: 351398 - RNA, 32 nt, Homo Sapiens
ggaaaguuggggaggggcgcgggagggcgcau

SEQ ID NO: 351399 - RNA, 28 nt, Homo Sapiens
uaguggcgggggccgccggcgggucgug

SEQ ID NO: 351400 - RNA, 32 nt, Homo Sapiens
aggcagcgugugucggucgccuagucuggaga

SEQ ID NO: 351401 - RNA, 32 nt, Homo Sapiens
auaucccacugggagcacuuuguaggcauugc

SEQ ID NO: 351402 - RNA, 32 nt, Homo Sapiens
caaaggggucaggagggaaaauaaugcacugg

SEQ ID NO: 351403 - RNA, 32 nt, Homo Sapiens
aaaguugauuacaaacgggaccauauuuugcu

SEQ ID NO: 351404 - RNA, 32 nt, Homo Sapiens
gagucagugccguuugcgccaguuggaaucga

SEQ ID NO: 351405 - RNA, 32 nt, Homo Sapiens
ggcugugcuguggccgccacggcacgcgggaa

SEQ ID NO: 351406 - RNA, 32 nt, Homo Sapiens
ugugcaucuuuuuuuucuuuuuuuaacaaaug

SEQ ID NO: 351407 - RNA, 32 nt, Homo Sapiens
cggugcugggucgggccgacgugccacccacc

SEQ ID NO: 351408 - RNA, 32 nt, Homo Sapiens
uguguuauacuuccuauuuuuaaugggcuuuu

SEQ ID NO: 351409 - RNA, 32 nt, Homo Sapiens
ugaccaccaccgcuccuccaccugcauccggc

SEQ ID NO: 351410 - RNA, 32 nt, Homo Sapiens
cacaagggggagaggcagcugggccagaccga

SEQ ID NO: 351411 - RNA, 32 nt, Homo Sapiens
uaguugaacaguuuaaugauuagucauuuuaa

SEQ ID NO: 351412 - RNA, 32 nt, Homo Sapiens
auccaucuguggccgauuuuuuccaagagcca

SEQ ID NO: 351413 - RNA, 32 nt, Homo Sapiens
agaagacuugacagcuugagaauagaggaaaa

SEQ ID NO: 351414 - RNA, 32 nt, Homo Sapiens
uagcaacgccacuccuucucagucuucaucga

SEQ ID NO: 351415 - RNA, 32 nt, Homo Sapiens
ccccucccccuuccccucccccuugggacgcg

SEQ ID NO: 351416 - RNA, 32 nt, Homo Sapiens
caaggagaagauccaugguuauuagagaaaga

SEQ ID NO: 351417 - RNA, 32 nt, Homo Sapiens
uccgcccugacccuccugcugccuucccaccc

SEQ ID NO: 351418 - RNA, 32 nt, Homo Sapiens
gcuauggagagggcuugaaauguguacaggug

SEQ ID NO: 351419 - RNA, 32 nt, Homo Sapiens
agucugcccucccuccucagucauguuaaacu

SEQ ID NO: 351420 - RNA, 32 nt, Homo Sapiens
cggggggugccuccccgcacagcgaugggggu

SEQ ID NO: 351421 - RNA, 32 nt, Homo Sapiens
ggcaauauuauuaucuacuuaagcaaagagaa

SEQ ID NO: 351422 - RNA, 32 nt, Homo Sapiens
cuugcagaaaaaauauuacaugcuaaauaaau

SEQ ID NO: 351423 - RNA, 32 nt, Homo Sapiens
cagcccacaucccacuuccuuaaaagucccuu

SEQ ID NO: 351424 - RNA, 32 nt, Homo Sapiens
ucucaguuucuuuuucuauaaaaugggcauaa

SEQ ID NO: 351425 - RNA, 32 nt, Homo Sapiens
gcugccucugcgaauggacggcgugggaagag

SEQ ID NO: 351426 - RNA, 32 nt, Homo Sapiens
gaacagcuauaaugacauugcauauuaaacau

SEQ ID NO: 351427 - RNA, 32 nt, Homo Sapiens
cuguggcucugaaaaugaagauuuggaaggag

SEQ ID NO: 351428 - RNA, 32 nt, Homo Sapiens
guuagagguauacauuuauuuaucuguuguac

SEQ ID NO: 351429 - RNA, 32 nt, Homo Sapiens
ccaggcgcagugggcucuuccagcggccaagc

SEQ ID NO: 351430 - RNA, 32 nt, Homo Sapiens
ucagacugauaaagaagugcuaacagauaagc

SEQ ID NO: 351431 - RNA, 32 nt, Homo Sapiens
aguacaaauaucuauuuuccuguuuuaauuuc

SEQ ID NO: 351432 - RNA, 32 nt, Homo Sapiens
guugcuacuggcuggauagcucugauggugga

SEQ ID NO: 351433 - RNA, 32 nt, Homo Sapiens
guggcuucucaauaaauauucagauguccuaa

SEQ ID NO: 351434 - RNA, 32 nt, Homo Sapiens
aaucucggcucacugcaagcuccaccuccugg

SEQ ID NO: 351435 - RNA, 32 nt, Homo Sapiens
ccuaagccugacgccugcacugggcccuccgg

SEQ ID NO: 351436 - RNA, 32 nt, Homo Sapiens
cucccaggccccaacggcagcacuuaugguag

SEQ ID NO: 351437 - RNA, 32 nt, Homo Sapiens
uaccagcagaaagguuaguaucaucagauagc

SEQ ID NO: 351438 - RNA, 32 nt, Homo Sapiens
cuuucacuggggauugaaaagcaccuccaccc

SEQ ID NO: 351439 - RNA, 32 nt, Homo Sapiens
gaacucaggaugggaagaaaaaggaaacaagc

SEQ ID NO: 351440 - RNA, 32 nt, Homo Sapiens
gcgggccucccgcucccaguccuagcugcugu

SEQ ID NO: 351441 - RNA, 32 nt, Homo Sapiens
aagugcccgagcucgccgccgugugugcugcg

SEQ ID NO: 351442 - RNA, 30 nt, Homo Sapiens
gacuuaaucugugcugaagaagaccaguca

SEQ ID NO: 351443 - RNA, 32 nt, Homo Sapiens
aauaaugaaauaaacauuaauguuguuuggaa

SEQ ID NO: 351444 - RNA, 32 nt, Homo Sapiens
guaaaauuauaacugggcaagcauggaugaca

SEQ ID NO: 351445 - RNA, 32 nt, Homo Sapiens
aagauccagcggggcuucugggcgccgguucc

SEQ ID NO: 351446 - RNA, 32 nt, Homo Sapiens
cucucucccagggcuucggcucgagccugcga

SEQ ID NO: 351447 - RNA, 32 nt, Homo Sapiens
ugucaguggucuuuuuuuauuuucugauuuug

SEQ ID NO: 351448 - RNA, 30 nt, Homo Sapiens
uuauagaugugcuugggggaaaaugaaggg

SEQ ID NO: 351449 - RNA, 32 nt, Homo Sapiens
uggccacugcccucguccccagccugcacucc

SEQ ID NO: 351450 - RNA, 32 nt, Homo Sapiens
guuuuaugcccauuucauauuguugucugugu

SEQ ID NO: 351451 - RNA, 32 nt, Homo Sapiens
agcucgcauuccuccgcccgucccgcucccgc

SEQ ID NO: 351452 - RNA, 32 nt, Homo Sapiens
auaccaggaugcuucuucaugcaugcgaaggg

SEQ ID NO: 351453 - RNA, 32 nt, Homo Sapiens
agcgaccuguggacuaaaucugccacgauugg

SEQ ID NO: 351454 - RNA, 32 nt, Homo Sapiens
ugaagaaagacauaauaaauaguuaaaggauu

SEQ ID NO: 351455 - RNA, 32 nt, Homo Sapiens
cuuugguuuaauuuaaagccacaaccacauac

SEQ ID NO: 351456 - RNA, 32 nt, Homo Sapiens
uggcuuccagggggccgucaguccucagccgc

SEQ ID NO: 351457 - RNA, 32 nt, Homo Sapiens
uggcauccuaacuggcagcuacuaggaaaagg

SEQ ID NO: 351458 - RNA, 32 nt, Homo Sapiens
ggguucgaauugcaacggcagcugccgggcgu

SEQ ID NO: 351459 - RNA, 32 nt, Homo Sapiens
uccaggaagaaaagagggcaaagggaacaaug

SEQ ID NO: 351460 - RNA, 31 nt, Homo Sapiens
ccuuugaaauaaagaagugauguuuuuaaau

SEQ ID NO: 351461 - RNA, 32 nt, Homo Sapiens
gggagucaaaaugcuuccuggugccgggagug

SEQ ID NO: 351462 - RNA, 32 nt, Homo Sapiens
caagucuauuuuuauuuauuuauuuuucuucu

SEQ ID NO: 351463 - RNA, 32 nt, Homo Sapiens
ugaauaggaaaaacuuugacucuugcccagug

SEQ ID NO: 351464 - RNA, 32 nt, Homo Sapiens
cuugcacgucaucauagaauucauacuggaaa

SEQ ID NO: 351465 - RNA, 32 nt, Homo Sapiens
auguacgugucuguagguguguguauauauau

SEQ ID NO: 351466 - RNA, 32 nt, Homo Sapiens
uucuccugggaugacaauuugcugagagagug

SEQ ID NO: 351467 - RNA, 32 nt, Homo Sapiens
gacgggugguggugucugucagacacacacag

SEQ ID NO: 351468 - RNA, 32 nt, Homo Sapiens
ugucuggcugaagauuugaugugguuccuccu

SEQ ID NO: 351469 - RNA, 32 nt, Homo Sapiens
ucuguauauuuuuguuguaacauauuauuuga

SEQ ID NO: 351470 - RNA, 32 nt, Homo Sapiens
aacuuuuuaacucuuuauucucuucucucgug

SEQ ID NO: 351471 - RNA, 32 nt, Homo Sapiens
augcccgaacccagccccugucggcagagaca

SEQ ID NO: 351472 - RNA, 32 nt, Homo Sapiens
gaaaaaaaagaaaaaaucaugccagcuaauca

SEQ ID NO: 351473 - RNA, 32 nt, Homo Sapiens
gcguuguuuucuucuuuuucuuuuccuuuauc

SEQ ID NO: 351474 - RNA, 32 nt, Homo Sapiens
acaguugccagagagggagaagagaguaugua

SEQ ID NO: 351475 - RNA, 32 nt, Homo Sapiens
acauggcucagcaucugugccaaacauaggcg

SEQ ID NO: 351476 - RNA, 32 nt, Homo Sapiens
agaaauaguuuuaugcaaaauuuuaaaaaaug

SEQ ID NO: 351477 - RNA, 32 nt, Homo Sapiens
uaaauacugagcucaguaaguuguguuagggg

SEQ ID NO: 351478 - RNA, 32 nt, Homo Sapiens
cugccccccgcggcggcuugaccuugaacgag

SEQ ID NO: 351479 - RNA, 32 nt, Homo Sapiens
gcuaaguuuuuguauuuuuaguagaggcgggg

SEQ ID NO: 351480 - RNA, 32 nt, Homo Sapiens
caaugugacaacacuaugaugucauuuggaag

SEQ ID NO: 351481 - RNA, 32 nt, Homo Sapiens
uuuuagugucugaccuaauauuuggagcuauc

SEQ ID NO: 351482 - RNA, 32 nt, Homo Sapiens
gcaccauccagaagcugccacacuaacagagu

SEQ ID NO: 351483 - RNA, 32 nt, Homo Sapiens
ccugaagaagauguuauugcuauuauaaucau

SEQ ID NO: 351484 - RNA, 32 nt, Homo Sapiens
uucuauuucuucauaauuugcaaagaaccagu

SEQ ID NO: 351485 - RNA, 32 nt, Homo Sapiens
aggcaagagcuacuaagccaacuggaacugug

SEQ ID NO: 351486 - RNA, 32 nt, Homo Sapiens
uuggaaggcauuaugugauuuacaauaugaga

SEQ ID NO: 351487 - RNA, 32 nt, Homo Sapiens
aaaugugagcacuguuagcagaugccuauggg

SEQ ID NO: 351488 - RNA, 32 nt, Homo Sapiens
cuucagggaagaccagaguccuggacagagag

SEQ ID NO: 351489 - RNA, 32 nt, Homo Sapiens
cagcugcccagcugccucccuucuuggacagc

SEQ ID NO: 351490 - RNA, 32 nt, Homo Sapiens
ccauggauggcaaaugugaugugcucccuucc

SEQ ID NO: 351491 - RNA, 32 nt, Homo Sapiens
gacaaucugguuccaacaccacaguguggcug

SEQ ID NO: 351492 - RNA, 32 nt, Homo Sapiens
gggugcucggacagaauucuuaccacagcaaa

SEQ ID NO: 351493 - RNA, 32 nt, Homo Sapiens
caucaagugucugaaauucaauauugguuuau

SEQ ID NO: 351494 - RNA, 32 nt, Homo Sapiens
uugucacuguguauauaauguuuugaagugac

SEQ ID NO: 351495 - RNA, 32 nt, Homo Sapiens
gauuuuaguuuaggaagacuaaaaguagccau

SEQ ID NO: 351496 - RNA, 32 nt, Homo Sapiens
cgcccaggccuuucuccaccggaggaccaggg

SEQ ID NO: 351497 - RNA, 32 nt, Homo Sapiens
acccucgggcagcacagcggggcugggacuca

SEQ ID NO: 351498 - RNA, 32 nt, Homo Sapiens
ccuguagccagaagcaauuuuuaaagaaaaua

SEQ ID NO: 351499 - RNA, 32 nt, Homo Sapiens
ccuugcauuaagcacaugauuuacagcuguga

SEQ ID NO: 351500 - RNA, 32 nt, Homo Sapiens
gcgcucgccgagggucgcuuggacccugaucu

SEQ ID NO: 351501 - RNA, 32 nt, Homo Sapiens
ugaauuuauucugugguaaaucuuuugaguug

SEQ ID NO: 351502 - RNA, 32 nt, Homo Sapiens
caacgacuccuuccugcuuccuggacaggacu

SEQ ID NO: 351503 - RNA, 32 nt, Homo Sapiens
aaucaggagaucugggguggggccuaggacuc

SEQ ID NO: 351504 - RNA, 32 nt, Homo Sapiens
ucuuacaggcuaacaucacaaacaauaaguuu

SEQ ID NO: 351505 - RNA, 32 nt, Homo Sapiens
ccaaaccacccagcccacauuccuccuuccug

SEQ ID NO: 351506 - RNA, 32 nt, Homo Sapiens
uaccagugacuaauuuugccacaggguacuaa

SEQ ID NO: 351507 - RNA, 32 nt, Homo Sapiens
ggcauuuggaccuguaggaaaagaggccagcu

SEQ ID NO: 351508 - RNA, 32 nt, Homo Sapiens
cucaugaucaugugucccccaacuccaccccu

SEQ ID NO: 351509 - RNA, 32 nt, Homo Sapiens
gcagcugugaauggccggugauguaugucagg

SEQ ID NO: 351510 - RNA, 32 nt, Homo Sapiens
gcauauuaguaacaacucuaaacugaauggga

SEQ ID NO: 351511 - RNA, 32 nt, Homo Sapiens
ccaucuuuugaaaaaccuggaagugaggagug

SEQ ID NO: 351512 - RNA, 32 nt, Homo Sapiens
uguuccuucuucauacugcugcucuguugcca

SEQ ID NO: 351513 - RNA, 32 nt, Homo Sapiens
ucccacagaaucuauuucugaugaauaugaaa

SEQ ID NO: 351514 - RNA, 32 nt, Homo Sapiens
aacauuucauuuuguuuuuggcccauggagcc

SEQ ID NO: 351515 - RNA, 32 nt, Homo Sapiens
aucuuggauuaugaagugacucucacaagaug

SEQ ID NO: 351516 - RNA, 32 nt, Homo Sapiens
ccgcugccuggcccgcgccguccggccgagcu

SEQ ID NO: 351517 - RNA, 32 nt, Homo Sapiens
uuguuuugagacaaaaucaccaccugucaaaa

SEQ ID NO: 351518 - RNA, 32 nt, Homo Sapiens
ucaggucaccgaagcaggacagcaaauuaaaa

SEQ ID NO: 351519 - RNA, 32 nt, Homo Sapiens
gaagauaaaggcauuacccccucuccgaggcc

SEQ ID NO: 351520 - RNA, 32 nt, Homo Sapiens
ggaaugagauaaagcauugacccaccacagga

SEQ ID NO: 351521 - RNA, 32 nt, Homo Sapiens
gcuguggagacggggcguccuggcuugaguuc

SEQ ID NO: 351522 - RNA, 32 nt, Homo Sapiens
cuuccugcaguuucucguggacacugcuggcu

SEQ ID NO: 351523 - RNA, 32 nt, Homo Sapiens
cugggagaaagcuggcuguuguccaaugccuu

SEQ ID NO: 351524 - RNA, 32 nt, Homo Sapiens
gcuccauuccgcucccaccccagccggcugcg

SEQ ID NO: 351525 - RNA, 32 nt, Homo Sapiens
ggggcgcgaccucggcccggccucccuucgcu

SEQ ID NO: 351526 - RNA, 32 nt, Homo Sapiens
uccuaguucucuuuguccaaucagauggcaag

SEQ ID NO: 351527 - RNA, 32 nt, Homo Sapiens
cugugucgaguuaaagaaaaaaucagcaguuu

SEQ ID NO: 351528 - RNA, 32 nt, Homo Sapiens
ggcccccucccucuccucuccucuccuauggu

SEQ ID NO: 351529 - RNA, 32 nt, Homo Sapiens
ggugcugaggcugggagggagggccauugggc

SEQ ID NO: 351530 - RNA, 32 nt, Homo Sapiens
auccaucuugucaaacacuuguccuuuguguu

SEQ ID NO: 351531 - RNA, 32 nt, Homo Sapiens
guuguagaguauuugcagaaggaaaccauuuc

SEQ ID NO: 351532 - RNA, 32 nt, Homo Sapiens
ugccccuccgucugccuccgcacggcuggcag

SEQ ID NO: 351533 - RNA, 32 nt, Homo Sapiens
cagagccggcccggcugccggacggugcggcc

SEQ ID NO: 351534 - RNA, 32 nt, Homo Sapiens
cucugaccacuuguguuaggaaaacuaucggc

SEQ ID NO: 351535 - RNA, 32 nt, Homo Sapiens
uuacacugacuucaggauagauguugggaugc

SEQ ID NO: 351536 - RNA, 32 nt, Homo Sapiens
ugucaauguauuaucaggaaacaugucuauac

SEQ ID NO: 351537 - RNA, 31 nt, Homo Sapiens
cugggaucacuccgacugccccgcgccucug

SEQ ID NO: 351538 - RNA, 28 nt, Homo Sapiens
uuggcaauccaggacauuauaaguagga

SEQ ID NO: 351539 - RNA, 32 nt, Homo Sapiens
ugcuguacauaguguauguuugugauauauaa

SEQ ID NO: 351540 - RNA, 32 nt, Homo Sapiens
uagguuagaucauguucucaccaauggucugc

SEQ ID NO: 351541 - RNA, 32 nt, Homo Sapiens
auauauuuggauguagcccuuauuuaauggcu

SEQ ID NO: 351542 - RNA, 32 nt, Homo Sapiens
gaaagagaugguucugauaucagcaacuguuc

SEQ ID NO: 351543 - RNA, 32 nt, Homo Sapiens
caggcagcacagagacccccggaacaagccua

SEQ ID NO: 351544 - RNA, 32 nt, Homo Sapiens
uuugguuugguuuguuauggcuuccuuuuuaa

SEQ ID NO: 351545 - RNA, 32 nt, Homo Sapiens
agggaggucaacauuaacgaguggggggauca

SEQ ID NO: 351546 - RNA, 32 nt, Homo Sapiens
ccuucuuagcauccuucaguaguuggacucgg

SEQ ID NO: 351547 - RNA, 32 nt, Homo Sapiens
agcagagggggcugccauccccugccugccac

SEQ ID NO: 351548 - RNA, 28 nt, Homo Sapiens
aacauggccgaguauacgcggcugcaca

SEQ ID NO: 351549 - RNA, 32 nt, Homo Sapiens
ggccugcaucugugucccacguccugcucagg

SEQ ID NO: 351550 - RNA, 32 nt, Homo Sapiens
aaucagagacagcuagagcaagggcagacaug

SEQ ID NO: 351551 - RNA, 32 nt, Homo Sapiens
aaaaacccuacuacguaugacucuaaccugau

SEQ ID NO: 351552 - RNA, 32 nt, Homo Sapiens
gcagaaugugaguaucuuucugagcauuuuuu

SEQ ID NO: 351553 - RNA, 32 nt, Homo Sapiens
agguucagcccacccacccccaugauuguaug

SEQ ID NO: 351554 - RNA, 32 nt, Homo Sapiens
cccgcggccggcggcuccuccucccacucugc

SEQ ID NO: 351555 - RNA, 32 nt, Homo Sapiens
caaaaggcauaaucggaaauagagacuacaua

SEQ ID NO: 351556 - RNA, 32 nt, Homo Sapiens
gcauuaagaacaaagauugagguuuccuaaag

SEQ ID NO: 351557 - RNA, 32 nt, Homo Sapiens
guguuuucaugucuuuuuucagcccucucaga

SEQ ID NO: 351558 - RNA, 32 nt, Homo Sapiens
ccacugaacaauuugagguaaaaucauucaca

SEQ ID NO: 351559 - RNA, 32 nt, Homo Sapiens
ugagccggccgcgggcgcgaccggaggcaguu

SEQ ID NO: 351560 - RNA, 32 nt, Homo Sapiens
guccagcgcuggcggugcaacugcggccgcgc

SEQ ID NO: 351561 - RNA, 32 nt, Homo Sapiens
agucuguaaaauggagguugcauucccuacuu

SEQ ID NO: 351562 - RNA, 32 nt, Homo Sapiens
ugggcaugguggcucacgccuguggucccagc

SEQ ID NO: 351563 - RNA, 32 nt, Homo Sapiens
aggcagguggaucaccugaggucagcaguuca

SEQ ID NO: 351564 - RNA, 32 nt, Homo Sapiens
uguuguugguuuuuauuuuuuauacuuuggcc

SEQ ID NO: 351565 - RNA, 32 nt, Homo Sapiens
aauccucauuuuacuccuuguuaucccagagu

SEQ ID NO: 351566 - RNA, 32 nt, Homo Sapiens
caaugggcccacgaccaagacccuggguguuc

SEQ ID NO: 351567 - RNA, 32 nt, Homo Sapiens
cgaguggucggaccaaacgcaacgagucuucg

SEQ ID NO: 351568 - RNA, 32 nt, Homo Sapiens
aaggaauuugacaacaucuauaaggcccaggu

SEQ ID NO: 351569 - RNA, 30 nt, Homo Sapiens
gcugcaggagguggggugaggacauuggau

SEQ ID NO: 351570 - RNA, 32 nt, Homo Sapiens
ccuuacuggucaaacgggauaaugggauacua

SEQ ID NO: 351571 - RNA, 32 nt, Homo Sapiens
uccaaagccccggccagcaaggccucagaggc

SEQ ID NO: 351572 - RNA, 32 nt, Homo Sapiens
cugaggagaaaguacagggccaauuuaaccuc

SEQ ID NO: 351573 - RNA, 32 nt, Homo Sapiens
uuuuguauguuaacaguacuuuauugaggugu

SEQ ID NO: 351574 - RNA, 32 nt, Homo Sapiens
gcccaucccuagacacaggggcuugcagccuu

SEQ ID NO: 351575 - RNA, 32 nt, Homo Sapiens
caugaagcacucuuggaguuguggguccugcc

SEQ ID NO: 351576 - RNA, 32 nt, Homo Sapiens
cgguguggaauauuaacccaaucuuugauaac

SEQ ID NO: 351577 - RNA, 32 nt, Homo Sapiens
aauguggaggaacguuacacacaccaugucgc

SEQ ID NO: 351578 - RNA, 32 nt, Homo Sapiens
agccucugcuggugauacccaggcaaacaggg

SEQ ID NO: 351579 - RNA, 32 nt, Homo Sapiens
ugacuuacaaacucuucuuaaucauuaucaau

SEQ ID NO: 351580 - RNA, 32 nt, Homo Sapiens
gcgccagcccucgggccggcccggaugaccag

SEQ ID NO: 351581 - RNA, 32 nt, Homo Sapiens
agccggcuuccgaggagacgccgggaggccac

SEQ ID NO: 351582 - RNA, 32 nt, Homo Sapiens
cagggaggcccacgguuagacaccaggcagaa

SEQ ID NO: 351583 - RNA, 32 nt, Homo Sapiens
caaagacguuuaccaguaauaucaccaggcac

SEQ ID NO: 351584 - RNA, 32 nt, Homo Sapiens
accggguccagcugcgucagcccgaguucuga

SEQ ID NO: 351585 - RNA, 32 nt, Homo Sapiens
guuucuuuuuacauucauaucuuaaaaauuaa

SEQ ID NO: 351586 - RNA, 32 nt, Homo Sapiens
uuuuaaaguauuaaaaccaaggaaaccccaau

SEQ ID NO: 351587 - RNA, 32 nt, Homo Sapiens
ccuggggcaugccugccucauguggggguguc

SEQ ID NO: 351588 - RNA, 29 nt, Homo Sapiens
ccccauggaguccucacccaucccccagu

SEQ ID NO: 351589 - RNA, 32 nt, Homo Sapiens
gggaacuggcuuacuuggggccccacccggga

SEQ ID NO: 351590 - RNA, 32 nt, Homo Sapiens
augacauuuuuagagaugcuuuuguagacaag

SEQ ID NO: 351591 - RNA, 32 nt, Homo Sapiens
aggggcugcaaagggaauaggcugauggagcu

SEQ ID NO: 351592 - RNA, 32 nt, Homo Sapiens
uuaaaacugugaaaaauagcuauaaaauuaua

SEQ ID NO: 351593 - RNA, 32 nt, Homo Sapiens
ccugggcaguccccggccugcgucuuccucag

SEQ ID NO: 351594 - RNA, 32 nt, Homo Sapiens
gcccagccccgcccuccacaccuccggcgcuc

SEQ ID NO: 351595 - RNA, 30 nt, Homo Sapiens
ugagcaggcaggcuccccucccgaguccug

SEQ ID NO: 351596 - RNA, 32 nt, Homo Sapiens
gucuggauguaccccaguuuauccccucaccu

SEQ ID NO: 351597 - RNA, 32 nt, Homo Sapiens
aagucauuuacuuuuucuuuugauauaccaug

SEQ ID NO: 351598 - RNA, 32 nt, Homo Sapiens
ugcgccccgaugcggcggcgaccuccgggucu

SEQ ID NO: 351599 - RNA, 32 nt, Homo Sapiens
auuggagaugaccaguccuuucugggaccuca

SEQ ID NO: 351600 - RNA, 32 nt, Homo Sapiens
cucuccugggaccgcuggggggcccccgcccc

SEQ ID NO: 351601 - RNA, 32 nt, Homo Sapiens
ucaaaaccaaucugauuaaaucaggaaaucau

SEQ ID NO: 351602 - RNA, 32 nt, Homo Sapiens
accugguaacaagccuguuaauauauuaagau

SEQ ID NO: 351603 - RNA, 32 nt, Homo Sapiens
ucaccacacucuucuuuuuuuuuuuuuuuuuu

SEQ ID NO: 351604 - RNA, 32 nt, Homo Sapiens
cucaggcacacuuucucaggaccuccugagag

SEQ ID NO: 351605 - RNA, 32 nt, Homo Sapiens
guagcuagguagucaaauggagcccuuuaauc

SEQ ID NO: 351606 - RNA, 32 nt, Homo Sapiens
gcugguuccccucuccagcuggaggccgaguu

SEQ ID NO: 351607 - RNA, 32 nt, Homo Sapiens
cacauaauuuaaauuauauaaaugcuagaaau

SEQ ID NO: 351608 - RNA, 32 nt, Homo Sapiens
accgccgccguccgccgucaccuacccggacu

SEQ ID NO: 351609 - RNA, 32 nt, Homo Sapiens
auacugugaugauggauugcaagugcaaagag

SEQ ID NO: 351610 - RNA, 32 nt, Homo Sapiens
aaugcuuguaaaugaaaggauuaucuuuuuug

SEQ ID NO: 351611 - RNA, 32 nt, Homo Sapiens
aaaaguguuagggauuccuuccaauaguuaga

SEQ ID NO: 351612 - RNA, 32 nt, Homo Sapiens
ucuguggaagggggcgaggcuaugucgcggug

SEQ ID NO: 351613 - RNA, 32 nt, Homo Sapiens
ugacccuggggccccgacccagcccugccucc

SEQ ID NO: 351614 - RNA, 32 nt, Homo Sapiens
aauauuuacccauacacuucaagaauguuuga

SEQ ID NO: 351615 - RNA, 32 nt, Homo Sapiens
cuuuaccucuacuuuaccaccaccacccuuuu

SEQ ID NO: 351616 - RNA, 32 nt, Homo Sapiens
ugcuagagcuauuuuuaccuauguauuuaucg

SEQ ID NO: 351617 - RNA, 32 nt, Homo Sapiens
uuuaucaugugguugcugguguguguaauuau

SEQ ID NO: 351618 - RNA, 32 nt, Homo Sapiens
agacauugcauucuacuacugcucugaugguu

SEQ ID NO: 351619 - RNA, 32 nt, Homo Sapiens
gggaugcaacacaaguuucauuugagccugaa

SEQ ID NO: 351620 - RNA, 32 nt, Homo Sapiens
aauaauaguaaauucucuugcauguuccauua

SEQ ID NO: 351621 - RNA, 32 nt, Homo Sapiens
ucaaacuuuacuauggcccuggccuagcauac

SEQ ID NO: 351622 - RNA, 32 nt, Homo Sapiens
ggcucccccuccccgugaucgcuccgcacucc

SEQ ID NO: 351623 - RNA, 32 nt, Homo Sapiens
gcuccagaggggcccaggcugcagccugccac

SEQ ID NO: 351624 - RNA, 32 nt, Homo Sapiens
cacucccgacuguguggagaucuuccaccaug

SEQ ID NO: 351625 - RNA, 32 nt, Homo Sapiens
uuuuuaaaaaauaaccuagacuaugcaaaaca

SEQ ID NO: 351626 - RNA, 32 nt, Homo Sapiens
auuccaagauacugaggucauaaucagaagcu

SEQ ID NO: 351627 - RNA, 32 nt, Homo Sapiens
ccucaacucugccccaccccagccucuuccag

SEQ ID NO: 351628 - RNA, 32 nt, Homo Sapiens
agagcagguguugugccuggagcugcucuccu

SEQ ID NO: 351629 - RNA, 32 nt, Homo Sapiens
aaaagccaggguagcaguaacaugacaaacgg

SEQ ID NO: 351630 - RNA, 32 nt, Homo Sapiens
aucggagggugcagcauacaccuaccacucag

SEQ ID NO: 351631 - RNA, 32 nt, Homo Sapiens
aguagcaacauugcgguuuucagacacauggu

SEQ ID NO: 351632 - RNA, 32 nt, Homo Sapiens
aguucaaaaccuaauaauguugucguuguugc

SEQ ID NO: 351633 - RNA, 32 nt, Homo Sapiens
cucccagacaccuuugccacauccccucacag

SEQ ID NO: 351634 - RNA, 32 nt, Homo Sapiens
ucguugucuucaccacccugaccagagccuug

SEQ ID NO: 351635 - RNA, 32 nt, Homo Sapiens
gagaagauauucuggugacugaaaguaugguc

SEQ ID NO: 351636 - RNA, 32 nt, Homo Sapiens
gaagccagacaacaacagcaucaaaacaaggc

SEQ ID NO: 351637 - RNA, 32 nt, Homo Sapiens
ugaaaugaacuguaguagguguguaguuuggg

SEQ ID NO: 351638 - RNA, 32 nt, Homo Sapiens
uuuaugcagacacagccccucaagacaagaaa

SEQ ID NO: 351639 - RNA, 32 nt, Homo Sapiens
gguucccagcuggccugagcagggggccugcc

SEQ ID NO: 351640 - RNA, 32 nt, Homo Sapiens
cugcaggaacucucccgucugugagaagccuc

SEQ ID NO: 351641 - RNA, 32 nt, Homo Sapiens
gcagcucccccagccacaagcauuacaugauc

SEQ ID NO: 351642 - RNA, 32 nt, Homo Sapiens
ucaaggaacgaaggggccacugacucagagcg

SEQ ID NO: 351643 - RNA, 32 nt, Homo Sapiens
cuguggaccgcaaauaacccuguacaaagagg

SEQ ID NO: 351644 - RNA, 32 nt, Homo Sapiens
aguuggcuuugugaaacugaggcaggauuucc

SEQ ID NO: 351645 - RNA, 32 nt, Homo Sapiens
cucagugcaaccuccgccacccggguucaggc

SEQ ID NO: 351646 - RNA, 32 nt, Homo Sapiens
uugaaaauauagugguugaggaccaauuccuc

SEQ ID NO: 351647 - RNA, 32 nt, Homo Sapiens
gagcgcucuuccgcgaccccaacagccucugg

SEQ ID NO: 351648 - RNA, 32 nt, Homo Sapiens
uugccaagauuucaccccuccuccucaagccc

SEQ ID NO: 351649 - RNA, 32 nt, Homo Sapiens
aacugaguguucucuuguuucuuugcauuaau

SEQ ID NO: 351650 - RNA, 32 nt, Homo Sapiens
gcuugcccucucccggccccgggacuccggga

SEQ ID NO: 351651 - RNA, 30 nt, Homo Sapiens
uauaggggagguguggggcgacagggucug

SEQ ID NO: 351652 - RNA, 32 nt, Homo Sapiens
uuugggguuuuuggaauccggaugcuguugaa

SEQ ID NO: 351653 - RNA, 32 nt, Homo Sapiens
uauuuaauuucuuuucuuccugucuguuccuc

SEQ ID NO: 351654 - RNA, 32 nt, Homo Sapiens
cccuuaggaugaagcugagucuuaccaaggua

SEQ ID NO: 351655 - RNA, 32 nt, Homo Sapiens
acgugcacuggaugauuuuucuuuugaacauu

SEQ ID NO: 351656 - RNA, 32 nt, Homo Sapiens
uuucuuuuggccgcggacaaggucggcagagg

SEQ ID NO: 351657 - RNA, 32 nt, Homo Sapiens
uugaauguuuuaacagcaagaauuuuaagaaa

SEQ ID NO: 351658 - RNA, 32 nt, Homo Sapiens
aguuguaacaagaaccugaggccgcuggagaa

SEQ ID NO: 351659 - RNA, 32 nt, Homo Sapiens
ggaggaagaggcuugggcugcagaugcacgca

SEQ ID NO: 351660 - RNA, 32 nt, Homo Sapiens
uggggccaggucagccguggccccaccuacca

SEQ ID NO: 351661 - RNA, 32 nt, Homo Sapiens
cuggagcccucccaguaccucgggcugcaaga

SEQ ID NO: 351662 - RNA, 32 nt, Homo Sapiens
ugcagaagccccagagaaucuaacucaugccu

SEQ ID NO: 351663 - RNA, 32 nt, Homo Sapiens
uugggggaccaagucaggcagaucacuuuagg

SEQ ID NO: 351664 - RNA, 32 nt, Homo Sapiens
aacaacucaagcccccaauucccaucgcauuc

SEQ ID NO: 351665 - RNA, 32 nt, Homo Sapiens
auuccuuuagaauuaacagcccuccaugcugu

SEQ ID NO: 351666 - RNA, 32 nt, Homo Sapiens
acugaauuugaaaccccccauuuuuucuuuuc

SEQ ID NO: 351667 - RNA, 32 nt, Homo Sapiens
auagaagaaggggaguguccgcaaaauggaaa

SEQ ID NO: 351668 - RNA, 32 nt, Homo Sapiens
cugcuacaaguaagaguuuggugcugguagaa

SEQ ID NO: 351669 - RNA, 32 nt, Homo Sapiens
auugauccauuuauuuuaauggcugccuuuuc

SEQ ID NO: 351670 - RNA, 32 nt, Homo Sapiens
ugccugcccccggccccgcgccccuacagccg

SEQ ID NO: 351671 - RNA, 32 nt, Homo Sapiens
auuugggaauggggagauugcccaccuguuau

SEQ ID NO: 351672 - RNA, 32 nt, Homo Sapiens
cauggagcaggaacuggaguaaaugcaauacu

SEQ ID NO: 351673 - RNA, 32 nt, Homo Sapiens
aaucauuuuaauauauuuuaaauuaaacauag

SEQ ID NO: 351674 - RNA, 32 nt, Homo Sapiens
cacuccccuaccccuuccccagccacugcugc

SEQ ID NO: 351675 - RNA, 32 nt, Homo Sapiens
gagcuggccugccuggaccuuguucccugggg

SEQ ID NO: 351676 - RNA, 32 nt, Homo Sapiens
acaugcuugcucaaaucaaucaccuuauuuua

SEQ ID NO: 351677 - RNA, 32 nt, Homo Sapiens
uauucagaagcagucuucaccuacacgaucuu

SEQ ID NO: 351678 - RNA, 32 nt, Homo Sapiens
uuuuggagaaaguuaaaacuagcuuuagagua

SEQ ID NO: 351679 - RNA, 32 nt, Homo Sapiens
ugaguuuggacaauuuuaucuaauuguaauuc

SEQ ID NO: 351680 - RNA, 32 nt, Homo Sapiens
cacccuuuccaggaauaauguuuugggaaaca

SEQ ID NO: 351681 - RNA, 32 nt, Homo Sapiens
gcugcccgccggggaaucccccggguggcgcc

SEQ ID NO: 351682 - RNA, 32 nt, Homo Sapiens
gggcauguuauucuuggugcugccuggggugu

SEQ ID NO: 351683 - RNA, 30 nt, Homo Sapiens
uacucccaguuugcugcagaaucucacaua

SEQ ID NO: 351684 - RNA, 32 nt, Homo Sapiens
ucuguuuccaaugggguuuuuggcgcauucuc

SEQ ID NO: 351685 - RNA, 32 nt, Homo Sapiens
uuguauuuuuauuguuaaugcucuucuuaugg

SEQ ID NO: 351686 - RNA, 32 nt, Homo Sapiens
gugaaaggaagcaagaagaaaagggguuugug

SEQ ID NO: 351687 - RNA, 32 nt, Homo Sapiens
agcugcguuccuccuuuccccucuccuuugga

SEQ ID NO: 351688 - RNA, 32 nt, Homo Sapiens
uucccuucccccuacaagauuaugagacccca

SEQ ID NO: 351689 - RNA, 32 nt, Homo Sapiens
uuugcugccauguucuuuuuuacaagaaggaa

SEQ ID NO: 351690 - RNA, 32 nt, Homo Sapiens
aauucuacuuugagugcugucuccauguuuga

SEQ ID NO: 351691 - RNA, 32 nt, Homo Sapiens
ugaguagggggagaggcaccaccuggggaaga

SEQ ID NO: 351692 - RNA, 32 nt, Homo Sapiens
gguguuuaaauuauagacuaggucauaaaaaa

SEQ ID NO: 351693 - RNA, 32 nt, Homo Sapiens
auauuuuugucaaaacaaaugcuguacuccaa

SEQ ID NO: 351694 - RNA, 32 nt, Homo Sapiens
gaaaugacauauauuaucuuugaauaucuaca

SEQ ID NO: 351695 - RNA, 32 nt, Homo Sapiens
gccccaagggcgcgucauggccccacacaccu

SEQ ID NO: 351696 - RNA, 32 nt, Homo Sapiens
auauguauauccuguuaucaauaaaacaauua

SEQ ID NO: 351697 - RNA, 32 nt, Homo Sapiens
agugagggcccauuuugugguucaagugcacu

SEQ ID NO: 351698 - RNA, 32 nt, Homo Sapiens
aaaauagccucuuuucucauagugcaguugua

SEQ ID NO: 351699 - RNA, 32 nt, Homo Sapiens
gagaaaagaaaguuuucugaaaaaaugcagua

SEQ ID NO: 351700 - RNA, 32 nt, Homo Sapiens
ggccucgggccucccuucuccuccaaaccuuc

SEQ ID NO: 351701 - RNA, 32 nt, Homo Sapiens
augcaugggaaaugaaagauuuuuguaaaaag

SEQ ID NO: 351702 - RNA, 31 nt, Homo Sapiens
agggggcgucagcgagccgugagaugcgugg

SEQ ID NO: 351703 - RNA, 32 nt, Homo Sapiens
ggaucacagaccugaaucuguuguguugguaa

SEQ ID NO: 351704 - RNA, 32 nt, Homo Sapiens
guccagcaccagccaagcuggugcuccagcgc

SEQ ID NO: 351705 - RNA, 30 nt, Homo Sapiens
agauuaugguuaaagggggaaaauuacuag

SEQ ID NO: 351706 - RNA, 32 nt, Homo Sapiens
cuccacauuccauuuuaauugauaugagggug

SEQ ID NO: 351707 - RNA, 31 nt, Homo Sapiens
ugguggcccucuccccugcccccugcaggaa

SEQ ID NO: 351708 - RNA, 32 nt, Homo Sapiens
cuccccugccccagcucgagccaggcucugga

SEQ ID NO: 351709 - RNA, 32 nt, Homo Sapiens
cgccugcaaucccagcacuuugggaggccgag

SEQ ID NO: 351710 - RNA, 32 nt, Homo Sapiens
augugaaccgugugcaaagccuuuaaaugguc

SEQ ID NO: 351711 - RNA, 32 nt, Homo Sapiens
uggccuuccuucccuucucccaucccuggccu

SEQ ID NO: 351712 - RNA, 32 nt, Homo Sapiens
guaauuuuacuucuuucuuucugauuuggaug

SEQ ID NO: 351713 - RNA, 28 nt, Homo Sapiens
caagaaaagucaggaccaaaugacagag

SEQ ID NO: 351714 - RNA, 32 nt, Homo Sapiens
ccuuagcaaauucuguuuuucuaggccugggg

SEQ ID NO: 351715 - RNA, 32 nt, Homo Sapiens
gucuggucucagggcgcaaacacaucccugca

SEQ ID NO: 351716 - RNA, 32 nt, Homo Sapiens
agggugagauagaaaaucauaguucuuuuaug

SEQ ID NO: 351717 - RNA, 32 nt, Homo Sapiens
auugcauauucuauguuuuguaguguuuggau

SEQ ID NO: 351718 - RNA, 32 nt, Homo Sapiens
uuccugcccauuuuccucucuggcuuccugcc

SEQ ID NO: 351719 - RNA, 32 nt, Homo Sapiens
acacaugaggcagagggaagacauugaagaaa

SEQ ID NO: 351720 - RNA, 32 nt, Homo Sapiens
ggugauguugggaagauguuucccugccaucu

SEQ ID NO: 351721 - RNA, 32 nt, Homo Sapiens
cccugggcugaggcccuggcccugcccccggc

SEQ ID NO: 351722 - RNA, 32 nt, Homo Sapiens
acgaugaucugccugcuuucacuguguuguuc

SEQ ID NO: 351723 - RNA, 32 nt, Homo Sapiens
gaaagaaggcuuuuauugaacagcuuaucuuc

SEQ ID NO: 351724 - RNA, 32 nt, Homo Sapiens
gggaauggaaagggcuucuuagaccuugaugg

SEQ ID NO: 351725 - RNA, 32 nt, Homo Sapiens
cuuugggggcccagcucugcagauuccacucc

SEQ ID NO: 351726 - RNA, 32 nt, Homo Sapiens
caaauuuguuuuuauuucuucuucucccuuuc

SEQ ID NO: 351727 - RNA, 32 nt, Homo Sapiens
guuucucaagggggucacuuucccucucaccg

SEQ ID NO: 351728 - RNA, 32 nt, Homo Sapiens
gagaaauauaaauacauagaaauggugcaucu

SEQ ID NO: 351729 - RNA, 32 nt, Homo Sapiens
aaaauugugucauauugaauguuuuuucaccu

SEQ ID NO: 351730 - RNA, 32 nt, Homo Sapiens
acuuuguguacaaaacuuuuuucaucuguaau

SEQ ID NO: 351731 - RNA, 28 nt, Homo Sapiens
ggagcggggaggcgcccgaggugagaca

SEQ ID NO: 351732 - RNA, 32 nt, Homo Sapiens
gaagggcagcggguaagguucccaagccagcc

SEQ ID NO: 351733 - RNA, 32 nt, Homo Sapiens
gagaaagaaagaucaauucuuuguuugcagua

SEQ ID NO: 351734 - RNA, 32 nt, Homo Sapiens
ucucuuuugguuuggauauugggaugcuuaga

SEQ ID NO: 351735 - RNA, 32 nt, Homo Sapiens
uauuuucuuaaaaaauaccagcaguuacucau

SEQ ID NO: 351736 - RNA, 32 nt, Homo Sapiens
ugcuucagggaaguuggagauuuauuucugcu

SEQ ID NO: 351737 - RNA, 32 nt, Homo Sapiens
cugcagggugcacaacucccugccaaggaaaa

SEQ ID NO: 351738 - RNA, 32 nt, Homo Sapiens
cuuuguacuuuuuugugauuuuugaaugcacg

SEQ ID NO: 351739 - RNA, 32 nt, Homo Sapiens
uaggucaguuuagcaagaacaccuaacccccc

SEQ ID NO: 351740 - RNA, 32 nt, Homo Sapiens
ccaccgccccagccucaccccaucccacgacc

SEQ ID NO: 351741 - RNA, 32 nt, Homo Sapiens
aaauuagcauauauggaagaaaaaucacuauu

SEQ ID NO: 351742 - RNA, 32 nt, Homo Sapiens
guagcugacuauuauuuauauuucauaccuug

SEQ ID NO: 351743 - RNA, 32 nt, Homo Sapiens
uuaacccaugcuuucauaaaccccuucggaca

SEQ ID NO: 351744 - RNA, 32 nt, Homo Sapiens
ucuggcugcugcacuggacucauuccauuggc

SEQ ID NO: 351745 - RNA, 32 nt, Homo Sapiens
cauaugauacugagccaggucuccagggaaca

SEQ ID NO: 351746 - RNA, 32 nt, Homo Sapiens
guaagcacugacuucguagaaaaccauaacau

SEQ ID NO: 351747 - RNA, 32 nt, Homo Sapiens
aaauuguuauuaucagaaaaugaagcaacacu

SEQ ID NO: 351748 - RNA, 32 nt, Homo Sapiens
cgggcccuaaugcuuuuauaauuuaguuuaua

SEQ ID NO: 351749 - RNA, 32 nt, Homo Sapiens
cuucccaccaugccagaaugggaaguugugac

SEQ ID NO: 351750 - RNA, 27 nt, Homo Sapiens
ucuugucugugcuucagcccugcacaa

SEQ ID NO: 351751 - RNA, 32 nt, Homo Sapiens
gcccaguuucaaacuccugaccucaggugauc

SEQ ID NO: 351752 - RNA, 32 nt, Homo Sapiens
gcagcugugggccacugggucuggccccuuuu

SEQ ID NO: 351753 - RNA, 32 nt, Homo Sapiens
gaugucggcaaccuaaauucauguacccuauc

SEQ ID NO: 351754 - RNA, 32 nt, Homo Sapiens
cucuuccugccagcucucaggacaggugacug

SEQ ID NO: 351755 - RNA, 32 nt, Homo Sapiens
uaaauugaaagcuuuuuagagaugaacuuuca

SEQ ID NO: 351756 - RNA, 32 nt, Homo Sapiens
uccaauacaaucuguuguuuuguuuuguuuuu

SEQ ID NO: 351757 - RNA, 32 nt, Homo Sapiens
ucauccuuuccacuugcuaauuuugcuacaaa

SEQ ID NO: 351758 - RNA, 32 nt, Homo Sapiens
cugucccacucugguggggcugcucucgaucu

SEQ ID NO: 351759 - RNA, 32 nt, Homo Sapiens
auaaaguaaacaugcauacaaauaaaaaacau

SEQ ID NO: 351760 - RNA, 31 nt, Homo Sapiens
caugagaaauaaauguuuguugauuaauuaa

SEQ ID NO: 351761 - RNA, 32 nt, Homo Sapiens
auuucuaaauuaaucuuuuucagaaauaucga

SEQ ID NO: 351762 - RNA, 32 nt, Homo Sapiens
gcuuucagggacuuccuguuuccucuaggaga

SEQ ID NO: 351763 - RNA, 32 nt, Homo Sapiens
uguggacuagcgaugcuguuuguaaaaugaag

SEQ ID NO: 351764 - RNA, 32 nt, Homo Sapiens
caagacccuggggcuccgggucuucuuagcag

SEQ ID NO: 351765 - RNA, 32 nt, Homo Sapiens
uuucaguaaaaugauuauggaauuaaucagca

SEQ ID NO: 351766 - RNA, 30 nt, Homo Sapiens
aaucucaccucugccacccaucuacuugca

SEQ ID NO: 351767 - RNA, 32 nt, Homo Sapiens
cacugccuucgcugcgcacgccccucguguuu

SEQ ID NO: 351768 - RNA, 32 nt, Homo Sapiens
uucccagcaaggcucagagcugcgggucucca

SEQ ID NO: 351769 - RNA, 32 nt, Homo Sapiens
uguggauuuaauguggaaaugauguuucauaa

SEQ ID NO: 351770 - RNA, 32 nt, Homo Sapiens
aucaacuugauaaauaacuuauaggugauagu

SEQ ID NO: 351771 - RNA, 32 nt, Homo Sapiens
ggcucaagugauccuccugccucagcauccca

SEQ ID NO: 351772 - RNA, 32 nt, Homo Sapiens
gcguggugggucgggcagagucggaagaacug

SEQ ID NO: 351773 - RNA, 32 nt, Homo Sapiens
caggcagaggccggggaagcagcgcggcaucc

SEQ ID NO: 351774 - RNA, 32 nt, Homo Sapiens
ccgacuugcgcggcgguggcggcggcggccaa

SEQ ID NO: 351775 - RNA, 32 nt, Homo Sapiens
agauuguugcuuaguacuuaaacuucuuaaac

SEQ ID NO: 351776 - RNA, 32 nt, Homo Sapiens
uaacuuaccaaagguccauuaaggggagggaa

SEQ ID NO: 351777 - RNA, 32 nt, Homo Sapiens
cagggagaaaucauguauguacugcauguggu

SEQ ID NO: 351778 - RNA, 32 nt, Homo Sapiens
gccauccccacuuccuccucuaccccaacaca

SEQ ID NO: 351779 - RNA, 32 nt, Homo Sapiens
cuucccgugcgcgcggauccucgcuccguugc

SEQ ID NO: 351780 - RNA, 32 nt, Homo Sapiens
cucugaacaucauuaaguaguuaauaauaauu

SEQ ID NO: 351781 - RNA, 32 nt, Homo Sapiens
cagauuaacacuuuugaaauuuuuguagcuuu

SEQ ID NO: 351782 - RNA, 32 nt, Homo Sapiens
ucuaauaaaaauuuauugagugaaacaaucuu

SEQ ID NO: 351783 - RNA, 32 nt, Homo Sapiens
aaggaauuuggguugauuuaagaagagaaucc

SEQ ID NO: 351784 - RNA, 32 nt, Homo Sapiens
uguguaugucuccgcgucuuccgcggagcggg

SEQ ID NO: 351785 - RNA, 32 nt, Homo Sapiens
ggaggaaagcuacccuugcacagcgccugucc

SEQ ID NO: 351786 - RNA, 32 nt, Homo Sapiens
cccaccugguuuuugucaaggucuagacucuc

SEQ ID NO: 351787 - RNA, 32 nt, Homo Sapiens
caauggccaacccccgaccucauacaaacuca

SEQ ID NO: 351788 - RNA, 32 nt, Homo Sapiens
guaacuacagcuuugauuggaugggagacuga

SEQ ID NO: 351789 - RNA, 32 nt, Homo Sapiens
uuuugggaugagaacauuuuaguuguuuaguu

SEQ ID NO: 351790 - RNA, 32 nt, Homo Sapiens
cgucccugcgcuccaacguccgcgcggccacc

SEQ ID NO: 351791 - RNA, 32 nt, Homo Sapiens
ugccaggugccuauauuccaauaaaauguuca

SEQ ID NO: 351792 - RNA, 32 nt, Homo Sapiens
uuuguggaaaauuuaacuuaaccaauuacugc

SEQ ID NO: 351793 - RNA, 32 nt, Homo Sapiens
uugguaaagcuacuccuugaucgauccuuugc

SEQ ID NO: 351794 - RNA, 32 nt, Homo Sapiens
cagaagaggacacgguucccguaccgaagggu

SEQ ID NO: 351795 - RNA, 32 nt, Homo Sapiens
cuggacugggagcccccggccccgggcuccug

SEQ ID NO: 351796 - RNA, 32 nt, Homo Sapiens
aucugguggccccaagccccaaugcauaagcu

SEQ ID NO: 351797 - RNA, 32 nt, Homo Sapiens
ggaggguuuucuccucacccccucugcccucc

SEQ ID NO: 351798 - RNA, 32 nt, Homo Sapiens
aaaggcuuugcccugcugcccucccccuccuc

SEQ ID NO: 351799 - RNA, 32 nt, Homo Sapiens
uaauucagugguuuuuaguauauucacaagau

SEQ ID NO: 351800 - RNA, 32 nt, Homo Sapiens
ucaugagaaaucaacugauucaaucuuccuau

SEQ ID NO: 351801 - RNA, 32 nt, Homo Sapiens
augggcaauuuauuuuuuuuuauugcaaaagg

SEQ ID NO: 351802 - RNA, 32 nt, Homo Sapiens
gcguccuggaagcaguggccgcggcggcuccc

SEQ ID NO: 351803 - RNA, 32 nt, Homo Sapiens
cugcugaauuaaaacagauauuucauaaaaaa

SEQ ID NO: 351804 - RNA, 32 nt, Homo Sapiens
uugguuugacuuaauguauaaacugugaguua

SEQ ID NO: 351805 - RNA, 32 nt, Homo Sapiens
gggggcgagauuggcgggaggggggcgcgggg

SEQ ID NO: 351806 - RNA, 32 nt, Homo Sapiens
uagcuuuucauuaguggggauuuugucaauua

SEQ ID NO: 351807 - RNA, 32 nt, Homo Sapiens
ucucuucucgcgcgcgcacucucucuucaaca

SEQ ID NO: 351808 - RNA, 32 nt, Homo Sapiens
guugugguguccagugugcagcagcccuggga

SEQ ID NO: 351809 - RNA, 32 nt, Homo Sapiens
uuucgccaccgccuuuuccuugccucgcgccg

SEQ ID NO: 351810 - RNA, 32 nt, Homo Sapiens
uaguccaaauucaaaugguguuuuuuuguaaa

SEQ ID NO: 351811 - RNA, 32 nt, Homo Sapiens
aaacccuuucagaauacagaacgagaaaacua

SEQ ID NO: 351812 - RNA, 32 nt, Homo Sapiens
ugguaggugauaaagaggcaucuuuucuagag

SEQ ID NO: 351813 - RNA, 32 nt, Homo Sapiens
aaaaaugaccuuuuguucacuccacccucaga

SEQ ID NO: 351814 - RNA, 32 nt, Homo Sapiens
ggaaggugugagaggagagaaggaaguggcug

SEQ ID NO: 351815 - RNA, 32 nt, Homo Sapiens
caggccccgcgcgccaggcaggcuucgcggcu

SEQ ID NO: 351816 - RNA, 32 nt, Homo Sapiens
gucuugcgagaaguaagaagauggaaaaggag

SEQ ID NO: 351817 - RNA, 32 nt, Homo Sapiens
ugaaacaagcaaaacaaaacuuuccagccauu

SEQ ID NO: 351818 - RNA, 32 nt, Homo Sapiens
ucccaugucuugcucuucuccuggagaauucu

SEQ ID NO: 351819 - RNA, 32 nt, Homo Sapiens
guauaaauuuuuucuuuuuuuuuuuuuuuuua

SEQ ID NO: 351820 - RNA, 32 nt, Homo Sapiens
gcaaauccaucccacgccugccacgggcuucc

SEQ ID NO: 351821 - RNA, 32 nt, Homo Sapiens
gguggaggcucaggggaccccauggggacagg

SEQ ID NO: 351822 - RNA, 32 nt, Homo Sapiens
cgucugucuguuaucgucugucucucuugaca

SEQ ID NO: 351823 - RNA, 32 nt, Homo Sapiens
uauauuuuuuaaagcuauguaauuguucagcg

SEQ ID NO: 351824 - RNA, 32 nt, Homo Sapiens
gaccucauuaaccgaugcuuuaccaaacagca

SEQ ID NO: 351825 - RNA, 32 nt, Homo Sapiens
guaggcaagcuacuucuguggacuuugacuua

SEQ ID NO: 351826 - RNA, 32 nt, Homo Sapiens
uuucguuuuuaaaaggauguauaaauuuuuac

SEQ ID NO: 351827 - RNA, 32 nt, Homo Sapiens
caauauaaagcacuguuuuucuucagucguuu

SEQ ID NO: 351828 - RNA, 32 nt, Homo Sapiens
uccccaggguugcugaggaagagcuugaugau

SEQ ID NO: 351829 - RNA, 32 nt, Homo Sapiens
ggguaugugugcuuucuuugccuuccuauuuc

SEQ ID NO: 351830 - RNA, 29 nt, Homo Sapiens
uagcaauauauccaaugcucagaauugaa

SEQ ID NO: 351831 - RNA, 31 nt, Homo Sapiens
gcaagaaaauaaaaacaaaaauagauauuaa

SEQ ID NO: 351832 - RNA, 32 nt, Homo Sapiens
uauucaaggaaguuuuaacuuuaauacagcuc

SEQ ID NO: 351833 - RNA, 32 nt, Homo Sapiens
cgaggcgggcacggucuccgagucgcggacgc

SEQ ID NO: 351834 - RNA, 32 nt, Homo Sapiens
ugucagcccucccugcaacuucucuuuuuggc

SEQ ID NO: 351835 - RNA, 32 nt, Homo Sapiens
gaaagaacuucuaaccccacuccaccgcccaa

SEQ ID NO: 351836 - RNA, 32 nt, Homo Sapiens
aagugaacuaaauauauauguguauauguaua

SEQ ID NO: 351837 - RNA, 32 nt, Homo Sapiens
ccggcgcgagaccgaagcuggcggcuggucgg

SEQ ID NO: 351838 - RNA, 32 nt, Homo Sapiens
caaaaaauauauuuuagucuguuauuuaagaa

SEQ ID NO: 351839 - RNA, 32 nt, Homo Sapiens
ggaagggguggggggccuggaaacuucguucu

SEQ ID NO: 351840 - RNA, 32 nt, Homo Sapiens
gccacuaugcccaacuaacauuuggaauuuuc

SEQ ID NO: 351841 - RNA, 30 nt, Homo Sapiens
aucgcgaauaucccucgccggccuggcgcc

SEQ ID NO: 351842 - RNA, 32 nt, Homo Sapiens
uacaucugcaaaaucucuuuuaccaucuaagg

SEQ ID NO: 351843 - RNA, 32 nt, Homo Sapiens
ucacacacaauuuaugugcacacucacacaug

SEQ ID NO: 351844 - RNA, 32 nt, Homo Sapiens
ccauaguuccucugaaggugauuuuguaauuu

SEQ ID NO: 351845 - RNA, 32 nt, Homo Sapiens
auguuccagguacccuuggagggacugagauc

SEQ ID NO: 351846 - RNA, 32 nt, Homo Sapiens
uaauguaucuguccagcuuuacaauggagaaa

SEQ ID NO: 351847 - RNA, 32 nt, Homo Sapiens
cuaccugacaccuauuggcuuuggucugcucu

SEQ ID NO: 351848 - RNA, 32 nt, Homo Sapiens
gagcccggaucuugugcugcuuuucucacuga

SEQ ID NO: 351849 - RNA, 32 nt, Homo Sapiens
gguagcugggcccgcguccgccgcccgcaucc

SEQ ID NO: 351850 - RNA, 32 nt, Homo Sapiens
aauauuuuaaaaacaaaauuugugaaaccuau

SEQ ID NO: 351851 - RNA, 32 nt, Homo Sapiens
aaggagacaugggaugcacagaggaacgagcu

SEQ ID NO: 351852 - RNA, 32 nt, Homo Sapiens
ucaauguacaguguauagagguuccaaauucc

SEQ ID NO: 351853 - RNA, 32 nt, Homo Sapiens
cuuuccuugaacuuauucgugauacagauucc

SEQ ID NO: 351854 - RNA, 32 nt, Homo Sapiens
cccagcccaagccugagccugagcccgccccg

SEQ ID NO: 351855 - RNA, 32 nt, Homo Sapiens
uacugucuaacgaauagcacauaacucauauu

SEQ ID NO: 351856 - RNA, 32 nt, Homo Sapiens
cccugacaaauuuuaauuauaaucucuucuua

SEQ ID NO: 351857 - RNA, 28 nt, Homo Sapiens
agccuggggcggccggccaggaaccacc

SEQ ID NO: 351858 - RNA, 32 nt, Homo Sapiens
ccauuacagaaccaaaucauggcagguauugc

SEQ ID NO: 351859 - RNA, 32 nt, Homo Sapiens
ggucaaugucuaggaaaucucuucagaaauaa

SEQ ID NO: 351860 - RNA, 32 nt, Homo Sapiens
caagauucucuuauuuccgggaccacggagag

SEQ ID NO: 351861 - RNA, 32 nt, Homo Sapiens
uggaggccgucucugguccccagggcaaggga

SEQ ID NO: 351862 - RNA, 32 nt, Homo Sapiens
uggaguucugggagcauggaggucuuaggggu

SEQ ID NO: 351863 - RNA, 32 nt, Homo Sapiens
uggaugagguugaguucuccacaacagcuccc

SEQ ID NO: 351864 - RNA, 32 nt, Homo Sapiens
ugugcuggggggucuagucuggaccagguagc

SEQ ID NO: 351865 - RNA, 29 nt, Homo Sapiens
uugucagugacuuugagcugagugcugaa

SEQ ID NO: 351866 - RNA, 32 nt, Homo Sapiens
agcgaggguagcagaggcucuccucagucuga

SEQ ID NO: 351867 - RNA, 32 nt, Homo Sapiens
ucuguguuuugccugccucugaugcugggacc

SEQ ID NO: 351868 - RNA, 32 nt, Homo Sapiens
acccacucucugaaacuucuuugcuaauaaaa

SEQ ID NO: 351869 - RNA, 32 nt, Homo Sapiens
ugucugaaagagauugggaacaaaaauaucua

SEQ ID NO: 351870 - RNA, 32 nt, Homo Sapiens
auuuuaguauauaaaaauagauaaugcucuug

SEQ ID NO: 351871 - RNA, 32 nt, Homo Sapiens
ugggugugcuggugcuggcgcugcugggucag

SEQ ID NO: 351872 - RNA, 32 nt, Homo Sapiens
ccauuagaacagaucccuucuuuuccuuuugc

SEQ ID NO: 351873 - RNA, 32 nt, Homo Sapiens
gaccagcuuuggcuaccuggaacacuguucag

SEQ ID NO: 351874 - RNA, 32 nt, Homo Sapiens
agaauuagaagaaaagugagagcuucagcaga

SEQ ID NO: 351875 - RNA, 32 nt, Homo Sapiens
ccuaucugguccucuuccccagccccaugugg

SEQ ID NO: 351876 - RNA, 27 nt, Homo Sapiens
gaaugcaacuguuugucucuuauccac

SEQ ID NO: 351877 - RNA, 32 nt, Homo Sapiens
ccugcagccagggcugggguugccagaggccc

SEQ ID NO: 351878 - RNA, 31 nt, Homo Sapiens
guucagaaguaguuacagguauuuugcaaaa

SEQ ID NO: 351879 - RNA, 29 nt, Homo Sapiens
gauuuacugacuuuccuagaauaguuccu

SEQ ID NO: 351880 - RNA, 32 nt, Homo Sapiens
uaaaaaauauagccuuuacauggacagaauuu

SEQ ID NO: 351881 - RNA, 32 nt, Homo Sapiens
guaguugauuuuuuaaaugugccauuauuguu

SEQ ID NO: 351882 - RNA, 32 nt, Homo Sapiens
cuucuucuucaaagcuuuuucuuaguuauaau

SEQ ID NO: 351883 - RNA, 32 nt, Homo Sapiens
aaacuaaaugaagauaagauauuauuuuguau

SEQ ID NO: 351884 - RNA, 32 nt, Homo Sapiens
cuuuauaaaugaaaaaauacauuucaguuaua

SEQ ID NO: 351885 - RNA, 32 nt, Homo Sapiens
augaaauucauuuaaacaguugacaaacuguc

SEQ ID NO: 351886 - RNA, 32 nt, Homo Sapiens
ggggcccggagcagggggcaggcggcccgccc

SEQ ID NO: 351887 - RNA, 32 nt, Homo Sapiens
gaguuugguaaucaacuacuggcuccuccagc

SEQ ID NO: 351888 - RNA, 32 nt, Homo Sapiens
ccuaggugacagagcaagacuccaucucaaaa

SEQ ID NO: 351889 - RNA, 32 nt, Homo Sapiens
uuucaauuaaggccccuuuagauggaauauaa

SEQ ID NO: 351890 - RNA, 32 nt, Homo Sapiens
gcggagggaggcggaggcugugagggacuccg

SEQ ID NO: 351891 - RNA, 32 nt, Homo Sapiens
guuuguaaaaauaucgguuuuauuuucagagg

SEQ ID NO: 351892 - RNA, 32 nt, Homo Sapiens
aguaggccgccagggggcgccgugugagcgcc

SEQ ID NO: 351893 - RNA, 32 nt, Homo Sapiens
ggaauucccugauauacaccuggaccaccacc

SEQ ID NO: 351894 - RNA, 32 nt, Homo Sapiens
ggggaccacagguguguguuuccccuuugugu

SEQ ID NO: 351895 - RNA, 32 nt, Homo Sapiens
uacucauaauuuauaaugcuuaauauaaucuu

SEQ ID NO: 351896 - RNA, 32 nt, Homo Sapiens
ggagcggaagcugagggugugaaacggcuggc

SEQ ID NO: 351897 - RNA, 32 nt, Homo Sapiens
guugucagaaaacaaguuaucuuucguuuuca

SEQ ID NO: 351898 - RNA, 32 nt, Homo Sapiens
uaacagaaaaggaagccuuuuaaauauucuuu

SEQ ID NO: 351899 - RNA, 32 nt, Homo Sapiens
ugccauugacuucugaccugacauuuaguaua

SEQ ID NO: 351900 - RNA, 32 nt, Homo Sapiens
cauucccacuuccacaaacaaacaaaaaaaug

SEQ ID NO: 351901 - RNA, 32 nt, Homo Sapiens
aauaucagguugauuucuuugauuaaacagaa

SEQ ID NO: 351902 - RNA, 32 nt, Homo Sapiens
aagaaagaaguaauguucuuugaaagaaagaa

SEQ ID NO: 351903 - RNA, 32 nt, Homo Sapiens
acaggcuccaugagcugggcggagaaagugug

SEQ ID NO: 351904 - RNA, 32 nt, Homo Sapiens
uucaauaaugaaaaacaaaucucuccuuaauu

SEQ ID NO: 351905 - RNA, 32 nt, Homo Sapiens
ucagccgccugcggaggugcugcccacgccug

SEQ ID NO: 351906 - RNA, 32 nt, Homo Sapiens
aaaaaacaacuguagcuguuauuuucaguacu

SEQ ID NO: 351907 - RNA, 32 nt, Homo Sapiens
auagcuucugacuagguguuaagggaucuuca

SEQ ID NO: 351908 - RNA, 32 nt, Homo Sapiens
uggagugggcucgggcggccaaguagccgcuu

SEQ ID NO: 351909 - RNA, 32 nt, Homo Sapiens
ggaaaaacaggguuagaaaaacaaguggaaaa

SEQ ID NO: 351910 - RNA, 32 nt, Homo Sapiens
uggugauuuuggaaggagcuuuauuguaaaua

SEQ ID NO: 351911 - RNA, 32 nt, Homo Sapiens
uaccucagcuaaugucucuguccccuaaaugc

SEQ ID NO: 351912 - RNA, 32 nt, Homo Sapiens
ggcuggagcugcaguaccguaccuguucucug

SEQ ID NO: 351913 - RNA, 32 nt, Homo Sapiens
cugaaggcaauugggaauguucgucguugaug

SEQ ID NO: 351914 - RNA, 32 nt, Homo Sapiens
uaauuaccauucgcuugcuauuaaagagccuu

SEQ ID NO: 351915 - RNA, 32 nt, Homo Sapiens
agcuauuaugaacaaaauuuuuccuguuaaau

SEQ ID NO: 351916 - RNA, 32 nt, Homo Sapiens
ucuugccugaguguuggccggagggacugcug

SEQ ID NO: 351917 - RNA, 32 nt, Homo Sapiens
cucugcuuggggugggggagucagcagcaccc

SEQ ID NO: 351918 - RNA, 32 nt, Homo Sapiens
guggaggccuccugggguggccuguccugcag

SEQ ID NO: 351919 - RNA, 32 nt, Homo Sapiens
cagccccugcugucaccccugcacagacccca

SEQ ID NO: 351920 - RNA, 32 nt, Homo Sapiens
ucaagcucaccaucuucagugcuggcauuuua

SEQ ID NO: 351921 - RNA, 32 nt, Homo Sapiens
uagcaauucuuugucaaugguuugaauuuuuu

SEQ ID NO: 351922 - RNA, 32 nt, Homo Sapiens
cccacucccucaugcuuuggguuaggguuuuc

SEQ ID NO: 351923 - RNA, 32 nt, Homo Sapiens
cgaucugugcuaagaggucaggacccagccga

SEQ ID NO: 351924 - RNA, 32 nt, Homo Sapiens
uuccaagccgcuagcgcagagggucccagauu

SEQ ID NO: 351925 - RNA, 32 nt, Homo Sapiens
cgcgaggcggcuuuucggagcaugcauguuua

SEQ ID NO: 351926 - RNA, 32 nt, Homo Sapiens
acaucucccgucacagcagguacuggacacag

SEQ ID NO: 351927 - RNA, 32 nt, Homo Sapiens
gcuaauccuccauuuuaacaaagaaaaaaguu

SEQ ID NO: 351928 - RNA, 32 nt, Homo Sapiens
gaagcacugagcagaagcuggaggcacaacgc

SEQ ID NO: 351929 - RNA, 32 nt, Homo Sapiens
cccuucugcggggaacccuuacaugggccucu

SEQ ID NO: 351930 - RNA, 32 nt, Homo Sapiens
augcuggggcucuggagagacugagacgggug

SEQ ID NO: 351931 - RNA, 32 nt, Homo Sapiens
gaauuuguguugcagguguuugccauguggua

SEQ ID NO: 351932 - RNA, 32 nt, Homo Sapiens
uguucugggaggaccccuaaaagggagcagcu

SEQ ID NO: 351933 - RNA, 32 nt, Homo Sapiens
aaaaggaaauuuucugggaaaugguucauauu

SEQ ID NO: 351934 - RNA, 32 nt, Homo Sapiens
cagcccauucccagcccugaggcccaccccag

SEQ ID NO: 351935 - RNA, 32 nt, Homo Sapiens
gccuccaccccuccagcccauccagcaaucgc

SEQ ID NO: 351936 - RNA, 32 nt, Homo Sapiens
auauuugggaccaagcugaagcacuaauccca

SEQ ID NO: 351937 - RNA, 32 nt, Homo Sapiens
ccuaguccacuuuaucuuuguucccaaggcac

SEQ ID NO: 351938 - RNA, 32 nt, Homo Sapiens
gguacugugcugagcacuguggcaccggcucu

SEQ ID NO: 351939 - RNA, 32 nt, Homo Sapiens
agcaauacguuagguguuuuggcuuuuuaguu

SEQ ID NO: 351940 - RNA, 32 nt, Homo Sapiens
gacacgugggaccugccuggauccuccucccu

SEQ ID NO: 351941 - RNA, 32 nt, Homo Sapiens
uggacuauuuccugcguaaaccgggcgcucag

SEQ ID NO: 351942 - RNA, 32 nt, Homo Sapiens
auauauaaaaaaucuuuuuuauaaauuuuauu

SEQ ID NO: 351943 - RNA, 32 nt, Homo Sapiens
ggccucauuuugcuguaucauuacaauuuggc

SEQ ID NO: 351944 - RNA, 32 nt, Homo Sapiens
gccaugaccgcacggcggccuggccaacacug

SEQ ID NO: 351945 - RNA, 32 nt, Homo Sapiens
cccugugguguugggacaacuugcucauggag

SEQ ID NO: 351946 - RNA, 32 nt, Homo Sapiens
acuccuagcucuuuucacugcaucauacugcu

SEQ ID NO: 351947 - RNA, 32 nt, Homo Sapiens
agguggcaguugcagggagcuaagaucgcgcc

SEQ ID NO: 351948 - RNA, 32 nt, Homo Sapiens
uuguaaguauucuuaacuuauggugauacagu

SEQ ID NO: 351949 - RNA, 32 nt, Homo Sapiens
uuaaugaauaguuuuucuugguuaaugcuuuu

SEQ ID NO: 351950 - RNA, 32 nt, Homo Sapiens
aggaaaaaaaagacaaauuaaaggaggggcua

SEQ ID NO: 351951 - RNA, 32 nt, Homo Sapiens
acaauggugugugcagaagagaagggacugaa

SEQ ID NO: 351952 - RNA, 32 nt, Homo Sapiens
uuacuuugaaagaugaaaaguuagugcuguuu

SEQ ID NO: 351953 - RNA, 32 nt, Homo Sapiens
gcaaaaccacagaaacaaaacuuuacauuuag

SEQ ID NO: 351954 - RNA, 32 nt, Homo Sapiens
ggagcguaugagcgucaaguccugcuuucuca

SEQ ID NO: 351955 - RNA, 32 nt, Homo Sapiens
auaauggacagaggaaacugacauuugucaug

SEQ ID NO: 351956 - RNA, 32 nt, Homo Sapiens
uuuccuggugccuucuuucuauuuuguuuuag

SEQ ID NO: 351957 - RNA, 32 nt, Homo Sapiens
ggaaucauguguaacuaacaagguuggacguu

SEQ ID NO: 351958 - RNA, 32 nt, Homo Sapiens
aaaacaaaacaaacuuccaaacaguguguugg

SEQ ID NO: 351959 - RNA, 32 nt, Homo Sapiens
gagcuagcgccgcgcgcagagcacacgcucgc

SEQ ID NO: 351960 - RNA, 32 nt, Homo Sapiens
cguggcaugcggggugaggguggcuuucuucc

SEQ ID NO: 351961 - RNA, 32 nt, Homo Sapiens
uuccagccccacuucuaugcgaugucaucuuu

SEQ ID NO: 351962 - RNA, 32 nt, Homo Sapiens
ugagggcacgccggggaccccuccccagagcc

SEQ ID NO: 351963 - RNA, 32 nt, Homo Sapiens
ugggauagugugguccagcugcauuguguagg

SEQ ID NO: 351964 - RNA, 32 nt, Homo Sapiens
gcaacugcagcucgccaccucccucaccgacc

SEQ ID NO: 351965 - RNA, 32 nt, Homo Sapiens
aggagaacuguuugugccccuugccccacugc

SEQ ID NO: 351966 - RNA, 32 nt, Homo Sapiens
uucaggacgaacaauauccagauccagagccg

SEQ ID NO: 351967 - RNA, 31 nt, Homo Sapiens
gcagcguccccggucgccagugggcggacgc

SEQ ID NO: 351968 - RNA, 32 nt, Homo Sapiens
aacaaaugucauucuaguuuagauagcauuuc

SEQ ID NO: 351969 - RNA, 32 nt, Homo Sapiens
auaaggggcagcucaugcugcugcucugcacc

SEQ ID NO: 351970 - RNA, 32 nt, Homo Sapiens
gcuuucaccgauuccaacccagcccuggacug

SEQ ID NO: 351971 - RNA, 32 nt, Homo Sapiens
gcaccccggccgcaggcugugccccggcugug

SEQ ID NO: 351972 - RNA, 32 nt, Homo Sapiens
gccgucugccuggcccauggaugcuuucucaa

SEQ ID NO: 351973 - RNA, 32 nt, Homo Sapiens
agaaauuauauuuuagccuuuauuuuuaaccu

SEQ ID NO: 351974 - RNA, 32 nt, Homo Sapiens
uuggguggccuggccuggaggcggggggucuu

SEQ ID NO: 351975 - RNA, 32 nt, Homo Sapiens
uugcccccaagcccaggcugacugccccaaac

SEQ ID NO: 351976 - RNA, 32 nt, Homo Sapiens
gcggccgcucgcgccucucgaugggcagcucg

SEQ ID NO: 351977 - RNA, 32 nt, Homo Sapiens
acaauucagacagcccggaauaucaagauuca

SEQ ID NO: 351978 - RNA, 32 nt, Homo Sapiens
uuacuguccuggcacaccccucaccauccugu

SEQ ID NO: 351979 - RNA, 32 nt, Homo Sapiens
acuuccgcccggcgcgagaccgaagcuggcgg

SEQ ID NO: 351980 - RNA, 32 nt, Homo Sapiens
gacuaguaaucagggacaaaauuuauaguuca

SEQ ID NO: 351981 - RNA, 32 nt, Homo Sapiens
ggcacucccagggcccaucgucagggucucca

SEQ ID NO: 351982 - RNA, 32 nt, Homo Sapiens
cccaagcgcuaccagcagacucuggaggccug

SEQ ID NO: 351983 - RNA, 32 nt, Homo Sapiens
uuaccccaaaauguauuugcuacauuuuguug

SEQ ID NO: 351984 - RNA, 32 nt, Homo Sapiens
uuuuuagcaaaauguaaugaaauaucagguug

SEQ ID NO: 351985 - RNA, 32 nt, Homo Sapiens
gcaccaccaaccccgggccgcaguccugacga

SEQ ID NO: 351986 - RNA, 32 nt, Homo Sapiens
acaggccugggccuggugcccgaggcccccca

SEQ ID NO: 351987 - RNA, 32 nt, Homo Sapiens
guuuuauuuggcuuguuuuauuuuggauuagu

SEQ ID NO: 351988 - RNA, 32 nt, Homo Sapiens
uuacaaaguauuuuguugcacauucagagaau

SEQ ID NO: 351989 - RNA, 32 nt, Homo Sapiens
gguucuaccucucaaauuggcaguacucaccc

SEQ ID NO: 351990 - RNA, 32 nt, Homo Sapiens
aaaagcaugucucacauaguggcaggcaggag

SEQ ID NO: 351991 - RNA, 32 nt, Homo Sapiens
aggaggcuggccuggggccgcugggagccggg

SEQ ID NO: 351992 - RNA, 32 nt, Homo Sapiens
auuacaauuaaaaauagugauguagcuguaac

SEQ ID NO: 351993 - RNA, 27 nt, Homo Sapiens
acaauuuccuucuuaauuucuccacug

SEQ ID NO: 351994 - RNA, 32 nt, Homo Sapiens
gcugcaaaauguauuucuuuuuacaagugaau

SEQ ID NO: 351995 - RNA, 32 nt, Homo Sapiens
gcagagcggcgucggcgggguuggccggggcg

SEQ ID NO: 351996 - RNA, 32 nt, Homo Sapiens
cagccccugaacuuggccccagcccugcuggg

SEQ ID NO: 351997 - RNA, 32 nt, Homo Sapiens
cgccgagcauccugggaggugugguccgggcg

SEQ ID NO: 351998 - RNA, 32 nt, Homo Sapiens
gcccugcccagggcuccuguccugcagccauu

SEQ ID NO: 351999 - RNA, 32 nt, Homo Sapiens
cuugcccauuuucugcucgacucgccccugau

SEQ ID NO: 352000 - RNA, 32 nt, Homo Sapiens
ccagcgcagccagcaggagccuggccugggag

SEQ ID NO: 352001 - RNA, 32 nt, Homo Sapiens
aauaggagcugacuuucugaccaaggagguga

SEQ ID NO: 352002 - RNA, 32 nt, Homo Sapiens
ugcuuggauuacccuguugaaguucaucucug

SEQ ID NO: 352003 - RNA, 32 nt, Homo Sapiens
ccugcggccagaccuucgcuccccucagagca

SEQ ID NO: 352004 - RNA, 32 nt, Homo Sapiens
ugguggcgcgccccugcauucccagcuacuug

SEQ ID NO: 352005 - RNA, 32 nt, Homo Sapiens
uuucauucuuagaggugcuuugaaauuuuagg

SEQ ID NO: 352006 - RNA, 32 nt, Homo Sapiens
gaccggacgugguggcucacgccuguaauccc

SEQ ID NO: 352007 - RNA, 32 nt, Homo Sapiens
aaucuuuugacugcaccuuacaaacagcaguc

SEQ ID NO: 352008 - RNA, 32 nt, Homo Sapiens
ggccccugcccggcugcggaaugaaccacauc

SEQ ID NO: 352009 - RNA, 32 nt, Homo Sapiens
aagguuauuccggagauuuaugucugaaaaua

SEQ ID NO: 352010 - RNA, 32 nt, Homo Sapiens
uaucuuauuuuugccuguugagaauaucuccc

SEQ ID NO: 352011 - RNA, 32 nt, Homo Sapiens
auggagcugaauaauggagauuuugugucugc

SEQ ID NO: 352012 - RNA, 32 nt, Homo Sapiens
gcuuuucuuaaaacgucaaugauuucuucaau

SEQ ID NO: 352013 - RNA, 32 nt, Homo Sapiens
ccugucacucaguaggcauauggcuacccauu

SEQ ID NO: 352014 - RNA, 32 nt, Homo Sapiens
uagcaggcgucuuugagccuagcugggguaga

SEQ ID NO: 352015 - RNA, 32 nt, Homo Sapiens
gaccccugcugccaccucuccugggccugugu

SEQ ID NO: 352016 - RNA, 32 nt, Homo Sapiens
cugaaggccacgauugcuggcuccacaauuua

SEQ ID NO: 352017 - RNA, 32 nt, Homo Sapiens
uaugaaaagcuacuucuguuccugcuuucccu

SEQ ID NO: 352018 - RNA, 32 nt, Homo Sapiens
gcaggucuuaguuuuucuuuuuucucauuucu

SEQ ID NO: 352019 - RNA, 32 nt, Homo Sapiens
cuggcggcgcaucccuccucucccaccuccug

SEQ ID NO: 352020 - RNA, 32 nt, Homo Sapiens
uagaagagaaaacgcugacuuucuuuuuaagu

SEQ ID NO: 352021 - RNA, 32 nt, Homo Sapiens
ucacuucagaucucuaaaaaacaaagaauuac

SEQ ID NO: 352022 - RNA, 32 nt, Homo Sapiens
uacuaguaaaaaauguuuauagauaacacgua

SEQ ID NO: 352023 - RNA, 32 nt, Homo Sapiens
cacccugcccccuacacccccugcagacccau

SEQ ID NO: 352024 - RNA, 32 nt, Homo Sapiens
caccucuucuuuaguugcuuucguuuuuuaug

SEQ ID NO: 352025 - RNA, 32 nt, Homo Sapiens
aagguugguguggggcugugcugcuggagcac

SEQ ID NO: 352026 - RNA, 32 nt, Homo Sapiens
gcuaacggguccggacgacggcggcggcggcg

SEQ ID NO: 352027 - RNA, 32 nt, Homo Sapiens
cuggcagugagcuggccgcggccuuggcugag

SEQ ID NO: 352028 - RNA, 32 nt, Homo Sapiens
cccaggcaagguggccgccaccagcgucauca

SEQ ID NO: 352029 - RNA, 32 nt, Homo Sapiens
aaagauauuccugaguuguaaaacugggaaga

SEQ ID NO: 352030 - RNA, 32 nt, Homo Sapiens
ccaacaaacaaauguguucacaaacuaaauua

SEQ ID NO: 352031 - RNA, 32 nt, Homo Sapiens
ugcacacacgauauucuguuucauccccggac

SEQ ID NO: 352032 - RNA, 32 nt, Homo Sapiens
uuggacuaugcagguccaaaacacaaaaggcu

SEQ ID NO: 352033 - RNA, 32 nt, Homo Sapiens
auguguucucauuguucaguucccaccuauga

SEQ ID NO: 352034 - RNA, 32 nt, Homo Sapiens
uuuaaaaggggagggguguacgaacagggagu

SEQ ID NO: 352035 - RNA, 32 nt, Homo Sapiens
agaucagaaauucaaaaacucagaauaaaaau

SEQ ID NO: 352036 - RNA, 32 nt, Homo Sapiens
ccacaucuggggaugguucuuuccccuuucaa

SEQ ID NO: 352037 - RNA, 32 nt, Homo Sapiens
uguauuuuguaugcuguauuuuccaagacgua

SEQ ID NO: 352038 - RNA, 30 nt, Homo Sapiens
ucugugaauugagcugcagaaacgaagcca

SEQ ID NO: 352039 - RNA, 32 nt, Homo Sapiens
uguggggagagguuuuuuaaaaauaucagccc

SEQ ID NO: 352040 - RNA, 32 nt, Homo Sapiens
ccaggcugcagccugccacaccucccaccacu

SEQ ID NO: 352041 - RNA, 32 nt, Homo Sapiens
ccaaagcaaaaauugacaaaugggaucugauu

SEQ ID NO: 352042 - RNA, 32 nt, Homo Sapiens
ugcuuaagggaagaaaacuuuggauuugcugg

SEQ ID NO: 352043 - RNA, 32 nt, Homo Sapiens
aggcuuacugucaccagucugucuguguuagg

SEQ ID NO: 352044 - RNA, 32 nt, Homo Sapiens
acaggggcgacauugcugggaagugcucagga

SEQ ID NO: 352045 - RNA, 32 nt, Homo Sapiens
ccuggggaugauguggaaauaggggcacacac

SEQ ID NO: 352046 - RNA, 32 nt, Homo Sapiens
uuaccuuagugugcauuuucuauauaauaucu

SEQ ID NO: 352047 - RNA, 32 nt, Homo Sapiens
aaucuaguucccuccuuuccuccccaacaaac

SEQ ID NO: 352048 - RNA, 32 nt, Homo Sapiens
ccaaacucauacgcucuagggauugaaaagca

SEQ ID NO: 352049 - RNA, 32 nt, Homo Sapiens
cuuuuccccuccccgggccacccagcccgccc

SEQ ID NO: 352050 - RNA, 32 nt, Homo Sapiens
caggcucucuccacugccugcccgccaccgug

SEQ ID NO: 352051 - RNA, 32 nt, Homo Sapiens
guagauuuuaaccaauuuuuaauagcuagaug

SEQ ID NO: 352052 - RNA, 32 nt, Homo Sapiens
ggcacaugccuggccggcugggguccccaccc

SEQ ID NO: 352053 - RNA, 32 nt, Homo Sapiens
gcccagcggcaucaggcuuucuuaaagugaga

SEQ ID NO: 352054 - RNA, 32 nt, Homo Sapiens
ggagccuccgcggagcucccgccgccgcuccc

SEQ ID NO: 352055 - RNA, 32 nt, Homo Sapiens
uugucagguuaccauguacagagauuacuugg

SEQ ID NO: 352056 - RNA, 32 nt, Homo Sapiens
uuauauuuauacauagagaggauuuucuaaaa

SEQ ID NO: 352057 - RNA, 32 nt, Homo Sapiens
ucaggcucaccuuaaaaucagcccuugauccc

SEQ ID NO: 352058 - RNA, 32 nt, Homo Sapiens
cugaggggccccagugccagcgacccagcccc

SEQ ID NO: 352059 - RNA, 32 nt, Homo Sapiens
cugugaaaaaucaaggaguuuuaauauuuuca

SEQ ID NO: 352060 - RNA, 32 nt, Homo Sapiens
guuaccuccaaucaguuuccuguccuaccugc

SEQ ID NO: 352061 - RNA, 32 nt, Homo Sapiens
gggugcuguuguccugccugugucucaucccc

SEQ ID NO: 352062 - RNA, 32 nt, Homo Sapiens
acuguacuccuauguuuaagauaauuuuuaca

SEQ ID NO: 352063 - RNA, 32 nt, Homo Sapiens
ggaagaaaauacacgacaaccacuuauggcuc

SEQ ID NO: 352064 - RNA, 32 nt, Homo Sapiens
cucccucuccaugcccaucaaacaacugcaca

SEQ ID NO: 352065 - RNA, 32 nt, Homo Sapiens
gugaaaugcugggaacaaugacuauaagacau

SEQ ID NO: 352066 - RNA, 32 nt, Homo Sapiens
agcagauuauuccuguuuuacagagaaagaua

SEQ ID NO: 352067 - RNA, 32 nt, Homo Sapiens
uauuucacgcagaauugucacuguuugucagg

SEQ ID NO: 352068 - RNA, 32 nt, Homo Sapiens
gggacagcagaaaacugcuuaagggaugcuuu

SEQ ID NO: 352069 - RNA, 32 nt, Homo Sapiens
caacacgugggagaggaggcgagcccacgggg

SEQ ID NO: 352070 - RNA, 32 nt, Homo Sapiens
aauguaguaauaaaguaaccaauauaaucauu

SEQ ID NO: 352071 - RNA, 32 nt, Homo Sapiens
gcagccccggcggcggcagccucuccucuggc

SEQ ID NO: 352072 - RNA, 32 nt, Homo Sapiens
ucuacaaaaaauuuaaaaaucagccaggugug

SEQ ID NO: 352073 - RNA, 32 nt, Homo Sapiens
accaacagggucaccaagcagacagggagccc

SEQ ID NO: 352074 - RNA, 32 nt, Homo Sapiens
caggggguccagcucugcuucccuucccaccu

SEQ ID NO: 352075 - RNA, 32 nt, Homo Sapiens
ugagcugugcacugcugucaagcggcacgggc

SEQ ID NO: 352076 - RNA, 32 nt, Homo Sapiens
cacccgccggcuagcagccccgggcccugagc

SEQ ID NO: 352077 - RNA, 30 nt, Homo Sapiens
uccgucauuaucccugccagcucagcucag

SEQ ID NO: 352078 - RNA, 32 nt, Homo Sapiens
aaugaaaaacaaaaauucagaaauaguguucu

SEQ ID NO: 352079 - RNA, 32 nt, Homo Sapiens
cggcucaaggaccgggagguaagagguuuggg

SEQ ID NO: 352080 - RNA, 32 nt, Homo Sapiens
ggacgcgcgucuccgccgcccgcggugacuuc

SEQ ID NO: 352081 - RNA, 32 nt, Homo Sapiens
cacccggcgccucggcgcgcccgcccuccgau

SEQ ID NO: 352082 - RNA, 32 nt, Homo Sapiens
uagauaaucuugcguuuuucgucaucuuauuc

SEQ ID NO: 352083 - RNA, 32 nt, Homo Sapiens
cuccuggcuucuccuggugcugcccucacugu

SEQ ID NO: 352084 - RNA, 32 nt, Homo Sapiens
acugagaaauaaaacugcucauaagugaaaaa

SEQ ID NO: 352085 - RNA, 32 nt, Homo Sapiens
caggaaaugacacgaacucauuacugcgaugg

SEQ ID NO: 352086 - RNA, 32 nt, Homo Sapiens
gucgggccagggucgugccgccggcgggucgg

SEQ ID NO: 352087 - RNA, 32 nt, Homo Sapiens
gggaacgagcucucgcccacucgccggagaga

SEQ ID NO: 352088 - RNA, 32 nt, Homo Sapiens
cgcuuggcgaaacugaggucucauggagaagc

SEQ ID NO: 352089 - RNA, 32 nt, Homo Sapiens
uacgggcugcugcagaggcggcuggagaacuu

SEQ ID NO: 352090 - RNA, 32 nt, Homo Sapiens
cacucugugcugggcuuugguaugguaacucu

SEQ ID NO: 352091 - RNA, 32 nt, Homo Sapiens
cugcuggagcaugaguuaacugcucaagaccc

SEQ ID NO: 352092 - RNA, 32 nt, Homo Sapiens
uccccgucuuuacaaaaacaaacaaacaaaca

SEQ ID NO: 352093 - RNA, 30 nt, Homo Sapiens
agaaagucugggucugcagaaucucauagu

SEQ ID NO: 352094 - RNA, 32 nt, Homo Sapiens
ggggaaaauaaacacaccacaaacaugaaccu

SEQ ID NO: 352095 - RNA, 32 nt, Homo Sapiens
gggacaggcagacaugcagccagggcuccagg

SEQ ID NO: 352096 - RNA, 32 nt, Homo Sapiens
cccucucccuccccaggacuucugugacuccu

SEQ ID NO: 352097 - RNA, 32 nt, Homo Sapiens
ucucuuuauuacugagggccaccaaauagccu

SEQ ID NO: 352098 - RNA, 32 nt, Homo Sapiens
gacucagacgaugcccugcugaagaugaccau

SEQ ID NO: 352099 - RNA, 32 nt, Homo Sapiens
uggagggcggcagcggcgaccggagcgguagg

SEQ ID NO: 352100 - RNA, 32 nt, Homo Sapiens
gguggagcugacaucugaaaagaaaacggacc

SEQ ID NO: 352101 - RNA, 32 nt, Homo Sapiens
gugugcgaggggagaagaaguaggaaaugagg

SEQ ID NO: 352102 - RNA, 32 nt, Homo Sapiens
agugacaaguugggaaugauguggugauuuag

SEQ ID NO: 352103 - RNA, 32 nt, Homo Sapiens
cugcgguucuuuggcuugucccagcuucugag

SEQ ID NO: 352104 - RNA, 32 nt, Homo Sapiens
auacauauauauacacacguguauaugagaua

SEQ ID NO: 352105 - RNA, 32 nt, Homo Sapiens
cauccagauugugacgguugcuaccuggaucc

SEQ ID NO: 352106 - RNA, 32 nt, Homo Sapiens
accaggcagaagcucccagagccccugucucg

SEQ ID NO: 352107 - RNA, 32 nt, Homo Sapiens
cccucgguaaguauguuuagaaauagaacauu

SEQ ID NO: 352108 - RNA, 32 nt, Homo Sapiens
gcgagagggggaagaggagcgugcaagcggaa

SEQ ID NO: 352109 - RNA, 32 nt, Homo Sapiens
cagcguaaugaaauauuaaugaaaucgcugaa

SEQ ID NO: 352110 - RNA, 32 nt, Homo Sapiens
uucuucucuccauguugggccaggucuggggg

SEQ ID NO: 352111 - RNA, 32 nt, Homo Sapiens
acagacugaaagacauaaaaugucaaaaggug

SEQ ID NO: 352112 - RNA, 32 nt, Homo Sapiens
gcugcaacuagaaaauauaugcacuucaggcu

SEQ ID NO: 352113 - RNA, 32 nt, Homo Sapiens
ucauacaaaaauaaccgcuacaaauucucugu

SEQ ID NO: 352114 - RNA, 32 nt, Homo Sapiens
acgacccguuacccaccuaaggaagcgcgaug

SEQ ID NO: 352115 - RNA, 32 nt, Homo Sapiens
agucauuauuuuuccuauucauuugaaauaag

SEQ ID NO: 352116 - RNA, 32 nt, Homo Sapiens
uugagcaagauuguggcaguuuuugcacaacu

SEQ ID NO: 352117 - RNA, 32 nt, Homo Sapiens
uuuugcuuuuuaaaauagcaguguuguaagac

SEQ ID NO: 352118 - RNA, 32 nt, Homo Sapiens
uggcgccguccucgcccggccaggccaugaag

SEQ ID NO: 352119 - RNA, 32 nt, Homo Sapiens
gaucuuaauguuuuugaucguugcguuaaagu

SEQ ID NO: 352120 - RNA, 32 nt, Homo Sapiens
acaaacaagacauuuagguaaaacuuuguagg

SEQ ID NO: 352121 - RNA, 32 nt, Homo Sapiens
caaacgccgcagcuuccacaucuaaacaagcu

SEQ ID NO: 352122 - RNA, 32 nt, Homo Sapiens
cgccaaccccagcaguccugggcccccuggga

SEQ ID NO: 352123 - RNA, 32 nt, Homo Sapiens
cugcugaagcuggcgucgcugccgcccucgug

SEQ ID NO: 352124 - RNA, 32 nt, Homo Sapiens
aggaugcuggaacaagcggcugguguugaaag

SEQ ID NO: 352125 - RNA, 32 nt, Homo Sapiens
augaaaaugcaaauagcugaaggggaaggaaa

SEQ ID NO: 352126 - RNA, 32 nt, Homo Sapiens
agccgcaucuauuggcagcuuuguuauugauc

SEQ ID NO: 352127 - RNA, 32 nt, Homo Sapiens
ggcgccagacgcggcgcguggccacguuggug

SEQ ID NO: 352128 - RNA, 32 nt, Homo Sapiens
gaaguuaaugaaaaaggcuauuugagcaugug

SEQ ID NO: 352129 - RNA, 32 nt, Homo Sapiens
uguuaaugaucaacaauuuuuguuuugauuaa

SEQ ID NO: 352130 - RNA, 32 nt, Homo Sapiens
gguggaggccaggcagggcugcugcugaacau

SEQ ID NO: 352131 - RNA, 32 nt, Homo Sapiens
accaguaggaggaggaugagccacagaaauug

SEQ ID NO: 352132 - RNA, 32 nt, Homo Sapiens
ugguaugcaccuguaguccuagcuacugagga

SEQ ID NO: 352133 - RNA, 32 nt, Homo Sapiens
ccacuccugggggucuccugcugcuuaggucc

SEQ ID NO: 352134 - RNA, 32 nt, Homo Sapiens
agugcucaaacacaccagagggggcaggcacc

SEQ ID NO: 352135 - RNA, 32 nt, Homo Sapiens
gaggggguuaugggggcgggaggguagacuga

SEQ ID NO: 352136 - RNA, 32 nt, Homo Sapiens
aaauguguguagauuucaugcucgacacuuac

SEQ ID NO: 352137 - RNA, 32 nt, Homo Sapiens
cuaacacucuuguacauguuucaguaugggua

SEQ ID NO: 352138 - RNA, 32 nt, Homo Sapiens
auaguuaucaucagucuuuguaucaagugcug

SEQ ID NO: 352139 - RNA, 32 nt, Homo Sapiens
caucagaggaugguggugcugcugcugauccg

SEQ ID NO: 352140 - RNA, 28 nt, Homo Sapiens
agcaugagccccacgaccaacgugcucc

SEQ ID NO: 352141 - RNA, 32 nt, Homo Sapiens
gauuuuuauuuuugagguuuugucaacuggag

SEQ ID NO: 352142 - RNA, 32 nt, Homo Sapiens
aggaauuuauuuacccaagcaauuaucuuaaa

SEQ ID NO: 352143 - RNA, 32 nt, Homo Sapiens
accagagaagacauagacgguauuaggaugau

SEQ ID NO: 352144 - RNA, 32 nt, Homo Sapiens
ggguaggagaucuggggaggcccugcccccua

SEQ ID NO: 352145 - RNA, 32 nt, Homo Sapiens
uccaccaaaaauacaaaaaauuagccacgcau

SEQ ID NO: 352146 - RNA, 32 nt, Homo Sapiens
agcacucccuuccccacccccauagcccaagg

SEQ ID NO: 352147 - RNA, 32 nt, Homo Sapiens
uauaaguuguacacuuuaaaaggucauguaga

SEQ ID NO: 352148 - RNA, 32 nt, Homo Sapiens
cggagagggcuuuguucgcgcucucgccacac

SEQ ID NO: 352149 - RNA, 32 nt, Homo Sapiens
ucugaaaugaauuagaaagaaaccauaagccu

SEQ ID NO: 352150 - RNA, 32 nt, Homo Sapiens
guucucaugauagugaauaaaucucaugagau

SEQ ID NO: 352151 - RNA, 31 nt, Homo Sapiens
ucuguggagccccagcauaugggggccugga

SEQ ID NO: 352152 - RNA, 32 nt, Homo Sapiens
ccgccgacagccagcccugcuccucccgccau

SEQ ID NO: 352153 - RNA, 32 nt, Homo Sapiens
ucccggcuccggggguucucguggccgcggca

SEQ ID NO: 352154 - RNA, 32 nt, Homo Sapiens
cuagguggagacagcccucuuucucaccuacc

SEQ ID NO: 352155 - RNA, 32 nt, Homo Sapiens
cuuuugugaaguauggcaaagguuuuucauga

SEQ ID NO: 352156 - RNA, 32 nt, Homo Sapiens
gaaaaaccauucaaauaugagaacugugggaa

SEQ ID NO: 352157 - RNA, 32 nt, Homo Sapiens
aaggggaacaaagggaccucugacagcuuaga

SEQ ID NO: 352158 - RNA, 32 nt, Homo Sapiens
cgagcgccugacccgggccugcgccagagccu

SEQ ID NO: 352159 - RNA, 32 nt, Homo Sapiens
ccucauuccuugcuucccguccccccgguaga

SEQ ID NO: 352160 - RNA, 32 nt, Homo Sapiens
uacagaauauuuuuguugaaccuucuugagaa

SEQ ID NO: 352161 - RNA, 32 nt, Homo Sapiens
cgcacccaacgccuccucccugagccacgagg

SEQ ID NO: 352162 - RNA, 31 nt, Homo Sapiens
gagauggaaaaaauacagguauacuugugau

SEQ ID NO: 352163 - RNA, 32 nt, Homo Sapiens
auaggcaaucccaggggguaugguggauccag

SEQ ID NO: 352164 - RNA, 32 nt, Homo Sapiens
aaaaaggauagaaaaugcccacaggggaaaaa

SEQ ID NO: 352165 - RNA, 32 nt, Homo Sapiens
caaacagagcaucuuguaacugaagacacacc

SEQ ID NO: 352166 - RNA, 32 nt, Homo Sapiens
gaccccaccgcugcuuucuccucccccagauc

SEQ ID NO: 352167 - RNA, 32 nt, Homo Sapiens
augggcaugauaagagccuuugacaauccaga

SEQ ID NO: 352168 - RNA, 32 nt, Homo Sapiens
uggcaagagggugacagcuuccuuuccugugu

SEQ ID NO: 352169 - RNA, 32 nt, Homo Sapiens
accaauugauaaccaaucacauaguuuuauca

SEQ ID NO: 352170 - RNA, 32 nt, Homo Sapiens
uuagcuacuccguaucucugagagccaggcgu

SEQ ID NO: 352171 - RNA, 32 nt, Homo Sapiens
cuccucugugaucacaaacucuggccagacuu

SEQ ID NO: 352172 - RNA, 32 nt, Homo Sapiens
uguugggaaagaagaaagggugagaaacccug

SEQ ID NO: 352173 - RNA, 32 nt, Homo Sapiens
cugugcugcuguuucuuuuggccgcggacaag

SEQ ID NO: 352174 - RNA, 32 nt, Homo Sapiens
gcaaagggagauauuucuuugugcagauucug

SEQ ID NO: 352175 - RNA, 32 nt, Homo Sapiens
ugucugaggcugccuccggcucaguagucagc

SEQ ID NO: 352176 - RNA, 32 nt, Homo Sapiens
augauggcugaguccagauuauagagguugcc

SEQ ID NO: 352177 - RNA, 32 nt, Homo Sapiens
ugcucugaugaggccaggccgacuggaccggc

SEQ ID NO: 352178 - RNA, 32 nt, Homo Sapiens
aucccagagaaaauaagggacuuuugcaaggc

SEQ ID NO: 352179 - RNA, 32 nt, Homo Sapiens
uguaucuguacaucagaaaugucacuauucca

SEQ ID NO: 352180 - RNA, 32 nt, Homo Sapiens
auaagcuccccuccccagguggacagucuuau

SEQ ID NO: 352181 - RNA, 32 nt, Homo Sapiens
ggcagcggccaccauggccaugccagagguaa

SEQ ID NO: 352182 - RNA, 32 nt, Homo Sapiens
cucaaugaacuuaugacuaauuauucuuuucu

SEQ ID NO: 352183 - RNA, 32 nt, Homo Sapiens
gcaugggaaaugccaaggcagauucuagagga

SEQ ID NO: 352184 - RNA, 32 nt, Homo Sapiens
cuuguuaaaaauucaaacuuuggguccccucu

SEQ ID NO: 352185 - RNA, 32 nt, Homo Sapiens
cguacccagaagccuggcaucccggcaaaaag

SEQ ID NO: 352186 - RNA, 32 nt, Homo Sapiens
auuuuuggaaaacugcuuuucuucugagaacc

SEQ ID NO: 352187 - RNA, 32 nt, Homo Sapiens
gccugagcugggugcuagcggccagugguguc

SEQ ID NO: 352188 - RNA, 32 nt, Homo Sapiens
augaaggaaguuggucuuugucugcagguggg

SEQ ID NO: 352189 - RNA, 32 nt, Homo Sapiens
uucucauuggggagcaacuuuuuuacgcacaa

SEQ ID NO: 352190 - RNA, 32 nt, Homo Sapiens
uuuguuuuuuucugcagcacucuuucagucag

SEQ ID NO: 352191 - RNA, 32 nt, Homo Sapiens
ccagaggaagacuccugaaacccuccccaggu

SEQ ID NO: 352192 - RNA, 32 nt, Homo Sapiens
ucacgccguaauucuuucugucucccuucucu

SEQ ID NO: 352193 - RNA, 32 nt, Homo Sapiens
gaaccagagaucacgcgccgcgccgcgaggcu

SEQ ID NO: 352194 - RNA, 32 nt, Homo Sapiens
caaccagggaccaaccggcugcuuacuuuugc

SEQ ID NO: 352195 - RNA, 32 nt, Homo Sapiens
guccaucaugcaaugcugagcacugggguggu

SEQ ID NO: 352196 - RNA, 32 nt, Homo Sapiens
gcaagggagaucuggcauuuucugcuuuacgu

SEQ ID NO: 352197 - RNA, 32 nt, Homo Sapiens
cacccuuggucuucgcuccaucgccuugaaag

SEQ ID NO: 352198 - RNA, 32 nt, Homo Sapiens
ucuacugcacauuuuucuuauuccuauucuug

SEQ ID NO: 352199 - RNA, 32 nt, Homo Sapiens
cccccagcagugcccucugaggcggagcugca

SEQ ID NO: 352200 - RNA, 32 nt, Homo Sapiens
uuccucuuugccuccuccccagaugggccucu

SEQ ID NO: 352201 - RNA, 32 nt, Homo Sapiens
gcuuguuuguguaauucaaccaaaagaauuuc

SEQ ID NO: 352202 - RNA, 32 nt, Homo Sapiens
uuuuccucuccucuccugccgagaguggaaca

SEQ ID NO: 352203 - RNA, 32 nt, Homo Sapiens
gccccgggccgcguccgccccgucccacacua

SEQ ID NO: 352204 - RNA, 32 nt, Homo Sapiens
uggauauuucagaaacccauagcaauucagug

SEQ ID NO: 352205 - RNA, 32 nt, Homo Sapiens
cagcaggagaaguuaagaauugagcaguucug

SEQ ID NO: 352206 - RNA, 32 nt, Homo Sapiens
acaaaauauuuuaauuuuuaaauuuucccuua

SEQ ID NO: 352207 - RNA, 32 nt, Homo Sapiens
gggaaaagugcauuuuacuguauuuuguguau

SEQ ID NO: 352208 - RNA, 32 nt, Homo Sapiens
caaaaaagaguuuuuucuuuauuaguaaauag

SEQ ID NO: 352209 - RNA, 32 nt, Homo Sapiens
caguagggcagacaguugaagccauagacauu

SEQ ID NO: 352210 - RNA, 32 nt, Homo Sapiens
aauaaggucguuaugacuuuggcaacuugcuu

SEQ ID NO: 352211 - RNA, 32 nt, Homo Sapiens
gccugggcgccucagccgccucacuccugggc

SEQ ID NO: 352212 - RNA, 32 nt, Homo Sapiens
gcaguucauuaucuaguaguggagcaccuagu

SEQ ID NO: 352213 - RNA, 32 nt, Homo Sapiens
ucucuggcggccuuguagucgucuccgagacu

SEQ ID NO: 352214 - RNA, 32 nt, Homo Sapiens
caacuuuauugagauucaauuuucauauagua

SEQ ID NO: 352215 - RNA, 32 nt, Homo Sapiens
uaaccucuuuguucuccauuuuucucaucaac

SEQ ID NO: 352216 - RNA, 31 nt, Homo Sapiens
gagcagagggcgguacggcuucuggauuguu

SEQ ID NO: 352217 - RNA, 32 nt, Homo Sapiens
uuaccaggacagagcuagaaucgagccaguaa

SEQ ID NO: 352218 - RNA, 32 nt, Homo Sapiens
uggcuagucaagcuccuccucccugcaucuga

SEQ ID NO: 352219 - RNA, 32 nt, Homo Sapiens
cuggucuuuucuuccacuucugcagaauuucc

SEQ ID NO: 352220 - RNA, 32 nt, Homo Sapiens
cuggaagucauagugaauuugcagcuucuauu

SEQ ID NO: 352221 - RNA, 32 nt, Homo Sapiens
uccaaaccaaaauaauucuuuuuccacccagu

SEQ ID NO: 352222 - RNA, 32 nt, Homo Sapiens
gggaggaggagcuucugggguccccagggcug

SEQ ID NO: 352223 - RNA, 32 nt, Homo Sapiens
cugauaauguuuaaauaauuuacaauauaaac

SEQ ID NO: 352224 - RNA, 32 nt, Homo Sapiens
uuuucugauuuaugaggguuugaaagaaagaa

SEQ ID NO: 352225 - RNA, 32 nt, Homo Sapiens
acagcugcuauaauuggagauuuuaccuggag

SEQ ID NO: 352226 - RNA, 32 nt, Homo Sapiens
gcacagcccuugucggugccccggccccuccc

SEQ ID NO: 352227 - RNA, 32 nt, Homo Sapiens
cguaaaagauaaaaaauacauuguuucaucau

SEQ ID NO: 352228 - RNA, 32 nt, Homo Sapiens
ccuacuguggcgggagggaggggcggcugcug

SEQ ID NO: 352229 - RNA, 32 nt, Homo Sapiens
cuacggcuuugcguccccggcgggcagcccca

SEQ ID NO: 352230 - RNA, 32 nt, Homo Sapiens
uucaacuuguuugcacgaccacuuccagcuug

SEQ ID NO: 352231 - RNA, 32 nt, Homo Sapiens
cagagaaaaaauaaaguggaauauuaaguaaa

SEQ ID NO: 352232 - RNA, 32 nt, Homo Sapiens
caucggcuuuguggucaucauguuccacccga

SEQ ID NO: 352233 - RNA, 32 nt, Homo Sapiens
ccacagcucccaccccacccccuucagugccc

SEQ ID NO: 352234 - RNA, 32 nt, Homo Sapiens
uuuucacauuuuaugagguguuauauccccag

SEQ ID NO: 352235 - RNA, 32 nt, Homo Sapiens
cagguggccccgggggagcuggggcucugcga

SEQ ID NO: 352236 - RNA, 32 nt, Homo Sapiens
ccaccacccagcuguugaagcucagcgugugc

SEQ ID NO: 352237 - RNA, 32 nt, Homo Sapiens
augcacccaaaagcuuccauggacagacggca

SEQ ID NO: 352238 - RNA, 32 nt, Homo Sapiens
ucuauuuugaagcgagcuuucaacaggcgggu

SEQ ID NO: 352239 - RNA, 32 nt, Homo Sapiens
cuggcugugcacguuuguguguccuuguaaau

SEQ ID NO: 352240 - RNA, 32 nt, Homo Sapiens
ccgaauaggaacagcucugaucugcaguuccc

SEQ ID NO: 352241 - RNA, 30 nt, Homo Sapiens
cucgcuaaaagacaguagauaugcaacgcc

SEQ ID NO: 352242 - RNA, 32 nt, Homo Sapiens
ucagugcucuguaucuagcuaaucuagugggg

SEQ ID NO: 352243 - RNA, 32 nt, Homo Sapiens
caugcccggccuucuuuuuuuuuuuuuuuuug

SEQ ID NO: 352244 - RNA, 32 nt, Homo Sapiens
agacccggguggcgguggcagcugcgaaaccc

SEQ ID NO: 352245 - RNA, 32 nt, Homo Sapiens
cuauucaaggauauuacucacugcacaucaua

SEQ ID NO: 352246 - RNA, 32 nt, Homo Sapiens
gacacuguuuccauucuaauuuaucaaaaaug

SEQ ID NO: 352247 - RNA, 32 nt, Homo Sapiens
cuuauucugugauaacuauccuccucauauaa

SEQ ID NO: 352248 - RNA, 32 nt, Homo Sapiens
gguggcggaggaagaggaguggcggcagcggc

SEQ ID NO: 352249 - RNA, 32 nt, Homo Sapiens
guccuuuggcccagccccugguuugcuuguag

SEQ ID NO: 352250 - RNA, 32 nt, Homo Sapiens
agccagaggggagggggacagaugugcugugu

SEQ ID NO: 352251 - RNA, 32 nt, Homo Sapiens
ggugccaccucagaccccggggugaggggggg

SEQ ID NO: 352252 - RNA, 32 nt, Homo Sapiens
auuauagauuaccauuguuagccucccuuaau

SEQ ID NO: 352253 - RNA, 32 nt, Homo Sapiens
ggggaagaaugcaauuaaugaaagaccuacac

SEQ ID NO: 352254 - RNA, 32 nt, Homo Sapiens
uuaaccaacauuuauauagagcaccaaagggg

SEQ ID NO: 352255 - RNA, 32 nt, Homo Sapiens
ccugugugacuggcugcccuccugaggcagca

SEQ ID NO: 352256 - RNA, 32 nt, Homo Sapiens
ccucagaucuuguagaaaauuucagcuguagc

SEQ ID NO: 352257 - RNA, 32 nt, Homo Sapiens
ggcgggagggaggggcggcugcugccugguga

SEQ ID NO: 352258 - RNA, 32 nt, Homo Sapiens
uaaagggaugcuuuuuaccuuuugcugucugc

SEQ ID NO: 352259 - RNA, 32 nt, Homo Sapiens
uucacuuccagaagugcugcacuucugaagaa

SEQ ID NO: 352260 - RNA, 30 nt, Homo Sapiens
ugaggcggcggcggcggcggggaucgucuc

SEQ ID NO: 352261 - RNA, 32 nt, Homo Sapiens
uccugggcuucccccaaccccuuucccggucu

SEQ ID NO: 352262 - RNA, 32 nt, Homo Sapiens
cacacuaguauuaaauggguguuccauaauga

SEQ ID NO: 352263 - RNA, 32 nt, Homo Sapiens
cccuucccugaacucuuccagcgucgggaagu

SEQ ID NO: 352264 - RNA, 32 nt, Homo Sapiens
gcugguauuucuauuucuuuuggauuuuuuuu

SEQ ID NO: 352265 - RNA, 32 nt, Homo Sapiens
gaggaagagcagcagcagcaggauggugaagu

SEQ ID NO: 352266 - RNA, 32 nt, Homo Sapiens
acccugucaaccaccucugaauccccaccagg

SEQ ID NO: 352267 - RNA, 32 nt, Homo Sapiens
uuuaacuuagguuuuaauuuuacaaucauuuc

SEQ ID NO: 352268 - RNA, 32 nt, Homo Sapiens
cuggcuaccgaaccccggggcucuucaccagu

SEQ ID NO: 352269 - RNA, 32 nt, Homo Sapiens
ggaucaaaauuuguguaacuugcagggcuuuc

SEQ ID NO: 352270 - RNA, 32 nt, Homo Sapiens
agaaggaagaaaguguguaaauaaucauuucu

SEQ ID NO: 352271 - RNA, 32 nt, Homo Sapiens
ggcacaugcuggaagcccugggccgccaccag

SEQ ID NO: 352272 - RNA, 32 nt, Homo Sapiens
gaagcucaucacauguaagaacugcuuuagag

SEQ ID NO: 352273 - RNA, 32 nt, Homo Sapiens
ggcuuggaacauuugggagacugagcuugauu

SEQ ID NO: 352274 - RNA, 32 nt, Homo Sapiens
gaauaugcuuucuuggaccauguuugagacuc

SEQ ID NO: 352275 - RNA, 32 nt, Homo Sapiens
gaccgugcgcagcgcuguaacugcaggauggg

SEQ ID NO: 352276 - RNA, 31 nt, Homo Sapiens
gggcagcgcagccucccaccaagggcccugc

SEQ ID NO: 352277 - RNA, 32 nt, Homo Sapiens
uggaaaaaaugaaaacuuucggacccaugaaa

SEQ ID NO: 352278 - RNA, 32 nt, Homo Sapiens
uuuucaggaaaguuuugaguguuauaaggugg

SEQ ID NO: 352279 - RNA, 32 nt, Homo Sapiens
guuggcaggguuuucauauauuauuaguaauu

SEQ ID NO: 352280 - RNA, 32 nt, Homo Sapiens
uaaauucucauuguguccccagcccucuucuc

SEQ ID NO: 352281 - RNA, 31 nt, Homo Sapiens
auguuucuuugagauuaauagauauuggggg

SEQ ID NO: 352282 - RNA, 32 nt, Homo Sapiens
uuuuucuagcaagagaugcuuuauucugcagc

SEQ ID NO: 352283 - RNA, 32 nt, Homo Sapiens
acguucaguucaucagggccuacgcuccggga

SEQ ID NO: 352284 - RNA, 32 nt, Homo Sapiens
augcuuugcugcgguuuccugaaagagcccca

SEQ ID NO: 352285 - RNA, 32 nt, Homo Sapiens
auuuccaggaggagaagcaagcagaugagagg

SEQ ID NO: 352286 - RNA, 32 nt, Homo Sapiens
aaauuuacccuucugcugaaauccaagauauu

SEQ ID NO: 352287 - RNA, 32 nt, Homo Sapiens
ccgacgcccgcggcgagcuggaccuggagcgc

SEQ ID NO: 352288 - RNA, 32 nt, Homo Sapiens
uuccccagggcccccaagggugucucaugcua

SEQ ID NO: 352289 - RNA, 32 nt, Homo Sapiens
auuuguauuuauucuuuuuuucucuagaguag

SEQ ID NO: 352290 - RNA, 32 nt, Homo Sapiens
ugaaagaccagagggacaauguucuacuaucc

SEQ ID NO: 352291 - RNA, 32 nt, Homo Sapiens
cuuuuuucagaauuagagaacaugcuguacaa

SEQ ID NO: 352292 - RNA, 32 nt, Homo Sapiens
gugcuauaauaaauaaacuucaacacucuuua

SEQ ID NO: 352293 - RNA, 32 nt, Homo Sapiens
ccgccucucccgcuccggaucccuccacgcag

SEQ ID NO: 352294 - RNA, 32 nt, Homo Sapiens
ugccuuuugggaagaaaugaaaaaagaagcag

SEQ ID NO: 352295 - RNA, 32 nt, Homo Sapiens
caugaacccaagucggcuucuagacagcaugu

SEQ ID NO: 352296 - RNA, 32 nt, Homo Sapiens
guuuuuccuagucguguagaaacuagccacug

SEQ ID NO: 352297 - RNA, 32 nt, Homo Sapiens
gaaaucuauuacauguaauacaaaacaaacau

SEQ ID NO: 352298 - RNA, 32 nt, Homo Sapiens
uauucuuauaaacacucccagcccuuugguca

SEQ ID NO: 352299 - RNA, 32 nt, Homo Sapiens
uuuauuuguuuguuuguuuuugaaaugaccau

SEQ ID NO: 352300 - RNA, 32 nt, Homo Sapiens
cuguuuaucuuuaaaacaaauauaagguuuua

SEQ ID NO: 352301 - RNA, 31 nt, Homo Sapiens
gcagaggagccccaagucuuggggaccacag

SEQ ID NO: 352302 - RNA, 32 nt, Homo Sapiens
guaagugggaaagugagcgagcaagcgagcua

SEQ ID NO: 352303 - RNA, 30 nt, Homo Sapiens
gcacuugucuguggcugaaacacuuaccug

SEQ ID NO: 352304 - RNA, 32 nt, Homo Sapiens
augcgcuuggggugaugacuuccuuaaauaca

SEQ ID NO: 352305 - RNA, 32 nt, Homo Sapiens
ggugcgggacgcccgcgccaugacugccgaga

SEQ ID NO: 352306 - RNA, 32 nt, Homo Sapiens
cgccacugccgggaagccccccaggccugacg

SEQ ID NO: 352307 - RNA, 32 nt, Homo Sapiens
agaacacagcauguggucccucaauaggccgu

SEQ ID NO: 352308 - RNA, 32 nt, Homo Sapiens
uccuguauacccaugaucauccuaaccccaaa

SEQ ID NO: 352309 - RNA, 32 nt, Homo Sapiens
aacaacaaucccaucuuguugggaggaauuaa

SEQ ID NO: 352310 - RNA, 32 nt, Homo Sapiens
ggcacuucaacgaugcugaaauuguuuuuaaa

SEQ ID NO: 352311 - RNA, 32 nt, Homo Sapiens
ggaugucucauggacucuggccccacacacuc

SEQ ID NO: 352312 - RNA, 32 nt, Homo Sapiens
cgcgcgccggacgccagugaccgcgaugguga

SEQ ID NO: 352313 - RNA, 32 nt, Homo Sapiens
uuuauugcugaauaauaccucauuguauggau

SEQ ID NO: 352314 - RNA, 32 nt, Homo Sapiens
uucgccggguuaguggcgacgcggccgcgcga

SEQ ID NO: 352315 - RNA, 32 nt, Homo Sapiens
ggccccgagcccacgggucugugcggauggua

SEQ ID NO: 352316 - RNA, 32 nt, Homo Sapiens
uggguccucuucugcccccagugcccuucccc

SEQ ID NO: 352317 - RNA, 32 nt, Homo Sapiens
augaaugaauacugagcuuggguugguggaaa

SEQ ID NO: 352318 - RNA, 32 nt, Homo Sapiens
aaccugcugcgcaacaggaacuucuggauccu

SEQ ID NO: 352319 - RNA, 32 nt, Homo Sapiens
acguagaaagaaaaaagcuuagggcuucuuuu

SEQ ID NO: 352320 - RNA, 32 nt, Homo Sapiens
gguccauuucuuaugauuuccuuuaaaggcac

SEQ ID NO: 352321 - RNA, 32 nt, Homo Sapiens
ggacagcgccaaccccuuugccuggccagagg

SEQ ID NO: 352322 - RNA, 32 nt, Homo Sapiens
aucacaccuauccaugagcagugggaaaaggc

SEQ ID NO: 352323 - RNA, 32 nt, Homo Sapiens
gagaacaggaggaggcaugagcgacgcggaug

SEQ ID NO: 352324 - RNA, 32 nt, Homo Sapiens
accagaaaccccacaacaugccaccucaugcc

SEQ ID NO: 352325 - RNA, 32 nt, Homo Sapiens
uucaucaaaggcauuagcugacaggcugguaa

SEQ ID NO: 352326 - RNA, 32 nt, Homo Sapiens
guuuaaaguauuuaguccuccaucugucaccu

SEQ ID NO: 352327 - RNA, 32 nt, Homo Sapiens
ugauguaaaaauuugcuuuaaaccauucaugc

SEQ ID NO: 352328 - RNA, 32 nt, Homo Sapiens
cauugagucaaagaauggcaucuaguccugag

SEQ ID NO: 352329 - RNA, 32 nt, Homo Sapiens
gggcugcaggagggcucugugcugcguguggu

SEQ ID NO: 352330 - RNA, 32 nt, Homo Sapiens
cugauucugugggaccaggcccgggcucuacc

SEQ ID NO: 352331 - RNA, 32 nt, Homo Sapiens
ccccugccauggccacggccacagcaaguggg

SEQ ID NO: 352332 - RNA, 32 nt, Homo Sapiens
gagguuuuacuuuuuaaaaacauucagcuuaa

SEQ ID NO: 352333 - RNA, 32 nt, Homo Sapiens
acccggaacccgcgccggccgacgagcgagcu

SEQ ID NO: 352334 - RNA, 32 nt, Homo Sapiens
uuagcaaaccucagccuauguguuucuacccu

SEQ ID NO: 352335 - RNA, 32 nt, Homo Sapiens
cgaccucggagccccucagcccugcccgaccc

SEQ ID NO: 352336 - RNA, 32 nt, Homo Sapiens
ucaccugguggcggaggcuccccuuguuuguc

SEQ ID NO: 352337 - RNA, 32 nt, Homo Sapiens
uaagaaucuauuuccuuuccagucauuucaau

SEQ ID NO: 352338 - RNA, 32 nt, Homo Sapiens
uggaauagaaucuuucuuuccauccugcaugg

SEQ ID NO: 352339 - RNA, 32 nt, Homo Sapiens
aacuguacuguacacaucauggcugcuggaca

SEQ ID NO: 352340 - RNA, 32 nt, Homo Sapiens
aaauguuuuuaaaaccuguuaguuaaaacacu

SEQ ID NO: 352341 - RNA, 32 nt, Homo Sapiens
accuaguauauuagccaucugucuuggguuua

SEQ ID NO: 352342 - RNA, 32 nt, Homo Sapiens
uuauuugacuguuaaaccaaaauauuuuuggu

SEQ ID NO: 352343 - RNA, 32 nt, Homo Sapiens
uccucccaggauacgcccgagcggaagaagcc

SEQ ID NO: 352344 - RNA, 32 nt, Homo Sapiens
uuuuuggcagggcacaguggcucacgccugua

SEQ ID NO: 352345 - RNA, 32 nt, Homo Sapiens
uuuauaacaaaacagggaucuguuugaacacu

SEQ ID NO: 352346 - RNA, 32 nt, Homo Sapiens
uucucccauacauuuuaauauguauuauauuu

SEQ ID NO: 352347 - RNA, 32 nt, Homo Sapiens
aagaaaggacaaauucgauacacccgcgucgg

SEQ ID NO: 352348 - RNA, 32 nt, Homo Sapiens
ggucugugucaccuucuccccagccccgcagg

SEQ ID NO: 352349 - RNA, 32 nt, Homo Sapiens
uuguugacugugaaagugaauuuucuugcugu

SEQ ID NO: 352350 - RNA, 31 nt, Homo Sapiens
acccgggcaucaggcuugccccgcacaucaa

SEQ ID NO: 352351 - RNA, 32 nt, Homo Sapiens
agcugaggugcugucuaaugggaaaugugauu

SEQ ID NO: 352352 - RNA, 32 nt, Homo Sapiens
cucagcucucccucacaccucccuucauccca

SEQ ID NO: 352353 - RNA, 32 nt, Homo Sapiens
guccuuguaggacaauaaacguauauauguac

SEQ ID NO: 352354 - RNA, 32 nt, Homo Sapiens
agccugggcaacaugagugaaagucugacuca

SEQ ID NO: 352355 - RNA, 32 nt, Homo Sapiens
caaauuauuuaguagcagaacuuaucucagga

SEQ ID NO: 352356 - RNA, 32 nt, Homo Sapiens
aaauugucucaaagugauuauauuauauauau

SEQ ID NO: 352357 - RNA, 32 nt, Homo Sapiens
cauauacugaaauggaaggaaauuuuaaaacu

SEQ ID NO: 352358 - RNA, 32 nt, Homo Sapiens
uuaaaaagacaaauaaaaacaguguuuuauag

SEQ ID NO: 352359 - RNA, 32 nt, Homo Sapiens
cggguguuuccaaccccuuucaugggggagag

SEQ ID NO: 352360 - RNA, 32 nt, Homo Sapiens
cccgaacgccgggagcaugagcgcgggcucgg

SEQ ID NO: 352361 - RNA, 32 nt, Homo Sapiens
aggcaauacuuauuauacaucggguaacugug

SEQ ID NO: 352362 - RNA, 32 nt, Homo Sapiens
aguccccgcggcgggcgcuggucucuccacgc

SEQ ID NO: 352363 - RNA, 32 nt, Homo Sapiens
gaauaauuuacagauaguaaaauuuaccccuu

SEQ ID NO: 352364 - RNA, 32 nt, Homo Sapiens
uucuguagaaaauaaaacugagcuacgaaaaa

SEQ ID NO: 352365 - RNA, 32 nt, Homo Sapiens
aaugcauuucaaguuaaaugucuuaaauguau

SEQ ID NO: 352366 - RNA, 32 nt, Homo Sapiens
cgcccucccuccccggccagggcgcucgggag

SEQ ID NO: 352367 - RNA, 32 nt, Homo Sapiens
cugagcugugcacggccuccccugcccuccug

SEQ ID NO: 352368 - RNA, 32 nt, Homo Sapiens
uccuggggacgaggaguguggggcaccugccg

SEQ ID NO: 352369 - RNA, 32 nt, Homo Sapiens
cuguuagaaaaauuagaaaauuuaaaauggaa

SEQ ID NO: 352370 - RNA, 32 nt, Homo Sapiens
aggguuuugacugcggccuggaggccaagaac

SEQ ID NO: 352371 - RNA, 32 nt, Homo Sapiens
ggcggcgcccucccagcucccugccucuguuu

SEQ ID NO: 352372 - RNA, 32 nt, Homo Sapiens
agacccucuuuggccauacacuccaugccuag

SEQ ID NO: 352373 - RNA, 32 nt, Homo Sapiens
ucucaaaaacaaaacaaaacaaacagaauaga

SEQ ID NO: 352374 - RNA, 32 nt, Homo Sapiens
ucuuaagauauuucaaggaaucagugucguua

SEQ ID NO: 352375 - RNA, 32 nt, Homo Sapiens
ggucacgccaggggccggcacgcacuggcacc

SEQ ID NO: 352376 - RNA, 32 nt, Homo Sapiens
cacauggccccucccccugccaggagcuuugg

SEQ ID NO: 352377 - RNA, 32 nt, Homo Sapiens
gggccaagauacucacaggcuggccacagcug

SEQ ID NO: 352378 - RNA, 32 nt, Homo Sapiens
ucccugaggauugacuucugcacuaauccagu

SEQ ID NO: 352379 - RNA, 32 nt, Homo Sapiens
gguuucaccauguuggcugggcuggucucgaa

SEQ ID NO: 352380 - RNA, 32 nt, Homo Sapiens
gguuuagguuuaugugcaagacuuuguguugu

SEQ ID NO: 352381 - RNA, 32 nt, Homo Sapiens
auguggugagcauauguaagacuuucaaagga

SEQ ID NO: 352382 - RNA, 32 nt, Homo Sapiens
acagccucagcuccgccugaccucugagcuca

SEQ ID NO: 352383 - RNA, 32 nt, Homo Sapiens
aaucaagugggaaggggaagcagagggaaaug

SEQ ID NO: 352384 - RNA, 32 nt, Homo Sapiens
aucuuuucaugacuucauucacaaauaccuau

SEQ ID NO: 352385 - RNA, 32 nt, Homo Sapiens
cgaggcgcacgcgguccgcgccggcgucaguc

SEQ ID NO: 352386 - RNA, 32 nt, Homo Sapiens
cugcugucaggagagauggcugaaaaggugau

SEQ ID NO: 352387 - RNA, 32 nt, Homo Sapiens
cagcaaggacaucggagaaggcuggggcugcg

SEQ ID NO: 352388 - RNA, 32 nt, Homo Sapiens
cccaggacacgacuuguaaugaaaguuugggg

SEQ ID NO: 352389 - RNA, 32 nt, Homo Sapiens
cauuuggugucugcccacugcagccauacugu

SEQ ID NO: 352390 - RNA, 32 nt, Homo Sapiens
cgcagccugcccggcucagcccggcccggcca

SEQ ID NO: 352391 - RNA, 32 nt, Homo Sapiens
aggugcuugccauuaugggaaaucagcuugcu

SEQ ID NO: 352392 - RNA, 32 nt, Homo Sapiens
agcgcucguccagcggggagcccgccagagag

SEQ ID NO: 352393 - RNA, 32 nt, Homo Sapiens
cgcgaucagggugcaacuucacucccuccucu

SEQ ID NO: 352394 - RNA, 31 nt, Homo Sapiens
cgugaggcaugcacucucagguuccccauag

SEQ ID NO: 352395 - RNA, 32 nt, Homo Sapiens
cgggcucuucuuccccaccuucccucucucgu

SEQ ID NO: 352396 - RNA, 31 nt, Homo Sapiens
uaauauggccaggggaucaauccgauuagcc

SEQ ID NO: 352397 - RNA, 27 nt, Homo Sapiens
uuuguuuccuucuuuagcugccgugug

SEQ ID NO: 352398 - RNA, 32 nt, Homo Sapiens
uccuaauaacaaaacuuucuguguucuuagau

SEQ ID NO: 352399 - RNA, 32 nt, Homo Sapiens
auauguuaggagguuauaaaucuuguggagug

SEQ ID NO: 352400 - RNA, 32 nt, Homo Sapiens
ggugggguguugcuggagcagaugagauaaaa

SEQ ID NO: 352401 - RNA, 32 nt, Homo Sapiens
augacagaaggaaccuugaaaacuaccugaua

SEQ ID NO: 352402 - RNA, 32 nt, Homo Sapiens
gcauucuguaaagaaacauaucaaacuaaaua

SEQ ID NO: 352403 - RNA, 32 nt, Homo Sapiens
cuuuacuaaguagcugguuuuguuuguuuguu

SEQ ID NO: 352404 - RNA, 32 nt, Homo Sapiens
cgcucggucaccucagagagcguggcggggag

SEQ ID NO: 352405 - RNA, 32 nt, Homo Sapiens
aauaucuguaucuauuaggacauuuuuuacau

SEQ ID NO: 352406 - RNA, 32 nt, Homo Sapiens
uucaccuggggguggggggugggggcacguac

SEQ ID NO: 352407 - RNA, 32 nt, Homo Sapiens
ggccgggcacagugacucacgccuguaacccc

SEQ ID NO: 352408 - RNA, 32 nt, Homo Sapiens
gauucuggauggccgggcugcugcugauguag

SEQ ID NO: 352409 - RNA, 32 nt, Homo Sapiens
cggaacgcgaagagggugguggagucgggcua

SEQ ID NO: 352410 - RNA, 32 nt, Homo Sapiens
gcaucaagcagcccaaccaaggcgugcaucga

SEQ ID NO: 352411 - RNA, 32 nt, Homo Sapiens
gguggccguccucacaccugugcgcagcccga

SEQ ID NO: 352412 - RNA, 29 nt, Homo Sapiens
uagguuuagaaguucagaggugacugugu

SEQ ID NO: 352413 - RNA, 32 nt, Homo Sapiens
cuugcuguuaauaaauauuguuucauucuucu

SEQ ID NO: 352414 - RNA, 32 nt, Homo Sapiens
gaacugggaggaagaaaacaugauggaauucc

SEQ ID NO: 352415 - RNA, 32 nt, Homo Sapiens
gagcguaacgacccuucuggccuggucucacg

SEQ ID NO: 352416 - RNA, 32 nt, Homo Sapiens
gccccccaggccaacagcgacuccaugguggg

SEQ ID NO: 352417 - RNA, 32 nt, Homo Sapiens
ucaaagcaaauuaagauuuuuauuuaagaaua

SEQ ID NO: 352418 - RNA, 32 nt, Homo Sapiens
cacugccccucuccgagagcugagaaggaaaa

SEQ ID NO: 352419 - RNA, 32 nt, Homo Sapiens
cacuacuuucuuuuucccugagaauaaauuug

SEQ ID NO: 352420 - RNA, 32 nt, Homo Sapiens
uuuaacucuucccucccccgugcuuuaguuga

SEQ ID NO: 352421 - RNA, 32 nt, Homo Sapiens
uauguaagcacacaugcgcacacacacuugca

SEQ ID NO: 352422 - RNA, 32 nt, Homo Sapiens
guggccccaccuguucuuuccuccccugccga

SEQ ID NO: 352423 - RNA, 32 nt, Homo Sapiens
uuguuguuguuacuguauuacaauuaguauuc

SEQ ID NO: 352424 - RNA, 32 nt, Homo Sapiens
cucggcuucccaaagcacuuggauuacagauu

SEQ ID NO: 352425 - RNA, 32 nt, Homo Sapiens
auauggauuuggaguaaaaugggugcuuuugg

SEQ ID NO: 352426 - RNA, 31 nt, Homo Sapiens
cucccagugaacacucuagggucacggaaac

SEQ ID NO: 352427 - RNA, 32 nt, Homo Sapiens
acaagcacuccagggcaucaguccgggccgcu

SEQ ID NO: 352428 - RNA, 32 nt, Homo Sapiens
uucuuuuucuuuuuuuuuuuuauaacuguaca

SEQ ID NO: 352429 - RNA, 32 nt, Homo Sapiens
acuguaaaguguacaaguuacuuuauauaugu

SEQ ID NO: 352430 - RNA, 32 nt, Homo Sapiens
gucacucuccucugugaucacaaacucuggcc

SEQ ID NO: 352431 - RNA, 32 nt, Homo Sapiens
aggagagaauaaaauuaccugugcaaaggugu

SEQ ID NO: 352432 - RNA, 32 nt, Homo Sapiens
cccucgcugugaacuuccuguuggugcugguu

SEQ ID NO: 352433 - RNA, 32 nt, Homo Sapiens
agggggcugcuagaguucuucuccucgggugu

SEQ ID NO: 352434 - RNA, 32 nt, Homo Sapiens
gcgcgccugucucccgggacgcuagagcaggc

SEQ ID NO: 352435 - RNA, 32 nt, Homo Sapiens
uuuauuuuucccuuuuccuaaauuaacuagca

SEQ ID NO: 352436 - RNA, 32 nt, Homo Sapiens
agggcugaguucugaggcgccaggcacagggc

SEQ ID NO: 352437 - RNA, 32 nt, Homo Sapiens
ggagacgcgcgcgucgggguuuaacgcguuuc

SEQ ID NO: 352438 - RNA, 32 nt, Homo Sapiens
gguugggaggggagaggacgcgggcgaggaag

SEQ ID NO: 352439 - RNA, 32 nt, Homo Sapiens
aucuuguauaugaggggaaaaggaaagggcuu

SEQ ID NO: 352440 - RNA, 32 nt, Homo Sapiens
cgcggggacuccggacucccagugucaccaac

SEQ ID NO: 352441 - RNA, 32 nt, Homo Sapiens
uagaauaugaucuauuuuaugcauauuguuua

SEQ ID NO: 352442 - RNA, 32 nt, Homo Sapiens
aaucauggagccacgugagcugaucguggcug

SEQ ID NO: 352443 - RNA, 32 nt, Homo Sapiens
uuugacuuugacaagcagaaauuacuuuuaaa

SEQ ID NO: 352444 - RNA, 32 nt, Homo Sapiens
cacugacauaauguagugaguguagacuggcc

SEQ ID NO: 352445 - RNA, 30 nt, Homo Sapiens
cuccuguuguuuuccgccggcaggaguagg

SEQ ID NO: 352446 - RNA, 28 nt, Homo Sapiens
uuaauaaaaauauuccuaaugcuuuuag

SEQ ID NO: 352447 - RNA, 32 nt, Homo Sapiens
gucuuugagaugagaaaggcuuaaaacuugag

SEQ ID NO: 352448 - RNA, 32 nt, Homo Sapiens
acccuguggcuucugcagcugcaccucgugga

SEQ ID NO: 352449 - RNA, 32 nt, Homo Sapiens
gggcugugcaggacgugccuuguuaccaaaua

SEQ ID NO: 352450 - RNA, 32 nt, Homo Sapiens
ccccaaguuccaccuucuauguuucuacuccc

SEQ ID NO: 352451 - RNA, 32 nt, Homo Sapiens
uggcuguaaaauauuucuuuauagcguuauua

SEQ ID NO: 352452 - RNA, 28 nt, Homo Sapiens
uuuuuaaaagauuaauuuuggaaacaga

SEQ ID NO: 352453 - RNA, 32 nt, Homo Sapiens
ccaguuaccugcugcuggggucggggcuggag

SEQ ID NO: 352454 - RNA, 32 nt, Homo Sapiens
gcuuucgagagcuucuggucuugguucaucag

SEQ ID NO: 352455 - RNA, 32 nt, Homo Sapiens
gauucaucuucaguugaaacuuaagagccccu

SEQ ID NO: 352456 - RNA, 32 nt, Homo Sapiens
guccuggccaaauaugggggccugccuagguu

SEQ ID NO: 352457 - RNA, 32 nt, Homo Sapiens
augagagcugaauguagggacaauuuucuagu

SEQ ID NO: 352458 - RNA, 32 nt, Homo Sapiens
uuucccacuuagaccaaagggauugagaagcu

SEQ ID NO: 352459 - RNA, 32 nt, Homo Sapiens
gugcccuggccugaggcccacaacccccaccc

SEQ ID NO: 352460 - RNA, 32 nt, Homo Sapiens
ggcuggccucucccugcaugggcccgcaggag

SEQ ID NO: 352461 - RNA, 32 nt, Homo Sapiens
aaggaaauauaaaagccggguuuuugcaacau

SEQ ID NO: 352462 - RNA, 32 nt, Homo Sapiens
agguacucugcugagugggcaaggcugaagua

SEQ ID NO: 352463 - RNA, 32 nt, Homo Sapiens
uucgggggcccgcgcugcagguugccuguccc

SEQ ID NO: 352464 - RNA, 32 nt, Homo Sapiens
aauguuguugaguacaguguugugaaugagac

SEQ ID NO: 352465 - RNA, 32 nt, Homo Sapiens
cagcuuccccccggcccggguccggccguggg

SEQ ID NO: 352466 - RNA, 32 nt, Homo Sapiens
uguuuuguaacuucauuuuuuauuccuuuagu

SEQ ID NO: 352467 - RNA, 32 nt, Homo Sapiens
auacuggaauaauuuguaaaugauuuuaauuu

SEQ ID NO: 352468 - RNA, 32 nt, Homo Sapiens
gauacaguuauucuuuuuuuuaaagaacauug

SEQ ID NO: 352469 - RNA, 32 nt, Homo Sapiens
agggcgccagggugcugucgggauaacguggg

SEQ ID NO: 352470 - RNA, 32 nt, Homo Sapiens
cuguuugucuuauccuggcccuggccagacgu

SEQ ID NO: 352471 - RNA, 32 nt, Homo Sapiens
uauuaaaauauguguuauuaggagaauguaca

SEQ ID NO: 352472 - RNA, 32 nt, Homo Sapiens
ggcccuuccccucggcuuugccuggacagcuc

SEQ ID NO: 352473 - RNA, 30 nt, Homo Sapiens
cuuuuucuggacugaagccugcaggaguua

SEQ ID NO: 352474 - RNA, 29 nt, Homo Sapiens
uuucucauauguagauacaaaaggauauu

SEQ ID NO: 352475 - RNA, 32 nt, Homo Sapiens
ggguccugguccccggucucugggcucggacu

SEQ ID NO: 352476 - RNA, 32 nt, Homo Sapiens
aaaaaauguuuccauugccauauuugauucac

SEQ ID NO: 352477 - RNA, 32 nt, Homo Sapiens
cuugcaagaggagaggcacgguagggaaaaga

SEQ ID NO: 352478 - RNA, 32 nt, Homo Sapiens
cuaaucaaaaaugauauagacgacagcacugg

SEQ ID NO: 352479 - RNA, 32 nt, Homo Sapiens
agagcccauaaggggacucuuuucaagacacg

SEQ ID NO: 352480 - RNA, 32 nt, Homo Sapiens
gcuuggaggaagagccugcggggaacuggcug

SEQ ID NO: 352481 - RNA, 32 nt, Homo Sapiens
auaaauguauagaacaauuggccauauugagg

SEQ ID NO: 352482 - RNA, 32 nt, Homo Sapiens
uaauaaaaauaauuugaaaaucuuaaaaaaaa

SEQ ID NO: 352483 - RNA, 32 nt, Homo Sapiens
cccagcuacuugagaggcugaggugggaaaau

SEQ ID NO: 352484 - RNA, 32 nt, Homo Sapiens
uacuguaagaguugugauaacuuuuuauucua

SEQ ID NO: 352485 - RNA, 32 nt, Homo Sapiens
aguugacuaauguaccucccaccaaccguaag

SEQ ID NO: 352486 - RNA, 32 nt, Homo Sapiens
ugguuaaugaccugccacccccgcccccccaa

SEQ ID NO: 352487 - RNA, 32 nt, Homo Sapiens
aacuaaugucagcacauguugcuaaugacagu

SEQ ID NO: 352488 - RNA, 32 nt, Homo Sapiens
uaaaaaauaaaauaaaauuaguuaauaaaaug

SEQ ID NO: 352489 - RNA, 32 nt, Homo Sapiens
gcuucaucucccaggagcugcccagccagcgc

SEQ ID NO: 352490 - RNA, 30 nt, Homo Sapiens
aaacugggagguggagguugcagugagcca

SEQ ID NO: 352491 - RNA, 32 nt, Homo Sapiens
uacaaucccacuuuuauaaaacaagacaaaua

SEQ ID NO: 352492 - RNA, 32 nt, Homo Sapiens
ccccgcucgcggcuagcuugcacgccagggca

SEQ ID NO: 352493 - RNA, 32 nt, Homo Sapiens
cgcgguuuuaauacuccuccccgaacugccaa

SEQ ID NO: 352494 - RNA, 32 nt, Homo Sapiens
uuuuaaugaaaaucuaaugauguaauaggcau

SEQ ID NO: 352495 - RNA, 32 nt, Homo Sapiens
ugccauguuuuaagucuucauggauguucugc

SEQ ID NO: 352496 - RNA, 32 nt, Homo Sapiens
acuuaaaugccaauuaaacaagaauauaacau

SEQ ID NO: 352497 - RNA, 32 nt, Homo Sapiens
cacaccccggcggcucucggcccagcgcgccu

SEQ ID NO: 352498 - RNA, 32 nt, Homo Sapiens
cacgcguccgggacccggcccgcgccuucugc

SEQ ID NO: 352499 - RNA, 32 nt, Homo Sapiens
acgcuggccccgguccagggccggccccugug

SEQ ID NO: 352500 - RNA, 32 nt, Homo Sapiens
uuuacaauguguaucaaaacuaccugugagca

SEQ ID NO: 352501 - RNA, 32 nt, Homo Sapiens
gacgggcucugggaagaccuacacccugacug

SEQ ID NO: 352502 - RNA, 32 nt, Homo Sapiens
uuucaaacaccguggcaccuccgagcaaggcg

SEQ ID NO: 352503 - RNA, 32 nt, Homo Sapiens
uuucugagugauucucuuucuguauugagagg

SEQ ID NO: 352504 - RNA, 32 nt, Homo Sapiens
cauguauuuguuuucuuguuuauuuucuucuu

SEQ ID NO: 352505 - RNA, 32 nt, Homo Sapiens
uagcauguucuucuggagcaggaguuacaaau

SEQ ID NO: 352506 - RNA, 32 nt, Homo Sapiens
aagaaaucuugaugaauauuuauguuguaauu

SEQ ID NO: 352507 - RNA, 32 nt, Homo Sapiens
uccuugcuaagccccacuccggcuacagcucu

SEQ ID NO: 352508 - RNA, 32 nt, Homo Sapiens
gucauacgcagcgcccuuugugacaccagggc

SEQ ID NO: 352509 - RNA, 32 nt, Homo Sapiens
aaaguggaacagaguccccagaacucaugugg

SEQ ID NO: 352510 - RNA, 32 nt, Homo Sapiens
cugccuuugaaaacaaggaaagguugguagaa

SEQ ID NO: 352511 - RNA, 32 nt, Homo Sapiens
uuggucuugcugucucagguggcagaggugaa

SEQ ID NO: 352512 - RNA, 32 nt, Homo Sapiens
uccuugcuuuuguaaauaaguuuaguucauuu

SEQ ID NO: 352513 - RNA, 32 nt, Homo Sapiens
uggaaaugguugacauuacacaugguauuugu

SEQ ID NO: 352514 - RNA, 32 nt, Homo Sapiens
cagacuucggaacggguguccugcuacuccug

SEQ ID NO: 352515 - RNA, 32 nt, Homo Sapiens
ugguccaggccuuggaggaaagcagaggauga

SEQ ID NO: 352516 - RNA, 32 nt, Homo Sapiens
cagccaggaccaucgcccuuucucagagcaga

SEQ ID NO: 352517 - RNA, 32 nt, Homo Sapiens
gacuggacaaaacaacacaaaggcagaaagga

SEQ ID NO: 352518 - RNA, 32 nt, Homo Sapiens
auaauucuagaccaaaguaaauauggcagaau

SEQ ID NO: 352519 - RNA, 32 nt, Homo Sapiens
ucuucuuuuaagaacaaugcaaauguacuuau

SEQ ID NO: 352520 - RNA, 32 nt, Homo Sapiens
ccucucccgccuuuucgcugggaaggguauca

SEQ ID NO: 352521 - RNA, 32 nt, Homo Sapiens
guagcuguucccaggaaaggggugcaaagacu

SEQ ID NO: 352522 - RNA, 32 nt, Homo Sapiens
cuguucugucuccugcacuuuguccugugagu

SEQ ID NO: 352523 - RNA, 32 nt, Homo Sapiens
cugggcuggugccuccccucccuagagguuuu

SEQ ID NO: 352524 - RNA, 32 nt, Homo Sapiens
ucucccgcuguguggcgucccccucccaccug

SEQ ID NO: 352525 - RNA, 32 nt, Homo Sapiens
gaagugaccccucuucuugccucuguaacacc

SEQ ID NO: 352526 - RNA, 32 nt, Homo Sapiens
gccccggcucugcaggaagcugaagugagagg

SEQ ID NO: 352527 - RNA, 32 nt, Homo Sapiens
gaccugcccucccucggucccaggucacugga

SEQ ID NO: 352528 - RNA, 32 nt, Homo Sapiens
ggucgguagucgucgccccagcccgccggggg

SEQ ID NO: 352529 - RNA, 32 nt, Homo Sapiens
gcuggcgucccaggcauagaaaccucgaagcg

SEQ ID NO: 352530 - RNA, 32 nt, Homo Sapiens
cauucacaucccauuccugccuuuugcaauca

SEQ ID NO: 352531 - RNA, 32 nt, Homo Sapiens
uccuucaggauggagucagauaaguguggacc

SEQ ID NO: 352532 - RNA, 32 nt, Homo Sapiens
uuuuggggggcugcuuccugucugaguaagcc

SEQ ID NO: 352533 - RNA, 32 nt, Homo Sapiens
ccuucacucccucucucuccccuugauggcca

SEQ ID NO: 352534 - RNA, 30 nt, Homo Sapiens
aggccaggcaggcagggaucccgcagcgag

SEQ ID NO: 352535 - RNA, 32 nt, Homo Sapiens
aggcuggguguuccuuuuuucuuuucuuuuuc

SEQ ID NO: 352536 - RNA, 32 nt, Homo Sapiens
aguuucaacaugaauuuuuuuauuucugucag

SEQ ID NO: 352537 - RNA, 32 nt, Homo Sapiens
cacaguuccaugacccagcgggcccccagggg

SEQ ID NO: 352538 - RNA, 32 nt, Homo Sapiens
uacaaaaaaaaauuauauaaaaaaaaagucua

SEQ ID NO: 352539 - RNA, 32 nt, Homo Sapiens
gucacuucugauuuuccaacaguugcuccuuc

SEQ ID NO: 352540 - RNA, 32 nt, Homo Sapiens
gccuugggagauuuauacuauaaauucaguga

SEQ ID NO: 352541 - RNA, 32 nt, Homo Sapiens
gaugaagauugaagggacuuuuuuauaucuca

SEQ ID NO: 352542 - RNA, 32 nt, Homo Sapiens
auaaaacucauaaaacaaaagccuuguaagca

SEQ ID NO: 352543 - RNA, 32 nt, Homo Sapiens
uagaccuucaucgcccucugaucgccgaucac

SEQ ID NO: 352544 - RNA, 32 nt, Homo Sapiens
ccauagauggagaaacaaagcucaggguuugu

SEQ ID NO: 352545 - RNA, 32 nt, Homo Sapiens
agaccaguguaacagaaagagaauguagccau

SEQ ID NO: 352546 - RNA, 32 nt, Homo Sapiens
gcucccagucccagcccgcggcccucccccuc

SEQ ID NO: 352547 - RNA, 32 nt, Homo Sapiens
auuguauugugauuuccuuuuagguauauugc

SEQ ID NO: 352548 - RNA, 32 nt, Homo Sapiens
caaaagaugacucaggaaaacaguccaacauu

SEQ ID NO: 352549 - RNA, 32 nt, Homo Sapiens
cuauuacauuuuauuuugucauguacuaaaau

SEQ ID NO: 352550 - RNA, 32 nt, Homo Sapiens
cugcacaguuuagaacagagggaccaaauugc

SEQ ID NO: 352551 - RNA, 32 nt, Homo Sapiens
ccuucuguucuuccuuacaccuaaauaauaca

SEQ ID NO: 352552 - RNA, 32 nt, Homo Sapiens
agagcacaaaaauuuuauugaacccaccuuag

SEQ ID NO: 352553 - RNA, 32 nt, Homo Sapiens
auuuguaaacaaauucuaaugggcaaaauauc

SEQ ID NO: 352554 - RNA, 32 nt, Homo Sapiens
ucuauuuuaaaauaaauuaguuguuaagaguc

SEQ ID NO: 352555 - RNA, 32 nt, Homo Sapiens
aggccccagcccuggccagcaccuacagcgga

SEQ ID NO: 352556 - RNA, 32 nt, Homo Sapiens
acuaaggugauacauagugagucacacaaucu

SEQ ID NO: 352557 - RNA, 32 nt, Homo Sapiens
uucugccuccccagcuucuccuccccaguugu

SEQ ID NO: 352558 - RNA, 31 nt, Homo Sapiens
cuagcaccacccucagccaggcuacaacgac

SEQ ID NO: 352559 - RNA, 32 nt, Homo Sapiens
uguguuuucaugucuuuuuucagcccucucag

SEQ ID NO: 352560 - RNA, 32 nt, Homo Sapiens
ggaguggcggaccugcagcagcuccuccagcu

SEQ ID NO: 352561 - RNA, 32 nt, Homo Sapiens
agcgggaccaacauggugaaaccccgucucua

SEQ ID NO: 352562 - RNA, 32 nt, Homo Sapiens
aaaacaacaaccccaacaacagaagccuuggc

SEQ ID NO: 352563 - RNA, 32 nt, Homo Sapiens
aaggaauugggaauuuuagucuuuuaagcaaa

SEQ ID NO: 352564 - RNA, 32 nt, Homo Sapiens
ucuguggccaggagcccuggcccgcaagaggg

SEQ ID NO: 352565 - RNA, 32 nt, Homo Sapiens
agggcaggcacucgggaagggaagauggaugu

SEQ ID NO: 352566 - RNA, 32 nt, Homo Sapiens
cucuagucugugggguacgccauggugcaggc

SEQ ID NO: 352567 - RNA, 32 nt, Homo Sapiens
gaggucucaccucuccuuucugagcuguggac

SEQ ID NO: 352568 - RNA, 32 nt, Homo Sapiens
gaugcauauguguauauuuuuaugaucuuaca

SEQ ID NO: 352569 - RNA, 32 nt, Homo Sapiens
gugaguugcauaauugugguuuucucuauacu

SEQ ID NO: 352570 - RNA, 32 nt, Homo Sapiens
uuaugcaacuucugccuccccagguucaagcg

SEQ ID NO: 352571 - RNA, 32 nt, Homo Sapiens
cugcagccugccugugcuggcugcuggggucg

SEQ ID NO: 352572 - RNA, 32 nt, Homo Sapiens
guucuggggaccugugguuugcuggcggaaac

SEQ ID NO: 352573 - RNA, 32 nt, Homo Sapiens
uggugucuggaucugcccuuucuacugugggg

SEQ ID NO: 352574 - RNA, 32 nt, Homo Sapiens
uauuuaaccucuucuuuugccacucgccucua

SEQ ID NO: 352575 - RNA, 32 nt, Homo Sapiens
augcucccagaccuccuucugcuucucagacu

SEQ ID NO: 352576 - RNA, 32 nt, Homo Sapiens
gaugggugauaaugaaagaccauuccagagaa

SEQ ID NO: 352577 - RNA, 32 nt, Homo Sapiens
acgaagucauguacucgguaugagcccuacgu

SEQ ID NO: 352578 - RNA, 32 nt, Homo Sapiens
auaaguucuggugugugaaguuggguggcuua

SEQ ID NO: 352579 - RNA, 32 nt, Homo Sapiens
ggcugccucugugccaggaugccaaggaccgc

SEQ ID NO: 352580 - RNA, 32 nt, Homo Sapiens
ugaaauaacucagccuuucaccaccaaauugu

SEQ ID NO: 352581 - RNA, 32 nt, Homo Sapiens
aguuauuuuguucuguucugucaugugccaca

SEQ ID NO: 352582 - RNA, 32 nt, Homo Sapiens
caauguuucuucauuucucugcauggguuggu

SEQ ID NO: 352583 - RNA, 32 nt, Homo Sapiens
guaggguaaaaucuaagaccugcacaagggca

SEQ ID NO: 352584 - RNA, 32 nt, Homo Sapiens
gccguggaugggaaaaacaucaacacuugugg

SEQ ID NO: 352585 - RNA, 32 nt, Homo Sapiens
cacuuaaaaaugguuuaaauggucaauuuugu

SEQ ID NO: 352586 - RNA, 32 nt, Homo Sapiens
aacggguacugggauuggggcugggggcuguc

SEQ ID NO: 352587 - RNA, 32 nt, Homo Sapiens
aaucuguaauuugaaauuuagcaggaaaugac

SEQ ID NO: 352588 - RNA, 32 nt, Homo Sapiens
uucagguucacccuuugccacccagccuaccc

SEQ ID NO: 352589 - RNA, 32 nt, Homo Sapiens
cugacuuuguaucaacacuauagaagaugagc

SEQ ID NO: 352590 - RNA, 32 nt, Homo Sapiens
gguggagggaggugcuuggggaggcagagguu

SEQ ID NO: 352591 - RNA, 32 nt, Homo Sapiens
gggcugagccagauuccuggauguguggacca

SEQ ID NO: 352592 - RNA, 32 nt, Homo Sapiens
ucuuagcaggcaggcagugucuggccauuauu

SEQ ID NO: 352593 - RNA, 32 nt, Homo Sapiens
cauggagaagagguacaagagaggcucccugc

SEQ ID NO: 352594 - RNA, 32 nt, Homo Sapiens
ccugcugggccugguccgcagccgccacuccc

SEQ ID NO: 352595 - RNA, 32 nt, Homo Sapiens
aauaucaggaagccauuuuuuauuucaggaaa

SEQ ID NO: 352596 - RNA, 32 nt, Homo Sapiens
uccggcugcaccaccccggcccgcugcugugc

SEQ ID NO: 352597 - RNA, 32 nt, Homo Sapiens
cccucauucuacccucuuuuuccugcuaaucc

SEQ ID NO: 352598 - RNA, 32 nt, Homo Sapiens
ugaagggccccggugcugugggccgagagccg

SEQ ID NO: 352599 - RNA, 32 nt, Homo Sapiens
gcgcugacagccccgcucagacuccgggagcc

SEQ ID NO: 352600 - RNA, 32 nt, Homo Sapiens
uggucucugcaccuccuuucugucccccggca

SEQ ID NO: 352601 - RNA, 32 nt, Homo Sapiens
uauuuguaaaggcuggaagagcagaaaucccc

SEQ ID NO: 352602 - RNA, 32 nt, Homo Sapiens
gggccgggccugcaggagccgggccgccgagg

SEQ ID NO: 352603 - RNA, 32 nt, Homo Sapiens
aguggacgcagagggaagagaugaucauugga

SEQ ID NO: 352604 - RNA, 32 nt, Homo Sapiens
cuuccuuuguugcacaaauagaguuuggaaaa

SEQ ID NO: 352605 - RNA, 32 nt, Homo Sapiens
ccccaccccucgcaccccuuguguuuucccuc

SEQ ID NO: 352606 - RNA, 32 nt, Homo Sapiens
uuauguaauaauauuaaugauauuaagcucca

SEQ ID NO: 352607 - RNA, 32 nt, Homo Sapiens
cccccgcccucccacccgcucagaccugguug

SEQ ID NO: 352608 - RNA, 32 nt, Homo Sapiens
gucuccugagcggcggcggcgccgggucgagg

SEQ ID NO: 352609 - RNA, 32 nt, Homo Sapiens
ucuccgcuucuccaguggccccgguggcucca

SEQ ID NO: 352610 - RNA, 32 nt, Homo Sapiens
ggucuagaccugaggcugcccgggccggaggc

SEQ ID NO: 352611 - RNA, 27 nt, Homo Sapiens
aucaugcaauucuucagcucuuccagg

SEQ ID NO: 352612 - RNA, 32 nt, Homo Sapiens
ggaaaucucaaccuaaugcugccggggaggaa

SEQ ID NO: 352613 - RNA, 32 nt, Homo Sapiens
ggugcuauuuccccucucuccuccucaaccug

SEQ ID NO: 352614 - RNA, 32 nt, Homo Sapiens
uguauagcaguuuuugucuauuuuaacauugu

SEQ ID NO: 352615 - RNA, 32 nt, Homo Sapiens
ucugagccgacgcccuugccccugccccuacc

SEQ ID NO: 352616 - RNA, 32 nt, Homo Sapiens
ucaacgucaacgccaagcccuucgugcccaac

SEQ ID NO: 352617 - RNA, 32 nt, Homo Sapiens
gcacucuaacuuaugugaacugagagaaaaaa

SEQ ID NO: 352618 - RNA, 32 nt, Homo Sapiens
cuugcuuugacaaauaccaccgugcucagugc

SEQ ID NO: 352619 - RNA, 32 nt, Homo Sapiens
ggccuccaccgccuuccccggcugcccggcag

SEQ ID NO: 352620 - RNA, 32 nt, Homo Sapiens
agaacugaugugcauuuauauuagcuuuugga

SEQ ID NO: 352621 - RNA, 32 nt, Homo Sapiens
cacugggcccccagccccucuuuugcgacccc

SEQ ID NO: 352622 - RNA, 32 nt, Homo Sapiens
ugcaugaaaaggaaacaucacaauggcuauuu

SEQ ID NO: 352623 - RNA, 32 nt, Homo Sapiens
augaacagagcacuuuuuacuaaguaguagau

SEQ ID NO: 352624 - RNA, 32 nt, Homo Sapiens
cagccccugcgcgcuccuagagcucgggccgu

SEQ ID NO: 352625 - RNA, 30 nt, Homo Sapiens
ggauggaauggcagcaugcaaacuuggauc

SEQ ID NO: 352626 - RNA, 32 nt, Homo Sapiens
gccgucgccgacgagaaccagaaccaccaccu

SEQ ID NO: 352627 - RNA, 32 nt, Homo Sapiens
auaugcacacauuuuuuaaaugcaccuggaau

SEQ ID NO: 352628 - RNA, 32 nt, Homo Sapiens
aacuuucuguaucucuuaggaggaacaaguaa

SEQ ID NO: 352629 - RNA, 32 nt, Homo Sapiens
gccaggggaggcccggugccggcggccaggga

SEQ ID NO: 352630 - RNA, 32 nt, Homo Sapiens
cucaacugcuggcgcccccacucccggccgcg

SEQ ID NO: 352631 - RNA, 32 nt, Homo Sapiens
uccacuggcagagggacacacgaucggggcaa

SEQ ID NO: 352632 - RNA, 32 nt, Homo Sapiens
aaacuaauauuuuuguuuguugcuuuugggag

SEQ ID NO: 352633 - RNA, 32 nt, Homo Sapiens
uccaacucuugcuuggggccaagcccugcacc

SEQ ID NO: 352634 - RNA, 32 nt, Homo Sapiens
uggacuuggcaguuuucuuuccccucaucuuu

SEQ ID NO: 352635 - RNA, 32 nt, Homo Sapiens
uuggggagaugccuuggggucuguggcaagag

SEQ ID NO: 352636 - RNA, 32 nt, Homo Sapiens
cagugccagcagcggcguguccuccuugagug

SEQ ID NO: 352637 - RNA, 32 nt, Homo Sapiens
gaacugcccugccugcccaucucagagccaua

SEQ ID NO: 352638 - RNA, 32 nt, Homo Sapiens
agagguuuauagccauagcauuuaccauuuua

SEQ ID NO: 352639 - RNA, 32 nt, Homo Sapiens
agaggcgggggccucgggagggugaaaggagg

SEQ ID NO: 352640 - RNA, 32 nt, Homo Sapiens
cacacacacacacacacacacacacacacgcc

SEQ ID NO: 352641 - RNA, 32 nt, Homo Sapiens
ccacauugcauaauuuugccuuacuaacagaa

SEQ ID NO: 352642 - RNA, 32 nt, Homo Sapiens
cuucuccguuguguguuuugcaugaaaguguu

SEQ ID NO: 352643 - RNA, 32 nt, Homo Sapiens
acugcccaccccacccacuguggucuguugua

SEQ ID NO: 352644 - RNA, 32 nt, Homo Sapiens
ugagccaggccccggcccggggugcuggggcu

SEQ ID NO: 352645 - RNA, 32 nt, Homo Sapiens
ccccugcccucccaccaaagccuccugugcuu

SEQ ID NO: 352646 - RNA, 32 nt, Homo Sapiens
caagaacuccgucugcuugggguuauucagug

SEQ ID NO: 352647 - RNA, 32 nt, Homo Sapiens
gguuucuccauguuggccaggcuggucuugaa

SEQ ID NO: 352648 - RNA, 32 nt, Homo Sapiens
uuuggcuagcuggcuuuuaauucuuaauuaaa

SEQ ID NO: 352649 - RNA, 32 nt, Homo Sapiens
gccuccugccucagccucccaaguauuuggga

SEQ ID NO: 352650 - RNA, 32 nt, Homo Sapiens
ggugucccuggccaguguccuuccaccugucc

SEQ ID NO: 352651 - RNA, 28 nt, Homo Sapiens
ggagucggggggccgccgaagaugggga

SEQ ID NO: 352652 - RNA, 32 nt, Homo Sapiens
cuugagacgcugagcgcguggugccacccuuc

SEQ ID NO: 352653 - RNA, 32 nt, Homo Sapiens
acccuuuugaguuugcccuagaauaaaugaga

SEQ ID NO: 352654 - RNA, 32 nt, Homo Sapiens
gacaacagccauuguuucugcuuccacucaua

SEQ ID NO: 352655 - RNA, 32 nt, Homo Sapiens
aaguuuguaguuacaugugaaacucuaaaugc

SEQ ID NO: 352656 - RNA, 32 nt, Homo Sapiens
agaaggcucuuuggggacccugacaugaagaa

SEQ ID NO: 352657 - RNA, 32 nt, Homo Sapiens
auauguauauauacaguacauagaaaauagaa

SEQ ID NO: 352658 - RNA, 32 nt, Homo Sapiens
aggugggauauaagaguaagauaccuugacua

SEQ ID NO: 352659 - RNA, 32 nt, Homo Sapiens
gaguuaacaauaaccuauugcauauauuuuga

SEQ ID NO: 352660 - RNA, 32 nt, Homo Sapiens
uuuuauuuuuaugugauaaucuaccuuuaaga

SEQ ID NO: 352661 - RNA, 32 nt, Homo Sapiens
ccgcgcgccccagucccgccccgccccgcuaa

SEQ ID NO: 352662 - RNA, 32 nt, Homo Sapiens
uacuuaauauuuuuaaaaacaaaccuuuuaag

SEQ ID NO: 352663 - RNA, 32 nt, Homo Sapiens
ucugcauaucuuaugucuuccauccaaaaaga

SEQ ID NO: 352664 - RNA, 32 nt, Homo Sapiens
uuggaaggguuuguuauuucauuuucagccaa

SEQ ID NO: 352665 - RNA, 32 nt, Homo Sapiens
ucuaugacugugauggguguagcugaucccag

SEQ ID NO: 352666 - RNA, 32 nt, Homo Sapiens
cuggagccuugauguuaaaagacacagccaug

SEQ ID NO: 352667 - RNA, 32 nt, Homo Sapiens
ugauaauuuuuggugcgugauuuuuagauuug

SEQ ID NO: 352668 - RNA, 32 nt, Homo Sapiens
uguuucaacauuuuaaacaaacagugguuaua

SEQ ID NO: 352669 - RNA, 29 nt, Homo Sapiens
uaaugcuggggacaggcaugcugccgcca

SEQ ID NO: 352670 - RNA, 32 nt, Homo Sapiens
aggaugguccccagccccacccuguccccacc

SEQ ID NO: 352671 - RNA, 32 nt, Homo Sapiens
ggcacaugccuuuuaaaaguucuuuaagcaac

SEQ ID NO: 352672 - RNA, 32 nt, Homo Sapiens
acccucaguccggcccgguccggccucccagc

SEQ ID NO: 352673 - RNA, 31 nt, Homo Sapiens
agucaaugauaaaaacagauguauuauggca

SEQ ID NO: 352674 - RNA, 32 nt, Homo Sapiens
ugggccgggguggaaggagggggauaaaccua

SEQ ID NO: 352675 - RNA, 32 nt, Homo Sapiens
cagcuggcggguguggagaccaggcuccugac

SEQ ID NO: 352676 - RNA, 32 nt, Homo Sapiens
gucugaagaagugcaauauguuagauacucag

SEQ ID NO: 352677 - RNA, 32 nt, Homo Sapiens
aacuucaaauauagagauauuuuuguacguua

SEQ ID NO: 352678 - RNA, 32 nt, Homo Sapiens
ggcgaccucgucugcgcggcgggcgugccagu

SEQ ID NO: 352679 - RNA, 30 nt, Homo Sapiens
caagagauaucuccugccuacuugccccuc

SEQ ID NO: 352680 - RNA, 32 nt, Homo Sapiens
cgcuccggcauccuagagaguacgcgugugag

SEQ ID NO: 352681 - RNA, 32 nt, Homo Sapiens
gcaccucaucagucaugcuccuccuccauuuu

SEQ ID NO: 352682 - RNA, 32 nt, Homo Sapiens
gugauauuuuaaaaaauaaguugucuaugggc

SEQ ID NO: 352683 - RNA, 32 nt, Homo Sapiens
ugcuaagcuuguuuauuggggaccacuaagca

SEQ ID NO: 352684 - RNA, 29 nt, Homo Sapiens
auaaaauucaucuggaaccacaaaagagc

SEQ ID NO: 352685 - RNA, 32 nt, Homo Sapiens
gguuucaccauauuggucaggcuggucuugaa

SEQ ID NO: 352686 - RNA, 32 nt, Homo Sapiens
acuaaucaacgugaagagaaacaaagguuuga

SEQ ID NO: 352687 - RNA, 32 nt, Homo Sapiens
ugugaaguuggagaggcgguaacggaggcacu

SEQ ID NO: 352688 - RNA, 32 nt, Homo Sapiens
gaggaagggagagaggcggcggcgacaccaug

SEQ ID NO: 352689 - RNA, 32 nt, Homo Sapiens
ucacaggaggaguuggcggggagccuugggcc

SEQ ID NO: 352690 - RNA, 32 nt, Homo Sapiens
aagauguugcuuccucaaggccacucggccau

SEQ ID NO: 352691 - RNA, 32 nt, Homo Sapiens
ugaggggcagggggcauggggcugggaggucu

SEQ ID NO: 352692 - RNA, 32 nt, Homo Sapiens
cucgcgcagcgggguggcacaggcggccaggg

SEQ ID NO: 352693 - RNA, 32 nt, Homo Sapiens
gccuuauauuccagagagguggcagcauuccc

SEQ ID NO: 352694 - RNA, 32 nt, Homo Sapiens
guguggaacaauagucuacugauaagaaucaa

SEQ ID NO: 352695 - RNA, 32 nt, Homo Sapiens
uucaguuuauuuucuguguucgagauugcuua

SEQ ID NO: 352696 - RNA, 32 nt, Homo Sapiens
gcuggaggguuguggcccgaggcugcagucag

SEQ ID NO: 352697 - RNA, 32 nt, Homo Sapiens
uaaaacugcccccuuuuuuaaacaggggagaa

SEQ ID NO: 352698 - RNA, 32 nt, Homo Sapiens
gaagaccuggggugggggugguacaggguagg

SEQ ID NO: 352699 - RNA, 32 nt, Homo Sapiens
auccauguaagaaaaaauaauuguugaagaaa

SEQ ID NO: 352700 - RNA, 32 nt, Homo Sapiens
agggggaggggaggcgucguccagggaacaaa

SEQ ID NO: 352701 - RNA, 32 nt, Homo Sapiens
gugagccaagauugcacccugcacucuagccu

SEQ ID NO: 352702 - RNA, 32 nt, Homo Sapiens
aaguguguguccucugaggugcuugagaaagu

SEQ ID NO: 352703 - RNA, 32 nt, Homo Sapiens
gacagaucagaagacauaguucccuccuucug

SEQ ID NO: 352704 - RNA, 32 nt, Homo Sapiens
auaaguauaaggaaacuaaauuugaaucaacu

SEQ ID NO: 352705 - RNA, 32 nt, Homo Sapiens
ggcagaggaaaauaaacuuuacuuuauaucau

SEQ ID NO: 352706 - RNA, 32 nt, Homo Sapiens
aggggccccgucccugggaaccuugcagguug

SEQ ID NO: 352707 - RNA, 32 nt, Homo Sapiens
ucugcccuaucccaugccccagcccccacccu

SEQ ID NO: 352708 - RNA, 32 nt, Homo Sapiens
ggcggcggcggaagcugcagaggccaccgggg

SEQ ID NO: 352709 - RNA, 32 nt, Homo Sapiens
uuuuuggaauuagaaaucaugauuguaggcug

SEQ ID NO: 352710 - RNA, 32 nt, Homo Sapiens
agacuugcuucuagagguuuaaucaccaugag

SEQ ID NO: 352711 - RNA, 32 nt, Homo Sapiens
agaccauccuggcuaacagugaaacccugucu

SEQ ID NO: 352712 - RNA, 32 nt, Homo Sapiens
uuauucagcuggggaaauuucucuaaauguac

SEQ ID NO: 352713 - RNA, 32 nt, Homo Sapiens
ucuguuccuugcccuguccccagcaccgagga

SEQ ID NO: 352714 - RNA, 32 nt, Homo Sapiens
ggcgccccaagccccagagacuaccugccggc

SEQ ID NO: 352715 - RNA, 32 nt, Homo Sapiens
ugcuaauuuaaagauugcaagagguuucuucc

SEQ ID NO: 352716 - RNA, 32 nt, Homo Sapiens
cucaccuuccaagucucccucaaagaagaaaa

SEQ ID NO: 352717 - RNA, 30 nt, Homo Sapiens
gcuacccuguccgauggggaaacugaggca

SEQ ID NO: 352718 - RNA, 32 nt, Homo Sapiens
gugguggcggcggcagcugcugccgggcgguu

SEQ ID NO: 352719 - RNA, 32 nt, Homo Sapiens
acaaagcccccaguuuccuguggcagguucug

SEQ ID NO: 352720 - RNA, 32 nt, Homo Sapiens
caccaacucacgccagggaccuggccaagaca

SEQ ID NO: 352721 - RNA, 32 nt, Homo Sapiens
agcggaggggagacgucgguugagcggcggcg

SEQ ID NO: 352722 - RNA, 31 nt, Homo Sapiens
gaccucgugauaugccugccucggccuccua

SEQ ID NO: 352723 - RNA, 32 nt, Homo Sapiens
gccacccccucccccgguccuccggggaagca

SEQ ID NO: 352724 - RNA, 32 nt, Homo Sapiens
ccccacaagccgcaaaaaccagcaaguuuuua

SEQ ID NO: 352725 - RNA, 32 nt, Homo Sapiens
ugacucacaccuguaauuccagcacuuuggga

SEQ ID NO: 352726 - RNA, 32 nt, Homo Sapiens
caguaucauucauucucucuccccucacuggu

SEQ ID NO: 352727 - RNA, 32 nt, Homo Sapiens
uggucgggagagcggcggcagcgagaggcgag

SEQ ID NO: 352728 - RNA, 32 nt, Homo Sapiens
caaucauuaucaaauacuuuuauuuuugggug

SEQ ID NO: 352729 - RNA, 32 nt, Homo Sapiens
gcucugggauuugaacaguccagcaauagcaa

SEQ ID NO: 352730 - RNA, 32 nt, Homo Sapiens
ccccuauuauuccgauuuuagaggugaagaaa

SEQ ID NO: 352731 - RNA, 32 nt, Homo Sapiens
ugcacaggacagagacacagcaagaugcccag

SEQ ID NO: 352732 - RNA, 32 nt, Homo Sapiens
cccccguccgccauccugcccaccaccagguc

SEQ ID NO: 352733 - RNA, 30 nt, Homo Sapiens
cugucuuugcuaaugguggagccacuaugg

SEQ ID NO: 352734 - RNA, 32 nt, Homo Sapiens
ucagcaguucuuccccuccuacaccuaaguua

SEQ ID NO: 352735 - RNA, 32 nt, Homo Sapiens
auaauaugucacuccuauuuaacaucucuuuc

SEQ ID NO: 352736 - RNA, 32 nt, Homo Sapiens
agggcugggggaggaggggcucaaggaagggg

SEQ ID NO: 352737 - RNA, 32 nt, Homo Sapiens
cccuuucccuucucuuuugaauccauuccuua

SEQ ID NO: 352738 - RNA, 30 nt, Homo Sapiens
cagcugcgcgcgccccccagucccgcaccc

SEQ ID NO: 352739 - RNA, 32 nt, Homo Sapiens
ggaguacacaccuggugugcagggugaagcag

SEQ ID NO: 352740 - RNA, 32 nt, Homo Sapiens
ugcaauccaucuguggccgauuuuuuccaaga

SEQ ID NO: 352741 - RNA, 32 nt, Homo Sapiens
agucaccucugaaagcacucuagaucuugcag

SEQ ID NO: 352742 - RNA, 32 nt, Homo Sapiens
uacagacccagccccagguucaauguccuccg

SEQ ID NO: 352743 - RNA, 32 nt, Homo Sapiens
uucaaacugaaaagcugagaccaagagcaagg

SEQ ID NO: 352744 - RNA, 32 nt, Homo Sapiens
cuggaguaaggcuugcugugggacgcccucgu

SEQ ID NO: 352745 - RNA, 32 nt, Homo Sapiens
auuuaauaccucugggcagaauccaaauacug

SEQ ID NO: 352746 - RNA, 32 nt, Homo Sapiens
ucuuuuauugcucuauuuuuuauugugcuauu

SEQ ID NO: 352747 - RNA, 32 nt, Homo Sapiens
auuuuacugugcuguuaacuuggaagaccugu

SEQ ID NO: 352748 - RNA, 32 nt, Homo Sapiens
uugauauuacagaugugcuauuagugcaauaa

SEQ ID NO: 352749 - RNA, 32 nt, Homo Sapiens
uugagaggaaaaaauggaaaagaaacuaaaau

SEQ ID NO: 352750 - RNA, 32 nt, Homo Sapiens
agcauggaugcagaauaagcaguugggagaga

SEQ ID NO: 352751 - RNA, 32 nt, Homo Sapiens
uugguuuuuuaaaaucuguaaaauuagaggau

SEQ ID NO: 352752 - RNA, 32 nt, Homo Sapiens
auaaaauguacaaauuagaaaaauguggauaa

SEQ ID NO: 352753 - RNA, 32 nt, Homo Sapiens
uucuucugacagugaugagcuaggugcagaga

SEQ ID NO: 352754 - RNA, 31 nt, Homo Sapiens
acuggugcaagguugcacacuucuaagaaga

SEQ ID NO: 352755 - RNA, 31 nt, Homo Sapiens
uguaaucccagcacuuugggaguccaaggca

SEQ ID NO: 352756 - RNA, 32 nt, Homo Sapiens
cugaucaauuuguauuuauuuauuuuaacauu

SEQ ID NO: 352757 - RNA, 32 nt, Homo Sapiens
aauacuguaguauaaauugggacauuauaaca

SEQ ID NO: 352758 - RNA, 32 nt, Homo Sapiens
ucagcgcccgacucacagauggcgggagacag

SEQ ID NO: 352759 - RNA, 32 nt, Homo Sapiens
cuuagaguaaacgaucaucaguucaauggacc

SEQ ID NO: 352760 - RNA, 32 nt, Homo Sapiens
cgcgcacacacacgcagacacacacacacaca

SEQ ID NO: 352761 - RNA, 32 nt, Homo Sapiens
caacuucuaccuuguguaagcugcugguuuug

SEQ ID NO: 352762 - RNA, 32 nt, Homo Sapiens
ccaugagugcucacuaaacaacuuuuuccauu

SEQ ID NO: 352763 - RNA, 32 nt, Homo Sapiens
uaggaaugccagcagaggccugaugauggcaa

SEQ ID NO: 352764 - RNA, 32 nt, Homo Sapiens
ucaggauuccuccuccuugaaucugagacugg

SEQ ID NO: 352765 - RNA, 32 nt, Homo Sapiens
agauccagccugccaacccugcgguuaaaugu

SEQ ID NO: 352766 - RNA, 32 nt, Homo Sapiens
aaugcugcuguaaauacagguauuuuuaauuu

SEQ ID NO: 352767 - RNA, 32 nt, Homo Sapiens
acaaauuugguaguuuucaguaugugugaugu

SEQ ID NO: 352768 - RNA, 32 nt, Homo Sapiens
uugauacuaagugauuaguuuuccaaguuguc

SEQ ID NO: 352769 - RNA, 32 nt, Homo Sapiens
ccagcccuggcaacgagagcgucuaccccgaa

SEQ ID NO: 352770 - RNA, 32 nt, Homo Sapiens
cauccaggcugagacugaaaggagcagaggcu

SEQ ID NO: 352771 - RNA, 32 nt, Homo Sapiens
ucuccugagugagguagcgccucccaucugcu

SEQ ID NO: 352772 - RNA, 32 nt, Homo Sapiens
uucagggcuacuacgguugaucuugcaacucu

SEQ ID NO: 352773 - RNA, 32 nt, Homo Sapiens
aaauagggaacagaaaguugucgauugcugug

SEQ ID NO: 352774 - RNA, 32 nt, Homo Sapiens
cuauuccagagaccgaguggcagggcggccac

SEQ ID NO: 352775 - RNA, 32 nt, Homo Sapiens
aaguguaaaaauucaaaagugaaauaaaaauu

SEQ ID NO: 352776 - RNA, 32 nt, Homo Sapiens
aaggccagcagagggcacggcccgccagggcu

SEQ ID NO: 352777 - RNA, 31 nt, Homo Sapiens
uauggugagguuuaaaggauaugaaacucua

SEQ ID NO: 352778 - RNA, 32 nt, Homo Sapiens
gggaagacuucgaugaugaugugugucuggga

SEQ ID NO: 352779 - RNA, 32 nt, Homo Sapiens
uaagacaauauacaagaagaaauaucagugag

SEQ ID NO: 352780 - RNA, 32 nt, Homo Sapiens
gucuggccaggccccaggcacagagcugccug

SEQ ID NO: 352781 - RNA, 32 nt, Homo Sapiens
uuuuucuucccuccccuuaucaaggguugaag

SEQ ID NO: 352782 - RNA, 32 nt, Homo Sapiens
aucugggaccagaggaaacaaaagcaccaaga

SEQ ID NO: 352783 - RNA, 32 nt, Homo Sapiens
agccgcucccgaggccccggcgcggcgcgagg

SEQ ID NO: 352784 - RNA, 32 nt, Homo Sapiens
gccuuucucuucauuacuucuuggguauuggu

SEQ ID NO: 352785 - RNA, 31 nt, Homo Sapiens
guggcugcaaggucucccggcugccauacug

SEQ ID NO: 352786 - RNA, 32 nt, Homo Sapiens
cuuuuucgcucaagcuauauaauccuagacug

SEQ ID NO: 352787 - RNA, 32 nt, Homo Sapiens
ggaguuagaauugagagacuugaacguggaga

SEQ ID NO: 352788 - RNA, 32 nt, Homo Sapiens
cuccacccccgacgcugaccccggccucaguc

SEQ ID NO: 352789 - RNA, 31 nt, Homo Sapiens
agaaugccaagcugccugcccgaggcugguc

SEQ ID NO: 352790 - RNA, 32 nt, Homo Sapiens
ggagggggaggcggcggcggcagcagaccccu

SEQ ID NO: 352791 - RNA, 32 nt, Homo Sapiens
aaugaaacucaaaaauaaaauaaaugugucaa

SEQ ID NO: 352792 - RNA, 32 nt, Homo Sapiens
auugaaagauaaaauguuuuaccucacuguug

SEQ ID NO: 352793 - RNA, 32 nt, Homo Sapiens
ucacuucaaaugcuuauuaaauuucaauccga

SEQ ID NO: 352794 - RNA, 32 nt, Homo Sapiens
gcccugugucuggccuggggggaccuggggcg

SEQ ID NO: 352795 - RNA, 32 nt, Homo Sapiens
cuuaagcuuucucagcugggaauuucagaaga

SEQ ID NO: 352796 - RNA, 32 nt, Homo Sapiens
ccggagagggugggguggagcagcgggggagc

SEQ ID NO: 352797 - RNA, 32 nt, Homo Sapiens
gccuugccuucccggcagcaucccaucugacc

SEQ ID NO: 352798 - RNA, 32 nt, Homo Sapiens
guuuucuauuaagcaauagaaauauuuuugug

SEQ ID NO: 352799 - RNA, 32 nt, Homo Sapiens
gcucuauuagcugcaagcuuuaccaaguaauu

SEQ ID NO: 352800 - RNA, 32 nt, Homo Sapiens
guucaugggauaaacagcugguauuuguaucu

SEQ ID NO: 352801 - RNA, 32 nt, Homo Sapiens
cuccuccgcgcccuccccgccgccaccagccg

SEQ ID NO: 352802 - RNA, 32 nt, Homo Sapiens
cgcugccccuccccgucccuguccccagcauc

SEQ ID NO: 352803 - RNA, 32 nt, Homo Sapiens
ucagccagggcggguacacacccugggcacag

SEQ ID NO: 352804 - RNA, 32 nt, Homo Sapiens
caucacuugugcuuguuugaugagcuugucac

SEQ ID NO: 352805 - RNA, 32 nt, Homo Sapiens
caucucaaaaugauuauaaaucaucaagaagg

SEQ ID NO: 352806 - RNA, 32 nt, Homo Sapiens
gcucgcgcaccucggaggagccaggagccgga

SEQ ID NO: 352807 - RNA, 32 nt, Homo Sapiens
ccuggagaaugcagaggccaaaaaagaaugag

SEQ ID NO: 352808 - RNA, 32 nt, Homo Sapiens
gcaggcagaggauccgauuaugcgccccuggg

SEQ ID NO: 352809 - RNA, 32 nt, Homo Sapiens
auuugugguuagaaucuuguuuuguuugcuuc

SEQ ID NO: 352810 - RNA, 32 nt, Homo Sapiens
uuacuuggaaagauuuuaccugugaagugaaa

SEQ ID NO: 352811 - RNA, 32 nt, Homo Sapiens
cggguccucccuccccagaccccagagggaga

SEQ ID NO: 352812 - RNA, 32 nt, Homo Sapiens
uuaaaaugugaguaucugauauuauuuaaucc

SEQ ID NO: 352813 - RNA, 31 nt, Homo Sapiens
uguggcauuccaguccaaccaugugacuuau

SEQ ID NO: 352814 - RNA, 29 nt, Homo Sapiens
ugugggguauguaugacuauaaagggaug

SEQ ID NO: 352815 - RNA, 32 nt, Homo Sapiens
ugaaaauguaaaauucuaacccuaaaguaggg

SEQ ID NO: 352816 - RNA, 32 nt, Homo Sapiens
auggaguccaaauaaaguggauauuccugcuc

SEQ ID NO: 352817 - RNA, 32 nt, Homo Sapiens
aaguauggugaugaacaaccacguucugacug

SEQ ID NO: 352818 - RNA, 31 nt, Homo Sapiens
ucccuccccauagcugcuugaguuaacuguc

SEQ ID NO: 352819 - RNA, 32 nt, Homo Sapiens
agugaucgugcagccagagccagccuuccuuc

SEQ ID NO: 352820 - RNA, 32 nt, Homo Sapiens
acacugugcagggcuguggagcucugagagac

SEQ ID NO: 352821 - RNA, 32 nt, Homo Sapiens
uucacuccucaauaaacaacauugaauacaaa

SEQ ID NO: 352822 - RNA, 32 nt, Homo Sapiens
gguggaggcugugguuuagagaccagaggaau

SEQ ID NO: 352823 - RNA, 32 nt, Homo Sapiens
cucugcucacuucagggcccagugcacucacu

SEQ ID NO: 352824 - RNA, 32 nt, Homo Sapiens
ugguauaaaaauuugugaauguugaaauucaa

SEQ ID NO: 352825 - RNA, 32 nt, Homo Sapiens
accuguugucauucuuuuucuuuuaaauuugu

SEQ ID NO: 352826 - RNA, 32 nt, Homo Sapiens
ucguuggacugcacuugccucuccaugugauc

SEQ ID NO: 352827 - RNA, 32 nt, Homo Sapiens
ucugugcucuuccaggaugcugccucuuacuc

SEQ ID NO: 352828 - RNA, 32 nt, Homo Sapiens
caccgagcucacgcugucucuuuguuccaagu

SEQ ID NO: 352829 - RNA, 32 nt, Homo Sapiens
aucaaggaagagguaugugcugauuuguuugg

SEQ ID NO: 352830 - RNA, 32 nt, Homo Sapiens
gugcuauuuuuccuuguuuuuaaaaaugaauc

SEQ ID NO: 352831 - RNA, 32 nt, Homo Sapiens
uccugucugaagaaaucagacugauuuccucu

SEQ ID NO: 352832 - RNA, 32 nt, Homo Sapiens
gguuucaucuucuuaggcacaauuagaaaaaa

SEQ ID NO: 352833 - RNA, 32 nt, Homo Sapiens
auccuuaaacacaugcacauauagguaugaca

SEQ ID NO: 352834 - RNA, 32 nt, Homo Sapiens
agagauggcuuuaggggcuuuauuuaaagacu

SEQ ID NO: 352835 - RNA, 32 nt, Homo Sapiens
ccaaacccacccagccacuuaauaaggaagca

SEQ ID NO: 352836 - RNA, 32 nt, Homo Sapiens
cucccagaaaucaacguggaccaggcccacuu

SEQ ID NO: 352837 - RNA, 32 nt, Homo Sapiens
agucaucagaucuggguuccaggcauggugug

SEQ ID NO: 352838 - RNA, 32 nt, Homo Sapiens
acccuguuaaaauggacauacauggaaccacu

SEQ ID NO: 352839 - RNA, 32 nt, Homo Sapiens
ggguuuuauuuugcuuguugaacucuuagagc

SEQ ID NO: 352840 - RNA, 32 nt, Homo Sapiens
gaagaaacagagccucagagagauuaguaccc

SEQ ID NO: 352841 - RNA, 32 nt, Homo Sapiens
gaaacugagguucagagaagugaaguaaauuc

SEQ ID NO: 352842 - RNA, 32 nt, Homo Sapiens
uauaaccacucaagcuacuggcacauagugaa

SEQ ID NO: 352843 - RNA, 32 nt, Homo Sapiens
ggccagcccgucuuauggacucugccuugcuu

SEQ ID NO: 352844 - RNA, 32 nt, Homo Sapiens
auccugggaugcccguuucacgcucugacaua

SEQ ID NO: 352845 - RNA, 32 nt, Homo Sapiens
cugggguugcugucgaggacccugugcaagac

SEQ ID NO: 352846 - RNA, 32 nt, Homo Sapiens
aggaaccgacacucagacacaaggcaaagagg

SEQ ID NO: 352847 - RNA, 32 nt, Homo Sapiens
acccagcccccucucccccugagccauugugg

SEQ ID NO: 352848 - RNA, 32 nt, Homo Sapiens
ugugggauuugucuucagcugcaaccagccuu

SEQ ID NO: 352849 - RNA, 32 nt, Homo Sapiens
acaccagccugcguccccggcgcggcgggcca

SEQ ID NO: 352850 - RNA, 32 nt, Homo Sapiens
aaaugagucauuuucaguuguaccuuagaugu

SEQ ID NO: 352851 - RNA, 30 nt, Homo Sapiens
cugagagcaagcuugagagcugcuaaggcu

SEQ ID NO: 352852 - RNA, 32 nt, Homo Sapiens
cgcccacaccuccucaccccagcccuccaccu

SEQ ID NO: 352853 - RNA, 32 nt, Homo Sapiens
gauguuuguguaaagaaauuucuaauguaaag

SEQ ID NO: 352854 - RNA, 32 nt, Homo Sapiens
uauacaguucaauaaacuuaacuuuaacugaa

SEQ ID NO: 352855 - RNA, 32 nt, Homo Sapiens
ucagccuucaauccccuuuccuuccucuuuuu

SEQ ID NO: 352856 - RNA, 32 nt, Homo Sapiens
cuaccucccacuuuuccuaggcacccuugcac

SEQ ID NO: 352857 - RNA, 32 nt, Homo Sapiens
uucccgccccggguccccggcgccgcaggagc

SEQ ID NO: 352858 - RNA, 32 nt, Homo Sapiens
ggcgaugcuagauuauaauuucaaacugugaa

SEQ ID NO: 352859 - RNA, 32 nt, Homo Sapiens
guuuugaaaauauuuuguuggcuuguaagaua

SEQ ID NO: 352860 - RNA, 32 nt, Homo Sapiens
aaauaaugaaccuuauuuuuuauuauugccaa

SEQ ID NO: 352861 - RNA, 32 nt, Homo Sapiens
gucauacaaaaauucaggcuagagggaacuaa

SEQ ID NO: 352862 - RNA, 32 nt, Homo Sapiens
uuacacauguuggguuuccugauaaaaagaga

SEQ ID NO: 352863 - RNA, 32 nt, Homo Sapiens
ucuugcgucuucccggccccuccuucggccca

SEQ ID NO: 352864 - RNA, 32 nt, Homo Sapiens
uaagaauggccauauaccacuucauuuacgua

SEQ ID NO: 352865 - RNA, 32 nt, Homo Sapiens
gagcaacguggacuuugaccugaugcucagau

SEQ ID NO: 352866 - RNA, 32 nt, Homo Sapiens
cucuccucacuggccuggggucaagaaguuug

SEQ ID NO: 352867 - RNA, 32 nt, Homo Sapiens
guccugaagaugugaaugggugguacgauuuc

SEQ ID NO: 352868 - RNA, 32 nt, Homo Sapiens
aguuaacccaccucggcugccucccccacucc

SEQ ID NO: 352869 - RNA, 32 nt, Homo Sapiens
gggaggcugaggcuggcggaucaugaggucag

SEQ ID NO: 352870 - RNA, 32 nt, Homo Sapiens
agcggcggggagaggcugccugcucucuaacg

SEQ ID NO: 352871 - RNA, 32 nt, Homo Sapiens
ggccggcgacacagugggggcuccucacuugc

SEQ ID NO: 352872 - RNA, 32 nt, Homo Sapiens
gaugcugaggcagaaguacuuuucucuuucag

SEQ ID NO: 352873 - RNA, 32 nt, Homo Sapiens
cuaaaaaucuuuuauuugguucguuucaaauu

SEQ ID NO: 352874 - RNA, 32 nt, Homo Sapiens
aaaucaauuuaaaggaaaguucuauuaucugg

SEQ ID NO: 352875 - RNA, 32 nt, Homo Sapiens
gagccccguggccucucagcucugcggccacc

SEQ ID NO: 352876 - RNA, 32 nt, Homo Sapiens
cauuuuacuguaaaauauuuauugucuucuag

SEQ ID NO: 352877 - RNA, 32 nt, Homo Sapiens
cagccagaccucugucugucccugcccagagg

SEQ ID NO: 352878 - RNA, 32 nt, Homo Sapiens
ggacaaaauuuuuuaaacaugugauucuguuu

SEQ ID NO: 352879 - RNA, 32 nt, Homo Sapiens
auguauacauuuccaguuuuaagauuuugcga

SEQ ID NO: 352880 - RNA, 32 nt, Homo Sapiens
uuucauuguaaaaauaaauguacuuugcacca

SEQ ID NO: 352881 - RNA, 32 nt, Homo Sapiens
gugcugguguugcgggaacgcuggcauuucug

SEQ ID NO: 352882 - RNA, 32 nt, Homo Sapiens
ccagcucugccagcagcugaguaccccugaac

SEQ ID NO: 352883 - RNA, 32 nt, Homo Sapiens
uacaagcuuugucuccuucgacuuggagucuu

SEQ ID NO: 352884 - RNA, 32 nt, Homo Sapiens
aauauagucuguacagaggaaaacacugggaa

SEQ ID NO: 352885 - RNA, 32 nt, Homo Sapiens
uuaacuuuacuuugaaguguuucugaaaugau

SEQ ID NO: 352886 - RNA, 32 nt, Homo Sapiens
cacuguugcuuaauugugaacagccaaaagcu

SEQ ID NO: 352887 - RNA, 32 nt, Homo Sapiens
ccaagcaagaacaaagagcucuugguggugac

SEQ ID NO: 352888 - RNA, 32 nt, Homo Sapiens
gccuugcccucccuucugcccagggcccagug

SEQ ID NO: 352889 - RNA, 32 nt, Homo Sapiens
aaggccagaguggccuggccaggagcucuuca

SEQ ID NO: 352890 - RNA, 32 nt, Homo Sapiens
aucccaccagcugccaguggcucccagaaagc

SEQ ID NO: 352891 - RNA, 32 nt, Homo Sapiens
ugauuaacaaguccgucacaugugcuguuaac

SEQ ID NO: 352892 - RNA, 32 nt, Homo Sapiens
cuuccucugcccguucaccugcaccaggcgga

SEQ ID NO: 352893 - RNA, 32 nt, Homo Sapiens
cccccaaaacucccacaacaagcauuaucaau

SEQ ID NO: 352894 - RNA, 32 nt, Homo Sapiens
aaugauucaaggaaacauaaucacacacgguu

SEQ ID NO: 352895 - RNA, 32 nt, Homo Sapiens
uuuacagaugagaauacugaggccuggacagg

SEQ ID NO: 352896 - RNA, 32 nt, Homo Sapiens
ugagggccuuguuuccuccuccccuuuccccu

SEQ ID NO: 352897 - RNA, 31 nt, Homo Sapiens
gccuugggaaacacuacuagcucugaccuuc

SEQ ID NO: 352898 - RNA, 32 nt, Homo Sapiens
uugcugguggguauuaaauaugcacaauauuc

SEQ ID NO: 352899 - RNA, 32 nt, Homo Sapiens
gcugaaacccaaacuauauaaaaaggaauuca

SEQ ID NO: 352900 - RNA, 32 nt, Homo Sapiens
ccagcccggggcgggggcgugcagcugaccca

SEQ ID NO: 352901 - RNA, 32 nt, Homo Sapiens
ugcguggcuacgacagcgggcccgagggcggu

SEQ ID NO: 352902 - RNA, 32 nt, Homo Sapiens
acugcgcugcgccccaggacccgcugcccaac

SEQ ID NO: 352903 - RNA, 28 nt, Homo Sapiens
gccaugcucccgcggccccugcggcugc

SEQ ID NO: 352904 - RNA, 32 nt, Homo Sapiens
agcagcaggaggagcggcggcggcugcaggag

SEQ ID NO: 352905 - RNA, 32 nt, Homo Sapiens
gaggaggauuauaacuuaggccuagccucuuu

SEQ ID NO: 352906 - RNA, 32 nt, Homo Sapiens
uaggccuguuugaaccgcaguuuuuuguguga

SEQ ID NO: 352907 - RNA, 32 nt, Homo Sapiens
aaaagauaccuuauugacgaaauauuuaggau

SEQ ID NO: 352908 - RNA, 32 nt, Homo Sapiens
acucuuuugaaaaauaaagguaucuaaugucu

SEQ ID NO: 352909 - RNA, 32 nt, Homo Sapiens
augaggucaggagaucgagaccauccuguuua

SEQ ID NO: 352910 - RNA, 32 nt, Homo Sapiens
agccucucacucucacucuccuccgcucaaac

SEQ ID NO: 352911 - RNA, 28 nt, Homo Sapiens
ggggacaggcugaccaggaucaccagga

SEQ ID NO: 352912 - RNA, 32 nt, Homo Sapiens
acauuccacccuccccgaccucagacugcgcc

SEQ ID NO: 352913 - RNA, 32 nt, Homo Sapiens
gcagauguuuuuucuuuuaacaaacuggaauu

SEQ ID NO: 352914 - RNA, 32 nt, Homo Sapiens
ggagggcauggcgggggccgugccgggcgcca

SEQ ID NO: 352915 - RNA, 32 nt, Homo Sapiens
ucagcccugcccugcccuccucaugaauagug

SEQ ID NO: 352916 - RNA, 32 nt, Homo Sapiens
cuggcugugccaggaccacaccuaccaaggcc

SEQ ID NO: 352917 - RNA, 32 nt, Homo Sapiens
gccggagcucgaggccggcggcggcgggagag

SEQ ID NO: 352918 - RNA, 32 nt, Homo Sapiens
uuaaagagucuccccccuuccaccucagggcg

SEQ ID NO: 352919 - RNA, 32 nt, Homo Sapiens
uguuuguugaagugguucucaugcaaaaauau

SEQ ID NO: 352920 - RNA, 32 nt, Homo Sapiens
cuaccuuucccaauuuuaguuucaugcaauaa

SEQ ID NO: 352921 - RNA, 32 nt, Homo Sapiens
gaggcaaaauugcagaauaacaaagaaauggu

SEQ ID NO: 352922 - RNA, 32 nt, Homo Sapiens
gguuccugacagucacugagcuauacgcaaua

SEQ ID NO: 352923 - RNA, 32 nt, Homo Sapiens
gaauaagcagguauaaaaaauauuuuaauuau

SEQ ID NO: 352924 - RNA, 32 nt, Homo Sapiens
gccugaggcugagacugcgggaugguccuggg

SEQ ID NO: 352925 - RNA, 32 nt, Homo Sapiens
cuaugaggguggcaucuggccacuugaauggc

SEQ ID NO: 352926 - RNA, 32 nt, Homo Sapiens
cuuauuaauuagaccuaggaaauucaagcuga

SEQ ID NO: 352927 - RNA, 32 nt, Homo Sapiens
uuuuuuaaaaauacuguucagaaugcuuuaau

SEQ ID NO: 352928 - RNA, 32 nt, Homo Sapiens
cauuguugcuacuuccuuuuguauuuucauca

SEQ ID NO: 352929 - RNA, 32 nt, Homo Sapiens
ggcuuccauucuaguucuuuuaccaagauuuu

SEQ ID NO: 352930 - RNA, 30 nt, Homo Sapiens
gcauccgcggggugggcggguccuggcggc

SEQ ID NO: 352931 - RNA, 32 nt, Homo Sapiens
uaacgggagucccagguuaaacacuuuaagau

SEQ ID NO: 352932 - RNA, 32 nt, Homo Sapiens
ugcagcgcccggcacccgcccaggagcgcgca

SEQ ID NO: 352933 - RNA, 32 nt, Homo Sapiens
aggacugugcuaaaugagauuguccagccccc

SEQ ID NO: 352934 - RNA, 32 nt, Homo Sapiens
ggggggcacaggagcugggagccccgucucca

SEQ ID NO: 352935 - RNA, 32 nt, Homo Sapiens
acauauuuugauaaggcacugaaaauauaaaa

SEQ ID NO: 352936 - RNA, 32 nt, Homo Sapiens
guguagaugauuaugaaggaccugcuuguugc

SEQ ID NO: 352937 - RNA, 32 nt, Homo Sapiens
caugauauugucaaaacagugaggaaacauua

SEQ ID NO: 352938 - RNA, 32 nt, Homo Sapiens
uauuuuugggagugacaaacauucucucaucc

SEQ ID NO: 352939 - RNA, 32 nt, Homo Sapiens
aauguaauauauaaagggugaggacuggcugu

SEQ ID NO: 352940 - RNA, 30 nt, Homo Sapiens
ggcaugggagguguauguuaggagcaugug

SEQ ID NO: 352941 - RNA, 32 nt, Homo Sapiens
ucagggagacucugaggcucuguugagaauca

SEQ ID NO: 352942 - RNA, 32 nt, Homo Sapiens
ggccccccgcggcgcaccccgcccuacacguc

SEQ ID NO: 352943 - RNA, 32 nt, Homo Sapiens
gcgggcgggcggugcgauguccggagaggaug

SEQ ID NO: 352944 - RNA, 32 nt, Homo Sapiens
ucagcccacucccagggccccacucuccuccc

SEQ ID NO: 352945 - RNA, 32 nt, Homo Sapiens
cgccagcuccuccuccucccgcugcuccugcu

SEQ ID NO: 352946 - RNA, 32 nt, Homo Sapiens
cuuuagucaaugaaacaaaaacaaaaucacaa

SEQ ID NO: 352947 - RNA, 32 nt, Homo Sapiens
uuacauuuuccacagcuguuuauucuuguuug

SEQ ID NO: 352948 - RNA, 32 nt, Homo Sapiens
uguucgggacgccggccugcaggcgccauggu

SEQ ID NO: 352949 - RNA, 32 nt, Homo Sapiens
cugaacacccugagagccuggugcuggagggc

SEQ ID NO: 352950 - RNA, 32 nt, Homo Sapiens
ggucgccggucgcggcggagccugggcgcuga

SEQ ID NO: 352951 - RNA, 32 nt, Homo Sapiens
agcaaggaaugggaacauuuccccaucagcaa

SEQ ID NO: 352952 - RNA, 32 nt, Homo Sapiens
uuccuacauaaaaugcaagaaaacagcauggc

SEQ ID NO: 352953 - RNA, 32 nt, Homo Sapiens
gagccccaccuggccucucucccggggguccu

SEQ ID NO: 352954 - RNA, 32 nt, Homo Sapiens
gcgaucucuauuuaauaaaggcaggcuuuguu

SEQ ID NO: 352955 - RNA, 32 nt, Homo Sapiens
aggaccacccucgccaagcuccaggguaccug

SEQ ID NO: 352956 - RNA, 32 nt, Homo Sapiens
uuagagcuggacuuaagacucauuggccgacc

SEQ ID NO: 352957 - RNA, 32 nt, Homo Sapiens
aaaaccccaagcaauuucaggagccacuggac

SEQ ID NO: 352958 - RNA, 32 nt, Homo Sapiens
ucuuuguguacuuguucaucauuguauaaguu

SEQ ID NO: 352959 - RNA, 32 nt, Homo Sapiens
uuucugaaguuucucuuaauucugauuugugu

SEQ ID NO: 352960 - RNA, 32 nt, Homo Sapiens
gauuggccgagcaagccuggaaaaugguaaau

SEQ ID NO: 352961 - RNA, 32 nt, Homo Sapiens
ugccggccccucugccucccccgcaccucgcu

SEQ ID NO: 352962 - RNA, 30 nt, Homo Sapiens
aucaaaaaugugcagcaccggcagagggaa

SEQ ID NO: 352963 - RNA, 32 nt, Homo Sapiens
gcuuauuccucggaguagaaggguguacaggg

SEQ ID NO: 352964 - RNA, 32 nt, Homo Sapiens
aucuuuaguuacuucacaugugugacaauacg

SEQ ID NO: 352965 - RNA, 32 nt, Homo Sapiens
gagcaguuucuugccgcuugggucuucagcac

SEQ ID NO: 352966 - RNA, 30 nt, Homo Sapiens
gccacacugcuaauauggaaaacagaaugu

SEQ ID NO: 352967 - RNA, 32 nt, Homo Sapiens
aaaugcgcggccgggggcgguggcucaugccu

SEQ ID NO: 352968 - RNA, 32 nt, Homo Sapiens
ugcaggcaaacacaaaugcuggcauucauuua

SEQ ID NO: 352969 - RNA, 32 nt, Homo Sapiens
ugccccaaacgaguggagagccaguguguacc

SEQ ID NO: 352970 - RNA, 32 nt, Homo Sapiens
ucagccucugcaccccacccacagccucccac

SEQ ID NO: 352971 - RNA, 32 nt, Homo Sapiens
ggagcucuaaucucugugauuacaugguccuu

SEQ ID NO: 352972 - RNA, 32 nt, Homo Sapiens
caaaguuuuaaaggaagaaaauaaaaaucacc

SEQ ID NO: 352973 - RNA, 30 nt, Homo Sapiens
gugcugccguuccggccacgccggugaagc

SEQ ID NO: 352974 - RNA, 32 nt, Homo Sapiens
auaauacagacauuguauguuaucauacugaa

SEQ ID NO: 352975 - RNA, 32 nt, Homo Sapiens
ucgcucugucuugccugccgcccuguaagacg

SEQ ID NO: 352976 - RNA, 32 nt, Homo Sapiens
agaauacaaaaaauuagcugagcaugguggug

SEQ ID NO: 352977 - RNA, 32 nt, Homo Sapiens
ccgagcucaccgccccugcuccccucuccgac

SEQ ID NO: 352978 - RNA, 32 nt, Homo Sapiens
aucugaaguuuuuuuuaccaccaucuuuuucu

SEQ ID NO: 352979 - RNA, 32 nt, Homo Sapiens
ucuggcauuuccccagccucccaccgccccau

SEQ ID NO: 352980 - RNA, 32 nt, Homo Sapiens
gcggcggcugagagggcggcggcgggagcgga

SEQ ID NO: 352981 - RNA, 32 nt, Homo Sapiens
ccacgucaggugguggcauagcacugcccugc

SEQ ID NO: 352982 - RNA, 32 nt, Homo Sapiens
cacaguaggaccucagaaaaguacccaaaugc

SEQ ID NO: 352983 - RNA, 32 nt, Homo Sapiens
uuuguauuuuugguagacaugggauuuugcug

SEQ ID NO: 352984 - RNA, 32 nt, Homo Sapiens
auuuucuacauagaaaacaugcaguaccuucu

SEQ ID NO: 352985 - RNA, 32 nt, Homo Sapiens
uuuaaaugcauaauuuucccauuuuaaaaucu

SEQ ID NO: 352986 - RNA, 32 nt, Homo Sapiens
ccaggauggccacccuccugcuguugccccuu

SEQ ID NO: 352987 - RNA, 32 nt, Homo Sapiens
gaccuaauauuugauagcacaacagugugacu

SEQ ID NO: 352988 - RNA, 31 nt, Homo Sapiens
gggaggagggcggucguccgggguuagguug

SEQ ID NO: 352989 - RNA, 32 nt, Homo Sapiens
ccuagagauuauuucugaaaaauguauuguaa

SEQ ID NO: 352990 - RNA, 32 nt, Homo Sapiens
uaccaaugucuauauauagagauauuuuauau

SEQ ID NO: 352991 - RNA, 32 nt, Homo Sapiens
cauuugaaggaccuaaauuuguagcaaauucu

SEQ ID NO: 352992 - RNA, 32 nt, Homo Sapiens
cuuuuuaauuugaagaaaaaucaucagucuug

SEQ ID NO: 352993 - RNA, 32 nt, Homo Sapiens
aagaagaacaaaauaugaugagagguggcugu

SEQ ID NO: 352994 - RNA, 32 nt, Homo Sapiens
caagcauacucuuguaagaaaaacacugaaua

SEQ ID NO: 352995 - RNA, 32 nt, Homo Sapiens
uuacuugauguaauaaagcuuauuuucauuaa

SEQ ID NO: 352996 - RNA, 32 nt, Homo Sapiens
cacggggacagccaugggucccgggcggccuu

SEQ ID NO: 352997 - RNA, 32 nt, Homo Sapiens
cauuucuugauacugcacuauagagaaauggu

SEQ ID NO: 352998 - RNA, 32 nt, Homo Sapiens
ggcucaacgcgcugcugcugcugcucuaucgg

SEQ ID NO: 352999 - RNA, 32 nt, Homo Sapiens
ggagaguucuuugcugccccugucuggaagac

SEQ ID NO: 353000 - RNA, 32 nt, Homo Sapiens
gcauaagacaccuuugcauagcuauuuaauug

SEQ ID NO: 353001 - RNA, 32 nt, Homo Sapiens
cauacaauacuguuaggcgucugauuucaugg

SEQ ID NO: 353002 - RNA, 32 nt, Homo Sapiens
gggggaucgcccugcuggcugccggcaccgcc

SEQ ID NO: 353003 - RNA, 32 nt, Homo Sapiens
gacaaccuggggaugccuguccccuaccugcu

SEQ ID NO: 353004 - RNA, 32 nt, Homo Sapiens
uccuggguggagaaagaagagaagcagaaacu

SEQ ID NO: 353005 - RNA, 32 nt, Homo Sapiens
gauuuuauuuuuguaucugugguaacaaaaca

SEQ ID NO: 353006 - RNA, 32 nt, Homo Sapiens
cccaccuguacagccccuccccgcccagaacu

SEQ ID NO: 353007 - RNA, 32 nt, Homo Sapiens
ggacuuugggaggcugaggaaagcagaucaca

SEQ ID NO: 353008 - RNA, 32 nt, Homo Sapiens
agggugagucacagcccucuccgucugcucua

SEQ ID NO: 353009 - RNA, 32 nt, Homo Sapiens
aauagguuuguuguuuuuuuuacauuguuaaa

SEQ ID NO: 353010 - RNA, 32 nt, Homo Sapiens
cuacugguaaauguaggagagaauuaagaauc

SEQ ID NO: 353011 - RNA, 32 nt, Homo Sapiens
uuauguggguguugaauugaucugucucugca

SEQ ID NO: 353012 - RNA, 32 nt, Homo Sapiens
ccuuuacaaugaucugcuuaugcugaaugaau

SEQ ID NO: 353013 - RNA, 32 nt, Homo Sapiens
ugaacacuuucaaagggcggacauaagacagg

SEQ ID NO: 353014 - RNA, 32 nt, Homo Sapiens
aagcauuuucucaaugcucugauuccaucaug

SEQ ID NO: 353015 - RNA, 32 nt, Homo Sapiens
uauuuaugguuuuuuuuuuuuaauuuuuucuu

SEQ ID NO: 353016 - RNA, 32 nt, Homo Sapiens
aagcugggcccagccgcggugccugcuggcca

SEQ ID NO: 353017 - RNA, 32 nt, Homo Sapiens
aaaaauacaucaaggaguuaugcugacauaau

SEQ ID NO: 353018 - RNA, 32 nt, Homo Sapiens
ucauacagaaauuguuucuuucagaagcagau

SEQ ID NO: 353019 - RNA, 32 nt, Homo Sapiens
aaaauacaaaaauuagcuggguguggugguac

SEQ ID NO: 353020 - RNA, 32 nt, Homo Sapiens
agagccaggcggugcaggagccaggcccagcc

SEQ ID NO: 353021 - RNA, 32 nt, Homo Sapiens
ccgucucuacuaaaauacaaaaaauuauccag

SEQ ID NO: 353022 - RNA, 32 nt, Homo Sapiens
gacuuagaaaucaaacuauaagaacaugaaau

SEQ ID NO: 353023 - RNA, 32 nt, Homo Sapiens
aauugauugcaacaucuugauuguuuuaacca

SEQ ID NO: 353024 - RNA, 32 nt, Homo Sapiens
guaucauggaccugccuucucaucuuuauagu

SEQ ID NO: 353025 - RNA, 32 nt, Homo Sapiens
augugugucuauacacacacauacauaaauau

SEQ ID NO: 353026 - RNA, 32 nt, Homo Sapiens
uuaccuuuucuuucuuuuuuuuucuuuuuuuc

SEQ ID NO: 353027 - RNA, 32 nt, Homo Sapiens
guggggacuucuguuuucucccuguggagauc

SEQ ID NO: 353028 - RNA, 32 nt, Homo Sapiens
agaugaggaaacugaggcuugggaaggguaga

SEQ ID NO: 353029 - RNA, 32 nt, Homo Sapiens
cacuggaggcauucuucaggcuccuuuaaggc

SEQ ID NO: 353030 - RNA, 32 nt, Homo Sapiens
cagagguuuuaacacauaaguaaaaacccgua

SEQ ID NO: 353031 - RNA, 32 nt, Homo Sapiens
gaauguguccccagcucagggauugccugaac

SEQ ID NO: 353032 - RNA, 31 nt, Homo Sapiens
cgagcugaccccacucugagagccuggccga

SEQ ID NO: 353033 - RNA, 32 nt, Homo Sapiens
agucaagccggggagggcgaaaagggaaccug

SEQ ID NO: 353034 - RNA, 32 nt, Homo Sapiens
ucgacugcagcaucaacagaucagugccgacc

SEQ ID NO: 353035 - RNA, 32 nt, Homo Sapiens
uucaccccacaggcgacacgcgagggagaaca

SEQ ID NO: 353036 - RNA, 32 nt, Homo Sapiens
uagcggcgucccccggccucucgccggcgcca

SEQ ID NO: 353037 - RNA, 32 nt, Homo Sapiens
ugggccaacagaggggaccccgggccaacaug

SEQ ID NO: 353038 - RNA, 32 nt, Homo Sapiens
ccccacugccccccaaguuccaggcucagucu

SEQ ID NO: 353039 - RNA, 32 nt, Homo Sapiens
acuuauugugaaccauaccguccccaaugacu

SEQ ID NO: 353040 - RNA, 32 nt, Homo Sapiens
ucgagaagaaggcagcacaggaucuguagcug

SEQ ID NO: 353041 - RNA, 32 nt, Homo Sapiens
auggccugccagcagcugagaagccccccuga

SEQ ID NO: 353042 - RNA, 32 nt, Homo Sapiens
guaguuaccaggagaugugaaugugcgucagg

SEQ ID NO: 353043 - RNA, 32 nt, Homo Sapiens
gcgcggacgagguaagcgaggaggcggcggcu

SEQ ID NO: 353044 - RNA, 32 nt, Homo Sapiens
uuacauacuauuauauaauguacaguguuauu

SEQ ID NO: 353045 - RNA, 32 nt, Homo Sapiens
agagcuuucucgagaccuuuggaccaagcaga

SEQ ID NO: 353046 - RNA, 28 nt, Homo Sapiens
aagauggcuuacugccugacaaauuguu

SEQ ID NO: 353047 - RNA, 32 nt, Homo Sapiens
gcccagucaagagcuaccggggcuggcuaguc

SEQ ID NO: 353048 - RNA, 32 nt, Homo Sapiens
uggaggcuggagguggagauggggucaggaac

SEQ ID NO: 353049 - RNA, 32 nt, Homo Sapiens
cccacccccgcaggcccucccggguccugacc

SEQ ID NO: 353050 - RNA, 32 nt, Homo Sapiens
caaaaucuuuaacuuuggacaaugugcuuuag

SEQ ID NO: 353051 - RNA, 32 nt, Homo Sapiens
cauugaaaaugccauaucuauaccauauuuua

SEQ ID NO: 353052 - RNA, 32 nt, Homo Sapiens
uacggggauacacggugcacccugcaacuuau

SEQ ID NO: 353053 - RNA, 32 nt, Homo Sapiens
uguuaccagaaguuguaccaugauguuguuuu

SEQ ID NO: 353054 - RNA, 32 nt, Homo Sapiens
aguagaaaagcaaguaugauauuuuuguaaga

SEQ ID NO: 353055 - RNA, 32 nt, Homo Sapiens
agaugggaggauuuuucuuuucucucugucuu

SEQ ID NO: 353056 - RNA, 32 nt, Homo Sapiens
cuuugcccugcaguagcaacuggugcugggac

SEQ ID NO: 353057 - RNA, 32 nt, Homo Sapiens
ccacugguuuuguagcuguuucauaaaacugu

SEQ ID NO: 353058 - RNA, 32 nt, Homo Sapiens
aucuuuuuuccuguuuuuuuuaaauuuguaag

SEQ ID NO: 353059 - RNA, 32 nt, Homo Sapiens
ugguccagucugcagaucuacauccugcccgc

SEQ ID NO: 353060 - RNA, 32 nt, Homo Sapiens
ugaccucuccauucccuucucuggcguagagg

SEQ ID NO: 353061 - RNA, 32 nt, Homo Sapiens
aggaauguuuuaauaccuccaaauuuuuaaga

SEQ ID NO: 353062 - RNA, 32 nt, Homo Sapiens
aguccuccccucccuggucuccugcuucagcu

SEQ ID NO: 353063 - RNA, 32 nt, Homo Sapiens
ggagcacgaugagggggugcugcugcgugaag

SEQ ID NO: 353064 - RNA, 32 nt, Homo Sapiens
auggggugaagcuucuucugcugucucuguuu

SEQ ID NO: 353065 - RNA, 32 nt, Homo Sapiens
cuccaggggagggagcuggggaggccagggua

SEQ ID NO: 353066 - RNA, 27 nt, Homo Sapiens
aacgucuuuuucuucagccuauacgcg

SEQ ID NO: 353067 - RNA, 32 nt, Homo Sapiens
acaagcuggauggaacagcaucugaagauggc

SEQ ID NO: 353068 - RNA, 32 nt, Homo Sapiens
uaauauacaaaauaacuuauuuugaugaucag

SEQ ID NO: 353069 - RNA, 32 nt, Homo Sapiens
auccauaaccucagaaggcaauauuauugaua

SEQ ID NO: 353070 - RNA, 32 nt, Homo Sapiens
gagggaaauaugucuuaacuuuugaugauaaa

SEQ ID NO: 353071 - RNA, 31 nt, Homo Sapiens
agggaggugggccccacuuagaauugcuccc

SEQ ID NO: 353072 - RNA, 32 nt, Homo Sapiens
cgccggggccgcggaaccgcuucugccgggau

SEQ ID NO: 353073 - RNA, 32 nt, Homo Sapiens
uuauauagccucuggaagccagacaaaguauc

SEQ ID NO: 353074 - RNA, 32 nt, Homo Sapiens
uggaaaaauuuaugccacuccuuuauuuuuug

SEQ ID NO: 353075 - RNA, 32 nt, Homo Sapiens
acugaggaggauuucaagagcaaccaaguaaa

SEQ ID NO: 353076 - RNA, 32 nt, Homo Sapiens
caaccugucccagccaaaacacugcuguauua

SEQ ID NO: 353077 - RNA, 32 nt, Homo Sapiens
ccuccugccaccuggugccucucggcucggug

SEQ ID NO: 353078 - RNA, 32 nt, Homo Sapiens
augaguuguaacacugaucugcuagugcugua

SEQ ID NO: 353079 - RNA, 32 nt, Homo Sapiens
ggaacacuggccugggucucccugguggggug

SEQ ID NO: 353080 - RNA, 32 nt, Homo Sapiens
ggggagaugcccucgccugagccgucugggcc

SEQ ID NO: 353081 - RNA, 32 nt, Homo Sapiens
ucuaggguugggagaauaguugagaucuggaa

SEQ ID NO: 353082 - RNA, 32 nt, Homo Sapiens
aguaauaagacuuaucucugguuugcuguuca

SEQ ID NO: 353083 - RNA, 32 nt, Homo Sapiens
ggaagucagagguggcgguuaguuggggccag

SEQ ID NO: 353084 - RNA, 32 nt, Homo Sapiens
gcuggccgcccggauggcgaccccagccucgg

SEQ ID NO: 353085 - RNA, 32 nt, Homo Sapiens
gagcccagcuggaguaggagcgcggacucgag

SEQ ID NO: 353086 - RNA, 32 nt, Homo Sapiens
ucaaaacaaaacaaaaguggguggcucacugg

SEQ ID NO: 353087 - RNA, 32 nt, Homo Sapiens
uacuccuuuccacacauacgcacacaaucuuc

SEQ ID NO: 353088 - RNA, 32 nt, Homo Sapiens
gcccagucucucaggccuccccgggcccccca

SEQ ID NO: 353089 - RNA, 32 nt, Homo Sapiens
guggguuuuguaguugauuuuuccaagagcgu

SEQ ID NO: 353090 - RNA, 32 nt, Homo Sapiens
ggcgcugacaccucccgucuaacugguagaca

SEQ ID NO: 353091 - RNA, 32 nt, Homo Sapiens
ggaggcugcuccagaacucagcaguguuggag

SEQ ID NO: 353092 - RNA, 32 nt, Homo Sapiens
gucuguguccugcccucccauccagcacucuc

SEQ ID NO: 353093 - RNA, 32 nt, Homo Sapiens
uccgugcgggccgcagcacgccggucuuugag

SEQ ID NO: 353094 - RNA, 32 nt, Homo Sapiens
uauucauuuuuccuaguauuuggaaaacagaa

SEQ ID NO: 353095 - RNA, 32 nt, Homo Sapiens
auggcuuuuuguuuguuuuucuuuuaagaaug

SEQ ID NO: 353096 - RNA, 32 nt, Homo Sapiens
gcauaugauauguuacauuuuauauuaggaau

SEQ ID NO: 353097 - RNA, 32 nt, Homo Sapiens
auauauuauaaauguugcuguugagcgggaug

SEQ ID NO: 353098 - RNA, 32 nt, Homo Sapiens
ucccccaaccucagacuuaccaggaagcagau

SEQ ID NO: 353099 - RNA, 32 nt, Homo Sapiens
agaaccugccugugucccagcuuggaggccug

SEQ ID NO: 353100 - RNA, 32 nt, Homo Sapiens
caaaggauuuucucuucagaagcaucaccaau

SEQ ID NO: 353101 - RNA, 32 nt, Homo Sapiens
cagcucagcugugccaggaucuuguugaguca

SEQ ID NO: 353102 - RNA, 32 nt, Homo Sapiens
aagacagagucuugcucuuguuguccaggcug

SEQ ID NO: 353103 - RNA, 32 nt, Homo Sapiens
cugccggaggauguccaccgccacgacagucg

SEQ ID NO: 353104 - RNA, 27 nt, Homo Sapiens
ugcaccaugagcuucugguauuucgua

SEQ ID NO: 353105 - RNA, 32 nt, Homo Sapiens
uuucucugccagcagggggcugagcagagccc

SEQ ID NO: 353106 - RNA, 32 nt, Homo Sapiens
caucaguguccucaucuguccaaugacagccc

SEQ ID NO: 353107 - RNA, 32 nt, Homo Sapiens
cugggaucuaguuuuccaaguaacauuuugug

SEQ ID NO: 353108 - RNA, 32 nt, Homo Sapiens
cucccugcaggagagcugaaucuggagcugga

SEQ ID NO: 353109 - RNA, 32 nt, Homo Sapiens
cacuucuucgcgucgccgcggggcuuccucag

SEQ ID NO: 353110 - RNA, 32 nt, Homo Sapiens
ucgccugugggaagagaagggaagccucuuca

SEQ ID NO: 353111 - RNA, 32 nt, Homo Sapiens
cugugacucaaggggacuucuguuuugaaucu

SEQ ID NO: 353112 - RNA, 30 nt, Homo Sapiens
gguaugggagguggcauguucuacuccuag

SEQ ID NO: 353113 - RNA, 32 nt, Homo Sapiens
ugugccugcagcauagagcgcaggcuggcaga

SEQ ID NO: 353114 - RNA, 32 nt, Homo Sapiens
ccaagaucuauuuaugucuauacuguucuauu

SEQ ID NO: 353115 - RNA, 32 nt, Homo Sapiens
agcgcgugcccccucgccggccucgacgucuc

SEQ ID NO: 353116 - RNA, 32 nt, Homo Sapiens
gcaggcuacuuugaagggaacaaucagaugca

SEQ ID NO: 353117 - RNA, 32 nt, Homo Sapiens
gggagggaauauuugagggagggcugggucuu

SEQ ID NO: 353118 - RNA, 32 nt, Homo Sapiens
auagcucacuggaauacauguuuaccucuuuc

SEQ ID NO: 353119 - RNA, 32 nt, Homo Sapiens
aaccaauucaucauaaaauccaaauaaucuug

SEQ ID NO: 353120 - RNA, 32 nt, Homo Sapiens
gcacagucuuugcauggagacuugaggagggc

SEQ ID NO: 353121 - RNA, 32 nt, Homo Sapiens
guguccaggcuuuugggggugggccuaucugg

SEQ ID NO: 353122 - RNA, 32 nt, Homo Sapiens
gcaccccagagccagucgggacaccccccgca

SEQ ID NO: 353123 - RNA, 32 nt, Homo Sapiens
aaacuuguauugguugguggcggugguacugg

SEQ ID NO: 353124 - RNA, 32 nt, Homo Sapiens
gagagugggcuagccugcuggaugcuguucgu

SEQ ID NO: 353125 - RNA, 32 nt, Homo Sapiens
uguuggcauacuugggggauuuaguggcaaau

SEQ ID NO: 353126 - RNA, 32 nt, Homo Sapiens
agcaggaccugccuuaacugcuccuggccacu

SEQ ID NO: 353127 - RNA, 32 nt, Homo Sapiens
ccgccaccccgaccccgcugcgcacggccugu

SEQ ID NO: 353128 - RNA, 32 nt, Homo Sapiens
ggaggaagggccaggagagagaucuagaaagu

SEQ ID NO: 353129 - RNA, 32 nt, Homo Sapiens
ugccgcccagggcucuggggccccgccggcca

SEQ ID NO: 353130 - RNA, 32 nt, Homo Sapiens
gguggcaaccaccugaauuucuauugguccau

SEQ ID NO: 353131 - RNA, 32 nt, Homo Sapiens
acacugagcuaguucagacauggccaugcugc

SEQ ID NO: 353132 - RNA, 32 nt, Homo Sapiens
ugccgggugaugagauacucggucggcgacgg

SEQ ID NO: 353133 - RNA, 32 nt, Homo Sapiens
caagaggccagugugucaccagcccucagcag

SEQ ID NO: 353134 - RNA, 32 nt, Homo Sapiens
auggugauaucucgucucuacugaaaauacaa

SEQ ID NO: 353135 - RNA, 32 nt, Homo Sapiens
cggucccucagccccuucucccccgucagccc

SEQ ID NO: 353136 - RNA, 32 nt, Homo Sapiens
gaaucacucuugugugauauaaaggcguguau

SEQ ID NO: 353137 - RNA, 32 nt, Homo Sapiens
gccgcggugggggacccggcgcagcggcaccu

SEQ ID NO: 353138 - RNA, 32 nt, Homo Sapiens
ccuccguuuucacccuucuccggacuucgcgu

SEQ ID NO: 353139 - RNA, 32 nt, Homo Sapiens
ccgggcaccaagcuugcuccgcgccacugccc

SEQ ID NO: 353140 - RNA, 32 nt, Homo Sapiens
gcugcaccaacccagccgcugcccggcgcccu

SEQ ID NO: 353141 - RNA, 32 nt, Homo Sapiens
agcgacucucuggagcuacuccugcuacaauc

SEQ ID NO: 353142 - RNA, 32 nt, Homo Sapiens
ccggguugggcgcccaccugcugccugccggu

SEQ ID NO: 353143 - RNA, 32 nt, Homo Sapiens
agucgcggugcagcggugggcggcaugucugu

SEQ ID NO: 353144 - RNA, 32 nt, Homo Sapiens
uuuaagugguauaauucugggauagaucuguu

SEQ ID NO: 353145 - RNA, 32 nt, Homo Sapiens
auuggagauaauuggaagauccuuucaaagca

SEQ ID NO: 353146 - RNA, 32 nt, Homo Sapiens
ccuaccuccaugccgaggaggaccccuccccc

SEQ ID NO: 353147 - RNA, 32 nt, Homo Sapiens
uuuguuuuguuuuuuuuuuuuaaugggggaca

SEQ ID NO: 353148 - RNA, 32 nt, Homo Sapiens
ccuuuuacacgacuucagaacauucuaugaca

SEQ ID NO: 353149 - RNA, 32 nt, Homo Sapiens
ccuucaucugucuccuucugcacccagaguag

SEQ ID NO: 353150 - RNA, 32 nt, Homo Sapiens
uugcaggucgcuccuuucccagccguggauaa

SEQ ID NO: 353151 - RNA, 31 nt, Homo Sapiens
gccucgcugccggucagcugcucggcacuuc

SEQ ID NO: 353152 - RNA, 32 nt, Homo Sapiens
aaaaaaacaaacaaaauccuuccuuuuaaaag

SEQ ID NO: 353153 - RNA, 32 nt, Homo Sapiens
uaauuuauauugcuuugcacuuugguuugaua

SEQ ID NO: 353154 - RNA, 32 nt, Homo Sapiens
cagaagcuaaugaagucagggauuccaugaag

SEQ ID NO: 353155 - RNA, 32 nt, Homo Sapiens
aaaaugaaaggaaaaauauuucaacccggcug

SEQ ID NO: 353156 - RNA, 32 nt, Homo Sapiens
uuauuuccauauaauuuuuuuauuuuagaguu

SEQ ID NO: 353157 - RNA, 32 nt, Homo Sapiens
caggguggccccagguccauguugggcacuag

SEQ ID NO: 353158 - RNA, 32 nt, Homo Sapiens
gucuuuuaauccaugaauauacuuaaguauau

SEQ ID NO: 353159 - RNA, 32 nt, Homo Sapiens
ggccgacaucacaguuuuccuguuucccaccc

SEQ ID NO: 353160 - RNA, 32 nt, Homo Sapiens
gaaucugcaggccccgcgcgccaggcaggcuu

SEQ ID NO: 353161 - RNA, 32 nt, Homo Sapiens
ugcggggaaugggaauccuaggucccugacug

SEQ ID NO: 353162 - RNA, 32 nt, Homo Sapiens
cuuucuuaccucccuuuuuuuauaacucucca

SEQ ID NO: 353163 - RNA, 30 nt, Homo Sapiens
cuggcaggucuaaugggggaggcggcgucc

SEQ ID NO: 353164 - RNA, 32 nt, Homo Sapiens
caucuuugccaccaccuggggagauccugcuu

SEQ ID NO: 353165 - RNA, 32 nt, Homo Sapiens
ugcuuggaaugggagaggcaauaaauaaaugu

SEQ ID NO: 353166 - RNA, 32 nt, Homo Sapiens
ccucccgcgggcccuggugcccuggcaugaag

SEQ ID NO: 353167 - RNA, 32 nt, Homo Sapiens
cgcacggugcacagcccaccagagcacuacag

SEQ ID NO: 353168 - RNA, 32 nt, Homo Sapiens
acuguggauaugaaguuuuuuuuucuuuugag

SEQ ID NO: 353169 - RNA, 32 nt, Homo Sapiens
acaaauuaaggggaacuccauguauuuuaccu

SEQ ID NO: 353170 - RNA, 32 nt, Homo Sapiens
guucuagaauaaaaguacaaaaaauuagaaua

SEQ ID NO: 353171 - RNA, 32 nt, Homo Sapiens
caaaauggaccugucucaaccaauugacacuu

SEQ ID NO: 353172 - RNA, 31 nt, Homo Sapiens
aguauuugauaaaaacagguaauguugauga

SEQ ID NO: 353173 - RNA, 32 nt, Homo Sapiens
cagggccguuugccauccagugagaacagccg

SEQ ID NO: 353174 - RNA, 32 nt, Homo Sapiens
augcggccacuggucggugcugccugguccug

SEQ ID NO: 353175 - RNA, 32 nt, Homo Sapiens
ccggcgccgcgugggccaaaccugcgcccgug

SEQ ID NO: 353176 - RNA, 32 nt, Homo Sapiens
cuaguugucugacccgugaucaagauguccuu

SEQ ID NO: 353177 - RNA, 32 nt, Homo Sapiens
cggggagcggcccuuccacugugaccagugca

SEQ ID NO: 353178 - RNA, 32 nt, Homo Sapiens
accuuugccguggguggacacagcaagaaggc

SEQ ID NO: 353179 - RNA, 32 nt, Homo Sapiens
acccucugcccgccuuggggucugcugggcug

SEQ ID NO: 353180 - RNA, 32 nt, Homo Sapiens
ucugcacacacaaauauagauguaacuuaggu

SEQ ID NO: 353181 - RNA, 32 nt, Homo Sapiens
cucagguugccuguccucuccuggccuccagu

SEQ ID NO: 353182 - RNA, 32 nt, Homo Sapiens
ggagcugcuccggccgcaccaugcgggagcug

SEQ ID NO: 353183 - RNA, 32 nt, Homo Sapiens
ucaauaugucauuguuuucuugacuaugucuc

SEQ ID NO: 353184 - RNA, 32 nt, Homo Sapiens
guagaccacaucuguucgucugcacagcugug

SEQ ID NO: 353185 - RNA, 32 nt, Homo Sapiens
gcugagugucugucgcugcugccgccuccacc

SEQ ID NO: 353186 - RNA, 32 nt, Homo Sapiens
ccgcgguccccuccccgcugaacagccuggau

SEQ ID NO: 353187 - RNA, 32 nt, Homo Sapiens
guccucucucgcggccgcucuguccgggagcc

SEQ ID NO: 353188 - RNA, 32 nt, Homo Sapiens
cugcggcggcgcgucgggaagugcuuggggcg

SEQ ID NO: 353189 - RNA, 32 nt, Homo Sapiens
cugacacccccuccccgccccuguggcccugg

SEQ ID NO: 353190 - RNA, 32 nt, Homo Sapiens
cuagagcuuccacugucagcccucacugucag

SEQ ID NO: 353191 - RNA, 32 nt, Homo Sapiens
cugauauugugccacugcacuccagccugggc

SEQ ID NO: 353192 - RNA, 32 nt, Homo Sapiens
gauccgcccagcucagccucccaaagugcuag

SEQ ID NO: 353193 - RNA, 32 nt, Homo Sapiens
agaguuuuguuuucuucagcguucaccuuccu

SEQ ID NO: 353194 - RNA, 32 nt, Homo Sapiens
uguguguuccauggauaccuggauaggcacau

SEQ ID NO: 353195 - RNA, 32 nt, Homo Sapiens
auacauauauccacaucuauauagagagauag

SEQ ID NO: 353196 - RNA, 32 nt, Homo Sapiens
caaaguguaucuggugcugaaugacuggggga

SEQ ID NO: 353197 - RNA, 32 nt, Homo Sapiens
uucgcccgcgucucugggcuuuugcucuguca

SEQ ID NO: 353198 - RNA, 32 nt, Homo Sapiens
ccuggugguggcuggcuguagccuagugcacg

SEQ ID NO: 353199 - RNA, 32 nt, Homo Sapiens
acccgccugcggucugcaucagccucugggaa

SEQ ID NO: 353200 - RNA, 32 nt, Homo Sapiens
uacuaauaaaaagaugaaaucugauggauuag

SEQ ID NO: 353201 - RNA, 32 nt, Homo Sapiens
auguguugacugucgcuaugggcucacuguug

SEQ ID NO: 353202 - RNA, 32 nt, Homo Sapiens
uauuuuacugucacuggaggcucugugggcug

SEQ ID NO: 353203 - RNA, 32 nt, Homo Sapiens
gggagccggagcugcgaggcgcggcgcagagc

SEQ ID NO: 353204 - RNA, 32 nt, Homo Sapiens
uuauaagcuaugaguugaaauguucugucaaa

SEQ ID NO: 353205 - RNA, 32 nt, Homo Sapiens
ggggaaaugggucuuuucaucaaggcaacucc

SEQ ID NO: 353206 - RNA, 32 nt, Homo Sapiens
acaaugaaaaagaaaaagcauuuuauauuacu

SEQ ID NO: 353207 - RNA, 32 nt, Homo Sapiens
ggcgagaggaagagggacuagguccaaacgcu

SEQ ID NO: 353208 - RNA, 32 nt, Homo Sapiens
uguggugcugggccugggccucauggcauuau

SEQ ID NO: 353209 - RNA, 32 nt, Homo Sapiens
guccaguacuuuguccagauuuuagauucuca

SEQ ID NO: 353210 - RNA, 32 nt, Homo Sapiens
gucuauaaauuaaacuggaaguaauuauuaaa

SEQ ID NO: 353211 - RNA, 32 nt, Homo Sapiens
auuaucccauucuuauucuccucaaaccugug

SEQ ID NO: 353212 - RNA, 32 nt, Homo Sapiens
cuugauuauuuuuucuuuagucacaaaucaga

SEQ ID NO: 353213 - RNA, 32 nt, Homo Sapiens
caaacacucuuaaauuuuucuuaaguaaugua

SEQ ID NO: 353214 - RNA, 32 nt, Homo Sapiens
auugaggcuuuguguuguaauucuucaguugg

SEQ ID NO: 353215 - RNA, 32 nt, Homo Sapiens
uggcuggacccugcauggagaagugaauucag

SEQ ID NO: 353216 - RNA, 32 nt, Homo Sapiens
gaggcaggccugacccggggccgggcagcccg

SEQ ID NO: 353217 - RNA, 32 nt, Homo Sapiens
auccucccagguggcugaaacuacaggcacau

SEQ ID NO: 353218 - RNA, 32 nt, Homo Sapiens
gaaggccugaggacccaaggccccacuggagc

SEQ ID NO: 353219 - RNA, 32 nt, Homo Sapiens
uuaccuauuccaucaaccuuccuuccacacag

SEQ ID NO: 353220 - RNA, 32 nt, Homo Sapiens
gcuacuaaaaauacaaaaauuacccgggcuug

SEQ ID NO: 353221 - RNA, 32 nt, Homo Sapiens
aacaauaauuuucuucaucuuuagaauuuuua

SEQ ID NO: 353222 - RNA, 32 nt, Homo Sapiens
uucagagaaaagugggggcuugugaaacagau

SEQ ID NO: 353223 - RNA, 32 nt, Homo Sapiens
gaugaacgccuuuccuuccaccagcugcuggu

SEQ ID NO: 353224 - RNA, 32 nt, Homo Sapiens
gcggcggccugguccgauggcuccucagcgga

SEQ ID NO: 353225 - RNA, 32 nt, Homo Sapiens
ucauuuucuccauggggaagacagccaugcuc

SEQ ID NO: 353226 - RNA, 32 nt, Homo Sapiens
ggagccagccacccugaccucccccagggcuc

SEQ ID NO: 353227 - RNA, 32 nt, Homo Sapiens
uugggcagucaucaaauucaucauaaagacau

SEQ ID NO: 353228 - RNA, 32 nt, Homo Sapiens
aagaaguuaaaagaaacugccuugaaaucccu

SEQ ID NO: 353229 - RNA, 32 nt, Homo Sapiens
aaaaauggggucugcuccugcuaccuugaccc

SEQ ID NO: 353230 - RNA, 32 nt, Homo Sapiens
uguuccccaagcccagagauguccaccugggc

SEQ ID NO: 353231 - RNA, 32 nt, Homo Sapiens
ggagcagccucucuccuuggaccuccucucgg

SEQ ID NO: 353232 - RNA, 32 nt, Homo Sapiens
uuuacugggagaaaaaagagaggagugguugu

SEQ ID NO: 353233 - RNA, 32 nt, Homo Sapiens
uuugauaaagcacugacaucuccuuccuaaua

SEQ ID NO: 353234 - RNA, 30 nt, Homo Sapiens
cucguacgugcgccuccgccggcagcuccu

SEQ ID NO: 353235 - RNA, 32 nt, Homo Sapiens
uguucacagccuuagaaguaaauuuuauggug

SEQ ID NO: 353236 - RNA, 32 nt, Homo Sapiens
uuuaggugggucucaaagaugauguagaauuu

SEQ ID NO: 353237 - RNA, 32 nt, Homo Sapiens
agcgcuugggacgcgccugggcaccgggcucg

SEQ ID NO: 353238 - RNA, 32 nt, Homo Sapiens
gggcagauagaggguuggcgggggguggagcg

SEQ ID NO: 353239 - RNA, 26 nt, Homo Sapiens
cauggcagcugagacuuggaacgugg

SEQ ID NO: 353240 - RNA, 32 nt, Homo Sapiens
gccacccaacuggaaucagagggucuggcugg

SEQ ID NO: 353241 - RNA, 31 nt, Homo Sapiens
cgccgccgagccaccaucaugccugggcacu

SEQ ID NO: 353242 - RNA, 32 nt, Homo Sapiens
uacauauccuucaccacccccagucccagcac

SEQ ID NO: 353243 - RNA, 32 nt, Homo Sapiens
acagagaauaaggaguagggccugcugggugu

SEQ ID NO: 353244 - RNA, 32 nt, Homo Sapiens
ggcgaguggucaagggacagggaccaccucac

SEQ ID NO: 353245 - RNA, 32 nt, Homo Sapiens
cuuaccuagcacauuguaauguuccaugaaug

SEQ ID NO: 353246 - RNA, 30 nt, Homo Sapiens
cauuggcgcccgagcugugaccgccgccac

SEQ ID NO: 353247 - RNA, 32 nt, Homo Sapiens
cauugccuggucuaguagcggaucucacucag

SEQ ID NO: 353248 - RNA, 32 nt, Homo Sapiens
ggcauuuugugcuucucucuuuuaugggaaag

SEQ ID NO: 353249 - RNA, 32 nt, Homo Sapiens
ccugacucacccuggcugcugcccauuguggc

SEQ ID NO: 353250 - RNA, 32 nt, Homo Sapiens
guuucuuccccuccccaagaagggagggggcu

SEQ ID NO: 353251 - RNA, 32 nt, Homo Sapiens
agggcuuccugccuguuuggcaaagucccagg

SEQ ID NO: 353252 - RNA, 32 nt, Homo Sapiens
uuggcccaggagcucuguucuuuccuaaucua

SEQ ID NO: 353253 - RNA, 32 nt, Homo Sapiens
gggcgcgguggcuaacgcuuguaaucccagcg

SEQ ID NO: 353254 - RNA, 32 nt, Homo Sapiens
cauguauagaaaguauggaaaagaaaacagac

SEQ ID NO: 353255 - RNA, 32 nt, Homo Sapiens
aucguaguccacccccuccccauccccagccc

SEQ ID NO: 353256 - RNA, 32 nt, Homo Sapiens
ggaaggcgagcaugacccugugacggaguuua

SEQ ID NO: 353257 - RNA, 32 nt, Homo Sapiens
accccaaaucuggucgucuccuccccccaugc

SEQ ID NO: 353258 - RNA, 32 nt, Homo Sapiens
gccugggaagcagcgaggaaaucacagccccc

SEQ ID NO: 353259 - RNA, 32 nt, Homo Sapiens
uucugauauccggaggugaaugaaaggccugg

SEQ ID NO: 353260 - RNA, 32 nt, Homo Sapiens
gcccaggugcugaccuaguggcggagaaaaag

SEQ ID NO: 353261 - RNA, 32 nt, Homo Sapiens
cucugcugugcaauuccuggggucuucaucug

SEQ ID NO: 353262 - RNA, 32 nt, Homo Sapiens
uuuaugguguguauagguaacauggggaaaau

SEQ ID NO: 353263 - RNA, 32 nt, Homo Sapiens
uuuuccuuucuuucuuuuuuuauacacacaau

SEQ ID NO: 353264 - RNA, 32 nt, Homo Sapiens
gccaaaagcacuuguuacauagugauuccuuu

SEQ ID NO: 353265 - RNA, 32 nt, Homo Sapiens
uuuccucagagguauaucaacucuccggcuau

SEQ ID NO: 353266 - RNA, 32 nt, Homo Sapiens
acaaacacccccgccccuccccaugcccaggg

SEQ ID NO: 353267 - RNA, 32 nt, Homo Sapiens
ggcgcaccugcgagacuacagagccucgggcc

SEQ ID NO: 353268 - RNA, 32 nt, Homo Sapiens
ugucaccuaggcuggaaugcaguggugcaauc

SEQ ID NO: 353269 - RNA, 32 nt, Homo Sapiens
cgaggccugagggccccuccccuguccccacc

SEQ ID NO: 353270 - RNA, 32 nt, Homo Sapiens
gaucccgugggacagaauguugugaagucugg

SEQ ID NO: 353271 - RNA, 32 nt, Homo Sapiens
caauugaacauuccuuccuucucccaucugga

SEQ ID NO: 353272 - RNA, 32 nt, Homo Sapiens
guacaaaccagcugccucacuucuguuucaca

SEQ ID NO: 353273 - RNA, 32 nt, Homo Sapiens
ggugaguagagcuguccgccucgucgggugau

SEQ ID NO: 353274 - RNA, 32 nt, Homo Sapiens
ucuucaaucuaucaaagugguuacaugcauuu

SEQ ID NO: 353275 - RNA, 32 nt, Homo Sapiens
cgaggcccgccagcacgcccuggcccggcagc

SEQ ID NO: 353276 - RNA, 32 nt, Homo Sapiens
augaaguugcuuggaauuguggaaagcguugg

SEQ ID NO: 353277 - RNA, 32 nt, Homo Sapiens
ggcaaaucagcaaagcacuuuguuauggagau

SEQ ID NO: 353278 - RNA, 31 nt, Homo Sapiens
caaagccaagccauuuaaugaccucaguuug

SEQ ID NO: 353279 - RNA, 32 nt, Homo Sapiens
ucaaaucuuuaggaaugugcuuccuaugccuc

SEQ ID NO: 353280 - RNA, 32 nt, Homo Sapiens
gcccugagccuuucugcgcccgcgggcaccau

SEQ ID NO: 353281 - RNA, 32 nt, Homo Sapiens
caggcaaagacacccuuagcucaccuuuaaua

SEQ ID NO: 353282 - RNA, 32 nt, Homo Sapiens
aguccagggaagaggguccuccaggucuugga

SEQ ID NO: 353283 - RNA, 32 nt, Homo Sapiens
auacauucaaauucuuuuuuuauuauuauuua

SEQ ID NO: 353284 - RNA, 32 nt, Homo Sapiens
ugggaaggggacccccgcccccugcccucccc

SEQ ID NO: 353285 - RNA, 32 nt, Homo Sapiens
gagccgcgccgcgccgcaccauggcgcccacc

SEQ ID NO: 353286 - RNA, 32 nt, Homo Sapiens
agggcgggaaaggguggucacugggucagccc

SEQ ID NO: 353287 - RNA, 32 nt, Homo Sapiens
acccaggaccucggaccuuggagccugcgggg

SEQ ID NO: 353288 - RNA, 32 nt, Homo Sapiens
aagagaggcgaagccaggucaccuuucaagga

SEQ ID NO: 353289 - RNA, 32 nt, Homo Sapiens
agcuccuccaagcagagcaacucccuggcugc

SEQ ID NO: 353290 - RNA, 32 nt, Homo Sapiens
gaggacuucagcguccaagacuggggcccacc

SEQ ID NO: 353291 - RNA, 32 nt, Homo Sapiens
gaaguugauuuucagaauguucuuagaaaaga

SEQ ID NO: 353292 - RNA, 32 nt, Homo Sapiens
agaagggcucggcagcccacucggugcuuccc

SEQ ID NO: 353293 - RNA, 32 nt, Homo Sapiens
ggaacgcccuccccagucccgcuguccagcaa

SEQ ID NO: 353294 - RNA, 32 nt, Homo Sapiens
aguucugcagcaugcagcgguaugacccuacg

SEQ ID NO: 353295 - RNA, 32 nt, Homo Sapiens
aaguguucgaggauuaacugacuggauuccuu

SEQ ID NO: 353296 - RNA, 32 nt, Homo Sapiens
aaaccacauuccugcugcugcgggcgugggcu

SEQ ID NO: 353297 - RNA, 32 nt, Homo Sapiens
gugauaugaugauuaggagcacaaauacuaua

SEQ ID NO: 353298 - RNA, 32 nt, Homo Sapiens
uauaccauuuuaaguucugaccucaggccucc

SEQ ID NO: 353299 - RNA, 32 nt, Homo Sapiens
gaaaaagacauuaccauagugcuuuacauuuu

SEQ ID NO: 353300 - RNA, 32 nt, Homo Sapiens
ggggccgccaccggcccaugagccccggccuc

SEQ ID NO: 353301 - RNA, 32 nt, Homo Sapiens
aauuaguuuauuuuugucaguuacaguccuag

SEQ ID NO: 353302 - RNA, 32 nt, Homo Sapiens
gaaagcacagcuccucccccagcccuugggac

SEQ ID NO: 353303 - RNA, 32 nt, Homo Sapiens
aucgggugggccccggccccuguggcuggcug

SEQ ID NO: 353304 - RNA, 32 nt, Homo Sapiens
aaggauucgguguugggaccacuccugcccug

SEQ ID NO: 353305 - RNA, 32 nt, Homo Sapiens
uccugccuggacagcucugcuggucuccccgu

SEQ ID NO: 353306 - RNA, 32 nt, Homo Sapiens
agcgauaaggcuggcgccggcccgcaaaagcu

SEQ ID NO: 353307 - RNA, 32 nt, Homo Sapiens
aggagucagguggccuucccaccgaugguccu

SEQ ID NO: 353308 - RNA, 30 nt, Homo Sapiens
aucccaggagguggugaguuggcuacaaga

SEQ ID NO: 353309 - RNA, 32 nt, Homo Sapiens
uaggcugccugccugugggcugggagacaggg

SEQ ID NO: 353310 - RNA, 32 nt, Homo Sapiens
cccuagaaggaagaggugaaggaucuggcuug

SEQ ID NO: 353311 - RNA, 32 nt, Homo Sapiens
ccaccucugccuccaggucucaucuuccaccc

SEQ ID NO: 353312 - RNA, 32 nt, Homo Sapiens
caaacacuuggguuaaaagaccuugacacuau

SEQ ID NO: 353313 - RNA, 32 nt, Homo Sapiens
agucagcacgggggugcuggaagagaucggga

SEQ ID NO: 353314 - RNA, 32 nt, Homo Sapiens
cacguguuugucugcugacccucuucccacaa

SEQ ID NO: 353315 - RNA, 32 nt, Homo Sapiens
gagaaggcuugugcccaaagcuugaagaaaga

SEQ ID NO: 353316 - RNA, 32 nt, Homo Sapiens
aucugugucaaguauuucugguaauaagaagc

SEQ ID NO: 353317 - RNA, 32 nt, Homo Sapiens
cccacuggacucaccucccccaucucuucugg

SEQ ID NO: 353318 - RNA, 31 nt, Homo Sapiens
ucuguucccgaggaucgucugccuuauugaa

SEQ ID NO: 353319 - RNA, 32 nt, Homo Sapiens
agugaucugugacagcagcagcuucauguugu

SEQ ID NO: 353320 - RNA, 32 nt, Homo Sapiens
ggaugcggagggcaguagaguugugugugcuc

SEQ ID NO: 353321 - RNA, 32 nt, Homo Sapiens
aaccacgugacugcagaaacauccuuaucaca

SEQ ID NO: 353322 - RNA, 32 nt, Homo Sapiens
gagauauauaaauuuagcauuuuuuauaacua

SEQ ID NO: 353323 - RNA, 32 nt, Homo Sapiens
cucugggugcagagggcgagagguggaagguc

SEQ ID NO: 353324 - RNA, 32 nt, Homo Sapiens
uggagaaaggacuuaugagugcugucaaucug

SEQ ID NO: 353325 - RNA, 32 nt, Homo Sapiens
gcucccacucccucugccgcacgccgcccguc

SEQ ID NO: 353326 - RNA, 32 nt, Homo Sapiens
cuucagaauucccgcccccacccagggauggg

SEQ ID NO: 353327 - RNA, 32 nt, Homo Sapiens
uagaauuucacauuuuaauuuagcaaauugau

SEQ ID NO: 353328 - RNA, 30 nt, Homo Sapiens
ucugggggagguggcaguuaugcuguuacu

SEQ ID NO: 353329 - RNA, 29 nt, Homo Sapiens
uagcaugugacuuuccaagaguuuagguu

SEQ ID NO: 353330 - RNA, 32 nt, Homo Sapiens
gccgagccugcagccugccccgcggccaacau

SEQ ID NO: 353331 - RNA, 32 nt, Homo Sapiens
cauaugguucauguucaaauguucacaaccac

SEQ ID NO: 353332 - RNA, 32 nt, Homo Sapiens
uaaagggaacaaucuguuucugauugcacagu

SEQ ID NO: 353333 - RNA, 29 nt, Homo Sapiens
aaugaguaaaguuuguuuuaucuuuucuu

SEQ ID NO: 353334 - RNA, 32 nt, Homo Sapiens
aagcacuccgaggaauggccaagcccucaucg

SEQ ID NO: 353335 - RNA, 32 nt, Homo Sapiens
ccuggggccgugaggagaaggugggcugcgcc

SEQ ID NO: 353336 - RNA, 32 nt, Homo Sapiens
cccaugccaucccauuccuacccaucccaaga

SEQ ID NO: 353337 - RNA, 32 nt, Homo Sapiens
aacgggccccucucucgggggaaccggacagc

SEQ ID NO: 353338 - RNA, 32 nt, Homo Sapiens
auccuucccacugcuccacgggcugcucggga

SEQ ID NO: 353339 - RNA, 32 nt, Homo Sapiens
auuggcuauugugaaaaaugaugcuauaaaug

SEQ ID NO: 353340 - RNA, 32 nt, Homo Sapiens
auauguuuguauuuauuuuuuauucauuuuau

SEQ ID NO: 353341 - RNA, 32 nt, Homo Sapiens
uccuuugaagucauuuauuauuuuauaaauug

SEQ ID NO: 353342 - RNA, 32 nt, Homo Sapiens
uguauacacgaaagucacaugaaaauagaacu

SEQ ID NO: 353343 - RNA, 32 nt, Homo Sapiens
caccgacaccaccgugacuaugaugaccaucu

SEQ ID NO: 353344 - RNA, 32 nt, Homo Sapiens
ugcaguagugaauguggaaccaagccugucug

SEQ ID NO: 353345 - RNA, 32 nt, Homo Sapiens
aagucuggcaccuuuaccuagaaguacucugc

SEQ ID NO: 353346 - RNA, 32 nt, Homo Sapiens
agggcacucgcucccgcacccugggggacagc

SEQ ID NO: 353347 - RNA, 32 nt, Homo Sapiens
gcaccagcuggggacucuggcuuccagagcuu

SEQ ID NO: 353348 - RNA, 32 nt, Homo Sapiens
agaucagccagagaggcagagaacuugcagcg

SEQ ID NO: 353349 - RNA, 32 nt, Homo Sapiens
agcugcuuguguuucuuggggugacugucauu

SEQ ID NO: 353350 - RNA, 32 nt, Homo Sapiens
ccuuaguuuauuuuuccaaaacauaacuuuag

SEQ ID NO: 353351 - RNA, 32 nt, Homo Sapiens
aacuguacagaaaauuuaaggugcagggacac

SEQ ID NO: 353352 - RNA, 32 nt, Homo Sapiens
guuguuacacauuucuggaaaagcaguguccg

SEQ ID NO: 353353 - RNA, 32 nt, Homo Sapiens
cgugaggggggccgggcgcgguggcucacucc

SEQ ID NO: 353354 - RNA, 30 nt, Homo Sapiens
uggauauucuccuuuuccuaacucuggggg

SEQ ID NO: 353355 - RNA, 32 nt, Homo Sapiens
agcguuccuggccagagcucuaccucuuugcc

SEQ ID NO: 353356 - RNA, 32 nt, Homo Sapiens
aaugcaucccccauguucgucaucucaucuca

SEQ ID NO: 353357 - RNA, 32 nt, Homo Sapiens
gggcagagguggcaggaauggugcugggcacu

SEQ ID NO: 353358 - RNA, 32 nt, Homo Sapiens
cugcccuguagggaaccccagcucuggggcuu

SEQ ID NO: 353359 - RNA, 32 nt, Homo Sapiens
cagacggcgcugagcgcggcggcggcgggagc

SEQ ID NO: 353360 - RNA, 32 nt, Homo Sapiens
uuugcuugaauucuuucuuaauuuacgauuuu

SEQ ID NO: 353361 - RNA, 32 nt, Homo Sapiens
guugugagacugaguucuguauucuggugagu

SEQ ID NO: 353362 - RNA, 32 nt, Homo Sapiens
agcugccugugcugcuccguggagugaaaaag

SEQ ID NO: 353363 - RNA, 32 nt, Homo Sapiens
caaaagaaaaagacaguggaaaaaagagacca

SEQ ID NO: 353364 - RNA, 32 nt, Homo Sapiens
auccucgcggccuggcuuccuucugcgcauga

SEQ ID NO: 353365 - RNA, 32 nt, Homo Sapiens
cucagcaccuucugcuggagagagguacggcu

SEQ ID NO: 353366 - RNA, 32 nt, Homo Sapiens
cccccguuuauaagccucuccuccguuuauaa

SEQ ID NO: 353367 - RNA, 32 nt, Homo Sapiens
uaauggcauccacaaggcaugcuaacgaggac

SEQ ID NO: 353368 - RNA, 32 nt, Homo Sapiens
uuuauuuuaacccuugaaucugcuuuauguac

SEQ ID NO: 353369 - RNA, 32 nt, Homo Sapiens
aguuuaauucgccuugauguucugccuuauaa

SEQ ID NO: 353370 - RNA, 32 nt, Homo Sapiens
ucugcugccggacagcgcacuccagggcagga

SEQ ID NO: 353371 - RNA, 32 nt, Homo Sapiens
auuuuauuuucucaagaugcuauaccacgucg

SEQ ID NO: 353372 - RNA, 29 nt, Homo Sapiens
uaagagugaggagcgcggacgagguaagc

SEQ ID NO: 353373 - RNA, 30 nt, Homo Sapiens
cuaaaagaaaagcuugagcaagucaaguua

SEQ ID NO: 353374 - RNA, 32 nt, Homo Sapiens
ucuccaggaaugccuccucccugggcagaaag

SEQ ID NO: 353375 - RNA, 32 nt, Homo Sapiens
uccuucugggugucccucuccucaucuguaag

SEQ ID NO: 353376 - RNA, 32 nt, Homo Sapiens
gaauuaggacuuuuuucuuaauuucacugacu

SEQ ID NO: 353377 - RNA, 32 nt, Homo Sapiens
cacuugaagaacugacucaaagcccuguggcc

SEQ ID NO: 353378 - RNA, 32 nt, Homo Sapiens
acuguggacuguguuuccuucuccgaggggcu

SEQ ID NO: 353379 - RNA, 32 nt, Homo Sapiens
aaagagugcuuugaauaagucagcuagggauu

SEQ ID NO: 353380 - RNA, 32 nt, Homo Sapiens
uuccuccgcccgggguggggccccuacagacu

SEQ ID NO: 353381 - RNA, 28 nt, Homo Sapiens
auaagaaaagauuaauugaagagcauag

SEQ ID NO: 353382 - RNA, 32 nt, Homo Sapiens
ugguaugcaccuguaaucccagcuacucggga

SEQ ID NO: 353383 - RNA, 32 nt, Homo Sapiens
ccuccucucuucugcuguucugcuccucccag

SEQ ID NO: 353384 - RNA, 32 nt, Homo Sapiens
cuauuuuagaauuugaauaaguacuccuaaag

SEQ ID NO: 353385 - RNA, 32 nt, Homo Sapiens
cuacccccucaccagcaccagcucuccaugca

SEQ ID NO: 353386 - RNA, 32 nt, Homo Sapiens
uauucuuaaguacaaaccuucaggaaaugcca

SEQ ID NO: 353387 - RNA, 32 nt, Homo Sapiens
ccuucaaacccagacaugcugcugcugcugcu

SEQ ID NO: 353388 - RNA, 32 nt, Homo Sapiens
gacuucauuucccccacucguuccggccccgc

SEQ ID NO: 353389 - RNA, 32 nt, Homo Sapiens
acagacaacaggagaccccccaccugaggcuc

SEQ ID NO: 353390 - RNA, 32 nt, Homo Sapiens
agaucaaaugugagucccacucacuggccuuc

SEQ ID NO: 353391 - RNA, 32 nt, Homo Sapiens
cagcaaccccccacccaacucugggccccagg

SEQ ID NO: 353392 - RNA, 32 nt, Homo Sapiens
uauuuugcuuuaaaucucugguaguuuuucca

SEQ ID NO: 353393 - RNA, 32 nt, Homo Sapiens
cauugucacuuagaaaagacaccuggaaccca

SEQ ID NO: 353394 - RNA, 32 nt, Homo Sapiens
aauauguuaaaauaaagucauuaucggaaaaa

SEQ ID NO: 353395 - RNA, 32 nt, Homo Sapiens
gugugguggggggcacccguauucccagcuac

SEQ ID NO: 353396 - RNA, 32 nt, Homo Sapiens
aguguuauuuuugggaugugagggugaucugg

SEQ ID NO: 353397 - RNA, 29 nt, Homo Sapiens
gaccaggcuggccaacauggcaaaacccc

SEQ ID NO: 353398 - RNA, 32 nt, Homo Sapiens
cacagcacuccagcccaggcggcagugagaga

SEQ ID NO: 353399 - RNA, 32 nt, Homo Sapiens
cugggugccugccugcccuucuaggaaugggg

SEQ ID NO: 353400 - RNA, 32 nt, Homo Sapiens
ccccaccgccccaccacacacauauuuuuaaa

SEQ ID NO: 353401 - RNA, 32 nt, Homo Sapiens
gaaaugcauccucccacagagcccuggaaggc

SEQ ID NO: 353402 - RNA, 32 nt, Homo Sapiens
ucaacagcuagacacagaugcucacagccgac

SEQ ID NO: 353403 - RNA, 32 nt, Homo Sapiens
cagaaauccuacuucagaaguguaauaaaugg

SEQ ID NO: 353404 - RNA, 32 nt, Homo Sapiens
aaccaaacaacgaaaaacaagaacaacuaauu

SEQ ID NO: 353405 - RNA, 32 nt, Homo Sapiens
ugcccccuccaaugcuacccccggccccaggg

SEQ ID NO: 353406 - RNA, 26 nt, Homo Sapiens
uauaaauaaaauuccauuugcauagc

SEQ ID NO: 353407 - RNA, 32 nt, Homo Sapiens
ucuuugaguccucccuuggcggcuccaucuaa

SEQ ID NO: 353408 - RNA, 32 nt, Homo Sapiens
agcagucaaccgaguuucugguaauaagaaua

SEQ ID NO: 353409 - RNA, 32 nt, Homo Sapiens
agcauuuuggagacugguuuuuaauaucugua

SEQ ID NO: 353410 - RNA, 32 nt, Homo Sapiens
ucugcaaaauuccguaaugguguauuaguauu

SEQ ID NO: 353411 - RNA, 32 nt, Homo Sapiens
uuuuuuauauaugcuaaaaauuuuggggaaua

SEQ ID NO: 353412 - RNA, 32 nt, Homo Sapiens
aauguuaguauuuuaauccuguaccaaaucug

SEQ ID NO: 353413 - RNA, 32 nt, Homo Sapiens
cuuuaaaguauuuuucuuccugauuaaaaaug

SEQ ID NO: 353414 - RNA, 32 nt, Homo Sapiens
cucggcaaaacucagacuaaaaacagaaaaag

SEQ ID NO: 353415 - RNA, 32 nt, Homo Sapiens
ggggagagggaagaugggccccaccagcucuc

SEQ ID NO: 353416 - RNA, 32 nt, Homo Sapiens
cuugaaauauauuuuugugagaauaaauguua

SEQ ID NO: 353417 - RNA, 32 nt, Homo Sapiens
gcagggaggcagggaggcugcagagucagagu

SEQ ID NO: 353418 - RNA, 32 nt, Homo Sapiens
gcucuaucaaagaagcaauugcagcuuuauuc

SEQ ID NO: 353419 - RNA, 32 nt, Homo Sapiens
uuuaaaccauguaagcucucuucuucucgaaa

SEQ ID NO: 353420 - RNA, 32 nt, Homo Sapiens
ugagucccggccggagccccacggccgcgggc

SEQ ID NO: 353421 - RNA, 32 nt, Homo Sapiens
gaucaauuagacauuuugaaaaugauuuaaag

SEQ ID NO: 353422 - RNA, 32 nt, Homo Sapiens
ggcacgaaucacauuuuguggaagugacuacu

SEQ ID NO: 353423 - RNA, 32 nt, Homo Sapiens
ccuccaucacgcccugcccccagggugguuca

SEQ ID NO: 353424 - RNA, 32 nt, Homo Sapiens
ggaaauguuacgcaaagugauacuguguaugu

SEQ ID NO: 353425 - RNA, 32 nt, Homo Sapiens
aagacaaaauuuuuuaaauguuagaaaaagca

SEQ ID NO: 353426 - RNA, 32 nt, Homo Sapiens
guuacacaaauguuuugguuuuccaguacaca

SEQ ID NO: 353427 - RNA, 32 nt, Homo Sapiens
gggguggcccacugcccuccccuggcccucau

SEQ ID NO: 353428 - RNA, 32 nt, Homo Sapiens
uuuuguuuugugaauuuguacuguauauuuga

SEQ ID NO: 353429 - RNA, 32 nt, Homo Sapiens
aguccauccuccuuuauuuguacccaccuucc

SEQ ID NO: 353430 - RNA, 32 nt, Homo Sapiens
gaaguaacagaaaagauggaaacacacagaac

SEQ ID NO: 353431 - RNA, 32 nt, Homo Sapiens
caccuuuaauacugugaauacuauuuggaggg

SEQ ID NO: 353432 - RNA, 32 nt, Homo Sapiens
cgcugcugccagccgaugccccagcccugcac

SEQ ID NO: 353433 - RNA, 32 nt, Homo Sapiens
uccaguugaaagagggugguagaaaucuauuc

SEQ ID NO: 353434 - RNA, 32 nt, Homo Sapiens
ccuccugaccuaggugauccacugccuccaug

SEQ ID NO: 353435 - RNA, 32 nt, Homo Sapiens
cugcuucuguugcuaucuaagaacugcauacc

SEQ ID NO: 353436 - RNA, 32 nt, Homo Sapiens
ggccaggcgggugcugccugggacccagugac

SEQ ID NO: 353437 - RNA, 32 nt, Homo Sapiens
guacugugcagguucauucugccacccaucug

SEQ ID NO: 353438 - RNA, 32 nt, Homo Sapiens
ucauccagaaaaugauggaaaacuaacagcuc

SEQ ID NO: 353439 - RNA, 32 nt, Homo Sapiens
gcacgaggggagauggcggcgcgcucggcgca

SEQ ID NO: 353440 - RNA, 32 nt, Homo Sapiens
gagccggcugcucgugccauggagcggagucc

SEQ ID NO: 353441 - RNA, 32 nt, Homo Sapiens
gacuagggccucggaggcuccucccucugccu

SEQ ID NO: 353442 - RNA, 32 nt, Homo Sapiens
guuuuauccauaucccugaggacuguguagac

SEQ ID NO: 353443 - RNA, 32 nt, Homo Sapiens
cugcccgccuuagccucccaaagugcugggau

SEQ ID NO: 353444 - RNA, 32 nt, Homo Sapiens
cugcccgccuuggccucccaaagugcuaggau

SEQ ID NO: 353445 - RNA, 32 nt, Homo Sapiens
uuugcugcugcuauugcuguuuccuguuucau

SEQ ID NO: 353446 - RNA, 32 nt, Homo Sapiens
uaugcaacuguagugguaaaauguuauaaagc

SEQ ID NO: 353447 - RNA, 32 nt, Homo Sapiens
cucgacuuaggacgcaacagagguuuuaguau

SEQ ID NO: 353448 - RNA, 32 nt, Homo Sapiens
ucugaggagcagcugugcccuccagugaacuu

SEQ ID NO: 353449 - RNA, 32 nt, Homo Sapiens
caaaauuuacaguuuuaaccauuuuuauuaua

SEQ ID NO: 353450 - RNA, 31 nt, Homo Sapiens
gguggcgcugcuggcggaccccgcgcugggc

SEQ ID NO: 353451 - RNA, 32 nt, Homo Sapiens
gcaagcaaaacaaaaacaaaacaggggcuggg

SEQ ID NO: 353452 - RNA, 32 nt, Homo Sapiens
aguguuuuuucacuguaucaaacaaugucagu

SEQ ID NO: 353453 - RNA, 32 nt, Homo Sapiens
acugucccuggccuauacggucauuuuuuaaa

SEQ ID NO: 353454 - RNA, 32 nt, Homo Sapiens
gacuaagauguuuuaauauguaucaaaaauua

SEQ ID NO: 353455 - RNA, 32 nt, Homo Sapiens
ucucuuagacauucagagggugaaccaccauc

SEQ ID NO: 353456 - RNA, 32 nt, Homo Sapiens
cgcccucccuccgcgccucccucccccucgag

SEQ ID NO: 353457 - RNA, 32 nt, Homo Sapiens
caggauaacgacccucaacagcggcggaaagg

SEQ ID NO: 353458 - RNA, 32 nt, Homo Sapiens
gagagacccacuuugcuccaacaacuugaaac

SEQ ID NO: 353459 - RNA, 32 nt, Homo Sapiens
ugauggccgccacucucaugacaucauagaug

SEQ ID NO: 353460 - RNA, 32 nt, Homo Sapiens
aaggugaggggcuggggcauggcauuaacacu

SEQ ID NO: 353461 - RNA, 32 nt, Homo Sapiens
gcuuuuuaaaaauaaacuucugaaaacccaag

SEQ ID NO: 353462 - RNA, 32 nt, Homo Sapiens
uagugaugggacagugaugacagugcagaaaa

SEQ ID NO: 353463 - RNA, 32 nt, Homo Sapiens
gugaguuggggauaugauagucagcucaggcu

SEQ ID NO: 353464 - RNA, 32 nt, Homo Sapiens
cgccggcaccgccgccuugcaccaucgcauca

SEQ ID NO: 353465 - RNA, 32 nt, Homo Sapiens
aaccugccacggggauuuaaacaaaggagguu

SEQ ID NO: 353466 - RNA, 32 nt, Homo Sapiens
aguaccaaaauguuaauguaugugucauuuaa

SEQ ID NO: 353467 - RNA, 32 nt, Homo Sapiens
ggcaaaauauuuuuauuaccuuuucuauuacu

SEQ ID NO: 353468 - RNA, 32 nt, Homo Sapiens
ugcugccuuaggugcugccgcacgguuagcua

SEQ ID NO: 353469 - RNA, 32 nt, Homo Sapiens
gccgugccgggcgggcgggucgucguccgagg

SEQ ID NO: 353470 - RNA, 32 nt, Homo Sapiens
ccccuccccccgccccgcacuccuaagggccc

SEQ ID NO: 353471 - RNA, 32 nt, Homo Sapiens
guuauuaauauuuuaauuuaaucuuccaugga

SEQ ID NO: 353472 - RNA, 32 nt, Homo Sapiens
ggcccagaagguggcagucccacaccuugucc

SEQ ID NO: 353473 - RNA, 32 nt, Homo Sapiens
uggcucgcuucccucccucguuuccagcuccu

SEQ ID NO: 353474 - RNA, 32 nt, Homo Sapiens
uuucucugaaauauauuauuaagggcaaugga

SEQ ID NO: 353475 - RNA, 32 nt, Homo Sapiens
gcgacagagcgagacuccgugggcuuggcggc

SEQ ID NO: 353476 - RNA, 32 nt, Homo Sapiens
cuaugaccuuggcaucaucccagggacauccu

SEQ ID NO: 353477 - RNA, 32 nt, Homo Sapiens
uuucucacaacacugaauuugguagcuuuucc

SEQ ID NO: 353478 - RNA, 32 nt, Homo Sapiens
ucuagauuugaaaguaaauuuuaugaagacau

SEQ ID NO: 353479 - RNA, 32 nt, Homo Sapiens
uggcaauguaccauacaaaaaauaagccaacu

SEQ ID NO: 353480 - RNA, 32 nt, Homo Sapiens
aggagaauguuuaauuuccauguauuugugaa

SEQ ID NO: 353481 - RNA, 32 nt, Homo Sapiens
auucuggucuaaucgaguguaaaauuacaauc

SEQ ID NO: 353482 - RNA, 32 nt, Homo Sapiens
acgccuuuccgccgcucgcgggccugcgccuc

SEQ ID NO: 353483 - RNA, 32 nt, Homo Sapiens
gaucauuuauuacuuuuuccuuuuuucucaca

SEQ ID NO: 353484 - RNA, 32 nt, Homo Sapiens
uauggccagauuuuggggggccugcucccaac

SEQ ID NO: 353485 - RNA, 32 nt, Homo Sapiens
gccagaccgagacgaacacucugccuaacuau

SEQ ID NO: 353486 - RNA, 32 nt, Homo Sapiens
ucuaagcaguauuugcagaaauaugcuucugg

SEQ ID NO: 353487 - RNA, 30 nt, Homo Sapiens
gcugggaucauccgcggcggccgggcucgu

SEQ ID NO: 353488 - RNA, 32 nt, Homo Sapiens
ucgaggaaccuccaggagagaagugccuguug

SEQ ID NO: 353489 - RNA, 32 nt, Homo Sapiens
agagaguaaacagugagagaccaagagagcaa

SEQ ID NO: 353490 - RNA, 32 nt, Homo Sapiens
guggcuugauguuugcugguaucuuccaaacu

SEQ ID NO: 353491 - RNA, 32 nt, Homo Sapiens
uuuccuccgcuccggcgcccccgccccggcuc

SEQ ID NO: 353492 - RNA, 32 nt, Homo Sapiens
auaguuucaaauaguccuucuuguuuacuacc

SEQ ID NO: 353493 - RNA, 31 nt, Homo Sapiens
cuggacacaguguucugcagagccugagcug

SEQ ID NO: 353494 - RNA, 32 nt, Homo Sapiens
caagcuucaccuugaaagaagcuuacauggca

SEQ ID NO: 353495 - RNA, 31 nt, Homo Sapiens
agacugaggcggaggcagccccgcgccgcgc

SEQ ID NO: 353496 - RNA, 32 nt, Homo Sapiens
auuuauauugaaagcuauaugcacuuuauuuc

SEQ ID NO: 353497 - RNA, 32 nt, Homo Sapiens
aggaugccucgcgacuagggguccagagacag

SEQ ID NO: 353498 - RNA, 32 nt, Homo Sapiens
ccccaagccccucccccuaaggcagcuggggg

SEQ ID NO: 353499 - RNA, 32 nt, Homo Sapiens
accaggagcccacccggucuggaccuuccugu

SEQ ID NO: 353500 - RNA, 32 nt, Homo Sapiens
acucccucauaucuuuucccccuggcauggau

SEQ ID NO: 353501 - RNA, 32 nt, Homo Sapiens
aaaaaauugcuguucaugauacuuguuugaag

SEQ ID NO: 353502 - RNA, 32 nt, Homo Sapiens
ggccuccuacaucuucagaucccggcugagcu

SEQ ID NO: 353503 - RNA, 32 nt, Homo Sapiens
uucuuguugaguuaguaucuuaauuuuuacuc

SEQ ID NO: 353504 - RNA, 32 nt, Homo Sapiens
gauaauguucccuuuugaacuuuuacauuuug

SEQ ID NO: 353505 - RNA, 32 nt, Homo Sapiens
ccucggaaccagaagacgcagggcgccgcguu

SEQ ID NO: 353506 - RNA, 32 nt, Homo Sapiens
guuuagaaacaucaacuggaaucaauuugcau

SEQ ID NO: 353507 - RNA, 32 nt, Homo Sapiens
ccagccuccagaagcuggaaccauuucucccg

SEQ ID NO: 353508 - RNA, 32 nt, Homo Sapiens
aaagaaagagagagggccgggcgugguggcuc

SEQ ID NO: 353509 - RNA, 32 nt, Homo Sapiens
acuaccugcugcuauucaaggaccccgcgcag

SEQ ID NO: 353510 - RNA, 32 nt, Homo Sapiens
guccuggguuuuucgagugcugccccagcgua

SEQ ID NO: 353511 - RNA, 32 nt, Homo Sapiens
uugggcccgggcggcuguagaggcggcggcgc

SEQ ID NO: 353512 - RNA, 32 nt, Homo Sapiens
ucccagguccugccuccacagguuuaacccag

SEQ ID NO: 353513 - RNA, 32 nt, Homo Sapiens
cggccgucggaccacggcgcggcggccaguuc

SEQ ID NO: 353514 - RNA, 30 nt, Homo Sapiens
aggcaaggcaggcgggucgucaaaguccua

SEQ ID NO: 353515 - RNA, 32 nt, Homo Sapiens
ucauuuuuucccuuuuagaauacauuaaaugg

SEQ ID NO: 353516 - RNA, 31 nt, Homo Sapiens
gggccgugugacacucucgugguauguaugg

SEQ ID NO: 353517 - RNA, 32 nt, Homo Sapiens
ugggucauggagacugcaguagucuuuacccu

SEQ ID NO: 353518 - RNA, 32 nt, Homo Sapiens
gaggaagggaaaacagaaagcagacaaagaaa

SEQ ID NO: 353519 - RNA, 32 nt, Homo Sapiens
aagaguaaaacuccaucucaaaaaauauauau

SEQ ID NO: 353520 - RNA, 32 nt, Homo Sapiens
uuaauauuuccucuguuuauuccuccucuccc

SEQ ID NO: 353521 - RNA, 32 nt, Homo Sapiens
gguggggacaggggcgggggcaggagcguggg

SEQ ID NO: 353522 - RNA, 32 nt, Homo Sapiens
gccccaauccuggccugcaucagggcaggacg

SEQ ID NO: 353523 - RNA, 32 nt, Homo Sapiens
cauuuccccucggcugccggcggcuccgacau

SEQ ID NO: 353524 - RNA, 32 nt, Homo Sapiens
ggauccucugauuugcagaauucacggaagcc

SEQ ID NO: 353525 - RNA, 32 nt, Homo Sapiens
accugcuccccacuccuucuccaagaaggggc

SEQ ID NO: 353526 - RNA, 32 nt, Homo Sapiens
uucugugugaagggacugagggugugguguca

SEQ ID NO: 353527 - RNA, 32 nt, Homo Sapiens
guccaccugccagguggaguguauguggcugu

SEQ ID NO: 353528 - RNA, 32 nt, Homo Sapiens
aagcacauguuuuuucaacuauaugcagaaau

SEQ ID NO: 353529 - RNA, 32 nt, Homo Sapiens
aauugagaaaacaaaacaaaaggaacaaucca

SEQ ID NO: 353530 - RNA, 32 nt, Homo Sapiens
uccugaccucaggugaucugcccgccucggcc

SEQ ID NO: 353531 - RNA, 32 nt, Homo Sapiens
gugcaggugacagaggcgaaggcagauggggc

SEQ ID NO: 353532 - RNA, 32 nt, Homo Sapiens
gccggcgguggcggcggcgagggcuggacucg

SEQ ID NO: 353533 - RNA, 32 nt, Homo Sapiens
caucagaaaauuuucauguuuuccuuuaaggu

SEQ ID NO: 353534 - RNA, 32 nt, Homo Sapiens
cgaggcuccgggagcccuugccugcggggguc

SEQ ID NO: 353535 - RNA, 32 nt, Homo Sapiens
gaagaccugcucuccuuccuuccuccccugcc

SEQ ID NO: 353536 - RNA, 32 nt, Homo Sapiens
auaaccaaacacacuuuacacuuuccuaguac

SEQ ID NO: 353537 - RNA, 32 nt, Homo Sapiens
auuauggacaacaugcaugaguagucaucaua

SEQ ID NO: 353538 - RNA, 32 nt, Homo Sapiens
cgccggcggggagcugcucggcggcggacagu

SEQ ID NO: 353539 - RNA, 32 nt, Homo Sapiens
gcuagacagccugguccgaaagcauugccagc

SEQ ID NO: 353540 - RNA, 32 nt, Homo Sapiens
gguuugcaaaaauucuacuuuaaaacaauuuu

SEQ ID NO: 353541 - RNA, 32 nt, Homo Sapiens
ugggagcccuggaguucuggcgggagggaagc

SEQ ID NO: 353542 - RNA, 32 nt, Homo Sapiens
gagguaggccgcgggaggcgggagccggcccc

SEQ ID NO: 353543 - RNA, 32 nt, Homo Sapiens
ggggccgagggggugcuuggugccaaacugaa

SEQ ID NO: 353544 - RNA, 32 nt, Homo Sapiens
uugucugugucacaauuuuguacugaggaacc

SEQ ID NO: 353545 - RNA, 32 nt, Homo Sapiens
gcuccgcccaccccacgccgggaacccacgcg

SEQ ID NO: 353546 - RNA, 32 nt, Homo Sapiens
acuaaaaaaacauuuuaaauguuaaaauuaua

SEQ ID NO: 353547 - RNA, 32 nt, Homo Sapiens
uucuucaacaguaugagcaaguuuauagacau

SEQ ID NO: 353548 - RNA, 32 nt, Homo Sapiens
acauguccuccagcugacugggacucaggcug

SEQ ID NO: 353549 - RNA, 32 nt, Homo Sapiens
caauguccugcaugcauaaugaaccguuuaca

SEQ ID NO: 353550 - RNA, 32 nt, Homo Sapiens
uuccucuccuggguugggggcuggggcccuga

SEQ ID NO: 353551 - RNA, 32 nt, Homo Sapiens
uaaauacuauccacaaaaaaggggaacaggga

SEQ ID NO: 353552 - RNA, 32 nt, Homo Sapiens
gucuuaaaugccgguauuugcugcugaagaca

SEQ ID NO: 353553 - RNA, 32 nt, Homo Sapiens
aggaagcucaugaauggaaccaaaaaagagca

SEQ ID NO: 353554 - RNA, 27 nt, Homo Sapiens
uucaaauaaaguuauuucuccuggucu

SEQ ID NO: 353555 - RNA, 32 nt, Homo Sapiens
gggccgagccgacgagauguucuugcugccuc

SEQ ID NO: 353556 - RNA, 32 nt, Homo Sapiens
gcauaucaucuuucccaccuaaaaaugucuga

SEQ ID NO: 353557 - RNA, 32 nt, Homo Sapiens
gccuagggaaaggggugggcgggcucuggugu

SEQ ID NO: 353558 - RNA, 32 nt, Homo Sapiens
cguuggcggagcagagcggaggcgcagccggg

SEQ ID NO: 353559 - RNA, 32 nt, Homo Sapiens
uuuuaguggagacgggguuuugccauauuggc

SEQ ID NO: 353560 - RNA, 32 nt, Homo Sapiens
uccgacccauccccaagccucagagucugaau

SEQ ID NO: 353561 - RNA, 32 nt, Homo Sapiens
cagcccuuuccgagggauggcgcccuacggcc

SEQ ID NO: 353562 - RNA, 32 nt, Homo Sapiens
uagugugaagacacccccagguccuggaacac

SEQ ID NO: 353563 - RNA, 32 nt, Homo Sapiens
uacauaaaaauauaguuuggaauucuuugcuc

SEQ ID NO: 353564 - RNA, 32 nt, Homo Sapiens
ggcgcggccgcggaaccugaggcggucugggg

SEQ ID NO: 353565 - RNA, 32 nt, Homo Sapiens
uacaagacgaagggcuucucucgucugaauuu

SEQ ID NO: 353566 - RNA, 32 nt, Homo Sapiens
agaggggcccugccccuccgccugcagccgug

SEQ ID NO: 353567 - RNA, 32 nt, Homo Sapiens
caacauaccuggggcgagaggcagcccauguu

SEQ ID NO: 353568 - RNA, 32 nt, Homo Sapiens
aaggggcgggacgcgccgcggucgggaugacg

SEQ ID NO: 353569 - RNA, 32 nt, Homo Sapiens
gcgcgugcuuugcagcagaugugugaccuggc

SEQ ID NO: 353570 - RNA, 32 nt, Homo Sapiens
gcugguauguuggaaugugucaggcacugugc

SEQ ID NO: 353571 - RNA, 32 nt, Homo Sapiens
aucaguuguaaaaguguguuggcaauguccga

SEQ ID NO: 353572 - RNA, 32 nt, Homo Sapiens
cuccagagacuugcccaagggcccaucaccac

SEQ ID NO: 353573 - RNA, 30 nt, Homo Sapiens
cgaagggcgcccgggagcccggucucucug

SEQ ID NO: 353574 - RNA, 32 nt, Homo Sapiens
caggucuaaaauugaaacgugauuuuaaauau

SEQ ID NO: 353575 - RNA, 32 nt, Homo Sapiens
uagcuucugccagcugcuuuugccaguagauu

SEQ ID NO: 353576 - RNA, 32 nt, Homo Sapiens
aggaugggccgcgccgccguggcccgcugugg

SEQ ID NO: 353577 - RNA, 32 nt, Homo Sapiens
cagcucuuccugacuuucccagcccuuugguu

SEQ ID NO: 353578 - RNA, 32 nt, Homo Sapiens
cuggugacucgcggcggcggcggcggacggcc

SEQ ID NO: 353579 - RNA, 32 nt, Homo Sapiens
caacaccaggacuuaagacaaauuggggcuga

SEQ ID NO: 353580 - RNA, 32 nt, Homo Sapiens
aaggugccauuggcagacaggcacaugggagg

SEQ ID NO: 353581 - RNA, 32 nt, Homo Sapiens
ugacuuuguuaguaucauguugaaauagcuug

SEQ ID NO: 353582 - RNA, 30 nt, Homo Sapiens
ggccugcuccuggucaucgcccugggcugc

SEQ ID NO: 353583 - RNA, 28 nt, Homo Sapiens
accauggcuguggcccagcagcugcggg

SEQ ID NO: 353584 - RNA, 32 nt, Homo Sapiens
gcaaugacaaugagaucgucaguauuauuuuc

SEQ ID NO: 353585 - RNA, 32 nt, Homo Sapiens
aaguguuggcaucgcccggcgcccgggacagu

SEQ ID NO: 353586 - RNA, 32 nt, Homo Sapiens
ugucaagcuguuugcuauaguuuccaagguau

SEQ ID NO: 353587 - RNA, 32 nt, Homo Sapiens
cucccuaccgcuccaagcccagcccucagcca

SEQ ID NO: 353588 - RNA, 32 nt, Homo Sapiens
aauaccagaaacugaggcgaggcucccagcag

SEQ ID NO: 353589 - RNA, 32 nt, Homo Sapiens
uaauuucauuugcaugaaauccugaggggugc

SEQ ID NO: 353590 - RNA, 32 nt, Homo Sapiens
gcgccccgcucccggggacugggagaacagga

SEQ ID NO: 353591 - RNA, 32 nt, Homo Sapiens
cuguuuggccccacccgagcccugggaaggug

SEQ ID NO: 353592 - RNA, 32 nt, Homo Sapiens
ugauggcuuccugguccccuugagucaucacc

SEQ ID NO: 353593 - RNA, 32 nt, Homo Sapiens
cauucccgccccaccuugugguuggauggaau

SEQ ID NO: 353594 - RNA, 32 nt, Homo Sapiens
uucuguguguuaaagaaauucaaucuacucau

SEQ ID NO: 353595 - RNA, 32 nt, Homo Sapiens
gccuggccgggcguagacgcgguggcagagcc

SEQ ID NO: 353596 - RNA, 32 nt, Homo Sapiens
ggccccacuccacgacaaccacuuccccaucu

SEQ ID NO: 353597 - RNA, 32 nt, Homo Sapiens
ccucucaccccgcugccucuagguucugggaa

SEQ ID NO: 353598 - RNA, 32 nt, Homo Sapiens
aaccaauaaccaaugccauauaaauggaaaag

SEQ ID NO: 353599 - RNA, 32 nt, Homo Sapiens
agcugggcagcuaugagaagugccaggaccuu

SEQ ID NO: 353600 - RNA, 32 nt, Homo Sapiens
aaguuuauuauguaugaguguaucaagaguua

SEQ ID NO: 353601 - RNA, 32 nt, Homo Sapiens
gugugaugugugugagcacacacacacaguaa

SEQ ID NO: 353602 - RNA, 32 nt, Homo Sapiens
ggcucggaccccggcgcccagcccggagccgu

SEQ ID NO: 353603 - RNA, 32 nt, Homo Sapiens
uugugccucuuuucucuccuuaauaagauaaa

SEQ ID NO: 353604 - RNA, 32 nt, Homo Sapiens
uuucugcuucaguugcugucagggcagcaguu

SEQ ID NO: 353605 - RNA, 32 nt, Homo Sapiens
ccaauagacaccuucccgacacuuuuuuaaug

SEQ ID NO: 353606 - RNA, 32 nt, Homo Sapiens
gggauuacaucauguauuuugccucauguauu

SEQ ID NO: 353607 - RNA, 32 nt, Homo Sapiens
aggaacaaaacaaaaagaauggaacauugaag

SEQ ID NO: 353608 - RNA, 32 nt, Homo Sapiens
uuuguguuuagcucauccaaagguguuacccu

SEQ ID NO: 353609 - RNA, 32 nt, Homo Sapiens
gcuagaaacaccaaggucuuugaaaauguuua

SEQ ID NO: 353610 - RNA, 32 nt, Homo Sapiens
gaagaacacacgcuuugaggguucucagaggc

SEQ ID NO: 353611 - RNA, 32 nt, Homo Sapiens
ugcucauuucacacucuucagaagacauuuca

SEQ ID NO: 353612 - RNA, 32 nt, Homo Sapiens
aaagaaaaaaaauaaacucaagaaugauuuuu

SEQ ID NO: 353613 - RNA, 32 nt, Homo Sapiens
ggauauuguaacuggccacaagaaugaaaugg

SEQ ID NO: 353614 - RNA, 32 nt, Homo Sapiens
ccauaaaaccagcagaacugcccucagggugg

SEQ ID NO: 353615 - RNA, 32 nt, Homo Sapiens
agaacuugcgucaaaaucaggacugaaauaca

SEQ ID NO: 353616 - RNA, 32 nt, Homo Sapiens
gugcauaggcgaugaaguggagaugucagaac

SEQ ID NO: 353617 - RNA, 32 nt, Homo Sapiens
uuuuauaucccauuuugguaauuauucauaca

SEQ ID NO: 353618 - RNA, 32 nt, Homo Sapiens
acucagccgcggcugcgggacccgggcaccgg

SEQ ID NO: 353619 - RNA, 32 nt, Homo Sapiens
gcacacaaacuuaucaauaaagccaucuccuu

SEQ ID NO: 353620 - RNA, 32 nt, Homo Sapiens
uuuuccaguugcuguggaccaaugcaucucuu

SEQ ID NO: 353621 - RNA, 29 nt, Homo Sapiens
ugaaaaguuugugagugaagaaugcugag

SEQ ID NO: 353622 - RNA, 30 nt, Homo Sapiens
caaaauguguauuugccccaucuuagguaa

SEQ ID NO: 353623 - RNA, 32 nt, Homo Sapiens
augcuccaugggugggggucgggaguggugag

SEQ ID NO: 353624 - RNA, 32 nt, Homo Sapiens
aacgccggccccaagcaccccgggucuuuaca

SEQ ID NO: 353625 - RNA, 32 nt, Homo Sapiens
acuggacugaagaucauugucugguagccuug

SEQ ID NO: 353626 - RNA, 32 nt, Homo Sapiens
uuggaagaaaucaucucucaucuaccaugauu

SEQ ID NO: 353627 - RNA, 32 nt, Homo Sapiens
cuuugaugcuauaaaauacaaacaacuuugaa

SEQ ID NO: 353628 - RNA, 28 nt, Homo Sapiens
gauuagggauuggugaugacucccaacg

SEQ ID NO: 353629 - RNA, 32 nt, Homo Sapiens
acccucuggugccucuacucaagugagaaguu

SEQ ID NO: 353630 - RNA, 32 nt, Homo Sapiens
cuuuccccaucccugccuccugccccugacgc

SEQ ID NO: 353631 - RNA, 32 nt, Homo Sapiens
cagccuuugucaauaaaccugucaugugcgga

SEQ ID NO: 353632 - RNA, 32 nt, Homo Sapiens
agaaggugcaagggggcaaguacccccgcucc

SEQ ID NO: 353633 - RNA, 32 nt, Homo Sapiens
gaggccggccggugccagcaccuuucggcuuc

SEQ ID NO: 353634 - RNA, 25 nt, Homo Sapiens
augccgagcagcucggacacggcgc

SEQ ID NO: 353635 - RNA, 32 nt, Homo Sapiens
ucuccaugcucauaugcaaugucuacaucaag

SEQ ID NO: 353636 - RNA, 32 nt, Homo Sapiens
ccagagcgccgccgccgccgcugcugcagcag

SEQ ID NO: 353637 - RNA, 32 nt, Homo Sapiens
ccaggcgcuuggcaagacaucagacacaccca

SEQ ID NO: 353638 - RNA, 32 nt, Homo Sapiens
gcuuuuacaauuuuuucggcuaguauauuaag

SEQ ID NO: 353639 - RNA, 32 nt, Homo Sapiens
ggaugcaguauuacugcagcuaaguggaguau

SEQ ID NO: 353640 - RNA, 32 nt, Homo Sapiens
cgggaggcaaugagcugcuggagcacaggcau

SEQ ID NO: 353641 - RNA, 30 nt, Homo Sapiens
ggcacccaugcucuggcucuugucucucug

SEQ ID NO: 353642 - RNA, 32 nt, Homo Sapiens
aaccaguucauaaggggaauuuuuuaaaaaac

SEQ ID NO: 353643 - RNA, 32 nt, Homo Sapiens
uuuuucggagacggaguuucacucuugcugcc

SEQ ID NO: 353644 - RNA, 32 nt, Homo Sapiens
caguggagguaaaaauauaauuucauacauug

SEQ ID NO: 353645 - RNA, 32 nt, Homo Sapiens
gagggagggcuccagacacauguccaagaagc

SEQ ID NO: 353646 - RNA, 32 nt, Homo Sapiens
guugccuccgcccacaccuuugccccucccca

SEQ ID NO: 353647 - RNA, 32 nt, Homo Sapiens
aagccaaguuaaauuucauauuaaagcaaguu

SEQ ID NO: 353648 - RNA, 32 nt, Homo Sapiens
aaugcagaacuaagauuuuugacucuaaagag

SEQ ID NO: 353649 - RNA, 31 nt, Homo Sapiens
cagugggagccccacggaccggaccccauuu

SEQ ID NO: 353650 - RNA, 32 nt, Homo Sapiens
cguuuuugguuuagauuauggaugcaugaagu

SEQ ID NO: 353651 - RNA, 32 nt, Homo Sapiens
ggauagcuccacuagagcugccugccaaagac

SEQ ID NO: 353652 - RNA, 29 nt, Homo Sapiens
ccucuaaggacuuuccugcuagauauuuc

SEQ ID NO: 353653 - RNA, 32 nt, Homo Sapiens
gagaaauuguugacauaaaauaaagaauugaa

SEQ ID NO: 353654 - RNA, 30 nt, Homo Sapiens
caggcgugugguggacacgcagcugcaggc

SEQ ID NO: 353655 - RNA, 32 nt, Homo Sapiens
uccaguugugagccaagauuguaaccagagag

SEQ ID NO: 353656 - RNA, 32 nt, Homo Sapiens
aauaauaaugauaacuaucuuuauugagcauc

SEQ ID NO: 353657 - RNA, 32 nt, Homo Sapiens
cugugcaaucaucaccaccuuccaucaucaua

SEQ ID NO: 353658 - RNA, 32 nt, Homo Sapiens
agcccacuuugccuacuguuagguuccugggg

SEQ ID NO: 353659 - RNA, 32 nt, Homo Sapiens
ccaccgcagaucuguagccagucagaggagga

SEQ ID NO: 353660 - RNA, 32 nt, Homo Sapiens
aaccauuccuggaugccugcaaaguaaggaau

SEQ ID NO: 353661 - RNA, 32 nt, Homo Sapiens
acuuuagggagaaaacuuuguauuuuuaaaac

SEQ ID NO: 353662 - RNA, 32 nt, Homo Sapiens
uucagcaagugcacguuaacugcuuuugaaau

SEQ ID NO: 353663 - RNA, 27 nt, Homo Sapiens
ggaugguggagagcgccggccgugcag

SEQ ID NO: 353664 - RNA, 32 nt, Homo Sapiens
ccaugaccccuacaaauuuacauuuuucuaug

SEQ ID NO: 353665 - RNA, 32 nt, Homo Sapiens
cucguggggaaaaggcagggaggggguggugu

SEQ ID NO: 353666 - RNA, 32 nt, Homo Sapiens
uucugcuguggccuuaguuuauguaaccagca

SEQ ID NO: 353667 - RNA, 32 nt, Homo Sapiens
cucaccuuacugcaaccaccacuuccuggguu

SEQ ID NO: 353668 - RNA, 32 nt, Homo Sapiens
uauuacagaagcuuuacccaggacauuuuauu

SEQ ID NO: 353669 - RNA, 32 nt, Homo Sapiens
caaagcagcuaaaaaugacacagcuuauuuac

SEQ ID NO: 353670 - RNA, 30 nt, Homo Sapiens
gggauggggaagcgcgcggccuuggagccg

SEQ ID NO: 353671 - RNA, 32 nt, Homo Sapiens
agugaccaaguggagacaguaaguuagauccc

SEQ ID NO: 353672 - RNA, 32 nt, Homo Sapiens
gcauuaggcagguaucucuuaacuguaagaca

SEQ ID NO: 353673 - RNA, 32 nt, Homo Sapiens
uugauuucaaggaagugguuaaucauuagucc

SEQ ID NO: 353674 - RNA, 32 nt, Homo Sapiens
agggcuuuaaacaugauuaucuugauuuccca

SEQ ID NO: 353675 - RNA, 32 nt, Homo Sapiens
agaggcggggguggagcagggagcugcgccuu

SEQ ID NO: 353676 - RNA, 32 nt, Homo Sapiens
gacucgcgcgccccuccccgcgcgcccaccca

SEQ ID NO: 353677 - RNA, 32 nt, Homo Sapiens
aaaauuacagaauaaacuugugacuggucuua

SEQ ID NO: 353678 - RNA, 32 nt, Homo Sapiens
uaguguagcuuaucuuaaacauuuuauaaaac

SEQ ID NO: 353679 - RNA, 32 nt, Homo Sapiens
auguauuauuuucaguauuuauugaauucugu

SEQ ID NO: 353680 - RNA, 32 nt, Homo Sapiens
uccauuuucuaaaacuuucauguaacuuuuau

SEQ ID NO: 353681 - RNA, 32 nt, Homo Sapiens
cggagauaucccaggaaaauuaaggcuucucu

SEQ ID NO: 353682 - RNA, 32 nt, Homo Sapiens
cgcugucgcacagccucuggggugcuuggucu

SEQ ID NO: 353683 - RNA, 32 nt, Homo Sapiens
agcacagccuacugucuggagaagagaaagaa

SEQ ID NO: 353684 - RNA, 32 nt, Homo Sapiens
acuguaggcgguggagacagggcuggggguag

SEQ ID NO: 353685 - RNA, 32 nt, Homo Sapiens
cugcauccggugcaaguuuuagcuggcagagg

SEQ ID NO: 353686 - RNA, 32 nt, Homo Sapiens
aagugacugcgcggcccgcgcccggggcggug

SEQ ID NO: 353687 - RNA, 32 nt, Homo Sapiens
ugggaggaaauucaaaggaaccaagagaaauu

SEQ ID NO: 353688 - RNA, 32 nt, Homo Sapiens
ggccaggugugguggcucacgccugugauccc

SEQ ID NO: 353689 - RNA, 32 nt, Homo Sapiens
cuacaguaaccaaaacagcaugauacuggcau

SEQ ID NO: 353690 - RNA, 32 nt, Homo Sapiens
uccccucaaggacaaagucuccagcccacguu

SEQ ID NO: 353691 - RNA, 32 nt, Homo Sapiens
guaggaaaaagaaaaauaaaagaauauuacca

SEQ ID NO: 353692 - RNA, 32 nt, Homo Sapiens
caggccuuguggcugcacacacaaucccacac

SEQ ID NO: 353693 - RNA, 32 nt, Homo Sapiens
gacguuugccaauugcagaacuucuucagcua

SEQ ID NO: 353694 - RNA, 32 nt, Homo Sapiens
ccccaggccagucccaauccccggcccguccg

SEQ ID NO: 353695 - RNA, 32 nt, Homo Sapiens
auucuacaguugugauaauagcauuuuuguaa

SEQ ID NO: 353696 - RNA, 32 nt, Homo Sapiens
agccacuucuauaacucuuacucugugauucu

SEQ ID NO: 353697 - RNA, 32 nt, Homo Sapiens
aaauauacuccuaguaauuuaagauuuuguuu

SEQ ID NO: 353698 - RNA, 32 nt, Homo Sapiens
gcggcgcugucauggagcuagcgcaggaagcg

SEQ ID NO: 353699 - RNA, 32 nt, Homo Sapiens
ucaauguuuuuuuuuucuuuucaauucuagcu

SEQ ID NO: 353700 - RNA, 32 nt, Homo Sapiens
ugcagggcgggaaggggagugguggcggcugc

SEQ ID NO: 353701 - RNA, 32 nt, Homo Sapiens
guuuucaaaaauuuuaucaaaacaggucacug

SEQ ID NO: 353702 - RNA, 32 nt, Homo Sapiens
cugcagcaguggcagcagcagucaaaacaaac

SEQ ID NO: 353703 - RNA, 32 nt, Homo Sapiens
ggagugauucugaaucaaggugauugugauua

SEQ ID NO: 353704 - RNA, 32 nt, Homo Sapiens
uccuacccauccccaacauucagcucagcugc

SEQ ID NO: 353705 - RNA, 32 nt, Homo Sapiens
guguucuccucuguggaaaugaaggcagcaag

SEQ ID NO: 353706 - RNA, 32 nt, Homo Sapiens
aguggggaaucuugcaugcugcugccacuccu

SEQ ID NO: 353707 - RNA, 32 nt, Homo Sapiens
cauacuuagaacauggcaaggauuucaauuga

SEQ ID NO: 353708 - RNA, 32 nt, Homo Sapiens
ugauccuugagcuuuucugugcuucucuguuc

SEQ ID NO: 353709 - RNA, 32 nt, Homo Sapiens
ggaugcuacugcucguggccuacgggcagagg

SEQ ID NO: 353710 - RNA, 32 nt, Homo Sapiens
uggauuaaauaguuuuaaaauacauauuugaa

SEQ ID NO: 353711 - RNA, 32 nt, Homo Sapiens
cuagggucuuugagucagcuuuaugaaaaaau

SEQ ID NO: 353712 - RNA, 32 nt, Homo Sapiens
acgccgcaacgcgccggcccaacugcaggaag

SEQ ID NO: 353713 - RNA, 32 nt, Homo Sapiens
gccuggugaaaaugguguuuguuguaacaucu

SEQ ID NO: 353714 - RNA, 32 nt, Homo Sapiens
accuauuuaauuguggaaaaugauuaugaaga

SEQ ID NO: 353715 - RNA, 32 nt, Homo Sapiens
acgaugucaggaguucgagaccagccuggcca

SEQ ID NO: 353716 - RNA, 32 nt, Homo Sapiens
ugucugcucagguguagcccgcgugacugagu

SEQ ID NO: 353717 - RNA, 30 nt, Homo Sapiens
gcuauugucugugcuuuugaagaguguuaa

SEQ ID NO: 353718 - RNA, 32 nt, Homo Sapiens
aauaaacguuuuaaguuuuuacuugaaaaaaa

SEQ ID NO: 353719 - RNA, 32 nt, Homo Sapiens
gggguguauuagcagccaaauaagcauaucug

SEQ ID NO: 353720 - RNA, 32 nt, Homo Sapiens
aaaacagugaaggagacugugccugggaaagc

SEQ ID NO: 353721 - RNA, 32 nt, Homo Sapiens
gauaccucaacacacccuuaaaucuggaagca

SEQ ID NO: 353722 - RNA, 32 nt, Homo Sapiens
agaguuucacagaaacaaagcuuugucacaca

SEQ ID NO: 353723 - RNA, 32 nt, Homo Sapiens
caagaaugaagauuucagacuccaagaucccu

SEQ ID NO: 353724 - RNA, 32 nt, Homo Sapiens
ggcagucagcgaaggcaaauggucugacugcu

SEQ ID NO: 353725 - RNA, 32 nt, Homo Sapiens
acagacagguugaacuuggcuucugagugcau

SEQ ID NO: 353726 - RNA, 32 nt, Homo Sapiens
cuugucuucuaaaaaauacuuuuuaauaaaua

SEQ ID NO: 353727 - RNA, 32 nt, Homo Sapiens
uggcauugacauuauugguaaucaacuggcuu

SEQ ID NO: 353728 - RNA, 32 nt, Homo Sapiens
uggcguccacaucacaccugugacggaagcac

SEQ ID NO: 353729 - RNA, 29 nt, Homo Sapiens
cauuugucauaugauggcacuugacuaca

SEQ ID NO: 353730 - RNA, 32 nt, Homo Sapiens
ccggacccaagccgggaucaaggcucaggaag

SEQ ID NO: 353731 - RNA, 32 nt, Homo Sapiens
cuaaaagugcaaacacaaagggaacugcgugg

SEQ ID NO: 353732 - RNA, 32 nt, Homo Sapiens
uguuucuuggggugacugucauugguaauacg

SEQ ID NO: 353733 - RNA, 32 nt, Homo Sapiens
cuucccuuccucaggcucccccggcccacccu

SEQ ID NO: 353734 - RNA, 32 nt, Homo Sapiens
ggagggcaccucagcaaccucugaguguggac

SEQ ID NO: 353735 - RNA, 32 nt, Homo Sapiens
caaauaucaaggaugagaauggcacuggcugu

SEQ ID NO: 353736 - RNA, 32 nt, Homo Sapiens
ggaaguucccuggucugagguuguuuaaaacu

SEQ ID NO: 353737 - RNA, 32 nt, Homo Sapiens
cccggaaaggucgggaggaggaggggcaaagg

SEQ ID NO: 353738 - RNA, 32 nt, Homo Sapiens
caguuuguucuguaaugccuuuuacauuugga

SEQ ID NO: 353739 - RNA, 32 nt, Homo Sapiens
agacuugcuaaauggcacaugcacuacaagag

SEQ ID NO: 353740 - RNA, 32 nt, Homo Sapiens
ugugagguccaguggccgcccaggcgcgacca

SEQ ID NO: 353741 - RNA, 32 nt, Homo Sapiens
gcagcugcgcgaggagugccgccgccgcucgc

SEQ ID NO: 353742 - RNA, 32 nt, Homo Sapiens
cuccugcugcucuggggcccagcccuccccgg

SEQ ID NO: 353743 - RNA, 32 nt, Homo Sapiens
guggagcaccauguuugagggcgaagggcaga

SEQ ID NO: 353744 - RNA, 32 nt, Homo Sapiens
cuaaaugucucauguagauauuccuuguuagu

SEQ ID NO: 353745 - RNA, 32 nt, Homo Sapiens
ccacccggguucuccuucauccccaacgcucc

SEQ ID NO: 353746 - RNA, 32 nt, Homo Sapiens
uguugccguggcaacuccacugggaugcucug

SEQ ID NO: 353747 - RNA, 32 nt, Homo Sapiens
guggcacuugccugggucacacacggaggcau

SEQ ID NO: 353748 - RNA, 32 nt, Homo Sapiens
aagauuuccucuguuggaucauuugaacccac

SEQ ID NO: 353749 - RNA, 32 nt, Homo Sapiens
auuauugcauuaccaagaaacaguagccaaag

SEQ ID NO: 353750 - RNA, 32 nt, Homo Sapiens
cugacucacucccagcucccaauccugucuca

SEQ ID NO: 353751 - RNA, 32 nt, Homo Sapiens
cugccgggacucggcgcgggacugcauggagg

SEQ ID NO: 353752 - RNA, 32 nt, Homo Sapiens
ucugaacacuuccaaagauuaaucaaacauaa

SEQ ID NO: 353753 - RNA, 32 nt, Homo Sapiens
gcagauuccuuccccucccguccccucacgcu

SEQ ID NO: 353754 - RNA, 27 nt, Homo Sapiens
agcgccguguucuucagccucagcugg

SEQ ID NO: 353755 - RNA, 32 nt, Homo Sapiens
acccgagcaccuucucuucacucagccaacug

SEQ ID NO: 353756 - RNA, 32 nt, Homo Sapiens
aagggaagaaacaaaguugaaccguuucuuua

SEQ ID NO: 353757 - RNA, 31 nt, Homo Sapiens
ccugcagagccccaggcagucggcucagcgc

SEQ ID NO: 353758 - RNA, 32 nt, Homo Sapiens
uuuuuaaaacuugagauuuuuaucauaccucc

SEQ ID NO: 353759 - RNA, 32 nt, Homo Sapiens
gagccugugugcucuguagucaugcagauccc

SEQ ID NO: 353760 - RNA, 32 nt, Homo Sapiens
auguugcuuaggaugugugcauguguguaagu

SEQ ID NO: 353761 - RNA, 32 nt, Homo Sapiens
uuguagagacgggguugggggaggcggggguu

SEQ ID NO: 353762 - RNA, 32 nt, Homo Sapiens
gcccgcccgagccccagcagcagugccagccu

SEQ ID NO: 353763 - RNA, 32 nt, Homo Sapiens
auuaaaaaacaaaaaucaccaauauccaagac

SEQ ID NO: 353764 - RNA, 32 nt, Homo Sapiens
acuuagaaauaaaaccacacaucuacaaccau

SEQ ID NO: 353765 - RNA, 32 nt, Homo Sapiens
gcagccacuuucugccagcaucugcagccagc

SEQ ID NO: 353766 - RNA, 32 nt, Homo Sapiens
cgggaacugagcagacccggcgcggagccacg

SEQ ID NO: 353767 - RNA, 32 nt, Homo Sapiens
aaagagccuggcagaagcucugugguuggagc

SEQ ID NO: 353768 - RNA, 32 nt, Homo Sapiens
acuccagccuggaugacagagaaggucauggg

SEQ ID NO: 353769 - RNA, 32 nt, Homo Sapiens
cccggcccggcggugcgaugagcuucuucggc

SEQ ID NO: 353770 - RNA, 32 nt, Homo Sapiens
ugaccgucucugucuccuuccuccccgggacc

SEQ ID NO: 353771 - RNA, 32 nt, Homo Sapiens
aaugaccuugauuuuuggguguguauugcaga

SEQ ID NO: 353772 - RNA, 32 nt, Homo Sapiens
ggcaagggaacaaaacuggauagagaaugagu

SEQ ID NO: 353773 - RNA, 32 nt, Homo Sapiens
aacaauacuuccugggguuuuggugugcagag

SEQ ID NO: 353774 - RNA, 32 nt, Homo Sapiens
cgagggcgcccaggccgcgccauggugaaggu

SEQ ID NO: 353775 - RNA, 32 nt, Homo Sapiens
cccaguuccgccuccaugagagguuuggggau

SEQ ID NO: 353776 - RNA, 32 nt, Homo Sapiens
uucuacauaagacaugguugggacaucagaua

SEQ ID NO: 353777 - RNA, 32 nt, Homo Sapiens
ugagccaggugugacaagccaacucugucacc

SEQ ID NO: 353778 - RNA, 32 nt, Homo Sapiens
cauggcucagacuugauguggaucgugaucau

SEQ ID NO: 353779 - RNA, 32 nt, Homo Sapiens
ccugcagagucuuuguugcuaucaucaucauc

SEQ ID NO: 353780 - RNA, 32 nt, Homo Sapiens
ggagcagaaagauguguuuuugcaaagaagaa

SEQ ID NO: 353781 - RNA, 32 nt, Homo Sapiens
ccacucaaaaucaauuggauuaauuuuaaugg

SEQ ID NO: 353782 - RNA, 32 nt, Homo Sapiens
uuuggauugcaaacaggauaaauuaaauguuc

SEQ ID NO: 353783 - RNA, 32 nt, Homo Sapiens
aagaacagaacaaaaugaacaagguagaucag

SEQ ID NO: 353784 - RNA, 32 nt, Homo Sapiens
uuaauguaacugugugguuugccuuugucccc

SEQ ID NO: 353785 - RNA, 32 nt, Homo Sapiens
uaaauaaaaaaguuaaagguaagaaaaugacu

SEQ ID NO: 353786 - RNA, 31 nt, Homo Sapiens
uugcugcugccggcgguuccagccugcaaac

SEQ ID NO: 353787 - RNA, 32 nt, Homo Sapiens
gaaugaugaagaauaaaagaugcugaaagaug

SEQ ID NO: 353788 - RNA, 32 nt, Homo Sapiens
ggcguugacuccgccgcacgcugcagccgcgg

SEQ ID NO: 353789 - RNA, 32 nt, Homo Sapiens
uuuguugcuguaauucuugauuaagugaccuu

SEQ ID NO: 353790 - RNA, 32 nt, Homo Sapiens
gcaaaccauacuucuuuuuuuuuccucugaug

SEQ ID NO: 353791 - RNA, 32 nt, Homo Sapiens
ggaaauggucuuucuuuuuuguaagauaugug

SEQ ID NO: 353792 - RNA, 32 nt, Homo Sapiens
acuucaaaaauuaaauucaacuucuuauaaag

SEQ ID NO: 353793 - RNA, 32 nt, Homo Sapiens
uacuuuuacacgcauguguuaagcaagcagca

SEQ ID NO: 353794 - RNA, 32 nt, Homo Sapiens
ggugggcuggggcggaaguggaggcggaggga

SEQ ID NO: 353795 - RNA, 32 nt, Homo Sapiens
ccuugacucggaaauguccggucgugguaagc

SEQ ID NO: 353796 - RNA, 32 nt, Homo Sapiens
cugcccucucuggaguuugccucccccagccc

SEQ ID NO: 353797 - RNA, 32 nt, Homo Sapiens
ggggccccaucccuacccuacucccuggccgc

SEQ ID NO: 353798 - RNA, 32 nt, Homo Sapiens
accccccgcccgggccgcacagagggaugccc

SEQ ID NO: 353799 - RNA, 32 nt, Homo Sapiens
guugcuggcccgccucucuggaccuugguuuu

SEQ ID NO: 353800 - RNA, 32 nt, Homo Sapiens
ggcccacggggcccgcgccugccucccuuccc

SEQ ID NO: 353801 - RNA, 32 nt, Homo Sapiens
gaaauugaacaaaggucaguaaugguuuuugg

SEQ ID NO: 353802 - RNA, 32 nt, Homo Sapiens
gucaagcuuucaucagccccagcccccacacu

SEQ ID NO: 353803 - RNA, 32 nt, Homo Sapiens
ugggcgcgagagcggcgcugggggcggguggg

SEQ ID NO: 353804 - RNA, 32 nt, Homo Sapiens
gggagagacagagggagagugugcauacagca

SEQ ID NO: 353805 - RNA, 32 nt, Homo Sapiens
gaggguucugcgaggagacgggaccagugaga

SEQ ID NO: 353806 - RNA, 32 nt, Homo Sapiens
ggagcucagaccacaaacaacaacaacaaucc

SEQ ID NO: 353807 - RNA, 32 nt, Homo Sapiens
uggcuccccaacaugcacggcaggagcggcgg

SEQ ID NO: 353808 - RNA, 32 nt, Homo Sapiens
cugcgucggagguggggcuguguugggcccau

SEQ ID NO: 353809 - RNA, 32 nt, Homo Sapiens
caggugcuggagccaccccggcauggggcccu

SEQ ID NO: 353810 - RNA, 32 nt, Homo Sapiens
cccacaaugaauguaacuauuuucuaaacacu

SEQ ID NO: 353811 - RNA, 32 nt, Homo Sapiens
guugacaccaaaacacagcuggauuccaucag

SEQ ID NO: 353812 - RNA, 32 nt, Homo Sapiens
gggaggccugggcggcagagccagugguacag

SEQ ID NO: 353813 - RNA, 32 nt, Homo Sapiens
ccauaaaaggauggaaacuuuuagaugacauu

SEQ ID NO: 353814 - RNA, 32 nt, Homo Sapiens
agcuagaaguccugucccacucuccuggccug

SEQ ID NO: 353815 - RNA, 32 nt, Homo Sapiens
ggacgggguggcuggccgggcugggggcuccu

SEQ ID NO: 353816 - RNA, 32 nt, Homo Sapiens
ugcauugcacgcugccaucgacgccccugacu

SEQ ID NO: 353817 - RNA, 32 nt, Homo Sapiens
cuccgcguggccucucaccucccccaggauag

SEQ ID NO: 353818 - RNA, 32 nt, Homo Sapiens
ugccuagugcaacugggaaacugauuguuuuc

SEQ ID NO: 353819 - RNA, 32 nt, Homo Sapiens
caagugcgguggugguggcggcggcggcgggg

SEQ ID NO: 353820 - RNA, 32 nt, Homo Sapiens
augcuuucucagauguucugaauauagaauau

SEQ ID NO: 353821 - RNA, 32 nt, Homo Sapiens
gaguccccggcaccccagguccgcgccauggg

SEQ ID NO: 353822 - RNA, 31 nt, Homo Sapiens
aauggccuucagagaaaguccccuuagugcu

SEQ ID NO: 353823 - RNA, 32 nt, Homo Sapiens
guaacuguuucauagcaaacuucaggacuuug

SEQ ID NO: 353824 - RNA, 32 nt, Homo Sapiens
agaagagaaaauaaguaaucauucgcugggac

SEQ ID NO: 353825 - RNA, 32 nt, Homo Sapiens
uauguaagaauuuuuaaacauaaaaguguuug

SEQ ID NO: 353826 - RNA, 32 nt, Homo Sapiens
uucacgccauucuccugccccagccucccaag

SEQ ID NO: 353827 - RNA, 32 nt, Homo Sapiens
gagucgggggccugggaguucauucuggacca

SEQ ID NO: 353828 - RNA, 32 nt, Homo Sapiens
gacgcguagagccgcuuugcgcgugcgcauca

SEQ ID NO: 353829 - RNA, 32 nt, Homo Sapiens
aaaucugaauuuaugacuuuucuaaucucucu

SEQ ID NO: 353830 - RNA, 30 nt, Homo Sapiens
gaauucccuuucgccggcgccgaguuccug

SEQ ID NO: 353831 - RNA, 32 nt, Homo Sapiens
gaggaccuuguacagggaugugauguuggaga

SEQ ID NO: 353832 - RNA, 32 nt, Homo Sapiens
cacaucucuuuguuugaagaaaacaggucuga

SEQ ID NO: 353833 - RNA, 32 nt, Homo Sapiens
ucaagggccccggccuggguggcgccagcagg

SEQ ID NO: 353834 - RNA, 32 nt, Homo Sapiens
uucagguuccccuucacugugcucucugcuau

SEQ ID NO: 353835 - RNA, 32 nt, Homo Sapiens
ucucugaaccucagccucgugcauugccugga

SEQ ID NO: 353836 - RNA, 32 nt, Homo Sapiens
cugaccaauuuuauuucuuguuccuauuaccu

SEQ ID NO: 353837 - RNA, 32 nt, Homo Sapiens
acaaaccggcgcccucuucacacguagcuccu

SEQ ID NO: 353838 - RNA, 28 nt, Homo Sapiens
auuugagaguuaaaacauuugagaguua

SEQ ID NO: 353839 - RNA, 32 nt, Homo Sapiens
ccacaagggucacaauacuguugugcgcacau

SEQ ID NO: 353840 - RNA, 32 nt, Homo Sapiens
cacugcacuccagccuggaaaacggagugaga

SEQ ID NO: 353841 - RNA, 32 nt, Homo Sapiens
auuggaaggucucuggggggccccgcuccucu

SEQ ID NO: 353842 - RNA, 32 nt, Homo Sapiens
guguuucuagaaucacagcucaagcauucugu

SEQ ID NO: 353843 - RNA, 32 nt, Homo Sapiens
ccacagcugaguuuauuauacuuguuuucuuu

SEQ ID NO: 353844 - RNA, 32 nt, Homo Sapiens
uaaugcgccucuugaggagaaaagcaauaaug

SEQ ID NO: 353845 - RNA, 32 nt, Homo Sapiens
cugcccagcguuggcgaggagccccgggaggu

SEQ ID NO: 353846 - RNA, 32 nt, Homo Sapiens
aagaugagugaagggaucaacuucucugacaa

SEQ ID NO: 353847 - RNA, 32 nt, Homo Sapiens
ugagccccugucacucucaugacacuuuccug

SEQ ID NO: 353848 - RNA, 32 nt, Homo Sapiens
ugucuaaaggcuuugccacauucuucacaugu

SEQ ID NO: 353849 - RNA, 32 nt, Homo Sapiens
aaagccauugaucaugaacuacagaggagagu

SEQ ID NO: 353850 - RNA, 32 nt, Homo Sapiens
auuugccggaacaauucaaacugcgauauuga

SEQ ID NO: 353851 - RNA, 32 nt, Homo Sapiens
cuuuuguucucucacacugaccagucuuggcc

SEQ ID NO: 353852 - RNA, 32 nt, Homo Sapiens
gguauagacuuugggaguaugugugugaaguu

SEQ ID NO: 353853 - RNA, 32 nt, Homo Sapiens
aggcccauggccccgucugcugcugggccccc

SEQ ID NO: 353854 - RNA, 32 nt, Homo Sapiens
gccugcaccccaccccagccacucaacuccug

SEQ ID NO: 353855 - RNA, 32 nt, Homo Sapiens
uagccggccgacgcgccagcuuccccgggagc

SEQ ID NO: 353856 - RNA, 32 nt, Homo Sapiens
aagaaggggcaaucugccugcugcuauauuaa

SEQ ID NO: 353857 - RNA, 32 nt, Homo Sapiens
aacuucuaauauauuuuuauauuuaguuauag

SEQ ID NO: 353858 - RNA, 32 nt, Homo Sapiens
gucacuuuaaacagcucaaaguagcuagcuaa

SEQ ID NO: 353859 - RNA, 32 nt, Homo Sapiens
gugcugccuggcgcuggcuaggaggcaaacgc

SEQ ID NO: 353860 - RNA, 30 nt, Homo Sapiens
augaaggccaggcgcggcggcucacgccug

SEQ ID NO: 353861 - RNA, 32 nt, Homo Sapiens
gacugagaggcaacguggcugcugcccugccc

SEQ ID NO: 353862 - RNA, 32 nt, Homo Sapiens
auucagaggauaauaucaaugaacuaaacuug

SEQ ID NO: 353863 - RNA, 32 nt, Homo Sapiens
cugucacugucccagcggcugcggcggacccc

SEQ ID NO: 353864 - RNA, 32 nt, Homo Sapiens
gcauaugaauguuuaauaaauguuuguugaau

SEQ ID NO: 353865 - RNA, 30 nt, Homo Sapiens
ccucaucuggacuccagcgguggcuucuug

SEQ ID NO: 353866 - RNA, 32 nt, Homo Sapiens
uguggcugggccgccccucuucucggcucaga

SEQ ID NO: 353867 - RNA, 32 nt, Homo Sapiens
ggcucugccugcgcccggggcagagcggggcu

SEQ ID NO: 353868 - RNA, 32 nt, Homo Sapiens
gcacgccaaccccagcaguccugggcccccug

SEQ ID NO: 353869 - RNA, 32 nt, Homo Sapiens
ccagcgcccucuccccucucccgagggcuggg

SEQ ID NO: 353870 - RNA, 32 nt, Homo Sapiens
cuuuuuacuauaagcaucaaaaacagauaagg

SEQ ID NO: 353871 - RNA, 32 nt, Homo Sapiens
ugauccuuucccucccccaaccccaagguccc

SEQ ID NO: 353872 - RNA, 32 nt, Homo Sapiens
cuguccagccccguagacgugcacgcacacug

SEQ ID NO: 353873 - RNA, 32 nt, Homo Sapiens
uggaucccuugcuacaucacaaaucaguuuca

SEQ ID NO: 353874 - RNA, 30 nt, Homo Sapiens
gguacgguaugucccaucgcccugugcacc

SEQ ID NO: 353875 - RNA, 32 nt, Homo Sapiens
agcaucagaauuuauauggaaaaaauagaaua

SEQ ID NO: 353876 - RNA, 32 nt, Homo Sapiens
acagcucucuucucucgccgccgcccgagcgc

SEQ ID NO: 353877 - RNA, 32 nt, Homo Sapiens
uuaaaagagauuaauaaaaucauaaugcauuu

SEQ ID NO: 353878 - RNA, 32 nt, Homo Sapiens
ccaccccgcgcgccucugccgccucuuccaga

SEQ ID NO: 353879 - RNA, 32 nt, Homo Sapiens
ggugcuuauaaaaaguuauaaauaucgaguag

SEQ ID NO: 353880 - RNA, 32 nt, Homo Sapiens
uuuauaagagaggaauucccccugcuagauua

SEQ ID NO: 353881 - RNA, 32 nt, Homo Sapiens
aaagugaacuuuauaagccagaacgaacuuac

SEQ ID NO: 353882 - RNA, 32 nt, Homo Sapiens
cggacgcucgggcgccaggagcuucgcuggag

SEQ ID NO: 353883 - RNA, 32 nt, Homo Sapiens
aagacugaaggaucaauaaacagccaucugcc

SEQ ID NO: 353884 - RNA, 32 nt, Homo Sapiens
uggcuccagggagaggccucuggaggcaaggg

SEQ ID NO: 353885 - RNA, 32 nt, Homo Sapiens
gaaaagguugauuuuucuuaauagauucugga

SEQ ID NO: 353886 - RNA, 32 nt, Homo Sapiens
auuacauagauauaaagacuuagggaauaaaa

SEQ ID NO: 353887 - RNA, 32 nt, Homo Sapiens
gagcagcagaccauggauaacuuagagaagca

SEQ ID NO: 353888 - RNA, 32 nt, Homo Sapiens
ugauagcaucccaaagccacagagcacacauu

SEQ ID NO: 353889 - RNA, 32 nt, Homo Sapiens
uccagaugguggagccaggcugucuggguuca

SEQ ID NO: 353890 - RNA, 32 nt, Homo Sapiens
uccaggcgcagcugcauucgcuucucgguuuu

SEQ ID NO: 353891 - RNA, 32 nt, Homo Sapiens
agccguggguggaaccaggagccuccuccaca

SEQ ID NO: 353892 - RNA, 32 nt, Homo Sapiens
gucaacagaucauguagauagagucaauuauu

SEQ ID NO: 353893 - RNA, 32 nt, Homo Sapiens
cuuccuguucccuccugguccuggacaccucc

SEQ ID NO: 353894 - RNA, 32 nt, Homo Sapiens
uuuuauguuaaaaaauguacauuuacugugga

SEQ ID NO: 353895 - RNA, 32 nt, Homo Sapiens
cgaucaggaaaugaaacugaugauuuuauaag

SEQ ID NO: 353896 - RNA, 32 nt, Homo Sapiens
ggggaaaaaguaccacuuggacacuuaaagga

SEQ ID NO: 353897 - RNA, 32 nt, Homo Sapiens
cacuccaucauucugagcaagacaauuaggac

SEQ ID NO: 353898 - RNA, 32 nt, Homo Sapiens
ucgaggucucgugcuggugaagugcagagcca

SEQ ID NO: 353899 - RNA, 28 nt, Homo Sapiens
cuuacaguggcuacccacgaggcaacau

SEQ ID NO: 353900 - RNA, 32 nt, Homo Sapiens
cccuccgcugccccugcccaccccgaggcagg

SEQ ID NO: 353901 - RNA, 32 nt, Homo Sapiens
gugguauguuuguauuuggggugucccuccgg

SEQ ID NO: 353902 - RNA, 32 nt, Homo Sapiens
cacauccuuguacagaggcauagguuaccacc

SEQ ID NO: 353903 - RNA, 32 nt, Homo Sapiens
gcggggcgggggucugccggccucugggcaag

SEQ ID NO: 353904 - RNA, 32 nt, Homo Sapiens
agugacugcgcggcccgcgcccggggcgguga

SEQ ID NO: 353905 - RNA, 32 nt, Homo Sapiens
gcagaugacagggugauugauggcaggcaucu

SEQ ID NO: 353906 - RNA, 32 nt, Homo Sapiens
auuuuggccguuaacuaacacauaagcaauaa

SEQ ID NO: 353907 - RNA, 32 nt, Homo Sapiens
auccuggaagcagacaaaaauaagagccugaa

SEQ ID NO: 353908 - RNA, 32 nt, Homo Sapiens
uuacaagauaaugucuuaauuuuguaccaauu

SEQ ID NO: 353909 - RNA, 32 nt, Homo Sapiens
uuucuuccccaccucccugaccuggaacucug

SEQ ID NO: 353910 - RNA, 32 nt, Homo Sapiens
cuuguaccaaaauauuuuacuucaaaaucuau

SEQ ID NO: 353911 - RNA, 32 nt, Homo Sapiens
gagugggaugacugagggacguggcugccucu

SEQ ID NO: 353912 - RNA, 32 nt, Homo Sapiens
agcacugacaguuccaugagcugggaacccgc

SEQ ID NO: 353913 - RNA, 32 nt, Homo Sapiens
uuccugcccucccccaacccucccuuggcggc

SEQ ID NO: 353914 - RNA, 32 nt, Homo Sapiens
ucaacucgcagggauccaacccuguccgcguc

SEQ ID NO: 353915 - RNA, 32 nt, Homo Sapiens
ucucucuccacggccucagagccacucccagc

SEQ ID NO: 353916 - RNA, 32 nt, Homo Sapiens
aaaccauuacaauuuagauaucuaccuauaga

SEQ ID NO: 353917 - RNA, 32 nt, Homo Sapiens
auggagauuauuuuuauuggaggaggaagcau

SEQ ID NO: 353918 - RNA, 32 nt, Homo Sapiens
ugcgggcuaaacauguuuccagugugauuccu

SEQ ID NO: 353919 - RNA, 32 nt, Homo Sapiens
gguuaaagcaugacuguaaauccuugaugcag

SEQ ID NO: 353920 - RNA, 32 nt, Homo Sapiens
agaguccugugcugaauguggacucaaucccu

SEQ ID NO: 353921 - RNA, 32 nt, Homo Sapiens
uugaccuccuggguucaagugauccuuccucc

SEQ ID NO: 353922 - RNA, 32 nt, Homo Sapiens
uaugcuugcaauacaagaauaucuucagaugg

SEQ ID NO: 353923 - RNA, 32 nt, Homo Sapiens
cagaaaaggggcgauaugcugcugagggguga

SEQ ID NO: 353924 - RNA, 32 nt, Homo Sapiens
cacccuggguggcaggcaagccuugaaaucaa

SEQ ID NO: 353925 - RNA, 32 nt, Homo Sapiens
gaggaggagcagcaccuccuacuggccugacc

SEQ ID NO: 353926 - RNA, 32 nt, Homo Sapiens
gaccucccucuccccaggagccccagccccag

SEQ ID NO: 353927 - RNA, 32 nt, Homo Sapiens
gcaauuaggcacuuccaaggcuuuaguagaga

SEQ ID NO: 353928 - RNA, 32 nt, Homo Sapiens
augaccaaaaauauuuugcuauuucuuucuuu

SEQ ID NO: 353929 - RNA, 32 nt, Homo Sapiens
acuccuaaagguaaacaaaagcaggcagauug

SEQ ID NO: 353930 - RNA, 32 nt, Homo Sapiens
caaguugucauuuauuugauggaauauuauaa

SEQ ID NO: 353931 - RNA, 32 nt, Homo Sapiens
cucgcugcagcgccgccucuucucugcgucgc

SEQ ID NO: 353932 - RNA, 32 nt, Homo Sapiens
acuaaauccagauccuaaaaccacagaaaaca

SEQ ID NO: 353933 - RNA, 32 nt, Homo Sapiens
auuguacagccaacuggaaagauauaaaaguu

SEQ ID NO: 353934 - RNA, 32 nt, Homo Sapiens
aauggaauacucacucuugggucuaaucuuuc

SEQ ID NO: 353935 - RNA, 32 nt, Homo Sapiens
uagcgucaccccagccccacguggcuucagau

SEQ ID NO: 353936 - RNA, 32 nt, Homo Sapiens
cugccgucgagggggaccaggcggcgggaugg

SEQ ID NO: 353937 - RNA, 32 nt, Homo Sapiens
uccuguguuuggguggcccugacuccaguuug

SEQ ID NO: 353938 - RNA, 32 nt, Homo Sapiens
uucaaagggcucucuggcuaaucuucaaagcc

SEQ ID NO: 353939 - RNA, 32 nt, Homo Sapiens
aagcuucagcugcuguauuguaaaacaggaaa

SEQ ID NO: 353940 - RNA, 32 nt, Homo Sapiens
uacagaaaauaccaccucgagaugggugcugg

SEQ ID NO: 353941 - RNA, 32 nt, Homo Sapiens
ccucucccuuucccuuugguaggugcaccuga

SEQ ID NO: 353942 - RNA, 32 nt, Homo Sapiens
aagggcagggaguggaagaggcugggagguca

SEQ ID NO: 353943 - RNA, 32 nt, Homo Sapiens
uuacugcagccuuugccuccccggcucgagca

SEQ ID NO: 353944 - RNA, 32 nt, Homo Sapiens
uauucuucuaaagagauuagaguuuuacugag

SEQ ID NO: 353945 - RNA, 32 nt, Homo Sapiens
cauuaaaugaugccucuguuuaauacaccugg

SEQ ID NO: 353946 - RNA, 32 nt, Homo Sapiens
acuuuucccugaauguuagaaacuacaaaacc

SEQ ID NO: 353947 - RNA, 32 nt, Homo Sapiens
ccacagagccggccccugcugcugcucgggca

SEQ ID NO: 353948 - RNA, 32 nt, Homo Sapiens
ccagcuugccccaccccgccccuccccuccac

SEQ ID NO: 353949 - RNA, 32 nt, Homo Sapiens
guuuuguuuuuaaauuuugaaaacugugcaau

SEQ ID NO: 353950 - RNA, 32 nt, Homo Sapiens
guucugucugguuuuguugccauuuugguuug

SEQ ID NO: 353951 - RNA, 32 nt, Homo Sapiens
gcuucccucgguggggaccccgacaucccagc

SEQ ID NO: 353952 - RNA, 29 nt, Homo Sapiens
uauaguuuaggaaaauauuuucuaagacc

SEQ ID NO: 353953 - RNA, 32 nt, Homo Sapiens
gacgagcagcggggucugccaugggucggggg

SEQ ID NO: 353954 - RNA, 32 nt, Homo Sapiens
acucaucuccaaguguuuccucuuuaagccua

SEQ ID NO: 353955 - RNA, 32 nt, Homo Sapiens
cccccuuaccugcccugcugccugcacacugc

SEQ ID NO: 353956 - RNA, 32 nt, Homo Sapiens
guacccggcuaauuuuuuguauuuucaguaga

SEQ ID NO: 353957 - RNA, 32 nt, Homo Sapiens
gucugcagcucuuuucuccaccgcgcgcccgc

SEQ ID NO: 353958 - RNA, 32 nt, Homo Sapiens
ugugaguacuggaugccugugagcuugccauu

SEQ ID NO: 353959 - RNA, 32 nt, Homo Sapiens
ggacugagauccuggggaugccuggagccugg

SEQ ID NO: 353960 - RNA, 32 nt, Homo Sapiens
aagcagaggaugucaucuuaugcuggcuuuua

SEQ ID NO: 353961 - RNA, 32 nt, Homo Sapiens
ggaggccagugcgcggccgcggugcucuaccg

SEQ ID NO: 353962 - RNA, 32 nt, Homo Sapiens
aaauacugcauuucuuuuuuuagaaaguauuc

SEQ ID NO: 353963 - RNA, 32 nt, Homo Sapiens
acagccuuuuuacuuuuuuccccuaacuuuag

SEQ ID NO: 353964 - RNA, 32 nt, Homo Sapiens
gcauguugcagcaaaucuauuguuuguaaaaa

SEQ ID NO: 353965 - RNA, 32 nt, Homo Sapiens
gccucccgcaccggggacccaggccagcgucc

SEQ ID NO: 353966 - RNA, 32 nt, Homo Sapiens
uuggcaguagggggcuguguuggugggcccua

SEQ ID NO: 353967 - RNA, 32 nt, Homo Sapiens
ucaaguguggggagucaugggguguggagggg

SEQ ID NO: 353968 - RNA, 32 nt, Homo Sapiens
ccauuaaauccauacuaggagcgucagugagg

SEQ ID NO: 353969 - RNA, 32 nt, Homo Sapiens
aucguauugccuauauacuugaauuaaaaaua

SEQ ID NO: 353970 - RNA, 32 nt, Homo Sapiens
aaacauucagccauccuagaaacuagcaauau

SEQ ID NO: 353971 - RNA, 32 nt, Homo Sapiens
uugauucaggggucugaugacacaggcugacu

SEQ ID NO: 353972 - RNA, 32 nt, Homo Sapiens
guagagacccuuccgcgccggcguucccgcuc

SEQ ID NO: 353973 - RNA, 30 nt, Homo Sapiens
cugcaggcgcugcugccgccgucgcuucug

SEQ ID NO: 353974 - RNA, 32 nt, Homo Sapiens
cccggcucugagucgcgcuucucagcggagug

SEQ ID NO: 353975 - RNA, 32 nt, Homo Sapiens
aacaauaacugccuauccagauaugccacacu

SEQ ID NO: 353976 - RNA, 32 nt, Homo Sapiens
agaaacaaaaugggucagauagcuuuggccac

SEQ ID NO: 353977 - RNA, 32 nt, Homo Sapiens
auaccuacuaaguggaaaacaagaccaucauc

SEQ ID NO: 353978 - RNA, 32 nt, Homo Sapiens
acuauuacagucgugguuucugcagcagcuca

SEQ ID NO: 353979 - RNA, 32 nt, Homo Sapiens
auguuuacauucaauuaaggggaaaaaguaga

SEQ ID NO: 353980 - RNA, 32 nt, Homo Sapiens
uccuaagaaugggaggcugccuuccuucccaa

SEQ ID NO: 353981 - RNA, 32 nt, Homo Sapiens
ucugaguggucgggucgaggcuucucggccua

SEQ ID NO: 353982 - RNA, 32 nt, Homo Sapiens
ucuggaaggggcuggcuggugcccuauuucca

SEQ ID NO: 353983 - RNA, 32 nt, Homo Sapiens
ugagaaaagcaucugcaaaaugcuaaagagca

SEQ ID NO: 353984 - RNA, 32 nt, Homo Sapiens
ucgaggaagggaagaaagaaacagaagucagg

SEQ ID NO: 353985 - RNA, 32 nt, Homo Sapiens
ugaaggggaaagggucuugagaaagaccauca

SEQ ID NO: 353986 - RNA, 32 nt, Homo Sapiens
uucuacuacccgcggcgccgcccgggugggac

SEQ ID NO: 353987 - RNA, 32 nt, Homo Sapiens
uucacucuucucagccacugaaguauuccccu

SEQ ID NO: 353988 - RNA, 32 nt, Homo Sapiens
ugauaauggugauacuuuguacuaguaggaaa

SEQ ID NO: 353989 - RNA, 32 nt, Homo Sapiens
uuacccgcgggccgccacagccgccggcggga

SEQ ID NO: 353990 - RNA, 31 nt, Homo Sapiens
cucccgcgauccugccugcgcccucugccca

SEQ ID NO: 353991 - RNA, 32 nt, Homo Sapiens
gcucuggccccggccccggccccgcggaccau

SEQ ID NO: 353992 - RNA, 32 nt, Homo Sapiens
acagauaugaagaaaguuucugauugauaugg

SEQ ID NO: 353993 - RNA, 32 nt, Homo Sapiens
ccuggagcaguaugagcagaugcugaagacca

SEQ ID NO: 353994 - RNA, 32 nt, Homo Sapiens
ucucguccuccuuugugcaggcgaggaagggg

SEQ ID NO: 353995 - RNA, 32 nt, Homo Sapiens
cccuaagaccuugggaggaaaacucagagagg

SEQ ID NO: 353996 - RNA, 31 nt, Homo Sapiens
cuuuuguuucuagccuguucaguguacaguu

SEQ ID NO: 353997 - RNA, 32 nt, Homo Sapiens
ccggcuccagccagcguccgccgccgccguag

SEQ ID NO: 353998 - RNA, 32 nt, Homo Sapiens
aaaauuaugagaugaaacuuuuauaugacgug

SEQ ID NO: 353999 - RNA, 32 nt, Homo Sapiens
aagcagcuuacauuuuacaaagggaagauaua

SEQ ID NO: 354000 - RNA, 32 nt, Homo Sapiens
gcucgccagugcgccaguccuuccgcaaggac

SEQ ID NO: 354001 - RNA, 32 nt, Homo Sapiens
acagcugcagcuuuucagggguggucugaaaa

SEQ ID NO: 354002 - RNA, 32 nt, Homo Sapiens
cagcuauugguguaccuauaauuuaagaaaua

SEQ ID NO: 354003 - RNA, 32 nt, Homo Sapiens
gcuuguuuugccauuuuuuuuauuggguuguc

SEQ ID NO: 354004 - RNA, 32 nt, Homo Sapiens
ccuucaccuacgagcagcucguggcgcuggag

SEQ ID NO: 354005 - RNA, 32 nt, Homo Sapiens
agcugucccuugaugcugaguguaguagaaca

SEQ ID NO: 354006 - RNA, 32 nt, Homo Sapiens
uguggagagcucauggccugucuaaauuguug

SEQ ID NO: 354007 - RNA, 32 nt, Homo Sapiens
cccccagcuaguaugaugauccuguuuuacaa

SEQ ID NO: 354008 - RNA, 32 nt, Homo Sapiens
gaacugacccccucagccccagcccaucaccc

SEQ ID NO: 354009 - RNA, 32 nt, Homo Sapiens
cgagucaccuuccaggaccccuggguaaaaaa

SEQ ID NO: 354010 - RNA, 32 nt, Homo Sapiens
gagcagcggcggugcccacacgcuggugaacc

SEQ ID NO: 354011 - RNA, 32 nt, Homo Sapiens
uuucauaauuuucuauuugaaaaugugcugau

SEQ ID NO: 354012 - RNA, 32 nt, Homo Sapiens
agcucagugccugggaccgcuccagcugcacu

SEQ ID NO: 354013 - RNA, 32 nt, Homo Sapiens
ggccuccccguccauccccgccggacucgggc

SEQ ID NO: 354014 - RNA, 32 nt, Homo Sapiens
uugaacuagaaauaaacuaaacuagaaacaaa

SEQ ID NO: 354015 - RNA, 32 nt, Homo Sapiens
uaaacacacagauacacacacacacacacaca

SEQ ID NO: 354016 - RNA, 32 nt, Homo Sapiens
cuaaaaaucuguuuaucauacauuuauuauuu

SEQ ID NO: 354017 - RNA, 32 nt, Homo Sapiens
gacuccgccgacgcccggugccgugggccugg

SEQ ID NO: 354018 - RNA, 32 nt, Homo Sapiens
ucuuaugauugucuuguugauuaaauuguuca

SEQ ID NO: 354019 - RNA, 32 nt, Homo Sapiens
uauucuuauuaaggaaauacuuugcauaaauu

SEQ ID NO: 354020 - RNA, 32 nt, Homo Sapiens
agauuaugacuauucguugacaucucaugaga

SEQ ID NO: 354021 - RNA, 32 nt, Homo Sapiens
gggcaugcagguacccaccucuuucucuuggg

SEQ ID NO: 354022 - RNA, 32 nt, Homo Sapiens
augccuguuucauugacacgugcugggauagg

SEQ ID NO: 354023 - RNA, 32 nt, Homo Sapiens
uccugauguaaaaacuaacaugcuagauaauc

SEQ ID NO: 354024 - RNA, 32 nt, Homo Sapiens
ggucaugucaguggcaaauaugcaagacacag

SEQ ID NO: 354025 - RNA, 32 nt, Homo Sapiens
gaagauggauacugugggaaagucagggacac

SEQ ID NO: 354026 - RNA, 32 nt, Homo Sapiens
gggugaagccauagaacauauuugcuugaaau

SEQ ID NO: 354027 - RNA, 32 nt, Homo Sapiens
gggggcagauccuggggagaauggaggagcac

SEQ ID NO: 354028 - RNA, 32 nt, Homo Sapiens
cagggaacuuguauaccacuaucuaugcagca

SEQ ID NO: 354029 - RNA, 32 nt, Homo Sapiens
aggaagccuaggaugcccagggcugggugcag

SEQ ID NO: 354030 - RNA, 32 nt, Homo Sapiens
cauuuuuuggaaacccucuccucccuccucca

SEQ ID NO: 354031 - RNA, 32 nt, Homo Sapiens
cugccccagacagagcugaggaccccuggccg

SEQ ID NO: 354032 - RNA, 32 nt, Homo Sapiens
aaagggucuaauuuuuuuuucuuaaugaaauc

SEQ ID NO: 354033 - RNA, 32 nt, Homo Sapiens
auaagagacuuccugauucucuaggucgguuc

SEQ ID NO: 354034 - RNA, 32 nt, Homo Sapiens
guuuaaguuaaguuucucuggugcaaucugug

SEQ ID NO: 354035 - RNA, 32 nt, Homo Sapiens
gagcuaguagguucggugggggcccuggcaug

SEQ ID NO: 354036 - RNA, 32 nt, Homo Sapiens
ccuugccccugcgucccgcgucuggguucuca

SEQ ID NO: 354037 - RNA, 32 nt, Homo Sapiens
cauuaugaauucuaguugugguuguuuuaaaa

SEQ ID NO: 354038 - RNA, 31 nt, Homo Sapiens
aucuguaguguuaaaaauuagauuagugauu

SEQ ID NO: 354039 - RNA, 32 nt, Homo Sapiens
uagagaagggaagagcguguagaacuguggcc

SEQ ID NO: 354040 - RNA, 32 nt, Homo Sapiens
agaugugggcuuugauuuccaaguaauauaau

SEQ ID NO: 354041 - RNA, 32 nt, Homo Sapiens
ucugcauggcgaucguggaagcagccaguugu

SEQ ID NO: 354042 - RNA, 32 nt, Homo Sapiens
cucugggcaccuccagcuccugcucgccggac

SEQ ID NO: 354043 - RNA, 32 nt, Homo Sapiens
gcuugcccugaaccgugagcucuagaaauucc

SEQ ID NO: 354044 - RNA, 30 nt, Homo Sapiens
gaaagaugccgguccgcaggggccacgucg

SEQ ID NO: 354045 - RNA, 32 nt, Homo Sapiens
agauagaaauuggucuuaauuuauauaaucaa

SEQ ID NO: 354046 - RNA, 32 nt, Homo Sapiens
cugaaaagcaaaugcacaguuagugcagcucc

SEQ ID NO: 354047 - RNA, 32 nt, Homo Sapiens
cuagcggcgucccccggccucucgccggcgcc

SEQ ID NO: 354048 - RNA, 32 nt, Homo Sapiens
uccugaaugacuuucuaacugugcagaaaggc

SEQ ID NO: 354049 - RNA, 32 nt, Homo Sapiens
cacuuccaccccaccccucaccucuuaggcua

SEQ ID NO: 354050 - RNA, 32 nt, Homo Sapiens
cacggggcucugggcucugugcccauucucug

SEQ ID NO: 354051 - RNA, 32 nt, Homo Sapiens
gacagaggucagcgugacccccugccucaaca

SEQ ID NO: 354052 - RNA, 32 nt, Homo Sapiens
gcggaaaaacaaacaugaauccugugauauug

SEQ ID NO: 354053 - RNA, 32 nt, Homo Sapiens
cugugucgggccgcaucauccgggagcugccc

SEQ ID NO: 354054 - RNA, 32 nt, Homo Sapiens
uggcauaaauauggucgcacuaauggaagaca

SEQ ID NO: 354055 - RNA, 32 nt, Homo Sapiens
ggcuuuuuuaaaaaacaaaacaaaacaacaaa

SEQ ID NO: 354056 - RNA, 32 nt, Homo Sapiens
caguaaaugugacaaaaguaaaauauaucaga

SEQ ID NO: 354057 - RNA, 32 nt, Homo Sapiens
aaucaaaauuuauaaaacuucuauuuuggugu

SEQ ID NO: 354058 - RNA, 32 nt, Homo Sapiens
guccuuuggggauacagagccaggaguggaac

SEQ ID NO: 354059 - RNA, 32 nt, Homo Sapiens
gugagaguuauagugagggaauggucacuaaa

SEQ ID NO: 354060 - RNA, 32 nt, Homo Sapiens
uugugcagaccaagagcaccacagacuacaac

SEQ ID NO: 354061 - RNA, 32 nt, Homo Sapiens
uuugucuuuuucucuuuuuucucauguuuucu

SEQ ID NO: 354062 - RNA, 32 nt, Homo Sapiens
ucauuuuggguuuuugccuccucccacugugu

SEQ ID NO: 354063 - RNA, 32 nt, Homo Sapiens
cauuguuuuuaaaaagcacauuguagccuaag

SEQ ID NO: 354064 - RNA, 32 nt, Homo Sapiens
aauggcugacuucugguucucccucaaguguu

SEQ ID NO: 354065 - RNA, 32 nt, Homo Sapiens
cauuucucuggauuugcaacccuaucauccuc

SEQ ID NO: 354066 - RNA, 32 nt, Homo Sapiens
ccagugaacuugaucuaauuucuuuugaucua

SEQ ID NO: 354067 - RNA, 32 nt, Homo Sapiens
ccggccccgcggccgcucaugggcagccaggg

SEQ ID NO: 354068 - RNA, 32 nt, Homo Sapiens
ugacaggggauuaaccuagaacaucaauuaua

SEQ ID NO: 354069 - RNA, 32 nt, Homo Sapiens
ugaaggacccucaaaacugccuccuggagucc

SEQ ID NO: 354070 - RNA, 32 nt, Homo Sapiens
ucugucccuuagcagagcugacgugcugugcu

SEQ ID NO: 354071 - RNA, 32 nt, Homo Sapiens
aggcggaugaauugcuugaauccaggaggcag

SEQ ID NO: 354072 - RNA, 31 nt, Homo Sapiens
guuacucaagccaccacauuuuggugaugca

SEQ ID NO: 354073 - RNA, 32 nt, Homo Sapiens
acugccgcaaaacagccaucaagagccaucug

SEQ ID NO: 354074 - RNA, 32 nt, Homo Sapiens
gcaucauuugcauauugauuucaagucuccua

SEQ ID NO: 354075 - RNA, 32 nt, Homo Sapiens
guccccccaagccacggccaggacgucgcgug

SEQ ID NO: 354076 - RNA, 32 nt, Homo Sapiens
uuguggccaugcagcccucccugaggauugac

SEQ ID NO: 354077 - RNA, 32 nt, Homo Sapiens
acagcggggaggaggaauggcuuuguggucgu

SEQ ID NO: 354078 - RNA, 32 nt, Homo Sapiens
aaaauucacaugccccuaacccucagauaaug

SEQ ID NO: 354079 - RNA, 32 nt, Homo Sapiens
aaaauaauacucagagcuaguaauuugggcca

SEQ ID NO: 354080 - RNA, 32 nt, Homo Sapiens
aacugaacagagcuccacacaucugucagggu

SEQ ID NO: 354081 - RNA, 32 nt, Homo Sapiens
cccuuacccucccaccacuccccucccaagac

SEQ ID NO: 354082 - RNA, 32 nt, Homo Sapiens
cagagcccaagccccacgcugcugucuuugcc

SEQ ID NO: 354083 - RNA, 32 nt, Homo Sapiens
ucucucauuauuucucucugacccucucccca

SEQ ID NO: 354084 - RNA, 32 nt, Homo Sapiens
ccugguaauucuucaccucuuuucucagcucc

SEQ ID NO: 354085 - RNA, 32 nt, Homo Sapiens
uacuguccccauucucucuccucccaccuuca

SEQ ID NO: 354086 - RNA, 32 nt, Homo Sapiens
uacuccaucuucugcguucccccaguucuuuu

SEQ ID NO: 354087 - RNA, 32 nt, Homo Sapiens
ggcugcaucugaggcggacgccgcaguguagg

SEQ ID NO: 354088 - RNA, 32 nt, Homo Sapiens
aguucuaaugaaauuuuguaaaagauggcaag

SEQ ID NO: 354089 - RNA, 32 nt, Homo Sapiens
uaaaaauuuaggaugaaggaaacaaggaaaua

SEQ ID NO: 354090 - RNA, 32 nt, Homo Sapiens
gacuaugauugaauuuuauuuauuaauacuuc

SEQ ID NO: 354091 - RNA, 32 nt, Homo Sapiens
ggcuugggggagaguugagcgcuuuucccccc

SEQ ID NO: 354092 - RNA, 32 nt, Homo Sapiens
uuuuuuuugguuuuguuuuuuauaauucaguu

SEQ ID NO: 354093 - RNA, 32 nt, Homo Sapiens
uauagguaaauggacauuaaacuuuuuuaaag

SEQ ID NO: 354094 - RNA, 32 nt, Homo Sapiens
auaagcgacuucugugaggcugagagaggaag

SEQ ID NO: 354095 - RNA, 32 nt, Homo Sapiens
caauggcagaggggguuggggcugggacucug

SEQ ID NO: 354096 - RNA, 32 nt, Homo Sapiens
acucauuuuuccagagacccagcugugauuca

SEQ ID NO: 354097 - RNA, 32 nt, Homo Sapiens
aaacugguaaccucacaacuccacacuucauc

SEQ ID NO: 354098 - RNA, 32 nt, Homo Sapiens
guaauuuguauauaaagaacuuggcaagagaa

SEQ ID NO: 354099 - RNA, 32 nt, Homo Sapiens
cucuauguuguccgccguguaaacauccgagg

SEQ ID NO: 354100 - RNA, 31 nt, Homo Sapiens
aaucugaaauaaaaggugcuguuccuuccuc

SEQ ID NO: 354101 - RNA, 32 nt, Homo Sapiens
uccugauauguuaucuuauuuauauuuucccu

SEQ ID NO: 354102 - RNA, 32 nt, Homo Sapiens
aauacccccauguugccuuguuuguuuuuucc

SEQ ID NO: 354103 - RNA, 32 nt, Homo Sapiens
uuaccauauagcaaagaagucacuaaggauua

SEQ ID NO: 354104 - RNA, 32 nt, Homo Sapiens
aaugcaggugcaacuucuaagaguuuuccugu

SEQ ID NO: 354105 - RNA, 32 nt, Homo Sapiens
aguggaguugguuuuuuucuuuuuucuucuuc

SEQ ID NO: 354106 - RNA, 30 nt, Homo Sapiens
aggcugcuccaggugggggaagucuggucc

SEQ ID NO: 354107 - RNA, 32 nt, Homo Sapiens
ccaaaaaauaccaaaauuagcuggguguggug

SEQ ID NO: 354108 - RNA, 32 nt, Homo Sapiens
gugaaccuaugacugcaguggaucucaaaaac

SEQ ID NO: 354109 - RNA, 32 nt, Homo Sapiens
gccaugaaauuugaaaaccaccaaaaaucaag

SEQ ID NO: 354110 - RNA, 32 nt, Homo Sapiens
augacuugugauuuuuuuuucuuuuuuuuaaa

SEQ ID NO: 354111 - RNA, 32 nt, Homo Sapiens
acgcagggaccccugcugcugcuccugcucag

SEQ ID NO: 354112 - RNA, 32 nt, Homo Sapiens
accucggggucugaggcccaggacccaccccc

SEQ ID NO: 354113 - RNA, 32 nt, Homo Sapiens
ugcggugagcaggcaccacgccggcagacucg

SEQ ID NO: 354114 - RNA, 32 nt, Homo Sapiens
uccguccgacagaacgguugggccuugccggc

SEQ ID NO: 354115 - RNA, 32 nt, Homo Sapiens
cuccggggggcggugcagagggggcacggaga

SEQ ID NO: 354116 - RNA, 32 nt, Homo Sapiens
gccgaugccagcgcacaucuggcgauguaggg

SEQ ID NO: 354117 - RNA, 32 nt, Homo Sapiens
acaguggagagugggagccuagcugugcuuga

SEQ ID NO: 354118 - RNA, 32 nt, Homo Sapiens
caccucgugucugcucauaggaugcgcuggag

SEQ ID NO: 354119 - RNA, 30 nt, Homo Sapiens
aacuaguuauguggcaugcagcauuuggaa

SEQ ID NO: 354120 - RNA, 32 nt, Homo Sapiens
gucuuauucuucccccugcaguuucuugcuuu

SEQ ID NO: 354121 - RNA, 32 nt, Homo Sapiens
ugcacggcgucccugagggcccuucccaaccu

SEQ ID NO: 354122 - RNA, 32 nt, Homo Sapiens
guggagccacggugacuguccuggacagcaag

SEQ ID NO: 354123 - RNA, 32 nt, Homo Sapiens
ggguggccccucuggagugcucacuaacaagg

SEQ ID NO: 354124 - RNA, 32 nt, Homo Sapiens
acaacuuuuuauuuugauguccuguuggcuca

SEQ ID NO: 354125 - RNA, 32 nt, Homo Sapiens
caggauggccagagacaauaaaagcacgagac

SEQ ID NO: 354126 - RNA, 32 nt, Homo Sapiens
uaaaauagcauuaggucuaucuagccaccacc

SEQ ID NO: 354127 - RNA, 32 nt, Homo Sapiens
gcaccugccccccugcuccccacacaucauau

SEQ ID NO: 354128 - RNA, 32 nt, Homo Sapiens
agccugucaugagcagaggaaaauauuauuaa

SEQ ID NO: 354129 - RNA, 32 nt, Homo Sapiens
aaaagagaacaucuuuuuuuuaaucguaguuu

SEQ ID NO: 354130 - RNA, 32 nt, Homo Sapiens
cucccaggccccaggccuguggcucccuuggu

SEQ ID NO: 354131 - RNA, 32 nt, Homo Sapiens
gccuggguuaguagauauuaucaaaguccaua

SEQ ID NO: 354132 - RNA, 32 nt, Homo Sapiens
ccugagagugggccagcucgcugcucaggcga

SEQ ID NO: 354133 - RNA, 32 nt, Homo Sapiens
ggcgcggggagcugugggcggcagcugcgucu

SEQ ID NO: 354134 - RNA, 32 nt, Homo Sapiens
aggcgggcagaucaccugagaucgggaguuug

SEQ ID NO: 354135 - RNA, 32 nt, Homo Sapiens
uaaaguugaaagaacauguuaaagucagucuu

SEQ ID NO: 354136 - RNA, 32 nt, Homo Sapiens
aagaggaauguuuaauaaaggcuuugauuuaa

SEQ ID NO: 354137 - RNA, 32 nt, Homo Sapiens
auugguucaugcucugagccucugccaagcug

SEQ ID NO: 354138 - RNA, 32 nt, Homo Sapiens
ucugucgcccacguuggagugcagugauguga

SEQ ID NO: 354139 - RNA, 30 nt, Homo Sapiens
agaggugucugugcugacaaggcgacuuca

SEQ ID NO: 354140 - RNA, 32 nt, Homo Sapiens
guuaaaagaugacacuagugauugcguuuugu

SEQ ID NO: 354141 - RNA, 32 nt, Homo Sapiens
ggaggacgcugaggaggcgccgagccgcgcag

SEQ ID NO: 354142 - RNA, 32 nt, Homo Sapiens
gaugagggaaauuuaauuuuccaagcaaagug

SEQ ID NO: 354143 - RNA, 32 nt, Homo Sapiens
ucucgccugugcugucucaugggacucaaugg

SEQ ID NO: 354144 - RNA, 32 nt, Homo Sapiens
cagacccaguccagcucuggugccugcccucu

SEQ ID NO: 354145 - RNA, 32 nt, Homo Sapiens
uacaccuucauauuuuaacagcuauguaacuu

SEQ ID NO: 354146 - RNA, 32 nt, Homo Sapiens
gggguugucaacaugaguauuacauuaacauu

SEQ ID NO: 354147 - RNA, 32 nt, Homo Sapiens
aguagacagagacagaccgagaaggaagggag

SEQ ID NO: 354148 - RNA, 32 nt, Homo Sapiens
gguccaggguccagcccuccgccagcccuguu

SEQ ID NO: 354149 - RNA, 32 nt, Homo Sapiens
uaucaccagaaugaaaauauuuaaagugauga

SEQ ID NO: 354150 - RNA, 32 nt, Homo Sapiens
aaacagauuucuuuuuaaauuguuuaaucaua

SEQ ID NO: 354151 - RNA, 32 nt, Homo Sapiens
gaaagcuagccaaagaucuugaagaagaauug

SEQ ID NO: 354152 - RNA, 32 nt, Homo Sapiens
cuccgugggcgcucaauaaacacacaugagaa

SEQ ID NO: 354153 - RNA, 32 nt, Homo Sapiens
gaugggcccucccaggcccgucaagcccuggu

SEQ ID NO: 354154 - RNA, 32 nt, Homo Sapiens
caccacuuccgcaggccuggaaacuuccuucu

SEQ ID NO: 354155 - RNA, 32 nt, Homo Sapiens
guuagcugucuccuugccaagccccaggaaga

SEQ ID NO: 354156 - RNA, 32 nt, Homo Sapiens
ugcugcugcccggcucgggccugagcgccgag

SEQ ID NO: 354157 - RNA, 32 nt, Homo Sapiens
auuuuucucauaguuaauuucaucucuccggu

SEQ ID NO: 354158 - RNA, 32 nt, Homo Sapiens
agccggggcggccguugcggggcgcgcucucg

SEQ ID NO: 354159 - RNA, 32 nt, Homo Sapiens
gacagcacaggggacagguggcacaccaugag

SEQ ID NO: 354160 - RNA, 32 nt, Homo Sapiens
ccaagcgccgaucugggcacccgccaccagca

SEQ ID NO: 354161 - RNA, 32 nt, Homo Sapiens
ugggcgacagagugagacgcuguuucaaaaaa

SEQ ID NO: 354162 - RNA, 32 nt, Homo Sapiens
gaggaccgggcggcgggaauguucucacuucu

SEQ ID NO: 354163 - RNA, 32 nt, Homo Sapiens
acgaugguaaugaacaaucugaaaauaaaauu

SEQ ID NO: 354164 - RNA, 32 nt, Homo Sapiens
uagcaucagugggaacucaguacucuguaugu

SEQ ID NO: 354165 - RNA, 32 nt, Homo Sapiens
cucacagaccucagccuggagcauccugaagc

SEQ ID NO: 354166 - RNA, 32 nt, Homo Sapiens
uuaauguaucucuugaucacuaucaagaugug

SEQ ID NO: 354167 - RNA, 32 nt, Homo Sapiens
cuucaacagggucuauugguucugccugagaa

SEQ ID NO: 354168 - RNA, 32 nt, Homo Sapiens
gccacugauaccauuuuauauuucaucaauug

SEQ ID NO: 354169 - RNA, 32 nt, Homo Sapiens
ugcuguacgcgggcagcgucaggacccugcag

SEQ ID NO: 354170 - RNA, 32 nt, Homo Sapiens
guuacaucaagauauguuuugguuguuaguac

SEQ ID NO: 354171 - RNA, 32 nt, Homo Sapiens
gacgugucggagccaccgccugagcugcucgg

SEQ ID NO: 354172 - RNA, 32 nt, Homo Sapiens
gggcuauuuguacuuuuuuauagagaacuuua

SEQ ID NO: 354173 - RNA, 32 nt, Homo Sapiens
ugcgggagccggagaagaaugaaacugcgugg

SEQ ID NO: 354174 - RNA, 32 nt, Homo Sapiens
ccuaucacauauauccuguuaagcacugaaga

SEQ ID NO: 354175 - RNA, 32 nt, Homo Sapiens
uuuguauauaguuguaaauauugucuugguua

SEQ ID NO: 354176 - RNA, 32 nt, Homo Sapiens
cucuacauaaaauuauuucuacaaugucaaga

SEQ ID NO: 354177 - RNA, 32 nt, Homo Sapiens
uauuuuuaaaacugggaacauaaagugccugu

SEQ ID NO: 354178 - RNA, 32 nt, Homo Sapiens
gggucccagcgcccaucggcccgggguccgag

SEQ ID NO: 354179 - RNA, 32 nt, Homo Sapiens
ucgacucucacuaggcuaaacucaagauuuga

SEQ ID NO: 354180 - RNA, 32 nt, Homo Sapiens
cugggucccugcugcuuucucuaccucaaggg

SEQ ID NO: 354181 - RNA, 32 nt, Homo Sapiens
cauuucccugguaagaucuacucuugagauac

SEQ ID NO: 354182 - RNA, 32 nt, Homo Sapiens
auaucaagugugcuuagaaaaauguauauugu

SEQ ID NO: 354183 - RNA, 32 nt, Homo Sapiens
uucugagaaugaauuugguuaguugcagaaga

SEQ ID NO: 354184 - RNA, 32 nt, Homo Sapiens
uuggauggucagcugggaguguccaucaucag

SEQ ID NO: 354185 - RNA, 32 nt, Homo Sapiens
cauugcccuucagaggagcaguucuuggauga

SEQ ID NO: 354186 - RNA, 32 nt, Homo Sapiens
gacgaagcaaccucguuucugaggaagaagcu

SEQ ID NO: 354187 - RNA, 32 nt, Homo Sapiens
cguacacugcagagacccgacccuccuugcua

SEQ ID NO: 354188 - RNA, 27 nt, Homo Sapiens
acccaggcccuucucagccccccggcc

SEQ ID NO: 354189 - RNA, 32 nt, Homo Sapiens
gucccucuucuccccaggaccccagggccaac

SEQ ID NO: 354190 - RNA, 32 nt, Homo Sapiens
ucugcaauaguggucagaaaaauacuuaaauu

SEQ ID NO: 354191 - RNA, 31 nt, Homo Sapiens
gguucauguguauuaccaucauucuuuuguc

SEQ ID NO: 354192 - RNA, 32 nt, Homo Sapiens
accaagcccaggccgggggcgguggcucacac

SEQ ID NO: 354193 - RNA, 32 nt, Homo Sapiens
ggccagggcagacagucucugaggaagccaca

SEQ ID NO: 354194 - RNA, 32 nt, Homo Sapiens
cuauugacuaauaaauaaucugcauaauucua

SEQ ID NO: 354195 - RNA, 32 nt, Homo Sapiens
ugcccaggcccgcgacucggcccgacaggaca

SEQ ID NO: 354196 - RNA, 32 nt, Homo Sapiens
cugcuaccugacgcgccagaagcacccagccc

SEQ ID NO: 354197 - RNA, 32 nt, Homo Sapiens
gcucaguacaucuauuuugugaacaucaguug

SEQ ID NO: 354198 - RNA, 32 nt, Homo Sapiens
aaguauguauugagugccuacucugugcaagg

SEQ ID NO: 354199 - RNA, 32 nt, Homo Sapiens
cuucuacuuggaccgcaugccuuuuuauagcc

SEQ ID NO: 354200 - RNA, 32 nt, Homo Sapiens
augucacugcugucacauauugucauacgugg

SEQ ID NO: 354201 - RNA, 32 nt, Homo Sapiens
caucccaaaggguggggggcgcuguuggcagg

SEQ ID NO: 354202 - RNA, 31 nt, Homo Sapiens
cggggcgugcacugccccagccccccguagc

SEQ ID NO: 354203 - RNA, 32 nt, Homo Sapiens
gcauuugaggcaucuguaaaaauguauagcuc

SEQ ID NO: 354204 - RNA, 32 nt, Homo Sapiens
uguggggagggcacucagcgccgaaauguccu

SEQ ID NO: 354205 - RNA, 32 nt, Homo Sapiens
ugcaccagguguuuuugucaccauacagauga

SEQ ID NO: 354206 - RNA, 32 nt, Homo Sapiens
auauuaaaaucagcguuugucaaccucagggg

SEQ ID NO: 354207 - RNA, 32 nt, Homo Sapiens
uagaacuugaacauugcugaauuggaccacuu

SEQ ID NO: 354208 - RNA, 32 nt, Homo Sapiens
acugaggagcuaaaucagaacugcacacuccu

SEQ ID NO: 354209 - RNA, 32 nt, Homo Sapiens
cuugcucucauuuuuugauuuauuuuuauuuu

SEQ ID NO: 354210 - RNA, 32 nt, Homo Sapiens
cagggauguacaaaauaauuuuaauguauuaa

SEQ ID NO: 354211 - RNA, 32 nt, Homo Sapiens
uacaggcgcccgccaccacaccuggcuaaguu

SEQ ID NO: 354212 - RNA, 32 nt, Homo Sapiens
gcagagcgcgccccuagccgguuccugucccu

SEQ ID NO: 354213 - RNA, 32 nt, Homo Sapiens
cagcagcauuucugacugacugagagagugua

SEQ ID NO: 354214 - RNA, 32 nt, Homo Sapiens
auguuaaauacgucuguaaaugguuaagcaag

SEQ ID NO: 354215 - RNA, 32 nt, Homo Sapiens
ugaacuucugggcaaaucuggaugcuaauugc

SEQ ID NO: 354216 - RNA, 32 nt, Homo Sapiens
agggaacggaagcagaagugggacaucgaggg

SEQ ID NO: 354217 - RNA, 32 nt, Homo Sapiens
acagcuuucuugcgucucauuugucgccgagc

SEQ ID NO: 354218 - RNA, 32 nt, Homo Sapiens
uacuguaguaacuuuuuuuuuaagagauuguu

SEQ ID NO: 354219 - RNA, 32 nt, Homo Sapiens
uacaagauaacacacacacacacacacacaca

SEQ ID NO: 354220 - RNA, 32 nt, Homo Sapiens
guggcggccgggcuuggcuucggcuccuugag

SEQ ID NO: 354221 - RNA, 31 nt, Homo Sapiens
gcaccaaacguauacaccugagcuagaaagu

SEQ ID NO: 354222 - RNA, 32 nt, Homo Sapiens
aggugagugggaaggagcagaaagcugggaaa

SEQ ID NO: 354223 - RNA, 32 nt, Homo Sapiens
cgagccugggguggagaggagggagccggcau

SEQ ID NO: 354224 - RNA, 32 nt, Homo Sapiens
uccucccugucauagagcugcaggguggauug

SEQ ID NO: 354225 - RNA, 32 nt, Homo Sapiens
cuuguaauuacauucauuguuuguuuuggcca

SEQ ID NO: 354226 - RNA, 32 nt, Homo Sapiens
caguuccuuucugcccaucacacagacgucca

SEQ ID NO: 354227 - RNA, 32 nt, Homo Sapiens
agcuucuuucccuuagugacucuugaaguacu

SEQ ID NO: 354228 - RNA, 32 nt, Homo Sapiens
aguugauuuuauucacaccauuagggguaugc

SEQ ID NO: 354229 - RNA, 32 nt, Homo Sapiens
gagccagcucugcggggucaucacgcagccau

SEQ ID NO: 354230 - RNA, 32 nt, Homo Sapiens
uucauugaguauguuuaaauuauuggcuuguc

SEQ ID NO: 354231 - RNA, 32 nt, Homo Sapiens
cggcgggccgcaggagggggucauggguaaag

SEQ ID NO: 354232 - RNA, 32 nt, Homo Sapiens
gcuuucaguuucaaaucgaaccuugaaagaca

SEQ ID NO: 354233 - RNA, 32 nt, Homo Sapiens
guggguuguuucugccgcucuguuugcugcag

SEQ ID NO: 354234 - RNA, 32 nt, Homo Sapiens
cggcucggccccagaucccgaucccucccucc

SEQ ID NO: 354235 - RNA, 32 nt, Homo Sapiens
cggacugugcuacuguauuugucucaaagcua

SEQ ID NO: 354236 - RNA, 32 nt, Homo Sapiens
uggcagguaaggaaacugagguccugugagug

SEQ ID NO: 354237 - RNA, 32 nt, Homo Sapiens
ugggaauccaaaugaugaugugcaauuucaug

SEQ ID NO: 354238 - RNA, 32 nt, Homo Sapiens
ucuagggcugaaccaggcgccaggcuccagag

SEQ ID NO: 354239 - RNA, 32 nt, Homo Sapiens
acccgccgccccauggcccaggcgucucgcuc

SEQ ID NO: 354240 - RNA, 32 nt, Homo Sapiens
uuucggggucagugucccacccuucacuuccc

SEQ ID NO: 354241 - RNA, 32 nt, Homo Sapiens
uccagcugcuggauaauacagaggaacuucaa

SEQ ID NO: 354242 - RNA, 32 nt, Homo Sapiens
ucuugacacugaagcagcuggugugggcugga

SEQ ID NO: 354243 - RNA, 32 nt, Homo Sapiens
cuccaccucaggugauccgccuaccuuggccu

SEQ ID NO: 354244 - RNA, 32 nt, Homo Sapiens
aauaaaauacuaggucauuggaggcuaaugug

SEQ ID NO: 354245 - RNA, 32 nt, Homo Sapiens
cuauaaucugcucugagcaguguuguguugug

SEQ ID NO: 354246 - RNA, 32 nt, Homo Sapiens
aggccgcuggaacaaaggaaggacagcucauu

SEQ ID NO: 354247 - RNA, 30 nt, Homo Sapiens
augaaugucugugggcaggaagugaagaga

SEQ ID NO: 354248 - RNA, 29 nt, Homo Sapiens
acugagucuuguuucaguaguaaaauuau

SEQ ID NO: 354249 - RNA, 32 nt, Homo Sapiens
caugaaggggcugccuuccacaaaugcuggcu

SEQ ID NO: 354250 - RNA, 32 nt, Homo Sapiens
gcagauaaauguuugaauucugcuccucucuc

SEQ ID NO: 354251 - RNA, 32 nt, Homo Sapiens
cucucugcuccuccuguucuacagucagccgc

SEQ ID NO: 354252 - RNA, 32 nt, Homo Sapiens
uggugccccccacuccacggacacagaagcuc

SEQ ID NO: 354253 - RNA, 32 nt, Homo Sapiens
ccaggggagagccacccacaggccauguccag

SEQ ID NO: 354254 - RNA, 32 nt, Homo Sapiens
ccucucggcgaaugcugcuugcgaaugugugc

SEQ ID NO: 354255 - RNA, 32 nt, Homo Sapiens
aauuuuuuggaaauuugcuguuguauuacuua

SEQ ID NO: 354256 - RNA, 32 nt, Homo Sapiens
cccgccuuccauaccuccccggcuccgcucgg

SEQ ID NO: 354257 - RNA, 32 nt, Homo Sapiens
gccuccgcgggcccggcccgcgucagcagcga

SEQ ID NO: 354258 - RNA, 32 nt, Homo Sapiens
gcgggguagcuauggcgacggcaagcgcggcc

SEQ ID NO: 354259 - RNA, 32 nt, Homo Sapiens
uaauuuuguucucuguaccaccaguugaaggg

SEQ ID NO: 354260 - RNA, 32 nt, Homo Sapiens
ccucggacccauuccaacaaucucguaaaaca

SEQ ID NO: 354261 - RNA, 32 nt, Homo Sapiens
auaaaaacugaaaaaagggauauauguuaccc

SEQ ID NO: 354262 - RNA, 29 nt, Homo Sapiens
gaccagccugaccaacauggcaaaacauc

SEQ ID NO: 354263 - RNA, 32 nt, Homo Sapiens
cauuauggcucccgaggggaagcgauuacuuu

SEQ ID NO: 354264 - RNA, 32 nt, Homo Sapiens
ggagggccgcgccaugcugacugcuugaaccu

SEQ ID NO: 354265 - RNA, 32 nt, Homo Sapiens
guaaggaaacaucauguuuaccugugcaggca

SEQ ID NO: 354266 - RNA, 32 nt, Homo Sapiens
ccaggcugcaucuucagccugauauguacuuu

SEQ ID NO: 354267 - RNA, 32 nt, Homo Sapiens
ggcauggggcaccuggugcugcugaggggcug

SEQ ID NO: 354268 - RNA, 32 nt, Homo Sapiens
aaggccgccgguguuacaccacggacaaagag

SEQ ID NO: 354269 - RNA, 32 nt, Homo Sapiens
cgcuggggacgccaggacgcgaaugaaccucc

SEQ ID NO: 354270 - RNA, 32 nt, Homo Sapiens
gacagugaaauaaaagaaauggcuugcugaaa

SEQ ID NO: 354271 - RNA, 32 nt, Homo Sapiens
gaguacgguggggauugcagcugcugagcagg

SEQ ID NO: 354272 - RNA, 32 nt, Homo Sapiens
gauuuuaugucccaggccguauucuaacaagg

SEQ ID NO: 354273 - RNA, 32 nt, Homo Sapiens
cugaugguguguccauuuugccugguauauaa

SEQ ID NO: 354274 - RNA, 32 nt, Homo Sapiens
gcaggacgccgcccccguggcucccggucucc

SEQ ID NO: 354275 - RNA, 31 nt, Homo Sapiens
ggcauuccuugaagccugccccgggcaguua

SEQ ID NO: 354276 - RNA, 32 nt, Homo Sapiens
gcccaccagggccaugcucugugacuugggcu

SEQ ID NO: 354277 - RNA, 32 nt, Homo Sapiens
gggugggugcagccagcgugcgggaacgggca

SEQ ID NO: 354278 - RNA, 32 nt, Homo Sapiens
uauuaaaacuaaaaaggaccagagaauucuua

SEQ ID NO: 354279 - RNA, 32 nt, Homo Sapiens
gcucuggaacucccagacgucccaggccccac

SEQ ID NO: 354280 - RNA, 32 nt, Homo Sapiens
cagggacaagauacucaccaggaccaggaagg

SEQ ID NO: 354281 - RNA, 32 nt, Homo Sapiens
aauaccacuuucggaccugggcggaccacgga

SEQ ID NO: 354282 - RNA, 32 nt, Homo Sapiens
agucagacaaaauaaaguuuugaagugcuacu

SEQ ID NO: 354283 - RNA, 32 nt, Homo Sapiens
gcaggugaggagggggcggggcaggaccgacc

SEQ ID NO: 354284 - RNA, 32 nt, Homo Sapiens
ugggaagagcguacugcagagccuagggccug

SEQ ID NO: 354285 - RNA, 32 nt, Homo Sapiens
auuguuuuaauggcauuuguugaaagaaaaaa

SEQ ID NO: 354286 - RNA, 32 nt, Homo Sapiens
guggcuugauguugauacacauuugaaauuuu

SEQ ID NO: 354287 - RNA, 32 nt, Homo Sapiens
cuauccuggggcuuggauaccuuuccaagucc

SEQ ID NO: 354288 - RNA, 32 nt, Homo Sapiens
caaggacaaaaauguucgaugugauuaauuca

SEQ ID NO: 354289 - RNA, 32 nt, Homo Sapiens
uugcucgccaccugguggccacgcguaccugc

SEQ ID NO: 354290 - RNA, 32 nt, Homo Sapiens
guuucuggauaucacgaugcugcgaguugccu

SEQ ID NO: 354291 - RNA, 27 nt, Homo Sapiens
accgucaauuacaucugguauuuguac

SEQ ID NO: 354292 - RNA, 32 nt, Homo Sapiens
gaauuacaaagaucugcaaaauuuauagcgcu

SEQ ID NO: 354293 - RNA, 32 nt, Homo Sapiens
gcauguuuucugcuggguggguucagagggca

SEQ ID NO: 354294 - RNA, 32 nt, Homo Sapiens
gucauggaauuguuuugauauuuuggaaaaca

SEQ ID NO: 354295 - RNA, 32 nt, Homo Sapiens
uuccuuuccuuccccguugugaaucucaguuu

SEQ ID NO: 354296 - RNA, 32 nt, Homo Sapiens
cuaagaggaaugccugcuggcuauugagauua

SEQ ID NO: 354297 - RNA, 32 nt, Homo Sapiens
gccccagcaggcacccaccucccugccaggcc

SEQ ID NO: 354298 - RNA, 32 nt, Homo Sapiens
ucaucuaaacuuaugagaccuugucuuagaga

SEQ ID NO: 354299 - RNA, 32 nt, Homo Sapiens
cuccauuaaaaaugcaauaaaaauaaauggca

SEQ ID NO: 354300 - RNA, 32 nt, Homo Sapiens
cucgaccaggccuccuucucaaccucagcccg

SEQ ID NO: 354301 - RNA, 32 nt, Homo Sapiens
uuggacagcccagaggcccagcuccccaguau

SEQ ID NO: 354302 - RNA, 32 nt, Homo Sapiens
cccugucuggcggggaacagggaccaagagac

SEQ ID NO: 354303 - RNA, 32 nt, Homo Sapiens
ggacgcugugaagcaaucauggaugcaaugaa

SEQ ID NO: 354304 - RNA, 32 nt, Homo Sapiens
uucccuuucugcagcgguugcacuacagguag

SEQ ID NO: 354305 - RNA, 32 nt, Homo Sapiens
aacuggaaagacugggaaugccuaauagcugg

SEQ ID NO: 354306 - RNA, 32 nt, Homo Sapiens
aguaucacgauaccacccacuucacaaaguuu

SEQ ID NO: 354307 - RNA, 32 nt, Homo Sapiens
ucauguacagcuuuuucuuuaccuuacccaaa

SEQ ID NO: 354308 - RNA, 32 nt, Homo Sapiens
uguccuuggagcuuccugggcccuucccuggg

SEQ ID NO: 354309 - RNA, 32 nt, Homo Sapiens
uuaacaauuuauuccauauaaaaauggaauuu

SEQ ID NO: 354310 - RNA, 32 nt, Homo Sapiens
gcggccgugggguggggaguccccggcacccc

SEQ ID NO: 354311 - RNA, 32 nt, Homo Sapiens
ccucuaaacaaaugcaugcaaagcuuuguaaa

SEQ ID NO: 354312 - RNA, 32 nt, Homo Sapiens
aaauagaaaccauuuucaaaagcaauucagaa

SEQ ID NO: 354313 - RNA, 32 nt, Homo Sapiens
gauucuaucuucauuuuagacuuuuggucugu

SEQ ID NO: 354314 - RNA, 27 nt, Homo Sapiens
uuaugaagcacuuuaagaaagaaaaga

SEQ ID NO: 354315 - RNA, 32 nt, Homo Sapiens
cucugucccccuccccuccccccggcacaccu

SEQ ID NO: 354316 - RNA, 32 nt, Homo Sapiens
cggaaaggccgcgucgugaucgacucggacac

SEQ ID NO: 354317 - RNA, 32 nt, Homo Sapiens
caagcucaccaucaaugagccuggacaaaaag

SEQ ID NO: 354318 - RNA, 32 nt, Homo Sapiens
acuccgacucuccgcugggcucccagagcugc

SEQ ID NO: 354319 - RNA, 32 nt, Homo Sapiens
gccugguguggacucugucuuaaaaggccucc

SEQ ID NO: 354320 - RNA, 31 nt, Homo Sapiens
gggaaggaaauuuguuugccaaauaaagacu

SEQ ID NO: 354321 - RNA, 32 nt, Homo Sapiens
uaacauaaacacauauaaaugcacuuacagca

SEQ ID NO: 354322 - RNA, 32 nt, Homo Sapiens
gucgagcccagccacccucccccgcggcggcg

SEQ ID NO: 354323 - RNA, 32 nt, Homo Sapiens
gaggaagagaaagaggaggagaauuaagaaga

SEQ ID NO: 354324 - RNA, 32 nt, Homo Sapiens
ggggccuuggggugcaugggugccgcccuggg

SEQ ID NO: 354325 - RNA, 32 nt, Homo Sapiens
cuuuauucaaggagauuuauggacuucaauuu

SEQ ID NO: 354326 - RNA, 32 nt, Homo Sapiens
aacccucccaaccaggccccagaucucgggga

SEQ ID NO: 354327 - RNA, 32 nt, Homo Sapiens
ggcccuucucagucccucagaacauugcccag

SEQ ID NO: 354328 - RNA, 32 nt, Homo Sapiens
agggugccaaccccaccucuaguauuuuggga

SEQ ID NO: 354329 - RNA, 32 nt, Homo Sapiens
accaggggcugacaaugcgaggucgcaacuga

SEQ ID NO: 354330 - RNA, 32 nt, Homo Sapiens
acgaugcccgcggugcccgcccggggcucugg

SEQ ID NO: 354331 - RNA, 32 nt, Homo Sapiens
uccuuuccaccucucacccauugcccaccauu

SEQ ID NO: 354332 - RNA, 32 nt, Homo Sapiens
aaaguccucagaagcuuuuucuuggaggguac

SEQ ID NO: 354333 - RNA, 32 nt, Homo Sapiens
gguggagacaggggcggggguccgcgcagagg

SEQ ID NO: 354334 - RNA, 32 nt, Homo Sapiens
uacuuggagugggggguggggguggggccaca

SEQ ID NO: 354335 - RNA, 32 nt, Homo Sapiens
aaaacagacccuuucaaguacuugcuuuuaaa

SEQ ID NO: 354336 - RNA, 32 nt, Homo Sapiens
acguggugaggguggccugggccugggcaccc

SEQ ID NO: 354337 - RNA, 32 nt, Homo Sapiens
agggugguguugcgcggggcugggauuagggc

SEQ ID NO: 354338 - RNA, 32 nt, Homo Sapiens
cuacugcauggagaaagugcugagggagagcg

SEQ ID NO: 354339 - RNA, 32 nt, Homo Sapiens
cauuuuaaguguuuaaaagcaaauacugauuu

SEQ ID NO: 354340 - RNA, 32 nt, Homo Sapiens
aggccugugugccacaccccagccuaacuccu

SEQ ID NO: 354341 - RNA, 32 nt, Homo Sapiens
cuagcuacuuuagaaauagaaaaugugaagag

SEQ ID NO: 354342 - RNA, 32 nt, Homo Sapiens
uaaagauuuuucuggagguucagcaaaguuau

SEQ ID NO: 354343 - RNA, 32 nt, Homo Sapiens
cuaaaaaaucaguaaaucuaaugacaacaaaa

SEQ ID NO: 354344 - RNA, 32 nt, Homo Sapiens
ucuucgucuccucccccucccccgucugacgc

SEQ ID NO: 354345 - RNA, 32 nt, Homo Sapiens
aaaccagaccacugaggagagccugcugagcu

SEQ ID NO: 354346 - RNA, 32 nt, Homo Sapiens
gcugugcgcgcgcgagcgggugugacgacuuu

SEQ ID NO: 354347 - RNA, 32 nt, Homo Sapiens
gcauaucauucuuuuucuuaagcuaaauuuuc

SEQ ID NO: 354348 - RNA, 32 nt, Homo Sapiens
gacugacuuguccaauaagauaagaucucaaa

SEQ ID NO: 354349 - RNA, 32 nt, Homo Sapiens
auuuucuggaauauaccaaguuuauauaauuu

SEQ ID NO: 354350 - RNA, 32 nt, Homo Sapiens
ugcucagcaaugggggcgccugcagcucuccc

SEQ ID NO: 354351 - RNA, 32 nt, Homo Sapiens
gagacacagcugcagaggccaccuggauugug

SEQ ID NO: 354352 - RNA, 32 nt, Homo Sapiens
cuccuuuacuuacaauaaguauaugcagcaca

SEQ ID NO: 354353 - RNA, 32 nt, Homo Sapiens
caaccaaggggagauggucccagaagucaaac

SEQ ID NO: 354354 - RNA, 32 nt, Homo Sapiens
auuuuugacagauuccucccaagucuggcucu

SEQ ID NO: 354355 - RNA, 32 nt, Homo Sapiens
gcacagugccuuuuccucuccugcucugagcc

SEQ ID NO: 354356 - RNA, 32 nt, Homo Sapiens
ucuucucuuuucuaauucuuuggauuuaauuu

SEQ ID NO: 354357 - RNA, 32 nt, Homo Sapiens
auuauuucuauugucuuugucuuaauaugcua

SEQ ID NO: 354358 - RNA, 32 nt, Homo Sapiens
guggggcccugacaccacguuaucaaacaugc

SEQ ID NO: 354359 - RNA, 32 nt, Homo Sapiens
cucaucauagugaguucucaugggaucugaug

SEQ ID NO: 354360 - RNA, 32 nt, Homo Sapiens
acgggacuuacgauuccaacccgucagcauag

SEQ ID NO: 354361 - RNA, 32 nt, Homo Sapiens
ugcugcgcgggcuuuuggagggggcggccguu

SEQ ID NO: 354362 - RNA, 32 nt, Homo Sapiens
ccaugggcgcugucgggcacucgggggucccc

SEQ ID NO: 354363 - RNA, 32 nt, Homo Sapiens
auaccugagugggcuccgggacgcugcucuuc

SEQ ID NO: 354364 - RNA, 32 nt, Homo Sapiens
aggaauauuuagucugauagagagaagucuug

SEQ ID NO: 354365 - RNA, 32 nt, Homo Sapiens
cugagaucgggaguuugagaccagucugacca

SEQ ID NO: 354366 - RNA, 32 nt, Homo Sapiens
gcauggaggagcuggaggagauggggauggac

SEQ ID NO: 354367 - RNA, 32 nt, Homo Sapiens
ggcagguaggcgggagcuucccugcgugggcc

SEQ ID NO: 354368 - RNA, 32 nt, Homo Sapiens
guguguauauauaaauacauauaugacugccu

SEQ ID NO: 354369 - RNA, 32 nt, Homo Sapiens
ggcacagccaaggaaugagcccugugggguga

SEQ ID NO: 354370 - RNA, 32 nt, Homo Sapiens
gccccugccuuggucagcauccaugcugcugg

SEQ ID NO: 354371 - RNA, 32 nt, Homo Sapiens
ccucaaccaaaauuuuuuuaaucuuagacauu

SEQ ID NO: 354372 - RNA, 32 nt, Homo Sapiens
cauuguuuucccuuauuuuaaaagugauuuuu

SEQ ID NO: 354373 - RNA, 32 nt, Homo Sapiens
gaagaggaggccggauugaugcauuaacaagu

SEQ ID NO: 354374 - RNA, 32 nt, Homo Sapiens
gaagguauaaauuuauauuauugugauggaaa

SEQ ID NO: 354375 - RNA, 32 nt, Homo Sapiens
cuacccacccccaucaccuacuccagcuccca

SEQ ID NO: 354376 - RNA, 32 nt, Homo Sapiens
ggacucuauucauccacccagccuuuucauuu

SEQ ID NO: 354377 - RNA, 32 nt, Homo Sapiens
ccccaccccacuuucggggccgcugcgcugga

SEQ ID NO: 354378 - RNA, 32 nt, Homo Sapiens
guuccuuuuguuuuaauaaaaugugucacuga

SEQ ID NO: 354379 - RNA, 32 nt, Homo Sapiens
aagaagacccagaacggcgucacuucucagac

SEQ ID NO: 354380 - RNA, 32 nt, Homo Sapiens
aucucggcucacgguaaccucugccucccagg

SEQ ID NO: 354381 - RNA, 32 nt, Homo Sapiens
ggcacuggugguccuccuccuccucacucuuc

SEQ ID NO: 354382 - RNA, 32 nt, Homo Sapiens
ccuaaauguucccuucucaggaauucugucuc

SEQ ID NO: 354383 - RNA, 32 nt, Homo Sapiens
ucccaggauggaggagccccaggccggcgaug

SEQ ID NO: 354384 - RNA, 32 nt, Homo Sapiens
cccaggcaaccucagaucuguuaauguguccg

SEQ ID NO: 354385 - RNA, 32 nt, Homo Sapiens
uugaaacuaggggucuccagugcuccugacuc

SEQ ID NO: 354386 - RNA, 32 nt, Homo Sapiens
guaauuuuaaaacaauauuuucaaauuauauu

SEQ ID NO: 354387 - RNA, 32 nt, Homo Sapiens
ccccucgcucccacccuucucuauugucugga

SEQ ID NO: 354388 - RNA, 32 nt, Homo Sapiens
gccugugaucauaaguuggguuucugaucuga

SEQ ID NO: 354389 - RNA, 32 nt, Homo Sapiens
gaaagaugcaugccucuuuggcucuuugaaca

SEQ ID NO: 354390 - RNA, 32 nt, Homo Sapiens
gccccgccccccacccccuaccaucucccaau

SEQ ID NO: 354391 - RNA, 32 nt, Homo Sapiens
uacaccaaugauuauuucucacaguuuucaug

SEQ ID NO: 354392 - RNA, 31 nt, Homo Sapiens
uuuaaaagagcaauaaaaaugaauuaugacu

SEQ ID NO: 354393 - RNA, 32 nt, Homo Sapiens
gaguguuucaguauuauagaaacagugaugac

SEQ ID NO: 354394 - RNA, 32 nt, Homo Sapiens
ggugguuugggcuugucuucuagucugggccg

SEQ ID NO: 354395 - RNA, 32 nt, Homo Sapiens
accccggagggguggggccgguguguguggcu

SEQ ID NO: 354396 - RNA, 32 nt, Homo Sapiens
gggggugggcccggcccucccuggaucuccuc

SEQ ID NO: 354397 - RNA, 32 nt, Homo Sapiens
cucacuucaucuaguuuagucccuuuauccug

SEQ ID NO: 354398 - RNA, 32 nt, Homo Sapiens
auuucaagcaaaaaccagaucuggagauccua

SEQ ID NO: 354399 - RNA, 31 nt, Homo Sapiens
caccuuuugugcuuaucuuugugcuaaaugu

SEQ ID NO: 354400 - RNA, 32 nt, Homo Sapiens
ugugggauaugacaccaauaaggaaugcuuua

SEQ ID NO: 354401 - RNA, 32 nt, Homo Sapiens
ucccaguacaccaguuguuccucccccaccuc

SEQ ID NO: 354402 - RNA, 32 nt, Homo Sapiens
cgauuagaaagaugaacaaaguauugcccuuu

SEQ ID NO: 354403 - RNA, 32 nt, Homo Sapiens
ucaagagucugugccagacuugaaggcuuuac

SEQ ID NO: 354404 - RNA, 32 nt, Homo Sapiens
gauacgcacagcacaccacugucccuucacug

SEQ ID NO: 354405 - RNA, 32 nt, Homo Sapiens
gagcaugcgcgagagagucuccgagugugugc

SEQ ID NO: 354406 - RNA, 32 nt, Homo Sapiens
gacaaacccugguguuuggagaggccccaggg

SEQ ID NO: 354407 - RNA, 32 nt, Homo Sapiens
aauguugccaccuuguuuguaacagugaaaaa

SEQ ID NO: 354408 - RNA, 32 nt, Homo Sapiens
gccauuaauguuucuuaucuauaucuguaucu

SEQ ID NO: 354409 - RNA, 32 nt, Homo Sapiens
cgggaagcugggugacggguucgcggcugccg

SEQ ID NO: 354410 - RNA, 29 nt, Homo Sapiens
aauuuuaggacugggugaaagcuaugcca

SEQ ID NO: 354411 - RNA, 32 nt, Homo Sapiens
cguuuuacaugaucugauacaaccauuaauga

SEQ ID NO: 354412 - RNA, 32 nt, Homo Sapiens
cacugcggcugcucaagacccuggagcuguac

SEQ ID NO: 354413 - RNA, 32 nt, Homo Sapiens
gcaggcuuugacucguucuccucccuggccuu

SEQ ID NO: 354414 - RNA, 32 nt, Homo Sapiens
gcucuucaagucccggcuccccggccgccucc

SEQ ID NO: 354415 - RNA, 31 nt, Homo Sapiens
uuuuucacaaagagcaaugacuuuauuuugc

SEQ ID NO: 354416 - RNA, 32 nt, Homo Sapiens
auacucauagaguuuguacaaaauauucaguu

SEQ ID NO: 354417 - RNA, 32 nt, Homo Sapiens
aggaacugcucccaccucuccuucucuuuccc

SEQ ID NO: 354418 - RNA, 32 nt, Homo Sapiens
acugcccuccaagaucuucccuugggcuuuuc

SEQ ID NO: 354419 - RNA, 32 nt, Homo Sapiens
aauugccuuaaaggauuugaaguaagaacaua

SEQ ID NO: 354420 - RNA, 32 nt, Homo Sapiens
ugucaguagcagucacuuaaaauacauuuugu

SEQ ID NO: 354421 - RNA, 32 nt, Homo Sapiens
gaccugcaaacacacacacacacacacacaca

SEQ ID NO: 354422 - RNA, 32 nt, Homo Sapiens
ggugugagcgccagcggaugggugucacaaau

SEQ ID NO: 354423 - RNA, 32 nt, Homo Sapiens
gcgaagcccccuccccggggaggcgggaccug

SEQ ID NO: 354424 - RNA, 32 nt, Homo Sapiens
caggcugcccucuccuucucugcccccacccc

SEQ ID NO: 354425 - RNA, 32 nt, Homo Sapiens
gucuacacccagaugguagcgcuugugacacu

SEQ ID NO: 354426 - RNA, 32 nt, Homo Sapiens
caggcgggagauguucuuggggcuuaggcucc

SEQ ID NO: 354427 - RNA, 32 nt, Homo Sapiens
aguggggaugagaggagaagucuuggcuucac

SEQ ID NO: 354428 - RNA, 32 nt, Homo Sapiens
gagugccugugcugucaggaagagggggugcu

SEQ ID NO: 354429 - RNA, 32 nt, Homo Sapiens
cacccccucugugccaagaguaaggcagggau

SEQ ID NO: 354430 - RNA, 32 nt, Homo Sapiens
uucacuuaguaagauaaggagcuccaaaucau

SEQ ID NO: 354431 - RNA, 32 nt, Homo Sapiens
ugaguauaaaagacaaaaguugaacagcaugg

SEQ ID NO: 354432 - RNA, 32 nt, Homo Sapiens
cucucuuuacuucccaguauaagauuuuugaa

SEQ ID NO: 354433 - RNA, 32 nt, Homo Sapiens
uucccauacccgggggaccccugacaaaccca

SEQ ID NO: 354434 - RNA, 32 nt, Homo Sapiens
aauuuaauugaaagaagaaacaacaacaaaaa

SEQ ID NO: 354435 - RNA, 32 nt, Homo Sapiens
auuuugccaaaauaacuuuuuguaucaaauau

SEQ ID NO: 354436 - RNA, 32 nt, Homo Sapiens
uuuguuuucuucaauagucuuauuuucagucu

SEQ ID NO: 354437 - RNA, 32 nt, Homo Sapiens
uuugagacacggucugacucugucacccaggc

SEQ ID NO: 354438 - RNA, 32 nt, Homo Sapiens
cguagagguuugcgguggggcuggguccccgg

SEQ ID NO: 354439 - RNA, 32 nt, Homo Sapiens
uaaagauacaaaaugguauuguuuacauuacu

SEQ ID NO: 354440 - RNA, 28 nt, Homo Sapiens
cuucgaguuacaggucaggaaaagccug

SEQ ID NO: 354441 - RNA, 32 nt, Homo Sapiens
aaagaagucaacauguagaucuggaagggaca

SEQ ID NO: 354442 - RNA, 32 nt, Homo Sapiens
cgagcggccccggaccgcaggccggacuacac

SEQ ID NO: 354443 - RNA, 32 nt, Homo Sapiens
cugagagacagaggaggaacucagaaggaucc

SEQ ID NO: 354444 - RNA, 32 nt, Homo Sapiens
cccuccucugccgcugucccagcccagucccu

SEQ ID NO: 354445 - RNA, 32 nt, Homo Sapiens
gccagagcugcgcgugcugcuuugcccgagcc

SEQ ID NO: 354446 - RNA, 32 nt, Homo Sapiens
cuauaccuuuuggggagguuccaguugauuga

SEQ ID NO: 354447 - RNA, 32 nt, Homo Sapiens
uuccaaaugcccucgucgauuuagcuucaaua

SEQ ID NO: 354448 - RNA, 32 nt, Homo Sapiens
ugcaguuuuguuacauggauagauugccuagu

SEQ ID NO: 354449 - RNA, 32 nt, Homo Sapiens
ccacagguagucagauccuuucugccuuaggu

SEQ ID NO: 354450 - RNA, 27 nt, Homo Sapiens
cgucacuauuaauucggaaagaaaaaa

SEQ ID NO: 354451 - RNA, 32 nt, Homo Sapiens
ccaaguacccucaccggcaugggacaugaggg

SEQ ID NO: 354452 - RNA, 32 nt, Homo Sapiens
guggacccuccucuaaucuccuccugcugugc

SEQ ID NO: 354453 - RNA, 32 nt, Homo Sapiens
cuaucuccacuuuaaaucuguccuguaaaagu

SEQ ID NO: 354454 - RNA, 32 nt, Homo Sapiens
uuucaaaacaauuuugugaauuuuauuuuuac

SEQ ID NO: 354455 - RNA, 32 nt, Homo Sapiens
ccgcugcggaggccggagacgcggcggcgcug

SEQ ID NO: 354456 - RNA, 32 nt, Homo Sapiens
gacuggggagacgaugcuguugcuuugcagau

SEQ ID NO: 354457 - RNA, 32 nt, Homo Sapiens
uuguaaggcggcauucgccgggcagaaccaug

SEQ ID NO: 354458 - RNA, 32 nt, Homo Sapiens
aaaauuguuuugaguuucccccggggauaaac

SEQ ID NO: 354459 - RNA, 32 nt, Homo Sapiens
gagguccagaugagagcagagauacagugaga

SEQ ID NO: 354460 - RNA, 32 nt, Homo Sapiens
aggcauaaugaaaguuuauuuaaugauucuug

SEQ ID NO: 354461 - RNA, 32 nt, Homo Sapiens
uaacacuuaauuugagcagcuuuuuuauuaca

SEQ ID NO: 354462 - RNA, 32 nt, Homo Sapiens
cgaaaaaucaaaccuucugaaaauuaugauau

SEQ ID NO: 354463 - RNA, 29 nt, Homo Sapiens
gccgaucggggaccgagaaggggaaucga

SEQ ID NO: 354464 - RNA, 32 nt, Homo Sapiens
acauuggaaacgcaguagaaaauggcugccaa

SEQ ID NO: 354465 - RNA, 32 nt, Homo Sapiens
gcuauuagguaguuuacagaucuuuauaaggu

SEQ ID NO: 354466 - RNA, 32 nt, Homo Sapiens
caucugcgcuggguguugugggacacaugcag

SEQ ID NO: 354467 - RNA, 30 nt, Homo Sapiens
acuauagaauaaagccucugugcugcacaa

SEQ ID NO: 354468 - RNA, 29 nt, Homo Sapiens
aaaaauggauuuggccaaccauggacuua

SEQ ID NO: 354469 - RNA, 32 nt, Homo Sapiens
aauggcauuccacaacagugcugcgacccgug

SEQ ID NO: 354470 - RNA, 32 nt, Homo Sapiens
cuggaguggcucucgucgaagacugucuucca

SEQ ID NO: 354471 - RNA, 32 nt, Homo Sapiens
guuccugaugacccaggcugccugagcaccuc

SEQ ID NO: 354472 - RNA, 32 nt, Homo Sapiens
gggcccgaagcgccagagauggcugcucagcg

SEQ ID NO: 354473 - RNA, 30 nt, Homo Sapiens
ccugauucucgcgauuauucucgaaucacc

SEQ ID NO: 354474 - RNA, 32 nt, Homo Sapiens
uguugaauaggaaauaaaauuaaugaagacag

SEQ ID NO: 354475 - RNA, 32 nt, Homo Sapiens
uuucacccagcucuuucuuaaugucuguguug

SEQ ID NO: 354476 - RNA, 32 nt, Homo Sapiens
gccgccgcguccucagccaccgcucccucuuc

SEQ ID NO: 354477 - RNA, 32 nt, Homo Sapiens
uuacagugcccauuuugaaauugccuauacag

SEQ ID NO: 354478 - RNA, 32 nt, Homo Sapiens
uuuaacaaaucagcuaugugguuccaaaguuu

SEQ ID NO: 354479 - RNA, 32 nt, Homo Sapiens
aaacaccauagggacccauucuacacagagca

SEQ ID NO: 354480 - RNA, 32 nt, Homo Sapiens
uuaacuacaguuugguaaauuguuauguuaac

SEQ ID NO: 354481 - RNA, 32 nt, Homo Sapiens
ggcugagcggguggauggguggacagaagggc

SEQ ID NO: 354482 - RNA, 32 nt, Homo Sapiens
ccccaacccuccccaccguccccccuucacua

SEQ ID NO: 354483 - RNA, 32 nt, Homo Sapiens
agcgucaauuguacugaaaaccacuuccagag

SEQ ID NO: 354484 - RNA, 32 nt, Homo Sapiens
gcagggcgugacucaccgcugggugcuugcca

SEQ ID NO: 354485 - RNA, 32 nt, Homo Sapiens
uugucagguaauuuuucccaagccguggauau

SEQ ID NO: 354486 - RNA, 32 nt, Homo Sapiens
guugcggaggucgggccugacugcagcgcagg

SEQ ID NO: 354487 - RNA, 32 nt, Homo Sapiens
ccagcuuugucaaucacccaagcacuuuaugc

SEQ ID NO: 354488 - RNA, 32 nt, Homo Sapiens
augcuuugaagaauuuauguaauuaaaauuuc

SEQ ID NO: 354489 - RNA, 32 nt, Homo Sapiens
ggaacugauaucucuggcuaaauauuuguccu

SEQ ID NO: 354490 - RNA, 32 nt, Homo Sapiens
caggagagggggcuaaggggcuggauccacca

SEQ ID NO: 354491 - RNA, 32 nt, Homo Sapiens
agccugcucuacuacuaacaaacaggccugcu

SEQ ID NO: 354492 - RNA, 32 nt, Homo Sapiens
gagagaaagugggaccuggugggcucaaccac

SEQ ID NO: 354493 - RNA, 32 nt, Homo Sapiens
aagggagugaucugcuuuacaugauacuaugc

SEQ ID NO: 354494 - RNA, 32 nt, Homo Sapiens
gcaagaugaccauuaugguuauggucuacugc

SEQ ID NO: 354495 - RNA, 32 nt, Homo Sapiens
uagcugcuaagagcuucacgcagguuuggccu

SEQ ID NO: 354496 - RNA, 32 nt, Homo Sapiens
cccuccuguccccaagcuuucaggcaggcacu

SEQ ID NO: 354497 - RNA, 32 nt, Homo Sapiens
aaggccccaaggaguucuuggguguggguucu

SEQ ID NO: 354498 - RNA, 32 nt, Homo Sapiens
cucaauaaaaauugauccacugucaaaaaaaa

SEQ ID NO: 354499 - RNA, 32 nt, Homo Sapiens
gacacuuguaagucaaucaguguuaaaguauu

SEQ ID NO: 354500 - RNA, 32 nt, Homo Sapiens
cuguaguggcccccuccuccccggccccuuuu

SEQ ID NO: 354501 - RNA, 32 nt, Homo Sapiens
uuuacuuccuuccccuguuguccaguccaacu

SEQ ID NO: 354502 - RNA, 29 nt, Homo Sapiens
aagagucauaggauuugaaagcuguuaga

SEQ ID NO: 354503 - RNA, 32 nt, Homo Sapiens
aguuagaaaaagacaaaauauugaaaugcuuc

SEQ ID NO: 354504 - RNA, 32 nt, Homo Sapiens
uggcucccaccuguagucccagcacuuuggga

SEQ ID NO: 354505 - RNA, 32 nt, Homo Sapiens
cuccuaaugcuaucccuccccccucccccaac

SEQ ID NO: 354506 - RNA, 31 nt, Homo Sapiens
cuguucccaccaucagcucaggcacuggcag

SEQ ID NO: 354507 - RNA, 32 nt, Homo Sapiens
gcugaguucacagaugaccacuaaacuucagg

SEQ ID NO: 354508 - RNA, 32 nt, Homo Sapiens
uuacagaagauucuuuuuuccaaacaguaggu

SEQ ID NO: 354509 - RNA, 32 nt, Homo Sapiens
augcgcgccgcugcuccgcgcgcugcccgggg

SEQ ID NO: 354510 - RNA, 32 nt, Homo Sapiens
uucucauuggccucuucagugauccccaugga

SEQ ID NO: 354511 - RNA, 32 nt, Homo Sapiens
caggagauccugaggcugguaggggaagguaa

SEQ ID NO: 354512 - RNA, 32 nt, Homo Sapiens
uucccacauaucugcauuucaagacuggguua

SEQ ID NO: 354513 - RNA, 32 nt, Homo Sapiens
ggcaguagagcagguagacgccgaaaaagcgc

SEQ ID NO: 354514 - RNA, 32 nt, Homo Sapiens
gagaccugcccccuaucucuacaaggaauaaa

SEQ ID NO: 354515 - RNA, 32 nt, Homo Sapiens
cagccucugaugcagcaucugcuuuggccucu

SEQ ID NO: 354516 - RNA, 32 nt, Homo Sapiens
ccuaguagacauaauuaaugauggagagaaac

SEQ ID NO: 354517 - RNA, 32 nt, Homo Sapiens
cuaaaugucuccccggccuugacuuuucuuuc

SEQ ID NO: 354518 - RNA, 32 nt, Homo Sapiens
guggcugugaaccugacuauggaaaagaugug

SEQ ID NO: 354519 - RNA, 28 nt, Homo Sapiens
gccuaugugcggccgccaccgcggugga

SEQ ID NO: 354520 - RNA, 32 nt, Homo Sapiens
uuccaguuaaggaccgaggcccugcccucucc

SEQ ID NO: 354521 - RNA, 29 nt, Homo Sapiens
ucagugaaguguuucaguagaaaguguca

SEQ ID NO: 354522 - RNA, 32 nt, Homo Sapiens
ucuaggcugaggugggggacacaggagaaacc

SEQ ID NO: 354523 - RNA, 32 nt, Homo Sapiens
ugaguugucuucuuggagcuguaggucuugaa

SEQ ID NO: 354524 - RNA, 32 nt, Homo Sapiens
auguuaggagggucuguuuucuuuuuauauaa

SEQ ID NO: 354525 - RNA, 32 nt, Homo Sapiens
gcagugagcccucagugagcugccacugaguc

SEQ ID NO: 354526 - RNA, 32 nt, Homo Sapiens
auguccucccgugccccuccccgcuguccucu

SEQ ID NO: 354527 - RNA, 30 nt, Homo Sapiens
uccauguguugugcugcacgggcuacuggc

SEQ ID NO: 354528 - RNA, 32 nt, Homo Sapiens
aggucgcggcagaggagauaggggucuguccu

SEQ ID NO: 354529 - RNA, 32 nt, Homo Sapiens
uucacaaaaauaaaacucuacaacucauucua

SEQ ID NO: 354530 - RNA, 32 nt, Homo Sapiens
ugugguuuuuucugagaggcucccagaaccaa

SEQ ID NO: 354531 - RNA, 32 nt, Homo Sapiens
gagacccucggcccccucuccuccauuucuga

SEQ ID NO: 354532 - RNA, 32 nt, Homo Sapiens
ucuguuaccaaagggaggggggcggcuuuugu

SEQ ID NO: 354533 - RNA, 32 nt, Homo Sapiens
gguucuuuuuucauaggaaauuccuucauaaa

SEQ ID NO: 354534 - RNA, 32 nt, Homo Sapiens
gaauugcggaaaucaaucugugaaugugguuc

SEQ ID NO: 354535 - RNA, 32 nt, Homo Sapiens
uauuuuaauauuuguuauucucucaugaauag

SEQ ID NO: 354536 - RNA, 32 nt, Homo Sapiens
uaaaauaagaauguuauccaacuauuaagaua

SEQ ID NO: 354537 - RNA, 32 nt, Homo Sapiens
gcgggguuccaagaggaaaguguuugacuccu

SEQ ID NO: 354538 - RNA, 32 nt, Homo Sapiens
uagagucgaagcagcaugcaaaaaauaauaau

SEQ ID NO: 354539 - RNA, 32 nt, Homo Sapiens
acacacauauuuuaucccaaguuuauaauggu

SEQ ID NO: 354540 - RNA, 32 nt, Homo Sapiens
aggucauguucgcuccuuagcaggcaaacgac

SEQ ID NO: 354541 - RNA, 32 nt, Homo Sapiens
acacacacaccaagugcgcacacacaccgaug

SEQ ID NO: 354542 - RNA, 32 nt, Homo Sapiens
gagccgcugucaacagacaguuuauucuauau

SEQ ID NO: 354543 - RNA, 32 nt, Homo Sapiens
acagcuagaugaaacuuucuauagaaaaaaaa

SEQ ID NO: 354544 - RNA, 32 nt, Homo Sapiens
ccuuacgccaccuuuugguuuguaaaagguuu

SEQ ID NO: 354545 - RNA, 32 nt, Homo Sapiens
uuuagauaguggcuuuccuucuucuggauucu

SEQ ID NO: 354546 - RNA, 32 nt, Homo Sapiens
aaguuugugaauggaguguuauuuuggacauu

SEQ ID NO: 354547 - RNA, 32 nt, Homo Sapiens
ucaggcuguuguagucagcagagccuagaaug

SEQ ID NO: 354548 - RNA, 32 nt, Homo Sapiens
acgagucggcgcacgcggccucgguccgguug

SEQ ID NO: 354549 - RNA, 32 nt, Homo Sapiens
gaaugggaugacugguggcugaguuacuugcu

SEQ ID NO: 354550 - RNA, 32 nt, Homo Sapiens
acaaaggcucuuucucagcacauugaugggca

SEQ ID NO: 354551 - RNA, 32 nt, Homo Sapiens
ucucuguccgcccuucacaccuccagccucac

SEQ ID NO: 354552 - RNA, 32 nt, Homo Sapiens
cauaauuuucuuuucauaaaacauucuuugua

SEQ ID NO: 354553 - RNA, 32 nt, Homo Sapiens
aaguccuuuccaccucucacccauugcccacc

SEQ ID NO: 354554 - RNA, 32 nt, Homo Sapiens
uccagcagccugggccccgucacgguccaaug

SEQ ID NO: 354555 - RNA, 32 nt, Homo Sapiens
uuaccccuucuccuccagcaguggcaaagggg

SEQ ID NO: 354556 - RNA, 32 nt, Homo Sapiens
caaucagaacaguauguauuuacaaaauaaua

SEQ ID NO: 354557 - RNA, 32 nt, Homo Sapiens
guagcugagcccggcaggggcugggguggugc

SEQ ID NO: 354558 - RNA, 32 nt, Homo Sapiens
uccaccccaucccaucccaccuugaaaaucgc

SEQ ID NO: 354559 - RNA, 30 nt, Homo Sapiens
aggccaugccggggccccggcgccccgcug

SEQ ID NO: 354560 - RNA, 32 nt, Homo Sapiens
cggucuucugcgccuggaucuugauguuccgg

SEQ ID NO: 354561 - RNA, 32 nt, Homo Sapiens
uccaggugccgcggccagcucucuacaccucu

SEQ ID NO: 354562 - RNA, 32 nt, Homo Sapiens
ugagucugaagaggaugugcugugguguauug

SEQ ID NO: 354563 - RNA, 32 nt, Homo Sapiens
uucguacaaaaauuuuaaaaaguuaccaaagg

SEQ ID NO: 354564 - RNA, 32 nt, Homo Sapiens
agugcaaaaaguaaugauagugaaugugauac

SEQ ID NO: 354565 - RNA, 32 nt, Homo Sapiens
aauucucacagucccagagggauugaagaguu

SEQ ID NO: 354566 - RNA, 32 nt, Homo Sapiens
agggaagagaagaaacagaagcggcucaguuc

SEQ ID NO: 354567 - RNA, 32 nt, Homo Sapiens
acuaagccugguugcagcaugcuugaaaucug

SEQ ID NO: 354568 - RNA, 32 nt, Homo Sapiens
uguggaaagggagagccauacugcacggacgu

SEQ ID NO: 354569 - RNA, 32 nt, Homo Sapiens
gcaucagcugucugucaucugcugcgauccgg

SEQ ID NO: 354570 - RNA, 32 nt, Homo Sapiens
acuccucuggagguuguuuuugaaagaaacag

SEQ ID NO: 354571 - RNA, 32 nt, Homo Sapiens
ucuggugcuguauauacgaaucuugcaaagcu

SEQ ID NO: 354572 - RNA, 32 nt, Homo Sapiens
cauucuaagcauuuacccuuuugauacucuag

SEQ ID NO: 354573 - RNA, 32 nt, Homo Sapiens
auggggugggguggagugggggcuucugagag

SEQ ID NO: 354574 - RNA, 32 nt, Homo Sapiens
aucgugacuaacacagugaaaccccgucucua

SEQ ID NO: 354575 - RNA, 32 nt, Homo Sapiens
ccggaccucacagcugacugggaacuggacau

SEQ ID NO: 354576 - RNA, 32 nt, Homo Sapiens
acuauuaauuugucugauuauauccuggugac

SEQ ID NO: 354577 - RNA, 32 nt, Homo Sapiens
agggaagacuggaaaugcugccgccuucugca

SEQ ID NO: 354578 - RNA, 32 nt, Homo Sapiens
cugcggggcuggggcggggagcgggcgggaaa

SEQ ID NO: 354579 - RNA, 32 nt, Homo Sapiens
ugaaauguguuaccauuucauauccauugaag

SEQ ID NO: 354580 - RNA, 32 nt, Homo Sapiens
gagcgccauggcuccuaggaagggcaguaguc

SEQ ID NO: 354581 - RNA, 32 nt, Homo Sapiens
acugccucugucaucaggacccuccguccacg

SEQ ID NO: 354582 - RNA, 32 nt, Homo Sapiens
gggugcugggggugggggcggggacagaggaa

SEQ ID NO: 354583 - RNA, 32 nt, Homo Sapiens
gccucucuacagcacggccuguggccuguuca

SEQ ID NO: 354584 - RNA, 32 nt, Homo Sapiens
uccccaauuuaaacaaagauucugccaacugu

SEQ ID NO: 354585 - RNA, 32 nt, Homo Sapiens
auucaaugaagauaucauuaccagguuacucu

SEQ ID NO: 354586 - RNA, 32 nt, Homo Sapiens
ccaccgcugagaagcaggcccgggcacucugc

SEQ ID NO: 354587 - RNA, 29 nt, Homo Sapiens
ugaaaucggggacaaaggacaaacagaga

SEQ ID NO: 354588 - RNA, 32 nt, Homo Sapiens
auguggauccugaaaaguguuaugaacaucug

SEQ ID NO: 354589 - RNA, 32 nt, Homo Sapiens
cagccccggcacucgcucuccuccucucacgg

SEQ ID NO: 354590 - RNA, 32 nt, Homo Sapiens
uuuggguuuuccuuuuucacucacaaacagca

SEQ ID NO: 354591 - RNA, 32 nt, Homo Sapiens
auuagagucauuuuaauccaaauuuucacaga

SEQ ID NO: 354592 - RNA, 28 nt, Homo Sapiens
aaggaauaaguuggaccaagggaagucg

SEQ ID NO: 354593 - RNA, 32 nt, Homo Sapiens
ucuagccuugggggcuugaguccagcccuggg

SEQ ID NO: 354594 - RNA, 32 nt, Homo Sapiens
ucuaucauuugaaugccuggggucugccuccg

SEQ ID NO: 354595 - RNA, 32 nt, Homo Sapiens
ugcccucccggacuuaucuacucuucacuuuc

SEQ ID NO: 354596 - RNA, 32 nt, Homo Sapiens
ucacuuuauaaaaugugagguuuauagguacu

SEQ ID NO: 354597 - RNA, 32 nt, Homo Sapiens
aaaaaaaaaaacaaaaaaggcugaaggcagcu

SEQ ID NO: 354598 - RNA, 32 nt, Homo Sapiens
ccggaagcggcggcgcucgggaggaagugccg

SEQ ID NO: 354599 - RNA, 32 nt, Homo Sapiens
acucaaaucucaccuugaauuaaauccccaua

SEQ ID NO: 354600 - RNA, 32 nt, Homo Sapiens
uuggaagugucuaauaaggugucacaauuuuu

SEQ ID NO: 354601 - RNA, 32 nt, Homo Sapiens
gcgauggccgcuccguguuccucggugggcca

SEQ ID NO: 354602 - RNA, 32 nt, Homo Sapiens
uuuuuuaaaaauuagccuugauauucuccaga

SEQ ID NO: 354603 - RNA, 32 nt, Homo Sapiens
gcgcgagcgccaggcguccggccgccguggcu

SEQ ID NO: 354604 - RNA, 32 nt, Homo Sapiens
ccccuagccccgcacaucagcgcggaccgcgg

SEQ ID NO: 354605 - RNA, 32 nt, Homo Sapiens
aaccaucuuuacaggcuccuagaagcugaagg

SEQ ID NO: 354606 - RNA, 32 nt, Homo Sapiens
uaacuuacgaucucuugacauacgguuucugg

SEQ ID NO: 354607 - RNA, 32 nt, Homo Sapiens
aagggcgcgggccgcggucccugcgcgugcgg

SEQ ID NO: 354608 - RNA, 32 nt, Homo Sapiens
aggacgccgggcgcgcacucggugcugauuau

SEQ ID NO: 354609 - RNA, 32 nt, Homo Sapiens
aagauucagcuguguccccuccagucugggau

SEQ ID NO: 354610 - RNA, 32 nt, Homo Sapiens
uucuguuuuuguuuugcugaucaaaaaagccc

SEQ ID NO: 354611 - RNA, 32 nt, Homo Sapiens
cgcuguaguuugucucuuucuuaucuuuuugc

SEQ ID NO: 354612 - RNA, 32 nt, Homo Sapiens
uuugcuggauuucccuucucccucgcuguuca

SEQ ID NO: 354613 - RNA, 32 nt, Homo Sapiens
acuuuuuccaacaaaacccacuccauagccau

SEQ ID NO: 354614 - RNA, 31 nt, Homo Sapiens
uuacauguucaucucuugccaaauaaggguc

SEQ ID NO: 354615 - RNA, 32 nt, Homo Sapiens
aucaggugacuuugagucaaucaaaagguaga

SEQ ID NO: 354616 - RNA, 32 nt, Homo Sapiens
auuuuccuuucugucugggagcacgccaagau

SEQ ID NO: 354617 - RNA, 32 nt, Homo Sapiens
cuccaaaccauccagcagcaccaacaggcuga

SEQ ID NO: 354618 - RNA, 32 nt, Homo Sapiens
cacgcuccaacacacacacacacacacacaca

SEQ ID NO: 354619 - RNA, 32 nt, Homo Sapiens
cuggcugaauccuuccucuccccuccucccau

SEQ ID NO: 354620 - RNA, 32 nt, Homo Sapiens
guuuacauaaaaauauaaauaaaguauucagc

SEQ ID NO: 354621 - RNA, 32 nt, Homo Sapiens
acuauauauuucaauaaaucugucacaaaaaa

SEQ ID NO: 354622 - RNA, 32 nt, Homo Sapiens
gcgauuugcacauauugaguuuauaacuugug

SEQ ID NO: 354623 - RNA, 32 nt, Homo Sapiens
gagcuucaaauuauauucauugauuaugguac

SEQ ID NO: 354624 - RNA, 32 nt, Homo Sapiens
ccccacaucacagaugauuuuggacaagauuu

SEQ ID NO: 354625 - RNA, 32 nt, Homo Sapiens
acucaaauuaaugguaacgaugaugcuguuuc

SEQ ID NO: 354626 - RNA, 32 nt, Homo Sapiens
caaauacugguuugcuucuguuuuccagagaa

SEQ ID NO: 354627 - RNA, 32 nt, Homo Sapiens
cugccgcccgcacccccgcgcgcccuccgucu

SEQ ID NO: 354628 - RNA, 32 nt, Homo Sapiens
cugcuuccucugccccucccccagccacgcag

SEQ ID NO: 354629 - RNA, 32 nt, Homo Sapiens
uucccggagagaaaggagcuuguauaaaggga

SEQ ID NO: 354630 - RNA, 32 nt, Homo Sapiens
guuugcaaaaauuucagagguuaugggggaaa

SEQ ID NO: 354631 - RNA, 32 nt, Homo Sapiens
cuccggcccggccccgagcaccgccuccccag

SEQ ID NO: 354632 - RNA, 32 nt, Homo Sapiens
cagcugguagcaugcaaaaggccuagagcgaa

SEQ ID NO: 354633 - RNA, 32 nt, Homo Sapiens
cucccuuggucccaggucacuggagcuccagg

SEQ ID NO: 354634 - RNA, 32 nt, Homo Sapiens
ugggaagcaucuuuucgcucagcaaguucaag

SEQ ID NO: 354635 - RNA, 32 nt, Homo Sapiens
uguuucuggugggacagcucuucugggccagc

SEQ ID NO: 354636 - RNA, 32 nt, Homo Sapiens
uuuuggcauuuuuuaugggaucaucaguuggu

SEQ ID NO: 354637 - RNA, 32 nt, Homo Sapiens
ggacuccagguaugaaugguguagaaauccau

SEQ ID NO: 354638 - RNA, 29 nt, Homo Sapiens
aaaaaauaauaugaguggaggcucuggca

SEQ ID NO: 354639 - RNA, 32 nt, Homo Sapiens
auuuagcuagggaaacucggcccucaaacccu

SEQ ID NO: 354640 - RNA, 32 nt, Homo Sapiens
ccuucuucuucuucuuuuuuuuuucuuccacu

SEQ ID NO: 354641 - RNA, 32 nt, Homo Sapiens
accaaaggcuggcccccaccccggcccggcca

SEQ ID NO: 354642 - RNA, 32 nt, Homo Sapiens
uuucauaaauguuuagugucaauacuaaugcu

SEQ ID NO: 354643 - RNA, 32 nt, Homo Sapiens
cccaccccauccccacaacuucccuuuugcua

SEQ ID NO: 354644 - RNA, 32 nt, Homo Sapiens
gagcuggggcagggggagagccaggcaaucgg

SEQ ID NO: 354645 - RNA, 32 nt, Homo Sapiens
ugccgggcacgguggcucacgccuguaauccc

SEQ ID NO: 354646 - RNA, 32 nt, Homo Sapiens
gggaugaauuguaaaagcaacaucagcuugac

SEQ ID NO: 354647 - RNA, 32 nt, Homo Sapiens
cacaacucuacaagcaucuuaucccucuacag

SEQ ID NO: 354648 - RNA, 32 nt, Homo Sapiens
guauguaucuucugaacccuacaucaaguuga

SEQ ID NO: 354649 - RNA, 32 nt, Homo Sapiens
cugcccgcgaccauggccuccuccgagguggc

SEQ ID NO: 354650 - RNA, 32 nt, Homo Sapiens
auucaguaaaauguggaaagggguauuaacaa

SEQ ID NO: 354651 - RNA, 32 nt, Homo Sapiens
ccgcucugccagccaggggcuccagccaugcu

SEQ ID NO: 354652 - RNA, 32 nt, Homo Sapiens
uaauaaagccggcgucagagaccgcugcuucc

SEQ ID NO: 354653 - RNA, 32 nt, Homo Sapiens
acuuagucccugagugugguugagguuugagg

SEQ ID NO: 354654 - RNA, 32 nt, Homo Sapiens
gggaggaagcagaauaaagcaauuuuccuuga

SEQ ID NO: 354655 - RNA, 32 nt, Homo Sapiens
aaccacucugaaaauuuuuagcagcaagucau

SEQ ID NO: 354656 - RNA, 32 nt, Homo Sapiens
auggcacauuuuacuuugcauuugcuuggaag

SEQ ID NO: 354657 - RNA, 32 nt, Homo Sapiens
gcccucuucuauuucuuauggggccaucuugg

SEQ ID NO: 354658 - RNA, 31 nt, Homo Sapiens
agcgcgagggcggugcggggcugucucccgg

SEQ ID NO: 354659 - RNA, 32 nt, Homo Sapiens
ucuuucgggaccagccccauuugcacagccug

SEQ ID NO: 354660 - RNA, 30 nt, Homo Sapiens
gagggauaaucggcggccggggcugaaggg

SEQ ID NO: 354661 - RNA, 32 nt, Homo Sapiens
aucauaaugcauuuugggugggacauauuuca

SEQ ID NO: 354662 - RNA, 32 nt, Homo Sapiens
gcaccucugccccaaggcugcccggcggccgg

SEQ ID NO: 354663 - RNA, 32 nt, Homo Sapiens
uuccaaccgcaccaaccacgggagccacgugu

SEQ ID NO: 354664 - RNA, 32 nt, Homo Sapiens
ccgaacugccuaccacaucaccaucaguguuu

SEQ ID NO: 354665 - RNA, 32 nt, Homo Sapiens
cccaacaaccccgaugagcugagcaaggcagg

SEQ ID NO: 354666 - RNA, 32 nt, Homo Sapiens
gagucacuguuaccaaauuagaacuaaaacaa

SEQ ID NO: 354667 - RNA, 32 nt, Homo Sapiens
uuuuggugcugugaacaggauaccaaagcugc

SEQ ID NO: 354668 - RNA, 32 nt, Homo Sapiens
ccaguccucaggugcaacccccugcguggucc

SEQ ID NO: 354669 - RNA, 32 nt, Homo Sapiens
gcaggcgcucuccuccuucucugccuguuucc

SEQ ID NO: 354670 - RNA, 32 nt, Homo Sapiens
guucacugcagacuccaccucuccaggcucag

SEQ ID NO: 354671 - RNA, 32 nt, Homo Sapiens
gauucggcccggugggggcgggcagggugcgc

SEQ ID NO: 354672 - RNA, 32 nt, Homo Sapiens
acaaaaaacucaaacgaauaaaaaagagaaag

SEQ ID NO: 354673 - RNA, 32 nt, Homo Sapiens
ugcucccugagccccagaugggccucccugac

SEQ ID NO: 354674 - RNA, 32 nt, Homo Sapiens
caguagugcaggaggugugagggcucccucga

SEQ ID NO: 354675 - RNA, 32 nt, Homo Sapiens
gcugaacgugcagcgcgcagcagcgaacgcgc

SEQ ID NO: 354676 - RNA, 32 nt, Homo Sapiens
cagccucccaaguagcugggaauauaggugug

SEQ ID NO: 354677 - RNA, 31 nt, Homo Sapiens
cuuaaguuccagguuuuuaucugguaaaaug

SEQ ID NO: 354678 - RNA, 32 nt, Homo Sapiens
cagaggugaggcagaauccacuguagccuucc

SEQ ID NO: 354679 - RNA, 32 nt, Homo Sapiens
cagcgcccaccugccgguggcuccugcucaca

SEQ ID NO: 354680 - RNA, 32 nt, Homo Sapiens
uuugauugguccuugagugaccagagacuuag

SEQ ID NO: 354681 - RNA, 32 nt, Homo Sapiens
acccccaccccggcccgggauacugcccccgg

SEQ ID NO: 354682 - RNA, 32 nt, Homo Sapiens
agaacuugguauccaugacuguggaggggcca

SEQ ID NO: 354683 - RNA, 32 nt, Homo Sapiens
uuaauccuuccacuucccuacucgcuacuaca

SEQ ID NO: 354684 - RNA, 32 nt, Homo Sapiens
aggccugcaguacaaguggaucuacaauuuug

SEQ ID NO: 354685 - RNA, 32 nt, Homo Sapiens
ugaccucaccuacagcugggauguaccuggag

SEQ ID NO: 354686 - RNA, 32 nt, Homo Sapiens
gggcuggagccgagccggggccgagcugcagg

SEQ ID NO: 354687 - RNA, 32 nt, Homo Sapiens
cucugucccagagccacccagaacccugacuc

SEQ ID NO: 354688 - RNA, 32 nt, Homo Sapiens
uauggaaagggagacuguuucagaggacuuga

SEQ ID NO: 354689 - RNA, 32 nt, Homo Sapiens
uggcccgccgguuucugagccuucugcccugc

SEQ ID NO: 354690 - RNA, 32 nt, Homo Sapiens
guugucaaaaauaccaauguuaauaugauuaa

SEQ ID NO: 354691 - RNA, 32 nt, Homo Sapiens
gaagcauaaauuagaauuuaauuugauguuca

SEQ ID NO: 354692 - RNA, 32 nt, Homo Sapiens
aggaagaaugcuuuugaguaccuaauaggugg

SEQ ID NO: 354693 - RNA, 32 nt, Homo Sapiens
aacuucaaagggacuauuuguauuguauguug

SEQ ID NO: 354694 - RNA, 32 nt, Homo Sapiens
gcacaguguuaaaugaaauuguaaaaccuguc

SEQ ID NO: 354695 - RNA, 32 nt, Homo Sapiens
uccacacauguauuuugaaacacugaagagca

SEQ ID NO: 354696 - RNA, 32 nt, Homo Sapiens
ucuucaaugcucuccaguggggccuagaugcu

SEQ ID NO: 354697 - RNA, 32 nt, Homo Sapiens
cauaucugggagaagaaauaagagacuaucau

SEQ ID NO: 354698 - RNA, 32 nt, Homo Sapiens
aguggcccggcaggcaggcauucaacaacaug

SEQ ID NO: 354699 - RNA, 32 nt, Homo Sapiens
agcaaaauucauaccauggaaacuacagaaca

SEQ ID NO: 354700 - RNA, 32 nt, Homo Sapiens
gccagcuugcagagagagcaagaacagagcca

SEQ ID NO: 354701 - RNA, 32 nt, Homo Sapiens
gccagugacuccggcagcggcgaugagggcga

SEQ ID NO: 354702 - RNA, 32 nt, Homo Sapiens
ccucacccaggcuggaaugcaguggugugaac

SEQ ID NO: 354703 - RNA, 32 nt, Homo Sapiens
gagagcugcccuucagcgauuauuuaaauuau

SEQ ID NO: 354704 - RNA, 32 nt, Homo Sapiens
auugcaaacauagcugugcccuugaagagaau

SEQ ID NO: 354705 - RNA, 32 nt, Homo Sapiens
uagaggggugguagacucggaggaucucccuc

SEQ ID NO: 354706 - RNA, 32 nt, Homo Sapiens
gaaaagucaggagaucagaauuuuaaauuuga

SEQ ID NO: 354707 - RNA, 32 nt, Homo Sapiens
aacauggcauuuggaaucaaguacauccaggu

SEQ ID NO: 354708 - RNA, 32 nt, Homo Sapiens
cacaaucacucucuguccucauugucaccucu

SEQ ID NO: 354709 - RNA, 32 nt, Homo Sapiens
gcaauuaccguucauuuuuacauaucaaacag

SEQ ID NO: 354710 - RNA, 31 nt, Homo Sapiens
gcaggagugcgcugccugcucccggugugac

SEQ ID NO: 354711 - RNA, 32 nt, Homo Sapiens
cagacaccauuaccauucaccaucucuaacau

SEQ ID NO: 354712 - RNA, 32 nt, Homo Sapiens
accagcggagagagggccgggaaaggcucccc

SEQ ID NO: 354713 - RNA, 32 nt, Homo Sapiens
ucuaccaagcuacuaaaaacauugcacaucug

SEQ ID NO: 354714 - RNA, 32 nt, Homo Sapiens
cuaacuuaaaaauaacaguuuccauauaacaa

SEQ ID NO: 354715 - RNA, 32 nt, Homo Sapiens
cauuuaaauauuaggauugaucaggaaauagu

SEQ ID NO: 354716 - RNA, 32 nt, Homo Sapiens
gagguuggccccagacucacugagugccugca

SEQ ID NO: 354717 - RNA, 32 nt, Homo Sapiens
gaggggggucugugcgcggccggcuggcucug

SEQ ID NO: 354718 - RNA, 32 nt, Homo Sapiens
caaaagaauaaaggaccaaauuucuuagcuca

SEQ ID NO: 354719 - RNA, 32 nt, Homo Sapiens
cgggcgcggggccgccauguggagcggccgca

SEQ ID NO: 354720 - RNA, 32 nt, Homo Sapiens
cucagcaccagccccaggcuuccauccucagu

SEQ ID NO: 354721 - RNA, 32 nt, Homo Sapiens
gguuacaaaugagacuccuucagucaguuauc

SEQ ID NO: 354722 - RNA, 32 nt, Homo Sapiens
cuguuuauuaugugggguggcuccauauuuua

SEQ ID NO: 354723 - RNA, 32 nt, Homo Sapiens
gcggggugggaagaagggaggggaugggguug

SEQ ID NO: 354724 - RNA, 32 nt, Homo Sapiens
ggcaccgccucccaaacagggcugcugguuuc

SEQ ID NO: 354725 - RNA, 32 nt, Homo Sapiens
gcgcagccaggugaccuccccgcggccuuuca

SEQ ID NO: 354726 - RNA, 32 nt, Homo Sapiens
gcugugggucgcgaagcagagcccgggacgug

SEQ ID NO: 354727 - RNA, 32 nt, Homo Sapiens
aagcagguaauauauaucacaaaacagggguc

SEQ ID NO: 354728 - RNA, 32 nt, Homo Sapiens
guuuuuagauaaaggagaaauauuuacaaaga

SEQ ID NO: 354729 - RNA, 32 nt, Homo Sapiens
auuaaagcauuugguauacaguaggugcucaa

SEQ ID NO: 354730 - RNA, 32 nt, Homo Sapiens
ugcccccucggcccggccccccugcugagccc

SEQ ID NO: 354731 - RNA, 32 nt, Homo Sapiens
augaucggagaaugcagguggaaugagguucu

SEQ ID NO: 354732 - RNA, 32 nt, Homo Sapiens
ggcaaauauaaaauguuuguuggauguguaua

SEQ ID NO: 354733 - RNA, 32 nt, Homo Sapiens
cccugcugagccccgagcgccgggccagcagc

SEQ ID NO: 354734 - RNA, 32 nt, Homo Sapiens
uuuucagaugaguuacuguuaacagguagguu

SEQ ID NO: 354735 - RNA, 32 nt, Homo Sapiens
cgagugcagcugccuccgcggggccgcgccug

SEQ ID NO: 354736 - RNA, 32 nt, Homo Sapiens
gggcugcugucauuggagcggugggcacuguu

SEQ ID NO: 354737 - RNA, 32 nt, Homo Sapiens
uuuugucaaagcaagaaguaaauacuuuagaa

SEQ ID NO: 354738 - RNA, 32 nt, Homo Sapiens
aaauguugacuucuagcuuccaucugcagcga

SEQ ID NO: 354739 - RNA, 32 nt, Homo Sapiens
cuguuuuggggagggagggagugauagcuuaa

SEQ ID NO: 354740 - RNA, 32 nt, Homo Sapiens
aagcugauucacuuucuuucugguaagcucaa

SEQ ID NO: 354741 - RNA, 32 nt, Homo Sapiens
agagcccgcucuugucucccaguuccugguag

SEQ ID NO: 354742 - RNA, 32 nt, Homo Sapiens
agcugagaucgcgucauugcacuccagccugg

SEQ ID NO: 354743 - RNA, 32 nt, Homo Sapiens
ugucuucucugugaggcaucuggccauucgca

SEQ ID NO: 354744 - RNA, 32 nt, Homo Sapiens
cagacgaugggggcgacccaucgggacccgac

SEQ ID NO: 354745 - RNA, 32 nt, Homo Sapiens
cacacccccaggaagggacccuggacacggcu

SEQ ID NO: 354746 - RNA, 32 nt, Homo Sapiens
ggggcgcuuucgcacgcgaagcaaccgcuaga

SEQ ID NO: 354747 - RNA, 30 nt, Homo Sapiens
uuacuauggaaagauuucgucuggagaaga

SEQ ID NO: 354748 - RNA, 28 nt, Homo Sapiens
gucaugcugcggcguggacacuuggcau

SEQ ID NO: 354749 - RNA, 30 nt, Homo Sapiens
uguccgccgcccgugccccgcucaaucccc

SEQ ID NO: 354750 - RNA, 32 nt, Homo Sapiens
cccagagaugaaugaggccuacuucaaacaau

SEQ ID NO: 354751 - RNA, 32 nt, Homo Sapiens
caacuuuggccauaguggccaucccaugaauc

SEQ ID NO: 354752 - RNA, 32 nt, Homo Sapiens
aaugcuugcauguguuuauuuauuuucaagag

SEQ ID NO: 354753 - RNA, 32 nt, Homo Sapiens
ugcuguaaucuaauuuuggugaagagacccag

SEQ ID NO: 354754 - RNA, 32 nt, Homo Sapiens
gcugccugaugguggcucugugcaguccgagc

SEQ ID NO: 354755 - RNA, 32 nt, Homo Sapiens
uauuagaaaaauacaaugaagaacccuaaaau

SEQ ID NO: 354756 - RNA, 32 nt, Homo Sapiens
uguuaauccaaauacacauuuaaacuuagggu

SEQ ID NO: 354757 - RNA, 32 nt, Homo Sapiens
ggacccauauccuacaggcaaaaagcaggcua

SEQ ID NO: 354758 - RNA, 32 nt, Homo Sapiens
gguccuccagcaugaagaaggagccaugagga

SEQ ID NO: 354759 - RNA, 32 nt, Homo Sapiens
ugugcccugcaguucugcccgaggcucaacuc

SEQ ID NO: 354760 - RNA, 32 nt, Homo Sapiens
cuacucugacuucugacuuguuuuuguuuucu

SEQ ID NO: 354761 - RNA, 32 nt, Homo Sapiens
gaggaggacugccccgcccccgggaaccgggu

SEQ ID NO: 354762 - RNA, 32 nt, Homo Sapiens
auauagaauggaaaacuaauguagccaaacca

SEQ ID NO: 354763 - RNA, 32 nt, Homo Sapiens
cuuguccacgcacccccaccagcccucucgcu

SEQ ID NO: 354764 - RNA, 32 nt, Homo Sapiens
guggccgaacccagcccucugcgcgccagugc

SEQ ID NO: 354765 - RNA, 32 nt, Homo Sapiens
ggcaugaaccaccguggccaggugccuuuuuu

SEQ ID NO: 354766 - RNA, 32 nt, Homo Sapiens
accacugcacuccggccugggcgacagagcga

SEQ ID NO: 354767 - RNA, 32 nt, Homo Sapiens
ccacuccgcuugcccacgccccgggagcucgc

SEQ ID NO: 354768 - RNA, 32 nt, Homo Sapiens
cagggcugccagcugagacacagccacaggac

SEQ ID NO: 354769 - RNA, 32 nt, Homo Sapiens
auaccugagauguuuuucugcaaccaaaauuc

SEQ ID NO: 354770 - RNA, 32 nt, Homo Sapiens
aucugccauaguuggauuaugcagcuuugcaa

SEQ ID NO: 354771 - RNA, 32 nt, Homo Sapiens
uauacucuugucauuuuuaauauuacugucuu

SEQ ID NO: 354772 - RNA, 32 nt, Homo Sapiens
ucucuucuccacuuacaaccagaguaguuuuu

SEQ ID NO: 354773 - RNA, 32 nt, Homo Sapiens
aguuuaaaacaaugggugauaagauaguacug

SEQ ID NO: 354774 - RNA, 32 nt, Homo Sapiens
auaauucaucaaguaaucauggccagcgauua

SEQ ID NO: 354775 - RNA, 32 nt, Homo Sapiens
uaguuguauggacuucuaaccaguugaguuuu

SEQ ID NO: 354776 - RNA, 32 nt, Homo Sapiens
cccgcgggggagagaaggagguggcccugcug

SEQ ID NO: 354777 - RNA, 32 nt, Homo Sapiens
ugcccccgagggugccaguccagcuagcugcc

SEQ ID NO: 354778 - RNA, 32 nt, Homo Sapiens
aagccuuucuaccauaucaccaaauacucaua

SEQ ID NO: 354779 - RNA, 32 nt, Homo Sapiens
cccuccccaagcccuucccagucacugcaugg

SEQ ID NO: 354780 - RNA, 32 nt, Homo Sapiens
uuuacauuugaaaguacaugaugaguauuagu

SEQ ID NO: 354781 - RNA, 32 nt, Homo Sapiens
aucacugauucccucucccacccaaggagaac

SEQ ID NO: 354782 - RNA, 32 nt, Homo Sapiens
ugcuuccggacgggcgaggagacuuguggucu

SEQ ID NO: 354783 - RNA, 32 nt, Homo Sapiens
ccaagugcucggggacccuuugaaaagugccu

SEQ ID NO: 354784 - RNA, 32 nt, Homo Sapiens
cagcccaggaggagccuaggcaggaggaggcu

SEQ ID NO: 354785 - RNA, 32 nt, Homo Sapiens
gauucugcauagauuucuuuuaaacuggcauu

SEQ ID NO: 354786 - RNA, 32 nt, Homo Sapiens
cuauuuuucugccaugagacuagagguugcuu

SEQ ID NO: 354787 - RNA, 32 nt, Homo Sapiens
gauauuauaggaauuucuuuucuaucuuuaug

SEQ ID NO: 354788 - RNA, 32 nt, Homo Sapiens
cacaugccuaucuuggagagggcaugggggca

SEQ ID NO: 354789 - RNA, 32 nt, Homo Sapiens
aaaaaacccaaguuugugauauuucagugauu

SEQ ID NO: 354790 - RNA, 32 nt, Homo Sapiens
gcugagcaggggaugccugugcguggugccug

SEQ ID NO: 354791 - RNA, 32 nt, Homo Sapiens
gggggugggugggaaccccggggaggcgacgg

SEQ ID NO: 354792 - RNA, 32 nt, Homo Sapiens
uuuauuuuuuaaaauaaaagguucuuuacaag

SEQ ID NO: 354793 - RNA, 32 nt, Homo Sapiens
uagccugcacuuuggguuuuuaacucaucuuu

SEQ ID NO: 354794 - RNA, 32 nt, Homo Sapiens
auguuuuaaaguuauuugauaaauacugccaa

SEQ ID NO: 354795 - RNA, 32 nt, Homo Sapiens
gguuugcagucauggcuggauggcugcagcug

SEQ ID NO: 354796 - RNA, 32 nt, Homo Sapiens
gggcgggcagcuuggguccuggacguugauag

SEQ ID NO: 354797 - RNA, 32 nt, Homo Sapiens
gcaucacagagacaccaaggaggaagaacccu

SEQ ID NO: 354798 - RNA, 32 nt, Homo Sapiens
ccacacguuuccuggggaguagccuggaauuu

SEQ ID NO: 354799 - RNA, 32 nt, Homo Sapiens
guacugugcccucuccuggcucuugaggcucu

SEQ ID NO: 354800 - RNA, 32 nt, Homo Sapiens
cucacauuuuaaaaauacuucuuuuaugacuc

SEQ ID NO: 354801 - RNA, 32 nt, Homo Sapiens
aggugcugguagggcugcaggagaccccagau

SEQ ID NO: 354802 - RNA, 32 nt, Homo Sapiens
uguacacauccagccacccccagccccaccac

SEQ ID NO: 354803 - RNA, 32 nt, Homo Sapiens
ggcuggccgucugccuggcccauggaugcuuu

SEQ ID NO: 354804 - RNA, 30 nt, Homo Sapiens
caagggaagugaagaggugagucuggguac

SEQ ID NO: 354805 - RNA, 32 nt, Homo Sapiens
cuugcccugaagucuuuuuuucuuuuuacgcu

SEQ ID NO: 354806 - RNA, 31 nt, Homo Sapiens
ccauggaaauaaaagaaaaauauauucgcaa

SEQ ID NO: 354807 - RNA, 32 nt, Homo Sapiens
gugaauggcuagaagaaggagcucaguaaacu

SEQ ID NO: 354808 - RNA, 32 nt, Homo Sapiens
auaugaacauguacagcgugcauagggacucu

SEQ ID NO: 354809 - RNA, 32 nt, Homo Sapiens
aucaugccccacucaauggccuagaagcugcc

SEQ ID NO: 354810 - RNA, 32 nt, Homo Sapiens
ugccugguccgcuuccuccccgcgaauaagaa

SEQ ID NO: 354811 - RNA, 32 nt, Homo Sapiens
cuaguaauucuuuaauguguauaaauucaauu

SEQ ID NO: 354812 - RNA, 32 nt, Homo Sapiens
aaggacccugccagccacagaccuccaauaaa

SEQ ID NO: 354813 - RNA, 32 nt, Homo Sapiens
gauucccuguucuuugaaguggcaccuaauaa

SEQ ID NO: 354814 - RNA, 32 nt, Homo Sapiens
cacuggcucccucgcccccagccccggggccu

SEQ ID NO: 354815 - RNA, 32 nt, Homo Sapiens
ccuucuuccgcccagccccccagccucaagaa

SEQ ID NO: 354816 - RNA, 32 nt, Homo Sapiens
gagagaucagauuguuacugugucuguguaga

SEQ ID NO: 354817 - RNA, 32 nt, Homo Sapiens
cuugcccuggggaauuugggacacagaauaaa

SEQ ID NO: 354818 - RNA, 32 nt, Homo Sapiens
ucccuuaucaccauccuggucauugcuggugu

SEQ ID NO: 354819 - RNA, 32 nt, Homo Sapiens
uuuuuguccgacaucuuugcaaggcugcggug

SEQ ID NO: 354820 - RNA, 32 nt, Homo Sapiens
uacauauauugauuuuuaaauaaaguugccuu

SEQ ID NO: 354821 - RNA, 32 nt, Homo Sapiens
gugagcaggaucagaaagaagaaggagucaaa

SEQ ID NO: 354822 - RNA, 32 nt, Homo Sapiens
ucaagguucaaagggaagcugcgaggauucca

SEQ ID NO: 354823 - RNA, 32 nt, Homo Sapiens
uaccaaacaaacaaaaagucauacauugcaau

SEQ ID NO: 354824 - RNA, 32 nt, Homo Sapiens
ucucagcuguacauagcacauacucuaaaauc

SEQ ID NO: 354825 - RNA, 32 nt, Homo Sapiens
cuggggaggaagaaugugcugcguggugggaa

SEQ ID NO: 354826 - RNA, 32 nt, Homo Sapiens
ucuuuggaugggccuuuuagaaaccucauugg

SEQ ID NO: 354827 - RNA, 32 nt, Homo Sapiens
gagaucuccuugccugaccccuggaccuggaa

SEQ ID NO: 354828 - RNA, 32 nt, Homo Sapiens
acauuuuuuggggaggaaaacaaccugucauu

SEQ ID NO: 354829 - RNA, 32 nt, Homo Sapiens
uuucauuuugguuuuuguuucuguuuuuauuu

SEQ ID NO: 354830 - RNA, 32 nt, Homo Sapiens
ggaugggcauuugaauggguagacugagugau

SEQ ID NO: 354831 - RNA, 32 nt, Homo Sapiens
agcugcgaugugucaagcaggaugcuggcugc

SEQ ID NO: 354832 - RNA, 32 nt, Homo Sapiens
aggugaagguccacagccaguuccucuacuga

SEQ ID NO: 354833 - RNA, 32 nt, Homo Sapiens
uauauuuuacugauuuaauauuacaguguaag

SEQ ID NO: 354834 - RNA, 32 nt, Homo Sapiens
cucucuucgucuggccgugaccccaagcaugg

SEQ ID NO: 354835 - RNA, 32 nt, Homo Sapiens
ccagggacgcgcgacccgggcgcccgcauucc

SEQ ID NO: 354836 - RNA, 32 nt, Homo Sapiens
ugccgagacaccuugaucucagacuucagccu

SEQ ID NO: 354837 - RNA, 32 nt, Homo Sapiens
uaguguugaugauguuaguacaugauuuuaaa

SEQ ID NO: 354838 - RNA, 32 nt, Homo Sapiens
cacacacuacuacugauggccuuucggggguc

SEQ ID NO: 354839 - RNA, 32 nt, Homo Sapiens
aaggcaauaugaaaaaauggaguuuggaguau

SEQ ID NO: 354840 - RNA, 32 nt, Homo Sapiens
ugagcgagcuuaaacuccauggccaaccauuc

SEQ ID NO: 354841 - RNA, 32 nt, Homo Sapiens
gauguagauaauuuaggauuuucauauaaaaa

SEQ ID NO: 354842 - RNA, 32 nt, Homo Sapiens
gguuugaaggggauccugggcuugggcaucac

SEQ ID NO: 354843 - RNA, 32 nt, Homo Sapiens
ggagugccuccuuaguggugcuugcagucaca

SEQ ID NO: 354844 - RNA, 32 nt, Homo Sapiens
cugagccugugcuuccugagaacagcaggggu

SEQ ID NO: 354845 - RNA, 32 nt, Homo Sapiens
gaucuugcucuguugcucagucuagggugcag

SEQ ID NO: 354846 - RNA, 32 nt, Homo Sapiens
aguuccccgagcgcagcccgcggaccaccacc

SEQ ID NO: 354847 - RNA, 32 nt, Homo Sapiens
ucuccucgccuuucacaguccccuccugccug

SEQ ID NO: 354848 - RNA, 32 nt, Homo Sapiens
uagaacucugguuuccugaggucauuuuguca

SEQ ID NO: 354849 - RNA, 32 nt, Homo Sapiens
augcggagcugaugaggguaaguuguauuaau

SEQ ID NO: 354850 - RNA, 32 nt, Homo Sapiens
agaugcuagacuaagaucuuugaggaaaagaa

SEQ ID NO: 354851 - RNA, 32 nt, Homo Sapiens
uuauuuuaugauaguuuguccuguguccuuag

SEQ ID NO: 354852 - RNA, 32 nt, Homo Sapiens
guuauuuuuaagaagggagauguuggcaccuu

SEQ ID NO: 354853 - RNA, 32 nt, Homo Sapiens
uaccacuugcuguaggcuguggaccaagaugu

SEQ ID NO: 354854 - RNA, 32 nt, Homo Sapiens
guguucuuaccuagccuccccccacuuccuca

SEQ ID NO: 354855 - RNA, 32 nt, Homo Sapiens
aagacuuaugauuucaauuugcuaccaaugag

SEQ ID NO: 354856 - RNA, 27 nt, Homo Sapiens
aggacccccuuucccagcccccaugcu

SEQ ID NO: 354857 - RNA, 32 nt, Homo Sapiens
cagagaggggccgcagucuucguggcugcguc

SEQ ID NO: 354858 - RNA, 32 nt, Homo Sapiens
ccaggcuccgucugccgccgcacgccgcgauc

SEQ ID NO: 354859 - RNA, 32 nt, Homo Sapiens
ucucccaggaagcucaucagaacaccucuugu

SEQ ID NO: 354860 - RNA, 32 nt, Homo Sapiens
cugcauaauguuucuggauuuacauacuguaa

SEQ ID NO: 354861 - RNA, 32 nt, Homo Sapiens
uuacgacggcauucuggugaaaaaccauacau

SEQ ID NO: 354862 - RNA, 32 nt, Homo Sapiens
gcucuggugucugcuggcuccuccuugcucgc

SEQ ID NO: 354863 - RNA, 32 nt, Homo Sapiens
ggguuugggggcccuucccgagucuugagagg

SEQ ID NO: 354864 - RNA, 32 nt, Homo Sapiens
gguccgcuagucgcggggcggcggcggcggcu

SEQ ID NO: 354865 - RNA, 32 nt, Homo Sapiens
ggcggaagguggcgcgcaccacggcggggcac

SEQ ID NO: 354866 - RNA, 32 nt, Homo Sapiens
aacgauauuuucugcauagauuuucuuuuaaa

SEQ ID NO: 354867 - RNA, 32 nt, Homo Sapiens
gaggaaggcaagaagcgcaggggguggcccgc

SEQ ID NO: 354868 - RNA, 32 nt, Homo Sapiens
uaaaguagaucaguaauuuccaaacucuucac

SEQ ID NO: 354869 - RNA, 32 nt, Homo Sapiens
cugucuuucaggaugaaugccauccacacaaa

SEQ ID NO: 354870 - RNA, 32 nt, Homo Sapiens
acuugacuggcauuucagcagcuccacuggga

SEQ ID NO: 354871 - RNA, 32 nt, Homo Sapiens
uggauuuggcagauauguauaauuauauuaaa

SEQ ID NO: 354872 - RNA, 32 nt, Homo Sapiens
cugcauuccgacugccuaugaacggguguggg

SEQ ID NO: 354873 - RNA, 32 nt, Homo Sapiens
ggagcagguggccauggugcccggcccugccu

SEQ ID NO: 354874 - RNA, 32 nt, Homo Sapiens
uggccccuucuccucagccuuccauuagcaag

SEQ ID NO: 354875 - RNA, 32 nt, Homo Sapiens
uagcgggucggggagggagcugcgaggggggc

SEQ ID NO: 354876 - RNA, 32 nt, Homo Sapiens
uuaaaugugcuuucuuuuugaaauuuauguuu

SEQ ID NO: 354877 - RNA, 32 nt, Homo Sapiens
agagaaaugucagagcgagggguguguggaca

SEQ ID NO: 354878 - RNA, 32 nt, Homo Sapiens
ggccgucugcccguggaccuggcugggagcug

SEQ ID NO: 354879 - RNA, 32 nt, Homo Sapiens
accacaacuaagaagcacuucaacggaccaga

SEQ ID NO: 354880 - RNA, 32 nt, Homo Sapiens
gccugaaaagaucagaauaaaaacugacuaga

SEQ ID NO: 354881 - RNA, 32 nt, Homo Sapiens
gcuucuccaucgucgccaccgcccgccuguuu

SEQ ID NO: 354882 - RNA, 32 nt, Homo Sapiens
gaguuauacgauuguguauuaaggguaguuuu

SEQ ID NO: 354883 - RNA, 32 nt, Homo Sapiens
uuagccaucccugacccuggcagugcacuggu

SEQ ID NO: 354884 - RNA, 32 nt, Homo Sapiens
ccuauggcugcucuccaaucccgggaagugag

SEQ ID NO: 354885 - RNA, 32 nt, Homo Sapiens
agucugggcugagaccaguccuggccagggua

SEQ ID NO: 354886 - RNA, 32 nt, Homo Sapiens
gugcgccgcgcgcuaguggccgcucuuccgcg

SEQ ID NO: 354887 - RNA, 32 nt, Homo Sapiens
ucuguggccccggccccugcccaggugugggu

SEQ ID NO: 354888 - RNA, 32 nt, Homo Sapiens
agaaaaauuuaagugacaaauguuagaagaug

SEQ ID NO: 354889 - RNA, 32 nt, Homo Sapiens
aaugagcagacccaucaauaagaaauuucuca

SEQ ID NO: 354890 - RNA, 32 nt, Homo Sapiens
cuuuuuuaaaacugguuuuauuuuaauuuuua

SEQ ID NO: 354891 - RNA, 30 nt, Homo Sapiens
gaauuauggaagaaauuguuaacugugacg

SEQ ID NO: 354892 - RNA, 32 nt, Homo Sapiens
gaacauccagcaugcugugaacccccugagac

SEQ ID NO: 354893 - RNA, 32 nt, Homo Sapiens
gcauggcccugacuucagaauuccagacucca

SEQ ID NO: 354894 - RNA, 32 nt, Homo Sapiens
aaguuauuuuuggcugggugugguggcucaua

SEQ ID NO: 354895 - RNA, 32 nt, Homo Sapiens
gaaugacuucuaaggcucuuucuggcuugaac

SEQ ID NO: 354896 - RNA, 32 nt, Homo Sapiens
uccuggcucccuucugccccagcuccgucucg

SEQ ID NO: 354897 - RNA, 32 nt, Homo Sapiens
gaaaugggagcacagugcugggaaaugggagc

SEQ ID NO: 354898 - RNA, 31 nt, Homo Sapiens
ucgacuucuucacuugaccuaacugauuaug

SEQ ID NO: 354899 - RNA, 32 nt, Homo Sapiens
aacaggagaccccccaccugaggcucaaccca

SEQ ID NO: 354900 - RNA, 32 nt, Homo Sapiens
uuagaggccucauaggcaaggaacucauaguu

SEQ ID NO: 354901 - RNA, 32 nt, Homo Sapiens
gauauuugaaaugaguuaugaaguugcaacug

SEQ ID NO: 354902 - RNA, 32 nt, Homo Sapiens
accaucgucugcaacaagggccccagcagagc

SEQ ID NO: 354903 - RNA, 32 nt, Homo Sapiens
aucauguguuugggggcuuuuaggggacccag

SEQ ID NO: 354904 - RNA, 32 nt, Homo Sapiens
ccugggggauggagaccccuaauccaugucac

SEQ ID NO: 354905 - RNA, 32 nt, Homo Sapiens
cucuuagcucugugcucucaccagacaaugaa

SEQ ID NO: 354906 - RNA, 32 nt, Homo Sapiens
caaggcaaguuucuaauuccaagcugccuguu

SEQ ID NO: 354907 - RNA, 32 nt, Homo Sapiens
aauauacauucaacaaauaagugagugauuau

SEQ ID NO: 354908 - RNA, 32 nt, Homo Sapiens
ucagggagaaaguagagaacaggcaaccucau

SEQ ID NO: 354909 - RNA, 32 nt, Homo Sapiens
uagaaaaaaaauuuaauucaaugguaagucua

SEQ ID NO: 354910 - RNA, 32 nt, Homo Sapiens
acaggccccuccccgcccucagcccuggccug

SEQ ID NO: 354911 - RNA, 32 nt, Homo Sapiens
accaaugugucugaaggccaaaauauauaucc

SEQ ID NO: 354912 - RNA, 32 nt, Homo Sapiens
cagacugcaggaccagaaccccugccuccauc

SEQ ID NO: 354913 - RNA, 32 nt, Homo Sapiens
cugaggcgggcucgucagccccuggcauugga

SEQ ID NO: 354914 - RNA, 32 nt, Homo Sapiens
aauucauauagucuauucuguugugucuaaau

SEQ ID NO: 354915 - RNA, 32 nt, Homo Sapiens
acagauggacccuggcuguacgaagggccagg

SEQ ID NO: 354916 - RNA, 32 nt, Homo Sapiens
cugagccugcgggacaggggggcuugcugggc

SEQ ID NO: 354917 - RNA, 32 nt, Homo Sapiens
cacacacacacacauacacacacacacacccc

SEQ ID NO: 354918 - RNA, 32 nt, Homo Sapiens
cacacacacacacacacacacacacacaccuc

SEQ ID NO: 354919 - RNA, 32 nt, Homo Sapiens
aguguguuaauuacaaauagucuucauaugcc

SEQ ID NO: 354920 - RNA, 32 nt, Homo Sapiens
auguagcaaccccuccuccccuccugggcaug

SEQ ID NO: 354921 - RNA, 32 nt, Homo Sapiens
ucuccuuuugaaaagguaaggugaaggugaau

SEQ ID NO: 354922 - RNA, 32 nt, Homo Sapiens
agcuggcagcauaugaaccaggcaugaugcag

SEQ ID NO: 354923 - RNA, 32 nt, Homo Sapiens
gaaaaagagcaaucuuaacaaacaaauuuuuu

SEQ ID NO: 354924 - RNA, 32 nt, Homo Sapiens
cacucaaauguguuuuaaccacagcaccuugc

SEQ ID NO: 354925 - RNA, 32 nt, Homo Sapiens
cacggguuuggaauuaccuucuggagauuggg

SEQ ID NO: 354926 - RNA, 32 nt, Homo Sapiens
cagaggcgcugccugccccuuguccugcccuc

SEQ ID NO: 354927 - RNA, 32 nt, Homo Sapiens
aaaaauaucucacugaauuguuacuuauauca

SEQ ID NO: 354928 - RNA, 32 nt, Homo Sapiens
gccagagugucuaugaauuccaaguuugaaaa

SEQ ID NO: 354929 - RNA, 32 nt, Homo Sapiens
caugaauggccaauuuggaaaagcagagaugg

SEQ ID NO: 354930 - RNA, 32 nt, Homo Sapiens
acugaggugggagcaucuccagugcuccccaa

SEQ ID NO: 354931 - RNA, 32 nt, Homo Sapiens
augcaaauauuuucuagccuguuguucuuucu

SEQ ID NO: 354932 - RNA, 32 nt, Homo Sapiens
auuaaaaauaaauguuugcaauuuucuacaga

SEQ ID NO: 354933 - RNA, 32 nt, Homo Sapiens
guugcagugaauugugagcaaaagaucuugaa

SEQ ID NO: 354934 - RNA, 30 nt, Homo Sapiens
gcacgagggcccgugccgccccagccgcug

SEQ ID NO: 354935 - RNA, 29 nt, Homo Sapiens
ggagcaucgguccgggaggucucugggcu

SEQ ID NO: 354936 - RNA, 32 nt, Homo Sapiens
uuucuuuuuucuuuuucuuuucuuuuuuuuuu

SEQ ID NO: 354937 - RNA, 32 nt, Homo Sapiens
aaucgauggugucaaggcaaaaaugggucagg

SEQ ID NO: 354938 - RNA, 32 nt, Homo Sapiens
caauaaaauauuauauacuauuggggaaaauu

SEQ ID NO: 354939 - RNA, 32 nt, Homo Sapiens
gcaccuugugccugggguguuaguggcaccgc

SEQ ID NO: 354940 - RNA, 32 nt, Homo Sapiens
cugaguacugaauggucuuccauccccagcaa

SEQ ID NO: 354941 - RNA, 32 nt, Homo Sapiens
aggcaggcucugccugcaccauuuuccuugcu

SEQ ID NO: 354942 - RNA, 32 nt, Homo Sapiens
aaggugaauccuuaaaaaacuacaucuguuac

SEQ ID NO: 354943 - RNA, 32 nt, Homo Sapiens
gauuauuuuaauauuucuauuaaauauguuua

SEQ ID NO: 354944 - RNA, 32 nt, Homo Sapiens
auuauacguaaaagauaaaaaauacauuguuu

SEQ ID NO: 354945 - RNA, 32 nt, Homo Sapiens
gagggaguuuuaagugauacagaucuuuuugc

SEQ ID NO: 354946 - RNA, 32 nt, Homo Sapiens
uuucugaugauuauaagcauuuauucuuuuga

SEQ ID NO: 354947 - RNA, 32 nt, Homo Sapiens
gaacuccuaaccucaggugauccacccaccuc

SEQ ID NO: 354948 - RNA, 32 nt, Homo Sapiens
agccauuuccaauuuuuuguccucugccuccc

SEQ ID NO: 354949 - RNA, 32 nt, Homo Sapiens
aaugagccuuggaccacuccaguguuagguaa

SEQ ID NO: 354950 - RNA, 32 nt, Homo Sapiens
uggaagacaaaguguuggaaaaucaaaagagg

SEQ ID NO: 354951 - RNA, 32 nt, Homo Sapiens
uucugggcagauuuaaaguggcugggguucag

SEQ ID NO: 354952 - RNA, 32 nt, Homo Sapiens
ccacagagcucuuccucauucugucucuguuc

SEQ ID NO: 354953 - RNA, 32 nt, Homo Sapiens
acuauaagauguacuaaggagauggaagguga

SEQ ID NO: 354954 - RNA, 32 nt, Homo Sapiens
agcagggcagaguucugccugugugugcuggg

SEQ ID NO: 354955 - RNA, 32 nt, Homo Sapiens
aaaucuguaaauacuacacugcucuuaagacc

SEQ ID NO: 354956 - RNA, 32 nt, Homo Sapiens
gacugaugagagggcuucugccagcuucacca

SEQ ID NO: 354957 - RNA, 32 nt, Homo Sapiens
aaggagcggcccuugugaccaguguccuuuug

SEQ ID NO: 354958 - RNA, 32 nt, Homo Sapiens
augguuauuacugaguaugaauuuaagaacug

SEQ ID NO: 354959 - RNA, 32 nt, Homo Sapiens
gaacuucccaugguagaauggggugggggagg

SEQ ID NO: 354960 - RNA, 32 nt, Homo Sapiens
uucauucauccugaccaagacugagccagcuu

SEQ ID NO: 354961 - RNA, 32 nt, Homo Sapiens
guauagggaaacuuuacaaauguaaugauugu

SEQ ID NO: 354962 - RNA, 32 nt, Homo Sapiens
agauuuuugaggugucuacuguaaaguauugc

SEQ ID NO: 354963 - RNA, 30 nt, Homo Sapiens
gcuugggccaggcgcgcgggccguuggggu

SEQ ID NO: 354964 - RNA, 32 nt, Homo Sapiens
uuuuaggauuguuuuucuauuucuguggaaaa

SEQ ID NO: 354965 - RNA, 32 nt, Homo Sapiens
aagaaagacagagacaaacaaauuugcuggga

SEQ ID NO: 354966 - RNA, 32 nt, Homo Sapiens
ucccccaaaaugcauuuagaaaacagucuuug

SEQ ID NO: 354967 - RNA, 32 nt, Homo Sapiens
gggcaccggcagggcaggcagcugcgcgcggc

SEQ ID NO: 354968 - RNA, 32 nt, Homo Sapiens
augcagaauugaaacaagaaaaauagaaaccu

SEQ ID NO: 354969 - RNA, 32 nt, Homo Sapiens
cuuccuuuauuacaaaucaguauuaaaacuuc

SEQ ID NO: 354970 - RNA, 32 nt, Homo Sapiens
uaccugugcacugcacccucacggccacccga

SEQ ID NO: 354971 - RNA, 32 nt, Homo Sapiens
cagccccuuugccauagccugauuuuggggag

SEQ ID NO: 354972 - RNA, 32 nt, Homo Sapiens
auuugaagccaaucauaaagauaauauagcau

SEQ ID NO: 354973 - RNA, 32 nt, Homo Sapiens
gccacugcggguggaaggagaagggcagggug

SEQ ID NO: 354974 - RNA, 32 nt, Homo Sapiens
agcccugugaaugaaggaagguggaaaauuuu

SEQ ID NO: 354975 - RNA, 32 nt, Homo Sapiens
acacaacaaaaagcaugcuauuugaguaacuc

SEQ ID NO: 354976 - RNA, 30 nt, Homo Sapiens
agaaagcuucuaaugggguugggaugaaag

SEQ ID NO: 354977 - RNA, 32 nt, Homo Sapiens
guauguuucucgcacgcucacccgcuucagug

SEQ ID NO: 354978 - RNA, 32 nt, Homo Sapiens
guccuccugcguguccuccccuccacugccug

SEQ ID NO: 354979 - RNA, 32 nt, Homo Sapiens
aacuucagcugacuccacggggaucuggaaau

SEQ ID NO: 354980 - RNA, 32 nt, Homo Sapiens
acaagguucuaguagggagaaacuagcaagua

SEQ ID NO: 354981 - RNA, 32 nt, Homo Sapiens
auucaucaucucuguuuuuucuucaauagauu

SEQ ID NO: 354982 - RNA, 32 nt, Homo Sapiens
uugacucuuucugucuguggguucuguauuca

SEQ ID NO: 354983 - RNA, 32 nt, Homo Sapiens
ugcagacacaguguugugcauguguguauugu

SEQ ID NO: 354984 - RNA, 32 nt, Homo Sapiens
uacuuccauuuugagaucuauaguuugauuau

SEQ ID NO: 354985 - RNA, 31 nt, Homo Sapiens
acagccucacggacagugccaaacccugugg

SEQ ID NO: 354986 - RNA, 32 nt, Homo Sapiens
uuguacguucaucacugggaaaacaguacuga

SEQ ID NO: 354987 - RNA, 32 nt, Homo Sapiens
guccacccuucucaugugacagauggggaaac

SEQ ID NO: 354988 - RNA, 32 nt, Homo Sapiens
guaagccagcuucuccucucccagggcggaaa

SEQ ID NO: 354989 - RNA, 32 nt, Homo Sapiens
uuaucucuuuaaucuuuuuuauuauuaaaagc

SEQ ID NO: 354990 - RNA, 32 nt, Homo Sapiens
gguacaaaacaaaccaacugaggaggugugac

SEQ ID NO: 354991 - RNA, 29 nt, Homo Sapiens
cacagggaguauuucagaggccagcguag

SEQ ID NO: 354992 - RNA, 32 nt, Homo Sapiens
ggccccggaaacccgaccugcagacgcgguac

SEQ ID NO: 354993 - RNA, 32 nt, Homo Sapiens
uagcagaaaacacuuugugcggcugccgagag

SEQ ID NO: 354994 - RNA, 32 nt, Homo Sapiens
uugugcuggaacuuacucauuguaacugaauc

SEQ ID NO: 354995 - RNA, 32 nt, Homo Sapiens
cuuccuuccagcugccucuggaaccuaggccg

SEQ ID NO: 354996 - RNA, 32 nt, Homo Sapiens
cggaaggagcgcggccggagguccucaggaag

SEQ ID NO: 354997 - RNA, 32 nt, Homo Sapiens
guccugucuuucuggcccacagaugagggcuc

SEQ ID NO: 354998 - RNA, 32 nt, Homo Sapiens
guuuguuuuugacuuugguuuauuuaaaaaac

SEQ ID NO: 354999 - RNA, 32 nt, Homo Sapiens
uccaacuuuuucucuuuguuuuuguccagugu

SEQ ID NO: 355000 - RNA, 32 nt, Homo Sapiens
ccuggcccccacagcccucuucggagccugag

SEQ ID NO: 355001 - RNA, 32 nt, Homo Sapiens
ucgugccugccagggcugaagcugccugguau

SEQ ID NO: 355002 - RNA, 32 nt, Homo Sapiens
gguuccugcccccaggugaacauuaacuuucc

SEQ ID NO: 355003 - RNA, 31 nt, Homo Sapiens
aaacacaggccccagauccagucauucuaaa

SEQ ID NO: 355004 - RNA, 32 nt, Homo Sapiens
caaaaacaugauauaaaacauaaaaaugguac

SEQ ID NO: 355005 - RNA, 32 nt, Homo Sapiens
ccucgccacccaguccucaacacacacaguca

SEQ ID NO: 355006 - RNA, 32 nt, Homo Sapiens
gaggcccucggcagcugcagccggggugucug

SEQ ID NO: 355007 - RNA, 32 nt, Homo Sapiens
aauucacuuuugugccauuuuuguaaauacag

SEQ ID NO: 355008 - RNA, 32 nt, Homo Sapiens
cuauauauugagugacuuucugaacaaauuua

SEQ ID NO: 355009 - RNA, 32 nt, Homo Sapiens
gaugggagccgggucgucgugcggcugcggcu

SEQ ID NO: 355010 - RNA, 32 nt, Homo Sapiens
aagcugacauaguguucugccauguaauguuu

SEQ ID NO: 355011 - RNA, 32 nt, Homo Sapiens
aauaucuguauauaaguuguguauuuuaagaa

SEQ ID NO: 355012 - RNA, 32 nt, Homo Sapiens
cucuuggaauccagaucaucuggcugaagcuu

SEQ ID NO: 355013 - RNA, 32 nt, Homo Sapiens
ugaaagggcuagauuauaaaauuaagccuuag

SEQ ID NO: 355014 - RNA, 32 nt, Homo Sapiens
agucuguucccuuuuagugccacgcguugaau

SEQ ID NO: 355015 - RNA, 32 nt, Homo Sapiens
uucauuggucucuaucuccugaaucuaacaca

SEQ ID NO: 355016 - RNA, 32 nt, Homo Sapiens
ucucuagaagcccagaauaaaaugaaaaagag

SEQ ID NO: 355017 - RNA, 32 nt, Homo Sapiens
ucaucugcaguucuuuuuguacacuuaauuac

SEQ ID NO: 355018 - RNA, 29 nt, Homo Sapiens
auaugccauguaauaugaaagcugcuuca

SEQ ID NO: 355019 - RNA, 32 nt, Homo Sapiens
uuguagaggcgggguuucgccauguugcccag

SEQ ID NO: 355020 - RNA, 32 nt, Homo Sapiens
gggcguccugcagcugguuagucuuaggccug

SEQ ID NO: 355021 - RNA, 32 nt, Homo Sapiens
gcccaggccccgggguucugccccacaguccu

SEQ ID NO: 355022 - RNA, 32 nt, Homo Sapiens
guguugaagauaaauaagcuuaaacaaauaac

SEQ ID NO: 355023 - RNA, 32 nt, Homo Sapiens
gcaagaucccucuaaaaucaaguggggcgaug

SEQ ID NO: 355024 - RNA, 32 nt, Homo Sapiens
gccgcugcacuccagccugggcgacagagcga

SEQ ID NO: 355025 - RNA, 32 nt, Homo Sapiens
aagaacaaauagguccugcauuuuauaagacu

SEQ ID NO: 355026 - RNA, 32 nt, Homo Sapiens
auggucuggaguucuuuuggggccuguuguac

SEQ ID NO: 355027 - RNA, 32 nt, Homo Sapiens
aaaacggauggacaacauuuuaugacaaccuc

SEQ ID NO: 355028 - RNA, 32 nt, Homo Sapiens
cuccaaacccucgaggcggaucuuuggacaga

SEQ ID NO: 355029 - RNA, 29 nt, Homo Sapiens
gagugauaaaguuaaaaugugcugugcuu

SEQ ID NO: 355030 - RNA, 32 nt, Homo Sapiens
uucuggggagcccacuccaacugcacagaagu

SEQ ID NO: 355031 - RNA, 32 nt, Homo Sapiens
auggagaaaaauuugaauucucaggauugagg

SEQ ID NO: 355032 - RNA, 28 nt, Homo Sapiens
auacauuuuguuaauauguuuuuauucc

SEQ ID NO: 355033 - RNA, 32 nt, Homo Sapiens
aaaacuguucgguggcuuuuuguccccaugcu

SEQ ID NO: 355034 - RNA, 32 nt, Homo Sapiens
cugcguggagaaggacucauggccaggaggag

SEQ ID NO: 355035 - RNA, 32 nt, Homo Sapiens
uacucauuaaauacaggaaaagaauguaguau

SEQ ID NO: 355036 - RNA, 32 nt, Homo Sapiens
uguauuauagaaugcuuuugcauggacuaucc

SEQ ID NO: 355037 - RNA, 32 nt, Homo Sapiens
aucuacuccuguacauuaauggauuacuuuag

SEQ ID NO: 355038 - RNA, 32 nt, Homo Sapiens
uuuuguucagguuuuucuuuuauauuuuuuuu

SEQ ID NO: 355039 - RNA, 32 nt, Homo Sapiens
aaaacccacauacuuugaaaaucuucuguguu

SEQ ID NO: 355040 - RNA, 32 nt, Homo Sapiens
gucagcccucgcgcccucuccuucuugugccu

SEQ ID NO: 355041 - RNA, 32 nt, Homo Sapiens
ccugaagauaccuugaucuuggacuuccaccc

SEQ ID NO: 355042 - RNA, 32 nt, Homo Sapiens
gccuuaugcuaagggugaguaauuccauggug

SEQ ID NO: 355043 - RNA, 32 nt, Homo Sapiens
cugugugugcauguaucuccaaaagcggcguu

SEQ ID NO: 355044 - RNA, 32 nt, Homo Sapiens
uuuacuuugaaauugcucaacuucugcuauuc

SEQ ID NO: 355045 - RNA, 32 nt, Homo Sapiens
caacucuugcguaaucaugacuaucucuagga

SEQ ID NO: 355046 - RNA, 32 nt, Homo Sapiens
aggaaauguaauguggauaaaggcccgccacc

SEQ ID NO: 355047 - RNA, 32 nt, Homo Sapiens
cuaauauucagagucaacaagaaacuaaaaca

SEQ ID NO: 355048 - RNA, 32 nt, Homo Sapiens
uguuagaugauuauucauccaaguugagcccc

SEQ ID NO: 355049 - RNA, 32 nt, Homo Sapiens
guacaauaauuucaagaggcuuuccagauugu

SEQ ID NO: 355050 - RNA, 32 nt, Homo Sapiens
aacaucacaacacugcucuaguuucuuggaga

SEQ ID NO: 355051 - RNA, 32 nt, Homo Sapiens
ugcagcuuuuucuuuugguugcgugcagugag

SEQ ID NO: 355052 - RNA, 32 nt, Homo Sapiens
auugaaggccccaaggaguucuuggguguggg

SEQ ID NO: 355053 - RNA, 32 nt, Homo Sapiens
ucccugucacuccuccuggggaccucagagau

SEQ ID NO: 355054 - RNA, 32 nt, Homo Sapiens
guggagcggacuuaguccauuaucugcaagug

SEQ ID NO: 355055 - RNA, 32 nt, Homo Sapiens
agguuuuugcuaaagaaauuaauaggaccaaa

SEQ ID NO: 355056 - RNA, 32 nt, Homo Sapiens
ccugaccuggggaugugaaacccacgagcugc

SEQ ID NO: 355057 - RNA, 32 nt, Homo Sapiens
ccacggagucggcacacuauggcugcccucug

SEQ ID NO: 355058 - RNA, 32 nt, Homo Sapiens
uucuucuauccugucaguuccuugagggaucc

SEQ ID NO: 355059 - RNA, 32 nt, Homo Sapiens
uuuuagaguauuuuagcaaaauauauguauag

SEQ ID NO: 355060 - RNA, 32 nt, Homo Sapiens
uauuggggauauaaaauaaagcauguuacaau

SEQ ID NO: 355061 - RNA, 32 nt, Homo Sapiens
uuugcugaggguuugaauaaaccuaggacuuc

SEQ ID NO: 355062 - RNA, 32 nt, Homo Sapiens
auaccauauggaccauuuuaaagaaaauuuua

SEQ ID NO: 355063 - RNA, 32 nt, Homo Sapiens
cuguagugccucuauagaaguacccacagaaa

SEQ ID NO: 355064 - RNA, 32 nt, Homo Sapiens
ugcuggugcccguguacacgcugcucugugac

SEQ ID NO: 355065 - RNA, 31 nt, Homo Sapiens
augauuuaaaacaugaaaguguauuguuguc

SEQ ID NO: 355066 - RNA, 32 nt, Homo Sapiens
gauuuucacacaacguuuuaaauugauauaag

SEQ ID NO: 355067 - RNA, 32 nt, Homo Sapiens
gugacugcaucauauauuuaacaaugacaaga

SEQ ID NO: 355068 - RNA, 32 nt, Homo Sapiens
accugcacaccuaaaacacuaggccacgcauc

SEQ ID NO: 355069 - RNA, 32 nt, Homo Sapiens
gguugcggggcuccuccuugccugcccacaca

SEQ ID NO: 355070 - RNA, 32 nt, Homo Sapiens
agaugacgagaugucccggcuccaguggcgag

SEQ ID NO: 355071 - RNA, 32 nt, Homo Sapiens
ggcgucgcucggcagccgcggggcccuaggcg

SEQ ID NO: 355072 - RNA, 31 nt, Homo Sapiens
uuaccaacaaagaaaagucaguauuauguug

SEQ ID NO: 355073 - RNA, 28 nt, Homo Sapiens
uuuugagugggaaagaggaugacaugug

SEQ ID NO: 355074 - RNA, 32 nt, Homo Sapiens
gaggacacuguacaagacaucuguaaaaaaga

SEQ ID NO: 355075 - RNA, 32 nt, Homo Sapiens
aaggcggggucuuauuagcauaaucugccugg

SEQ ID NO: 355076 - RNA, 32 nt, Homo Sapiens
cuggccugugucuguuauuuugguuguaaauc

SEQ ID NO: 355077 - RNA, 32 nt, Homo Sapiens
cccggcuaauuuuuuguauuuucaguagagac

SEQ ID NO: 355078 - RNA, 26 nt, Homo Sapiens
gauggaagcggagaggcggccggcgc

SEQ ID NO: 355079 - RNA, 31 nt, Homo Sapiens
gccugcugcacuugccugcccugccuugcuu

SEQ ID NO: 355080 - RNA, 32 nt, Homo Sapiens
ucuuguuauuacgguuuuauuaauuuuguaga

SEQ ID NO: 355081 - RNA, 32 nt, Homo Sapiens
auccagaaugccuaccaucagcuccugaauca

SEQ ID NO: 355082 - RNA, 32 nt, Homo Sapiens
gagaugaguauuuuauucguguucuguuuccg

SEQ ID NO: 355083 - RNA, 32 nt, Homo Sapiens
aaaguuaaauuaacuaaauaugcauuuccucg

SEQ ID NO: 355084 - RNA, 30 nt, Homo Sapiens
acuggcuuuguucuuuacuaacucugaaca

SEQ ID NO: 355085 - RNA, 32 nt, Homo Sapiens
accugagccacuuuucccagccuguuuuuugu

SEQ ID NO: 355086 - RNA, 32 nt, Homo Sapiens
caguccuggcccccugccuccucccucaugag

SEQ ID NO: 355087 - RNA, 32 nt, Homo Sapiens
cucccucccuccacugacguggcccagaugaa

SEQ ID NO: 355088 - RNA, 32 nt, Homo Sapiens
aggaguucgacacuguauaacagauauaucug

SEQ ID NO: 355089 - RNA, 32 nt, Homo Sapiens
uauuguaauuuuccuacuucuuugauaaaaga

SEQ ID NO: 355090 - RNA, 32 nt, Homo Sapiens
aagauuaaugaaaaauaaacauuucugucccc

SEQ ID NO: 355091 - RNA, 32 nt, Homo Sapiens
gccggcggguggcaggaagacaccaggcugca

SEQ ID NO: 355092 - RNA, 32 nt, Homo Sapiens
uuuaguucacacauuauaugcaguuuaucuuu

SEQ ID NO: 355093 - RNA, 32 nt, Homo Sapiens
cuguguggggacgcugcacgagccguggacca

SEQ ID NO: 355094 - RNA, 32 nt, Homo Sapiens
caggagccgcauggguccugugcaggaccccu

SEQ ID NO: 355095 - RNA, 29 nt, Homo Sapiens
ggggggaggggacagagggggcgucacgg

SEQ ID NO: 355096 - RNA, 32 nt, Homo Sapiens
uuccuauacauuuuuccaauccccaugcaaac

SEQ ID NO: 355097 - RNA, 32 nt, Homo Sapiens
agggagagacgcgggcacaaaggucgcgggag

SEQ ID NO: 355098 - RNA, 32 nt, Homo Sapiens
guuuauguauaaaucauggaauuuaugcaaaa

SEQ ID NO: 355099 - RNA, 32 nt, Homo Sapiens
ccaccuuccucccaccccgggaacccggaagu

SEQ ID NO: 355100 - RNA, 32 nt, Homo Sapiens
agccucugcuacggagcgcuucuguccucugu

SEQ ID NO: 355101 - RNA, 32 nt, Homo Sapiens
ucuguuggaauaacccagaugucugcaucccc

SEQ ID NO: 355102 - RNA, 32 nt, Homo Sapiens
ggaaucaccagggcccggaucuaagaugcccu

SEQ ID NO: 355103 - RNA, 32 nt, Homo Sapiens
ucaggguguuaaaaaaguuucuuaaucucucu

SEQ ID NO: 355104 - RNA, 32 nt, Homo Sapiens
aagugaaaauccacaacucugagagaaacuac

SEQ ID NO: 355105 - RNA, 32 nt, Homo Sapiens
ccgugcauauucuauuugcugaucuaccagcu

SEQ ID NO: 355106 - RNA, 32 nt, Homo Sapiens
ugggaaauucccaaaucugugcucuuuacagg

SEQ ID NO: 355107 - RNA, 32 nt, Homo Sapiens
ucugggaaauuacuuuccuccucccuguguua

SEQ ID NO: 355108 - RNA, 32 nt, Homo Sapiens
ucccagaggccccggcggccugugcuccucac

SEQ ID NO: 355109 - RNA, 32 nt, Homo Sapiens
cacacugcagagcuaccccaccucugggccug

SEQ ID NO: 355110 - RNA, 32 nt, Homo Sapiens
aaacuuuaaaaauuauuauauauuuauagcaa

SEQ ID NO: 355111 - RNA, 32 nt, Homo Sapiens
ccuuccugccagccuggcagcucuggaagugg

SEQ ID NO: 355112 - RNA, 32 nt, Homo Sapiens
auucagaauauuucucuguucguauccagccc

SEQ ID NO: 355113 - RNA, 32 nt, Homo Sapiens
gaagaaccucagugagaaaacacacccgccuu

SEQ ID NO: 355114 - RNA, 32 nt, Homo Sapiens
gauugaugggcuccggcccgcugggguguuau

SEQ ID NO: 355115 - RNA, 32 nt, Homo Sapiens
aggggcuuugagagagacgaccccaaggcaag

SEQ ID NO: 355116 - RNA, 32 nt, Homo Sapiens
ugcguuucaaccaagaccaaaacugcuuuugc

SEQ ID NO: 355117 - RNA, 32 nt, Homo Sapiens
cagcaaauuccauuuugugguguuagugucuu

SEQ ID NO: 355118 - RNA, 32 nt, Homo Sapiens
cacuaccuuguaccuuuauacuuagauuggaa

SEQ ID NO: 355119 - RNA, 28 nt, Homo Sapiens
gugauggggcggcagccccgggccucug

SEQ ID NO: 355120 - RNA, 32 nt, Homo Sapiens
uugcagcucucccagcagcccuggacaguggc

SEQ ID NO: 355121 - RNA, 32 nt, Homo Sapiens
caagagucaacaccgccucaaaaguacaaggc

SEQ ID NO: 355122 - RNA, 32 nt, Homo Sapiens
cuggcacagggaggagcagcucuguaaaucug

SEQ ID NO: 355123 - RNA, 32 nt, Homo Sapiens
ggucauggauggcuuaaaauaccagcccuucc

SEQ ID NO: 355124 - RNA, 32 nt, Homo Sapiens
ccauuuauuaauuuauaaggggacuagaagga

SEQ ID NO: 355125 - RNA, 32 nt, Homo Sapiens
uauaugaaauauuuaugcgacucucaaacuuu

SEQ ID NO: 355126 - RNA, 32 nt, Homo Sapiens
agucccauucagaagucuucucuuaaagcagc

SEQ ID NO: 355127 - RNA, 32 nt, Homo Sapiens
cucaaagcagagccaguagugaucaguauccu

SEQ ID NO: 355128 - RNA, 32 nt, Homo Sapiens
uuucuggggugaagcccuuuggcugccccacu

SEQ ID NO: 355129 - RNA, 32 nt, Homo Sapiens
auaauuguuuuaaaguaauaaucuaaauguuc

SEQ ID NO: 355130 - RNA, 32 nt, Homo Sapiens
uguucgagcugaggagugccuucaggccagug

SEQ ID NO: 355131 - RNA, 32 nt, Homo Sapiens
cagacagcccccagcccuucuccgacggccuc

SEQ ID NO: 355132 - RNA, 32 nt, Homo Sapiens
cucagccgcugucggggcgcggggucgcgggg

SEQ ID NO: 355133 - RNA, 32 nt, Homo Sapiens
gaagaccuuggcagcgacguggcucgagaagc

SEQ ID NO: 355134 - RNA, 32 nt, Homo Sapiens
ccaugcacacacucacaggaggcccguggacu

SEQ ID NO: 355135 - RNA, 32 nt, Homo Sapiens
agaugugcuuauaaagcuuccaaauacaacuc

SEQ ID NO: 355136 - RNA, 32 nt, Homo Sapiens
agaaagcaagaaaauauguuucccccucagga

SEQ ID NO: 355137 - RNA, 32 nt, Homo Sapiens
uugguguccucccagaucuaugugucuuuccc

SEQ ID NO: 355138 - RNA, 32 nt, Homo Sapiens
uagcguguaucacuuucugagaucaucuuccu

SEQ ID NO: 355139 - RNA, 32 nt, Homo Sapiens
gggcuggcuagucaugggggagcccaguagag

SEQ ID NO: 355140 - RNA, 31 nt, Homo Sapiens
agugcgccucaccagaaccaguuaagagaca

SEQ ID NO: 355141 - RNA, 32 nt, Homo Sapiens
ugugggacugucagggauuccagggacccacu

SEQ ID NO: 355142 - RNA, 32 nt, Homo Sapiens
ggggacgcacuguguccuaguugaggcuaaca

SEQ ID NO: 355143 - RNA, 32 nt, Homo Sapiens
agaaaucuauagaaaguguucuguuacaaaau

SEQ ID NO: 355144 - RNA, 32 nt, Homo Sapiens
auagauuuugcuuggguuuucuuucuuaaaaa

SEQ ID NO: 355145 - RNA, 32 nt, Homo Sapiens
ggaggcacagacugaaaaccaggaaauugggu

SEQ ID NO: 355146 - RNA, 32 nt, Homo Sapiens
uuccugcuuccucuccuuugcugaaacaaaug

SEQ ID NO: 355147 - RNA, 32 nt, Homo Sapiens
uguugagaacuaaggauauucuuuagcaagag

SEQ ID NO: 355148 - RNA, 32 nt, Homo Sapiens
acccugaaccaucagcuaaaagagguagauag

SEQ ID NO: 355149 - RNA, 32 nt, Homo Sapiens
uacugagggccgagccgaggcggcgcgggugc

SEQ ID NO: 355150 - RNA, 32 nt, Homo Sapiens
ugcugcuccaggugcugccgcccggggcuacg

SEQ ID NO: 355151 - RNA, 32 nt, Homo Sapiens
cuucgucugccagccccuggccuguuauacac

SEQ ID NO: 355152 - RNA, 32 nt, Homo Sapiens
ggcaggagcgugcucuuccccgcggcucgugc

SEQ ID NO: 355153 - RNA, 32 nt, Homo Sapiens
aagagucccccuccuggcagaaugucugggcu

SEQ ID NO: 355154 - RNA, 32 nt, Homo Sapiens
gcuccugcagcagucccaugccccacacucug

SEQ ID NO: 355155 - RNA, 32 nt, Homo Sapiens
ccuggccccucugcccggcagcgccgcgcacc

SEQ ID NO: 355156 - RNA, 32 nt, Homo Sapiens
uacuacacuuuauauuugauaucuaaaauguu

SEQ ID NO: 355157 - RNA, 32 nt, Homo Sapiens
uucuuuuuuuuuaaguuuuaaauaaacucaga

SEQ ID NO: 355158 - RNA, 32 nt, Homo Sapiens
uaaacaagagugauauuuugcuagggcuuuca

SEQ ID NO: 355159 - RNA, 32 nt, Homo Sapiens
gaauacaggugugaaccaccacguuuuguccc

SEQ ID NO: 355160 - RNA, 32 nt, Homo Sapiens
gaagaaugccgcguugggugggugcugaggga

SEQ ID NO: 355161 - RNA, 32 nt, Homo Sapiens
uauuugucaucuccacugcauacuuccucaua

SEQ ID NO: 355162 - RNA, 32 nt, Homo Sapiens
ggauucgccucccagcggacgugagcuuccac

SEQ ID NO: 355163 - RNA, 32 nt, Homo Sapiens
aagagcacaauguagguguauuugaguauuuu

SEQ ID NO: 355164 - RNA, 32 nt, Homo Sapiens
uggaaauguuuagacaggauauuuucuugaug

SEQ ID NO: 355165 - RNA, 32 nt, Homo Sapiens
aguauuuugcuauauauaaagacaacaaaaga

SEQ ID NO: 355166 - RNA, 32 nt, Homo Sapiens
auuuuuuucuauuuuugguagagacaggguuu

SEQ ID NO: 355167 - RNA, 32 nt, Homo Sapiens
ucggcgccgcaucaccgcgucccaggccuccu

SEQ ID NO: 355168 - RNA, 32 nt, Homo Sapiens
gucuuuuuacuuuuuuaauagcgaccuuugca

SEQ ID NO: 355169 - RNA, 32 nt, Homo Sapiens
agguccucauucuccagccagccucucugccc

SEQ ID NO: 355170 - RNA, 32 nt, Homo Sapiens
auacuauuuuaaaaauaccuuuaguaccuggg

SEQ ID NO: 355171 - RNA, 32 nt, Homo Sapiens
guuugucucgugguuggaagccuccccuuggc

SEQ ID NO: 355172 - RNA, 32 nt, Homo Sapiens
gacugccgcgcgcggccgcucugggccugguu

SEQ ID NO: 355173 - RNA, 32 nt, Homo Sapiens
guccccgggcuucgccccacccggcccguggg

SEQ ID NO: 355174 - RNA, 32 nt, Homo Sapiens
accacauuuucaaauaguaaucauuaaagagg

SEQ ID NO: 355175 - RNA, 32 nt, Homo Sapiens
gccauugcacuccagccugggcgacaagagug

SEQ ID NO: 355176 - RNA, 30 nt, Homo Sapiens
cuccccgcggcgcagcacggagucucggcg

SEQ ID NO: 355177 - RNA, 30 nt, Homo Sapiens
gcuaaucugcuaaugcaguaaauuggagga

SEQ ID NO: 355178 - RNA, 32 nt, Homo Sapiens
ggugguucagccccuucuccaaccccuucaua

SEQ ID NO: 355179 - RNA, 32 nt, Homo Sapiens
auaauaccuguaggauauggcguugcugaagg

SEQ ID NO: 355180 - RNA, 30 nt, Homo Sapiens
gguucugucugugcuguccagcauagcagc

SEQ ID NO: 355181 - RNA, 32 nt, Homo Sapiens
gcucggcagcccagcccugggccugggugggu

SEQ ID NO: 355182 - RNA, 32 nt, Homo Sapiens
gaguugggcugcucccggggcucccaucucuu

SEQ ID NO: 355183 - RNA, 32 nt, Homo Sapiens
ggggagggguccaggcagcugggccgccgcgg

SEQ ID NO: 355184 - RNA, 32 nt, Homo Sapiens
ucucuccauuuucucccaagaagcaugacucg

SEQ ID NO: 355185 - RNA, 32 nt, Homo Sapiens
gcuucuaugugagggagagcaguuggguuucu

SEQ ID NO: 355186 - RNA, 32 nt, Homo Sapiens
agaaugaugucuuuuucucaaugcagugaguu

SEQ ID NO: 355187 - RNA, 32 nt, Homo Sapiens
ggggccgggaugcagggcgcgcggacagaaac

SEQ ID NO: 355188 - RNA, 32 nt, Homo Sapiens
uacauaauauguugaucuuacacucugcuuuu

SEQ ID NO: 355189 - RNA, 32 nt, Homo Sapiens
cggaggcagaucugagcuaugcagggaaaagg

SEQ ID NO: 355190 - RNA, 32 nt, Homo Sapiens
aggcggcccucccugcgggccuccagcagccc

SEQ ID NO: 355191 - RNA, 32 nt, Homo Sapiens
agcugggugugguggcgggcgccuguaauccc

SEQ ID NO: 355192 - RNA, 32 nt, Homo Sapiens
cuuuuucccagaaaggaaagauaccugcagcc

SEQ ID NO: 355193 - RNA, 32 nt, Homo Sapiens
uacuuauacauuccugaaacauuuucaucugu

SEQ ID NO: 355194 - RNA, 32 nt, Homo Sapiens
ccugacgguauucagcugcgcguaagucuggc

SEQ ID NO: 355195 - RNA, 32 nt, Homo Sapiens
guguaagacagagggcacagucccaugucaug

SEQ ID NO: 355196 - RNA, 32 nt, Homo Sapiens
ugacuguggaggagggcuugcuuaagauaugu

SEQ ID NO: 355197 - RNA, 32 nt, Homo Sapiens
gcuaccauuuuacauuucuauuucauaaugaa

SEQ ID NO: 355198 - RNA, 32 nt, Homo Sapiens
auuuaugaaaauaaaacgucguuuuuccugga

SEQ ID NO: 355199 - RNA, 32 nt, Homo Sapiens
gcgagggcgagggcggagaggcgaggaagcug

SEQ ID NO: 355200 - RNA, 32 nt, Homo Sapiens
uggaugccccagcgcccucccuguccaguucc

SEQ ID NO: 355201 - RNA, 32 nt, Homo Sapiens
uagucauucugugcuauauuguaacugccaga

SEQ ID NO: 355202 - RNA, 32 nt, Homo Sapiens
uacccuaccccucccaucggggcugugcuggg

SEQ ID NO: 355203 - RNA, 32 nt, Homo Sapiens
ccugggucugcuagguucgaugauggcgaacu

SEQ ID NO: 355204 - RNA, 32 nt, Homo Sapiens
acuguuuucuccaugaauaaacucacuugauu

SEQ ID NO: 355205 - RNA, 31 nt, Homo Sapiens
auguuggggggccccacggagaguugacuug

SEQ ID NO: 355206 - RNA, 32 nt, Homo Sapiens
ugucaagcuauuuguuaagaaggucugcaaca

SEQ ID NO: 355207 - RNA, 32 nt, Homo Sapiens
ucuccccuuccuuugcccggggacgccgaacu

SEQ ID NO: 355208 - RNA, 31 nt, Homo Sapiens
caggugaaauaaacagccauguugcucauac

SEQ ID NO: 355209 - RNA, 32 nt, Homo Sapiens
uuagugaaacaaaagguuaagaaauguggaua

SEQ ID NO: 355210 - RNA, 32 nt, Homo Sapiens
gcgcggggccggccuuccugcagccucuuccg

SEQ ID NO: 355211 - RNA, 32 nt, Homo Sapiens
ugagacacuaagauguuucuacugcuacggaa

SEQ ID NO: 355212 - RNA, 32 nt, Homo Sapiens
uuguuucuccuugcccagcagugcugccuuca

SEQ ID NO: 355213 - RNA, 32 nt, Homo Sapiens
acuguauauccaauaauagugaaauggauccc

SEQ ID NO: 355214 - RNA, 32 nt, Homo Sapiens
gccugagggacggaggccgggauacuugggaa

SEQ ID NO: 355215 - RNA, 32 nt, Homo Sapiens
gaggacgaaggccuguguguugccaggcaggc

SEQ ID NO: 355216 - RNA, 32 nt, Homo Sapiens
ggucacuaccgucgcuuucuauuucucuuucu

SEQ ID NO: 355217 - RNA, 32 nt, Homo Sapiens
auaugcuucuguuucaucuacuugggcaugcu

SEQ ID NO: 355218 - RNA, 32 nt, Homo Sapiens
auagccuugggguuggacaucucuaguguagc

SEQ ID NO: 355219 - RNA, 32 nt, Homo Sapiens
agaggcugugcgagcccuucccggcccucccc

SEQ ID NO: 355220 - RNA, 32 nt, Homo Sapiens
cacccucgcacccacaccccucgcgguuccag

SEQ ID NO: 355221 - RNA, 32 nt, Homo Sapiens
uaugaggaagcaguuuaaauagcccuguucuc

SEQ ID NO: 355222 - RNA, 32 nt, Homo Sapiens
cauacauuacaauuccucccuugcucggcggu

SEQ ID NO: 355223 - RNA, 32 nt, Homo Sapiens
uaauuuuccuauggcauguuaacuggugcaca

SEQ ID NO: 355224 - RNA, 32 nt, Homo Sapiens
acuugaauucugucuuguuuuccgcauugugu

SEQ ID NO: 355225 - RNA, 32 nt, Homo Sapiens
gccugggaugcgcgcgcaccugcccucgcccc

SEQ ID NO: 355226 - RNA, 32 nt, Homo Sapiens
ccagaggcuucguuuacccagcaggccccugg

SEQ ID NO: 355227 - RNA, 32 nt, Homo Sapiens
ccugccgacuccuggguugagcuguugccuca

SEQ ID NO: 355228 - RNA, 32 nt, Homo Sapiens
guaacucuagaaucagccccaucagcacuaga

SEQ ID NO: 355229 - RNA, 32 nt, Homo Sapiens
guuuuacuauaaugaaagauauuuucauacuc

SEQ ID NO: 355230 - RNA, 32 nt, Homo Sapiens
cuccuuuaccuuccucucuccucagcggccgu

SEQ ID NO: 355231 - RNA, 32 nt, Homo Sapiens
ucgcaccgccgcgcccgggccgcgagugauga

SEQ ID NO: 355232 - RNA, 32 nt, Homo Sapiens
aacuucuagaaguugaaguuacaaagguauau

SEQ ID NO: 355233 - RNA, 32 nt, Homo Sapiens
gcggagcccagcccuccagcgucugccuccag

SEQ ID NO: 355234 - RNA, 32 nt, Homo Sapiens
cgcagucccccgagacucgccgagcgccguug

SEQ ID NO: 355235 - RNA, 32 nt, Homo Sapiens
uaucagucacaguuuucuuuccaauuaaacac

SEQ ID NO: 355236 - RNA, 32 nt, Homo Sapiens
gccucggccccggcaucccuguugggcgucag

SEQ ID NO: 355237 - RNA, 32 nt, Homo Sapiens
ccaauguuccugucucuccccucccccaccuu

SEQ ID NO: 355238 - RNA, 32 nt, Homo Sapiens
ccagccugcugccucagcacagccaagggaaa

SEQ ID NO: 355239 - RNA, 32 nt, Homo Sapiens
aaauccggccccauaccuggggcucucacuuc

SEQ ID NO: 355240 - RNA, 32 nt, Homo Sapiens
uuuacuguguuuuauaaaauagaguguaguuu

SEQ ID NO: 355241 - RNA, 32 nt, Homo Sapiens
ugcccaccaagcccugcccccagcccaagagg

SEQ ID NO: 355242 - RNA, 32 nt, Homo Sapiens
gcuguguggcaucgccaccuccucccgagcag

SEQ ID NO: 355243 - RNA, 31 nt, Homo Sapiens
ggggggcgggcggugucaggucccagcgagc

SEQ ID NO: 355244 - RNA, 32 nt, Homo Sapiens
uuuuuuugagccccucuuucagauaagguuau

SEQ ID NO: 355245 - RNA, 32 nt, Homo Sapiens
aagaucuggccgcgaauggaacucgcggcagc

SEQ ID NO: 355246 - RNA, 32 nt, Homo Sapiens
uguggagggcagggcaggguugccagauaaaa

SEQ ID NO: 355247 - RNA, 32 nt, Homo Sapiens
acccaauuucugggcucuggauccucacaguc

SEQ ID NO: 355248 - RNA, 32 nt, Homo Sapiens
aacagcggcagccagagaacuguuuuaaucau

SEQ ID NO: 355249 - RNA, 32 nt, Homo Sapiens
ucccuaugagagacggaagaggagacacagac

SEQ ID NO: 355250 - RNA, 29 nt, Homo Sapiens
uugauccuguuuuuccucucugccccgga

SEQ ID NO: 355251 - RNA, 32 nt, Homo Sapiens
gugugcaggaggaggggggauaaauaggaggc

SEQ ID NO: 355252 - RNA, 32 nt, Homo Sapiens
gugguggcuggagauggcugcugcucacccuc

SEQ ID NO: 355253 - RNA, 32 nt, Homo Sapiens
ugcuuuguuugcaauagcacaagcugcauuau

SEQ ID NO: 355254 - RNA, 32 nt, Homo Sapiens
cuugaguuaugaaauacuuuuacauuuaagga

SEQ ID NO: 355255 - RNA, 32 nt, Homo Sapiens
uucuuugaaagaaagaaaaaucucuugcugug

SEQ ID NO: 355256 - RNA, 32 nt, Homo Sapiens
augcaugcuacggaaaaaucuacuucaguagc

SEQ ID NO: 355257 - RNA, 32 nt, Homo Sapiens
acuauaaagacaguaaaaagaucagugguuau

SEQ ID NO: 355258 - RNA, 32 nt, Homo Sapiens
uuuuauuuaauggauuauggauuacaguauuu

SEQ ID NO: 355259 - RNA, 32 nt, Homo Sapiens
cucugcugcgucugcccucguuuugucucacg

SEQ ID NO: 355260 - RNA, 32 nt, Homo Sapiens
aggaaaaucuucauuaggaauuuaucagaaag

SEQ ID NO: 355261 - RNA, 32 nt, Homo Sapiens
auacuucaaugaggagcacaggcaccagcucu

SEQ ID NO: 355262 - RNA, 32 nt, Homo Sapiens
gaaagagggagcggucccgcgcggcuggggcg

SEQ ID NO: 355263 - RNA, 32 nt, Homo Sapiens
ccaaugcaacguggcuacuccaaacagaguug

SEQ ID NO: 355264 - RNA, 31 nt, Homo Sapiens
augugacucaagacuuccagagccucaaaug

SEQ ID NO: 355265 - RNA, 32 nt, Homo Sapiens
ggccccuuuccacaggcagcgucuccacaggg

SEQ ID NO: 355266 - RNA, 32 nt, Homo Sapiens
cccaaggagagcccugaagucuuguggaguuu

SEQ ID NO: 355267 - RNA, 32 nt, Homo Sapiens
uguuuuccucaaugaggaguguugcucauuug

SEQ ID NO: 355268 - RNA, 32 nt, Homo Sapiens
gugugccugcagcagccuccacagccacgaug

SEQ ID NO: 355269 - RNA, 30 nt, Homo Sapiens
auuugcaucugugcugcaguagucuuucuu

SEQ ID NO: 355270 - RNA, 32 nt, Homo Sapiens
cugagcgccugaucgccgcggaccugagccga

SEQ ID NO: 355271 - RNA, 32 nt, Homo Sapiens
aagaacggguggcauuuuggaguuauuggccu

SEQ ID NO: 355272 - RNA, 32 nt, Homo Sapiens
agcaaauguauuauaauuaaaguuuuauuugc

SEQ ID NO: 355273 - RNA, 32 nt, Homo Sapiens
ccaacggaaaucaauaggaguugaagagauua

SEQ ID NO: 355274 - RNA, 32 nt, Homo Sapiens
ugacgcgguggcggcgagggcgguggggcugc

SEQ ID NO: 355275 - RNA, 32 nt, Homo Sapiens
ccgaggcucguacggcgccuucugcaaggggc

SEQ ID NO: 355276 - RNA, 32 nt, Homo Sapiens
ugauguugcaucuaaagaugcuauaagacaau

SEQ ID NO: 355277 - RNA, 32 nt, Homo Sapiens
ugcuguuguuauuauugucauuauuaccacug

SEQ ID NO: 355278 - RNA, 32 nt, Homo Sapiens
gaacccgggaggaggagcuugcagugagccga

SEQ ID NO: 355279 - RNA, 32 nt, Homo Sapiens
cauuucaagacagugcuuuaaaacacuaacaa

SEQ ID NO: 355280 - RNA, 32 nt, Homo Sapiens
gcccugaacuuacuccacuuggccucuccaga

SEQ ID NO: 355281 - RNA, 32 nt, Homo Sapiens
ugcacgggccuggccucggccuuggccucaca

SEQ ID NO: 355282 - RNA, 30 nt, Homo Sapiens
gacaucaaguaguuugaugagacagucugu

SEQ ID NO: 355283 - RNA, 32 nt, Homo Sapiens
gcaggaggcaagugaggccuaucugguuggcc

SEQ ID NO: 355284 - RNA, 32 nt, Homo Sapiens
auuagagcuauucuuuucagauauuucaauaa

SEQ ID NO: 355285 - RNA, 32 nt, Homo Sapiens
ugaauuaucgcagagaaaaaccacaugagaaa

SEQ ID NO: 355286 - RNA, 32 nt, Homo Sapiens
aaguuggugacuguuuuaaucaucaucuagac

SEQ ID NO: 355287 - RNA, 32 nt, Homo Sapiens
uccucugggagccgcacccacaugacugcccu

SEQ ID NO: 355288 - RNA, 31 nt, Homo Sapiens
uuaaaguauaguggaaggauacaaaugcuag

SEQ ID NO: 355289 - RNA, 28 nt, Homo Sapiens
ucaggaggugguauuaggaugacugugu

SEQ ID NO: 355290 - RNA, 32 nt, Homo Sapiens
caaucauaugagagagauuauuacugucuaca

SEQ ID NO: 355291 - RNA, 32 nt, Homo Sapiens
gcagcggcagagagggaauggugcaggcaggc

SEQ ID NO: 355292 - RNA, 32 nt, Homo Sapiens
uguucaggauggggaggauauuucaauugcuc

SEQ ID NO: 355293 - RNA, 32 nt, Homo Sapiens
gggcccaugugagcgccaugcggcgccgcgca

SEQ ID NO: 355294 - RNA, 32 nt, Homo Sapiens
gggacccgccccacagacuccaacuuccccuc

SEQ ID NO: 355295 - RNA, 32 nt, Homo Sapiens
caaaauuugucaaaaguggccuuuuauuguaa

SEQ ID NO: 355296 - RNA, 32 nt, Homo Sapiens
gcauagagaacaaaguaaaaguaguguugucc

SEQ ID NO: 355297 - RNA, 32 nt, Homo Sapiens
auauaagaaauauuuccaaaacuaaaggaauu

SEQ ID NO: 355298 - RNA, 32 nt, Homo Sapiens
guggaagaggccgcggugcugcgggccgcugu

SEQ ID NO: 355299 - RNA, 32 nt, Homo Sapiens
ucaaguuuuuuuuuuccaaaucguaagaacug

SEQ ID NO: 355300 - RNA, 32 nt, Homo Sapiens
gcauguacaacacaaaucaugcuucugacugg

SEQ ID NO: 355301 - RNA, 32 nt, Homo Sapiens
acaucaaaauaguuacaucuugugaaaauaua

SEQ ID NO: 355302 - RNA, 31 nt, Homo Sapiens
caggcagcaccgagccugccccgugagcuga

SEQ ID NO: 355303 - RNA, 31 nt, Homo Sapiens
agagauacguggagaaaggaaauuuacucua

SEQ ID NO: 355304 - RNA, 31 nt, Homo Sapiens
agauugugccacugccuccggccugggcgag

SEQ ID NO: 355305 - RNA, 32 nt, Homo Sapiens
cacacaugcacggauauugccuggacacacac

SEQ ID NO: 355306 - RNA, 32 nt, Homo Sapiens
agaucccgggcucuccgaacgcaacuucgccc

SEQ ID NO: 355307 - RNA, 32 nt, Homo Sapiens
guucugcagacacgccuuccccucagccacac

SEQ ID NO: 355308 - RNA, 32 nt, Homo Sapiens
cucucgcuccagcagagccugcgccuuucuga

SEQ ID NO: 355309 - RNA, 32 nt, Homo Sapiens
gccucaggaagaggauccuucuuguuauugcu

SEQ ID NO: 355310 - RNA, 32 nt, Homo Sapiens
accccaccccgccccacccccagcccuggccc

SEQ ID NO: 355311 - RNA, 32 nt, Homo Sapiens
uggucaaagcaguaaaggaguuuagagauacu

SEQ ID NO: 355312 - RNA, 31 nt, Homo Sapiens
ccuccccagcgcagcagcccggcugugggcc

SEQ ID NO: 355313 - RNA, 32 nt, Homo Sapiens
ucaagaaaaaauaaauggaaaucaucgaaaau

SEQ ID NO: 355314 - RNA, 32 nt, Homo Sapiens
ggaucuggcguugcagcgccccucccagcaag

SEQ ID NO: 355315 - RNA, 32 nt, Homo Sapiens
aaucccuuggugacuucucuccaggguuguca

SEQ ID NO: 355316 - RNA, 32 nt, Homo Sapiens
caggagagaagauaacauuuacaaguaaacag

SEQ ID NO: 355317 - RNA, 32 nt, Homo Sapiens
gugccccccacuuucucccugucuggccccug

SEQ ID NO: 355318 - RNA, 32 nt, Homo Sapiens
uccaggugcucagaccuuuacauccuggacuu

SEQ ID NO: 355319 - RNA, 32 nt, Homo Sapiens
cauuuuuaaaacauuuuacuguaauucuguug

SEQ ID NO: 355320 - RNA, 32 nt, Homo Sapiens
aaggauuauguccgaguauuuauuuucuucgg

SEQ ID NO: 355321 - RNA, 32 nt, Homo Sapiens
cucucccccaacaaacccaguccucauaucau

SEQ ID NO: 355322 - RNA, 32 nt, Homo Sapiens
uuuuguuguuguuguuuucaaguuuuaucauu

SEQ ID NO: 355323 - RNA, 32 nt, Homo Sapiens
cucuuaagaacaauggcugaaccaaauguuuc

SEQ ID NO: 355324 - RNA, 32 nt, Homo Sapiens
aauuaaugaaaauaaaaguuucuaaauuuaca

SEQ ID NO: 355325 - RNA, 32 nt, Homo Sapiens
auuuccuguaggauguuccugcacuauaacaa

SEQ ID NO: 355326 - RNA, 32 nt, Homo Sapiens
cgagcaugccgagauuugcagcuccuccgaga

SEQ ID NO: 355327 - RNA, 32 nt, Homo Sapiens
ggacuucuguuguguucucaccacucgauuug

SEQ ID NO: 355328 - RNA, 32 nt, Homo Sapiens
gugggguugccugggaccagguccucagaaac

SEQ ID NO: 355329 - RNA, 32 nt, Homo Sapiens
ugcguguugcugugaaguugucugugaaaucg

SEQ ID NO: 355330 - RNA, 32 nt, Homo Sapiens
uacaggaccagagggacaagacaugacuguga

SEQ ID NO: 355331 - RNA, 32 nt, Homo Sapiens
ggaaaccaggagugccacuaugcugacuucuu

SEQ ID NO: 355332 - RNA, 32 nt, Homo Sapiens
caccgccgauucugaggaugacaauuccacau

SEQ ID NO: 355333 - RNA, 32 nt, Homo Sapiens
ccucuuugcugcuuuguuuuccuccugauucu

SEQ ID NO: 355334 - RNA, 32 nt, Homo Sapiens
uggagggcugcuacuuacauaaucuagccacu

SEQ ID NO: 355335 - RNA, 32 nt, Homo Sapiens
gcacauguaaaaaguuuggcuauuuaaacuaa

SEQ ID NO: 355336 - RNA, 31 nt, Homo Sapiens
ucucauuuugaaauuuugccaauggucuggu

SEQ ID NO: 355337 - RNA, 32 nt, Homo Sapiens
aguuauucaggagaguauguugaucuugguuc

SEQ ID NO: 355338 - RNA, 32 nt, Homo Sapiens
guuuuauguucagaaauaugugaauuagaaug

SEQ ID NO: 355339 - RNA, 32 nt, Homo Sapiens
gcucuccuccaccgcucccccggagccuccca

SEQ ID NO: 355340 - RNA, 32 nt, Homo Sapiens
gaaacauaaaaaggaugggguaacaguuauag

SEQ ID NO: 355341 - RNA, 32 nt, Homo Sapiens
ccugugucuauuauuauauacauaucucuacg

SEQ ID NO: 355342 - RNA, 32 nt, Homo Sapiens
aauuuguauauauaagcauuguguauguauuc

SEQ ID NO: 355343 - RNA, 32 nt, Homo Sapiens
ccaaaggcugcacaacucugugaauauaauaa

SEQ ID NO: 355344 - RNA, 32 nt, Homo Sapiens
cuuuacauguaacucauuuaauccccaacaac

SEQ ID NO: 355345 - RNA, 32 nt, Homo Sapiens
cauuuuggguggcagcagcuuuggaucacuca

SEQ ID NO: 355346 - RNA, 32 nt, Homo Sapiens
gcuccagggacccaggcccacauccauccagc

SEQ ID NO: 355347 - RNA, 32 nt, Homo Sapiens
uuuuaaaaagcacuucuacuugguuuuuugau

SEQ ID NO: 355348 - RNA, 32 nt, Homo Sapiens
gggcagaggcggcccaggggcggcacgcggcu

SEQ ID NO: 355349 - RNA, 32 nt, Homo Sapiens
ggggacagauuugugaccggcgcgguuuuugu

SEQ ID NO: 355350 - RNA, 32 nt, Homo Sapiens
agagacacagaaaagacaaaggaauguacuaa

SEQ ID NO: 355351 - RNA, 32 nt, Homo Sapiens
caccuguuugugaugugcaggcacagaagaaa

SEQ ID NO: 355352 - RNA, 32 nt, Homo Sapiens
ugguuuugcucuugccucacaguugccucuuc

SEQ ID NO: 355353 - RNA, 32 nt, Homo Sapiens
agaaaagaaaucagagccauuuaaugagguuc

SEQ ID NO: 355354 - RNA, 32 nt, Homo Sapiens
ucugcaggccccagcccuggccuccaagcaag

SEQ ID NO: 355355 - RNA, 32 nt, Homo Sapiens
gcuccgcgccugcuccuucuccacuuuuugca

SEQ ID NO: 355356 - RNA, 32 nt, Homo Sapiens
cuguaucaguuucaaaaacguagaaagcacgg

SEQ ID NO: 355357 - RNA, 32 nt, Homo Sapiens
aaaaggauuggauaauaaaaauaaguuucuac

SEQ ID NO: 355358 - RNA, 31 nt, Homo Sapiens
cuaucagcaaggucaucuaggaguacaagua

SEQ ID NO: 355359 - RNA, 31 nt, Homo Sapiens
uugagggguaucaagaaccagauugguuaca

SEQ ID NO: 355360 - RNA, 32 nt, Homo Sapiens
ugaagcaucuacacgcguccacagcagcacug

SEQ ID NO: 355361 - RNA, 32 nt, Homo Sapiens
cauuguauuuccccccacgaguugcuucaggg

SEQ ID NO: 355362 - RNA, 32 nt, Homo Sapiens
ugacugccaaacuuuuuccauuuguuauguuc

SEQ ID NO: 355363 - RNA, 32 nt, Homo Sapiens
cucaucagggcccagcagcaaccugccgcugc

SEQ ID NO: 355364 - RNA, 32 nt, Homo Sapiens
agaucuguauggaauuaucugcuuuuauggug

SEQ ID NO: 355365 - RNA, 32 nt, Homo Sapiens
ccuauccaacugaggucgccuuugcgaucccu

SEQ ID NO: 355366 - RNA, 32 nt, Homo Sapiens
ccauugccugcaccccaccccagccacucaac

SEQ ID NO: 355367 - RNA, 32 nt, Homo Sapiens
aauucuggggagagaugauggugucugcagca

SEQ ID NO: 355368 - RNA, 32 nt, Homo Sapiens
ggauggaggagaaggugguugaacugaguacu

SEQ ID NO: 355369 - RNA, 32 nt, Homo Sapiens
ucuggcucagugauggagagccagguucaucu

SEQ ID NO: 355370 - RNA, 32 nt, Homo Sapiens
ggcugcuuggacacgcgugugcaugugcacgc

SEQ ID NO: 355371 - RNA, 32 nt, Homo Sapiens
ucucagccuggaguggcagcucugcuagcagc

SEQ ID NO: 355372 - RNA, 32 nt, Homo Sapiens
uaacauacuuuaaaauguucagguagcaguga

SEQ ID NO: 355373 - RNA, 32 nt, Homo Sapiens
agccccuuguuccaaugaacucuaccuuugug

SEQ ID NO: 355374 - RNA, 32 nt, Homo Sapiens
gaagggaagggagagccagugacgacuggcag

SEQ ID NO: 355375 - RNA, 32 nt, Homo Sapiens
ucuacaguugauauauuuguaacugguacaag

SEQ ID NO: 355376 - RNA, 32 nt, Homo Sapiens
uuauauauauuuuuuggucuguucuuuguaaa

SEQ ID NO: 355377 - RNA, 32 nt, Homo Sapiens
ggugggagggggagugggaauaugcgugugug

SEQ ID NO: 355378 - RNA, 32 nt, Homo Sapiens
ugcccuccaacccugcaggggcgucagggcac

SEQ ID NO: 355379 - RNA, 32 nt, Homo Sapiens
cgcuguggagacagcauccuccccaguccggg

SEQ ID NO: 355380 - RNA, 32 nt, Homo Sapiens
aaaagauuugaaaaauauaaaaaauggacaaa

SEQ ID NO: 355381 - RNA, 32 nt, Homo Sapiens
gcccucucugggggcucuggggcucagcacag

SEQ ID NO: 355382 - RNA, 32 nt, Homo Sapiens
acacaaacauucaaagcuuagggauagguccu

SEQ ID NO: 355383 - RNA, 32 nt, Homo Sapiens
augaaacaaaaauguauuagacauuaccccug

SEQ ID NO: 355384 - RNA, 32 nt, Homo Sapiens
gauuugucauguuuauuuuuuauuuuuacaau

SEQ ID NO: 355385 - RNA, 32 nt, Homo Sapiens
uaaucuguucuucuauucccacguuagccaau

SEQ ID NO: 355386 - RNA, 32 nt, Homo Sapiens
gccuuugaggcccucccucgguguuuuuuccc

SEQ ID NO: 355387 - RNA, 27 nt, Homo Sapiens
ggauggaggggacagaggcggcggcgg

SEQ ID NO: 355388 - RNA, 32 nt, Homo Sapiens
gcugcuucucccugcucccaucucauccccac

SEQ ID NO: 355389 - RNA, 32 nt, Homo Sapiens
auucuagcuuaauuuuuuuuuaaaugccacgu

SEQ ID NO: 355390 - RNA, 32 nt, Homo Sapiens
auaauauucacacauauucuuaaugacauuuc

SEQ ID NO: 355391 - RNA, 32 nt, Homo Sapiens
agugggcagggccuguuuuccgugccucacgc

SEQ ID NO: 355392 - RNA, 32 nt, Homo Sapiens
cuuuuauuuauuauuuaugucugccguauuuu

SEQ ID NO: 355393 - RNA, 32 nt, Homo Sapiens
cuguccgggcugcugcgacgcgggcuccgcag

SEQ ID NO: 355394 - RNA, 32 nt, Homo Sapiens
aaugaacuccacuuacuugcucagucuuccca

SEQ ID NO: 355395 - RNA, 32 nt, Homo Sapiens
gcucgagcguccucggggagugccagccagag

SEQ ID NO: 355396 - RNA, 32 nt, Homo Sapiens
accuccccaacccagacuuuggagcggguggg

SEQ ID NO: 355397 - RNA, 32 nt, Homo Sapiens
gaacauggcugccgccggccgccaaccggucu

SEQ ID NO: 355398 - RNA, 31 nt, Homo Sapiens
augugcagaaacacuuguguggccugucccu

SEQ ID NO: 355399 - RNA, 32 nt, Homo Sapiens
uugagagugggagcagagggccaggcacccag

SEQ ID NO: 355400 - RNA, 32 nt, Homo Sapiens
auagcagaaaucaacuacuguacaauuucuug

SEQ ID NO: 355401 - RNA, 32 nt, Homo Sapiens
aaaggauguggcuccauguccauggugccccc

SEQ ID NO: 355402 - RNA, 32 nt, Homo Sapiens
ggcugaucucaaacaucugaccucaggaaguc

SEQ ID NO: 355403 - RNA, 32 nt, Homo Sapiens
uuccugguucucgguucuaaaaacagacuucc

SEQ ID NO: 355404 - RNA, 32 nt, Homo Sapiens
auggcauuuuaacuuguaaaaucgugugauga

SEQ ID NO: 355405 - RNA, 32 nt, Homo Sapiens
aggugauacuauuucaugaaggugguaccaac

SEQ ID NO: 355406 - RNA, 32 nt, Homo Sapiens
ggccgcgcccugggcuggcgucgugccuagcc

SEQ ID NO: 355407 - RNA, 32 nt, Homo Sapiens
gaaaaggaaggggugugguuugucuuugaaau

SEQ ID NO: 355408 - RNA, 32 nt, Homo Sapiens
uuguggccaucagagacucaaaaggaaguaag

SEQ ID NO: 355409 - RNA, 30 nt, Homo Sapiens
ugacaaggauucucugccuaagcuuaagga

SEQ ID NO: 355410 - RNA, 32 nt, Homo Sapiens
cgagcugugggaagagcccuggauaggaagcc

SEQ ID NO: 355411 - RNA, 32 nt, Homo Sapiens
acuuucagguaauuuuaacugauuauuucuuu

SEQ ID NO: 355412 - RNA, 32 nt, Homo Sapiens
cucggggcggggguguguggucaggcugggca

SEQ ID NO: 355413 - RNA, 32 nt, Homo Sapiens
ugccuuggaccccagcucuccucccccuuucu

SEQ ID NO: 355414 - RNA, 32 nt, Homo Sapiens
aguucucugaaucuuuaaugaaaucauuugcc

SEQ ID NO: 355415 - RNA, 32 nt, Homo Sapiens
cgugugggugcccuccaggugugugugaccau

SEQ ID NO: 355416 - RNA, 32 nt, Homo Sapiens
aggucgaggcugcagugagcugugauugcacc

SEQ ID NO: 355417 - RNA, 32 nt, Homo Sapiens
auuucacuaaauccaaaagagaauuuucaauc

SEQ ID NO: 355418 - RNA, 32 nt, Homo Sapiens
uuccucccacggugccaaccaaggcuuaugau

SEQ ID NO: 355419 - RNA, 32 nt, Homo Sapiens
aggcccgagagggggcugggggugggugggca

SEQ ID NO: 355420 - RNA, 32 nt, Homo Sapiens
cgucaccgccgggcggcccgcgcggagucuga

SEQ ID NO: 355421 - RNA, 32 nt, Homo Sapiens
acugcuaauugauauuuacugagcagcugcug

SEQ ID NO: 355422 - RNA, 32 nt, Homo Sapiens
auauguagauguaugcacacacauauauuauu

SEQ ID NO: 355423 - RNA, 32 nt, Homo Sapiens
gcuucucucgcacacggucaucuuuacauauc

SEQ ID NO: 355424 - RNA, 32 nt, Homo Sapiens
gaugauacuuuuuccauuacugcugcgucccu

SEQ ID NO: 355425 - RNA, 32 nt, Homo Sapiens
gagauccccgguuucccugauuagacacugag

SEQ ID NO: 355426 - RNA, 32 nt, Homo Sapiens
gugaauuugaauaaaugagaaaaaaugcaaaa

SEQ ID NO: 355427 - RNA, 31 nt, Homo Sapiens
cggucuuauggaauaaaguccaucagcucug

SEQ ID NO: 355428 - RNA, 32 nt, Homo Sapiens
cugccucccuucccuaggccuggcuccuucug

SEQ ID NO: 355429 - RNA, 32 nt, Homo Sapiens
aagagcuauaggaggaaaaaacaggcuccuca

SEQ ID NO: 355430 - RNA, 32 nt, Homo Sapiens
uaaaacucaaucaugacuuuggcagagauaaa

SEQ ID NO: 355431 - RNA, 29 nt, Homo Sapiens
guacauguguguauguacauagauacauc

SEQ ID NO: 355432 - RNA, 32 nt, Homo Sapiens
gaaaauuaaaccucuuuuauaauuacccaguc

SEQ ID NO: 355433 - RNA, 32 nt, Homo Sapiens
uccagggccuccuggggagccuguccuguguu

SEQ ID NO: 355434 - RNA, 32 nt, Homo Sapiens
agacauggcgucccugagagccugcagccugc

SEQ ID NO: 355435 - RNA, 32 nt, Homo Sapiens
ccccuagccaaggagugugaauuuauagaucu

SEQ ID NO: 355436 - RNA, 32 nt, Homo Sapiens
cacugggaggggagugguggacacccagcuag

SEQ ID NO: 355437 - RNA, 32 nt, Homo Sapiens
ccggagcccauccaccaaggcuccauccauag

SEQ ID NO: 355438 - RNA, 32 nt, Homo Sapiens
ugauuucuuuaacaagacuuggaacaugugca

SEQ ID NO: 355439 - RNA, 32 nt, Homo Sapiens
cuaaugugaaguuuuaaucacuuuuaaguaua

SEQ ID NO: 355440 - RNA, 32 nt, Homo Sapiens
uagaauuuugacucuauauaaaucaagaaacg

SEQ ID NO: 355441 - RNA, 32 nt, Homo Sapiens
gcuccccccgagccaugagcugcuacaucaaa

SEQ ID NO: 355442 - RNA, 32 nt, Homo Sapiens
ucuuauuacccaccucuuuuuuuuuuuuuuuu

SEQ ID NO: 355443 - RNA, 32 nt, Homo Sapiens
cuauaaggaagaaaaacugaaaauguuuuagu

SEQ ID NO: 355444 - RNA, 32 nt, Homo Sapiens
aaaaugucuucaguuguaaaucuuaccauuau

SEQ ID NO: 355445 - RNA, 32 nt, Homo Sapiens
ugaauaauugaaaaacaaaacacucacuggau

SEQ ID NO: 355446 - RNA, 32 nt, Homo Sapiens
aaguuauuuaacaguaaucuauuuacuaauua

SEQ ID NO: 355447 - RNA, 32 nt, Homo Sapiens
uaaaagaucaaguaugcuaauuuuaagcaaau

SEQ ID NO: 355448 - RNA, 32 nt, Homo Sapiens
ugggcugaucugccuuacauaaucacauaagg

SEQ ID NO: 355449 - RNA, 32 nt, Homo Sapiens
cuuuggcgcuauggaggagcccggggcuaccc

SEQ ID NO: 355450 - RNA, 32 nt, Homo Sapiens
acaaacaaacaaaaggcauauggggagcuggg

SEQ ID NO: 355451 - RNA, 32 nt, Homo Sapiens
agagccuccagauagaaugcaggucuacagac

SEQ ID NO: 355452 - RNA, 28 nt, Homo Sapiens
auucaguauguguaaauguguuuguguu

SEQ ID NO: 355453 - RNA, 32 nt, Homo Sapiens
gcuuguccauagugugaauaaaaacuaaauca

SEQ ID NO: 355454 - RNA, 32 nt, Homo Sapiens
ugccccggagaauucagacagauguuuguuuc

SEQ ID NO: 355455 - RNA, 31 nt, Homo Sapiens
aaaguaucaaagaaaaacaaugaaauugacc

SEQ ID NO: 355456 - RNA, 32 nt, Homo Sapiens
guggaugguagaugaaguacuuugcggugcuc

SEQ ID NO: 355457 - RNA, 32 nt, Homo Sapiens
aaauccaaacaaaagcaggcuagagccagaag

SEQ ID NO: 355458 - RNA, 32 nt, Homo Sapiens
gcaaagaguaguuuuucuacaauguuguaaau

SEQ ID NO: 355459 - RNA, 27 nt, Homo Sapiens
guccuauccuucuuagugccucaaacu

SEQ ID NO: 355460 - RNA, 32 nt, Homo Sapiens
cccgcgcgugcccuccucccgccacacggcac

SEQ ID NO: 355461 - RNA, 32 nt, Homo Sapiens
ggauccggggcugagggaaggaggcggcggcc

SEQ ID NO: 355462 - RNA, 32 nt, Homo Sapiens
cagaagcccccuuggggcgccacaguuuuccc

SEQ ID NO: 355463 - RNA, 32 nt, Homo Sapiens
aguuucgaaacaaggagaccagugcuggucca

SEQ ID NO: 355464 - RNA, 32 nt, Homo Sapiens
gugagaggggcgccuuuucagcccuuugcucu

SEQ ID NO: 355465 - RNA, 32 nt, Homo Sapiens
gaaucuuggccaugugucagauuaucagaaca

SEQ ID NO: 355466 - RNA, 32 nt, Homo Sapiens
cugugcuagcauccuuuuuuucuuuucagugg

SEQ ID NO: 355467 - RNA, 32 nt, Homo Sapiens
uauccuccucccauuccaaccuuagaauggag

SEQ ID NO: 355468 - RNA, 32 nt, Homo Sapiens
acuuguaccccacuaaaaguauuagucuacac

SEQ ID NO: 355469 - RNA, 32 nt, Homo Sapiens
cccacuccugagaacagcggagccaggcgcuu

SEQ ID NO: 355470 - RNA, 32 nt, Homo Sapiens
ugccgcaccuucugccccauccccaggcucug

SEQ ID NO: 355471 - RNA, 32 nt, Homo Sapiens
ugacagauaauauuuuugaaacuuugaaaagu

SEQ ID NO: 355472 - RNA, 32 nt, Homo Sapiens
guaauacauuuuauuuuuucauugcuauauga

SEQ ID NO: 355473 - RNA, 32 nt, Homo Sapiens
aacugauggaguggcacaaauucccagugucu

SEQ ID NO: 355474 - RNA, 32 nt, Homo Sapiens
cagccuauacuucccuuuuugaauaccauuug

SEQ ID NO: 355475 - RNA, 32 nt, Homo Sapiens
cucuaccugugcucagccauggccagcgagag

SEQ ID NO: 355476 - RNA, 32 nt, Homo Sapiens
gaggagggucagggcuggccuuccucugugca

SEQ ID NO: 355477 - RNA, 32 nt, Homo Sapiens
gggacugggccggcugccucccagcgaugcac

SEQ ID NO: 355478 - RNA, 32 nt, Homo Sapiens
uagaaguaacuuucuucugcugcucuaaucug

SEQ ID NO: 355479 - RNA, 32 nt, Homo Sapiens
cgggccagggccgcacuccggagacucgcggu

SEQ ID NO: 355480 - RNA, 32 nt, Homo Sapiens
cuuaucuggcauaaaaagcagaaagucaguuu

SEQ ID NO: 355481 - RNA, 32 nt, Homo Sapiens
cucaaaugcuguccccggcagcuuuccugggg

SEQ ID NO: 355482 - RNA, 32 nt, Homo Sapiens
uggaagccuucuguucagacaccccuuaugcu

SEQ ID NO: 355483 - RNA, 32 nt, Homo Sapiens
ugccaggugccgccccggggcaagggccccag

SEQ ID NO: 355484 - RNA, 32 nt, Homo Sapiens
uugaaauagaaaacugucuauuuaauauagua

SEQ ID NO: 355485 - RNA, 32 nt, Homo Sapiens
ugugagcgccccugagcgccggcagcggccgc

SEQ ID NO: 355486 - RNA, 32 nt, Homo Sapiens
gucugcgcauguuuccuccuccuagcuccauc

SEQ ID NO: 355487 - RNA, 32 nt, Homo Sapiens
ggugcgaagaacugcaauggcugcugcaacgg

SEQ ID NO: 355488 - RNA, 32 nt, Homo Sapiens
aaagaagaguuccauggucaacuaaguucagg

SEQ ID NO: 355489 - RNA, 32 nt, Homo Sapiens
ccggcgcgccgcggaguuggcugcugggaggu

SEQ ID NO: 355490 - RNA, 32 nt, Homo Sapiens
ggcuagucuuggauuauaguaaucugcagaua

SEQ ID NO: 355491 - RNA, 32 nt, Homo Sapiens
ccaggcuugugcggggccaggcugggagccca

SEQ ID NO: 355492 - RNA, 32 nt, Homo Sapiens
agcaggcgggcgcgcuguggcuccgcgccgcg

SEQ ID NO: 355493 - RNA, 32 nt, Homo Sapiens
guucugcugcaccugaaugcuuucuguuaucc

SEQ ID NO: 355494 - RNA, 32 nt, Homo Sapiens
acaaccccaugauauagauauuaaacuauaau

SEQ ID NO: 355495 - RNA, 32 nt, Homo Sapiens
agaucugucuucauacccuuccccucaaacua

SEQ ID NO: 355496 - RNA, 32 nt, Homo Sapiens
cagacauuagaagauggcuagaaggacauuua

SEQ ID NO: 355497 - RNA, 32 nt, Homo Sapiens
guaaccucuaguugcggacgcgguuguucuau

SEQ ID NO: 355498 - RNA, 32 nt, Homo Sapiens
caagauuuggcaggaucggcuuccucaggggc

SEQ ID NO: 355499 - RNA, 32 nt, Homo Sapiens
gaugagcaaggccuuccaggacaggcucgguu

SEQ ID NO: 355500 - RNA, 32 nt, Homo Sapiens
uugcuucuguuccccauggagcuccgaauucu

SEQ ID NO: 355501 - RNA, 32 nt, Homo Sapiens
uuuuguuuggugcacgaacucauccaggaggu

SEQ ID NO: 355502 - RNA, 32 nt, Homo Sapiens
uccgcggccuuccuccucccugcuccagaauu

SEQ ID NO: 355503 - RNA, 32 nt, Homo Sapiens
ugguauggcagccauucuuuuaucuauuuaac

SEQ ID NO: 355504 - RNA, 32 nt, Homo Sapiens
uccggcuccccgcgcgcaagauggcugacccg

SEQ ID NO: 355505 - RNA, 32 nt, Homo Sapiens
ccacgcccugggcagccgugggcccccgacgc

SEQ ID NO: 355506 - RNA, 32 nt, Homo Sapiens
ccauagguuuuacauuuauauuuuuucuuauu

SEQ ID NO: 355507 - RNA, 32 nt, Homo Sapiens
aaccccagagacugcagauuugugccaugcgg

SEQ ID NO: 355508 - RNA, 32 nt, Homo Sapiens
ugaauccgucuccacaccccuucugccaaggg

SEQ ID NO: 355509 - RNA, 32 nt, Homo Sapiens
gccaucccugaacucuuucuagcccuuuuaga

SEQ ID NO: 355510 - RNA, 32 nt, Homo Sapiens
cccgcccagucgagcucuugggcccccuugaa

SEQ ID NO: 355511 - RNA, 32 nt, Homo Sapiens
gucugcuuauccuuccacggacucaaguuucu

SEQ ID NO: 355512 - RNA, 32 nt, Homo Sapiens
uugcuaaaggauucagagauucugggagaaac

SEQ ID NO: 355513 - RNA, 32 nt, Homo Sapiens
gguucucuaccucggcccacgccgccugaguu

SEQ ID NO: 355514 - RNA, 32 nt, Homo Sapiens
ggugaguuccugcuaggcaaccaaauuuaagc

SEQ ID NO: 355515 - RNA, 32 nt, Homo Sapiens
gagggaggauccuggaggacugggaagaucua

SEQ ID NO: 355516 - RNA, 29 nt, Homo Sapiens
agaauucuuuguuucagaggaugagaaau

SEQ ID NO: 355517 - RNA, 32 nt, Homo Sapiens
gguggucuugguuuucuggaaugacaacaaac

SEQ ID NO: 355518 - RNA, 32 nt, Homo Sapiens
ucccaccaccgcccuguuuuagcuaguccuca

SEQ ID NO: 355519 - RNA, 32 nt, Homo Sapiens
caggcgcaggcccagcugagcggccgccgagc

SEQ ID NO: 355520 - RNA, 32 nt, Homo Sapiens
ggcuucagcuucugaggaucugccgggugcug

SEQ ID NO: 355521 - RNA, 32 nt, Homo Sapiens
uuuacaaaacagucuuguucagauuuuuacag

SEQ ID NO: 355522 - RNA, 32 nt, Homo Sapiens
acuuuucugaauaaaauaauuucaaaugcugu

SEQ ID NO: 355523 - RNA, 32 nt, Homo Sapiens
acgaccucuagaugucuuuucuuucuaugaaa

SEQ ID NO: 355524 - RNA, 32 nt, Homo Sapiens
uguccuggaaaauaaaccugaugcuggagggc

SEQ ID NO: 355525 - RNA, 32 nt, Homo Sapiens
gcucaguggccgcuccuucuuucagcccauca

SEQ ID NO: 355526 - RNA, 32 nt, Homo Sapiens
agguggggagcaggucucccagagacaccccg

SEQ ID NO: 355527 - RNA, 32 nt, Homo Sapiens
gccaagggcuuggaggcccagccccauccggg

SEQ ID NO: 355528 - RNA, 32 nt, Homo Sapiens
ggugggucugucuaccuguuucuucuacaaga

SEQ ID NO: 355529 - RNA, 32 nt, Homo Sapiens
gggacuuuaaaaaacugcuuucauuuaaaauu

SEQ ID NO: 355530 - RNA, 32 nt, Homo Sapiens
auuuuguuuuuugaacaguuggauagacuucu

SEQ ID NO: 355531 - RNA, 32 nt, Homo Sapiens
agcuguuuacuuuuaauauuucuacauaaaau

SEQ ID NO: 355532 - RNA, 32 nt, Homo Sapiens
gcacacaaugucaacacugcuuuuuagugaau

SEQ ID NO: 355533 - RNA, 32 nt, Homo Sapiens
ugcagacuauagcaggcacaacaucaaaauuu

SEQ ID NO: 355534 - RNA, 32 nt, Homo Sapiens
ggucuccuccggaguuccacagauggaggagg

SEQ ID NO: 355535 - RNA, 30 nt, Homo Sapiens
auuucaaauaucccguguuaccuuucucua

SEQ ID NO: 355536 - RNA, 32 nt, Homo Sapiens
aguggcccauucuugucacucuacacauauga

SEQ ID NO: 355537 - RNA, 32 nt, Homo Sapiens
cacagaagggaaggccugcagagggggccagg

SEQ ID NO: 355538 - RNA, 32 nt, Homo Sapiens
gcaggcaucgccauucuugcugaaccguuugu

SEQ ID NO: 355539 - RNA, 32 nt, Homo Sapiens
uuacccaucuucucuacuguccccauucucuc

SEQ ID NO: 355540 - RNA, 32 nt, Homo Sapiens
uuaaucaaccucaguugacaaggugcucagau

SEQ ID NO: 355541 - RNA, 30 nt, Homo Sapiens
ugguucuguuucucuggggaaaccugacua

SEQ ID NO: 355542 - RNA, 32 nt, Homo Sapiens
ucuguauuucugcuggcauuaaggguugaugg

SEQ ID NO: 355543 - RNA, 32 nt, Homo Sapiens
cacucacaaaaauacccccucaugaaauaacu

SEQ ID NO: 355544 - RNA, 32 nt, Homo Sapiens
aucuuguuuuaaaauguaauuucuaagguuua

SEQ ID NO: 355545 - RNA, 32 nt, Homo Sapiens
gagggggacaacauggaaacgugguaguagca

SEQ ID NO: 355546 - RNA, 32 nt, Homo Sapiens
ggacaagguuccugggguacaagggcaggcca

SEQ ID NO: 355547 - RNA, 32 nt, Homo Sapiens
cuggauuggggggacaugggaccuuacgcuug

SEQ ID NO: 355548 - RNA, 32 nt, Homo Sapiens
auggggagagagaggaagcgacugagcccuuu

SEQ ID NO: 355549 - RNA, 32 nt, Homo Sapiens
cacauuguccuacuccagccccuucaauuauu

SEQ ID NO: 355550 - RNA, 32 nt, Homo Sapiens
ggugguagaaaagaggccagugugaccuguga

SEQ ID NO: 355551 - RNA, 29 nt, Homo Sapiens
cuguggaugaagauaaagaugguggaaua

SEQ ID NO: 355552 - RNA, 32 nt, Homo Sapiens
uuuggucuuuaaagugugaucaaaagagacuu

SEQ ID NO: 355553 - RNA, 32 nt, Homo Sapiens
ggcaggggucugcggcccuuucucagggacac

SEQ ID NO: 355554 - RNA, 32 nt, Homo Sapiens
uugugcucccucacucccuaauaaacaugagu

SEQ ID NO: 355555 - RNA, 32 nt, Homo Sapiens
gacaaugggucuucuuccauuacaccuucuuu

SEQ ID NO: 355556 - RNA, 32 nt, Homo Sapiens
ggccagggccccagacuccccgaaguuggccu

SEQ ID NO: 355557 - RNA, 32 nt, Homo Sapiens
gacacacccugauagcacaaucuccuuggggc

SEQ ID NO: 355558 - RNA, 32 nt, Homo Sapiens
agugaauggaaauugucuuuucauguaguaua

SEQ ID NO: 355559 - RNA, 31 nt, Homo Sapiens
aagagcuugcacagccaacgagacacauugc

SEQ ID NO: 355560 - RNA, 32 nt, Homo Sapiens
aaauauguaagaugagagaaacaucagaagaa

SEQ ID NO: 355561 - RNA, 32 nt, Homo Sapiens
ugcucaugucauucuucagugcuuugaagauu

SEQ ID NO: 355562 - RNA, 32 nt, Homo Sapiens
cugggggccugggcucugcugcccuggacccc

SEQ ID NO: 355563 - RNA, 32 nt, Homo Sapiens
gugccuggccuggccuagaccucuggaauuga

SEQ ID NO: 355564 - RNA, 32 nt, Homo Sapiens
uuuuuaaguauuuuaguaauuuuggaccagug

SEQ ID NO: 355565 - RNA, 32 nt, Homo Sapiens
aucacguugcagagaccccaacucugccuucc

SEQ ID NO: 355566 - RNA, 31 nt, Homo Sapiens
ggcguucaaaagauauaaccaaauaaacaag

SEQ ID NO: 355567 - RNA, 32 nt, Homo Sapiens
uuucuguuguaaaugccuuuuacaaacauuga

SEQ ID NO: 355568 - RNA, 32 nt, Homo Sapiens
ucugccuaaaauuggcacauguaaguauugaa

SEQ ID NO: 355569 - RNA, 32 nt, Homo Sapiens
ugacaagcggacuuccacucuucuuugucauu

SEQ ID NO: 355570 - RNA, 32 nt, Homo Sapiens
uaaugacucccucuccccagcuguccuccccu

SEQ ID NO: 355571 - RNA, 32 nt, Homo Sapiens
uggaaacugucaacuuacaaaggcacuauaac

SEQ ID NO: 355572 - RNA, 32 nt, Homo Sapiens
uguccuggcauguucacucagcccuuggcuau

SEQ ID NO: 355573 - RNA, 32 nt, Homo Sapiens
ggugugggguaaaagaugcauaaggccuuuuc

SEQ ID NO: 355574 - RNA, 32 nt, Homo Sapiens
uuugggggcgacccccgauccaugccaggucu

SEQ ID NO: 355575 - RNA, 32 nt, Homo Sapiens
auaagagaaaugaaaauuaaaacuacaccaga

SEQ ID NO: 355576 - RNA, 32 nt, Homo Sapiens
cccagagccacacauacauacacauacacacc

SEQ ID NO: 355577 - RNA, 32 nt, Homo Sapiens
agaaggaggaacuggccgggguccggaggcag

SEQ ID NO: 355578 - RNA, 32 nt, Homo Sapiens
cagacagggaaaucugccuaccaagaggggug

SEQ ID NO: 355579 - RNA, 32 nt, Homo Sapiens
ugugccguuuuccguccgcgacucuuccggcc

SEQ ID NO: 355580 - RNA, 32 nt, Homo Sapiens
uuucaagacaacagaugaauugugaaagagag

SEQ ID NO: 355581 - RNA, 32 nt, Homo Sapiens
uuuuugcuuuuucuuuuuguuuuuaaaacuua

SEQ ID NO: 355582 - RNA, 32 nt, Homo Sapiens
aaacucgugggggauuuuugcauguauaagau

SEQ ID NO: 355583 - RNA, 32 nt, Homo Sapiens
aguaacaaugaaaaugggggcaaauacagaua

SEQ ID NO: 355584 - RNA, 32 nt, Homo Sapiens
uaaaaaagguagaagcauaacaauaugagcuc

SEQ ID NO: 355585 - RNA, 32 nt, Homo Sapiens
gaaaucaguguuccaugaagugccaaaauuau

SEQ ID NO: 355586 - RNA, 32 nt, Homo Sapiens
uccuccccacagcuccucccaaucccaggccu

SEQ ID NO: 355587 - RNA, 32 nt, Homo Sapiens
aguacuuuucuuucuuuuuuuuucggggaggg

SEQ ID NO: 355588 - RNA, 32 nt, Homo Sapiens
acugugcacagcuacacaaaggugugccuucu

SEQ ID NO: 355589 - RNA, 32 nt, Homo Sapiens
aauauuaagaaacuuuguuaugugugauaaua

SEQ ID NO: 355590 - RNA, 32 nt, Homo Sapiens
auauuuuuguuuucaauauccuccucaugguu

SEQ ID NO: 355591 - RNA, 32 nt, Homo Sapiens
cacaccgggugcuggcgggcggguccgcuggc

SEQ ID NO: 355592 - RNA, 32 nt, Homo Sapiens
ucuguuuaaaauauaaaagaaaacuuugcccc

SEQ ID NO: 355593 - RNA, 32 nt, Homo Sapiens
caugguccuaaacucugcuuggaccagaagau

SEQ ID NO: 355594 - RNA, 32 nt, Homo Sapiens
gggcgccuccugccggccccgaccuugggaca

SEQ ID NO: 355595 - RNA, 32 nt, Homo Sapiens
gagggcgcuuggauuuccuucuccgcggcgcg

SEQ ID NO: 355596 - RNA, 32 nt, Homo Sapiens
aaggggguauauguugcaaacaaauguuuuag

SEQ ID NO: 355597 - RNA, 32 nt, Homo Sapiens
augaggucaggagaucaagaccaucguggcuu

SEQ ID NO: 355598 - RNA, 31 nt, Homo Sapiens
ugaccaugaagcaaccucagagccuuaguuc

SEQ ID NO: 355599 - RNA, 32 nt, Homo Sapiens
gugucagauuguguucaaaaugucuagaaagg

SEQ ID NO: 355600 - RNA, 32 nt, Homo Sapiens
auguuaaguaauggaugaaacuuuuuaaaaua

SEQ ID NO: 355601 - RNA, 32 nt, Homo Sapiens
aaaauuagccaagugugauggcacauaccugu

SEQ ID NO: 355602 - RNA, 32 nt, Homo Sapiens
ggccuggaggcuugcuugggacuggaggcuug

SEQ ID NO: 355603 - RNA, 32 nt, Homo Sapiens
gcaaauaugugaucuuaaauuuauaaggacua

SEQ ID NO: 355604 - RNA, 32 nt, Homo Sapiens
uuaagggaaaauuaagugacuguguuacacug

SEQ ID NO: 355605 - RNA, 32 nt, Homo Sapiens
cugcaguuuuggaggccuucagagcauuucac

SEQ ID NO: 355606 - RNA, 32 nt, Homo Sapiens
ugucguggguggcagggucagcaggcagagac

SEQ ID NO: 355607 - RNA, 29 nt, Homo Sapiens
aagggauuugugaugucuguaaaguguaa

SEQ ID NO: 355608 - RNA, 32 nt, Homo Sapiens
aagauuuuuaguguaaaugaaaaaagauaaca

SEQ ID NO: 355609 - RNA, 32 nt, Homo Sapiens
uacuugugcaaauuauuuuuuuaaagugauuu

SEQ ID NO: 355610 - RNA, 28 nt, Homo Sapiens
uggauucaaauaaagaaauacaugacuu

SEQ ID NO: 355611 - RNA, 32 nt, Homo Sapiens
gcucagcaccuucuucucuccuccagcucucc

SEQ ID NO: 355612 - RNA, 32 nt, Homo Sapiens
uguggaauuacauugaugcauuuauugagaaa

SEQ ID NO: 355613 - RNA, 32 nt, Homo Sapiens
ugacaaaaguuuuuaauaauaguuuuaaucau

SEQ ID NO: 355614 - RNA, 32 nt, Homo Sapiens
accacgugcccuacgauggccuaacaggagug

SEQ ID NO: 355615 - RNA, 32 nt, Homo Sapiens
gauaugaaaacucuauguugggacauaaugcu

SEQ ID NO: 355616 - RNA, 32 nt, Homo Sapiens
auaacaaaauguuuuauuuucauuuuagcaaa

SEQ ID NO: 355617 - RNA, 30 nt, Homo Sapiens
agcauuccgcccgugagcuggagcugggcc

SEQ ID NO: 355618 - RNA, 32 nt, Homo Sapiens
gcucuuuucucgggacgggagaggccguguag

SEQ ID NO: 355619 - RNA, 32 nt, Homo Sapiens
gcucaaauuacauuucauuaccuuaaaaagcc

SEQ ID NO: 355620 - RNA, 32 nt, Homo Sapiens
uccugugugggucuucauccugccugaccggc

SEQ ID NO: 355621 - RNA, 32 nt, Homo Sapiens
acuggaacacuggguguuccucacgugauugg

SEQ ID NO: 355622 - RNA, 32 nt, Homo Sapiens
gcuggaauuuaaaaauuguuuuacuuguaucg

SEQ ID NO: 355623 - RNA, 32 nt, Homo Sapiens
agguugcuuggaaauguacauaaaacuaaaau

SEQ ID NO: 355624 - RNA, 32 nt, Homo Sapiens
ucccuuggcuuugucuucugagaugaggcuuu

SEQ ID NO: 355625 - RNA, 32 nt, Homo Sapiens
ggcacguuccuuagcuccgccgcggccguccu

SEQ ID NO: 355626 - RNA, 32 nt, Homo Sapiens
gcgccuuggcgaacucggccacuccaguuccu

SEQ ID NO: 355627 - RNA, 32 nt, Homo Sapiens
cucacggaauccaauugcugcuaccucaccau

SEQ ID NO: 355628 - RNA, 32 nt, Homo Sapiens
acagaaaauaccaccucgagaugggugcuggu

SEQ ID NO: 355629 - RNA, 32 nt, Homo Sapiens
uucugaaagugucaagaauagcuucggaauuc

SEQ ID NO: 355630 - RNA, 32 nt, Homo Sapiens
agguucccuuugcauguugcacucuguucuca

SEQ ID NO: 355631 - RNA, 32 nt, Homo Sapiens
gccucccucuucuggugacucgugccugcuuc

SEQ ID NO: 355632 - RNA, 32 nt, Homo Sapiens
ugaaguuuuuucccuuuuuuuaaagccaaacu

SEQ ID NO: 355633 - RNA, 32 nt, Homo Sapiens
gucugaaucagcuguuauuccaagcuaucaug

SEQ ID NO: 355634 - RNA, 32 nt, Homo Sapiens
cccccgcccacgccaaggagggcuugcggcac

SEQ ID NO: 355635 - RNA, 32 nt, Homo Sapiens
caaaggucaggaguucgagaccagccuggcca

SEQ ID NO: 355636 - RNA, 32 nt, Homo Sapiens
uaagcacaaauggaauugugcaaccaccagaa

SEQ ID NO: 355637 - RNA, 32 nt, Homo Sapiens
uagcgggcgggcgcagaagagaauaauacucu

SEQ ID NO: 355638 - RNA, 32 nt, Homo Sapiens
aaggauaaugaaauaaucagugacugaaacca

SEQ ID NO: 355639 - RNA, 30 nt, Homo Sapiens
ccauaggccacccccuauccucugaguguu

SEQ ID NO: 355640 - RNA, 32 nt, Homo Sapiens
ccgagucuccuggucugucuccaggcugggga

SEQ ID NO: 355641 - RNA, 32 nt, Homo Sapiens
aggagagaggcuuauuuaaguauuggcucagg

SEQ ID NO: 355642 - RNA, 32 nt, Homo Sapiens
ugcauucuggggauuguuuggccucuaaucga

SEQ ID NO: 355643 - RNA, 32 nt, Homo Sapiens
uagaacacagaaaaugaaaauauuuagaauaa

SEQ ID NO: 355644 - RNA, 32 nt, Homo Sapiens
auugaaaguagugcuguaaauauucugccaua

SEQ ID NO: 355645 - RNA, 32 nt, Homo Sapiens
acagaaucucaacucugucacccagacuggag

SEQ ID NO: 355646 - RNA, 32 nt, Homo Sapiens
cacuuauaaucacagcacuuugggaggcugag

SEQ ID NO: 355647 - RNA, 32 nt, Homo Sapiens
gcacuggauuccucaguccaccagcucagaca

SEQ ID NO: 355648 - RNA, 32 nt, Homo Sapiens
ucucaggcaugccugugugacaucaguggcau

SEQ ID NO: 355649 - RNA, 32 nt, Homo Sapiens
ccgauuccagaugaccuuccaguguccccaag

SEQ ID NO: 355650 - RNA, 32 nt, Homo Sapiens
gugccggggaggaggggguggguucgcugaca

SEQ ID NO: 355651 - RNA, 32 nt, Homo Sapiens
uagcaccacccuccccuccccgcacaccaacu

SEQ ID NO: 355652 - RNA, 32 nt, Homo Sapiens
guagaagacaccucugaccagaauguuucccu

SEQ ID NO: 355653 - RNA, 32 nt, Homo Sapiens
cacuaucuuaugugccucccccaggcucccug

SEQ ID NO: 355654 - RNA, 32 nt, Homo Sapiens
aucuguauauaauuaauauauaguauuaacug

SEQ ID NO: 355655 - RNA, 32 nt, Homo Sapiens
ggagccccacccaacagccaccaagccugaca

SEQ ID NO: 355656 - RNA, 32 nt, Homo Sapiens
gcauuugcauauaucugaccaaacuuuaugcg

SEQ ID NO: 355657 - RNA, 32 nt, Homo Sapiens
acucccucugcuguccuccccucucaggggaa

SEQ ID NO: 355658 - RNA, 32 nt, Homo Sapiens
caguuguccuuccugucgucgucugccgugug

SEQ ID NO: 355659 - RNA, 32 nt, Homo Sapiens
cacccgcgccgcgcccagcauuccagcgucca

SEQ ID NO: 355660 - RNA, 32 nt, Homo Sapiens
gagaugggcuuuugcucuuacccaggcugagu

SEQ ID NO: 355661 - RNA, 32 nt, Homo Sapiens
ccauauauuguacagccuuauagaaucuaagc

SEQ ID NO: 355662 - RNA, 32 nt, Homo Sapiens
uucaauagauaccaccgugugaccuauaauuu

SEQ ID NO: 355663 - RNA, 32 nt, Homo Sapiens
cgcuucgcgcgcgcuccgugacgcacacuucc

SEQ ID NO: 355664 - RNA, 32 nt, Homo Sapiens
cuuugucacaguguugucgugaagaucagaua

SEQ ID NO: 355665 - RNA, 32 nt, Homo Sapiens
gaugaaugagagagggagggaacagugcccaa

SEQ ID NO: 355666 - RNA, 32 nt, Homo Sapiens
aaaaaagaaguaaaaaguuuuagcacagcuuc

SEQ ID NO: 355667 - RNA, 32 nt, Homo Sapiens
aaugugggggguggagggcggggcccugaugu

SEQ ID NO: 355668 - RNA, 32 nt, Homo Sapiens
ggagcucugaguuccggcaccaguagcaggcc

SEQ ID NO: 355669 - RNA, 32 nt, Homo Sapiens
uggcggggggacgaacuucucuuccucacaug

SEQ ID NO: 355670 - RNA, 26 nt, Homo Sapiens
ugucaauaaaguuuaguccuuuuuua

SEQ ID NO: 355671 - RNA, 32 nt, Homo Sapiens
acucugucgcccaagcuggagugcaguggcac

SEQ ID NO: 355672 - RNA, 32 nt, Homo Sapiens
uguauuuugaauauucccaauuuucgaaguca

SEQ ID NO: 355673 - RNA, 32 nt, Homo Sapiens
cugcagcuggggaagacuuaugccaucccggc

SEQ ID NO: 355674 - RNA, 32 nt, Homo Sapiens
cuuagccugagacaugaugcaagagcugcagg

SEQ ID NO: 355675 - RNA, 32 nt, Homo Sapiens
gacgcugggcugcccgcucugcccuaaggccu

SEQ ID NO: 355676 - RNA, 32 nt, Homo Sapiens
auauggcuuuagaaauaaaauaacccucaaaa

SEQ ID NO: 355677 - RNA, 32 nt, Homo Sapiens
aagucacacaggacaauuauucuuaugccuaa

SEQ ID NO: 355678 - RNA, 32 nt, Homo Sapiens
ccuccuuaucacggucccgcucgcggccucgc

SEQ ID NO: 355679 - RNA, 32 nt, Homo Sapiens
gagcuggcgggugucuuccugcggcaauagac

SEQ ID NO: 355680 - RNA, 32 nt, Homo Sapiens
aaaacuuccuggcagcaaguuuucauauauag

SEQ ID NO: 355681 - RNA, 32 nt, Homo Sapiens
aaaaauuccauaucuagccccaucccacaccu

SEQ ID NO: 355682 - RNA, 32 nt, Homo Sapiens
cuucaugauuccuuuguugaaaaugaagacua

SEQ ID NO: 355683 - RNA, 32 nt, Homo Sapiens
gacacccggagcucuacgugcuccucagggga

SEQ ID NO: 355684 - RNA, 32 nt, Homo Sapiens
guaaaauggaucagugggaaggauaagguguc

SEQ ID NO: 355685 - RNA, 32 nt, Homo Sapiens
cccagcuacucaggaagcugggguggaaguau

SEQ ID NO: 355686 - RNA, 32 nt, Homo Sapiens
uauccauaacauuuauacuacauuuguaagag

SEQ ID NO: 355687 - RNA, 32 nt, Homo Sapiens
cuucaacgcuaggcuggcgcagguccucgcgg

SEQ ID NO: 355688 - RNA, 32 nt, Homo Sapiens
uagugauaucuaggaguauaaaguugucaccc

SEQ ID NO: 355689 - RNA, 32 nt, Homo Sapiens
uuccucguucucucgcgcagggcccccgcggc

SEQ ID NO: 355690 - RNA, 31 nt, Homo Sapiens
gugcaggcugcggcgcugacggccucugcuc

SEQ ID NO: 355691 - RNA, 32 nt, Homo Sapiens
guuucaguguuucaucagguccuuccaucucu

SEQ ID NO: 355692 - RNA, 32 nt, Homo Sapiens
gcugcuuguggguuucugggguggaaggcagg

SEQ ID NO: 355693 - RNA, 32 nt, Homo Sapiens
gacccagagacucgcgcguggagcgugguggg

SEQ ID NO: 355694 - RNA, 32 nt, Homo Sapiens
uauauagaggauguuauaaauauacauauaca

SEQ ID NO: 355695 - RNA, 32 nt, Homo Sapiens
ucccaaggccccagcaccaaccucugagccca

SEQ ID NO: 355696 - RNA, 32 nt, Homo Sapiens
gggagccgccgggacccucgcgucgucgccgc

SEQ ID NO: 355697 - RNA, 32 nt, Homo Sapiens
auuuugaguggccuuucaacccuaagaugaau

SEQ ID NO: 355698 - RNA, 32 nt, Homo Sapiens
uccacagguccagccggccggugagcgccugg

SEQ ID NO: 355699 - RNA, 32 nt, Homo Sapiens
gaugagacaucuaggaggaaagcuggucauca

SEQ ID NO: 355700 - RNA, 32 nt, Homo Sapiens
gggaagcauauuacagaaaugauuucaaguac

SEQ ID NO: 355701 - RNA, 32 nt, Homo Sapiens
caccgcgaccucaggcugaccguagggaggga

SEQ ID NO: 355702 - RNA, 32 nt, Homo Sapiens
uggcagagaacaggcuggccuacugucaguuc

SEQ ID NO: 355703 - RNA, 29 nt, Homo Sapiens
agaaaugcguguuucagugacuagauuau

SEQ ID NO: 355704 - RNA, 32 nt, Homo Sapiens
gucauugacugauguagauaauuuaggauuuu

SEQ ID NO: 355705 - RNA, 32 nt, Homo Sapiens
uacugcuacucuguacccccagcccuacugcc

SEQ ID NO: 355706 - RNA, 32 nt, Homo Sapiens
cugcugcagcucccuccucagggaucacacug

SEQ ID NO: 355707 - RNA, 32 nt, Homo Sapiens
uaauccagauaaauaaaugcaagggcaaauua

SEQ ID NO: 355708 - RNA, 32 nt, Homo Sapiens
gcggaaccucgcgcuucgcccggggacaaucc

SEQ ID NO: 355709 - RNA, 32 nt, Homo Sapiens
aagaaaccucaucguuacaggccugguacugu

SEQ ID NO: 355710 - RNA, 32 nt, Homo Sapiens
guucaauuucuuucuuuccuuaauaaauuuaa

SEQ ID NO: 355711 - RNA, 31 nt, Homo Sapiens
gcgggagaagagguuuaauuuaguugauuuu

SEQ ID NO: 355712 - RNA, 32 nt, Homo Sapiens
uccucaccucucacccucuccuucccgggagg

SEQ ID NO: 355713 - RNA, 32 nt, Homo Sapiens
ugugauaauuuaaaauuauuuucaacuacuuu

SEQ ID NO: 355714 - RNA, 32 nt, Homo Sapiens
agauggcaggaacaggcaugcagagccauaua

SEQ ID NO: 355715 - RNA, 32 nt, Homo Sapiens
agcaauugauguuuccauuaaucuuuuucugg

SEQ ID NO: 355716 - RNA, 32 nt, Homo Sapiens
gaaauggaaaaguuuccagaguauuucuagua

SEQ ID NO: 355717 - RNA, 32 nt, Homo Sapiens
uaauuguggcaaauuuuucagacaucguucau

SEQ ID NO: 355718 - RNA, 32 nt, Homo Sapiens
cauuucagcuggcgcugcagcugcugcacaga

SEQ ID NO: 355719 - RNA, 31 nt, Homo Sapiens
gguggacggcacggacuaccccgcgcgccag

SEQ ID NO: 355720 - RNA, 32 nt, Homo Sapiens
aaugacucuaaaacgugcaauacaaauccuca

SEQ ID NO: 355721 - RNA, 32 nt, Homo Sapiens
gcggggggcagacaguucuguuacucagcugc

SEQ ID NO: 355722 - RNA, 32 nt, Homo Sapiens
uauuggauuuuuuuuucuugaauugcaaaugg

SEQ ID NO: 355723 - RNA, 32 nt, Homo Sapiens
ggugucacucccucacccccugcccaggccca

SEQ ID NO: 355724 - RNA, 32 nt, Homo Sapiens
uucuguuuccuugauuucuccuccuuuggaug

SEQ ID NO: 355725 - RNA, 32 nt, Homo Sapiens
ucaguacugaccaaagccagggcugugugugc

SEQ ID NO: 355726 - RNA, 32 nt, Homo Sapiens
uuugccagcuacguccugguauuucuauccuu

SEQ ID NO: 355727 - RNA, 32 nt, Homo Sapiens
accugcuuucggccccgccccgcccgccgccg

SEQ ID NO: 355728 - RNA, 32 nt, Homo Sapiens
agcuugcccagccccagguaacgcuggcggug

SEQ ID NO: 355729 - RNA, 32 nt, Homo Sapiens
guaggcacuauaaggaccagcccaaccccaug

SEQ ID NO: 355730 - RNA, 32 nt, Homo Sapiens
ugguuuggggaauguucgugggauauguucca

SEQ ID NO: 355731 - RNA, 32 nt, Homo Sapiens
agaggccggccgcgcucccagcccgcccggag

SEQ ID NO: 355732 - RNA, 32 nt, Homo Sapiens
cacacgggagucucgccgcggguccuugacag

SEQ ID NO: 355733 - RNA, 32 nt, Homo Sapiens
accguugguuggaaaagacuuuguuucaugug

SEQ ID NO: 355734 - RNA, 32 nt, Homo Sapiens
gacuccaucucggaugaaagugcuuugagaaa

SEQ ID NO: 355735 - RNA, 32 nt, Homo Sapiens
gacguguucaucaaguuuuucucaaccauaag

SEQ ID NO: 355736 - RNA, 32 nt, Homo Sapiens
cagcguuuggggauuuagacuccuaaagccag

SEQ ID NO: 355737 - RNA, 32 nt, Homo Sapiens
guuuauuuacacuuugcuuugcacgauaacuu

SEQ ID NO: 355738 - RNA, 32 nt, Homo Sapiens
aauacuacuagcuuccagacaaucaugucaaa

SEQ ID NO: 355739 - RNA, 32 nt, Homo Sapiens
uacaucagcacuguuuugauagauaagagagg

SEQ ID NO: 355740 - RNA, 32 nt, Homo Sapiens
acuacuugagugaagauuucuucuuucccugu

SEQ ID NO: 355741 - RNA, 32 nt, Homo Sapiens
cuuugcccugaacuuguccggguagggagggc

SEQ ID NO: 355742 - RNA, 32 nt, Homo Sapiens
aaacgaccgcagagcaggcugaauuccuccaa

SEQ ID NO: 355743 - RNA, 32 nt, Homo Sapiens
gugagggaagacuguaacacagcugaacuauu

SEQ ID NO: 355744 - RNA, 32 nt, Homo Sapiens
ggaagaggaugaugauuugaaggaaguaacug

SEQ ID NO: 355745 - RNA, 32 nt, Homo Sapiens
agaguugucaucaacaauccaaugcucaccua

SEQ ID NO: 355746 - RNA, 32 nt, Homo Sapiens
cugucucauccacauaagcacuccccgaagaa

SEQ ID NO: 355747 - RNA, 32 nt, Homo Sapiens
ucagggggcuccugcucuccuuccccuucccu

SEQ ID NO: 355748 - RNA, 32 nt, Homo Sapiens
aucaggcacacaacuucuguuuccuucucuug

SEQ ID NO: 355749 - RNA, 27 nt, Homo Sapiens
auuuccucccccaucagccccuggcag

SEQ ID NO: 355750 - RNA, 32 nt, Homo Sapiens
aacaaccaaagugauauauaaaauaguugaug

SEQ ID NO: 355751 - RNA, 31 nt, Homo Sapiens
cugugaaugaaacauugugaccucaaguuua

SEQ ID NO: 355752 - RNA, 32 nt, Homo Sapiens
ggguacacaggucuucucuccuccccuccugc

SEQ ID NO: 355753 - RNA, 32 nt, Homo Sapiens
aacuuguucuugcaugagauggcuuugguugu

SEQ ID NO: 355754 - RNA, 32 nt, Homo Sapiens
gagguucagcacagccagcaucagccgagcuu

SEQ ID NO: 355755 - RNA, 32 nt, Homo Sapiens
ucggaaaccaugacccccggcgcgggcccaug

SEQ ID NO: 355756 - RNA, 32 nt, Homo Sapiens
gaauaauucaagucagccuagagaccauguug

SEQ ID NO: 355757 - RNA, 32 nt, Homo Sapiens
agaaacuacccagauguacauaaaaagugaau

SEQ ID NO: 355758 - RNA, 32 nt, Homo Sapiens
agccagggccuggcgagcuggcguggagccca

SEQ ID NO: 355759 - RNA, 32 nt, Homo Sapiens
cuguguuuuaccuggugaucaguucucaggcu

SEQ ID NO: 355760 - RNA, 32 nt, Homo Sapiens
auuccaggcagacagcacugcaagagggugag

SEQ ID NO: 355761 - RNA, 32 nt, Homo Sapiens
caagcuuuucuaaauuuuucagagagaguuac

SEQ ID NO: 355762 - RNA, 32 nt, Homo Sapiens
cccagccccacuuuuucucuugguucucccac

SEQ ID NO: 355763 - RNA, 32 nt, Homo Sapiens
cauaagcacaauuuuaauuuuaugauaucuga

SEQ ID NO: 355764 - RNA, 32 nt, Homo Sapiens
augacaauccucagccgcugguauuuucuaag

SEQ ID NO: 355765 - RNA, 32 nt, Homo Sapiens
ucccuaugccugugucccagaccacacccaua

SEQ ID NO: 355766 - RNA, 32 nt, Homo Sapiens
cgccccugccccccagcccucguguguccaca

SEQ ID NO: 355767 - RNA, 32 nt, Homo Sapiens
aucauccgugcucccacccccaccccggccuc

SEQ ID NO: 355768 - RNA, 32 nt, Homo Sapiens
ugggaguuuagacaauguugcccuuggauuuu

SEQ ID NO: 355769 - RNA, 32 nt, Homo Sapiens
uguaauuuucuuuuccuuuuaaagacagguuc

SEQ ID NO: 355770 - RNA, 32 nt, Homo Sapiens
auuguugaagagauccaaaaccagaauaagcc

SEQ ID NO: 355771 - RNA, 32 nt, Homo Sapiens
ucuggaugccucucggcccacccaggugauga

SEQ ID NO: 355772 - RNA, 32 nt, Homo Sapiens
cgcucagcuccucucggcuccuccuccuccuc

SEQ ID NO: 355773 - RNA, 32 nt, Homo Sapiens
gcccagcucuuccucccggcugcaucuccagg

SEQ ID NO: 355774 - RNA, 32 nt, Homo Sapiens
agguugaccacuguggaauguacuggagagac

SEQ ID NO: 355775 - RNA, 32 nt, Homo Sapiens
gauauggcuauauauuuauguagaagauuuag

SEQ ID NO: 355776 - RNA, 32 nt, Homo Sapiens
ugagggguagcgguguguaggcagugaggggg

SEQ ID NO: 355777 - RNA, 32 nt, Homo Sapiens
cuauuucacaugccuuguuuacuuuucagagc

SEQ ID NO: 355778 - RNA, 32 nt, Homo Sapiens
gugaaaccauggaauuauaugaaaaugauaca

SEQ ID NO: 355779 - RNA, 32 nt, Homo Sapiens
cauaccauguuuucuuuuuuuaaaaaaauuua

SEQ ID NO: 355780 - RNA, 32 nt, Homo Sapiens
agcagucacuggccuuccugugcauccagccc

SEQ ID NO: 355781 - RNA, 32 nt, Homo Sapiens
uaaggcuugacaaagucaaaaguuuuguccua

SEQ ID NO: 355782 - RNA, 32 nt, Homo Sapiens
ggcucacggguucugaccuacacucugaaacu

SEQ ID NO: 355783 - RNA, 32 nt, Homo Sapiens
ccugcccucugcccggcccuacugagauuccc

SEQ ID NO: 355784 - RNA, 32 nt, Homo Sapiens
cuauuacauaguuuuucuugagauccguuuuu

SEQ ID NO: 355785 - RNA, 32 nt, Homo Sapiens
ggaugccagaauuagagacucuggagaucaug

SEQ ID NO: 355786 - RNA, 32 nt, Homo Sapiens
aguauugaugaggaugauggugauguuccaga

SEQ ID NO: 355787 - RNA, 32 nt, Homo Sapiens
cugaugaaacugaaacaggaggugauuguguu

SEQ ID NO: 355788 - RNA, 30 nt, Homo Sapiens
guccaggauaaaacucagauaccaaggaua

SEQ ID NO: 355789 - RNA, 32 nt, Homo Sapiens
cauaagagagccuugguucaucaguguuaaaa

SEQ ID NO: 355790 - RNA, 32 nt, Homo Sapiens
gccuggaagcgcgggggcggcgccgagaacga

SEQ ID NO: 355791 - RNA, 29 nt, Homo Sapiens
caacaugucugcuucggugaaagaaagcc

SEQ ID NO: 355792 - RNA, 32 nt, Homo Sapiens
guauccccaaccccagacccccaucacuugau

SEQ ID NO: 355793 - RNA, 32 nt, Homo Sapiens
gcagcuucccagccuccgccccggccucgccu

SEQ ID NO: 355794 - RNA, 32 nt, Homo Sapiens
aaaaacuuccaagucuagacuccaaagaauau

SEQ ID NO: 355795 - RNA, 32 nt, Homo Sapiens
ucuuagagaccucagaaaucugcagaaaguuc

SEQ ID NO: 355796 - RNA, 32 nt, Homo Sapiens
cuacuuucuguuaucuagaaauuaagauugaa

SEQ ID NO: 355797 - RNA, 32 nt, Homo Sapiens
ugagcagcccuaucuuuaccgaacauaccuga

SEQ ID NO: 355798 - RNA, 32 nt, Homo Sapiens
uucagagaaauauuuuugaaaagaccagacaa

SEQ ID NO: 355799 - RNA, 32 nt, Homo Sapiens
auacacaaauaaauaagaacaugcaauguuug

SEQ ID NO: 355800 - RNA, 32 nt, Homo Sapiens
augugcaucuuggucugagaggcacccacugu

SEQ ID NO: 355801 - RNA, 32 nt, Homo Sapiens
uggggucucacugucucuaguauuuuagcuac

SEQ ID NO: 355802 - RNA, 32 nt, Homo Sapiens
cuccugguggcugugcugcugcugugagcggg

SEQ ID NO: 355803 - RNA, 32 nt, Homo Sapiens
gggcucagccuugcugagacacuuucuuuugu

SEQ ID NO: 355804 - RNA, 32 nt, Homo Sapiens
ggguacagggagccuuagcuggcugccauguc

SEQ ID NO: 355805 - RNA, 32 nt, Homo Sapiens
aacaaagcauuaccaccuugugucuucagaau

SEQ ID NO: 355806 - RNA, 32 nt, Homo Sapiens
ugaauuugauucaaagggaaauuauugcagaa

SEQ ID NO: 355807 - RNA, 32 nt, Homo Sapiens
ggcgugaggucuugcaggcaucugucuuuuua

SEQ ID NO: 355808 - RNA, 32 nt, Homo Sapiens
gcaucuagccuggccuggagggcaaggcagau

SEQ ID NO: 355809 - RNA, 32 nt, Homo Sapiens
uguacuucaaauaauagcacagauuuuacauc

SEQ ID NO: 355810 - RNA, 32 nt, Homo Sapiens
cuugacuguuuucuuuaugucuuuugaugaau

SEQ ID NO: 355811 - RNA, 32 nt, Homo Sapiens
caagaauuuacuagcauuugcucguaguauga

SEQ ID NO: 355812 - RNA, 32 nt, Homo Sapiens
ggacccaggaggaguggcaggugguggcgggg

SEQ ID NO: 355813 - RNA, 32 nt, Homo Sapiens
ggggacuguuugguguccuugguuucacuggu

SEQ ID NO: 355814 - RNA, 32 nt, Homo Sapiens
uguggagcacaccugcuaacugcucccucaac

SEQ ID NO: 355815 - RNA, 31 nt, Homo Sapiens
uuaucccucaaugcacaugauugauaccguu

SEQ ID NO: 355816 - RNA, 32 nt, Homo Sapiens
uccaguuuguaaagauucucauugucacugua

SEQ ID NO: 355817 - RNA, 32 nt, Homo Sapiens
gcgcgugugugagcgcgccggaccaagcgggc

SEQ ID NO: 355818 - RNA, 32 nt, Homo Sapiens
ggcaggcagggugcuccuggugucugcccacc

SEQ ID NO: 355819 - RNA, 32 nt, Homo Sapiens
agagaggaaaacugaggccuagaagggaggag

SEQ ID NO: 355820 - RNA, 32 nt, Homo Sapiens
ccucacucaggguggggucaggaaucugcauu

SEQ ID NO: 355821 - RNA, 32 nt, Homo Sapiens
cuccauuccacucaucucuggccugagugaca

SEQ ID NO: 355822 - RNA, 32 nt, Homo Sapiens
uguaaacaguuuccccucccccaccccuuuuu

SEQ ID NO: 355823 - RNA, 32 nt, Homo Sapiens
ggaaaguguucuagguuccagcacaccugcaa

SEQ ID NO: 355824 - RNA, 32 nt, Homo Sapiens
aauaagucaggaggaugcaauuguugaaagcu

SEQ ID NO: 355825 - RNA, 32 nt, Homo Sapiens
ugcugagaagauuguaaugcuuuguacaaaua

SEQ ID NO: 355826 - RNA, 32 nt, Homo Sapiens
cauguauauauucauaaggaauauaagcuucc

SEQ ID NO: 355827 - RNA, 32 nt, Homo Sapiens
cuacccuuucccuucucuuuugaauccauucc

SEQ ID NO: 355828 - RNA, 32 nt, Homo Sapiens
uggaggagggacggaggagguucccuugcugg

SEQ ID NO: 355829 - RNA, 28 nt, Homo Sapiens
acgaggcggcggccgcggggaggaggau

SEQ ID NO: 355830 - RNA, 32 nt, Homo Sapiens
ccaugcgggaccgcgcggcccggugagggcgc

SEQ ID NO: 355831 - RNA, 32 nt, Homo Sapiens
acaggggacgggaugaggagcgggaggguucc

SEQ ID NO: 355832 - RNA, 32 nt, Homo Sapiens
uauuccugucuccucuuucuuuuucccugugg

SEQ ID NO: 355833 - RNA, 32 nt, Homo Sapiens
caggcuacaaccuuccuucuuaagggccacag

SEQ ID NO: 355834 - RNA, 32 nt, Homo Sapiens
acaaaugcaccuauuuauaccgggcaagaaca

SEQ ID NO: 355835 - RNA, 32 nt, Homo Sapiens
cuucaauggaaaucccaucaucaucuuccagg

SEQ ID NO: 355836 - RNA, 32 nt, Homo Sapiens
acguugggauggauuacagaggaugugcccuc

SEQ ID NO: 355837 - RNA, 32 nt, Homo Sapiens
cugacuuggacagcugaccagugacugaucag

SEQ ID NO: 355838 - RNA, 32 nt, Homo Sapiens
auucugaggguggggagggagagagagggagg

SEQ ID NO: 355839 - RNA, 32 nt, Homo Sapiens
cuggauuuuggacucucaugggccuguagccu

SEQ ID NO: 355840 - RNA, 32 nt, Homo Sapiens
acucggccggcagcggagccgcagccaccagc

SEQ ID NO: 355841 - RNA, 32 nt, Homo Sapiens
ccuccuuuucuuuccaagucacaaaauucucc

SEQ ID NO: 355842 - RNA, 32 nt, Homo Sapiens
gaagaagcugcagccgcaccuggccaagggug

SEQ ID NO: 355843 - RNA, 32 nt, Homo Sapiens
ucuccgcggaggagguggaggaggcggcggcg

SEQ ID NO: 355844 - RNA, 32 nt, Homo Sapiens
caggcuccccgcgucccgcuggugaccugccc

SEQ ID NO: 355845 - RNA, 32 nt, Homo Sapiens
acuuguccaugugccaagaggguggcgcaccc

SEQ ID NO: 355846 - RNA, 32 nt, Homo Sapiens
cagagcuguccggcugcgcgguggcccggggg

SEQ ID NO: 355847 - RNA, 32 nt, Homo Sapiens
acgggaaggaggaggcgagaguuggagcgcgu

SEQ ID NO: 355848 - RNA, 32 nt, Homo Sapiens
agaugggagcagcucuccgucuagcacuugga

SEQ ID NO: 355849 - RNA, 32 nt, Homo Sapiens
cccccacccagcugcccucagccuucagccuc

SEQ ID NO: 355850 - RNA, 32 nt, Homo Sapiens
gugcccagccucuuggccccagaacuguacag

SEQ ID NO: 355851 - RNA, 28 nt, Homo Sapiens
caucuaaaagauuauaauuucagaauuc

SEQ ID NO: 355852 - RNA, 32 nt, Homo Sapiens
guaaacauucauauggccauuaauuuuaacau

SEQ ID NO: 355853 - RNA, 32 nt, Homo Sapiens
ugacuccgaggguugggagagcgcguuggugg

SEQ ID NO: 355854 - RNA, 32 nt, Homo Sapiens
caucuuuaaauuauuuauccuaauggauucca

SEQ ID NO: 355855 - RNA, 32 nt, Homo Sapiens
cuuguagguacaaucuaggccuugaagaaaca

SEQ ID NO: 355856 - RNA, 32 nt, Homo Sapiens
ucccccugacuucaggcuuuccuaaguguauu

SEQ ID NO: 355857 - RNA, 32 nt, Homo Sapiens
uacauaacuaaauuugauacuuauauuuucgu

SEQ ID NO: 355858 - RNA, 32 nt, Homo Sapiens
ucaucuuuguuguuuuaucacuguaagccugu

SEQ ID NO: 355859 - RNA, 32 nt, Homo Sapiens
aggggcccgagcugcccccacccccggccuca

SEQ ID NO: 355860 - RNA, 32 nt, Homo Sapiens
agcgugaaaaacuguaaaauuaacucaauagu

SEQ ID NO: 355861 - RNA, 32 nt, Homo Sapiens
gcuguccucuuguguuggcuuaauuucuggau

SEQ ID NO: 355862 - RNA, 28 nt, Homo Sapiens
ccugcagguguggcgccgaggggagauc

SEQ ID NO: 355863 - RNA, 32 nt, Homo Sapiens
uugccagguaaagaaaccauggcauaaagcug

SEQ ID NO: 355864 - RNA, 32 nt, Homo Sapiens
gcgccaggugcagcuuccugaucaagaugguc

SEQ ID NO: 355865 - RNA, 32 nt, Homo Sapiens
uggauuggggucccucuaaaauuuaaugcaug

SEQ ID NO: 355866 - RNA, 32 nt, Homo Sapiens
ugccugagauccuuccugaggagcguccauuc

SEQ ID NO: 355867 - RNA, 29 nt, Homo Sapiens
ggcaacauagugaacccugucuguaugga

SEQ ID NO: 355868 - RNA, 31 nt, Homo Sapiens
ucagcgcagcccagggcuccaagugaggccc

SEQ ID NO: 355869 - RNA, 32 nt, Homo Sapiens
gauuccagaacacugcuacuagguucugaaug

SEQ ID NO: 355870 - RNA, 32 nt, Homo Sapiens
cuaagggggaagaggagaggguauggggcggc

SEQ ID NO: 355871 - RNA, 32 nt, Homo Sapiens
agggacuccuccugccagcagugaaggcuggg

SEQ ID NO: 355872 - RNA, 31 nt, Homo Sapiens
auccgagauuucaccaccugacuccccucaa

SEQ ID NO: 355873 - RNA, 32 nt, Homo Sapiens
ggaaaauggugguaacuuccaagccgcugggu

SEQ ID NO: 355874 - RNA, 32 nt, Homo Sapiens
gcgcgccaugaggaaggcgccacgcagcccgc

SEQ ID NO: 355875 - RNA, 30 nt, Homo Sapiens
cagcgggucugcguaggcggcagcgucugu

SEQ ID NO: 355876 - RNA, 32 nt, Homo Sapiens
aaagcauggugccgauaacaguucaaccaucc

SEQ ID NO: 355877 - RNA, 31 nt, Homo Sapiens
uggaacucacggagaccuacagucccugggc

SEQ ID NO: 355878 - RNA, 32 nt, Homo Sapiens
aagaauccaguaccuugcacauagaaguagca

SEQ ID NO: 355879 - RNA, 32 nt, Homo Sapiens
caauuuucugcugaaauucagaaagaacuuau

SEQ ID NO: 355880 - RNA, 32 nt, Homo Sapiens
guagcgccgcuucccguccggucccaaaggug

SEQ ID NO: 355881 - RNA, 32 nt, Homo Sapiens
uuucuuucuucgguuucuuaaaaucuuugccu

SEQ ID NO: 355882 - RNA, 32 nt, Homo Sapiens
gccucuauaggguaaccuggaacauucucuag

SEQ ID NO: 355883 - RNA, 32 nt, Homo Sapiens
gaucacucacuuuauauguauugaaacaucau

SEQ ID NO: 355884 - RNA, 32 nt, Homo Sapiens
cuguuccuccccaucacccagccaccggauuc

SEQ ID NO: 355885 - RNA, 32 nt, Homo Sapiens
guccucucuuuucugauaaaauccaucccgug

SEQ ID NO: 355886 - RNA, 32 nt, Homo Sapiens
aguauguacucuauuuaaggaucugugguagu

SEQ ID NO: 355887 - RNA, 32 nt, Homo Sapiens
aguuaauagaccagcuuagguucuucauuuag

SEQ ID NO: 355888 - RNA, 32 nt, Homo Sapiens
agugagccgagaucacacuacugcacuccagc

SEQ ID NO: 355889 - RNA, 32 nt, Homo Sapiens
ccacagcuccagccuuaguuuuuggagucaag

SEQ ID NO: 355890 - RNA, 32 nt, Homo Sapiens
aagcggcguuugcggccgcugcaggcgccggg

SEQ ID NO: 355891 - RNA, 32 nt, Homo Sapiens
acauccuggccaucuugucugugcaacaacag

SEQ ID NO: 355892 - RNA, 32 nt, Homo Sapiens
ggagcaccugggccagaugcuggccaucaacg

SEQ ID NO: 355893 - RNA, 30 nt, Homo Sapiens
ucagcuuccgguguggugggucccggauau

SEQ ID NO: 355894 - RNA, 29 nt, Homo Sapiens
uuauauauauguauuuaaaaugugccauu

SEQ ID NO: 355895 - RNA, 32 nt, Homo Sapiens
cacuaucuugauuuguuacagcagccaacuua

SEQ ID NO: 355896 - RNA, 32 nt, Homo Sapiens
uguuuuauuuuuacuuuuuuuuugucauugca

SEQ ID NO: 355897 - RNA, 32 nt, Homo Sapiens
uaaguguuagacaccaucauggccacaaaacu

SEQ ID NO: 355898 - RNA, 32 nt, Homo Sapiens
uucccgaagugcccggcccgacgggggcgacg

SEQ ID NO: 355899 - RNA, 32 nt, Homo Sapiens
uugauguuuagauaaacuucagugaaaugacu

SEQ ID NO: 355900 - RNA, 32 nt, Homo Sapiens
aauuucuugggguuaaccaucuuuaguuaaau

SEQ ID NO: 355901 - RNA, 30 nt, Homo Sapiens
accggcagcccagccccgggucccgguucc

SEQ ID NO: 355902 - RNA, 32 nt, Homo Sapiens
gagcucugcgcggcgcggcgggcgauccgagc

SEQ ID NO: 355903 - RNA, 30 nt, Homo Sapiens
gggcgucacccagcgccgccggcugcccca

SEQ ID NO: 355904 - RNA, 32 nt, Homo Sapiens
cgguggcugcuuuguuggaaagagggagggcc

SEQ ID NO: 355905 - RNA, 32 nt, Homo Sapiens
aagccucagggugaagggggucccuugaggga

SEQ ID NO: 355906 - RNA, 32 nt, Homo Sapiens
aguaaacaacauaauguuuaauuuacaacuua

SEQ ID NO: 355907 - RNA, 32 nt, Homo Sapiens
ugccaauauauuccaauauagugguauuauuu

SEQ ID NO: 355908 - RNA, 32 nt, Homo Sapiens
caugugaacacacacacacacacacacacaca

SEQ ID NO: 355909 - RNA, 32 nt, Homo Sapiens
cccuguugcgcgggcauccugugcguugcagg

SEQ ID NO: 355910 - RNA, 32 nt, Homo Sapiens
caaggagggagaggaccugagaucgaagauag

SEQ ID NO: 355911 - RNA, 29 nt, Homo Sapiens
aagggcauauguaaguugcaaagguggag

SEQ ID NO: 355912 - RNA, 32 nt, Homo Sapiens
gcacccccugucaucaauccccugcauacaca

SEQ ID NO: 355913 - RNA, 32 nt, Homo Sapiens
gcugcgagggucacagagcguuccgggggcca

SEQ ID NO: 355914 - RNA, 32 nt, Homo Sapiens
ucaaauuuagcaauaaacaauuagcauuaguu

SEQ ID NO: 355915 - RNA, 32 nt, Homo Sapiens
agaugauccuuccuaaucaaauucuucucauu

SEQ ID NO: 355916 - RNA, 32 nt, Homo Sapiens
gggcuggugcucauggcacuuccuccuugcuc

SEQ ID NO: 355917 - RNA, 32 nt, Homo Sapiens
cugcgccgcucccgcccgcucucccacuacuc

SEQ ID NO: 355918 - RNA, 32 nt, Homo Sapiens
uuucauguuacuguugcagcuugugcugagcc

SEQ ID NO: 355919 - RNA, 32 nt, Homo Sapiens
agcagggaacaucacccucuucagacuggagu

SEQ ID NO: 355920 - RNA, 32 nt, Homo Sapiens
accuccaaaauauggccuuguuuucacugcgu

SEQ ID NO: 355921 - RNA, 32 nt, Homo Sapiens
uugggaaacugggcugcaugaggugggcccug

SEQ ID NO: 355922 - RNA, 32 nt, Homo Sapiens
acgacgcuuuguuuuucuuuugugaagccucu

SEQ ID NO: 355923 - RNA, 32 nt, Homo Sapiens
cgcaggcuucucugcuggugcuucugugccug

SEQ ID NO: 355924 - RNA, 32 nt, Homo Sapiens
aaagaaaaacaaaaucuccgcaguguccaaac

SEQ ID NO: 355925 - RNA, 32 nt, Homo Sapiens
ugauagaaaugaauuucuuguaacauucuuuu

SEQ ID NO: 355926 - RNA, 32 nt, Homo Sapiens
caaccacaauaaagaugaaacaaaauuuauga

SEQ ID NO: 355927 - RNA, 32 nt, Homo Sapiens
aaaaacacaucugucucugcaaugcaaaguga

SEQ ID NO: 355928 - RNA, 32 nt, Homo Sapiens
uaggugguugguuaagcuugccaaaggagagg

SEQ ID NO: 355929 - RNA, 32 nt, Homo Sapiens
uaauauccaaauauguacuugucugauuucua

SEQ ID NO: 355930 - RNA, 32 nt, Homo Sapiens
ugucggccgggcgcaguggcuguaaucccagc

SEQ ID NO: 355931 - RNA, 32 nt, Homo Sapiens
acauuuuuugaaauccaaauuuucaugagaaa

SEQ ID NO: 355932 - RNA, 32 nt, Homo Sapiens
uaguuaugacagagacuacauggcccacaaag

SEQ ID NO: 355933 - RNA, 32 nt, Homo Sapiens
ccgggcguugagcacagcgcgggccaggccga

SEQ ID NO: 355934 - RNA, 32 nt, Homo Sapiens
uaaaaacaacucccaucaguagcaauacaagg

SEQ ID NO: 355935 - RNA, 32 nt, Homo Sapiens
ggaucaggagggguguuaaaacaucaaaauga

SEQ ID NO: 355936 - RNA, 32 nt, Homo Sapiens
cuacccacucccugcccuucccacugcagaga

SEQ ID NO: 355937 - RNA, 27 nt, Homo Sapiens
aacccugccuucuuccucccuccacgg

SEQ ID NO: 355938 - RNA, 30 nt, Homo Sapiens
ucauccacugcucgcugccucuccagaucu

SEQ ID NO: 355939 - RNA, 31 nt, Homo Sapiens
aauaugaaaacauacaucggauaugugaaaa

SEQ ID NO: 355940 - RNA, 32 nt, Homo Sapiens
gagccaccgcgcccggccucagcagguuuuuc

SEQ ID NO: 355941 - RNA, 32 nt, Homo Sapiens
ccacgccgcccccuucaagcgaccacacucca

SEQ ID NO: 355942 - RNA, 32 nt, Homo Sapiens
ccguagccgcgccugucccaauaugaauaggg

SEQ ID NO: 355943 - RNA, 32 nt, Homo Sapiens
cuggguaaaaaguuauauuaauauuguuaucc

SEQ ID NO: 355944 - RNA, 32 nt, Homo Sapiens
agugaaaagagccaggaguccuggguucuagu

SEQ ID NO: 355945 - RNA, 32 nt, Homo Sapiens
agcgccugucccugucacggaccccagcguua

SEQ ID NO: 355946 - RNA, 32 nt, Homo Sapiens
aaggaagacaaagauuuaaacaguucccaccu

SEQ ID NO: 355947 - RNA, 32 nt, Homo Sapiens
ggaaagcccaggugcuggcugccagcugcugc

SEQ ID NO: 355948 - RNA, 32 nt, Homo Sapiens
cggggcugcgguggaggcuccucugugagcuc

SEQ ID NO: 355949 - RNA, 32 nt, Homo Sapiens
auccgccgaccucggccucccaaaguccucgg

SEQ ID NO: 355950 - RNA, 32 nt, Homo Sapiens
aaucuguuauauguucuguguuuaaugaagaa

SEQ ID NO: 355951 - RNA, 32 nt, Homo Sapiens
ggaggccaggagaugagagagaaggucgagua

SEQ ID NO: 355952 - RNA, 32 nt, Homo Sapiens
uuguuguaauugguuuucuacuugauaccacu

SEQ ID NO: 355953 - RNA, 32 nt, Homo Sapiens
aaucguagaaucugaaauaaacaggaacaaag

SEQ ID NO: 355954 - RNA, 32 nt, Homo Sapiens
auugagaugaucuuuacugaaaaggaacagau

SEQ ID NO: 355955 - RNA, 32 nt, Homo Sapiens
gaauucgugcagcagcaguucacuccuuagga

SEQ ID NO: 355956 - RNA, 32 nt, Homo Sapiens
uggccugggucccagggcuggcccuaggcacu

SEQ ID NO: 355957 - RNA, 32 nt, Homo Sapiens
uguauuuaaaaguccaacaacuuuuuaauaua

SEQ ID NO: 355958 - RNA, 32 nt, Homo Sapiens
ugagggaggaggaggaggaagagguauggcau

SEQ ID NO: 355959 - RNA, 32 nt, Homo Sapiens
ccggugccaccgccggccgugcuuguuccgag

SEQ ID NO: 355960 - RNA, 32 nt, Homo Sapiens
cagacccgcgccccgcgcucuccggcccgucg

SEQ ID NO: 355961 - RNA, 32 nt, Homo Sapiens
gcauaugaugguuuuuuuuuuacauuaaagag

SEQ ID NO: 355962 - RNA, 32 nt, Homo Sapiens
ucuugcccuaaaacgugcagugcagagaguga

SEQ ID NO: 355963 - RNA, 32 nt, Homo Sapiens
uuauugaagaaagcacaaaaauaaucaaaaau

SEQ ID NO: 355964 - RNA, 32 nt, Homo Sapiens
ggaagaauaagcagaaauaauuuuauauauuu

SEQ ID NO: 355965 - RNA, 32 nt, Homo Sapiens
cagcacaaacacaaggucauggccacacugug

SEQ ID NO: 355966 - RNA, 32 nt, Homo Sapiens
gcugcugugauguaaacuuagggugcugagau

SEQ ID NO: 355967 - RNA, 32 nt, Homo Sapiens
uagcacaaaucgaacuuaggauuuguuucuuc

SEQ ID NO: 355968 - RNA, 32 nt, Homo Sapiens
gagcgccguaauugacacaucucuuauuugag

SEQ ID NO: 355969 - RNA, 32 nt, Homo Sapiens
ugccuucuuauucucacuccaccacccaaaag

SEQ ID NO: 355970 - RNA, 32 nt, Homo Sapiens
cuuuggaggaggaggaggaggaggagaggggc

SEQ ID NO: 355971 - RNA, 32 nt, Homo Sapiens
ucgugcuacccucuccuguuccaaaagccugu

SEQ ID NO: 355972 - RNA, 32 nt, Homo Sapiens
gaacacuguuccaucucagggauugcuuaacc

SEQ ID NO: 355973 - RNA, 32 nt, Homo Sapiens
auuaucuguacuguggguuuaaguaugcuacu

SEQ ID NO: 355974 - RNA, 32 nt, Homo Sapiens
accauccuauucaaauaaacgaguaacaagaa

SEQ ID NO: 355975 - RNA, 32 nt, Homo Sapiens
uuucuuggaaaguuuuguaaaauuauucuggu

SEQ ID NO: 355976 - RNA, 32 nt, Homo Sapiens
caguuugaaaauaaauuguugucgaugauagu

SEQ ID NO: 355977 - RNA, 32 nt, Homo Sapiens
uggugaucaaggagauuguagauucuggcagg

SEQ ID NO: 355978 - RNA, 32 nt, Homo Sapiens
uaugcuuacugugugcuucucauccccugguu

SEQ ID NO: 355979 - RNA, 32 nt, Homo Sapiens
ccuaguucaguaucuuuuuuuuuuuuuuuuuu

SEQ ID NO: 355980 - RNA, 32 nt, Homo Sapiens
cuucccuucuaaacugguucugcuucuaagac

SEQ ID NO: 355981 - RNA, 32 nt, Homo Sapiens
acugcccggcccggcacgggcggcgcgaugug

SEQ ID NO: 355982 - RNA, 32 nt, Homo Sapiens
gcuacccauguccuuucucaccaugguguggc

SEQ ID NO: 355983 - RNA, 32 nt, Homo Sapiens
guuggucugaagcucagugaggcuggagguug

SEQ ID NO: 355984 - RNA, 27 nt, Homo Sapiens
cgauucuccugcuucagccuccugagu

SEQ ID NO: 355985 - RNA, 32 nt, Homo Sapiens
cauuaauggaggcggaggagcagccuuacggg

SEQ ID NO: 355986 - RNA, 32 nt, Homo Sapiens
uucugggucccuucccacuuccuuccaggacc

SEQ ID NO: 355987 - RNA, 32 nt, Homo Sapiens
cagcuccuugucugcuggguggccccugccau

SEQ ID NO: 355988 - RNA, 32 nt, Homo Sapiens
aauauaaaaugugcucuaccccauuggcucag

SEQ ID NO: 355989 - RNA, 32 nt, Homo Sapiens
uuucuuuauccugucugucauugaugggcauu

SEQ ID NO: 355990 - RNA, 32 nt, Homo Sapiens
gaggggccauggugccaaugcacuuacugggg

SEQ ID NO: 355991 - RNA, 32 nt, Homo Sapiens
cagcacccugucaaaacagaccacucggcucu

SEQ ID NO: 355992 - RNA, 31 nt, Homo Sapiens
uaauuuauaaagaaaagagguauugauucau

SEQ ID NO: 355993 - RNA, 32 nt, Homo Sapiens
cagcguugcccauuugaauuuccuagcaggcc

SEQ ID NO: 355994 - RNA, 32 nt, Homo Sapiens
agagguagcugcagaggggggaggccaagggu

SEQ ID NO: 355995 - RNA, 32 nt, Homo Sapiens
uuauccugcagaaauacacaaauacacaaaga

SEQ ID NO: 355996 - RNA, 32 nt, Homo Sapiens
cagagacagagccccucgagagggauccuugg

SEQ ID NO: 355997 - RNA, 32 nt, Homo Sapiens
gaauuggacauugcucugucagagcacagagg

SEQ ID NO: 355998 - RNA, 32 nt, Homo Sapiens
gcguacaggaggagcacgggcagcugcuugcg

SEQ ID NO: 355999 - RNA, 32 nt, Homo Sapiens
aggaggagaagcuccugaagcggcgggcgcgc

SEQ ID NO: 356000 - RNA, 32 nt, Homo Sapiens
gaaauuggagagggagucaauuccuaggauag

SEQ ID NO: 356001 - RNA, 32 nt, Homo Sapiens
cuuaagucuucaagcggagacaucaaagggaa

SEQ ID NO: 356002 - RNA, 32 nt, Homo Sapiens
gugcugaggaucuggaauacugaaguggaagg

SEQ ID NO: 356003 - RNA, 32 nt, Homo Sapiens
ggcugcucaggaucucaagacacucccgacug

SEQ ID NO: 356004 - RNA, 32 nt, Homo Sapiens
aaaggauagagguaguuuuuucaaaagagcac

SEQ ID NO: 356005 - RNA, 32 nt, Homo Sapiens
acuuguaucuuggugguauauaaagaacucgu

SEQ ID NO: 356006 - RNA, 29 nt, Homo Sapiens
auucuggggaacugggcaccaggagugcc

SEQ ID NO: 356007 - RNA, 32 nt, Homo Sapiens
ucuggauuuuuguuuuuguaaaaucuuuuacu

SEQ ID NO: 356008 - RNA, 32 nt, Homo Sapiens
gaggagagucggcgccgagaugggcggauaaa

SEQ ID NO: 356009 - RNA, 32 nt, Homo Sapiens
guccccgcgaagacagcgucagagggaaggga

SEQ ID NO: 356010 - RNA, 32 nt, Homo Sapiens
ccagagacccgcaggccggcccgggcucacuu

SEQ ID NO: 356011 - RNA, 32 nt, Homo Sapiens
guguuuugccaccuuauuuuuauaugggaaau

SEQ ID NO: 356012 - RNA, 32 nt, Homo Sapiens
aagaggcauuguaggaacaugucaaaaacagc

SEQ ID NO: 356013 - RNA, 32 nt, Homo Sapiens
agcacagaugacauuuuagauacacucuaaau

SEQ ID NO: 356014 - RNA, 32 nt, Homo Sapiens
gauuauucaggcccauauuugcugacuuuuua

SEQ ID NO: 356015 - RNA, 30 nt, Homo Sapiens
gcggcggcgcccgaggcccgaggcggaagu

SEQ ID NO: 356016 - RNA, 32 nt, Homo Sapiens
guauuuagaauauucauguaaaacuugugaac

SEQ ID NO: 356017 - RNA, 32 nt, Homo Sapiens
gcagagccccugggccagcagaacagcacucc

SEQ ID NO: 356018 - RNA, 32 nt, Homo Sapiens
ucugagagcaaagggaaggacugacgagagau

SEQ ID NO: 356019 - RNA, 32 nt, Homo Sapiens
caagaaauagcaguacaaaaccauucuucuga

SEQ ID NO: 356020 - RNA, 32 nt, Homo Sapiens
gacaguggcuuuucuacaguacucuuccuuau

SEQ ID NO: 356021 - RNA, 32 nt, Homo Sapiens
cggcggcagcgggguccggguccggagcgcca

SEQ ID NO: 356022 - RNA, 32 nt, Homo Sapiens
uuugugccaaccccccaaauucauauguugaa

SEQ ID NO: 356023 - RNA, 32 nt, Homo Sapiens
gagucagcauggugcacagcagaaaguggggg

SEQ ID NO: 356024 - RNA, 32 nt, Homo Sapiens
ggaugcacuaaaguuagcaaguuuauaauaaa

SEQ ID NO: 356025 - RNA, 32 nt, Homo Sapiens
uaaaugaggccagaauggcauguuuuauaauu

SEQ ID NO: 356026 - RNA, 32 nt, Homo Sapiens
uccuccgcuggcucauggcgccaggcguggga

SEQ ID NO: 356027 - RNA, 32 nt, Homo Sapiens
agaauuuuaaagcgguauaacaaaauuaagua

SEQ ID NO: 356028 - RNA, 32 nt, Homo Sapiens
cacagaucuacuggucagcaucagggucccca

SEQ ID NO: 356029 - RNA, 32 nt, Homo Sapiens
uaaucuaauagauuuccuuaagggcaggagau

SEQ ID NO: 356030 - RNA, 32 nt, Homo Sapiens
guccagaagagcuggaggacagacagaagaaa

SEQ ID NO: 356031 - RNA, 32 nt, Homo Sapiens
gagguuccggugcucgccgccgcccagcuccc

SEQ ID NO: 356032 - RNA, 32 nt, Homo Sapiens
cugagaaucugugaaugcagaggggagggcuc

SEQ ID NO: 356033 - RNA, 32 nt, Homo Sapiens
acacauauuuuaaagguuaaagugaauguuuu

SEQ ID NO: 356034 - RNA, 32 nt, Homo Sapiens
guccuggguguguuuuuucaaucuucuaaaaa

SEQ ID NO: 356035 - RNA, 31 nt, Homo Sapiens
uauauuccaaagaaacccuauauuauauauc

SEQ ID NO: 356036 - RNA, 32 nt, Homo Sapiens
guauauauucuauuuguauggaauucuuauuc

SEQ ID NO: 356037 - RNA, 32 nt, Homo Sapiens
ccccccgcguccugugcggauuucagggcuga

SEQ ID NO: 356038 - RNA, 32 nt, Homo Sapiens
aggcaagcccuguugacacaggucuuuccuaa

SEQ ID NO: 356039 - RNA, 32 nt, Homo Sapiens
cugaagugcacuuuuuugaaacaucauuuugc

SEQ ID NO: 356040 - RNA, 32 nt, Homo Sapiens
ugauucugugcagcuggcucuccgcaaccuga

SEQ ID NO: 356041 - RNA, 32 nt, Homo Sapiens
agaagacuguucugcaauuugcugccaaaugc

SEQ ID NO: 356042 - RNA, 32 nt, Homo Sapiens
acuguuguauccucggacgggcuccugacaug

SEQ ID NO: 356043 - RNA, 32 nt, Homo Sapiens
cccaucgcugcagcugccauuggugccgauga

SEQ ID NO: 356044 - RNA, 31 nt, Homo Sapiens
cggcugacacacugccuccccagccuuccug

SEQ ID NO: 356045 - RNA, 32 nt, Homo Sapiens
uuagcgggucucccggcggcccggccccgcgu

SEQ ID NO: 356046 - RNA, 32 nt, Homo Sapiens
gcaggccuggccucccggggccuggaucccua

SEQ ID NO: 356047 - RNA, 32 nt, Homo Sapiens
aacuggagauaaacccuaugacuauaagcaau

SEQ ID NO: 356048 - RNA, 32 nt, Homo Sapiens
cagugccggccgccauggcagaggcguccggc

SEQ ID NO: 356049 - RNA, 32 nt, Homo Sapiens
ggacuuugauuuuaagccaaauccaucuccau

SEQ ID NO: 356050 - RNA, 32 nt, Homo Sapiens
ucaucacguugaccaggcuggucucgaacucc

SEQ ID NO: 356051 - RNA, 32 nt, Homo Sapiens
cgggucggggagggagcugcgaggggggcgga

SEQ ID NO: 356052 - RNA, 32 nt, Homo Sapiens
ugaaguccggugccucugccuuaucccuggug

SEQ ID NO: 356053 - RNA, 32 nt, Homo Sapiens
uaaagaauaaauuuaauauuuuuaaggcaugg

SEQ ID NO: 356054 - RNA, 29 nt, Homo Sapiens
gaagccguauguaugucaggggguuuaga

SEQ ID NO: 356055 - RNA, 32 nt, Homo Sapiens
gcccagagccuggcugcccaucauguggcccc

SEQ ID NO: 356056 - RNA, 32 nt, Homo Sapiens
cugaggacuguggccuggcuggcgggccagcg

SEQ ID NO: 356057 - RNA, 29 nt, Homo Sapiens
gauacauaguuuuauugaaagcuaaaaau

SEQ ID NO: 356058 - RNA, 32 nt, Homo Sapiens
caauaagaauacuuaauucuaguucccgacaa

SEQ ID NO: 356059 - RNA, 32 nt, Homo Sapiens
uuuuggaauccaguggaaucuuuaaucuuguu

SEQ ID NO: 356060 - RNA, 32 nt, Homo Sapiens
uucgacuccuguuuuucuuuaauuaacuauac

SEQ ID NO: 356061 - RNA, 32 nt, Homo Sapiens
uggagcuugggccccagggcgcgcccugccuc

SEQ ID NO: 356062 - RNA, 32 nt, Homo Sapiens
augaugaggagaaauggccucccgucuuguga

SEQ ID NO: 356063 - RNA, 32 nt, Homo Sapiens
gucucuagagcuuccaaguccugggaaugugc

SEQ ID NO: 356064 - RNA, 32 nt, Homo Sapiens
augugacuuggaaaaugagaaagauuuagcaa

SEQ ID NO: 356065 - RNA, 29 nt, Homo Sapiens
uauauuuuuuuuuucagagauagagucuc

SEQ ID NO: 356066 - RNA, 32 nt, Homo Sapiens
gaguucuccagauuugggagaggcgcagagac

SEQ ID NO: 356067 - RNA, 32 nt, Homo Sapiens
gugugccugccaggcuggggcggagcugcccg

SEQ ID NO: 356068 - RNA, 32 nt, Homo Sapiens
ucugagccauucucuccccuccucugcccugu

SEQ ID NO: 356069 - RNA, 32 nt, Homo Sapiens
cggcccuuccugcagcgccugccgccccgggg

SEQ ID NO: 356070 - RNA, 32 nt, Homo Sapiens
uccccaucuccauuuuaacauguaguacuuuu

SEQ ID NO: 356071 - RNA, 32 nt, Homo Sapiens
ccccacagcugcccuuucuccccuccacucau

SEQ ID NO: 356072 - RNA, 32 nt, Homo Sapiens
gugauaauggauccuuaacagaugaacuaucc

SEQ ID NO: 356073 - RNA, 32 nt, Homo Sapiens
cgugggggccgcggcccgcgcugacccuggac

SEQ ID NO: 356074 - RNA, 32 nt, Homo Sapiens
ucccuggcauuuuaggugucgguuggguaggc

SEQ ID NO: 356075 - RNA, 32 nt, Homo Sapiens
uaugauuguaaaauugcuaaauaugacuguaa

SEQ ID NO: 356076 - RNA, 32 nt, Homo Sapiens
gcgcggcggcgguggcggcggggaagauggcg

SEQ ID NO: 356077 - RNA, 32 nt, Homo Sapiens
ggccaggcaugguggcucacaccaguaauccc

SEQ ID NO: 356078 - RNA, 32 nt, Homo Sapiens
uccgaguucgcccuucccccaccuccuugucu

SEQ ID NO: 356079 - RNA, 32 nt, Homo Sapiens
ugaugaagccagguugucaaagaucauuugca

SEQ ID NO: 356080 - RNA, 32 nt, Homo Sapiens
uuccacacccucacugcuguagacauuugcua

SEQ ID NO: 356081 - RNA, 32 nt, Homo Sapiens
cccaggaaaaagaaaaacaggaauacuuuaac

SEQ ID NO: 356082 - RNA, 32 nt, Homo Sapiens
cuuccaaguauuauuuuuacuguuaaaaaauu

SEQ ID NO: 356083 - RNA, 32 nt, Homo Sapiens
uauuaacuuguauuuucuuaauauacaaucua

SEQ ID NO: 356084 - RNA, 32 nt, Homo Sapiens
ggugaccccucccccggcugccgccgucgccg

SEQ ID NO: 356085 - RNA, 31 nt, Homo Sapiens
gcuuugucaggggacucaggagucgaccaag

SEQ ID NO: 356086 - RNA, 32 nt, Homo Sapiens
ggaauggagacggguccaucguguuccucaca

SEQ ID NO: 356087 - RNA, 32 nt, Homo Sapiens
cccauuuccagaugaagccuuucagcccuucu

SEQ ID NO: 356088 - RNA, 32 nt, Homo Sapiens
agucccggauuacuuucuuggcagcuuaagug

SEQ ID NO: 356089 - RNA, 32 nt, Homo Sapiens
ugacucuucuauuaggggcuaaugcagcuggu

SEQ ID NO: 356090 - RNA, 32 nt, Homo Sapiens
ggagaccacccucccccagccagauacggaau

SEQ ID NO: 356091 - RNA, 32 nt, Homo Sapiens
ugcgcugacaccuggucugugcaccuguguug

SEQ ID NO: 356092 - RNA, 32 nt, Homo Sapiens
aaaaaaguuuuaaaaauugaggaguuuuguuc

SEQ ID NO: 356093 - RNA, 32 nt, Homo Sapiens
agauggggccccacugaucuggauuugaaaag

SEQ ID NO: 356094 - RNA, 32 nt, Homo Sapiens
cauuccugucccccggccucgucuucuguccu

SEQ ID NO: 356095 - RNA, 32 nt, Homo Sapiens
agaucaugccauugcacagcagccugggugac

SEQ ID NO: 356096 - RNA, 32 nt, Homo Sapiens
aagugcuucauuuuucgugcccgccccgcgcc

SEQ ID NO: 356097 - RNA, 32 nt, Homo Sapiens
ggauaaaucaacauggcaacuaugauuccacc

SEQ ID NO: 356098 - RNA, 32 nt, Homo Sapiens
cugcuuucugccucuccuccacagccccaacc

SEQ ID NO: 356099 - RNA, 32 nt, Homo Sapiens
augccagcggcuuuggcugggguuggucugaa

SEQ ID NO: 356100 - RNA, 32 nt, Homo Sapiens
ugggagguggagguugcagugagccaagauca

SEQ ID NO: 356101 - RNA, 32 nt, Homo Sapiens
gcuugcugccagcaaagccccuccacaccccu

SEQ ID NO: 356102 - RNA, 32 nt, Homo Sapiens
ucugauggagggacaacaaugguuucaacugu

SEQ ID NO: 356103 - RNA, 32 nt, Homo Sapiens
caguaugaacuuccugauacaaauguagggau

SEQ ID NO: 356104 - RNA, 32 nt, Homo Sapiens
acccaugaacucccaguuugcgaauuaauaag

SEQ ID NO: 356105 - RNA, 32 nt, Homo Sapiens
ugauucucccuugacucuggcuccugcaccac

SEQ ID NO: 356106 - RNA, 32 nt, Homo Sapiens
acugcaagguaaagaaagaaaaaagggaaaua

SEQ ID NO: 356107 - RNA, 32 nt, Homo Sapiens
uggguuuaaaaauaacuagaaaaacucaggcc

SEQ ID NO: 356108 - RNA, 32 nt, Homo Sapiens
acaagccgcuggcagccgcggaucucaccgcc

SEQ ID NO: 356109 - RNA, 32 nt, Homo Sapiens
gauaccagccguucuguguauuuuggacgaag

SEQ ID NO: 356110 - RNA, 32 nt, Homo Sapiens
guaauagcauuaagaagaucgugugagcuugc

SEQ ID NO: 356111 - RNA, 32 nt, Homo Sapiens
ccuccugccuacugcagguuuguggggcgugg

SEQ ID NO: 356112 - RNA, 32 nt, Homo Sapiens
ggucucaaacuccugagcucaagcaauccguc

SEQ ID NO: 356113 - RNA, 32 nt, Homo Sapiens
uccagcugugcagcugacuucugugagacugg

SEQ ID NO: 356114 - RNA, 32 nt, Homo Sapiens
uggaccccucgccuccuccccgagggccaaug

SEQ ID NO: 356115 - RNA, 32 nt, Homo Sapiens
auuuaaauuuuaaaggaauggaguuuuucagc

SEQ ID NO: 356116 - RNA, 32 nt, Homo Sapiens
uuucuuuuuuuccuuuugauaauagcaucaua

SEQ ID NO: 356117 - RNA, 32 nt, Homo Sapiens
aaggacagggauuuuuguucuuguuguucucg

SEQ ID NO: 356118 - RNA, 32 nt, Homo Sapiens
gggucugggcugaggggcgcggcuucgcggug

SEQ ID NO: 356119 - RNA, 32 nt, Homo Sapiens
ccugcccucccucuccuaucugaacccugguc

SEQ ID NO: 356120 - RNA, 32 nt, Homo Sapiens
agcaaacauguuuuuugaaccuugucauuuuu

SEQ ID NO: 356121 - RNA, 32 nt, Homo Sapiens
ucuuuuucucccuaccccccaaccccuagccc

SEQ ID NO: 356122 - RNA, 31 nt, Homo Sapiens
uugaacuuuauauaaauggauuuauacauua

SEQ ID NO: 356123 - RNA, 32 nt, Homo Sapiens
aaccccuaaaauuguagcaacuuugaaagguu

SEQ ID NO: 356124 - RNA, 32 nt, Homo Sapiens
acuccuuuccuucagcuggcauuugaauguuu

SEQ ID NO: 356125 - RNA, 32 nt, Homo Sapiens
aucucagagucccuuccaaucaauuugcagcu

SEQ ID NO: 356126 - RNA, 30 nt, Homo Sapiens
ggcagagccgcgcagcaccugggagcggua

SEQ ID NO: 356127 - RNA, 32 nt, Homo Sapiens
aguuuguccggcggcagcggcguuggggacuc

SEQ ID NO: 356128 - RNA, 32 nt, Homo Sapiens
acuggagggguagagaaggcucugccagcccc

SEQ ID NO: 356129 - RNA, 32 nt, Homo Sapiens
uccuaagagauuugguaugugaggauacuuuc

SEQ ID NO: 356130 - RNA, 32 nt, Homo Sapiens
acuaguaacugagacuccuccagccuccuccc

SEQ ID NO: 356131 - RNA, 32 nt, Homo Sapiens
ggaagagagaaaggaaauauuuuggucuuuua

SEQ ID NO: 356132 - RNA, 32 nt, Homo Sapiens
ggggccaccugccuugcgugcuuuucuggguu

SEQ ID NO: 356133 - RNA, 32 nt, Homo Sapiens
uucuguccaucccauucuauucuguacuguga

SEQ ID NO: 356134 - RNA, 32 nt, Homo Sapiens
aaggcaaauaauccuuguuuugucuucaccca

SEQ ID NO: 356135 - RNA, 32 nt, Homo Sapiens
ugcgccaggauggaguucgugaaaugccuugg

SEQ ID NO: 356136 - RNA, 32 nt, Homo Sapiens
uuccaguaacccaaaucuuguuuacaaaauau

SEQ ID NO: 356137 - RNA, 32 nt, Homo Sapiens
gcccucuggugccgcucugcccgaugcacagc

SEQ ID NO: 356138 - RNA, 28 nt, Homo Sapiens
gucaggaguucaggaccagccugaccaa

SEQ ID NO: 356139 - RNA, 32 nt, Homo Sapiens
gcuuacauuuuaauugagccagcaaagaaggc

SEQ ID NO: 356140 - RNA, 32 nt, Homo Sapiens
ucuacuaaaaauuaaaaauuagcuggacaugg

SEQ ID NO: 356141 - RNA, 32 nt, Homo Sapiens
agauucucccaccuccucccuuugauggaacc

SEQ ID NO: 356142 - RNA, 32 nt, Homo Sapiens
cccuuccacuugaguucucucuucuccugcug

SEQ ID NO: 356143 - RNA, 27 nt, Homo Sapiens
uuuuguuaauaaaauuuugaagaaacc

SEQ ID NO: 356144 - RNA, 30 nt, Homo Sapiens
aaaaagccacuugcugauaaaauuuuguua

SEQ ID NO: 356145 - RNA, 32 nt, Homo Sapiens
uggaguaccccgagaucccagcagcgcacaca

SEQ ID NO: 356146 - RNA, 29 nt, Homo Sapiens
acaaauccuaguagauucugugcaugugg

SEQ ID NO: 356147 - RNA, 32 nt, Homo Sapiens
aggaaggcucagugggcucagcagaaggaagg

SEQ ID NO: 356148 - RNA, 32 nt, Homo Sapiens
augcuaagaaugcauuauugagggucauucuu

SEQ ID NO: 356149 - RNA, 32 nt, Homo Sapiens
acagaaggcccgaggaggccgacugggcugcu

SEQ ID NO: 356150 - RNA, 32 nt, Homo Sapiens
ggagggugagugccgccauuuaguggcugcua

SEQ ID NO: 356151 - RNA, 32 nt, Homo Sapiens
uuaucuuuugaaaggcacagucuaaaucgaaa

SEQ ID NO: 356152 - RNA, 32 nt, Homo Sapiens
uccacacacgcacacgggcacucgcgaggcga

SEQ ID NO: 356153 - RNA, 32 nt, Homo Sapiens
ugccggggccgcgccggcuacauuguuuccuc

SEQ ID NO: 356154 - RNA, 32 nt, Homo Sapiens
ucccgagucugcgggcagcugcugucccagca

SEQ ID NO: 356155 - RNA, 32 nt, Homo Sapiens
cccaaguuucuuuuucccuggaaaauaaaaaa

SEQ ID NO: 356156 - RNA, 32 nt, Homo Sapiens
ugugcuugaaagauuuccuccacggccuuugc

SEQ ID NO: 356157 - RNA, 32 nt, Homo Sapiens
gugcaaucuucaguuuugugauuaaguucauu

SEQ ID NO: 356158 - RNA, 32 nt, Homo Sapiens
gucuauuauuaugcuuaagaaaauauucaguu

SEQ ID NO: 356159 - RNA, 32 nt, Homo Sapiens
guuacccccgguuccgcugucuuuucugucua

SEQ ID NO: 356160 - RNA, 32 nt, Homo Sapiens
cgcugggaggauuaagggacuuaaucugcuag

SEQ ID NO: 356161 - RNA, 32 nt, Homo Sapiens
acagagacucuauaacacacguggaaaaaguu

SEQ ID NO: 356162 - RNA, 32 nt, Homo Sapiens
ccccaaccucauccucccagguggcugaaacu

SEQ ID NO: 356163 - RNA, 32 nt, Homo Sapiens
guuuuugguugaugagaauuuacgucugcaau

SEQ ID NO: 356164 - RNA, 32 nt, Homo Sapiens
caugagagaaaguuucaagaucuucuguguga

SEQ ID NO: 356165 - RNA, 32 nt, Homo Sapiens
uagccuugaaaauggagugaacaggaggcaaa

SEQ ID NO: 356166 - RNA, 32 nt, Homo Sapiens
ccaagggugcuggcugagcugcuggagcuagg

SEQ ID NO: 356167 - RNA, 31 nt, Homo Sapiens
aaugguugggcagaccaaccauugggucacc

SEQ ID NO: 356168 - RNA, 32 nt, Homo Sapiens
accagccgcugcagggcucccaugggcugagu

SEQ ID NO: 356169 - RNA, 32 nt, Homo Sapiens
aaauuccgagcugcgguugugcaugagaauac

SEQ ID NO: 356170 - RNA, 32 nt, Homo Sapiens
aacagcauccucugcuggcucuccugugguca

SEQ ID NO: 356171 - RNA, 32 nt, Homo Sapiens
gcugugcaacuggcauauuauuuugcacauaa

SEQ ID NO: 356172 - RNA, 32 nt, Homo Sapiens
ggggucacaccuuauucagcaucagaggaguc

SEQ ID NO: 356173 - RNA, 32 nt, Homo Sapiens
gaaaccagggucucaugguuuaaaagacuuug

SEQ ID NO: 356174 - RNA, 32 nt, Homo Sapiens
ggcugguguuuuuugacauuuacuucaguuuu

SEQ ID NO: 356175 - RNA, 32 nt, Homo Sapiens
guuuaaguuguucccccucccucugaaaaaag

SEQ ID NO: 356176 - RNA, 32 nt, Homo Sapiens
uauaugcauaugcuucuguuucaucuacuugg

SEQ ID NO: 356177 - RNA, 32 nt, Homo Sapiens
aaacauaauuuaauguaugaauagaugugaau

SEQ ID NO: 356178 - RNA, 32 nt, Homo Sapiens
guuugcuuugguuuuuccauuuucuuuggcau

SEQ ID NO: 356179 - RNA, 32 nt, Homo Sapiens
acucagauaaccaaauuaaaagaauuagaaua

SEQ ID NO: 356180 - RNA, 32 nt, Homo Sapiens
accugucugaccauagagcuugcaggcaggcc

SEQ ID NO: 356181 - RNA, 30 nt, Homo Sapiens
auagucaauaguucuuggauaugcaauugc

SEQ ID NO: 356182 - RNA, 32 nt, Homo Sapiens
caugaccaacugguaguuggcacugaaaaaac

SEQ ID NO: 356183 - RNA, 32 nt, Homo Sapiens
uugcagaaaaauuuauuaaauuggaaaaucuu

SEQ ID NO: 356184 - RNA, 32 nt, Homo Sapiens
uguuaauguuacgauguuuuuaaaagacaaaa

SEQ ID NO: 356185 - RNA, 32 nt, Homo Sapiens
ccaaguuuaaaauuguucaacauucaaacagu

SEQ ID NO: 356186 - RNA, 32 nt, Homo Sapiens
ugcagaaggggcaggacugcagugcacugcgg

SEQ ID NO: 356187 - RNA, 32 nt, Homo Sapiens
uggugaaaccucgucuuuaccaaaaaauacaa

SEQ ID NO: 356188 - RNA, 32 nt, Homo Sapiens
uugaauuugguaugggugggacauuguaaagg

SEQ ID NO: 356189 - RNA, 32 nt, Homo Sapiens
ggagccugcccaccggcccccggcagugcagu

SEQ ID NO: 356190 - RNA, 32 nt, Homo Sapiens
gccuuugaaaauaaagcuguuaugggugucau

SEQ ID NO: 356191 - RNA, 32 nt, Homo Sapiens
uguuguuuguuguuuugagucagcugauuuuc

SEQ ID NO: 356192 - RNA, 32 nt, Homo Sapiens
gaaucaguccucagggccccagaucccccuuc

SEQ ID NO: 356193 - RNA, 32 nt, Homo Sapiens
ugagcgaguggagucugccacccaggaucccc

SEQ ID NO: 356194 - RNA, 32 nt, Homo Sapiens
gaggugauaaguguaggcaagcacuggguaga

SEQ ID NO: 356195 - RNA, 32 nt, Homo Sapiens
guuccaucuuuucauuuccccagcgcagcuuu

SEQ ID NO: 356196 - RNA, 32 nt, Homo Sapiens
cuccaaauauuuuguuucccuuuuuugugugg

SEQ ID NO: 356197 - RNA, 32 nt, Homo Sapiens
gcggcggcggcaagggcgggagggagcggucg

SEQ ID NO: 356198 - RNA, 32 nt, Homo Sapiens
cauaccccuucuuccacccccagacuaaagga

SEQ ID NO: 356199 - RNA, 29 nt, Homo Sapiens
cagggcaggggacagcuggcgccgguucu

SEQ ID NO: 356200 - RNA, 32 nt, Homo Sapiens
ucuaccuccgcccaaggcgcgcggcaggcgac

SEQ ID NO: 356201 - RNA, 32 nt, Homo Sapiens
gcuagaagaugaauucaggcacuuucuuccaa

SEQ ID NO: 356202 - RNA, 32 nt, Homo Sapiens
uggaguggggagagggcaguugggugugcugg

SEQ ID NO: 356203 - RNA, 32 nt, Homo Sapiens
ggcgguaagcggaacuucggcccgaggggcuc

SEQ ID NO: 356204 - RNA, 32 nt, Homo Sapiens
cauuuuagauaguauuaccuucaucagcaagu

SEQ ID NO: 356205 - RNA, 32 nt, Homo Sapiens
uggaaaugaaaauuauuuuaugucuagaguag

SEQ ID NO: 356206 - RNA, 32 nt, Homo Sapiens
gaacacugguaguucuggggcugggagggaga

SEQ ID NO: 356207 - RNA, 32 nt, Homo Sapiens
auaugugaagcaaacucuaaaauuauaaauga

SEQ ID NO: 356208 - RNA, 32 nt, Homo Sapiens
ucucagagacagcagggcuggugcucuucucc

SEQ ID NO: 356209 - RNA, 32 nt, Homo Sapiens
gaauucccucacucacggcucccuuugccaga

SEQ ID NO: 356210 - RNA, 32 nt, Homo Sapiens
agcuuaagccaaaccuguucugucccacuggc

SEQ ID NO: 356211 - RNA, 27 nt, Homo Sapiens
uucugaggucucuucagcccuuuucgc

SEQ ID NO: 356212 - RNA, 32 nt, Homo Sapiens
acuucccuacugacaaguucuuugguauuuca

SEQ ID NO: 356213 - RNA, 32 nt, Homo Sapiens
uuucccuuggcaaagaucuucuacuaagauau

SEQ ID NO: 356214 - RNA, 32 nt, Homo Sapiens
ugugcaucgcacgcggccacgaccacagacac

SEQ ID NO: 356215 - RNA, 32 nt, Homo Sapiens
ugcugccuccggcagagcugagccaaaauguc

SEQ ID NO: 356216 - RNA, 32 nt, Homo Sapiens
cagagaaauuuucaugaauuauuccaugaagu

SEQ ID NO: 356217 - RNA, 32 nt, Homo Sapiens
cacuguuccuuccaugcugaguugccuggacg

SEQ ID NO: 356218 - RNA, 32 nt, Homo Sapiens
uagcucucuucccuaaugcucuccauaccccc

SEQ ID NO: 356219 - RNA, 30 nt, Homo Sapiens
cagagcugacugcaugaugagucugaaggc

SEQ ID NO: 356220 - RNA, 31 nt, Homo Sapiens
ucagugacaaacacuccuuuggccuguugaa

SEQ ID NO: 356221 - RNA, 32 nt, Homo Sapiens
guuuauucuuuuguuucuuuuaucugacugac

SEQ ID NO: 356222 - RNA, 32 nt, Homo Sapiens
ccacagcuaacauggcggcgcccugugugucc

SEQ ID NO: 356223 - RNA, 32 nt, Homo Sapiens
cagcuuuucugggggucucauaaagagcaguu

SEQ ID NO: 356224 - RNA, 32 nt, Homo Sapiens
ccacagaagcaccaugggguccucccugaacu

SEQ ID NO: 356225 - RNA, 32 nt, Homo Sapiens
gccuaggccaucaguggguccuggauagugag

SEQ ID NO: 356226 - RNA, 32 nt, Homo Sapiens
agcaagcagaccaauggccgaggagucuggca

SEQ ID NO: 356227 - RNA, 32 nt, Homo Sapiens
cuccagccccacuucugaaaguaucagcuacu

SEQ ID NO: 356228 - RNA, 32 nt, Homo Sapiens
ugacaagccuuugugcucuauagcagacacua

SEQ ID NO: 356229 - RNA, 32 nt, Homo Sapiens
ccccggccccucgggccucugcacagccucuu

SEQ ID NO: 356230 - RNA, 32 nt, Homo Sapiens
uuauaagaccucuuucagcagaucacaucaga

SEQ ID NO: 356231 - RNA, 32 nt, Homo Sapiens
aaguuuacugaaucuucaagaccaaagcagaa

SEQ ID NO: 356232 - RNA, 32 nt, Homo Sapiens
uauuguuugaauuuauacgaauacugggacug

SEQ ID NO: 356233 - RNA, 32 nt, Homo Sapiens
gacagaguaguugaugaguuagauaacaaacg

SEQ ID NO: 356234 - RNA, 32 nt, Homo Sapiens
ugacugaaaaagauggauacuacuaugcugaa

SEQ ID NO: 356235 - RNA, 32 nt, Homo Sapiens
aaccacucucucugccccuucaucucucugag

SEQ ID NO: 356236 - RNA, 32 nt, Homo Sapiens
ugccaccuccucugcuggucgggcugggaccc

SEQ ID NO: 356237 - RNA, 32 nt, Homo Sapiens
gaacucagcacacuccugggaaucuuguaaga

SEQ ID NO: 356238 - RNA, 32 nt, Homo Sapiens
auuaccuguuucuccuucccuuucacacucca

SEQ ID NO: 356239 - RNA, 32 nt, Homo Sapiens
caauuuuuuuuuuuuuuuuuuagauggaaucu

SEQ ID NO: 356240 - RNA, 32 nt, Homo Sapiens
ggaucaacuugacacaacuuugaaacugcaua

SEQ ID NO: 356241 - RNA, 32 nt, Homo Sapiens
agugccauugcuacuuugauaaucuauguauc

SEQ ID NO: 356242 - RNA, 32 nt, Homo Sapiens
uugccuuuguuuaagccuggaacuuguaagaa

SEQ ID NO: 356243 - RNA, 32 nt, Homo Sapiens
gagagcaggucccagcucccccugccagccgc

SEQ ID NO: 356244 - RNA, 32 nt, Homo Sapiens
gguuagacaugauuagugaacaauccuauacu

SEQ ID NO: 356245 - RNA, 32 nt, Homo Sapiens
ucuguuauuuccccccagcuuccaucacccuu

SEQ ID NO: 356246 - RNA, 32 nt, Homo Sapiens
acgacgaggagauucguuuccaaaccagagga

SEQ ID NO: 356247 - RNA, 32 nt, Homo Sapiens
ggggguuauuuaaugaaaaacaugcuauguuu

SEQ ID NO: 356248 - RNA, 32 nt, Homo Sapiens
cagggccugauggggcguggccaggcaauaaa

SEQ ID NO: 356249 - RNA, 32 nt, Homo Sapiens
gcguggaggaggagggaggccgggcggucaca

SEQ ID NO: 356250 - RNA, 32 nt, Homo Sapiens
uucuucuuuccacaagccuuucuugcugcugu

SEQ ID NO: 356251 - RNA, 32 nt, Homo Sapiens
auucugcugagguuuucuuaauguuguagagc

SEQ ID NO: 356252 - RNA, 32 nt, Homo Sapiens
gagucuguugcuagaaucuuggcaacauacag

SEQ ID NO: 356253 - RNA, 32 nt, Homo Sapiens
ugcuggggugaggcagcggcgcggccgggccg

SEQ ID NO: 356254 - RNA, 32 nt, Homo Sapiens
uauuaguacgggcauuacaaucuuuugguugu

SEQ ID NO: 356255 - RNA, 32 nt, Homo Sapiens
cggacccgucagagccgccgagccccgcaccu

SEQ ID NO: 356256 - RNA, 32 nt, Homo Sapiens
aucuuuuaucaguguucagaucauagauuaau

SEQ ID NO: 356257 - RNA, 32 nt, Homo Sapiens
gccgacuucuccccuuuccccagccucgugcc

SEQ ID NO: 356258 - RNA, 32 nt, Homo Sapiens
gacucucuacaaugauaacucaauucaaaugu

SEQ ID NO: 356259 - RNA, 32 nt, Homo Sapiens
auguuuagugacacgugaaaaauacaugaaau

SEQ ID NO: 356260 - RNA, 32 nt, Homo Sapiens
ucuccucugcuguccaagcgcuuuggugcagg

SEQ ID NO: 356261 - RNA, 32 nt, Homo Sapiens
aaguuuaauguugccaauggagguccugcacc

SEQ ID NO: 356262 - RNA, 30 nt, Homo Sapiens
cgucauggcaggcgccgggggcguggcuuc

SEQ ID NO: 356263 - RNA, 32 nt, Homo Sapiens
uucuccuggcuggcccgggcugccccaggacc

SEQ ID NO: 356264 - RNA, 32 nt, Homo Sapiens
ucugauguauaaauuugcugaacuuugaguua

SEQ ID NO: 356265 - RNA, 32 nt, Homo Sapiens
ucagagcaugagaugaagacuucuuuggguuu

SEQ ID NO: 356266 - RNA, 32 nt, Homo Sapiens
aggggaggggagaaucgaggacggacggccua

SEQ ID NO: 356267 - RNA, 32 nt, Homo Sapiens
uuacugccuucuuuaugggaacccucuuuuua

SEQ ID NO: 356268 - RNA, 32 nt, Homo Sapiens
acacauguuguccugccccuggcaauaaaggc

SEQ ID NO: 356269 - RNA, 32 nt, Homo Sapiens
caccccuuucccuuccucucuauuuauaaggu

SEQ ID NO: 356270 - RNA, 32 nt, Homo Sapiens
cucaagcugacuuccuaccucccccuccaucu

SEQ ID NO: 356271 - RNA, 32 nt, Homo Sapiens
uaaaaacgagaaaaacaaaaugaaagagggga

SEQ ID NO: 356272 - RNA, 32 nt, Homo Sapiens
gaugaccugugcucugcaggggaaaccagaag

SEQ ID NO: 356273 - RNA, 30 nt, Homo Sapiens
gccgccguuauauuugcagaagcuuugaga

SEQ ID NO: 356274 - RNA, 32 nt, Homo Sapiens
uuuuugccaauaagagcuggcuuuucugccau

SEQ ID NO: 356275 - RNA, 32 nt, Homo Sapiens
cggcgccggacccugcgacaaccggggucccc

SEQ ID NO: 356276 - RNA, 32 nt, Homo Sapiens
uugguacagaaauuauuaaagaacacucaaaa

SEQ ID NO: 356277 - RNA, 32 nt, Homo Sapiens
ucaauaaauagcaaaccugguccuuuuuaaga

SEQ ID NO: 356278 - RNA, 32 nt, Homo Sapiens
caaccggucuugcugucucacccaggcuggag

SEQ ID NO: 356279 - RNA, 32 nt, Homo Sapiens
ucaccaucugggcaaucauuuauuuuccuuga

SEQ ID NO: 356280 - RNA, 32 nt, Homo Sapiens
ggcagccgcgcuaggcuccggcguguggccgc

SEQ ID NO: 356281 - RNA, 32 nt, Homo Sapiens
uguucauguaaauuuugaauacauucauacau

SEQ ID NO: 356282 - RNA, 32 nt, Homo Sapiens
agcaaaaaacucaagagggggaacugaaaauu

SEQ ID NO: 356283 - RNA, 32 nt, Homo Sapiens
uuguccgggccacuccucccuuccuuuccacu

SEQ ID NO: 356284 - RNA, 32 nt, Homo Sapiens
cggcggcggcagcagcagcagcagcaggagac

SEQ ID NO: 356285 - RNA, 32 nt, Homo Sapiens
uuugcucacuguccuggaguggcaccggccuc

SEQ ID NO: 356286 - RNA, 32 nt, Homo Sapiens
ggcacccggcggguccugaggguguggacauc

SEQ ID NO: 356287 - RNA, 32 nt, Homo Sapiens
gaaaagaagaacacauaccaaaaaagacauau

SEQ ID NO: 356288 - RNA, 32 nt, Homo Sapiens
uuuaaggacuaucccugagaccauccuucuca

SEQ ID NO: 356289 - RNA, 32 nt, Homo Sapiens
guuuccagccuggugccuggggugcugagcua

SEQ ID NO: 356290 - RNA, 32 nt, Homo Sapiens
ccuccagcaccuguaggaacucccggaagagc

SEQ ID NO: 356291 - RNA, 32 nt, Homo Sapiens
aguguggcuuugugauugcugcccuaaaggag

SEQ ID NO: 356292 - RNA, 32 nt, Homo Sapiens
acacuuuauuauauuucacuuauagaccugau

SEQ ID NO: 356293 - RNA, 32 nt, Homo Sapiens
aggggccgccgggaucaucccgcccagucgag

SEQ ID NO: 356294 - RNA, 27 nt, Homo Sapiens
cgauggcgcugcucgccuugcugcugg

SEQ ID NO: 356295 - RNA, 32 nt, Homo Sapiens
agucaccaggguucuccauuccaagugagugu

SEQ ID NO: 356296 - RNA, 32 nt, Homo Sapiens
aaaaguuuuuaaaaauaugguagaauccuucu

SEQ ID NO: 356297 - RNA, 32 nt, Homo Sapiens
ggauuaugaaucagugcguggagccgcgcggc

SEQ ID NO: 356298 - RNA, 32 nt, Homo Sapiens
ggguacaaucaagugauauuuuguagcaccuc

SEQ ID NO: 356299 - RNA, 32 nt, Homo Sapiens
uccccauuccauucaacaggcacauguuugaa

SEQ ID NO: 356300 - RNA, 32 nt, Homo Sapiens
cgagaccaacaacaacgauguggccauccugc

SEQ ID NO: 356301 - RNA, 32 nt, Homo Sapiens
uuaccaaaaaauacauaacucuuccuuguagg

SEQ ID NO: 356302 - RNA, 32 nt, Homo Sapiens
caccggcccgucuguccacuguccuggcuugu

SEQ ID NO: 356303 - RNA, 32 nt, Homo Sapiens
gcuggccaauagaaaaagcucccgcggagagg

SEQ ID NO: 356304 - RNA, 32 nt, Homo Sapiens
gaccuccaaaaaaggaccaguuccucggaugu

SEQ ID NO: 356305 - RNA, 32 nt, Homo Sapiens
accugucugugccucaguuuccucaccagaaa

SEQ ID NO: 356306 - RNA, 32 nt, Homo Sapiens
accuggauuggaaacaugcucuguaaaggguc

SEQ ID NO: 356307 - RNA, 32 nt, Homo Sapiens
aguccaaaggcgucugcauuguuuccuuucuu

SEQ ID NO: 356308 - RNA, 32 nt, Homo Sapiens
ggaguuuggagaacugguuucugucuaauccu

SEQ ID NO: 356309 - RNA, 32 nt, Homo Sapiens
cugccagauccgccggccgcggaccggggcug

SEQ ID NO: 356310 - RNA, 32 nt, Homo Sapiens
uuuuuguauuuuuauagagauaggguuucacc

SEQ ID NO: 356311 - RNA, 32 nt, Homo Sapiens
uauaugaaaaccuauucuggucuaaauugugu

SEQ ID NO: 356312 - RNA, 32 nt, Homo Sapiens
ucaguauacacaugauuagaaacuuuagaaac

SEQ ID NO: 356313 - RNA, 32 nt, Homo Sapiens
uuaauuugucuuguuuguaaacguaugcaaua

SEQ ID NO: 356314 - RNA, 32 nt, Homo Sapiens
gaggguuuuguggugccuggagccuguguccu

SEQ ID NO: 356315 - RNA, 32 nt, Homo Sapiens
gcaacuuccgccuccuggguucaagcaauucu

SEQ ID NO: 356316 - RNA, 30 nt, Homo Sapiens
ccugcaggcaggcuugaugggagcgcccag

SEQ ID NO: 356317 - RNA, 32 nt, Homo Sapiens
caacaguggggagcuuccucagcgauccuggg

SEQ ID NO: 356318 - RNA, 32 nt, Homo Sapiens
uuuccuccaggccgacaaggaguuguagaaug

SEQ ID NO: 356319 - RNA, 28 nt, Homo Sapiens
uauagauguuggaacauuaagaaaaaug

SEQ ID NO: 356320 - RNA, 32 nt, Homo Sapiens
ccagucagcuccugggguugcgccaggcgccc

SEQ ID NO: 356321 - RNA, 32 nt, Homo Sapiens
agcuaugaucagaagacuuuaauuauauauuu

SEQ ID NO: 356322 - RNA, 32 nt, Homo Sapiens
gaaacgggcugccgugggguguguguaggcuu

SEQ ID NO: 356323 - RNA, 32 nt, Homo Sapiens
gauacauccccucccccugcuggggccucagu

SEQ ID NO: 356324 - RNA, 32 nt, Homo Sapiens
agugguucuuugauuaaggagcucuauuucuu

SEQ ID NO: 356325 - RNA, 32 nt, Homo Sapiens
uaguucuuguuuucauguuuuauuuuuaaaaa

SEQ ID NO: 356326 - RNA, 32 nt, Homo Sapiens
ucgugaacaccuguguaaccacugccaaagug

SEQ ID NO: 356327 - RNA, 32 nt, Homo Sapiens
uaugccacugucuuguuaccaauuagacaucu

SEQ ID NO: 356328 - RNA, 32 nt, Homo Sapiens
gcacuagaauaaagagggacaacaaaauacac

SEQ ID NO: 356329 - RNA, 32 nt, Homo Sapiens
cugucccgccgccgcuggcccagacugagagc

SEQ ID NO: 356330 - RNA, 32 nt, Homo Sapiens
uauuuaucaaggauuauccaucuugcuaaugg

SEQ ID NO: 356331 - RNA, 32 nt, Homo Sapiens
auccccuuccucagcccucccagccuacuccc

SEQ ID NO: 356332 - RNA, 32 nt, Homo Sapiens
aaguauauuuaggauauacauguucaauuugu

SEQ ID NO: 356333 - RNA, 32 nt, Homo Sapiens
aaaaauauuguuaagugugccaguuauuuaaa

SEQ ID NO: 356334 - RNA, 28 nt, Homo Sapiens
ggaauguggguguggccgaggugauggc

SEQ ID NO: 356335 - RNA, 32 nt, Homo Sapiens
ccaccugguccucccccuucccaugcugccaa

SEQ ID NO: 356336 - RNA, 31 nt, Homo Sapiens
gguucgggggcggugcuaggccccgaggcug

SEQ ID NO: 356337 - RNA, 32 nt, Homo Sapiens
cccugcuggccgugcccggcgcccggcgagag

SEQ ID NO: 356338 - RNA, 32 nt, Homo Sapiens
gucggcggccccugcgggcgccagucagcuuu

SEQ ID NO: 356339 - RNA, 32 nt, Homo Sapiens
acauuuugauaaaauggcaacaaaaugcagac

SEQ ID NO: 356340 - RNA, 32 nt, Homo Sapiens
acaccagucaacagaaguggacagggccuagg

SEQ ID NO: 356341 - RNA, 32 nt, Homo Sapiens
acacacacaaaacaaccauauucaagacacgg

SEQ ID NO: 356342 - RNA, 32 nt, Homo Sapiens
cugcccagccaggcuccuguggugcugcuggg

SEQ ID NO: 356343 - RNA, 30 nt, Homo Sapiens
uaggaggcggugcgcgcggcccggcgacgg

SEQ ID NO: 356344 - RNA, 32 nt, Homo Sapiens
ggacauggugcacuaauuucacuaccuaucca

SEQ ID NO: 356345 - RNA, 32 nt, Homo Sapiens
aaggaaauaggaggagucuagaguagacucac

SEQ ID NO: 356346 - RNA, 32 nt, Homo Sapiens
gccuuccccacuucucaccaccaccgccauca

SEQ ID NO: 356347 - RNA, 32 nt, Homo Sapiens
ucuuguuaaauuauauaagcagaaaaugcugg

SEQ ID NO: 356348 - RNA, 32 nt, Homo Sapiens
cugugugcugugguuccuggggugcccuccac

SEQ ID NO: 356349 - RNA, 32 nt, Homo Sapiens
uuuaaauuugaagaugggauguguacauguug

SEQ ID NO: 356350 - RNA, 32 nt, Homo Sapiens
cugucugcaaguggccauccccgcccccgacu

SEQ ID NO: 356351 - RNA, 32 nt, Homo Sapiens
gaaaaauucacaagcuaacuuccacuaaucca

SEQ ID NO: 356352 - RNA, 31 nt, Homo Sapiens
uggaauacauuuuaacuuaauguaaugcaua

SEQ ID NO: 356353 - RNA, 32 nt, Homo Sapiens
uaaacuugauuucucuaggagcacuccuuugg

SEQ ID NO: 356354 - RNA, 32 nt, Homo Sapiens
cuacauacguauucucuuuugucucuucauuu

SEQ ID NO: 356355 - RNA, 32 nt, Homo Sapiens
ucauguuguccuaccuaggagcagggggaggg

SEQ ID NO: 356356 - RNA, 32 nt, Homo Sapiens
ucuccucucaugguuugaaacugcaucugaau

SEQ ID NO: 356357 - RNA, 32 nt, Homo Sapiens
gagcaguggccagagccuccucugcaccucuc

SEQ ID NO: 356358 - RNA, 32 nt, Homo Sapiens
ccccaagccuucuccuuuccccucacacguga

SEQ ID NO: 356359 - RNA, 32 nt, Homo Sapiens
ggguacgguggcaugaucauggcucacugcag

SEQ ID NO: 356360 - RNA, 32 nt, Homo Sapiens
augucuccaaaaaugauugugaucaagaaucu

SEQ ID NO: 356361 - RNA, 32 nt, Homo Sapiens
uaggaaucuuccggauaaguaugaagcaauuc

SEQ ID NO: 356362 - RNA, 32 nt, Homo Sapiens
aggaugccgcuagcuccugcccggggucccua

SEQ ID NO: 356363 - RNA, 32 nt, Homo Sapiens
gaaguggucuaauagacaggaauagaaguugu

SEQ ID NO: 356364 - RNA, 32 nt, Homo Sapiens
cagagggcagugaccggcaccuucugugcguc

SEQ ID NO: 356365 - RNA, 30 nt, Homo Sapiens
ccggcaugguccaagaacuggaccuuaccc

SEQ ID NO: 356366 - RNA, 32 nt, Homo Sapiens
caggugaagaucucgggagaccaugacuaaga

SEQ ID NO: 356367 - RNA, 32 nt, Homo Sapiens
agcugcucagaaucccauaaacaucugucuua

SEQ ID NO: 356368 - RNA, 32 nt, Homo Sapiens
accucugggaugcaacuuguuggugucacgcc

SEQ ID NO: 356369 - RNA, 32 nt, Homo Sapiens
caauaaauccaacagcacauccacguucagag

SEQ ID NO: 356370 - RNA, 32 nt, Homo Sapiens
aauacuuuuuaaaaucaauuuuguugauugua

SEQ ID NO: 356371 - RNA, 32 nt, Homo Sapiens
gacauagucucacucugucacccaggcuggag

SEQ ID NO: 356372 - RNA, 32 nt, Homo Sapiens
uacauugucuuagguacuauuuauaaccuaga

SEQ ID NO: 356373 - RNA, 32 nt, Homo Sapiens
gacagggagccaggaugggaaccacggacuga

SEQ ID NO: 356374 - RNA, 32 nt, Homo Sapiens
uucuccagccucagccuccugaguagcuggga

SEQ ID NO: 356375 - RNA, 32 nt, Homo Sapiens
acuguacaguuaaucuuauuugccaucaucuu

SEQ ID NO: 356376 - RNA, 32 nt, Homo Sapiens
aaccacgggccgcccugugcccggcccaccuu

SEQ ID NO: 356377 - RNA, 32 nt, Homo Sapiens
ugcuaauacgauugauauccuggacucggcac

SEQ ID NO: 356378 - RNA, 32 nt, Homo Sapiens
ccuucagcuuugacaagaacucacggcuuccc

SEQ ID NO: 356379 - RNA, 32 nt, Homo Sapiens
aacaagaaaaauacuauuugccaugcuauuac

SEQ ID NO: 356380 - RNA, 32 nt, Homo Sapiens
gaagacacagugaccucuguggagacauggaa

SEQ ID NO: 356381 - RNA, 32 nt, Homo Sapiens
ugacgccuggccauuuuuccuguuuuaccuua

SEQ ID NO: 356382 - RNA, 32 nt, Homo Sapiens
cacuggcccagccccagccccggcccccagca

SEQ ID NO: 356383 - RNA, 30 nt, Homo Sapiens
ucaguucuggacuguggguuugugggggga

SEQ ID NO: 356384 - RNA, 32 nt, Homo Sapiens
acaacaacaacaaaacaccucugucaauguaa

SEQ ID NO: 356385 - RNA, 31 nt, Homo Sapiens
cuaggaguuaaugaucguucugggucagcuu

SEQ ID NO: 356386 - RNA, 32 nt, Homo Sapiens
gucugcccuucaccccaguggccacucagcuu

SEQ ID NO: 356387 - RNA, 32 nt, Homo Sapiens
uuaacuacgacaugccugaggacucggacacc

SEQ ID NO: 356388 - RNA, 32 nt, Homo Sapiens
cuuuuucuuaaucucugcuccuccuuugaacu

SEQ ID NO: 356389 - RNA, 32 nt, Homo Sapiens
accucuugcaguuaagccuguugucuguugua

SEQ ID NO: 356390 - RNA, 32 nt, Homo Sapiens
cucuugcccuccccaucccaccaccuuggagc

SEQ ID NO: 356391 - RNA, 30 nt, Homo Sapiens
ggaacagagaagcugucuuaagccuuguuc

SEQ ID NO: 356392 - RNA, 32 nt, Homo Sapiens
ggcccugaggcugcaccugaguaccacauccu

SEQ ID NO: 356393 - RNA, 31 nt, Homo Sapiens
cugccguuacugucuccuccaaggaguggaa

SEQ ID NO: 356394 - RNA, 32 nt, Homo Sapiens
caggcaaaaugaaaauacuuguggcauuucug

SEQ ID NO: 356395 - RNA, 32 nt, Homo Sapiens
ccugcaaaaaauuuaauauuuaaagauggugu

SEQ ID NO: 356396 - RNA, 30 nt, Homo Sapiens
aggacaggcaggccagauggccccuccacu

SEQ ID NO: 356397 - RNA, 32 nt, Homo Sapiens
aggcggugugacugcacagcgaggugccggau

SEQ ID NO: 356398 - RNA, 32 nt, Homo Sapiens
gcguggggggagcuguugcagcagcccaagcc

SEQ ID NO: 356399 - RNA, 32 nt, Homo Sapiens
agggaucaccugaaguagaggaucucauguaa

SEQ ID NO: 356400 - RNA, 32 nt, Homo Sapiens
ugagggucugggcggcgggcggcugggucugu

SEQ ID NO: 356401 - RNA, 31 nt, Homo Sapiens
uggaacuaauuauauagaggauaugucucaa

SEQ ID NO: 356402 - RNA, 32 nt, Homo Sapiens
ggccgggugcgguggcuccugccuauaauccc

SEQ ID NO: 356403 - RNA, 32 nt, Homo Sapiens
ggcagaugccgccugguccagcuaucgugcuc

SEQ ID NO: 356404 - RNA, 32 nt, Homo Sapiens
guccccccugucaccgggcagcucacccucau

SEQ ID NO: 356405 - RNA, 32 nt, Homo Sapiens
caaauuaaaaauuuucauugcuacaaaaaaaa

SEQ ID NO: 356406 - RNA, 32 nt, Homo Sapiens
gccauuuauucuguuuucugggauaauguaaa

SEQ ID NO: 356407 - RNA, 32 nt, Homo Sapiens
cacacuuggggauuaggggagugagaaaagau

SEQ ID NO: 356408 - RNA, 32 nt, Homo Sapiens
ucuggauguauuaugcuguggauauaaguuua

SEQ ID NO: 356409 - RNA, 32 nt, Homo Sapiens
ggguuacugcggccaccgccacagcagccuug

SEQ ID NO: 356410 - RNA, 32 nt, Homo Sapiens
guguuagcaaaguggaaucuaucagcauuguu

SEQ ID NO: 356411 - RNA, 32 nt, Homo Sapiens
ccaccacgugcacugugcugcugcuggcagag

SEQ ID NO: 356412 - RNA, 32 nt, Homo Sapiens
ugggugauaaccuuugaugaaaugagauaugu

SEQ ID NO: 356413 - RNA, 32 nt, Homo Sapiens
acaauccagagacaugagguccugcugggaca

SEQ ID NO: 356414 - RNA, 32 nt, Homo Sapiens
uucagaacauucaaaauaacuguuuugcuaca

SEQ ID NO: 356415 - RNA, 26 nt, Homo Sapiens
gaugaugcgcugcugccgccgccgcu

SEQ ID NO: 356416 - RNA, 32 nt, Homo Sapiens
aaaagagagaauuauuucuuucaucagagcaa

SEQ ID NO: 356417 - RNA, 32 nt, Homo Sapiens
ucaucugggacaaaacuggagaugcaucggga

SEQ ID NO: 356418 - RNA, 32 nt, Homo Sapiens
cguuggccgugguugguggggguggacguggg

SEQ ID NO: 356419 - RNA, 32 nt, Homo Sapiens
ugucaugagggugacauccgccaccugugcuc

SEQ ID NO: 356420 - RNA, 32 nt, Homo Sapiens
agugcuuuuccccagccuccccggcccugccg

SEQ ID NO: 356421 - RNA, 32 nt, Homo Sapiens
ccguguuuggggugggggagcugcuuagagac

SEQ ID NO: 356422 - RNA, 32 nt, Homo Sapiens
ucuuuuucugucuguuuugucugcuuucuuaa

SEQ ID NO: 356423 - RNA, 32 nt, Homo Sapiens
cggagggcggguggcgcgggaggaagcggcgg

SEQ ID NO: 356424 - RNA, 32 nt, Homo Sapiens
agcagagaugagagcgugggaacuguguucuu

SEQ ID NO: 356425 - RNA, 32 nt, Homo Sapiens
ugcccgccugcgccuccugagccagagccugu

SEQ ID NO: 356426 - RNA, 32 nt, Homo Sapiens
gagaaaauguagaucaaggcgagcugccuaca

SEQ ID NO: 356427 - RNA, 32 nt, Homo Sapiens
uugaccccagcagcccgagggacugucugagu

SEQ ID NO: 356428 - RNA, 32 nt, Homo Sapiens
ggagcuagagaggcaggcaagcaguuggguuc

SEQ ID NO: 356429 - RNA, 32 nt, Homo Sapiens
uggggucucgccauguugcccgggcuggucuc

SEQ ID NO: 356430 - RNA, 32 nt, Homo Sapiens
cuauuguuaguagauacaaguugaccuuucuc

SEQ ID NO: 356431 - RNA, 32 nt, Homo Sapiens
cccauuagacuguaaccuuguuuagggaaaga

SEQ ID NO: 356432 - RNA, 32 nt, Homo Sapiens
aaaguagaagcaguuuggaagaguaguuacaa

SEQ ID NO: 356433 - RNA, 32 nt, Homo Sapiens
uccguucggcccgguccggcccgaagcauggc

SEQ ID NO: 356434 - RNA, 32 nt, Homo Sapiens
gacuuuauagcacuuuuucaacuuuuugcuuu

SEQ ID NO: 356435 - RNA, 32 nt, Homo Sapiens
gccugucccucggccucggcccgggacgucua

SEQ ID NO: 356436 - RNA, 32 nt, Homo Sapiens
gauaaguguuuuucuuuuuuaaaauuggaagc

SEQ ID NO: 356437 - RNA, 32 nt, Homo Sapiens
ccgaccgcacuccagccugggcgacagagucu

SEQ ID NO: 356438 - RNA, 32 nt, Homo Sapiens
ccucacgugucccucccggccccggggccacc

SEQ ID NO: 356439 - RNA, 32 nt, Homo Sapiens
caauuuauaacucuccaagaauguacagaauu

SEQ ID NO: 356440 - RNA, 28 nt, Homo Sapiens
gggaccuggcggccgccgaucggggcug

SEQ ID NO: 356441 - RNA, 32 nt, Homo Sapiens
uuggauuuucuuaauucaacauuugaagaugu

SEQ ID NO: 356442 - RNA, 32 nt, Homo Sapiens
cccaagccugaaggggcaagaguagaagucgc

SEQ ID NO: 356443 - RNA, 32 nt, Homo Sapiens
uugaacccucuggguagggcugugcugagggg

SEQ ID NO: 356444 - RNA, 32 nt, Homo Sapiens
cggccucgcucuccgcuccccucccccgcauc

SEQ ID NO: 356445 - RNA, 32 nt, Homo Sapiens
uuucuuaaaaaaugcuugugauuugaaaaaag

SEQ ID NO: 356446 - RNA, 32 nt, Homo Sapiens
ucuacagaugaaaauuacauaaauaaaacauu

SEQ ID NO: 356447 - RNA, 32 nt, Homo Sapiens
ccuggaauaugaugaagagcaucaguggaaaa

SEQ ID NO: 356448 - RNA, 32 nt, Homo Sapiens
cgcgcgcagucggaggcggagaaggacgaaga

SEQ ID NO: 356449 - RNA, 32 nt, Homo Sapiens
gauaacaagauaccaaucuuauauuguauuuu

SEQ ID NO: 356450 - RNA, 32 nt, Homo Sapiens
aucuaguuauuuacaggaacuucaucauaauu

SEQ ID NO: 356451 - RNA, 32 nt, Homo Sapiens
uauccgcguccgcagcgccgccagccaggcga

SEQ ID NO: 356452 - RNA, 32 nt, Homo Sapiens
acugcccccuccccauccccagcccagccgag

SEQ ID NO: 356453 - RNA, 32 nt, Homo Sapiens
ccaccacagcguccuccuccucccuggagaag

SEQ ID NO: 356454 - RNA, 32 nt, Homo Sapiens
ggguuucuguugcauuucugguaacacacagu

SEQ ID NO: 356455 - RNA, 32 nt, Homo Sapiens
cuccuggccugccugcccgcccacccugggag

SEQ ID NO: 356456 - RNA, 32 nt, Homo Sapiens
aggaugagguucaaacucuacugaaauuaaag

SEQ ID NO: 356457 - RNA, 32 nt, Homo Sapiens
acagcgagcaagggacuggugccucgcuggug

SEQ ID NO: 356458 - RNA, 32 nt, Homo Sapiens
ccucaugcuauugcaauguguacaucaaaagu

SEQ ID NO: 356459 - RNA, 32 nt, Homo Sapiens
uuuauuuuuuaaaaauuauuuuuguggacuug

SEQ ID NO: 356460 - RNA, 32 nt, Homo Sapiens
cauguacccuacgagcccccagccucagagcg

SEQ ID NO: 356461 - RNA, 30 nt, Homo Sapiens
cucgcguggggcgguuaccgccggcuucag

SEQ ID NO: 356462 - RNA, 32 nt, Homo Sapiens
cuuuuagauuucaaaggagcaguuggguaaua

SEQ ID NO: 356463 - RNA, 32 nt, Homo Sapiens
cuaguaaaucaucaaaaugagaucauaagugu

SEQ ID NO: 356464 - RNA, 32 nt, Homo Sapiens
aggcuaauauuaucacuuucucagaaagucuu

SEQ ID NO: 356465 - RNA, 32 nt, Homo Sapiens
ucuuuuucuuuucuuuuuuuuagaauagcuga

SEQ ID NO: 356466 - RNA, 32 nt, Homo Sapiens
cuuggauauggccaggacccacagggacacag

SEQ ID NO: 356467 - RNA, 32 nt, Homo Sapiens
aggaggaggaggaggaaggcaaagccccugga

SEQ ID NO: 356468 - RNA, 32 nt, Homo Sapiens
uccagaaauaaagaucucaggaccccccaaaa

SEQ ID NO: 356469 - RNA, 32 nt, Homo Sapiens
cuauuagugucugauuuaggaauguaaaauga

SEQ ID NO: 356470 - RNA, 32 nt, Homo Sapiens
gugaaugaaggaagaggauucuaggcagagaa

SEQ ID NO: 356471 - RNA, 32 nt, Homo Sapiens
ucucuggggcucucgugagcuguccacccaga

SEQ ID NO: 356472 - RNA, 32 nt, Homo Sapiens
agccugaccaacacggagaaaccccgucucua

SEQ ID NO: 356473 - RNA, 32 nt, Homo Sapiens
ugcccauuauacagaugggaucaauaagguuc

SEQ ID NO: 356474 - RNA, 32 nt, Homo Sapiens
gggccuucccucgggucccuggcagaaagaca

SEQ ID NO: 356475 - RNA, 32 nt, Homo Sapiens
aguuccaaaaauacaucagcaggacuggacag

SEQ ID NO: 356476 - RNA, 32 nt, Homo Sapiens
cgggagcagggcacugugcugcugcuguggag

SEQ ID NO: 356477 - RNA, 32 nt, Homo Sapiens
gugugacauagaccugcauauuugucagugcc

SEQ ID NO: 356478 - RNA, 32 nt, Homo Sapiens
ggcguuccccaacacauucacggaguagaugc

SEQ ID NO: 356479 - RNA, 32 nt, Homo Sapiens
agaaaaagacuucugcaggaaauaggguagag

SEQ ID NO: 356480 - RNA, 32 nt, Homo Sapiens
aaagccccuccuguuugaauucuuaagguaag

SEQ ID NO: 356481 - RNA, 32 nt, Homo Sapiens
cuuuuuggguacaggcccgucuggccauuucu

SEQ ID NO: 356482 - RNA, 32 nt, Homo Sapiens
ugcccauagccaggaguuacugcacaaacacu

SEQ ID NO: 356483 - RNA, 32 nt, Homo Sapiens
gcacagucgaggagggagcgcgggacgccgag

SEQ ID NO: 356484 - RNA, 32 nt, Homo Sapiens
aucuguucuuuuuaauauuuuaucucuguuug

SEQ ID NO: 356485 - RNA, 32 nt, Homo Sapiens
gagguuucgaaagagggaaaaggaaaaaacaa

SEQ ID NO: 356486 - RNA, 32 nt, Homo Sapiens
uacugaggccuaaaaguaaacauuacucauuu

SEQ ID NO: 356487 - RNA, 32 nt, Homo Sapiens
agaggggaugggcagccuccucacaggugggc

SEQ ID NO: 356488 - RNA, 32 nt, Homo Sapiens
aacguuacagauacugaugagguguuuuaugu

SEQ ID NO: 356489 - RNA, 32 nt, Homo Sapiens
ccugauuccucuaucucccccagcccuaggca

SEQ ID NO: 356490 - RNA, 32 nt, Homo Sapiens
aacuuucagugcuggccaaaaccuggccgucu

SEQ ID NO: 356491 - RNA, 32 nt, Homo Sapiens
uaaccaugaaauugauaacaauacgcuuuugg

SEQ ID NO: 356492 - RNA, 32 nt, Homo Sapiens
uacgggagugucugaggcccaguguguuuuuu

SEQ ID NO: 356493 - RNA, 31 nt, Homo Sapiens
uggcaccugcccugccugcauccggagaauu

SEQ ID NO: 356494 - RNA, 32 nt, Homo Sapiens
agccagugguggccacgcagccuuauaaagca

SEQ ID NO: 356495 - RNA, 32 nt, Homo Sapiens
ugguuucuuuugcgguuuucuaaccaauugca

SEQ ID NO: 356496 - RNA, 32 nt, Homo Sapiens
uaucacaaacuuaaccaagcuuauuucugugu

SEQ ID NO: 356497 - RNA, 30 nt, Homo Sapiens
cugacuuuggacugcuucagucucugccau

SEQ ID NO: 356498 - RNA, 32 nt, Homo Sapiens
cacugcacuccagcccaggugacagagggaga

SEQ ID NO: 356499 - RNA, 32 nt, Homo Sapiens
ggucuggucucagaaucacuuuucccaucugu

SEQ ID NO: 356500 - RNA, 32 nt, Homo Sapiens
ugagggaacuauaaaacaaauauuuuaauucg

SEQ ID NO: 356501 - RNA, 27 nt, Homo Sapiens
uccugguccuucugcagaggccugagc

SEQ ID NO: 356502 - RNA, 32 nt, Homo Sapiens
gucuuaugacucucagaaagcuacucuagugg

SEQ ID NO: 356503 - RNA, 32 nt, Homo Sapiens
uccugccccgcgggaccacaauaaaaaccuug

SEQ ID NO: 356504 - RNA, 32 nt, Homo Sapiens
cuuccgccggugccgcggcgccucauggaagc

SEQ ID NO: 356505 - RNA, 32 nt, Homo Sapiens
uucuguaaagcacacaggagcucuuuggccaa

SEQ ID NO: 356506 - RNA, 32 nt, Homo Sapiens
ggccggacccgcggccgcguucggaaaucagc

SEQ ID NO: 356507 - RNA, 32 nt, Homo Sapiens
ccuagcugccagcgagcccaacccgcgacgac

SEQ ID NO: 356508 - RNA, 32 nt, Homo Sapiens
guauauuguagcaaaauccugaaacaaugggg

SEQ ID NO: 356509 - RNA, 32 nt, Homo Sapiens
gcuagauguuucccccuuggaguuuugucagu

SEQ ID NO: 356510 - RNA, 32 nt, Homo Sapiens
acgccaaggggagggggcugaccugugcuugg

SEQ ID NO: 356511 - RNA, 32 nt, Homo Sapiens
ggcgaggagagccauggaggaaccgggugcuc

SEQ ID NO: 356512 - RNA, 32 nt, Homo Sapiens
accuucuauuaacauuucuuuucaguuauaca

SEQ ID NO: 356513 - RNA, 32 nt, Homo Sapiens
gguuaaauaaguuagacauuugaaagaaauga

SEQ ID NO: 356514 - RNA, 32 nt, Homo Sapiens
aaacuggauuaccaggcuggugggcagcuccu

SEQ ID NO: 356515 - RNA, 32 nt, Homo Sapiens
acucaguucccccauccucuuccuccucucgc

SEQ ID NO: 356516 - RNA, 32 nt, Homo Sapiens
ugauugcaagacuauguaaaucuuuuuuuaau

SEQ ID NO: 356517 - RNA, 32 nt, Homo Sapiens
ccccccagccccacccaccccuuccuguccag

SEQ ID NO: 356518 - RNA, 32 nt, Homo Sapiens
cugugauaaaauguaauuucaacuauuuugua

SEQ ID NO: 356519 - RNA, 32 nt, Homo Sapiens
ugcggccacccccuccuccccgagcuuuccug

SEQ ID NO: 356520 - RNA, 32 nt, Homo Sapiens
agaauauugaauaagcaauccuaugauccacu

SEQ ID NO: 356521 - RNA, 32 nt, Homo Sapiens
cugcgguggggggaagguuggggggugucugg

SEQ ID NO: 356522 - RNA, 32 nt, Homo Sapiens
gccgagggagccugaggcccuagcaggugcuc

SEQ ID NO: 356523 - RNA, 32 nt, Homo Sapiens
aggcuccuccucugcuggcuuagggucagaag

SEQ ID NO: 356524 - RNA, 32 nt, Homo Sapiens
cgccuguaaucccagcacuuugggaggcgggc

SEQ ID NO: 356525 - RNA, 32 nt, Homo Sapiens
uacccaagauaaaugaaaacuuauauccacau

SEQ ID NO: 356526 - RNA, 32 nt, Homo Sapiens
ccgccacuuacccaccccggcucaagcacgac

SEQ ID NO: 356527 - RNA, 32 nt, Homo Sapiens
aguggauagauagaaugguuuuccuguuuguc

SEQ ID NO: 356528 - RNA, 32 nt, Homo Sapiens
acaaaguacaagcuauuaaaaauuagauggaa

SEQ ID NO: 356529 - RNA, 32 nt, Homo Sapiens
cuugcagcuucuggaaucaagaccaugggcac

SEQ ID NO: 356530 - RNA, 32 nt, Homo Sapiens
ucaaaauaaaaagucaucuuaaaaaccuggau

SEQ ID NO: 356531 - RNA, 31 nt, Homo Sapiens
gaccucgugaucugccugccuuggcccuccc

SEQ ID NO: 356532 - RNA, 32 nt, Homo Sapiens
cuccacaaccucacgcuagagucaagaaugga

SEQ ID NO: 356533 - RNA, 32 nt, Homo Sapiens
uuugucaacugucuuuucucugucccagcaca

SEQ ID NO: 356534 - RNA, 32 nt, Homo Sapiens
uagcuaagcuuccaagcuuaauucacguuauu

SEQ ID NO: 356535 - RNA, 32 nt, Homo Sapiens
augcaaaacgagcccagucacuugcgcggcca

SEQ ID NO: 356536 - RNA, 32 nt, Homo Sapiens
aacauucuguuguuuuaaaggaaguggguccg

SEQ ID NO: 356537 - RNA, 32 nt, Homo Sapiens
uccauauuuauguaccauauuauaccuuuuua

SEQ ID NO: 356538 - RNA, 32 nt, Homo Sapiens
uuaucugccucgggagugggaauugcugguac

SEQ ID NO: 356539 - RNA, 32 nt, Homo Sapiens
ucuguuaugcucucucguuggcaggggagcgg

SEQ ID NO: 356540 - RNA, 32 nt, Homo Sapiens
gcugccugccuugcccucacugcccacucugc

SEQ ID NO: 356541 - RNA, 32 nt, Homo Sapiens
aucuguguuacuagugccugguauguaguagg

SEQ ID NO: 356542 - RNA, 32 nt, Homo Sapiens
aacccauuuuccaccuggucuuucuugacagg

SEQ ID NO: 356543 - RNA, 32 nt, Homo Sapiens
aucccuuacauaucaucaucgacuucauacug

SEQ ID NO: 356544 - RNA, 32 nt, Homo Sapiens
uuaaagcaguauuuaaugcaauuuccaguuau

SEQ ID NO: 356545 - RNA, 32 nt, Homo Sapiens
cauguugcuuuguauaaaaaucuuauuuauaa

SEQ ID NO: 356546 - RNA, 32 nt, Homo Sapiens
auugacugaagguauguugaagaucaauaggc

SEQ ID NO: 356547 - RNA, 32 nt, Homo Sapiens
agcagcaccaucaucaccaucaccaccaacaa

SEQ ID NO: 356548 - RNA, 32 nt, Homo Sapiens
cggggacccgcggaaggggcggggcgcaccau

SEQ ID NO: 356549 - RNA, 32 nt, Homo Sapiens
aucccucaacugugucugauguuucuucucau

SEQ ID NO: 356550 - RNA, 32 nt, Homo Sapiens
ggcugcguacgucagagcugccuccgaagugg

SEQ ID NO: 356551 - RNA, 32 nt, Homo Sapiens
cugugggcacugggcuggagaacacgagccca

SEQ ID NO: 356552 - RNA, 32 nt, Homo Sapiens
gggaguuaacuggcaggcauggcaagguugca

SEQ ID NO: 356553 - RNA, 32 nt, Homo Sapiens
acuagaguugaucugaagauuauggcagaauu

SEQ ID NO: 356554 - RNA, 32 nt, Homo Sapiens
ugaagugagcugaguucgugccauuacacucc

SEQ ID NO: 356555 - RNA, 32 nt, Homo Sapiens
aaggaucuuagcugugucaucacuagcaucac

SEQ ID NO: 356556 - RNA, 29 nt, Homo Sapiens
gcauugucagugauguuccaugaaacaaa

SEQ ID NO: 356557 - RNA, 32 nt, Homo Sapiens
ugggaaacugaauaaagcaguugaucagcauc

SEQ ID NO: 356558 - RNA, 32 nt, Homo Sapiens
cuugagaaggaagaagcaggaugacagagccu

SEQ ID NO: 356559 - RNA, 32 nt, Homo Sapiens
aaggauguggaggggcagugaggccugggaga

SEQ ID NO: 356560 - RNA, 32 nt, Homo Sapiens
caaacccgugcgcgugcucggcuuugagcgau

SEQ ID NO: 356561 - RNA, 32 nt, Homo Sapiens
gacaggcagugggaaacaaaugcccuccuaag

SEQ ID NO: 356562 - RNA, 32 nt, Homo Sapiens
aaggacccgcaggcccuuguuauugccucgcu

SEQ ID NO: 356563 - RNA, 28 nt, Homo Sapiens
cuuguguuaguaauaaacgucuugccac

SEQ ID NO: 356564 - RNA, 32 nt, Homo Sapiens
ccuacugcuaguaacuauuggagcuagaauaa

SEQ ID NO: 356565 - RNA, 32 nt, Homo Sapiens
ucaugaggggagaggagacggaggggaguaga

SEQ ID NO: 356566 - RNA, 32 nt, Homo Sapiens
cggaaauaaauauaucacuuugaaagguaagg

SEQ ID NO: 356567 - RNA, 32 nt, Homo Sapiens
auggcaaguguauuuauauuguaaccacaugc

SEQ ID NO: 356568 - RNA, 32 nt, Homo Sapiens
guucucuucuaaaaagcauuucaccuuuacca

SEQ ID NO: 356569 - RNA, 32 nt, Homo Sapiens
gggcccagacacggaggcuguuuccucuccgg

SEQ ID NO: 356570 - RNA, 32 nt, Homo Sapiens
agcugagauugugccacuguauuccauccugg

SEQ ID NO: 356571 - RNA, 32 nt, Homo Sapiens
uccagccuuucugucaucaucuccacagccca

SEQ ID NO: 356572 - RNA, 32 nt, Homo Sapiens
uuacuccuguguuccugguaugcggagaauga

SEQ ID NO: 356573 - RNA, 32 nt, Homo Sapiens
uguaauccugaaacaaagaaaacuacaagcug

SEQ ID NO: 356574 - RNA, 32 nt, Homo Sapiens
aauuagauguuuuuauuuuucugugauuguac

SEQ ID NO: 356575 - RNA, 32 nt, Homo Sapiens
ucccuuuucagggguguccacaaagucaaagc

SEQ ID NO: 356576 - RNA, 32 nt, Homo Sapiens
caggcugguucuucagaggaaucaucccugac

SEQ ID NO: 356577 - RNA, 32 nt, Homo Sapiens
cuuaagagccugggcgcugcuccagcuggacg

SEQ ID NO: 356578 - RNA, 32 nt, Homo Sapiens
aucuugagggaagagggugagugaagcccagg

SEQ ID NO: 356579 - RNA, 32 nt, Homo Sapiens
guccccuuuucucaucuguggggugaacgcuu

SEQ ID NO: 356580 - RNA, 32 nt, Homo Sapiens
uggaggaauuuugucaacuacccaccugggga

SEQ ID NO: 356581 - RNA, 32 nt, Homo Sapiens
ucaaacccagacaugcugcugcugcugcugcu

SEQ ID NO: 356582 - RNA, 29 nt, Homo Sapiens
gaacauggacgaaggaauuccucauuugc

SEQ ID NO: 356583 - RNA, 32 nt, Homo Sapiens
agucagaugcagaaucagaacuucugauagaa

SEQ ID NO: 356584 - RNA, 32 nt, Homo Sapiens
agauaauuugaagcagucuuugaaaauaacaa

SEQ ID NO: 356585 - RNA, 32 nt, Homo Sapiens
ucuguaaaauuuucauaagauuccuuggcaau

SEQ ID NO: 356586 - RNA, 32 nt, Homo Sapiens
cuuucucuuccuucuuuuuuuguuuguuuguu

SEQ ID NO: 356587 - RNA, 32 nt, Homo Sapiens
aagcucccccacccccacucccggccccgguu

SEQ ID NO: 356588 - RNA, 32 nt, Homo Sapiens
cagaacauuauguacaggcacggcauaucuuc

SEQ ID NO: 356589 - RNA, 32 nt, Homo Sapiens
aaacaaauguaaauaauguuuauauuagaguu

SEQ ID NO: 356590 - RNA, 32 nt, Homo Sapiens
cuuauacaaaaauuaauuaaagauggauuaaa

SEQ ID NO: 356591 - RNA, 32 nt, Homo Sapiens
acauuuuauaauguuugucucuguaaagguaa

SEQ ID NO: 356592 - RNA, 32 nt, Homo Sapiens
ccacccugccccaccugccccuucccccuuug

SEQ ID NO: 356593 - RNA, 32 nt, Homo Sapiens
ggcaggaagggcagcaggauggcugccaagga

SEQ ID NO: 356594 - RNA, 32 nt, Homo Sapiens
cacaggcuucagcucauggguuccacccuaac

SEQ ID NO: 356595 - RNA, 32 nt, Homo Sapiens
aaagugcugaacuggcugaaguucaaguacgg

SEQ ID NO: 356596 - RNA, 32 nt, Homo Sapiens
gccauuuccagaagauuauuuuguuuuuggau

SEQ ID NO: 356597 - RNA, 32 nt, Homo Sapiens
aauuuuuucagagaauguauuuuugugcagaa

SEQ ID NO: 356598 - RNA, 32 nt, Homo Sapiens
uauuugugucauugugguuuaaauuuucaauu

SEQ ID NO: 356599 - RNA, 31 nt, Homo Sapiens
cucgggcacugaccccugccccugccugggc

SEQ ID NO: 356600 - RNA, 32 nt, Homo Sapiens
aggcuuuuagaaugcaguuucucauuugcugu

SEQ ID NO: 356601 - RNA, 32 nt, Homo Sapiens
gaagaaaauaaaauaacaaaugaaaugcgaug

SEQ ID NO: 356602 - RNA, 32 nt, Homo Sapiens
cccuccuucccucucuucugccugauagaggg

SEQ ID NO: 356603 - RNA, 32 nt, Homo Sapiens
ccgcccaggcacggccgaccccgccccgggca

SEQ ID NO: 356604 - RNA, 32 nt, Homo Sapiens
cagcugaguucgccggcccagggcaggcgggg

SEQ ID NO: 356605 - RNA, 32 nt, Homo Sapiens
cuuggggaaaggcauccagagaaggugggagc

SEQ ID NO: 356606 - RNA, 32 nt, Homo Sapiens
gggugugggaggagggaagcaggucuguccug

SEQ ID NO: 356607 - RNA, 32 nt, Homo Sapiens
uuaauucuugccuuaccuguaccucuuagugu

SEQ ID NO: 356608 - RNA, 32 nt, Homo Sapiens
uuucaacacugacagcacuuuaaaaaucuuug

SEQ ID NO: 356609 - RNA, 32 nt, Homo Sapiens
uggguaaauaaccagcagcuagguuuugaauu

SEQ ID NO: 356610 - RNA, 32 nt, Homo Sapiens
uuugaucccacuuuuccaggagaaaaaccacc

SEQ ID NO: 356611 - RNA, 32 nt, Homo Sapiens
gcaucagaaaucaugugacuguuaugauuauc

SEQ ID NO: 356612 - RNA, 32 nt, Homo Sapiens
caucagaggcugggcuuggcagaggggagggg

SEQ ID NO: 356613 - RNA, 31 nt, Homo Sapiens
ucccgagggccggugucggagaagcuuccgc

SEQ ID NO: 356614 - RNA, 32 nt, Homo Sapiens
aggcuggaguauaguggcacaaacauggcuca

SEQ ID NO: 356615 - RNA, 32 nt, Homo Sapiens
agaagcugccgcggaggaagacaggcugcggg

SEQ ID NO: 356616 - RNA, 32 nt, Homo Sapiens
ucagcucugccagccccagcggucacgcccgg

SEQ ID NO: 356617 - RNA, 31 nt, Homo Sapiens
cuuuucccacccuuaagccaaguacagggau

SEQ ID NO: 356618 - RNA, 32 nt, Homo Sapiens
cuaaaacgccccugguccggccccacucugcg

SEQ ID NO: 356619 - RNA, 32 nt, Homo Sapiens
ucaaauauaaaauauuguuauaugaguagaaa

SEQ ID NO: 356620 - RNA, 32 nt, Homo Sapiens
gguacauccaacaaaauaguuggagccacaag

SEQ ID NO: 356621 - RNA, 32 nt, Homo Sapiens
ccuauggauuugauuaauuuuaaugaaaaacu

SEQ ID NO: 356622 - RNA, 32 nt, Homo Sapiens
gcccagccgccccgucugagaagugaggagac

SEQ ID NO: 356623 - RNA, 32 nt, Homo Sapiens
acaggaucccaagagggagaucaugagccuuc

SEQ ID NO: 356624 - RNA, 32 nt, Homo Sapiens
uuauaaacugucugcuggcuuuuuccuucagu

SEQ ID NO: 356625 - RNA, 31 nt, Homo Sapiens
uaccaacaagaggaccuugaucuuggcgaaa

SEQ ID NO: 356626 - RNA, 32 nt, Homo Sapiens
auuauaaugaauuuagugagcauaggugaucc

SEQ ID NO: 356627 - RNA, 32 nt, Homo Sapiens
gcuuuugguuugggggcgcccucucugcuccu

SEQ ID NO: 356628 - RNA, 32 nt, Homo Sapiens
ucucagguaugaacagacacuuugaaacgacu

SEQ ID NO: 356629 - RNA, 32 nt, Homo Sapiens
agcagcuuuaaaacaggguaaauauucaggca

SEQ ID NO: 356630 - RNA, 32 nt, Homo Sapiens
ugcaggccacccccggccccggccccagcguu

SEQ ID NO: 356631 - RNA, 32 nt, Homo Sapiens
gaaggaggacacauuuuaauuuuuugggggga

SEQ ID NO: 356632 - RNA, 32 nt, Homo Sapiens
ccgcgggaagcucguggccgggaccccgaggc

SEQ ID NO: 356633 - RNA, 32 nt, Homo Sapiens
aauauucuggacuuaaacauuacuguaauuuu

SEQ ID NO: 356634 - RNA, 32 nt, Homo Sapiens
gacagagagccgcuacugcaugcagcuguccc

SEQ ID NO: 356635 - RNA, 32 nt, Homo Sapiens
ggcgggcaguugcaguggugcagaauggcuga

SEQ ID NO: 356636 - RNA, 32 nt, Homo Sapiens
ucuucugguggaugcuuugcucccucugagcu

SEQ ID NO: 356637 - RNA, 32 nt, Homo Sapiens
ggccugggggugccgggggccggcagcuggag

SEQ ID NO: 356638 - RNA, 32 nt, Homo Sapiens
uuugggacuauuuggaucuugucucaaugcuc

SEQ ID NO: 356639 - RNA, 32 nt, Homo Sapiens
ugaggguccuuggugccgcgggaacccuuccu

SEQ ID NO: 356640 - RNA, 32 nt, Homo Sapiens
cuuuaaaagcaaacagaaaaagauauauauau

SEQ ID NO: 356641 - RNA, 32 nt, Homo Sapiens
gucacagaagaaaaccacaaacuuguuuuauu

SEQ ID NO: 356642 - RNA, 32 nt, Homo Sapiens
agacacugaugcaugcugaaguuagcugcugc

SEQ ID NO: 356643 - RNA, 32 nt, Homo Sapiens
cuuuuuauuuuuguuuuuaaugcuuugauauu

SEQ ID NO: 356644 - RNA, 32 nt, Homo Sapiens
aggggagacagagguuucuggaugccaugaca

SEQ ID NO: 356645 - RNA, 32 nt, Homo Sapiens
gcgcggggcgggacgcugauggagcgcgccau

SEQ ID NO: 356646 - RNA, 32 nt, Homo Sapiens
agccuugacgaaugcacagaggcgcuggcaga

SEQ ID NO: 356647 - RNA, 32 nt, Homo Sapiens
ugagagacaauuuuuauuugcugcacguggaa

SEQ ID NO: 356648 - RNA, 32 nt, Homo Sapiens
uugagugugcccgugugcuccuggcgcacggc

SEQ ID NO: 356649 - RNA, 32 nt, Homo Sapiens
cuagguugguaaaaaaugagaugccguaccuc

SEQ ID NO: 356650 - RNA, 32 nt, Homo Sapiens
cuguaguuagcgcuuagugacacgcgggccuu

SEQ ID NO: 356651 - RNA, 32 nt, Homo Sapiens
gugaguccugguccaaggaucccccuggagag

SEQ ID NO: 356652 - RNA, 32 nt, Homo Sapiens
gggugggggaggucccuccugcccuaagugca

SEQ ID NO: 356653 - RNA, 32 nt, Homo Sapiens
gguguggucaguacucugugaauaucaggugu

SEQ ID NO: 356654 - RNA, 32 nt, Homo Sapiens
ugcgugcguggcagcggaagacgauucccaua

SEQ ID NO: 356655 - RNA, 28 nt, Homo Sapiens
gccucggggcggcgcaccgggagagcac

SEQ ID NO: 356656 - RNA, 32 nt, Homo Sapiens
uguuuauugcaaaauccuuucgaaauaaacag

SEQ ID NO: 356657 - RNA, 32 nt, Homo Sapiens
caugugguuuuauauacacacacacacacaca

SEQ ID NO: 356658 - RNA, 32 nt, Homo Sapiens
gaccuccaacugggaggacgucagcuuccgca

SEQ ID NO: 356659 - RNA, 32 nt, Homo Sapiens
auagccuuugugcuguucugccuugccuguga

SEQ ID NO: 356660 - RNA, 32 nt, Homo Sapiens
ccgcccugccagccccgaacuugcccgcgccu

SEQ ID NO: 356661 - RNA, 32 nt, Homo Sapiens
acugaggcgagaccgggcacgguguggcucug

SEQ ID NO: 356662 - RNA, 32 nt, Homo Sapiens
uugcucauacaaacagaucagcaugaggacag

SEQ ID NO: 356663 - RNA, 32 nt, Homo Sapiens
gugccaggcagcgaggccccccaccccuaucc

SEQ ID NO: 356664 - RNA, 32 nt, Homo Sapiens
uaggucaauaaauacauacaauuuaagaugaa

SEQ ID NO: 356665 - RNA, 32 nt, Homo Sapiens
auauaucuauagacccaccauggcacauaugg

SEQ ID NO: 356666 - RNA, 32 nt, Homo Sapiens
gggggaugggggugggggugcugcagagaaaa

SEQ ID NO: 356667 - RNA, 32 nt, Homo Sapiens
aaugaacuucuuuuuucuuuuuuuuauuauua

SEQ ID NO: 356668 - RNA, 32 nt, Homo Sapiens
uuuaaauuuuuucagugagcguggugacugca

SEQ ID NO: 356669 - RNA, 32 nt, Homo Sapiens
ugcaccuuccccacccccuccugggaagugcc

SEQ ID NO: 356670 - RNA, 32 nt, Homo Sapiens
gagacagagcgugcacacguagaguggcuagu

SEQ ID NO: 356671 - RNA, 32 nt, Homo Sapiens
aggacccuguuucucucuuugcuuuggcugcu

SEQ ID NO: 356672 - RNA, 31 nt, Homo Sapiens
ucccagagcaccugccugcccugccgaugug

SEQ ID NO: 356673 - RNA, 32 nt, Homo Sapiens
gaagggucagggcaggccaggggggugggggg

SEQ ID NO: 356674 - RNA, 32 nt, Homo Sapiens
gucaggagacagagaccauccuggccaacacg

SEQ ID NO: 356675 - RNA, 32 nt, Homo Sapiens
aaagcugccgcggaaccccgcuagugcgacca

SEQ ID NO: 356676 - RNA, 28 nt, Homo Sapiens
agaaugucaggagaggccacagucuugg

SEQ ID NO: 356677 - RNA, 32 nt, Homo Sapiens
ccccggccggcgacaaugaccacuucccugca

SEQ ID NO: 356678 - RNA, 32 nt, Homo Sapiens
cgcguccugcugaccccagccggcgccgaggg

SEQ ID NO: 356679 - RNA, 32 nt, Homo Sapiens
aggguuacaccuguagccacuugacacuaaca

SEQ ID NO: 356680 - RNA, 32 nt, Homo Sapiens
agcguugggcggcgggcgucccugagagaaau

SEQ ID NO: 356681 - RNA, 32 nt, Homo Sapiens
ucuacgggccaguccgcggugugucaauuguc

SEQ ID NO: 356682 - RNA, 32 nt, Homo Sapiens
gcuauuauaacccuugcuuuuuauggguuaug

SEQ ID NO: 356683 - RNA, 32 nt, Homo Sapiens
aaucagacauuuacaagaagcaucagcagcca

SEQ ID NO: 356684 - RNA, 32 nt, Homo Sapiens
uaugugauugguuucaaggaaauguacucuau

SEQ ID NO: 356685 - RNA, 32 nt, Homo Sapiens
gucaaggaguggggcgggguggcgggggagaa

SEQ ID NO: 356686 - RNA, 32 nt, Homo Sapiens
gugaguucuuugcauguucaaaauggaagcca

SEQ ID NO: 356687 - RNA, 32 nt, Homo Sapiens
gccccggcaggccuggcuccucacaucccagg

SEQ ID NO: 356688 - RNA, 28 nt, Homo Sapiens
cauaguggaauaaagaagguaaaccauc

SEQ ID NO: 356689 - RNA, 32 nt, Homo Sapiens
ucuuaguucgggcuucucuaacacuguaccau

SEQ ID NO: 356690 - RNA, 32 nt, Homo Sapiens
ccgggacccucaggcucagaucaguggccgag

SEQ ID NO: 356691 - RNA, 30 nt, Homo Sapiens
cacgacucugggaguggggaaacagagagc

SEQ ID NO: 356692 - RNA, 32 nt, Homo Sapiens
ggcagcucuggaggggguuugcuggggaacug

SEQ ID NO: 356693 - RNA, 32 nt, Homo Sapiens
uuuuuugcaaaacacccaccccugcccuccug

SEQ ID NO: 356694 - RNA, 31 nt, Homo Sapiens
uugaucacgcaaaagaaacgauaucagagau

SEQ ID NO: 356695 - RNA, 32 nt, Homo Sapiens
ucagucaggaggcucugugggaugcuguugcc

SEQ ID NO: 356696 - RNA, 32 nt, Homo Sapiens
aacccagcucaaccgggagugccugcugcacc

SEQ ID NO: 356697 - RNA, 32 nt, Homo Sapiens
guguccggcaucugcuggucuucauugugaaa

SEQ ID NO: 356698 - RNA, 32 nt, Homo Sapiens
agauuuggaacuguaucuguauggaaacaaca

SEQ ID NO: 356699 - RNA, 32 nt, Homo Sapiens
caggcuguguccucggugggcacugacaguga

SEQ ID NO: 356700 - RNA, 32 nt, Homo Sapiens
agguuccugggaaugccugggguucuucgauc

SEQ ID NO: 356701 - RNA, 32 nt, Homo Sapiens
agguuccucccucuccugcagaguaggcaucu

SEQ ID NO: 356702 - RNA, 32 nt, Homo Sapiens
gaaacaugaacaaaacauugaugaaauguugg

SEQ ID NO: 356703 - RNA, 32 nt, Homo Sapiens
uucuggugugugcucccgccuccuggguauac

SEQ ID NO: 356704 - RNA, 32 nt, Homo Sapiens
acauucccugcugcaccuggucugcaggggug

SEQ ID NO: 356705 - RNA, 32 nt, Homo Sapiens
auguaaauuuaggguugacuugagaucuuaau

SEQ ID NO: 356706 - RNA, 32 nt, Homo Sapiens
cuuccucccagaguccuccccacaguuccuaa

SEQ ID NO: 356707 - RNA, 32 nt, Homo Sapiens
gguuguauauaaaguuuuuuuauuucuuuugu

SEQ ID NO: 356708 - RNA, 32 nt, Homo Sapiens
ccaucguuauacaccagacaugugcuaaggac

SEQ ID NO: 356709 - RNA, 32 nt, Homo Sapiens
ccaggcccaggaguccaauuaugaaaauuuga

SEQ ID NO: 356710 - RNA, 32 nt, Homo Sapiens
guaaacugguuuaauucuuaaucuguagucag

SEQ ID NO: 356711 - RNA, 32 nt, Homo Sapiens
ggcuggcucccucuuggucuucccaggcuggg

SEQ ID NO: 356712 - RNA, 32 nt, Homo Sapiens
cauuucacacuggcgcguccccggggcugggg

SEQ ID NO: 356713 - RNA, 32 nt, Homo Sapiens
cccacuuuggagaaugguuuuguauagccucu

SEQ ID NO: 356714 - RNA, 32 nt, Homo Sapiens
uuuuguuaugaauaguuuaucuuccaaaagau

SEQ ID NO: 356715 - RNA, 32 nt, Homo Sapiens
cucagggaggacccgggcugggcaaugacugg

SEQ ID NO: 356716 - RNA, 32 nt, Homo Sapiens
uauagguggccucuccuuguggccugggccuc

SEQ ID NO: 356717 - RNA, 32 nt, Homo Sapiens
guccccugccccacaagauucaccugggccuc

SEQ ID NO: 356718 - RNA, 32 nt, Homo Sapiens
cugaagccagcuuggcuguguucucugaucua

SEQ ID NO: 356719 - RNA, 32 nt, Homo Sapiens
ugaugcugcaguuuuguuauagauagguguau

SEQ ID NO: 356720 - RNA, 32 nt, Homo Sapiens
gaaggauugugggagacacuuuuucuuuccuu

SEQ ID NO: 356721 - RNA, 32 nt, Homo Sapiens
gacucugccugccuaccuggucugggaagaug

SEQ ID NO: 356722 - RNA, 32 nt, Homo Sapiens
gcauggacaaggaaaggugaagucuggggagc

SEQ ID NO: 356723 - RNA, 32 nt, Homo Sapiens
cuuugcagaaaagggagggaggaaaggggccu

SEQ ID NO: 356724 - RNA, 32 nt, Homo Sapiens
aaguaaaguuucuucaucccaaugcauggcca

SEQ ID NO: 356725 - RNA, 32 nt, Homo Sapiens
gggggugacuguaaagaguggugcuggccccg

SEQ ID NO: 356726 - RNA, 32 nt, Homo Sapiens
gagacucuuuugcucaacauuaaauugugcuu

SEQ ID NO: 356727 - RNA, 32 nt, Homo Sapiens
auauucaaacugagucuuauugccaauuuugg

SEQ ID NO: 356728 - RNA, 32 nt, Homo Sapiens
uuccccuacucuggccucuacuccccacaccc

SEQ ID NO: 356729 - RNA, 32 nt, Homo Sapiens
cuugaaaccauagcaugcuacucuucacagug

SEQ ID NO: 356730 - RNA, 32 nt, Homo Sapiens
uuaucacccagacaugugcagaugaaauguca

SEQ ID NO: 356731 - RNA, 32 nt, Homo Sapiens
uuuguguccacuguggaaaggaccccagacug

SEQ ID NO: 356732 - RNA, 32 nt, Homo Sapiens
ccucaccucuuuguucuuccugucuccuuuga

SEQ ID NO: 356733 - RNA, 32 nt, Homo Sapiens
uuagaagcacaagcuguaaaucuaaaaggcac

SEQ ID NO: 356734 - RNA, 32 nt, Homo Sapiens
ggaacucgccaggggcgccgccggcggcggag

SEQ ID NO: 356735 - RNA, 29 nt, Homo Sapiens
ugacggcgaggacagaggaggcgcguccg

SEQ ID NO: 356736 - RNA, 32 nt, Homo Sapiens
uuaaaaauggcaagacaguuuauuuaagagca

SEQ ID NO: 356737 - RNA, 32 nt, Homo Sapiens
augugucagcuacuucauuccuguaaauacuc

SEQ ID NO: 356738 - RNA, 32 nt, Homo Sapiens
uaagugauuccuccuuuuuuuuguucaauguu

SEQ ID NO: 356739 - RNA, 32 nt, Homo Sapiens
cugauggccccggcccugcucugugcacauuu

SEQ ID NO: 356740 - RNA, 32 nt, Homo Sapiens
uuuaguucauauauauuuagagcaauacaugu

SEQ ID NO: 356741 - RNA, 32 nt, Homo Sapiens
ucagcaugggggugggguggucacacagucca

SEQ ID NO: 356742 - RNA, 29 nt, Homo Sapiens
guuuuccuguccucuagaggcaagccagg

SEQ ID NO: 356743 - RNA, 32 nt, Homo Sapiens
ugaaaacagggccagcagacuccauggcccaa

SEQ ID NO: 356744 - RNA, 32 nt, Homo Sapiens
ugcgccggaucugggcgaccacguuuugccuc

SEQ ID NO: 356745 - RNA, 32 nt, Homo Sapiens
cuguuaguaggucugcgccuggugucugccuc

SEQ ID NO: 356746 - RNA, 32 nt, Homo Sapiens
ugucccgcugcggcuccgcggcgauggccacc

SEQ ID NO: 356747 - RNA, 32 nt, Homo Sapiens
gacaaugacaacauggaggggagucauggcca

SEQ ID NO: 356748 - RNA, 32 nt, Homo Sapiens
aaugaaaggcugcagugccaguuuuaagaaag

SEQ ID NO: 356749 - RNA, 32 nt, Homo Sapiens
ggugugugaacuuuuuaaaauaaacacaaaaa

SEQ ID NO: 356750 - RNA, 32 nt, Homo Sapiens
caguccuugacaaggaaucuccuuuauacaag

SEQ ID NO: 356751 - RNA, 32 nt, Homo Sapiens
gcaugcgggggaagagaacugacccagguaau

SEQ ID NO: 356752 - RNA, 32 nt, Homo Sapiens
caauaccuacaauaaacugguaugaauaauug

SEQ ID NO: 356753 - RNA, 32 nt, Homo Sapiens
cggcuuguuauucuuaaaauggcgccgcuaga

SEQ ID NO: 356754 - RNA, 32 nt, Homo Sapiens
cgauaccuagcgcaggccucucuucuuguuac

SEQ ID NO: 356755 - RNA, 32 nt, Homo Sapiens
uguggagaugaggaaauugaggcacagagauu

SEQ ID NO: 356756 - RNA, 32 nt, Homo Sapiens
ccuauaucccuugccgcaccuggugggcccuc

SEQ ID NO: 356757 - RNA, 32 nt, Homo Sapiens
aacagagacuuccugcaucuucugccuuucca

SEQ ID NO: 356758 - RNA, 32 nt, Homo Sapiens
cgugcaggacaaacgggagcggaagagagggc

SEQ ID NO: 356759 - RNA, 32 nt, Homo Sapiens
ggggacaguggccaggaggcgagggcagcacu

SEQ ID NO: 356760 - RNA, 32 nt, Homo Sapiens
uggaaauucuaccugcauuugaucuacuucca

SEQ ID NO: 356761 - RNA, 32 nt, Homo Sapiens
ucgcccaguucuugcucucucaucucauucuc

SEQ ID NO: 356762 - RNA, 32 nt, Homo Sapiens
gcccugacgugcccggcccugugguucugcgg

SEQ ID NO: 356763 - RNA, 32 nt, Homo Sapiens
gugucuaguccagcucccauggagggugggga

SEQ ID NO: 356764 - RNA, 32 nt, Homo Sapiens
auacuguaaaaugccuaggaauuaaccaaaga

SEQ ID NO: 356765 - RNA, 32 nt, Homo Sapiens
ggaggagcccucagacagcaguggcaucaacu

SEQ ID NO: 356766 - RNA, 32 nt, Homo Sapiens
ccaugguugggucuugugaagucugagguuua

SEQ ID NO: 356767 - RNA, 32 nt, Homo Sapiens
uggauauugaaauggacaguggagaugaagcc

SEQ ID NO: 356768 - RNA, 32 nt, Homo Sapiens
gacuccguauuuuauuuuuuuaaauaaaaaac

SEQ ID NO: 356769 - RNA, 32 nt, Homo Sapiens
accauccugugagccccacucccggccccacu

SEQ ID NO: 356770 - RNA, 28 nt, Homo Sapiens
uagcgggcauaggcgaagccgcgguuca

SEQ ID NO: 356771 - RNA, 32 nt, Homo Sapiens
uguggggaaguggaagggaagcuggcggggga

SEQ ID NO: 356772 - RNA, 32 nt, Homo Sapiens
cugaggaggcggcggcagcagcgccuacaccg

SEQ ID NO: 356773 - RNA, 32 nt, Homo Sapiens
acaagaagagaagaaaauauuguugaaauuaa

SEQ ID NO: 356774 - RNA, 32 nt, Homo Sapiens
ccuagugccugccucguggcugacucuugaag

SEQ ID NO: 356775 - RNA, 32 nt, Homo Sapiens
gcuuucucccgggaaccgcggcugugacccaa

SEQ ID NO: 356776 - RNA, 32 nt, Homo Sapiens
uucugaauuuaaaaugaaaauucauguccaua

SEQ ID NO: 356777 - RNA, 32 nt, Homo Sapiens
gaacaggagccccccuccacagaugucccccc

SEQ ID NO: 356778 - RNA, 32 nt, Homo Sapiens
ugcgcccccagccccagucccaggugggcaag

SEQ ID NO: 356779 - RNA, 32 nt, Homo Sapiens
cuguaaaaugaacaauaaaauaaagcauauag

SEQ ID NO: 356780 - RNA, 32 nt, Homo Sapiens
uacauauauacacauaacauccaauuaugacu

SEQ ID NO: 356781 - RNA, 32 nt, Homo Sapiens
ugguuugcaggucagccuccucucccuagugu

SEQ ID NO: 356782 - RNA, 32 nt, Homo Sapiens
ccgccgacccgcccgccggcucgcccgccagc

SEQ ID NO: 356783 - RNA, 32 nt, Homo Sapiens
gagccaccacacccggccccccuucaauuuua

SEQ ID NO: 356784 - RNA, 32 nt, Homo Sapiens
ccggccaggcagcugggaccagaaugcaaccc

SEQ ID NO: 356785 - RNA, 32 nt, Homo Sapiens
agauuaguucugccagucuuggagacaggcau

SEQ ID NO: 356786 - RNA, 32 nt, Homo Sapiens
uauuuugauguaggcuuuuguauacuguguuu

SEQ ID NO: 356787 - RNA, 32 nt, Homo Sapiens
aucaaguggaggcggaggaggaggcggaggag

SEQ ID NO: 356788 - RNA, 32 nt, Homo Sapiens
aaucucucuauggauucccucaucuccugcca

SEQ ID NO: 356789 - RNA, 32 nt, Homo Sapiens
cuguaccagguggugacuguuuaacucuuugg

SEQ ID NO: 356790 - RNA, 32 nt, Homo Sapiens
gcagaggaggacuuaguuuuucauauguguuu

SEQ ID NO: 356791 - RNA, 32 nt, Homo Sapiens
aggaguccugcagcgcacccagccccuacccc

SEQ ID NO: 356792 - RNA, 32 nt, Homo Sapiens
acuaaugcauggagcuucucauuugucuucag

SEQ ID NO: 356793 - RNA, 32 nt, Homo Sapiens
ccuggguaacaagcacaaaacugucucaaaaa

SEQ ID NO: 356794 - RNA, 32 nt, Homo Sapiens
ccuguggauccugcaauccuucugccccaaaa

SEQ ID NO: 356795 - RNA, 32 nt, Homo Sapiens
uuggagaucagccucaccuucucccaucccag

SEQ ID NO: 356796 - RNA, 32 nt, Homo Sapiens
cgugugcgcuggcacacaugggugcugggugu

SEQ ID NO: 356797 - RNA, 32 nt, Homo Sapiens
gcccuccccgcucuccuuccugggcgagcugc

SEQ ID NO: 356798 - RNA, 32 nt, Homo Sapiens
ugcugagcccgcuccggccgggacgaugguga

SEQ ID NO: 356799 - RNA, 32 nt, Homo Sapiens
aaaggaacuggaugucuuuuuaauuuugagca

SEQ ID NO: 356800 - RNA, 32 nt, Homo Sapiens
aggaccugccccccacucugcacagccuagac

SEQ ID NO: 356801 - RNA, 32 nt, Homo Sapiens
uguuuugcuuugcuuguugugaauuaaaaugg

SEQ ID NO: 356802 - RNA, 32 nt, Homo Sapiens
gugaguuucaguucuuuuuuucuuuuuuuuga

SEQ ID NO: 356803 - RNA, 32 nt, Homo Sapiens
auauaugauuuuuaaacuauuuccuggguugc

SEQ ID NO: 356804 - RNA, 32 nt, Homo Sapiens
uaacacagcucuuuuuauauggcaugguuccu

SEQ ID NO: 356805 - RNA, 32 nt, Homo Sapiens
gcgggacuguaggcccgggggcuccgccucgu

SEQ ID NO: 356806 - RNA, 32 nt, Homo Sapiens
agaaccuccccucccccgccggggccugggcg

SEQ ID NO: 356807 - RNA, 32 nt, Homo Sapiens
caggcuuggggauucucugacagugaccaccg

SEQ ID NO: 356808 - RNA, 32 nt, Homo Sapiens
ugcggacgacugggggcgccaugauggucgag

SEQ ID NO: 356809 - RNA, 32 nt, Homo Sapiens
cggcgaccgcugaccgagcccggcgccccagg

SEQ ID NO: 356810 - RNA, 32 nt, Homo Sapiens
ccugacacuauaaggcuguguaaauuguaaau

SEQ ID NO: 356811 - RNA, 27 nt, Homo Sapiens
ccaguggccucuuucagcccagcccag

SEQ ID NO: 356812 - RNA, 30 nt, Homo Sapiens
ugccgugucuguguagaaagaaguagacau

SEQ ID NO: 356813 - RNA, 32 nt, Homo Sapiens
acccacugugcgacauuuggccugcagaauag

SEQ ID NO: 356814 - RNA, 29 nt, Homo Sapiens
aauuaugaauuucaaaguaucuuacaaau

SEQ ID NO: 356815 - RNA, 32 nt, Homo Sapiens
cccaacaguuccacccaaaccuccugacacau

SEQ ID NO: 356816 - RNA, 31 nt, Homo Sapiens
gaguuaauaaaaccucuuuccuuuauaaauu

SEQ ID NO: 356817 - RNA, 32 nt, Homo Sapiens
caagcuuggugguugugaguccauucaucuau

SEQ ID NO: 356818 - RNA, 32 nt, Homo Sapiens
gcgauacacugcauuugcuggugcuauuuuua

SEQ ID NO: 356819 - RNA, 32 nt, Homo Sapiens
ccugggagcggacagggaugcaaccaacgacg

SEQ ID NO: 356820 - RNA, 32 nt, Homo Sapiens
uugccuuucagaucuuaacagagcagcagggc

SEQ ID NO: 356821 - RNA, 32 nt, Homo Sapiens
ugacgaugaugaugaugacuauugcuauggca

SEQ ID NO: 356822 - RNA, 32 nt, Homo Sapiens
ccgggcgcgggcgggggucgugugcuuggagg

SEQ ID NO: 356823 - RNA, 32 nt, Homo Sapiens
ccuccuccccacccucaugacugggaaggaag

SEQ ID NO: 356824 - RNA, 32 nt, Homo Sapiens
cuuauauccucccacacuaagguuccccuggc

SEQ ID NO: 356825 - RNA, 31 nt, Homo Sapiens
gaaacuaacauaucgagcagccagcugugug

SEQ ID NO: 356826 - RNA, 32 nt, Homo Sapiens
aaugggaaaaagaaggagacuaaacuuuauac

SEQ ID NO: 356827 - RNA, 32 nt, Homo Sapiens
uggcugcccuccccagaccaccccggcagccu

SEQ ID NO: 356828 - RNA, 32 nt, Homo Sapiens
ucgcguuucaggaaacaaacaaacaaaaaaaa

SEQ ID NO: 356829 - RNA, 32 nt, Homo Sapiens
caguuguggggauauuaagggaaacuuuccuc

SEQ ID NO: 356830 - RNA, 32 nt, Homo Sapiens
acauugaaaaauuuaucaagaauuuaaaggau

SEQ ID NO: 356831 - RNA, 32 nt, Homo Sapiens
aacgggauugaaaaagauuugauggagaggaa

SEQ ID NO: 356832 - RNA, 32 nt, Homo Sapiens
augugcagugcaacuuuuuuuuuuuuuugaga

SEQ ID NO: 356833 - RNA, 32 nt, Homo Sapiens
ugaaagcgccuggcgggcagccggcgaugccc

SEQ ID NO: 356834 - RNA, 32 nt, Homo Sapiens
uguccccuggaacaaaucacugacaucuacaa

SEQ ID NO: 356835 - RNA, 32 nt, Homo Sapiens
gcugcauguccgcuccucugugugcucucacu

SEQ ID NO: 356836 - RNA, 32 nt, Homo Sapiens
gaguaccaguuuuaaauugcccauuggcauuu

SEQ ID NO: 356837 - RNA, 32 nt, Homo Sapiens
aaaacuuuuccacaguuuuacauucauguggu

SEQ ID NO: 356838 - RNA, 32 nt, Homo Sapiens
gccgucgcagacucgccgcgggagccccagcc

SEQ ID NO: 356839 - RNA, 32 nt, Homo Sapiens
gugcuuucuuaccaugaauagaugaaaacuug

SEQ ID NO: 356840 - RNA, 32 nt, Homo Sapiens
ugcuauuucacugacacaauuguuaugguaua

SEQ ID NO: 356841 - RNA, 32 nt, Homo Sapiens
caaucugggggcuuguuuuucuuuucuucuuu

SEQ ID NO: 356842 - RNA, 32 nt, Homo Sapiens
cauguauugugaccgugcggcuccaccucuuc

SEQ ID NO: 356843 - RNA, 32 nt, Homo Sapiens
uccgagaagugccucucauuucuggggaguug

SEQ ID NO: 356844 - RNA, 32 nt, Homo Sapiens
guuaaugauuauucuuuuuauugcaaguauuu

SEQ ID NO: 356845 - RNA, 32 nt, Homo Sapiens
aaggauaaugagaaacuucacaauggcaccau

SEQ ID NO: 356846 - RNA, 32 nt, Homo Sapiens
ccgaccucaaccccaacaagacccugcugcca

SEQ ID NO: 356847 - RNA, 32 nt, Homo Sapiens
uguuugcugagggcuuccugugccagagccca

SEQ ID NO: 356848 - RNA, 32 nt, Homo Sapiens
gacuguauuuauauuucauacuuauauuguuu

SEQ ID NO: 356849 - RNA, 32 nt, Homo Sapiens
gauccccugcuacuccacugaccuggaagagc

SEQ ID NO: 356850 - RNA, 32 nt, Homo Sapiens
gagugagugguccuuuggucaaugaaaacuug

SEQ ID NO: 356851 - RNA, 32 nt, Homo Sapiens
uagugaugacuguuuugguuugaaaugaacag

SEQ ID NO: 356852 - RNA, 32 nt, Homo Sapiens
uuguaaauuuuuuaagguucuuguguauauuu

SEQ ID NO: 356853 - RNA, 29 nt, Homo Sapiens
uggauuagauguuuucauuuucuaauuuu

SEQ ID NO: 356854 - RNA, 32 nt, Homo Sapiens
auaguguuuguucugaauguugguagacccuu

SEQ ID NO: 356855 - RNA, 32 nt, Homo Sapiens
uggaagaacaauuucuaugaauuuucucuuua

SEQ ID NO: 356856 - RNA, 32 nt, Homo Sapiens
acaucagcccugaguucuugaguccacccaac

SEQ ID NO: 356857 - RNA, 32 nt, Homo Sapiens
guggaaagcauuucuuuuuaaguuaucguaac

SEQ ID NO: 356858 - RNA, 32 nt, Homo Sapiens
gagcucccacccaggauugucaccuucacccc

SEQ ID NO: 356859 - RNA, 32 nt, Homo Sapiens
acaccauugcuuggcguauccuugaggaccuc

SEQ ID NO: 356860 - RNA, 32 nt, Homo Sapiens
ugccauuggccauggccauggcaacaugcuca

SEQ ID NO: 356861 - RNA, 32 nt, Homo Sapiens
aauaugcacuguaaaggguggggugauguggc

SEQ ID NO: 356862 - RNA, 32 nt, Homo Sapiens
gauucuuaguccaaagauuuccaauuagggag

SEQ ID NO: 356863 - RNA, 32 nt, Homo Sapiens
uggaggaggggaggcggcgaggaggcgcagcu

SEQ ID NO: 356864 - RNA, 32 nt, Homo Sapiens
uuuaauaaugauagcaaagacaauggugagaa

SEQ ID NO: 356865 - RNA, 32 nt, Homo Sapiens
cgaugcauaaagucagccuguucaaagugcuc

SEQ ID NO: 356866 - RNA, 32 nt, Homo Sapiens
caccagcccuuaaagugucggccgcucuguga

SEQ ID NO: 356867 - RNA, 26 nt, Homo Sapiens
gauggcgggaggaggcgggaguagcg

SEQ ID NO: 356868 - RNA, 32 nt, Homo Sapiens
aaaauauauaaaagugaauuaaauaagcacau

SEQ ID NO: 356869 - RNA, 32 nt, Homo Sapiens
acccccggggcaagcucagugacuauuauaug

SEQ ID NO: 356870 - RNA, 32 nt, Homo Sapiens
gugcgcgcgggccgggugcgcgccacgcucuu

SEQ ID NO: 356871 - RNA, 32 nt, Homo Sapiens
aauauauauuuaccaaaaaauuuugugacauu

SEQ ID NO: 356872 - RNA, 32 nt, Homo Sapiens
guuccuucuugcccugaccccagcccgugcag

SEQ ID NO: 356873 - RNA, 32 nt, Homo Sapiens
uugauuuguucaaagaaugaugaaucacuuag

SEQ ID NO: 356874 - RNA, 32 nt, Homo Sapiens
aauacauugguagucucuaugacuuguagcaa

SEQ ID NO: 356875 - RNA, 32 nt, Homo Sapiens
ucuccacuucucaccugccauccacgcccugc

SEQ ID NO: 356876 - RNA, 32 nt, Homo Sapiens
ccucagcccagcagccucuagagcagcguggu

SEQ ID NO: 356877 - RNA, 32 nt, Homo Sapiens
cggggcgggucguccagcugugcuccuggggc

SEQ ID NO: 356878 - RNA, 32 nt, Homo Sapiens
gggcucuagggcugcucgcugcugcuguggcc

SEQ ID NO: 356879 - RNA, 32 nt, Homo Sapiens
uugucuguccagccgugugugcaugugccgag

SEQ ID NO: 356880 - RNA, 32 nt, Homo Sapiens
ugcaggccucugcuccuugucuuucuuaccug

SEQ ID NO: 356881 - RNA, 32 nt, Homo Sapiens
ugaauggaagcaggcugagaguagccaaagag

SEQ ID NO: 356882 - RNA, 32 nt, Homo Sapiens
gggaagaggcgagagggcuguggaggagcucg

SEQ ID NO: 356883 - RNA, 32 nt, Homo Sapiens
guucaggguccuuagugagccuggacagagca

SEQ ID NO: 356884 - RNA, 32 nt, Homo Sapiens
aagguuuggggagagggggguaucaggcaggg

SEQ ID NO: 356885 - RNA, 32 nt, Homo Sapiens
ugccgccgcuccuccugcagccgcccguaggu

SEQ ID NO: 356886 - RNA, 32 nt, Homo Sapiens
gcgcccggggagggggcgcccggcuuggaauu

SEQ ID NO: 356887 - RNA, 32 nt, Homo Sapiens
acugcaucuuucaaacaaaaauauugauuucu

SEQ ID NO: 356888 - RNA, 32 nt, Homo Sapiens
cuguuucuccugcggcagggcagucgcugcug

SEQ ID NO: 356889 - RNA, 32 nt, Homo Sapiens
uuucuaccaauauucuaggcaugagaauaccu

SEQ ID NO: 356890 - RNA, 32 nt, Homo Sapiens
ccgauggcaggugccuagggggugugggguuc

SEQ ID NO: 356891 - RNA, 32 nt, Homo Sapiens
gucacagcugggcuuccacaggucagaauaug

SEQ ID NO: 356892 - RNA, 32 nt, Homo Sapiens
agaacacugagauauugggacacacaucaaaa

SEQ ID NO: 356893 - RNA, 32 nt, Homo Sapiens
caguccuuauucaaauuuauaaguuguugcuc

SEQ ID NO: 356894 - RNA, 32 nt, Homo Sapiens
gauggcggccccaccccaacuaccaccucuuu

SEQ ID NO: 356895 - RNA, 32 nt, Homo Sapiens
uccacagaggugguccaugcauuucugcuucc

SEQ ID NO: 356896 - RNA, 32 nt, Homo Sapiens
agguccucacgcccagcuccgcccccucacgc

SEQ ID NO: 356897 - RNA, 32 nt, Homo Sapiens
cuuauaaaaugaaauaaugcauguaaugaugc

SEQ ID NO: 356898 - RNA, 32 nt, Homo Sapiens
gcgcucuuaguggaggucagugauuggcugug

SEQ ID NO: 356899 - RNA, 28 nt, Homo Sapiens
acugcaguuacagaaucugaugaagcga

SEQ ID NO: 356900 - RNA, 32 nt, Homo Sapiens
ugcccagagaugccuccaccgcugccuaagug

SEQ ID NO: 356901 - RNA, 32 nt, Homo Sapiens
auaacuguuugguauuugaugcagaugagaga

SEQ ID NO: 356902 - RNA, 32 nt, Homo Sapiens
caccguuccuuccaaucccuccacucggguuc

SEQ ID NO: 356903 - RNA, 32 nt, Homo Sapiens
ucugcuaauguuuuauauuuauauuuuuguau

SEQ ID NO: 356904 - RNA, 29 nt, Homo Sapiens
uaagaauaaaguuggauguucuuuuucug

SEQ ID NO: 356905 - RNA, 32 nt, Homo Sapiens
ccuggcacggcggcgccgcggacuccaccauc

SEQ ID NO: 356906 - RNA, 32 nt, Homo Sapiens
aaucuggaucucugcccccagccccuauccuc

SEQ ID NO: 356907 - RNA, 32 nt, Homo Sapiens
ugccagcugcuucugcccaccccgccucuggg

SEQ ID NO: 356908 - RNA, 32 nt, Homo Sapiens
auuuccucuaaagaaacuuggcuggaauuucu

SEQ ID NO: 356909 - RNA, 32 nt, Homo Sapiens
cuuggcgccucccugggccucuuacucuaugc

SEQ ID NO: 356910 - RNA, 32 nt, Homo Sapiens
aagcugcuguccuuccaccaccagcaccggac

SEQ ID NO: 356911 - RNA, 32 nt, Homo Sapiens
agucccucaaggggccauccugucccaccaug

SEQ ID NO: 356912 - RNA, 26 nt, Homo Sapiens
cauggcgggggccgcagcgggcggca

SEQ ID NO: 356913 - RNA, 32 nt, Homo Sapiens
uccgggcggggacggagcucggcgugcuugcu

SEQ ID NO: 356914 - RNA, 32 nt, Homo Sapiens
cuggaagaagaugcuugcaucuguggaaucug

SEQ ID NO: 356915 - RNA, 32 nt, Homo Sapiens
ucggcuguguauuggggcgcguggaggcugca

SEQ ID NO: 356916 - RNA, 32 nt, Homo Sapiens
ucucuauggccuugagaagcaguuggagagac

SEQ ID NO: 356917 - RNA, 32 nt, Homo Sapiens
ggauuccagcucauaauaaguacucuauauca

SEQ ID NO: 356918 - RNA, 32 nt, Homo Sapiens
guuagggugugggaaaaugcuauauuaauaaa

SEQ ID NO: 356919 - RNA, 32 nt, Homo Sapiens
cucacugcaagccccaccuucugaguucacgc

SEQ ID NO: 356920 - RNA, 32 nt, Homo Sapiens
acgaguccccgagaccccgggcugccuucuug

SEQ ID NO: 356921 - RNA, 32 nt, Homo Sapiens
cuuuccaucuaccaaauggguguaauaauacu

SEQ ID NO: 356922 - RNA, 32 nt, Homo Sapiens
ggaaacgccaagacauagaaaaccacgcuuuu

SEQ ID NO: 356923 - RNA, 32 nt, Homo Sapiens
aggcagaagggagagugaugcacgaugggcaa

SEQ ID NO: 356924 - RNA, 32 nt, Homo Sapiens
agaggaaagggaggggugccccagaggcacca

SEQ ID NO: 356925 - RNA, 32 nt, Homo Sapiens
ccccaccaugccgcgggccccggcgccgcugu

SEQ ID NO: 356926 - RNA, 32 nt, Homo Sapiens
cggcaggaugaccagccccgcggccgcucaaa

SEQ ID NO: 356927 - RNA, 32 nt, Homo Sapiens
uggcuucuguaaaccgccagguagaagaguua

SEQ ID NO: 356928 - RNA, 32 nt, Homo Sapiens
aaguccccagaccugcuuucccggcccggcug

SEQ ID NO: 356929 - RNA, 31 nt, Homo Sapiens
gccuccccccacugccuguccccguccccac

SEQ ID NO: 356930 - RNA, 32 nt, Homo Sapiens
gcauuuccguggacagcccgccgucagggugg

SEQ ID NO: 356931 - RNA, 32 nt, Homo Sapiens
agccuguaccagccugccuucuccaggagggg

SEQ ID NO: 356932 - RNA, 32 nt, Homo Sapiens
agcagggagaggggcggagaggcagcgaaccu

SEQ ID NO: 356933 - RNA, 32 nt, Homo Sapiens
uucaccaugcuguuuugaugucuguuuuugau

SEQ ID NO: 356934 - RNA, 32 nt, Homo Sapiens
uucuugguaacaaaaacuaaaauaaggaauag

SEQ ID NO: 356935 - RNA, 29 nt, Homo Sapiens
aaauuuuagugaguauauuuucugaguuc

SEQ ID NO: 356936 - RNA, 32 nt, Homo Sapiens
gguagaaacaaauuauucauuacaucguaaau

SEQ ID NO: 356937 - RNA, 32 nt, Homo Sapiens
ggcgcacgcuggcgguggcagcgguggcagcg

SEQ ID NO: 356938 - RNA, 32 nt, Homo Sapiens
ggucccgcggcccgcaccugccgcccgcaccu

SEQ ID NO: 356939 - RNA, 32 nt, Homo Sapiens
uuguacuuggggauugguaaagauugugagua

SEQ ID NO: 356940 - RNA, 32 nt, Homo Sapiens
acaggcacaaaacagcccacauggaauucuaa

SEQ ID NO: 356941 - RNA, 32 nt, Homo Sapiens
uauucaaggcuacuaucgccaguaucgucagg

SEQ ID NO: 356942 - RNA, 32 nt, Homo Sapiens
agcaguacagcgcgcggcucuacacgcuuggg

SEQ ID NO: 356943 - RNA, 32 nt, Homo Sapiens
cccaggcuggggugggggccugagcagacaca

SEQ ID NO: 356944 - RNA, 32 nt, Homo Sapiens
ucuugccauugccuggagggggaccagagcau

SEQ ID NO: 356945 - RNA, 32 nt, Homo Sapiens
uguuccuguguccccuccccagccauccuccc

SEQ ID NO: 356946 - RNA, 32 nt, Homo Sapiens
gcucccaggaacaccugcuacugcacacucca

SEQ ID NO: 356947 - RNA, 32 nt, Homo Sapiens
ggggucaggacacagagugggagggagacuga

SEQ ID NO: 356948 - RNA, 32 nt, Homo Sapiens
uccugguuccccuguugauuugugagggccaa

SEQ ID NO: 356949 - RNA, 32 nt, Homo Sapiens
gaauacuggugcccagccagcccgugacagcu

SEQ ID NO: 356950 - RNA, 32 nt, Homo Sapiens
cggggacuucuggaguccgagaagucaacggc

SEQ ID NO: 356951 - RNA, 32 nt, Homo Sapiens
cagguguacaaauuggucaaguugcaauuauu

SEQ ID NO: 356952 - RNA, 32 nt, Homo Sapiens
uuggggccaacauugaaacauaccuucuggaa

SEQ ID NO: 356953 - RNA, 30 nt, Homo Sapiens
cuauucuaucaccauugcaggauaagcugg

SEQ ID NO: 356954 - RNA, 32 nt, Homo Sapiens
ggcaucagaggagcuuccacaucaucggaaca

SEQ ID NO: 356955 - RNA, 32 nt, Homo Sapiens
ucagcgcaaccuggugaugcacguguucacuu

SEQ ID NO: 356956 - RNA, 32 nt, Homo Sapiens
uacuaaaguauuuguaaauaaaugacaugauc

SEQ ID NO: 356957 - RNA, 32 nt, Homo Sapiens
gauuuaugcugacuuaacuguuuaccuauaaa

SEQ ID NO: 356958 - RNA, 32 nt, Homo Sapiens
gcuuacaauauuuuugacuuacaauuggcuaa

SEQ ID NO: 356959 - RNA, 32 nt, Homo Sapiens
gagucuguaaaaauaauaaauauguuugaagu

SEQ ID NO: 356960 - RNA, 32 nt, Homo Sapiens
gccauugcagguggcuuucucacauucuugaa

SEQ ID NO: 356961 - RNA, 32 nt, Homo Sapiens
ccuccuuccuucccggggcccuggaaggagcu

SEQ ID NO: 356962 - RNA, 32 nt, Homo Sapiens
aggccccggacaggaggcagugccgcuucggc

SEQ ID NO: 356963 - RNA, 32 nt, Homo Sapiens
gcguagcuaaaauuauuuauuggacuaaaaac

SEQ ID NO: 356964 - RNA, 32 nt, Homo Sapiens
aggggcccauccccgaggcucaacucaacgca

SEQ ID NO: 356965 - RNA, 32 nt, Homo Sapiens
guugacagggguuuccucuggcuucuccagac

SEQ ID NO: 356966 - RNA, 32 nt, Homo Sapiens
gacaaggauucaguaaggucauauguggacag

SEQ ID NO: 356967 - RNA, 32 nt, Homo Sapiens
ugacuuuuuuauuauuauuauuuuuuggaaga

SEQ ID NO: 356968 - RNA, 32 nt, Homo Sapiens
caauuuugucuccuccuuuucuguucaaauug

SEQ ID NO: 356969 - RNA, 32 nt, Homo Sapiens
cugaagaggguggaugcagcugcuuguguuuc

SEQ ID NO: 356970 - RNA, 32 nt, Homo Sapiens
cuggauccuccgucuccaucagaucagcucug

SEQ ID NO: 356971 - RNA, 32 nt, Homo Sapiens
gcugcugaccuccccuugaggacccuccucac

SEQ ID NO: 356972 - RNA, 32 nt, Homo Sapiens
ccaaggagcaucuguagaaaagaagauggccc

SEQ ID NO: 356973 - RNA, 32 nt, Homo Sapiens
gaacuuggucccuaccccaguccccagggccu

SEQ ID NO: 356974 - RNA, 28 nt, Homo Sapiens
aaguggcugggggccaggaugccugggu

SEQ ID NO: 356975 - RNA, 30 nt, Homo Sapiens
caaacugcccagcagcaccaagucgggcug

SEQ ID NO: 356976 - RNA, 32 nt, Homo Sapiens
augaucaacuucaaaucugugauugcuuacag

SEQ ID NO: 356977 - RNA, 32 nt, Homo Sapiens
caaacccaguguuuuaggagcaugagugccgu

SEQ ID NO: 356978 - RNA, 32 nt, Homo Sapiens
ugccguacucgcacuccagagcccugggaugu

SEQ ID NO: 356979 - RNA, 32 nt, Homo Sapiens
ugcgaaaggaugaaagugaccauguuuuguuu

SEQ ID NO: 356980 - RNA, 32 nt, Homo Sapiens
cuuuuacuuuguaaauguggugccaaaucccu

SEQ ID NO: 356981 - RNA, 32 nt, Homo Sapiens
ugaguagcucccucucccaggaggaagcacag

SEQ ID NO: 356982 - RNA, 32 nt, Homo Sapiens
gccuggaggagcaaagacuggggucuuuugcg

SEQ ID NO: 356983 - RNA, 32 nt, Homo Sapiens
gcagcggcucugccugggauuccaccgcagua

SEQ ID NO: 356984 - RNA, 32 nt, Homo Sapiens
ccccagcaaaucaggaccuaucuaggcagacc

SEQ ID NO: 356985 - RNA, 32 nt, Homo Sapiens
gaugacccaccuguagugagauguacugucga

SEQ ID NO: 356986 - RNA, 32 nt, Homo Sapiens
ggagaacuuagugcaagacuacaggaguuaac

SEQ ID NO: 356987 - RNA, 32 nt, Homo Sapiens
agagaagugugcauguacacacaccacacaca

SEQ ID NO: 356988 - RNA, 32 nt, Homo Sapiens
augucgaggaccagaugcuuuuuggucuccca

SEQ ID NO: 356989 - RNA, 32 nt, Homo Sapiens
gaacuauuauauugaggccuguccucuacaua

SEQ ID NO: 356990 - RNA, 32 nt, Homo Sapiens
auuuccgugugucagcagcaggagacuuugau

SEQ ID NO: 356991 - RNA, 32 nt, Homo Sapiens
uaauaaaauuuaugggggacucuauuagaaaa

SEQ ID NO: 356992 - RNA, 32 nt, Homo Sapiens
aacccaccucacauggccugcucuguugccua

SEQ ID NO: 356993 - RNA, 32 nt, Homo Sapiens
augaaaucuucagagcuuugccuauggggcac

SEQ ID NO: 356994 - RNA, 32 nt, Homo Sapiens
auauaaaagcaucauuuccuuugagaaaaaca

SEQ ID NO: 356995 - RNA, 32 nt, Homo Sapiens
auauagauauauaccaaugucuauauauagag

SEQ ID NO: 356996 - RNA, 32 nt, Homo Sapiens
gcauguuacaacaugaaggaacuuugaggaca

SEQ ID NO: 356997 - RNA, 32 nt, Homo Sapiens
cugaacuugcuguucaucuguugaucuggagg

SEQ ID NO: 356998 - RNA, 32 nt, Homo Sapiens
augauggaauaaaacauaugaaguagaaggac

SEQ ID NO: 356999 - RNA, 32 nt, Homo Sapiens
cuacccaaggccaccagccuugucuuccucuu

SEQ ID NO: 357000 - RNA, 32 nt, Homo Sapiens
gcacccgccucccggcauggugcucaaggccu

SEQ ID NO: 357001 - RNA, 32 nt, Homo Sapiens
cgagaagcagugccugggucccucacggagga

SEQ ID NO: 357002 - RNA, 32 nt, Homo Sapiens
ccagggagagaauggaggacugggaggagaag

SEQ ID NO: 357003 - RNA, 32 nt, Homo Sapiens
ggaagcgaagcagugucaacagucccugguaa

SEQ ID NO: 357004 - RNA, 32 nt, Homo Sapiens
caaagucuuuaaaagaagaguauacugaagaa

SEQ ID NO: 357005 - RNA, 32 nt, Homo Sapiens
auacacagaaaaggcugggaaacgggagcaga

SEQ ID NO: 357006 - RNA, 32 nt, Homo Sapiens
gcccccugccccaccccugaugucugcuccag

SEQ ID NO: 357007 - RNA, 32 nt, Homo Sapiens
ggggauggaagacgcggggagugagcugggug

SEQ ID NO: 357008 - RNA, 32 nt, Homo Sapiens
ccugcccccaaaucaucagguuccucggguuu

SEQ ID NO: 357009 - RNA, 32 nt, Homo Sapiens
ugauagugagugaguucucacaauaucugaug

SEQ ID NO: 357010 - RNA, 32 nt, Homo Sapiens
ccuaaucccuggaaccuguaaaaguuaccuga

SEQ ID NO: 357011 - RNA, 32 nt, Homo Sapiens
gcuuaucaggacuuagaauuauucagaacuca

SEQ ID NO: 357012 - RNA, 32 nt, Homo Sapiens
cucucccuuucccacuugaggacccuggggag

SEQ ID NO: 357013 - RNA, 32 nt, Homo Sapiens
acugagaagcaccaccugcgaaacucccagcc

SEQ ID NO: 357014 - RNA, 32 nt, Homo Sapiens
ccucaguaucuaggauucaaugacaggaagug

SEQ ID NO: 357015 - RNA, 32 nt, Homo Sapiens
ccccugcagacaccaaugugcuccgcuacauc

SEQ ID NO: 357016 - RNA, 32 nt, Homo Sapiens
cagugagccccuccccagccagcccuucccug

SEQ ID NO: 357017 - RNA, 32 nt, Homo Sapiens
uagugguccuugaaaaacugugaauguuuggg

SEQ ID NO: 357018 - RNA, 32 nt, Homo Sapiens
gccuaccuggggauuucuugguuugugaaaac

SEQ ID NO: 357019 - RNA, 32 nt, Homo Sapiens
accauuuucuauuugugcaaacucuguaaaua

SEQ ID NO: 357020 - RNA, 32 nt, Homo Sapiens
aaacagggcuggcuccagcacaaacucucccu

SEQ ID NO: 357021 - RNA, 32 nt, Homo Sapiens
aaugucccucccagagugaagucgcagggccc

SEQ ID NO: 357022 - RNA, 32 nt, Homo Sapiens
cacuucucuggcauguaagggugcugguaugc

SEQ ID NO: 357023 - RNA, 32 nt, Homo Sapiens
accaagggugauauuucuuuuagagauguuag

SEQ ID NO: 357024 - RNA, 32 nt, Homo Sapiens
cugcaggacuguggggaagcaggaacgggagc

SEQ ID NO: 357025 - RNA, 32 nt, Homo Sapiens
cguauacuuuuguuugaauucaaaguaucccu

SEQ ID NO: 357026 - RNA, 32 nt, Homo Sapiens
agaguaggggagaagguugggguguagggccu

SEQ ID NO: 357027 - RNA, 32 nt, Homo Sapiens
ggaaguggguccgugacauucugcagcuaguc

SEQ ID NO: 357028 - RNA, 32 nt, Homo Sapiens
ucuuucccaacacuuaaucauggcagccagga

SEQ ID NO: 357029 - RNA, 32 nt, Homo Sapiens
uugugucuaauagcuaaacaaacaugugaaac

SEQ ID NO: 357030 - RNA, 32 nt, Homo Sapiens
gaucagccaggaagaguuugccaggcagcuac

SEQ ID NO: 357031 - RNA, 32 nt, Homo Sapiens
aucacuuuuuaacuucuguaaaauacagauca

SEQ ID NO: 357032 - RNA, 32 nt, Homo Sapiens
gcucuccggacccccaaagggcccagcauugg

SEQ ID NO: 357033 - RNA, 28 nt, Homo Sapiens
aaggcggggcggccugugagcccugaag

SEQ ID NO: 357034 - RNA, 32 nt, Homo Sapiens
aacaaauccaacaaaggaucacucaaggccag

SEQ ID NO: 357035 - RNA, 32 nt, Homo Sapiens
ccaggggucgcugucgccugcugcuggcuccu

SEQ ID NO: 357036 - RNA, 32 nt, Homo Sapiens
caaucagcauauaacuauauugauauuagaag

SEQ ID NO: 357037 - RNA, 32 nt, Homo Sapiens
gcaauaacugguuuuguauuuuuucuuaaucc

SEQ ID NO: 357038 - RNA, 32 nt, Homo Sapiens
uauagcugggggacaaaacauaaagccaucaa

SEQ ID NO: 357039 - RNA, 30 nt, Homo Sapiens
cgccgaagcccgaggccgggucccggguug

SEQ ID NO: 357040 - RNA, 32 nt, Homo Sapiens
aagcccuaaacuaaauauuauuaauaaccccc

SEQ ID NO: 357041 - RNA, 32 nt, Homo Sapiens
uagaguagauuauauugauugauuuucugaug

SEQ ID NO: 357042 - RNA, 32 nt, Homo Sapiens
gcugggcgcgcugcccgggagccccgcaccca

SEQ ID NO: 357043 - RNA, 31 nt, Homo Sapiens
cccucaauaaauaaaguucuuuuuuaguucc

SEQ ID NO: 357044 - RNA, 32 nt, Homo Sapiens
gggucguucugcuuccugcccgaggggcgugc

SEQ ID NO: 357045 - RNA, 29 nt, Homo Sapiens
guggaugcgaccgggcgggcccucggccu

SEQ ID NO: 357046 - RNA, 32 nt, Homo Sapiens
gauaaccaucguauguaaaguguuaugaccag

SEQ ID NO: 357047 - RNA, 32 nt, Homo Sapiens
ccgcggagcgcgcgcgggguugguugccgcga

SEQ ID NO: 357048 - RNA, 32 nt, Homo Sapiens
cucuugggaaaauggacuuaauaggaauaugg

SEQ ID NO: 357049 - RNA, 32 nt, Homo Sapiens
acaaguaccuucugccuccuccauucuuccug

SEQ ID NO: 357050 - RNA, 32 nt, Homo Sapiens
ugccuauucccgccccccaccccuccccugcg

SEQ ID NO: 357051 - RNA, 32 nt, Homo Sapiens
gagcccgcucccucacugccacacagcaaguu

SEQ ID NO: 357052 - RNA, 32 nt, Homo Sapiens
agauucucaaaggagcgagcaugucguggaca

SEQ ID NO: 357053 - RNA, 32 nt, Homo Sapiens
cucaaacucccauuuucaaaccacuguaucuc

SEQ ID NO: 357054 - RNA, 32 nt, Homo Sapiens
ggugcuucuguugugaaugugaaacauuauuu

SEQ ID NO: 357055 - RNA, 32 nt, Homo Sapiens
uugaaaaguucugggugaauggcugccuuaua

SEQ ID NO: 357056 - RNA, 32 nt, Homo Sapiens
ugggauuuucuuuucuuuucucugguaauauu

SEQ ID NO: 357057 - RNA, 32 nt, Homo Sapiens
caagucaccaacucucagcugucgcuuugcca

SEQ ID NO: 357058 - RNA, 32 nt, Homo Sapiens
uccacccugggcgggggcgcgcgagaagcggu

SEQ ID NO: 357059 - RNA, 29 nt, Homo Sapiens
uuucauauauguauauacacauacuugaa

SEQ ID NO: 357060 - RNA, 32 nt, Homo Sapiens
gcacucauggccuuccacgucuuccuccaaga

SEQ ID NO: 357061 - RNA, 32 nt, Homo Sapiens
auagauauuuuuggauuuguuaccaaacauua

SEQ ID NO: 357062 - RNA, 32 nt, Homo Sapiens
gagugccaggacuggacauggggggagcacug

SEQ ID NO: 357063 - RNA, 32 nt, Homo Sapiens
augugcaaacucccaagccacuaauaacuuca

SEQ ID NO: 357064 - RNA, 31 nt, Homo Sapiens
aaacaaaggcuguuccgccgccggccgcaca

SEQ ID NO: 357065 - RNA, 32 nt, Homo Sapiens
cggcugcgguggcggcagcgaggcgagcgggg

SEQ ID NO: 357066 - RNA, 32 nt, Homo Sapiens
ugaggagaaugaauugguuaucagaguggaag

SEQ ID NO: 357067 - RNA, 32 nt, Homo Sapiens
gacauuuaaucuuucauagaaacuccugaaga

SEQ ID NO: 357068 - RNA, 32 nt, Homo Sapiens
ccagcucucaacuuuuuuuuuaaauaaacuga

SEQ ID NO: 357069 - RNA, 32 nt, Homo Sapiens
ugggcggagggugcaggggagggcacggcgcc

SEQ ID NO: 357070 - RNA, 32 nt, Homo Sapiens
caucggacuauuccgaagaaguggccaccucc

SEQ ID NO: 357071 - RNA, 32 nt, Homo Sapiens
cucuggaauggagaggcuggcgacuggagcag

SEQ ID NO: 357072 - RNA, 32 nt, Homo Sapiens
acuauuacauccacaugauaccucugaucaag

SEQ ID NO: 357073 - RNA, 32 nt, Homo Sapiens
gcauaguuacagaaauuccugaagauucccca

SEQ ID NO: 357074 - RNA, 32 nt, Homo Sapiens
caagaaguccuuuuuccaauucuguacauuaa

SEQ ID NO: 357075 - RNA, 32 nt, Homo Sapiens
agugaaaaggaaguaaaugagauucuuuugug

SEQ ID NO: 357076 - RNA, 32 nt, Homo Sapiens
gugcauaggaccaguuucugugacuuuucucc

SEQ ID NO: 357077 - RNA, 32 nt, Homo Sapiens
caccuguaaucccagcacuuuggcaggccgag

SEQ ID NO: 357078 - RNA, 32 nt, Homo Sapiens
ucauuuuuaaaagggagagagaaucuauuuaa

SEQ ID NO: 357079 - RNA, 32 nt, Homo Sapiens
gaccugaaucuaaguuaccaucccuuggaaau

SEQ ID NO: 357080 - RNA, 32 nt, Homo Sapiens
gagauauuuguaguccuaugugaaugagcuua

SEQ ID NO: 357081 - RNA, 32 nt, Homo Sapiens
gaugauuuuaucaucucaucuuugaguguugu

SEQ ID NO: 357082 - RNA, 32 nt, Homo Sapiens
ugggagccgggucugccucuucugggagggca

SEQ ID NO: 357083 - RNA, 32 nt, Homo Sapiens
uagugcugcagggucccucgggugcugugggc

SEQ ID NO: 357084 - RNA, 32 nt, Homo Sapiens
agaucacauacuuuuuaaauccaaauacaaaa

SEQ ID NO: 357085 - RNA, 32 nt, Homo Sapiens
ccuuuggccccacuccacgacaaccacuuccc

SEQ ID NO: 357086 - RNA, 32 nt, Homo Sapiens
uauaccaaaaauuguauuucauggcauuaggg

SEQ ID NO: 357087 - RNA, 32 nt, Homo Sapiens
guuuggcuuccacuuuucggcccgcccaguuc

SEQ ID NO: 357088 - RNA, 32 nt, Homo Sapiens
gucugagacuagcucuggggguggcgggggcc

SEQ ID NO: 357089 - RNA, 30 nt, Homo Sapiens
ugaaauggcauugccaccaucuuuauuuag

SEQ ID NO: 357090 - RNA, 32 nt, Homo Sapiens
uuuagcuguguauucugacauuuucuauucua

SEQ ID NO: 357091 - RNA, 32 nt, Homo Sapiens
ccuagccaaugucuccuccccuucccccaccg

SEQ ID NO: 357092 - RNA, 32 nt, Homo Sapiens
ggcguccuucuucccgccgccggugccgaacc

SEQ ID NO: 357093 - RNA, 32 nt, Homo Sapiens
ggggcgggaccccagcaccucccccaacugac

SEQ ID NO: 357094 - RNA, 32 nt, Homo Sapiens
agauaggaggucggcacaagauacagaucaca

SEQ ID NO: 357095 - RNA, 32 nt, Homo Sapiens
ggagauggcggcggcagcggcggcgccgagag

SEQ ID NO: 357096 - RNA, 32 nt, Homo Sapiens
ccucgacaggccuuaaauuuacuacuacauua

SEQ ID NO: 357097 - RNA, 32 nt, Homo Sapiens
ugcaagaugaguuuuuggagauaaaugaaaua

SEQ ID NO: 357098 - RNA, 32 nt, Homo Sapiens
aaagacugguaacagcagcagcagccagacag

SEQ ID NO: 357099 - RNA, 32 nt, Homo Sapiens
cugcccagcaaccuguggagacaacccacacu

SEQ ID NO: 357100 - RNA, 32 nt, Homo Sapiens
auugcaccgagaccuaacugccgcucagagug

SEQ ID NO: 357101 - RNA, 32 nt, Homo Sapiens
ucaguacuaggaugcacccaguggugagagua

SEQ ID NO: 357102 - RNA, 32 nt, Homo Sapiens
cagcaccccccucccccaaugaggacaccuuu

SEQ ID NO: 357103 - RNA, 32 nt, Homo Sapiens
uuugggcucuucuggagggaaguaacauuuac

SEQ ID NO: 357104 - RNA, 32 nt, Homo Sapiens
caggggucaguucccacccccacccgucccag

SEQ ID NO: 357105 - RNA, 32 nt, Homo Sapiens
auuuaguacuuuuuauugauaauuuggcagaa

SEQ ID NO: 357106 - RNA, 32 nt, Homo Sapiens
guuuugucuaaccaucaaaauguuugagacuu

SEQ ID NO: 357107 - RNA, 32 nt, Homo Sapiens
ucucuuuuucuuuacacacucaggucaaagua

SEQ ID NO: 357108 - RNA, 32 nt, Homo Sapiens
gucaggguaaaccaucauguuuuuggaggugg

SEQ ID NO: 357109 - RNA, 32 nt, Homo Sapiens
ccaaauugucaccugcuucucugcccagcuuu

SEQ ID NO: 357110 - RNA, 32 nt, Homo Sapiens
aaauauuaaauuauaguuucugauaaagaaau

SEQ ID NO: 357111 - RNA, 32 nt, Homo Sapiens
agacuggcuuguugcuggccccagcgccuggu

SEQ ID NO: 357112 - RNA, 32 nt, Homo Sapiens
aacggcccagcggaccacccaggcuugaggca

SEQ ID NO: 357113 - RNA, 32 nt, Homo Sapiens
ggacuuggagaguuaagaaacaccugguaccu

SEQ ID NO: 357114 - RNA, 32 nt, Homo Sapiens
ccccagcaccuacagcuggggcugcagggaga

SEQ ID NO: 357115 - RNA, 32 nt, Homo Sapiens
ggggggccaggcgggggugguggacguggccg

SEQ ID NO: 357116 - RNA, 30 nt, Homo Sapiens
ccauugcccugcucaguuuggcugcauuug

SEQ ID NO: 357117 - RNA, 32 nt, Homo Sapiens
agagaggucaaggggaaguauuuucuaguuca

SEQ ID NO: 357118 - RNA, 32 nt, Homo Sapiens
agggucugacacaacuagucaacuaacaaggu

SEQ ID NO: 357119 - RNA, 32 nt, Homo Sapiens
cagaacaaauagggagcauuugaaagcuucug

SEQ ID NO: 357120 - RNA, 31 nt, Homo Sapiens
ccugccgcgcagguucuuccccgcgcggagg

SEQ ID NO: 357121 - RNA, 32 nt, Homo Sapiens
acuuauugauucauaaagugaauuuuauuuaa

SEQ ID NO: 357122 - RNA, 32 nt, Homo Sapiens
uuggguugggcuggauaucuuuguagaugugg

SEQ ID NO: 357123 - RNA, 32 nt, Homo Sapiens
ugcuguauuuugugacauccacaugcagcauc

SEQ ID NO: 357124 - RNA, 32 nt, Homo Sapiens
caaacggcuggggaagaagagauuuggacaug

SEQ ID NO: 357125 - RNA, 32 nt, Homo Sapiens
ccggaaggccgcggcggcgucccggcugcuaa

SEQ ID NO: 357126 - RNA, 32 nt, Homo Sapiens
guaguguuggguggaggauggacgagugagcu

SEQ ID NO: 357127 - RNA, 32 nt, Homo Sapiens
gauguuucacugacaguuuuuaacaauaaauu

SEQ ID NO: 357128 - RNA, 32 nt, Homo Sapiens
aaugcgccaagcauaaagguggggcauggcau

SEQ ID NO: 357129 - RNA, 32 nt, Homo Sapiens
uuucuaaaucucuucauagauuccaucaacac

SEQ ID NO: 357130 - RNA, 32 nt, Homo Sapiens
ucaugggcuggagggggagcgaggggagaggg

SEQ ID NO: 357131 - RNA, 32 nt, Homo Sapiens
gaugacagugauucaaaugauucaaaugccau

SEQ ID NO: 357132 - RNA, 32 nt, Homo Sapiens
cucuggcucaguuccuucucccugcaaccuca

SEQ ID NO: 357133 - RNA, 32 nt, Homo Sapiens
ccaaggaaaucagugucuuuuacguuguuaug

SEQ ID NO: 357134 - RNA, 32 nt, Homo Sapiens
uucccucccccgucuuuuuuuuuuuuuuucaa

SEQ ID NO: 357135 - RNA, 32 nt, Homo Sapiens
ccuaacaaugagcuccucccucccugccuccu

SEQ ID NO: 357136 - RNA, 32 nt, Homo Sapiens
aguguugaggcuugugagaugcaccgcucagu

SEQ ID NO: 357137 - RNA, 31 nt, Homo Sapiens
ccuaugaaauaaaauuauuuuucagaauuaa

SEQ ID NO: 357138 - RNA, 32 nt, Homo Sapiens
aggaugauacuaguaccuaucuuguagaauug

SEQ ID NO: 357139 - RNA, 32 nt, Homo Sapiens
uccugagcagugccucucacggcuugucucau

SEQ ID NO: 357140 - RNA, 32 nt, Homo Sapiens
augcugaaccccuucaucuacagccugagaaa

SEQ ID NO: 357141 - RNA, 32 nt, Homo Sapiens
ucgcgucgucgccgccgccgccgcccagaucc

SEQ ID NO: 357142 - RNA, 32 nt, Homo Sapiens
gucaccuccaggccguuucucauacuacagga

SEQ ID NO: 357143 - RNA, 32 nt, Homo Sapiens
gucaucugacuucugaucaagcauuagauuuu

SEQ ID NO: 357144 - RNA, 32 nt, Homo Sapiens
guaaagaaaaggugcaaugcagugcuuuuaga

SEQ ID NO: 357145 - RNA, 32 nt, Homo Sapiens
ucuggaaaugccuggaucugcgaccccagccu

SEQ ID NO: 357146 - RNA, 32 nt, Homo Sapiens
gaggaaagauuccgccgcggcgcucucagacc

SEQ ID NO: 357147 - RNA, 32 nt, Homo Sapiens
gacgcuuccuuuggggaccagaggaacauuag

SEQ ID NO: 357148 - RNA, 32 nt, Homo Sapiens
uauaauuagagguuuuccuguuguguaaagga

SEQ ID NO: 357149 - RNA, 32 nt, Homo Sapiens
ccaggaugacugaagaugacuucuuuuuacag

SEQ ID NO: 357150 - RNA, 27 nt, Homo Sapiens
aaugaccauuaauaaucuggcaggaga

SEQ ID NO: 357151 - RNA, 32 nt, Homo Sapiens
ucccuuucuaugcugucccauccacuguccuc

SEQ ID NO: 357152 - RNA, 32 nt, Homo Sapiens
ucugcgcgcggaccuuccuuuuccagauggug

SEQ ID NO: 357153 - RNA, 32 nt, Homo Sapiens
uggagcacacugggaagcugugggccacggug

SEQ ID NO: 357154 - RNA, 32 nt, Homo Sapiens
gcuuucuuuuaaaaucauguaucuugauuguu

SEQ ID NO: 357155 - RNA, 32 nt, Homo Sapiens
gggaagcacucaaauaaagaugcgugguguua

SEQ ID NO: 357156 - RNA, 32 nt, Homo Sapiens
ggggugcguggcaccugcuuaaccgugcuucu

SEQ ID NO: 357157 - RNA, 32 nt, Homo Sapiens
ugccuggcgggcgggcuccggagcuuuccuga

SEQ ID NO: 357158 - RNA, 31 nt, Homo Sapiens
acaauggugccccagaaagcugcagguggug

SEQ ID NO: 357159 - RNA, 32 nt, Homo Sapiens
uugugaggagccuaaauacauucuuccugggg

SEQ ID NO: 357160 - RNA, 31 nt, Homo Sapiens
gguggaaagagcagaacaccauagacaauau

SEQ ID NO: 357161 - RNA, 32 nt, Homo Sapiens
cuguuagaauaaagaggugacaccauaaaguc

SEQ ID NO: 357162 - RNA, 32 nt, Homo Sapiens
ccuccguauguguauggaaacacacaccuuca

SEQ ID NO: 357163 - RNA, 32 nt, Homo Sapiens
uccgcucgccccgagagagacccggccaugca

SEQ ID NO: 357164 - RNA, 32 nt, Homo Sapiens
ucugcugccacaugcuugggcugccccacccc

SEQ ID NO: 357165 - RNA, 32 nt, Homo Sapiens
uaauuuuuaaacauguuaccagcgcaugucua

SEQ ID NO: 357166 - RNA, 32 nt, Homo Sapiens
ccuuugaccugccucccuucaugcauggaaau

SEQ ID NO: 357167 - RNA, 32 nt, Homo Sapiens
cguacagcauaccuccagagaagugcugaaag

SEQ ID NO: 357168 - RNA, 32 nt, Homo Sapiens
ugaguuuuguaucauuucaauuagaagacuac

SEQ ID NO: 357169 - RNA, 32 nt, Homo Sapiens
aguuuaggccccagcaggcaaaccacuucaca

SEQ ID NO: 357170 - RNA, 32 nt, Homo Sapiens
uucucaauaacaugcaaacaaacaagccacgg

SEQ ID NO: 357171 - RNA, 32 nt, Homo Sapiens
caggagcagcaauggucucaccauagcugcug

SEQ ID NO: 357172 - RNA, 32 nt, Homo Sapiens
acucuuucuuugguauuccauccacuauccug

SEQ ID NO: 357173 - RNA, 32 nt, Homo Sapiens
accaugccuggccacaucuacuuuuuuaaaug

SEQ ID NO: 357174 - RNA, 30 nt, Homo Sapiens
cacacggcgcccggucucuccgcaaugcca

SEQ ID NO: 357175 - RNA, 32 nt, Homo Sapiens
uuucucuccagcugcugagcugcucacccuuu

SEQ ID NO: 357176 - RNA, 32 nt, Homo Sapiens
auugaagacaccuuuucagaccaaccacagau

SEQ ID NO: 357177 - RNA, 32 nt, Homo Sapiens
guauauuauuuagauuaacaaacauauuuguu

SEQ ID NO: 357178 - RNA, 32 nt, Homo Sapiens
caagacguauauuauuuuacuauuaaagaaaa

SEQ ID NO: 357179 - RNA, 32 nt, Homo Sapiens
auaauaugcaagauugguaaacaggcaggagc

SEQ ID NO: 357180 - RNA, 32 nt, Homo Sapiens
uauuucucaaaaucauucuaugcugauuuuac

SEQ ID NO: 357181 - RNA, 32 nt, Homo Sapiens
acuaucucauuuccuggaaauaaaauguaaaa

SEQ ID NO: 357182 - RNA, 32 nt, Homo Sapiens
ugugagcaguuuuccgaaaccccgucaggcga

SEQ ID NO: 357183 - RNA, 32 nt, Homo Sapiens
aaaguaacagagcaucaaaaacaucacucccu

SEQ ID NO: 357184 - RNA, 32 nt, Homo Sapiens
gcuauuggugguuugucuucuuuguuaggcug

SEQ ID NO: 357185 - RNA, 32 nt, Homo Sapiens
ccaaaauauccagauguaaaccccaaacuugu

SEQ ID NO: 357186 - RNA, 31 nt, Homo Sapiens
cuuagguccucccagaaccuggcggaucgcc

SEQ ID NO: 357187 - RNA, 32 nt, Homo Sapiens
ucagagcacacuuaugggccaagcccagcuua

SEQ ID NO: 357188 - RNA, 32 nt, Homo Sapiens
ccccaaagugaacauggauugucuguuaaaca

SEQ ID NO: 357189 - RNA, 32 nt, Homo Sapiens
cagugcuauuuuuucuuaaucagaaaggaaaa

SEQ ID NO: 357190 - RNA, 32 nt, Homo Sapiens
gcgugccgugugagugugacagggccaguggg

SEQ ID NO: 357191 - RNA, 32 nt, Homo Sapiens
aacuuaaaggauuguucuuuauucugaaguua

SEQ ID NO: 357192 - RNA, 32 nt, Homo Sapiens
cguggaagacgggcucccuccucccccaccug

SEQ ID NO: 357193 - RNA, 32 nt, Homo Sapiens
gugcugaggcucccugcugcaaugcaauuaaa

SEQ ID NO: 357194 - RNA, 32 nt, Homo Sapiens
gucaaaucaagaaugggugugcaugugcuugu

SEQ ID NO: 357195 - RNA, 29 nt, Homo Sapiens
ccacagaugugggucagaggcagagaugg

SEQ ID NO: 357196 - RNA, 32 nt, Homo Sapiens
uaggccccguccguggccccgccccgccgcga

SEQ ID NO: 357197 - RNA, 32 nt, Homo Sapiens
accucagagaaaaaaaucauuguuuagguuug

SEQ ID NO: 357198 - RNA, 32 nt, Homo Sapiens
guuacugagauguuuuaccauccuuacaaugu

SEQ ID NO: 357199 - RNA, 32 nt, Homo Sapiens
uugauggcaaaauaauuaugguaaaaaacaag

SEQ ID NO: 357200 - RNA, 32 nt, Homo Sapiens
augaacuaaguaguuaaauauuuacauauuca

SEQ ID NO: 357201 - RNA, 32 nt, Homo Sapiens
gccacaggaggagggauuccagagggauucca

SEQ ID NO: 357202 - RNA, 32 nt, Homo Sapiens
cgccugcguggcagcaggggaaucuugcgucu

SEQ ID NO: 357203 - RNA, 31 nt, Homo Sapiens
ugggaaaaauaaaaugcugggugucucacaa

SEQ ID NO: 357204 - RNA, 32 nt, Homo Sapiens
aggagccacggguggggccaggccacacagcc

SEQ ID NO: 357205 - RNA, 29 nt, Homo Sapiens
auccaaugguguuucacauggaagaggac

SEQ ID NO: 357206 - RNA, 32 nt, Homo Sapiens
gggaaauguacaagagcacuacugaagaaguc

SEQ ID NO: 357207 - RNA, 32 nt, Homo Sapiens
aggccccccgucccggucauggccaugcucag

SEQ ID NO: 357208 - RNA, 32 nt, Homo Sapiens
auauugugugaaaauauauaaauaucacccaa

SEQ ID NO: 357209 - RNA, 32 nt, Homo Sapiens
uguauuuauuuuuauacuuuuauuuucacuag

SEQ ID NO: 357210 - RNA, 30 nt, Homo Sapiens
gaaaaacuguggccugcagaagucccaggc

SEQ ID NO: 357211 - RNA, 32 nt, Homo Sapiens
gcacacacacacaucuggagauggcaaaaucc

SEQ ID NO: 357212 - RNA, 32 nt, Homo Sapiens
uuuuuuaacauugugaauauugugaccauguu

SEQ ID NO: 357213 - RNA, 32 nt, Homo Sapiens
gggacucggaagcuccgaucucaacaacaucc

SEQ ID NO: 357214 - RNA, 32 nt, Homo Sapiens
uuuuccauuuuuccuaauuuggagucacugaa

SEQ ID NO: 357215 - RNA, 32 nt, Homo Sapiens
uguccugucaccugccgcccagccccucuccu

SEQ ID NO: 357216 - RNA, 32 nt, Homo Sapiens
cuuuauuuuucauuuuaauuuuuugagauagg

SEQ ID NO: 357217 - RNA, 32 nt, Homo Sapiens
caguccuuuuuuccuuuguuccaaauaaaaga

SEQ ID NO: 357218 - RNA, 32 nt, Homo Sapiens
cccuucccaucccagagcuuuaugauucugua

SEQ ID NO: 357219 - RNA, 32 nt, Homo Sapiens
caaauauaacaaguauaauuacauccuccaau

SEQ ID NO: 357220 - RNA, 32 nt, Homo Sapiens
aguagagggcaccaaacaggcauuauaggagg

SEQ ID NO: 357221 - RNA, 32 nt, Homo Sapiens
uucacuugccgggagagacuuuuuacaacuca

SEQ ID NO: 357222 - RNA, 32 nt, Homo Sapiens
aacacaguggacuuccuauuaagacuuacuug

SEQ ID NO: 357223 - RNA, 32 nt, Homo Sapiens
uauaauuuguucuuuucuuuuacuuuguuacc

SEQ ID NO: 357224 - RNA, 32 nt, Homo Sapiens
aacaaacacaucucuuuuuucugucuauucac

SEQ ID NO: 357225 - RNA, 32 nt, Homo Sapiens
cauuucuacuaaaaauacaaaauuagcugggc

SEQ ID NO: 357226 - RNA, 31 nt, Homo Sapiens
caccggcagcgcagcgucuccgauaguaagu

SEQ ID NO: 357227 - RNA, 32 nt, Homo Sapiens
aaaagcaaauuuauauacuaaaaucauuuguc

SEQ ID NO: 357228 - RNA, 32 nt, Homo Sapiens
gacaaguuuggcuuccggcuucccuaugcugg

SEQ ID NO: 357229 - RNA, 32 nt, Homo Sapiens
gcuucuccucugccucauccacagucauuuuu

SEQ ID NO: 357230 - RNA, 32 nt, Homo Sapiens
ugccgcgggggagaggccgcgagcgggaccga

SEQ ID NO: 357231 - RNA, 32 nt, Homo Sapiens
aucuuggccuguucuuuuuuguuuuuugagac

SEQ ID NO: 357232 - RNA, 32 nt, Homo Sapiens
uguggauccccgaaggccccccgccccgcccg

SEQ ID NO: 357233 - RNA, 32 nt, Homo Sapiens
ucuccucccccuccuagggggugucagaagcu

SEQ ID NO: 357234 - RNA, 32 nt, Homo Sapiens
ucuccuuccggggcugcccucaagagcuucug

SEQ ID NO: 357235 - RNA, 32 nt, Homo Sapiens
uuugguuacuuguugcaugacucuuaacacag

SEQ ID NO: 357236 - RNA, 32 nt, Homo Sapiens
gagcggcugcuucgguucuucuccgugucccc

SEQ ID NO: 357237 - RNA, 32 nt, Homo Sapiens
aacuacguagagagggagaggcaccugcugaa

SEQ ID NO: 357238 - RNA, 32 nt, Homo Sapiens
ugccuguaaucccagcacuuucggaggccaag

SEQ ID NO: 357239 - RNA, 32 nt, Homo Sapiens
augcauuucaaaaggaaaguugguuuugagcc

SEQ ID NO: 357240 - RNA, 32 nt, Homo Sapiens
ggcacuggagcaugcagaggaggugagagugg

SEQ ID NO: 357241 - RNA, 32 nt, Homo Sapiens
gcugugcucucuggcgccccacagccuggcca

SEQ ID NO: 357242 - RNA, 32 nt, Homo Sapiens
agccagcagggccuucugcuugccugcugcca

SEQ ID NO: 357243 - RNA, 32 nt, Homo Sapiens
guacucuaaaagacacuaaauuguacuaauug

SEQ ID NO: 357244 - RNA, 32 nt, Homo Sapiens
uucuucacugguuuuauucuugguauuuucaa

SEQ ID NO: 357245 - RNA, 32 nt, Homo Sapiens
ucuuuccauaucaaguaccauaugaguucauu

SEQ ID NO: 357246 - RNA, 32 nt, Homo Sapiens
caggucuggcuuggucaguuucuuagguaugg

SEQ ID NO: 357247 - RNA, 32 nt, Homo Sapiens
gaaaaaaauggcacuguguauugcuugaaugc

SEQ ID NO: 357248 - RNA, 32 nt, Homo Sapiens
agcggcauccucagcgccccagcgauccggug

SEQ ID NO: 357249 - RNA, 32 nt, Homo Sapiens
uuguccuggccgcgaccuggaccuccaugagu

SEQ ID NO: 357250 - RNA, 32 nt, Homo Sapiens
aaaaacauuguuaagaagugccuugagcucuu

SEQ ID NO: 357251 - RNA, 32 nt, Homo Sapiens
cguuccgcgcgcucgcgccggagcagcgcugc

SEQ ID NO: 357252 - RNA, 28 nt, Homo Sapiens
uauuucugggguaauauuauaaauuuag

SEQ ID NO: 357253 - RNA, 32 nt, Homo Sapiens
cuugaaucuagaguuacuauuuuuguauauau

SEQ ID NO: 357254 - RNA, 32 nt, Homo Sapiens
uuuuuucgcccccgucacuuccgggugcgaca

SEQ ID NO: 357255 - RNA, 31 nt, Homo Sapiens
gcaaugucaugcuggggguccacuccucccu

SEQ ID NO: 357256 - RNA, 32 nt, Homo Sapiens
uccucaguucacuguuucccccggggaaacaa

SEQ ID NO: 357257 - RNA, 32 nt, Homo Sapiens
ugugccauauccucucaggagguuuaaauguu

SEQ ID NO: 357258 - RNA, 32 nt, Homo Sapiens
agcuucuuguuccauaggauuaaggaagacuc

SEQ ID NO: 357259 - RNA, 32 nt, Homo Sapiens
ggccggguccgcggccggcgaacggggcucga

SEQ ID NO: 357260 - RNA, 32 nt, Homo Sapiens
uuaugggggcgggaaauggcggugccccggag

SEQ ID NO: 357261 - RNA, 32 nt, Homo Sapiens
cuagagagcuggcgcaccuccugggccugacg

SEQ ID NO: 357262 - RNA, 32 nt, Homo Sapiens
uugcgacccagcugccauaaccaccuuagaac

SEQ ID NO: 357263 - RNA, 32 nt, Homo Sapiens
uuucucuucagauuucugaaaaugaaaacuau

SEQ ID NO: 357264 - RNA, 32 nt, Homo Sapiens
cucuuggggcuccaggauuugcugaaagagaa

SEQ ID NO: 357265 - RNA, 32 nt, Homo Sapiens
cuguggccccgcccggcccgcgcuugcuagcg

SEQ ID NO: 357266 - RNA, 32 nt, Homo Sapiens
uucaguccugaacauuuauaggguuuuauaga

SEQ ID NO: 357267 - RNA, 32 nt, Homo Sapiens
cggaggcgaaggggcggcgggacgcgggccug

SEQ ID NO: 357268 - RNA, 32 nt, Homo Sapiens
aacgucguggcucggaucucgcagugggcaga

SEQ ID NO: 357269 - RNA, 32 nt, Homo Sapiens
ucucgccaugcugcuccugggccugcugcugc

SEQ ID NO: 357270 - RNA, 32 nt, Homo Sapiens
ucccgccugguccaccacuuggcuagaguuca

SEQ ID NO: 357271 - RNA, 32 nt, Homo Sapiens
gccuguccccuggcaaguuggccacggaaccc

SEQ ID NO: 357272 - RNA, 32 nt, Homo Sapiens
cugucaucauucagagcacagccugagagacc

SEQ ID NO: 357273 - RNA, 32 nt, Homo Sapiens
aggaaagugggaggagaggcugcacucuaaac

SEQ ID NO: 357274 - RNA, 32 nt, Homo Sapiens
cuccccggccugacagacccagggagcugcag

SEQ ID NO: 357275 - RNA, 32 nt, Homo Sapiens
ggggaagaggggcuggggcaaugcaggcuggg

SEQ ID NO: 357276 - RNA, 32 nt, Homo Sapiens
cacccacagcuauuuugcuuguguuccacucg

SEQ ID NO: 357277 - RNA, 32 nt, Homo Sapiens
cuccaccagcccagcucugucccuccccuagg

SEQ ID NO: 357278 - RNA, 32 nt, Homo Sapiens
cacggucaacuaucaagcaagcguggugucga

SEQ ID NO: 357279 - RNA, 32 nt, Homo Sapiens
cccuaccccagagcuuccaugcaaaggaauuc

SEQ ID NO: 357280 - RNA, 32 nt, Homo Sapiens
ugcugggauguuucgcaucaccaacauugagu

SEQ ID NO: 357281 - RNA, 32 nt, Homo Sapiens
aaacaauaaauauuuauaacuuucucuauaag

SEQ ID NO: 357282 - RNA, 32 nt, Homo Sapiens
gagggcugaccaagcugaaacucuagaauuaa

SEQ ID NO: 357283 - RNA, 30 nt, Homo Sapiens
cagugagagaagcucgugaauguugugcug

SEQ ID NO: 357284 - RNA, 32 nt, Homo Sapiens
ggaauucugaaauccccaccacuuccucccuc

SEQ ID NO: 357285 - RNA, 32 nt, Homo Sapiens
caggcaccgaggagggugcuggcuguagguga

SEQ ID NO: 357286 - RNA, 32 nt, Homo Sapiens
gggauauauauuuuguggucauuugaaaagaa

SEQ ID NO: 357287 - RNA, 32 nt, Homo Sapiens
ccggcgccccgcacccccgccaggcgcauguc

SEQ ID NO: 357288 - RNA, 32 nt, Homo Sapiens
ugugacuuuuguuuucugaguugauuagaaug

SEQ ID NO: 357289 - RNA, 32 nt, Homo Sapiens
accugcagguauugggagauccacagcugagg

SEQ ID NO: 357290 - RNA, 32 nt, Homo Sapiens
ucauauucauauuugguagaacuguuaaccua

SEQ ID NO: 357291 - RNA, 32 nt, Homo Sapiens
cacagauauaaaacuauaaguaauaaauuguu

SEQ ID NO: 357292 - RNA, 32 nt, Homo Sapiens
uuugggcacugcagcucuggacuuuucuggcc

SEQ ID NO: 357293 - RNA, 32 nt, Homo Sapiens
cugcaccuucccagcuccaccucugacuugag

SEQ ID NO: 357294 - RNA, 32 nt, Homo Sapiens
agguggccgacgaggcggagaaguacaaucug

SEQ ID NO: 357295 - RNA, 32 nt, Homo Sapiens
acucaccuauuugaaaucauggcuauauuguu

SEQ ID NO: 357296 - RNA, 32 nt, Homo Sapiens
ucauaguacuccaaggguccccggcucuaccc

SEQ ID NO: 357297 - RNA, 32 nt, Homo Sapiens
aggccgccgggggugcgguccaggccucccgu

SEQ ID NO: 357298 - RNA, 32 nt, Homo Sapiens
uccccuuucaaagaggagcaucucuaagugcc

SEQ ID NO: 357299 - RNA, 32 nt, Homo Sapiens
gauguaauaaauguacugugggacauguuaau

SEQ ID NO: 357300 - RNA, 32 nt, Homo Sapiens
cagugguggagcuggaccugccugcugcaguc

SEQ ID NO: 357301 - RNA, 32 nt, Homo Sapiens
acaaacaaaaaaggagcagagaaagacagugg

SEQ ID NO: 357302 - RNA, 32 nt, Homo Sapiens
uggucugcuuggauuuccuacagcccccgugg

SEQ ID NO: 357303 - RNA, 32 nt, Homo Sapiens
uaauguuuagaaaaaagaguggcagggggguu

SEQ ID NO: 357304 - RNA, 32 nt, Homo Sapiens
uccugaccaauggaaauauguacaacuucagc

SEQ ID NO: 357305 - RNA, 32 nt, Homo Sapiens
cagccugggucucagccccgcguacggccuuu

SEQ ID NO: 357306 - RNA, 32 nt, Homo Sapiens
aucucagguuucagcuccugcuguccugagcg

SEQ ID NO: 357307 - RNA, 32 nt, Homo Sapiens
uauuuuguuuuaaaaauaugaaucaaaauucc

SEQ ID NO: 357308 - RNA, 32 nt, Homo Sapiens
cgugccucuugcuuucuuucugaaguggagac

SEQ ID NO: 357309 - RNA, 32 nt, Homo Sapiens
aggcagcaguggggcggggauggaggcggccg

SEQ ID NO: 357310 - RNA, 32 nt, Homo Sapiens
agguccugggcuggccgccgggauguugcccu

SEQ ID NO: 357311 - RNA, 32 nt, Homo Sapiens
acauacauauauauuuuuggaaaauggagcua

SEQ ID NO: 357312 - RNA, 32 nt, Homo Sapiens
ccauaaggaaaugagaugcagaaucagaagga

SEQ ID NO: 357313 - RNA, 32 nt, Homo Sapiens
uguacauagauauagacacacacuuuaaaaga

SEQ ID NO: 357314 - RNA, 32 nt, Homo Sapiens
ccgcucgacccucucccggccccuccccuucu

SEQ ID NO: 357315 - RNA, 32 nt, Homo Sapiens
guuguuccugggauguucuuuuuugugcauua

SEQ ID NO: 357316 - RNA, 32 nt, Homo Sapiens
acacaucagagguauuucugcuguauuuuuca

SEQ ID NO: 357317 - RNA, 32 nt, Homo Sapiens
uuccggagucugccucuggccgcggccugugg

SEQ ID NO: 357318 - RNA, 32 nt, Homo Sapiens
cacagaaccuggaggcuaaacccccagcuuuc

SEQ ID NO: 357319 - RNA, 32 nt, Homo Sapiens
cuggcacuccuccaagcuuggcacagugagcc

SEQ ID NO: 357320 - RNA, 32 nt, Homo Sapiens
aggaacaccagggccugugcuccggagccuuc

SEQ ID NO: 357321 - RNA, 32 nt, Homo Sapiens
augggcugccagaucaacgcacaggggaacuc

SEQ ID NO: 357322 - RNA, 32 nt, Homo Sapiens
uccuacaaaaauauuucagaaauucuauuuaa

SEQ ID NO: 357323 - RNA, 32 nt, Homo Sapiens
uccuucuugccuguagcuccugcuggaggaag

SEQ ID NO: 357324 - RNA, 32 nt, Homo Sapiens
gaaaugccuccacguacuuucauuugcauguc

SEQ ID NO: 357325 - RNA, 32 nt, Homo Sapiens
acggcccccagcugcguagcuccagccccuuu

SEQ ID NO: 357326 - RNA, 32 nt, Homo Sapiens
uuuucaguuuuaagcagguauagugcaggcuu

SEQ ID NO: 357327 - RNA, 32 nt, Homo Sapiens
gucuugauaaaguggaauuggcaaacuagaau

SEQ ID NO: 357328 - RNA, 32 nt, Homo Sapiens
caacaggaccagcgauggcucucccugcugga

SEQ ID NO: 357329 - RNA, 32 nt, Homo Sapiens
ccuuaggacgacugaggugugggcugacggaa

SEQ ID NO: 357330 - RNA, 32 nt, Homo Sapiens
ccuggcagccucagcucugugccccucacccu

SEQ ID NO: 357331 - RNA, 31 nt, Homo Sapiens
gggucuggcugcugccugcuucuugcuccag

SEQ ID NO: 357332 - RNA, 32 nt, Homo Sapiens
ucuuuccggagccccagcgucuccugcccaaa

SEQ ID NO: 357333 - RNA, 32 nt, Homo Sapiens
uguugccccugggcggggcggcgugggaagac

SEQ ID NO: 357334 - RNA, 32 nt, Homo Sapiens
ucccgcuuuucccccaguuccccaagagcguc

SEQ ID NO: 357335 - RNA, 32 nt, Homo Sapiens
guggcaggauuucgggaagcuggggacacggc

SEQ ID NO: 357336 - RNA, 30 nt, Homo Sapiens
ccagggcccugcugucagugcgccugcgcg

SEQ ID NO: 357337 - RNA, 32 nt, Homo Sapiens
augccucucccgcuccaguccuagcccagcug

SEQ ID NO: 357338 - RNA, 32 nt, Homo Sapiens
uuuggaacuuacaaagggucuaucuuguaaau

SEQ ID NO: 357339 - RNA, 32 nt, Homo Sapiens
cauuuggaggauuuucuucuuuguaauguaaa

SEQ ID NO: 357340 - RNA, 32 nt, Homo Sapiens
gugagaaauauucuggagaaauuuacaccauc

SEQ ID NO: 357341 - RNA, 32 nt, Homo Sapiens
cccguccauggugcuaagcgggcccggguccc

SEQ ID NO: 357342 - RNA, 30 nt, Homo Sapiens
ccucggagagguggcaugauuguggauccc

SEQ ID NO: 357343 - RNA, 32 nt, Homo Sapiens
uggagauaauggagccgucuuuuacucacugc

SEQ ID NO: 357344 - RNA, 32 nt, Homo Sapiens
gauuuauguuucccucagucauuugguuuaug

SEQ ID NO: 357345 - RNA, 32 nt, Homo Sapiens
aacaaauuuugccaauugcuggaccaauggca

SEQ ID NO: 357346 - RNA, 32 nt, Homo Sapiens
uguccuagucuccugcuccccccgccccgcuu

SEQ ID NO: 357347 - RNA, 32 nt, Homo Sapiens
aaacaauggacacuuccugauggcaucagugg

SEQ ID NO: 357348 - RNA, 32 nt, Homo Sapiens
acaaccucuuuucugcagaaaagcuccagcag

SEQ ID NO: 357349 - RNA, 32 nt, Homo Sapiens
ucuuggggagaugccuuggggucuguggcaag

SEQ ID NO: 357350 - RNA, 32 nt, Homo Sapiens
uuuccccguaccgcagcccccgggcacgaccu

SEQ ID NO: 357351 - RNA, 32 nt, Homo Sapiens
ugggauucauuuaaaaauuaaucuuucccugu

SEQ ID NO: 357352 - RNA, 32 nt, Homo Sapiens
ggggcccaacgcgcaugcugggcgcccgggug

SEQ ID NO: 357353 - RNA, 32 nt, Homo Sapiens
caucucaucuaugccugcaggcaacugaaaag

SEQ ID NO: 357354 - RNA, 32 nt, Homo Sapiens
gcaagagagcagcgcccaggccugcuggcauc

SEQ ID NO: 357355 - RNA, 32 nt, Homo Sapiens
ucccagguucccucggccuguaccucgcgcac

SEQ ID NO: 357356 - RNA, 32 nt, Homo Sapiens
gaccugggcuucuggagggccagcucccagag

SEQ ID NO: 357357 - RNA, 32 nt, Homo Sapiens
uacguggucauccugugccccacggagaugga

SEQ ID NO: 357358 - RNA, 32 nt, Homo Sapiens
ccugugcccuccccacucccaggcggggcagg

SEQ ID NO: 357359 - RNA, 32 nt, Homo Sapiens
uggcauaaaguuuggggaugccaggcauacuu

SEQ ID NO: 357360 - RNA, 32 nt, Homo Sapiens
uaauuuaaaaauuguaauacauugauuuauaa

SEQ ID NO: 357361 - RNA, 32 nt, Homo Sapiens
aaauuuuccuuccuguucugugucugcuguaa

SEQ ID NO: 357362 - RNA, 32 nt, Homo Sapiens
uguuuuuguaaaaaugugaaaagucaaaaaua

SEQ ID NO: 357363 - RNA, 32 nt, Homo Sapiens
gcuguaccuuuucugauucagaauuauagaaa

SEQ ID NO: 357364 - RNA, 32 nt, Homo Sapiens
cggcuccgcaacugccacuccuccucggggug

SEQ ID NO: 357365 - RNA, 32 nt, Homo Sapiens
aaaaagaaaaggaauagucauuaaggauaccu

SEQ ID NO: 357366 - RNA, 32 nt, Homo Sapiens
uaagcgggcucagagcgccgcggcauucagcc

SEQ ID NO: 357367 - RNA, 27 nt, Homo Sapiens
aucauugucuuuuucagcccgcuccgg

SEQ ID NO: 357368 - RNA, 32 nt, Homo Sapiens
uuaacagugcuaaauguuuuguauuucccagu

SEQ ID NO: 357369 - RNA, 32 nt, Homo Sapiens
uucuucuccaugaagccagggcacaaagaauu

SEQ ID NO: 357370 - RNA, 32 nt, Homo Sapiens
augugccuuguuaacaaaauguuuacaagcag

SEQ ID NO: 357371 - RNA, 32 nt, Homo Sapiens
ugagggcaguugcucuguguuggugaaauugc

SEQ ID NO: 357372 - RNA, 32 nt, Homo Sapiens
gggguagggcugccaugcugcagagcugaugg

SEQ ID NO: 357373 - RNA, 31 nt, Homo Sapiens
uccuagcagcgcauuuugucugugggcccug

SEQ ID NO: 357374 - RNA, 32 nt, Homo Sapiens
acacuuaaugauacauguuuccaauuauccuu

SEQ ID NO: 357375 - RNA, 32 nt, Homo Sapiens
gaacacaaccucaaucagcaucguuuucauac

SEQ ID NO: 357376 - RNA, 32 nt, Homo Sapiens
uauuuucagagcggcgggaguagggcugggga

SEQ ID NO: 357377 - RNA, 32 nt, Homo Sapiens
ugcggucgaagaaggggacgccgacaagaguu

SEQ ID NO: 357378 - RNA, 32 nt, Homo Sapiens
aaagguuuuugcaaauaagaauaugaaaaaua

SEQ ID NO: 357379 - RNA, 32 nt, Homo Sapiens
cagaugucuccagaccugaggacuuuuuaaua

SEQ ID NO: 357380 - RNA, 32 nt, Homo Sapiens
aacaguguguuuaauaaauuguaauuauuuug

SEQ ID NO: 357381 - RNA, 32 nt, Homo Sapiens
cuugggagacagaagaggcaucugugcacagc

SEQ ID NO: 357382 - RNA, 32 nt, Homo Sapiens
cugcggaggccugcugcccccuggcggccagu

SEQ ID NO: 357383 - RNA, 32 nt, Homo Sapiens
uuaugcuuucccugauuccagcuuucugcuuc

SEQ ID NO: 357384 - RNA, 32 nt, Homo Sapiens
cuuuuacuuuugucauuuucuugauaaucgua

SEQ ID NO: 357385 - RNA, 32 nt, Homo Sapiens
cuuugcaacaccuuaaguggacaggacuggga

SEQ ID NO: 357386 - RNA, 32 nt, Homo Sapiens
gguuguugauggggaacuugccacuaagagaa

SEQ ID NO: 357387 - RNA, 32 nt, Homo Sapiens
ucucccugcccccagccagccccuccccaucc

SEQ ID NO: 357388 - RNA, 32 nt, Homo Sapiens
uaggucccggccagcucuggaguucucucauc

SEQ ID NO: 357389 - RNA, 32 nt, Homo Sapiens
cgcugccaccugaucccauccaggcgcugaga

SEQ ID NO: 357390 - RNA, 32 nt, Homo Sapiens
acuuuaauaggugauaaauguacaguaguuag

SEQ ID NO: 357391 - RNA, 30 nt, Homo Sapiens
ccccuccuaaugacagaggaaaccgaggcu

SEQ ID NO: 357392 - RNA, 32 nt, Homo Sapiens
gcccaccugcuucccagaaccuccucacuagg

SEQ ID NO: 357393 - RNA, 32 nt, Homo Sapiens
caggagccaggucuggagcaucagugugaggg

SEQ ID NO: 357394 - RNA, 32 nt, Homo Sapiens
auugugcauaucgucuaauaauaaaaacccau

SEQ ID NO: 357395 - RNA, 32 nt, Homo Sapiens
aggaccccaccugacaggcucugguccaagau

SEQ ID NO: 357396 - RNA, 32 nt, Homo Sapiens
ccuacagacgggagucagagaucuggccaacc

SEQ ID NO: 357397 - RNA, 32 nt, Homo Sapiens
acaucaaaaauauuuaaaauuuguaucugacu

SEQ ID NO: 357398 - RNA, 32 nt, Homo Sapiens
guaguaauauuauauuaucaaggguuuauauu

SEQ ID NO: 357399 - RNA, 32 nt, Homo Sapiens
ccgcaacccgcgccgcgccgcgccgauuugau

SEQ ID NO: 357400 - RNA, 32 nt, Homo Sapiens
ccuguugauauaugugcugaugcugcugggca

SEQ ID NO: 357401 - RNA, 32 nt, Homo Sapiens
guuugcggagagccgcuuaugggugugguccg

SEQ ID NO: 357402 - RNA, 32 nt, Homo Sapiens
aacucaagcccccaauucccaucgcauuccau

SEQ ID NO: 357403 - RNA, 32 nt, Homo Sapiens
gcggcccugccagugguagcacagugucccca

SEQ ID NO: 357404 - RNA, 32 nt, Homo Sapiens
cuuuaaaugucuccaguguggcacauaauguu

SEQ ID NO: 357405 - RNA, 32 nt, Homo Sapiens
agcaugguuucaugguuuuucucuaugaaaug

SEQ ID NO: 357406 - RNA, 32 nt, Homo Sapiens
aaauuggaggguaaaacugaagaaauuguuga

SEQ ID NO: 357407 - RNA, 32 nt, Homo Sapiens
uuuuccagccucauggguauggcacucuuaau

SEQ ID NO: 357408 - RNA, 32 nt, Homo Sapiens
cuacauguuagaggcacagacugggugcaggu

SEQ ID NO: 357409 - RNA, 32 nt, Homo Sapiens
aacggucguaacuucggggcugcgagcgcgga

SEQ ID NO: 357410 - RNA, 32 nt, Homo Sapiens
gcaaaaaugauggcggcuuacaauggcgguac

SEQ ID NO: 357411 - RNA, 32 nt, Homo Sapiens
gaucugcugcaguguccuuuccuguggaggcu

SEQ ID NO: 357412 - RNA, 32 nt, Homo Sapiens
agccaguccccauuggcugacagugccaccug

SEQ ID NO: 357413 - RNA, 32 nt, Homo Sapiens
uccagcgcucccucacagaacucccccgcacc

SEQ ID NO: 357414 - RNA, 32 nt, Homo Sapiens
ucacagucauauauuuacuguuauauagauug

SEQ ID NO: 357415 - RNA, 32 nt, Homo Sapiens
gcucugcacacaccugucuuccccucaucagg

SEQ ID NO: 357416 - RNA, 32 nt, Homo Sapiens
ucagccuggacagcuaccaggaucucacuggg

SEQ ID NO: 357417 - RNA, 32 nt, Homo Sapiens
cugcuacgggguccggccggcgcccucccgag

SEQ ID NO: 357418 - RNA, 32 nt, Homo Sapiens
cucggccggcccggagcucgcccacgcggacc

SEQ ID NO: 357419 - RNA, 32 nt, Homo Sapiens
gcgcucggguggcgggggcgggucugaguggu

SEQ ID NO: 357420 - RNA, 32 nt, Homo Sapiens
uuucugcucuccccggcaugccuggcuuguuu

SEQ ID NO: 357421 - RNA, 32 nt, Homo Sapiens
ggggaugcuuaauguguacaaaaacuauguag

SEQ ID NO: 357422 - RNA, 29 nt, Homo Sapiens
cuccaagcaaauaaauguacaucuuuauc

SEQ ID NO: 357423 - RNA, 32 nt, Homo Sapiens
agcucccuguaacccaauucucuuauuugaua

SEQ ID NO: 357424 - RNA, 32 nt, Homo Sapiens
uuuuuaggaauuuuauuuuucaccuuaauucu

SEQ ID NO: 357425 - RNA, 32 nt, Homo Sapiens
ugcagcgggcacccucaucaccauagggaagg

SEQ ID NO: 357426 - RNA, 32 nt, Homo Sapiens
uuuguauauuagacuuaauagcaaaguauauu

SEQ ID NO: 357427 - RNA, 32 nt, Homo Sapiens
gucauagugucugcuuucuagauaucugggaa

SEQ ID NO: 357428 - RNA, 32 nt, Homo Sapiens
cguggucucacgggagcccuggccaggugacc

SEQ ID NO: 357429 - RNA, 32 nt, Homo Sapiens
augaccauauggaacaucccaaggcuguccca

SEQ ID NO: 357430 - RNA, 32 nt, Homo Sapiens
uaggaaggucuggccuggggucgggugaagga

SEQ ID NO: 357431 - RNA, 32 nt, Homo Sapiens
gccuaucuuuugcuguguucaccucugaccag

SEQ ID NO: 357432 - RNA, 32 nt, Homo Sapiens
auauagaauaaggguuuuugcauaauaagcag

SEQ ID NO: 357433 - RNA, 32 nt, Homo Sapiens
cauucugaaucuuccugccccuccucacugcu

SEQ ID NO: 357434 - RNA, 32 nt, Homo Sapiens
ucugguagcugggauuacagggaaggaaaaua

SEQ ID NO: 357435 - RNA, 32 nt, Homo Sapiens
caugaacacuugcaguugcuaagggacuuuau

SEQ ID NO: 357436 - RNA, 32 nt, Homo Sapiens
ggggcucucuacagagaauuuuuauuuuguaa

SEQ ID NO: 357437 - RNA, 32 nt, Homo Sapiens
gaacuccaacaaugacgauaauaaugcccaga

SEQ ID NO: 357438 - RNA, 32 nt, Homo Sapiens
uauucucuccucuuguaaauauuuauuuuaaa

SEQ ID NO: 357439 - RNA, 32 nt, Homo Sapiens
gugcacuguauaagagaguacucuuacauuaa

SEQ ID NO: 357440 - RNA, 32 nt, Homo Sapiens
agugucuucauuagugugcaucuauuaacugu

SEQ ID NO: 357441 - RNA, 32 nt, Homo Sapiens
aaaagguguuugugcuccguuuuguuucugcu

SEQ ID NO: 357442 - RNA, 32 nt, Homo Sapiens
accacacgcugcgcuagcacaaacacaaagua

SEQ ID NO: 357443 - RNA, 32 nt, Homo Sapiens
gggcuccucccgcuccuccugggcaaugcucc

SEQ ID NO: 357444 - RNA, 32 nt, Homo Sapiens
caacuuccuguugauguucagaauggauuuau

SEQ ID NO: 357445 - RNA, 32 nt, Homo Sapiens
agauuuguuuuaaaaaagucugaauuggcaug

SEQ ID NO: 357446 - RNA, 32 nt, Homo Sapiens
ggaaggcacgguggcgacucacgcuguucucg

SEQ ID NO: 357447 - RNA, 32 nt, Homo Sapiens
uaaaggauuacaacacuuaaaauugaauggac

SEQ ID NO: 357448 - RNA, 32 nt, Homo Sapiens
cacagacagaaacgccugccccugccccaagu

SEQ ID NO: 357449 - RNA, 32 nt, Homo Sapiens
gguguggagccuuugccugucucuaaaaagag

SEQ ID NO: 357450 - RNA, 32 nt, Homo Sapiens
caggaggaaugggaauaucuggauucugcuca

SEQ ID NO: 357451 - RNA, 32 nt, Homo Sapiens
guucaacuuuuguagaguuuauuguucagaga

SEQ ID NO: 357452 - RNA, 32 nt, Homo Sapiens
cccuauuugcaaaagcacuuuuguaguaacaa

SEQ ID NO: 357453 - RNA, 32 nt, Homo Sapiens
ccagggccgcugagccggggccgcaggaaagg

SEQ ID NO: 357454 - RNA, 32 nt, Homo Sapiens
ucccccucccccaccccuuugccuuuucuaag

SEQ ID NO: 357455 - RNA, 32 nt, Homo Sapiens
auuuagaagaucuggcuacacccuguagaugc

SEQ ID NO: 357456 - RNA, 32 nt, Homo Sapiens
cgguaaccagcgugagcucgcccgccagaaga

SEQ ID NO: 357457 - RNA, 32 nt, Homo Sapiens
gccagcugcccccauaacuggcagcauuccca

SEQ ID NO: 357458 - RNA, 32 nt, Homo Sapiens
caugagaggagggacuccaucuugagccaugu

SEQ ID NO: 357459 - RNA, 32 nt, Homo Sapiens
guuuaauaaagucaguuuaauuuuaucuaaua

SEQ ID NO: 357460 - RNA, 32 nt, Homo Sapiens
uggcuagagaaugucaauguccacacugcaug

SEQ ID NO: 357461 - RNA, 32 nt, Homo Sapiens
auaggggccuuucuugccauugcucaaaauga

SEQ ID NO: 357462 - RNA, 32 nt, Homo Sapiens
ccgaugcccucgcaggcucccggagcaccauc

SEQ ID NO: 357463 - RNA, 32 nt, Homo Sapiens
ccucgguccagguuaugggaucagccaaucaa

SEQ ID NO: 357464 - RNA, 32 nt, Homo Sapiens
gagccccagcugcggaggccgacggcacccgg

SEQ ID NO: 357465 - RNA, 32 nt, Homo Sapiens
ccaccgcccucccuccccgcccugccgcccug

SEQ ID NO: 357466 - RNA, 32 nt, Homo Sapiens
ucggagggagguucgggugggcaucgggcggc

SEQ ID NO: 357467 - RNA, 32 nt, Homo Sapiens
cccugcucaucuccaauaaaauaaaagcacuu

SEQ ID NO: 357468 - RNA, 32 nt, Homo Sapiens
ugcauaaacaauucuugcauuuuccugaagug

SEQ ID NO: 357469 - RNA, 32 nt, Homo Sapiens
uaagcaucuacucuguguccagcccugugcag

SEQ ID NO: 357470 - RNA, 32 nt, Homo Sapiens
cuguaucuugcguuuuaaauucuuaauaaggu

SEQ ID NO: 357471 - RNA, 32 nt, Homo Sapiens
uggccaacgggccccagguugaaggccaucgc

SEQ ID NO: 357472 - RNA, 32 nt, Homo Sapiens
cugggccuucuuccagggggccccuggcagca

SEQ ID NO: 357473 - RNA, 32 nt, Homo Sapiens
ucugcccuucggagccucuggaagcuuagggc

SEQ ID NO: 357474 - RNA, 32 nt, Homo Sapiens
uccucucucuuuccaaucccuaaagggaauua

SEQ ID NO: 357475 - RNA, 29 nt, Homo Sapiens
caacgcugguguuucaggagucaucccag

SEQ ID NO: 357476 - RNA, 32 nt, Homo Sapiens
uguccuuggcagagaccuugcugcccaggccc

SEQ ID NO: 357477 - RNA, 32 nt, Homo Sapiens
cuaauauucuaaugguaaauuucucuguauca

SEQ ID NO: 357478 - RNA, 32 nt, Homo Sapiens
uucacauguccugcaaauguauuguuaaauuu

SEQ ID NO: 357479 - RNA, 32 nt, Homo Sapiens
gaauguguuucugaucaucugaaucuuaauca

SEQ ID NO: 357480 - RNA, 32 nt, Homo Sapiens
gucacccucccucuccuucaugggaaacagcu

SEQ ID NO: 357481 - RNA, 31 nt, Homo Sapiens
caucccacgcacugccuggugcguccauaga

SEQ ID NO: 357482 - RNA, 32 nt, Homo Sapiens
guaaacauucaguccauugcaaugcguguuuc

SEQ ID NO: 357483 - RNA, 32 nt, Homo Sapiens
cucacauacgacuccaacgggauugugagaau

SEQ ID NO: 357484 - RNA, 26 nt, Homo Sapiens
gauggaggauucggccucggccucgc

SEQ ID NO: 357485 - RNA, 32 nt, Homo Sapiens
cuuauugaaaugugucccacuguaauuuccaa

SEQ ID NO: 357486 - RNA, 32 nt, Homo Sapiens
caguuuuugucaggggaacauaaaaauaucca

SEQ ID NO: 357487 - RNA, 32 nt, Homo Sapiens
uuguaaacuguaaagugacauacauauaauug

SEQ ID NO: 357488 - RNA, 32 nt, Homo Sapiens
uggaggagguggugauauuuaaaccauuuggu

SEQ ID NO: 357489 - RNA, 32 nt, Homo Sapiens
ccugggauucuccuccucccuccgccccacuc

SEQ ID NO: 357490 - RNA, 32 nt, Homo Sapiens
uucuaccccgcccacaccgcccuaaacggcuu

SEQ ID NO: 357491 - RNA, 32 nt, Homo Sapiens
ccaggugugggaaaacguuguggggguggaaa

SEQ ID NO: 357492 - RNA, 32 nt, Homo Sapiens
agacuggccacccgcugcgugugugugcgcgc

SEQ ID NO: 357493 - RNA, 32 nt, Homo Sapiens
guggcggcggcgcggggagccgguugcaggcc

SEQ ID NO: 357494 - RNA, 32 nt, Homo Sapiens
cccaugcucccucuaccucacugccaccacuc

SEQ ID NO: 357495 - RNA, 32 nt, Homo Sapiens
cggaauuccgcggaauuccgcgccgccgccgc

SEQ ID NO: 357496 - RNA, 32 nt, Homo Sapiens
uccgaacaggaguaaagaauggcuguugaaca

SEQ ID NO: 357497 - RNA, 32 nt, Homo Sapiens
ugcuucuuuccgagagaugucaaguccucaag

SEQ ID NO: 357498 - RNA, 32 nt, Homo Sapiens
ccuggaggaagcugcuggggugcggggggcug

SEQ ID NO: 357499 - RNA, 32 nt, Homo Sapiens
gugcugggccgcgggccgaaggagucgccagg

SEQ ID NO: 357500 - RNA, 32 nt, Homo Sapiens
gcggggagcgcggcgggcgccacguggaaaag

SEQ ID NO: 357501 - RNA, 32 nt, Homo Sapiens
gaagagggggcgggacagaggaugcuguucuu

SEQ ID NO: 357502 - RNA, 32 nt, Homo Sapiens
gccccccaggccaacagcgacuccaugguaau

SEQ ID NO: 357503 - RNA, 32 nt, Homo Sapiens
ggagauggcucuucuguguaaaucagcugcug

SEQ ID NO: 357504 - RNA, 32 nt, Homo Sapiens
agcaaaggagacugaggccagugaaguaggaa

SEQ ID NO: 357505 - RNA, 32 nt, Homo Sapiens
ggaggcaacagcuucuuagccuugacaccaaa

SEQ ID NO: 357506 - RNA, 32 nt, Homo Sapiens
caggcaauuugcacuauauuuggcugcagauu

SEQ ID NO: 357507 - RNA, 32 nt, Homo Sapiens
acaucaaauaucuaucagcugaugaaacaaua

SEQ ID NO: 357508 - RNA, 32 nt, Homo Sapiens
uucuaguguaaauguucaaauacuguuauaau

SEQ ID NO: 357509 - RNA, 32 nt, Homo Sapiens
cgccccagcgcgcgcccaggcgccuuggaauc

SEQ ID NO: 357510 - RNA, 32 nt, Homo Sapiens
cagguugugcccuguggcugccugcaccccag

SEQ ID NO: 357511 - RNA, 32 nt, Homo Sapiens
cuggcaggccuaggggacaaauccucagcccg

SEQ ID NO: 357512 - RNA, 32 nt, Homo Sapiens
ucggugaggcggugccgggcggggguugucgg

SEQ ID NO: 357513 - RNA, 32 nt, Homo Sapiens
cuauuaaugcugugagaauguuucuagaucag

SEQ ID NO: 357514 - RNA, 32 nt, Homo Sapiens
cguuucaacuuuuugguuaaauuuauuucaaa

SEQ ID NO: 357515 - RNA, 32 nt, Homo Sapiens
cgccauugcauuccagccugggugacagagcg

SEQ ID NO: 357516 - RNA, 32 nt, Homo Sapiens
cagauuuucuaaaaaucagauuucaaguucgu

SEQ ID NO: 357517 - RNA, 32 nt, Homo Sapiens
uuguucugcucagagcaccaccaggccuacuu

SEQ ID NO: 357518 - RNA, 32 nt, Homo Sapiens
auuuuuucuguuucucuuuucucuuaacgauu

SEQ ID NO: 357519 - RNA, 28 nt, Homo Sapiens
acuuuguggacuugcaggaugacuuaga

SEQ ID NO: 357520 - RNA, 32 nt, Homo Sapiens
ccccaaaaaaauuuuuuuuuuaauaaacccaa

SEQ ID NO: 357521 - RNA, 32 nt, Homo Sapiens
gauugcugucucccuugaauuccucuguuccu

SEQ ID NO: 357522 - RNA, 32 nt, Homo Sapiens
gucagugagacaaucucucuauaugcagagcc

SEQ ID NO: 357523 - RNA, 32 nt, Homo Sapiens
aaaauaaaguccccggguuccuuaaugccucc

SEQ ID NO: 357524 - RNA, 32 nt, Homo Sapiens
uuuuguaaaaauuaaauuuggaauuacuuguu

SEQ ID NO: 357525 - RNA, 32 nt, Homo Sapiens
caaggggcagugggcucuugggugcuguucca

SEQ ID NO: 357526 - RNA, 32 nt, Homo Sapiens
acucagauccucaucgcccuugugucagugcu

SEQ ID NO: 357527 - RNA, 30 nt, Homo Sapiens
gugucauggaauccgucaccuuugaggaug

SEQ ID NO: 357528 - RNA, 32 nt, Homo Sapiens
gcuguuaugcuucaggguugcugaagaagaug

SEQ ID NO: 357529 - RNA, 32 nt, Homo Sapiens
guggaaucaggagagcccagagguccuuugaa

SEQ ID NO: 357530 - RNA, 32 nt, Homo Sapiens
agcgggcacuggcgaucuuggccacggacagc

SEQ ID NO: 357531 - RNA, 32 nt, Homo Sapiens
gaggccagggaagaugguacuuagaggcuuuu

SEQ ID NO: 357532 - RNA, 30 nt, Homo Sapiens
ugacucugugcucaccaagcucuugaccuu

SEQ ID NO: 357533 - RNA, 32 nt, Homo Sapiens
ccaaacggaaagcgccaaauggcuguuuaaaa

SEQ ID NO: 357534 - RNA, 32 nt, Homo Sapiens
uauauaucuaagaccucugaucauuaaaaccu

SEQ ID NO: 357535 - RNA, 32 nt, Homo Sapiens
agauggcagaaguggaagaugagccuacuugu

SEQ ID NO: 357536 - RNA, 32 nt, Homo Sapiens
auuccuaaacuaugaaaccuuuuuccuaguag

SEQ ID NO: 357537 - RNA, 32 nt, Homo Sapiens
acaggcagaggcuggaacaguuuggagggcuc

SEQ ID NO: 357538 - RNA, 32 nt, Homo Sapiens
aaacccaccaaaaugcuccuauccaacaauua

SEQ ID NO: 357539 - RNA, 32 nt, Homo Sapiens
ugaaucuuccgcuuccuccccaccgauuucag

SEQ ID NO: 357540 - RNA, 32 nt, Homo Sapiens
gaaccuacccacccucacggccuggaguucuu

SEQ ID NO: 357541 - RNA, 32 nt, Homo Sapiens
ugcauccccaggacucauggaacuuaacucug

SEQ ID NO: 357542 - RNA, 28 nt, Homo Sapiens
cuucuguucucauuuauguguuuaggga

SEQ ID NO: 357543 - RNA, 32 nt, Homo Sapiens
uccuguucuugccuugucugaacuugccgcuu

SEQ ID NO: 357544 - RNA, 32 nt, Homo Sapiens
gcguacauaucccacagugcaucauuccgaac

SEQ ID NO: 357545 - RNA, 32 nt, Homo Sapiens
acaggaggagccauggucaucaucaucgggga

SEQ ID NO: 357546 - RNA, 32 nt, Homo Sapiens
ugggccgcauucccugcaggaccucccggguc

SEQ ID NO: 357547 - RNA, 32 nt, Homo Sapiens
gcaugucugcaccuccgcuugccagaggcccu

SEQ ID NO: 357548 - RNA, 32 nt, Homo Sapiens
acaccuuccucuaucucuaaugcuuucugauc

SEQ ID NO: 357549 - RNA, 32 nt, Homo Sapiens
aacuguugcagggcaacacuaguuugauauuu

SEQ ID NO: 357550 - RNA, 32 nt, Homo Sapiens
aaggaugucucuucuucugauuucugagugag

SEQ ID NO: 357551 - RNA, 32 nt, Homo Sapiens
aaacuugaaaaugacuuugccuuaacuuuugu

SEQ ID NO: 357552 - RNA, 32 nt, Homo Sapiens
guugacuucugcauuaaccugcaugaucuguu

SEQ ID NO: 357553 - RNA, 32 nt, Homo Sapiens
ccuuucuccuccuggggagugucguguugaac

SEQ ID NO: 357554 - RNA, 32 nt, Homo Sapiens
gcuugccgcggggcccacuaggcggggcgggg

SEQ ID NO: 357555 - RNA, 32 nt, Homo Sapiens
aucgagcagcuggauccccgcggccggacucc

SEQ ID NO: 357556 - RNA, 32 nt, Homo Sapiens
gaggacagcuggaagaaggcuauggaggagcu

SEQ ID NO: 357557 - RNA, 32 nt, Homo Sapiens
aaggcuguacucaagaggaggagcugacacau

SEQ ID NO: 357558 - RNA, 32 nt, Homo Sapiens
uuugaaaaugucaugauaccuguugagauaac

SEQ ID NO: 357559 - RNA, 32 nt, Homo Sapiens
aauaaaggaaauguuaucaaaagauguucuga

SEQ ID NO: 357560 - RNA, 32 nt, Homo Sapiens
cgcgguggguacggggugauguggaggcuggg

SEQ ID NO: 357561 - RNA, 32 nt, Homo Sapiens
ucgguccuacucugcccucccgucucagcccu

SEQ ID NO: 357562 - RNA, 32 nt, Homo Sapiens
uggcucacaccuguaaucaaaacacuuuggga

SEQ ID NO: 357563 - RNA, 32 nt, Homo Sapiens
ggcgguugaucggucauuggggugcugcagcc

SEQ ID NO: 357564 - RNA, 32 nt, Homo Sapiens
cccucacugacccuccaaacgccccuguccuc

SEQ ID NO: 357565 - RNA, 32 nt, Homo Sapiens
auucguuuagguuuuuauacuccaccuccuuu

SEQ ID NO: 357566 - RNA, 32 nt, Homo Sapiens
aagcucucaauaacccuugaaaaaugacugga

SEQ ID NO: 357567 - RNA, 32 nt, Homo Sapiens
uuguucauacaauauguuauaauagcaauauu

SEQ ID NO: 357568 - RNA, 32 nt, Homo Sapiens
aagccuguucuucuccuuccuguggcuucccc

SEQ ID NO: 357569 - RNA, 30 nt, Homo Sapiens
gcgcaguccgcgcagcccucaucgcaacug

SEQ ID NO: 357570 - RNA, 32 nt, Homo Sapiens
uuacccagaaaagauaggcccuagaagccuca

SEQ ID NO: 357571 - RNA, 31 nt, Homo Sapiens
aguggcggcugcugccugcucuggaggcagg

SEQ ID NO: 357572 - RNA, 32 nt, Homo Sapiens
ucacugccaugguugugcuauucucaucucaa

SEQ ID NO: 357573 - RNA, 32 nt, Homo Sapiens
aauuagccgggcgugguggcgggugccuguau

SEQ ID NO: 357574 - RNA, 32 nt, Homo Sapiens
ggacuucuuugggcagaugcuaggucaguugu

SEQ ID NO: 357575 - RNA, 32 nt, Homo Sapiens
uuuuaguuauuuacaucaaugaguucuuucag

SEQ ID NO: 357576 - RNA, 32 nt, Homo Sapiens
acuauguguucuauuccggauguucuagcuag

SEQ ID NO: 357577 - RNA, 32 nt, Homo Sapiens
aggauucagugccuggugaggacccauuccuu

SEQ ID NO: 357578 - RNA, 32 nt, Homo Sapiens
gacugcagcucuuuucauuuugccauccuuuu

SEQ ID NO: 357579 - RNA, 32 nt, Homo Sapiens
agcugggcgcgguggugcacaccuauagucuc

SEQ ID NO: 357580 - RNA, 31 nt, Homo Sapiens
aaagucagaagucaccauagagccugcaaau

SEQ ID NO: 357581 - RNA, 32 nt, Homo Sapiens
cucuuuuccaacaauguauaaucuccaccuau

SEQ ID NO: 357582 - RNA, 32 nt, Homo Sapiens
uucuacugguguauauuuuuuacuggaaauga

SEQ ID NO: 357583 - RNA, 32 nt, Homo Sapiens
guuuaugcugucagcacauuugugugggucuc

SEQ ID NO: 357584 - RNA, 32 nt, Homo Sapiens
ccacuuggccccuuuuaaaaacguguaugugc

SEQ ID NO: 357585 - RNA, 32 nt, Homo Sapiens
ggucucaaacucccgaccucaaguagucugcc

SEQ ID NO: 357586 - RNA, 32 nt, Homo Sapiens
cugccuagcauuagaggcucucagaucugccc

SEQ ID NO: 357587 - RNA, 32 nt, Homo Sapiens
uucucaagaaggaagacuccccugccucccca

SEQ ID NO: 357588 - RNA, 32 nt, Homo Sapiens
gcaccaucuucaggugcuuagaauggccuggg

SEQ ID NO: 357589 - RNA, 32 nt, Homo Sapiens
cuuaagcauaaaaauugaauucguuucugaca

SEQ ID NO: 357590 - RNA, 32 nt, Homo Sapiens
cuuucauugcagggaucuuaugcuggcaaaau

SEQ ID NO: 357591 - RNA, 27 nt, Homo Sapiens
accaccuccuucuuucccgccccugcg

SEQ ID NO: 357592 - RNA, 32 nt, Homo Sapiens
ugggucuccucccuccucccccuucaccaaug

SEQ ID NO: 357593 - RNA, 32 nt, Homo Sapiens
cagacuaggggcugggggcggccacagacggc

SEQ ID NO: 357594 - RNA, 32 nt, Homo Sapiens
gaaaugggagcacggcacugggaaaugggagc

SEQ ID NO: 357595 - RNA, 32 nt, Homo Sapiens
gggucuaaggacaagcaguccuuacuuuggga

SEQ ID NO: 357596 - RNA, 32 nt, Homo Sapiens
cauagacccgggacgagcggcgcggagcccgc

SEQ ID NO: 357597 - RNA, 32 nt, Homo Sapiens
cagccucccucucccaccucugucugcccgcu

SEQ ID NO: 357598 - RNA, 32 nt, Homo Sapiens
cccugggagagccuguggcccaccuuggccuu

SEQ ID NO: 357599 - RNA, 32 nt, Homo Sapiens
uacugggagaaaaaagagaggagugguuguag

SEQ ID NO: 357600 - RNA, 32 nt, Homo Sapiens
agcuagccugaaggauucugggaaucaugucc

SEQ ID NO: 357601 - RNA, 32 nt, Homo Sapiens
ugcucacggcucugcagucccgcggcgcgaua

SEQ ID NO: 357602 - RNA, 32 nt, Homo Sapiens
gucaaguaguugucauaaaacaucaguuacga

SEQ ID NO: 357603 - RNA, 31 nt, Homo Sapiens
ugaaaaguuaggccucucagagucaccacuu

SEQ ID NO: 357604 - RNA, 32 nt, Homo Sapiens
gcgggcgguugcggcgaggcgaggcgaggcgg

SEQ ID NO: 357605 - RNA, 32 nt, Homo Sapiens
auacuuguuuguguuuuaaauaaaacugaugu

SEQ ID NO: 357606 - RNA, 32 nt, Homo Sapiens
agcaacagagugagaccccugucucuacaaaa

SEQ ID NO: 357607 - RNA, 32 nt, Homo Sapiens
ucucguaaacacacucuccuccaccggcgccu

SEQ ID NO: 357608 - RNA, 32 nt, Homo Sapiens
ucugaagaaacaaguucuccuccacgacuugc

SEQ ID NO: 357609 - RNA, 32 nt, Homo Sapiens
gggaacccaucccacacaccagcugugugacc

SEQ ID NO: 357610 - RNA, 32 nt, Homo Sapiens
gcagguacacgacaccacggacgugccacgua

SEQ ID NO: 357611 - RNA, 32 nt, Homo Sapiens
ggggacaagggcagacggccccugccugggaa

SEQ ID NO: 357612 - RNA, 32 nt, Homo Sapiens
cccgcccuucccgagaccccagccgggcugcc

SEQ ID NO: 357613 - RNA, 32 nt, Homo Sapiens
ucgcagcccuccgugcuccccccuaucaugcc

SEQ ID NO: 357614 - RNA, 32 nt, Homo Sapiens
uugaaagauuuaugucagucuuagauaauacc

SEQ ID NO: 357615 - RNA, 32 nt, Homo Sapiens
cuggagaaauaccagcaaagggcuguguagac

SEQ ID NO: 357616 - RNA, 32 nt, Homo Sapiens
cagcccugaggcuccgccccagcccucagccc

SEQ ID NO: 357617 - RNA, 28 nt, Homo Sapiens
uuuacaguggcuaaggaggaaaggggag

SEQ ID NO: 357618 - RNA, 31 nt, Homo Sapiens
agaaugcggcacugacgggcaagugcuucug

SEQ ID NO: 357619 - RNA, 32 nt, Homo Sapiens
ucuucagagcaaaaacagccaaucuugaaaac

SEQ ID NO: 357620 - RNA, 32 nt, Homo Sapiens
uagcuagugucuagugucagcuuugcucaaug

SEQ ID NO: 357621 - RNA, 32 nt, Homo Sapiens
gaagcgccccucccucccggacggggcggcug

SEQ ID NO: 357622 - RNA, 32 nt, Homo Sapiens
ccuuuugguagaguuuguuucccuggaaaaug

SEQ ID NO: 357623 - RNA, 32 nt, Homo Sapiens
caggccaggcauuuggggucuugggccacagu

SEQ ID NO: 357624 - RNA, 32 nt, Homo Sapiens
cagacggcgggggcggcccaggcgcccgggau

SEQ ID NO: 357625 - RNA, 32 nt, Homo Sapiens
acggugcuccauucgcaccuccccuccucgug

SEQ ID NO: 357626 - RNA, 32 nt, Homo Sapiens
cugagauugugaacaaggaugucuggggcgau

SEQ ID NO: 357627 - RNA, 32 nt, Homo Sapiens
ucauggcaccucagccagggguguacaaguag

SEQ ID NO: 357628 - RNA, 32 nt, Homo Sapiens
acaagacucuccaggaggaaauacagcagaga

SEQ ID NO: 357629 - RNA, 32 nt, Homo Sapiens
gccacacccaccgggcccucuccggcgucugc

SEQ ID NO: 357630 - RNA, 32 nt, Homo Sapiens
agacuccuuucuggccuaacagcgcauuccuu

SEQ ID NO: 357631 - RNA, 32 nt, Homo Sapiens
cuaccuccccuggccugggugaguugggggug

SEQ ID NO: 357632 - RNA, 32 nt, Homo Sapiens
gggaagaggaggaggaggcuguggaugacaca

SEQ ID NO: 357633 - RNA, 32 nt, Homo Sapiens
ccagaagacacuuuauucguuuauauugugag

SEQ ID NO: 357634 - RNA, 32 nt, Homo Sapiens
uuucuuugagggcauuuauucugugugacugu

SEQ ID NO: 357635 - RNA, 32 nt, Homo Sapiens
gauuaaucuguagcaugcaucauuccuuggcu

SEQ ID NO: 357636 - RNA, 32 nt, Homo Sapiens
guguaaauauucaacacuuccauuccauuugu

SEQ ID NO: 357637 - RNA, 32 nt, Homo Sapiens
cugcaaacucgacaggacccugcccgaggggc

SEQ ID NO: 357638 - RNA, 32 nt, Homo Sapiens
cucagucccucuucugguuucccuuuauuucu

SEQ ID NO: 357639 - RNA, 32 nt, Homo Sapiens
gcauucaccaaauaaacuugcucucugggccu

SEQ ID NO: 357640 - RNA, 32 nt, Homo Sapiens
uaggucuguaggucccuggugcuuccaguacu

SEQ ID NO: 357641 - RNA, 32 nt, Homo Sapiens
acaaggcaaagauagucauucauucaacacau

SEQ ID NO: 357642 - RNA, 32 nt, Homo Sapiens
gcucucacaucuguagcaauaaagcuguuauu

SEQ ID NO: 357643 - RNA, 32 nt, Homo Sapiens
guaguuggagucuguucacgggccugagcuuc

SEQ ID NO: 357644 - RNA, 32 nt, Homo Sapiens
aggcuuccuggucuagaguugcuggcaagaag

SEQ ID NO: 357645 - RNA, 32 nt, Homo Sapiens
aucugcccgcggcugcgugaggacagcagggg

SEQ ID NO: 357646 - RNA, 32 nt, Homo Sapiens
ggcuggucucaaacuccugaccucagguguuc

SEQ ID NO: 357647 - RNA, 32 nt, Homo Sapiens
aauuuuuccagaagcuuguucaaauuuuauuu

SEQ ID NO: 357648 - RNA, 32 nt, Homo Sapiens
auugauuuacuucaauuuguuaccacaacuug

SEQ ID NO: 357649 - RNA, 32 nt, Homo Sapiens
uauucuuagcagugacuuauuaucuguugaag

SEQ ID NO: 357650 - RNA, 32 nt, Homo Sapiens
ugguuuuugugaugcuguauuacuucuggguu

SEQ ID NO: 357651 - RNA, 32 nt, Homo Sapiens
caaugauucuuuaggaacuuugaauacugaau

SEQ ID NO: 357652 - RNA, 32 nt, Homo Sapiens
ucccuugccucauaggcuucugggaugucauc

SEQ ID NO: 357653 - RNA, 32 nt, Homo Sapiens
auugcuauagagucccugggcuuuaaacgcuu

SEQ ID NO: 357654 - RNA, 32 nt, Homo Sapiens
acuuuuggucgagcggagggcgcgcagcucca

SEQ ID NO: 357655 - RNA, 32 nt, Homo Sapiens
cucggcgaagagcggcuuggagcgguugauga

SEQ ID NO: 357656 - RNA, 32 nt, Homo Sapiens
ccgaggaggggcccgguggcggcagggccagg

SEQ ID NO: 357657 - RNA, 32 nt, Homo Sapiens
uauuaauaaaaugguucaugaaucggagacua

SEQ ID NO: 357658 - RNA, 32 nt, Homo Sapiens
agcagcuccaaucccaccccagccuccucagc

SEQ ID NO: 357659 - RNA, 32 nt, Homo Sapiens
agucauugucauaaguaaaccuaguaaaaccu

SEQ ID NO: 357660 - RNA, 32 nt, Homo Sapiens
cagccugccuuuggccgcuccccgcccccacu

SEQ ID NO: 357661 - RNA, 32 nt, Homo Sapiens
uggacgcagaacuucagccaugaagguaacag

SEQ ID NO: 357662 - RNA, 32 nt, Homo Sapiens
guggcaccuuggccacaugccugcaggcauuu

SEQ ID NO: 357663 - RNA, 32 nt, Homo Sapiens
cgugaugggaagugggggugggacaggcuccu

SEQ ID NO: 357664 - RNA, 31 nt, Homo Sapiens
gucuaggugcgcagccaccuauggaugcguc

SEQ ID NO: 357665 - RNA, 32 nt, Homo Sapiens
acuuuuaaaaauuuaguggauuuugaaaauuc

SEQ ID NO: 357666 - RNA, 32 nt, Homo Sapiens
uuugugggaugaugaagaccucauaacagacg

SEQ ID NO: 357667 - RNA, 32 nt, Homo Sapiens
uccauuauuuuauuuuauagucucaaaucaaa

SEQ ID NO: 357668 - RNA, 32 nt, Homo Sapiens
uauucauucagcaaauguuuuuugagccuaca

SEQ ID NO: 357669 - RNA, 32 nt, Homo Sapiens
aucaagccuuauaauaucuuauagaccaugca

SEQ ID NO: 357670 - RNA, 32 nt, Homo Sapiens
aggccuggagguuuugcgcgagcauuacguuc

SEQ ID NO: 357671 - RNA, 32 nt, Homo Sapiens
gaagggugaugaugaggguuaaauuaacaaua

SEQ ID NO: 357672 - RNA, 32 nt, Homo Sapiens
ggcagugccacccuuacccagcccagccuuga

SEQ ID NO: 357673 - RNA, 32 nt, Homo Sapiens
caggcuccccggccccggggccucaggguccc

SEQ ID NO: 357674 - RNA, 32 nt, Homo Sapiens
ccaggcucuugggcccuucccgagggcaggca

SEQ ID NO: 357675 - RNA, 32 nt, Homo Sapiens
uccgagaagguugcaagaagaugccacugucu

SEQ ID NO: 357676 - RNA, 32 nt, Homo Sapiens
ugaugaguuuuuaugguuccaaugaaauaucu

SEQ ID NO: 357677 - RNA, 32 nt, Homo Sapiens
cugccugcugcagcugcaggcauucugagggg

SEQ ID NO: 357678 - RNA, 32 nt, Homo Sapiens
uaaguuuuuuaaaaacaacuggaggcaucuuu

SEQ ID NO: 357679 - RNA, 32 nt, Homo Sapiens
ugacaaauuuuaaauuuucucuaauaguccuc

SEQ ID NO: 357680 - RNA, 32 nt, Homo Sapiens
acauccugugggugggggcccucgacaggaca

SEQ ID NO: 357681 - RNA, 32 nt, Homo Sapiens
guuuuccacucugggcugggugggccaggugu

SEQ ID NO: 357682 - RNA, 32 nt, Homo Sapiens
gcaauuugcagggcacugcugggcaggagucc

SEQ ID NO: 357683 - RNA, 32 nt, Homo Sapiens
uugauaucuacugacauugucuauaugaggaa

SEQ ID NO: 357684 - RNA, 32 nt, Homo Sapiens
uucuguagcauuucuuuuuuuaucacacuagu

SEQ ID NO: 357685 - RNA, 32 nt, Homo Sapiens
uaguguuuaaagaaacaaagaaacucuaauau

SEQ ID NO: 357686 - RNA, 32 nt, Homo Sapiens
ucuguuuucuucacuuaauauagugucauuga

SEQ ID NO: 357687 - RNA, 32 nt, Homo Sapiens
ucaggacaucuggguucuggguccuggucuug

SEQ ID NO: 357688 - RNA, 32 nt, Homo Sapiens
accuagaaugucaagacacucaagauaaagac

SEQ ID NO: 357689 - RNA, 32 nt, Homo Sapiens
guuuuuucuuuuucuuuuuuuuuccaaaaaua

SEQ ID NO: 357690 - RNA, 32 nt, Homo Sapiens
ggcuaacaagcacuuuaguugcugguuuacau

SEQ ID NO: 357691 - RNA, 32 nt, Homo Sapiens
acuguggaugcaucgcuggguaaaggagaaga

SEQ ID NO: 357692 - RNA, 32 nt, Homo Sapiens
uuaacaggguuuccuuuuuuucucacgacuau

SEQ ID NO: 357693 - RNA, 32 nt, Homo Sapiens
aauggguucuggaguucucauggucuuuagga

SEQ ID NO: 357694 - RNA, 32 nt, Homo Sapiens
ucccggguucaagcgauucuucugccucagcc

SEQ ID NO: 357695 - RNA, 32 nt, Homo Sapiens
gcucaucaauuucauaagacuaugcuugcuaa

SEQ ID NO: 357696 - RNA, 32 nt, Homo Sapiens
uuaguuccuauauguuuuuucuuuagaaacag

SEQ ID NO: 357697 - RNA, 32 nt, Homo Sapiens
ccugaccucauuugaccuucacagcaacccag

SEQ ID NO: 357698 - RNA, 32 nt, Homo Sapiens
ggaagaccuggauuucuuucuggaagacacug

SEQ ID NO: 357699 - RNA, 31 nt, Homo Sapiens
ucuggagccagucuaccuugaguuaaauccc

SEQ ID NO: 357700 - RNA, 31 nt, Homo Sapiens
agcaguuuggauucaaguucuuguaucuguc

SEQ ID NO: 357701 - RNA, 32 nt, Homo Sapiens
gccucuuaaaaauuaucuuuaaaacuuacuau

SEQ ID NO: 357702 - RNA, 32 nt, Homo Sapiens
auuuucuuuuuuucuuuuuuuuuuuaagaaaa

SEQ ID NO: 357703 - RNA, 32 nt, Homo Sapiens
gaccggcgcccuagccugggaauccggggaau

SEQ ID NO: 357704 - RNA, 32 nt, Homo Sapiens
uuuuuauuauguaagcaaaaccaauaaaaauu

SEQ ID NO: 357705 - RNA, 32 nt, Homo Sapiens
cucccucguggcgggcccggacaugggguccc

SEQ ID NO: 357706 - RNA, 32 nt, Homo Sapiens
uuccauuguucuagcaguggagguguuacagu

SEQ ID NO: 357707 - RNA, 32 nt, Homo Sapiens
cuauucacuaaauaaacauugugugaauacug

SEQ ID NO: 357708 - RNA, 32 nt, Homo Sapiens
gaggagggaggauuuccucugugcagcuuucg

SEQ ID NO: 357709 - RNA, 32 nt, Homo Sapiens
uauugugaugguaugaaaauguguacauuccc

SEQ ID NO: 357710 - RNA, 32 nt, Homo Sapiens
gaugacagagagagacccugucucaaaaaaua

SEQ ID NO: 357711 - RNA, 32 nt, Homo Sapiens
cuugaucaucacaggggccauuucugccuugu

SEQ ID NO: 357712 - RNA, 32 nt, Homo Sapiens
cgggccgccgguacccacggaccgcgcgcccg

SEQ ID NO: 357713 - RNA, 32 nt, Homo Sapiens
auuggaaguggcggcggcggcaggcggcagag

SEQ ID NO: 357714 - RNA, 32 nt, Homo Sapiens
aaaugcaugagcagauugaaaaugaauacauu

SEQ ID NO: 357715 - RNA, 32 nt, Homo Sapiens
agacaaacaaagaaacaaaauuaaaauggaau

SEQ ID NO: 357716 - RNA, 32 nt, Homo Sapiens
ccaucaguguaaauagagcuuaaagucauggu

SEQ ID NO: 357717 - RNA, 32 nt, Homo Sapiens
cucucgcuccucccuuucuaguucccuuucag

SEQ ID NO: 357718 - RNA, 32 nt, Homo Sapiens
aauuagagaaugccuguaaauguaggcugaac

SEQ ID NO: 357719 - RNA, 32 nt, Homo Sapiens
ugucauguuguaauucauuacucagcuaacau

SEQ ID NO: 357720 - RNA, 32 nt, Homo Sapiens
ggcaaggucuuguuuugucacccaggcuggag

SEQ ID NO: 357721 - RNA, 32 nt, Homo Sapiens
aaagugaugcaaacagaaauuccaccagccuc

SEQ ID NO: 357722 - RNA, 32 nt, Homo Sapiens
auacgcaucccaucucucccacuuccuccuac

SEQ ID NO: 357723 - RNA, 32 nt, Homo Sapiens
cagagccccauccccaggagugccccgugcag

SEQ ID NO: 357724 - RNA, 32 nt, Homo Sapiens
uugggaccaggcuucugcuccuccucagccag

SEQ ID NO: 357725 - RNA, 32 nt, Homo Sapiens
cuuggcucgcugcgccucugccucccagguuc

SEQ ID NO: 357726 - RNA, 32 nt, Homo Sapiens
cuggagaagggagaccuggcaguggagggagg

SEQ ID NO: 357727 - RNA, 32 nt, Homo Sapiens
cuaaggugguggccugcugauguggagacuac

SEQ ID NO: 357728 - RNA, 32 nt, Homo Sapiens
guugucuaauguagugauuaaucucugcuagu

SEQ ID NO: 357729 - RNA, 32 nt, Homo Sapiens
gggacguagggcuaagggagggggcgcuggag

SEQ ID NO: 357730 - RNA, 32 nt, Homo Sapiens
caaucagccuuucuccucuucucuucuuggga

SEQ ID NO: 357731 - RNA, 26 nt, Homo Sapiens
gauggcaagaaagaagcugaaaaaau

SEQ ID NO: 357732 - RNA, 30 nt, Homo Sapiens
uugguuugugacugcaucucccucuccucu

SEQ ID NO: 357733 - RNA, 32 nt, Homo Sapiens
ccccugcucaggugcuucugaaaguuccuuug

SEQ ID NO: 357734 - RNA, 32 nt, Homo Sapiens
agagagacugguuguuuuauuuucaauguauu

SEQ ID NO: 357735 - RNA, 32 nt, Homo Sapiens
guuuagugagcagaagacaagcuagaaaucac

SEQ ID NO: 357736 - RNA, 32 nt, Homo Sapiens
uuuauuuuauuuuauuuuuuuacccuuccuca

SEQ ID NO: 357737 - RNA, 32 nt, Homo Sapiens
uagcucgaggcggacgcggcccgggccccgug

SEQ ID NO: 357738 - RNA, 32 nt, Homo Sapiens
ccaccaggaucugaggcccaaauccuuccuca

SEQ ID NO: 357739 - RNA, 32 nt, Homo Sapiens
uugccguuuuugggggcucuggguguggcggu

SEQ ID NO: 357740 - RNA, 32 nt, Homo Sapiens
aaccucccagggugggagcugggccgggcugg

SEQ ID NO: 357741 - RNA, 32 nt, Homo Sapiens
gguuucaccaugcuggccaggcuggucucaaa

SEQ ID NO: 357742 - RNA, 32 nt, Homo Sapiens
gguuccaccauguuggccaggcuggucucaaa

SEQ ID NO: 357743 - RNA, 32 nt, Homo Sapiens
uuucagauccaccccacccccagacucauccc

SEQ ID NO: 357744 - RNA, 29 nt, Homo Sapiens
ucauguauauguauuauauugaagaauaa

SEQ ID NO: 357745 - RNA, 32 nt, Homo Sapiens
cccuucccuggcacugagcaguguugguuugg

SEQ ID NO: 357746 - RNA, 32 nt, Homo Sapiens
ccccgcgccugagacuggcuggaaaugcucug

SEQ ID NO: 357747 - RNA, 32 nt, Homo Sapiens
ccccgaguugccuccuuucuccgggugccgua

SEQ ID NO: 357748 - RNA, 32 nt, Homo Sapiens
aauaggccgggcgcgguagcucacgccuggaa

SEQ ID NO: 357749 - RNA, 32 nt, Homo Sapiens
cuaaguauaauggaagcauucaaauguuuguu

SEQ ID NO: 357750 - RNA, 32 nt, Homo Sapiens
ccgggcagccccccaacacuucuccugcccug

SEQ ID NO: 357751 - RNA, 32 nt, Homo Sapiens
uccccaaacucccuccucccuguuaaauguca

SEQ ID NO: 357752 - RNA, 32 nt, Homo Sapiens
uuagugugcuuuuucauccaacuuuuuauugu

SEQ ID NO: 357753 - RNA, 30 nt, Homo Sapiens
gcgccugucugugcccuggagcauucugcc

SEQ ID NO: 357754 - RNA, 32 nt, Homo Sapiens
guuuuguucuaccugcuuucaagucucuaauu

SEQ ID NO: 357755 - RNA, 32 nt, Homo Sapiens
auuaacacuacuaagucuuucaccuuaacuua

SEQ ID NO: 357756 - RNA, 32 nt, Homo Sapiens
cugaaaaagaacaugcaacccacugagaccuc

SEQ ID NO: 357757 - RNA, 32 nt, Homo Sapiens
agaaauuuaggaagauuaggugccaaaauacc

SEQ ID NO: 357758 - RNA, 32 nt, Homo Sapiens
ccgcuucuccuucaaugacccuuccggaucgg

SEQ ID NO: 357759 - RNA, 32 nt, Homo Sapiens
gaugggaucucacucugucacccaggcuggag

SEQ ID NO: 357760 - RNA, 32 nt, Homo Sapiens
gacagggucuugcucugucacccaggcugggg

SEQ ID NO: 357761 - RNA, 32 nt, Homo Sapiens
aaacuauggcaauacuuaagcaucucuaaauu

SEQ ID NO: 357762 - RNA, 32 nt, Homo Sapiens
gccucccuuucucccuucuccacuucacuggu

SEQ ID NO: 357763 - RNA, 32 nt, Homo Sapiens
uuaacuaauguuuuauugguaaacauuggcuu

SEQ ID NO: 357764 - RNA, 32 nt, Homo Sapiens
agaaguuuuagaagcugcuaaaaaguuauuaa

SEQ ID NO: 357765 - RNA, 32 nt, Homo Sapiens
ccagcuugcagaggagcaagcuaguagaaaua

SEQ ID NO: 357766 - RNA, 32 nt, Homo Sapiens
cgucuccgucccugacgccccggagcgagcgc

SEQ ID NO: 357767 - RNA, 32 nt, Homo Sapiens
gcgcgcucagcaccaccagcggcgccagaugc

SEQ ID NO: 357768 - RNA, 31 nt, Homo Sapiens
ugcuccgcucuccccgcuccaagcgccgauc

SEQ ID NO: 357769 - RNA, 28 nt, Homo Sapiens
uugauuugcgucaacauuauaaaagagc

SEQ ID NO: 357770 - RNA, 32 nt, Homo Sapiens
agauaaagcacacuguggggccaggcaugacc

SEQ ID NO: 357771 - RNA, 32 nt, Homo Sapiens
agaagcccacagaagacagagaaggaacaacu

SEQ ID NO: 357772 - RNA, 32 nt, Homo Sapiens
auuguuuuuuaaaaacacaucuguaguaagau

SEQ ID NO: 357773 - RNA, 32 nt, Homo Sapiens
gaaagcaugagcagauggaguauggaagaaau

SEQ ID NO: 357774 - RNA, 32 nt, Homo Sapiens
aagcgcugauggccuucucuccccucagaacu

SEQ ID NO: 357775 - RNA, 32 nt, Homo Sapiens
cuuccucugcauuuacacaccacacaacacac

SEQ ID NO: 357776 - RNA, 32 nt, Homo Sapiens
agccccgacuccccggacgccgcccgccgugc

SEQ ID NO: 357777 - RNA, 32 nt, Homo Sapiens
auuuggcuuugacagagugcuuugaaauuaug

SEQ ID NO: 357778 - RNA, 32 nt, Homo Sapiens
agccgccgccgccgccgccaccucugagcagc

SEQ ID NO: 357779 - RNA, 32 nt, Homo Sapiens
uaccucuccauucacuucuccugccagggcca

SEQ ID NO: 357780 - RNA, 32 nt, Homo Sapiens
cuugggagcugcugggcuagguccagauccgc

SEQ ID NO: 357781 - RNA, 32 nt, Homo Sapiens
gacaguacugucaucugcauuauacggacugu

SEQ ID NO: 357782 - RNA, 32 nt, Homo Sapiens
uucauauuguaagaacuguuaauaaaaguugu

SEQ ID NO: 357783 - RNA, 32 nt, Homo Sapiens
ccagugguggggacagcgaugccaagagccug

SEQ ID NO: 357784 - RNA, 32 nt, Homo Sapiens
uugugacccagccaacaccuccccuacaagau

SEQ ID NO: 357785 - RNA, 32 nt, Homo Sapiens
auguauuucuucacugcucccacucugauuug

SEQ ID NO: 357786 - RNA, 32 nt, Homo Sapiens
uucuuaaaguguggcaaacauaaaauuugcaa

SEQ ID NO: 357787 - RNA, 32 nt, Homo Sapiens
gccaggcuguguauuucuuucccaggaaauua

SEQ ID NO: 357788 - RNA, 32 nt, Homo Sapiens
ggcucccggcucccggccgcgccucgccccau

SEQ ID NO: 357789 - RNA, 32 nt, Homo Sapiens
uuaacuaggagaaaaagacaugauaauacagg

SEQ ID NO: 357790 - RNA, 32 nt, Homo Sapiens
uuaugcuggaguauuuaaauguaaguauuuua

SEQ ID NO: 357791 - RNA, 32 nt, Homo Sapiens
gcugacugccagcaaagguuuguaauuaagaa

SEQ ID NO: 357792 - RNA, 32 nt, Homo Sapiens
ugaguuuuagcauuuuaccauuccugaaaugg

SEQ ID NO: 357793 - RNA, 32 nt, Homo Sapiens
cgcgagaggcgacgaggcccgggcggcaggag

SEQ ID NO: 357794 - RNA, 32 nt, Homo Sapiens
uaagaagaauaauucaguguuuguauuuuuug

SEQ ID NO: 357795 - RNA, 32 nt, Homo Sapiens
cucuauuguuaacuuuuaagcauuucacaaac

SEQ ID NO: 357796 - RNA, 32 nt, Homo Sapiens
uuccaggcaaaauaauccuauggugaaaaaaa

SEQ ID NO: 357797 - RNA, 32 nt, Homo Sapiens
uuuccuacuuggauucuagguggacauuacag

SEQ ID NO: 357798 - RNA, 32 nt, Homo Sapiens
cuaccugugguguugggaccaagccuccaaua

SEQ ID NO: 357799 - RNA, 32 nt, Homo Sapiens
cucacaacagcauggauaaaucuuacagacau

SEQ ID NO: 357800 - RNA, 32 nt, Homo Sapiens
ugcaacuaugugauugacaucuguaaggcuag

SEQ ID NO: 357801 - RNA, 32 nt, Homo Sapiens
cuucugacagccagacaagggcugugcucagg

SEQ ID NO: 357802 - RNA, 32 nt, Homo Sapiens
gaaugacuagagcuacacaccauuucuggacu

SEQ ID NO: 357803 - RNA, 32 nt, Homo Sapiens
ggucgucggccaaccuccccaacagcacuuag

SEQ ID NO: 357804 - RNA, 32 nt, Homo Sapiens
uaauuaagacccauuaaaucuguacuuggauc

SEQ ID NO: 357805 - RNA, 32 nt, Homo Sapiens
gcuggucagaggugcaagcagaugagaaucca

SEQ ID NO: 357806 - RNA, 32 nt, Homo Sapiens
uaucuggaccucuggagucccuuaagcacaag

SEQ ID NO: 357807 - RNA, 32 nt, Homo Sapiens
uuuuaaaauuuauaaacaagucacuuaaaugc

SEQ ID NO: 357808 - RNA, 32 nt, Homo Sapiens
aaacacuucaugguaguaauuuccuguuuucc

SEQ ID NO: 357809 - RNA, 32 nt, Homo Sapiens
accaggcuugccuggggugccagugaccacag

SEQ ID NO: 357810 - RNA, 32 nt, Homo Sapiens
auguuuagguuuccuuugcaguggaugcuuaa

SEQ ID NO: 357811 - RNA, 32 nt, Homo Sapiens
ccuggacugccccuuccucccccaucgcccgc

SEQ ID NO: 357812 - RNA, 32 nt, Homo Sapiens
uucuuuccucuccagauccccagccaugcaua

SEQ ID NO: 357813 - RNA, 32 nt, Homo Sapiens
cacuuuuuuuuucuuuuuuuuuuuauuguaga

SEQ ID NO: 357814 - RNA, 32 nt, Homo Sapiens
ugcucaacagucacuauaagacaccuacuugu

SEQ ID NO: 357815 - RNA, 32 nt, Homo Sapiens
uuccuaaaguuacugcugaccuugaagcauug

SEQ ID NO: 357816 - RNA, 32 nt, Homo Sapiens
cacuguuguaauuauuaaacugauuauuuuuc

SEQ ID NO: 357817 - RNA, 32 nt, Homo Sapiens
caaugagucaacagaaauacuguaggugaccu

SEQ ID NO: 357818 - RNA, 32 nt, Homo Sapiens
uguggcaaccgggaacuccucugugggcucag

SEQ ID NO: 357819 - RNA, 32 nt, Homo Sapiens
gggugcuggggcaguccuaggcgugggggcag

SEQ ID NO: 357820 - RNA, 32 nt, Homo Sapiens
acuuugaaaagaauucuuuuucucacuauuaa

SEQ ID NO: 357821 - RNA, 32 nt, Homo Sapiens
uagagaacacugggugguuugaagggugucuu

SEQ ID NO: 357822 - RNA, 32 nt, Homo Sapiens
uggguucuagaccucugggaaccagcaccuga

SEQ ID NO: 357823 - RNA, 32 nt, Homo Sapiens
agccaagaggaguaccuggugcaccuggugcc

SEQ ID NO: 357824 - RNA, 32 nt, Homo Sapiens
gguggggcucugcagcugugagauggcccagc

SEQ ID NO: 357825 - RNA, 32 nt, Homo Sapiens
uucucuuucuuugaaccaucuccaccugcucu

SEQ ID NO: 357826 - RNA, 32 nt, Homo Sapiens
ccuccacaguggcugccuccucauuuggcucc

SEQ ID NO: 357827 - RNA, 32 nt, Homo Sapiens
auuucagcaaaguggagucaugugugguuuau

SEQ ID NO: 357828 - RNA, 32 nt, Homo Sapiens
uugagacaaaaauuaucuauuuguauauauac

SEQ ID NO: 357829 - RNA, 27 nt, Homo Sapiens
accugugcuucugacagcccccgagac

SEQ ID NO: 357830 - RNA, 32 nt, Homo Sapiens
ggcuccucuauggugggacccuggacaaggga

SEQ ID NO: 357831 - RNA, 27 nt, Homo Sapiens
ugcagguauuaauucuuauaauuuuuu

SEQ ID NO: 357832 - RNA, 32 nt, Homo Sapiens
auggggucaggauaugaguccugggcauuauu

SEQ ID NO: 357833 - RNA, 32 nt, Homo Sapiens
ugcugggaaaagggcuuguggggugccuguau

SEQ ID NO: 357834 - RNA, 32 nt, Homo Sapiens
ggagagaauaaauuucugauguuguaagccug

SEQ ID NO: 357835 - RNA, 32 nt, Homo Sapiens
uucccgcucccucugcacccccuugccggaag

SEQ ID NO: 357836 - RNA, 32 nt, Homo Sapiens
ccagcagggucuccugugagccggggaccaug

SEQ ID NO: 357837 - RNA, 30 nt, Homo Sapiens
ggcacauuccuaaugggauguaccucuccc

SEQ ID NO: 357838 - RNA, 32 nt, Homo Sapiens
uucccuguucuuccuccagcugcaccagagca

SEQ ID NO: 357839 - RNA, 32 nt, Homo Sapiens
ugauucugauucaaauagcaugauccaugcuu

SEQ ID NO: 357840 - RNA, 32 nt, Homo Sapiens
uacauaaaaauaugguagaauuaauuuaugac

SEQ ID NO: 357841 - RNA, 32 nt, Homo Sapiens
ggggagcgcuggcccgacgcaguggcacugcu

SEQ ID NO: 357842 - RNA, 32 nt, Homo Sapiens
ggcucuuucuaaaaaucuuucuauuuaacugg

SEQ ID NO: 357843 - RNA, 32 nt, Homo Sapiens
acaggcccagcuggggcccacaugcugacaca

SEQ ID NO: 357844 - RNA, 32 nt, Homo Sapiens
cagaaaagauuauaaaagaaagcaagauuuuu

SEQ ID NO: 357845 - RNA, 32 nt, Homo Sapiens
ugagguaaauuuccuuuucuauuuuguuuagg

SEQ ID NO: 357846 - RNA, 32 nt, Homo Sapiens
ucuauccugcagucggcagaucaugggacuuc

SEQ ID NO: 357847 - RNA, 32 nt, Homo Sapiens
cacugauugccuuguuauuacuagguuuuuug

SEQ ID NO: 357848 - RNA, 32 nt, Homo Sapiens
caugcuucucugguuggagauccuguuauuau

SEQ ID NO: 357849 - RNA, 32 nt, Homo Sapiens
ggaguggagggcgaggcccgggucccgcgcuc

SEQ ID NO: 357850 - RNA, 32 nt, Homo Sapiens
cccagguguuugugagcagguugggauucgga

SEQ ID NO: 357851 - RNA, 32 nt, Homo Sapiens
ggcggggaagcgcuuccagggaggcggcaggg

SEQ ID NO: 357852 - RNA, 29 nt, Homo Sapiens
aguacugaaaauaaauaguuguacuucuc

SEQ ID NO: 357853 - RNA, 32 nt, Homo Sapiens
auuuuuguacuauuucuagggaaauuuuucag

SEQ ID NO: 357854 - RNA, 32 nt, Homo Sapiens
ggaugggggucuaacagcuguagggugcugcc

SEQ ID NO: 357855 - RNA, 32 nt, Homo Sapiens
acuaaaugauauauuuauauuauaagauuaaa

SEQ ID NO: 357856 - RNA, 32 nt, Homo Sapiens
guccacugucaagggagaacugucacaacucc

SEQ ID NO: 357857 - RNA, 32 nt, Homo Sapiens
ugagggaugcugggcacugcugccggguggcc

SEQ ID NO: 357858 - RNA, 32 nt, Homo Sapiens
aaaaguauaaucugcuuuacaacuaguauaga

SEQ ID NO: 357859 - RNA, 32 nt, Homo Sapiens
ggaagcccagaaacagagccugccccgagccu

SEQ ID NO: 357860 - RNA, 32 nt, Homo Sapiens
auaagccauagccccaggcccgcccugcccgc

SEQ ID NO: 357861 - RNA, 32 nt, Homo Sapiens
ccuuauggaucuuuucuuuagaccuauuuuug

SEQ ID NO: 357862 - RNA, 32 nt, Homo Sapiens
gcucccaggggucucccuggcucccuccucca

SEQ ID NO: 357863 - RNA, 32 nt, Homo Sapiens
gugcagaguauuuugagugugcagguaacaga

SEQ ID NO: 357864 - RNA, 32 nt, Homo Sapiens
ugauuuuucuuucuugcuuucauuuuaauuag

SEQ ID NO: 357865 - RNA, 32 nt, Homo Sapiens
uugauuugguacuuaaauauuuuuggagugaa

SEQ ID NO: 357866 - RNA, 32 nt, Homo Sapiens
agcucuguuucgguugacccaggucauggaau

SEQ ID NO: 357867 - RNA, 32 nt, Homo Sapiens
acuauaggagucauaaaaggaacuuaguuaaa

SEQ ID NO: 357868 - RNA, 32 nt, Homo Sapiens
cugaagccgucccuggcagagcccucgugcau

SEQ ID NO: 357869 - RNA, 32 nt, Homo Sapiens
uuauuggauuaccauguacuccagcacccaaa

SEQ ID NO: 357870 - RNA, 32 nt, Homo Sapiens
auuucccuaugcucauuucguccucuuucccc

SEQ ID NO: 357871 - RNA, 32 nt, Homo Sapiens
gcuagcagaaaaaaacaaaacaaaacuguugu

SEQ ID NO: 357872 - RNA, 32 nt, Homo Sapiens
agacagaaccaagaagcauguaggugaaaaua

SEQ ID NO: 357873 - RNA, 32 nt, Homo Sapiens
cguuugugcuuggacguguucuuccacuugag

SEQ ID NO: 357874 - RNA, 31 nt, Homo Sapiens
ggugaggccuccugccugccuggugcccugu

SEQ ID NO: 357875 - RNA, 27 nt, Homo Sapiens
cgauccucccgcuucagccucuagagu

SEQ ID NO: 357876 - RNA, 32 nt, Homo Sapiens
ggccuggugucuccccucccccaccacccggu

SEQ ID NO: 357877 - RNA, 32 nt, Homo Sapiens
auucugccccacuuacuaacugccaguucucc

SEQ ID NO: 357878 - RNA, 32 nt, Homo Sapiens
uuaaagcauugcuguuaugucuguuuaagaaa

SEQ ID NO: 357879 - RNA, 32 nt, Homo Sapiens
gcaccacucugcacagugcugagauuuuggcu

SEQ ID NO: 357880 - RNA, 32 nt, Homo Sapiens
augcuggcugguagcuaggagcucagcugggu

SEQ ID NO: 357881 - RNA, 32 nt, Homo Sapiens
ggugacacuccagccugggugacaaaggagac

SEQ ID NO: 357882 - RNA, 32 nt, Homo Sapiens
aacagggugauaauggucuuccuggaagaaaa

SEQ ID NO: 357883 - RNA, 32 nt, Homo Sapiens
gucugaaccucugccaguccuggagacuggug

SEQ ID NO: 357884 - RNA, 32 nt, Homo Sapiens
ucuucucuuaagucuucaucucuucuuuugcu

SEQ ID NO: 357885 - RNA, 32 nt, Homo Sapiens
cuucugaaucaucagauuaaauuaugcuucau

SEQ ID NO: 357886 - RNA, 32 nt, Homo Sapiens
ucauuuuccugaugaauguuggugaccaccac

SEQ ID NO: 357887 - RNA, 32 nt, Homo Sapiens
uauuccaaccuucuuugguauuuguaauuucu

SEQ ID NO: 357888 - RNA, 32 nt, Homo Sapiens
caggugacuaugaaaggcuuauauuuccaaca

SEQ ID NO: 357889 - RNA, 29 nt, Homo Sapiens
ccuucucagguccgggaacuuaccagccc

SEQ ID NO: 357890 - RNA, 32 nt, Homo Sapiens
ccuuucccuggccuuucugucuucguugaugu

SEQ ID NO: 357891 - RNA, 32 nt, Homo Sapiens
aguccguuccucaagcuccgggcuggggcuuu

SEQ ID NO: 357892 - RNA, 32 nt, Homo Sapiens
cugccgggccgcggcggugaucgauggggagc

SEQ ID NO: 357893 - RNA, 32 nt, Homo Sapiens
uccauauuuucucacuaaucucccguuagcca

SEQ ID NO: 357894 - RNA, 32 nt, Homo Sapiens
auucccauucagugacucaaaccugugggggg

SEQ ID NO: 357895 - RNA, 32 nt, Homo Sapiens
gagaguggcaaagccuuuaauuauagcucacu

SEQ ID NO: 357896 - RNA, 32 nt, Homo Sapiens
aagguuuuuuaaaugauacugucauccucuug

SEQ ID NO: 357897 - RNA, 32 nt, Homo Sapiens
aauucuuuugaaaauaaccaugaauacacuua

SEQ ID NO: 357898 - RNA, 32 nt, Homo Sapiens
uuaacaggaaagucagcuuaaaggacacuccu

SEQ ID NO: 357899 - RNA, 32 nt, Homo Sapiens
auugcacuaaauuuauacaugaaacugaaaaa

SEQ ID NO: 357900 - RNA, 32 nt, Homo Sapiens
gcauggcacugacuagccgacccggugcugac

SEQ ID NO: 357901 - RNA, 32 nt, Homo Sapiens
auaacuggcuuauuuucuuuuaaugugcaaug

SEQ ID NO: 357902 - RNA, 32 nt, Homo Sapiens
ugccucugagaauaaugacaauuuaugaauuu

SEQ ID NO: 357903 - RNA, 32 nt, Homo Sapiens
uggagaaaaaggaugccugaacacgcgaaguc

SEQ ID NO: 357904 - RNA, 32 nt, Homo Sapiens
gagaagaccaccugaauucucaucccaucuaa

SEQ ID NO: 357905 - RNA, 32 nt, Homo Sapiens
acuggcugcucuacggaaggaagugcuacuuc

SEQ ID NO: 357906 - RNA, 32 nt, Homo Sapiens
accgcgcguccgccccagucccauccguaggc

SEQ ID NO: 357907 - RNA, 32 nt, Homo Sapiens
ccccaggcucccccuccaccgccuccgccgcc

SEQ ID NO: 357908 - RNA, 32 nt, Homo Sapiens
cucuccagcaaccaaaguacaacacuccaaga

SEQ ID NO: 357909 - RNA, 32 nt, Homo Sapiens
acaggcgugagccacggcacgcagccagcaag

SEQ ID NO: 357910 - RNA, 32 nt, Homo Sapiens
cugcaaucaaaauaauuuacugagcacaacuc

SEQ ID NO: 357911 - RNA, 32 nt, Homo Sapiens
cuucagaaauaaaacuuuaucacuugcuucau

SEQ ID NO: 357912 - RNA, 32 nt, Homo Sapiens
agcaaugggguugccgggaggggcgaggcugg

SEQ ID NO: 357913 - RNA, 32 nt, Homo Sapiens
uuccaaaauaacaaagaugucugcagugaaua

SEQ ID NO: 357914 - RNA, 32 nt, Homo Sapiens
cagacaaaagaggccgcccgcguaggaaggca

SEQ ID NO: 357915 - RNA, 32 nt, Homo Sapiens
caacucugccaaaagauggaucuuuaaugauu

SEQ ID NO: 357916 - RNA, 32 nt, Homo Sapiens
ucuagucguagugccuucaggguccgaggagc

SEQ ID NO: 357917 - RNA, 32 nt, Homo Sapiens
gagaggauucugcagcaaaacaacaauggccg

SEQ ID NO: 357918 - RNA, 32 nt, Homo Sapiens
cagaggccgucucagcucccagcccuuccccc

SEQ ID NO: 357919 - RNA, 32 nt, Homo Sapiens
aaaggaagggaagagugcuccaagacuuggac

SEQ ID NO: 357920 - RNA, 32 nt, Homo Sapiens
ggcccuuggggauggggcugcuggggacugcc

SEQ ID NO: 357921 - RNA, 29 nt, Homo Sapiens
uuuaaaaaggucauauauuuuuugcuacu

SEQ ID NO: 357922 - RNA, 32 nt, Homo Sapiens
caaauuguagcggcccuuccugcagcgccugc

SEQ ID NO: 357923 - RNA, 32 nt, Homo Sapiens
ugauggaccuccuagugccuucuggaccuaag

SEQ ID NO: 357924 - RNA, 32 nt, Homo Sapiens
ggcacaaaguuccauauguucuaaaaacaauu

SEQ ID NO: 357925 - RNA, 32 nt, Homo Sapiens
gagaugugcugucaguauaaaauacauaccag

SEQ ID NO: 357926 - RNA, 32 nt, Homo Sapiens
cccggcagacccacccacccccuggggcugcu

SEQ ID NO: 357927 - RNA, 30 nt, Homo Sapiens
cuguaaaauaucccuauguuuaaucuguau

SEQ ID NO: 357928 - RNA, 32 nt, Homo Sapiens
uuaggggugggaacuuuuuuaaauguucuuuu

SEQ ID NO: 357929 - RNA, 32 nt, Homo Sapiens
cacaugagugucugaagaugacuucugugagu

SEQ ID NO: 357930 - RNA, 32 nt, Homo Sapiens
acucgggcccugcuccuccugcagccccuccu

SEQ ID NO: 357931 - RNA, 32 nt, Homo Sapiens
cuguugcccuccccagggccugaguaccuuuu

SEQ ID NO: 357932 - RNA, 32 nt, Homo Sapiens
acuuuuggauuuuuuucuuuucuuuuuuucug

SEQ ID NO: 357933 - RNA, 32 nt, Homo Sapiens
cccaguggcaccagcugaaggccugguggggc

SEQ ID NO: 357934 - RNA, 32 nt, Homo Sapiens
gaaaugaggugaugauaccuaauuauguuuuc

SEQ ID NO: 357935 - RNA, 32 nt, Homo Sapiens
cugagagacaccagcucccugccuccaagccu

SEQ ID NO: 357936 - RNA, 32 nt, Homo Sapiens
caguuuuugaguuuugugugacuugaauuuuu

SEQ ID NO: 357937 - RNA, 31 nt, Homo Sapiens
cccuuguguaacauugcaaaccuguggcuuu

SEQ ID NO: 357938 - RNA, 32 nt, Homo Sapiens
cauucggcaagucucuaggaaguuccaaacuu

SEQ ID NO: 357939 - RNA, 32 nt, Homo Sapiens
auggcuggugcgccagcucuguuacuccucac

SEQ ID NO: 357940 - RNA, 32 nt, Homo Sapiens
cuuuauuugaauaacaaggaaaacaguaacua

SEQ ID NO: 357941 - RNA, 32 nt, Homo Sapiens
ccagggcaggaggauggugccuggacaacccu

SEQ ID NO: 357942 - RNA, 32 nt, Homo Sapiens
cccaaccaccagcagcagcagggcccuccucc

SEQ ID NO: 357943 - RNA, 32 nt, Homo Sapiens
ccauccccacuuuggcguuugccuuuguuuga

SEQ ID NO: 357944 - RNA, 32 nt, Homo Sapiens
ugcccuuaaaaauuaguuuucauuaaaaagaa

SEQ ID NO: 357945 - RNA, 32 nt, Homo Sapiens
uugacagacacaaaauucuacugcauuugggc

SEQ ID NO: 357946 - RNA, 32 nt, Homo Sapiens
gcucgccccuccccucagccugcccgccucuc

SEQ ID NO: 357947 - RNA, 32 nt, Homo Sapiens
ggagccaggugggcugggcagagccuuggggc

SEQ ID NO: 357948 - RNA, 32 nt, Homo Sapiens
acugauuuuucaucaagagauugacauaccaa

SEQ ID NO: 357949 - RNA, 32 nt, Homo Sapiens
gaaauuacuguaaagaacuuccuguaaaacac

SEQ ID NO: 357950 - RNA, 32 nt, Homo Sapiens
aucccugaaaacagugaauguuauaugaaguu

SEQ ID NO: 357951 - RNA, 32 nt, Homo Sapiens
uuugaggaggucggagcggaaggacgucgugg

SEQ ID NO: 357952 - RNA, 32 nt, Homo Sapiens
uugcccuuucccuuucccugggguccaaacca

SEQ ID NO: 357953 - RNA, 32 nt, Homo Sapiens
gguccccgggcgggcuuggcacggaggcggua

SEQ ID NO: 357954 - RNA, 32 nt, Homo Sapiens
uucaggccaaccccauccuagaggccuuuggc

SEQ ID NO: 357955 - RNA, 32 nt, Homo Sapiens
agaagagaauccaccugcaauuccuggcuggc

SEQ ID NO: 357956 - RNA, 32 nt, Homo Sapiens
ggaguguuccccacacccuggaccucucccua

SEQ ID NO: 357957 - RNA, 32 nt, Homo Sapiens
cccugugugugagcaagaccacagcucuccuu

SEQ ID NO: 357958 - RNA, 32 nt, Homo Sapiens
uuuuuggccuucuaagaaagugucucauaaca

SEQ ID NO: 357959 - RNA, 31 nt, Homo Sapiens
gcugggcuggcaagggcuccaaggcccauca

SEQ ID NO: 357960 - RNA, 32 nt, Homo Sapiens
aaugugugugacucacuuuaucaugauggucu

SEQ ID NO: 357961 - RNA, 32 nt, Homo Sapiens
auuuucuucuauuucuuugucuucauuuaauu

SEQ ID NO: 357962 - RNA, 32 nt, Homo Sapiens
cgcaguugccagccagauugggagucuguuug

SEQ ID NO: 357963 - RNA, 32 nt, Homo Sapiens
gaggucaggaguuucagaccaauauggugaaa

SEQ ID NO: 357964 - RNA, 32 nt, Homo Sapiens
cuuuacagcauagauagaaaaaugcacauuuu

SEQ ID NO: 357965 - RNA, 32 nt, Homo Sapiens
aacagagagcagugucucccagugucccuccu

SEQ ID NO: 357966 - RNA, 32 nt, Homo Sapiens
cugagccccaggcccggcccagcccgccuggg

SEQ ID NO: 357967 - RNA, 27 nt, Homo Sapiens
agggguuuccucuucagccugccuggg

SEQ ID NO: 357968 - RNA, 32 nt, Homo Sapiens
uaaaugaaaaacgcaucucauuguaggcauuu

SEQ ID NO: 357969 - RNA, 32 nt, Homo Sapiens
cccuugauccgagucagaucugcacuagcaac

SEQ ID NO: 357970 - RNA, 32 nt, Homo Sapiens
caugagaaauucaaaugagagaaguugcugau

SEQ ID NO: 357971 - RNA, 32 nt, Homo Sapiens
aguuucucagaauuacacgcacgaccauccaa

SEQ ID NO: 357972 - RNA, 29 nt, Homo Sapiens
ccucauaauaauaaaaacucaauuuagcg

SEQ ID NO: 357973 - RNA, 32 nt, Homo Sapiens
gaucuucugccggcugccccagaggacagugg

SEQ ID NO: 357974 - RNA, 32 nt, Homo Sapiens
gauaacauuauguggcccucuggauccagcca

SEQ ID NO: 357975 - RNA, 31 nt, Homo Sapiens
aucucucaguggcuagaggugcuguuucaag

SEQ ID NO: 357976 - RNA, 32 nt, Homo Sapiens
aacuccauauaagcuuuuccagcaaagauugu

SEQ ID NO: 357977 - RNA, 32 nt, Homo Sapiens
uguuuuuguagcuuuuggaacauggaaugccu

SEQ ID NO: 357978 - RNA, 32 nt, Homo Sapiens
cuguacuaaaauguaaugaaaaauaaaagauu

SEQ ID NO: 357979 - RNA, 32 nt, Homo Sapiens
agcgagggcggcugcuccugcuaugcagagcc

SEQ ID NO: 357980 - RNA, 32 nt, Homo Sapiens
ccuccacggccccuugcccuugcucagguucu

SEQ ID NO: 357981 - RNA, 30 nt, Homo Sapiens
uuugucucuugcugcagcuggugcuccaaa

SEQ ID NO: 357982 - RNA, 32 nt, Homo Sapiens
auaauuuugcaaaucuguuaccucugacauca

SEQ ID NO: 357983 - RNA, 32 nt, Homo Sapiens
agggauccaaugggacugggcuggggcuggag

SEQ ID NO: 357984 - RNA, 32 nt, Homo Sapiens
ugaggguccaugggaagaaagacacaaugagg

SEQ ID NO: 357985 - RNA, 32 nt, Homo Sapiens
ugaauagguucagggaugagcaacagcccaua

SEQ ID NO: 357986 - RNA, 32 nt, Homo Sapiens
ggauauagacuguaucucuagaaaggcuauuu

SEQ ID NO: 357987 - RNA, 32 nt, Homo Sapiens
uauagcuacauaugggagagacucagugagcc

SEQ ID NO: 357988 - RNA, 32 nt, Homo Sapiens
cucugggagcagcccucacuggcuggaccaag

SEQ ID NO: 357989 - RNA, 32 nt, Homo Sapiens
aggacccugccaggucccgcgcaccaucccug

SEQ ID NO: 357990 - RNA, 32 nt, Homo Sapiens
guugccuuuuuuuuuucuuuuuucuuuguaaa

SEQ ID NO: 357991 - RNA, 32 nt, Homo Sapiens
aaauaccugcugucacuccagaggacauuuuu

SEQ ID NO: 357992 - RNA, 32 nt, Homo Sapiens
caucuuccucaagaucuuuguuuccacaaacu

SEQ ID NO: 357993 - RNA, 32 nt, Homo Sapiens
agcagaauccggagaaggaucaggucaacacg

SEQ ID NO: 357994 - RNA, 32 nt, Homo Sapiens
acggggugggagaggggagaggagagaguuug

SEQ ID NO: 357995 - RNA, 32 nt, Homo Sapiens
ggcggggcgugguggcucacacuuguaauccc

SEQ ID NO: 357996 - RNA, 32 nt, Homo Sapiens
uuaccagcugggucaccuuggaugggucuguc

SEQ ID NO: 357997 - RNA, 32 nt, Homo Sapiens
uauuuuuagccuucuuuuucugcacugagucu

SEQ ID NO: 357998 - RNA, 32 nt, Homo Sapiens
agacauuuggccaguaugucuuucucaggggu

SEQ ID NO: 357999 - RNA, 32 nt, Homo Sapiens
augaucccgggcggguggcggcggcggcagag

SEQ ID NO: 358000 - RNA, 32 nt, Homo Sapiens
agacccaagguuuggaucugcuaccaccagac

SEQ ID NO: 358001 - RNA, 32 nt, Homo Sapiens
guuacaaaugcuggauaaauagacugauaaaa

SEQ ID NO: 358002 - RNA, 32 nt, Homo Sapiens
gucacugggaugccucuugcagggucuugcuu

SEQ ID NO: 358003 - RNA, 31 nt, Homo Sapiens
ugcaagaaauaaaaauuuaagaauuaaauug

SEQ ID NO: 358004 - RNA, 32 nt, Homo Sapiens
cucccuuccugccccaggcccuggcucugccc

SEQ ID NO: 358005 - RNA, 32 nt, Homo Sapiens
ccaaaaagcaaacguaagaaaauacacagagc

SEQ ID NO: 358006 - RNA, 32 nt, Homo Sapiens
gccagggacuuggggaggaagaauggggagug

SEQ ID NO: 358007 - RNA, 29 nt, Homo Sapiens
cagaugaugaagaagaagaagagguggau

SEQ ID NO: 358008 - RNA, 32 nt, Homo Sapiens
ggaggugcgagcaaagaauggccgaguggauu

SEQ ID NO: 358009 - RNA, 32 nt, Homo Sapiens
gacgaauguucccuuuggccuuaggugagucc

SEQ ID NO: 358010 - RNA, 32 nt, Homo Sapiens
gugugugguuggaaaacuuuuuuguuuugaug

SEQ ID NO: 358011 - RNA, 32 nt, Homo Sapiens
aaauggaaguauuuuucucugugaagccacau

SEQ ID NO: 358012 - RNA, 32 nt, Homo Sapiens
gccaaaccagcagggaguuagcacugaacugc

SEQ ID NO: 358013 - RNA, 32 nt, Homo Sapiens
cgccuuguucuucucaagagaaaguuguaacu

SEQ ID NO: 358014 - RNA, 32 nt, Homo Sapiens
ccuccccucgcccggcgcggucccguccgccu

SEQ ID NO: 358015 - RNA, 32 nt, Homo Sapiens
guuuaugguuucauuucugagaauagaguugg

SEQ ID NO: 358016 - RNA, 32 nt, Homo Sapiens
cugcggaugcacgcccuccucccgggccuccg

SEQ ID NO: 358017 - RNA, 32 nt, Homo Sapiens
cccugaugcaaggcaguagcucugccaacugg

SEQ ID NO: 358018 - RNA, 32 nt, Homo Sapiens
caauugccuuuguaggccaagaucaugccgug

SEQ ID NO: 358019 - RNA, 32 nt, Homo Sapiens
cucugggcuccgcuccucacuccugcuguaca

SEQ ID NO: 358020 - RNA, 32 nt, Homo Sapiens
agaugauggucuuuuuauuguagacauuccua

SEQ ID NO: 358021 - RNA, 32 nt, Homo Sapiens
uggcaauauaguuggauagccuggauacuuug

SEQ ID NO: 358022 - RNA, 32 nt, Homo Sapiens
agaaggugaacgcuggagaccuuaauggugga

SEQ ID NO: 358023 - RNA, 32 nt, Homo Sapiens
ccucuugcaacuucuuuuuucuucuuuguaaa

SEQ ID NO: 358024 - RNA, 28 nt, Homo Sapiens
aagaugccggcugagcugcugcugcugc

SEQ ID NO: 358025 - RNA, 32 nt, Homo Sapiens
ccagguucaagcaguucuccuaccucagccuc

SEQ ID NO: 358026 - RNA, 32 nt, Homo Sapiens
ugcccagagaggggguucaggaugcugcgugg

SEQ ID NO: 358027 - RNA, 32 nt, Homo Sapiens
uacgaagccaaggcaagaauucgucaccagau

SEQ ID NO: 358028 - RNA, 32 nt, Homo Sapiens
cauuucaaucccaguuagaaaugaaaauaauu

SEQ ID NO: 358029 - RNA, 32 nt, Homo Sapiens
cacuccagccccagauaaccacuuucuauccu

SEQ ID NO: 358030 - RNA, 32 nt, Homo Sapiens
cuuuguugaugcugaggccgggccaugggcac

SEQ ID NO: 358031 - RNA, 32 nt, Homo Sapiens
agcucuauggagguggcagcggguaccgagug

SEQ ID NO: 358032 - RNA, 32 nt, Homo Sapiens
agagaaaauggacuuacaaaaacuugcagcag

SEQ ID NO: 358033 - RNA, 32 nt, Homo Sapiens
uugcagguucccuuuuuccuuccucagguuuu

SEQ ID NO: 358034 - RNA, 32 nt, Homo Sapiens
gccaccgcccaggccagcuggugcuaaguccg

SEQ ID NO: 358035 - RNA, 32 nt, Homo Sapiens
uguuguauauauaaauaugcaagaugugccuu

SEQ ID NO: 358036 - RNA, 32 nt, Homo Sapiens
cagccaggugcauuaacagaccucccuacagc

SEQ ID NO: 358037 - RNA, 32 nt, Homo Sapiens
ggcugggaguggguagccgucauguugucccc

SEQ ID NO: 358038 - RNA, 32 nt, Homo Sapiens
uuugauuaucaucaucauuauuauuacacaaa

SEQ ID NO: 358039 - RNA, 32 nt, Homo Sapiens
ccaucugggaugcaaaccgucccuguguuccc

SEQ ID NO: 358040 - RNA, 32 nt, Homo Sapiens
uccgaguagugucugagacucugcucugcagg

SEQ ID NO: 358041 - RNA, 32 nt, Homo Sapiens
aauuauugguuuguguaacuagugguagagug

SEQ ID NO: 358042 - RNA, 32 nt, Homo Sapiens
uuccaggaggggcuaccuguugacugucuuug

SEQ ID NO: 358043 - RNA, 32 nt, Homo Sapiens
cggcuggcucugcucugcgggacagcgcggcg

SEQ ID NO: 358044 - RNA, 32 nt, Homo Sapiens
uugggagcuaaguggaagguucaacauguggg

SEQ ID NO: 358045 - RNA, 32 nt, Homo Sapiens
uuuuugugcacgcuuuuugugaucuguguuaa

SEQ ID NO: 358046 - RNA, 32 nt, Homo Sapiens
uuuucuuuuuugcaugugguaguuuuaaguua

SEQ ID NO: 358047 - RNA, 32 nt, Homo Sapiens
augcaggucucucuaaacgcaugaauguaugu

SEQ ID NO: 358048 - RNA, 32 nt, Homo Sapiens
acauuaagaaugccucuguaauacuguaauua

SEQ ID NO: 358049 - RNA, 32 nt, Homo Sapiens
gaaaaagagucucccccuuaaauuuccuggua

SEQ ID NO: 358050 - RNA, 32 nt, Homo Sapiens
ggaagaccauggcccaggaucccugagcuuuc

SEQ ID NO: 358051 - RNA, 32 nt, Homo Sapiens
uucaacagcucuuuuugguacguuccccaaaa

SEQ ID NO: 358052 - RNA, 32 nt, Homo Sapiens
ccgaagccggugccgcagcccccugcgccccc

SEQ ID NO: 358053 - RNA, 32 nt, Homo Sapiens
caggcugaggaccagcaugggguguggcuggc

SEQ ID NO: 358054 - RNA, 32 nt, Homo Sapiens
caauuuugcuucucagcuuccacucuaauauu

SEQ ID NO: 358055 - RNA, 32 nt, Homo Sapiens
gccaccauaauuugaggccuauagauuuagcu

SEQ ID NO: 358056 - RNA, 32 nt, Homo Sapiens
cucccuguuguaauuugagauuucccaaauua

SEQ ID NO: 358057 - RNA, 32 nt, Homo Sapiens
gaacuugcagugagccgagauggcgcgacugc

SEQ ID NO: 358058 - RNA, 32 nt, Homo Sapiens
gcuguggcuuaagaguaacagcagccaccgcc

SEQ ID NO: 358059 - RNA, 32 nt, Homo Sapiens
aagagccagaguucuuugggguuuuuguuugu

SEQ ID NO: 358060 - RNA, 32 nt, Homo Sapiens
uuuucauggaaaucauucugauuacagugcug

SEQ ID NO: 358061 - RNA, 32 nt, Homo Sapiens
ucaugcucuuuugugaugauuuucauauuuuc

SEQ ID NO: 358062 - RNA, 32 nt, Homo Sapiens
uaaagcaauguuguuaaaauuagcucaauaaa

SEQ ID NO: 358063 - RNA, 32 nt, Homo Sapiens
uuucaacauuuuauuacgauuauuauucagca

SEQ ID NO: 358064 - RNA, 32 nt, Homo Sapiens
uuacuggaagauuuccucuuuauucucucccg

SEQ ID NO: 358065 - RNA, 32 nt, Homo Sapiens
guauggaaagauuguauauuucuguguauuac

SEQ ID NO: 358066 - RNA, 32 nt, Homo Sapiens
uguucacgcccaugagggaagaggaaagugcc

SEQ ID NO: 358067 - RNA, 32 nt, Homo Sapiens
ucuuacuaaaauguuaacuuucuaaaaaccuu

SEQ ID NO: 358068 - RNA, 32 nt, Homo Sapiens
uuagcaacgaucuagcugugcaaaggcauuuc

SEQ ID NO: 358069 - RNA, 32 nt, Homo Sapiens
aucgacaucaugccacccugggcaaaagagca

SEQ ID NO: 358070 - RNA, 32 nt, Homo Sapiens
agaaguacacccacaagcaaggccuuggauuu

SEQ ID NO: 358071 - RNA, 32 nt, Homo Sapiens
acuccugggacuucuagguacaaacucaggug

SEQ ID NO: 358072 - RNA, 32 nt, Homo Sapiens
guuguuuuuaacaacuaaucaagagugaguga

SEQ ID NO: 358073 - RNA, 32 nt, Homo Sapiens
aaaaucuaauauuugcaguaucuaagaauuga

SEQ ID NO: 358074 - RNA, 32 nt, Homo Sapiens
agagcacagagguaggagaacugggguucaag

SEQ ID NO: 358075 - RNA, 32 nt, Homo Sapiens
ucugaaaguguggggccgcggcuggcaggcgg

SEQ ID NO: 358076 - RNA, 32 nt, Homo Sapiens
uuuaaggaaaauuagcaguuggucuauucaga

SEQ ID NO: 358077 - RNA, 32 nt, Homo Sapiens
cauucagaaaaauuaucuuagggacugauauu

SEQ ID NO: 358078 - RNA, 32 nt, Homo Sapiens
gaguagagacaguaauggguagagacuuuagg

SEQ ID NO: 358079 - RNA, 32 nt, Homo Sapiens
gcaggagaggaugguaggguugccagggcuca

SEQ ID NO: 358080 - RNA, 32 nt, Homo Sapiens
ccagaagugugccugaaagauagcggcggcug

SEQ ID NO: 358081 - RNA, 32 nt, Homo Sapiens
cuggacuguccuguuugccuccaggagaaccu

SEQ ID NO: 358082 - RNA, 32 nt, Homo Sapiens
caugcucuuaauguugauuuuacaauaugaag

SEQ ID NO: 358083 - RNA, 32 nt, Homo Sapiens
gccgcggagccagagcugcgcgcacgaaccgu

SEQ ID NO: 358084 - RNA, 32 nt, Homo Sapiens
uucccagcugucugugucagccugucccccug

SEQ ID NO: 358085 - RNA, 32 nt, Homo Sapiens
acacagaaauuugauauguggccaaauuggau

SEQ ID NO: 358086 - RNA, 32 nt, Homo Sapiens
ccucagaauacaaguuaaugcauguuacucag

SEQ ID NO: 358087 - RNA, 32 nt, Homo Sapiens
augaaggagguagcagcccuggguucuccuca

SEQ ID NO: 358088 - RNA, 32 nt, Homo Sapiens
uacccagguaaacagggucuggaguggaucuc

SEQ ID NO: 358089 - RNA, 32 nt, Homo Sapiens
gaaccagccaucugaaugagcugaucguuguu

SEQ ID NO: 358090 - RNA, 32 nt, Homo Sapiens
uccguccucccugagggcuggcacugccuccc

SEQ ID NO: 358091 - RNA, 32 nt, Homo Sapiens
ucucaggaugauuuaaaacaaauuuuaaaaaa

SEQ ID NO: 358092 - RNA, 32 nt, Homo Sapiens
ggggaggcggggguuaggguuguccuggcugg

SEQ ID NO: 358093 - RNA, 32 nt, Homo Sapiens
cuuguaaaaguuaauucucaccauuccugugg

SEQ ID NO: 358094 - RNA, 32 nt, Homo Sapiens
guaccuggaaaaccaccaggaguugacccuuu

SEQ ID NO: 358095 - RNA, 32 nt, Homo Sapiens
gucccagggugcagagaccuccccacccccag

SEQ ID NO: 358096 - RNA, 32 nt, Homo Sapiens
gcacccacagagcuccaaguaaccaaauuccc

SEQ ID NO: 358097 - RNA, 32 nt, Homo Sapiens
uucucccaugucaucaccccaccaccgucacu

SEQ ID NO: 358098 - RNA, 32 nt, Homo Sapiens
cagcacccugucaaaacagaccacuugacucu

SEQ ID NO: 358099 - RNA, 32 nt, Homo Sapiens
gcuaauuuauuaaugaugauaauuauaaugua

SEQ ID NO: 358100 - RNA, 32 nt, Homo Sapiens
agugucaggaugguaauucuuauucuuucguu

SEQ ID NO: 358101 - RNA, 32 nt, Homo Sapiens
agcagcccuaggucuuccuguucugacccccc

SEQ ID NO: 358102 - RNA, 32 nt, Homo Sapiens
uggucuuugccuaaauaacaguuuuauaugca

SEQ ID NO: 358103 - RNA, 32 nt, Homo Sapiens
ugggugccccacuaaguagaauaaagaaaaac

SEQ ID NO: 358104 - RNA, 32 nt, Homo Sapiens
ugauucuuuucccccuacuuuuccuaaugguu

SEQ ID NO: 358105 - RNA, 32 nt, Homo Sapiens
aggcugaucccuguccgcacaggugggugaug

SEQ ID NO: 358106 - RNA, 32 nt, Homo Sapiens
caauuucuaaauaguuucuguuugaaacuagu

SEQ ID NO: 358107 - RNA, 32 nt, Homo Sapiens
ugcucagugguauggacugaauguuugugguc

SEQ ID NO: 358108 - RNA, 32 nt, Homo Sapiens
cugggucuccaagucuuugucucccuguaucc

SEQ ID NO: 358109 - RNA, 32 nt, Homo Sapiens
ccgcagcaggccagaccccccuacccccgccc

SEQ ID NO: 358110 - RNA, 32 nt, Homo Sapiens
ucgcgccgcccgguugccgugggaaccacgga

SEQ ID NO: 358111 - RNA, 32 nt, Homo Sapiens
uuuuaauguuuuucauuuaucauuguaaaacc

SEQ ID NO: 358112 - RNA, 32 nt, Homo Sapiens
uggagggagcaggugccaguccccucacucuc

SEQ ID NO: 358113 - RNA, 32 nt, Homo Sapiens
aauaauguuuucuacauuuucauuuggacuaa

SEQ ID NO: 358114 - RNA, 32 nt, Homo Sapiens
uugcuuuguguuguguucugguaaagcuuuaa

SEQ ID NO: 358115 - RNA, 30 nt, Homo Sapiens
guccggcuggacugcggcagccgcgcggcu

SEQ ID NO: 358116 - RNA, 32 nt, Homo Sapiens
acaccuuuaccagguccccuuccuacccucca

SEQ ID NO: 358117 - RNA, 32 nt, Homo Sapiens
gacgcucccagggccuggcugggccagcuucc

SEQ ID NO: 358118 - RNA, 32 nt, Homo Sapiens
ugcucuccaggccccaggugccagcagcaccc

SEQ ID NO: 358119 - RNA, 32 nt, Homo Sapiens
agacaguggguuccucagguccaacaaaacau

SEQ ID NO: 358120 - RNA, 32 nt, Homo Sapiens
gcugggccccccaccccucaucccaggaagca

SEQ ID NO: 358121 - RNA, 32 nt, Homo Sapiens
aggaugaagauaaggaagauacguuaccauug

SEQ ID NO: 358122 - RNA, 32 nt, Homo Sapiens
cggggucguccgcaaagccugaguccuguccu

SEQ ID NO: 358123 - RNA, 32 nt, Homo Sapiens
ugaaacggaaauauuugaagugagauuugacc

SEQ ID NO: 358124 - RNA, 29 nt, Homo Sapiens
accuggugggagcccuggacgagggugac

SEQ ID NO: 358125 - RNA, 32 nt, Homo Sapiens
aaccgagcgcagagccgguagcgggaaggaug

SEQ ID NO: 358126 - RNA, 32 nt, Homo Sapiens
uaaauguguuguagaguuuaucaauaaagccg

SEQ ID NO: 358127 - RNA, 32 nt, Homo Sapiens
gaucccccggcuccccgcgucccaggcgccgg

SEQ ID NO: 358128 - RNA, 30 nt, Homo Sapiens
ccaauagauguuccugccuaagacuuugaa

SEQ ID NO: 358129 - RNA, 32 nt, Homo Sapiens
ucgcgggugaacaccgcggagccccgggacuu

SEQ ID NO: 358130 - RNA, 32 nt, Homo Sapiens
aaaauaaagcuaccauguuaauacaucauuuu

SEQ ID NO: 358131 - RNA, 32 nt, Homo Sapiens
guagcuuucgaucuuucauauuucauccuggu

SEQ ID NO: 358132 - RNA, 32 nt, Homo Sapiens
cccuguuaaaauugcuguauuguuaaugaaac

SEQ ID NO: 358133 - RNA, 32 nt, Homo Sapiens
aggacugccguggggagcaccccugcugcccc

SEQ ID NO: 358134 - RNA, 32 nt, Homo Sapiens
uuggcaaauuugcaugagcuccuggaaagagu

SEQ ID NO: 358135 - RNA, 32 nt, Homo Sapiens
cuggcccacagcacgugagccugcacucacug

SEQ ID NO: 358136 - RNA, 32 nt, Homo Sapiens
gagaggacccacgcgugacccgggccaaguac

SEQ ID NO: 358137 - RNA, 32 nt, Homo Sapiens
aaccugcugccuuggggacccuggacgugccg

SEQ ID NO: 358138 - RNA, 32 nt, Homo Sapiens
guugagccugucugaauuugggcccccuuucu

SEQ ID NO: 358139 - RNA, 32 nt, Homo Sapiens
uuucuccugcgacauggcaguccccaaaaaca

SEQ ID NO: 358140 - RNA, 32 nt, Homo Sapiens
cuuuuggguuucugcccugcccacccucugga

SEQ ID NO: 358141 - RNA, 32 nt, Homo Sapiens
gugaugagcucgucuguggaacaucacaagua

SEQ ID NO: 358142 - RNA, 32 nt, Homo Sapiens
uguuaucaucguuuuucugauuuuuaaauaag

SEQ ID NO: 358143 - RNA, 32 nt, Homo Sapiens
uuuaaaucuaaagaauuuaguagauuccuuca

SEQ ID NO: 358144 - RNA, 32 nt, Homo Sapiens
ucauccauggauguaaaugaugaugaaucaac

SEQ ID NO: 358145 - RNA, 32 nt, Homo Sapiens
ugggaauguaaauuaguauaaccacuauggag

SEQ ID NO: 358146 - RNA, 32 nt, Homo Sapiens
auuuuuucacaggagaaauaaucauauucgua

SEQ ID NO: 358147 - RNA, 32 nt, Homo Sapiens
cuuaccugcccccuucuguccagcacuugcau

SEQ ID NO: 358148 - RNA, 32 nt, Homo Sapiens
cuccgcaugccccucccuccccacggcccugc

SEQ ID NO: 358149 - RNA, 32 nt, Homo Sapiens
uccuagccgcgugagcgccgagcuugggcacc

SEQ ID NO: 358150 - RNA, 30 nt, Homo Sapiens
cugacccagucccugggggaagcccuggau

SEQ ID NO: 358151 - RNA, 32 nt, Homo Sapiens
cuguaacuaauuuuucauaacuuuuuaaaaua

SEQ ID NO: 358152 - RNA, 32 nt, Homo Sapiens
cuuccggcauuuggaugggacgugucugugac

SEQ ID NO: 358153 - RNA, 32 nt, Homo Sapiens
cacuauaucugauaccauuuaugaaacauucu

SEQ ID NO: 358154 - RNA, 32 nt, Homo Sapiens
guaguaucauaaaauugaaauaaaauacaucu

SEQ ID NO: 358155 - RNA, 32 nt, Homo Sapiens
uuuguauucucauuuuaaucagguguacauuc

SEQ ID NO: 358156 - RNA, 32 nt, Homo Sapiens
ugauuucuucaacuaacagguagcaugaaaau

SEQ ID NO: 358157 - RNA, 29 nt, Homo Sapiens
acgcuaaaaucgugaucuauaaaagaaaa

SEQ ID NO: 358158 - RNA, 32 nt, Homo Sapiens
gguggaccugaguuucgucuccugucucucug

SEQ ID NO: 358159 - RNA, 32 nt, Homo Sapiens
ugccaauccaaguuugcacucuucuggccugc

SEQ ID NO: 358160 - RNA, 32 nt, Homo Sapiens
ugggagccucuucccuuucucacucaccugca

SEQ ID NO: 358161 - RNA, 32 nt, Homo Sapiens
gugucuuccagauggguaccacagauggcuga

SEQ ID NO: 358162 - RNA, 32 nt, Homo Sapiens
ggcggugcaagccccgcccggcccuacccagg

SEQ ID NO: 358163 - RNA, 32 nt, Homo Sapiens
aagacccacaugcuacaagacgggcaaaauaa

SEQ ID NO: 358164 - RNA, 32 nt, Homo Sapiens
aaggaggcuggagaggcuucugaugguggaga

SEQ ID NO: 358165 - RNA, 32 nt, Homo Sapiens
ccccgggccccggcugucacugggcucugcgc

SEQ ID NO: 358166 - RNA, 32 nt, Homo Sapiens
ugucacuagaauggauaaaauaaugcugcaaa

SEQ ID NO: 358167 - RNA, 32 nt, Homo Sapiens
gccucuuucucugccuggcccagggcuggcgg

SEQ ID NO: 358168 - RNA, 32 nt, Homo Sapiens
ccucuuagauucaacaaugaauauuuuauuau

SEQ ID NO: 358169 - RNA, 32 nt, Homo Sapiens
uagcggaggcuguaguggggcugguggugcuu

SEQ ID NO: 358170 - RNA, 32 nt, Homo Sapiens
auuugcuuuacauuaaauuuguaggcuaauuu

SEQ ID NO: 358171 - RNA, 32 nt, Homo Sapiens
ccugauccuucacagaucaaggugaugccuac

SEQ ID NO: 358172 - RNA, 32 nt, Homo Sapiens
gcucccccgucccaucggggugggcuaggugc

SEQ ID NO: 358173 - RNA, 32 nt, Homo Sapiens
ccagagcccuccccgcgcugccagugggacgc

SEQ ID NO: 358174 - RNA, 32 nt, Homo Sapiens
gcauuuuugcaugguaaggaaaaggcuuacuu

SEQ ID NO: 358175 - RNA, 31 nt, Homo Sapiens
cgcacgcggcacuucagagccccgcccgggg

SEQ ID NO: 358176 - RNA, 32 nt, Homo Sapiens
cgcugucucucuccgagcgggagggaccaucc

SEQ ID NO: 358177 - RNA, 32 nt, Homo Sapiens
uauauagaauaggaguaauauuugaaaacaac

SEQ ID NO: 358178 - RNA, 32 nt, Homo Sapiens
ccuccuccugcaaugcauaacuaggccuaggc

SEQ ID NO: 358179 - RNA, 32 nt, Homo Sapiens
aagaacaggaauccucuuggugggggccgagc

SEQ ID NO: 358180 - RNA, 32 nt, Homo Sapiens
gggaggcacggcaggggggucaggggcaagug

SEQ ID NO: 358181 - RNA, 32 nt, Homo Sapiens
aggaacauugguuaagaacuguuggaaacaaa

SEQ ID NO: 358182 - RNA, 32 nt, Homo Sapiens
uuuccuaagggcacgaguccagcaaauucagg

SEQ ID NO: 358183 - RNA, 32 nt, Homo Sapiens
uaaacuguuuaguuaugcaugcuucuuauuaa

SEQ ID NO: 358184 - RNA, 32 nt, Homo Sapiens
aaaccugaaaacaauauaaacaucugggaaua

SEQ ID NO: 358185 - RNA, 32 nt, Homo Sapiens
uguagaugaaguucuuucauacuggcuaucau

SEQ ID NO: 358186 - RNA, 32 nt, Homo Sapiens
uuuacacgaugaugaauuuugacaguuugugc

SEQ ID NO: 358187 - RNA, 32 nt, Homo Sapiens
guauuuacugugguuguagacaaaugugaaag

SEQ ID NO: 358188 - RNA, 32 nt, Homo Sapiens
ugaagagaugaaugaaaaugugauauauacau

SEQ ID NO: 358189 - RNA, 32 nt, Homo Sapiens
ggagggcguccggucugcacgcccgccgcgag

SEQ ID NO: 358190 - RNA, 32 nt, Homo Sapiens
auuagaagaugaugauguuagaugcccaucgu

SEQ ID NO: 358191 - RNA, 32 nt, Homo Sapiens
gguuccaucaucuccuuccauaucucacaggu

SEQ ID NO: 358192 - RNA, 32 nt, Homo Sapiens
gcaguuugggaccucccugugccucucagcac

SEQ ID NO: 358193 - RNA, 32 nt, Homo Sapiens
agacaaauuuaaaggaaacacuaaggcugcuu

SEQ ID NO: 358194 - RNA, 32 nt, Homo Sapiens
uuccagguucugaaagagucuuucuucuucaa

SEQ ID NO: 358195 - RNA, 32 nt, Homo Sapiens
uacaauacuguaaauaaacugugcauggcuuu

SEQ ID NO: 358196 - RNA, 32 nt, Homo Sapiens
aauuuuagcucuucccacuuuuuuuuuccuau

SEQ ID NO: 358197 - RNA, 32 nt, Homo Sapiens
gcuaauuuuuuuuuuuuuuuuacgaagccagu

SEQ ID NO: 358198 - RNA, 32 nt, Homo Sapiens
cuggugacacugggcuuccucccgccuucguc

SEQ ID NO: 358199 - RNA, 31 nt, Homo Sapiens
uauguuguaagcagccaacuguaaaugucua

SEQ ID NO: 358200 - RNA, 32 nt, Homo Sapiens
auuggaagguugucuguaaauaauauauguuu

SEQ ID NO: 358201 - RNA, 32 nt, Homo Sapiens
cagauaagaaugcugguuuuccuaaaugcagu

SEQ ID NO: 358202 - RNA, 32 nt, Homo Sapiens
gcaugacgggcuucucgggggcccgccgcacg

SEQ ID NO: 358203 - RNA, 32 nt, Homo Sapiens
ccacauaguauuuuuauguuacccaucaucuu

SEQ ID NO: 358204 - RNA, 32 nt, Homo Sapiens
cguccucaccgagcuccugcaucccuugagug

SEQ ID NO: 358205 - RNA, 32 nt, Homo Sapiens
ggacggugcgcggcccggcccgucucgcgaac

SEQ ID NO: 358206 - RNA, 32 nt, Homo Sapiens
uuuucuucauccaaaacaaggugaugggaaga

SEQ ID NO: 358207 - RNA, 32 nt, Homo Sapiens
cccacgagccccacagggacccucgaggcccc

SEQ ID NO: 358208 - RNA, 32 nt, Homo Sapiens
gaagguggaaacaaaaugccaggccucugcuc

SEQ ID NO: 358209 - RNA, 32 nt, Homo Sapiens
caaacugaguuagggaggguaugcuaacgaca

SEQ ID NO: 358210 - RNA, 32 nt, Homo Sapiens
acccaagagcaucuuggcccugggaagagguc

SEQ ID NO: 358211 - RNA, 32 nt, Homo Sapiens
uccaugaaucaucaucauguuuagacauuagu

SEQ ID NO: 358212 - RNA, 32 nt, Homo Sapiens
ccaggcacuagauuuuggagggggcgacuacc

SEQ ID NO: 358213 - RNA, 27 nt, Homo Sapiens
caaugauaggcaucccaccuccaccac

SEQ ID NO: 358214 - RNA, 32 nt, Homo Sapiens
uaccauuaaggugaaaucauggaucagauauu

SEQ ID NO: 358215 - RNA, 32 nt, Homo Sapiens
ccagggaggggagggaggacugcaugacgcgg

SEQ ID NO: 358216 - RNA, 32 nt, Homo Sapiens
gcuuuuuuaaagagaaaagaugaugcugggug

SEQ ID NO: 358217 - RNA, 32 nt, Homo Sapiens
ucuuugucggaggagcuccucuguuuccugug

SEQ ID NO: 358218 - RNA, 32 nt, Homo Sapiens
gaguugaccaguuugugacuagucuggucacc

SEQ ID NO: 358219 - RNA, 32 nt, Homo Sapiens
caggcgccgagacccaaggcgccacugagggc

SEQ ID NO: 358220 - RNA, 32 nt, Homo Sapiens
aucuucgguguugugagcccuuaaaagggaca

SEQ ID NO: 358221 - RNA, 32 nt, Homo Sapiens
ugcccuucagagaugaacuuucccuccaaagc

SEQ ID NO: 358222 - RNA, 32 nt, Homo Sapiens
uauuccuuuccacauuuccuaugugaauauug

SEQ ID NO: 358223 - RNA, 32 nt, Homo Sapiens
caagcuuaaagucuuguuagacuugggcaggg

SEQ ID NO: 358224 - RNA, 32 nt, Homo Sapiens
gauguggaugacugucaggauguugcuucaga

SEQ ID NO: 358225 - RNA, 32 nt, Homo Sapiens
aaacaagagagggaggcagaaguaaagaggcc

SEQ ID NO: 358226 - RNA, 32 nt, Homo Sapiens
ugagauuuggaggggacaaacauccaaaccau

SEQ ID NO: 358227 - RNA, 32 nt, Homo Sapiens
auguuauguuuccuuuuucauauuucuugcau

SEQ ID NO: 358228 - RNA, 32 nt, Homo Sapiens
uccugccuauuacuguauucucuacuucuaaa

SEQ ID NO: 358229 - RNA, 32 nt, Homo Sapiens
cgggcagcauuuccaguuggcuccaacagcuc

SEQ ID NO: 358230 - RNA, 32 nt, Homo Sapiens
gugaacacaacacucccaccaacaccuccuug

SEQ ID NO: 358231 - RNA, 32 nt, Homo Sapiens
gggagguccuguacagugaugugcaacagggu

SEQ ID NO: 358232 - RNA, 32 nt, Homo Sapiens
guuuguuuuuauuuuuggcuuuaugucuauac

SEQ ID NO: 358233 - RNA, 32 nt, Homo Sapiens
ugccgggcaacgcgccuuuuaaaccugaggga

SEQ ID NO: 358234 - RNA, 32 nt, Homo Sapiens
ugaauacaguugcagauaggcugguuuucaug

SEQ ID NO: 358235 - RNA, 32 nt, Homo Sapiens
cgcggaggacugugggagcggcuuccuuggau

SEQ ID NO: 358236 - RNA, 32 nt, Homo Sapiens
gccugcugggggugggggcccgaagcgccaga

SEQ ID NO: 358237 - RNA, 32 nt, Homo Sapiens
aaauaauagauauuacagacuauagaauacca

SEQ ID NO: 358238 - RNA, 32 nt, Homo Sapiens
aacuggggcuccuggggguacaggaauccuua

SEQ ID NO: 358239 - RNA, 32 nt, Homo Sapiens
agcugccgcccgggcuugcgcugggccaggcg

SEQ ID NO: 358240 - RNA, 32 nt, Homo Sapiens
gggcuuugugguugggggcgcgcgugcgagug

SEQ ID NO: 358241 - RNA, 32 nt, Homo Sapiens
cuauuuuuacuuuguguuuguaacuuacuauu

SEQ ID NO: 358242 - RNA, 32 nt, Homo Sapiens
ccccuccccagggccuuuuccuccucugcguc

SEQ ID NO: 358243 - RNA, 32 nt, Homo Sapiens
acugcgagaagagcuucuucagccaccuucug

SEQ ID NO: 358244 - RNA, 32 nt, Homo Sapiens
uuucaugacaauguaauuuguguaacuguuga

SEQ ID NO: 358245 - RNA, 32 nt, Homo Sapiens
agcagagccccucccuucagagauuacgggua

SEQ ID NO: 358246 - RNA, 32 nt, Homo Sapiens
uuagcgcccucccguucuguccauuugucuug

SEQ ID NO: 358247 - RNA, 32 nt, Homo Sapiens
aacuugagagguuuaauacgugcauguauuaa

SEQ ID NO: 358248 - RNA, 32 nt, Homo Sapiens
gaucguccuggccacccucugauugauaagac

SEQ ID NO: 358249 - RNA, 32 nt, Homo Sapiens
uuuccuuucucugguaacuccuccuuuauacu

SEQ ID NO: 358250 - RNA, 32 nt, Homo Sapiens
cuuaucaucccauuaaauguugucauuuugaa

SEQ ID NO: 358251 - RNA, 32 nt, Homo Sapiens
acgucuuucuucucccacccuccaccuuccaa

SEQ ID NO: 358252 - RNA, 32 nt, Homo Sapiens
gccccgccaggagagacggugccucgcucugu

SEQ ID NO: 358253 - RNA, 30 nt, Homo Sapiens
ggaccauggacgccagauggugggcagugg

SEQ ID NO: 358254 - RNA, 32 nt, Homo Sapiens
acggcaacagagccuuacguuaaauuuucagu

SEQ ID NO: 358255 - RNA, 32 nt, Homo Sapiens
ccagaguaacuggaaaauucuccaucaggagg

SEQ ID NO: 358256 - RNA, 32 nt, Homo Sapiens
cccguccacauucuugcugucaucucagccau

SEQ ID NO: 358257 - RNA, 32 nt, Homo Sapiens
cgagggcgcuggccgccagcagcucacagcgc

SEQ ID NO: 358258 - RNA, 32 nt, Homo Sapiens
gaacuaccaucucuacuaaaaauagaaacaaa

SEQ ID NO: 358259 - RNA, 32 nt, Homo Sapiens
uuuuuaaugggcagguucuugcucucccaggc

SEQ ID NO: 358260 - RNA, 32 nt, Homo Sapiens
ccaauuuccuuccuucccuccacagguuugga

SEQ ID NO: 358261 - RNA, 32 nt, Homo Sapiens
ccucacugcacuuuggaccccuggggccaaca

SEQ ID NO: 358262 - RNA, 32 nt, Homo Sapiens
ugaucccagaaucuuccuucuacaggucugcu

SEQ ID NO: 358263 - RNA, 32 nt, Homo Sapiens
uuuuaauaguuuuauuuugucuguccuguuug

SEQ ID NO: 358264 - RNA, 32 nt, Homo Sapiens
cagcaaggaucugccagcugcccugcagccaa

SEQ ID NO: 358265 - RNA, 32 nt, Homo Sapiens
cuuugaaggcccauaccaauauuuucagugua

SEQ ID NO: 358266 - RNA, 32 nt, Homo Sapiens
uuaaagcccccggcccagcccugcagguauau

SEQ ID NO: 358267 - RNA, 32 nt, Homo Sapiens
ggcaggacccgggcuccacugccgccucuccg

SEQ ID NO: 358268 - RNA, 32 nt, Homo Sapiens
gcggguguucgccuacgucacuggggcgcuac

SEQ ID NO: 358269 - RNA, 32 nt, Homo Sapiens
aauuguauuguuuuauacugugaccacaaaua

SEQ ID NO: 358270 - RNA, 32 nt, Homo Sapiens
caaaagguauccacacuuuugguugaguuuag

SEQ ID NO: 358271 - RNA, 32 nt, Homo Sapiens
cugcuguuuucagauugcuuugaaauaaagcu

SEQ ID NO: 358272 - RNA, 32 nt, Homo Sapiens
cccggcuaguggagcccggcgcggggcccgcu

SEQ ID NO: 358273 - RNA, 32 nt, Homo Sapiens
aucuuggagauagaaaauauaaugauaaauuc

SEQ ID NO: 358274 - RNA, 31 nt, Homo Sapiens
cuccugcagccccagacacucgggccacggg

SEQ ID NO: 358275 - RNA, 32 nt, Homo Sapiens
cauucccuccuccgccucccccaggucggcga

SEQ ID NO: 358276 - RNA, 32 nt, Homo Sapiens
acaaaaaauaccauggcaaaaccuauaugaaa

SEQ ID NO: 358277 - RNA, 32 nt, Homo Sapiens
gaccuauuugaaagaucaaagauugaugcucu

SEQ ID NO: 358278 - RNA, 32 nt, Homo Sapiens
uccugcagggagggaggagagaagggcggcag

SEQ ID NO: 358279 - RNA, 32 nt, Homo Sapiens
ggcauccucacagcuuucccaggcaccgcccc

SEQ ID NO: 358280 - RNA, 32 nt, Homo Sapiens
caagaguuuccacauaaucccaaaaaacacua

SEQ ID NO: 358281 - RNA, 32 nt, Homo Sapiens
cuacauagaagggacagggucuguguuacaga

SEQ ID NO: 358282 - RNA, 32 nt, Homo Sapiens
ucagaucaagccuccugaauccccucauuaca

SEQ ID NO: 358283 - RNA, 32 nt, Homo Sapiens
agugaaucaaugagcgcguguagagaaaguag

SEQ ID NO: 358284 - RNA, 32 nt, Homo Sapiens
agugaccuggggacaucauggaaccaagggau

SEQ ID NO: 358285 - RNA, 32 nt, Homo Sapiens
uauuuuucacggugcuacuaauccugcuguau

SEQ ID NO: 358286 - RNA, 32 nt, Homo Sapiens
aaaucuuauggcaucagagcuuccucguuuuc

SEQ ID NO: 358287 - RNA, 32 nt, Homo Sapiens
cuuuagucuuccauguucugaucacugugugg

SEQ ID NO: 358288 - RNA, 32 nt, Homo Sapiens
acaguggucuuagguaagugcagggagcagcc

SEQ ID NO: 358289 - RNA, 32 nt, Homo Sapiens
gcacaccuggaaaguucugcaaggccucagcu

SEQ ID NO: 358290 - RNA, 32 nt, Homo Sapiens
cuggugccaagaucuacauuucaacccugccu

SEQ ID NO: 358291 - RNA, 32 nt, Homo Sapiens
auuuccugcugggggagggaggaguccacgca

SEQ ID NO: 358292 - RNA, 32 nt, Homo Sapiens
acuauuuuuaucuugcuuuuucguucugucgc

SEQ ID NO: 358293 - RNA, 32 nt, Homo Sapiens
uauuuguuagacacaaauuauaauuuuguugu

SEQ ID NO: 358294 - RNA, 32 nt, Homo Sapiens
uuuauuuaaaaguuuugaaaauaugcaguacu

SEQ ID NO: 358295 - RNA, 32 nt, Homo Sapiens
cuuaucaaucccaaccauccuccuuggguuca

SEQ ID NO: 358296 - RNA, 32 nt, Homo Sapiens
uggcucacaccuguaaucugaacacuuuggga

SEQ ID NO: 358297 - RNA, 32 nt, Homo Sapiens
ggcgggccucagugccagcagccccgcuccgc

SEQ ID NO: 358298 - RNA, 32 nt, Homo Sapiens
uuaugccaggcuaauuuuuuuauuuuuuauag

SEQ ID NO: 358299 - RNA, 32 nt, Homo Sapiens
uaauuguuguacaaaccagagcuuuuuaaagu

SEQ ID NO: 358300 - RNA, 30 nt, Homo Sapiens
ggcccuuugcacugcaucacccuggugccc

SEQ ID NO: 358301 - RNA, 32 nt, Homo Sapiens
gaacacaacacgcuuagcccuguccacaaaca

SEQ ID NO: 358302 - RNA, 32 nt, Homo Sapiens
uauaaugguaauucauuuuugauguuuuguga

SEQ ID NO: 358303 - RNA, 32 nt, Homo Sapiens
uguaacacauaaagacagcaagaauucuuauu

SEQ ID NO: 358304 - RNA, 32 nt, Homo Sapiens
uacauggcggcugugacaguuugcaaggcaca

SEQ ID NO: 358305 - RNA, 32 nt, Homo Sapiens
agguguagagaggggggcguugaaaggacacc

SEQ ID NO: 358306 - RNA, 32 nt, Homo Sapiens
gaugaauuuuuuguggucauaaucaaauacuu

SEQ ID NO: 358307 - RNA, 32 nt, Homo Sapiens
gcucagacauuuucuuuuuuuaacuggugaag

SEQ ID NO: 358308 - RNA, 32 nt, Homo Sapiens
guuuacaucagaaagaaaacagcaaaugacau

SEQ ID NO: 358309 - RNA, 32 nt, Homo Sapiens
gcauuugaagcaucuguugauuguauggaugu

SEQ ID NO: 358310 - RNA, 32 nt, Homo Sapiens
gaucugaaugagucaaagccggcggccucggc

SEQ ID NO: 358311 - RNA, 32 nt, Homo Sapiens
uggagggacuaguagggcagggggacagaaau

SEQ ID NO: 358312 - RNA, 32 nt, Homo Sapiens
aacaucuccaugugcagucucaucucuuauag

SEQ ID NO: 358313 - RNA, 32 nt, Homo Sapiens
acaugcgggagcggcuggaggaggaagagggc

SEQ ID NO: 358314 - RNA, 32 nt, Homo Sapiens
gcauugcuuagcgaccccgccucuggguuugc

SEQ ID NO: 358315 - RNA, 32 nt, Homo Sapiens
caaauuuaaauuauauguuuuguguucucauu

SEQ ID NO: 358316 - RNA, 32 nt, Homo Sapiens
uuuacaucauuuguuuuuccugaccaguauuu

SEQ ID NO: 358317 - RNA, 32 nt, Homo Sapiens
uaaauuaguggugaagacaaaauauaacuugu

SEQ ID NO: 358318 - RNA, 32 nt, Homo Sapiens
ggaacucagucccaggauuaggguuuucuguu

SEQ ID NO: 358319 - RNA, 32 nt, Homo Sapiens
cccgcucgucccgccccgaggggcgugaggag

SEQ ID NO: 358320 - RNA, 32 nt, Homo Sapiens
caggaucgcgggcuugcuuuccgguagcgugg

SEQ ID NO: 358321 - RNA, 32 nt, Homo Sapiens
guuagguggccgcuccucccugcuccucaugg

SEQ ID NO: 358322 - RNA, 32 nt, Homo Sapiens
uucauccucugauugccccaauaaaaaucuuu

SEQ ID NO: 358323 - RNA, 32 nt, Homo Sapiens
uaacuggaucuuaaggacuaaagcagaaugua

SEQ ID NO: 358324 - RNA, 32 nt, Homo Sapiens
uuguuaauuuuuguguauuuucagauaaacua

SEQ ID NO: 358325 - RNA, 32 nt, Homo Sapiens
gccuagucagggcacagcugcccugcugccac

SEQ ID NO: 358326 - RNA, 32 nt, Homo Sapiens
ccugugcccucccugcccagucgcuuuugggg

SEQ ID NO: 358327 - RNA, 32 nt, Homo Sapiens
aaaugguuuaguuuuucucuuuagcucuaugg

SEQ ID NO: 358328 - RNA, 32 nt, Homo Sapiens
cggaagcugacugguccacgcacagccaaagc

SEQ ID NO: 358329 - RNA, 32 nt, Homo Sapiens
gaugugcaaaagaccuuuuuguagccaaacaa

SEQ ID NO: 358330 - RNA, 32 nt, Homo Sapiens
gacaccaucaugacccaaaagggcugcacuuc

SEQ ID NO: 358331 - RNA, 32 nt, Homo Sapiens
gccaauugggcacugugacugcaccgaugccc

SEQ ID NO: 358332 - RNA, 32 nt, Homo Sapiens
uggagggcagcagccccccaccccugcaaccc

SEQ ID NO: 358333 - RNA, 32 nt, Homo Sapiens
acugggaaauaguguucuuuuuugcaagcuug

SEQ ID NO: 358334 - RNA, 32 nt, Homo Sapiens
ccucaacuucuuuuuucuuccuuuuuaaaaau

SEQ ID NO: 358335 - RNA, 32 nt, Homo Sapiens
guucaguuucacaaguuuuuuacaacuacuag

SEQ ID NO: 358336 - RNA, 32 nt, Homo Sapiens
acgccuggauaauuuuuuguauuuucaguaga

SEQ ID NO: 358337 - RNA, 32 nt, Homo Sapiens
aacaguaacgcagguguagaaucagaaaggaa

SEQ ID NO: 358338 - RNA, 32 nt, Homo Sapiens
acaaaauaauuuccguuuaagguaucuguuug

SEQ ID NO: 358339 - RNA, 32 nt, Homo Sapiens
uccuaggcaaugccuccugcuggcuuaguggg

SEQ ID NO: 358340 - RNA, 32 nt, Homo Sapiens
cgggcugggcccgcgcccauggcaagcgcggc

SEQ ID NO: 358341 - RNA, 32 nt, Homo Sapiens
ugugggaaucagccucugccccgcccccucca

SEQ ID NO: 358342 - RNA, 32 nt, Homo Sapiens
agcugcccaccucguuccccagcccucacccc

SEQ ID NO: 358343 - RNA, 29 nt, Homo Sapiens
aagcaguaaaguuuuugagaacuagugaa

SEQ ID NO: 358344 - RNA, 32 nt, Homo Sapiens
cccccggagggguggggcgcggaggaggcuac

SEQ ID NO: 358345 - RNA, 32 nt, Homo Sapiens
ccggggagauggaggaaagcaguuagaauguc

SEQ ID NO: 358346 - RNA, 32 nt, Homo Sapiens
acagugcccaaccaucucaccaggagaaagag

SEQ ID NO: 358347 - RNA, 32 nt, Homo Sapiens
gacucagccggaaccggcucccggcccgaggg

SEQ ID NO: 358348 - RNA, 32 nt, Homo Sapiens
ugccucaaguacagacuccugaagauuuaugg

SEQ ID NO: 358349 - RNA, 32 nt, Homo Sapiens
aaaaaauguauguaucucuggaagucaauaau

SEQ ID NO: 358350 - RNA, 32 nt, Homo Sapiens
auuaguauuuuuccggugaacagaagauuugu

SEQ ID NO: 358351 - RNA, 32 nt, Homo Sapiens
ugguacugucuccacagcccucaguccccacc

SEQ ID NO: 358352 - RNA, 32 nt, Homo Sapiens
acuauagucaugauccgcugggcccccagcgc

SEQ ID NO: 358353 - RNA, 32 nt, Homo Sapiens
auuccacugaaaccucuguucucaugaaggag

SEQ ID NO: 358354 - RNA, 32 nt, Homo Sapiens
ggcgcugcgccaagccgggccggaguggugcg

SEQ ID NO: 358355 - RNA, 32 nt, Homo Sapiens
gcugcgcucuccccggccggagcgcuccuccu

SEQ ID NO: 358356 - RNA, 32 nt, Homo Sapiens
cuuguaauuaucuuguuauuuauuuuuugaau

SEQ ID NO: 358357 - RNA, 32 nt, Homo Sapiens
uucuuggcacgcuggcugaagacauguugccc

SEQ ID NO: 358358 - RNA, 32 nt, Homo Sapiens
ucccccagccccaccaaccccuggccaccuug

SEQ ID NO: 358359 - RNA, 32 nt, Homo Sapiens
gaaacugguuguaaaagagaaacuaucuauuu

SEQ ID NO: 358360 - RNA, 32 nt, Homo Sapiens
gauccauggugauucuagacuucagauauauu

SEQ ID NO: 358361 - RNA, 32 nt, Homo Sapiens
guguacuguuugaaacaaaaguacagacagaa

SEQ ID NO: 358362 - RNA, 32 nt, Homo Sapiens
ggcggccguggcggugaagcguggggccggca

SEQ ID NO: 358363 - RNA, 32 nt, Homo Sapiens
auuguagggggauguuacuccuaaugucacag

SEQ ID NO: 358364 - RNA, 32 nt, Homo Sapiens
ccugaccccaucuggcugcugccccgucuccc

SEQ ID NO: 358365 - RNA, 32 nt, Homo Sapiens
cuuuuuucagcuucuuuauuuccuccuaaugg

SEQ ID NO: 358366 - RNA, 32 nt, Homo Sapiens
agcacccuucccaacuuagucuacacaagaga

SEQ ID NO: 358367 - RNA, 32 nt, Homo Sapiens
aguuuuuaauguuuaaaguugaugcuguuuuc

SEQ ID NO: 358368 - RNA, 32 nt, Homo Sapiens
acguuucuuuucucuuucuuuaauuuuuguuu

SEQ ID NO: 358369 - RNA, 32 nt, Homo Sapiens
ccauuuuuaaaauacagacaaaacacuucuuu

SEQ ID NO: 358370 - RNA, 32 nt, Homo Sapiens
aaaauggaaauucuaguuuguuagaauuaugc

SEQ ID NO: 358371 - RNA, 32 nt, Homo Sapiens
cuguggcuaccuuggucuugcugcugauaucu

SEQ ID NO: 358372 - RNA, 32 nt, Homo Sapiens
cuguuuuguuucacucagauuagcucaguuuu

SEQ ID NO: 358373 - RNA, 32 nt, Homo Sapiens
auacuggcgaagaggcugcgggcgguauuagc

SEQ ID NO: 358374 - RNA, 32 nt, Homo Sapiens
ugauuucuaaaugcaacuuauguuuauacaua

SEQ ID NO: 358375 - RNA, 32 nt, Homo Sapiens
cccgcacgccaggcccgggcuccaccgugggu

SEQ ID NO: 358376 - RNA, 32 nt, Homo Sapiens
agcccagggcaguguugcugcauauugcaugg

SEQ ID NO: 358377 - RNA, 32 nt, Homo Sapiens
aaacccaggucuggaacuggcuccuuaccuug

SEQ ID NO: 358378 - RNA, 32 nt, Homo Sapiens
ggggagguccccaccccuccccuccaggagca

SEQ ID NO: 358379 - RNA, 32 nt, Homo Sapiens
gcucgggaccaauuuugaagagguacuuggcc

SEQ ID NO: 358380 - RNA, 32 nt, Homo Sapiens
aaaaacaaaacaaaacaaaacugugggccauu

SEQ ID NO: 358381 - RNA, 32 nt, Homo Sapiens
ugaggcccgucccccgccccgccccgccucac

SEQ ID NO: 358382 - RNA, 32 nt, Homo Sapiens
gcguccccgagcucggcuccgagugcaccuac

SEQ ID NO: 358383 - RNA, 32 nt, Homo Sapiens
ugacagaguagacuggaaagacuuuauaauca

SEQ ID NO: 358384 - RNA, 32 nt, Homo Sapiens
ccccaguugagggggaaaauaguucuuaaaaa

SEQ ID NO: 358385 - RNA, 32 nt, Homo Sapiens
ucauucauuccuggguuuuucuuuuauuuucu

SEQ ID NO: 358386 - RNA, 32 nt, Homo Sapiens
guucuaaaaugaagucacacaggacaauuauu

SEQ ID NO: 358387 - RNA, 32 nt, Homo Sapiens
uaacuuucuccuuauuucuuggcacuuguaua

SEQ ID NO: 358388 - RNA, 32 nt, Homo Sapiens
cuuuccaagcugccuccacucuacuugacaca

SEQ ID NO: 358389 - RNA, 32 nt, Homo Sapiens
uugugggaggaaggcgaugucuggccuuuuuu

SEQ ID NO: 358390 - RNA, 28 nt, Homo Sapiens
uuacugucuuggaagauguguuuaugug

SEQ ID NO: 358391 - RNA, 32 nt, Homo Sapiens
caauuccugugcucaaaaaugagagugacggc

SEQ ID NO: 358392 - RNA, 32 nt, Homo Sapiens
ccccguccaaaguuugaugcuauguagucagu

SEQ ID NO: 358393 - RNA, 32 nt, Homo Sapiens
aucucggccccgggaggcgggcgcucgggcgc

SEQ ID NO: 358394 - RNA, 31 nt, Homo Sapiens
aagaccaugucgaagggccccgggcccggcg

SEQ ID NO: 358395 - RNA, 32 nt, Homo Sapiens
cuagaaaacaggaugccugucacugauaaguu

SEQ ID NO: 358396 - RNA, 32 nt, Homo Sapiens
cacgggcagcucagccggccucacgccgccgu

SEQ ID NO: 358397 - RNA, 32 nt, Homo Sapiens
accccauuuuucccaggguaaucaugaaagaa

SEQ ID NO: 358398 - RNA, 32 nt, Homo Sapiens
guagugaauacagaauagcacaauauauagga

SEQ ID NO: 358399 - RNA, 32 nt, Homo Sapiens
cuugcuggaaaacccaaaguguuuuuuauuca

SEQ ID NO: 358400 - RNA, 32 nt, Homo Sapiens
gacugcagccuucaucuuuauugggaaugagu

SEQ ID NO: 358401 - RNA, 32 nt, Homo Sapiens
uaucuguaucauaauaguuggauaugcuuaug

SEQ ID NO: 358402 - RNA, 32 nt, Homo Sapiens
caguggcaaaaauaaugacauguagcaaagau

SEQ ID NO: 358403 - RNA, 32 nt, Homo Sapiens
uucaguuucucgcaugcgcagugaguaaacau

SEQ ID NO: 358404 - RNA, 32 nt, Homo Sapiens
ugagaacugacuuucuccccauccccuuccua

SEQ ID NO: 358405 - RNA, 32 nt, Homo Sapiens
ggguguccagaacuagcgaccgggagagcuuu

SEQ ID NO: 358406 - RNA, 32 nt, Homo Sapiens
cacaucauguuuuuuuuuuuuaagacaaaaaa

SEQ ID NO: 358407 - RNA, 32 nt, Homo Sapiens
ucccccaccugagggucugcucugccuugacc

SEQ ID NO: 358408 - RNA, 32 nt, Homo Sapiens
cuaaggcacuggaacuaaagcugcuggaccug

SEQ ID NO: 358409 - RNA, 32 nt, Homo Sapiens
cgugccacgcaccgccgcacgcgcuggagcag

SEQ ID NO: 358410 - RNA, 32 nt, Homo Sapiens
uguggcccuaaggagcugaccgugccagagcu

SEQ ID NO: 358411 - RNA, 32 nt, Homo Sapiens
gauauuuuagaauugaguugugugaagauguc

SEQ ID NO: 358412 - RNA, 32 nt, Homo Sapiens
gugaauuaggauuucaaagugcccuaauagug

SEQ ID NO: 358413 - RNA, 32 nt, Homo Sapiens
guucaggaaaauugaaugcaaaccauagcaca

SEQ ID NO: 358414 - RNA, 32 nt, Homo Sapiens
uuauuugucugucaauauuuaauagcuuagaa

SEQ ID NO: 358415 - RNA, 32 nt, Homo Sapiens
gugacucaagucaucaccaaugucugucaugc

SEQ ID NO: 358416 - RNA, 32 nt, Homo Sapiens
cauaccucagaauaauaaaggcuacauaugac

SEQ ID NO: 358417 - RNA, 32 nt, Homo Sapiens
acguauggcuccacaccuccaaugcugccugg

SEQ ID NO: 358418 - RNA, 32 nt, Homo Sapiens
cacuguccucccgcugccccggguggugagcg

SEQ ID NO: 358419 - RNA, 32 nt, Homo Sapiens
gguauuuuaaaauuauuguuaaacauaucaua

SEQ ID NO: 358420 - RNA, 32 nt, Homo Sapiens
ucucguuucuccucuuuccuccugcuucaugg

SEQ ID NO: 358421 - RNA, 32 nt, Homo Sapiens
uaucuugcagcuaguuaauauuucaucuuuug

SEQ ID NO: 358422 - RNA, 32 nt, Homo Sapiens
gcaacuccuuaguggauugggcugaaagaaaa

SEQ ID NO: 358423 - RNA, 32 nt, Homo Sapiens
ugagucacugccugcgcagcuccggccgccug

SEQ ID NO: 358424 - RNA, 32 nt, Homo Sapiens
uaccuuggcaucuugugugauguuuuacacac

SEQ ID NO: 358425 - RNA, 32 nt, Homo Sapiens
aaaaguaaaaauuaaaaaaugaaauuaaaaau

SEQ ID NO: 358426 - RNA, 31 nt, Homo Sapiens
agcagcacgcaugucccuccaaggcugucuu

SEQ ID NO: 358427 - RNA, 32 nt, Homo Sapiens
caggccaggaggagcuugggcgcaggccaggc

SEQ ID NO: 358428 - RNA, 32 nt, Homo Sapiens
ccaggagguugggggaggagcaucugcccucc

SEQ ID NO: 358429 - RNA, 32 nt, Homo Sapiens
ccuccucgcccgcucccgccggcgagcaagau

SEQ ID NO: 358430 - RNA, 32 nt, Homo Sapiens
gguggcgggaggacggcuccgcgcugcaugcg

SEQ ID NO: 358431 - RNA, 32 nt, Homo Sapiens
aguucuguguccaagucccacccaggcugggu

SEQ ID NO: 358432 - RNA, 32 nt, Homo Sapiens
agcugugagcuuuucuccaucagccgucugag

SEQ ID NO: 358433 - RNA, 32 nt, Homo Sapiens
cccugccccgucccaacacccaccgaagaacc

SEQ ID NO: 358434 - RNA, 32 nt, Homo Sapiens
uguugagucuuaguuaagcaggaauuuaugaa

SEQ ID NO: 358435 - RNA, 32 nt, Homo Sapiens
gggcuuccaaagccggccgcagcccggcgacc

SEQ ID NO: 358436 - RNA, 32 nt, Homo Sapiens
cuuuccccaagcaggggcggccgcagcucuca

SEQ ID NO: 358437 - RNA, 32 nt, Homo Sapiens
aggagaugaaaucacuuuuuauuuuuuagaga

SEQ ID NO: 358438 - RNA, 32 nt, Homo Sapiens
ggguugugagucccggcccagccccuccaccc

SEQ ID NO: 358439 - RNA, 32 nt, Homo Sapiens
agagugucacuuuuuuguuuucuuuuugaaag

SEQ ID NO: 358440 - RNA, 32 nt, Homo Sapiens
cugcgguucccucucacuuuuagaucggaagc

SEQ ID NO: 358441 - RNA, 32 nt, Homo Sapiens
ccgcagcgagggugauguguggggcagguacu

SEQ ID NO: 358442 - RNA, 32 nt, Homo Sapiens
cccagaccaaaaugaauugcaaguugccacaa

SEQ ID NO: 358443 - RNA, 32 nt, Homo Sapiens
aaucuucagugagaucuuuuuauaaaacuucu

SEQ ID NO: 358444 - RNA, 32 nt, Homo Sapiens
uauuucacaucuuuauuauugcaguuuucucu

SEQ ID NO: 358445 - RNA, 32 nt, Homo Sapiens
acccgucaaacacaaucuuuguaaagcuagau

SEQ ID NO: 358446 - RNA, 32 nt, Homo Sapiens
ggucagaaggauuuucuccuguauuuucuucu

SEQ ID NO: 358447 - RNA, 32 nt, Homo Sapiens
cuggggagguagcugagaacuuggcacugcgc

SEQ ID NO: 358448 - RNA, 32 nt, Homo Sapiens
cugcgccggaggagggguuucggccgacacgu

SEQ ID NO: 358449 - RNA, 32 nt, Homo Sapiens
acgaaucaauauauauguugauaucaugaguu

SEQ ID NO: 358450 - RNA, 32 nt, Homo Sapiens
uugggcccaagcccaagacaggucucccugag

SEQ ID NO: 358451 - RNA, 32 nt, Homo Sapiens
gcagaugcuggagauccugggguuggucugcu

SEQ ID NO: 358452 - RNA, 32 nt, Homo Sapiens
ggcugaugcaggagaauagcuuaagcccagga

SEQ ID NO: 358453 - RNA, 32 nt, Homo Sapiens
ucauacugucuccucccaauucauccuuaauu

SEQ ID NO: 358454 - RNA, 32 nt, Homo Sapiens
ucuuacaguuuauuuucacuuccaauguagca

SEQ ID NO: 358455 - RNA, 32 nt, Homo Sapiens
ucuucucccaggggagcuacucaggacucacg

SEQ ID NO: 358456 - RNA, 32 nt, Homo Sapiens
aagaaguaaacgcagaacaucacauuaaagga

SEQ ID NO: 358457 - RNA, 32 nt, Homo Sapiens
cagaccccacugaccaauuuuccacugaccug

SEQ ID NO: 358458 - RNA, 32 nt, Homo Sapiens
aggaacuguauaugacucacuucugugccccc

SEQ ID NO: 358459 - RNA, 32 nt, Homo Sapiens
ucauaaccugcaagauuuuucuuaaaaccuuu

SEQ ID NO: 358460 - RNA, 32 nt, Homo Sapiens
guagauaaaugaauucaaccaguugaucaaau

SEQ ID NO: 358461 - RNA, 32 nt, Homo Sapiens
ccuuuuggaucuuugcaacacugaagauuugg

SEQ ID NO: 358462 - RNA, 32 nt, Homo Sapiens
aucaaaaugugacagaagagacacgcugcaug

SEQ ID NO: 358463 - RNA, 31 nt, Homo Sapiens
gugccgaaauaaacauacgugugcauguguc

SEQ ID NO: 358464 - RNA, 32 nt, Homo Sapiens
gggagguggaggaggagggucugccaagcuac

SEQ ID NO: 358465 - RNA, 32 nt, Homo Sapiens
cugccaggcugagggacagugacacaggugag

SEQ ID NO: 358466 - RNA, 32 nt, Homo Sapiens
agagaugcugauuuuuuuucugauaaauucuu

SEQ ID NO: 358467 - RNA, 32 nt, Homo Sapiens
uagagaaaucaauuucugcuagguauuaacca

SEQ ID NO: 358468 - RNA, 32 nt, Homo Sapiens
ggagggagaagcugucagggacccagggcgcc

SEQ ID NO: 358469 - RNA, 32 nt, Homo Sapiens
agggcaguggguggaggaccgggagcuuuggg

SEQ ID NO: 358470 - RNA, 32 nt, Homo Sapiens
gaggguggacgaagcucucucuagaaagacau

SEQ ID NO: 358471 - RNA, 32 nt, Homo Sapiens
gaagaccagaggaaacacagcaaacggagccu

SEQ ID NO: 358472 - RNA, 32 nt, Homo Sapiens
uccggggaagcagcggcuucagcaagauugga

SEQ ID NO: 358473 - RNA, 32 nt, Homo Sapiens
cuaacuacaaaauaaacaaugauaaauuggac

SEQ ID NO: 358474 - RNA, 32 nt, Homo Sapiens
uggaggacuggaaaugucuuugagcugaaggu

SEQ ID NO: 358475 - RNA, 32 nt, Homo Sapiens
uuuuggaaacaaaaaggcagcagugaucuggg

SEQ ID NO: 358476 - RNA, 32 nt, Homo Sapiens
cugcacagaacagacugcguuauuguuauuuu

SEQ ID NO: 358477 - RNA, 32 nt, Homo Sapiens
ugggagggccaggcaguuacuccugggggcug

SEQ ID NO: 358478 - RNA, 32 nt, Homo Sapiens
agagguagaggguggaugcccagggcacccaa

SEQ ID NO: 358479 - RNA, 32 nt, Homo Sapiens
uucuuuugucuucuauuuuuuaucuguuuuuc

SEQ ID NO: 358480 - RNA, 32 nt, Homo Sapiens
cagacuggccuguugcuguuucccaggagcug

SEQ ID NO: 358481 - RNA, 32 nt, Homo Sapiens
ggaauggcuguauuuacccaaugccuguaccc

SEQ ID NO: 358482 - RNA, 32 nt, Homo Sapiens
cauccccagcuaggaagaaagaauggcacucu

SEQ ID NO: 358483 - RNA, 32 nt, Homo Sapiens
ucucaaaaaugaaaucauaauguacauugcuu

SEQ ID NO: 358484 - RNA, 32 nt, Homo Sapiens
gacaacacgcaccuaccuggaggacaugagca

SEQ ID NO: 358485 - RNA, 32 nt, Homo Sapiens
ggccuaguuugcucgcgcccucacgcgcuuug

SEQ ID NO: 358486 - RNA, 32 nt, Homo Sapiens
guagucacaccugucaacaagguccgcaaguu

SEQ ID NO: 358487 - RNA, 32 nt, Homo Sapiens
ugagguggaagauaaguaagcagguacuuaaa

SEQ ID NO: 358488 - RNA, 32 nt, Homo Sapiens
agggucuagcugugacaguaaauauaauaccg

SEQ ID NO: 358489 - RNA, 32 nt, Homo Sapiens
ugucguuaauagguuucuggguaaauggccca

SEQ ID NO: 358490 - RNA, 32 nt, Homo Sapiens
cgggccugcgcugcggacgacccggccguccc

SEQ ID NO: 358491 - RNA, 32 nt, Homo Sapiens
ugaaaugauauuaaguggaaaccagagauaaa

SEQ ID NO: 358492 - RNA, 32 nt, Homo Sapiens
cuguggggcaguggggccagagcccaccuccc

SEQ ID NO: 358493 - RNA, 32 nt, Homo Sapiens
gcccaccgagggucggcccuguaggugaccuc

SEQ ID NO: 358494 - RNA, 31 nt, Homo Sapiens
gugaugcagagcagccaaggauauguugacc

SEQ ID NO: 358495 - RNA, 32 nt, Homo Sapiens
uguuccgggggucggcggccgcucuccugcca

SEQ ID NO: 358496 - RNA, 32 nt, Homo Sapiens
cccgccaucccgccucuuucugcgggcgucuc

SEQ ID NO: 358497 - RNA, 32 nt, Homo Sapiens
auguggcuggaaccacaggcacgugccaccau

SEQ ID NO: 358498 - RNA, 32 nt, Homo Sapiens
ucauaguugacuuaagcgcauggacaccaaau

SEQ ID NO: 358499 - RNA, 32 nt, Homo Sapiens
cagagaccccaggccaguuaccucugacccug

SEQ ID NO: 358500 - RNA, 32 nt, Homo Sapiens
ucaaguucuugacuauuauucucuuauaagua

SEQ ID NO: 358501 - RNA, 32 nt, Homo Sapiens
caaaggcugccgucgggacgggcgaguuaggg

SEQ ID NO: 358502 - RNA, 32 nt, Homo Sapiens
guaguuuaguuauaacuuugcaucuauaauug

SEQ ID NO: 358503 - RNA, 32 nt, Homo Sapiens
agcuggacagaaaaggggcagacacaccgagg

SEQ ID NO: 358504 - RNA, 32 nt, Homo Sapiens
gcucuggugcacgccugagcguccuccaucuu

SEQ ID NO: 358505 - RNA, 32 nt, Homo Sapiens
cccacucuucuccuucccuccccuccccuccc

SEQ ID NO: 358506 - RNA, 32 nt, Homo Sapiens
ucuguggcauccugcuggccugaggcucaccu

SEQ ID NO: 358507 - RNA, 32 nt, Homo Sapiens
ccugggcagauggggucaaggcugggccaguc

SEQ ID NO: 358508 - RNA, 32 nt, Homo Sapiens
uguaaugauauuuggcuuguugauuucucagc

SEQ ID NO: 358509 - RNA, 32 nt, Homo Sapiens
cuuuggagaggggacaguuguuggcucuggua

SEQ ID NO: 358510 - RNA, 32 nt, Homo Sapiens
aaacaaaaacaaaaaacugcagugaaagacaa

SEQ ID NO: 358511 - RNA, 32 nt, Homo Sapiens
gugucaggaagagagagccgagcugcaggcac

SEQ ID NO: 358512 - RNA, 32 nt, Homo Sapiens
uugguggagagccacagguagcuggaaaagau

SEQ ID NO: 358513 - RNA, 32 nt, Homo Sapiens
guuugagguacaaggggaaaagauggcgauuc

SEQ ID NO: 358514 - RNA, 32 nt, Homo Sapiens
cuagaauggaagcuccccgagagcaggaaccu

SEQ ID NO: 358515 - RNA, 32 nt, Homo Sapiens
uuguaagacaccuuaaacaaaguccuucaauu

SEQ ID NO: 358516 - RNA, 32 nt, Homo Sapiens
gauuacaucuuuccauaucuuuuacacuuacc

SEQ ID NO: 358517 - RNA, 32 nt, Homo Sapiens
ggcugcaaccucaguggccacugagcaucugg

SEQ ID NO: 358518 - RNA, 32 nt, Homo Sapiens
uaaggaggcagcaacggagaguggggaagugg

SEQ ID NO: 358519 - RNA, 32 nt, Homo Sapiens
uauuuuuaaguacaccugucagcuguuucuua

SEQ ID NO: 358520 - RNA, 32 nt, Homo Sapiens
gugaagcccgcggcgccuagggcgcagggagu

SEQ ID NO: 358521 - RNA, 32 nt, Homo Sapiens
ccucuucccaguucucuuuauagaagcucuag

SEQ ID NO: 358522 - RNA, 32 nt, Homo Sapiens
uaggacugcaggugcuccaccacgcccggcua

SEQ ID NO: 358523 - RNA, 32 nt, Homo Sapiens
gaggcugaggcggguggauugcuugagaccau

SEQ ID NO: 358524 - RNA, 32 nt, Homo Sapiens
cccggccagauucuaacagcauuugacucauu

SEQ ID NO: 358525 - RNA, 32 nt, Homo Sapiens
aaacuccugcucucaagaaguauccauggaca

SEQ ID NO: 358526 - RNA, 32 nt, Homo Sapiens
agcagguauaugcuguugaggcugguuauaga

SEQ ID NO: 358527 - RNA, 32 nt, Homo Sapiens
accucccgccccacagugcccugcaguugcca

SEQ ID NO: 358528 - RNA, 32 nt, Homo Sapiens
cauccccagggauaagacacaaacaccugcaa

SEQ ID NO: 358529 - RNA, 32 nt, Homo Sapiens
augcuaagcagaaaugcagacaauauaagaca

SEQ ID NO: 358530 - RNA, 30 nt, Homo Sapiens
uauaaagggaagcuugaggaggaauuucac

SEQ ID NO: 358531 - RNA, 32 nt, Homo Sapiens
ugacuuguauacaacuaaugcauguuuuauug

SEQ ID NO: 358532 - RNA, 32 nt, Homo Sapiens
ucauagguuuuuuuuuuuuuuaugugauugcc

SEQ ID NO: 358533 - RNA, 32 nt, Homo Sapiens
acaagguuguggugacuggugccgugauguuu

SEQ ID NO: 358534 - RNA, 32 nt, Homo Sapiens
ugugaggccaucucugagcaguggacucaaaa

SEQ ID NO: 358535 - RNA, 32 nt, Homo Sapiens
gucagcacaaaggaggcuuuuucugugcuuug

SEQ ID NO: 358536 - RNA, 32 nt, Homo Sapiens
gcagauaggaggaggaggaacugcgugugccc

SEQ ID NO: 358537 - RNA, 32 nt, Homo Sapiens
gaagagcucccucaccaugaguagcgcuaugu

SEQ ID NO: 358538 - RNA, 32 nt, Homo Sapiens
uugaagaguagagacaauggcuaaacguugac

SEQ ID NO: 358539 - RNA, 32 nt, Homo Sapiens
uacugcacuccagccugggugacagagcgaga

SEQ ID NO: 358540 - RNA, 32 nt, Homo Sapiens
cccgccugucuccucggcggagccugcugccc

SEQ ID NO: 358541 - RNA, 32 nt, Homo Sapiens
ugaugaguaauuaugacuaagaaucuagcccu

SEQ ID NO: 358542 - RNA, 32 nt, Homo Sapiens
aaauuacauuuuacauaauuuauguguaugaa

SEQ ID NO: 358543 - RNA, 28 nt, Homo Sapiens
uauccuaauauaggaccaauugaaguau

SEQ ID NO: 358544 - RNA, 32 nt, Homo Sapiens
ucggcggagggucauggcuccggcgccggacg

SEQ ID NO: 358545 - RNA, 32 nt, Homo Sapiens
ggagccucagaagaaaacaaaguucuauuuua

SEQ ID NO: 358546 - RNA, 32 nt, Homo Sapiens
guuggguauuauaaauaagagauacaaccaug

SEQ ID NO: 358547 - RNA, 32 nt, Homo Sapiens
auuuaaaucuuaaauuuaauagagucuaguga

SEQ ID NO: 358548 - RNA, 32 nt, Homo Sapiens
acggccuccgggcugucuccccggccaucccc

SEQ ID NO: 358549 - RNA, 32 nt, Homo Sapiens
aauacucagaagauaaggugugaauguaugua

SEQ ID NO: 358550 - RNA, 32 nt, Homo Sapiens
aggacgcgcccggcgccccugagccggccgag

SEQ ID NO: 358551 - RNA, 32 nt, Homo Sapiens
uuuaucaggggucuccuguacaguguaucugu

SEQ ID NO: 358552 - RNA, 32 nt, Homo Sapiens
uucuuaccuagccuccccccacuuccucaaaa

SEQ ID NO: 358553 - RNA, 32 nt, Homo Sapiens
agcguuggguuuaugucuuuauuugacgaaaa

SEQ ID NO: 358554 - RNA, 32 nt, Homo Sapiens
aaguauuuucuguagcuauuguuuccucaguc

SEQ ID NO: 358555 - RNA, 32 nt, Homo Sapiens
accgcccguaugccuccgcgggcgcuuggcag

SEQ ID NO: 358556 - RNA, 32 nt, Homo Sapiens
cuguuacauuuccuuucacguauuucuuuuag

SEQ ID NO: 358557 - RNA, 32 nt, Homo Sapiens
ugaguaaaaauauaaaauaguaaaauuucacu

SEQ ID NO: 358558 - RNA, 32 nt, Homo Sapiens
cacucauuauuacaaggucaugcugaaauuuu

SEQ ID NO: 358559 - RNA, 32 nt, Homo Sapiens
gugauauucuuuguuaauuuggaccauuuucc

SEQ ID NO: 358560 - RNA, 32 nt, Homo Sapiens
acuaugauuuggaaaauaaaucaaugcuauaa

SEQ ID NO: 358561 - RNA, 32 nt, Homo Sapiens
uuuggaacaagcugauggacugcgcaucucug

SEQ ID NO: 358562 - RNA, 32 nt, Homo Sapiens
auuaagcucugucuacauuuugucuuagugcu

SEQ ID NO: 358563 - RNA, 32 nt, Homo Sapiens
caggaggaugagccagcucugcaguuccacuu

SEQ ID NO: 358564 - RNA, 32 nt, Homo Sapiens
aaggaaucuaguguaaaaaacaacagcaaaca

SEQ ID NO: 358565 - RNA, 32 nt, Homo Sapiens
ucucagaugaggaacaggaccuuaagaucaag

SEQ ID NO: 358566 - RNA, 32 nt, Homo Sapiens
uaauuuuuaguugcucuuuguuuucucugccg

SEQ ID NO: 358567 - RNA, 32 nt, Homo Sapiens
ugcuuucuuucucuuccagucauggcaccaaa

SEQ ID NO: 358568 - RNA, 32 nt, Homo Sapiens
gagagcagugcuuccagaguuccuccugcacc

SEQ ID NO: 358569 - RNA, 32 nt, Homo Sapiens
acugguguggaggucgagguggggagggggag

SEQ ID NO: 358570 - RNA, 32 nt, Homo Sapiens
uuugagaagaacucaauggauacuggauuugc

SEQ ID NO: 358571 - RNA, 32 nt, Homo Sapiens
uucugaaaaucacucucggacugccguccucg

SEQ ID NO: 358572 - RNA, 32 nt, Homo Sapiens
cuucccacaaaauuauucuccauuuguacaua

SEQ ID NO: 358573 - RNA, 32 nt, Homo Sapiens
gaacagauaacuucuucagauacauuugugua

SEQ ID NO: 358574 - RNA, 32 nt, Homo Sapiens
ucuugcauggcaccaccggccagacacugccc

SEQ ID NO: 358575 - RNA, 32 nt, Homo Sapiens
uguaaguacagcagcagcauuauuaaauacug

SEQ ID NO: 358576 - RNA, 32 nt, Homo Sapiens
gaccauugcagcauccuccccuccucggacuc

SEQ ID NO: 358577 - RNA, 32 nt, Homo Sapiens
aguccuacuuggacugacaggccugauggagc

SEQ ID NO: 358578 - RNA, 32 nt, Homo Sapiens
acgacggacagaggagagacaccacugggagc

SEQ ID NO: 358579 - RNA, 32 nt, Homo Sapiens
gacugcggggacccgcuccgcgcacaguggcu

SEQ ID NO: 358580 - RNA, 32 nt, Homo Sapiens
uagcucuauacucucuggcuccccucauccuc

SEQ ID NO: 358581 - RNA, 32 nt, Homo Sapiens
gaauuugaaaaaugucuguuaugcaaugcugg

SEQ ID NO: 358582 - RNA, 32 nt, Homo Sapiens
gaguccugagagaacagaagguguaacugcau

SEQ ID NO: 358583 - RNA, 32 nt, Homo Sapiens
ggagcagccaaggaggcugcuguccccccaca

SEQ ID NO: 358584 - RNA, 32 nt, Homo Sapiens
acacucaccccugucagcgugcggcugggcuc

SEQ ID NO: 358585 - RNA, 32 nt, Homo Sapiens
cauauuuuacacaaaaucauguugugggagcc

SEQ ID NO: 358586 - RNA, 32 nt, Homo Sapiens
cuucagaaggauuaacgccaaacuaaacugac

SEQ ID NO: 358587 - RNA, 32 nt, Homo Sapiens
cucaggggaucuuuuuacuccccuuuguuuga

SEQ ID NO: 358588 - RNA, 32 nt, Homo Sapiens
gccuguuggccauuuuuguugccacuauaaag

SEQ ID NO: 358589 - RNA, 32 nt, Homo Sapiens
auacugcagcuuuacugccuuccuccuuaucc

SEQ ID NO: 358590 - RNA, 32 nt, Homo Sapiens
ucuuaugugucuauauuguccuugucccuuuu

SEQ ID NO: 358591 - RNA, 32 nt, Homo Sapiens
aaacuuuguacgacagacccaggcuggagucu

SEQ ID NO: 358592 - RNA, 32 nt, Homo Sapiens
gauccggcccucgccuccucccucgguggcgc

SEQ ID NO: 358593 - RNA, 30 nt, Homo Sapiens
gaggcccaugcucccugaacgcuggagacc

SEQ ID NO: 358594 - RNA, 32 nt, Homo Sapiens
acgcguccgggcggcggcaguggcggucccac

SEQ ID NO: 358595 - RNA, 32 nt, Homo Sapiens
ccauagaguuuucaaaaugugaaucuuuggaa

SEQ ID NO: 358596 - RNA, 32 nt, Homo Sapiens
accuuggaagcaguuagaaucuaccaggcaca

SEQ ID NO: 358597 - RNA, 32 nt, Homo Sapiens
aagauacucuacagaacuugucaaaucuuuga

SEQ ID NO: 358598 - RNA, 32 nt, Homo Sapiens
cucacacugaagauuuugcaucacuuuugcua

SEQ ID NO: 358599 - RNA, 32 nt, Homo Sapiens
acauuaucaaggaaaacggggaucgcugcucc

SEQ ID NO: 358600 - RNA, 32 nt, Homo Sapiens
cagcccagcucuucuugggguuguuuacgccc

SEQ ID NO: 358601 - RNA, 32 nt, Homo Sapiens
acauccgccucccggacucaagcgauucuccu

SEQ ID NO: 358602 - RNA, 32 nt, Homo Sapiens
gacuuuuaucccaauuagugaaucuuggaggg

SEQ ID NO: 358603 - RNA, 32 nt, Homo Sapiens
cucagggcagggaagaguuaggacucuguuuu

SEQ ID NO: 358604 - RNA, 32 nt, Homo Sapiens
aguuauuuugaauauuuuuaugcugucaugcu

SEQ ID NO: 358605 - RNA, 32 nt, Homo Sapiens
ccacccacuggcucccucccccagcgcucucc

SEQ ID NO: 358606 - RNA, 32 nt, Homo Sapiens
ggccccgugcccggcguguggccuuacugguu

SEQ ID NO: 358607 - RNA, 32 nt, Homo Sapiens
uuuaauucauuuuaaacaaaagcagaguacac

SEQ ID NO: 358608 - RNA, 32 nt, Homo Sapiens
ccccucugucucccuccauucuguuccgcuag

SEQ ID NO: 358609 - RNA, 32 nt, Homo Sapiens
aagacuaggguuguuucuuaaauuuagcucau

SEQ ID NO: 358610 - RNA, 32 nt, Homo Sapiens
ucuucaguacuugccuccuugcuggcauugaa

SEQ ID NO: 358611 - RNA, 32 nt, Homo Sapiens
cuuguacccacccaugagaagcaagagaccuu

SEQ ID NO: 358612 - RNA, 32 nt, Homo Sapiens
ucugucugacaccccuuuccagaaccagaaag

SEQ ID NO: 358613 - RNA, 32 nt, Homo Sapiens
uuccucccacuuuuccucccccauagccacag

SEQ ID NO: 358614 - RNA, 32 nt, Homo Sapiens
gccgcgagacccacccagugccgcagaagaag

SEQ ID NO: 358615 - RNA, 32 nt, Homo Sapiens
ggccucccugcccccacccccagcaucgcagu

SEQ ID NO: 358616 - RNA, 32 nt, Homo Sapiens
cagugccuguccucgccacagggccuccaggg

SEQ ID NO: 358617 - RNA, 32 nt, Homo Sapiens
accuguucucuagcugugaucuuaccacuuca

SEQ ID NO: 358618 - RNA, 32 nt, Homo Sapiens
cuccaguccuuccuggagaugccuucagccag

SEQ ID NO: 358619 - RNA, 32 nt, Homo Sapiens
cuccuguuccggugucagagggcccgcccucc

SEQ ID NO: 358620 - RNA, 32 nt, Homo Sapiens
ucauggggcauguuucuaguuuuuauugcugg

SEQ ID NO: 358621 - RNA, 32 nt, Homo Sapiens
ugcacaggagagauggcgucagggcguuaucu

SEQ ID NO: 358622 - RNA, 32 nt, Homo Sapiens
aggggcaggaggagccacaugagagagggaga

SEQ ID NO: 358623 - RNA, 32 nt, Homo Sapiens
gcaucugauuuucagguguacauuuauuuuug

SEQ ID NO: 358624 - RNA, 32 nt, Homo Sapiens
uuugccuucugugcguaaagcaugucaggcuc

SEQ ID NO: 358625 - RNA, 32 nt, Homo Sapiens
agggagccacggcgcaugcuggcgaugcccau

SEQ ID NO: 358626 - RNA, 32 nt, Homo Sapiens
aggucugaccgccccgcugaggucucagaaca

SEQ ID NO: 358627 - RNA, 32 nt, Homo Sapiens
aacuuuccagaugauuuguaacuucucugugc

SEQ ID NO: 358628 - RNA, 32 nt, Homo Sapiens
ccaucaaggagaucaaaagccuuuuuuucucc

SEQ ID NO: 358629 - RNA, 32 nt, Homo Sapiens
uuggagaggucuuguugagaaggcaaaauuuu

SEQ ID NO: 358630 - RNA, 32 nt, Homo Sapiens
aagagucuggcaccucuuuuagguccaauaag

SEQ ID NO: 358631 - RNA, 32 nt, Homo Sapiens
ucuccgcagugcagagcagcuugccgaggacc

SEQ ID NO: 358632 - RNA, 32 nt, Homo Sapiens
cggcagguggcagcagcucgggcccccgccgc

SEQ ID NO: 358633 - RNA, 32 nt, Homo Sapiens
agggcucucgcacgggggcgucuugggacggg

SEQ ID NO: 358634 - RNA, 32 nt, Homo Sapiens
gcaaaaggaaacaaauaauguucauuuuaagc

SEQ ID NO: 358635 - RNA, 32 nt, Homo Sapiens
acaaaaauuagccaggcauaguugugggcacc

SEQ ID NO: 358636 - RNA, 32 nt, Homo Sapiens
cuugaccguccucaaccaagcgaugcaugcca

SEQ ID NO: 358637 - RNA, 32 nt, Homo Sapiens
cauucuugcucugggaucuacaggcaggguag

SEQ ID NO: 358638 - RNA, 32 nt, Homo Sapiens
augggccuauuaugagcuacgcugugacuuug

SEQ ID NO: 358639 - RNA, 32 nt, Homo Sapiens
ucgcucggacgcggcuucggcccgcagagggu

SEQ ID NO: 358640 - RNA, 32 nt, Homo Sapiens
ggucgugguaguguacaagggauguuugcacc

SEQ ID NO: 358641 - RNA, 32 nt, Homo Sapiens
ccagcuucuccuuaccugcacccaggccucag

SEQ ID NO: 358642 - RNA, 32 nt, Homo Sapiens
cagcuauaaucucagcacuuugggaggcugag

SEQ ID NO: 358643 - RNA, 32 nt, Homo Sapiens
acuaauuuuuaaaaauucuuuguagagagggg

SEQ ID NO: 358644 - RNA, 32 nt, Homo Sapiens
aaaagucacucugcggucugggcucacauccc

SEQ ID NO: 358645 - RNA, 32 nt, Homo Sapiens
ccuuauaggggagagggaacagagcccaguga

SEQ ID NO: 358646 - RNA, 32 nt, Homo Sapiens
ucugguaaaacaagugaacaaacaaucuacaa

SEQ ID NO: 358647 - RNA, 32 nt, Homo Sapiens
ggagcccuccgggaacgccggcccuggggcag

SEQ ID NO: 358648 - RNA, 32 nt, Homo Sapiens
ccuguauuaaacaauguauggacagaguggaa

SEQ ID NO: 358649 - RNA, 32 nt, Homo Sapiens
auggcucugaagacucacucuuuggaaugucc

SEQ ID NO: 358650 - RNA, 29 nt, Homo Sapiens
uaaaagggagauuucaguuuaaaacuuaa

SEQ ID NO: 358651 - RNA, 32 nt, Homo Sapiens
uagcuugugucuuuuuguuuguuugcuuguuu

SEQ ID NO: 358652 - RNA, 32 nt, Homo Sapiens
ucuuacccccgccgcuucucgacucuguuguu

SEQ ID NO: 358653 - RNA, 32 nt, Homo Sapiens
uauuuacaaaugcuuuauucucuucuuuaaua

SEQ ID NO: 358654 - RNA, 32 nt, Homo Sapiens
uggcguggcccacaaaccuuggauucaccauc

SEQ ID NO: 358655 - RNA, 32 nt, Homo Sapiens
agggaggcggcccuuccagcagccaugaggga

SEQ ID NO: 358656 - RNA, 32 nt, Homo Sapiens
uuuucugaaaauacauacuuuuacauuucuac

SEQ ID NO: 358657 - RNA, 32 nt, Homo Sapiens
cccccggcugccaucuccuccuccugggccgc

SEQ ID NO: 358658 - RNA, 32 nt, Homo Sapiens
ucacucucucgccuguucugugucucacaugc

SEQ ID NO: 358659 - RNA, 32 nt, Homo Sapiens
auuucacacaggcucuuacacacacacgcucc

SEQ ID NO: 358660 - RNA, 32 nt, Homo Sapiens
gcuuuaguuaggaugucgugaugggaccgagc

SEQ ID NO: 358661 - RNA, 32 nt, Homo Sapiens
acacaggcggcuuucuggaaaaagcauggaaa

SEQ ID NO: 358662 - RNA, 32 nt, Homo Sapiens
agaaccaagggaagaaguugggguuauuagaa

SEQ ID NO: 358663 - RNA, 32 nt, Homo Sapiens
ucaggagagauggcuuguccccugcccugaag

SEQ ID NO: 358664 - RNA, 32 nt, Homo Sapiens
gaggaugaggcugcaucuccccucagacugga

SEQ ID NO: 358665 - RNA, 32 nt, Homo Sapiens
gagagaacauucaugagagacacaauaaugaa

SEQ ID NO: 358666 - RNA, 32 nt, Homo Sapiens
ugagagccaaaggauaugcccugucaugguuu

SEQ ID NO: 358667 - RNA, 31 nt, Homo Sapiens
aggcacaggcacugcccguuccccuugccug

SEQ ID NO: 358668 - RNA, 32 nt, Homo Sapiens
cugcagccaucccaaggcuccugaccuaccug

SEQ ID NO: 358669 - RNA, 32 nt, Homo Sapiens
ugcccaguucccuuugcagccugggaaggugg

SEQ ID NO: 358670 - RNA, 32 nt, Homo Sapiens
cacgaugggauuuuucucccuugccgaaaugg

SEQ ID NO: 358671 - RNA, 32 nt, Homo Sapiens
gagauuauauauacacuauccgugcacauuau

SEQ ID NO: 358672 - RNA, 32 nt, Homo Sapiens
uuacuuuauccuguggcauuauccccuggagu

SEQ ID NO: 358673 - RNA, 32 nt, Homo Sapiens
gagcucagggacccccaggucuguguggcugc

SEQ ID NO: 358674 - RNA, 32 nt, Homo Sapiens
aaggagcaucagaaaugaggcaagcuaggaga

SEQ ID NO: 358675 - RNA, 32 nt, Homo Sapiens
gaaaugacucuuaauuugaauuuuggagugcu

SEQ ID NO: 358676 - RNA, 32 nt, Homo Sapiens
agaccuacuuaacaacuuuauaccugguuaac

SEQ ID NO: 358677 - RNA, 32 nt, Homo Sapiens
gcugagccgcggcugccggacgggacgggacc

SEQ ID NO: 358678 - RNA, 32 nt, Homo Sapiens
aaaauagagagauaagauugcgugcaugugug

SEQ ID NO: 358679 - RNA, 32 nt, Homo Sapiens
gaaaccauggauuuauuuuacugcacaaugug

SEQ ID NO: 358680 - RNA, 32 nt, Homo Sapiens
cgcguggacuuccgccuggugaacgagcugcu

SEQ ID NO: 358681 - RNA, 32 nt, Homo Sapiens
uuaaacaaaaauuuaaauuuuggaauccucua

SEQ ID NO: 358682 - RNA, 32 nt, Homo Sapiens
uacaagaauaaucaaauuuucuuaaaacuaga

SEQ ID NO: 358683 - RNA, 32 nt, Homo Sapiens
auuauguacagaagauucccaaggcugcuguu

SEQ ID NO: 358684 - RNA, 32 nt, Homo Sapiens
uuuccuuguucauaaauguagagcagugauuu

SEQ ID NO: 358685 - RNA, 32 nt, Homo Sapiens
gcucacucccaggcccgucgagggaucucugc

SEQ ID NO: 358686 - RNA, 32 nt, Homo Sapiens
aauuauauauuuacaaaaggccauuacuucug

SEQ ID NO: 358687 - RNA, 32 nt, Homo Sapiens
caauaugccauuguauaaggacaugaugucaa

SEQ ID NO: 358688 - RNA, 32 nt, Homo Sapiens
aaugaaaggcauucaaauaaaaagagaggaag

SEQ ID NO: 358689 - RNA, 32 nt, Homo Sapiens
uaagcuccaagcccuucaggaguuccaaggga

SEQ ID NO: 358690 - RNA, 28 nt, Homo Sapiens
acugcggggcggccggaggaucgccgag

SEQ ID NO: 358691 - RNA, 32 nt, Homo Sapiens
agagggcucuagucccugguucugaacacucu

SEQ ID NO: 358692 - RNA, 27 nt, Homo Sapiens
aaaguguuuaucuucagcaccaaauac

SEQ ID NO: 358693 - RNA, 32 nt, Homo Sapiens
uaccaguugagggacacuuugauuccaguuug

SEQ ID NO: 358694 - RNA, 32 nt, Homo Sapiens
ccucccaugugcagcccggccagccgggcucu

SEQ ID NO: 358695 - RNA, 32 nt, Homo Sapiens
uaauacugauaaacaaaauguaaagguaauga

SEQ ID NO: 358696 - RNA, 32 nt, Homo Sapiens
ucccccacacaagcucauccccggccucuggg

SEQ ID NO: 358697 - RNA, 32 nt, Homo Sapiens
auucauaaagguccauacaaaaauguuauaac

SEQ ID NO: 358698 - RNA, 32 nt, Homo Sapiens
uccuuuccccagcccucuucagcccuccccag

SEQ ID NO: 358699 - RNA, 32 nt, Homo Sapiens
ccaccgugggccucagagcugcugcuggggca

SEQ ID NO: 358700 - RNA, 32 nt, Homo Sapiens
ucgcuucuccuagcagacccugcccggcuugg

SEQ ID NO: 358701 - RNA, 32 nt, Homo Sapiens
uagaaguguuggacucaguuuacucugggcau

SEQ ID NO: 358702 - RNA, 32 nt, Homo Sapiens
ucaggcuccccggcccucuggcugccaaagcc

SEQ ID NO: 358703 - RNA, 32 nt, Homo Sapiens
gcucuugaagggcugaguggccugcugggggu

SEQ ID NO: 358704 - RNA, 32 nt, Homo Sapiens
ccugcuccccgcuuccuccccuucagucagcu

SEQ ID NO: 358705 - RNA, 28 nt, Homo Sapiens
auuuugguggcuacuauaaggaaaucua

SEQ ID NO: 358706 - RNA, 32 nt, Homo Sapiens
ggaaaggggaaagagggauucuaggguuucau

SEQ ID NO: 358707 - RNA, 32 nt, Homo Sapiens
guccacugcgcgcuucgcucuccgccgcccga

SEQ ID NO: 358708 - RNA, 32 nt, Homo Sapiens
acagugacugugaauauauaaagcagagugac

SEQ ID NO: 358709 - RNA, 32 nt, Homo Sapiens
aucugacaaaaugacaucauggcagaguugua

SEQ ID NO: 358710 - RNA, 32 nt, Homo Sapiens
cagcauguccaagccccuaaccccagaugugg

SEQ ID NO: 358711 - RNA, 30 nt, Homo Sapiens
cgcguaggggcugggaggccggcgcgcaga

SEQ ID NO: 358712 - RNA, 32 nt, Homo Sapiens
uuguauauugaugaaugagaucuuaccuauua

SEQ ID NO: 358713 - RNA, 32 nt, Homo Sapiens
aacacaacucagggcuuuugugaagguucccc

SEQ ID NO: 358714 - RNA, 32 nt, Homo Sapiens
guagcaucugguucaguguuucccugggcuga

SEQ ID NO: 358715 - RNA, 32 nt, Homo Sapiens
aggcuuaacauuuuugauuuuguuuuuuaaug

SEQ ID NO: 358716 - RNA, 32 nt, Homo Sapiens
uaaucagaauaaagcggaagcaccaugaugac

SEQ ID NO: 358717 - RNA, 32 nt, Homo Sapiens
agugggccugccagcaggccagggacucagcg

SEQ ID NO: 358718 - RNA, 32 nt, Homo Sapiens
cuguggcagggccgguggguugagcugcgccu

SEQ ID NO: 358719 - RNA, 32 nt, Homo Sapiens
acaaccaccaaaagguggaaacaacacaagca

SEQ ID NO: 358720 - RNA, 32 nt, Homo Sapiens
agauuucuaaaauauuuugaugcugaaagagg

SEQ ID NO: 358721 - RNA, 32 nt, Homo Sapiens
guacuuccacauugguuuaaccagaggaaaac

SEQ ID NO: 358722 - RNA, 32 nt, Homo Sapiens
cauuucaggacauuuggaaaucaggucgauuu

SEQ ID NO: 358723 - RNA, 32 nt, Homo Sapiens
ucaguuuaaagugaaagaaaaaucuguaauac

SEQ ID NO: 358724 - RNA, 32 nt, Homo Sapiens
uucgcccgcagcuccgcgcccgcgggcaacca

SEQ ID NO: 358725 - RNA, 32 nt, Homo Sapiens
aaaacaaaacaaaaaacuauguauuugcacag

SEQ ID NO: 358726 - RNA, 32 nt, Homo Sapiens
agucacagaaaagaaaagcagagucagcuacu

SEQ ID NO: 358727 - RNA, 32 nt, Homo Sapiens
uauuaagaauaaaagugcagcuugacgauaua

SEQ ID NO: 358728 - RNA, 32 nt, Homo Sapiens
aagcuaauuauaugcacugaaauggugggaau

SEQ ID NO: 358729 - RNA, 32 nt, Homo Sapiens
ccgcuuuggccaaccuagccaaggcugcagca

SEQ ID NO: 358730 - RNA, 32 nt, Homo Sapiens
auguacacauauauucacuacauauguaugua

SEQ ID NO: 358731 - RNA, 32 nt, Homo Sapiens
cuguaagcgggaagggggcucuggcacuagcu

SEQ ID NO: 358732 - RNA, 32 nt, Homo Sapiens
uuucagaaacgaauccauagcugacaaauuca

SEQ ID NO: 358733 - RNA, 32 nt, Homo Sapiens
ugcaggguugcuaaucagauaccugcugucac

SEQ ID NO: 358734 - RNA, 32 nt, Homo Sapiens
cagaaucuuaaaccuauuugguaggaaagggu

SEQ ID NO: 358735 - RNA, 29 nt, Homo Sapiens
uguuacauauguauacaugugccauguuu

SEQ ID NO: 358736 - RNA, 32 nt, Homo Sapiens
guguccugucccacaaggaggugcccggggac

SEQ ID NO: 358737 - RNA, 32 nt, Homo Sapiens
aguucaacacaaguuuguugagcuuuaaaaug

SEQ ID NO: 358738 - RNA, 32 nt, Homo Sapiens
agaugcuuauuaugacuauuaucauuucugac

SEQ ID NO: 358739 - RNA, 32 nt, Homo Sapiens
accuuccuguaccuccuccccacagcuugcuu

SEQ ID NO: 358740 - RNA, 32 nt, Homo Sapiens
guuauaugaaguagaaaaaauaaaauacuucc

SEQ ID NO: 358741 - RNA, 32 nt, Homo Sapiens
cauucuccacauuucuuuuuuauuagcuucau

SEQ ID NO: 358742 - RNA, 32 nt, Homo Sapiens
ugacuucugcaucuccuuccaggucagcucau

SEQ ID NO: 358743 - RNA, 32 nt, Homo Sapiens
cccgcucucgcaccaccaccaccacccgcacc

SEQ ID NO: 358744 - RNA, 32 nt, Homo Sapiens
gggacaaguagccaccugaguuccugagguga

SEQ ID NO: 358745 - RNA, 32 nt, Homo Sapiens
gcccccgugaucucaaggaccggucugcuugc

SEQ ID NO: 358746 - RNA, 32 nt, Homo Sapiens
cgggguaggggaagaagagcuaucaggagaaa

SEQ ID NO: 358747 - RNA, 32 nt, Homo Sapiens
cagcagagacccucggaccccugcagggccug

SEQ ID NO: 358748 - RNA, 32 nt, Homo Sapiens
ugucucaagauuauauuauaauaauguucucu

SEQ ID NO: 358749 - RNA, 32 nt, Homo Sapiens
ucauuuuuaacccaaauauugcaagcacuuua

SEQ ID NO: 358750 - RNA, 32 nt, Homo Sapiens
ggaggccaggacacugaggagcucugaaccca

SEQ ID NO: 358751 - RNA, 32 nt, Homo Sapiens
uacggagucucgcucugucacccaggcuggag

SEQ ID NO: 358752 - RNA, 32 nt, Homo Sapiens
agaaaggugacccugaucccaaaccugcccuc

SEQ ID NO: 358753 - RNA, 32 nt, Homo Sapiens
cuaucgauucaaggucucaagauggaacugug

SEQ ID NO: 358754 - RNA, 32 nt, Homo Sapiens
ugccuuuccuaaaacuuaaccacacauccacu

SEQ ID NO: 358755 - RNA, 32 nt, Homo Sapiens
auccuucaauuucuguauaaaagcagaucuuu

SEQ ID NO: 358756 - RNA, 32 nt, Homo Sapiens
aagcaguggguccuccucaccagccgcuuacg

SEQ ID NO: 358757 - RNA, 32 nt, Homo Sapiens
gaggggugaaaaauauuuuaaaacuuugaaga

SEQ ID NO: 358758 - RNA, 32 nt, Homo Sapiens
ccuucccccagccccagcgcccguucccuuug

SEQ ID NO: 358759 - RNA, 32 nt, Homo Sapiens
aaagaacucaccuugccuuccucccccaaaug

SEQ ID NO: 358760 - RNA, 32 nt, Homo Sapiens
agagggacauacaccugacuaguagucgaucu

SEQ ID NO: 358761 - RNA, 32 nt, Homo Sapiens
cuuccacugcaagucuguggccccacaacgug

SEQ ID NO: 358762 - RNA, 32 nt, Homo Sapiens
uguuugucguuggaaauugaggcuuggccaga

SEQ ID NO: 358763 - RNA, 32 nt, Homo Sapiens
guuggugcauguacccaaaauaaacauuuuga

SEQ ID NO: 358764 - RNA, 32 nt, Homo Sapiens
auggagcucuggugcugguggacagugccccu

SEQ ID NO: 358765 - RNA, 32 nt, Homo Sapiens
uuugugagauaaaacucuccuuuuccuuacca

SEQ ID NO: 358766 - RNA, 32 nt, Homo Sapiens
gcagcaggcagaggagggagggggccuagggc

SEQ ID NO: 358767 - RNA, 32 nt, Homo Sapiens
uagaaaagagauacgugaauuuuuuagcuaag

SEQ ID NO: 358768 - RNA, 32 nt, Homo Sapiens
cgaguacaaguuggccagcagcuccgagaaga

SEQ ID NO: 358769 - RNA, 32 nt, Homo Sapiens
gaggcgcucgccgaccugcccucgcucgaguu

SEQ ID NO: 358770 - RNA, 32 nt, Homo Sapiens
guguuuccugaaacugucuccuccugccucca

SEQ ID NO: 358771 - RNA, 32 nt, Homo Sapiens
gagccgcaggucugcugggccuggcacugcga

SEQ ID NO: 358772 - RNA, 32 nt, Homo Sapiens
cggggaccagccccgcgccggcaccauguucc

SEQ ID NO: 358773 - RNA, 32 nt, Homo Sapiens
auuccaguggucgaucauccucacguggucca

SEQ ID NO: 358774 - RNA, 32 nt, Homo Sapiens
ucucuacauuuuuaauuuauuaaacuugcugu

SEQ ID NO: 358775 - RNA, 32 nt, Homo Sapiens
ucccgaggcuuugucuuccucucgucaguucu

SEQ ID NO: 358776 - RNA, 32 nt, Homo Sapiens
uugaauuccaugguuaaaucucauaaaauaua

SEQ ID NO: 358777 - RNA, 32 nt, Homo Sapiens
ggaguguucugaggggcuuuggcauuugcugg

SEQ ID NO: 358778 - RNA, 32 nt, Homo Sapiens
agacaagugguagucauuuguguuuaucaugc

SEQ ID NO: 358779 - RNA, 32 nt, Homo Sapiens
ggaagggacaacauggaagaaacagcgauuua

SEQ ID NO: 358780 - RNA, 32 nt, Homo Sapiens
ucagggcacauggcccgggcccaucccccgcg

SEQ ID NO: 358781 - RNA, 32 nt, Homo Sapiens
cuugaagauuuuuggcauccacugauagauuu

SEQ ID NO: 358782 - RNA, 32 nt, Homo Sapiens
ccagugaggggcccgacacaccccccaggaga

SEQ ID NO: 358783 - RNA, 32 nt, Homo Sapiens
gccacacauccuccucccaucccuugcuccga

SEQ ID NO: 358784 - RNA, 32 nt, Homo Sapiens
uuuauguauggggaaaaauggauacuuuuuaa

SEQ ID NO: 358785 - RNA, 32 nt, Homo Sapiens
auaagccuuuaguugcucucuauuuugacuug

SEQ ID NO: 358786 - RNA, 32 nt, Homo Sapiens
uugaugggcucaucucaugcuguggcuggggc

SEQ ID NO: 358787 - RNA, 32 nt, Homo Sapiens
gacauuuuuuauuugcaugaaaaaaacucacu

SEQ ID NO: 358788 - RNA, 25 nt, Homo Sapiens
augcugcugcugcugcugcugcugc

SEQ ID NO: 358789 - RNA, 32 nt, Homo Sapiens
ugagaaggaaaaacuucuguauggaggaaaag

SEQ ID NO: 358790 - RNA, 32 nt, Homo Sapiens
cuuaucaaucccagaugaacugagggacaucu

SEQ ID NO: 358791 - RNA, 32 nt, Homo Sapiens
gcgcuacugggcgggggaggggcggccugccc

SEQ ID NO: 358792 - RNA, 32 nt, Homo Sapiens
auagguggaaaacaaauuaggucucagguuga

SEQ ID NO: 358793 - RNA, 32 nt, Homo Sapiens
guagcuaccggucgcgucgccgugggcgacgu

SEQ ID NO: 358794 - RNA, 32 nt, Homo Sapiens
cuugguagcgacccccucccccaaccccucuc

SEQ ID NO: 358795 - RNA, 28 nt, Homo Sapiens
gggaaggggcggcucucgagaggagccc

SEQ ID NO: 358796 - RNA, 30 nt, Homo Sapiens
gagccacugugcgccacccaugagaacgcc

SEQ ID NO: 358797 - RNA, 32 nt, Homo Sapiens
aauagaauacuguuaccaaauucuuccuaaga

SEQ ID NO: 358798 - RNA, 32 nt, Homo Sapiens
acauuuguaaauuguccuuccauucacccuuc

SEQ ID NO: 358799 - RNA, 32 nt, Homo Sapiens
ucuaaaauuccuauauuguaacuugccuuuuu

SEQ ID NO: 358800 - RNA, 32 nt, Homo Sapiens
cucuccacggcgggcucgcagcuccugucaaa

SEQ ID NO: 358801 - RNA, 32 nt, Homo Sapiens
accacacagccgacucucuccuccuccucccg

SEQ ID NO: 358802 - RNA, 32 nt, Homo Sapiens
guucauuguuuggccaaugaaucuucaaaaac

SEQ ID NO: 358803 - RNA, 32 nt, Homo Sapiens
ggcaaagaggugacaggaaggcugggagcagc

SEQ ID NO: 358804 - RNA, 32 nt, Homo Sapiens
cccagccaccacccugagauuaugcggcucuu

SEQ ID NO: 358805 - RNA, 32 nt, Homo Sapiens
uggcucacaccuguaaucccagcacuguggaa

SEQ ID NO: 358806 - RNA, 32 nt, Homo Sapiens
ccugacagcagguguacacaugccaacacuua

SEQ ID NO: 358807 - RNA, 32 nt, Homo Sapiens
cauuucugaagauauuuguaaauuuuuuaaaa

SEQ ID NO: 358808 - RNA, 32 nt, Homo Sapiens
cuccgugcggcggggcgggcgggugccacacc

SEQ ID NO: 358809 - RNA, 32 nt, Homo Sapiens
ucugccccaguccccccggcccaggcggccga

SEQ ID NO: 358810 - RNA, 32 nt, Homo Sapiens
auucauaacuaaugcauagaaaagauacauaa

SEQ ID NO: 358811 - RNA, 32 nt, Homo Sapiens
uggaccauggggaucagagucuggccugccag

SEQ ID NO: 358812 - RNA, 32 nt, Homo Sapiens
uaggugugauaauugaaguaaauaucuuuuau

SEQ ID NO: 358813 - RNA, 32 nt, Homo Sapiens
ccuggcugauucuggucgcccuggacacuccc

SEQ ID NO: 358814 - RNA, 32 nt, Homo Sapiens
agggucggcggugggaaggcgauggcggauuu

SEQ ID NO: 358815 - RNA, 32 nt, Homo Sapiens
acccauucucccugacagcauauuacugcuuc

SEQ ID NO: 358816 - RNA, 32 nt, Homo Sapiens
aaaguucgguguugggaggagccccggugaca

SEQ ID NO: 358817 - RNA, 32 nt, Homo Sapiens
uuuugacuuggcuauugauauucauucuacuu

SEQ ID NO: 358818 - RNA, 32 nt, Homo Sapiens
cagugguguaucaauaaagauagagaacgcua

SEQ ID NO: 358819 - RNA, 32 nt, Homo Sapiens
cauuuucauaaagcaaaauaauuguauuauuu

SEQ ID NO: 358820 - RNA, 32 nt, Homo Sapiens
augaccaucauucccccaacuaaaacaaauac

SEQ ID NO: 358821 - RNA, 32 nt, Homo Sapiens
guacauagauauuguauccugauaaauagauu

SEQ ID NO: 358822 - RNA, 32 nt, Homo Sapiens
gcaagcaaggagauaggauuauagauaauuuc

SEQ ID NO: 358823 - RNA, 32 nt, Homo Sapiens
gugacacaaaaaugcauugaucaugaauagga

SEQ ID NO: 358824 - RNA, 32 nt, Homo Sapiens
uacaggaagugacaccaguacucuguaaagca

SEQ ID NO: 358825 - RNA, 32 nt, Homo Sapiens
gggcaggcuuccuggaggaggggcugaggccg

SEQ ID NO: 358826 - RNA, 32 nt, Homo Sapiens
cuuuccuacuagacacucucauuuuuauguua

SEQ ID NO: 358827 - RNA, 32 nt, Homo Sapiens
aggaggaggaggagcuggaggaggaggucgac

SEQ ID NO: 358828 - RNA, 32 nt, Homo Sapiens
ggaauaccaaaauaauugaaagcagggucuca

SEQ ID NO: 358829 - RNA, 32 nt, Homo Sapiens
gcuguccguggcggcugguguuggcuggcauu

SEQ ID NO: 358830 - RNA, 32 nt, Homo Sapiens
aaagacuagguuauuuucaacugggaaaaaag

SEQ ID NO: 358831 - RNA, 32 nt, Homo Sapiens
agacggucuccaagggugcugugcagcaagga

SEQ ID NO: 358832 - RNA, 32 nt, Homo Sapiens
gcagccaggacacgugucccuugacugaagac

SEQ ID NO: 358833 - RNA, 32 nt, Homo Sapiens
uuaggggaacuacaacaauuauaugaacuguu

SEQ ID NO: 358834 - RNA, 32 nt, Homo Sapiens
uguaagcuuucaucaacaaauuccaaagugcc

SEQ ID NO: 358835 - RNA, 32 nt, Homo Sapiens
uauucuggucaaguugaaauggcugcuuagag

SEQ ID NO: 358836 - RNA, 32 nt, Homo Sapiens
uucuugcaauuugaagguacgaguagagguuu

SEQ ID NO: 358837 - RNA, 32 nt, Homo Sapiens
ggcgcuuaugggggcgggaaauggcggugccc

SEQ ID NO: 358838 - RNA, 32 nt, Homo Sapiens
ggaaaagcucuuucuuaccuaaagauaaaacc

SEQ ID NO: 358839 - RNA, 31 nt, Homo Sapiens
aggaagagggcggcgacggugguggugacug

SEQ ID NO: 358840 - RNA, 32 nt, Homo Sapiens
ucaugcguugccugcccuuccuccauuguugc

SEQ ID NO: 358841 - RNA, 32 nt, Homo Sapiens
gacaugcacacucuuuacaaaggguagaagua

SEQ ID NO: 358842 - RNA, 32 nt, Homo Sapiens
uggcaguuguacaugaaauuaaugaaagagua

SEQ ID NO: 358843 - RNA, 32 nt, Homo Sapiens
cuccuccuccgucuucagggccagggcguagc

SEQ ID NO: 358844 - RNA, 32 nt, Homo Sapiens
cacaaugacaacauggugagaaaagugcagua

SEQ ID NO: 358845 - RNA, 32 nt, Homo Sapiens
cuggcguaguggggcagcugcugaccaaaccc

SEQ ID NO: 358846 - RNA, 32 nt, Homo Sapiens
gccugaccaauauggagaaaucucgccuuugc

SEQ ID NO: 358847 - RNA, 32 nt, Homo Sapiens
gcggcggaggaggaggcgaccgagaagaugcc

SEQ ID NO: 358848 - RNA, 32 nt, Homo Sapiens
ugaauuccugcgccuuccugacgugagcccug

SEQ ID NO: 358849 - RNA, 32 nt, Homo Sapiens
gucuuggaacaaaaacaggacauuagugggaa

SEQ ID NO: 358850 - RNA, 32 nt, Homo Sapiens
gcugaaaacggagagggaaugggagacuugau

SEQ ID NO: 358851 - RNA, 32 nt, Homo Sapiens
auuuggguggcagaagcccacccucguuacgg

SEQ ID NO: 358852 - RNA, 32 nt, Homo Sapiens
gucucggccugggcagucacgugguggucacu

SEQ ID NO: 358853 - RNA, 32 nt, Homo Sapiens
uccuaccugccucuuuggcuuggaccuauaug

SEQ ID NO: 358854 - RNA, 32 nt, Homo Sapiens
gguccucauuuuuacagaguauacaggcaaag

SEQ ID NO: 358855 - RNA, 32 nt, Homo Sapiens
accugcagagccggggaccucucuguggcaag

SEQ ID NO: 358856 - RNA, 32 nt, Homo Sapiens
gcgccgggucccaaucguggcuccacacaggg

SEQ ID NO: 358857 - RNA, 32 nt, Homo Sapiens
gcugcagggaagaggagagcccccugcccugc

SEQ ID NO: 358858 - RNA, 32 nt, Homo Sapiens
aauggcagcuucacaaggggugucauaggaga

SEQ ID NO: 358859 - RNA, 32 nt, Homo Sapiens
gguggaaccugcggaccugagagcagcgcgcg

SEQ ID NO: 358860 - RNA, 32 nt, Homo Sapiens
ggcccugcugcucuagccccagccaccagccu

SEQ ID NO: 358861 - RNA, 32 nt, Homo Sapiens
gccucacucagcggcgccacugagagggacgg

SEQ ID NO: 358862 - RNA, 32 nt, Homo Sapiens
ugaaaaugugaauugcaugacuuguagcauau

SEQ ID NO: 358863 - RNA, 32 nt, Homo Sapiens
ggaacagaugugaguuauugauuagaacugac

SEQ ID NO: 358864 - RNA, 32 nt, Homo Sapiens
cagaaauaacuggaagaauacaauauauggcc

SEQ ID NO: 358865 - RNA, 31 nt, Homo Sapiens
gugaggagaugcacucucaugucuuaaguuc

SEQ ID NO: 358866 - RNA, 32 nt, Homo Sapiens
aggaaggagaggaggcugcugagugcugcuac

SEQ ID NO: 358867 - RNA, 32 nt, Homo Sapiens
ggcucucccucccccugucccccacccucaug

SEQ ID NO: 358868 - RNA, 32 nt, Homo Sapiens
gccaggaggaggagguugcagugagccgagau

SEQ ID NO: 358869 - RNA, 32 nt, Homo Sapiens
ucuacuaaaaauacgaaaauuagcugggugug

SEQ ID NO: 358870 - RNA, 32 nt, Homo Sapiens
cccaggcaaccuggcugcuccuggcccuuggc

SEQ ID NO: 358871 - RNA, 32 nt, Homo Sapiens
agcugcuuuucugcaaagucuguggagcagua

SEQ ID NO: 358872 - RNA, 32 nt, Homo Sapiens
ccuguguucuuugaacaucauuugugcagauu

SEQ ID NO: 358873 - RNA, 32 nt, Homo Sapiens
aauucaaguauuuaaaaauaaggugcauuucu

SEQ ID NO: 358874 - RNA, 32 nt, Homo Sapiens
uaagagacaucccaccuucuaucccaaauccc

SEQ ID NO: 358875 - RNA, 32 nt, Homo Sapiens
gaauggcugugccccaccuguuguccugaacu

SEQ ID NO: 358876 - RNA, 32 nt, Homo Sapiens
uugcuugcaaaacagauggccuuggagaccag

SEQ ID NO: 358877 - RNA, 32 nt, Homo Sapiens
uaaagaucucaccugacaacacuguugcauug

SEQ ID NO: 358878 - RNA, 32 nt, Homo Sapiens
aauguggggcuuuggauuuccacaccauccca

SEQ ID NO: 358879 - RNA, 32 nt, Homo Sapiens
ucaaguggacacuuguugacugcuacauuucc

SEQ ID NO: 358880 - RNA, 32 nt, Homo Sapiens
augguuugguuuccucucugcucugccccugc

SEQ ID NO: 358881 - RNA, 32 nt, Homo Sapiens
cucggcuccuccccggcagcggcggcggcucg

SEQ ID NO: 358882 - RNA, 32 nt, Homo Sapiens
cuguguucuuauuugcugggucucucucugga

SEQ ID NO: 358883 - RNA, 32 nt, Homo Sapiens
cuucaccagauuuuguuuuccuccccccgcug

SEQ ID NO: 358884 - RNA, 32 nt, Homo Sapiens
ggagugugugggcgccugguguccugacagcc

SEQ ID NO: 358885 - RNA, 32 nt, Homo Sapiens
uauuacacauauaacuguuauuuaaauacuua

SEQ ID NO: 358886 - RNA, 32 nt, Homo Sapiens
aagcaccuuugacuaggauaacauuuucacua

SEQ ID NO: 358887 - RNA, 29 nt, Homo Sapiens
cucuuuaaguguuugcauuuucuauuugg

SEQ ID NO: 358888 - RNA, 32 nt, Homo Sapiens
uauacuuuuuaaaguauuuugucugauuuuua

SEQ ID NO: 358889 - RNA, 32 nt, Homo Sapiens
gcgcggcggacauggcgguggaguccugagcu

SEQ ID NO: 358890 - RNA, 32 nt, Homo Sapiens
auuuucuuacuuuguuuuuguuuacuuuguug

SEQ ID NO: 358891 - RNA, 32 nt, Homo Sapiens
cgccugcuauuucaaaagggguugcagcaggg

SEQ ID NO: 358892 - RNA, 32 nt, Homo Sapiens
accuuguuaucucuugccuccuccucucuguu

SEQ ID NO: 358893 - RNA, 32 nt, Homo Sapiens
cacagccagccacugcaucugcugcacaguug

SEQ ID NO: 358894 - RNA, 32 nt, Homo Sapiens
aucaucggaauccuucaccauggcauccagcc

SEQ ID NO: 358895 - RNA, 32 nt, Homo Sapiens
uagcaauuuucaaauaauuauuuuuucucuga

SEQ ID NO: 358896 - RNA, 32 nt, Homo Sapiens
ccuuaaaacuaaaaucucuggaaaauggauuu

SEQ ID NO: 358897 - RNA, 32 nt, Homo Sapiens
ugacaggccaagaagauggccuaugaucucug

SEQ ID NO: 358898 - RNA, 32 nt, Homo Sapiens
uuuaaugaaacugaaaaaauagacuugauccc

SEQ ID NO: 358899 - RNA, 32 nt, Homo Sapiens
aaaaauuacauucuucugauguaacaugugau

SEQ ID NO: 358900 - RNA, 32 nt, Homo Sapiens
caccccagcacagcuccuccccugccgccucc

SEQ ID NO: 358901 - RNA, 32 nt, Homo Sapiens
ucugcgccugcccagagcugacuccugauuua

SEQ ID NO: 358902 - RNA, 32 nt, Homo Sapiens
ccgggagccaucucgugcgcagaguuaguucg

SEQ ID NO: 358903 - RNA, 32 nt, Homo Sapiens
acccauaguuuauuuauagagagcacacacuc

SEQ ID NO: 358904 - RNA, 32 nt, Homo Sapiens
uaaagaugacgaagaaaagcccaagaucaaag

SEQ ID NO: 358905 - RNA, 32 nt, Homo Sapiens
ugcucuccucccagcucuggcucagccucucu

SEQ ID NO: 358906 - RNA, 32 nt, Homo Sapiens
aggcgccugccagcacgccuggcuaauuuuuu

SEQ ID NO: 358907 - RNA, 32 nt, Homo Sapiens
uaggagcuuugcgaccccuacgcaacugcagc

SEQ ID NO: 358908 - RNA, 32 nt, Homo Sapiens
ugcuggcagaaagcaaaugugaccugugucac

SEQ ID NO: 358909 - RNA, 32 nt, Homo Sapiens
uuacaauucgacaugagauuugaguggggaca

SEQ ID NO: 358910 - RNA, 32 nt, Homo Sapiens
uuuugauggcaggcuggagaacaucaugagag

SEQ ID NO: 358911 - RNA, 32 nt, Homo Sapiens
cauuauagaccccgccagcagcaguggggcuu

SEQ ID NO: 358912 - RNA, 32 nt, Homo Sapiens
aagcauuccccaccccaccuugccucuguccu

SEQ ID NO: 358913 - RNA, 32 nt, Homo Sapiens
uccucguuaagcagaagaagucaguaguuauu

SEQ ID NO: 358914 - RNA, 31 nt, Homo Sapiens
ucaaagacacaauaaacuuccuauggucuga

SEQ ID NO: 358915 - RNA, 32 nt, Homo Sapiens
aaccuugacuuuccaguugccuugaaguauug

SEQ ID NO: 358916 - RNA, 32 nt, Homo Sapiens
gcacaucuguuguuucccuugcagggcaguga

SEQ ID NO: 358917 - RNA, 32 nt, Homo Sapiens
ccauguccagaccggccagcucccccgccuac

SEQ ID NO: 358918 - RNA, 32 nt, Homo Sapiens
aaguaucugggauuauucuuugaaaacagaug

SEQ ID NO: 358919 - RNA, 32 nt, Homo Sapiens
guucgaaagcaucuugagaggaacggacacgu

SEQ ID NO: 358920 - RNA, 32 nt, Homo Sapiens
agauuuggagggcauggaucuucugacaguag

SEQ ID NO: 358921 - RNA, 32 nt, Homo Sapiens
uuccuacaaaaauauuucagaaauucuauuua

SEQ ID NO: 358922 - RNA, 32 nt, Homo Sapiens
gacuuccucuccagccuucucucucuggucag

SEQ ID NO: 358923 - RNA, 32 nt, Homo Sapiens
uggucuuggggguggggggaccuuuuccagca

SEQ ID NO: 358924 - RNA, 32 nt, Homo Sapiens
guguuagguacaguguguuugaucgugguggc

SEQ ID NO: 358925 - RNA, 32 nt, Homo Sapiens
gccgcgccuccugcaagccgggacccagcggc

SEQ ID NO: 358926 - RNA, 27 nt, Homo Sapiens
gggaugcccuucuuccauucccagaca

SEQ ID NO: 358927 - RNA, 32 nt, Homo Sapiens
cugucccccuuuguccucuuuaucucaggcuc

SEQ ID NO: 358928 - RNA, 32 nt, Homo Sapiens
ccgagucacucuguucgucgggacgccgccuu

SEQ ID NO: 358929 - RNA, 32 nt, Homo Sapiens
ucugggugucuguagaagaugcuuccuccauu

SEQ ID NO: 358930 - RNA, 32 nt, Homo Sapiens
uucgagaccugccugaccaacaugcugaaacc

SEQ ID NO: 358931 - RNA, 32 nt, Homo Sapiens
aguuuaacuuugcuagugauguguuggaucac

SEQ ID NO: 358932 - RNA, 32 nt, Homo Sapiens
cucaacaggacauauguggccuugaagggaag

SEQ ID NO: 358933 - RNA, 32 nt, Homo Sapiens
aggagcucuucaguuggagaucuaggcagugg

SEQ ID NO: 358934 - RNA, 32 nt, Homo Sapiens
agccgagccgguucguggcccgccccgccggg

SEQ ID NO: 358935 - RNA, 32 nt, Homo Sapiens
cgcucgcucgccucccagcccgcggcccgagc

SEQ ID NO: 358936 - RNA, 32 nt, Homo Sapiens
uguuucggguggcgggauggggagcagcuugg

SEQ ID NO: 358937 - RNA, 32 nt, Homo Sapiens
gccugaacaaaauaaaguguugacuccugggc

SEQ ID NO: 358938 - RNA, 32 nt, Homo Sapiens
uccagaaucugcgucugagaucucucugcaua

SEQ ID NO: 358939 - RNA, 32 nt, Homo Sapiens
gagaaaccaacccagcuaacaccuggaucuca

SEQ ID NO: 358940 - RNA, 32 nt, Homo Sapiens
ugugcauuauuaugagaaaacaguucuauaag

SEQ ID NO: 358941 - RNA, 32 nt, Homo Sapiens
gcaaacagcuggauacagauaagcagucuucc

SEQ ID NO: 358942 - RNA, 32 nt, Homo Sapiens
cucaaaaugccuuucagcaucacuccaguuuu

SEQ ID NO: 358943 - RNA, 32 nt, Homo Sapiens
aucugaaugacacuuaaaaugauugcuuguuu

SEQ ID NO: 358944 - RNA, 32 nt, Homo Sapiens
cuugaucuccagcccccaggucuuugccagau

SEQ ID NO: 358945 - RNA, 32 nt, Homo Sapiens
guggcaggauagagacagucgcacaguccaug

SEQ ID NO: 358946 - RNA, 32 nt, Homo Sapiens
uugaccuugcacuccaacuauagugccuugca

SEQ ID NO: 358947 - RNA, 32 nt, Homo Sapiens
guggugccacuacuucagguacuuagaugagu

SEQ ID NO: 358948 - RNA, 30 nt, Homo Sapiens
cuccugcuccccgugccgccggccccagcg

SEQ ID NO: 358949 - RNA, 32 nt, Homo Sapiens
gaucuaacagcuuuaauacagauagaaacaua

SEQ ID NO: 358950 - RNA, 32 nt, Homo Sapiens
cgucccgcccugccuccacuuggggacccugc

SEQ ID NO: 358951 - RNA, 32 nt, Homo Sapiens
cuggcauccuuaaaauacuuugaaaauauggc

SEQ ID NO: 358952 - RNA, 32 nt, Homo Sapiens
guucacagugauuuuuggcuguuaugaauaaa

SEQ ID NO: 358953 - RNA, 32 nt, Homo Sapiens
accuuaucaaaauauaaaaauucuacacucga

SEQ ID NO: 358954 - RNA, 32 nt, Homo Sapiens
uuuucagaucacauuucccagagugaguucgg

SEQ ID NO: 358955 - RNA, 32 nt, Homo Sapiens
aagacacaaaagacaguggcaaagaggguuga

SEQ ID NO: 358956 - RNA, 32 nt, Homo Sapiens
cuagggguagcagagggaagggaggauuuugu

SEQ ID NO: 358957 - RNA, 32 nt, Homo Sapiens
ccaugaggcaauacuaauuauccacaaggcag

SEQ ID NO: 358958 - RNA, 32 nt, Homo Sapiens
cagacaucuuuuucagauugucuuaagcccaa

SEQ ID NO: 358959 - RNA, 32 nt, Homo Sapiens
ccaggaaucuucacauuugcuuuuuugucaau

SEQ ID NO: 358960 - RNA, 32 nt, Homo Sapiens
ccaaaaugaagaagacacagaggugaagauuc

SEQ ID NO: 358961 - RNA, 32 nt, Homo Sapiens
auuuauugggaacaaagcuaucuuucaagaac

SEQ ID NO: 358962 - RNA, 32 nt, Homo Sapiens
cuuuuguagaaaguuuaacauaaaagacaaua

SEQ ID NO: 358963 - RNA, 32 nt, Homo Sapiens
uaauauuuuuuuucuuuuuuuuuuuuuuuuuu

SEQ ID NO: 358964 - RNA, 32 nt, Homo Sapiens
uuuuuagauuugucuuuuuuuuuuuaagaaga

SEQ ID NO: 358965 - RNA, 32 nt, Homo Sapiens
cuauguuacugauuuacauaguuacuguacua

SEQ ID NO: 358966 - RNA, 32 nt, Homo Sapiens
gccaccccuccuuaucucuggguggugcacau

SEQ ID NO: 358967 - RNA, 32 nt, Homo Sapiens
acacagguguccccggcagguuggucaaaagc

SEQ ID NO: 358968 - RNA, 32 nt, Homo Sapiens
ggcacugccugggggagggggcuguuccuggc

SEQ ID NO: 358969 - RNA, 32 nt, Homo Sapiens
gagaucaguguaucaaaguaaaucugcaaauu

SEQ ID NO: 358970 - RNA, 32 nt, Homo Sapiens
ccaaaaaugcaaaagaagaagaaacuaaaagc

SEQ ID NO: 358971 - RNA, 32 nt, Homo Sapiens
uuuuucccauucuuuggguugucuuuucacug

SEQ ID NO: 358972 - RNA, 32 nt, Homo Sapiens
accgcugcccucacgcgccgcagacgggaccc

SEQ ID NO: 358973 - RNA, 32 nt, Homo Sapiens
aggcaauuuuuagauacguuaccugcaaccug

SEQ ID NO: 358974 - RNA, 32 nt, Homo Sapiens
gcagagggauaggaggcugugauucagauuau

SEQ ID NO: 358975 - RNA, 32 nt, Homo Sapiens
gcgaacagccagagcgucggcgccacggccga

SEQ ID NO: 358976 - RNA, 32 nt, Homo Sapiens
uuauuuucuggugagguggguuugggaggaaa

SEQ ID NO: 358977 - RNA, 32 nt, Homo Sapiens
uuggccaauauuucuuucagccauuucauuuc

SEQ ID NO: 358978 - RNA, 32 nt, Homo Sapiens
uuagcauuccuguuuuuacgagguggaggaua

SEQ ID NO: 358979 - RNA, 32 nt, Homo Sapiens
cggggcgcaggagcgagaucgucuaccgggac

SEQ ID NO: 358980 - RNA, 32 nt, Homo Sapiens
ugagccuuacugucuucaguggcaaauggauc

SEQ ID NO: 358981 - RNA, 32 nt, Homo Sapiens
gcuggggagagccgucuccacccugucugccu

SEQ ID NO: 358982 - RNA, 32 nt, Homo Sapiens
cauuccaccgacagacugcugcuucuagugau

SEQ ID NO: 358983 - RNA, 32 nt, Homo Sapiens
gugcuaccgggccccaggcccagccacccggu

SEQ ID NO: 358984 - RNA, 32 nt, Homo Sapiens
uguaaagauuuuguaaucuauaguccaucuua

SEQ ID NO: 358985 - RNA, 32 nt, Homo Sapiens
ucuuugcacugaccaaugcugagagcagaccc

SEQ ID NO: 358986 - RNA, 32 nt, Homo Sapiens
uuauaaacauguuugaaagauguucccuuccu

SEQ ID NO: 358987 - RNA, 32 nt, Homo Sapiens
gaauaaguagcuuuuggacuuuagauggcaaa

SEQ ID NO: 358988 - RNA, 32 nt, Homo Sapiens
ccuuuccucacagggaccaagacaaagcaugg

SEQ ID NO: 358989 - RNA, 32 nt, Homo Sapiens
cugcuuuuaccaggaaagacuauugaaagaug

SEQ ID NO: 358990 - RNA, 32 nt, Homo Sapiens
gcuuuuccagcaucgcagaggcaaaagcgugg

SEQ ID NO: 358991 - RNA, 32 nt, Homo Sapiens
gauuccguccucgggggcucugggugcugcgg

SEQ ID NO: 358992 - RNA, 32 nt, Homo Sapiens
ccucugaggagaggccuggggggacagcuggg

SEQ ID NO: 358993 - RNA, 32 nt, Homo Sapiens
gagaauuaaacgaaaaucauuguuaauugcug

SEQ ID NO: 358994 - RNA, 32 nt, Homo Sapiens
aucucaaggaccagcuguccccacgcccccga

SEQ ID NO: 358995 - RNA, 32 nt, Homo Sapiens
uccucagagcccaccccuggagggaucaugcc

SEQ ID NO: 358996 - RNA, 32 nt, Homo Sapiens
gggaggggcggagcagggagggggccucaggg

SEQ ID NO: 358997 - RNA, 32 nt, Homo Sapiens
ccuggccagcucccuguggccuuggaggacuu

SEQ ID NO: 358998 - RNA, 32 nt, Homo Sapiens
gacuaaggccccagcguucucuuguucuuucu

SEQ ID NO: 358999 - RNA, 32 nt, Homo Sapiens
cuaugcugcguucuccugacuuuacguuggcc

SEQ ID NO: 359000 - RNA, 32 nt, Homo Sapiens
cugucaguccuggaagcuugaauagaauuaua

SEQ ID NO: 359001 - RNA, 32 nt, Homo Sapiens
gaagcaaauaccaaagcaguugggaguacaua

SEQ ID NO: 359002 - RNA, 31 nt, Homo Sapiens
aaugaauuuguaucauuuccaaauaaaguaa

SEQ ID NO: 359003 - RNA, 32 nt, Homo Sapiens
ccuacucggccacuggccagagucccuccagc

SEQ ID NO: 359004 - RNA, 32 nt, Homo Sapiens
cacauucucacagacaccgucucacacguugg

SEQ ID NO: 359005 - RNA, 32 nt, Homo Sapiens
gacccaggccucuguggcaugcugcaaggauc

SEQ ID NO: 359006 - RNA, 32 nt, Homo Sapiens
cugaccugaccgugagugcuucaguaucuggu

SEQ ID NO: 359007 - RNA, 32 nt, Homo Sapiens
ccugggcacuggcugggccccgagggcucuuc

SEQ ID NO: 359008 - RNA, 32 nt, Homo Sapiens
cuaaacauggugugcuuagaaacugcagauuu

SEQ ID NO: 359009 - RNA, 32 nt, Homo Sapiens
aaaaugaacacuggcuuuuguucacuuugccc

SEQ ID NO: 359010 - RNA, 32 nt, Homo Sapiens
gggggcgagccuggcgcccgcggccuaaaccu

SEQ ID NO: 359011 - RNA, 32 nt, Homo Sapiens
agcgcggaggaggaagcccacccuucuccccc

SEQ ID NO: 359012 - RNA, 32 nt, Homo Sapiens
ugcuaguugguaugcuuuuguaaaacgagauu

SEQ ID NO: 359013 - RNA, 30 nt, Homo Sapiens
ugcaggcuccgcggcggcggcaacggaggc

SEQ ID NO: 359014 - RNA, 32 nt, Homo Sapiens
ugcauuuugaccaagguccaaggugaaugucc

SEQ ID NO: 359015 - RNA, 32 nt, Homo Sapiens
gcuuauaugcaaacauaauaaauauuauuaaa

SEQ ID NO: 359016 - RNA, 32 nt, Homo Sapiens
auuuaaaaacgaauuguauuuucucucuccug

SEQ ID NO: 359017 - RNA, 32 nt, Homo Sapiens
gcgcccugucagggaccccaucggggaucucc

SEQ ID NO: 359018 - RNA, 32 nt, Homo Sapiens
ccauuccaggaggaugggaacaguccuggcug

SEQ ID NO: 359019 - RNA, 32 nt, Homo Sapiens
gaagggaaaaggaagagcucaggguuggacau

SEQ ID NO: 359020 - RNA, 32 nt, Homo Sapiens
ucucacccaucccaccccuccauuggcuccca

SEQ ID NO: 359021 - RNA, 32 nt, Homo Sapiens
aacggcugcggcuucgggcggccggguuucuc

SEQ ID NO: 359022 - RNA, 32 nt, Homo Sapiens
caggccuccuggaugugcuuacuaacucuggg

SEQ ID NO: 359023 - RNA, 32 nt, Homo Sapiens
uuucuuaaagcacccguucaccuucuugguug

SEQ ID NO: 359024 - RNA, 32 nt, Homo Sapiens
uguccuucgcguuccucguuaagcagaagaag

SEQ ID NO: 359025 - RNA, 32 nt, Homo Sapiens
gauuguguggguugucuuuuuacuuuuuuaau

SEQ ID NO: 359026 - RNA, 32 nt, Homo Sapiens
uuagcugcuucuucacguuucuuucuuuaugu

SEQ ID NO: 359027 - RNA, 32 nt, Homo Sapiens
uguuuccuggacaaagaagagaauacaagauu

SEQ ID NO: 359028 - RNA, 32 nt, Homo Sapiens
cccgucucuacuaaauacaaaaaauuagcugg

SEQ ID NO: 359029 - RNA, 32 nt, Homo Sapiens
cuuucuaggcuggugaaauauuugcagaauga

SEQ ID NO: 359030 - RNA, 32 nt, Homo Sapiens
gcucugcuauaaucuuaugggaccacuacugu

SEQ ID NO: 359031 - RNA, 32 nt, Homo Sapiens
cccgggcccgccagcccuggcuugggcuuacu

SEQ ID NO: 359032 - RNA, 32 nt, Homo Sapiens
cgggcuuggcaggcgcccggcgcgcccgcacu

SEQ ID NO: 359033 - RNA, 32 nt, Homo Sapiens
gcuggcacuccagccgcgugcaggugugcagc

SEQ ID NO: 359034 - RNA, 32 nt, Homo Sapiens
ugugcggcacucaccaguuagcacugguugaa

SEQ ID NO: 359035 - RNA, 32 nt, Homo Sapiens
ucucuuaauuuucaggaagaaagggaaauugc

SEQ ID NO: 359036 - RNA, 29 nt, Homo Sapiens
guacgaguguguauguauguguauagcag

SEQ ID NO: 359037 - RNA, 32 nt, Homo Sapiens
accgugcgcugcuccgcguccaggcccgcgcc

SEQ ID NO: 359038 - RNA, 32 nt, Homo Sapiens
gaacgguaguauauggcacaaaugugugcaca

SEQ ID NO: 359039 - RNA, 32 nt, Homo Sapiens
auauggcaaaaccccaucuuuaccaaaaauaa

SEQ ID NO: 359040 - RNA, 32 nt, Homo Sapiens
aucaauuuucuuuccuguaaaaaugagaauaa

SEQ ID NO: 359041 - RNA, 32 nt, Homo Sapiens
gcgggggccgcucgcguccuccauggaggccg

SEQ ID NO: 359042 - RNA, 32 nt, Homo Sapiens
aggggccgccugguccacggacucagccuccc

SEQ ID NO: 359043 - RNA, 32 nt, Homo Sapiens
cggggccggcggcuuuccugcuguuuacuaac

SEQ ID NO: 359044 - RNA, 31 nt, Homo Sapiens
ggcuugcggcacuuucuggaccgcgugcugg

SEQ ID NO: 359045 - RNA, 32 nt, Homo Sapiens
cuagcaguaggugugaggugggcuugcccaug

SEQ ID NO: 359046 - RNA, 32 nt, Homo Sapiens
cccggccgcugcugcccuccccgccgagguuc

SEQ ID NO: 359047 - RNA, 32 nt, Homo Sapiens
gaaguggagacaggacuaggaugugucuuaag

SEQ ID NO: 359048 - RNA, 32 nt, Homo Sapiens
gcugguuucuaguugguuaucuaguuaccaau

SEQ ID NO: 359049 - RNA, 32 nt, Homo Sapiens
cggcggcggcggaucgaggagcucuccagguc

SEQ ID NO: 359050 - RNA, 32 nt, Homo Sapiens
ggcuuuugcaguuguggaaggcagaaggcaug

SEQ ID NO: 359051 - RNA, 32 nt, Homo Sapiens
ucccagccucuacucuucccagccccuaaucc

SEQ ID NO: 359052 - RNA, 27 nt, Homo Sapiens
gagcuguucuucuucagccaucuugcc

SEQ ID NO: 359053 - RNA, 32 nt, Homo Sapiens
gagauuuggccgggcguccgcaggccgugggg

SEQ ID NO: 359054 - RNA, 32 nt, Homo Sapiens
agcaagcauuauaaacaaaacuaauaacuguu

SEQ ID NO: 359055 - RNA, 32 nt, Homo Sapiens
ggcaaccugugcucaaucugaagacaauggac

SEQ ID NO: 359056 - RNA, 32 nt, Homo Sapiens
ggucgguagcuuccgaggcucugcgggagaau

SEQ ID NO: 359057 - RNA, 32 nt, Homo Sapiens
agggagggcuggggcgggggccgggcuuggaa

SEQ ID NO: 359058 - RNA, 32 nt, Homo Sapiens
cccugcugcugucuuggugccugucacccaca

SEQ ID NO: 359059 - RNA, 32 nt, Homo Sapiens
uuagguucauugugccucaguuccucucaaaa

SEQ ID NO: 359060 - RNA, 32 nt, Homo Sapiens
agguauccaaagcuuuuaaaauuuaugcauac

SEQ ID NO: 359061 - RNA, 32 nt, Homo Sapiens
uaugcuuuaaaauaaacucaguacuuuuagaa

SEQ ID NO: 359062 - RNA, 32 nt, Homo Sapiens
ugacugugcaccgacgucggcgcgggcugcac

SEQ ID NO: 359063 - RNA, 32 nt, Homo Sapiens
ugcuucuugaucuaggcaaaccuuuauaaagu

SEQ ID NO: 359064 - RNA, 32 nt, Homo Sapiens
aaugggugccccugaggauuuuggcucuguag

SEQ ID NO: 359065 - RNA, 32 nt, Homo Sapiens
cuaaucgaggggaagcucaaggcggccaaaaa

SEQ ID NO: 359066 - RNA, 32 nt, Homo Sapiens
agagacacaaaugaagaagaacaaagagccug

SEQ ID NO: 359067 - RNA, 32 nt, Homo Sapiens
ucaucucaccuggauuugauugagucaccuug

SEQ ID NO: 359068 - RNA, 32 nt, Homo Sapiens
ccuccugggagaccugcagaccacgcccaccu

SEQ ID NO: 359069 - RNA, 32 nt, Homo Sapiens
ccagugccuucuccuccgcugcagcuuuccau

SEQ ID NO: 359070 - RNA, 32 nt, Homo Sapiens
auauggagaaacaaaauccucaggaaauuaga

SEQ ID NO: 359071 - RNA, 32 nt, Homo Sapiens
gcacugggagggagaccccacaguggccucuu

SEQ ID NO: 359072 - RNA, 32 nt, Homo Sapiens
uucauccucagccggcaacucaucucaaguuu

SEQ ID NO: 359073 - RNA, 32 nt, Homo Sapiens
uacaagcagaaucuaauuuaauuuugauugac

SEQ ID NO: 359074 - RNA, 32 nt, Homo Sapiens
gccacacugauuacuacuaaaccaggaaagca

SEQ ID NO: 359075 - RNA, 32 nt, Homo Sapiens
gccccugguucccuccucuccucccaccccca

SEQ ID NO: 359076 - RNA, 32 nt, Homo Sapiens
ucuugaaggacaucuuccuucucaguauaccc

SEQ ID NO: 359077 - RNA, 29 nt, Homo Sapiens
cuauguauauguauggaauaguauuaaua

SEQ ID NO: 359078 - RNA, 32 nt, Homo Sapiens
gcccgggugaggggcggggagagacacgggcu

SEQ ID NO: 359079 - RNA, 32 nt, Homo Sapiens
agccccuggcacagagcagacccggccacugg

SEQ ID NO: 359080 - RNA, 32 nt, Homo Sapiens
gcagucccuuagggggcgccuggaagcccgcg

SEQ ID NO: 359081 - RNA, 32 nt, Homo Sapiens
cagucucaaaaaugucuguaucgagaucuucc

SEQ ID NO: 359082 - RNA, 32 nt, Homo Sapiens
ugggccucuggccggagcugccuggucccaga

SEQ ID NO: 359083 - RNA, 32 nt, Homo Sapiens
cggcggaggcagagaccgaggcugcaccggca

SEQ ID NO: 359084 - RNA, 32 nt, Homo Sapiens
gcgguucgcgggugcugucagagcugggccgg

SEQ ID NO: 359085 - RNA, 32 nt, Homo Sapiens
cugggcagacuucagcugggacagaaguccga

SEQ ID NO: 359086 - RNA, 32 nt, Homo Sapiens
gcaguggggaggaggcacagcuagcugcacag

SEQ ID NO: 359087 - RNA, 32 nt, Homo Sapiens
aucgggccguguccgccgcggcccugcgaggu

SEQ ID NO: 359088 - RNA, 32 nt, Homo Sapiens
acaguggucccaggcgggagggagcggacacg

SEQ ID NO: 359089 - RNA, 32 nt, Homo Sapiens
aagaaguucucacccauugaauuuuuaaaugg

SEQ ID NO: 359090 - RNA, 32 nt, Homo Sapiens
agcugucgagucagguacgugcaggagauggg

SEQ ID NO: 359091 - RNA, 31 nt, Homo Sapiens
gcuccaacaccccguuccugaguuaaaaguc

SEQ ID NO: 359092 - RNA, 32 nt, Homo Sapiens
gaggggggccgcauccuccuguccuugugcuu

SEQ ID NO: 359093 - RNA, 32 nt, Homo Sapiens
cuccagacuccucaccaagaugggcuaugagu

SEQ ID NO: 359094 - RNA, 32 nt, Homo Sapiens
uuagcugaugacccauguaucugauguucaac

SEQ ID NO: 359095 - RNA, 32 nt, Homo Sapiens
cagugugugaggaauuugaauuuagaguuuaa

SEQ ID NO: 359096 - RNA, 32 nt, Homo Sapiens
gcugcacuccagcuugaaugacagagggagac

SEQ ID NO: 359097 - RNA, 32 nt, Homo Sapiens
uguguuuugccacagagcuguugccuuccaga

SEQ ID NO: 359098 - RNA, 32 nt, Homo Sapiens
ggaggcugugaccugcgcgcggcggcccgacc

SEQ ID NO: 359099 - RNA, 32 nt, Homo Sapiens
ucagagaucuugcauuucugcucucuuauguc

SEQ ID NO: 359100 - RNA, 32 nt, Homo Sapiens
ugcuuuguauucaaaucuuaguuguuaauuau

SEQ ID NO: 359101 - RNA, 32 nt, Homo Sapiens
cccgguggaaaacuccuguugccguuucccuc

SEQ ID NO: 359102 - RNA, 32 nt, Homo Sapiens
gacagcaucuguuuccucuuugguccugagcu

SEQ ID NO: 359103 - RNA, 32 nt, Homo Sapiens
acuaagggaagacaugucaagcccuuaagcaa

SEQ ID NO: 359104 - RNA, 32 nt, Homo Sapiens
cugaguuaaacacuuaaaaugguuaaaauggc

SEQ ID NO: 359105 - RNA, 32 nt, Homo Sapiens
ccccgggcccgggucuggccccggcccauucg

SEQ ID NO: 359106 - RNA, 32 nt, Homo Sapiens
cuugaauagggcuaaagaaguauuuuaacaaa

SEQ ID NO: 359107 - RNA, 32 nt, Homo Sapiens
uuagugaagguaauuccaaaauacugguauca

SEQ ID NO: 359108 - RNA, 32 nt, Homo Sapiens
cggcaguaacaaaaaagaggagcauauaaugg

SEQ ID NO: 359109 - RNA, 32 nt, Homo Sapiens
cauaaccaaagggagcacagucugcacccagc

SEQ ID NO: 359110 - RNA, 32 nt, Homo Sapiens
aggaauuugcauuuagugaaaaacagaaagca

SEQ ID NO: 359111 - RNA, 32 nt, Homo Sapiens
gaccgggcacgguguggcucugggguuagaau

SEQ ID NO: 359112 - RNA, 32 nt, Homo Sapiens
caaccuuuggccuuccucucuacauuuaagag

SEQ ID NO: 359113 - RNA, 32 nt, Homo Sapiens
gaguaggggcacagacuugugccucgcuuccc

SEQ ID NO: 359114 - RNA, 32 nt, Homo Sapiens
guucuucucgaggccuggccagcccuguggcu

SEQ ID NO: 359115 - RNA, 32 nt, Homo Sapiens
uagcagggaagaagggggcuuugugggguccu

SEQ ID NO: 359116 - RNA, 32 nt, Homo Sapiens
gcagggguguggggggcgcagggguguggcuu

SEQ ID NO: 359117 - RNA, 32 nt, Homo Sapiens
gccuuuauuuuuccucauuucucaugggcaac

SEQ ID NO: 359118 - RNA, 32 nt, Homo Sapiens
ugcaccugccccccagccuucacugacagccg

SEQ ID NO: 359119 - RNA, 32 nt, Homo Sapiens
acauacccuuuuucuucaacaggcuuuuaaug

SEQ ID NO: 359120 - RNA, 32 nt, Homo Sapiens
gugucagcauugauuucuuaauuuugauaccu

SEQ ID NO: 359121 - RNA, 32 nt, Homo Sapiens
agcaaaaacuugggcuuuggugaggauaugga

SEQ ID NO: 359122 - RNA, 32 nt, Homo Sapiens
agcuugugagagcugggaaguuucagagguag

SEQ ID NO: 359123 - RNA, 32 nt, Homo Sapiens
ccggcugaggagccucuugggucgcacuuacc

SEQ ID NO: 359124 - RNA, 32 nt, Homo Sapiens
gcccgggcucugcucacugcuguuccguguca

SEQ ID NO: 359125 - RNA, 32 nt, Homo Sapiens
cugccccagcccagccccagccucugcucuuu

SEQ ID NO: 359126 - RNA, 32 nt, Homo Sapiens
ccgguccccugucaucgaguucugggagaaca

SEQ ID NO: 359127 - RNA, 32 nt, Homo Sapiens
agacccaucccgcggugcagccgccggcccgg

SEQ ID NO: 359128 - RNA, 32 nt, Homo Sapiens
aaauucuugagcucagccuguucucagcagua

SEQ ID NO: 359129 - RNA, 32 nt, Homo Sapiens
uuagcaacauuuucuuuuucuuuuuuuuuuuu

SEQ ID NO: 359130 - RNA, 32 nt, Homo Sapiens
ccaccuggugccuaugcuaggcuuguccugag

SEQ ID NO: 359131 - RNA, 32 nt, Homo Sapiens
cagcauguuucuucuguaaauaugaaaauaaa

SEQ ID NO: 359132 - RNA, 32 nt, Homo Sapiens
caccacacuccagccugggugacaagagcaaa

SEQ ID NO: 359133 - RNA, 32 nt, Homo Sapiens
guugaauauaaaaaucuagauaaaaagugugu

SEQ ID NO: 359134 - RNA, 26 nt, Homo Sapiens
gauggacucgguggagaagggggccg

SEQ ID NO: 359135 - RNA, 32 nt, Homo Sapiens
uuuuuaaucaucuuaaaguaugauuugauaua

SEQ ID NO: 359136 - RNA, 32 nt, Homo Sapiens
uggcagcaaacaccagcuccucagcuucgugu

SEQ ID NO: 359137 - RNA, 31 nt, Homo Sapiens
cugaugccuaaccaaagaugaguuaaccaaa

SEQ ID NO: 359138 - RNA, 32 nt, Homo Sapiens
ccagacugccagcagcacccgucuguuacaca

SEQ ID NO: 359139 - RNA, 32 nt, Homo Sapiens
gcaguuaaagaaacagaaaaaaaccgacacuu

SEQ ID NO: 359140 - RNA, 32 nt, Homo Sapiens
ggcagcgggcggcggcagcaguggccgcacau

SEQ ID NO: 359141 - RNA, 32 nt, Homo Sapiens
ccgacuuccuuccccuccccugugucugucuc

SEQ ID NO: 359142 - RNA, 32 nt, Homo Sapiens
ggcagucagugaaggcaaauggucugacuucu

SEQ ID NO: 359143 - RNA, 32 nt, Homo Sapiens
auuuuagcaaaaacagaguaaauagcauucuc

SEQ ID NO: 359144 - RNA, 32 nt, Homo Sapiens
cuaaaugugauacuguugacauccuccagaau

SEQ ID NO: 359145 - RNA, 32 nt, Homo Sapiens
ucucagaaaguuuguguuucaguuggagggaa

SEQ ID NO: 359146 - RNA, 32 nt, Homo Sapiens
gcccuggccccggccuccaagcaguugaaaaa

SEQ ID NO: 359147 - RNA, 32 nt, Homo Sapiens
ugauggccagucaugugcugguaaauguuaag

SEQ ID NO: 359148 - RNA, 32 nt, Homo Sapiens
ggauuuucuuuuaguuugucuuguuuugcuuu

SEQ ID NO: 359149 - RNA, 32 nt, Homo Sapiens
uccugcuucuaaaagugagaguaucacacccu

SEQ ID NO: 359150 - RNA, 32 nt, Homo Sapiens
cucucaccaucccacugcccccucgcucccau

SEQ ID NO: 359151 - RNA, 32 nt, Homo Sapiens
ucugccauuuaaaaggaaagaugucuuuucuc

SEQ ID NO: 359152 - RNA, 32 nt, Homo Sapiens
gauuauucugaacaucuaacaggacauaucag

SEQ ID NO: 359153 - RNA, 32 nt, Homo Sapiens
uuucuuagcuuuucuuuuuuuuuuccaacucc

SEQ ID NO: 359154 - RNA, 32 nt, Homo Sapiens
ggugcugaaaacacauguagauaauggccauc

SEQ ID NO: 359155 - RNA, 32 nt, Homo Sapiens
ggagcaggggguagcggucaaaggagcaaaac

SEQ ID NO: 359156 - RNA, 32 nt, Homo Sapiens
ugucacugcacuccagccuggugacagaguga

SEQ ID NO: 359157 - RNA, 32 nt, Homo Sapiens
uucugacauaucuguuacugcugacucacauu

SEQ ID NO: 359158 - RNA, 32 nt, Homo Sapiens
ugcugcaucuugcuguuguacuucugaaauca

SEQ ID NO: 359159 - RNA, 32 nt, Homo Sapiens
agugcugcacuccuccugccccugccacgccc

SEQ ID NO: 359160 - RNA, 32 nt, Homo Sapiens
gggggaggagaccccugagacccagaggugcc

SEQ ID NO: 359161 - RNA, 32 nt, Homo Sapiens
uugugccuaagccaccugagcagcugggauug

SEQ ID NO: 359162 - RNA, 32 nt, Homo Sapiens
caugauuguaaauuuccugaggccucccaagc

SEQ ID NO: 359163 - RNA, 32 nt, Homo Sapiens
gcucccucauauguaggugcugggaaaagggc

SEQ ID NO: 359164 - RNA, 32 nt, Homo Sapiens
cuuuggcuuuguuuuucugaauggauggagac

SEQ ID NO: 359165 - RNA, 32 nt, Homo Sapiens
gaaugaguguaaauuguuuucuuuuguguauu

SEQ ID NO: 359166 - RNA, 32 nt, Homo Sapiens
cccgggcucaagugauucuccucccucagccu

SEQ ID NO: 359167 - RNA, 32 nt, Homo Sapiens
aaauagcaacuucguaagauuauugaggaugu

SEQ ID NO: 359168 - RNA, 32 nt, Homo Sapiens
cuuugagacauuccuuauaguuggagacucaa

SEQ ID NO: 359169 - RNA, 32 nt, Homo Sapiens
aaccucacccuccugacccccauguaaauauu

SEQ ID NO: 359170 - RNA, 32 nt, Homo Sapiens
caaacuuccaguugaaccccuuuuucugugug

SEQ ID NO: 359171 - RNA, 32 nt, Homo Sapiens
aguucucuggaugcccagacaccucucuucag

SEQ ID NO: 359172 - RNA, 32 nt, Homo Sapiens
ccacgucaccaauguguccagauucuuagauc

SEQ ID NO: 359173 - RNA, 32 nt, Homo Sapiens
acaagcuaacuucuaaggauuaugaguaauuc

SEQ ID NO: 359174 - RNA, 32 nt, Homo Sapiens
uugaauccuagcuaguuugggguugugagcag

SEQ ID NO: 359175 - RNA, 32 nt, Homo Sapiens
aaaugauccugaacacucugaacuugacguag

SEQ ID NO: 359176 - RNA, 32 nt, Homo Sapiens
cauugugauauuaaauauacaugaugcuuaau

SEQ ID NO: 359177 - RNA, 32 nt, Homo Sapiens
ugauuuugauuuccuccagagcuguguuucug

SEQ ID NO: 359178 - RNA, 32 nt, Homo Sapiens
cugcaucaaaaucuaaccaauuugagccucug

SEQ ID NO: 359179 - RNA, 32 nt, Homo Sapiens
gccucgugcuggcggacgcagcugggugcaga

SEQ ID NO: 359180 - RNA, 32 nt, Homo Sapiens
ccccacagcuggggccuggccuugggguacug

SEQ ID NO: 359181 - RNA, 32 nt, Homo Sapiens
aaaugaugcuggaugggacucuacacauccug

SEQ ID NO: 359182 - RNA, 32 nt, Homo Sapiens
gaagguuugaagguuugaguuacucugucaua

SEQ ID NO: 359183 - RNA, 32 nt, Homo Sapiens
gaauuauugaaucaagaauuugaaagagaaaa

SEQ ID NO: 359184 - RNA, 32 nt, Homo Sapiens
ucacucuuucccuuacuagaguucugccauag

SEQ ID NO: 359185 - RNA, 32 nt, Homo Sapiens
aguuuuuaugugaagauguuuccuuuuccucc

SEQ ID NO: 359186 - RNA, 32 nt, Homo Sapiens
gucaacacguauguuggguagaacagaggugg

SEQ ID NO: 359187 - RNA, 32 nt, Homo Sapiens
gcuuuuaacaauuuauagaauuuaacagaugu

SEQ ID NO: 359188 - RNA, 32 nt, Homo Sapiens
ccuuauaagcccagcucugcuuuuuccagauu

SEQ ID NO: 359189 - RNA, 32 nt, Homo Sapiens
gacccacccgcccccucagccggagcagcccg

SEQ ID NO: 359190 - RNA, 32 nt, Homo Sapiens
uaaguuuagaauuauaaugaucuacaguugua

SEQ ID NO: 359191 - RNA, 32 nt, Homo Sapiens
acuucaaaaacuaaaaucauugucaaaauuaa

SEQ ID NO: 359192 - RNA, 32 nt, Homo Sapiens
gagugcuuuguccuuacaagcgugguguucuu

SEQ ID NO: 359193 - RNA, 32 nt, Homo Sapiens
uuuuauguuuguuugucuuccuuuaagcaaca

SEQ ID NO: 359194 - RNA, 32 nt, Homo Sapiens
cagaaacuuaauuggggaugaauagaaaaccu

SEQ ID NO: 359195 - RNA, 32 nt, Homo Sapiens
cauagugauaaagacaaggaaacgcugcaggg

SEQ ID NO: 359196 - RNA, 32 nt, Homo Sapiens
cagaaucuccuucuuuccuggacuuaacucua

SEQ ID NO: 359197 - RNA, 32 nt, Homo Sapiens
uccuccuuuuucuucagccacaggcucccaga

SEQ ID NO: 359198 - RNA, 32 nt, Homo Sapiens
ggcuggaagauaauacagaaugucccaggcca

SEQ ID NO: 359199 - RNA, 32 nt, Homo Sapiens
cggucggcucugcccgcuguucuggggucgac

SEQ ID NO: 359200 - RNA, 32 nt, Homo Sapiens
gccggcgcugcaggcagcggcggcugcgcggu

SEQ ID NO: 359201 - RNA, 32 nt, Homo Sapiens
uuucuucauuuccauggauagcucauaguugg

SEQ ID NO: 359202 - RNA, 32 nt, Homo Sapiens
aauucacgcauugaaaacaaauuuagaaaauc

SEQ ID NO: 359203 - RNA, 32 nt, Homo Sapiens
guggaagcaacucucgcgaauuuuaaaauuua

SEQ ID NO: 359204 - RNA, 31 nt, Homo Sapiens
accacccacagaggacacucgagccauggag

SEQ ID NO: 359205 - RNA, 32 nt, Homo Sapiens
uuuuguaaucucaauaaauguggauugaaguu

SEQ ID NO: 359206 - RNA, 32 nt, Homo Sapiens
uaccgcuucuauuuaaggauguagagaguaau

SEQ ID NO: 359207 - RNA, 32 nt, Homo Sapiens
uuuaaugucucuuuuccuuucuuucuaaaaag

SEQ ID NO: 359208 - RNA, 32 nt, Homo Sapiens
ccccgcccaucccgccccucgagagccgcggc

SEQ ID NO: 359209 - RNA, 32 nt, Homo Sapiens
uuaaauucauucaaaugaugauguaaucccaa

SEQ ID NO: 359210 - RNA, 32 nt, Homo Sapiens
uuuuuauuuucuggaugcacaaugaaaguuua

SEQ ID NO: 359211 - RNA, 32 nt, Homo Sapiens
augugcaaaaauuuuuggauugacaguaacuu

SEQ ID NO: 359212 - RNA, 32 nt, Homo Sapiens
uuuggggaugggaugcucugccugcugaugug

SEQ ID NO: 359213 - RNA, 32 nt, Homo Sapiens
gcucaggccccggagccugugcagcuugccca

SEQ ID NO: 359214 - RNA, 32 nt, Homo Sapiens
caaggcuaguuccugcaccacccaggauucaa

SEQ ID NO: 359215 - RNA, 32 nt, Homo Sapiens
cagcccagcccagcauagcccgagggcuggaa

SEQ ID NO: 359216 - RNA, 32 nt, Homo Sapiens
auauguuaggaauacucuuucuuucuuucuuu

SEQ ID NO: 359217 - RNA, 32 nt, Homo Sapiens
aaaaagaggucuucauuuagacaugugauuuc

SEQ ID NO: 359218 - RNA, 32 nt, Homo Sapiens
aauuuaaugaaacuuuucuuuuuccuucgacc

SEQ ID NO: 359219 - RNA, 32 nt, Homo Sapiens
gccgccgccaagggggccucgguuaaacacug

SEQ ID NO: 359220 - RNA, 32 nt, Homo Sapiens
guuuuaaccgcacaugcacacacacacgcuuu

SEQ ID NO: 359221 - RNA, 32 nt, Homo Sapiens
ccuucagcguggaaccugaggacgcagggagg

SEQ ID NO: 359222 - RNA, 32 nt, Homo Sapiens
agcugcucaagcuggagaacugucuuccuucc

SEQ ID NO: 359223 - RNA, 32 nt, Homo Sapiens
caaaguuuuuaaagaauacgggucugugguga

SEQ ID NO: 359224 - RNA, 32 nt, Homo Sapiens
acaaagaucauuaauuugauaauggaacuuaa

SEQ ID NO: 359225 - RNA, 29 nt, Homo Sapiens
auggagaugaagauuauuauaagcagcgg

SEQ ID NO: 359226 - RNA, 32 nt, Homo Sapiens
gcucaucagcuuuuuuaccauugagccaggag

SEQ ID NO: 359227 - RNA, 32 nt, Homo Sapiens
ccgcuccggcucgcuguccgcgggcccagcuc

SEQ ID NO: 359228 - RNA, 32 nt, Homo Sapiens
ccuguagacguucgccagguaaaggagugaug

SEQ ID NO: 359229 - RNA, 32 nt, Homo Sapiens
aaaaauuaaaacucuguauacuguaucagcag

SEQ ID NO: 359230 - RNA, 32 nt, Homo Sapiens
cucacaaagggagaggagagaacagggcaaga

SEQ ID NO: 359231 - RNA, 32 nt, Homo Sapiens
gcagaaacagagcuucauggcuugcuuaaauu

SEQ ID NO: 359232 - RNA, 32 nt, Homo Sapiens
ccuccuccaaaaaaggaaucaaauccacgagu

SEQ ID NO: 359233 - RNA, 32 nt, Homo Sapiens
cacugauacucuuuuuauugcuauuucuaaau

SEQ ID NO: 359234 - RNA, 30 nt, Homo Sapiens
gguggagaaaaaugagagauaugcauauga

SEQ ID NO: 359235 - RNA, 32 nt, Homo Sapiens
accuuggccucccaaauuguucguuuuacuuu

SEQ ID NO: 359236 - RNA, 32 nt, Homo Sapiens
ucuaagcaccgucccugcccagccccacuucu

SEQ ID NO: 359237 - RNA, 32 nt, Homo Sapiens
gcguggguccgcuugccgcgggcggccggaga

SEQ ID NO: 359238 - RNA, 32 nt, Homo Sapiens
cugcugccgccagccuagagccgcccgccgaa

SEQ ID NO: 359239 - RNA, 32 nt, Homo Sapiens
aagaaugauuaaaaauaagcuuuuacuuuuua

SEQ ID NO: 359240 - RNA, 32 nt, Homo Sapiens
guuuaaaaaaauuuaaaaaaaaaaaaaaaaaa

SEQ ID NO: 359241 - RNA, 32 nt, Homo Sapiens
ccgaggccaguccuaguucuugguccagggag

SEQ ID NO: 359242 - RNA, 32 nt, Homo Sapiens
guucugugaaaaauaaauuuccuucuuguacc

SEQ ID NO: 359243 - RNA, 32 nt, Homo Sapiens
cugcagaggggaggaacaggcacaggcuagag

SEQ ID NO: 359244 - RNA, 32 nt, Homo Sapiens
auauuuaaacaaaaacaaaaaaaaugaaugca

SEQ ID NO: 359245 - RNA, 32 nt, Homo Sapiens
gucacugcaccucggcccagggccucuuaccu

SEQ ID NO: 359246 - RNA, 32 nt, Homo Sapiens
aggccccagggcugaaaauggcgggacaucca

SEQ ID NO: 359247 - RNA, 32 nt, Homo Sapiens
ccugaaggcugagugucuucugccucaugugg

SEQ ID NO: 359248 - RNA, 32 nt, Homo Sapiens
aaagaaucuaccucacugggaaugucaucauu

SEQ ID NO: 359249 - RNA, 32 nt, Homo Sapiens
uuuagauguucuucuuuuuucuuuauuauuau

SEQ ID NO: 359250 - RNA, 32 nt, Homo Sapiens
ucauagggaaacuuuacuaauguaaugauugu

SEQ ID NO: 359251 - RNA, 32 nt, Homo Sapiens
cuucccuaggggaccgguuagagcaacuguag

SEQ ID NO: 359252 - RNA, 32 nt, Homo Sapiens
uguggagggaaaacgaauaugaagauaauuuu

SEQ ID NO: 359253 - RNA, 32 nt, Homo Sapiens
cgacugcccuccccgaccucuagcugaccaug

SEQ ID NO: 359254 - RNA, 32 nt, Homo Sapiens
uccacgggcucccggcagcuccggcugcuugg

SEQ ID NO: 359255 - RNA, 32 nt, Homo Sapiens
ggccucuccagacuaauguuccugucaccugc

SEQ ID NO: 359256 - RNA, 32 nt, Homo Sapiens
gagaggacccucggagcccucugcccacuuaa

SEQ ID NO: 359257 - RNA, 32 nt, Homo Sapiens
auugaaagaaguuggcacucuugcucaaaauc

SEQ ID NO: 359258 - RNA, 31 nt, Homo Sapiens
cgcaagcaacgcugccugccucugccgcucc

SEQ ID NO: 359259 - RNA, 32 nt, Homo Sapiens
gaagacuaaguaaauccaguuuccaagaaccu

SEQ ID NO: 359260 - RNA, 32 nt, Homo Sapiens
aucuguaucuauauaucuuguuuaccuggucu

SEQ ID NO: 359261 - RNA, 32 nt, Homo Sapiens
ccggagccaaggugggggcgcagagggccugu

SEQ ID NO: 359262 - RNA, 32 nt, Homo Sapiens
ucuggaucaguaaaauuauacugugugugagu

SEQ ID NO: 359263 - RNA, 32 nt, Homo Sapiens
uacugccugcccccaacuccccgggcccggcc

SEQ ID NO: 359264 - RNA, 32 nt, Homo Sapiens
cauuuuaucuucuccuuuugaugaaaacuguc

SEQ ID NO: 359265 - RNA, 32 nt, Homo Sapiens
ccuggauuagagacauaaagauuggaagcucc

SEQ ID NO: 359266 - RNA, 32 nt, Homo Sapiens
ggagccacgccaagcacagcggcuggaacagg

SEQ ID NO: 359267 - RNA, 32 nt, Homo Sapiens
cccuugcuuuauaguggcacaaacgcuucaga

SEQ ID NO: 359268 - RNA, 32 nt, Homo Sapiens
ccaagagguguggaaggaaaagugggguuggg

SEQ ID NO: 359269 - RNA, 32 nt, Homo Sapiens
uugguuuugguacuuuuuguuccucuuuguau

SEQ ID NO: 359270 - RNA, 32 nt, Homo Sapiens
caccuuccuuuagucucguccugugguguuga

SEQ ID NO: 359271 - RNA, 32 nt, Homo Sapiens
ugagguuuacauauuucucugacauuuauaua

SEQ ID NO: 359272 - RNA, 32 nt, Homo Sapiens
aagucagucacagauucagcgaaaccaguugg

SEQ ID NO: 359273 - RNA, 30 nt, Homo Sapiens
gcuaaggagaagcuugucuguguuccuugg

SEQ ID NO: 359274 - RNA, 32 nt, Homo Sapiens
uggcuuccaggagagcgggaugaacccuggac

SEQ ID NO: 359275 - RNA, 32 nt, Homo Sapiens
ugcgggcgggaccggauuucguccgugggccc

SEQ ID NO: 359276 - RNA, 30 nt, Homo Sapiens
gucugggcacuugccgcccuuagucuuuuc

SEQ ID NO: 359277 - RNA, 30 nt, Homo Sapiens
uuacaggauaaaagccuuuauacagaaaca

SEQ ID NO: 359278 - RNA, 32 nt, Homo Sapiens
ccagcuugccuguuucuucucuacacccaccc

SEQ ID NO: 359279 - RNA, 32 nt, Homo Sapiens
ggaaugucgcgugcaagcaggcagcuggugug

SEQ ID NO: 359280 - RNA, 32 nt, Homo Sapiens
uuaugcuauauaucaggguucuguauuuuuga

SEQ ID NO: 359281 - RNA, 32 nt, Homo Sapiens
auuaauuggccauguucauuauuuaucuaugu

SEQ ID NO: 359282 - RNA, 32 nt, Homo Sapiens
aagagaauuuuuucuauuacuuauggaucaug

SEQ ID NO: 359283 - RNA, 32 nt, Homo Sapiens
ugcuugcuugcuugcuugcuugcuuacuagac

SEQ ID NO: 359284 - RNA, 32 nt, Homo Sapiens
aauguaccagaaaaauaauaaagcaaagaagc

SEQ ID NO: 359285 - RNA, 32 nt, Homo Sapiens
auucuucuccuccuucacaucagaauggaagu

SEQ ID NO: 359286 - RNA, 32 nt, Homo Sapiens
ucaggcauggugccggccugccucuccaucac

SEQ ID NO: 359287 - RNA, 32 nt, Homo Sapiens
caacacuagggucagaagacuccagaagcagc

SEQ ID NO: 359288 - RNA, 32 nt, Homo Sapiens
gcggcugcgggggaaccccgugggaggcgccu

SEQ ID NO: 359289 - RNA, 32 nt, Homo Sapiens
ggcauccuggugccugcauaccucuggcagcu

SEQ ID NO: 359290 - RNA, 32 nt, Homo Sapiens
cuccgccucgcgcuccuccugagcagcgggcc

SEQ ID NO: 359291 - RNA, 32 nt, Homo Sapiens
uuugaguuguacacauuuccaucagagaagau

SEQ ID NO: 359292 - RNA, 32 nt, Homo Sapiens
uuccugccaagagccaccugggcuuaccucuc

SEQ ID NO: 359293 - RNA, 32 nt, Homo Sapiens
acugggacuguagguacucaccacugcaucug

SEQ ID NO: 359294 - RNA, 32 nt, Homo Sapiens
gaagaagguguugggguaggauucuucagagg

SEQ ID NO: 359295 - RNA, 32 nt, Homo Sapiens
uaauacaaauauacacauugcacagaaaauac

SEQ ID NO: 359296 - RNA, 28 nt, Homo Sapiens
ggcccaguggcuacacugaccacaccca

SEQ ID NO: 359297 - RNA, 32 nt, Homo Sapiens
aagccuuuugccgcuccggggaccagcagcaa

SEQ ID NO: 359298 - RNA, 32 nt, Homo Sapiens
uuccuguaaucccagcacuuugggaggccaag

SEQ ID NO: 359299 - RNA, 32 nt, Homo Sapiens
gucacgcacagcacguccacugagguccacag

SEQ ID NO: 359300 - RNA, 32 nt, Homo Sapiens
uucguggggcgggacagcgucggccugauuuc

SEQ ID NO: 359301 - RNA, 32 nt, Homo Sapiens
gacagagucucgcucugucacccaggcuguag

SEQ ID NO: 359302 - RNA, 32 nt, Homo Sapiens
cagggggcgagccuggcgcccgcggccuaaac

SEQ ID NO: 359303 - RNA, 32 nt, Homo Sapiens
agcaggucuaggucacagggggacagguuggg

SEQ ID NO: 359304 - RNA, 32 nt, Homo Sapiens
ccauuauaaagauaaggaaacuggccaggugc

SEQ ID NO: 359305 - RNA, 32 nt, Homo Sapiens
gaucauuggcugccauccaggaccccaauuug

SEQ ID NO: 359306 - RNA, 32 nt, Homo Sapiens
auuuuugauacugaaggcccaggccccccagu

SEQ ID NO: 359307 - RNA, 31 nt, Homo Sapiens
gagcugcagcgcagcagaguaucugacggcg

SEQ ID NO: 359308 - RNA, 32 nt, Homo Sapiens
acacaacugccuauguucccccgaugagagga

SEQ ID NO: 359309 - RNA, 32 nt, Homo Sapiens
uuuucuccagcaucacagauccugcagauaua

SEQ ID NO: 359310 - RNA, 32 nt, Homo Sapiens
auaaguuuccagggaaggcugcauagacagcu

SEQ ID NO: 359311 - RNA, 32 nt, Homo Sapiens
ugaaacggccccauugccuggucuaguagcgg

SEQ ID NO: 359312 - RNA, 32 nt, Homo Sapiens
ccuagcaaacuaaugcagucaccaacccaggg

SEQ ID NO: 359313 - RNA, 32 nt, Homo Sapiens
gcugcgugcacgcccugccgccgccccgcaga

SEQ ID NO: 359314 - RNA, 32 nt, Homo Sapiens
cagaaagaugaagaagaaaacaugucugugaa

SEQ ID NO: 359315 - RNA, 32 nt, Homo Sapiens
caggugguaaaaauucuuucuggcccaguuaa

SEQ ID NO: 359316 - RNA, 32 nt, Homo Sapiens
cgggcagggugggugcggagcggcucuggggg

SEQ ID NO: 359317 - RNA, 32 nt, Homo Sapiens
cagggucccagugcccucuggacacuaugcca

SEQ ID NO: 359318 - RNA, 32 nt, Homo Sapiens
uguccgucaucucugauggaagugacagccau

SEQ ID NO: 359319 - RNA, 32 nt, Homo Sapiens
auauaagggaacucaagggaaaaggaaacaca

SEQ ID NO: 359320 - RNA, 32 nt, Homo Sapiens
uguuugaagauaaggauaaacccgaugcaaag

SEQ ID NO: 359321 - RNA, 32 nt, Homo Sapiens
ccggcgguccccuccgccaggcgagauggggu

SEQ ID NO: 359322 - RNA, 32 nt, Homo Sapiens
ugacgaugaugaugaauacccaacuccaaaca

SEQ ID NO: 359323 - RNA, 32 nt, Homo Sapiens
ggaccccugagagcuucugaucccagcuauua

SEQ ID NO: 359324 - RNA, 32 nt, Homo Sapiens
uggcccccaagcagaggaggcugcaccucccu

SEQ ID NO: 359325 - RNA, 32 nt, Homo Sapiens
ucaacacaagauacuuguauugggagugaaaa

SEQ ID NO: 359326 - RNA, 32 nt, Homo Sapiens
uguagauaacauucuuuuuuuuuucuuuuuuu

SEQ ID NO: 359327 - RNA, 32 nt, Homo Sapiens
uggguaaaacuuaugaaaauuuccucaugcug

SEQ ID NO: 359328 - RNA, 32 nt, Homo Sapiens
acuuuuagaccaaagauuggguucuagaaaau

SEQ ID NO: 359329 - RNA, 32 nt, Homo Sapiens
agaugaagaacaaaaugucaaguugacugaaa

SEQ ID NO: 359330 - RNA, 32 nt, Homo Sapiens
ccuuucaggaggaggaggggagugcucugaag

SEQ ID NO: 359331 - RNA, 32 nt, Homo Sapiens
gcggcuccaaguucccuucucuuugccagcca

SEQ ID NO: 359332 - RNA, 32 nt, Homo Sapiens
uauuuugcuuaguuuucuuuuuaauuccagaa

SEQ ID NO: 359333 - RNA, 32 nt, Homo Sapiens
ugaucccaguguugcccuccccuuaucaggga

SEQ ID NO: 359334 - RNA, 32 nt, Homo Sapiens
aaugcucuauuuauguuauuauuccugggagc

SEQ ID NO: 359335 - RNA, 32 nt, Homo Sapiens
gauuuuaguuuucuacuugucuaugaaugaca

SEQ ID NO: 359336 - RNA, 32 nt, Homo Sapiens
cggcgcaggaggaagcggaggaggucgggcgc

SEQ ID NO: 359337 - RNA, 32 nt, Homo Sapiens
gagcccgacugcgggagaagggggcgagccug

SEQ ID NO: 359338 - RNA, 32 nt, Homo Sapiens
ucaaggauaaccugacagacucaggccacuuu

SEQ ID NO: 359339 - RNA, 32 nt, Homo Sapiens
cacacccaugcgccccgggagcggggccaugc

SEQ ID NO: 359340 - RNA, 32 nt, Homo Sapiens
ugauaagacuucaugaaauaauaauuauagca

SEQ ID NO: 359341 - RNA, 32 nt, Homo Sapiens
cucaggggggucccugaugcagugcuucagau

SEQ ID NO: 359342 - RNA, 32 nt, Homo Sapiens
gaucccaacuaucgcuuguugccucuuuuuca

SEQ ID NO: 359343 - RNA, 32 nt, Homo Sapiens
cgggacucgccgcucgcacgcccuugggccgc

SEQ ID NO: 359344 - RNA, 32 nt, Homo Sapiens
cgccgucgggagccggccgcugggagcccguc

SEQ ID NO: 359345 - RNA, 32 nt, Homo Sapiens
aaauaugauauuuggauagggauuucagcaac

SEQ ID NO: 359346 - RNA, 32 nt, Homo Sapiens
cccggaggcugcgccccggcgccuggaacccg

SEQ ID NO: 359347 - RNA, 32 nt, Homo Sapiens
ccgaggacgcacgcaccuccgcgcucugcgcc

SEQ ID NO: 359348 - RNA, 32 nt, Homo Sapiens
cagcugcacugacugugcucaccacacaucug

SEQ ID NO: 359349 - RNA, 32 nt, Homo Sapiens
cauuucuuucuaacuguagcuaucauuacugg

SEQ ID NO: 359350 - RNA, 32 nt, Homo Sapiens
acuacaauguuuaucuuuuucuuuuugaacaa

SEQ ID NO: 359351 - RNA, 32 nt, Homo Sapiens
uuucaaugccagugcugcucagcccucagcag

SEQ ID NO: 359352 - RNA, 32 nt, Homo Sapiens
agacuggcaagagcucuuugucucaccagcuc

SEQ ID NO: 359353 - RNA, 32 nt, Homo Sapiens
caccugugauuuuuuuuuuuuaauguuguuuc

SEQ ID NO: 359354 - RNA, 32 nt, Homo Sapiens
uccacccauggaagaaaggcuggcuguccuug

SEQ ID NO: 359355 - RNA, 32 nt, Homo Sapiens
uuuccuucuguauuggucagaauagaauccau

SEQ ID NO: 359356 - RNA, 32 nt, Homo Sapiens
caguuuuaugcacuuuauuuuguuuugauuuu

SEQ ID NO: 359357 - RNA, 32 nt, Homo Sapiens
guccacucugcucagggccgcggccgacauca

SEQ ID NO: 359358 - RNA, 32 nt, Homo Sapiens
caguaauuugaaaaugagucauuaaugcugug

SEQ ID NO: 359359 - RNA, 32 nt, Homo Sapiens
uccauucuagguuuuucuuuuuuucaguaacu

SEQ ID NO: 359360 - RNA, 32 nt, Homo Sapiens
ucugcagaaaucagaacucuuaccaugguuug

SEQ ID NO: 359361 - RNA, 32 nt, Homo Sapiens
agcucgguggcauggcggcgguggcugccccg

SEQ ID NO: 359362 - RNA, 32 nt, Homo Sapiens
agucccgauuuucuccugcugcuguggcccgg

SEQ ID NO: 359363 - RNA, 32 nt, Homo Sapiens
uaugacccaaaagacuugaggcacauaugcag

SEQ ID NO: 359364 - RNA, 32 nt, Homo Sapiens
ccuaggaaacgaauucagcuugugaugccaca

SEQ ID NO: 359365 - RNA, 32 nt, Homo Sapiens
guuucuggucugaaggcuuaagagucacaucu

SEQ ID NO: 359366 - RNA, 32 nt, Homo Sapiens
cuaucacaagacauaacugaugcugaacauga

SEQ ID NO: 359367 - RNA, 32 nt, Homo Sapiens
cuggucugcauaaaagaaaauaaaaugacaua

SEQ ID NO: 359368 - RNA, 32 nt, Homo Sapiens
uaaugccuauuuccaaaugccagagaaagcag

SEQ ID NO: 359369 - RNA, 31 nt, Homo Sapiens
agcaguuugugcuuuguaagcuucagucuua

SEQ ID NO: 359370 - RNA, 32 nt, Homo Sapiens
acauucccgccagcaccacggcaguuuacaaa

SEQ ID NO: 359371 - RNA, 32 nt, Homo Sapiens
gcucagaucacagcgagcuaaagggaaccugg

SEQ ID NO: 359372 - RNA, 32 nt, Homo Sapiens
caaaacauaaauuuauaagaaccauaagugcu

SEQ ID NO: 359373 - RNA, 32 nt, Homo Sapiens
cacacacaagauacaugguggaagaucuaagg

SEQ ID NO: 359374 - RNA, 32 nt, Homo Sapiens
aauauugcagggcaucggguguuucuauucca

SEQ ID NO: 359375 - RNA, 32 nt, Homo Sapiens
auucaguggcucauuuauaccuaauaaaauaa

SEQ ID NO: 359376 - RNA, 32 nt, Homo Sapiens
guugcuugaugguguguacaaauuuaccugaa

SEQ ID NO: 359377 - RNA, 32 nt, Homo Sapiens
gguugcagcuaaaacagagagaucugacugcu

SEQ ID NO: 359378 - RNA, 32 nt, Homo Sapiens
uacaagaaaaacagagaacuuaaaggcugaaa

SEQ ID NO: 359379 - RNA, 30 nt, Homo Sapiens
ucacgggggcuccagccgccggcguggccc

SEQ ID NO: 359380 - RNA, 32 nt, Homo Sapiens
uucgaugggcuuuucuucuugucaguggaggg

SEQ ID NO: 359381 - RNA, 32 nt, Homo Sapiens
uauuuaauuuaaacuaaugaugugaacuauuu

SEQ ID NO: 359382 - RNA, 32 nt, Homo Sapiens
gagcaccuggcacugugccagauucuuucaga

SEQ ID NO: 359383 - RNA, 32 nt, Homo Sapiens
ucucugaggcuauggaggguccuccuccaucu

SEQ ID NO: 359384 - RNA, 30 nt, Homo Sapiens
ccgcgucgcaggcgcgcgagacuccugcug

SEQ ID NO: 359385 - RNA, 32 nt, Homo Sapiens
ucuccccaggccagagcggccaucgcguagaa

SEQ ID NO: 359386 - RNA, 32 nt, Homo Sapiens
ucucugagaaccagcccuucuguggccucacu

SEQ ID NO: 359387 - RNA, 32 nt, Homo Sapiens
uccucuccaauucgccuccccccacuuggagc

SEQ ID NO: 359388 - RNA, 32 nt, Homo Sapiens
gguaagugguggcccuguagggugacggagag

SEQ ID NO: 359389 - RNA, 32 nt, Homo Sapiens
ccuagcggccggggagggaggggccggguccg

SEQ ID NO: 359390 - RNA, 32 nt, Homo Sapiens
aaguccuuaauauuauuuuaaauuaaaauuug

SEQ ID NO: 359391 - RNA, 32 nt, Homo Sapiens
auguagauuuaaaagaacuauuuuaaaucuca

SEQ ID NO: 359392 - RNA, 32 nt, Homo Sapiens
gcgcgccggcggggcgcagagcccgcgagccu

SEQ ID NO: 359393 - RNA, 32 nt, Homo Sapiens
ucugggugccccacugggucccucccacaggg

SEQ ID NO: 359394 - RNA, 32 nt, Homo Sapiens
aauacagaucauaauauucuauagguaauguu

SEQ ID NO: 359395 - RNA, 32 nt, Homo Sapiens
gggagucgggggagcacguccaggcguggugc

SEQ ID NO: 359396 - RNA, 32 nt, Homo Sapiens
cuccggauucuccauguuggacccaaacugag

SEQ ID NO: 359397 - RNA, 32 nt, Homo Sapiens
gccuguuaaguccagcacuuugggaggcugag

SEQ ID NO: 359398 - RNA, 32 nt, Homo Sapiens
uagaacauuucccuugucuucaaacuguuugg

SEQ ID NO: 359399 - RNA, 32 nt, Homo Sapiens
ugaguaagcuccuggguugaagcagauggggu

SEQ ID NO: 359400 - RNA, 32 nt, Homo Sapiens
caagcgagucaagauuccagaucgcgccccag

SEQ ID NO: 359401 - RNA, 32 nt, Homo Sapiens
gagggggcuucacccuguguccuuagaggggg

SEQ ID NO: 359402 - RNA, 32 nt, Homo Sapiens
aauguuauuguaaaaugccagaugcaaaggga

SEQ ID NO: 359403 - RNA, 32 nt, Homo Sapiens
gagccgugcgucgugcccugcugcugcccaga

SEQ ID NO: 359404 - RNA, 27 nt, Homo Sapiens
gggucuuccuucuuaaucccauggcug

SEQ ID NO: 359405 - RNA, 32 nt, Homo Sapiens
gugacccacugaggcuugcauacucugcauug

SEQ ID NO: 359406 - RNA, 32 nt, Homo Sapiens
ucaggagcagacaguggccuccccuuccccuc

SEQ ID NO: 359407 - RNA, 32 nt, Homo Sapiens
gggaccucgcucaggaccguggggaguuggcu

SEQ ID NO: 359408 - RNA, 32 nt, Homo Sapiens
cucuguaugucugacuucaaaauaaaauguau

SEQ ID NO: 359409 - RNA, 32 nt, Homo Sapiens
uuuguaauccaagucagagcuauacacuaacu

SEQ ID NO: 359410 - RNA, 32 nt, Homo Sapiens
aacaauaaccuccuccaaaaaauaacugcauc

SEQ ID NO: 359411 - RNA, 32 nt, Homo Sapiens
ucucgguggguuccccgcaaaaucaggcuuga

SEQ ID NO: 359412 - RNA, 32 nt, Homo Sapiens
uagaguauuuuuccucguaguucgagaauaaa

SEQ ID NO: 359413 - RNA, 32 nt, Homo Sapiens
gggacugggagacugcuugguguucccugagg

SEQ ID NO: 359414 - RNA, 32 nt, Homo Sapiens
cagaggccuucaucagaaaugcugcagaaaac

SEQ ID NO: 359415 - RNA, 32 nt, Homo Sapiens
uuguauugauuucuucuguauuuaccuuuugg

SEQ ID NO: 359416 - RNA, 32 nt, Homo Sapiens
ccgcccuggugccuuagcccccggcacaggau

SEQ ID NO: 359417 - RNA, 32 nt, Homo Sapiens
ggugcagcgcgccuggggagagcccgaaggag

SEQ ID NO: 359418 - RNA, 29 nt, Homo Sapiens
ucccaaugaauuuuauauuguuuauuuuu

SEQ ID NO: 359419 - RNA, 32 nt, Homo Sapiens
cuguuaaaauuugggaggaaacggaaagcaag

SEQ ID NO: 359420 - RNA, 32 nt, Homo Sapiens
ccagaguagcacuguuccuuaauacuggcaua

SEQ ID NO: 359421 - RNA, 32 nt, Homo Sapiens
uaaacgucaaggauugauuggaccaggcaaga

SEQ ID NO: 359422 - RNA, 32 nt, Homo Sapiens
uuuuucuuuacuaucuaaaaguuuaucgguau

SEQ ID NO: 359423 - RNA, 32 nt, Homo Sapiens
uuccccagaccgauccuucccaacguacuccu

SEQ ID NO: 359424 - RNA, 32 nt, Homo Sapiens
aguaugguuaaaguuaaugccuuaauugacac

SEQ ID NO: 359425 - RNA, 32 nt, Homo Sapiens
gcacggccccgggccuggcccuggcacccgcu

SEQ ID NO: 359426 - RNA, 32 nt, Homo Sapiens
auuuuuugucuuguuguugucuauuuucuccc

SEQ ID NO: 359427 - RNA, 32 nt, Homo Sapiens
uuucuauggauagacaauccgcucuucaucca

SEQ ID NO: 359428 - RNA, 32 nt, Homo Sapiens
uaaucuuuuguaguuuguauuaaacuugaacu

SEQ ID NO: 359429 - RNA, 30 nt, Homo Sapiens
aauggggguaggaugccaagaagccugcag

SEQ ID NO: 359430 - RNA, 32 nt, Homo Sapiens
uugggagauggggugggcaggggugguccugg

SEQ ID NO: 359431 - RNA, 30 nt, Homo Sapiens
cagacuuggggcgagugagcggguggcagg

SEQ ID NO: 359432 - RNA, 32 nt, Homo Sapiens
ccaaacaaaaauaccuggagcagcaguguagc

SEQ ID NO: 359433 - RNA, 32 nt, Homo Sapiens
agacagagaaggcuuuccaagcagaagccaga

SEQ ID NO: 359434 - RNA, 32 nt, Homo Sapiens
uaugaucuaugaauguuuuucuuaaaauuuac

SEQ ID NO: 359435 - RNA, 32 nt, Homo Sapiens
cacugccacugcugcugcugcugcugggagcc

SEQ ID NO: 359436 - RNA, 32 nt, Homo Sapiens
gcuuucagauucaaaucaaaccuugaaaguca

SEQ ID NO: 359437 - RNA, 26 nt, Homo Sapiens
aaaaauacauugcaugagccauuuau

SEQ ID NO: 359438 - RNA, 32 nt, Homo Sapiens
uaccccuuucccuucugcccaccuugcccugu

SEQ ID NO: 359439 - RNA, 32 nt, Homo Sapiens
agggccggguggcuuccgaugaggaccugaag

SEQ ID NO: 359440 - RNA, 32 nt, Homo Sapiens
uugccuggccuggccugaggcucagcagugca

SEQ ID NO: 359441 - RNA, 32 nt, Homo Sapiens
cucugcuucugcugccgcucugcagccuggac

SEQ ID NO: 359442 - RNA, 32 nt, Homo Sapiens
ccugccaggcugccuggcaucccuggggcaug

SEQ ID NO: 359443 - RNA, 29 nt, Homo Sapiens
uaaaggucauaugacagggcuguuaccuc

SEQ ID NO: 359444 - RNA, 32 nt, Homo Sapiens
gacaguccugcagcugcugggucacagagugg

SEQ ID NO: 359445 - RNA, 32 nt, Homo Sapiens
aauauaggacaccccagcuuguccuuggcuca

SEQ ID NO: 359446 - RNA, 32 nt, Homo Sapiens
cagcagucugaccucguggacaaaggaaaugc

SEQ ID NO: 359447 - RNA, 32 nt, Homo Sapiens
cacaaaguuucucauauccuguucaaguuaau

SEQ ID NO: 359448 - RNA, 32 nt, Homo Sapiens
aagaugaugaaacuuacaaccacaagcaaucc

SEQ ID NO: 359449 - RNA, 32 nt, Homo Sapiens
gccaguaauuuaaugaauuucugguuuguauu

SEQ ID NO: 359450 - RNA, 32 nt, Homo Sapiens
uuggaaacaaaguaaacuauaaacuuguacaa

SEQ ID NO: 359451 - RNA, 32 nt, Homo Sapiens
accccaugcccccaauucuguggcgcauccag

SEQ ID NO: 359452 - RNA, 30 nt, Homo Sapiens
gcaggagaaucucuaaaugagucuuguaug

SEQ ID NO: 359453 - RNA, 32 nt, Homo Sapiens
uuccuggaggucggggacaaaaugaagaaugu

SEQ ID NO: 359454 - RNA, 32 nt, Homo Sapiens
cugggacauuuuauuuuuguucugaauacuua

SEQ ID NO: 359455 - RNA, 32 nt, Homo Sapiens
gucuguuuuaugucuuaguauaauuucagaug

SEQ ID NO: 359456 - RNA, 32 nt, Homo Sapiens
caccuugcagccgugggaauguucuauggauc

SEQ ID NO: 359457 - RNA, 32 nt, Homo Sapiens
gaucugcccacuuuggccucccaaagugcugg

SEQ ID NO: 359458 - RNA, 32 nt, Homo Sapiens
ccccggcaguccggggucgccggcgagggcca

SEQ ID NO: 359459 - RNA, 32 nt, Homo Sapiens
cacacaggcaaauguaaguauuuuaaauagaa

SEQ ID NO: 359460 - RNA, 32 nt, Homo Sapiens
gucuuauuagugucuauucuuaaaauuaagug

SEQ ID NO: 359461 - RNA, 32 nt, Homo Sapiens
uccucaaauauuuggggcuaacacuucacaga

SEQ ID NO: 359462 - RNA, 32 nt, Homo Sapiens
uaguuuugacccccacgcuauggcaucaucga

SEQ ID NO: 359463 - RNA, 32 nt, Homo Sapiens
gagcagagguaaacaaugaaaacucaccaacc

SEQ ID NO: 359464 - RNA, 32 nt, Homo Sapiens
uuaaucuuuauucucuauuuacagcaaguauu

SEQ ID NO: 359465 - RNA, 32 nt, Homo Sapiens
cagcauuagugggaaaaagugggcccucauac

SEQ ID NO: 359466 - RNA, 32 nt, Homo Sapiens
ccacuuuuuuuuuuuucuuccccuggcuacuu

SEQ ID NO: 359467 - RNA, 32 nt, Homo Sapiens
ucucuucuuuucaaauacaugaaaguugcaca

SEQ ID NO: 359468 - RNA, 32 nt, Homo Sapiens
ccugcagcgggcaaagagcucccgaggaagca

SEQ ID NO: 359469 - RNA, 32 nt, Homo Sapiens
uugcaaucacuuuuugaauaugacaucaaaag

SEQ ID NO: 359470 - RNA, 32 nt, Homo Sapiens
aaaacaucaguugaaagauuugccagguacaa

SEQ ID NO: 359471 - RNA, 32 nt, Homo Sapiens
aauuaggucauauuuggugaugagacuuaugg

SEQ ID NO: 359472 - RNA, 32 nt, Homo Sapiens
gggaagagcuggaacagcaggaggcggaggug

SEQ ID NO: 359473 - RNA, 32 nt, Homo Sapiens
cagauccugagggaaaucaugggcaaggcugg

SEQ ID NO: 359474 - RNA, 29 nt, Homo Sapiens
uuuacugaaaguuuauauaguauagucua

SEQ ID NO: 359475 - RNA, 32 nt, Homo Sapiens
ugauuaaacuaaagggcuucugcacaggaaaa

SEQ ID NO: 359476 - RNA, 32 nt, Homo Sapiens
ucccacacuggaccucuuuccugguucucuuu

SEQ ID NO: 359477 - RNA, 31 nt, Homo Sapiens
gagaaauuacagacucucagacugaggauag

SEQ ID NO: 359478 - RNA, 32 nt, Homo Sapiens
auucccccaucagcgcucaaaaacagucccuc

SEQ ID NO: 359479 - RNA, 32 nt, Homo Sapiens
cuuuguacccucacauacaaagggaucaaauu

SEQ ID NO: 359480 - RNA, 32 nt, Homo Sapiens
aaugacuccaugagguagcuacuaaaaccccc

SEQ ID NO: 359481 - RNA, 32 nt, Homo Sapiens
uugaggcucccacgcugagguguccaccuggc

SEQ ID NO: 359482 - RNA, 32 nt, Homo Sapiens
gaccgcagcagcccagccccagccuuccuccg

SEQ ID NO: 359483 - RNA, 32 nt, Homo Sapiens
ggaauucucuuggcgacaacuccccauugaag

SEQ ID NO: 359484 - RNA, 32 nt, Homo Sapiens
cuggauccucugccugcccccucccccgugac

SEQ ID NO: 359485 - RNA, 32 nt, Homo Sapiens
uguucucugaagagcaaaugucucauuccagu

SEQ ID NO: 359486 - RNA, 32 nt, Homo Sapiens
uuggagaaaugcuuagguccuaugauagcuuc

SEQ ID NO: 359487 - RNA, 32 nt, Homo Sapiens
uuuuccuccuuucauuucccacuacgcacaaa

SEQ ID NO: 359488 - RNA, 32 nt, Homo Sapiens
acgaggacuggcugaggcuaggcgcucucaug

SEQ ID NO: 359489 - RNA, 32 nt, Homo Sapiens
agguuguuauuuaaggagaugaauguggguca

SEQ ID NO: 359490 - RNA, 32 nt, Homo Sapiens
acuuuaaguucugggauacaugugcagaaugu

SEQ ID NO: 359491 - RNA, 32 nt, Homo Sapiens
uaagaugugcucaaaucaggacuuaaaucaua

SEQ ID NO: 359492 - RNA, 32 nt, Homo Sapiens
uucaugcaggcucccuagggccccaucccagu

SEQ ID NO: 359493 - RNA, 32 nt, Homo Sapiens
aaaaaugcuuagucuuuuuuuuuuauuagaua

SEQ ID NO: 359494 - RNA, 32 nt, Homo Sapiens
ucguuugagggacugaugugaguguaugucca

SEQ ID NO: 359495 - RNA, 32 nt, Homo Sapiens
uacucauuaaucauuuuuccugaucuucuccc

SEQ ID NO: 359496 - RNA, 32 nt, Homo Sapiens
gcugcuggugagcagccccggcgugccccgcg

SEQ ID NO: 359497 - RNA, 32 nt, Homo Sapiens
caaggugugaaugaggcaggaugaacuggaca

SEQ ID NO: 359498 - RNA, 32 nt, Homo Sapiens
aaugcaggucuccucugagcuguuccauugcu

SEQ ID NO: 359499 - RNA, 32 nt, Homo Sapiens
gccaagccggcgggcccaccucuucccgagcg

SEQ ID NO: 359500 - RNA, 32 nt, Homo Sapiens
ugcuaggcgggggaggggcguugcuauggcga

SEQ ID NO: 359501 - RNA, 32 nt, Homo Sapiens
cuauucuccugcuccacccccaacccaccccc

SEQ ID NO: 359502 - RNA, 32 nt, Homo Sapiens
cacucccguagcugcugcagcugcuggcucag

SEQ ID NO: 359503 - RNA, 32 nt, Homo Sapiens
aguuaaccauuuuaauguuuccaauuaaaccu

SEQ ID NO: 359504 - RNA, 32 nt, Homo Sapiens
aggcgcagaggggagccuccccgggaauaugc

SEQ ID NO: 359505 - RNA, 32 nt, Homo Sapiens
uaugcaucuauuuuuucuugacuucuuuuaua

SEQ ID NO: 359506 - RNA, 32 nt, Homo Sapiens
gagacuaaaaauugugcaaacgaauaaaaaaa

SEQ ID NO: 359507 - RNA, 32 nt, Homo Sapiens
cuacuuuuaaguugcugaugaacucuuaauca

SEQ ID NO: 359508 - RNA, 32 nt, Homo Sapiens
uagcaguauauuccaaagauaauuacaaacgg

SEQ ID NO: 359509 - RNA, 32 nt, Homo Sapiens
gccaucaucuccugggaugccagagggcugcc

SEQ ID NO: 359510 - RNA, 32 nt, Homo Sapiens
ucgcggcguccacgucccucccccgcugcacc

SEQ ID NO: 359511 - RNA, 30 nt, Homo Sapiens
cuguucaggcccgugcuggggacgccgcuu

SEQ ID NO: 359512 - RNA, 32 nt, Homo Sapiens
uagaaguguaaauuuuuacaaccauuuugaag

SEQ ID NO: 359513 - RNA, 32 nt, Homo Sapiens
uugauauaaaauuguaaucuucauuuuuguca

SEQ ID NO: 359514 - RNA, 32 nt, Homo Sapiens
cagguucuucccuccuucucacugguuuuucc

SEQ ID NO: 359515 - RNA, 32 nt, Homo Sapiens
gugcuucccgcacagcugcagccauggggucu

SEQ ID NO: 359516 - RNA, 32 nt, Homo Sapiens
cucguccuggcagcccuuccgcgcuucacaca

SEQ ID NO: 359517 - RNA, 32 nt, Homo Sapiens
acugaucuauauauuuuuucuuuuugaaagau

SEQ ID NO: 359518 - RNA, 32 nt, Homo Sapiens
uagcuaguagauugcagccauguuguggaagc

SEQ ID NO: 359519 - RNA, 32 nt, Homo Sapiens
uuacaugaaaacaaaaugcuacuuguuaccuc

SEQ ID NO: 359520 - RNA, 32 nt, Homo Sapiens
accgccuccgcggcagcauggcggacgcagcu

SEQ ID NO: 359521 - RNA, 32 nt, Homo Sapiens
ugaaggugaacucguggagauuuuggagagaa

SEQ ID NO: 359522 - RNA, 32 nt, Homo Sapiens
cagugcuccuguugcaacuccucccagccagc

SEQ ID NO: 359523 - RNA, 32 nt, Homo Sapiens
ggucucuaggaugccagaggcagcgcacacaa

SEQ ID NO: 359524 - RNA, 32 nt, Homo Sapiens
gugccagggagggugggauuugccagaugcca

SEQ ID NO: 359525 - RNA, 32 nt, Homo Sapiens
caugaagaaaagacacugaagcuaaaaaagac

SEQ ID NO: 359526 - RNA, 32 nt, Homo Sapiens
agaacccuaaauuuauucauaagagaaaauau

SEQ ID NO: 359527 - RNA, 32 nt, Homo Sapiens
gcuccccaccucaggagauacuggaggacucu

SEQ ID NO: 359528 - RNA, 32 nt, Homo Sapiens
uuuugucuuuuaaauuuuuaaaaaaugcagua

SEQ ID NO: 359529 - RNA, 32 nt, Homo Sapiens
ugagccccggcggcgcccgggcccacgcggaa

SEQ ID NO: 359530 - RNA, 32 nt, Homo Sapiens
cagcggcggcggcuacugucugggcugagcag

SEQ ID NO: 359531 - RNA, 32 nt, Homo Sapiens
cgugagcaguguuaccugcauuauuacauuag

SEQ ID NO: 359532 - RNA, 32 nt, Homo Sapiens
ugugcgcagggccuggucuuccucccccaagc

SEQ ID NO: 359533 - RNA, 32 nt, Homo Sapiens
uaagaaaugcaaacgaccgcagagcaggcuga

SEQ ID NO: 359534 - RNA, 32 nt, Homo Sapiens
aaaccagcugucugcugaugaacggcccaucu

SEQ ID NO: 359535 - RNA, 32 nt, Homo Sapiens
uuuuugccuuuauaaguuuucuaaucaaaagu

SEQ ID NO: 359536 - RNA, 32 nt, Homo Sapiens
auauauuauaaacauugaucuagugacuaacc

SEQ ID NO: 359537 - RNA, 32 nt, Homo Sapiens
agacacgugauaggaagcugguguccgagucc

SEQ ID NO: 359538 - RNA, 32 nt, Homo Sapiens
auuccacaugacugaggcauauaugaucucug

SEQ ID NO: 359539 - RNA, 32 nt, Homo Sapiens
gacuuucucaagcuccuccucacugcccuucc

SEQ ID NO: 359540 - RNA, 32 nt, Homo Sapiens
agaggcuccauggccgugcugcugggccaucc

SEQ ID NO: 359541 - RNA, 32 nt, Homo Sapiens
gauuugcuuuuguaacuuuugaugaucaugau

SEQ ID NO: 359542 - RNA, 32 nt, Homo Sapiens
ccuuucagguuaaauuuuagagugcccuggcc

SEQ ID NO: 359543 - RNA, 32 nt, Homo Sapiens
uuguacuguaguucagauagagauauuuuggg

SEQ ID NO: 359544 - RNA, 32 nt, Homo Sapiens
gggugcugcugcuccugcugcugcugccgcca

SEQ ID NO: 359545 - RNA, 32 nt, Homo Sapiens
cgagcugcgggcccgggaucgcggcggcugga

SEQ ID NO: 359546 - RNA, 32 nt, Homo Sapiens
uggcugaauuugaagaaaaaaugaaugagaac

SEQ ID NO: 359547 - RNA, 32 nt, Homo Sapiens
uacacuuaaaaucaucucuacuguauaaauuu

SEQ ID NO: 359548 - RNA, 32 nt, Homo Sapiens
augacuuaguuauaauuaguaguagucuagac

SEQ ID NO: 359549 - RNA, 32 nt, Homo Sapiens
uaaacugaaaauaaggugggcuucacuggaga

SEQ ID NO: 359550 - RNA, 32 nt, Homo Sapiens
ccccagaccccagcacggagccaggcgccugu

SEQ ID NO: 359551 - RNA, 32 nt, Homo Sapiens
cugaagaaaaauuuauauuucagauuuauuuc

SEQ ID NO: 359552 - RNA, 32 nt, Homo Sapiens
agucagccugguuugcugggaaugccuuuaaa

SEQ ID NO: 359553 - RNA, 30 nt, Homo Sapiens
ggagcggcgcccgcacugaggcggcugcag

SEQ ID NO: 359554 - RNA, 32 nt, Homo Sapiens
agaaugaaaugccccaccuuugcccauggacc

SEQ ID NO: 359555 - RNA, 32 nt, Homo Sapiens
uuuagggguaacacaacacagauacuuuugaa

SEQ ID NO: 359556 - RNA, 32 nt, Homo Sapiens
ccaggcucugaacacaucccugagcugcagag

SEQ ID NO: 359557 - RNA, 32 nt, Homo Sapiens
gacguucaggucugcugguuggcgguccgggc

SEQ ID NO: 359558 - RNA, 32 nt, Homo Sapiens
caugaggcaauaacuguggguacaccuauaaa

SEQ ID NO: 359559 - RNA, 32 nt, Homo Sapiens
ccagcccaacuccagaacccagcccuucucua

SEQ ID NO: 359560 - RNA, 32 nt, Homo Sapiens
acagggucucaacucuguuacccaggcuggag

SEQ ID NO: 359561 - RNA, 27 nt, Homo Sapiens
agaaauccccucuucagcuucuuuugu

SEQ ID NO: 359562 - RNA, 32 nt, Homo Sapiens
uccauacuggcuuuugauuauaugcagauucc

SEQ ID NO: 359563 - RNA, 32 nt, Homo Sapiens
accauccaguugcaggaaaacaagcuuaagac

SEQ ID NO: 359564 - RNA, 32 nt, Homo Sapiens
uccuggccccucgggugacccuucccacacac

SEQ ID NO: 359565 - RNA, 32 nt, Homo Sapiens
augagaucgccguguagugccgagggcgagga

SEQ ID NO: 359566 - RNA, 32 nt, Homo Sapiens
ugagggaguucagguaucuguugugacuggug

SEQ ID NO: 359567 - RNA, 32 nt, Homo Sapiens
augcugcuacccaagaaaucuaauggaaugaa

SEQ ID NO: 359568 - RNA, 32 nt, Homo Sapiens
cugcagacaucugcgcuuuuaccuguuccucu

SEQ ID NO: 359569 - RNA, 32 nt, Homo Sapiens
agcuuaguguaaacacaagccuaggacaugga

SEQ ID NO: 359570 - RNA, 32 nt, Homo Sapiens
caaaaucccacuuuuaauuuugagauggugag

SEQ ID NO: 359571 - RNA, 32 nt, Homo Sapiens
gcucagcccucauuccuccccgagcucauauc

SEQ ID NO: 359572 - RNA, 32 nt, Homo Sapiens
ggaauuuugaaauuucuauuuaaugaagaagu

SEQ ID NO: 359573 - RNA, 32 nt, Homo Sapiens
accucaacuccgugcuuaaccaaagaagcugu

SEQ ID NO: 359574 - RNA, 32 nt, Homo Sapiens
aguguacuccugugaacaaaauucagagccug

SEQ ID NO: 359575 - RNA, 32 nt, Homo Sapiens
aagugggaaauaccaccaaggagccucaucgu

SEQ ID NO: 359576 - RNA, 32 nt, Homo Sapiens
gauggguucuuugucauucuguuaguauaacc

SEQ ID NO: 359577 - RNA, 32 nt, Homo Sapiens
gagaugugucagcuucuguaugagaugcagcc

SEQ ID NO: 359578 - RNA, 32 nt, Homo Sapiens
ggugauugugauuauagugacaaugaagauga

SEQ ID NO: 359579 - RNA, 32 nt, Homo Sapiens
ggaagcaggaauuuaaauuuggggaagacagg

SEQ ID NO: 359580 - RNA, 32 nt, Homo Sapiens
cgaagcuuauaauuagaaaaacaucaggaaaa

SEQ ID NO: 359581 - RNA, 32 nt, Homo Sapiens
gggccgggccgcggcuccggguguuaggagac

SEQ ID NO: 359582 - RNA, 32 nt, Homo Sapiens
cgacgcuucuguucggcccgaccuccaccccg

SEQ ID NO: 359583 - RNA, 32 nt, Homo Sapiens
ugaggaugaggaggaguaugaugaagaugcuc

SEQ ID NO: 359584 - RNA, 32 nt, Homo Sapiens
aagauaacauguauggcaaggcuuauccaaag

SEQ ID NO: 359585 - RNA, 32 nt, Homo Sapiens
gcuuugcagcagcagagggccgcccaguucca

SEQ ID NO: 359586 - RNA, 32 nt, Homo Sapiens
ggugagguuuuaaauucuaaagucuuuguccu

SEQ ID NO: 359587 - RNA, 32 nt, Homo Sapiens
auaaacaggcagagacccuuugccccugccuu

SEQ ID NO: 359588 - RNA, 32 nt, Homo Sapiens
uggaauaguuuaacccagcaacuuuccuuuuu

SEQ ID NO: 359589 - RNA, 32 nt, Homo Sapiens
uucuuuccaguuuuccaaauacugucucuucu

SEQ ID NO: 359590 - RNA, 32 nt, Homo Sapiens
cggccgcgugacugccucagcguccccgagcu

SEQ ID NO: 359591 - RNA, 32 nt, Homo Sapiens
ccacaugagggagagggcagacucagguggga

SEQ ID NO: 359592 - RNA, 32 nt, Homo Sapiens
ggccaacgaguuuuaggagugccaaucauagu

SEQ ID NO: 359593 - RNA, 32 nt, Homo Sapiens
gccauuuccauuaugguggcagcccuccauuc

SEQ ID NO: 359594 - RNA, 32 nt, Homo Sapiens
uguuaagucugaaauggaagugaggauguaac

SEQ ID NO: 359595 - RNA, 28 nt, Homo Sapiens
agggugguuacaggauuaacuaccaguu

SEQ ID NO: 359596 - RNA, 32 nt, Homo Sapiens
gaucacuacauauuguaugcauguaucaaaau

SEQ ID NO: 359597 - RNA, 32 nt, Homo Sapiens
aagucagaugcuucaugucacagcauuuaguu

SEQ ID NO: 359598 - RNA, 32 nt, Homo Sapiens
ccauuuuuggggauuugucgacucauuuuguc

SEQ ID NO: 359599 - RNA, 32 nt, Homo Sapiens
gaauuuucgcuaaacuucugacuuucauauaa

SEQ ID NO: 359600 - RNA, 32 nt, Homo Sapiens
ugaauugaccuacgcaucuccuccuccuugga

SEQ ID NO: 359601 - RNA, 32 nt, Homo Sapiens
gucuaggcagagacagaagaauguugaauaag

SEQ ID NO: 359602 - RNA, 32 nt, Homo Sapiens
ccccgcgcgcagcugccgcgcucugcacccug

SEQ ID NO: 359603 - RNA, 32 nt, Homo Sapiens
gaccccccacccaagaauggcggugcccccug

SEQ ID NO: 359604 - RNA, 32 nt, Homo Sapiens
gaagaggagcagcgcggccgcgcggacccggc

SEQ ID NO: 359605 - RNA, 32 nt, Homo Sapiens
aucucuacugaaugucauugaaaaacuaaaaa

SEQ ID NO: 359606 - RNA, 32 nt, Homo Sapiens
aagagagaaacacuucugcugucaccuugaau

SEQ ID NO: 359607 - RNA, 32 nt, Homo Sapiens
gcugcccuccuccaggcccccggacgcucagc

SEQ ID NO: 359608 - RNA, 32 nt, Homo Sapiens
auguuuucuaaauuauuuuucuuuaagcugac

SEQ ID NO: 359609 - RNA, 32 nt, Homo Sapiens
aauuaucuguguuuuucagugaaacgggucaa

SEQ ID NO: 359610 - RNA, 32 nt, Homo Sapiens
uggggaccucagugggggcagucaggccaaac

SEQ ID NO: 359611 - RNA, 32 nt, Homo Sapiens
gcggagggcggagggauccggaggcggcggag

SEQ ID NO: 359612 - RNA, 32 nt, Homo Sapiens
cugaccugcuuugcagacgugccuccgcaccu

SEQ ID NO: 359613 - RNA, 32 nt, Homo Sapiens
uauucaaguauuuauacagauaggaaucaaga

SEQ ID NO: 359614 - RNA, 32 nt, Homo Sapiens
agugguagaugggacagguaaguggcagaggu

SEQ ID NO: 359615 - RNA, 32 nt, Homo Sapiens
ggcagagaauacugacgguuaccaguauuaac

SEQ ID NO: 359616 - RNA, 32 nt, Homo Sapiens
ccuccugcucccccuccaugggcuguacccac

SEQ ID NO: 359617 - RNA, 32 nt, Homo Sapiens
auaacauuuacuauuuuugaagacuagugaga

SEQ ID NO: 359618 - RNA, 32 nt, Homo Sapiens
guauuaucagaaguugcuuccuuuaaaaauga

SEQ ID NO: 359619 - RNA, 32 nt, Homo Sapiens
gccucccuuuaauccaggauccuguccuuccu

SEQ ID NO: 359620 - RNA, 32 nt, Homo Sapiens
ugcgacuccgccucccugggaccuggauuggg

SEQ ID NO: 359621 - RNA, 32 nt, Homo Sapiens
gccaugauguguauauuaagcuaugugccaca

SEQ ID NO: 359622 - RNA, 32 nt, Homo Sapiens
ugccguuaagggugugggccgaagauaugcuc

SEQ ID NO: 359623 - RNA, 32 nt, Homo Sapiens
uaauugccauaauaaacuuugaugagucaaaa

SEQ ID NO: 359624 - RNA, 32 nt, Homo Sapiens
caccuguacagcacguuacuguacuggauacu

SEQ ID NO: 359625 - RNA, 32 nt, Homo Sapiens
aauccuccgcacccucgcccagggcuggggcg

SEQ ID NO: 359626 - RNA, 32 nt, Homo Sapiens
acccaaccacucggggcccccaucuugggggu

SEQ ID NO: 359627 - RNA, 32 nt, Homo Sapiens
aagcuuccgcggcuccgccgaccaggggccgc

SEQ ID NO: 359628 - RNA, 32 nt, Homo Sapiens
uuuauagagauuacaacccuuuucaagcuuua

SEQ ID NO: 359629 - RNA, 32 nt, Homo Sapiens
cccuacagaaaagaaauuggacagaacagaau

SEQ ID NO: 359630 - RNA, 32 nt, Homo Sapiens
uuuuuagcauauaaaguuugagucaguuucuc

SEQ ID NO: 359631 - RNA, 30 nt, Homo Sapiens
ucugagcccugcuuccaaggggcgcgcccg

SEQ ID NO: 359632 - RNA, 32 nt, Homo Sapiens
aaaguccaauuucucaugaccaaaaaaugugu

SEQ ID NO: 359633 - RNA, 32 nt, Homo Sapiens
aauuuuucgguuuccuucaucauucucuucuc

SEQ ID NO: 359634 - RNA, 32 nt, Homo Sapiens
agagacgcuuugaaaacaaaacaggaaagaac

SEQ ID NO: 359635 - RNA, 32 nt, Homo Sapiens
uucugaauuaaaccccacuuauggguguaagc

SEQ ID NO: 359636 - RNA, 23 nt, Homo Sapiens
auaaggcaugcuaccaggaugca

SEQ ID NO: 359637 - RNA, 32 nt, Homo Sapiens
auaagaaagcaucuaaacugaacugagagcac

SEQ ID NO: 359638 - RNA, 32 nt, Homo Sapiens
ggccgagucuucccuuauccccagacgccuag

SEQ ID NO: 359639 - RNA, 32 nt, Homo Sapiens
ucggauccggugccgagccaagcggggccgug

SEQ ID NO: 359640 - RNA, 30 nt, Homo Sapiens
ggccagcaaacuugcuauucuggaaagggc

SEQ ID NO: 359641 - RNA, 32 nt, Homo Sapiens
acaguguccaaauauaauuggccuaaguaacc

SEQ ID NO: 359642 - RNA, 32 nt, Homo Sapiens
aaaaugcuuuagacuuccagggcucaccagau

SEQ ID NO: 359643 - RNA, 32 nt, Homo Sapiens
acacgcacagugggccugcugcaugcguguua

SEQ ID NO: 359644 - RNA, 32 nt, Homo Sapiens
ccaacaugcagaaaaguuucuaaucucagauc

SEQ ID NO: 359645 - RNA, 32 nt, Homo Sapiens
aaauaagugacuuauuuuuuuaaagcuagaug

SEQ ID NO: 359646 - RNA, 32 nt, Homo Sapiens
gacccccgcgcgcaggcaugagccccgccccc

SEQ ID NO: 359647 - RNA, 32 nt, Homo Sapiens
aguccuacaaccuugacaaagaguaguuuuau

SEQ ID NO: 359648 - RNA, 32 nt, Homo Sapiens
cugggcuuggcccgcggccugcaccgaccccg

SEQ ID NO: 359649 - RNA, 32 nt, Homo Sapiens
accugucaacaaaaacaaaacacacaaaaaaa

SEQ ID NO: 359650 - RNA, 32 nt, Homo Sapiens
agcugucacacgcuaguauuggcuucauugug

SEQ ID NO: 359651 - RNA, 32 nt, Homo Sapiens
agagcacgguggggcggggcgggagaaagugg

SEQ ID NO: 359652 - RNA, 32 nt, Homo Sapiens
gcuaccuccgcggcgccgcuucggccgccaua

SEQ ID NO: 359653 - RNA, 32 nt, Homo Sapiens
ccaaguuggugauggcugccucauggugggcc

SEQ ID NO: 359654 - RNA, 32 nt, Homo Sapiens
uuuuccaaacuccuaaucagaagagaguccac

SEQ ID NO: 359655 - RNA, 32 nt, Homo Sapiens
guacuguuuaaugggguauucagugacuaagg

SEQ ID NO: 359656 - RNA, 32 nt, Homo Sapiens
auuuuguguaaucuuucuuaauuuaaaaacaa

SEQ ID NO: 359657 - RNA, 32 nt, Homo Sapiens
gagcagcgccgcgcagagcccgggacaauggg

SEQ ID NO: 359658 - RNA, 32 nt, Homo Sapiens
gaaucggcuuugcagugcacuuuggggagcag

SEQ ID NO: 359659 - RNA, 32 nt, Homo Sapiens
ggagaggugaagagggccaggaugcugcugag

SEQ ID NO: 359660 - RNA, 32 nt, Homo Sapiens
aacaucggacucccaaguucuucaauuuuggg

SEQ ID NO: 359661 - RNA, 32 nt, Homo Sapiens
gaggaagugacuuuuuacagaagccacugaac

SEQ ID NO: 359662 - RNA, 32 nt, Homo Sapiens
agccucauccuccccaggaccccuguccagga

SEQ ID NO: 359663 - RNA, 32 nt, Homo Sapiens
ugauuuuuauucaaauuaaaaauuuucauugc

SEQ ID NO: 359664 - RNA, 32 nt, Homo Sapiens
auuuauagaaugccuuaccuggguucugggca

SEQ ID NO: 359665 - RNA, 32 nt, Homo Sapiens
aggcccaaaagccacagaugagcauuggguug

SEQ ID NO: 359666 - RNA, 32 nt, Homo Sapiens
aauggugaauuucgugguaugugaauucuacc

SEQ ID NO: 359667 - RNA, 32 nt, Homo Sapiens
aagugagcaggcugaggccaccauggagcagu

SEQ ID NO: 359668 - RNA, 32 nt, Homo Sapiens
uuccaguccuucccuuccucuccucacucuga

SEQ ID NO: 359669 - RNA, 32 nt, Homo Sapiens
agaaugccuagaacaagaacuuuucaucauua

SEQ ID NO: 359670 - RNA, 32 nt, Homo Sapiens
uuugggauggacuggaggagcgcagcguccag

SEQ ID NO: 359671 - RNA, 32 nt, Homo Sapiens
uuauaaagguaaaacuugucuccaaccaguuu

SEQ ID NO: 359672 - RNA, 32 nt, Homo Sapiens
gcacagcagcucaugccuguaauccuagcacu

SEQ ID NO: 359673 - RNA, 32 nt, Homo Sapiens
cacagucuuucguuuccagccuuugucacuag

SEQ ID NO: 359674 - RNA, 32 nt, Homo Sapiens
ucggcggacauuagccgcuaggaccuuaggcg

SEQ ID NO: 359675 - RNA, 29 nt, Homo Sapiens
uggggucggggacagagcagugaccaugg

SEQ ID NO: 359676 - RNA, 32 nt, Homo Sapiens
uucugugaaaauauuucuuugaaaacuuugca

SEQ ID NO: 359677 - RNA, 32 nt, Homo Sapiens
gaaucuagaugaugaggguagacugggugcgg

SEQ ID NO: 359678 - RNA, 32 nt, Homo Sapiens
ccaggaacagaagagauuaaaugauaaaucau

SEQ ID NO: 359679 - RNA, 32 nt, Homo Sapiens
aaugcguuguuguuguuuucuuucucucuugc

SEQ ID NO: 359680 - RNA, 32 nt, Homo Sapiens
gucuuuuuccugcuacaacuacaggguacuug

SEQ ID NO: 359681 - RNA, 32 nt, Homo Sapiens
gacuugccaggcucccuuucucuucuucccca

SEQ ID NO: 359682 - RNA, 32 nt, Homo Sapiens
uuuuaaugaaacuuuucugaaaaggaauucug

SEQ ID NO: 359683 - RNA, 32 nt, Homo Sapiens
caagugcccacucuccuuugugcucuguuggc

SEQ ID NO: 359684 - RNA, 32 nt, Homo Sapiens
guugcugcugcagcugagguacagcggcgguu

SEQ ID NO: 359685 - RNA, 32 nt, Homo Sapiens
uugcuuuucuaaaaauuuuccuaguaacauuu

SEQ ID NO: 359686 - RNA, 32 nt, Homo Sapiens
accugcccaucccagcagacccaccuccccgc

SEQ ID NO: 359687 - RNA, 32 nt, Homo Sapiens
aaaauaaaaaggaaaggaagcguucaccgcca

SEQ ID NO: 359688 - RNA, 32 nt, Homo Sapiens
cccugucgcucauaaugaggcaucauauaucc

SEQ ID NO: 359689 - RNA, 32 nt, Homo Sapiens
ggccccgcugcacuccaccuccgcccccucgg

SEQ ID NO: 359690 - RNA, 32 nt, Homo Sapiens
aaguaaccaggcggggggaggggcggagcagg

SEQ ID NO: 359691 - RNA, 32 nt, Homo Sapiens
gcacaccuccaagucagggcaccacaacacgc

SEQ ID NO: 359692 - RNA, 32 nt, Homo Sapiens
cuguauguagaaaaaagacauaaaaccuuaga

SEQ ID NO: 359693 - RNA, 32 nt, Homo Sapiens
cccaagcugcgguucggcugcugccgagaacu

SEQ ID NO: 359694 - RNA, 32 nt, Homo Sapiens
gcugccuuuaggugacacaucccuuuagucuc

SEQ ID NO: 359695 - RNA, 32 nt, Homo Sapiens
gugcugaugcuuaauuuucaaaacuucuauau

SEQ ID NO: 359696 - RNA, 32 nt, Homo Sapiens
gaccgggcgcgguggcucaugccuguaauccc

SEQ ID NO: 359697 - RNA, 32 nt, Homo Sapiens
ugcaccccugaaccucaagaucacgguccagc

SEQ ID NO: 359698 - RNA, 32 nt, Homo Sapiens
ucuaaacugucuccaacacauuguuucugagc

SEQ ID NO: 359699 - RNA, 32 nt, Homo Sapiens
caauccccaucccaggcuugcugugucucacu

SEQ ID NO: 359700 - RNA, 32 nt, Homo Sapiens
aguaauauauuuuuacuuuauuucuuuaaucc

SEQ ID NO: 359701 - RNA, 32 nt, Homo Sapiens
aagaauauucuauuugacuuaaugccaaacgc

SEQ ID NO: 359702 - RNA, 32 nt, Homo Sapiens
cguccguccaucugcaucucugucccaugacu

SEQ ID NO: 359703 - RNA, 32 nt, Homo Sapiens
aucccugugugcugcagcaucaccacggccua

SEQ ID NO: 359704 - RNA, 32 nt, Homo Sapiens
gggcgccggccgccaggccaccucacguccgg

SEQ ID NO: 359705 - RNA, 32 nt, Homo Sapiens
aaacucaaggaccaggugcugcuggaggggga

SEQ ID NO: 359706 - RNA, 32 nt, Homo Sapiens
ccuucuccaaaagaagagccaagagaaggucc

SEQ ID NO: 359707 - RNA, 32 nt, Homo Sapiens
gcacaccccccgcgccggacccgcaccucggc

SEQ ID NO: 359708 - RNA, 32 nt, Homo Sapiens
cuccacuaaggcccaagcucuuucucucggca

SEQ ID NO: 359709 - RNA, 32 nt, Homo Sapiens
gcccgucugugcacucuuggcuccuggggaga

SEQ ID NO: 359710 - RNA, 32 nt, Homo Sapiens
ggcgcggugcgggcuuuucccaggcgccccgg

SEQ ID NO: 359711 - RNA, 32 nt, Homo Sapiens
uuucauaaaaacaaauacuaguuuugaaggau

SEQ ID NO: 359712 - RNA, 32 nt, Homo Sapiens
caacagccacagagccccugagacccagccgc

SEQ ID NO: 359713 - RNA, 32 nt, Homo Sapiens
ucccagguucaagcaauuccccugccucagcu

SEQ ID NO: 359714 - RNA, 32 nt, Homo Sapiens
guacauguuaaaggcuuuuuauauagguaaac

SEQ ID NO: 359715 - RNA, 32 nt, Homo Sapiens
uggccaauagagaacauucaagggaaaugggg

SEQ ID NO: 359716 - RNA, 32 nt, Homo Sapiens
cuguguccccaaaaccggggcccuccacagag

SEQ ID NO: 359717 - RNA, 32 nt, Homo Sapiens
cagccuuugcccacaagugccucagugcccac

SEQ ID NO: 359718 - RNA, 32 nt, Homo Sapiens
gucuucugcauaaucaugccuucuugcuaagu

SEQ ID NO: 359719 - RNA, 32 nt, Homo Sapiens
ccugccuugugccccaggcauccucagccucu

SEQ ID NO: 359720 - RNA, 32 nt, Homo Sapiens
agcaaccgggacggaggcuggcccugggacag

SEQ ID NO: 359721 - RNA, 32 nt, Homo Sapiens
cgaguggaaugauuaaugauguuuugcagcag

SEQ ID NO: 359722 - RNA, 32 nt, Homo Sapiens
cacgaggcuccagccgucaccuccugacacac

SEQ ID NO: 359723 - RNA, 32 nt, Homo Sapiens
cuggaccguuggaguggguccuggagacccua

SEQ ID NO: 359724 - RNA, 32 nt, Homo Sapiens
accagcugccagccugagaagccugucuuucc

SEQ ID NO: 359725 - RNA, 32 nt, Homo Sapiens
aggauuguuauucaaauacauuugguagaauu

SEQ ID NO: 359726 - RNA, 32 nt, Homo Sapiens
aacaaacaaaaagcagcugaaaaagugcauca

SEQ ID NO: 359727 - RNA, 32 nt, Homo Sapiens
cugagcuguaccagaauaaagaauagagugua

SEQ ID NO: 359728 - RNA, 32 nt, Homo Sapiens
agcucacccuggcuuuuuuugcugggggugcu

SEQ ID NO: 359729 - RNA, 32 nt, Homo Sapiens
cacaugaaaaagacaguggagaauuuacggaa

SEQ ID NO: 359730 - RNA, 32 nt, Homo Sapiens
aaauaguacauaacuggucauuaauuaugaac

SEQ ID NO: 359731 - RNA, 32 nt, Homo Sapiens
aguaauaaguggaaaguaagauaccuugagua

SEQ ID NO: 359732 - RNA, 32 nt, Homo Sapiens
caggccgucggccucgcccgccgccccaagaa

SEQ ID NO: 359733 - RNA, 31 nt, Homo Sapiens
aaaaaagauacgacucucagaagccuguuuu

SEQ ID NO: 359734 - RNA, 32 nt, Homo Sapiens
auagacacagaaaaaugaauggugggacccuc

SEQ ID NO: 359735 - RNA, 32 nt, Homo Sapiens
gugaugggaugguguggcgcuccugccguggg

SEQ ID NO: 359736 - RNA, 32 nt, Homo Sapiens
uugcuuucuaaagacuccauggugcauucaag

SEQ ID NO: 359737 - RNA, 32 nt, Homo Sapiens
acugccuugcagagccuggagccggaaagagc

SEQ ID NO: 359738 - RNA, 32 nt, Homo Sapiens
aaggauccaguuucuucacgucgucaccagca

SEQ ID NO: 359739 - RNA, 31 nt, Homo Sapiens
uucauuaugaacauaguagaaaacagcauau

SEQ ID NO: 359740 - RNA, 32 nt, Homo Sapiens
accgagagcaccuggugaugauggagaagauc

SEQ ID NO: 359741 - RNA, 32 nt, Homo Sapiens
auaagguauuccugaggccuugauuucagguu

SEQ ID NO: 359742 - RNA, 32 nt, Homo Sapiens
uucuggcuaugggaaaacuaccaccuguugag

SEQ ID NO: 359743 - RNA, 32 nt, Homo Sapiens
agggaggaaggggaacuguaucugagagagag

SEQ ID NO: 359744 - RNA, 32 nt, Homo Sapiens
gcugguggggaccagacccagcuccuuagcug

SEQ ID NO: 359745 - RNA, 27 nt, Homo Sapiens
cagggguuuuucuucagagucuauuuu

SEQ ID NO: 359746 - RNA, 32 nt, Homo Sapiens
ucugugguuguugaauuguaacaagagagaga

SEQ ID NO: 359747 - RNA, 32 nt, Homo Sapiens
aaauagcaaaauuuauauuuagaagcaaaaaa

SEQ ID NO: 359748 - RNA, 32 nt, Homo Sapiens
gccugucugauccaagagcugagacacggcca

SEQ ID NO: 359749 - RNA, 32 nt, Homo Sapiens
ucuacaguauauauagcagagaaucagaggcu

SEQ ID NO: 359750 - RNA, 32 nt, Homo Sapiens
cauaacuguuuuuauauucuugucugauugcu

SEQ ID NO: 359751 - RNA, 32 nt, Homo Sapiens
cauuggcacccucucccgccccacuuccaucg

SEQ ID NO: 359752 - RNA, 32 nt, Homo Sapiens
gggcaccuggccugggcuuuccuucugggccu

SEQ ID NO: 359753 - RNA, 31 nt, Homo Sapiens
cgcuugcugccggguuugguccaagggcugc

SEQ ID NO: 359754 - RNA, 32 nt, Homo Sapiens
ccagagcaagagccaacugaaagcguagaccu

SEQ ID NO: 359755 - RNA, 32 nt, Homo Sapiens
agccagcauggccggcaggagcgcaccgcgcu

SEQ ID NO: 359756 - RNA, 32 nt, Homo Sapiens
cuugcugccuguucaaacugagguggaaugca

SEQ ID NO: 359757 - RNA, 32 nt, Homo Sapiens
ggcucucagauuucccugcccuccucacaucc

SEQ ID NO: 359758 - RNA, 32 nt, Homo Sapiens
acagauuuuuaaaauaaauaugauuugaagua

SEQ ID NO: 359759 - RNA, 32 nt, Homo Sapiens
caacagugcauguaccucuggaugucaucuga

SEQ ID NO: 359760 - RNA, 32 nt, Homo Sapiens
guuugucugaaucugaaguccaucugcucugu

SEQ ID NO: 359761 - RNA, 32 nt, Homo Sapiens
cagccagggugaagggaaaguaguuggggcug

SEQ ID NO: 359762 - RNA, 32 nt, Homo Sapiens
accacgagcuggaagcugagaccagcugguca

SEQ ID NO: 359763 - RNA, 32 nt, Homo Sapiens
cagccugcgggaaggugguauggccggcugug

SEQ ID NO: 359764 - RNA, 32 nt, Homo Sapiens
aaugugagguguacuuacauuucuaggauaac

SEQ ID NO: 359765 - RNA, 32 nt, Homo Sapiens
ugguccagcuggaucugcaagauuguaagaca

SEQ ID NO: 359766 - RNA, 32 nt, Homo Sapiens
cgagcuggcugaccccacugagcgguucaggu

SEQ ID NO: 359767 - RNA, 32 nt, Homo Sapiens
cuaucaggcauaauugauucucaugaaaacuu

SEQ ID NO: 359768 - RNA, 32 nt, Homo Sapiens
ucaauuuccacaauucacuugaaugacuuguu

SEQ ID NO: 359769 - RNA, 32 nt, Homo Sapiens
ggaggacuuugauugggaccauugagaugggu

SEQ ID NO: 359770 - RNA, 32 nt, Homo Sapiens
ggaggugacaaggccuuagggccaaaagucuu

SEQ ID NO: 359771 - RNA, 32 nt, Homo Sapiens
ccugcucugagacacaccccuguggcgagcac

SEQ ID NO: 359772 - RNA, 32 nt, Homo Sapiens
gaaagggaggguggagggugaggccaaaucag

SEQ ID NO: 359773 - RNA, 32 nt, Homo Sapiens
agcuguggagcacguggaugcugccuaccccg

SEQ ID NO: 359774 - RNA, 32 nt, Homo Sapiens
uucuccagcaacaugaggaggaaaagaagaaa

SEQ ID NO: 359775 - RNA, 32 nt, Homo Sapiens
ccaacuuccugugggcccucccggggcgccuc

SEQ ID NO: 359776 - RNA, 32 nt, Homo Sapiens
uuucccgucuauccuucauuuauugaagccaa

SEQ ID NO: 359777 - RNA, 32 nt, Homo Sapiens
cuuuacauauauauguaugugggugugagugu

SEQ ID NO: 359778 - RNA, 32 nt, Homo Sapiens
gggccagaccgccuccaccucccccgcccgcc

SEQ ID NO: 359779 - RNA, 32 nt, Homo Sapiens
uuaagucuguguauuguaauagagugggcuca

SEQ ID NO: 359780 - RNA, 32 nt, Homo Sapiens
guaagcgagacacaacacuuguccucuuggag

SEQ ID NO: 359781 - RNA, 32 nt, Homo Sapiens
agacucccaggaagacuagcccugcccacagg

SEQ ID NO: 359782 - RNA, 32 nt, Homo Sapiens
aucaauuuuuaaaaccuuuucuuguuuauuug

SEQ ID NO: 359783 - RNA, 32 nt, Homo Sapiens
agucggggguggcaagggggcggggcgggggc

SEQ ID NO: 359784 - RNA, 32 nt, Homo Sapiens
uccgugagcugcuggggcggccggcgcccgcc

SEQ ID NO: 359785 - RNA, 32 nt, Homo Sapiens
gcggcaucacgguugcauucccauuggacuca

SEQ ID NO: 359786 - RNA, 32 nt, Homo Sapiens
uguuuuuauuuuuauuuuuuuaauuuuuucuu

SEQ ID NO: 359787 - RNA, 32 nt, Homo Sapiens
guccaucuccauaggcuucucagcuuguaaaa

SEQ ID NO: 359788 - RNA, 32 nt, Homo Sapiens
ggucucuccuccccuuucccuccaggcccagu

SEQ ID NO: 359789 - RNA, 32 nt, Homo Sapiens
ugaaacuguggcaacgucagcgcuugaggcuu

SEQ ID NO: 359790 - RNA, 32 nt, Homo Sapiens
cgggcgcacucuccagccuuuuccuggcugag

SEQ ID NO: 359791 - RNA, 32 nt, Homo Sapiens
ccucccacacccaaagcugagccugcagggaa

SEQ ID NO: 359792 - RNA, 32 nt, Homo Sapiens
uggcgccuguuucgacgccgggacccccagga

SEQ ID NO: 359793 - RNA, 32 nt, Homo Sapiens
uaggugagagacgauggugacaauguguggag

SEQ ID NO: 359794 - RNA, 32 nt, Homo Sapiens
gaggggcucaauccccacccccccacacacac

SEQ ID NO: 359795 - RNA, 32 nt, Homo Sapiens
acgccccggccgcucagcccccgggcacugcu

SEQ ID NO: 359796 - RNA, 32 nt, Homo Sapiens
ccuuccaccucagacuccaaagcauugggauu

SEQ ID NO: 359797 - RNA, 32 nt, Homo Sapiens
uacaugucucaccaauagaugauucaagaaca

SEQ ID NO: 359798 - RNA, 32 nt, Homo Sapiens
uguugccgcugcauucucguguucagugaugc

SEQ ID NO: 359799 - RNA, 32 nt, Homo Sapiens
gcgagggcgaggacggcggcccgccccgggga

SEQ ID NO: 359800 - RNA, 32 nt, Homo Sapiens
auuccaaaaugaaucaugcuuauguacuaaga

SEQ ID NO: 359801 - RNA, 32 nt, Homo Sapiens
cucccagcuaaaucaucggcauugugaagcag

SEQ ID NO: 359802 - RNA, 32 nt, Homo Sapiens
gcaacuguauaaaagcguugggcauguuuguu

SEQ ID NO: 359803 - RNA, 32 nt, Homo Sapiens
cccaagaacugagggucuccccggccucuacu

SEQ ID NO: 359804 - RNA, 32 nt, Homo Sapiens
aggggaguggcagugaggagggggccagguca

SEQ ID NO: 359805 - RNA, 31 nt, Homo Sapiens
uggugucuggggucagcaggagugagagcac

SEQ ID NO: 359806 - RNA, 32 nt, Homo Sapiens
ggcuggaauuuaugaucuggguuacgguaugu

SEQ ID NO: 359807 - RNA, 32 nt, Homo Sapiens
caggugucuggcuauuuuaaaacuacagauga

SEQ ID NO: 359808 - RNA, 32 nt, Homo Sapiens
ugaaagacacguauaccauuugguccagcuca

SEQ ID NO: 359809 - RNA, 27 nt, Homo Sapiens
aaacccucacucuucagccucuguuug

SEQ ID NO: 359810 - RNA, 32 nt, Homo Sapiens
gcagaaucuaaagaaagcauugaguccugggg

SEQ ID NO: 359811 - RNA, 32 nt, Homo Sapiens
cccaacuccucuauccaagacugugcccacau

SEQ ID NO: 359812 - RNA, 32 nt, Homo Sapiens
uuauggacuuuagcaguugcugugaaaaacua

SEQ ID NO: 359813 - RNA, 32 nt, Homo Sapiens
uacuuagagaauaauacuucauuuuugcagua

SEQ ID NO: 359814 - RNA, 32 nt, Homo Sapiens
cuggacuauagcgcuuaacauaaacaacaaca

SEQ ID NO: 359815 - RNA, 32 nt, Homo Sapiens
cugggcccaaagccaucuucugauggaaggaa

SEQ ID NO: 359816 - RNA, 32 nt, Homo Sapiens
agucaucuuuugaaaacaaaguuuugaauugg

SEQ ID NO: 359817 - RNA, 32 nt, Homo Sapiens
aagaucuuugaaucuucagucugauuuuuaau

SEQ ID NO: 359818 - RNA, 32 nt, Homo Sapiens
ggccaauaaagauagaugacauuucaaucuca

SEQ ID NO: 359819 - RNA, 32 nt, Homo Sapiens
aaguuauguuauuuuucuuuuaugcauuuauu

SEQ ID NO: 359820 - RNA, 32 nt, Homo Sapiens
uggcuuuuuccacaucuguucugugugguaga

SEQ ID NO: 359821 - RNA, 32 nt, Homo Sapiens
gccuguuuucuguaguuuauaguuagagcucu

SEQ ID NO: 359822 - RNA, 32 nt, Homo Sapiens
cgggagcaggggcugagaaggggcgucuguuc

SEQ ID NO: 359823 - RNA, 30 nt, Homo Sapiens
ccgcccggcgcgcagcagcaccaugggcac

SEQ ID NO: 359824 - RNA, 32 nt, Homo Sapiens
acaagcugugcagcuguguaggccucucuguc

SEQ ID NO: 359825 - RNA, 32 nt, Homo Sapiens
uauaaaauaaaggcuucaaauucuucaaagua

SEQ ID NO: 359826 - RNA, 28 nt, Homo Sapiens
caccuggggcggcguccgcggugaggac

SEQ ID NO: 359827 - RNA, 32 nt, Homo Sapiens
agggggaggaggaggagcucacacccucaaac

SEQ ID NO: 359828 - RNA, 32 nt, Homo Sapiens
aaagggcagaggucacugggggugggaagguc

SEQ ID NO: 359829 - RNA, 32 nt, Homo Sapiens
gguguccugccagugguacuuucacagcuggg

SEQ ID NO: 359830 - RNA, 32 nt, Homo Sapiens
ugagcccccggcgcgggggcugcuacacuaca

SEQ ID NO: 359831 - RNA, 32 nt, Homo Sapiens
cuucccuuguaggaacagccuuucucgaaucu

SEQ ID NO: 359832 - RNA, 32 nt, Homo Sapiens
ggaaggcauaagcauagaaauauuuuaggaua

SEQ ID NO: 359833 - RNA, 32 nt, Homo Sapiens
gaugcugaggaagaugaugacacgggugguau

SEQ ID NO: 359834 - RNA, 32 nt, Homo Sapiens
cugauggguuuacccagcuacccaguagcaua

SEQ ID NO: 359835 - RNA, 32 nt, Homo Sapiens
aacaugauuguaguagaauuuauuuuccagua

SEQ ID NO: 359836 - RNA, 32 nt, Homo Sapiens
ucauccacgcucagaucuccccugcccucagg

SEQ ID NO: 359837 - RNA, 32 nt, Homo Sapiens
uauuuagucucccacacucucccgaagacaug

SEQ ID NO: 359838 - RNA, 32 nt, Homo Sapiens
ugggguauauaaauuuaguaaauuucuuacuu

SEQ ID NO: 359839 - RNA, 32 nt, Homo Sapiens
caccccagccucccguccccagcccgcugcac

SEQ ID NO: 359840 - RNA, 32 nt, Homo Sapiens
uagggaaagguaauauaaaaacagguaaaaug

SEQ ID NO: 359841 - RNA, 32 nt, Homo Sapiens
guguccagccccaccaaggggccuccagagac

SEQ ID NO: 359842 - RNA, 32 nt, Homo Sapiens
cucuccauugucaggcaccccuggcaccaggg

SEQ ID NO: 359843 - RNA, 32 nt, Homo Sapiens
auauagaaacuuuaauuuuagaggauagugaa

SEQ ID NO: 359844 - RNA, 32 nt, Homo Sapiens
auuaugaucucguuuugacaauaaaaauccuu

SEQ ID NO: 359845 - RNA, 32 nt, Homo Sapiens
gggagguggaggugcgaguauaaaugaucaac

SEQ ID NO: 359846 - RNA, 32 nt, Homo Sapiens
caaaucccuggccacuuuagucuccccacuau

SEQ ID NO: 359847 - RNA, 32 nt, Homo Sapiens
aauaguugacuucucggccacgugcgugguau

SEQ ID NO: 359848 - RNA, 32 nt, Homo Sapiens
cgguuguuugcuaacguauccuugaauucugc

SEQ ID NO: 359849 - RNA, 32 nt, Homo Sapiens
ggugacccuuugagcgagccaaggcugggugg

SEQ ID NO: 359850 - RNA, 32 nt, Homo Sapiens
acaauauuuuuaaagguuucuuuuuuaacuuu

SEQ ID NO: 359851 - RNA, 32 nt, Homo Sapiens
cugacccauucuuuuuauucuucucuacagca

SEQ ID NO: 359852 - RNA, 32 nt, Homo Sapiens
ugacccauaaccccaagucccagcccagaacc

SEQ ID NO: 359853 - RNA, 32 nt, Homo Sapiens
gggcaguggugcccuuccugcagaagagacau

SEQ ID NO: 359854 - RNA, 32 nt, Homo Sapiens
ccuucaguccauucccuuaggcaauuuuuaau

SEQ ID NO: 359855 - RNA, 32 nt, Homo Sapiens
gcugcgggcagcgaggagcggcuggcgcucga

SEQ ID NO: 359856 - RNA, 32 nt, Homo Sapiens
acuuuggagaccuggaggagcaggagacacag

SEQ ID NO: 359857 - RNA, 32 nt, Homo Sapiens
guauaacuaugaaggcaaagguucucuggccg

SEQ ID NO: 359858 - RNA, 32 nt, Homo Sapiens
uuugagacacaaaacuuuuuaacuuugaugau

SEQ ID NO: 359859 - RNA, 32 nt, Homo Sapiens
ugaaaaaauucucagauccaucaauaaauuuu

SEQ ID NO: 359860 - RNA, 32 nt, Homo Sapiens
agaaggcucacagaggcuucaaucccuaaugc

SEQ ID NO: 359861 - RNA, 32 nt, Homo Sapiens
cgccccccaaggaaaacaaagcuugaguaaga

SEQ ID NO: 359862 - RNA, 32 nt, Homo Sapiens
uacuugucagcagugcaaaaaauauuaucugu

SEQ ID NO: 359863 - RNA, 32 nt, Homo Sapiens
uuggaggaauaaugacccaguauuugucccau

SEQ ID NO: 359864 - RNA, 32 nt, Homo Sapiens
ggugaggggcuccccccuccccuguuucuguc

SEQ ID NO: 359865 - RNA, 32 nt, Homo Sapiens
ggagguuacuacugccauccaagggaccauca

SEQ ID NO: 359866 - RNA, 32 nt, Homo Sapiens
uuuccugucuguuuuguacugcuugagugcag

SEQ ID NO: 359867 - RNA, 32 nt, Homo Sapiens
caguugaacuaaacuaaggaaccauccauuag

SEQ ID NO: 359868 - RNA, 32 nt, Homo Sapiens
cuccgccggucgguccccgcgcggcugagccc

SEQ ID NO: 359869 - RNA, 32 nt, Homo Sapiens
acagagggcgggucgcgcgcucgguggccguu

SEQ ID NO: 359870 - RNA, 32 nt, Homo Sapiens
auuuugucuucuucuuuuuuuuuuuuuuuuag

SEQ ID NO: 359871 - RNA, 32 nt, Homo Sapiens
gcucugggacucagccucuuaggaccuacgau

SEQ ID NO: 359872 - RNA, 32 nt, Homo Sapiens
agccugagucuauuuuggaucuguaaauaauc

SEQ ID NO: 359873 - RNA, 32 nt, Homo Sapiens
gcaucacagucaaggaagaguaaguuugaaua

SEQ ID NO: 359874 - RNA, 32 nt, Homo Sapiens
uguccuuaaccuuggcacaacaaaucucuaaa

SEQ ID NO: 359875 - RNA, 32 nt, Homo Sapiens
cuuuuucaacagcuaggggcaauccagugugu

SEQ ID NO: 359876 - RNA, 32 nt, Homo Sapiens
acacugccgggaagacggauuccgaggcagaa

SEQ ID NO: 359877 - RNA, 32 nt, Homo Sapiens
uaacauaucaaggagcucuucuagcuaaauga

SEQ ID NO: 359878 - RNA, 32 nt, Homo Sapiens
cuggugacauagucuggcaggccuaggggaca

SEQ ID NO: 359879 - RNA, 32 nt, Homo Sapiens
gauuuuaaggacccaggagguggggcagaaga

SEQ ID NO: 359880 - RNA, 32 nt, Homo Sapiens
aaauaauagaaagguaaacaaacaaauaaaua

SEQ ID NO: 359881 - RNA, 32 nt, Homo Sapiens
uuuuuggagggaggaguagagauauauaaccu

SEQ ID NO: 359882 - RNA, 32 nt, Homo Sapiens
aguuuuuucuucccuuuuaacuucaucgauuu

SEQ ID NO: 359883 - RNA, 32 nt, Homo Sapiens
cggagcccgggcccgccaugggccuccccgag

SEQ ID NO: 359884 - RNA, 32 nt, Homo Sapiens
ugaccauagaaagugacguguuaaaaaccagc

SEQ ID NO: 359885 - RNA, 32 nt, Homo Sapiens
cccaacauuuucugcuggcccugucuuaccuc

SEQ ID NO: 359886 - RNA, 32 nt, Homo Sapiens
uccugugcgacucuccgcaccugcgccggugc

SEQ ID NO: 359887 - RNA, 32 nt, Homo Sapiens
ggguggugaggcggcccggcacugggagcugc

SEQ ID NO: 359888 - RNA, 32 nt, Homo Sapiens
uaccgccggagggaagccugggcccgcugagc

SEQ ID NO: 359889 - RNA, 32 nt, Homo Sapiens
agcgugcccucgccgcugguacggcuccuacc

SEQ ID NO: 359890 - RNA, 32 nt, Homo Sapiens
aauugaaaaaauaggugagagcuugguuuuau

SEQ ID NO: 359891 - RNA, 32 nt, Homo Sapiens
ggcuacagcaacagccagagguguuccugggg

SEQ ID NO: 359892 - RNA, 32 nt, Homo Sapiens
acgggggccugguggagaaggaggugcuggcu

SEQ ID NO: 359893 - RNA, 32 nt, Homo Sapiens
ugcagaguuuguuuuucuauaugugaaggauu

SEQ ID NO: 359894 - RNA, 31 nt, Homo Sapiens
accccucgggacugccuggugcagguggugg

SEQ ID NO: 359895 - RNA, 32 nt, Homo Sapiens
gaagugggaugagaaugugaccgguuuugaaa

SEQ ID NO: 359896 - RNA, 32 nt, Homo Sapiens
gccaugaccaaagccccgcgggcccaggcgcg

SEQ ID NO: 359897 - RNA, 32 nt, Homo Sapiens
cacccccacccggcucacccccggcccugcca

SEQ ID NO: 359898 - RNA, 32 nt, Homo Sapiens
gaccccugcccccaugcgugguccauaugguc

SEQ ID NO: 359899 - RNA, 32 nt, Homo Sapiens
uguauagugucuguauuugguauauacuuugc

SEQ ID NO: 359900 - RNA, 32 nt, Homo Sapiens
gcuuucguccuggccucugggggaucggcggc

SEQ ID NO: 359901 - RNA, 32 nt, Homo Sapiens
ugcccagcccugcucugcccagcccagcaggg

SEQ ID NO: 359902 - RNA, 32 nt, Homo Sapiens
gugaucucacaaaacugguaaguuucuuaugc

SEQ ID NO: 359903 - RNA, 32 nt, Homo Sapiens
gauuucacuugaaaauggcacggugucugcag

SEQ ID NO: 359904 - RNA, 32 nt, Homo Sapiens
cauuuuauugaaauucuuuaaauuguuuaaag

SEQ ID NO: 359905 - RNA, 32 nt, Homo Sapiens
ggacaggcucugcagauucuaggcugcccuag

SEQ ID NO: 359906 - RNA, 32 nt, Homo Sapiens
cuuuuuggguauagaaaccaauuuuuuuuaau

SEQ ID NO: 359907 - RNA, 32 nt, Homo Sapiens
aguuguguagacaagaauacaugcaugagaag

SEQ ID NO: 359908 - RNA, 32 nt, Homo Sapiens
cucugucugaccagcagcuugggauuggcgga

SEQ ID NO: 359909 - RNA, 32 nt, Homo Sapiens
cagggacuguggcgaggccgccgcccagugga

SEQ ID NO: 359910 - RNA, 29 nt, Homo Sapiens
auucuaugugcuauguaccagauaauucu

SEQ ID NO: 359911 - RNA, 32 nt, Homo Sapiens
gagacaccauaguggaaacuggggcuuaugcu

SEQ ID NO: 359912 - RNA, 32 nt, Homo Sapiens
uuuuauuuuuuuaauuuuuucuuuuuuauuaa

SEQ ID NO: 359913 - RNA, 32 nt, Homo Sapiens
ucauuauagaauguauucacccauaauauacc

SEQ ID NO: 359914 - RNA, 32 nt, Homo Sapiens
ugaaccguggucuugggcaccuugcuuuauua

SEQ ID NO: 359915 - RNA, 32 nt, Homo Sapiens
guacaauguggucuuuaaucuguccuucaugu

SEQ ID NO: 359916 - RNA, 32 nt, Homo Sapiens
caugguaaugaaauuaugauggagcuguguua

SEQ ID NO: 359917 - RNA, 32 nt, Homo Sapiens
gcgcugcggcccgugcagccccggaggccccu

SEQ ID NO: 359918 - RNA, 32 nt, Homo Sapiens
ugguauccuaugguuuuuguuguucaguaaau

SEQ ID NO: 359919 - RNA, 32 nt, Homo Sapiens
aggacucauuugacacacuauuagauuuacca

SEQ ID NO: 359920 - RNA, 30 nt, Homo Sapiens
uuuucccauaucccuggacucuugagaaaa

SEQ ID NO: 359921 - RNA, 32 nt, Homo Sapiens
gcccuuuggccgcgaccacgggaaccagcggu

SEQ ID NO: 359922 - RNA, 32 nt, Homo Sapiens
cugggccagcuucccucaugggcuugguucuc

SEQ ID NO: 359923 - RNA, 32 nt, Homo Sapiens
gggaucaauuuucauuaaacuugaagcagucg

SEQ ID NO: 359924 - RNA, 32 nt, Homo Sapiens
auggaagccuggguuggagauccugaggcagc

SEQ ID NO: 359925 - RNA, 32 nt, Homo Sapiens
uuucgaugaaguucugagauacugaaauguga

SEQ ID NO: 359926 - RNA, 32 nt, Homo Sapiens
ucuugccguggcucuuccuccucccucagcga

SEQ ID NO: 359927 - RNA, 32 nt, Homo Sapiens
guguauuuuuauuuuccugugacuguuuuugu

SEQ ID NO: 359928 - RNA, 32 nt, Homo Sapiens
ggggaguggccuuucuuuuccccucccucccg

SEQ ID NO: 359929 - RNA, 32 nt, Homo Sapiens
cugcugaccacuaauguucuagcugaugguga

SEQ ID NO: 359930 - RNA, 32 nt, Homo Sapiens
gggccucccgccuccucccccaucccccugcc

SEQ ID NO: 359931 - RNA, 32 nt, Homo Sapiens
gaaagaaagaaacuguauagauauauuuaaaa

SEQ ID NO: 359932 - RNA, 32 nt, Homo Sapiens
uucagaaacaacauggugucagggcuccaugu

SEQ ID NO: 359933 - RNA, 32 nt, Homo Sapiens
ccacgcguccguacuaaugagaccgcugagga

SEQ ID NO: 359934 - RNA, 32 nt, Homo Sapiens
uauacaucuacucuuuuaauucuuauuuccuu

SEQ ID NO: 359935 - RNA, 32 nt, Homo Sapiens
uuacugaaaaggaacagauuguuccuaaacca

SEQ ID NO: 359936 - RNA, 30 nt, Homo Sapiens
uguauuuuggcugcugcaggagccauuuua

SEQ ID NO: 359937 - RNA, 32 nt, Homo Sapiens
augacuccagagagccacagugccaaacuccu

SEQ ID NO: 359938 - RNA, 32 nt, Homo Sapiens
uacagcaguagggaggucagugcuucgugccu

SEQ ID NO: 359939 - RNA, 32 nt, Homo Sapiens
gcccucgccgcggccaugcccgggcccuagag

SEQ ID NO: 359940 - RNA, 32 nt, Homo Sapiens
accacauguccgaugcuguuguuuccuacuuu

SEQ ID NO: 359941 - RNA, 32 nt, Homo Sapiens
gauacaccuaaggucacgcagcuggguagaua

SEQ ID NO: 359942 - RNA, 32 nt, Homo Sapiens
caggccgcacaccaaguguauggucugaauga

SEQ ID NO: 359943 - RNA, 32 nt, Homo Sapiens
gauaaugauugaaaacgugucuguugaguaaa

SEQ ID NO: 359944 - RNA, 32 nt, Homo Sapiens
cugauauauaugcauuugcuguuuuggccaau

SEQ ID NO: 359945 - RNA, 32 nt, Homo Sapiens
aauuuuccaucauauuucauuucuguaacagu

SEQ ID NO: 359946 - RNA, 32 nt, Homo Sapiens
auacacuaagguccuugugguuuuccaguuaa

SEQ ID NO: 359947 - RNA, 32 nt, Homo Sapiens
gcauacuagcuaaaacuuucuuuuguuuuauu

SEQ ID NO: 359948 - RNA, 32 nt, Homo Sapiens
ugaugaugaugaugaugaugauaacuagaacu

SEQ ID NO: 359949 - RNA, 32 nt, Homo Sapiens
gcaggcucugcagaacucccaggcccagcucg

SEQ ID NO: 359950 - RNA, 32 nt, Homo Sapiens
agaagacacacacaucacauagacccucagaa

SEQ ID NO: 359951 - RNA, 32 nt, Homo Sapiens
gucgucucugguuuccuacucuuaaugauuuu

SEQ ID NO: 359952 - RNA, 32 nt, Homo Sapiens
uuuuauuagacuaucugauagagguuggauuu

SEQ ID NO: 359953 - RNA, 32 nt, Homo Sapiens
gugacaaaaugaauagcuacaaugucucguga

SEQ ID NO: 359954 - RNA, 32 nt, Homo Sapiens
gcauguacuuggacuuguuuaauugaauaagc

SEQ ID NO: 359955 - RNA, 32 nt, Homo Sapiens
agggagcugaugcuggcaaugggaucagagug

SEQ ID NO: 359956 - RNA, 32 nt, Homo Sapiens
caaagauguaaguuaucuuacacauaauaugu

SEQ ID NO: 359957 - RNA, 32 nt, Homo Sapiens
uucuccagccucagccucccgaguagcuggga

SEQ ID NO: 359958 - RNA, 32 nt, Homo Sapiens
uucuccagccucagccucccaaguagcuagga

SEQ ID NO: 359959 - RNA, 32 nt, Homo Sapiens
gcagcaggcuggaaggcucaggacaccgagcu

SEQ ID NO: 359960 - RNA, 32 nt, Homo Sapiens
gccucccugaaaauguuuuucugccagggagc

SEQ ID NO: 359961 - RNA, 32 nt, Homo Sapiens
uuuuagauauuuuucuaucucucacuucucag

SEQ ID NO: 359962 - RNA, 32 nt, Homo Sapiens
aauaaaauacucucuuuuuuuuuaagguggaa

SEQ ID NO: 359963 - RNA, 32 nt, Homo Sapiens
uguauugcuacaauuuaaauauuaaaacaaau

SEQ ID NO: 359964 - RNA, 32 nt, Homo Sapiens
aaguaagauugcaaaauagaaauaucuauaaa

SEQ ID NO: 359965 - RNA, 32 nt, Homo Sapiens
gucgccccgcagucccggggcucccaagggcc

SEQ ID NO: 359966 - RNA, 32 nt, Homo Sapiens
uucagccagggccagugcuccuaaacugagcu

SEQ ID NO: 359967 - RNA, 32 nt, Homo Sapiens
auuauacuuccucauucauauuauguugauac

SEQ ID NO: 359968 - RNA, 32 nt, Homo Sapiens
gguggugugccccuguaaucccagcuacucag

SEQ ID NO: 359969 - RNA, 32 nt, Homo Sapiens
cucuguuccgagcugcacuuugggcauccgug

SEQ ID NO: 359970 - RNA, 32 nt, Homo Sapiens
cugugucaguuauuauauuuaaguuuguacau

SEQ ID NO: 359971 - RNA, 32 nt, Homo Sapiens
cugggugugaacgaguauaucuuaccagggau

SEQ ID NO: 359972 - RNA, 32 nt, Homo Sapiens
auuuaacucgacaaaaucauuucauacuauau

SEQ ID NO: 359973 - RNA, 32 nt, Homo Sapiens
gcggagguuucagaguagaaggugaugucagc

SEQ ID NO: 359974 - RNA, 32 nt, Homo Sapiens
acacggaaacauuuuuaacagagcacuuaauu

SEQ ID NO: 359975 - RNA, 32 nt, Homo Sapiens
gucagggagauaauggcugcgcggccgaucac

SEQ ID NO: 359976 - RNA, 32 nt, Homo Sapiens
aauaguucugaacauuuuucuauucauucauu

SEQ ID NO: 359977 - RNA, 32 nt, Homo Sapiens
ucagggaaggccucccugaggacauaugagca

SEQ ID NO: 359978 - RNA, 32 nt, Homo Sapiens
caaagcaaacaauaaauauuauuguuauuguu

SEQ ID NO: 359979 - RNA, 32 nt, Homo Sapiens
aagcccagcaaccggcuucgcuccacaacaca

SEQ ID NO: 359980 - RNA, 32 nt, Homo Sapiens
cccauccguaggagcggcgucccggccgcccc

SEQ ID NO: 359981 - RNA, 32 nt, Homo Sapiens
agaauggcuguaccauuuugcauuccaagcag

SEQ ID NO: 359982 - RNA, 32 nt, Homo Sapiens
auggguauuuguuuucguauguuucugccagu

SEQ ID NO: 359983 - RNA, 32 nt, Homo Sapiens
aacuguuggaauggauuuuucuuuaacugccg

SEQ ID NO: 359984 - RNA, 32 nt, Homo Sapiens
cagcguuuguacucacagacaaggcaaaggua

SEQ ID NO: 359985 - RNA, 32 nt, Homo Sapiens
caagaaaacuguaacagaaaauaaauuuugaa

SEQ ID NO: 359986 - RNA, 32 nt, Homo Sapiens
ucucauagcauuaacuaaucuauuggguucau

SEQ ID NO: 359987 - RNA, 32 nt, Homo Sapiens
caagugguauaaauacagccagauguaccaga

SEQ ID NO: 359988 - RNA, 31 nt, Homo Sapiens
ucucuuuugugcuggguucaguggcucuuca

SEQ ID NO: 359989 - RNA, 32 nt, Homo Sapiens
cuuguggccaggccuuccuuugcuggaggaag

SEQ ID NO: 359990 - RNA, 32 nt, Homo Sapiens
agcauacaagauuuaaauuugggaaggggggg

SEQ ID NO: 359991 - RNA, 32 nt, Homo Sapiens
acuuaacuacugagauauucagagcauuuuua

SEQ ID NO: 359992 - RNA, 32 nt, Homo Sapiens
cugaagaguauuuuauguauaucuauauacac

SEQ ID NO: 359993 - RNA, 32 nt, Homo Sapiens
uaaaguaugauuuuugagucaggcacaguggc

SEQ ID NO: 359994 - RNA, 30 nt, Homo Sapiens
cacaccccaacuuugccgccgccgccgcgc

SEQ ID NO: 359995 - RNA, 28 nt, Homo Sapiens
acacagguuuggggaccaaggacccauc

SEQ ID NO: 359996 - RNA, 30 nt, Homo Sapiens
uccuaagagccagugggggaagaggggcug

SEQ ID NO: 359997 - RNA, 32 nt, Homo Sapiens
aguuuaguuucucaggcuccuacuuguaaguu

SEQ ID NO: 359998 - RNA, 32 nt, Homo Sapiens
ucccuacuuccacugcuuuuuccugcauuuaa

SEQ ID NO: 359999 - RNA, 32 nt, Homo Sapiens
aaauguguuuugucuuuuuuuauuacuagugu

SEQ ID NO: 360000 - RNA, 32 nt, Homo Sapiens
gaagagagaggaaaguagacuccaucaugaca

SEQ ID NO: 360001 - RNA, 32 nt, Homo Sapiens
uuggaggcaugggaaauugucucaauuuguac

SEQ ID NO: 360002 - RNA, 32 nt, Homo Sapiens
ugugacuguccacuucccuucccccagaguca

SEQ ID NO: 360003 - RNA, 32 nt, Homo Sapiens
uaauacaaugaugguugagugaaaauacagaa

SEQ ID NO: 360004 - RNA, 32 nt, Homo Sapiens
caccuguaaucccagcacuuugggauuccgag

SEQ ID NO: 360005 - RNA, 32 nt, Homo Sapiens
accaacccggggacuggugccucugccugauc

SEQ ID NO: 360006 - RNA, 32 nt, Homo Sapiens
auguggggucagagaccccacacacagucccu

SEQ ID NO: 360007 - RNA, 32 nt, Homo Sapiens
auuuuccaauuugaagauucauuugaaggugg

SEQ ID NO: 360008 - RNA, 32 nt, Homo Sapiens
gaggggaaggauuuucuucauucuguguauuu

SEQ ID NO: 360009 - RNA, 32 nt, Homo Sapiens
ccccugggcacccggauucaccucuggaccac

SEQ ID NO: 360010 - RNA, 32 nt, Homo Sapiens
uggagcagugggagaccccucucccguuucuc

SEQ ID NO: 360011 - RNA, 32 nt, Homo Sapiens
cuuaaauaaaacugcauugcugauucaaaaaa

SEQ ID NO: 360012 - RNA, 32 nt, Homo Sapiens
ggcacagaugaccaaagucccuuccugcuucc

SEQ ID NO: 360013 - RNA, 32 nt, Homo Sapiens
uguauuagugauauuucucuaguaguuaaaaa

SEQ ID NO: 360014 - RNA, 32 nt, Homo Sapiens
uuccucuugguuucuucaguuaagucaaaaca

SEQ ID NO: 360015 - RNA, 32 nt, Homo Sapiens
caaggcugucuccucaggauccugccaaaggc

SEQ ID NO: 360016 - RNA, 32 nt, Homo Sapiens
uaaacuagaauaauaaugcccuuaaugugagg

SEQ ID NO: 360017 - RNA, 32 nt, Homo Sapiens
uuucaugacuuccaaagguucagaugaggaug

SEQ ID NO: 360018 - RNA, 32 nt, Homo Sapiens
uaauuugcccuucucuccccaucuucccucag

SEQ ID NO: 360019 - RNA, 32 nt, Homo Sapiens
gcgggccgugcagagcagcaccuccaucaggc

SEQ ID NO: 360020 - RNA, 32 nt, Homo Sapiens
uacacugccugccuuaagugaggaaaucaaag

SEQ ID NO: 360021 - RNA, 32 nt, Homo Sapiens
gggaauaaaaauuuuaaaaauuaagagauaua

SEQ ID NO: 360022 - RNA, 32 nt, Homo Sapiens
aucauaauggagcuagaaaauuccuaucaccu

SEQ ID NO: 360023 - RNA, 32 nt, Homo Sapiens
caccgcugcucuugcugcucucucgcggcaga

SEQ ID NO: 360024 - RNA, 32 nt, Homo Sapiens
aacaauuguaaaugguagagcuaagauuugaa

SEQ ID NO: 360025 - RNA, 31 nt, Homo Sapiens
cuguggcggcacucgccccggugcuggucug

SEQ ID NO: 360026 - RNA, 31 nt, Homo Sapiens
uccuugaacauauuggagggaucauggagau

SEQ ID NO: 360027 - RNA, 32 nt, Homo Sapiens
ucuuaaaaaaaauuauacugcuguaaaugauu

SEQ ID NO: 360028 - RNA, 32 nt, Homo Sapiens
ggaggcaacuucugcccuguucuauucaacag

SEQ ID NO: 360029 - RNA, 32 nt, Homo Sapiens
agguccucuaaauauaaucccuauucuuacau

SEQ ID NO: 360030 - RNA, 32 nt, Homo Sapiens
gguaauuuacuugacuguucuauuuguuuguc

SEQ ID NO: 360031 - RNA, 32 nt, Homo Sapiens
aaggggcagcacugccugcugcuuccuucccc

SEQ ID NO: 360032 - RNA, 32 nt, Homo Sapiens
gaagaaccaauauauacaaugggccaacaauc

SEQ ID NO: 360033 - RNA, 32 nt, Homo Sapiens
ugggaagcguucggugaaagcggguuucgacg

SEQ ID NO: 360034 - RNA, 32 nt, Homo Sapiens
augcaacauggacacaaacuuaugauagggcc

SEQ ID NO: 360035 - RNA, 32 nt, Homo Sapiens
cugccuuccugccugcccuuuuugugcaggug

SEQ ID NO: 360036 - RNA, 30 nt, Homo Sapiens
auaagucagguaaggggggaaaugaccacc

SEQ ID NO: 360037 - RNA, 32 nt, Homo Sapiens
caaaaaaguauauacugcgugauuccauuuac

SEQ ID NO: 360038 - RNA, 32 nt, Homo Sapiens
uuuuuguucaucaguaauaacuaguuggccaa

SEQ ID NO: 360039 - RNA, 32 nt, Homo Sapiens
uguguuuuugguuuuucuaaguauauagaaag

SEQ ID NO: 360040 - RNA, 32 nt, Homo Sapiens
cauuaucuguggucuuuuuuuccuuucaagcu

SEQ ID NO: 360041 - RNA, 32 nt, Homo Sapiens
ugguguuccagaagcacucucaaggggugauu

SEQ ID NO: 360042 - RNA, 32 nt, Homo Sapiens
uaaauaccuuauuggacaagggcuugcuucaa

SEQ ID NO: 360043 - RNA, 32 nt, Homo Sapiens
cagcucugccuugcaucacccucagccuaagg

SEQ ID NO: 360044 - RNA, 32 nt, Homo Sapiens
uaccuguuagacaaugguugcucuugggcucu

SEQ ID NO: 360045 - RNA, 32 nt, Homo Sapiens
cacccagagcuacuaccgcagugccaaugggg

SEQ ID NO: 360046 - RNA, 32 nt, Homo Sapiens
ugacagauuuuaaaauaagaucuaaaaaagag

SEQ ID NO: 360047 - RNA, 32 nt, Homo Sapiens
gacgauguaaaaauaauaaacaauauauaccu

SEQ ID NO: 360048 - RNA, 32 nt, Homo Sapiens
uuuuuaugcaugaugguaaaauaaaagcaugu

SEQ ID NO: 360049 - RNA, 32 nt, Homo Sapiens
cacagaaaucaauggugauauuugagaaagaa

SEQ ID NO: 360050 - RNA, 32 nt, Homo Sapiens
uuuuccggacgccacccgcgggcacugccgac

SEQ ID NO: 360051 - RNA, 30 nt, Homo Sapiens
ucucugucauagcccgcagaagcuuggcua

SEQ ID NO: 360052 - RNA, 32 nt, Homo Sapiens
gugaaaaaaaauuuaaaccugccauuaaaaau

SEQ ID NO: 360053 - RNA, 32 nt, Homo Sapiens
cuuggcugccuggccagggccgggggcucagc

SEQ ID NO: 360054 - RNA, 32 nt, Homo Sapiens
cacuuuccugucauuucuaacuuaccacaugc

SEQ ID NO: 360055 - RNA, 32 nt, Homo Sapiens
gaaggcugaaaaagugggucggagacgggcuc

SEQ ID NO: 360056 - RNA, 32 nt, Homo Sapiens
aagugaacaaagugagaaaugaaaucgaaugg

SEQ ID NO: 360057 - RNA, 32 nt, Homo Sapiens
cauauauuucuguauuuccuggauaaggaaga

SEQ ID NO: 360058 - RNA, 32 nt, Homo Sapiens
acuucuaaauuccauguggcauuccccuaccc

SEQ ID NO: 360059 - RNA, 32 nt, Homo Sapiens
aaaugaaggcuuuaaucagcauuguaaaggaa

SEQ ID NO: 360060 - RNA, 32 nt, Homo Sapiens
guccuuggaauugauucuaaggugauguucuu

SEQ ID NO: 360061 - RNA, 32 nt, Homo Sapiens
gccuccugcacuaaccaaaaaacacaagaaga

SEQ ID NO: 360062 - RNA, 32 nt, Homo Sapiens
uauuuuugucacagagcaagcuggccaugaac

SEQ ID NO: 360063 - RNA, 32 nt, Homo Sapiens
ucuucucggucccaucuucugcacccauugcc

SEQ ID NO: 360064 - RNA, 32 nt, Homo Sapiens
agcaaagagauuaggacacagcagagacuuuc

SEQ ID NO: 360065 - RNA, 32 nt, Homo Sapiens
aauuaaagguacaaaaucgugaaucucaguua

SEQ ID NO: 360066 - RNA, 32 nt, Homo Sapiens
agcucccagcacucaaccaaccuccccgcaga

SEQ ID NO: 360067 - RNA, 32 nt, Homo Sapiens
ggggccagccugccuccaccucccacccccuu

SEQ ID NO: 360068 - RNA, 32 nt, Homo Sapiens
cauuguucuuccagcccucgcccccaaccccc

SEQ ID NO: 360069 - RNA, 32 nt, Homo Sapiens
acgcccagcaugcugaucccauuuucaaugaa

SEQ ID NO: 360070 - RNA, 32 nt, Homo Sapiens
cagaguccggcauccccuccccagacugccug

SEQ ID NO: 360071 - RNA, 32 nt, Homo Sapiens
ccaccgacgaucuccugagugcacugggaaau

SEQ ID NO: 360072 - RNA, 32 nt, Homo Sapiens
gaaauucugaccaccuuuuggcuuugaguauu

SEQ ID NO: 360073 - RNA, 31 nt, Homo Sapiens
ggaacuuucaggagaaagccaaacuccucug

SEQ ID NO: 360074 - RNA, 32 nt, Homo Sapiens
auguaaaugaauucuguggaucaggaaucagc

SEQ ID NO: 360075 - RNA, 32 nt, Homo Sapiens
aggacuaugcaugguagugagucaguugugua

SEQ ID NO: 360076 - RNA, 32 nt, Homo Sapiens
caagauucaagacccuucucuugcuugucacc

SEQ ID NO: 360077 - RNA, 32 nt, Homo Sapiens
uuuuuguuuugccuucuuauuuagucaguuug

SEQ ID NO: 360078 - RNA, 32 nt, Homo Sapiens
uuccuggcauguaagugcccacuuccucaugu

SEQ ID NO: 360079 - RNA, 32 nt, Homo Sapiens
gucuccccuauuauaaauuuggcacuucuaua

SEQ ID NO: 360080 - RNA, 32 nt, Homo Sapiens
gaauuggccuggcuaccacuguggucgcgugc

SEQ ID NO: 360081 - RNA, 32 nt, Homo Sapiens
uugaaggcuuccaggcaggucugugugggaca

SEQ ID NO: 360082 - RNA, 32 nt, Homo Sapiens
agguucuccacagcagucuuccacuggccaca

SEQ ID NO: 360083 - RNA, 32 nt, Homo Sapiens
cuguguggccgcggccccagcgugcgucucuu

SEQ ID NO: 360084 - RNA, 32 nt, Homo Sapiens
uaaaaauacacacacacacacacacacacaca

SEQ ID NO: 360085 - RNA, 32 nt, Homo Sapiens
cagacuugccaggcucccuuucucuucuuccc

SEQ ID NO: 360086 - RNA, 32 nt, Homo Sapiens
cugggcucaagcgauccuccccgcucagccuc

SEQ ID NO: 360087 - RNA, 32 nt, Homo Sapiens
aggcgaguucgcagcugcgcgccggguccugg

SEQ ID NO: 360088 - RNA, 32 nt, Homo Sapiens
gggacuacugcagaagacccugggagaguugg

SEQ ID NO: 360089 - RNA, 32 nt, Homo Sapiens
guucgcacaggcagcgggaggaggggcggcgc

SEQ ID NO: 360090 - RNA, 32 nt, Homo Sapiens
uaagugauugugguuuuucucgugguuuuuau

SEQ ID NO: 360091 - RNA, 32 nt, Homo Sapiens
uuucccgcucggcccuggcccggagggcccca

SEQ ID NO: 360092 - RNA, 32 nt, Homo Sapiens
agaguuggagggcugagaaggggcagcucuga

SEQ ID NO: 360093 - RNA, 32 nt, Homo Sapiens
cuuuucaaagcugguuaaaaauaagauacuga

SEQ ID NO: 360094 - RNA, 32 nt, Homo Sapiens
ggcaaaggaggguggaggggugucggccuaga

SEQ ID NO: 360095 - RNA, 32 nt, Homo Sapiens
gaacaggcugucuagucagaugcagcuugauc

SEQ ID NO: 360096 - RNA, 32 nt, Homo Sapiens
ccagacacuccucuccuugccugcaggcugcc

SEQ ID NO: 360097 - RNA, 32 nt, Homo Sapiens
acugguaccaaaacagagauauagauuaaugg

SEQ ID NO: 360098 - RNA, 32 nt, Homo Sapiens
aaguaagcuugaugggcuggaacuuuugacuu

SEQ ID NO: 360099 - RNA, 32 nt, Homo Sapiens
cgccgagacagcugcgcgggcgagcaucccca

SEQ ID NO: 360100 - RNA, 32 nt, Homo Sapiens
gcguuucccggguaaagggcacugcugauggu

SEQ ID NO: 360101 - RNA, 32 nt, Homo Sapiens
ccccaggccugcagcaaauacaucaguguuca

SEQ ID NO: 360102 - RNA, 32 nt, Homo Sapiens
uucacccuccaaggccuccccauggccacagu

SEQ ID NO: 360103 - RNA, 32 nt, Homo Sapiens
uuacagcugguucuguagaaagagggaaaaga

SEQ ID NO: 360104 - RNA, 32 nt, Homo Sapiens
gcaaguuugcugacccaacaguaauucuugac

SEQ ID NO: 360105 - RNA, 32 nt, Homo Sapiens
auccacuuaggccccaggguccacggauggcc

SEQ ID NO: 360106 - RNA, 32 nt, Homo Sapiens
ugauucaggucauccgggcccuggacagagau

SEQ ID NO: 360107 - RNA, 32 nt, Homo Sapiens
ccuacagaaugggagaaaauguuugcaaucua

SEQ ID NO: 360108 - RNA, 32 nt, Homo Sapiens
cuauuguagcugugauuauuccaguuucugug

SEQ ID NO: 360109 - RNA, 32 nt, Homo Sapiens
ugucauuuaaacaauguauuaccaagugaaua

SEQ ID NO: 360110 - RNA, 32 nt, Homo Sapiens
cauucaucuauuuuucaaauguucuuucaaaa

SEQ ID NO: 360111 - RNA, 32 nt, Homo Sapiens
gauuauaaucuuuuucucuuuaucuuucauag

SEQ ID NO: 360112 - RNA, 32 nt, Homo Sapiens
guugggaaagcagggggacaugugucccucag

SEQ ID NO: 360113 - RNA, 32 nt, Homo Sapiens
acaguguggcuucagcuaugcacggggacagc

SEQ ID NO: 360114 - RNA, 32 nt, Homo Sapiens
acuccagccugggugacagagcaagaaucauu

SEQ ID NO: 360115 - RNA, 32 nt, Homo Sapiens
uaacauuagcuauuauacacuaaccaggcauu

SEQ ID NO: 360116 - RNA, 32 nt, Homo Sapiens
uaacugggaaagggcucugugugguaacaccu

SEQ ID NO: 360117 - RNA, 32 nt, Homo Sapiens
cagcggcccuaggcugccugcuccucagauag

SEQ ID NO: 360118 - RNA, 32 nt, Homo Sapiens
cagcugcaaaaauacugucuuugguggucaag

SEQ ID NO: 360119 - RNA, 32 nt, Homo Sapiens
agugcacuuuuguauuucauaguaagcuuaaa

SEQ ID NO: 360120 - RNA, 32 nt, Homo Sapiens
ccgaucucccccggcccggugugcagcaggag

SEQ ID NO: 360121 - RNA, 32 nt, Homo Sapiens
cugaacagcagcagcagcuccucauuggacuc

SEQ ID NO: 360122 - RNA, 32 nt, Homo Sapiens
caccuguaaucccagcacuuugggagccugag

SEQ ID NO: 360123 - RNA, 32 nt, Homo Sapiens
cugagagauugcuuaacucaaacucugcuucu

SEQ ID NO: 360124 - RNA, 32 nt, Homo Sapiens
ucagccgggucucauggcaggcaccuguaauc

SEQ ID NO: 360125 - RNA, 32 nt, Homo Sapiens
gucagggccggcuuugaguccaggcacugcag

SEQ ID NO: 360126 - RNA, 32 nt, Homo Sapiens
gaaggagacaccuuuuccccccugacccagaa

SEQ ID NO: 360127 - RNA, 32 nt, Homo Sapiens
uacaaaaaaugaauuuugaaagggugugugua

SEQ ID NO: 360128 - RNA, 32 nt, Homo Sapiens
uugguggucugggaacccacgugggcuggguu

SEQ ID NO: 360129 - RNA, 32 nt, Homo Sapiens
aagacaagaucugcaugaaucuauguauuucu

SEQ ID NO: 360130 - RNA, 32 nt, Homo Sapiens
gguccccuuggccacugucucugggcaugcaa

SEQ ID NO: 360131 - RNA, 32 nt, Homo Sapiens
ucuaaaguuucuggaacuuuccuccuuaccgu

SEQ ID NO: 360132 - RNA, 32 nt, Homo Sapiens
aggagauaccguagucuagauugucuuugagg

SEQ ID NO: 360133 - RNA, 32 nt, Homo Sapiens
aaugcagaaaucaacagaaucacucacacaua

SEQ ID NO: 360134 - RNA, 32 nt, Homo Sapiens
cgaggccggcgcgggcgggcgcggccuuuguc

SEQ ID NO: 360135 - RNA, 32 nt, Homo Sapiens
ccacccacccaccuccucccucugcucuucca

SEQ ID NO: 360136 - RNA, 32 nt, Homo Sapiens
cguuuaauuuccaagaaaaaacacugggucga

SEQ ID NO: 360137 - RNA, 32 nt, Homo Sapiens
uugggccugagucaauggauagguccuaggag

SEQ ID NO: 360138 - RNA, 31 nt, Homo Sapiens
aagagaaaaugaauaaaaaugaugacaucaa

SEQ ID NO: 360139 - RNA, 32 nt, Homo Sapiens
gcaaauugucauaagcuuuucccuuaugcuuu

SEQ ID NO: 360140 - RNA, 32 nt, Homo Sapiens
ucaccauccgcccucggcuuccgcggggcgcu

SEQ ID NO: 360141 - RNA, 32 nt, Homo Sapiens
ccaauguuaaacaaaagcauccagacacacaa

SEQ ID NO: 360142 - RNA, 27 nt, Homo Sapiens
ugauccucccccuucagccucccaaag

SEQ ID NO: 360143 - RNA, 32 nt, Homo Sapiens
uccuguagcggucucgccggccucggcguccg

SEQ ID NO: 360144 - RNA, 32 nt, Homo Sapiens
cugaggccgcggagagugacggcggcccggcc

SEQ ID NO: 360145 - RNA, 32 nt, Homo Sapiens
ccaucuucaaagccagccauguagcaucucuc

SEQ ID NO: 360146 - RNA, 32 nt, Homo Sapiens
ggccauccugugggcucugagacuuugcaugg

SEQ ID NO: 360147 - RNA, 32 nt, Homo Sapiens
aaaggaagguaacuucaauguaauagcuuccu

SEQ ID NO: 360148 - RNA, 32 nt, Homo Sapiens
aagguguggucacaaucagggccgggguuucc

SEQ ID NO: 360149 - RNA, 32 nt, Homo Sapiens
ugugagccgagaccgcaccacugcacuccagc

SEQ ID NO: 360150 - RNA, 32 nt, Homo Sapiens
uacccaggagguggagguugcggugaacugag

SEQ ID NO: 360151 - RNA, 32 nt, Homo Sapiens
ggaggccgggucugcuggccacagggcugccg

SEQ ID NO: 360152 - RNA, 32 nt, Homo Sapiens
accccaguacccucagacaugucuugucugcu

SEQ ID NO: 360153 - RNA, 32 nt, Homo Sapiens
caccaccaauaugauggggaagggcaggaacu

SEQ ID NO: 360154 - RNA, 32 nt, Homo Sapiens
aagccccugccccuccucucccucaucaagga

SEQ ID NO: 360155 - RNA, 32 nt, Homo Sapiens
auauaauggaggaugaauuuggcauuaguagg

SEQ ID NO: 360156 - RNA, 32 nt, Homo Sapiens
uuuuucccuaaaaaauguuaaucaagaauauu

SEQ ID NO: 360157 - RNA, 32 nt, Homo Sapiens
ggacuguuuuuagacccuccuagccuugaaca

SEQ ID NO: 360158 - RNA, 32 nt, Homo Sapiens
agccugcuacccgaccccggcgacgccuccac

SEQ ID NO: 360159 - RNA, 32 nt, Homo Sapiens
ggcuauccucaaugugacccacacuacaccuc

SEQ ID NO: 360160 - RNA, 32 nt, Homo Sapiens
agggagaaauguuuaaaucugucuaugccaua

SEQ ID NO: 360161 - RNA, 32 nt, Homo Sapiens
agcgggcagccaccccacgcuccccugcgguc

SEQ ID NO: 360162 - RNA, 32 nt, Homo Sapiens
aggagcaggaggagcgugaacgagaagagcag

SEQ ID NO: 360163 - RNA, 32 nt, Homo Sapiens
cgaucuuggagagcuucuuguccgggggcagc

SEQ ID NO: 360164 - RNA, 32 nt, Homo Sapiens
agcccccauggugaaggggcgagggcagcagg

SEQ ID NO: 360165 - RNA, 32 nt, Homo Sapiens
gucgagguggggcacggccgccggcaagaaac

SEQ ID NO: 360166 - RNA, 32 nt, Homo Sapiens
cgacggcgacgacgacgacucccgcgcgugug

SEQ ID NO: 360167 - RNA, 31 nt, Homo Sapiens
auaccaucaaagaaaagcugauaucaccccc

SEQ ID NO: 360168 - RNA, 32 nt, Homo Sapiens
gucuacugguacaagucagcucugcuaccugg

SEQ ID NO: 360169 - RNA, 32 nt, Homo Sapiens
uauucaucuauuuucucagaaucuauucagua

SEQ ID NO: 360170 - RNA, 32 nt, Homo Sapiens
auaagagauaaaacuugaaguacuuuuuucaa

SEQ ID NO: 360171 - RNA, 32 nt, Homo Sapiens
ucugcgugccccagcucugccccuuuggggcu

SEQ ID NO: 360172 - RNA, 32 nt, Homo Sapiens
uagugcagccucagccccaggcacagcgccgc

SEQ ID NO: 360173 - RNA, 32 nt, Homo Sapiens
gaagccgagacugcgcuucgugcgaggcccgg

SEQ ID NO: 360174 - RNA, 32 nt, Homo Sapiens
gauggcccgggcggcggcggcggcaugcggcu

SEQ ID NO: 360175 - RNA, 32 nt, Homo Sapiens
cucaaacccccacuuccugccccaggcuggcg

SEQ ID NO: 360176 - RNA, 32 nt, Homo Sapiens
gaacauucaggccuugcuggguucccugcuca

SEQ ID NO: 360177 - RNA, 32 nt, Homo Sapiens
guccucccgccaggucccgcggcccgcaccug

SEQ ID NO: 360178 - RNA, 32 nt, Homo Sapiens
uuguaugauauuaagcggagauguggcauuug

SEQ ID NO: 360179 - RNA, 32 nt, Homo Sapiens
gcccggagguagcuaccacggccugugucaac

SEQ ID NO: 360180 - RNA, 27 nt, Homo Sapiens
gaauggacaucuuugccaaauucucug

SEQ ID NO: 360181 - RNA, 30 nt, Homo Sapiens
gagauucgagggugcaugcaaagcaauguu

SEQ ID NO: 360182 - RNA, 32 nt, Homo Sapiens
ccgugccguguaauaaagucccagugcucauc

SEQ ID NO: 360183 - RNA, 32 nt, Homo Sapiens
gcggcggcggccgggggcgacauggcggagga

SEQ ID NO: 360184 - RNA, 32 nt, Homo Sapiens
gagaggucugauuguccccauguuccuggugu

SEQ ID NO: 360185 - RNA, 32 nt, Homo Sapiens
uaauuccuuaagucuaaagaugaugaacuuca

SEQ ID NO: 360186 - RNA, 32 nt, Homo Sapiens
uuggcuuuuuaaauuacuguuauuauuuuggg

SEQ ID NO: 360187 - RNA, 32 nt, Homo Sapiens
uuucauucuuguauuauaauuaauuuucuacc

SEQ ID NO: 360188 - RNA, 32 nt, Homo Sapiens
gcucugcccaaaagcuuuuccacacuuacagu

SEQ ID NO: 360189 - RNA, 32 nt, Homo Sapiens
gcuuucucagguuguguggagagacaggacuc

SEQ ID NO: 360190 - RNA, 32 nt, Homo Sapiens
agcccacaaaaaugcagugaagaagaagauau

SEQ ID NO: 360191 - RNA, 32 nt, Homo Sapiens
ugcacggggccuggguggggggugcgggugug

SEQ ID NO: 360192 - RNA, 32 nt, Homo Sapiens
uccuuuccagcaugaggaacuagccaccaacu

SEQ ID NO: 360193 - RNA, 32 nt, Homo Sapiens
uccuugggaaaauaaugauuccaauuaaagag

SEQ ID NO: 360194 - RNA, 32 nt, Homo Sapiens
uggcuguagguugugcggcugcagcggcucuu

SEQ ID NO: 360195 - RNA, 32 nt, Homo Sapiens
uacuuagaaaauaccuauugcaguuaguuuau

SEQ ID NO: 360196 - RNA, 32 nt, Homo Sapiens
gaugaguggguuccggagagcagaguacucaa

SEQ ID NO: 360197 - RNA, 32 nt, Homo Sapiens
ugcagaagggcaggcuggccgcggccgguuug

SEQ ID NO: 360198 - RNA, 32 nt, Homo Sapiens
agcccagccccgguuccuccccgcugcaggcc

SEQ ID NO: 360199 - RNA, 32 nt, Homo Sapiens
aaauaugugaaugguggaaauggugacuagca

SEQ ID NO: 360200 - RNA, 32 nt, Homo Sapiens
cuucaucuauucaaauggauugucuuauucug

SEQ ID NO: 360201 - RNA, 32 nt, Homo Sapiens
caggucaggaggagguagagagagggcagccg

SEQ ID NO: 360202 - RNA, 32 nt, Homo Sapiens
caauuuuagaugaaguuauuuucaagcuuuuu

SEQ ID NO: 360203 - RNA, 32 nt, Homo Sapiens
uaaaaggaaauauuuuaaaauuauacaguuca

SEQ ID NO: 360204 - RNA, 32 nt, Homo Sapiens
gguguugauaguaugucuguaaucucuguaua

SEQ ID NO: 360205 - RNA, 32 nt, Homo Sapiens
acccugccagcuuccaagagggcggcuucacu

SEQ ID NO: 360206 - RNA, 32 nt, Homo Sapiens
gaaauucagaaccuauuuuuuaucaucuuauu

SEQ ID NO: 360207 - RNA, 29 nt, Homo Sapiens
acgauuucuaaauguaggaaggccuguga

SEQ ID NO: 360208 - RNA, 32 nt, Homo Sapiens
accuuuaugucuagcuaagggauuguaaauac

SEQ ID NO: 360209 - RNA, 32 nt, Homo Sapiens
ucuuuugagcacuuuuauucucuuuuucuuaa

SEQ ID NO: 360210 - RNA, 32 nt, Homo Sapiens
gggguucuguugagaauuaagagcuaacacua

SEQ ID NO: 360211 - RNA, 32 nt, Homo Sapiens
uccacccagccaggaugcugcaggccaagcug

SEQ ID NO: 360212 - RNA, 32 nt, Homo Sapiens
cugccacugcauauggcaguccugguccuucc

SEQ ID NO: 360213 - RNA, 32 nt, Homo Sapiens
gccaacucugguuuccuccucacccugucugg

SEQ ID NO: 360214 - RNA, 32 nt, Homo Sapiens
cuguaaaccaaggacuaugaauacuaaauguu

SEQ ID NO: 360215 - RNA, 32 nt, Homo Sapiens
ucagguccagaccuccccgucuuccggcugcc

SEQ ID NO: 360216 - RNA, 32 nt, Homo Sapiens
acuucagugucccucccccuguauugugacaa

SEQ ID NO: 360217 - RNA, 32 nt, Homo Sapiens
gccgccgccgccgcagccgccggagccgcaau

SEQ ID NO: 360218 - RNA, 28 nt, Homo Sapiens
gaggaaaggaaaaaacauuuggaaaaua

SEQ ID NO: 360219 - RNA, 32 nt, Homo Sapiens
ugccauauucuuguuggagaugaaccguagca

SEQ ID NO: 360220 - RNA, 32 nt, Homo Sapiens
ccugccccagggagcucacgccaggcaggcca

SEQ ID NO: 360221 - RNA, 29 nt, Homo Sapiens
gaacuuuuuauccaaugacucaacucuaa

SEQ ID NO: 360222 - RNA, 32 nt, Homo Sapiens
uuaaauuuucaucuuuccuguuguggauggac

SEQ ID NO: 360223 - RNA, 32 nt, Homo Sapiens
cuccugacucucuugacaucagaugggguauu

SEQ ID NO: 360224 - RNA, 32 nt, Homo Sapiens
aaggaaguggcuugaaggaugugcuaguaagc

SEQ ID NO: 360225 - RNA, 32 nt, Homo Sapiens
uggcccucauccacccucccaagcugugcgag

SEQ ID NO: 360226 - RNA, 32 nt, Homo Sapiens
ugcuaaacacugggcuucaucacccagggaua

SEQ ID NO: 360227 - RNA, 32 nt, Homo Sapiens
augcagaggggagggcucauggccaggauucc

SEQ ID NO: 360228 - RNA, 32 nt, Homo Sapiens
uuuauuuuuuaaaaucgauaaugggacucuug

SEQ ID NO: 360229 - RNA, 32 nt, Homo Sapiens
uucuacuuggggggaaaaaaguccucauguag

SEQ ID NO: 360230 - RNA, 32 nt, Homo Sapiens
uacuccuggugcccgcccggccagaccgucag

SEQ ID NO: 360231 - RNA, 32 nt, Homo Sapiens
augaaguaauuucagaugauauuccccuucag

SEQ ID NO: 360232 - RNA, 32 nt, Homo Sapiens
auccuauuuagaaaaaauaaaacuacuuucug

SEQ ID NO: 360233 - RNA, 32 nt, Homo Sapiens
caagacauggggcauuuccacaaauuuaaguu

SEQ ID NO: 360234 - RNA, 32 nt, Homo Sapiens
ucugagggcugagacgccauggggccgcugcu

SEQ ID NO: 360235 - RNA, 32 nt, Homo Sapiens
gagcacgaggggaggcacggugcggagagcgu

SEQ ID NO: 360236 - RNA, 32 nt, Homo Sapiens
gccuugaaaaagacauucaggacugcugguuu

SEQ ID NO: 360237 - RNA, 32 nt, Homo Sapiens
cucuccccuccuccccucccccaucauaaaga

SEQ ID NO: 360238 - RNA, 32 nt, Homo Sapiens
uucacaaauaucaaaacaaaauggaggaaaac

SEQ ID NO: 360239 - RNA, 31 nt, Homo Sapiens
gcugccauccccugccugccaccugccccuc

SEQ ID NO: 360240 - RNA, 32 nt, Homo Sapiens
cacacuccggcgagccgagcccgcagcgcucc

SEQ ID NO: 360241 - RNA, 32 nt, Homo Sapiens
uguggcucaaagauuaacuuagcuaaaaauaa

SEQ ID NO: 360242 - RNA, 32 nt, Homo Sapiens
ggcgccucaggccccaggauccaccaucaagg

SEQ ID NO: 360243 - RNA, 32 nt, Homo Sapiens
cuuaaugaaugcauuuuauuuaucucaauuuu

SEQ ID NO: 360244 - RNA, 32 nt, Homo Sapiens
ggagcugcuggaggcccugggguugguagggc

SEQ ID NO: 360245 - RNA, 32 nt, Homo Sapiens
gacuggucaucuccugaggaccuguacaugac

SEQ ID NO: 360246 - RNA, 32 nt, Homo Sapiens
gcacucaauuuacaucguaucaauugcuauac

SEQ ID NO: 360247 - RNA, 32 nt, Homo Sapiens
gaaaaugcccagagucugacucuuacccuuuu

SEQ ID NO: 360248 - RNA, 32 nt, Homo Sapiens
caggcagcgggcccagccugagcaauggcagg

SEQ ID NO: 360249 - RNA, 32 nt, Homo Sapiens
gcagccauggagaggcucugugccaccgcugu

SEQ ID NO: 360250 - RNA, 32 nt, Homo Sapiens
caagugccacuaccgccaugggccucacuauc

SEQ ID NO: 360251 - RNA, 32 nt, Homo Sapiens
uaggaauaaaaagucauaaacuauucccaacu

SEQ ID NO: 360252 - RNA, 32 nt, Homo Sapiens
gagaggcugaggugggcagaucauuugaggcc

SEQ ID NO: 360253 - RNA, 32 nt, Homo Sapiens
cuuugcucagggcugucugugcugcuccucac

SEQ ID NO: 360254 - RNA, 32 nt, Homo Sapiens
gacaccccggggggccugauguguguggguug

SEQ ID NO: 360255 - RNA, 32 nt, Homo Sapiens
uuagggggagaccccugauuuuauuuauucau

SEQ ID NO: 360256 - RNA, 32 nt, Homo Sapiens
uuugugggcagcuaaaugcagcuuuguuaaua

SEQ ID NO: 360257 - RNA, 32 nt, Homo Sapiens
auuggauaaccaagagcucaggucacacagac

SEQ ID NO: 360258 - RNA, 32 nt, Homo Sapiens
uuagugggcuacuauuuaagacuuuguuuuuu

SEQ ID NO: 360259 - RNA, 32 nt, Homo Sapiens
ucaggacacaggcccagccacccccaggggcc

SEQ ID NO: 360260 - RNA, 32 nt, Homo Sapiens
ggcacacucgaacgcuaagagaaugguccaau

SEQ ID NO: 360261 - RNA, 32 nt, Homo Sapiens
auucagcaccagacgucugugcugccugguuu

SEQ ID NO: 360262 - RNA, 32 nt, Homo Sapiens
ugucagauuacgggaaggugauggguuccagu

SEQ ID NO: 360263 - RNA, 32 nt, Homo Sapiens
augcucucggaacaucaccugccugccggcag

SEQ ID NO: 360264 - RNA, 31 nt, Homo Sapiens
gagcgcccacggacaguguccacucuggcaa

SEQ ID NO: 360265 - RNA, 32 nt, Homo Sapiens
gccgcccgcgcgcgacgggaccggcagcauga

SEQ ID NO: 360266 - RNA, 32 nt, Homo Sapiens
cccuggugcgauggaguguggugcugggccug

SEQ ID NO: 360267 - RNA, 31 nt, Homo Sapiens
augacaccagcuuucuccagagccugugcag

SEQ ID NO: 360268 - RNA, 32 nt, Homo Sapiens
uauacauaauuucccauuucugcaaguaguca

SEQ ID NO: 360269 - RNA, 32 nt, Homo Sapiens
uucaugguuugugaaucauuucaguauguaau

SEQ ID NO: 360270 - RNA, 32 nt, Homo Sapiens
ccgcagcguuacugccuguguauaguauaaau

SEQ ID NO: 360271 - RNA, 32 nt, Homo Sapiens
gaauccacauucagauaaccauuuuguauaua

SEQ ID NO: 360272 - RNA, 32 nt, Homo Sapiens
uacugaacauggacaaugugcaugucauugac

SEQ ID NO: 360273 - RNA, 28 nt, Homo Sapiens
aaacauugucuugucauguguuuaggug

SEQ ID NO: 360274 - RNA, 32 nt, Homo Sapiens
aauuugccgggugugguggugcaugccuguaa

SEQ ID NO: 360275 - RNA, 32 nt, Homo Sapiens
gcuuauccccucucaucuuccuccccuaaacc

SEQ ID NO: 360276 - RNA, 32 nt, Homo Sapiens
gcuccugggcaggucuucuccuccucuccauc

SEQ ID NO: 360277 - RNA, 32 nt, Homo Sapiens
guaugauacuauuuaaauuuggaggacaacuu

SEQ ID NO: 360278 - RNA, 27 nt, Homo Sapiens
ugagaguccuucuuucccccuuuucuu

SEQ ID NO: 360279 - RNA, 32 nt, Homo Sapiens
cauucuucacuuucuuucugcuuuuacaaaag

SEQ ID NO: 360280 - RNA, 31 nt, Homo Sapiens
gagucauauugaggcauucaaggaugcacag

SEQ ID NO: 360281 - RNA, 32 nt, Homo Sapiens
cagccaggccggcuauggucccggggcucccg

SEQ ID NO: 360282 - RNA, 32 nt, Homo Sapiens
ucccauguuguccuggcaugugcaguauacac

SEQ ID NO: 360283 - RNA, 32 nt, Homo Sapiens
uuuuccucaucuagcugaaaaaucugaacgcu

SEQ ID NO: 360284 - RNA, 32 nt, Homo Sapiens
aacccagccuccagcucugucucaccaagcac

SEQ ID NO: 360285 - RNA, 32 nt, Homo Sapiens
ccaugcccaagccacccccaagaucccccuga

SEQ ID NO: 360286 - RNA, 32 nt, Homo Sapiens
uccgggcccagcucuuccucccggcugcgucu

SEQ ID NO: 360287 - RNA, 32 nt, Homo Sapiens
auccagugggcaggccaaggccugcugggccc

SEQ ID NO: 360288 - RNA, 32 nt, Homo Sapiens
ccaggagaaugaauaagaagagaacaucucua

SEQ ID NO: 360289 - RNA, 32 nt, Homo Sapiens
gucuucuuucccuuuuaugauggauuuugaua

SEQ ID NO: 360290 - RNA, 32 nt, Homo Sapiens
guuaggauccauuuaaacucucuaggauaaug

SEQ ID NO: 360291 - RNA, 32 nt, Homo Sapiens
auauguucccccuguuucagaggcucagauug

SEQ ID NO: 360292 - RNA, 32 nt, Homo Sapiens
cagggccuggggaugcuggacgugggagaggg

SEQ ID NO: 360293 - RNA, 32 nt, Homo Sapiens
gaggaugugggaacugccagagggccggagcg

SEQ ID NO: 360294 - RNA, 32 nt, Homo Sapiens
aacagggagcagcccugugucgggggcuggaa

SEQ ID NO: 360295 - RNA, 32 nt, Homo Sapiens
gucgucgguuacagcgggaaugggcgggccaa

SEQ ID NO: 360296 - RNA, 32 nt, Homo Sapiens
gauuccuuuccuucuuuuuucuuuucuuaccc

SEQ ID NO: 360297 - RNA, 32 nt, Homo Sapiens
uaccagaaaaggauacauuuagugccucccac

SEQ ID NO: 360298 - RNA, 30 nt, Homo Sapiens
uguuacguuaugcccaucaagaguagcuug

SEQ ID NO: 360299 - RNA, 32 nt, Homo Sapiens
guagucuguagcuugagcaaucucccuugucc

SEQ ID NO: 360300 - RNA, 32 nt, Homo Sapiens
uuauacaaauauauuuaauuuaggaguauaug

SEQ ID NO: 360301 - RNA, 32 nt, Homo Sapiens
uauauucucacgggcaguagcuguggugaggu

SEQ ID NO: 360302 - RNA, 32 nt, Homo Sapiens
caugcacaccucacaccaguuccuccugcuga

SEQ ID NO: 360303 - RNA, 32 nt, Homo Sapiens
aguuugugaauucuaguacagcagccaugcag

SEQ ID NO: 360304 - RNA, 32 nt, Homo Sapiens
uccuagguuucaucauuuuuggcuccuuagca

SEQ ID NO: 360305 - RNA, 32 nt, Homo Sapiens
uugcuuugauuucccugggagcuguucucugu

SEQ ID NO: 360306 - RNA, 32 nt, Homo Sapiens
agaggcuaaaauugagugcagauggggcuagu

SEQ ID NO: 360307 - RNA, 32 nt, Homo Sapiens
uacaagucagauuuuucuuaaacuagcaggca

SEQ ID NO: 360308 - RNA, 32 nt, Homo Sapiens
guggcagugccuuuagggcauucucaacccuu

SEQ ID NO: 360309 - RNA, 32 nt, Homo Sapiens
aauggagguuccuaagacacucacacaauucu

SEQ ID NO: 360310 - RNA, 32 nt, Homo Sapiens
ugguuggaagcauauguggggaggcuggcugg

SEQ ID NO: 360311 - RNA, 32 nt, Homo Sapiens
guccucagauaaaaugccaccaaaaagucuga

SEQ ID NO: 360312 - RNA, 32 nt, Homo Sapiens
aagaauguucacuuacugauuacuacaaucaa

SEQ ID NO: 360313 - RNA, 32 nt, Homo Sapiens
uaaaugaucaccagcccucgccugcucucuua

SEQ ID NO: 360314 - RNA, 32 nt, Homo Sapiens
ugcgcugugacauuuucacagcccuucuugca

SEQ ID NO: 360315 - RNA, 32 nt, Homo Sapiens
caaugaugaugauaaugaugaugacgacgaca

SEQ ID NO: 360316 - RNA, 32 nt, Homo Sapiens
gcaaggauaaguuauagagcaguuggaggaag

SEQ ID NO: 360317 - RNA, 32 nt, Homo Sapiens
guacuuacaucauguggauaacucaagaauua

SEQ ID NO: 360318 - RNA, 32 nt, Homo Sapiens
uaagaaggaaaagaagaagagaugacaaacca

SEQ ID NO: 360319 - RNA, 32 nt, Homo Sapiens
gcugcagaggaggucacgcguccccaaggccu

SEQ ID NO: 360320 - RNA, 32 nt, Homo Sapiens
uaagaagguacacagcacaucugcagucauuc

SEQ ID NO: 360321 - RNA, 32 nt, Homo Sapiens
uccagguugcuguauguauacuucaauuauua

SEQ ID NO: 360322 - RNA, 32 nt, Homo Sapiens
gacgggcgaagccgccugcugccgcccaggaa

SEQ ID NO: 360323 - RNA, 32 nt, Homo Sapiens
accgcgccuggccaggauuucuauuuuuaaua

SEQ ID NO: 360324 - RNA, 32 nt, Homo Sapiens
gugggcuuuuuugcccuucucuuaguugagca

SEQ ID NO: 360325 - RNA, 32 nt, Homo Sapiens
gggacucugauccuuuggagagugcgccucuc

SEQ ID NO: 360326 - RNA, 32 nt, Homo Sapiens
acaacaagaugauucacucuggcugcacuucu

SEQ ID NO: 360327 - RNA, 32 nt, Homo Sapiens
ucucuuuuuuacaguacauguauuuaaaucau

SEQ ID NO: 360328 - RNA, 32 nt, Homo Sapiens
cguccgccgagcagcuggcccggcugggcccg

SEQ ID NO: 360329 - RNA, 32 nt, Homo Sapiens
cuguuugagaccagcugcucggccuccacaug

SEQ ID NO: 360330 - RNA, 32 nt, Homo Sapiens
uacaugcucugucuugggccuaucauuaacau

SEQ ID NO: 360331 - RNA, 32 nt, Homo Sapiens
aagguguuugguuuuucuuuuaauuuuuauug

SEQ ID NO: 360332 - RNA, 32 nt, Homo Sapiens
uuggggucccugucgcccacccccggcaaucc

SEQ ID NO: 360333 - RNA, 32 nt, Homo Sapiens
auaaaauaaaauggcuguauaagaauacuuuu

SEQ ID NO: 360334 - RNA, 32 nt, Homo Sapiens
aguuggagauaauuagucaaagggcacaugga

SEQ ID NO: 360335 - RNA, 32 nt, Homo Sapiens
cuuuuuauaaaauaaaacuaaugugagguugg

SEQ ID NO: 360336 - RNA, 32 nt, Homo Sapiens
cugcaggccauggaccccggcgggcaccgaag

SEQ ID NO: 360337 - RNA, 32 nt, Homo Sapiens
ccggagccucccuggaguggagcagcccugaa

SEQ ID NO: 360338 - RNA, 32 nt, Homo Sapiens
gcggcggcgccggggcgaugcugugggucucg

SEQ ID NO: 360339 - RNA, 32 nt, Homo Sapiens
agccagaagcaucuccucugagagcccuugcc

SEQ ID NO: 360340 - RNA, 32 nt, Homo Sapiens
cucuuauuuuuuauuuaauuuaauuacauaaa

SEQ ID NO: 360341 - RNA, 30 nt, Homo Sapiens
uggggccgcgcgcagcagcggcgacgacuu

SEQ ID NO: 360342 - RNA, 32 nt, Homo Sapiens
cgugcacuuaggaugcagagcuuaccgcacac

SEQ ID NO: 360343 - RNA, 32 nt, Homo Sapiens
cugcucgcgccugccgcccgccggccucagga

SEQ ID NO: 360344 - RNA, 32 nt, Homo Sapiens
uuggaugaguggcuuaacuucucugggccuuu

SEQ ID NO: 360345 - RNA, 32 nt, Homo Sapiens
uugaagaugacaguuuucuguaacuacagcuu

SEQ ID NO: 360346 - RNA, 32 nt, Homo Sapiens
ucaccccugcaccuuccuccgaccuguguagg

SEQ ID NO: 360347 - RNA, 32 nt, Homo Sapiens
ccguccacuucagccgcagcgucccucgccgg

SEQ ID NO: 360348 - RNA, 32 nt, Homo Sapiens
ggugagcggagagacagaacuguccccgcccc

SEQ ID NO: 360349 - RNA, 32 nt, Homo Sapiens
acauaucaagaagucagagaaaacacuuuccu

SEQ ID NO: 360350 - RNA, 32 nt, Homo Sapiens
ggagcugcggcuguugccgccgggcugcgcag

SEQ ID NO: 360351 - RNA, 32 nt, Homo Sapiens
ggugcuuuuucugcagggacgaagugccaccu

SEQ ID NO: 360352 - RNA, 32 nt, Homo Sapiens
ucacaccagggagaaaucauguauguacugca

SEQ ID NO: 360353 - RNA, 32 nt, Homo Sapiens
ggguuggauauauguuauuaucacuauuaagu

SEQ ID NO: 360354 - RNA, 32 nt, Homo Sapiens
accaaggauauuuuuuaggauaagguagcugc

SEQ ID NO: 360355 - RNA, 32 nt, Homo Sapiens
gaagucuucuauuuauuuauuuauucauuagu

SEQ ID NO: 360356 - RNA, 32 nt, Homo Sapiens
agcuggccaagagcuuuuaauuuuauugauac

SEQ ID NO: 360357 - RNA, 31 nt, Homo Sapiens
ugaucauaauaaaaacaugcauauaaucaau

SEQ ID NO: 360358 - RNA, 32 nt, Homo Sapiens
gacagcaugaggaaacaaaucauuggugauuu

SEQ ID NO: 360359 - RNA, 32 nt, Homo Sapiens
uauaguuuuauguuuguuuucuuagaaacaaa

SEQ ID NO: 360360 - RNA, 32 nt, Homo Sapiens
cuagagaaaaagaaugagaaaaauucuaccuu

SEQ ID NO: 360361 - RNA, 32 nt, Homo Sapiens
cagaacuugcagcagagaugagcuuuuccaug

SEQ ID NO: 360362 - RNA, 32 nt, Homo Sapiens
acucccucuccucuccucucugguagguuuaa

SEQ ID NO: 360363 - RNA, 32 nt, Homo Sapiens
guccauccggcgaugcugggucuggacgagcu

SEQ ID NO: 360364 - RNA, 32 nt, Homo Sapiens
uagacauuuuauaaacagaaaucuuggaccaa

SEQ ID NO: 360365 - RNA, 26 nt, Homo Sapiens
gaugugccgggcggggggcccggguu

SEQ ID NO: 360366 - RNA, 32 nt, Homo Sapiens
uauuuuuguaaaaauggaaugcugaaauaagu

SEQ ID NO: 360367 - RNA, 32 nt, Homo Sapiens
ugauaccuagcagagacagucugcccuugcag

SEQ ID NO: 360368 - RNA, 32 nt, Homo Sapiens
guucauuuaaccuggugacuggcucuuaucac

SEQ ID NO: 360369 - RNA, 32 nt, Homo Sapiens
cggggcaggggcgggggccaguguggugacac

SEQ ID NO: 360370 - RNA, 32 nt, Homo Sapiens
uucccuucccaauccuacaaaggagccuuccu

SEQ ID NO: 360371 - RNA, 32 nt, Homo Sapiens
aaaauacuacuucuuuagcuugggcuacaugu

SEQ ID NO: 360372 - RNA, 32 nt, Homo Sapiens
agauuccagugggacauggugccguuuuucug

SEQ ID NO: 360373 - RNA, 32 nt, Homo Sapiens
uuaguguugggaacugugcuauguuugugagc

SEQ ID NO: 360374 - RNA, 32 nt, Homo Sapiens
cacaucuguagccccagccauccuugugccuu

SEQ ID NO: 360375 - RNA, 32 nt, Homo Sapiens
auuauugagucuuuucauacacuucuuaaaau

SEQ ID NO: 360376 - RNA, 32 nt, Homo Sapiens
gaaaggccugugggcacgcgccgcccgcagcc

SEQ ID NO: 360377 - RNA, 32 nt, Homo Sapiens
aauauugagucuuuuuucuuucuuaccuucuc

SEQ ID NO: 360378 - RNA, 32 nt, Homo Sapiens
gccucccugccagcccagauggucacaagggc

SEQ ID NO: 360379 - RNA, 32 nt, Homo Sapiens
auuugacauuggcaucaaggaugaacaggaau

SEQ ID NO: 360380 - RNA, 32 nt, Homo Sapiens
gagugaauuguaccuauuucugaugaugucgg

SEQ ID NO: 360381 - RNA, 32 nt, Homo Sapiens
uccucccgccccagccuccugaguagcuggga

SEQ ID NO: 360382 - RNA, 32 nt, Homo Sapiens
gaacaguggacgcagagggaagagaugaucau

SEQ ID NO: 360383 - RNA, 32 nt, Homo Sapiens
acuuacaaccaccuauuucaagcuuauaacaa

SEQ ID NO: 360384 - RNA, 29 nt, Homo Sapiens
agcgguccggggaagcugccgucuaaccu

SEQ ID NO: 360385 - RNA, 32 nt, Homo Sapiens
aaaauuagcugggcgugguggagcaugccugu

SEQ ID NO: 360386 - RNA, 32 nt, Homo Sapiens
guaaacgcguuuguuccaacccggggccgcgg

SEQ ID NO: 360387 - RNA, 32 nt, Homo Sapiens
acaucaccaagggccuggcaccaggugcccag

SEQ ID NO: 360388 - RNA, 32 nt, Homo Sapiens
ugggaguuccccagccacacaaggcccagguu

SEQ ID NO: 360389 - RNA, 28 nt, Homo Sapiens
caguaggggcggccgggcagaggagccc

SEQ ID NO: 360390 - RNA, 32 nt, Homo Sapiens
gaaaaggagauggucucgaugucauggauuua

SEQ ID NO: 360391 - RNA, 32 nt, Homo Sapiens
augguaauuacauauccuuauauuuacuuuaa

SEQ ID NO: 360392 - RNA, 32 nt, Homo Sapiens
gugauccgcgcgccucagccucccaaagugcu

SEQ ID NO: 360393 - RNA, 32 nt, Homo Sapiens
cgagaaugacuucguccaccggauccaggagg

SEQ ID NO: 360394 - RNA, 32 nt, Homo Sapiens
agauacagcuauuuaauauuucugggagaugu

SEQ ID NO: 360395 - RNA, 32 nt, Homo Sapiens
ugaacagaauagacaaggccccugcccuuuua

SEQ ID NO: 360396 - RNA, 32 nt, Homo Sapiens
aaccgcagcgucggcgcccgcggccccggcag

SEQ ID NO: 360397 - RNA, 32 nt, Homo Sapiens
ucagccgugcugugccucuccuaccugccuga

SEQ ID NO: 360398 - RNA, 32 nt, Homo Sapiens
auuuucagucguugugcuuuuuuguuuugugc

SEQ ID NO: 360399 - RNA, 32 nt, Homo Sapiens
uuauagucauaauuauuuuauuguaaagauuu

SEQ ID NO: 360400 - RNA, 32 nt, Homo Sapiens
caucugcucuucugcuacuucaacauuuucua

SEQ ID NO: 360401 - RNA, 32 nt, Homo Sapiens
agccaagauugugccacuguauuccagacugg

SEQ ID NO: 360402 - RNA, 32 nt, Homo Sapiens
gaagaggauccggagcagcugcugccagcccg

SEQ ID NO: 360403 - RNA, 32 nt, Homo Sapiens
agaaagugguauauaugucuuuguauacauua

SEQ ID NO: 360404 - RNA, 32 nt, Homo Sapiens
auaguuaauauuagaacuuauguugcuguuuu

SEQ ID NO: 360405 - RNA, 32 nt, Homo Sapiens
gguguuugagggcauauguuugaaagagggag

SEQ ID NO: 360406 - RNA, 32 nt, Homo Sapiens
auucacuacagccuggaugacaagcaagaccc

SEQ ID NO: 360407 - RNA, 32 nt, Homo Sapiens
auggaaucaaaauaauguuauagugagaauca

SEQ ID NO: 360408 - RNA, 32 nt, Homo Sapiens
gcccaggcguucgagacuggcaugggaaacau

SEQ ID NO: 360409 - RNA, 32 nt, Homo Sapiens
gugagcgcuggugggagacgccaggcugggau

SEQ ID NO: 360410 - RNA, 32 nt, Homo Sapiens
auugccuaguauguuaauuugcucaaaauaca

SEQ ID NO: 360411 - RNA, 32 nt, Homo Sapiens
ccucuuggucccugucuacuaagagucaugaa

SEQ ID NO: 360412 - RNA, 32 nt, Homo Sapiens
uuuuauaaaagccuuuucauggcauuacauag

SEQ ID NO: 360413 - RNA, 32 nt, Homo Sapiens
gcuggucccgggugaugcuaggcggcucccug

SEQ ID NO: 360414 - RNA, 32 nt, Homo Sapiens
cuccagggcuccuggggccacugcugaccugg

SEQ ID NO: 360415 - RNA, 32 nt, Homo Sapiens
aggaugaaaugcuaauaaaagauaaaaccuuu

SEQ ID NO: 360416 - RNA, 32 nt, Homo Sapiens
gccuccgguugccuuacaccacgccuucaccu

SEQ ID NO: 360417 - RNA, 32 nt, Homo Sapiens
ucuucuaaaaauacaaaaauuacccaggcgug

SEQ ID NO: 360418 - RNA, 32 nt, Homo Sapiens
gaggcggccgcggcgcgggcugcaggacugac

SEQ ID NO: 360419 - RNA, 32 nt, Homo Sapiens
cccugcuauuuucuccuugugugacuuuggag

SEQ ID NO: 360420 - RNA, 32 nt, Homo Sapiens
ccaaggcuuugccugcagaccggccacucugu

SEQ ID NO: 360421 - RNA, 32 nt, Homo Sapiens
caucaaucaaaacaaugaaaucaaugaaacaa

SEQ ID NO: 360422 - RNA, 32 nt, Homo Sapiens
acccgccccgguuccgggacgcucccugggag

SEQ ID NO: 360423 - RNA, 32 nt, Homo Sapiens
acauucagaacaaggauauuauuuucagugau

SEQ ID NO: 360424 - RNA, 32 nt, Homo Sapiens
cagccuuauuucugccggggccuccccaccgg

SEQ ID NO: 360425 - RNA, 32 nt, Homo Sapiens
ggugaaaguccuccccuugccggaggccagcu

SEQ ID NO: 360426 - RNA, 32 nt, Homo Sapiens
ccaggaccaacucugacagcugcgagagagag

SEQ ID NO: 360427 - RNA, 32 nt, Homo Sapiens
ccuguccucggaucacagucucuucucacuac

SEQ ID NO: 360428 - RNA, 32 nt, Homo Sapiens
augaguuuuuaaaaucagguggacuuagguga

SEQ ID NO: 360429 - RNA, 32 nt, Homo Sapiens
guacagcaccgacgagguguacaagggcuacu

SEQ ID NO: 360430 - RNA, 32 nt, Homo Sapiens
uccagaacuaaauccuuauguaugaaauuacc

SEQ ID NO: 360431 - RNA, 32 nt, Homo Sapiens
uauuaucucuuaaauuuuugccagugugugaa

SEQ ID NO: 360432 - RNA, 30 nt, Homo Sapiens
uuucuauuaaauauggugaaaacacuaaaa

SEQ ID NO: 360433 - RNA, 32 nt, Homo Sapiens
agcacugccggcgggggcgggugccagggacu

SEQ ID NO: 360434 - RNA, 32 nt, Homo Sapiens
uaaguuuguaaauuuaauuuuaaugcuguuuu

SEQ ID NO: 360435 - RNA, 32 nt, Homo Sapiens
ccgcgagcagcuccgcgccggcccugagagac

SEQ ID NO: 360436 - RNA, 32 nt, Homo Sapiens
gacgaggccuuugcuuuacagcacuguaugug

SEQ ID NO: 360437 - RNA, 32 nt, Homo Sapiens
cagaaaacccaccaugggaaaauaagcauuuu

SEQ ID NO: 360438 - RNA, 32 nt, Homo Sapiens
uugaugcuccugcggaaaucuacauuaacgau

SEQ ID NO: 360439 - RNA, 32 nt, Homo Sapiens
ccugaggcagagcuauccaggggaccugcaga

SEQ ID NO: 360440 - RNA, 32 nt, Homo Sapiens
ugcucaguccgcgcggcggcugcgaguaggaa

SEQ ID NO: 360441 - RNA, 32 nt, Homo Sapiens
uuaauguuucuuggggaauauguuagagaauu

SEQ ID NO: 360442 - RNA, 32 nt, Homo Sapiens
uccccuuagcgcuugaccgugccucccagcug

SEQ ID NO: 360443 - RNA, 32 nt, Homo Sapiens
acaaaaaagcaaacagagaaaaauaaaugaac

SEQ ID NO: 360444 - RNA, 32 nt, Homo Sapiens
auuuucuguuuucuauacuugaaucuuuaaaa

SEQ ID NO: 360445 - RNA, 32 nt, Homo Sapiens
cucgcgccaggcgagucuccgcgucucccucg

SEQ ID NO: 360446 - RNA, 32 nt, Homo Sapiens
auuuucuuaaaugaaguuguaacuucgguaua

SEQ ID NO: 360447 - RNA, 32 nt, Homo Sapiens
agggagcauuccaggagagaaaguaaaagaag

SEQ ID NO: 360448 - RNA, 32 nt, Homo Sapiens
ccaccccaagcucugcucuccuccucugugag

SEQ ID NO: 360449 - RNA, 32 nt, Homo Sapiens
guauugugggcagagaucuuuaguucaaaucc

SEQ ID NO: 360450 - RNA, 32 nt, Homo Sapiens
acucuggcauuuguugaggagaugaggaagaa

SEQ ID NO: 360451 - RNA, 32 nt, Homo Sapiens
gaggaggccgaagacgaggccuaugacagagc

SEQ ID NO: 360452 - RNA, 32 nt, Homo Sapiens
aacauuagcucuuuacucuuucucaaccccuu

SEQ ID NO: 360453 - RNA, 29 nt, Homo Sapiens
auuccaacuagaguauauuuuuuguuuau

SEQ ID NO: 360454 - RNA, 32 nt, Homo Sapiens
gccccucaccucccggacguggcggccggccg

SEQ ID NO: 360455 - RNA, 32 nt, Homo Sapiens
uugacuugauucagagagacaauucacuccau

SEQ ID NO: 360456 - RNA, 32 nt, Homo Sapiens
aauaauaauaauacagauguuguuauauaagg

SEQ ID NO: 360457 - RNA, 32 nt, Homo Sapiens
uuggggcuccugaaacaccucguuuugaaggu

SEQ ID NO: 360458 - RNA, 32 nt, Homo Sapiens
uauuuuucugaacauuuucaugaauccagggg

SEQ ID NO: 360459 - RNA, 30 nt, Homo Sapiens
cuugaggaagguggcauuccgugcuugccu

SEQ ID NO: 360460 - RNA, 32 nt, Homo Sapiens
caggaucaugccuucugugucuggaagaggcg

SEQ ID NO: 360461 - RNA, 32 nt, Homo Sapiens
aucccgucugugggagacccaggugcuuucuc

SEQ ID NO: 360462 - RNA, 32 nt, Homo Sapiens
caugguggacauuuggcagccugaccuguggg

SEQ ID NO: 360463 - RNA, 32 nt, Homo Sapiens
uccuugccagaagcugcagagaaggguggagg

SEQ ID NO: 360464 - RNA, 32 nt, Homo Sapiens
gguaaucaaucugcaucccauuuuggaugaga

SEQ ID NO: 360465 - RNA, 32 nt, Homo Sapiens
cauggaggccgaugaagacaagaaggaggagg

SEQ ID NO: 360466 - RNA, 32 nt, Homo Sapiens
gagccccuccucugcagggaaugcuuccagca

SEQ ID NO: 360467 - RNA, 32 nt, Homo Sapiens
gcugccaugcugcagagcugauggagugaugu

SEQ ID NO: 360468 - RNA, 32 nt, Homo Sapiens
gcuaagugcaugcacaaagaugguggccugag

SEQ ID NO: 360469 - RNA, 32 nt, Homo Sapiens
acagcgcggcaggacgcgcccgggucucagcg

SEQ ID NO: 360470 - RNA, 32 nt, Homo Sapiens
caaugaaaaguaacaaagugauggcuuggaac

SEQ ID NO: 360471 - RNA, 32 nt, Homo Sapiens
gugggguccuggagccugucucuucuuucugg

SEQ ID NO: 360472 - RNA, 32 nt, Homo Sapiens
aggcaagaugaccuugcugccuggggccugcu

SEQ ID NO: 360473 - RNA, 32 nt, Homo Sapiens
cuacuucuaacagcuuacaauuagauaccgca

SEQ ID NO: 360474 - RNA, 32 nt, Homo Sapiens
uggucuccccucaaaaaaugcuuagacuuaau

SEQ ID NO: 360475 - RNA, 32 nt, Homo Sapiens
ggauggaguuuugcuugucacccaggcuggag

SEQ ID NO: 360476 - RNA, 32 nt, Homo Sapiens
gaacgcgagucccaggauccccggcacccagu

SEQ ID NO: 360477 - RNA, 32 nt, Homo Sapiens
ccugaaagcugggaugacaggcacaugccacc

SEQ ID NO: 360478 - RNA, 32 nt, Homo Sapiens
ucaagugauccuccugccccagccuccugaag

SEQ ID NO: 360479 - RNA, 32 nt, Homo Sapiens
uggaagccgcggcugccagggaguggggcggc

SEQ ID NO: 360480 - RNA, 32 nt, Homo Sapiens
accuguaggaccuccucccacccacgcugccc

SEQ ID NO: 360481 - RNA, 32 nt, Homo Sapiens
ccccuuaggccuuguuauuuauccugcauggu

SEQ ID NO: 360482 - RNA, 32 nt, Homo Sapiens
cgguggcggcggcggcagcuucgcgccgaauc

SEQ ID NO: 360483 - RNA, 32 nt, Homo Sapiens
uucgggcuuugcugaggcccagcuggugcuga

SEQ ID NO: 360484 - RNA, 32 nt, Homo Sapiens
cauuauuuucccacaauucuuuugaaagaugg

SEQ ID NO: 360485 - RNA, 32 nt, Homo Sapiens
ggagagaagggucuuuccaccugcgcggcugc

SEQ ID NO: 360486 - RNA, 32 nt, Homo Sapiens
cuggagcugcgcgcuaacgggcugcugccaac

SEQ ID NO: 360487 - RNA, 32 nt, Homo Sapiens
cuuaggaauuuaaugguuauauguugucuuuu

SEQ ID NO: 360488 - RNA, 32 nt, Homo Sapiens
gcaggggcgugcuggggugguuugggagugca

SEQ ID NO: 360489 - RNA, 32 nt, Homo Sapiens
ggccccucugcuggcguccccggagcccagug

SEQ ID NO: 360490 - RNA, 32 nt, Homo Sapiens
aaaugaaguuguuuauggauaagagagugaga

SEQ ID NO: 360491 - RNA, 32 nt, Homo Sapiens
gggauguuagacagcggcuucuguuggcuccu

SEQ ID NO: 360492 - RNA, 30 nt, Homo Sapiens
ggcaagaagcaggauccugagucugggcaa

SEQ ID NO: 360493 - RNA, 32 nt, Homo Sapiens
uuuggugauaaggaucacacuuauuagauuuc

SEQ ID NO: 360494 - RNA, 32 nt, Homo Sapiens
cggcagucucuggggcgcauggagcggcguua

SEQ ID NO: 360495 - RNA, 32 nt, Homo Sapiens
ggccuaucuuggagagcuggggaccagcaguc

SEQ ID NO: 360496 - RNA, 32 nt, Homo Sapiens
ggcaaucucagcugugccggcgcuacgggacc

SEQ ID NO: 360497 - RNA, 32 nt, Homo Sapiens
agagaaggcagacaacauguuuccgugacuca

SEQ ID NO: 360498 - RNA, 32 nt, Homo Sapiens
uggcgccgcgucugccccgcgugcucggagcg

SEQ ID NO: 360499 - RNA, 32 nt, Homo Sapiens
caaguguguuuguuccagaguguggaaguaua

SEQ ID NO: 360500 - RNA, 32 nt, Homo Sapiens
ggcccggggggaccaggaugacaccuccauuu

SEQ ID NO: 360501 - RNA, 32 nt, Homo Sapiens
cuguagggaagucaucauuguauuuugcaacg

SEQ ID NO: 360502 - RNA, 28 nt, Homo Sapiens
aucaugucucacugggccccagccaccc

SEQ ID NO: 360503 - RNA, 32 nt, Homo Sapiens
ucugccuuuuuggaguuuauauucuggugggu

SEQ ID NO: 360504 - RNA, 32 nt, Homo Sapiens
cagacauacauuuaauaacauagggugacuug

SEQ ID NO: 360505 - RNA, 32 nt, Homo Sapiens
auacaacaguagauuuuuuuuaauuuuuauuu

SEQ ID NO: 360506 - RNA, 32 nt, Homo Sapiens
cccaugugucaaaaaucuuacuucuacauuuu

SEQ ID NO: 360507 - RNA, 32 nt, Homo Sapiens
gauacccaccgggucugacauuccaaguaacc

SEQ ID NO: 360508 - RNA, 32 nt, Homo Sapiens
cugcuuuguuacaagcucccaggggagguggg

SEQ ID NO: 360509 - RNA, 32 nt, Homo Sapiens
agccuccggcgccagagcugggcucuucaaca

SEQ ID NO: 360510 - RNA, 32 nt, Homo Sapiens
cguggggcagcuguagcagcguuggcggcagg

SEQ ID NO: 360511 - RNA, 32 nt, Homo Sapiens
auaugaaggugcuugagaaaagagaugauguu

SEQ ID NO: 360512 - RNA, 32 nt, Homo Sapiens
gcccggcgcccgggacaguccugggcacagcc

SEQ ID NO: 360513 - RNA, 32 nt, Homo Sapiens
ugagaugcuugaagaggaugaugggcaaauau

SEQ ID NO: 360514 - RNA, 32 nt, Homo Sapiens
agaccagcgugggcaauauagcaagacuccac

SEQ ID NO: 360515 - RNA, 32 nt, Homo Sapiens
ggguuccgucuucucacugcggacccuggauu

SEQ ID NO: 360516 - RNA, 32 nt, Homo Sapiens
uuugucaauuuucuuucuuuuuaaauaaaugc

SEQ ID NO: 360517 - RNA, 32 nt, Homo Sapiens
gccgcggccuccuccacacacacacacaccag

SEQ ID NO: 360518 - RNA, 32 nt, Homo Sapiens
cgugaucgcggcggccccgggcucugggugcg

SEQ ID NO: 360519 - RNA, 32 nt, Homo Sapiens
uacagaugaugaugaugaugaugaagaugaug

SEQ ID NO: 360520 - RNA, 32 nt, Homo Sapiens
cccauugccugcugcgcacccggacgugcggc

SEQ ID NO: 360521 - RNA, 32 nt, Homo Sapiens
ugccuucugcggcggcagaagugaagugccug

SEQ ID NO: 360522 - RNA, 32 nt, Homo Sapiens
caaaugcccguaagaauuccuacuucaaaccu

SEQ ID NO: 360523 - RNA, 32 nt, Homo Sapiens
cagcuucccagcugcccuggcuuagccuuccc

SEQ ID NO: 360524 - RNA, 32 nt, Homo Sapiens
uggugacuggaagaggcaccagagacucucac

SEQ ID NO: 360525 - RNA, 32 nt, Homo Sapiens
uguuagugauagauuuuucuauucuuuucccu

SEQ ID NO: 360526 - RNA, 32 nt, Homo Sapiens
gcauagcuauuuuuaucacucuaaucaguaag

SEQ ID NO: 360527 - RNA, 32 nt, Homo Sapiens
uccucucgccuggccgccagccccagccccag

SEQ ID NO: 360528 - RNA, 32 nt, Homo Sapiens
guauucagcaucguuucuaaaaacaguugacc

SEQ ID NO: 360529 - RNA, 32 nt, Homo Sapiens
uacaagaugacgacaguccaagggcagccuug

SEQ ID NO: 360530 - RNA, 32 nt, Homo Sapiens
ccgcugucgccgcgacucgagccccgggcgca

SEQ ID NO: 360531 - RNA, 32 nt, Homo Sapiens
gcagcucgucgacacgucucgucuccuguccc

SEQ ID NO: 360532 - RNA, 32 nt, Homo Sapiens
cuaagggauugaaaaaugaauguugagugauu

SEQ ID NO: 360533 - RNA, 32 nt, Homo Sapiens
ccaaaguuuaaaggcuugauuacucuauauua

SEQ ID NO: 360534 - RNA, 32 nt, Homo Sapiens
cccuguuuccaaugccaauucaucucagcaau

SEQ ID NO: 360535 - RNA, 32 nt, Homo Sapiens
uuggaaacuguaaaaugauacuguagaaccug

SEQ ID NO: 360536 - RNA, 32 nt, Homo Sapiens
gcuuacagccuggacgccucagucgccucacu

SEQ ID NO: 360537 - RNA, 32 nt, Homo Sapiens
acuugguaugaaaaaauuugaugggauucaaa

SEQ ID NO: 360538 - RNA, 32 nt, Homo Sapiens
ccucucacccucgggagaagacucuuagagaa

SEQ ID NO: 360539 - RNA, 32 nt, Homo Sapiens
ccaaccccauccccaccuccacuucagaacau

SEQ ID NO: 360540 - RNA, 32 nt, Homo Sapiens
acauuucaauguuugccaguacucauguacga

SEQ ID NO: 360541 - RNA, 32 nt, Homo Sapiens
cagggucucugcuuuaccacggagcaggguca

SEQ ID NO: 360542 - RNA, 32 nt, Homo Sapiens
aggcuaauauuuuuauauauuuuugacuuuuu

SEQ ID NO: 360543 - RNA, 32 nt, Homo Sapiens
uccaaggcuuugcauuggcuguaccugaaacu

SEQ ID NO: 360544 - RNA, 32 nt, Homo Sapiens
cuuucguguagagcaauuuaauuggagaagug

SEQ ID NO: 360545 - RNA, 32 nt, Homo Sapiens
agccuaagccauuugucuuuuucucaguggag

SEQ ID NO: 360546 - RNA, 32 nt, Homo Sapiens
cucaggaguauucuucuacaccagcugcuguu

SEQ ID NO: 360547 - RNA, 32 nt, Homo Sapiens
gugccaaugaauuauuggaauaucacacuuua

SEQ ID NO: 360548 - RNA, 32 nt, Homo Sapiens
caccacugcauuccagccugggugacagagca

SEQ ID NO: 360549 - RNA, 32 nt, Homo Sapiens
aaaucaaaauccaaaauuuguuugucacugcc

SEQ ID NO: 360550 - RNA, 32 nt, Homo Sapiens
uguuuuaaauuaaauucggguaauauuaaaca

SEQ ID NO: 360551 - RNA, 32 nt, Homo Sapiens
ggaccaguucuuguugcuguuguacaaguuau

SEQ ID NO: 360552 - RNA, 32 nt, Homo Sapiens
gagaugcucagggcuccuggggggagcaggcu

SEQ ID NO: 360553 - RNA, 32 nt, Homo Sapiens
gacuaaaguuaaucgcagaugaacuagaaguc

SEQ ID NO: 360554 - RNA, 30 nt, Homo Sapiens
uuguccaaugggaggaccuaagugggagag

SEQ ID NO: 360555 - RNA, 32 nt, Homo Sapiens
acaggagagaggaaugaaaacacacccacgcc

SEQ ID NO: 360556 - RNA, 32 nt, Homo Sapiens
gaaaauacaacuucuucagggaagaaaaugaa

SEQ ID NO: 360557 - RNA, 32 nt, Homo Sapiens
cacccuuaauccacaauuuuaagaccuggagu

SEQ ID NO: 360558 - RNA, 32 nt, Homo Sapiens
cauauauuauauucuuaauucuguaaaaguga

SEQ ID NO: 360559 - RNA, 32 nt, Homo Sapiens
aaggugaugugguuuuaaucuuucauucuguu

SEQ ID NO: 360560 - RNA, 32 nt, Homo Sapiens
caacccuagugucaccucaaauccaugucccc

SEQ ID NO: 360561 - RNA, 32 nt, Homo Sapiens
ucaaguaaaaauuuguuuuucagagauuuacc

SEQ ID NO: 360562 - RNA, 32 nt, Homo Sapiens
guuccagagagaaaaaagcuaauuuuccuaag

SEQ ID NO: 360563 - RNA, 32 nt, Homo Sapiens
agucccuucuaaagcgacguggucugcgggca

SEQ ID NO: 360564 - RNA, 32 nt, Homo Sapiens
cucugcauuuuucuaauaauuaacaacgugaa

SEQ ID NO: 360565 - RNA, 32 nt, Homo Sapiens
ccgagcccgcggccucacgcgcgcccucuccc

SEQ ID NO: 360566 - RNA, 32 nt, Homo Sapiens
ucuucgcgcggccccgcaccccggcaagcagc

SEQ ID NO: 360567 - RNA, 30 nt, Homo Sapiens
cagggggacaggauugaugaggcuugaaag

SEQ ID NO: 360568 - RNA, 32 nt, Homo Sapiens
aauagcuaaaauguugcagagaaauaagugac

SEQ ID NO: 360569 - RNA, 32 nt, Homo Sapiens
uagauuuaauugguuauauaaucuucaccaua

SEQ ID NO: 360570 - RNA, 32 nt, Homo Sapiens
gcugcugggggaaauccugggguccuugagac

SEQ ID NO: 360571 - RNA, 32 nt, Homo Sapiens
ccgcgggcgaggggacgggacugggcccugaa

SEQ ID NO: 360572 - RNA, 32 nt, Homo Sapiens
ccguggacgccgaccguccgggacgaggguuu

SEQ ID NO: 360573 - RNA, 32 nt, Homo Sapiens
gagcauguagcggcugcuggcggcggggcucc

SEQ ID NO: 360574 - RNA, 32 nt, Homo Sapiens
uugaagaaggcacuauauaaauacaaaauaau

SEQ ID NO: 360575 - RNA, 32 nt, Homo Sapiens
cacaggggccucccauguuaagagggacugug

SEQ ID NO: 360576 - RNA, 32 nt, Homo Sapiens
gcuguccucucgucuagaaggcaccaccucgc

SEQ ID NO: 360577 - RNA, 32 nt, Homo Sapiens
aguaggaagcuacugcucuccuggcaaggauu

SEQ ID NO: 360578 - RNA, 32 nt, Homo Sapiens
cuagcgcaauugaaggaucaucugaaggggca

SEQ ID NO: 360579 - RNA, 32 nt, Homo Sapiens
uuuucuuuucuuuuaaaaaauuuguagaucua

SEQ ID NO: 360580 - RNA, 32 nt, Homo Sapiens
ucaagcgauccuccugccucagucuccugacu

SEQ ID NO: 360581 - RNA, 32 nt, Homo Sapiens
aacccugcaaauaacggaaacaucaggcauga

SEQ ID NO: 360582 - RNA, 32 nt, Homo Sapiens
aauuaucugacuuuuuuguuuuugugcacaua

SEQ ID NO: 360583 - RNA, 32 nt, Homo Sapiens
acccucugcugcccuccucugccacgcgggac

SEQ ID NO: 360584 - RNA, 32 nt, Homo Sapiens
ucaggcugcugggguagccgcccgccgagccu

SEQ ID NO: 360585 - RNA, 32 nt, Homo Sapiens
ugagccagggucacccuuguggggccuggaca

SEQ ID NO: 360586 - RNA, 32 nt, Homo Sapiens
uaacuaagaguugucuuaauucuaaugggauu

SEQ ID NO: 360587 - RNA, 32 nt, Homo Sapiens
gccccccagacccccaggaguggagcggccca

SEQ ID NO: 360588 - RNA, 32 nt, Homo Sapiens
acccccagccccaccccuggccuccccagguc

SEQ ID NO: 360589 - RNA, 32 nt, Homo Sapiens
accagaguagaaaacgugcuggaacaaaauug

SEQ ID NO: 360590 - RNA, 32 nt, Homo Sapiens
caugccaaacacuuuucacaccuaccgaccca

SEQ ID NO: 360591 - RNA, 32 nt, Homo Sapiens
caaccacagcaggagcagacucugccauggcc

SEQ ID NO: 360592 - RNA, 32 nt, Homo Sapiens
agugcgcccggagccggcgccgcgggccgagu

SEQ ID NO: 360593 - RNA, 31 nt, Homo Sapiens
ggacaacggcacugcccgcgccgggcccagg

SEQ ID NO: 360594 - RNA, 32 nt, Homo Sapiens
acaauggggggaggaugggacuuuguuuuuuc

SEQ ID NO: 360595 - RNA, 32 nt, Homo Sapiens
gcccgcgcgcagccgccgccgccgccgccgcg

SEQ ID NO: 360596 - RNA, 32 nt, Homo Sapiens
aaagauaggcaaaaaggauugaauccauacca

SEQ ID NO: 360597 - RNA, 32 nt, Homo Sapiens
ccugagugcuauuguauuuuggcuuggugugu

SEQ ID NO: 360598 - RNA, 32 nt, Homo Sapiens
gccuccccgcggccgcucgcagcuugcuggcc

SEQ ID NO: 360599 - RNA, 32 nt, Homo Sapiens
uucucccuuuggcuccucuccugcugccuuac

SEQ ID NO: 360600 - RNA, 32 nt, Homo Sapiens
acaauagaguuucaguacaugaacuauagaaa

SEQ ID NO: 360601 - RNA, 32 nt, Homo Sapiens
agccguggugguggagaugggguccaagccug

SEQ ID NO: 360602 - RNA, 32 nt, Homo Sapiens
auuauuuuugucacggaaagcauccucuccaa

SEQ ID NO: 360603 - RNA, 32 nt, Homo Sapiens
cacagggucauuacagagauuaaaugaaauaa

SEQ ID NO: 360604 - RNA, 32 nt, Homo Sapiens
acagggugcagggagcaguucuuguuuuaucu

SEQ ID NO: 360605 - RNA, 32 nt, Homo Sapiens
guggcaagugcacggggcacagcggagucugu

SEQ ID NO: 360606 - RNA, 32 nt, Homo Sapiens
uauuaucaugcaauguuuuuacugcuguucuc

SEQ ID NO: 360607 - RNA, 32 nt, Homo Sapiens
gcuuggagguuugaggcccaccuccgcccauu

SEQ ID NO: 360608 - RNA, 32 nt, Homo Sapiens
uggcaaaaucucucuuguuuuaguggguucug

SEQ ID NO: 360609 - RNA, 32 nt, Homo Sapiens
acacgcagugugaagaaagggggugucugcgg

SEQ ID NO: 360610 - RNA, 32 nt, Homo Sapiens
auccagccagcgcaggccccccggcccgguug

SEQ ID NO: 360611 - RNA, 32 nt, Homo Sapiens
uugccacucccacgguccuguguguuccggau

SEQ ID NO: 360612 - RNA, 32 nt, Homo Sapiens
ccaagcuuaacuuuuccaauguggaauccugg

SEQ ID NO: 360613 - RNA, 32 nt, Homo Sapiens
gggugcaggaagagggcgcugaggugggggug

SEQ ID NO: 360614 - RNA, 32 nt, Homo Sapiens
agaacagaacagagaaacccugacugucuaca

SEQ ID NO: 360615 - RNA, 32 nt, Homo Sapiens
ggaagaggagguggcggcuauuaaacuugguu

SEQ ID NO: 360616 - RNA, 30 nt, Homo Sapiens
ccuugagccgaggaguuugagucugcagug

SEQ ID NO: 360617 - RNA, 32 nt, Homo Sapiens
guucggaaugucaacuaugagauccccucacu

SEQ ID NO: 360618 - RNA, 32 nt, Homo Sapiens
cuucugcugcuacugcugcugcugcaagguug

SEQ ID NO: 360619 - RNA, 32 nt, Homo Sapiens
cuucuguggucacagaaguaaacauuguuggc

SEQ ID NO: 360620 - RNA, 32 nt, Homo Sapiens
gaauuagagaaagugaugugguaauggaagaa

SEQ ID NO: 360621 - RNA, 32 nt, Homo Sapiens
auuaacaauucuuuucccugugcuucuuaugu

SEQ ID NO: 360622 - RNA, 32 nt, Homo Sapiens
uggcagcccagcugcugaccuuguuaaguaaa

SEQ ID NO: 360623 - RNA, 32 nt, Homo Sapiens
cgagcuggcccgcagacacguggguuucauca

SEQ ID NO: 360624 - RNA, 32 nt, Homo Sapiens
cgggcugcggagaggcgggccgggccaagcgg

SEQ ID NO: 360625 - RNA, 32 nt, Homo Sapiens
ugggcaagugacucagccucuuggugugcgaa

SEQ ID NO: 360626 - RNA, 32 nt, Homo Sapiens
guggcccagggccagccccgccuccuccccgg

SEQ ID NO: 360627 - RNA, 32 nt, Homo Sapiens
gaaacucugaugcuauauauacaugguauaau

SEQ ID NO: 360628 - RNA, 32 nt, Homo Sapiens
acuuagguuggaccagcagagaagagaacaua

SEQ ID NO: 360629 - RNA, 32 nt, Homo Sapiens
aaagagaaguaaaaguuuaacuuuuuaacuaa

SEQ ID NO: 360630 - RNA, 32 nt, Homo Sapiens
cagaugauucuaugucucaugauugauuguug

SEQ ID NO: 360631 - RNA, 32 nt, Homo Sapiens
cugcugccggugccgguugugagcgggucucc

SEQ ID NO: 360632 - RNA, 32 nt, Homo Sapiens
cgugaggaggccgggugcggagccgccggugg

SEQ ID NO: 360633 - RNA, 32 nt, Homo Sapiens
acuacacgggugcagaaucacuuuacaaaaga

SEQ ID NO: 360634 - RNA, 32 nt, Homo Sapiens
cuuuuaguguguaucauuuuccuuuuagaaac

SEQ ID NO: 360635 - RNA, 32 nt, Homo Sapiens
ugcugcuuuguaaaaaauaacuguaauugaua

SEQ ID NO: 360636 - RNA, 32 nt, Homo Sapiens
agucaggcagcggcuuccugaugauggucauu

SEQ ID NO: 360637 - RNA, 32 nt, Homo Sapiens
uugaugagcugcugcgaguugacaucggcacu

SEQ ID NO: 360638 - RNA, 32 nt, Homo Sapiens
aauuagccgggcgugggggugggcgccuguag

SEQ ID NO: 360639 - RNA, 32 nt, Homo Sapiens
uuaccucccgccgcugccccccagccaaacgu

SEQ ID NO: 360640 - RNA, 32 nt, Homo Sapiens
guggccuugucuucuuuguuuuguuuuuuugu

SEQ ID NO: 360641 - RNA, 32 nt, Homo Sapiens
aguaaaacagaaaaagacaaaguugauggaaa

SEQ ID NO: 360642 - RNA, 32 nt, Homo Sapiens
guaccuuucuucacugcagauuucucaccugu

SEQ ID NO: 360643 - RNA, 32 nt, Homo Sapiens
gcgcagccgaggggcucuggagugccuuagag

SEQ ID NO: 360644 - RNA, 32 nt, Homo Sapiens
augaacuugugauuuuguguuuuacuugacca

SEQ ID NO: 360645 - RNA, 32 nt, Homo Sapiens
agacuuuuaaaauaaacuguuuucuuuuggaa

SEQ ID NO: 360646 - RNA, 32 nt, Homo Sapiens
guccccgcggcgggcgcuggucucuccacgcg

SEQ ID NO: 360647 - RNA, 32 nt, Homo Sapiens
uuuucuaacuuuguauggauaaucuuucuauu

SEQ ID NO: 360648 - RNA, 32 nt, Homo Sapiens
uaguguugccaccuggauuugcugcauugcuc

SEQ ID NO: 360649 - RNA, 32 nt, Homo Sapiens
gcuccaagacaguggauaucgaggcagucgug

SEQ ID NO: 360650 - RNA, 32 nt, Homo Sapiens
cuccagauccuccaggguagcagaugaugcac

SEQ ID NO: 360651 - RNA, 27 nt, Homo Sapiens
acauguggccccaggacaucgcuggca

SEQ ID NO: 360652 - RNA, 27 nt, Homo Sapiens
ucauggcagaacucaagguggaggcgc

SEQ ID NO: 360653 - RNA, 32 nt, Homo Sapiens
gagguuuugguuuucuuuuuuauuauuaaagg

SEQ ID NO: 360654 - RNA, 32 nt, Homo Sapiens
uaagaauaacugugccccucuaagagugcaca

SEQ ID NO: 360655 - RNA, 32 nt, Homo Sapiens
ccucuaccacaagucuuuuuugcaaucuugaa

SEQ ID NO: 360656 - RNA, 32 nt, Homo Sapiens
cugacacuuaggaaacucugaauuaggccauc

SEQ ID NO: 360657 - RNA, 32 nt, Homo Sapiens
gugccccacgggggcggggcucagauuccugu

SEQ ID NO: 360658 - RNA, 32 nt, Homo Sapiens
ggccacgcucagacacuucgaucgucgagucu

SEQ ID NO: 360659 - RNA, 32 nt, Homo Sapiens
agagggcucaacaccgggaucuauguuuaagu

SEQ ID NO: 360660 - RNA, 32 nt, Homo Sapiens
gcugugggaccgcugaccgcgcggcugcuccg

SEQ ID NO: 360661 - RNA, 32 nt, Homo Sapiens
ugaccagcauuuccuuuuuuuuuuuccuucag

SEQ ID NO: 360662 - RNA, 32 nt, Homo Sapiens
cuuaaagcagggcugggccggagggugugggu

SEQ ID NO: 360663 - RNA, 32 nt, Homo Sapiens
gucgcccguuugcgcucucgccgaggcacagg

SEQ ID NO: 360664 - RNA, 32 nt, Homo Sapiens
aguaaaagaacaaaaggagaaauuacaccuau

SEQ ID NO: 360665 - RNA, 32 nt, Homo Sapiens
cucccagcuugcccaccgcgggcugucugcuc

SEQ ID NO: 360666 - RNA, 32 nt, Homo Sapiens
uaaacacaaaauuuaucauaacaaaaauacua

SEQ ID NO: 360667 - RNA, 32 nt, Homo Sapiens
aggggagugacgcgucccuggaccuugggucu

SEQ ID NO: 360668 - RNA, 32 nt, Homo Sapiens
ggagccgcggcgacggcggcagcagcugcggu

SEQ ID NO: 360669 - RNA, 32 nt, Homo Sapiens
ccuuucauacuuccuugacuuuguuuucauua

SEQ ID NO: 360670 - RNA, 32 nt, Homo Sapiens
ucugcaauguuguugagugugaaucuuagcuu

SEQ ID NO: 360671 - RNA, 32 nt, Homo Sapiens
gggagguguggccuuuuccuggugcaguguga

SEQ ID NO: 360672 - RNA, 32 nt, Homo Sapiens
aaccgcugccagcucagcggacagcgccaacc

SEQ ID NO: 360673 - RNA, 32 nt, Homo Sapiens
ccaggggacaggucggggcaguauuuggggga

SEQ ID NO: 360674 - RNA, 32 nt, Homo Sapiens
cugcucuccgcaggcccacuguccuuggguuu

SEQ ID NO: 360675 - RNA, 31 nt, Homo Sapiens
gaaaaccucaauguuaccuuuuucugauaaa

SEQ ID NO: 360676 - RNA, 32 nt, Homo Sapiens
auuaaauaaaaauuaucuaguaaggaauuucu

SEQ ID NO: 360677 - RNA, 32 nt, Homo Sapiens
uugcaguuacuccaccuacggcauaaaacacc

SEQ ID NO: 360678 - RNA, 32 nt, Homo Sapiens
ggcuugcccucccaccagggccagcccaagau

SEQ ID NO: 360679 - RNA, 32 nt, Homo Sapiens
ccagcacuucgggaggccgagaugggcagagc

SEQ ID NO: 360680 - RNA, 32 nt, Homo Sapiens
uguggccuugggcuugcugcuucauuacucac

SEQ ID NO: 360681 - RNA, 32 nt, Homo Sapiens
cagcaguaaaacuuauaaauuuuuuaaauaau

SEQ ID NO: 360682 - RNA, 30 nt, Homo Sapiens
aaagcugcggcgccgccgccggaggccgcg

SEQ ID NO: 360683 - RNA, 32 nt, Homo Sapiens
gucaggauaaucaaaugaaaauacuaguucag

SEQ ID NO: 360684 - RNA, 32 nt, Homo Sapiens
aagagagggucucccuggggugggguugcugg

SEQ ID NO: 360685 - RNA, 32 nt, Homo Sapiens
acaaucucuaaagggguaagggagauaccuac

SEQ ID NO: 360686 - RNA, 32 nt, Homo Sapiens
aucuuugaaacaacagaagaaacaagugguac

SEQ ID NO: 360687 - RNA, 32 nt, Homo Sapiens
ccuuugcccucccugcccagcagccugauagg

SEQ ID NO: 360688 - RNA, 32 nt, Homo Sapiens
uaaccuuuacuuugauggaucuggccagaggg

SEQ ID NO: 360689 - RNA, 32 nt, Homo Sapiens
ccuagcaggaccagcuccgggcccgcucagcu

SEQ ID NO: 360690 - RNA, 32 nt, Homo Sapiens
cugaaauguuuccuuccucuacauauuccaug

SEQ ID NO: 360691 - RNA, 32 nt, Homo Sapiens
gccuccagcugaccugcccuguccucuccagc

SEQ ID NO: 360692 - RNA, 32 nt, Homo Sapiens
cuuggucuuugugcugaucuuaauuuucuacc

SEQ ID NO: 360693 - RNA, 32 nt, Homo Sapiens
cagccugccucccagggcaagagcuccagccu

SEQ ID NO: 360694 - RNA, 32 nt, Homo Sapiens
cccgcaccgcggcuacuggcuugcgguccgcc

SEQ ID NO: 360695 - RNA, 32 nt, Homo Sapiens
gcuuccuuuuuggcagaauauguuuggcagca

SEQ ID NO: 360696 - RNA, 32 nt, Homo Sapiens
ugggaggguggaggugaaggauggggccuaga

SEQ ID NO: 360697 - RNA, 32 nt, Homo Sapiens
augguggcaaagcccaggaucuggcuuugcca

SEQ ID NO: 360698 - RNA, 32 nt, Homo Sapiens
cagugugauaaggaagacauagcuuuuguccu

SEQ ID NO: 360699 - RNA, 32 nt, Homo Sapiens
ugcucuggccccaguccuggggcugucaccuu

SEQ ID NO: 360700 - RNA, 32 nt, Homo Sapiens
caccgccgcacucgggaagacccggcuucgag

SEQ ID NO: 360701 - RNA, 31 nt, Homo Sapiens
aaacacauacgcagccaugcauagaccaaca

SEQ ID NO: 360702 - RNA, 32 nt, Homo Sapiens
uuaaauaaagacaacuaaaaauaaaaaaaaaa

SEQ ID NO: 360703 - RNA, 32 nt, Homo Sapiens
guuacaugaacuggaaauagugaugagaugga

SEQ ID NO: 360704 - RNA, 32 nt, Homo Sapiens
gauuguuccuucccucccuuccucucccacca

SEQ ID NO: 360705 - RNA, 32 nt, Homo Sapiens
ucuauacacuucaagacuuuacaggauuuuuu

SEQ ID NO: 360706 - RNA, 32 nt, Homo Sapiens
agaacaagccccaggaagaaaguauuucaaac

SEQ ID NO: 360707 - RNA, 32 nt, Homo Sapiens
gcucuccuguacagggcacuuacuacgaaugg

SEQ ID NO: 360708 - RNA, 32 nt, Homo Sapiens
cugauugggacccauauaccacguugcugacu

SEQ ID NO: 360709 - RNA, 32 nt, Homo Sapiens
auuuucgcaccacagcacugcacggaaaguca

SEQ ID NO: 360710 - RNA, 32 nt, Homo Sapiens
ucucauuacuguagugcugagguuauugaagu

SEQ ID NO: 360711 - RNA, 32 nt, Homo Sapiens
uguaucaucuucaauuuauuucaccaacauuu

SEQ ID NO: 360712 - RNA, 32 nt, Homo Sapiens
uccgggccugggugccuacagcagccagagca

SEQ ID NO: 360713 - RNA, 32 nt, Homo Sapiens
ggcgccaggugggcuccugggagggugaugaa

SEQ ID NO: 360714 - RNA, 32 nt, Homo Sapiens
caauauaaaaauugguaaacuagaaguaacuu

SEQ ID NO: 360715 - RNA, 32 nt, Homo Sapiens
uucagacuucauuaaacuuaugaccgaaaaaa

SEQ ID NO: 360716 - RNA, 32 nt, Homo Sapiens
uaaauggaaucccagcacuuugggaggccgag

SEQ ID NO: 360717 - RNA, 32 nt, Homo Sapiens
uccauaauuucauuuuaauuaauuauaggaaa

SEQ ID NO: 360718 - RNA, 32 nt, Homo Sapiens
ggagaagaugacccguggaacacuugccuggc

SEQ ID NO: 360719 - RNA, 32 nt, Homo Sapiens
aggagaaguggggaaagguggagcagagaguu

SEQ ID NO: 360720 - RNA, 32 nt, Homo Sapiens
gcauccauuuuuccaaagaagagucgaguccu

SEQ ID NO: 360721 - RNA, 32 nt, Homo Sapiens
gcguucuuuuuggagaggaacuuuugggaugu

SEQ ID NO: 360722 - RNA, 32 nt, Homo Sapiens
accacagcugugguagagcuugguaaaagacu

SEQ ID NO: 360723 - RNA, 32 nt, Homo Sapiens
ccaccuccucggucagccccagccccagguug

SEQ ID NO: 360724 - RNA, 32 nt, Homo Sapiens
gggaagccccacuugaaggaagaagucuaaga

SEQ ID NO: 360725 - RNA, 32 nt, Homo Sapiens
ucuguaaaacaucaacccccaaucagaagaug

SEQ ID NO: 360726 - RNA, 32 nt, Homo Sapiens
uuguuuccauuuccuuucccuuuguguuugcu

SEQ ID NO: 360727 - RNA, 30 nt, Homo Sapiens
uggaccgagaagcuggaugugcucuggcuc

SEQ ID NO: 360728 - RNA, 32 nt, Homo Sapiens
ccgccaaggccugaggaccgccgagggcgugg

SEQ ID NO: 360729 - RNA, 32 nt, Homo Sapiens
ccagugcucacagauggcuggcccaugugcug

SEQ ID NO: 360730 - RNA, 32 nt, Homo Sapiens
caugccucacuuucuucuagcugagcuuuaaa

SEQ ID NO: 360731 - RNA, 32 nt, Homo Sapiens
uuugacucgguuugccucccugcccguuguuu

SEQ ID NO: 360732 - RNA, 32 nt, Homo Sapiens
ggcucuggaucccacacuguacuucccacagc

SEQ ID NO: 360733 - RNA, 32 nt, Homo Sapiens
uuuguuggugugcaauggaggaacauggcuca

SEQ ID NO: 360734 - RNA, 30 nt, Homo Sapiens
gcacaggcacaagcggcggguccagcacau

SEQ ID NO: 360735 - RNA, 32 nt, Homo Sapiens
aggaaagcggcugggcucuuggacaccugguu

SEQ ID NO: 360736 - RNA, 32 nt, Homo Sapiens
ggggcagcaaaagaagcggugguggugggcgu

SEQ ID NO: 360737 - RNA, 32 nt, Homo Sapiens
gugaagcaacugagauuauuaugauuuugggg

SEQ ID NO: 360738 - RNA, 32 nt, Homo Sapiens
ggagagucuggccugggcaaauccacacuugu

SEQ ID NO: 360739 - RNA, 32 nt, Homo Sapiens
guuugccuacauuuuggagaugcugcacacca

SEQ ID NO: 360740 - RNA, 32 nt, Homo Sapiens
cuccuuucaguggcaaugcuuaaaucucagca

SEQ ID NO: 360741 - RNA, 32 nt, Homo Sapiens
agcagaagggaagaagguguaagucaagcucu

SEQ ID NO: 360742 - RNA, 32 nt, Homo Sapiens
uuuaauugacuucuaaaauguucaaauugucu

SEQ ID NO: 360743 - RNA, 32 nt, Homo Sapiens
aguugguagaaaguagccucaaauucuguucc

SEQ ID NO: 360744 - RNA, 32 nt, Homo Sapiens
aucccaaaguacuugaauaagggcuauuguaa

SEQ ID NO: 360745 - RNA, 32 nt, Homo Sapiens
gacauuugacaaguuauaucaacgacugugcu

SEQ ID NO: 360746 - RNA, 32 nt, Homo Sapiens
cauucuuccuauggauggcuggcuacuucaua

SEQ ID NO: 360747 - RNA, 32 nt, Homo Sapiens
agccgcgugcguucgcgccgcgccuccuugcg

SEQ ID NO: 360748 - RNA, 32 nt, Homo Sapiens
cacuuagaaaucauguacugugcacugggcau

SEQ ID NO: 360749 - RNA, 32 nt, Homo Sapiens
auauguuuugucuauugaaaacauacacggua

SEQ ID NO: 360750 - RNA, 30 nt, Homo Sapiens
cgccugcgcgcgcuccuccguacgagaacu

SEQ ID NO: 360751 - RNA, 32 nt, Homo Sapiens
ccugccucugucuugagcccaggcccacuggg

SEQ ID NO: 360752 - RNA, 32 nt, Homo Sapiens
uaccacugcccccaccauaccaccauuguaaa

SEQ ID NO: 360753 - RNA, 32 nt, Homo Sapiens
ugagccucaggauucuuguucuuccucuuauc

SEQ ID NO: 360754 - RNA, 32 nt, Homo Sapiens
agagaaggagccuaaacugaauuuguguuauu

SEQ ID NO: 360755 - RNA, 32 nt, Homo Sapiens
ucuucaccuuuucauuguuuuacaaugauuca

SEQ ID NO: 360756 - RNA, 32 nt, Homo Sapiens
guauaggacagaggaccaaaauacacagcagg

SEQ ID NO: 360757 - RNA, 32 nt, Homo Sapiens
agcggggacgggacggcuuccgggauuuggcg

SEQ ID NO: 360758 - RNA, 32 nt, Homo Sapiens
ugcagugggccaagauuacggcauuacauucc

SEQ ID NO: 360759 - RNA, 32 nt, Homo Sapiens
aggcuugggaacccggccccugacggcccauu

SEQ ID NO: 360760 - RNA, 32 nt, Homo Sapiens
guaggagcacaggcuuccaguggcagggaaau

SEQ ID NO: 360761 - RNA, 32 nt, Homo Sapiens
ccuucccugccuuuuuugcagcagggauagua

SEQ ID NO: 360762 - RNA, 32 nt, Homo Sapiens
cacuguuauguggaccaaaaugucugguauac

SEQ ID NO: 360763 - RNA, 32 nt, Homo Sapiens
cgcuugcuucaaucaugguuauuugauggcaa

SEQ ID NO: 360764 - RNA, 32 nt, Homo Sapiens
aggcaggauccucaggccccagccgcgggagg

SEQ ID NO: 360765 - RNA, 32 nt, Homo Sapiens
gaagaugaaugaagaacauggacucaugugga

SEQ ID NO: 360766 - RNA, 32 nt, Homo Sapiens
ucuuuaauaauacauaugucaucaacacuaag

SEQ ID NO: 360767 - RNA, 32 nt, Homo Sapiens
ccuggagagcucaggaccuggaaguuucccaa

SEQ ID NO: 360768 - RNA, 32 nt, Homo Sapiens
gagaaguagagcucuugccauuuuuucccuug

SEQ ID NO: 360769 - RNA, 32 nt, Homo Sapiens
uuuagaauauauuauacuucuuaugucuuaau

SEQ ID NO: 360770 - RNA, 32 nt, Homo Sapiens
ccugcucagugacccuuucucuagggggacau

SEQ ID NO: 360771 - RNA, 32 nt, Homo Sapiens
aucuaggugucuauaauggcugaaaccacuac

SEQ ID NO: 360772 - RNA, 27 nt, Homo Sapiens
ucaggagccuucuucaccagcuccuug

SEQ ID NO: 360773 - RNA, 32 nt, Homo Sapiens
cagucugcgcagcggcugcgucgcccgcacag

SEQ ID NO: 360774 - RNA, 32 nt, Homo Sapiens
uuucaggauacaugugccgaaugugcagguuu

SEQ ID NO: 360775 - RNA, 32 nt, Homo Sapiens
uuaaugauguugaggaucuuuucaugugcuug

SEQ ID NO: 360776 - RNA, 32 nt, Homo Sapiens
cccaacauaccauuauagucucuucuuucuga

SEQ ID NO: 360777 - RNA, 32 nt, Homo Sapiens
aacaaucuguagauugguuuccauacagggaa

SEQ ID NO: 360778 - RNA, 32 nt, Homo Sapiens
ggcacacggggcagagcagagaagcucagcgc

SEQ ID NO: 360779 - RNA, 32 nt, Homo Sapiens
cagaggcgugugauccacacacagucaggcca

SEQ ID NO: 360780 - RNA, 32 nt, Homo Sapiens
augcagcccucccugaguggcucucccuccca

SEQ ID NO: 360781 - RNA, 32 nt, Homo Sapiens
agcagccauuucuccuuuccuuccucccaucc

SEQ ID NO: 360782 - RNA, 32 nt, Homo Sapiens
uuccaauaggcuaucauuuaauguuaacuggc

SEQ ID NO: 360783 - RNA, 32 nt, Homo Sapiens
gucugggccggggcccugugccgcugaagaca

SEQ ID NO: 360784 - RNA, 32 nt, Homo Sapiens
gucggacgccgccgcggcgcgcucugcagacu

SEQ ID NO: 360785 - RNA, 31 nt, Homo Sapiens
guggggagaaagaaaaaguguauuacuuaaa

SEQ ID NO: 360786 - RNA, 32 nt, Homo Sapiens
gauaaggaagggggcaggagaggacaggcguc

SEQ ID NO: 360787 - RNA, 32 nt, Homo Sapiens
aaccuuguugcaaguuuuugcauuggcaucuu

SEQ ID NO: 360788 - RNA, 31 nt, Homo Sapiens
ugcuggaaauaaaaccuugguuugucaaggc

SEQ ID NO: 360789 - RNA, 32 nt, Homo Sapiens
gccaggaugugcggugugaguuucccgagcug

SEQ ID NO: 360790 - RNA, 32 nt, Homo Sapiens
ugaauguguacuuuuguuaauuaaauuauuuu

SEQ ID NO: 360791 - RNA, 32 nt, Homo Sapiens
uuguuaaaaaauaaaaaguacuaacauuacag

SEQ ID NO: 360792 - RNA, 32 nt, Homo Sapiens
agcauuaugugcaauuaaguuguuaugacaua

SEQ ID NO: 360793 - RNA, 32 nt, Homo Sapiens
acgcccagcuagcucucgccucacugcggccu

SEQ ID NO: 360794 - RNA, 32 nt, Homo Sapiens
cuguuuauuuuucucugcuauacaaaguuccu

SEQ ID NO: 360795 - RNA, 32 nt, Homo Sapiens
uacugccccugccuaugcccacggggcuggug

SEQ ID NO: 360796 - RNA, 32 nt, Homo Sapiens
uggcgccacgcgccgcgcuucgugacgccccu

SEQ ID NO: 360797 - RNA, 32 nt, Homo Sapiens
cuuaaagucgcaacugggccccuuucaagaaa

SEQ ID NO: 360798 - RNA, 32 nt, Homo Sapiens
cagucuacucccucgaguucccuguccagaga

SEQ ID NO: 360799 - RNA, 32 nt, Homo Sapiens
cgucgcccccgcccccgcgaaaagcccugcag

SEQ ID NO: 360800 - RNA, 32 nt, Homo Sapiens
gcauugaacugggaaagcuaagaggaagauuc

SEQ ID NO: 360801 - RNA, 32 nt, Homo Sapiens
gggcggccaaguagccgcuucuccggagcccg

SEQ ID NO: 360802 - RNA, 32 nt, Homo Sapiens
caacaauggucacucaugggauggccaccugg

SEQ ID NO: 360803 - RNA, 32 nt, Homo Sapiens
gugacacaagcacuuuaauggccuggagggac

SEQ ID NO: 360804 - RNA, 32 nt, Homo Sapiens
caaauauauuuaaugguuaagggacuuguccc

SEQ ID NO: 360805 - RNA, 32 nt, Homo Sapiens
aggugaaaucucuuuguaauccacuagguuuu

SEQ ID NO: 360806 - RNA, 32 nt, Homo Sapiens
uauauuucaaggauugaguauucugcauuaau

SEQ ID NO: 360807 - RNA, 32 nt, Homo Sapiens
cuauaaaaaaaauaaauaaauccuccagucug

SEQ ID NO: 360808 - RNA, 32 nt, Homo Sapiens
auuuguuugggucuuuugugccguggcuccca

SEQ ID NO: 360809 - RNA, 32 nt, Homo Sapiens
accucccuggcuggagggucggggaggggcug

SEQ ID NO: 360810 - RNA, 32 nt, Homo Sapiens
auugccuggaggcagcucuaaagcacaagacc

SEQ ID NO: 360811 - RNA, 32 nt, Homo Sapiens
agggccgggcuggaagggcggcggcggcuggg

SEQ ID NO: 360812 - RNA, 32 nt, Homo Sapiens
ugcuguuugccaaaucuuguuucuuagcuugg

SEQ ID NO: 360813 - RNA, 32 nt, Homo Sapiens
ccuugggcagugccuccuccugggccuggguc

SEQ ID NO: 360814 - RNA, 30 nt, Homo Sapiens
ugcugguggcuaaugguguaaccugagaug

SEQ ID NO: 360815 - RNA, 32 nt, Homo Sapiens
agggaauggucagccuaaggguaauguacagc

SEQ ID NO: 360816 - RNA, 32 nt, Homo Sapiens
gcuccugaaugaaagaaauuaucccuuuguuc

SEQ ID NO: 360817 - RNA, 32 nt, Homo Sapiens
uuuuauguucaauaagaacacuuuuuaaaaga

SEQ ID NO: 360818 - RNA, 32 nt, Homo Sapiens
aaacccggaauaugaagugcagauuguaacau

SEQ ID NO: 360819 - RNA, 32 nt, Homo Sapiens
ccacccugcacaauggggccgacgaggccuag

SEQ ID NO: 360820 - RNA, 32 nt, Homo Sapiens
cuucauggggguagaugcuuuacuucauucau

SEQ ID NO: 360821 - RNA, 32 nt, Homo Sapiens
gggccucuccaccccaaccccacagcccgcca

SEQ ID NO: 360822 - RNA, 32 nt, Homo Sapiens
ucagcugcacaccaguaguauggcaugcuacg

SEQ ID NO: 360823 - RNA, 32 nt, Homo Sapiens
cgagacgccucgccgcggccagcucgcugcuc

SEQ ID NO: 360824 - RNA, 32 nt, Homo Sapiens
uacccucggcccggacguugccuuccuuucau

SEQ ID NO: 360825 - RNA, 32 nt, Homo Sapiens
ggaccucgcagccaggcaaggcugucagguug

SEQ ID NO: 360826 - RNA, 32 nt, Homo Sapiens
gucccugcccuucuuccccuucccugacugca

SEQ ID NO: 360827 - RNA, 32 nt, Homo Sapiens
caugcaggccccaggccccaugcucuuuguaa

SEQ ID NO: 360828 - RNA, 32 nt, Homo Sapiens
guugaugugucuuuuuuuuuuuuuuuaaugua

SEQ ID NO: 360829 - RNA, 32 nt, Homo Sapiens
ggagcaagcugauggcauggcucuugacaagg

SEQ ID NO: 360830 - RNA, 32 nt, Homo Sapiens
uccuccuguaggguguggccacuuccccaccc

SEQ ID NO: 360831 - RNA, 32 nt, Homo Sapiens
agucucauaaaacuaauuuggcuucaaguuuc

SEQ ID NO: 360832 - RNA, 32 nt, Homo Sapiens
aaccgcgucaauaaaaggccgccccgacccgc

SEQ ID NO: 360833 - RNA, 32 nt, Homo Sapiens
cucugcacuccagccugggugacagagugaga

SEQ ID NO: 360834 - RNA, 32 nt, Homo Sapiens
agauugguaauauuuaaaccagcaaauacuua

SEQ ID NO: 360835 - RNA, 32 nt, Homo Sapiens
ucuuuaagauggagucuugcucuguugcccgg

SEQ ID NO: 360836 - RNA, 32 nt, Homo Sapiens
ugguaauauaacugaaaaaauaaaagugauug

SEQ ID NO: 360837 - RNA, 32 nt, Homo Sapiens
ccgccagagucgcccccggcacggccacugcg

SEQ ID NO: 360838 - RNA, 32 nt, Homo Sapiens
aagacuaaaucauucuuuuuuaugguucaaaa

SEQ ID NO: 360839 - RNA, 32 nt, Homo Sapiens
agguuucuuugaauauuagaaaacguuauuaa

SEQ ID NO: 360840 - RNA, 32 nt, Homo Sapiens
cgcccaggucuccagcucuccucuacccccca

SEQ ID NO: 360841 - RNA, 32 nt, Homo Sapiens
caccauaacuauuuuuaauaugggucauucuu

SEQ ID NO: 360842 - RNA, 32 nt, Homo Sapiens
agagugguuuuuacuuuuuuuaaugauuaaaa

SEQ ID NO: 360843 - RNA, 32 nt, Homo Sapiens
augucuuuaagguagcaucauugaucuuugga

SEQ ID NO: 360844 - RNA, 32 nt, Homo Sapiens
augacacgcacuuuucuaaucauuguacauuu

SEQ ID NO: 360845 - RNA, 32 nt, Homo Sapiens
gcauguuaaugauaaaacaaaaggugcaaaac

SEQ ID NO: 360846 - RNA, 32 nt, Homo Sapiens
ggccugucacacagcccucuccuucaccgagg

SEQ ID NO: 360847 - RNA, 32 nt, Homo Sapiens
uuuuggugacuucugacucuccuuccaccucc

SEQ ID NO: 360848 - RNA, 32 nt, Homo Sapiens
caacuaggccccugcuggccuuccugccauug

SEQ ID NO: 360849 - RNA, 32 nt, Homo Sapiens
uucggggaacuucgacccuccucgguucagga

SEQ ID NO: 360850 - RNA, 32 nt, Homo Sapiens
cgagugcacgccgggggcggggcacggcacga

SEQ ID NO: 360851 - RNA, 32 nt, Homo Sapiens
auugggaaccgcgguggcuuccgcggagguuu

SEQ ID NO: 360852 - RNA, 32 nt, Homo Sapiens
ggcuggucaagaacuccugaccucaagugauc

SEQ ID NO: 360853 - RNA, 31 nt, Homo Sapiens
aacaggucccagagcaguggauaugucuggu

SEQ ID NO: 360854 - RNA, 32 nt, Homo Sapiens
auggcuccugugggcaagagaauaggugguuu

SEQ ID NO: 360855 - RNA, 32 nt, Homo Sapiens
aaugcagcugucaugcaguucuuuucuuuugc

SEQ ID NO: 360856 - RNA, 32 nt, Homo Sapiens
gagguccuccuggccugagcgcagcgccucca

SEQ ID NO: 360857 - RNA, 30 nt, Homo Sapiens
uguauugucuguguacccagaguuuacaau

SEQ ID NO: 360858 - RNA, 32 nt, Homo Sapiens
aaccaacagcugcccccuccccgcccccgugu

SEQ ID NO: 360859 - RNA, 32 nt, Homo Sapiens
uccccgccaagagcucugccaggggcgggcaa

SEQ ID NO: 360860 - RNA, 32 nt, Homo Sapiens
uaggagaaaaacucuuuuuuuuuuuccuuugu

SEQ ID NO: 360861 - RNA, 32 nt, Homo Sapiens
gcguggcccuucagggccgaaucugcacuguc

SEQ ID NO: 360862 - RNA, 32 nt, Homo Sapiens
gacaauauaaaaucugugugauuguuugcagu

SEQ ID NO: 360863 - RNA, 32 nt, Homo Sapiens
ccaagguugacuguuuguagaggaacagccag

SEQ ID NO: 360864 - RNA, 32 nt, Homo Sapiens
acugggugccccggcggcgccacgcuuggcug

SEQ ID NO: 360865 - RNA, 32 nt, Homo Sapiens
caucucuacuaauaauacaacaauuagccagg

SEQ ID NO: 360866 - RNA, 32 nt, Homo Sapiens
ugcacauagacacagggaaacacacacacgga

SEQ ID NO: 360867 - RNA, 32 nt, Homo Sapiens
ugagggucagauguggaaggaaagugggugcu

SEQ ID NO: 360868 - RNA, 31 nt, Homo Sapiens
guggagccugcgcgccucgcuugagcugcau

SEQ ID NO: 360869 - RNA, 32 nt, Homo Sapiens
ccuaaaauggagagaagaaugaacuagaacau

SEQ ID NO: 360870 - RNA, 32 nt, Homo Sapiens
uguucuguguucaagcuccugugggcaacuca

SEQ ID NO: 360871 - RNA, 32 nt, Homo Sapiens
uuaaaucaaaaauuggauaauuuuuaauauuu

SEQ ID NO: 360872 - RNA, 32 nt, Homo Sapiens
ggucugggcaacaugcaugcccagaggcaguu

SEQ ID NO: 360873 - RNA, 32 nt, Homo Sapiens
ggaguccagggccagaggaucccuugaggcca

SEQ ID NO: 360874 - RNA, 32 nt, Homo Sapiens
acaguggcuucuuuucguuuucguuuugaaga

SEQ ID NO: 360875 - RNA, 32 nt, Homo Sapiens
ccaauuugacauuuucaucauagauuaguuuu

SEQ ID NO: 360876 - RNA, 32 nt, Homo Sapiens
aaucaguucauuccaugaugcauauuacugga

SEQ ID NO: 360877 - RNA, 30 nt, Homo Sapiens
gaaagaggcaggcgcaauggcucaugccug

SEQ ID NO: 360878 - RNA, 32 nt, Homo Sapiens
cuuguugagcagccuccuuauccagauagauc

SEQ ID NO: 360879 - RNA, 32 nt, Homo Sapiens
ccugggcaaccucuggaagaaccacaggcccu

SEQ ID NO: 360880 - RNA, 30 nt, Homo Sapiens
ggggcugucuguguuucccagguggagcuc

SEQ ID NO: 360881 - RNA, 32 nt, Homo Sapiens
uaugaagaauacugauguuuaccuguauuugc

SEQ ID NO: 360882 - RNA, 32 nt, Homo Sapiens
aagaguuggaggguuggcagggggcgaugaua

SEQ ID NO: 360883 - RNA, 32 nt, Homo Sapiens
auauauacuuuuuaaaagacugauguaccauu

SEQ ID NO: 360884 - RNA, 31 nt, Homo Sapiens
auuuuauuaaagaaaaggauguuacacugaa

SEQ ID NO: 360885 - RNA, 32 nt, Homo Sapiens
ugggaaggccgcgcuugccgucuccgccgccc

SEQ ID NO: 360886 - RNA, 32 nt, Homo Sapiens
uauuuugucaaguacugaaauaaaaacugaaa

SEQ ID NO: 360887 - RNA, 32 nt, Homo Sapiens
aacucuuaugcaaugcugauaggaauguagau

SEQ ID NO: 360888 - RNA, 32 nt, Homo Sapiens
aggccugggcccuggaggaggacauggugaug

SEQ ID NO: 360889 - RNA, 32 nt, Homo Sapiens
uuagaggaggaagagggagucuggcaugaguu

SEQ ID NO: 360890 - RNA, 32 nt, Homo Sapiens
cgcacugcaugggaaauagcggcccuggagga

SEQ ID NO: 360891 - RNA, 32 nt, Homo Sapiens
ggaugagggcaccccugaggccggcgcuccga

SEQ ID NO: 360892 - RNA, 32 nt, Homo Sapiens
ccuuugaaaauauuuuaaaauaaaaaacuuga

SEQ ID NO: 360893 - RNA, 32 nt, Homo Sapiens
agagaaaaagguccuacgaaaacggaauaaua

SEQ ID NO: 360894 - RNA, 32 nt, Homo Sapiens
aagaguugacauuuuacuuagagguauucaag

SEQ ID NO: 360895 - RNA, 32 nt, Homo Sapiens
gaggugguggcuggcccggcccccgcccacgc

SEQ ID NO: 360896 - RNA, 32 nt, Homo Sapiens
agucuagaugcauuucaaaaggaaaguugguu

SEQ ID NO: 360897 - RNA, 32 nt, Homo Sapiens
auuccaggcaccucccguuuguccuugaggac

SEQ ID NO: 360898 - RNA, 32 nt, Homo Sapiens
aaacaaggccucgcgccgcugcggguccugcg

SEQ ID NO: 360899 - RNA, 32 nt, Homo Sapiens
gcccugcuuuuuguggcaaggccuguucugau

SEQ ID NO: 360900 - RNA, 32 nt, Homo Sapiens
augucacugcagugucccauucuaggauuguc

SEQ ID NO: 360901 - RNA, 32 nt, Homo Sapiens
guuuaaaguagaaguuacauaauucuauauuu

SEQ ID NO: 360902 - RNA, 32 nt, Homo Sapiens
cuucucggcugaggcgccgcgcggccaggcag

SEQ ID NO: 360903 - RNA, 32 nt, Homo Sapiens
uguccucugugccucuuuccuugucugaggug

SEQ ID NO: 360904 - RNA, 32 nt, Homo Sapiens
uuaguuuuugcauauguaguacacuuaugcau

SEQ ID NO: 360905 - RNA, 32 nt, Homo Sapiens
ugcagaagcccaagcagccgcggccgcagugg

SEQ ID NO: 360906 - RNA, 32 nt, Homo Sapiens
ggccggcugcagcggcagcuccgccgggcguc

SEQ ID NO: 360907 - RNA, 32 nt, Homo Sapiens
cagcguccacuggcuccaggcuccucacaaca

SEQ ID NO: 360908 - RNA, 32 nt, Homo Sapiens
uagaaggcagcacuaugcugcaaacccagacg

SEQ ID NO: 360909 - RNA, 32 nt, Homo Sapiens
ggggacggggcugacaucuacauuuuuuaaaa

SEQ ID NO: 360910 - RNA, 32 nt, Homo Sapiens
ucccuccucuguaacuucuuucugggggauug

SEQ ID NO: 360911 - RNA, 32 nt, Homo Sapiens
gcccgccgcucccagaccucgcccgagucggc

SEQ ID NO: 360912 - RNA, 32 nt, Homo Sapiens
uuuuuuccacuuuuguucuacuccuucccuaa

SEQ ID NO: 360913 - RNA, 32 nt, Homo Sapiens
uuuguuuguuuuuauuuuggaaugcuuauaag

SEQ ID NO: 360914 - RNA, 32 nt, Homo Sapiens
uuuugguuaaacuuaugaaaauguauuaagaa

SEQ ID NO: 360915 - RNA, 32 nt, Homo Sapiens
cuggggaauacucgcugcagcugggguucccu

SEQ ID NO: 360916 - RNA, 32 nt, Homo Sapiens
cucugacuugguuuuucugucccugucuccca

SEQ ID NO: 360917 - RNA, 32 nt, Homo Sapiens
aacuuccuccggauuccccggcgccucgggaa

SEQ ID NO: 360918 - RNA, 32 nt, Homo Sapiens
uuccagugccccaccacccuucugaucuuagg

SEQ ID NO: 360919 - RNA, 32 nt, Homo Sapiens
ucgacagaugcggcaccgauccuuaccagaga

SEQ ID NO: 360920 - RNA, 32 nt, Homo Sapiens
aagcaaacaaccaaagcaacauuucaaaauaa

SEQ ID NO: 360921 - RNA, 32 nt, Homo Sapiens
ucuuuggcuuuguuuguuuguuuucuucuuca

SEQ ID NO: 360922 - RNA, 32 nt, Homo Sapiens
ugacugaaggauuuauucagacugcuguacuc

SEQ ID NO: 360923 - RNA, 32 nt, Homo Sapiens
guucaagcccaggcuuccuggguccugccugg

SEQ ID NO: 360924 - RNA, 32 nt, Homo Sapiens
cagggggccaugccgugccggagggaggagga

SEQ ID NO: 360925 - RNA, 32 nt, Homo Sapiens
uuucauagauguauauuauuuugaaguaucaa

SEQ ID NO: 360926 - RNA, 32 nt, Homo Sapiens
gggaguguccccacccaaugcuuuggaaaaug

SEQ ID NO: 360927 - RNA, 32 nt, Homo Sapiens
ugccugugaugaugauaauggaaggauggagg

SEQ ID NO: 360928 - RNA, 32 nt, Homo Sapiens
cugcccaggcuggccgccgccgugccgaugua

SEQ ID NO: 360929 - RNA, 32 nt, Homo Sapiens
cacuuagcuugugaacaggccuuuuuaaaauc

SEQ ID NO: 360930 - RNA, 32 nt, Homo Sapiens
aaccggaucuguuuccagacgcagaaugagug

SEQ ID NO: 360931 - RNA, 32 nt, Homo Sapiens
gguaugucugcuugcuugcugcuuuuccuugc

SEQ ID NO: 360932 - RNA, 31 nt, Homo Sapiens
gcucauccacggagaggggcuccguuuauuc

SEQ ID NO: 360933 - RNA, 32 nt, Homo Sapiens
ccuccauucuauuuuagaauaaauucccaacu

SEQ ID NO: 360934 - RNA, 32 nt, Homo Sapiens
cauggaggagcccccuccuucucaccucgguc

SEQ ID NO: 360935 - RNA, 32 nt, Homo Sapiens
ggacuagccaucuugauaaauaggaguguaug

SEQ ID NO: 360936 - RNA, 32 nt, Homo Sapiens
cuagcagcagauuuuuuuuuuauugguacaua

SEQ ID NO: 360937 - RNA, 32 nt, Homo Sapiens
cacacuuucaguuggaugugggucauugugga

SEQ ID NO: 360938 - RNA, 32 nt, Homo Sapiens
acaacauggaaaacaggccuccccucccucuc

SEQ ID NO: 360939 - RNA, 32 nt, Homo Sapiens
gccacggcgggggugggggcgggggguuggua

SEQ ID NO: 360940 - RNA, 32 nt, Homo Sapiens
acccccacuccagccucagcggggccccagcg

SEQ ID NO: 360941 - RNA, 32 nt, Homo Sapiens
ggcuguuaagguuucuguuuuacuuugguuuu

SEQ ID NO: 360942 - RNA, 32 nt, Homo Sapiens
accccuucuuucauguucugagcuauaacauu

SEQ ID NO: 360943 - RNA, 32 nt, Homo Sapiens
aggaucggggagagaaggggccuguguucuca

SEQ ID NO: 360944 - RNA, 32 nt, Homo Sapiens
acaaagaaaaucccaggccuagauggcugcau

SEQ ID NO: 360945 - RNA, 32 nt, Homo Sapiens
gguucccuuuuuguccucuccuccauucaagg

SEQ ID NO: 360946 - RNA, 32 nt, Homo Sapiens
guguaaagguuuuagcagaaagcaaaauaucu

SEQ ID NO: 360947 - RNA, 32 nt, Homo Sapiens
acagcaagcagauucuaaacucgggggcaucu

SEQ ID NO: 360948 - RNA, 32 nt, Homo Sapiens
guaggugagcuggucugcccgagccuagagag

SEQ ID NO: 360949 - RNA, 32 nt, Homo Sapiens
cacuaugccaaagcuugggaaauacuacugug

SEQ ID NO: 360950 - RNA, 32 nt, Homo Sapiens
ccuggccguuugcguuuggaugcaggcccggg

SEQ ID NO: 360951 - RNA, 32 nt, Homo Sapiens
guggcaacagcuuugaacuagagagguagaug

SEQ ID NO: 360952 - RNA, 30 nt, Homo Sapiens
cucccagggaagcuuguuacugagaaggac

SEQ ID NO: 360953 - RNA, 32 nt, Homo Sapiens
uucaacuuuuaagggagcgguccacggccucc

SEQ ID NO: 360954 - RNA, 32 nt, Homo Sapiens
cccgcuacaaucugaugaacucugccauaaua

SEQ ID NO: 360955 - RNA, 32 nt, Homo Sapiens
gaucucacaaaacugguaaguuucuuaugcuc

SEQ ID NO: 360956 - RNA, 32 nt, Homo Sapiens
uggugcucuuucccuuuaucaguuugacugug

SEQ ID NO: 360957 - RNA, 32 nt, Homo Sapiens
uggaaugaggagccuuccccuugagcuccuuu

SEQ ID NO: 360958 - RNA, 32 nt, Homo Sapiens
ccaccugcuccugccuggacggcgcccuucag

SEQ ID NO: 360959 - RNA, 28 nt, Homo Sapiens
ccaguagggcggccgagcagaggcgccc

SEQ ID NO: 360960 - RNA, 32 nt, Homo Sapiens
agcacuuggaaaaugcacuuguccuguuuugu

SEQ ID NO: 360961 - RNA, 32 nt, Homo Sapiens
aggagcucuugugcuugaguucaguguuagug

SEQ ID NO: 360962 - RNA, 32 nt, Homo Sapiens
aucagauguacaaugugcauugucuuugagcc

SEQ ID NO: 360963 - RNA, 32 nt, Homo Sapiens
ccugggacccaccgugggaccugaggcagaac

SEQ ID NO: 360964 - RNA, 32 nt, Homo Sapiens
uuugauaugcuucaauuuuguaaaaucaaauu

SEQ ID NO: 360965 - RNA, 32 nt, Homo Sapiens
aaagaugcucguucgguuguuggaccucuuuc

SEQ ID NO: 360966 - RNA, 32 nt, Homo Sapiens
gcccuuucucagcugccuccccugcccuuucu

SEQ ID NO: 360967 - RNA, 32 nt, Homo Sapiens
ggugucaucugucacauuuguaaaaugaguau

SEQ ID NO: 360968 - RNA, 32 nt, Homo Sapiens
gguagagcaggaagcucugugaugucagagca

SEQ ID NO: 360969 - RNA, 31 nt, Homo Sapiens
cccaggccacagagaaccugaguucccggga

SEQ ID NO: 360970 - RNA, 32 nt, Homo Sapiens
aucagccccagcuggacuugggcccccacugu

SEQ ID NO: 360971 - RNA, 32 nt, Homo Sapiens
gauacgugaauggauguaaugccguuaugcag

SEQ ID NO: 360972 - RNA, 32 nt, Homo Sapiens
gagggagcggcggcaggcucucgcuuucggca

SEQ ID NO: 360973 - RNA, 32 nt, Homo Sapiens
cuccucugacacagggcuggcccgccaggugg

SEQ ID NO: 360974 - RNA, 32 nt, Homo Sapiens
ccuuugagcuuauuuuaacucuugagcaacau

SEQ ID NO: 360975 - RNA, 32 nt, Homo Sapiens
gugcggagggagaggggcgggcaggaaccggg

SEQ ID NO: 360976 - RNA, 32 nt, Homo Sapiens
uagagggggcuuugugccucaaaccccaagga

SEQ ID NO: 360977 - RNA, 29 nt, Homo Sapiens
ccuauagguacgucuuucuuguagcaaua

SEQ ID NO: 360978 - RNA, 32 nt, Homo Sapiens
uacagguguaagucacuguacccagcccaaaa

SEQ ID NO: 360979 - RNA, 32 nt, Homo Sapiens
aaggugugaacaugcccugaugccuaaccaaa

SEQ ID NO: 360980 - RNA, 32 nt, Homo Sapiens
cucuuguucugugccugagaauggcgaaaccc

SEQ ID NO: 360981 - RNA, 32 nt, Homo Sapiens
cuuucacuaacuucuucagcccuccagcaucu

SEQ ID NO: 360982 - RNA, 32 nt, Homo Sapiens
uccuguuccccucacuggucucuccagugucc

SEQ ID NO: 360983 - RNA, 32 nt, Homo Sapiens
ccauuuccuauauaaauaccagcaagaucacu

SEQ ID NO: 360984 - RNA, 32 nt, Homo Sapiens
aucucuccugaacucccacgacgcuaucccuu

SEQ ID NO: 360985 - RNA, 32 nt, Homo Sapiens
ccugggccugacgcgggcuuccuggauugcau

SEQ ID NO: 360986 - RNA, 32 nt, Homo Sapiens
uuacuguagaaaaauaaagagaugcuuguucu

SEQ ID NO: 360987 - RNA, 32 nt, Homo Sapiens
gccggggaggggcucacacucaggcugggcug

SEQ ID NO: 360988 - RNA, 32 nt, Homo Sapiens
cagaggcuggaacacuucgcugcaaacuguga

SEQ ID NO: 360989 - RNA, 32 nt, Homo Sapiens
ccuccuaauccucuccuagguuguggggcugg

SEQ ID NO: 360990 - RNA, 32 nt, Homo Sapiens
uuuuguaauuuaugauuguuaaguaagcuuga

SEQ ID NO: 360991 - RNA, 32 nt, Homo Sapiens
gccccgcgaaaacaucugccucccaggagggu

SEQ ID NO: 360992 - RNA, 32 nt, Homo Sapiens
uucuaucucugcccacccacaccugugauguu

SEQ ID NO: 360993 - RNA, 32 nt, Homo Sapiens
cugcagugacagaauuugaaguuuggcuagca

SEQ ID NO: 360994 - RNA, 32 nt, Homo Sapiens
ccccuucuugccaggcuucuccucucuccugc

SEQ ID NO: 360995 - RNA, 32 nt, Homo Sapiens
gguggugcaggagaccguguugguggaggagc

SEQ ID NO: 360996 - RNA, 32 nt, Homo Sapiens
ucccauuccagaaacuuugagccaugcuagga

SEQ ID NO: 360997 - RNA, 32 nt, Homo Sapiens
uauuugccccacucaugaucaccguuuauuuu

SEQ ID NO: 360998 - RNA, 32 nt, Homo Sapiens
agcccaauucuaugguaacccuggcaggccca

SEQ ID NO: 360999 - RNA, 32 nt, Homo Sapiens
ggacagagggucacaaccaaugagggaugucu

SEQ ID NO: 361000 - RNA, 32 nt, Homo Sapiens
auguccuuccaaaaauguuguuguguacauac

SEQ ID NO: 361001 - RNA, 32 nt, Homo Sapiens
augcggugacuuucuuuuuuuguaaagcaaau

SEQ ID NO: 361002 - RNA, 32 nt, Homo Sapiens
uaugagugcgucccacccaacgcagcaccagc

SEQ ID NO: 361003 - RNA, 32 nt, Homo Sapiens
ggcaccaucuucucauucaucuccaaggacgu

SEQ ID NO: 361004 - RNA, 32 nt, Homo Sapiens
ucucugcagacaccagccugguguccuccuuc

SEQ ID NO: 361005 - RNA, 32 nt, Homo Sapiens
cgagucgucccgcgcgcaccgccuccgcgcgc

SEQ ID NO: 361006 - RNA, 32 nt, Homo Sapiens
cagaugagggaagaaacaagagaguaauugcu

SEQ ID NO: 361007 - RNA, 32 nt, Homo Sapiens
guuugccccaaguuugcacuauuuaauacuuu

SEQ ID NO: 361008 - RNA, 32 nt, Homo Sapiens
gucagacauuacggucucuccuccccugcccc

SEQ ID NO: 361009 - RNA, 32 nt, Homo Sapiens
aaacaaacaaacaaaaacaagucuuuuggaug

SEQ ID NO: 361010 - RNA, 32 nt, Homo Sapiens
ggugugagccacuacacccagcccugcagucc

SEQ ID NO: 361011 - RNA, 32 nt, Homo Sapiens
ggcaccucuucccccaggaagccuucccugcc

SEQ ID NO: 361012 - RNA, 32 nt, Homo Sapiens
ccugggcagaaucuugccuagagcuugcggag

SEQ ID NO: 361013 - RNA, 32 nt, Homo Sapiens
aaauuaaaccaacuauaggccuuuuucuuggg

SEQ ID NO: 361014 - RNA, 32 nt, Homo Sapiens
aggcuggagaagcucacccaauaaacauuaag

SEQ ID NO: 361015 - RNA, 32 nt, Homo Sapiens
gucuaaaguggaacugaauaguagcugugaga

SEQ ID NO: 361016 - RNA, 32 nt, Homo Sapiens
uagauucuuggucacuucucuaccacaagcca

SEQ ID NO: 361017 - RNA, 32 nt, Homo Sapiens
aaguagaaccucagcuugcuaacugaaguguu

SEQ ID NO: 361018 - RNA, 32 nt, Homo Sapiens
ugugucaacugugccguuuuuauuuuauuccu

SEQ ID NO: 361019 - RNA, 31 nt, Homo Sapiens
cucgggcagcgcaccgccacgagagcccggg

SEQ ID NO: 361020 - RNA, 32 nt, Homo Sapiens
ccuucccgcucccucacacaccgccucagccc

SEQ ID NO: 361021 - RNA, 32 nt, Homo Sapiens
ccagcaugaagauaauggcuaauaaaaaugag

SEQ ID NO: 361022 - RNA, 32 nt, Homo Sapiens
cugcaaauaaauuaaagaauauuguucucgua

SEQ ID NO: 361023 - RNA, 32 nt, Homo Sapiens
uggccccagcgcccagcccugcucuccgcgcu

SEQ ID NO: 361024 - RNA, 32 nt, Homo Sapiens
gcuuugucguaucucagagagggaaucuaauu

SEQ ID NO: 361025 - RNA, 32 nt, Homo Sapiens
uaacaugcaauaacaagcaugcauaaaucaau

SEQ ID NO: 361026 - RNA, 32 nt, Homo Sapiens
ggccgcugagcccacggcagcggccgcaggac

SEQ ID NO: 361027 - RNA, 32 nt, Homo Sapiens
uucuuuguuucccccucuuucuuuuuuaaaaa

SEQ ID NO: 361028 - RNA, 32 nt, Homo Sapiens
caggaagaccccgcagcucucccgcggcgcuu

SEQ ID NO: 361029 - RNA, 32 nt, Homo Sapiens
aaacccagacugcccaugagacccugauggug

SEQ ID NO: 361030 - RNA, 31 nt, Homo Sapiens
gcacuuaaauaaaaacagauguuaaaauauu

SEQ ID NO: 361031 - RNA, 32 nt, Homo Sapiens
gaccgcaucuucucccucgcagcugcuucuug

SEQ ID NO: 361032 - RNA, 32 nt, Homo Sapiens
ggccagcgcucgccuggcuggugcagucagga

SEQ ID NO: 361033 - RNA, 30 nt, Homo Sapiens
ucccacccgcccguggcccgcgcccauggc

SEQ ID NO: 361034 - RNA, 32 nt, Homo Sapiens
cugcccuaaauuuuacuaauaaauccauuuuu

SEQ ID NO: 361035 - RNA, 32 nt, Homo Sapiens
uuuucuuaaauaucaagcuguucuuugaacag

SEQ ID NO: 361036 - RNA, 32 nt, Homo Sapiens
agcucaggcguccccgccccagcuuuucucgg

SEQ ID NO: 361037 - RNA, 32 nt, Homo Sapiens
cgccgcaggacacaucaacaagccccauuaaa

SEQ ID NO: 361038 - RNA, 32 nt, Homo Sapiens
ugccuguaaucucagcacuuugggaggccaac

SEQ ID NO: 361039 - RNA, 32 nt, Homo Sapiens
ggguagcuucacauuuaauuuauaaaguuaac

SEQ ID NO: 361040 - RNA, 32 nt, Homo Sapiens
aagaauuauuuuuguguuucuaaaacuauggu

SEQ ID NO: 361041 - RNA, 32 nt, Homo Sapiens
gcagucagagauucuuuuuuaauccuuggaga

SEQ ID NO: 361042 - RNA, 32 nt, Homo Sapiens
cugggccacugaccaccuccccggcauccccu

SEQ ID NO: 361043 - RNA, 32 nt, Homo Sapiens
gagaguccaaaauauauuuuuccagcccgaaa

SEQ ID NO: 361044 - RNA, 32 nt, Homo Sapiens
uauggaagccccuuccucuccugcaccaaauc

SEQ ID NO: 361045 - RNA, 32 nt, Homo Sapiens
auucacucggagccuggaugaugggggcuggu

SEQ ID NO: 361046 - RNA, 31 nt, Homo Sapiens
uggacucggcacugcuuugcccagggcacau

SEQ ID NO: 361047 - RNA, 32 nt, Homo Sapiens
gucugggcucugccccugcgccuccacugcag

SEQ ID NO: 361048 - RNA, 32 nt, Homo Sapiens
uggagaaacaacaucuucuggaagggaagaca

SEQ ID NO: 361049 - RNA, 32 nt, Homo Sapiens
ggccguuaaguggacaggaaguggccccacau

SEQ ID NO: 361050 - RNA, 32 nt, Homo Sapiens
aaugaccugaucuguccuuccuccuccuuccc

SEQ ID NO: 361051 - RNA, 32 nt, Homo Sapiens
ugcuuauaaauuuuuuaccacucccacauaaa

SEQ ID NO: 361052 - RNA, 32 nt, Homo Sapiens
gguugucucugcuguucauuguuuccuguuaa

SEQ ID NO: 361053 - RNA, 32 nt, Homo Sapiens
accguucugcugacccagcucccuuuagucac

SEQ ID NO: 361054 - RNA, 32 nt, Homo Sapiens
aguuucuaguguggcccagucuccaggaucaa

SEQ ID NO: 361055 - RNA, 32 nt, Homo Sapiens
uuucgcaugcaaacauuuggugauuaagcgag

SEQ ID NO: 361056 - RNA, 32 nt, Homo Sapiens
aacaugcugugagccagagagguaaugguuug

SEQ ID NO: 361057 - RNA, 32 nt, Homo Sapiens
cacagggcagggggcgucugugcagagaagcg

SEQ ID NO: 361058 - RNA, 32 nt, Homo Sapiens
cgguccaggcuggcagcugccggcgcuuggcg

SEQ ID NO: 361059 - RNA, 32 nt, Homo Sapiens
cugacgcugcugcugcccggccucggggugag

SEQ ID NO: 361060 - RNA, 32 nt, Homo Sapiens
cucaucucuuaccaaaaaauacgaaaauuagc

SEQ ID NO: 361061 - RNA, 32 nt, Homo Sapiens
cuuugcguuaggauggcucugaucugacauuu

SEQ ID NO: 361062 - RNA, 32 nt, Homo Sapiens
ucccagcuauucuggaggcugaggcaggaauc

SEQ ID NO: 361063 - RNA, 32 nt, Homo Sapiens
gagcgggggagggaagcaacagacggcuggag

SEQ ID NO: 361064 - RNA, 32 nt, Homo Sapiens
ccgagccgccgggacucagcgccuucgggugg

SEQ ID NO: 361065 - RNA, 32 nt, Homo Sapiens
gugggccgugcagcagggcgcagcgaggcgga

SEQ ID NO: 361066 - RNA, 32 nt, Homo Sapiens
gauccucccagcucagccugcugaccagcugg

SEQ ID NO: 361067 - RNA, 32 nt, Homo Sapiens
cggacagugucuagcacgcucaguccgggcuu

SEQ ID NO: 361068 - RNA, 32 nt, Homo Sapiens
caagaugggcuuugccguuuccguagugggca

SEQ ID NO: 361069 - RNA, 32 nt, Homo Sapiens
agcuguggggcuggcacagagccccaggcaag

SEQ ID NO: 361070 - RNA, 32 nt, Homo Sapiens
gucuccuccugccuccucuccugcaauccacc

SEQ ID NO: 361071 - RNA, 32 nt, Homo Sapiens
auugaucugacuguggaaacauccucucacuu

SEQ ID NO: 361072 - RNA, 32 nt, Homo Sapiens
gccgcauugucuaauuuuuagaacacuaggcu

SEQ ID NO: 361073 - RNA, 32 nt, Homo Sapiens
aaaagcagugcuaacaggauauuguucuggga

SEQ ID NO: 361074 - RNA, 32 nt, Homo Sapiens
auucaaaacaaauguggauuaaguguuuaggc

SEQ ID NO: 361075 - RNA, 32 nt, Homo Sapiens
cucagccagacguccaggaucccaccccuugc

SEQ ID NO: 361076 - RNA, 31 nt, Homo Sapiens
uuuacaaaauaaaaacggucuucacuaguua

SEQ ID NO: 361077 - RNA, 32 nt, Homo Sapiens
ucuuccccgcaugucucuuccuucuguuguuc

SEQ ID NO: 361078 - RNA, 32 nt, Homo Sapiens
cccucucucuucugcuccacccuuggccuguc

SEQ ID NO: 361079 - RNA, 32 nt, Homo Sapiens
cccugaagauaaucuuagcugccaaguaaaua

SEQ ID NO: 361080 - RNA, 32 nt, Homo Sapiens
uaagaugcgggaagugucagcucccggcgugg

SEQ ID NO: 361081 - RNA, 32 nt, Homo Sapiens
cuuuaguugcuuucguuuuuuaugauguagga

SEQ ID NO: 361082 - RNA, 32 nt, Homo Sapiens
gcgugcacaaucaaaaguacuaugcaauuuua

SEQ ID NO: 361083 - RNA, 32 nt, Homo Sapiens
uuuugugccugccuagcuauccagacagagca

SEQ ID NO: 361084 - RNA, 32 nt, Homo Sapiens
ccugguccccagcagagcuugccacccggaga

SEQ ID NO: 361085 - RNA, 32 nt, Homo Sapiens
uucacuguuucuuauaggagacuugacagcuu

SEQ ID NO: 361086 - RNA, 32 nt, Homo Sapiens
cagguggucgguaaagacacgugggauugaac

SEQ ID NO: 361087 - RNA, 32 nt, Homo Sapiens
uagaaagucuucugcaaacccauuucugaaaa

SEQ ID NO: 361088 - RNA, 32 nt, Homo Sapiens
gcccugcgccuguuaccacggaugcccacagg

SEQ ID NO: 361089 - RNA, 32 nt, Homo Sapiens
caacacugcuccauggugagagcacagcaacu

SEQ ID NO: 361090 - RNA, 32 nt, Homo Sapiens
gggacccaggacaccuggccacggggaggcgg

SEQ ID NO: 361091 - RNA, 30 nt, Homo Sapiens
uuccgggcgcccgagccggcugcucgugcc

SEQ ID NO: 361092 - RNA, 32 nt, Homo Sapiens
guucagagggguuuaagcagguguccugguga

SEQ ID NO: 361093 - RNA, 32 nt, Homo Sapiens
cugccggucccauccuuggagggacuaagcug

SEQ ID NO: 361094 - RNA, 32 nt, Homo Sapiens
uuuuugccaaaauaccacuaguggaaagucag

SEQ ID NO: 361095 - RNA, 32 nt, Homo Sapiens
uggcuguguuugucuucuguacaaagccugaa

SEQ ID NO: 361096 - RNA, 32 nt, Homo Sapiens
caauauuacucagcuuuuuuuauuguaaaaag

SEQ ID NO: 361097 - RNA, 32 nt, Homo Sapiens
guagaugggaauuugagggagaauacagagau

SEQ ID NO: 361098 - RNA, 32 nt, Homo Sapiens
agcugccccugcgccucggcgggaggcguccu

SEQ ID NO: 361099 - RNA, 32 nt, Homo Sapiens
cagggcagccagagccagacagcaggcuccug

SEQ ID NO: 361100 - RNA, 32 nt, Homo Sapiens
uuucuuuuggcagguacuuggaugcauuuuac

SEQ ID NO: 361101 - RNA, 32 nt, Homo Sapiens
gagagguuaagugaauugauccaggccacaca

SEQ ID NO: 361102 - RNA, 32 nt, Homo Sapiens
cuccgccggcgccaacaccugucaacucugcg

SEQ ID NO: 361103 - RNA, 32 nt, Homo Sapiens
cccucacagggcugauuguucuccuucucccu

SEQ ID NO: 361104 - RNA, 32 nt, Homo Sapiens
uaaaacaccaaaaggaccuagcucuguagaag

SEQ ID NO: 361105 - RNA, 32 nt, Homo Sapiens
uccagagggagggagcuaagggcgccuagcga

SEQ ID NO: 361106 - RNA, 32 nt, Homo Sapiens
ucuucccuaaaauguagaaauucuaacuuaau

SEQ ID NO: 361107 - RNA, 32 nt, Homo Sapiens
gagaggaacgcgagacgcggcagagcgcguuc

SEQ ID NO: 361108 - RNA, 32 nt, Homo Sapiens
gggagugggaaaugcgggagggaggguggggc

SEQ ID NO: 361109 - RNA, 32 nt, Homo Sapiens
aguauuauugaagaugugaucaauagauugua

SEQ ID NO: 361110 - RNA, 32 nt, Homo Sapiens
ugaguuauaagaauuggaauuucugagauccc

SEQ ID NO: 361111 - RNA, 32 nt, Homo Sapiens
gcugauggcccccaacucaccagcaucaugac

SEQ ID NO: 361112 - RNA, 32 nt, Homo Sapiens
uccugugugcguacacauccacacacaccucc

SEQ ID NO: 361113 - RNA, 32 nt, Homo Sapiens
agguagcaaaugcaggauuuuguuuacuuuca

SEQ ID NO: 361114 - RNA, 32 nt, Homo Sapiens
aauccuuuugacacguucgacaaaagcagugg

SEQ ID NO: 361115 - RNA, 32 nt, Homo Sapiens
gaagcaaggugaggagucucuaccuccaugug

SEQ ID NO: 361116 - RNA, 32 nt, Homo Sapiens
gcgggcuuaggacagguccuguggcacagucc

SEQ ID NO: 361117 - RNA, 32 nt, Homo Sapiens
auucuauaagauuacagcaagauggaaauacc

SEQ ID NO: 361118 - RNA, 32 nt, Homo Sapiens
uccuggguguaguggaugccagucuuguugcu

SEQ ID NO: 361119 - RNA, 32 nt, Homo Sapiens
uuaaggggaaaggagcagugugccagaggauu

SEQ ID NO: 361120 - RNA, 32 nt, Homo Sapiens
uucagauauuuaugugaacuuaaaccucuuug

SEQ ID NO: 361121 - RNA, 32 nt, Homo Sapiens
acgcgagaggaugguagcggagcgcacccaca

SEQ ID NO: 361122 - RNA, 32 nt, Homo Sapiens
aaacuauggaaaugcugcuaaaauuuuuauau

SEQ ID NO: 361123 - RNA, 32 nt, Homo Sapiens
gaguaguuuuugucacauacacauacagcauu

SEQ ID NO: 361124 - RNA, 32 nt, Homo Sapiens
cccucgggguagggccugggggcugugggaag

SEQ ID NO: 361125 - RNA, 32 nt, Homo Sapiens
uuuuagaagcauuuuacccauuuauuuuuuua

SEQ ID NO: 361126 - RNA, 32 nt, Homo Sapiens
guucauuuuuucugugaggauacuuaagguua

SEQ ID NO: 361127 - RNA, 32 nt, Homo Sapiens
ugguuugcauucaaaacgaugugguuugucca

SEQ ID NO: 361128 - RNA, 32 nt, Homo Sapiens
uuagggagagcagagcgaggcagcugaucuuc

SEQ ID NO: 361129 - RNA, 32 nt, Homo Sapiens
cagugggcucugcaccauauucagcaccagag

SEQ ID NO: 361130 - RNA, 32 nt, Homo Sapiens
agcacuucugguggaugaauuugggggcacaa

SEQ ID NO: 361131 - RNA, 32 nt, Homo Sapiens
aucuucuggagguguucaggauguggagcuuc

SEQ ID NO: 361132 - RNA, 32 nt, Homo Sapiens
guuuaauuuuuccuaguuagacaauaaagauu

SEQ ID NO: 361133 - RNA, 32 nt, Homo Sapiens
gcagaguuaauaugcuuuucugaugaauuaca

SEQ ID NO: 361134 - RNA, 32 nt, Homo Sapiens
caaaauguaauuugcaaagagcuucaaacacc

SEQ ID NO: 361135 - RNA, 32 nt, Homo Sapiens
auuuuucacaugcuaaagcuggcagugaaugu

SEQ ID NO: 361136 - RNA, 32 nt, Homo Sapiens
cagaggagcauauacugaaaagaaggcaguau

SEQ ID NO: 361137 - RNA, 32 nt, Homo Sapiens
agguaguauaaaauccuacuaauaaaaauaag

SEQ ID NO: 361138 - RNA, 32 nt, Homo Sapiens
cgcugguucggggagggccccuggauacugcc

SEQ ID NO: 361139 - RNA, 32 nt, Homo Sapiens
aaaaguuacugauuuaauuucauguuauuugg

SEQ ID NO: 361140 - RNA, 32 nt, Homo Sapiens
ugcugugauuugucaaucaaaaauaguaaaua

SEQ ID NO: 361141 - RNA, 32 nt, Homo Sapiens
uauuuuuaaugauuuaauguuaugauaucaug

SEQ ID NO: 361142 - RNA, 32 nt, Homo Sapiens
uaugucucuuuuccuuuuuaaagcauagaagu

SEQ ID NO: 361143 - RNA, 32 nt, Homo Sapiens
acagaccaccccacccuacccuguccuugccc

SEQ ID NO: 361144 - RNA, 32 nt, Homo Sapiens
auaagacacaaauuauauauuguuaugaagca

SEQ ID NO: 361145 - RNA, 32 nt, Homo Sapiens
cugccccucagcgcccuggacugugguuccag

SEQ ID NO: 361146 - RNA, 32 nt, Homo Sapiens
ggucuucagaggugcgacagggucuggaaucu

SEQ ID NO: 361147 - RNA, 32 nt, Homo Sapiens
uuuuuucuguguaaaucauuaaguauaagaag

SEQ ID NO: 361148 - RNA, 32 nt, Homo Sapiens
ccuugcuuuccccaucuguuggaccaaauaau

SEQ ID NO: 361149 - RNA, 32 nt, Homo Sapiens
acccagcccuuaauuagggcuucagugacuua

SEQ ID NO: 361150 - RNA, 32 nt, Homo Sapiens
ugguggaagacagcuuccuguacuggcggauu

SEQ ID NO: 361151 - RNA, 32 nt, Homo Sapiens
ggucaaugauuuccuccuccgggugugcgaca

SEQ ID NO: 361152 - RNA, 32 nt, Homo Sapiens
uggaacauuuaaaagcaagagaauucuaauuu

SEQ ID NO: 361153 - RNA, 32 nt, Homo Sapiens
cacuguauugcuauauuuuuguagauaaauaa

SEQ ID NO: 361154 - RNA, 32 nt, Homo Sapiens
agcuccaugcuaaccugcccacagcaacccca

SEQ ID NO: 361155 - RNA, 32 nt, Homo Sapiens
uuacaggaggagcuacagcugcugcaggaaua

SEQ ID NO: 361156 - RNA, 32 nt, Homo Sapiens
ugaccuuugugccucuucuugcaagguguuuu

SEQ ID NO: 361157 - RNA, 32 nt, Homo Sapiens
agacagugugauggaugaugcugcugguugua

SEQ ID NO: 361158 - RNA, 32 nt, Homo Sapiens
acccacucggcaccccagucuaacaccacaac

SEQ ID NO: 361159 - RNA, 32 nt, Homo Sapiens
aaugucugcuuugggugcgguuuuguacucgg

SEQ ID NO: 361160 - RNA, 32 nt, Homo Sapiens
uucccuguaauuuguuuuuaaucuuguaaagc

SEQ ID NO: 361161 - RNA, 32 nt, Homo Sapiens
gaagagaagaucauuaaccacuguauacuuug

SEQ ID NO: 361162 - RNA, 32 nt, Homo Sapiens
gaucugaggugcucuggucugugggucagucc

SEQ ID NO: 361163 - RNA, 32 nt, Homo Sapiens
cucaggccugcgccuggggugagcugagcccg

SEQ ID NO: 361164 - RNA, 32 nt, Homo Sapiens
gccuugagaugauuggagcucuuaccaucaaa

SEQ ID NO: 361165 - RNA, 32 nt, Homo Sapiens
guggagucuguggcuggcaggggcauguucau

SEQ ID NO: 361166 - RNA, 32 nt, Homo Sapiens
cccaccccgccagcuccagagccacgacuaau

SEQ ID NO: 361167 - RNA, 32 nt, Homo Sapiens
agacuguagagcucggucucuccaaguuugug

SEQ ID NO: 361168 - RNA, 32 nt, Homo Sapiens
ugcccgucuuguguccgcacagaggucugcaa

SEQ ID NO: 361169 - RNA, 30 nt, Homo Sapiens
uucacuuugaagaagggggaaacuggaaag

SEQ ID NO: 361170 - RNA, 32 nt, Homo Sapiens
gaauacuuuuguuagaaugagaauuaaagaga

SEQ ID NO: 361171 - RNA, 32 nt, Homo Sapiens
gcuagcccgcggcgccgcgacgucugcacggc

SEQ ID NO: 361172 - RNA, 32 nt, Homo Sapiens
gcggcaggccggggcgggacgaggagagcugc

SEQ ID NO: 361173 - RNA, 32 nt, Homo Sapiens
accccaaggggagcuuugggagcacaaagccc

SEQ ID NO: 361174 - RNA, 32 nt, Homo Sapiens
aucccacucagccaagugucuuucugugucug

SEQ ID NO: 361175 - RNA, 32 nt, Homo Sapiens
agaugugcgucccccuccucuuccagcagguc

SEQ ID NO: 361176 - RNA, 30 nt, Homo Sapiens
uaggccaagcccgugccucagggcagacuu

SEQ ID NO: 361177 - RNA, 32 nt, Homo Sapiens
cuucucaaccucagcccgcggcgccgacccuu

SEQ ID NO: 361178 - RNA, 32 nt, Homo Sapiens
cgccaaaaccaucaacuuaugggauauaagcu

SEQ ID NO: 361179 - RNA, 32 nt, Homo Sapiens
cucuaaaaaaacaaaaacaucuggcagaugag

SEQ ID NO: 361180 - RNA, 32 nt, Homo Sapiens
cucuuuucaaggaucuguuauaaugaauaacu

SEQ ID NO: 361181 - RNA, 32 nt, Homo Sapiens
ccugguagcugagacuacaggugcucuucauu

SEQ ID NO: 361182 - RNA, 32 nt, Homo Sapiens
uuuguuuuuuuuuuuuuuuuuacuuuauacag

SEQ ID NO: 361183 - RNA, 32 nt, Homo Sapiens
gagcugcgacgggcacaccccggagcgucggc

SEQ ID NO: 361184 - RNA, 32 nt, Homo Sapiens
acuuggaagacccguguuuccuggaccgcgaa

SEQ ID NO: 361185 - RNA, 32 nt, Homo Sapiens
aucuacacaaaauuauuuuaacugcucuuauu

SEQ ID NO: 361186 - RNA, 32 nt, Homo Sapiens
cagcggugggucuggauguggguaaacuaagg

SEQ ID NO: 361187 - RNA, 32 nt, Homo Sapiens
ucuacuaaaaauacaaaaaauuagcugggcga

SEQ ID NO: 361188 - RNA, 32 nt, Homo Sapiens
ucuccucccgggccggggcgggcccgaggccu

SEQ ID NO: 361189 - RNA, 32 nt, Homo Sapiens
cugcagguguccucgggucucagguggcugcg

SEQ ID NO: 361190 - RNA, 32 nt, Homo Sapiens
caggcugcgccucacccuccaguggagacaga

SEQ ID NO: 361191 - RNA, 32 nt, Homo Sapiens
uugccuggcugguugacagacccggggugguc

SEQ ID NO: 361192 - RNA, 32 nt, Homo Sapiens
ugccacugucuccucuccaucccgcccagcca

SEQ ID NO: 361193 - RNA, 32 nt, Homo Sapiens
cuucuauugcccaguuuccccagccagaacau

SEQ ID NO: 361194 - RNA, 32 nt, Homo Sapiens
cuauuuuuaaucuuguuuguugcgcaauggaa

SEQ ID NO: 361195 - RNA, 32 nt, Homo Sapiens
gauguugcgggaagucagggaccccggaggga

SEQ ID NO: 361196 - RNA, 32 nt, Homo Sapiens
gaguaaaggugacucuugugauuauggguguu

SEQ ID NO: 361197 - RNA, 32 nt, Homo Sapiens
cacauccccuggauccuaugcaccacucagcc

SEQ ID NO: 361198 - RNA, 32 nt, Homo Sapiens
gugugauccgguuucuuuuugcucgccccugu

SEQ ID NO: 361199 - RNA, 32 nt, Homo Sapiens
ugcuuccuaagagucuccauggagucuauuuu

SEQ ID NO: 361200 - RNA, 32 nt, Homo Sapiens
gccgccuccgaccgcaggccgagggccgccac

SEQ ID NO: 361201 - RNA, 32 nt, Homo Sapiens
uucuacuccaugaguaacuccaagugcugcgg

SEQ ID NO: 361202 - RNA, 32 nt, Homo Sapiens
uuuaucuggcuuauuucauuuagcauguuuua

SEQ ID NO: 361203 - RNA, 32 nt, Homo Sapiens
uggccccuucccgacccccacccgccauucag

SEQ ID NO: 361204 - RNA, 32 nt, Homo Sapiens
cccacgcugcgcuccgccaucuccaggccuuu

SEQ ID NO: 361205 - RNA, 32 nt, Homo Sapiens
caugcgugcagcaaagaauggaggagucggaa

SEQ ID NO: 361206 - RNA, 32 nt, Homo Sapiens
auaaaucccacuuuagauccuaaaaaaaaaaa

SEQ ID NO: 361207 - RNA, 32 nt, Homo Sapiens
uagcuuguugaaauguuuugcaucugucaauu

SEQ ID NO: 361208 - RNA, 32 nt, Homo Sapiens
cacacugccucuuuuccaacucuucuuccaac

SEQ ID NO: 361209 - RNA, 32 nt, Homo Sapiens
acggcgacuuccugcgcacgccgcgccgcugg

SEQ ID NO: 361210 - RNA, 32 nt, Homo Sapiens
uucugauuuuaacuucacuaauguaauuacuc

SEQ ID NO: 361211 - RNA, 32 nt, Homo Sapiens
aaugaccgcccggaugugccacuggagccccg

SEQ ID NO: 361212 - RNA, 32 nt, Homo Sapiens
aucuacugauugugggggcauggcaagguuug

SEQ ID NO: 361213 - RNA, 32 nt, Homo Sapiens
agccagccggugccuggcgccccugccccccg

SEQ ID NO: 361214 - RNA, 32 nt, Homo Sapiens
cucuaaagauaaaaucuauguuagauugucaa

SEQ ID NO: 361215 - RNA, 32 nt, Homo Sapiens
cuccuucggaaagaugucggacacggcaguag

SEQ ID NO: 361216 - RNA, 32 nt, Homo Sapiens
cccugucuucgggucucaggacccaaagaucc

SEQ ID NO: 361217 - RNA, 32 nt, Homo Sapiens
auuuuagguucaauagcugaaguuuuucaugu

SEQ ID NO: 361218 - RNA, 32 nt, Homo Sapiens
ccaaaggauauuacagaauauuagauucauua

SEQ ID NO: 361219 - RNA, 32 nt, Homo Sapiens
aggcccucccucugcccucccgucugugagcu

SEQ ID NO: 361220 - RNA, 32 nt, Homo Sapiens
cuggaaaauaauauccaaaugaaauuaagucu

SEQ ID NO: 361221 - RNA, 32 nt, Homo Sapiens
auacucauauccugaaaagaugugauuucauc

SEQ ID NO: 361222 - RNA, 32 nt, Homo Sapiens
ucccccuccccucccccuccccaacucagauc

SEQ ID NO: 361223 - RNA, 32 nt, Homo Sapiens
ugguuggagcugggcuccgucuccaggucugg

SEQ ID NO: 361224 - RNA, 32 nt, Homo Sapiens
gggagcggagagcgcaggcgugccgaggugga

SEQ ID NO: 361225 - RNA, 32 nt, Homo Sapiens
agugggagcuucggucucguauugugucugga

SEQ ID NO: 361226 - RNA, 32 nt, Homo Sapiens
ccuccuccaauuccccucccccaucauucugg

SEQ ID NO: 361227 - RNA, 32 nt, Homo Sapiens
cuagacucagagguacuaaaauuuguuaccac

SEQ ID NO: 361228 - RNA, 32 nt, Homo Sapiens
aaugcugcuggcuuccaguccuccccuuccuc

SEQ ID NO: 361229 - RNA, 32 nt, Homo Sapiens
caguuucccaaaacguaaucaagccucugguc

SEQ ID NO: 361230 - RNA, 32 nt, Homo Sapiens
auuagcucauuucaccauugagaggucggaag

SEQ ID NO: 361231 - RNA, 32 nt, Homo Sapiens
ugcccacccaccccgaccccagcccccagccu

SEQ ID NO: 361232 - RNA, 32 nt, Homo Sapiens
auaacuuguuacaaguuuuuguuguaaauaca

SEQ ID NO: 361233 - RNA, 32 nt, Homo Sapiens
auccaaagauaaauuccgagugauauauuccu

SEQ ID NO: 361234 - RNA, 32 nt, Homo Sapiens
guucucauuguuagauuuugccuuuuacaagu

SEQ ID NO: 361235 - RNA, 32 nt, Homo Sapiens
auuagcuugcauuugaugaccuuuaagggcac

SEQ ID NO: 361236 - RNA, 32 nt, Homo Sapiens
cguggagccgcggcuuugcccgucuccucugg

SEQ ID NO: 361237 - RNA, 32 nt, Homo Sapiens
cagaagcggcgcugcuacagggaccaggagcu

SEQ ID NO: 361238 - RNA, 32 nt, Homo Sapiens
acuugucacuuuaauuugauauuuuuauuuuc

SEQ ID NO: 361239 - RNA, 32 nt, Homo Sapiens
ugcauggcccaaggacaaggaccuccagccag

SEQ ID NO: 361240 - RNA, 32 nt, Homo Sapiens
cagcguuggcccggccccgggagcggagagcg

SEQ ID NO: 361241 - RNA, 32 nt, Homo Sapiens
cccacacagaugcugggcugggacauggcauc

SEQ ID NO: 361242 - RNA, 32 nt, Homo Sapiens
acuuuaaacaauugcuugcugagauguuguua

SEQ ID NO: 361243 - RNA, 32 nt, Homo Sapiens
agacggagcccggcccugcgccuccgcaccac

SEQ ID NO: 361244 - RNA, 32 nt, Homo Sapiens
guuacacauaugucuguaugcaugugaacaca

SEQ ID NO: 361245 - RNA, 32 nt, Homo Sapiens
ccacguagcgcacuuuuauuuguauuuuuuca

SEQ ID NO: 361246 - RNA, 32 nt, Homo Sapiens
gaaacugaauguuuauuccuugauacuaaaag

SEQ ID NO: 361247 - RNA, 32 nt, Homo Sapiens
ucuauauauuauuaauauuaaauuguuuuuua

SEQ ID NO: 361248 - RNA, 32 nt, Homo Sapiens
cuaaagacacugggcucugccaggggccuugg

SEQ ID NO: 361249 - RNA, 32 nt, Homo Sapiens
cggggcugagggaaggaggcggcggccaugga

SEQ ID NO: 361250 - RNA, 32 nt, Homo Sapiens
uucagguaaggguaauauuuuaauaguaguca

SEQ ID NO: 361251 - RNA, 32 nt, Homo Sapiens
gggagggccuggacugagggggaccaggucuu

SEQ ID NO: 361252 - RNA, 28 nt, Homo Sapiens
aggguggggcggcugggaagcuggcacg

SEQ ID NO: 361253 - RNA, 32 nt, Homo Sapiens
aaucacacaguuguggcaaaaaucacauugug

SEQ ID NO: 361254 - RNA, 32 nt, Homo Sapiens
cucucgugccccagcggccugcccagggccuu

SEQ ID NO: 361255 - RNA, 32 nt, Homo Sapiens
ggggugaucccccaaggagugauacauauauu

SEQ ID NO: 361256 - RNA, 32 nt, Homo Sapiens
acaggcuagggucauggagaguggugcuaaga

SEQ ID NO: 361257 - RNA, 32 nt, Homo Sapiens
uugcagcucagguuucggggugcuugaggagg

SEQ ID NO: 361258 - RNA, 32 nt, Homo Sapiens
auuucucagcauuuauacuaaaaauuauguaa

SEQ ID NO: 361259 - RNA, 32 nt, Homo Sapiens
auuugaguauuuuuauaaugucucuuuuaaag

SEQ ID NO: 361260 - RNA, 32 nt, Homo Sapiens
auaucuauuuuuccccuguggauuagccccgu

SEQ ID NO: 361261 - RNA, 32 nt, Homo Sapiens
uaauagcaaaaagugccaaaguccucagagac

SEQ ID NO: 361262 - RNA, 31 nt, Homo Sapiens
cuccuaccucacugccugucccagagcaggc

SEQ ID NO: 361263 - RNA, 32 nt, Homo Sapiens
ugaagaaggcuuggaacccaccccaccucccu

SEQ ID NO: 361264 - RNA, 32 nt, Homo Sapiens
guuugguucaagcacaucaaggccuucgaccg

SEQ ID NO: 361265 - RNA, 32 nt, Homo Sapiens
ugaagucaggucuuuuaaucagguuagaauuc

SEQ ID NO: 361266 - RNA, 32 nt, Homo Sapiens
gugucacccauguugagccgcuccugauggcu

SEQ ID NO: 361267 - RNA, 32 nt, Homo Sapiens
uauaugugauagcuguccaacauccugucugg

SEQ ID NO: 361268 - RNA, 32 nt, Homo Sapiens
ugauucaauauuuuugccaaaccucaggguaa

SEQ ID NO: 361269 - RNA, 32 nt, Homo Sapiens
accuucaucccucucucuuugccuccaagaag

SEQ ID NO: 361270 - RNA, 32 nt, Homo Sapiens
gauccagcugguuuuuguuuugcugaggcuca

SEQ ID NO: 361271 - RNA, 29 nt, Homo Sapiens
auuauuucuauccaauuugugaagaagga

SEQ ID NO: 361272 - RNA, 32 nt, Homo Sapiens
ggguucagaggccgguaccuccccuacagcag

SEQ ID NO: 361273 - RNA, 32 nt, Homo Sapiens
gacccagcucuacuccaggcuuccacacuucu

SEQ ID NO: 361274 - RNA, 32 nt, Homo Sapiens
ugcaggacgcagaaaggauguagggagagacu

SEQ ID NO: 361275 - RNA, 32 nt, Homo Sapiens
cguuugcugcuuugcauccucuccaggcucug

SEQ ID NO: 361276 - RNA, 32 nt, Homo Sapiens
ucuucucuagaauccacugguaagccacaucu

SEQ ID NO: 361277 - RNA, 32 nt, Homo Sapiens
gcagccaggcccagcccccgcccgagcucagg

SEQ ID NO: 361278 - RNA, 32 nt, Homo Sapiens
guaaucguuccugacccuugugucucauauac

SEQ ID NO: 361279 - RNA, 32 nt, Homo Sapiens
ccagcuucaaggaaagaaaauuuuuucuacaa

SEQ ID NO: 361280 - RNA, 32 nt, Homo Sapiens
cgcagcccgcggcaaucaauaaacagcaggug

SEQ ID NO: 361281 - RNA, 32 nt, Homo Sapiens
ucauaguugcuuuuuucauaguucuuguuuuc

SEQ ID NO: 361282 - RNA, 32 nt, Homo Sapiens
uccaauuuucugugcugaaaucauucugaaaa

SEQ ID NO: 361283 - RNA, 32 nt, Homo Sapiens
ggaauuguuuuaagucuuaucaagcagccaag

SEQ ID NO: 361284 - RNA, 32 nt, Homo Sapiens
cucaucccggccccgggauggcguccccacgg

SEQ ID NO: 361285 - RNA, 32 nt, Homo Sapiens
aggucccugugucguugggggaggaagugacc

SEQ ID NO: 361286 - RNA, 32 nt, Homo Sapiens
agcccugucccugcccuucucugccuggccug

SEQ ID NO: 361287 - RNA, 32 nt, Homo Sapiens
aaggguggggaagggugggcccggggucacac

SEQ ID NO: 361288 - RNA, 32 nt, Homo Sapiens
caaaauaaauaccauuuuaguggcaacagcuu

SEQ ID NO: 361289 - RNA, 32 nt, Homo Sapiens
aaguucagagcucugauguggaaagacaggag

SEQ ID NO: 361290 - RNA, 32 nt, Homo Sapiens
gaagcgagcucuggcugugacaucaguuguca

SEQ ID NO: 361291 - RNA, 32 nt, Homo Sapiens
auaagcucagaauccaagugaacacuagccag

SEQ ID NO: 361292 - RNA, 32 nt, Homo Sapiens
uacagauaaauuuugguuuuauuguuauucug

SEQ ID NO: 361293 - RNA, 32 nt, Homo Sapiens
cagcaggguugugacaauauugaaacaccacu

SEQ ID NO: 361294 - RNA, 29 nt, Homo Sapiens
guaaaauaaaguuuucuauuuuuccuuaa

SEQ ID NO: 361295 - RNA, 32 nt, Homo Sapiens
cuuuuuagcauuauaucuaacaaaucaagaga

SEQ ID NO: 361296 - RNA, 32 nt, Homo Sapiens
uuagaccaacuggagaauugccagacuugugg

SEQ ID NO: 361297 - RNA, 32 nt, Homo Sapiens
gucuccguggcugcccucuccugccucaugcu

SEQ ID NO: 361298 - RNA, 32 nt, Homo Sapiens
ccaaggcaaguggguaugggaauagcaacuaa

SEQ ID NO: 361299 - RNA, 32 nt, Homo Sapiens
cugaauuucuucacuagagcuuccucaucagg

SEQ ID NO: 361300 - RNA, 32 nt, Homo Sapiens
cccaccgcccaggucuuaacuuucuggcaucc

SEQ ID NO: 361301 - RNA, 32 nt, Homo Sapiens
cgaaggacagccugcagugaccagagagccca

SEQ ID NO: 361302 - RNA, 32 nt, Homo Sapiens
cccuuccgcucgccuuuuucgucagccggcug

SEQ ID NO: 361303 - RNA, 32 nt, Homo Sapiens
uauauacuauuaugcagcuuauuuuaccugaa

SEQ ID NO: 361304 - RNA, 32 nt, Homo Sapiens
uugagcagaaggaaacaaaguucugcagauaa

SEQ ID NO: 361305 - RNA, 32 nt, Homo Sapiens
uuucuaauaauggccacuguugcuuuuacacu

SEQ ID NO: 361306 - RNA, 32 nt, Homo Sapiens
cacacacacacacacacacacacacacacacu

SEQ ID NO: 361307 - RNA, 32 nt, Homo Sapiens
gccuauucccccagcagcgucuucccgccgcu

SEQ ID NO: 361308 - RNA, 32 nt, Homo Sapiens
acccggggaccgacucuggggguuggagagac

SEQ ID NO: 361309 - RNA, 32 nt, Homo Sapiens
uuugggucccagcuccuccccuuccacucagc

SEQ ID NO: 361310 - RNA, 32 nt, Homo Sapiens
ucgccugugggaagagaagagaagccucuuca

SEQ ID NO: 361311 - RNA, 32 nt, Homo Sapiens
uuguguugacuguugauacuuauuuacuguau

SEQ ID NO: 361312 - RNA, 32 nt, Homo Sapiens
gcuguucuggcuggccucuccuuccugaggcc

SEQ ID NO: 361313 - RNA, 32 nt, Homo Sapiens
ugaucucugucuagaaauaccauagaccauau

SEQ ID NO: 361314 - RNA, 32 nt, Homo Sapiens
gguggcuuuuucuagccagauugcauuaaucc

SEQ ID NO: 361315 - RNA, 32 nt, Homo Sapiens
gcuggggggucucagcauguagggcuucugug

SEQ ID NO: 361316 - RNA, 32 nt, Homo Sapiens
uucucaacaaaguggauuuauauagacaaaau

SEQ ID NO: 361317 - RNA, 32 nt, Homo Sapiens
gccuguaacuauuauuuuuuuauaaagagaga

SEQ ID NO: 361318 - RNA, 32 nt, Homo Sapiens
cuccagcaccucagggccaauauaagaagugg

SEQ ID NO: 361319 - RNA, 32 nt, Homo Sapiens
aaccagguggaaaaaggaaggguuucagugcu

SEQ ID NO: 361320 - RNA, 32 nt, Homo Sapiens
auaagcuguaauaucauuuuauagaaaaugca

SEQ ID NO: 361321 - RNA, 32 nt, Homo Sapiens
guguguaaaagcugaugauuacagcaagaaug

SEQ ID NO: 361322 - RNA, 32 nt, Homo Sapiens
guggacaggcgaggcucuggugcuuacugcac

SEQ ID NO: 361323 - RNA, 32 nt, Homo Sapiens
cccuagcuucccucccuaucccugcagccuga

SEQ ID NO: 361324 - RNA, 32 nt, Homo Sapiens
guccauaugcuaauagugaucaagaagacuuu

SEQ ID NO: 361325 - RNA, 32 nt, Homo Sapiens
aucaugucuugugcauaauucuuccaaaggau

SEQ ID NO: 361326 - RNA, 32 nt, Homo Sapiens
ggcgucacucccuagcucugucccagcuuuug

SEQ ID NO: 361327 - RNA, 32 nt, Homo Sapiens
uaaauuuuauuaugauaaauuccugggagggg

SEQ ID NO: 361328 - RNA, 32 nt, Homo Sapiens
gauggcuuugugaacgaguccaggcugcagaa

SEQ ID NO: 361329 - RNA, 32 nt, Homo Sapiens
uggccgagggaagaaaaagcuucuggaugucc

SEQ ID NO: 361330 - RNA, 32 nt, Homo Sapiens
gcggggccucgcgagagcggcgaggccugggc

SEQ ID NO: 361331 - RNA, 32 nt, Homo Sapiens
gaaucaggccuggagaucuagggucuugucca

SEQ ID NO: 361332 - RNA, 32 nt, Homo Sapiens
cgggcgggcgcgcgugugcccaggagugcgcg

SEQ ID NO: 361333 - RNA, 32 nt, Homo Sapiens
uaauagagaaguaaaaaauguaaguugaccuu

SEQ ID NO: 361334 - RNA, 32 nt, Homo Sapiens
aaaaaauuaaaauaaaauaaaauaaaaaucau

SEQ ID NO: 361335 - RNA, 32 nt, Homo Sapiens
guuaauaguuacucuagaaaaauuggagauuu

SEQ ID NO: 361336 - RNA, 32 nt, Homo Sapiens
guaggcgugccaagccgcggcucugcggagaa

SEQ ID NO: 361337 - RNA, 32 nt, Homo Sapiens
caaaauugauucaugaguuuuuugccucccac

SEQ ID NO: 361338 - RNA, 32 nt, Homo Sapiens
cuccuugaggauuaaagccuaacaguacugag

SEQ ID NO: 361339 - RNA, 32 nt, Homo Sapiens
accucugcuucucagccccacccaggcaagcc

SEQ ID NO: 361340 - RNA, 32 nt, Homo Sapiens
ccaaaggacucccccugaagaccugucaaagu

SEQ ID NO: 361341 - RNA, 32 nt, Homo Sapiens
gccccuuuguugggggcagccuguugguccac

SEQ ID NO: 361342 - RNA, 32 nt, Homo Sapiens
ggguguauaugugcuuauaaucuuacauacau

SEQ ID NO: 361343 - RNA, 32 nt, Homo Sapiens
uuuuagaccugggacggcaaaagggaagggaa

SEQ ID NO: 361344 - RNA, 32 nt, Homo Sapiens
ccaguaaacacuaagauggaccucaagccgac

SEQ ID NO: 361345 - RNA, 32 nt, Homo Sapiens
augcugccuucugggcaggacacgccauccug

SEQ ID NO: 361346 - RNA, 32 nt, Homo Sapiens
uuaauuuguaaauuuagugaccauuagcuagu

SEQ ID NO: 361347 - RNA, 32 nt, Homo Sapiens
gcuacaaaguguuuaaaacagauuguuuccca

SEQ ID NO: 361348 - RNA, 32 nt, Homo Sapiens
ugcaggcgacacaccaagggcuccacgaggga

SEQ ID NO: 361349 - RNA, 32 nt, Homo Sapiens
cauuaccacagcuacaacaacauguaccugua

SEQ ID NO: 361350 - RNA, 32 nt, Homo Sapiens
gacaaaauucauucagaccgcacauguuagag

SEQ ID NO: 361351 - RNA, 32 nt, Homo Sapiens
ccuuccaauaagucaagcaagauggaaacauu

SEQ ID NO: 361352 - RNA, 32 nt, Homo Sapiens
gcagugaugcuucauauuucccagcacuguuc

SEQ ID NO: 361353 - RNA, 32 nt, Homo Sapiens
gucuagagacauguguuuauuuuugaugccua

SEQ ID NO: 361354 - RNA, 32 nt, Homo Sapiens
uuccaguuccacccuuuccugcggcaccacca

SEQ ID NO: 361355 - RNA, 31 nt, Homo Sapiens
ggcagcucacggaaauacagcuucagcgugc

SEQ ID NO: 361356 - RNA, 32 nt, Homo Sapiens
uuugggaggugauugggucauaggggugcagc

SEQ ID NO: 361357 - RNA, 32 nt, Homo Sapiens
uacaaugcccugcugcugcucaucucccuuua

SEQ ID NO: 361358 - RNA, 32 nt, Homo Sapiens
ucgccgagcucagggucccccaccgcaccgcg

SEQ ID NO: 361359 - RNA, 32 nt, Homo Sapiens
guauuaacauuuuggaauauguuuuauuaguu

SEQ ID NO: 361360 - RNA, 32 nt, Homo Sapiens
gcauguauuuuuaucaauuuaacacagaucaa

SEQ ID NO: 361361 - RNA, 32 nt, Homo Sapiens
uaaagggcccucugcuggcugaguggcaauac

SEQ ID NO: 361362 - RNA, 32 nt, Homo Sapiens
ucugugauauuguccaagaauguaucaauaag

SEQ ID NO: 361363 - RNA, 32 nt, Homo Sapiens
aagcuuaugacgugggcgaaguccucaaaggc

SEQ ID NO: 361364 - RNA, 32 nt, Homo Sapiens
cagaggcaagcacuggugagucuaggacagau

SEQ ID NO: 361365 - RNA, 32 nt, Homo Sapiens
ucuggagcuaaaagcagagauguuugagguga

SEQ ID NO: 361366 - RNA, 32 nt, Homo Sapiens
aaugggaguacagagagcgucuggccuuggag

SEQ ID NO: 361367 - RNA, 32 nt, Homo Sapiens
gaggaggggcagagaccugggacucuguauuu

SEQ ID NO: 361368 - RNA, 32 nt, Homo Sapiens
gggggcgacggccgcugugacgcugcggcggc

SEQ ID NO: 361369 - RNA, 32 nt, Homo Sapiens
ugugggugguggggggcggggggcaggacuga

SEQ ID NO: 361370 - RNA, 32 nt, Homo Sapiens
gaagcaaaacaaacaaagcaauauuaaaggaa

SEQ ID NO: 361371 - RNA, 32 nt, Homo Sapiens
cuaacaguaguauuuuuagaauggcagcuaua

SEQ ID NO: 361372 - RNA, 31 nt, Homo Sapiens
aucuuuacugaugaacaguccacuuccaaga

SEQ ID NO: 361373 - RNA, 32 nt, Homo Sapiens
gcucuguguccgucuguguaugugugugucug

SEQ ID NO: 361374 - RNA, 32 nt, Homo Sapiens
cggaaauucuucccuucccuuagccuguggaa

SEQ ID NO: 361375 - RNA, 32 nt, Homo Sapiens
gaggcccggagcugcuccugcugcuggcaaca

SEQ ID NO: 361376 - RNA, 32 nt, Homo Sapiens
ugaagacuuguggauauucagaggauauuuuc

SEQ ID NO: 361377 - RNA, 32 nt, Homo Sapiens
uugaaggaaugggauauggagccacauccacu

SEQ ID NO: 361378 - RNA, 32 nt, Homo Sapiens
agauuuuauucuuuuuuccccauuuguuuuaa

SEQ ID NO: 361379 - RNA, 32 nt, Homo Sapiens
acugugaggggagagcagcauggccagguccu

SEQ ID NO: 361380 - RNA, 32 nt, Homo Sapiens
uccugaccgcguuccucagccuccucuccuag

SEQ ID NO: 361381 - RNA, 32 nt, Homo Sapiens
uugcuuugaccacagcacgucuguguugaccu

SEQ ID NO: 361382 - RNA, 32 nt, Homo Sapiens
uggugucuggagagguucgggcucgguccuca

SEQ ID NO: 361383 - RNA, 32 nt, Homo Sapiens
agguucuuuccacaggccauccucuuauuccg

SEQ ID NO: 361384 - RNA, 32 nt, Homo Sapiens
ucugcuuuaaagugaggggccgaggaaaacuu

SEQ ID NO: 361385 - RNA, 32 nt, Homo Sapiens
uugcaggagaaauaaugaggauguaauuauua

SEQ ID NO: 361386 - RNA, 32 nt, Homo Sapiens
caaagagagaaaauaaagaccuugcuuaugau

SEQ ID NO: 361387 - RNA, 32 nt, Homo Sapiens
cggcucggggaccccgacucccggcccagcga

SEQ ID NO: 361388 - RNA, 32 nt, Homo Sapiens
uaaagaaugugguaaccacagaauuaauaacu

SEQ ID NO: 361389 - RNA, 32 nt, Homo Sapiens
ccccugcaggccuggggcuccuucugggaagu

SEQ ID NO: 361390 - RNA, 32 nt, Homo Sapiens
ugcugaggagucauggaagaguuuuuaaacca

SEQ ID NO: 361391 - RNA, 32 nt, Homo Sapiens
ggaacaaaacagugacgagacagauaguuaga

SEQ ID NO: 361392 - RNA, 32 nt, Homo Sapiens
guguggacauaacugcucuggaccucagcuuu

SEQ ID NO: 361393 - RNA, 32 nt, Homo Sapiens
uuuguagauuuguuuacacuuuuguuucucag

SEQ ID NO: 361394 - RNA, 32 nt, Homo Sapiens
uugacuuuaaacagucuucuuuuuggaagcag

SEQ ID NO: 361395 - RNA, 32 nt, Homo Sapiens
cagaauagcagagcccuccucccgcggagcug

SEQ ID NO: 361396 - RNA, 32 nt, Homo Sapiens
agaagggugggcuguugcccuugccugagguu

SEQ ID NO: 361397 - RNA, 32 nt, Homo Sapiens
gcggccgugcggggcgucaauggaucgccacu

SEQ ID NO: 361398 - RNA, 32 nt, Homo Sapiens
ugccaccagcccugcuggccccugguuccgcu

SEQ ID NO: 361399 - RNA, 32 nt, Homo Sapiens
uggcuccaggugccgcccacucuugacgugau

SEQ ID NO: 361400 - RNA, 32 nt, Homo Sapiens
agauuuugguuuccuuuuuuuaucacauggau

SEQ ID NO: 361401 - RNA, 32 nt, Homo Sapiens
uuuaugucagaacuuggugccuguaccgucaa

SEQ ID NO: 361402 - RNA, 30 nt, Homo Sapiens
cgguggggagguggcugcgcaggguggagg

SEQ ID NO: 361403 - RNA, 32 nt, Homo Sapiens
cauagcaugggaagaagaaaauaaacaucucc

SEQ ID NO: 361404 - RNA, 32 nt, Homo Sapiens
uguggacuaugaagaugcuauguagguuaugg

SEQ ID NO: 361405 - RNA, 32 nt, Homo Sapiens
ccaauuucuguuuuuaagagaauggggucuug

SEQ ID NO: 361406 - RNA, 32 nt, Homo Sapiens
gacuaaugauguuuccucuugccuucucuggu

SEQ ID NO: 361407 - RNA, 32 nt, Homo Sapiens
ggacgucuggucuccugugugggauaauacac

SEQ ID NO: 361408 - RNA, 32 nt, Homo Sapiens
aaaggugcuucugagagauaagagggaagggg

SEQ ID NO: 361409 - RNA, 32 nt, Homo Sapiens
aucgcuguuucccccauuuuuccuuuucaccc

SEQ ID NO: 361410 - RNA, 32 nt, Homo Sapiens
cuucuccagugucuaccuuccuccucaacucc

SEQ ID NO: 361411 - RNA, 32 nt, Homo Sapiens
uuacaacauuuuacuuuuuaucauugaugugu

SEQ ID NO: 361412 - RNA, 32 nt, Homo Sapiens
aacacaaagggugggggcaggggaguuugggg

SEQ ID NO: 361413 - RNA, 32 nt, Homo Sapiens
ugaauugagaugauuaaaauggugacuuaauc

SEQ ID NO: 361414 - RNA, 32 nt, Homo Sapiens
ugaaugggggagggggaggggagcacggggug

SEQ ID NO: 361415 - RNA, 32 nt, Homo Sapiens
aggugacgccgcagccgccgggagccgcgagg

SEQ ID NO: 361416 - RNA, 32 nt, Homo Sapiens
ugauucuccuucagcccucaccccugguucuc

SEQ ID NO: 361417 - RNA, 32 nt, Homo Sapiens
guccaaagugaaacuuuuucucuuuccugucu

SEQ ID NO: 361418 - RNA, 32 nt, Homo Sapiens
accuuguaauuugaaauauuuucuuuguuaaa

SEQ ID NO: 361419 - RNA, 32 nt, Homo Sapiens
ucagauugcauucaugcuucuguguacacaua

SEQ ID NO: 361420 - RNA, 32 nt, Homo Sapiens
acucaaggccacucacuuaauacccgucucuu

SEQ ID NO: 361421 - RNA, 32 nt, Homo Sapiens
cugcccuguucccccauccauccuacaagccu

SEQ ID NO: 361422 - RNA, 27 nt, Homo Sapiens
cgauucuccuaccucagcccccagagu

SEQ ID NO: 361423 - RNA, 30 nt, Homo Sapiens
cgccuggcgcccgcccgagcugccgccuug

SEQ ID NO: 361424 - RNA, 32 nt, Homo Sapiens
ugguuaucaaauccaccccaccccauuacaca

SEQ ID NO: 361425 - RNA, 32 nt, Homo Sapiens
uuuuuaaaaacaaacaaacaaacaaaaaaaaa

SEQ ID NO: 361426 - RNA, 32 nt, Homo Sapiens
gauaagaagugguuccagagguccugguggaa

SEQ ID NO: 361427 - RNA, 32 nt, Homo Sapiens
cccaucucugcaaaauuaaaacaucagccgac

SEQ ID NO: 361428 - RNA, 31 nt, Homo Sapiens
uucagaaaauaaaagcagagauaacacuucc

SEQ ID NO: 361429 - RNA, 32 nt, Homo Sapiens
ugcaaaaagcacaacuaauaaauugaauguuu

SEQ ID NO: 361430 - RNA, 32 nt, Homo Sapiens
acauccuaucuuucuucuucuauucaugcuuu

SEQ ID NO: 361431 - RNA, 32 nt, Homo Sapiens
gaggaggaggaggaagugucagauaugggugg

SEQ ID NO: 361432 - RNA, 32 nt, Homo Sapiens
cugaauucauggagauguggacacgcuugguu

SEQ ID NO: 361433 - RNA, 32 nt, Homo Sapiens
aacaauguauauuauguuccuguguguugaau

SEQ ID NO: 361434 - RNA, 32 nt, Homo Sapiens
ggcuaagugaccagcuuucuuguccucuccuu

SEQ ID NO: 361435 - RNA, 32 nt, Homo Sapiens
aaaacugggcugaauuugcugcugucuccagc

SEQ ID NO: 361436 - RNA, 32 nt, Homo Sapiens
gagaugaaagauacauggaaaucauauuauau

SEQ ID NO: 361437 - RNA, 32 nt, Homo Sapiens
cauuagcacaacuuacgcauuggggaauugug

SEQ ID NO: 361438 - RNA, 32 nt, Homo Sapiens
aacuccccugaugaagaaagugccagaggcag

SEQ ID NO: 361439 - RNA, 32 nt, Homo Sapiens
ccgucucuaccaaaauacaaaaaauuagccag

SEQ ID NO: 361440 - RNA, 32 nt, Homo Sapiens
acauucaauauuuguagguuugauaaauuuca

SEQ ID NO: 361441 - RNA, 32 nt, Homo Sapiens
auauuaaauaucuauuguauccauagaauagg

SEQ ID NO: 361442 - RNA, 32 nt, Homo Sapiens
ucagaagagcuugcaggcaagccaggagaccc

SEQ ID NO: 361443 - RNA, 32 nt, Homo Sapiens
ggaaggagcaggaagggcucccugcccuuggg

SEQ ID NO: 361444 - RNA, 32 nt, Homo Sapiens
ucccucucucuuaaauuggugccuugaaagag

SEQ ID NO: 361445 - RNA, 31 nt, Homo Sapiens
auguuccuaaaacaucccugaguucaccacc

SEQ ID NO: 361446 - RNA, 32 nt, Homo Sapiens
gugagugaaacacagaauaugggaauggcagc

SEQ ID NO: 361447 - RNA, 32 nt, Homo Sapiens
gcuguuugaaaauaaaucuuaguguucaaaac

SEQ ID NO: 361448 - RNA, 32 nt, Homo Sapiens
cggaagagcccagccuucgccgagggccgcag

SEQ ID NO: 361449 - RNA, 32 nt, Homo Sapiens
uuauuuuacuucuaaccuuguuuccugacggu

SEQ ID NO: 361450 - RNA, 32 nt, Homo Sapiens
auggguaguauuuuuuacauuuuacacacugu

SEQ ID NO: 361451 - RNA, 32 nt, Homo Sapiens
acauaaaauaauuuauacuugaaaaaaucaaa

SEQ ID NO: 361452 - RNA, 32 nt, Homo Sapiens
agguagucaagcgggggucgucucagaucugg

SEQ ID NO: 361453 - RNA, 32 nt, Homo Sapiens
cacuuccacggcucagcgucagggcaaguugg

SEQ ID NO: 361454 - RNA, 32 nt, Homo Sapiens
cuccaggccugaagagacuaugcugaguguga

SEQ ID NO: 361455 - RNA, 32 nt, Homo Sapiens
gauggcuuuuauuccuuuccacauuuccuaug

SEQ ID NO: 361456 - RNA, 32 nt, Homo Sapiens
agccgggcccuccccucaggaacguguccagg

SEQ ID NO: 361457 - RNA, 32 nt, Homo Sapiens
ccccugcgggcucgagggcgcgcucuggucgc

SEQ ID NO: 361458 - RNA, 32 nt, Homo Sapiens
uuucaagccagccccaggaccaggcuagcucc

SEQ ID NO: 361459 - RNA, 32 nt, Homo Sapiens
guggagugggcggggggucuccgcggaggagg

SEQ ID NO: 361460 - RNA, 32 nt, Homo Sapiens
cugugucgugagacguuuuucuggauuuuuuu

SEQ ID NO: 361461 - RNA, 32 nt, Homo Sapiens
guaacugauauuaaaccuaaauguucugccua

SEQ ID NO: 361462 - RNA, 32 nt, Homo Sapiens
gccuuugaugaacuuaaaaggagagccuggag

SEQ ID NO: 361463 - RNA, 32 nt, Homo Sapiens
uuccacaguaaaaauacguuuuuuguaaaggc

SEQ ID NO: 361464 - RNA, 32 nt, Homo Sapiens
gaugccgaccucagccucacaggccaaagcau

SEQ ID NO: 361465 - RNA, 32 nt, Homo Sapiens
auuaauuuagagcagaaccuuuccaagggauc

SEQ ID NO: 361466 - RNA, 32 nt, Homo Sapiens
uuauuauaaagccgaugauauuucauggcagg

SEQ ID NO: 361467 - RNA, 32 nt, Homo Sapiens
guugggugguugccaauuuccuagaacggaau

SEQ ID NO: 361468 - RNA, 32 nt, Homo Sapiens
guuuucguucugcuuccaaccugaguaaagug

SEQ ID NO: 361469 - RNA, 32 nt, Homo Sapiens
uuugugcggccggcggacuggagcucccaguc

SEQ ID NO: 361470 - RNA, 32 nt, Homo Sapiens
aguccuucccaccuccucccuacccuucuaca

SEQ ID NO: 361471 - RNA, 32 nt, Homo Sapiens
agagaagaucacauuuucuucuugagcaagag

SEQ ID NO: 361472 - RNA, 32 nt, Homo Sapiens
gguaauuguaaauuuaaagcauuagcauuuau

SEQ ID NO: 361473 - RNA, 32 nt, Homo Sapiens
ccuugugaaaauuuauccauuuaucuucaggu

SEQ ID NO: 361474 - RNA, 32 nt, Homo Sapiens
ugccgggcgcgguggcuuacgccuauaauccc

SEQ ID NO: 361475 - RNA, 31 nt, Homo Sapiens
ucagaaacacagagaaagucuugcuuuuuca

SEQ ID NO: 361476 - RNA, 32 nt, Homo Sapiens
agcucucucaugacccaccucagcucagcccc

SEQ ID NO: 361477 - RNA, 32 nt, Homo Sapiens
ccagaggcggcggcugcucuggaccucggugu

SEQ ID NO: 361478 - RNA, 32 nt, Homo Sapiens
cuagagcacccuugggaccccuaguuccacug

SEQ ID NO: 361479 - RNA, 32 nt, Homo Sapiens
ucugacaaggucaagcuccaaggaagggauuc

SEQ ID NO: 361480 - RNA, 27 nt, Homo Sapiens
augggagccuucuucccucuccccucc

SEQ ID NO: 361481 - RNA, 32 nt, Homo Sapiens
ugccuuugcugaggguauguccugcuccuuuc

SEQ ID NO: 361482 - RNA, 32 nt, Homo Sapiens
cgagggcgcgggccaggcgcgcggugucaccu

SEQ ID NO: 361483 - RNA, 32 nt, Homo Sapiens
cggacccagggaccuucagggcccgcagaccc

SEQ ID NO: 361484 - RNA, 32 nt, Homo Sapiens
gggcccuuacucuuccucucccuugucgccuu

SEQ ID NO: 361485 - RNA, 32 nt, Homo Sapiens
uguuggucucaaacuccugaccucagguaauc

SEQ ID NO: 361486 - RNA, 32 nt, Homo Sapiens
guccggccgucagcugcagcccggggagccag

SEQ ID NO: 361487 - RNA, 32 nt, Homo Sapiens
gguuuagggcccauuuggggcccccuccuucu

SEQ ID NO: 361488 - RNA, 32 nt, Homo Sapiens
agcugggugacggguucgcggcugccgccgga

SEQ ID NO: 361489 - RNA, 32 nt, Homo Sapiens
uagaaaagcacugguaguuguacaauaucagu

SEQ ID NO: 361490 - RNA, 32 nt, Homo Sapiens
uuaugaccucaaucaauuuaauugucuagaau

SEQ ID NO: 361491 - RNA, 32 nt, Homo Sapiens
aaaaggauggaaacuuuuagaugacauucuac

SEQ ID NO: 361492 - RNA, 32 nt, Homo Sapiens
agaggaaggucuuuuuaccaucagcauucucu

SEQ ID NO: 361493 - RNA, 32 nt, Homo Sapiens
gggucagauuguuuuucuuccaucucuuaagg

SEQ ID NO: 361494 - RNA, 32 nt, Homo Sapiens
cucgcgcuggucccggucucgccccgcagccc

SEQ ID NO: 361495 - RNA, 32 nt, Homo Sapiens
cagcuauugguaauauaauaauguccuuuccc

SEQ ID NO: 361496 - RNA, 32 nt, Homo Sapiens
ugaaccccagaguuuaaauaucucuggcucaa

SEQ ID NO: 361497 - RNA, 32 nt, Homo Sapiens
ggcaggaacgggggcggggacggcgcuggagg

SEQ ID NO: 361498 - RNA, 32 nt, Homo Sapiens
cuggacaguuuaggacaagcucauacgucuuc

SEQ ID NO: 361499 - RNA, 32 nt, Homo Sapiens
cuccuggauaugaagaggauaugaagaucaca

SEQ ID NO: 361500 - RNA, 32 nt, Homo Sapiens
gaccugucuuacgggcgucgcccgagacagga

SEQ ID NO: 361501 - RNA, 32 nt, Homo Sapiens
gccgcccggccgcgggucgggcucugugucag

SEQ ID NO: 361502 - RNA, 32 nt, Homo Sapiens
cggggccggagcccggcagcccggggcgcuuu

SEQ ID NO: 361503 - RNA, 32 nt, Homo Sapiens
gcagaacaucgcugggacgugccuggccuaag

SEQ ID NO: 361504 - RNA, 32 nt, Homo Sapiens
agccggacagcagugcuggacugcacagcccc

SEQ ID NO: 361505 - RNA, 32 nt, Homo Sapiens
uucccucagacucugucuucagcucgggcccc

SEQ ID NO: 361506 - RNA, 32 nt, Homo Sapiens
uaucuuagaaagcaaaaacaaacaggaguuuc

SEQ ID NO: 361507 - RNA, 32 nt, Homo Sapiens
gcuguaaaggauuuuaggaggaauuugaaaca

SEQ ID NO: 361508 - RNA, 32 nt, Homo Sapiens
guugcaguuggucaggaugcucgguucccaag

SEQ ID NO: 361509 - RNA, 32 nt, Homo Sapiens
auguagaaaggaaagacauaagagacuccauu

SEQ ID NO: 361510 - RNA, 32 nt, Homo Sapiens
uaagaccaauuuaugaaaauacucuccuuuuu

SEQ ID NO: 361511 - RNA, 32 nt, Homo Sapiens
ucccaccugaaaguacauaacuucuaucacuu

SEQ ID NO: 361512 - RNA, 32 nt, Homo Sapiens
uugcugagccacaccauucucaucucuacagc

SEQ ID NO: 361513 - RNA, 32 nt, Homo Sapiens
ugaacuggaaagggucucuugucagggcuuga

SEQ ID NO: 361514 - RNA, 32 nt, Homo Sapiens
ccucccugccagcugcccccaccgccuucccc

SEQ ID NO: 361515 - RNA, 29 nt, Homo Sapiens
ugaacauaggugaugucugggucuauuuu

SEQ ID NO: 361516 - RNA, 32 nt, Homo Sapiens
uauauacugguugauuuauagauguaauuagc

SEQ ID NO: 361517 - RNA, 32 nt, Homo Sapiens
gggucuggcagcccucccgggaugggcccaca

SEQ ID NO: 361518 - RNA, 32 nt, Homo Sapiens
gaggugugcguggcuucuggggugggacccag

SEQ ID NO: 361519 - RNA, 32 nt, Homo Sapiens
ugcagccacuuggcuauggagagcagccgaca

SEQ ID NO: 361520 - RNA, 32 nt, Homo Sapiens
cgagcuuagaaaguggauucacugcuuucucu

SEQ ID NO: 361521 - RNA, 32 nt, Homo Sapiens
uuucacucuccuuagaauuggaacuaugcagu

SEQ ID NO: 361522 - RNA, 32 nt, Homo Sapiens
cugguuggugccugggagagugacgaggccua

SEQ ID NO: 361523 - RNA, 32 nt, Homo Sapiens
ggcuucccucuguagagcugcucccgccacca

SEQ ID NO: 361524 - RNA, 32 nt, Homo Sapiens
guucacucaggaaccacuggcuccuccagugc

SEQ ID NO: 361525 - RNA, 32 nt, Homo Sapiens
cugcgcgcgggccacgcgcggcggcgacuugg

SEQ ID NO: 361526 - RNA, 32 nt, Homo Sapiens
agcaagugaugaugaugaugaucuggguucaa

SEQ ID NO: 361527 - RNA, 32 nt, Homo Sapiens
gaggagaaguggggaccccaccccucaucagg

SEQ ID NO: 361528 - RNA, 32 nt, Homo Sapiens
uagugcacaauggccuuucugugcuguuuuuc

SEQ ID NO: 361529 - RNA, 32 nt, Homo Sapiens
uuuuuucuuuugcuuuaaaucaugaaucccgc

SEQ ID NO: 361530 - RNA, 32 nt, Homo Sapiens
uggccuuccucuucuuucucuuucccucugcc

SEQ ID NO: 361531 - RNA, 32 nt, Homo Sapiens
acguacucacacgccgaucuccccucggaggc

SEQ ID NO: 361532 - RNA, 32 nt, Homo Sapiens
auuuuaaauugugacuuccucuaaucacgaac

SEQ ID NO: 361533 - RNA, 32 nt, Homo Sapiens
ugaggaugccagcucaaggcccagccaggccu

SEQ ID NO: 361534 - RNA, 32 nt, Homo Sapiens
uggaccuucagaacaauauaaaacugaaugaa

SEQ ID NO: 361535 - RNA, 32 nt, Homo Sapiens
gaccaagaugacccauccagggcccuccccau

SEQ ID NO: 361536 - RNA, 32 nt, Homo Sapiens
uuuguuuuaugcuucucgaugauccuuuuguu

SEQ ID NO: 361537 - RNA, 32 nt, Homo Sapiens
auuccuuauaaaauauaauuuugaggaaauaa

SEQ ID NO: 361538 - RNA, 32 nt, Homo Sapiens
cuggcaccugacgcgccugcgcccacccaacu

SEQ ID NO: 361539 - RNA, 32 nt, Homo Sapiens
aacucacugcuuuugaggcaucuggaaauuuu

SEQ ID NO: 361540 - RNA, 32 nt, Homo Sapiens
aauggugucugaaaggaaaaaauuuaacauca

SEQ ID NO: 361541 - RNA, 32 nt, Homo Sapiens
caguguugucauuguuuagaaauaguucuuuu

SEQ ID NO: 361542 - RNA, 31 nt, Homo Sapiens
uggacucaagccacgccaugagggugaaagg

SEQ ID NO: 361543 - RNA, 32 nt, Homo Sapiens
cgcgcccggcuguuuugcuuuguuuucaacca

SEQ ID NO: 361544 - RNA, 32 nt, Homo Sapiens
agccaggaagaaauugauuugcuguaaacaga

SEQ ID NO: 361545 - RNA, 32 nt, Homo Sapiens
cugaagccaagccacaucaagguuugacaggg

SEQ ID NO: 361546 - RNA, 32 nt, Homo Sapiens
cucuaaggugguuuuuggguuuuguuuaggag

SEQ ID NO: 361547 - RNA, 32 nt, Homo Sapiens
cacauggaugaagauuucuguaucauuuguuu

SEQ ID NO: 361548 - RNA, 32 nt, Homo Sapiens
aagaucuucuaaauggaaugcuuguugcacug

SEQ ID NO: 361549 - RNA, 32 nt, Homo Sapiens
caugcuugugccuggggugcucagcgccucug

SEQ ID NO: 361550 - RNA, 32 nt, Homo Sapiens
gggaaggagagccggauugauuggggugagag

SEQ ID NO: 361551 - RNA, 32 nt, Homo Sapiens
ccuaauucaaggaauaucaagucccagccccu

SEQ ID NO: 361552 - RNA, 32 nt, Homo Sapiens
ugaauauguaucgugcccccuccggagucuuu

SEQ ID NO: 361553 - RNA, 32 nt, Homo Sapiens
uggcauggagaaugggcuggagguggagagac

SEQ ID NO: 361554 - RNA, 32 nt, Homo Sapiens
cucccuuuccaagucaagaaaugcuuugucug

SEQ ID NO: 361555 - RNA, 32 nt, Homo Sapiens
cuucacugcccccgcagcacucacagacaucu

SEQ ID NO: 361556 - RNA, 32 nt, Homo Sapiens
guaggccggccgcgggcugagcgcgccuggug

SEQ ID NO: 361557 - RNA, 32 nt, Homo Sapiens
auuuuugguuaagcaucaauauguagaucuuu

SEQ ID NO: 361558 - RNA, 32 nt, Homo Sapiens
uuuuuccagugaaacaaaacguaagaaucuga

SEQ ID NO: 361559 - RNA, 32 nt, Homo Sapiens
uuuucuucccaggcaauacaccucugaacaug

SEQ ID NO: 361560 - RNA, 32 nt, Homo Sapiens
gucugcuuugguuaagggcucccuaaacuuug

SEQ ID NO: 361561 - RNA, 32 nt, Homo Sapiens
ugcuguuuacccucuuggaugcuggagagaau

SEQ ID NO: 361562 - RNA, 32 nt, Homo Sapiens
uuugugugaacaggcacgcagcugcagauuuu

SEQ ID NO: 361563 - RNA, 32 nt, Homo Sapiens
ggcccagccccucuccccugcccaagucccca

SEQ ID NO: 361564 - RNA, 32 nt, Homo Sapiens
aggcagcgguggccacagaggcggcggagaga

SEQ ID NO: 361565 - RNA, 30 nt, Homo Sapiens
ggagcccucugguggccccguccgggcaua

SEQ ID NO: 361566 - RNA, 32 nt, Homo Sapiens
cccagccggccgcacaggcaccgccucccguc

SEQ ID NO: 361567 - RNA, 28 nt, Homo Sapiens
gcgccaggagcggggccgagguacggcg

SEQ ID NO: 361568 - RNA, 32 nt, Homo Sapiens
cuaauaagaaauuuauuauggagauauagccc

SEQ ID NO: 361569 - RNA, 32 nt, Homo Sapiens
uaucaaauauaugauacguggacauuuccuca

SEQ ID NO: 361570 - RNA, 32 nt, Homo Sapiens
gagcccuugcuccuuaggauccccgcccccac

SEQ ID NO: 361571 - RNA, 32 nt, Homo Sapiens
gccuugcagcgcgggugggagccccgggcgga

SEQ ID NO: 361572 - RNA, 32 nt, Homo Sapiens
uuauuauuuuaaagcuauuguauaaaggaugg

SEQ ID NO: 361573 - RNA, 32 nt, Homo Sapiens
ggaggccaacgcggguggauugcuugagccca

SEQ ID NO: 361574 - RNA, 32 nt, Homo Sapiens
guacgagcgggcccuggacguggcggcagagc

SEQ ID NO: 361575 - RNA, 32 nt, Homo Sapiens
uuauacagaauuauuaacuauauuuuacuaac

SEQ ID NO: 361576 - RNA, 27 nt, Homo Sapiens
ggcaagacuugcuucagccccaggugu

SEQ ID NO: 361577 - RNA, 27 nt, Homo Sapiens
cucuaaccuuuauucagccccuuuucc

SEQ ID NO: 361578 - RNA, 32 nt, Homo Sapiens
ugauccugaagcccaacuuccacaaggacugg

SEQ ID NO: 361579 - RNA, 32 nt, Homo Sapiens
acaguuuucuuuucuuuuuucuuuuuugagac

SEQ ID NO: 361580 - RNA, 32 nt, Homo Sapiens
uaaagacccaggggagaauggguguuguaugg

SEQ ID NO: 361581 - RNA, 32 nt, Homo Sapiens
gacccccauuuuccuccgccccucuccuaaag

SEQ ID NO: 361582 - RNA, 32 nt, Homo Sapiens
cacucacaaggccagcaggugcuuccuuggcu

SEQ ID NO: 361583 - RNA, 32 nt, Homo Sapiens
auucagaaauuugauaaacagaauuguuauuu

SEQ ID NO: 361584 - RNA, 32 nt, Homo Sapiens
uggguggagggagaggcgcggagacacugggg

SEQ ID NO: 361585 - RNA, 32 nt, Homo Sapiens
aucacacaaaaauaaauguauuaaaauuaaau

SEQ ID NO: 361586 - RNA, 32 nt, Homo Sapiens
auucucuuuagaguucuuuguauuucuuucuu

SEQ ID NO: 361587 - RNA, 32 nt, Homo Sapiens
cagcuuaucuugagagguaguguuaucuaccu

SEQ ID NO: 361588 - RNA, 32 nt, Homo Sapiens
auauucaaaguggugcacuuugaaggaagcac

SEQ ID NO: 361589 - RNA, 32 nt, Homo Sapiens
guauaacugugaauauacuaagaaccaaagag

SEQ ID NO: 361590 - RNA, 32 nt, Homo Sapiens
agcagacgguaugaccaucaagggcagcaaag

SEQ ID NO: 361591 - RNA, 32 nt, Homo Sapiens
cacacccggcuaauuuuuguauuuucaguaga

SEQ ID NO: 361592 - RNA, 32 nt, Homo Sapiens
gacgccgaggcccagcuggaccgcgaggguga

SEQ ID NO: 361593 - RNA, 32 nt, Homo Sapiens
gccccucccaacacuguuacaauggcaauuaa

SEQ ID NO: 361594 - RNA, 32 nt, Homo Sapiens
auuacugcaagagaauggaagucuuaauagaa

SEQ ID NO: 361595 - RNA, 32 nt, Homo Sapiens
cuccaggauugugagaaauacauguuuguugu

SEQ ID NO: 361596 - RNA, 32 nt, Homo Sapiens
aaggacuuaaaauaaaauuuuuuugaaagagg

SEQ ID NO: 361597 - RNA, 32 nt, Homo Sapiens
gcacccacugcagcugcgcacagucgcauuuc

SEQ ID NO: 361598 - RNA, 32 nt, Homo Sapiens
caacaccccugcccggccccugagcugccucc

SEQ ID NO: 361599 - RNA, 32 nt, Homo Sapiens
aaggaauugcccaauuuuaaauucugacuuug

SEQ ID NO: 361600 - RNA, 32 nt, Homo Sapiens
caugucaucuucugagcccuucuuucuacuuu

SEQ ID NO: 361601 - RNA, 32 nt, Homo Sapiens
auuaacuuuuuggaguauauuguugcaucuuu

SEQ ID NO: 361602 - RNA, 32 nt, Homo Sapiens
gaugcugucauuuuuugaaccaaaagacaaac

SEQ ID NO: 361603 - RNA, 32 nt, Homo Sapiens
caugaccaaauauuuuguauuggagaagcuuu

SEQ ID NO: 361604 - RNA, 32 nt, Homo Sapiens
ggcagccaucuccuucucggcaucauggccgc

SEQ ID NO: 361605 - RNA, 32 nt, Homo Sapiens
uuuugaauauuuuuaaauaaagucuuaaaagc

SEQ ID NO: 361606 - RNA, 32 nt, Homo Sapiens
ccucugaggaggaggagcugcacaaccaguua

SEQ ID NO: 361607 - RNA, 32 nt, Homo Sapiens
ccagauguggccugggccgugcacucagcccu

SEQ ID NO: 361608 - RNA, 32 nt, Homo Sapiens
gaaccgcggacaccccggccccgauggccccc

SEQ ID NO: 361609 - RNA, 32 nt, Homo Sapiens
augggauggcuuuucuagccugcugugugaca

SEQ ID NO: 361610 - RNA, 32 nt, Homo Sapiens
gauacccuauucacugccugccaggcagccag

SEQ ID NO: 361611 - RNA, 32 nt, Homo Sapiens
uguugcuuguuugucaaaauauuaucuuuuau

SEQ ID NO: 361612 - RNA, 32 nt, Homo Sapiens
agccaauggccugucuccccacuaccaucccc

SEQ ID NO: 361613 - RNA, 32 nt, Homo Sapiens
acuauacuguuauaaauuaaguauaugcuuac

SEQ ID NO: 361614 - RNA, 32 nt, Homo Sapiens
ccaggucugggguaaccuggaacuuccaccug

SEQ ID NO: 361615 - RNA, 32 nt, Homo Sapiens
agcaacaaagggauucagcugcacguuugaga

SEQ ID NO: 361616 - RNA, 32 nt, Homo Sapiens
gaaaugcucccuccacugccgggccuucucuu

SEQ ID NO: 361617 - RNA, 32 nt, Homo Sapiens
ugacccugggccguccucuccuccucuucaug

SEQ ID NO: 361618 - RNA, 32 nt, Homo Sapiens
gaaaugcaaggccguggaaacuucugauuucu

SEQ ID NO: 361619 - RNA, 32 nt, Homo Sapiens
ccgucuccgcguggcucuggagccucaccucg

SEQ ID NO: 361620 - RNA, 32 nt, Homo Sapiens
cugccgggccucagcccucgccugccugagca

SEQ ID NO: 361621 - RNA, 32 nt, Homo Sapiens
ccccaccuccacgucccggcugggccccagac

SEQ ID NO: 361622 - RNA, 32 nt, Homo Sapiens
aaagugugggccagcccuccacuugcucuuac

SEQ ID NO: 361623 - RNA, 32 nt, Homo Sapiens
gcuugcugaaacgcugagugcccgccacucuc

SEQ ID NO: 361624 - RNA, 32 nt, Homo Sapiens
cuucagcccccagccccucccccaugucccac

SEQ ID NO: 361625 - RNA, 32 nt, Homo Sapiens
accgcaaagcuacaacgauggacucuugcaua

SEQ ID NO: 361626 - RNA, 32 nt, Homo Sapiens
cagggaugaaaauaaagugaauauuaaaaauu

SEQ ID NO: 361627 - RNA, 32 nt, Homo Sapiens
ccugcuguucgaugaagcaguuccagaaggac

SEQ ID NO: 361628 - RNA, 30 nt, Homo Sapiens
agcgaggccugugcugcgaggggcugugcu

SEQ ID NO: 361629 - RNA, 32 nt, Homo Sapiens
caaauuagaauaggauagcaucugaugccuga

SEQ ID NO: 361630 - RNA, 32 nt, Homo Sapiens
uacagaaaaaauuuuaaauuauuucacauuag

SEQ ID NO: 361631 - RNA, 32 nt, Homo Sapiens
gggcgcgagugguuaaaagacaguuggugucg

SEQ ID NO: 361632 - RNA, 32 nt, Homo Sapiens
aagucugucugcaccuugaagcugagggugug

SEQ ID NO: 361633 - RNA, 32 nt, Homo Sapiens
accaaauaauuucauauucaagcuucagaagc

SEQ ID NO: 361634 - RNA, 32 nt, Homo Sapiens
agccacagucccacaagccucagccuacccgu

SEQ ID NO: 361635 - RNA, 32 nt, Homo Sapiens
caacgcggccucagccaggaauaauccaggaa

SEQ ID NO: 361636 - RNA, 32 nt, Homo Sapiens
cuguaaauuuaaaccuaaauauuuggccaaua

SEQ ID NO: 361637 - RNA, 32 nt, Homo Sapiens
ccuucagcacugagguguuuaagauuugcaac

SEQ ID NO: 361638 - RNA, 32 nt, Homo Sapiens
uucaguuuuuauuuccauucugaaaugcuucc

SEQ ID NO: 361639 - RNA, 32 nt, Homo Sapiens
cgcgcggccagcugcagccgccggcgagccga

SEQ ID NO: 361640 - RNA, 32 nt, Homo Sapiens
aucuccuaucuuuagugaaaucuuauguguaa

SEQ ID NO: 361641 - RNA, 32 nt, Homo Sapiens
uccaggaugcacauuuucauacguagaccagu

SEQ ID NO: 361642 - RNA, 31 nt, Homo Sapiens
agagaaagcaguuuccaaggauauguuucau

SEQ ID NO: 361643 - RNA, 32 nt, Homo Sapiens
guuccucuucccucuuuuuuaaucauguucuu

SEQ ID NO: 361644 - RNA, 32 nt, Homo Sapiens
aaaaccaagaagaaacaaagccuuuugacuug

SEQ ID NO: 361645 - RNA, 32 nt, Homo Sapiens
caccuugcaugggagauaaggacccccacauc

SEQ ID NO: 361646 - RNA, 32 nt, Homo Sapiens
uaauuuaugcucacaccuuacugcacagaaaa

SEQ ID NO: 361647 - RNA, 32 nt, Homo Sapiens
gcccaacuccagugcagcugcccacccugccg

SEQ ID NO: 361648 - RNA, 32 nt, Homo Sapiens
caaaacucaggcagaagcucuccggaggaucc

SEQ ID NO: 361649 - RNA, 32 nt, Homo Sapiens
uuggagcuggugaaucuguggaccacauucaa

SEQ ID NO: 361650 - RNA, 32 nt, Homo Sapiens
aaacuaaaauuugguagaaacuagaaaagaca

SEQ ID NO: 361651 - RNA, 32 nt, Homo Sapiens
uaauauccagcaucuauaaagaacuuaaacaa

SEQ ID NO: 361652 - RNA, 32 nt, Homo Sapiens
gugcugggaggcccggccagcucgaucgcagg

SEQ ID NO: 361653 - RNA, 32 nt, Homo Sapiens
cucguuuccuuccguucaccuucgcagggcgg

SEQ ID NO: 361654 - RNA, 32 nt, Homo Sapiens
ucgacuggggucgggcaggaguaaagggagug

SEQ ID NO: 361655 - RNA, 32 nt, Homo Sapiens
ugugcauuuuuguagaaauuguuacuggacuu

SEQ ID NO: 361656 - RNA, 32 nt, Homo Sapiens
ugcucuccuccagccgagggacccuggugggg

SEQ ID NO: 361657 - RNA, 32 nt, Homo Sapiens
aggcagucaggcgggggcgcuccugcccaggc

SEQ ID NO: 361658 - RNA, 32 nt, Homo Sapiens
agaggaaacaggaaacaagacugcgaauggcg

SEQ ID NO: 361659 - RNA, 32 nt, Homo Sapiens
aaugcccauguucaugaaggggcuugcuuaca

SEQ ID NO: 361660 - RNA, 32 nt, Homo Sapiens
gccagaacacugggcucgauuacuacagaccu

SEQ ID NO: 361661 - RNA, 32 nt, Homo Sapiens
gcugcugagaugagugcagugucgcagcccca

SEQ ID NO: 361662 - RNA, 32 nt, Homo Sapiens
agcaacuugaaagugccuggaaaauugcacca

SEQ ID NO: 361663 - RNA, 32 nt, Homo Sapiens
aauuucccuuugcaugagauuggcccauuuug

SEQ ID NO: 361664 - RNA, 32 nt, Homo Sapiens
ugaggguggcaggcagcggggagccgauagag

SEQ ID NO: 361665 - RNA, 32 nt, Homo Sapiens
ucccugacccuggucccggcucccguccgggc

SEQ ID NO: 361666 - RNA, 32 nt, Homo Sapiens
aguccagugucgcaauuuuggaaggcaagaug

SEQ ID NO: 361667 - RNA, 32 nt, Homo Sapiens
ccauucgcaggagcuuuuccuguccugugguu

SEQ ID NO: 361668 - RNA, 32 nt, Homo Sapiens
accagcaauucucuuucuuuuacuguuauaga

SEQ ID NO: 361669 - RNA, 32 nt, Homo Sapiens
gguauucugccagcugcccugugggccaggca

SEQ ID NO: 361670 - RNA, 32 nt, Homo Sapiens
uccagaggcccuggucucggagaagucaggga

SEQ ID NO: 361671 - RNA, 32 nt, Homo Sapiens
ucaccacacaugccagcugaugcaaagaaauu

SEQ ID NO: 361672 - RNA, 32 nt, Homo Sapiens
ucuuuugccgugguucugagcauucaccucac

SEQ ID NO: 361673 - RNA, 32 nt, Homo Sapiens
gggaggcggcgguuguggugagcugugauugu

SEQ ID NO: 361674 - RNA, 32 nt, Homo Sapiens
ccaggcugcugaugaagugagggaaaguggag

SEQ ID NO: 361675 - RNA, 30 nt, Homo Sapiens
auccuccgcgcgcacgagcucagucccuac

SEQ ID NO: 361676 - RNA, 32 nt, Homo Sapiens
cuccucaaggacucccaaaaccagagacacca

SEQ ID NO: 361677 - RNA, 32 nt, Homo Sapiens
cccaaggucccggugugccgcugccguaggga

SEQ ID NO: 361678 - RNA, 32 nt, Homo Sapiens
uuugggacaaaauuauaaaaugaaauguguag

SEQ ID NO: 361679 - RNA, 32 nt, Homo Sapiens
augauacuuauugaaaucuacauccugcccaa

SEQ ID NO: 361680 - RNA, 32 nt, Homo Sapiens
uagagaaggccucagggaccaacaggggccag

SEQ ID NO: 361681 - RNA, 32 nt, Homo Sapiens
ccacucugccuggccuccugcugaugaggacu

SEQ ID NO: 361682 - RNA, 32 nt, Homo Sapiens
caagccaagcucccaaccuuucagcagcuucu

SEQ ID NO: 361683 - RNA, 32 nt, Homo Sapiens
cagaaagucaacaagcaaaaugccuugagugu

SEQ ID NO: 361684 - RNA, 31 nt, Homo Sapiens
gcagccugacggagaacaucugggccuucgc

SEQ ID NO: 361685 - RNA, 32 nt, Homo Sapiens
ucccuuucuccacauuuccccaugugcugcau

SEQ ID NO: 361686 - RNA, 32 nt, Homo Sapiens
cagcuccaucaaccguaagauuuuaguugaua

SEQ ID NO: 361687 - RNA, 32 nt, Homo Sapiens
ucuugcauugguggagaggggcucaguaggcc

SEQ ID NO: 361688 - RNA, 32 nt, Homo Sapiens
cacugcacuccagccugggcaccaaugugaga

SEQ ID NO: 361689 - RNA, 32 nt, Homo Sapiens
ccggaaggcgagugccggagggggcgggacag

SEQ ID NO: 361690 - RNA, 32 nt, Homo Sapiens
uuaggaaugauccuuacagaauucuuuucaac

SEQ ID NO: 361691 - RNA, 32 nt, Homo Sapiens
acaaaugugcaugaugcauuuacuacagcaua

SEQ ID NO: 361692 - RNA, 32 nt, Homo Sapiens
uuauuaguuuuauaggugaugauccaaggcgc

SEQ ID NO: 361693 - RNA, 32 nt, Homo Sapiens
cgauuccaacucgggggucccggagcggcgcg

SEQ ID NO: 361694 - RNA, 32 nt, Homo Sapiens
gguuuuagcuucuuggagaugauuccaacuua

SEQ ID NO: 361695 - RNA, 32 nt, Homo Sapiens
gcccggaagagccucauguuccgugggggcug

SEQ ID NO: 361696 - RNA, 32 nt, Homo Sapiens
uuuauugaguaauaaacuuguggcacacaaaa

SEQ ID NO: 361697 - RNA, 32 nt, Homo Sapiens
agcccagcgaggagggcugccggggucugggc

SEQ ID NO: 361698 - RNA, 32 nt, Homo Sapiens
auacuaugaagaucaaagucuuaaguguguuu

SEQ ID NO: 361699 - RNA, 32 nt, Homo Sapiens
ccugauacuggguaaacaaaacaaagauggac

SEQ ID NO: 361700 - RNA, 32 nt, Homo Sapiens
ggaaaacaggacuuaaaaugacauucaguaua

SEQ ID NO: 361701 - RNA, 28 nt, Homo Sapiens
uuagaaauaaaguuauucuacuaguugc

SEQ ID NO: 361702 - RNA, 32 nt, Homo Sapiens
uuccugcuaagaucccacgggcgagggcuugc

SEQ ID NO: 361703 - RNA, 32 nt, Homo Sapiens
aaaacaaaaaucaaacuacaucuauuugguga

SEQ ID NO: 361704 - RNA, 32 nt, Homo Sapiens
ugggucggggagaggggcggacggcggcaccc

SEQ ID NO: 361705 - RNA, 32 nt, Homo Sapiens
gaucgccaaccuuucccccaccagcuaaggac

SEQ ID NO: 361706 - RNA, 32 nt, Homo Sapiens
gguuccauuugugggagggagggcucauccac

SEQ ID NO: 361707 - RNA, 32 nt, Homo Sapiens
cagacaauucuaugacccgugucuucauuuuu

SEQ ID NO: 361708 - RNA, 32 nt, Homo Sapiens
cggaccccauucucucuucuuuucuccuuugg

SEQ ID NO: 361709 - RNA, 32 nt, Homo Sapiens
acugcccaugcugaccacccagcccuccggcu

SEQ ID NO: 361710 - RNA, 32 nt, Homo Sapiens
uaacuguugguaggaaucuuguaaccagucau

SEQ ID NO: 361711 - RNA, 32 nt, Homo Sapiens
uuauauuuaggcuuauccuguuuugaaaugau

SEQ ID NO: 361712 - RNA, 32 nt, Homo Sapiens
augguuugguaguuccuuuaaaaguuaaacau

SEQ ID NO: 361713 - RNA, 32 nt, Homo Sapiens
acuucgagcuggcaacgauccaaauauccauc

SEQ ID NO: 361714 - RNA, 32 nt, Homo Sapiens
ccgaggcagcagagccgaggagagcaggucca

SEQ ID NO: 361715 - RNA, 32 nt, Homo Sapiens
aguccaggagaaaguauaaaaguuaccuugag

SEQ ID NO: 361716 - RNA, 27 nt, Homo Sapiens
agaagccuuaauuucugguacugugug

SEQ ID NO: 361717 - RNA, 32 nt, Homo Sapiens
cuccugugcaucucggccagcacgggagccag

SEQ ID NO: 361718 - RNA, 32 nt, Homo Sapiens
gaggaggcggagaggcagagggaggagccucg

SEQ ID NO: 361719 - RNA, 32 nt, Homo Sapiens
ucacugaguaguacuuuuuuuauccacuuacc

SEQ ID NO: 361720 - RNA, 32 nt, Homo Sapiens
ggacuguuucaaaaccacuggacuagaugauc

SEQ ID NO: 361721 - RNA, 32 nt, Homo Sapiens
ucauugcaaccucggcucacuguaaccuucac

SEQ ID NO: 361722 - RNA, 32 nt, Homo Sapiens
aaguggguagcuggcgggagaggguggcugcg

SEQ ID NO: 361723 - RNA, 32 nt, Homo Sapiens
ucucucauuuuuccucuuuccaaagaggaaug

SEQ ID NO: 361724 - RNA, 32 nt, Homo Sapiens
gucugggacauuagucguuauauuugacuuga

SEQ ID NO: 361725 - RNA, 32 nt, Homo Sapiens
cagccagugguuccagguccagcccugacuuc

SEQ ID NO: 361726 - RNA, 32 nt, Homo Sapiens
uccccaccccuacaccacuuccacacaggggc

SEQ ID NO: 361727 - RNA, 32 nt, Homo Sapiens
aaacggggguagacuuugugggaaauucgcca

SEQ ID NO: 361728 - RNA, 32 nt, Homo Sapiens
aacgguuggggcugcgcgugagaagguggcgg

SEQ ID NO: 361729 - RNA, 32 nt, Homo Sapiens
cgauccugcuaagcagagaaucgcuguggccg

SEQ ID NO: 361730 - RNA, 32 nt, Homo Sapiens
aagcaaacagaaaacagaaaaaaggaggaguu

SEQ ID NO: 361731 - RNA, 32 nt, Homo Sapiens
uguagccuuguuaaaggcuauuuuauaauuuu

SEQ ID NO: 361732 - RNA, 32 nt, Homo Sapiens
caccuucugcacugcucaucugggcagaggaa

SEQ ID NO: 361733 - RNA, 32 nt, Homo Sapiens
aaaauuuauaaauauggaauucuucaggguau

SEQ ID NO: 361734 - RNA, 32 nt, Homo Sapiens
auaugaaaaaaguuuaguaauuacagacauaa

SEQ ID NO: 361735 - RNA, 32 nt, Homo Sapiens
uccaaagggccugggaguuggggggugcccaa

SEQ ID NO: 361736 - RNA, 32 nt, Homo Sapiens
acuguccuccagcccaggaugggccagucccu

SEQ ID NO: 361737 - RNA, 32 nt, Homo Sapiens
cucagugcagggagguggaggccucugagguu

SEQ ID NO: 361738 - RNA, 32 nt, Homo Sapiens
aucuauaaccuuaccccccaaccccgugcucu

SEQ ID NO: 361739 - RNA, 32 nt, Homo Sapiens
aaacuacggggacgauuucugauugauuuuug

SEQ ID NO: 361740 - RNA, 32 nt, Homo Sapiens
aagucccaguguugacgggaguggaggagccc

SEQ ID NO: 361741 - RNA, 32 nt, Homo Sapiens
aguccagaaucccuaaggagaauggggcagcu

SEQ ID NO: 361742 - RNA, 32 nt, Homo Sapiens
cuuucgccacuacaguacagugguuuucuuuu

SEQ ID NO: 361743 - RNA, 32 nt, Homo Sapiens
cuugugcugucaucuaggaacuggcugcccaa

SEQ ID NO: 361744 - RNA, 32 nt, Homo Sapiens
ccugcaccgugaggcuggggggaccaggaccg

SEQ ID NO: 361745 - RNA, 32 nt, Homo Sapiens
gcugccccggaccccugugacuggcccgggcu

SEQ ID NO: 361746 - RNA, 32 nt, Homo Sapiens
aggcuggagugcagugguaugaucucagcuca

SEQ ID NO: 361747 - RNA, 32 nt, Homo Sapiens
auaacuauccaauugggaccaaugccaucguu

SEQ ID NO: 361748 - RNA, 32 nt, Homo Sapiens
aacaagaaaggccugucacccucgccuugggu

SEQ ID NO: 361749 - RNA, 32 nt, Homo Sapiens
cuccgccgcccagccgcgccccagccagcccu

SEQ ID NO: 361750 - RNA, 32 nt, Homo Sapiens
caacaugaaaauaccucuaaaacugggcaaag

SEQ ID NO: 361751 - RNA, 32 nt, Homo Sapiens
augugacuaaucuucagugauaauauuucauc

SEQ ID NO: 361752 - RNA, 32 nt, Homo Sapiens
guaccaauggacacuguggacaauggucauuu

SEQ ID NO: 361753 - RNA, 32 nt, Homo Sapiens
gauacaaggauuauuucaauguuacugcacug

SEQ ID NO: 361754 - RNA, 32 nt, Homo Sapiens
agcacccgcccccgggccccagccuuccaccu

SEQ ID NO: 361755 - RNA, 32 nt, Homo Sapiens
ggccuagggggaagaagaaucuacagauaagc

SEQ ID NO: 361756 - RNA, 32 nt, Homo Sapiens
ucaauagagauaaaacagaugauguacugaca

SEQ ID NO: 361757 - RNA, 32 nt, Homo Sapiens
aggcucugucuccaccgcagggcccaagguga

SEQ ID NO: 361758 - RNA, 31 nt, Homo Sapiens
ugagacgagacaauccugccccgccgccagg

SEQ ID NO: 361759 - RNA, 32 nt, Homo Sapiens
auauuuuaaugauaaguaaugcuagguuaauc

SEQ ID NO: 361760 - RNA, 32 nt, Homo Sapiens
cugggacaacgcgccuuccuccccaccucugc

SEQ ID NO: 361761 - RNA, 32 nt, Homo Sapiens
cggugugaugagcacuuacacccacguucuca

SEQ ID NO: 361762 - RNA, 32 nt, Homo Sapiens
augaauuuucuuuucuguccaaacaaguaaaa

SEQ ID NO: 361763 - RNA, 32 nt, Homo Sapiens
ggaagggcagauggaggagggauuguaauggc

SEQ ID NO: 361764 - RNA, 29 nt, Homo Sapiens
aaagcaccauaugaggaaaaaguuauuug

SEQ ID NO: 361765 - RNA, 27 nt, Homo Sapiens
ucugggcccuccuucagcccccaucau

SEQ ID NO: 361766 - RNA, 32 nt, Homo Sapiens
agucaacaccaugucaagucugcacaagagcc

SEQ ID NO: 361767 - RNA, 32 nt, Homo Sapiens
gcacugcaccugccuccagccgccggcugugc

SEQ ID NO: 361768 - RNA, 32 nt, Homo Sapiens
ugauggccccagcaaggucgcugcagggacuu

SEQ ID NO: 361769 - RNA, 32 nt, Homo Sapiens
acaggagucgggggcuccucugucccacugcu

SEQ ID NO: 361770 - RNA, 32 nt, Homo Sapiens
uuuggggagacgguguugcagagacgcaaggg

SEQ ID NO: 361771 - RNA, 32 nt, Homo Sapiens
uagccugaggugccgccuccuugugcacaaau

SEQ ID NO: 361772 - RNA, 32 nt, Homo Sapiens
ucccgggcucggcuucgccgggauccucuugg

SEQ ID NO: 361773 - RNA, 32 nt, Homo Sapiens
uaaucuauuuuuccauauacuuuaaauaaugg

SEQ ID NO: 361774 - RNA, 32 nt, Homo Sapiens
ugaaaaaaguuaacauucaguacuuuaugaaa

SEQ ID NO: 361775 - RNA, 32 nt, Homo Sapiens
aacauguguacuuaauuucuuuauguaaucua

SEQ ID NO: 361776 - RNA, 29 nt, Homo Sapiens
ggauacauagugauucguauacaauuuug

SEQ ID NO: 361777 - RNA, 32 nt, Homo Sapiens
gaguggaaccaggagcucagaguccugacagc

SEQ ID NO: 361778 - RNA, 32 nt, Homo Sapiens
ugauagugggaccacauacauaaaaaucucuc

SEQ ID NO: 361779 - RNA, 32 nt, Homo Sapiens
aggaaauucuaaaacaacuuuucuggccuugu

SEQ ID NO: 361780 - RNA, 32 nt, Homo Sapiens
ggaaggggaaggaggccugggaccccgaaaag

SEQ ID NO: 361781 - RNA, 32 nt, Homo Sapiens
aaaaaaucagaucuuggugaggaccucgagca

SEQ ID NO: 361782 - RNA, 32 nt, Homo Sapiens
cgagagcagacaccagcagcccugucacgccg

SEQ ID NO: 361783 - RNA, 32 nt, Homo Sapiens
guuuucauguuuacuuguuuuauauugaucug

SEQ ID NO: 361784 - RNA, 32 nt, Homo Sapiens
uaguucugcacuuuuccacauuauacuccaua

SEQ ID NO: 361785 - RNA, 32 nt, Homo Sapiens
uuaacuuguaaaaucgugugaugaugcuuauc

SEQ ID NO: 361786 - RNA, 32 nt, Homo Sapiens
gucagugacugccgggaguccugcaggggcgg

SEQ ID NO: 361787 - RNA, 32 nt, Homo Sapiens
aaauccguacuugauaggauuaugauauuaca

SEQ ID NO: 361788 - RNA, 32 nt, Homo Sapiens
uuuaucccugacagcugcugcacuagccuucc

SEQ ID NO: 361789 - RNA, 32 nt, Homo Sapiens
ccuggagcugucuuugcuggaggccgaggcgg

SEQ ID NO: 361790 - RNA, 32 nt, Homo Sapiens
ggcccacaaaaauaacuauuauuuuagccuua

SEQ ID NO: 361791 - RNA, 31 nt, Homo Sapiens
acuguaugugcgagggcaggaguauuuuugu

SEQ ID NO: 361792 - RNA, 32 nt, Homo Sapiens
aagugggccuccuggggauggggugguacacu

SEQ ID NO: 361793 - RNA, 32 nt, Homo Sapiens
ccagagcaaccuggcaguaauaugcccacccc

SEQ ID NO: 361794 - RNA, 32 nt, Homo Sapiens
gggcucgcacucuucuggucucccaggcccaa

SEQ ID NO: 361795 - RNA, 32 nt, Homo Sapiens
guccucauauccucuugagccaaacuguuugg

SEQ ID NO: 361796 - RNA, 32 nt, Homo Sapiens
cacugcacuccagccugggugacagugagacu

SEQ ID NO: 361797 - RNA, 32 nt, Homo Sapiens
auaccgcccuucguguccgcugcaucuuccuc

SEQ ID NO: 361798 - RNA, 32 nt, Homo Sapiens
ucugccgccuccccucaugccucaccgugucu

SEQ ID NO: 361799 - RNA, 32 nt, Homo Sapiens
agagacgggaccagcugcuggccacauuuccu

SEQ ID NO: 361800 - RNA, 32 nt, Homo Sapiens
ccgccagugcgcgcggagcugcugggcgccgc

SEQ ID NO: 361801 - RNA, 32 nt, Homo Sapiens
gguauuagggggcuugggggcugggggugcug

SEQ ID NO: 361802 - RNA, 32 nt, Homo Sapiens
uuguugaccuucuccuucuuaucacccugcuc

SEQ ID NO: 361803 - RNA, 32 nt, Homo Sapiens
uauuuucuggacuuaaauguuauuacaaauau

SEQ ID NO: 361804 - RNA, 32 nt, Homo Sapiens
uuuggcugacacuugcagaaauuaaugcaaac

SEQ ID NO: 361805 - RNA, 32 nt, Homo Sapiens
ccguugcacuauggacaguugcucuuaagaga

SEQ ID NO: 361806 - RNA, 30 nt, Homo Sapiens
uaaccugucugugaggagcucccugcucua

SEQ ID NO: 361807 - RNA, 32 nt, Homo Sapiens
cagaaauuuuuggaaaugggacuuugugcagg

SEQ ID NO: 361808 - RNA, 32 nt, Homo Sapiens
cucacuaugcugcccaggcucaggucuuaauc

SEQ ID NO: 361809 - RNA, 32 nt, Homo Sapiens
agggguguggaggacagagagauggugaaaug

SEQ ID NO: 361810 - RNA, 32 nt, Homo Sapiens
ucuggggagccauggaaggugcuggauaaagg

SEQ ID NO: 361811 - RNA, 32 nt, Homo Sapiens
cugcuacagaaacuugaagaaacuacuaaauu

SEQ ID NO: 361812 - RNA, 32 nt, Homo Sapiens
acagauucaggccagcccagccaggccaacag

SEQ ID NO: 361813 - RNA, 32 nt, Homo Sapiens
gcccuggguccucccacccucucuccucccac

SEQ ID NO: 361814 - RNA, 32 nt, Homo Sapiens
gcgcccgcuuccaagauggcggcagcgaugcc

SEQ ID NO: 361815 - RNA, 32 nt, Homo Sapiens
uggauucauugccacacucuuuucucccaggg

SEQ ID NO: 361816 - RNA, 32 nt, Homo Sapiens
ccccgcaccuggaagcugggaggccgcgagga

SEQ ID NO: 361817 - RNA, 32 nt, Homo Sapiens
uuugcugguuuaguccuauuaaggucuguauu

SEQ ID NO: 361818 - RNA, 32 nt, Homo Sapiens
cgucugugcaggcccuguaguccgccacaggg

SEQ ID NO: 361819 - RNA, 32 nt, Homo Sapiens
gcaacccacgguggccucuccucuuucugcgg

SEQ ID NO: 361820 - RNA, 32 nt, Homo Sapiens
ggaacuucuaaacagcacauccucgagccagc

SEQ ID NO: 361821 - RNA, 32 nt, Homo Sapiens
ugacaaugcccccacuuccaccuacagcuugc

SEQ ID NO: 361822 - RNA, 32 nt, Homo Sapiens
cugucuauugucagcaucauuuucaucuguaa

SEQ ID NO: 361823 - RNA, 32 nt, Homo Sapiens
guggugcccgccgaccugcggcccccgugguu

SEQ ID NO: 361824 - RNA, 32 nt, Homo Sapiens
cggacgugguggcacaugccuguaaugccagc

SEQ ID NO: 361825 - RNA, 32 nt, Homo Sapiens
auuaaauuaggacuaacuuauguuuuauaaug

SEQ ID NO: 361826 - RNA, 32 nt, Homo Sapiens
guaauagggagugggaauaaaacuacuuaauu

SEQ ID NO: 361827 - RNA, 32 nt, Homo Sapiens
uucguugacacucaggaccguacguacgcugc

SEQ ID NO: 361828 - RNA, 32 nt, Homo Sapiens
uaaacauaagauaauacugaaaacuuuacaaa

SEQ ID NO: 361829 - RNA, 32 nt, Homo Sapiens
gauuuucuauagagaagaagcacaauggggaa

SEQ ID NO: 361830 - RNA, 32 nt, Homo Sapiens
gcaucuacaccugaggacaagacgcugcccac

SEQ ID NO: 361831 - RNA, 32 nt, Homo Sapiens
gccauacaaacuucuuugauaaagaugcuuuc

SEQ ID NO: 361832 - RNA, 32 nt, Homo Sapiens
gagauguaacaaggggaaggccuccucccuuc

SEQ ID NO: 361833 - RNA, 32 nt, Homo Sapiens
uaugcugagaauuauuucuuaugcuuuuuacu

SEQ ID NO: 361834 - RNA, 32 nt, Homo Sapiens
guaacaugaagaaagaagagauaccuaguaug

SEQ ID NO: 361835 - RNA, 32 nt, Homo Sapiens
cucuuauuuuuggcagaauaaacauugauuuu

SEQ ID NO: 361836 - RNA, 32 nt, Homo Sapiens
agggacuccuuccaauaaaguucaaacugaaa

SEQ ID NO: 361837 - RNA, 32 nt, Homo Sapiens
ccgggagccagcaggccccucgcucaacccca

SEQ ID NO: 361838 - RNA, 32 nt, Homo Sapiens
accgaggcgcgcguggggccacugccguggcg

SEQ ID NO: 361839 - RNA, 32 nt, Homo Sapiens
uccaggucugugccgccucccuccggucucgg

SEQ ID NO: 361840 - RNA, 32 nt, Homo Sapiens
cuggagcuggcugacgacucugcccgaguucc

SEQ ID NO: 361841 - RNA, 32 nt, Homo Sapiens
aaagggaguaaaagguguauuuuugucguaug

SEQ ID NO: 361842 - RNA, 32 nt, Homo Sapiens
agggucccgccagcgcucaaaccgcucgcgcc

SEQ ID NO: 361843 - RNA, 32 nt, Homo Sapiens
acugaagaaauaucuuuuuucuuugauucauu

SEQ ID NO: 361844 - RNA, 32 nt, Homo Sapiens
ugguuaugaacgcuuuugugcugcugauuuuu

SEQ ID NO: 361845 - RNA, 32 nt, Homo Sapiens
gcacucgcccggcucgcccgcuuucgcaccca

SEQ ID NO: 361846 - RNA, 32 nt, Homo Sapiens
cucugcuagggagagaacgccagagggaggcg

SEQ ID NO: 361847 - RNA, 32 nt, Homo Sapiens
cugggcauagugggcucuggcuggcaggacag

SEQ ID NO: 361848 - RNA, 32 nt, Homo Sapiens
ucuuuuuuuuuaaagcacuuuguauauaaaaa

SEQ ID NO: 361849 - RNA, 32 nt, Homo Sapiens
aaugcaagacgcauccccugcaaaacacacug

SEQ ID NO: 361850 - RNA, 32 nt, Homo Sapiens
caauaaaauauguuaaaauuuguauccccugu

SEQ ID NO: 361851 - RNA, 32 nt, Homo Sapiens
gaagucauuuucuaaguggaagaggaaauuuu

SEQ ID NO: 361852 - RNA, 32 nt, Homo Sapiens
ggccgagcccgagccgcugccggagcggagcc

SEQ ID NO: 361853 - RNA, 32 nt, Homo Sapiens
cguagcgcccggcuccugcagacgcucggccu

SEQ ID NO: 361854 - RNA, 32 nt, Homo Sapiens
aaauuaaaaagaauuuuaauucucauauuguu

SEQ ID NO: 361855 - RNA, 32 nt, Homo Sapiens
ggucaaaagcuggccuucagggugaccuaaca

SEQ ID NO: 361856 - RNA, 32 nt, Homo Sapiens
ggagccacaacuuggggugggaagaacuuguc

SEQ ID NO: 361857 - RNA, 32 nt, Homo Sapiens
gccugucucauucgccucuggaucugcugcau

SEQ ID NO: 361858 - RNA, 32 nt, Homo Sapiens
auuuuuauaaauugugugauaauuagagguaa

SEQ ID NO: 361859 - RNA, 32 nt, Homo Sapiens
acacuuuacuaaaauuuaucaaauuauacugg

SEQ ID NO: 361860 - RNA, 32 nt, Homo Sapiens
ugcaaugaccuuucugugcaauaaaagcuuau

SEQ ID NO: 361861 - RNA, 32 nt, Homo Sapiens
uugguuuuuccauuuucuuuggcauuuauuua

SEQ ID NO: 361862 - RNA, 32 nt, Homo Sapiens
acuuuuguaugauacauaaagugcuugagucu

SEQ ID NO: 361863 - RNA, 32 nt, Homo Sapiens
gcagccaacucucaaggcaaggccaggcccca

SEQ ID NO: 361864 - RNA, 32 nt, Homo Sapiens
uuaaaaagaaauuuauauaaaauuuaaaauac

SEQ ID NO: 361865 - RNA, 32 nt, Homo Sapiens
ggcccgugcucccgcuccuguggagggcuggg

SEQ ID NO: 361866 - RNA, 32 nt, Homo Sapiens
ggaacucuucaugagcacuuuguaaacacccu

SEQ ID NO: 361867 - RNA, 32 nt, Homo Sapiens
gaaaagccgagaccaggaggcuggggcacauc

SEQ ID NO: 361868 - RNA, 32 nt, Homo Sapiens
accaggugucucugagaauccaaacauccugg

SEQ ID NO: 361869 - RNA, 32 nt, Homo Sapiens
ucuaagugcagaugaaaguguguuauauauau

SEQ ID NO: 361870 - RNA, 32 nt, Homo Sapiens
uuggauuuggaaggcuuacauugugguugacu

SEQ ID NO: 361871 - RNA, 32 nt, Homo Sapiens
ugcuuggaaggggugacucugagcacagguag

SEQ ID NO: 361872 - RNA, 32 nt, Homo Sapiens
caaccugccccggccaggccugcagacccaga

SEQ ID NO: 361873 - RNA, 32 nt, Homo Sapiens
caccccgcgaccccucccgggaccccggagac

SEQ ID NO: 361874 - RNA, 32 nt, Homo Sapiens
aaccccgggaauaugaguuagacccagaaagu

SEQ ID NO: 361875 - RNA, 32 nt, Homo Sapiens
cgaaacagaaacgacauagaugucgaaacccu

SEQ ID NO: 361876 - RNA, 32 nt, Homo Sapiens
gaugcccugugcucuaucagggcaugucagac

SEQ ID NO: 361877 - RNA, 32 nt, Homo Sapiens
gagauuugauucauggcagauauucucuguug

SEQ ID NO: 361878 - RNA, 32 nt, Homo Sapiens
ggggagaacggcucucggagaacgggcugggg

SEQ ID NO: 361879 - RNA, 32 nt, Homo Sapiens
guucuuccaccuggcaggaucuacgccuuucc

SEQ ID NO: 361880 - RNA, 32 nt, Homo Sapiens
gagcaugucaagaaacugauaagaucaaaaag

SEQ ID NO: 361881 - RNA, 32 nt, Homo Sapiens
ggacucauuuuucuuuucuggacucuaauagg

SEQ ID NO: 361882 - RNA, 32 nt, Homo Sapiens
ccgccccugcccccucuccccccgcauguggg

SEQ ID NO: 361883 - RNA, 32 nt, Homo Sapiens
cuuaccugacagagcccuggcuuugaccugcu

SEQ ID NO: 361884 - RNA, 32 nt, Homo Sapiens
uuacaaucuauagguaccuuugaaaggucaua

SEQ ID NO: 361885 - RNA, 31 nt, Homo Sapiens
uucuugaaauaaaaccaacuuuaucauucuu

SEQ ID NO: 361886 - RNA, 32 nt, Homo Sapiens
ccaaccuguugccugccagcccuuucuggauu

SEQ ID NO: 361887 - RNA, 32 nt, Homo Sapiens
agaaaaaacacuuuuccugagggauuucuaac

SEQ ID NO: 361888 - RNA, 30 nt, Homo Sapiens
cuagcccuccaugcagcccaucuucccuca

SEQ ID NO: 361889 - RNA, 32 nt, Homo Sapiens
uuuauagucacagauggcagaggaagaggcuc

SEQ ID NO: 361890 - RNA, 32 nt, Homo Sapiens
aagccaccacacagauggaaacaaaggaggaa

SEQ ID NO: 361891 - RNA, 27 nt, Homo Sapiens
cgauucuccugcuucagccuuccgagu

SEQ ID NO: 361892 - RNA, 32 nt, Homo Sapiens
cuucuuauuuggagaaaucuccagcugcucug

SEQ ID NO: 361893 - RNA, 32 nt, Homo Sapiens
gggaagggagaugcuuuguacauauuuugggg

SEQ ID NO: 361894 - RNA, 32 nt, Homo Sapiens
aucaccaugaguuuguuuugcuuuucauacag

SEQ ID NO: 361895 - RNA, 32 nt, Homo Sapiens
auaucuguuucauuuggaggauuuucuucuuu

SEQ ID NO: 361896 - RNA, 32 nt, Homo Sapiens
acacaccuuucuggacagagcccccaccagcc

SEQ ID NO: 361897 - RNA, 32 nt, Homo Sapiens
ucccuucuccacuuacuguaauuguuggaacu

SEQ ID NO: 361898 - RNA, 32 nt, Homo Sapiens
gcccugcuccagcucacacguggaugguacuu

SEQ ID NO: 361899 - RNA, 32 nt, Homo Sapiens
ggggggcggcgcauccgcggccucgagcuugc

SEQ ID NO: 361900 - RNA, 32 nt, Homo Sapiens
ccaaagagugcccuccuccccucucagccucc

SEQ ID NO: 361901 - RNA, 28 nt, Homo Sapiens
aagcuaccuugucauauguguugauucu

SEQ ID NO: 361902 - RNA, 32 nt, Homo Sapiens
ggggcgggggagaggacgucucugcgggcccc

SEQ ID NO: 361903 - RNA, 32 nt, Homo Sapiens
cauuuuguuguuuguuuuuuuauuuuggauga

SEQ ID NO: 361904 - RNA, 32 nt, Homo Sapiens
cugucauucuucuccuuucagcugaggaggaa

SEQ ID NO: 361905 - RNA, 32 nt, Homo Sapiens
agcgcugcggccccgcuuccuggcggccgggu

SEQ ID NO: 361906 - RNA, 32 nt, Homo Sapiens
gugaaacacccucggcugggaagucaguucgu

SEQ ID NO: 361907 - RNA, 32 nt, Homo Sapiens
ccuuccccaaccauggccccagguuugagcuu

SEQ ID NO: 361908 - RNA, 32 nt, Homo Sapiens
gagaagcagacaccgucacaggccccucuggu

SEQ ID NO: 361909 - RNA, 32 nt, Homo Sapiens
guuagucuccgcugcuaguucuuggcucuggg

SEQ ID NO: 361910 - RNA, 32 nt, Homo Sapiens
ggcagcggcggcagcggcggcggcuacugucu

SEQ ID NO: 361911 - RNA, 32 nt, Homo Sapiens
auucaaguucccuccagccccuccaccccucc

SEQ ID NO: 361912 - RNA, 32 nt, Homo Sapiens
ugcuaggccccgaggcugcgggaccugagcgc

SEQ ID NO: 361913 - RNA, 32 nt, Homo Sapiens
aucugaauucuauacccauggugacucugaug

SEQ ID NO: 361914 - RNA, 29 nt, Homo Sapiens
uuaauguaaaguuuguuauagucuaugug

SEQ ID NO: 361915 - RNA, 32 nt, Homo Sapiens
gaaggcauuccacuucccuucuccugaugcua

SEQ ID NO: 361916 - RNA, 32 nt, Homo Sapiens
cgccgccaccgccgccaccgccuccugggacu

SEQ ID NO: 361917 - RNA, 32 nt, Homo Sapiens
ugccuugucgcagccagccugcucuuacuuau

SEQ ID NO: 361918 - RNA, 32 nt, Homo Sapiens
aucuacacaaacuacaaaaguuaauuuucuug

SEQ ID NO: 361919 - RNA, 32 nt, Homo Sapiens
guugugaaacaaaagcugacauuuauauauau

SEQ ID NO: 361920 - RNA, 32 nt, Homo Sapiens
caaagacuacacuguuguugagguggugguag

SEQ ID NO: 361921 - RNA, 32 nt, Homo Sapiens
cggcucccgacgccagcugggcgucagaccca

SEQ ID NO: 361922 - RNA, 32 nt, Homo Sapiens
uggaaguucagcguuguaugucucucucuaca

SEQ ID NO: 361923 - RNA, 32 nt, Homo Sapiens
ggaccugccguggagggugcccggcagacgug

SEQ ID NO: 361924 - RNA, 32 nt, Homo Sapiens
cgccugcccgucucucucccauggagccccag

SEQ ID NO: 361925 - RNA, 32 nt, Homo Sapiens
acugcguuuucauuauucgcugaaacauacag

SEQ ID NO: 361926 - RNA, 32 nt, Homo Sapiens
gcauucuuuuccuuuuucuuccuguucauuau

SEQ ID NO: 361927 - RNA, 32 nt, Homo Sapiens
cuaggucuaguuucccacuuuggaccugcugc

SEQ ID NO: 361928 - RNA, 32 nt, Homo Sapiens
auuagcaauggcuggcuguuaguucugguaaa

SEQ ID NO: 361929 - RNA, 32 nt, Homo Sapiens
acccgggagggagagguugcagugagccaaga

SEQ ID NO: 361930 - RNA, 32 nt, Homo Sapiens
ggguuaucagauuugcacuuugagauccguuc

SEQ ID NO: 361931 - RNA, 32 nt, Homo Sapiens
gcggaaugucaacuauucaacauggaggcgga

SEQ ID NO: 361932 - RNA, 32 nt, Homo Sapiens
cuuuauguguguauauuguauguugagacaua

SEQ ID NO: 361933 - RNA, 32 nt, Homo Sapiens
aauacaguaguaguuucuuuuguauuuuguau

SEQ ID NO: 361934 - RNA, 32 nt, Homo Sapiens
uaauuucagguagaagacauguccaccuucug

SEQ ID NO: 361935 - RNA, 32 nt, Homo Sapiens
uuuuccuacuauuguuugacaugggaacuuuc

SEQ ID NO: 361936 - RNA, 32 nt, Homo Sapiens
auuauaaggugauucaugcuuuagugaauucu

SEQ ID NO: 361937 - RNA, 32 nt, Homo Sapiens
guuuagaugucuuuuugugauguuauauaaaa

SEQ ID NO: 361938 - RNA, 32 nt, Homo Sapiens
aauaauccuaauuauugccuuuucaauuauag

SEQ ID NO: 361939 - RNA, 32 nt, Homo Sapiens
uuguuagauuuauguauagcuaguuuauuuua

SEQ ID NO: 361940 - RNA, 32 nt, Homo Sapiens
gcugcgccccagcagcguccccggucgccagu

SEQ ID NO: 361941 - RNA, 32 nt, Homo Sapiens
ccugccugccccaccugccucauauugugugg

SEQ ID NO: 361942 - RNA, 32 nt, Homo Sapiens
auugcuuguuuaucagacaauugaauguagua

SEQ ID NO: 361943 - RNA, 32 nt, Homo Sapiens
gcacauuuagguugauuccuuaucuuugcuau

SEQ ID NO: 361944 - RNA, 32 nt, Homo Sapiens
ucgggugccaagggcgagccgucaguccccgg

SEQ ID NO: 361945 - RNA, 32 nt, Homo Sapiens
gagagcugcccccaaaucagacauaccucugu

SEQ ID NO: 361946 - RNA, 32 nt, Homo Sapiens
gacagacacauuagagcagcuguuuguuauug

SEQ ID NO: 361947 - RNA, 32 nt, Homo Sapiens
cuccagggcuccuggugcuccccaugugggaa

SEQ ID NO: 361948 - RNA, 32 nt, Homo Sapiens
uuugaaagaacaauaauaaaagacacuucuuc

SEQ ID NO: 361949 - RNA, 32 nt, Homo Sapiens
uuggccaguagauuauuauguuugucagauau

SEQ ID NO: 361950 - RNA, 32 nt, Homo Sapiens
ccuaaauugggaaacaguuguuagcaaacccu

SEQ ID NO: 361951 - RNA, 32 nt, Homo Sapiens
ccccucguuuuuccuucaauaaacuauuuugu

SEQ ID NO: 361952 - RNA, 32 nt, Homo Sapiens
ggugcgccguccuggggucgcugccgagagcg

SEQ ID NO: 361953 - RNA, 32 nt, Homo Sapiens
uaaauguuacacaauuugcauuggaauaaaua

SEQ ID NO: 361954 - RNA, 32 nt, Homo Sapiens
cacauaaaauacugaguccagucccggguaug

SEQ ID NO: 361955 - RNA, 32 nt, Homo Sapiens
uucauuacuucagucauagaaacucuuguucu

SEQ ID NO: 361956 - RNA, 32 nt, Homo Sapiens
ggaggcaugaccccaaaccaccaucucuuuac

SEQ ID NO: 361957 - RNA, 32 nt, Homo Sapiens
gauuauccaagcaaaaucauggaauuauuggu

SEQ ID NO: 361958 - RNA, 32 nt, Homo Sapiens
guggacuauuuuuguuuuuuuaaauggaaugc

SEQ ID NO: 361959 - RNA, 32 nt, Homo Sapiens
uuggggagggggagaaagaagaaagggauugc

SEQ ID NO: 361960 - RNA, 32 nt, Homo Sapiens
ccccggguccacgagcugcccacguccucucc

SEQ ID NO: 361961 - RNA, 32 nt, Homo Sapiens
aggauuacucgcgucuggcuccaggcgccgag

SEQ ID NO: 361962 - RNA, 28 nt, Homo Sapiens
agcauggcgucggccccgccggccucgc

SEQ ID NO: 361963 - RNA, 32 nt, Homo Sapiens
uccuucacuccagcuuuuauuucagugacuuu

SEQ ID NO: 361964 - RNA, 32 nt, Homo Sapiens
uccuccagcucuuuuauugagcauccacgugc

SEQ ID NO: 361965 - RNA, 32 nt, Homo Sapiens
uccagcgccugccugugcugggccugggagag

SEQ ID NO: 361966 - RNA, 32 nt, Homo Sapiens
aauaguuuggcuuuucugcagggucucuguga

SEQ ID NO: 361967 - RNA, 32 nt, Homo Sapiens
uccuguuugugcucagccauugaaaggauggu

SEQ ID NO: 361968 - RNA, 32 nt, Homo Sapiens
gaucugaggaaauaauggauaugaaggggcuu

SEQ ID NO: 361969 - RNA, 32 nt, Homo Sapiens
uaagcuguugccugcaaacccccgcaugagca

SEQ ID NO: 361970 - RNA, 32 nt, Homo Sapiens
aagggccauuuucaguccagcaaugucauccu

SEQ ID NO: 361971 - RNA, 32 nt, Homo Sapiens
uuuugcaguauguuguaguuaaacguuaauaa

SEQ ID NO: 361972 - RNA, 32 nt, Homo Sapiens
acccuuacauuaugcuaugaagaguaguaaua

SEQ ID NO: 361973 - RNA, 32 nt, Homo Sapiens
uaaucucuugcaccaccuauucuuacuuccug

SEQ ID NO: 361974 - RNA, 32 nt, Homo Sapiens
gauagcuugagcucagagaguucgagacaaac

SEQ ID NO: 361975 - RNA, 32 nt, Homo Sapiens
acgcgcucuccaccacccaacccaaaccauga

SEQ ID NO: 361976 - RNA, 32 nt, Homo Sapiens
caggaggguuugguucccacucagcuucugcc

SEQ ID NO: 361977 - RNA, 32 nt, Homo Sapiens
gggcagugcagguggacggggaggcggcucug

SEQ ID NO: 361978 - RNA, 32 nt, Homo Sapiens
auuuuuggcucuuuccauuaugagcuguguaa

SEQ ID NO: 361979 - RNA, 32 nt, Homo Sapiens
aucuugucccuauggauucaguucucuuaccc

SEQ ID NO: 361980 - RNA, 32 nt, Homo Sapiens
uaugaagaaaaauaaacagaacuuuaaagauc

SEQ ID NO: 361981 - RNA, 32 nt, Homo Sapiens
gacuucucugaaccuagcuuuaccacagugau

SEQ ID NO: 361982 - RNA, 32 nt, Homo Sapiens
auggaagcacauuaaaaguuacauaauauuac

SEQ ID NO: 361983 - RNA, 32 nt, Homo Sapiens
uggccggguggucguugcugcgcgccccgagc

SEQ ID NO: 361984 - RNA, 32 nt, Homo Sapiens
ccuggauaauuuuuuguauuuucaguagagac

SEQ ID NO: 361985 - RNA, 32 nt, Homo Sapiens
uugccuuuauugucuauaaaucuuccaccaug

SEQ ID NO: 361986 - RNA, 32 nt, Homo Sapiens
auucacagcaaccuggauggauuuggagacca

SEQ ID NO: 361987 - RNA, 32 nt, Homo Sapiens
ggcuccggacgcgggcgccaggugcacagccc

SEQ ID NO: 361988 - RNA, 32 nt, Homo Sapiens
uuuuuaguuggaaaaacaauuccuguaaccuu

SEQ ID NO: 361989 - RNA, 32 nt, Homo Sapiens
aacuccaaugcuaaagguuggauuguguuaga

SEQ ID NO: 361990 - RNA, 32 nt, Homo Sapiens
auuuauuugucaauguuuuccaaauacuuaga

SEQ ID NO: 361991 - RNA, 32 nt, Homo Sapiens
agauuccucagacucauccagcccuugggugc

SEQ ID NO: 361992 - RNA, 32 nt, Homo Sapiens
aaauggagaaggaaaaauagcuuuuaucaauu

SEQ ID NO: 361993 - RNA, 32 nt, Homo Sapiens
cggcgaggaggcgccgcugcugccggggcucg

SEQ ID NO: 361994 - RNA, 32 nt, Homo Sapiens
accuguacugucaggugcacuuugaugagggg

SEQ ID NO: 361995 - RNA, 32 nt, Homo Sapiens
gucuacagucaacuaaauaccaguuaucacag

SEQ ID NO: 361996 - RNA, 32 nt, Homo Sapiens
cugcuguuuuuggcagucgcuuuucugaauuc

SEQ ID NO: 361997 - RNA, 32 nt, Homo Sapiens
acuuaggugcugucaacauuagcaagauaaug

SEQ ID NO: 361998 - RNA, 32 nt, Homo Sapiens
aaauuccugagaaaaguuucucuucuuaagaa

SEQ ID NO: 361999 - RNA, 32 nt, Homo Sapiens
gcuuugggggucccacgagacauggacuagga

SEQ ID NO: 362000 - RNA, 32 nt, Homo Sapiens
ggucucuaagagauggggaaugugcuauguau

SEQ ID NO: 362001 - RNA, 32 nt, Homo Sapiens
acauaauccaccaugcugaaucagauggaagg

SEQ ID NO: 362002 - RNA, 32 nt, Homo Sapiens
uagccuuggggaugugaugaaaacacuuggca

SEQ ID NO: 362003 - RNA, 29 nt, Homo Sapiens
caaacugugacuuuuuacagacucgggcg

SEQ ID NO: 362004 - RNA, 32 nt, Homo Sapiens
ccuuuaagagcugaaagggcugugcugagagc

SEQ ID NO: 362005 - RNA, 32 nt, Homo Sapiens
cuccagcacccaugcccgcugcaccgcugcca

SEQ ID NO: 362006 - RNA, 32 nt, Homo Sapiens
aaacguggcccucuccaucuucaaagccagua

SEQ ID NO: 362007 - RNA, 32 nt, Homo Sapiens
ucugaggagagggaagaaggccugcuggggcu

SEQ ID NO: 362008 - RNA, 32 nt, Homo Sapiens
uuuucacugucucugucucaucuaguaccuac

SEQ ID NO: 362009 - RNA, 32 nt, Homo Sapiens
acaaccugcauaauguggacucuugaccagua

SEQ ID NO: 362010 - RNA, 32 nt, Homo Sapiens
aacuguuguaugccuggugcuuugcgacuugu

SEQ ID NO: 362011 - RNA, 32 nt, Homo Sapiens
ccaccacccacaacaaccgaagggcaggguga

SEQ ID NO: 362012 - RNA, 32 nt, Homo Sapiens
acgaaaagaacaagaaauaaaagaauccccuu

SEQ ID NO: 362013 - RNA, 32 nt, Homo Sapiens
auguuguguuuccauuuuugucucaagauccu

SEQ ID NO: 362014 - RNA, 32 nt, Homo Sapiens
gggcacuggcguacacugguaucccuccuaaa

SEQ ID NO: 362015 - RNA, 32 nt, Homo Sapiens
ugugucaccaaaacaauggagauacggucaga

SEQ ID NO: 362016 - RNA, 32 nt, Homo Sapiens
ucuuuuguugugguuuugcuuuuuagagacag

SEQ ID NO: 362017 - RNA, 32 nt, Homo Sapiens
ugggcuuucugaucuaaccccagcccaaauuc

SEQ ID NO: 362018 - RNA, 32 nt, Homo Sapiens
caggcugggaccagcuguuugucuccaggugu

SEQ ID NO: 362019 - RNA, 32 nt, Homo Sapiens
agggcgcgcuggcccggcacggcgguggucuu

SEQ ID NO: 362020 - RNA, 28 nt, Homo Sapiens
accagguggugccugccgaggucugggc

SEQ ID NO: 362021 - RNA, 32 nt, Homo Sapiens
uauauucuaaaguggaccugagcuauuugagc

SEQ ID NO: 362022 - RNA, 32 nt, Homo Sapiens
aagacugucuugggagcagcuuaaucccaaaa

SEQ ID NO: 362023 - RNA, 32 nt, Homo Sapiens
uuaucuaguacacauugaauuaaacuagaaaa

SEQ ID NO: 362024 - RNA, 32 nt, Homo Sapiens
cagaauuuuccuucuucagcucauuuugucuc

SEQ ID NO: 362025 - RNA, 32 nt, Homo Sapiens
gagcaacuugaauaauacugugaacuaaccaa

SEQ ID NO: 362026 - RNA, 32 nt, Homo Sapiens
aacagagccccucucccgccguggcccguggg

SEQ ID NO: 362027 - RNA, 32 nt, Homo Sapiens
uggcaaucuaagaugucuuuaucaagggucag

SEQ ID NO: 362028 - RNA, 32 nt, Homo Sapiens
uugaagaaaaaguagagacaaaaguaauguca

SEQ ID NO: 362029 - RNA, 32 nt, Homo Sapiens
uacagagaugauuuucaaaauauuuuaacaac

SEQ ID NO: 362030 - RNA, 32 nt, Homo Sapiens
auaagguauaguauauugauaauuauuuaauu

SEQ ID NO: 362031 - RNA, 32 nt, Homo Sapiens
ugaccuuggaaaauauuuuucuuacuuuacca

SEQ ID NO: 362032 - RNA, 32 nt, Homo Sapiens
gggcaaaccacuuuucuucucugaugcucagu

SEQ ID NO: 362033 - RNA, 32 nt, Homo Sapiens
ccugaaaggggcccgggcgacccuaagaggaa

SEQ ID NO: 362034 - RNA, 32 nt, Homo Sapiens
gagccuuauuaaaauauuuucuuaauuauggu

SEQ ID NO: 362035 - RNA, 32 nt, Homo Sapiens
uugaaaugcuguuuucauucugcauuugugua

SEQ ID NO: 362036 - RNA, 32 nt, Homo Sapiens
caaauauguuuuaauguaucucuaaugcauuu

SEQ ID NO: 362037 - RNA, 32 nt, Homo Sapiens
uagccuuaaacauuacuaauaguuucacauca

SEQ ID NO: 362038 - RNA, 32 nt, Homo Sapiens
ccgccaccucgucuccuccccguccccgccca

SEQ ID NO: 362039 - RNA, 32 nt, Homo Sapiens
acaugcgggaggaggcuuagcagacuugcgcu

SEQ ID NO: 362040 - RNA, 30 nt, Homo Sapiens
augaaugucuguguuggugauauuaucaag

SEQ ID NO: 362041 - RNA, 32 nt, Homo Sapiens
ugaaaguugcaucaguccucacggugcaaaca

SEQ ID NO: 362042 - RNA, 32 nt, Homo Sapiens
aauaaauaaaauaaaaucauguucacugcuaa

SEQ ID NO: 362043 - RNA, 32 nt, Homo Sapiens
aggcggcgcuuggcugguggggcccgcggcgg

SEQ ID NO: 362044 - RNA, 31 nt, Homo Sapiens
uuguaaggcgcguuccugccccgcacacgca

SEQ ID NO: 362045 - RNA, 32 nt, Homo Sapiens
gggcauuagaggucucugggggugccugggaa

SEQ ID NO: 362046 - RNA, 32 nt, Homo Sapiens
aaaaccuaaaagacaggcucuguauauauaua

SEQ ID NO: 362047 - RNA, 32 nt, Homo Sapiens
ccauuuaaaauuguuuuuuuuacuauuuuuua

SEQ ID NO: 362048 - RNA, 32 nt, Homo Sapiens
aaccacuggagagacacucagaaggacuuccc

SEQ ID NO: 362049 - RNA, 32 nt, Homo Sapiens
guccuuuagagcaugauuacuuguucccaugg

SEQ ID NO: 362050 - RNA, 32 nt, Homo Sapiens
uaaaauuauaccauuuaacuggcucuuuuguc

SEQ ID NO: 362051 - RNA, 32 nt, Homo Sapiens
cugaccuccgccccugcccccgcucccgcucc

SEQ ID NO: 362052 - RNA, 32 nt, Homo Sapiens
gacacuugacauuuuuauauuauaaauaaaau

SEQ ID NO: 362053 - RNA, 32 nt, Homo Sapiens
uguaucuucauggcuaucagauauauaaauuu

SEQ ID NO: 362054 - RNA, 32 nt, Homo Sapiens
gaaccugcuacauaggccuaaugccacaacca

SEQ ID NO: 362055 - RNA, 32 nt, Homo Sapiens
acagagucauuuccuaaggaccccaaaagaca

SEQ ID NO: 362056 - RNA, 32 nt, Homo Sapiens
cuagcagcacgcuccucagagagggggccgag

SEQ ID NO: 362057 - RNA, 32 nt, Homo Sapiens
ucacccacccuacaguuugcuaacuccuugaa

SEQ ID NO: 362058 - RNA, 32 nt, Homo Sapiens
cuacagugcugagcaaaaaguccccaauaaau

SEQ ID NO: 362059 - RNA, 32 nt, Homo Sapiens
uccccagcacggggcuccaugguugaggcucu

SEQ ID NO: 362060 - RNA, 32 nt, Homo Sapiens
uuauaggcacaucuccuucauuuccuagguca

SEQ ID NO: 362061 - RNA, 32 nt, Homo Sapiens
guguccuccuucccgcagccaccagcccaugg

SEQ ID NO: 362062 - RNA, 32 nt, Homo Sapiens
cugaagagcuuaaagauaguuacaaaauacaa

SEQ ID NO: 362063 - RNA, 32 nt, Homo Sapiens
uucuuguuucuguuaaacuauauuccuagaaa

SEQ ID NO: 362064 - RNA, 32 nt, Homo Sapiens
cgaggcugcgccccggccggcccaugcguuuu

SEQ ID NO: 362065 - RNA, 32 nt, Homo Sapiens
aucucccaagacaagugguauaggggaaauga

SEQ ID NO: 362066 - RNA, 32 nt, Homo Sapiens
ucuccaucuuucugcccugcauaccagcccuc

SEQ ID NO: 362067 - RNA, 32 nt, Homo Sapiens
ucuggaugcauuuuguggugggcccccuagag

SEQ ID NO: 362068 - RNA, 32 nt, Homo Sapiens
uuauuuuauuuuuguaauagucaguuggcaaa

SEQ ID NO: 362069 - RNA, 32 nt, Homo Sapiens
gaaggagggagccacgugccccgccccacccg

SEQ ID NO: 362070 - RNA, 32 nt, Homo Sapiens
agaaucauauaguauuuguccuuuugugucca

SEQ ID NO: 362071 - RNA, 32 nt, Homo Sapiens
ccauuacauugaugacauuaugcugauuggau

SEQ ID NO: 362072 - RNA, 32 nt, Homo Sapiens
aucuauauguuuaauacaccuaauguauuaug

SEQ ID NO: 362073 - RNA, 32 nt, Homo Sapiens
uuaucuucguguuuccucuuucuacugggcca

SEQ ID NO: 362074 - RNA, 32 nt, Homo Sapiens
auagugucucgaguacuaauaugcaauuauga

SEQ ID NO: 362075 - RNA, 32 nt, Homo Sapiens
cacauuaugaauaguguuauuuuuuagcacac

SEQ ID NO: 362076 - RNA, 32 nt, Homo Sapiens
uaccuggaguuuaguaucaacuucuacacaga

SEQ ID NO: 362077 - RNA, 32 nt, Homo Sapiens
uuuccccuauccuguucuuccccuccccgcuc

SEQ ID NO: 362078 - RNA, 32 nt, Homo Sapiens
agugcuggcagccaccauccacuuccuggccu

SEQ ID NO: 362079 - RNA, 32 nt, Homo Sapiens
ugcccgggauuaccugccccagccccgaggug

SEQ ID NO: 362080 - RNA, 32 nt, Homo Sapiens
cagaaagcccaccagcaacauaauuuuaaagc

SEQ ID NO: 362081 - RNA, 32 nt, Homo Sapiens
agacauugauuugguuucauuaucauauagaa

SEQ ID NO: 362082 - RNA, 32 nt, Homo Sapiens
gaccagcaccaggggcucucuagacugccccu

SEQ ID NO: 362083 - RNA, 32 nt, Homo Sapiens
aaagaugagggguacccaccccugcccuucaa

SEQ ID NO: 362084 - RNA, 32 nt, Homo Sapiens
uuucugcuuuuguguaccccaccaccccauua

SEQ ID NO: 362085 - RNA, 32 nt, Homo Sapiens
aagccauccaaccaaaggaagugauuugacaa

SEQ ID NO: 362086 - RNA, 30 nt, Homo Sapiens
ugaauacuacuugccacauccacagcccau

SEQ ID NO: 362087 - RNA, 32 nt, Homo Sapiens
auuuagaacacuuugguagcaauagaaacuuu

SEQ ID NO: 362088 - RNA, 32 nt, Homo Sapiens
cuccagcucuacucacaggcuccgauggcggc

SEQ ID NO: 362089 - RNA, 32 nt, Homo Sapiens
aagacaaggaccagcuuuggggccuccaccug

SEQ ID NO: 362090 - RNA, 32 nt, Homo Sapiens
auauuucugucggagggaugacugcuggagga

SEQ ID NO: 362091 - RNA, 32 nt, Homo Sapiens
cccaccgauccggaggcugcgggcagccguua

SEQ ID NO: 362092 - RNA, 32 nt, Homo Sapiens
aaucgccucgcacgcgcucagcccgcccccug

SEQ ID NO: 362093 - RNA, 32 nt, Homo Sapiens
cauauuuagauauagcugguuaaaaaaugcca

SEQ ID NO: 362094 - RNA, 32 nt, Homo Sapiens
ccuauaguuuaaaagcacaucuauguucacug

SEQ ID NO: 362095 - RNA, 32 nt, Homo Sapiens
aaauccagccuuuggaggaauagagaugguca

SEQ ID NO: 362096 - RNA, 32 nt, Homo Sapiens
cagcaggggagcuugccgaagccccggagcca

SEQ ID NO: 362097 - RNA, 32 nt, Homo Sapiens
uaugaugaagauguuagugcaaugcuaaaaga

SEQ ID NO: 362098 - RNA, 31 nt, Homo Sapiens
uguggcgaacacaaccugccccguauggugc

SEQ ID NO: 362099 - RNA, 32 nt, Homo Sapiens
uuuuuuuaauuuuauuuuuuuaugaaaagaac

SEQ ID NO: 362100 - RNA, 30 nt, Homo Sapiens
ugcgcgcuguggggccaccagucggggcgc

SEQ ID NO: 362101 - RNA, 32 nt, Homo Sapiens
gccuugccuucuuaaccacgggcuccugcaga

SEQ ID NO: 362102 - RNA, 32 nt, Homo Sapiens
ccugguccacugggccgugagcagccaccgac

SEQ ID NO: 362103 - RNA, 32 nt, Homo Sapiens
cagcagcggcuggggucuggcuccuuucagag

SEQ ID NO: 362104 - RNA, 32 nt, Homo Sapiens
cauuuuuccuuccuuuuaucacauugcuaaau

SEQ ID NO: 362105 - RNA, 32 nt, Homo Sapiens
agcuuuuggacaauuuugaguugaggagugau

SEQ ID NO: 362106 - RNA, 32 nt, Homo Sapiens
ucuuaacaaaagucuuugauaacuuaagaacc

SEQ ID NO: 362107 - RNA, 32 nt, Homo Sapiens
uucaccccaucccauaccaguuccauccaggg

SEQ ID NO: 362108 - RNA, 32 nt, Homo Sapiens
ccuggcauuuccccuacuggcucucauucuca

SEQ ID NO: 362109 - RNA, 32 nt, Homo Sapiens
ucucagguauuuuuaugacuucuacuaaaauu

SEQ ID NO: 362110 - RNA, 32 nt, Homo Sapiens
uacaggcaugcgccaccacgcccagcuaauuu

SEQ ID NO: 362111 - RNA, 32 nt, Homo Sapiens
aaugcacugaugauaaugauaaugaaauuuua

SEQ ID NO: 362112 - RNA, 32 nt, Homo Sapiens
gauguggaaaccagagcugucuguggagcugu

SEQ ID NO: 362113 - RNA, 32 nt, Homo Sapiens
uugaacugccucaggaccccacuggagagcac

SEQ ID NO: 362114 - RNA, 32 nt, Homo Sapiens
ggugucuguuugucagugucuguuggcugggg

SEQ ID NO: 362115 - RNA, 32 nt, Homo Sapiens
uuucgagcaaacagacacguugaaagaauaga

SEQ ID NO: 362116 - RNA, 32 nt, Homo Sapiens
aauucagagaauauaaauuacuucuugugaag

SEQ ID NO: 362117 - RNA, 32 nt, Homo Sapiens
cccaccccaucccgucccccaccccaaggcua

SEQ ID NO: 362118 - RNA, 29 nt, Homo Sapiens
agccauggagguucuccuggguggaccau

SEQ ID NO: 362119 - RNA, 32 nt, Homo Sapiens
uuauucccaucuggcuucugcacuauuaaaau

SEQ ID NO: 362120 - RNA, 32 nt, Homo Sapiens
ucuaccccggucccucccuuucuggggugggg

SEQ ID NO: 362121 - RNA, 32 nt, Homo Sapiens
ccuuacucacauuccuucucuuuccuguguaa

SEQ ID NO: 362122 - RNA, 32 nt, Homo Sapiens
gacagaaaaacccugccucagcccuugggucc

SEQ ID NO: 362123 - RNA, 30 nt, Homo Sapiens
cccggccagcacuaugcccaucuuacuguu

SEQ ID NO: 362124 - RNA, 32 nt, Homo Sapiens
agcagcccgugaggcugaggcuccucccacug

SEQ ID NO: 362125 - RNA, 32 nt, Homo Sapiens
uaaaaggcuaucuauucuuaauucaaggauaa

SEQ ID NO: 362126 - RNA, 32 nt, Homo Sapiens
cugugacuaugauuaggagccuugcuucauuu

SEQ ID NO: 362127 - RNA, 32 nt, Homo Sapiens
agaacuggagaguaagaaugagcggugugggg

SEQ ID NO: 362128 - RNA, 32 nt, Homo Sapiens
uggauuugguggaagacacagauuuuucugga

SEQ ID NO: 362129 - RNA, 32 nt, Homo Sapiens
cagaguuauugaaucuuaauuuuuuuuaaugu

SEQ ID NO: 362130 - RNA, 32 nt, Homo Sapiens
uuaucaccuucuaaauuacuauguaauuuacu

SEQ ID NO: 362131 - RNA, 32 nt, Homo Sapiens
agacggcaaccuggguuccggaagccggagag

SEQ ID NO: 362132 - RNA, 32 nt, Homo Sapiens
caacaaaacuucgaaacaaaauggaagaaaau

SEQ ID NO: 362133 - RNA, 32 nt, Homo Sapiens
uuuuuuauucuauuuacaggaugauuuuuaaa

SEQ ID NO: 362134 - RNA, 32 nt, Homo Sapiens
guggguugauuacacaaugccuuguacaugau

SEQ ID NO: 362135 - RNA, 32 nt, Homo Sapiens
cguccucaccuuccccaagccacacauccucc

SEQ ID NO: 362136 - RNA, 32 nt, Homo Sapiens
gguugugagggccagcagugccacccugguaa

SEQ ID NO: 362137 - RNA, 32 nt, Homo Sapiens
auucuauauuuugaucuauuaagggauuagua

SEQ ID NO: 362138 - RNA, 32 nt, Homo Sapiens
gaccuuauuaaaccucuuuuagugcuucuaag

SEQ ID NO: 362139 - RNA, 32 nt, Homo Sapiens
ugguuuuaacucuaagaaaauuuuaaaaggaa

SEQ ID NO: 362140 - RNA, 32 nt, Homo Sapiens
auccugucccugccacauccauaagcuccuga

SEQ ID NO: 362141 - RNA, 32 nt, Homo Sapiens
aagcaauuuucuguuccucuccuuccaccacu

SEQ ID NO: 362142 - RNA, 32 nt, Homo Sapiens
ugucauaacuuuucuuuuuucuuuuuccauua

SEQ ID NO: 362143 - RNA, 32 nt, Homo Sapiens
ugggcuggaagaggcagcaaaagggaaaauca

SEQ ID NO: 362144 - RNA, 32 nt, Homo Sapiens
auuugucccacuuuuacuaaacaguggcagca

SEQ ID NO: 362145 - RNA, 32 nt, Homo Sapiens
uucuuuuuccugaaauauaaauugggauuuaa

SEQ ID NO: 362146 - RNA, 32 nt, Homo Sapiens
ggacacagccgggaccccgguucacacugacu

SEQ ID NO: 362147 - RNA, 29 nt, Homo Sapiens
aagaguuuggcuucaugaggcaaggugau

SEQ ID NO: 362148 - RNA, 32 nt, Homo Sapiens
uuucagcccacuuuuaucgccuuaaccuaguu

SEQ ID NO: 362149 - RNA, 32 nt, Homo Sapiens
gccauugauuugcacaaagagacuguggcucu

SEQ ID NO: 362150 - RNA, 32 nt, Homo Sapiens
caucguccaucccaucuuccuuugcccccagg

SEQ ID NO: 362151 - RNA, 32 nt, Homo Sapiens
ggaaguauuauguaaguuauuacauguaaaag

SEQ ID NO: 362152 - RNA, 32 nt, Homo Sapiens
ugugagggcauggacagaucuuccucagagga

SEQ ID NO: 362153 - RNA, 32 nt, Homo Sapiens
gcuguggaccagcuguguggaucucuagccca

SEQ ID NO: 362154 - RNA, 32 nt, Homo Sapiens
aggagcggacccugcucuccccgggcugcggg

SEQ ID NO: 362155 - RNA, 32 nt, Homo Sapiens
ucgggcuccuucccuggcgauggcuggccgcu

SEQ ID NO: 362156 - RNA, 32 nt, Homo Sapiens
gauccuaaaagugauccaaucuaagaaaaugg

SEQ ID NO: 362157 - RNA, 32 nt, Homo Sapiens
uauauuuuuuaaaaucaaugugaaaacauaga

SEQ ID NO: 362158 - RNA, 32 nt, Homo Sapiens
caguugucugucuuuucuuauguuuuuauuug

SEQ ID NO: 362159 - RNA, 32 nt, Homo Sapiens
caauccaggauucaggcccaccccauuuccag

SEQ ID NO: 362160 - RNA, 32 nt, Homo Sapiens
cgggcgggucgcgggggcaaugcgggcgcagg

SEQ ID NO: 362161 - RNA, 32 nt, Homo Sapiens
aggaaccgccccaagaagagccucuggcccgg

SEQ ID NO: 362162 - RNA, 32 nt, Homo Sapiens
caggagcggcaggagcugcggcuggagaagga

SEQ ID NO: 362163 - RNA, 32 nt, Homo Sapiens
agaagggguggcugggucuucaaggaucuccu

SEQ ID NO: 362164 - RNA, 31 nt, Homo Sapiens
augggcaccaccugccugccugucgugccuu

SEQ ID NO: 362165 - RNA, 32 nt, Homo Sapiens
gaagaggggggcugucggcugcugcuucuggg

SEQ ID NO: 362166 - RNA, 30 nt, Homo Sapiens
ggaucauggcugccgcgccgccgcuacggg

SEQ ID NO: 362167 - RNA, 32 nt, Homo Sapiens
cugagacuuuaaucuccaccagcccuuaaagu

SEQ ID NO: 362168 - RNA, 32 nt, Homo Sapiens
gcacugcacuucuucguuuucuucuugcuccc

SEQ ID NO: 362169 - RNA, 32 nt, Homo Sapiens
uauaaaccuggcacuuuacaaacaaauaaaca

SEQ ID NO: 362170 - RNA, 32 nt, Homo Sapiens
uuucaagccugccuaggaauucccagcccaaa

SEQ ID NO: 362171 - RNA, 32 nt, Homo Sapiens
cuucuggccaaucagugccgcuucgucacggg

SEQ ID NO: 362172 - RNA, 32 nt, Homo Sapiens
acccggcuaauuuuuguauuuucaguagagac

SEQ ID NO: 362173 - RNA, 32 nt, Homo Sapiens
ucgacaauauuccuugaugacagcauagccag

SEQ ID NO: 362174 - RNA, 32 nt, Homo Sapiens
uauacuuguuuucaguuuucauuucgacaaac

SEQ ID NO: 362175 - RNA, 32 nt, Homo Sapiens
cugaguaaacucccagaaagccugacaaauau

SEQ ID NO: 362176 - RNA, 32 nt, Homo Sapiens
guaaaaguaaaauggaugacaauaagagcuua

SEQ ID NO: 362177 - RNA, 32 nt, Homo Sapiens
ccucugccauucucccaaaaguaugcaaucag

SEQ ID NO: 362178 - RNA, 32 nt, Homo Sapiens
aguuagauaaugucccaccucuccccacacgc

SEQ ID NO: 362179 - RNA, 32 nt, Homo Sapiens
cccauguggggucuuucuggcgggccgccugc

SEQ ID NO: 362180 - RNA, 32 nt, Homo Sapiens
uauggaggucaucggggccucagcucggaggc

SEQ ID NO: 362181 - RNA, 32 nt, Homo Sapiens
ugguguacuaauuuugucacagugacaugccc

SEQ ID NO: 362182 - RNA, 32 nt, Homo Sapiens
gcaguuucugucccuuucuguaguuccuuuaa

SEQ ID NO: 362183 - RNA, 32 nt, Homo Sapiens
cugcugaaaaauuuuaucaaaaguuacuggaa

SEQ ID NO: 362184 - RNA, 32 nt, Homo Sapiens
ccugguagggaagagguaagggggaugauuca

SEQ ID NO: 362185 - RNA, 32 nt, Homo Sapiens
uccccuccuugccuccuguguaaucauuucuu

SEQ ID NO: 362186 - RNA, 32 nt, Homo Sapiens
ugcuaacaguccgcuuuccaggaggcaaacuu

SEQ ID NO: 362187 - RNA, 32 nt, Homo Sapiens
caaggugaaauaagagcucaagggcaguggca

SEQ ID NO: 362188 - RNA, 32 nt, Homo Sapiens
acugaacccagcugucuugcaaacuuucagug

SEQ ID NO: 362189 - RNA, 32 nt, Homo Sapiens
cagaacgggcagggcugccacugaccugaaga

SEQ ID NO: 362190 - RNA, 32 nt, Homo Sapiens
uacaugugugaacacguguuucugucgugugu

SEQ ID NO: 362191 - RNA, 32 nt, Homo Sapiens
guuguggcccggacgccgcgggccacccccug

SEQ ID NO: 362192 - RNA, 32 nt, Homo Sapiens
aauuuuggauacugauauaaaaucaucaagau

SEQ ID NO: 362193 - RNA, 32 nt, Homo Sapiens
acagguaaaugucaaggcacaaucaguuuuca

SEQ ID NO: 362194 - RNA, 32 nt, Homo Sapiens
cacagagggaggagcucugagaacagucuccu

SEQ ID NO: 362195 - RNA, 32 nt, Homo Sapiens
gcugcuccauucuccugcucucuggguuccuu

SEQ ID NO: 362196 - RNA, 32 nt, Homo Sapiens
ugcgguggcugccuauguucucagagcggguc

SEQ ID NO: 362197 - RNA, 32 nt, Homo Sapiens
ucccacgcuaccgggcacgggcggccuccuau

SEQ ID NO: 362198 - RNA, 32 nt, Homo Sapiens
uccuuaucgcauccucccgggcgaaggcccaa

SEQ ID NO: 362199 - RNA, 32 nt, Homo Sapiens
ugcucuuuacuucauggacuuccacugccauc

SEQ ID NO: 362200 - RNA, 32 nt, Homo Sapiens
uuuuaaagcuuuucuucaguguuuugucaacc

SEQ ID NO: 362201 - RNA, 32 nt, Homo Sapiens
uauuuuacauaaauuaaguuauaaauugacac

SEQ ID NO: 362202 - RNA, 32 nt, Homo Sapiens
uggcccucugaggggacgacugugccugagug

SEQ ID NO: 362203 - RNA, 32 nt, Homo Sapiens
ucccggcauaccuauuagugucuuaaaaagga

SEQ ID NO: 362204 - RNA, 32 nt, Homo Sapiens
ucgacggcggagcggcagcagccuccguggcc

SEQ ID NO: 362205 - RNA, 32 nt, Homo Sapiens
guuuuaagaaauaaagugacuccucagccguu

SEQ ID NO: 362206 - RNA, 32 nt, Homo Sapiens
ggugucggagagccgccgagcgugcggucccg

SEQ ID NO: 362207 - RNA, 32 nt, Homo Sapiens
cuuggcaaauaaauucacuuaauagaucacag

SEQ ID NO: 362208 - RNA, 32 nt, Homo Sapiens
uccagcccaggucccaggaucccugcacccau

SEQ ID NO: 362209 - RNA, 31 nt, Homo Sapiens
gagggaaagcaauggaugggauauguuaaaa

SEQ ID NO: 362210 - RNA, 32 nt, Homo Sapiens
uuccaggcccagcucuugccucaugguggccu

SEQ ID NO: 362211 - RNA, 32 nt, Homo Sapiens
gugggcauaggauuuccaacccaagcccccag

SEQ ID NO: 362212 - RNA, 32 nt, Homo Sapiens
uccuccuucuugaaccccucagcccucaguua

SEQ ID NO: 362213 - RNA, 32 nt, Homo Sapiens
aggcgugagaauggcgucccgcggccggcguc

SEQ ID NO: 362214 - RNA, 32 nt, Homo Sapiens
aaacugcaguuucuuuccuuuggauacauaag

SEQ ID NO: 362215 - RNA, 30 nt, Homo Sapiens
gccgcaugccacccgcgccgcgcccaggua

SEQ ID NO: 362216 - RNA, 32 nt, Homo Sapiens
uaaaccuuccuggaggaagggcacauauuuug

SEQ ID NO: 362217 - RNA, 32 nt, Homo Sapiens
aaaauacaaaaauuagguggacaugguggcga

SEQ ID NO: 362218 - RNA, 32 nt, Homo Sapiens
cgcggguccuuccccggccccgagggccaagg

SEQ ID NO: 362219 - RNA, 32 nt, Homo Sapiens
aaacacugugacgaguucagugcuaagaacug

SEQ ID NO: 362220 - RNA, 32 nt, Homo Sapiens
ugagugaaccaucauauaaacguguaguacag

SEQ ID NO: 362221 - RNA, 32 nt, Homo Sapiens
ugacuaauauaaaucaagaaaauuuguuguua

SEQ ID NO: 362222 - RNA, 32 nt, Homo Sapiens
agagccauuuggaaauacaaaaugguaccucu

SEQ ID NO: 362223 - RNA, 32 nt, Homo Sapiens
acggcacucaggaagcacuuggugaggacgag

SEQ ID NO: 362224 - RNA, 32 nt, Homo Sapiens
auggagaugcccgcacaguaauguagaaaugu

SEQ ID NO: 362225 - RNA, 32 nt, Homo Sapiens
uaauccccuguaacucuaaauaaaauaaugau

SEQ ID NO: 362226 - RNA, 32 nt, Homo Sapiens
ccaucaugcaagacgguaacacgaugcgcaac

SEQ ID NO: 362227 - RNA, 32 nt, Homo Sapiens
uuuaauucugagauuuccccaagcuguggauu

SEQ ID NO: 362228 - RNA, 32 nt, Homo Sapiens
auaccauccuuuucuauuuucuugaugcuguu

SEQ ID NO: 362229 - RNA, 30 nt, Homo Sapiens
gccccugugucccacuacacacagaaaacc

SEQ ID NO: 362230 - RNA, 32 nt, Homo Sapiens
gaacuguaagaaauaaauauuugcuguuuaua

SEQ ID NO: 362231 - RNA, 27 nt, Homo Sapiens
ggccuagccuuuugcagcccccagagg

SEQ ID NO: 362232 - RNA, 29 nt, Homo Sapiens
guguguauguguauguauacauauauauc

SEQ ID NO: 362233 - RNA, 32 nt, Homo Sapiens
uggggcuuaugcggcggcguggugaaauagau

SEQ ID NO: 362234 - RNA, 32 nt, Homo Sapiens
guucccccauuuccuucaguaccagucuauaa

SEQ ID NO: 362235 - RNA, 32 nt, Homo Sapiens
uucucuuaaaagacaacauaacuuuuuauguc

SEQ ID NO: 362236 - RNA, 32 nt, Homo Sapiens
ccagccucuaggugagucagugcgucacucug

SEQ ID NO: 362237 - RNA, 32 nt, Homo Sapiens
uuaggugacaccugguuaugacagucagaaau

SEQ ID NO: 362238 - RNA, 32 nt, Homo Sapiens
uuugcuuuucuuuugaaaguaugaaaaugauu

SEQ ID NO: 362239 - RNA, 32 nt, Homo Sapiens
aaugacccagauuguuucugcuuugggugcag

SEQ ID NO: 362240 - RNA, 32 nt, Homo Sapiens
cccaacaucaaacaaagcacaaacagugaggc

SEQ ID NO: 362241 - RNA, 32 nt, Homo Sapiens
uguccgcaggcaccagccccagccucccacca

SEQ ID NO: 362242 - RNA, 32 nt, Homo Sapiens
aaugccguauauauuuuucaacaaauauuaac

SEQ ID NO: 362243 - RNA, 31 nt, Homo Sapiens
auugugugcugcaagaaagugcuuguugauu

SEQ ID NO: 362244 - RNA, 32 nt, Homo Sapiens
ucagacaggaggagaggcagcagguugagcuc

SEQ ID NO: 362245 - RNA, 32 nt, Homo Sapiens
gcgcgggcugucuaggggcggcgaccucagcu

SEQ ID NO: 362246 - RNA, 32 nt, Homo Sapiens
ucugagccuggugggauccccggagcgucaca

SEQ ID NO: 362247 - RNA, 32 nt, Homo Sapiens
aaggguaacuaugacaaagauacuuuugagau

SEQ ID NO: 362248 - RNA, 32 nt, Homo Sapiens
ggggagguuuguguacacccauguauuuaaaa

SEQ ID NO: 362249 - RNA, 32 nt, Homo Sapiens
ucaccuaaggccaggaggucaaggcugcggug

SEQ ID NO: 362250 - RNA, 31 nt, Homo Sapiens
agacuggagcccccgaaggauggagaccaug

SEQ ID NO: 362251 - RNA, 32 nt, Homo Sapiens
ccaccgccuugauggcagcacccucgugugcc

SEQ ID NO: 362252 - RNA, 31 nt, Homo Sapiens
gcaaagaaauaaaugcaugauguaaugucaa

SEQ ID NO: 362253 - RNA, 32 nt, Homo Sapiens
gguguuucaaggaaacucuuaucacuacuauu

SEQ ID NO: 362254 - RNA, 32 nt, Homo Sapiens
gcacgcuauggaguuuucuauaaguaccagcc

SEQ ID NO: 362255 - RNA, 30 nt, Homo Sapiens
gcaccaugagccgcguucgggaugcuggcu

SEQ ID NO: 362256 - RNA, 31 nt, Homo Sapiens
uugcgugcagccucccaaccaugggcugggu

SEQ ID NO: 362257 - RNA, 32 nt, Homo Sapiens
guguuggguucagugaguggugagugguguuc

SEQ ID NO: 362258 - RNA, 32 nt, Homo Sapiens
cucucugguuaauuucaguaucauauuaugca

SEQ ID NO: 362259 - RNA, 32 nt, Homo Sapiens
aaaaaaaaucauucuuuuuagucuuagcaccu

SEQ ID NO: 362260 - RNA, 32 nt, Homo Sapiens
uuuugaggccgcguagucgguguuuuugaacu

SEQ ID NO: 362261 - RNA, 32 nt, Homo Sapiens
uugcuggcccucgcuuugcgcaacaccuuggu

SEQ ID NO: 362262 - RNA, 32 nt, Homo Sapiens
ggagcgcugcgucucccgccucagcuaggaag

SEQ ID NO: 362263 - RNA, 32 nt, Homo Sapiens
ucucagcggugggguguccgcgugccugccug

SEQ ID NO: 362264 - RNA, 32 nt, Homo Sapiens
gagaagugaguguaucugccccugcccaggcu

SEQ ID NO: 362265 - RNA, 32 nt, Homo Sapiens
cccgguccgaagucgcgggcauauucugucug

SEQ ID NO: 362266 - RNA, 32 nt, Homo Sapiens
ggagacccuggcuccaagccccggccucuaua

SEQ ID NO: 362267 - RNA, 32 nt, Homo Sapiens
cauguaauuauugcgaacaccuugcuuugugg

SEQ ID NO: 362268 - RNA, 32 nt, Homo Sapiens
uugucuccaaaauaaacuacugaaaucaaacc

SEQ ID NO: 362269 - RNA, 32 nt, Homo Sapiens
cacucgcuggaaacccugaacucugugccccc

SEQ ID NO: 362270 - RNA, 30 nt, Homo Sapiens
ccggcagcagcgcugccgccgcguccucag

SEQ ID NO: 362271 - RNA, 31 nt, Homo Sapiens
aaugaauaguuaggcucuucaguguaauaau

SEQ ID NO: 362272 - RNA, 32 nt, Homo Sapiens
acugaaaauauuuaauaaaauaaccuuuaaac

SEQ ID NO: 362273 - RNA, 32 nt, Homo Sapiens
cuuaauugcuuccaagcuuccaaaggcucuuu

SEQ ID NO: 362274 - RNA, 32 nt, Homo Sapiens
cagagaaccagacguuuguuucccaguuggaa

SEQ ID NO: 362275 - RNA, 32 nt, Homo Sapiens
agccugugcgacaagagcgaaacucugucuca

SEQ ID NO: 362276 - RNA, 32 nt, Homo Sapiens
ggaccccauuuugcaccuauugaaucagaagg

SEQ ID NO: 362277 - RNA, 32 nt, Homo Sapiens
cugagaggcgcaucguggaaaaaugaagcagc

SEQ ID NO: 362278 - RNA, 32 nt, Homo Sapiens
gaauggucugcuccagcuccugaguucacugc

SEQ ID NO: 362279 - RNA, 32 nt, Homo Sapiens
aagaacugugcauugacauccaaacauuucuu

SEQ ID NO: 362280 - RNA, 32 nt, Homo Sapiens
cuugagccuugaugaguuccaguaugugguau

SEQ ID NO: 362281 - RNA, 32 nt, Homo Sapiens
uauuuuaaaaacaaaauuugugaaaccuauag

SEQ ID NO: 362282 - RNA, 32 nt, Homo Sapiens
ucucugcccgucucuuacuggaggcacuaaac

SEQ ID NO: 362283 - RNA, 32 nt, Homo Sapiens
uguugaaauauuugacugacuuucaucuagga

SEQ ID NO: 362284 - RNA, 32 nt, Homo Sapiens
cuggaggcacagagggcgggggccuuggcgaa

SEQ ID NO: 362285 - RNA, 32 nt, Homo Sapiens
auuguauaaaauugcuauugcagcuuuauauu

SEQ ID NO: 362286 - RNA, 32 nt, Homo Sapiens
cugcagcucccucucugguccugggucccaca

SEQ ID NO: 362287 - RNA, 32 nt, Homo Sapiens
agucaguucugcagcagauaccagcuaugugu

SEQ ID NO: 362288 - RNA, 32 nt, Homo Sapiens
cgcuugaccugaccucucuccucuccccucac

SEQ ID NO: 362289 - RNA, 32 nt, Homo Sapiens
ccagcuuucaggcaagcuugugccaaagauaa

SEQ ID NO: 362290 - RNA, 29 nt, Homo Sapiens
gcaugucuggcuuuccugguggguccagg

SEQ ID NO: 362291 - RNA, 32 nt, Homo Sapiens
cucccugccaggcgcgugcgggacgccgcucu

SEQ ID NO: 362292 - RNA, 32 nt, Homo Sapiens
agggaaggcgggcgggcggggguggggguggg

SEQ ID NO: 362293 - RNA, 32 nt, Homo Sapiens
cuaucggcgacucccaggauccuggccaugag

SEQ ID NO: 362294 - RNA, 32 nt, Homo Sapiens
ggaugaugaugaugaugaugacuccucuucag

SEQ ID NO: 362295 - RNA, 32 nt, Homo Sapiens
cuggaauucgagaacuuuaaaaauagucuuug

SEQ ID NO: 362296 - RNA, 32 nt, Homo Sapiens
ccuggggaggcccucuuuggccugcucagcag

SEQ ID NO: 362297 - RNA, 32 nt, Homo Sapiens
ccagcucagguggugaguccuccuguccagcc

SEQ ID NO: 362298 - RNA, 32 nt, Homo Sapiens
auugcagauucuucuuuuuugaaagaacaaca

SEQ ID NO: 362299 - RNA, 32 nt, Homo Sapiens
caacaguacaguaauuagccgaaacuugccug

SEQ ID NO: 362300 - RNA, 32 nt, Homo Sapiens
acccgggcugccugccccugcugcuugggacg

SEQ ID NO: 362301 - RNA, 32 nt, Homo Sapiens
cuuacacucuuuaagccauuccagucaugaug

SEQ ID NO: 362302 - RNA, 32 nt, Homo Sapiens
acccccuggacacgugcagggcccgcgcggcc

SEQ ID NO: 362303 - RNA, 32 nt, Homo Sapiens
uuucuauguaacauauaucucuaauuaucugu

SEQ ID NO: 362304 - RNA, 32 nt, Homo Sapiens
ccgccacccggcagccccggcgcagcuccggc

SEQ ID NO: 362305 - RNA, 32 nt, Homo Sapiens
gaccgcuccucccuuuuuccuugucccacacu

SEQ ID NO: 362306 - RNA, 32 nt, Homo Sapiens
uggcuuugguagaaagccuugguuuaaggcug

SEQ ID NO: 362307 - RNA, 32 nt, Homo Sapiens
auugauuggguuuuuucuuuauucuuaauuug

SEQ ID NO: 362308 - RNA, 32 nt, Homo Sapiens
auggcacugaagaugucccuucacugucccaa

SEQ ID NO: 362309 - RNA, 28 nt, Homo Sapiens
ggagcaauggcgaccuuugugagcgagc

SEQ ID NO: 362310 - RNA, 29 nt, Homo Sapiens
aguuacaggaugcucaguuuuaagguaua

SEQ ID NO: 362311 - RNA, 32 nt, Homo Sapiens
caccauaaggccagggagcugcugccagaaug

SEQ ID NO: 362312 - RNA, 30 nt, Homo Sapiens
ggcagcuugcccgugcugccgugcaguucu

SEQ ID NO: 362313 - RNA, 32 nt, Homo Sapiens
ugagauaggucacuuaaaauaacagugccuuu

SEQ ID NO: 362314 - RNA, 32 nt, Homo Sapiens
ugacauuaaaagacugugauauugaaagauga

SEQ ID NO: 362315 - RNA, 32 nt, Homo Sapiens
uuaaugagcauguacauagaaauagugacugc

SEQ ID NO: 362316 - RNA, 32 nt, Homo Sapiens
uaucuguauucaauauuugacaaaaucuaaug

SEQ ID NO: 362317 - RNA, 32 nt, Homo Sapiens
gucuugggaaaggggagagcuugaccuccauc

SEQ ID NO: 362318 - RNA, 32 nt, Homo Sapiens
auuuauagaauauuuguaaaucuauuuuuagu

SEQ ID NO: 362319 - RNA, 32 nt, Homo Sapiens
auaacacuauuugucuaaagaauggggaaaga

SEQ ID NO: 362320 - RNA, 32 nt, Homo Sapiens
gaccuuuuaaaauuaaaauacuauuggaagug

SEQ ID NO: 362321 - RNA, 32 nt, Homo Sapiens
gugccauguaaaauauagugauaucaaauaaa

SEQ ID NO: 362322 - RNA, 32 nt, Homo Sapiens
cagacauuccuccccaguugaucauuuaaaug

SEQ ID NO: 362323 - RNA, 32 nt, Homo Sapiens
ugugcauuggauaacaccaccauucacaaguu

SEQ ID NO: 362324 - RNA, 32 nt, Homo Sapiens
caacuaguauaaaacgaggcagcgaacccaca

SEQ ID NO: 362325 - RNA, 32 nt, Homo Sapiens
gaucauacugaauauacagacuaauucaggaa

SEQ ID NO: 362326 - RNA, 32 nt, Homo Sapiens
aggaagaucuaucaauaaauagcaaaccuggu

SEQ ID NO: 362327 - RNA, 32 nt, Homo Sapiens
uuaagccuguggaacugugaguccaauuaaac

SEQ ID NO: 362328 - RNA, 32 nt, Homo Sapiens
uuuuuccccccugaguguucuuauguauacac

SEQ ID NO: 362329 - RNA, 32 nt, Homo Sapiens
uucaaggccccgagucuuggacugugaagcau

SEQ ID NO: 362330 - RNA, 29 nt, Homo Sapiens
cgggaguuggagaccagccugagcaacau

SEQ ID NO: 362331 - RNA, 32 nt, Homo Sapiens
uuaaguauagccuaagaagagaauuccuuuuu

SEQ ID NO: 362332 - RNA, 32 nt, Homo Sapiens
cccguggguaggucccuggcucccagcuggag

SEQ ID NO: 362333 - RNA, 32 nt, Homo Sapiens
guagcuggcggucccgggugcugcugguuagu

SEQ ID NO: 362334 - RNA, 32 nt, Homo Sapiens
uuguauauuuaguaugaacuuuuuucagaaua

SEQ ID NO: 362335 - RNA, 29 nt, Homo Sapiens
aaguucauagugaaguuuccacugugagc

SEQ ID NO: 362336 - RNA, 32 nt, Homo Sapiens
gucagacuuuuccuuucaucuuuguguucauc

SEQ ID NO: 362337 - RNA, 32 nt, Homo Sapiens
gcucuuuuugucuucuucagacugcgccaugg

SEQ ID NO: 362338 - RNA, 32 nt, Homo Sapiens
ugcagcccuccucuccucaccuggccccagcu

SEQ ID NO: 362339 - RNA, 32 nt, Homo Sapiens
gaacuugcuggaaauacaaauccucaggcccc

SEQ ID NO: 362340 - RNA, 32 nt, Homo Sapiens
gaauggugccugggacucuauaagugcuuuag

SEQ ID NO: 362341 - RNA, 32 nt, Homo Sapiens
ucaaugaaaaguuaaccuuuguagcuuauaaa

SEQ ID NO: 362342 - RNA, 32 nt, Homo Sapiens
ccagaucuggcuucuuucccaaggagggggug

SEQ ID NO: 362343 - RNA, 32 nt, Homo Sapiens
aagccgccgugugguaggccgccgggccgccc

SEQ ID NO: 362344 - RNA, 32 nt, Homo Sapiens
uuaucuuuacagauuucccugagaaagggaau

SEQ ID NO: 362345 - RNA, 32 nt, Homo Sapiens
caacaguccccucccgccgccuccucagccaa

SEQ ID NO: 362346 - RNA, 32 nt, Homo Sapiens
ggugaccccagccccagccggcgcggagcagg

SEQ ID NO: 362347 - RNA, 32 nt, Homo Sapiens
ccgaaacccaaguuaugcauccccauccccau

SEQ ID NO: 362348 - RNA, 32 nt, Homo Sapiens
cuccaacaagcaugugacugugagauugugug

SEQ ID NO: 362349 - RNA, 32 nt, Homo Sapiens
uucgcuugugucccucuuucuagugucgcgcu

SEQ ID NO: 362350 - RNA, 29 nt, Homo Sapiens
ccccaggugcuucacagaggcaagauggc

SEQ ID NO: 362351 - RNA, 32 nt, Homo Sapiens
ucuguguguauuggucagaauagaauccauuc

SEQ ID NO: 362352 - RNA, 32 nt, Homo Sapiens
cccucgggcugcaagcacugcugcugggaugc

SEQ ID NO: 362353 - RNA, 32 nt, Homo Sapiens
aggacacuuuaaauauauagucuaaauaccgu

SEQ ID NO: 362354 - RNA, 32 nt, Homo Sapiens
gugcgcggcccggcccgucucgcgaacucgcg

SEQ ID NO: 362355 - RNA, 32 nt, Homo Sapiens
gggaaaggaaggaaagugaccccacuuucacu

SEQ ID NO: 362356 - RNA, 32 nt, Homo Sapiens
gacauuuugaaauaauguaaugugaaguguuu

SEQ ID NO: 362357 - RNA, 31 nt, Homo Sapiens
caaaagccagccaccaccuucaacuguuggc

SEQ ID NO: 362358 - RNA, 32 nt, Homo Sapiens
uguuguugguaacaguucaauucauuaacguu

SEQ ID NO: 362359 - RNA, 32 nt, Homo Sapiens
uugugcacuucauacugucacuuuuuaaaacu

SEQ ID NO: 362360 - RNA, 32 nt, Homo Sapiens
aaauugacaaguagaauacaaacaaccaaguu

SEQ ID NO: 362361 - RNA, 32 nt, Homo Sapiens
uaggguagguggggcggggguagggguggaua

SEQ ID NO: 362362 - RNA, 32 nt, Homo Sapiens
auauccguagaauggagagggaccggaucuca

SEQ ID NO: 362363 - RNA, 32 nt, Homo Sapiens
caagcuguaaaaaaacaaaaaaauuaauaaaa

SEQ ID NO: 362364 - RNA, 32 nt, Homo Sapiens
guucacacauucaauuuacagauuuagaauac

SEQ ID NO: 362365 - RNA, 32 nt, Homo Sapiens
ucucuguugcagaguuggaaguauuggccaag

SEQ ID NO: 362366 - RNA, 32 nt, Homo Sapiens
agauaggccgcuccccugaggaucccaggaac

SEQ ID NO: 362367 - RNA, 32 nt, Homo Sapiens
ucagcugaguuccaccaauuauaaauuaaauc

SEQ ID NO: 362368 - RNA, 32 nt, Homo Sapiens
gcuauggaaagaugcauagaaagaguauaaug

SEQ ID NO: 362369 - RNA, 32 nt, Homo Sapiens
uccuccguguccccgcuccgccgcccgagcag

SEQ ID NO: 362370 - RNA, 32 nt, Homo Sapiens
uucuggccuucuccauucuccuccagggguuc

SEQ ID NO: 362371 - RNA, 32 nt, Homo Sapiens
uuugacauuuaccaugaaaaaacuacauaaaa

SEQ ID NO: 362372 - RNA, 29 nt, Homo Sapiens
ggaagaaguguuucgaguuuaacaugcgc

SEQ ID NO: 362373 - RNA, 32 nt, Homo Sapiens
uauacuguuuaguuauuccuuucuuuacccac

SEQ ID NO: 362374 - RNA, 32 nt, Homo Sapiens
aagauuaggaggagaaaaagaggagcuuugga

SEQ ID NO: 362375 - RNA, 32 nt, Homo Sapiens
ucauaauaaacuagauacuguugaucuuuuaa

SEQ ID NO: 362376 - RNA, 32 nt, Homo Sapiens
ccucauccuucccaggguugcucugaggccau

SEQ ID NO: 362377 - RNA, 32 nt, Homo Sapiens
agagaaaugcaugggaauauuuuuuccuuaaa

SEQ ID NO: 362378 - RNA, 32 nt, Homo Sapiens
aggacuggaucccagggcacugucaguucuuc

SEQ ID NO: 362379 - RNA, 32 nt, Homo Sapiens
gcugcauaguauuccgugguguguauguacca

SEQ ID NO: 362380 - RNA, 32 nt, Homo Sapiens
ucuacucacagcugaagaaaaugagcacaccc

SEQ ID NO: 362381 - RNA, 32 nt, Homo Sapiens
agauauuccagaaagagagacuuuaagguuuu

SEQ ID NO: 362382 - RNA, 32 nt, Homo Sapiens
ugcaccuucauuuuaacccccauuuuaucagc

SEQ ID NO: 362383 - RNA, 32 nt, Homo Sapiens
ucauuuccagcaugugguucaaauaauauuuu

SEQ ID NO: 362384 - RNA, 32 nt, Homo Sapiens
auaccaaguguaucugcauauuuuaccaacug

SEQ ID NO: 362385 - RNA, 32 nt, Homo Sapiens
aaagaagagagccuaacugaaaggaagaggga

SEQ ID NO: 362386 - RNA, 32 nt, Homo Sapiens
gugaggugggccccggcccugggacaggcagc

SEQ ID NO: 362387 - RNA, 30 nt, Homo Sapiens
ccuguucuggacuguguucugggccugcug

SEQ ID NO: 362388 - RNA, 32 nt, Homo Sapiens
augaucauuuaaaagaaagucucuuucaauau

SEQ ID NO: 362389 - RNA, 32 nt, Homo Sapiens
uccagcccauucugagacucaguccucccaug

SEQ ID NO: 362390 - RNA, 32 nt, Homo Sapiens
cuauuuaauuuucacaacugcuugaauuuuga

SEQ ID NO: 362391 - RNA, 32 nt, Homo Sapiens
auaucucugugucuguccaccagccacagccc

SEQ ID NO: 362392 - RNA, 32 nt, Homo Sapiens
ugauuggucguuagguauucuauuugaguuca

SEQ ID NO: 362393 - RNA, 32 nt, Homo Sapiens
augaaugcuguggagaggcaucuggaacagaa

SEQ ID NO: 362394 - RNA, 32 nt, Homo Sapiens
gggcucaagccuggcccuggcccgcagcacac

SEQ ID NO: 362395 - RNA, 32 nt, Homo Sapiens
caccagggccccugcuggcucugaccgcccuc

SEQ ID NO: 362396 - RNA, 32 nt, Homo Sapiens
uucauuuuacuuuauaaaauugacauaauuga

SEQ ID NO: 362397 - RNA, 32 nt, Homo Sapiens
ugauguaaauuaaauaguaaucaugauucagu

SEQ ID NO: 362398 - RNA, 32 nt, Homo Sapiens
uuuuagauccugauacaucacugagugucaua

SEQ ID NO: 362399 - RNA, 32 nt, Homo Sapiens
aaaggacauuuucucauugguuuugccgugaa

SEQ ID NO: 362400 - RNA, 32 nt, Homo Sapiens
aaaagagaaaauuuggggugcuagaacccuua

SEQ ID NO: 362401 - RNA, 32 nt, Homo Sapiens
ggaaaugcugacuuuuaacccacacaagcgaa

SEQ ID NO: 362402 - RNA, 32 nt, Homo Sapiens
uuucaggauggcaacugcagagcauuaaaaua

SEQ ID NO: 362403 - RNA, 32 nt, Homo Sapiens
ccccuucuugcaacucuccuuaauuuuguuug

SEQ ID NO: 362404 - RNA, 32 nt, Homo Sapiens
uccucucacaugcugaaagcaagauguguucc

SEQ ID NO: 362405 - RNA, 32 nt, Homo Sapiens
agacagggaaucaacccaugugcccagcaaug

SEQ ID NO: 362406 - RNA, 32 nt, Homo Sapiens
ccagcuccuagagccaggcccgggccagggag

SEQ ID NO: 362407 - RNA, 32 nt, Homo Sapiens
aauuauacugaauauaauuuaaccuuggggaa

SEQ ID NO: 362408 - RNA, 32 nt, Homo Sapiens
gaauagccugaagaugaaggggaccgggggag

SEQ ID NO: 362409 - RNA, 32 nt, Homo Sapiens
guuuuaaggggaggaccggugcgagugaggca

SEQ ID NO: 362410 - RNA, 32 nt, Homo Sapiens
ccaaauucagcuuuuucaguuggcaguuuuuu

SEQ ID NO: 362411 - RNA, 32 nt, Homo Sapiens
caguguuaaaacuacaagagcuagaaaacuaa

SEQ ID NO: 362412 - RNA, 32 nt, Homo Sapiens
aaaaguuaacagcaugcugaaugugaaauauc

SEQ ID NO: 362413 - RNA, 32 nt, Homo Sapiens
ggcuaaucuugaacuugugaccucaggugauc

SEQ ID NO: 362414 - RNA, 32 nt, Homo Sapiens
acaaacuuauccaaaaauuuuauguggaaaag

SEQ ID NO: 362415 - RNA, 32 nt, Homo Sapiens
gucugggaccccaauucauucuuaucugccaa

SEQ ID NO: 362416 - RNA, 32 nt, Homo Sapiens
ugaguggaccaaagcugaaacgcucugagcaa

SEQ ID NO: 362417 - RNA, 32 nt, Homo Sapiens
aaagccagaaaguugaaagaccucugcccuca

SEQ ID NO: 362418 - RNA, 32 nt, Homo Sapiens
agcgccagcggccgggacgaggcggccgggag

SEQ ID NO: 362419 - RNA, 32 nt, Homo Sapiens
aaugaccuucugggcuacugacugcucacuau

SEQ ID NO: 362420 - RNA, 32 nt, Homo Sapiens
acggagauggaaugucacgagggauccagcca

SEQ ID NO: 362421 - RNA, 32 nt, Homo Sapiens
ccgggaaacaaggccucuggcucagugccuga

SEQ ID NO: 362422 - RNA, 32 nt, Homo Sapiens
cauagguaaugauuauauaaaauacauaauau

SEQ ID NO: 362423 - RNA, 32 nt, Homo Sapiens
gccccacguuucgaauucaucuccagguuaag

SEQ ID NO: 362424 - RNA, 32 nt, Homo Sapiens
caugcuuuaggggagggaaaggggcuaaaguc

SEQ ID NO: 362425 - RNA, 32 nt, Homo Sapiens
aauuucucauugauguugugaaaaucgucaug

SEQ ID NO: 362426 - RNA, 32 nt, Homo Sapiens
gcaagggcucggucggcccacccaggaccaaa

SEQ ID NO: 362427 - RNA, 32 nt, Homo Sapiens
uuuucuggacucuggacuuucucuaauaauaa

SEQ ID NO: 362428 - RNA, 32 nt, Homo Sapiens
aaaagccuuucuguaaagaaugguacaagaca

SEQ ID NO: 362429 - RNA, 32 nt, Homo Sapiens
cggugcugggcauguacgcggcggcggggccg

SEQ ID NO: 362430 - RNA, 32 nt, Homo Sapiens
aggccucccuggagcccagcaagcauuucugc

SEQ ID NO: 362431 - RNA, 32 nt, Homo Sapiens
cggaugauagaguggagacacuugaagccguu

SEQ ID NO: 362432 - RNA, 32 nt, Homo Sapiens
ggaagggccaagggacgucuucuccacgccgc

SEQ ID NO: 362433 - RNA, 32 nt, Homo Sapiens
auuaucuguagcauuucacaaauaauguuugc

SEQ ID NO: 362434 - RNA, 32 nt, Homo Sapiens
cccgcgcaccucgcucccccucccggccggcg

SEQ ID NO: 362435 - RNA, 32 nt, Homo Sapiens
cuugauaaaaacaacuaaaacagcaaagcaag

SEQ ID NO: 362436 - RNA, 29 nt, Homo Sapiens
gugaaauuguguuucaggcuuagucugac

SEQ ID NO: 362437 - RNA, 32 nt, Homo Sapiens
cagcgcugcgaggaggcgcccgggacagucau

SEQ ID NO: 362438 - RNA, 32 nt, Homo Sapiens
auuggcccuguguuuaccacucuggcccacuc

SEQ ID NO: 362439 - RNA, 32 nt, Homo Sapiens
acgaggagggcggacuccaggccccggcccag

SEQ ID NO: 362440 - RNA, 32 nt, Homo Sapiens
cagggcccaugccccugagaauaaaaagccgc

SEQ ID NO: 362441 - RNA, 32 nt, Homo Sapiens
ggcgcagggagcccggccccccaugcagccau

SEQ ID NO: 362442 - RNA, 32 nt, Homo Sapiens
ggggugcgggggugggguccagcccagagcag

SEQ ID NO: 362443 - RNA, 32 nt, Homo Sapiens
uuuuuaaaaaauugaaacuugcauuuuaaagu

SEQ ID NO: 362444 - RNA, 31 nt, Homo Sapiens
cccucccuuccccaaggauccacucccccag

SEQ ID NO: 362445 - RNA, 32 nt, Homo Sapiens
aagauuguaagacagccugugcucccucgcuc

SEQ ID NO: 362446 - RNA, 32 nt, Homo Sapiens
ugaccgaccccacuuccucagaauguaacggg

SEQ ID NO: 362447 - RNA, 32 nt, Homo Sapiens
gcuggcagucuguuggacuucucuucaggaag

SEQ ID NO: 362448 - RNA, 32 nt, Homo Sapiens
caacgccgugcagcccuggaggaacggcagcg

SEQ ID NO: 362449 - RNA, 32 nt, Homo Sapiens
agccgggcuugguggcgggcgccuguagucuc

SEQ ID NO: 362450 - RNA, 32 nt, Homo Sapiens
cccggggacccuaucgcgacuccaucgcgcca

SEQ ID NO: 362451 - RNA, 32 nt, Homo Sapiens
gaagucagauuucagcccaguuguguaggagu

SEQ ID NO: 362452 - RNA, 32 nt, Homo Sapiens
ccugucucaagcccauccauuauuucuuaacu

SEQ ID NO: 362453 - RNA, 32 nt, Homo Sapiens
uugccucagcaucuuugccuaaaauaaauuca

SEQ ID NO: 362454 - RNA, 32 nt, Homo Sapiens
cucucagagauccagguccgggagaugacagu

SEQ ID NO: 362455 - RNA, 32 nt, Homo Sapiens
gggaaagccagccccagcugggcccccggggc

SEQ ID NO: 362456 - RNA, 30 nt, Homo Sapiens
gagccagacugcauccgccgcggcgucucc

SEQ ID NO: 362457 - RNA, 32 nt, Homo Sapiens
gaauggaauaaggcuaaaaauauguuuagugu

SEQ ID NO: 362458 - RNA, 32 nt, Homo Sapiens
cuucccccuccuuaggccccagccugggccca

SEQ ID NO: 362459 - RNA, 32 nt, Homo Sapiens
agauauaugguaaaaaucagugaauguuuguu

SEQ ID NO: 362460 - RNA, 32 nt, Homo Sapiens
aucccaauuuccccugcucacucuuccacaga

SEQ ID NO: 362461 - RNA, 32 nt, Homo Sapiens
gugcuuaugcuucaguccaggcuggagagguu

SEQ ID NO: 362462 - RNA, 32 nt, Homo Sapiens
ccaccgucaccucggccgcugccgcugucgcc

SEQ ID NO: 362463 - RNA, 32 nt, Homo Sapiens
gagugaggggggaggcgguggcggcggccauu

SEQ ID NO: 362464 - RNA, 32 nt, Homo Sapiens
cugcacagcugaguccagugggagcugacgcc

SEQ ID NO: 362465 - RNA, 32 nt, Homo Sapiens
uccuugucugcaccacccgccuccugccucca

SEQ ID NO: 362466 - RNA, 32 nt, Homo Sapiens
auguuucaccuggacauuaaggugauguuuga

SEQ ID NO: 362467 - RNA, 32 nt, Homo Sapiens
ggagcagaaagauguguuuuugggaagaagaa

SEQ ID NO: 362468 - RNA, 32 nt, Homo Sapiens
ugaggacucccggugccucucuagggcccugg

SEQ ID NO: 362469 - RNA, 32 nt, Homo Sapiens
ggaaaggcggcuuuuagccagguauuucagug

SEQ ID NO: 362470 - RNA, 32 nt, Homo Sapiens
gggcagggaaggggaacacagauuucuuuggg

SEQ ID NO: 362471 - RNA, 32 nt, Homo Sapiens
uauauaugugguaaggaaaugccgauucuuca

SEQ ID NO: 362472 - RNA, 32 nt, Homo Sapiens
uuccuccuuccuccccggauuggcuugcugug

SEQ ID NO: 362473 - RNA, 32 nt, Homo Sapiens
ccuucuccgcuuuuucuugcagaugggccuag

SEQ ID NO: 362474 - RNA, 32 nt, Homo Sapiens
uccaguccaguuucccaaaaaccccaguguuu

SEQ ID NO: 362475 - RNA, 32 nt, Homo Sapiens
uccccaggugaaccaagggucugcuccggggc

SEQ ID NO: 362476 - RNA, 32 nt, Homo Sapiens
uuagguguuguggacaggagcugggaccaaga

SEQ ID NO: 362477 - RNA, 32 nt, Homo Sapiens
gcucgcgugggcugcccucccgggcccgcagu

SEQ ID NO: 362478 - RNA, 32 nt, Homo Sapiens
acuacuaaauguuuaugccucuguaaaccaaa

SEQ ID NO: 362479 - RNA, 32 nt, Homo Sapiens
aucuuaaaaaucgauccgcuuaccaugggccu

SEQ ID NO: 362480 - RNA, 32 nt, Homo Sapiens
ggugugcagagggcucugagcgccaggauggc

SEQ ID NO: 362481 - RNA, 32 nt, Homo Sapiens
gggguugaacaaacggaaagugccaggauuug

SEQ ID NO: 362482 - RNA, 32 nt, Homo Sapiens
gccuaaggcuuuuugcuuuuuuauuuauuguu

SEQ ID NO: 362483 - RNA, 32 nt, Homo Sapiens
cacuuggcaauaaaagaugacaagaagcauca

SEQ ID NO: 362484 - RNA, 32 nt, Homo Sapiens
ccuuuuuuuuuuaauucuuaauuuuuuuuuuu

SEQ ID NO: 362485 - RNA, 32 nt, Homo Sapiens
gaaugaguuugaugaauugacagaaguaggcu

SEQ ID NO: 362486 - RNA, 32 nt, Homo Sapiens
ccaucuccauugguggccccagcucaguaacu

SEQ ID NO: 362487 - RNA, 32 nt, Homo Sapiens
uaucuauguaacaaaucgcagcacaggagucc

SEQ ID NO: 362488 - RNA, 32 nt, Homo Sapiens
ucggaccagugucaaggaaaguuuguuuuauu

SEQ ID NO: 362489 - RNA, 32 nt, Homo Sapiens
cuauuucgccugcaaucuccagugaccauguc

SEQ ID NO: 362490 - RNA, 32 nt, Homo Sapiens
aaaauaaauaauuguggauauaaaagaacacc

SEQ ID NO: 362491 - RNA, 32 nt, Homo Sapiens
uucccucauccacagcuucucacugccgaagu

SEQ ID NO: 362492 - RNA, 32 nt, Homo Sapiens
gagcaguguacaaaucuggcugcccguuuacu

SEQ ID NO: 362493 - RNA, 32 nt, Homo Sapiens
aaccauggucauuuuuaggcauguaucauuca

SEQ ID NO: 362494 - RNA, 28 nt, Homo Sapiens
ugcacuuuuuaaaauaaauacugaauuc

SEQ ID NO: 362495 - RNA, 32 nt, Homo Sapiens
cagcccgacaccugcuguaauuggggugcaug

SEQ ID NO: 362496 - RNA, 32 nt, Homo Sapiens
cugaucuguuuuguagcugagguuuugcauac

SEQ ID NO: 362497 - RNA, 32 nt, Homo Sapiens
accaauuuuuaaaauccaaauauaucucaugg

SEQ ID NO: 362498 - RNA, 32 nt, Homo Sapiens
cuacaaaaugagauuccagugaacuaauuugg

SEQ ID NO: 362499 - RNA, 32 nt, Homo Sapiens
cccugggaucaugguggcguugcggggccuug

SEQ ID NO: 362500 - RNA, 32 nt, Homo Sapiens
uagacuaauuauuuuauccccaucccagggua

SEQ ID NO: 362501 - RNA, 32 nt, Homo Sapiens
agaugagguauuuuaugaguauuuucagacaa

SEQ ID NO: 362502 - RNA, 32 nt, Homo Sapiens
gccccagcgugcccucccggggguggguuccg

SEQ ID NO: 362503 - RNA, 32 nt, Homo Sapiens
gccggccgacuggccugagggccuggcugccc

SEQ ID NO: 362504 - RNA, 32 nt, Homo Sapiens
augaucuguuucucagacaugcagcacuucaa

SEQ ID NO: 362505 - RNA, 31 nt, Homo Sapiens
ucugaauuucacacucuuagagccuggaaga

SEQ ID NO: 362506 - RNA, 32 nt, Homo Sapiens
cccucaguugauauuucuuauaugauauucua

SEQ ID NO: 362507 - RNA, 32 nt, Homo Sapiens
uggcugcauggggcuccuuggacccuguagac

SEQ ID NO: 362508 - RNA, 32 nt, Homo Sapiens
cacucuuuaaggauuauuaguguuucauugau

SEQ ID NO: 362509 - RNA, 31 nt, Homo Sapiens
uguaccgagcgcagcgagcuacagacggggg

SEQ ID NO: 362510 - RNA, 32 nt, Homo Sapiens
uuaugguaguggggucaggaauguaggaacug

SEQ ID NO: 362511 - RNA, 32 nt, Homo Sapiens
cacucacuuauaaagauacuuaucuuuucagc

SEQ ID NO: 362512 - RNA, 32 nt, Homo Sapiens
cacuuguccuguggaacaacuacuuauaaugc

SEQ ID NO: 362513 - RNA, 32 nt, Homo Sapiens
uuaacagaagagucgaagcucugcgagaccca

SEQ ID NO: 362514 - RNA, 32 nt, Homo Sapiens
gauugaagaaaacaaacugaacaaagaaacaa

SEQ ID NO: 362515 - RNA, 32 nt, Homo Sapiens
cacacagauaaugcuuccagugaaugugaacu

SEQ ID NO: 362516 - RNA, 32 nt, Homo Sapiens
ccaagaaaaaucaagccuaaugugcuuggauc

SEQ ID NO: 362517 - RNA, 32 nt, Homo Sapiens
gccugucuuuaaaacuuaacuacuuuagggug

SEQ ID NO: 362518 - RNA, 32 nt, Homo Sapiens
uccucggccucccuggccccagcgcggcucca

SEQ ID NO: 362519 - RNA, 30 nt, Homo Sapiens
gaaaggcccugcuccuguuccgcgcagccu

SEQ ID NO: 362520 - RNA, 32 nt, Homo Sapiens
ggcuaaaugugcagcucuuucuccagguggga

SEQ ID NO: 362521 - RNA, 32 nt, Homo Sapiens
guuagucggguuugucucuggugggcuuucag

SEQ ID NO: 362522 - RNA, 32 nt, Homo Sapiens
ucgugcugggcguggcggcucacgccuguaau

SEQ ID NO: 362523 - RNA, 32 nt, Homo Sapiens
gcucccuccgcuccucucccccgccccucccg

SEQ ID NO: 362524 - RNA, 32 nt, Homo Sapiens
ggucagucaauaccauaggacuaugaaaaaua

SEQ ID NO: 362525 - RNA, 32 nt, Homo Sapiens
uggacuuguugacggaagaaaaguaggaaugc

SEQ ID NO: 362526 - RNA, 32 nt, Homo Sapiens
cugcugcccccguuuuuaauucuucucugccu

SEQ ID NO: 362527 - RNA, 32 nt, Homo Sapiens
ugguucacauucauuuuaggguuaguggucau

SEQ ID NO: 362528 - RNA, 32 nt, Homo Sapiens
ugguggcauaacugaaaauaugaagaaaagcc

SEQ ID NO: 362529 - RNA, 32 nt, Homo Sapiens
uugacaaaugagaucuaauuaaacuaaagagc

SEQ ID NO: 362530 - RNA, 32 nt, Homo Sapiens
cuuaacagaugacaauuaggcuuuugucauug

SEQ ID NO: 362531 - RNA, 32 nt, Homo Sapiens
uucaaaaggaaauuauuuugaaaguauguuua

SEQ ID NO: 362532 - RNA, 32 nt, Homo Sapiens
uuaugagauaauguucuaaucaaugucucugc

SEQ ID NO: 362533 - RNA, 32 nt, Homo Sapiens
cgucauugauuggguuuuuucuuuauucuuaa

SEQ ID NO: 362534 - RNA, 31 nt, Homo Sapiens
ucuuugggaaaacacauucagaauuauaucu

SEQ ID NO: 362535 - RNA, 32 nt, Homo Sapiens
uuccggacacacaugcacacacaggugcagau

SEQ ID NO: 362536 - RNA, 32 nt, Homo Sapiens
agaaaaauguaaaauuccaguucuuuucuaau

SEQ ID NO: 362537 - RNA, 32 nt, Homo Sapiens
cgauaaugagggcaauggcauucuucgacgcc

SEQ ID NO: 362538 - RNA, 32 nt, Homo Sapiens
augugcaggaccaaguugcccgcucugccagc

SEQ ID NO: 362539 - RNA, 32 nt, Homo Sapiens
aaucacccagguugaaaaccacugcucugucc

SEQ ID NO: 362540 - RNA, 32 nt, Homo Sapiens
gcugaguuugcggaagaaaccaggagagugcc

SEQ ID NO: 362541 - RNA, 32 nt, Homo Sapiens
ucuuaaggcuuuuugaagcuuauuuuacugug

SEQ ID NO: 362542 - RNA, 32 nt, Homo Sapiens
uuacucucaguccaacaacaucacucaaacaa

SEQ ID NO: 362543 - RNA, 32 nt, Homo Sapiens
cuuuggaaaaagacaggaaauaaacaccaaaa

SEQ ID NO: 362544 - RNA, 32 nt, Homo Sapiens
cggggcugggagggcugcuggcgcgggcucgc

SEQ ID NO: 362545 - RNA, 32 nt, Homo Sapiens
uaucccccucggaaggggggcccccagccuuu

SEQ ID NO: 362546 - RNA, 32 nt, Homo Sapiens
gagcugcauuucccagcugggcacucucgcgc

SEQ ID NO: 362547 - RNA, 32 nt, Homo Sapiens
caaaauguauaauuacguaaacacauauucaa

SEQ ID NO: 362548 - RNA, 32 nt, Homo Sapiens
cuggggggggggccucgcacccgccuugccag

SEQ ID NO: 362549 - RNA, 32 nt, Homo Sapiens
guggugucugucagacacacacaggucgccag

SEQ ID NO: 362550 - RNA, 32 nt, Homo Sapiens
aaaggugucuaaaaacuucagcuuuucaccca

SEQ ID NO: 362551 - RNA, 30 nt, Homo Sapiens
cccaagcuagguggcauucaugguggggcg

SEQ ID NO: 362552 - RNA, 32 nt, Homo Sapiens
agagagccgccgagccgagccgagccccagcu

SEQ ID NO: 362553 - RNA, 32 nt, Homo Sapiens
gccuucccaugcaaacuguagggcgcuuacag

SEQ ID NO: 362554 - RNA, 32 nt, Homo Sapiens
cucuguccacacugcuacggggccagagccaa

SEQ ID NO: 362555 - RNA, 32 nt, Homo Sapiens
gggggugcagcgcggauucuggcugccgugcg

SEQ ID NO: 362556 - RNA, 32 nt, Homo Sapiens
accccgcggagcacguacccagggaccgcagc

SEQ ID NO: 362557 - RNA, 32 nt, Homo Sapiens
gccagagagccuggugcugcugcugcuguggc

SEQ ID NO: 362558 - RNA, 32 nt, Homo Sapiens
cuguccaucccauggaaacaugggcacaauca

SEQ ID NO: 362559 - RNA, 30 nt, Homo Sapiens
ccuacccgcgcgcaggccaaguugcugaau

SEQ ID NO: 362560 - RNA, 32 nt, Homo Sapiens
cuucccauccuguucagcacucccagcugugu

SEQ ID NO: 362561 - RNA, 32 nt, Homo Sapiens
accucuguuguccucacggcucauuauaugcc

SEQ ID NO: 362562 - RNA, 32 nt, Homo Sapiens
cauugcacuccagccugggugauaagagcgaa

SEQ ID NO: 362563 - RNA, 32 nt, Homo Sapiens
ucucuaccaaaauaaaaauuagcugggcaugg

SEQ ID NO: 362564 - RNA, 32 nt, Homo Sapiens
gcagcaacagcuccaagaagugcucggcagga

SEQ ID NO: 362565 - RNA, 32 nt, Homo Sapiens
uacaguuugaacaauuauuuuaauccagcuaa

SEQ ID NO: 362566 - RNA, 32 nt, Homo Sapiens
uccugguuguauuucuguuuccugcuuuccuc

SEQ ID NO: 362567 - RNA, 32 nt, Homo Sapiens
cucccacugugaaaucgcuggugcucacaauu

SEQ ID NO: 362568 - RNA, 30 nt, Homo Sapiens
gacagaccacuugccacgcuguuguaaaaa

SEQ ID NO: 362569 - RNA, 29 nt, Homo Sapiens
uaaguacaguauguauauuuuguaaaucu

SEQ ID NO: 362570 - RNA, 32 nt, Homo Sapiens
uauaucaguuuccuaaugcuucaugauaggca

SEQ ID NO: 362571 - RNA, 32 nt, Homo Sapiens
acgcagaccugagggagcugggcccgccuuuu

SEQ ID NO: 362572 - RNA, 32 nt, Homo Sapiens
uggcaaagcggcguccguggccgcccgaggcc

SEQ ID NO: 362573 - RNA, 32 nt, Homo Sapiens
cauccccucccaucccccggcgcgugugugua

SEQ ID NO: 362574 - RNA, 32 nt, Homo Sapiens
aauucaaagcuacucaaaucauucaauaaaug

SEQ ID NO: 362575 - RNA, 32 nt, Homo Sapiens
gucaccuagaaagcauccuuggucaucauugu

SEQ ID NO: 362576 - RNA, 32 nt, Homo Sapiens
gaaagauccucugcugaccccuggagcagcuc

SEQ ID NO: 362577 - RNA, 32 nt, Homo Sapiens
ccuccguccacaccucggucugaugggcgaga

SEQ ID NO: 362578 - RNA, 32 nt, Homo Sapiens
ucucucuaggaaucccaaaaccacauuuugaa

SEQ ID NO: 362579 - RNA, 32 nt, Homo Sapiens
uggacauuauucuccugauccuccuaccuggu

SEQ ID NO: 362580 - RNA, 32 nt, Homo Sapiens
cacugcagcucuuuucaguuuuugcuuauaca

SEQ ID NO: 362581 - RNA, 32 nt, Homo Sapiens
cuccagcugcugauugugaucaccucucccga

SEQ ID NO: 362582 - RNA, 32 nt, Homo Sapiens
agaccuugagggugggccagcauaggggggag

SEQ ID NO: 362583 - RNA, 32 nt, Homo Sapiens
gaggagccgggcgcaggggcaucugugugucc

SEQ ID NO: 362584 - RNA, 32 nt, Homo Sapiens
uauaaaucauguuuaaauuuuucuagccaggc

SEQ ID NO: 362585 - RNA, 32 nt, Homo Sapiens
gaaccacucauaauucuucaccuuaggaauaa

SEQ ID NO: 362586 - RNA, 32 nt, Homo Sapiens
cguuuacuggcaaaccgcauuuguaaaugugc

SEQ ID NO: 362587 - RNA, 32 nt, Homo Sapiens
uuaauuuuucuuucaugacaacacauuccaaa

SEQ ID NO: 362588 - RNA, 32 nt, Homo Sapiens
uauauuuaugucuuuucauauuuaguucuggu

SEQ ID NO: 362589 - RNA, 32 nt, Homo Sapiens
ugaugucaguaccaccuggauguggaccuuug

SEQ ID NO: 362590 - RNA, 32 nt, Homo Sapiens
aaacauuuaaagcuagagacgggggaggcuua

SEQ ID NO: 362591 - RNA, 32 nt, Homo Sapiens
uagcaaaguuauucuguaaauacaacagaauc

SEQ ID NO: 362592 - RNA, 32 nt, Homo Sapiens
uaucgcacucagacaccaccacuuccuagagc

SEQ ID NO: 362593 - RNA, 32 nt, Homo Sapiens
cgcugccccgcugcagagagccggggaaagcg

SEQ ID NO: 362594 - RNA, 32 nt, Homo Sapiens
ggacggagagggugacgggggcugggaagggg

SEQ ID NO: 362595 - RNA, 32 nt, Homo Sapiens
auagcagucgcagucgcagacggucagccgau

SEQ ID NO: 362596 - RNA, 32 nt, Homo Sapiens
gggacggcgccccugucaggcugugucuuauc

SEQ ID NO: 362597 - RNA, 32 nt, Homo Sapiens
gaagcuggcccgagacguggagccaugcugcg

SEQ ID NO: 362598 - RNA, 32 nt, Homo Sapiens
ggauuaggauauggaaauaaaaucauggugac

SEQ ID NO: 362599 - RNA, 32 nt, Homo Sapiens
gggcaucugcugucgcugccucggccccgggc

SEQ ID NO: 362600 - RNA, 32 nt, Homo Sapiens
guaaauauuuuaagagcaugcagccaucuugg

SEQ ID NO: 362601 - RNA, 32 nt, Homo Sapiens
ggaagguuuuauucauucuugaauuuuuccuu

SEQ ID NO: 362602 - RNA, 32 nt, Homo Sapiens
aauagaacacauguucaugugacuuaacucag

SEQ ID NO: 362603 - RNA, 32 nt, Homo Sapiens
cacguuccacugcccuggcccagggcccaggc

SEQ ID NO: 362604 - RNA, 32 nt, Homo Sapiens
uaucauguguuggcuuuugguuuuacuauguu

SEQ ID NO: 362605 - RNA, 32 nt, Homo Sapiens
gucaccccaccuccccgcgcggucccggcccc

SEQ ID NO: 362606 - RNA, 32 nt, Homo Sapiens
ccuuuucuagguugccucuccuugccccuaag

SEQ ID NO: 362607 - RNA, 27 nt, Homo Sapiens
gucaccucugucuucagcacccucaua

SEQ ID NO: 362608 - RNA, 32 nt, Homo Sapiens
cgcccccaguggagacaaaugucugauggagu

SEQ ID NO: 362609 - RNA, 32 nt, Homo Sapiens
ucaucaucccucaucacccacagucgcccgau

SEQ ID NO: 362610 - RNA, 32 nt, Homo Sapiens
gugugcguggagguggcugaugagaacacaag

SEQ ID NO: 362611 - RNA, 31 nt, Homo Sapiens
uagugugaauaaaaacuaaaucacaucuaua

SEQ ID NO: 362612 - RNA, 32 nt, Homo Sapiens
gggcucaguccuccucaucccaucucacucuc

SEQ ID NO: 362613 - RNA, 32 nt, Homo Sapiens
cucuugagaacacacucgugugugcacauaaa

SEQ ID NO: 362614 - RNA, 32 nt, Homo Sapiens
ccggcgcggggcggggaggggcgggaaguuug

SEQ ID NO: 362615 - RNA, 32 nt, Homo Sapiens
agcgcaguuugcucgcuuuccuccccugccgg

SEQ ID NO: 362616 - RNA, 32 nt, Homo Sapiens
ccucacugacuucauaauuggaaugucacaug

SEQ ID NO: 362617 - RNA, 32 nt, Homo Sapiens
acaacaccuacacccaccuguuuuccaguguu

SEQ ID NO: 362618 - RNA, 32 nt, Homo Sapiens
ugacuuuuuaguacuaagcuuaauuuuuaaaa

SEQ ID NO: 362619 - RNA, 32 nt, Homo Sapiens
gcauuuguccccaacuaacugauaauuuaguu

SEQ ID NO: 362620 - RNA, 32 nt, Homo Sapiens
uuuaacuuuuaaaaucuauuucauuucuuagu

SEQ ID NO: 362621 - RNA, 32 nt, Homo Sapiens
ucccucuucccucucccucucucugggaccac

SEQ ID NO: 362622 - RNA, 32 nt, Homo Sapiens
caaaugcugucaugcggaaacguaugaaacag

SEQ ID NO: 362623 - RNA, 32 nt, Homo Sapiens
ucuggcccucaaacuauauugcagcuuucagc

SEQ ID NO: 362624 - RNA, 32 nt, Homo Sapiens
ugacugcuacugaguucuuucacagguaugga

SEQ ID NO: 362625 - RNA, 32 nt, Homo Sapiens
gcagaagcauccccggccgugggguuuucucc

SEQ ID NO: 362626 - RNA, 32 nt, Homo Sapiens
guccuccugugcuauuuguacaaauaaaccug

SEQ ID NO: 362627 - RNA, 32 nt, Homo Sapiens
uuuagaaugacccuugggaacagugaacguag

SEQ ID NO: 362628 - RNA, 32 nt, Homo Sapiens
gggagcuggcggacucccacuccccgcucccu

SEQ ID NO: 362629 - RNA, 28 nt, Homo Sapiens
auagaguugccuaccaggguuacuguaa

SEQ ID NO: 362630 - RNA, 32 nt, Homo Sapiens
aggugugcaauaagguagcaaguaaaacgcag

SEQ ID NO: 362631 - RNA, 32 nt, Homo Sapiens
accgcuucgcucccgcagcaucagcaccggag

SEQ ID NO: 362632 - RNA, 32 nt, Homo Sapiens
cucugaggguucggagcuucccucugggacua

SEQ ID NO: 362633 - RNA, 32 nt, Homo Sapiens
guuuuuaaaagcugcuaaagacucggaggaag

SEQ ID NO: 362634 - RNA, 32 nt, Homo Sapiens
ugaaauaauuuucaagcaaaguauugugaaag

SEQ ID NO: 362635 - RNA, 32 nt, Homo Sapiens
gcgcugccgggcggcuggcacuaagcgguccu

SEQ ID NO: 362636 - RNA, 30 nt, Homo Sapiens
gccguccgugccgcuagggagccgagacug

SEQ ID NO: 362637 - RNA, 32 nt, Homo Sapiens
auagcguuauuaaagugugucuuaauaaaauu

SEQ ID NO: 362638 - RNA, 31 nt, Homo Sapiens
gggcauuggcagugccugccaccacagccag

SEQ ID NO: 362639 - RNA, 32 nt, Homo Sapiens
cagagcaaaaacagccaaucuugaaaacauac

SEQ ID NO: 362640 - RNA, 32 nt, Homo Sapiens
uuguguucaguuuuguggucugagagauguac

SEQ ID NO: 362641 - RNA, 32 nt, Homo Sapiens
aagaggagcgaagggauuuauacaacauuuuu

SEQ ID NO: 362642 - RNA, 32 nt, Homo Sapiens
ggagagacuguggaguuugauguuguugaagg

SEQ ID NO: 362643 - RNA, 32 nt, Homo Sapiens
ucgcuuauccagaaugaugcuauguguagcau

SEQ ID NO: 362644 - RNA, 32 nt, Homo Sapiens
gccucugaggcucggcggggcugcggcugccu

SEQ ID NO: 362645 - RNA, 32 nt, Homo Sapiens
gauacagguuauauuauuuuuauuuuauuuug

SEQ ID NO: 362646 - RNA, 32 nt, Homo Sapiens
uggagcgaugugguugauaucaauaacuuuuc

SEQ ID NO: 362647 - RNA, 32 nt, Homo Sapiens
uuuaacuucuaaaauuauuucugaauacaguu

SEQ ID NO: 362648 - RNA, 32 nt, Homo Sapiens
cccaucaugcguggacugauaggacaucuuuu

SEQ ID NO: 362649 - RNA, 32 nt, Homo Sapiens
agcucggggcccagcccaugccccacacgggc

SEQ ID NO: 362650 - RNA, 32 nt, Homo Sapiens
caugcagcaggugcaaggcagcaagaauuugg

SEQ ID NO: 362651 - RNA, 32 nt, Homo Sapiens
aaauugaggaucucaaagagcuuugcuuauau

SEQ ID NO: 362652 - RNA, 32 nt, Homo Sapiens
cccgauuccuuccuucucccuggagcggccga

SEQ ID NO: 362653 - RNA, 32 nt, Homo Sapiens
uaugcuggugguuaaggccagggccucuccaa

SEQ ID NO: 362654 - RNA, 32 nt, Homo Sapiens
augcccccaggccccagguuuugacauccgaa

SEQ ID NO: 362655 - RNA, 30 nt, Homo Sapiens
ugagcgggagguggcacucacuaaguuaac

SEQ ID NO: 362656 - RNA, 32 nt, Homo Sapiens
auggccuuaaaaauaagucauuuauuauacag

SEQ ID NO: 362657 - RNA, 32 nt, Homo Sapiens
gggauggccaaggggugacaucuuaauuccua

SEQ ID NO: 362658 - RNA, 32 nt, Homo Sapiens
aagcuggugcuggugggcgacgcaagcguggg

SEQ ID NO: 362659 - RNA, 32 nt, Homo Sapiens
uguaauggacaaaaauaagauaugagaauauu

SEQ ID NO: 362660 - RNA, 30 nt, Homo Sapiens
aaaaaucaaaugcaaccccaucuuguuuua

SEQ ID NO: 362661 - RNA, 32 nt, Homo Sapiens
cagugaggucaaaaaauguuugaaagccacug

SEQ ID NO: 362662 - RNA, 32 nt, Homo Sapiens
aaagaagauaguccuuacaaaauuauuuauag

SEQ ID NO: 362663 - RNA, 32 nt, Homo Sapiens
cagcauggggcuacagaaauggcugggugcca

SEQ ID NO: 362664 - RNA, 32 nt, Homo Sapiens
ccauuuuaaaaagcccuguuauaaacguugaa

SEQ ID NO: 362665 - RNA, 32 nt, Homo Sapiens
uuugcacuaugacauuuuuaggguugaguaau

SEQ ID NO: 362666 - RNA, 32 nt, Homo Sapiens
uccucccccaucugcacccccaucauagguag

SEQ ID NO: 362667 - RNA, 32 nt, Homo Sapiens
cuguuuguaaaaauaucaguuuuacuuuucag

SEQ ID NO: 362668 - RNA, 32 nt, Homo Sapiens
agcuuccugccugccuguaccccgccaacagc

SEQ ID NO: 362669 - RNA, 32 nt, Homo Sapiens
aguagauauuaucaaaguccauaucaugaauu

SEQ ID NO: 362670 - RNA, 31 nt, Homo Sapiens
cugugguguuugacuuacaggaugaaaacuc

SEQ ID NO: 362671 - RNA, 32 nt, Homo Sapiens
uuccuuccgcuuucuuuuuuugugccuugugc

SEQ ID NO: 362672 - RNA, 32 nt, Homo Sapiens
ucauucccaucccugucaccagucccagcucc

SEQ ID NO: 362673 - RNA, 32 nt, Homo Sapiens
ccuuguugaggaaugcugaaaacuaaauuuua

SEQ ID NO: 362674 - RNA, 32 nt, Homo Sapiens
ggggcucagaaagauaccauggaguaguuuga

SEQ ID NO: 362675 - RNA, 32 nt, Homo Sapiens
aagggaccaaaaugacugacucaaaauauuuc

SEQ ID NO: 362676 - RNA, 32 nt, Homo Sapiens
uuuuccugcccccugccuugccaaagacauuu

SEQ ID NO: 362677 - RNA, 32 nt, Homo Sapiens
cugucccuguggacccgccauccaccguccug

SEQ ID NO: 362678 - RNA, 32 nt, Homo Sapiens
aauuuaggaaauggcauauauucugcaaagug

SEQ ID NO: 362679 - RNA, 32 nt, Homo Sapiens
aacauaaggacaacaaauacuccacccuguca

SEQ ID NO: 362680 - RNA, 32 nt, Homo Sapiens
guauaguaaccaaaaaccaaaacagugauauu

SEQ ID NO: 362681 - RNA, 32 nt, Homo Sapiens
uggugcggggugcugggagcgaggggggccgc

SEQ ID NO: 362682 - RNA, 32 nt, Homo Sapiens
uucuugauagaguagcaugguaacgauggugu

SEQ ID NO: 362683 - RNA, 32 nt, Homo Sapiens
uacagaaucuuacuucucuuuguuccugauau

SEQ ID NO: 362684 - RNA, 32 nt, Homo Sapiens
aagcuuugccaccugcagaaaugcauugcccc

SEQ ID NO: 362685 - RNA, 32 nt, Homo Sapiens
cuaguccgccugcuucaggacucucaagaucu

SEQ ID NO: 362686 - RNA, 32 nt, Homo Sapiens
gcagugaucaugggggaaauguuuacauuuuu

SEQ ID NO: 362687 - RNA, 32 nt, Homo Sapiens
uuuaggccuguaagaaacuaugccugauucug

SEQ ID NO: 362688 - RNA, 31 nt, Homo Sapiens
ccuccauggaacagucucagaguacugaaga

SEQ ID NO: 362689 - RNA, 32 nt, Homo Sapiens
uagcuggggagguggauuuagcagaaggcaac

SEQ ID NO: 362690 - RNA, 32 nt, Homo Sapiens
gcucaugggcaacaucacuggggcccagagag

SEQ ID NO: 362691 - RNA, 32 nt, Homo Sapiens
gugagugucaggcuucaaugccuguguuagag

SEQ ID NO: 362692 - RNA, 32 nt, Homo Sapiens
aauuucauuuaguugucaugacucuuucaguc

SEQ ID NO: 362693 - RNA, 32 nt, Homo Sapiens
uccuccccucccuccuucuuuaguuuaaccau

SEQ ID NO: 362694 - RNA, 32 nt, Homo Sapiens
ggcacuugcuacuucaguaaugucuauauuau

SEQ ID NO: 362695 - RNA, 32 nt, Homo Sapiens
cagaagggggucugggucugcucaggaucaug

SEQ ID NO: 362696 - RNA, 32 nt, Homo Sapiens
agagcgaucaugucgcacaaacaaauuuacua

SEQ ID NO: 362697 - RNA, 27 nt, Homo Sapiens
agccccacuucccucagcccccagggc

SEQ ID NO: 362698 - RNA, 32 nt, Homo Sapiens
gugcugcuaccuuguauguuuacauaaugcuu

SEQ ID NO: 362699 - RNA, 32 nt, Homo Sapiens
auauuuucuuguaucagaauuguuauuaugca

SEQ ID NO: 362700 - RNA, 32 nt, Homo Sapiens
ucccacccacgcugcccccagagcuugggcug

SEQ ID NO: 362701 - RNA, 32 nt, Homo Sapiens
ccugcaaccucuuccaggcucccuuuuccagc

SEQ ID NO: 362702 - RNA, 32 nt, Homo Sapiens
uucuauguagcgcagcaguucgcagcgauugc

SEQ ID NO: 362703 - RNA, 31 nt, Homo Sapiens
caaggccuuaggaaaucaggaguccagauca

SEQ ID NO: 362704 - RNA, 32 nt, Homo Sapiens
agcggggcgggggucuaucaggcgcgggacug

SEQ ID NO: 362705 - RNA, 32 nt, Homo Sapiens
agaagagaguuuguuuucucuuucucugcucu

SEQ ID NO: 362706 - RNA, 32 nt, Homo Sapiens
aaauaaaccuggacacaagggccuucguggcc

SEQ ID NO: 362707 - RNA, 32 nt, Homo Sapiens
uccagauaugcggucuuaauuccuuuggaaau

SEQ ID NO: 362708 - RNA, 32 nt, Homo Sapiens
cccaggagugauuucucuuuauauauauuauu

SEQ ID NO: 362709 - RNA, 32 nt, Homo Sapiens
ugaagauuuuugcugcagaaucaguuacaaac

SEQ ID NO: 362710 - RNA, 32 nt, Homo Sapiens
gccgcugcuuugcgcugguggaccacaggcau

SEQ ID NO: 362711 - RNA, 32 nt, Homo Sapiens
gaccccagcuuccugcccuccaccgggagucu

SEQ ID NO: 362712 - RNA, 32 nt, Homo Sapiens
ccgcagcaugagcuccgcagccggguucugcg

SEQ ID NO: 362713 - RNA, 32 nt, Homo Sapiens
auugugcaauaugcugugggacaugggauguc

SEQ ID NO: 362714 - RNA, 28 nt, Homo Sapiens
uauuuuaagauucagcauuugaaagauu

SEQ ID NO: 362715 - RNA, 32 nt, Homo Sapiens
ccggcugcuucucaucccggccgccucgcggg

SEQ ID NO: 362716 - RNA, 32 nt, Homo Sapiens
aucugcagauguucugaauaccucugagaaua

SEQ ID NO: 362717 - RNA, 32 nt, Homo Sapiens
gcauguaucuguagaaauaacuuuuuaguuaa

SEQ ID NO: 362718 - RNA, 32 nt, Homo Sapiens
agacuucugaagauugguuaggguaaccucuu

SEQ ID NO: 362719 - RNA, 32 nt, Homo Sapiens
aauaacuucaucccuuucccucucugcugagc

SEQ ID NO: 362720 - RNA, 32 nt, Homo Sapiens
cagccucccucauacccaucauucccucugcc

SEQ ID NO: 362721 - RNA, 32 nt, Homo Sapiens
uccgguccgagcucggggcgccccgcaggcgc

SEQ ID NO: 362722 - RNA, 32 nt, Homo Sapiens
uaauuucauguaauacauaauuguauagucaa

SEQ ID NO: 362723 - RNA, 32 nt, Homo Sapiens
agugggggaaagguggcuggaccucuguuggc

SEQ ID NO: 362724 - RNA, 32 nt, Homo Sapiens
gucccgucccggggucaccccggagccugucc

SEQ ID NO: 362725 - RNA, 32 nt, Homo Sapiens
ucugccuggauauauuucuacucuugaccaaa

SEQ ID NO: 362726 - RNA, 32 nt, Homo Sapiens
gaagucuuccuccucugugucuucccaaggcu

SEQ ID NO: 362727 - RNA, 32 nt, Homo Sapiens
aauccugcauaaaaauauaauuuauacuaugu

SEQ ID NO: 362728 - RNA, 32 nt, Homo Sapiens
cagaccuggagcgccacacacugcacaucuuu

SEQ ID NO: 362729 - RNA, 32 nt, Homo Sapiens
ugguugaagaauguauuuuacuuaaagaggga

SEQ ID NO: 362730 - RNA, 32 nt, Homo Sapiens
ugggacccuggccacucauuuuucuccuccuu

SEQ ID NO: 362731 - RNA, 32 nt, Homo Sapiens
ggcuggucuugaacccuugaccucaggucauc

SEQ ID NO: 362732 - RNA, 32 nt, Homo Sapiens
cucaccauggcgccagcucccggguucggcuc

SEQ ID NO: 362733 - RNA, 32 nt, Homo Sapiens
aguuuuagaacuaaacacaucuguaaaacuaa

SEQ ID NO: 362734 - RNA, 32 nt, Homo Sapiens
gggcuacaauuauguuugaaagugaccuagcu

SEQ ID NO: 362735 - RNA, 32 nt, Homo Sapiens
uggauuggcagccucagcaucaccuaguagcu

SEQ ID NO: 362736 - RNA, 32 nt, Homo Sapiens
cucuacagugaagacucuuucuuaauauagga

SEQ ID NO: 362737 - RNA, 32 nt, Homo Sapiens
uggaccuauauuacagauucuauucaugaaca

SEQ ID NO: 362738 - RNA, 32 nt, Homo Sapiens
acauccgcauucuccucuucuuccugggugcu

SEQ ID NO: 362739 - RNA, 32 nt, Homo Sapiens
ucugccaaccauuuuuucagaaggggucagaa

SEQ ID NO: 362740 - RNA, 32 nt, Homo Sapiens
uccagggcccuccuuuccuauaaguucauauu

SEQ ID NO: 362741 - RNA, 32 nt, Homo Sapiens
uccuguggccgggcucuccacccaggcgaggc

SEQ ID NO: 362742 - RNA, 32 nt, Homo Sapiens
aucagggaucuucggacccagcagaaggaucc

SEQ ID NO: 362743 - RNA, 32 nt, Homo Sapiens
cagaucuccgagucguuguugaccgugugcuc

SEQ ID NO: 362744 - RNA, 32 nt, Homo Sapiens
guguucuuggucuuaaauuuaacagcaaacac

SEQ ID NO: 362745 - RNA, 32 nt, Homo Sapiens
gcccaucccgacucccggggcccucagacacc

SEQ ID NO: 362746 - RNA, 32 nt, Homo Sapiens
gcggccgccagcuaggggcgcgggaaggcggg

SEQ ID NO: 362747 - RNA, 32 nt, Homo Sapiens
uguaggcuccucacgggcgauggcugucuuuu

SEQ ID NO: 362748 - RNA, 32 nt, Homo Sapiens
uguguguucugaccgcuccacccacagaccgu

SEQ ID NO: 362749 - RNA, 32 nt, Homo Sapiens
guagucuucuccaugaauuacacguuagaaua

SEQ ID NO: 362750 - RNA, 32 nt, Homo Sapiens
gcucauuguaggucaaugggaguucuuuuaaa

SEQ ID NO: 362751 - RNA, 32 nt, Homo Sapiens
cccagcgccugccugcccggggugugcacaga

SEQ ID NO: 362752 - RNA, 32 nt, Homo Sapiens
gcccauuccacaccgagccccauccacguggc

SEQ ID NO: 362753 - RNA, 32 nt, Homo Sapiens
aauuauuacauaucagguuuuccugauuuaua

SEQ ID NO: 362754 - RNA, 32 nt, Homo Sapiens
ucgcgggccauggaggguagcuucucggaugg

SEQ ID NO: 362755 - RNA, 32 nt, Homo Sapiens
ucccaagaacagagccuguccccagauguccc

SEQ ID NO: 362756 - RNA, 31 nt, Homo Sapiens
aggcgcgauccagagagccaggcaagcgggg

SEQ ID NO: 362757 - RNA, 32 nt, Homo Sapiens
agagguuguuuuuugcagaucuugguguuaau

SEQ ID NO: 362758 - RNA, 32 nt, Homo Sapiens
ucaaaucccucaucagacugugacuuuaacau

SEQ ID NO: 362759 - RNA, 32 nt, Homo Sapiens
ugaacaguuauuuaaauaaacaaaauucuuug

SEQ ID NO: 362760 - RNA, 32 nt, Homo Sapiens
cauggccacucccugcccccagccuggcugga

SEQ ID NO: 362761 - RNA, 32 nt, Homo Sapiens
uccgcgcaggugccaacccagccuuugaagag

SEQ ID NO: 362762 - RNA, 32 nt, Homo Sapiens
cagaaacuauagcagacacauaaaauccauug

SEQ ID NO: 362763 - RNA, 32 nt, Homo Sapiens
uaauuagcguucuucacccccacccccacccc

SEQ ID NO: 362764 - RNA, 32 nt, Homo Sapiens
ggauaaucuucauaaacaaaaaacauggaaaa

SEQ ID NO: 362765 - RNA, 32 nt, Homo Sapiens
caucccccaucccuuguucacacgcccugauu

SEQ ID NO: 362766 - RNA, 32 nt, Homo Sapiens
cugcaggccccaugccucuccucccucucugg

SEQ ID NO: 362767 - RNA, 32 nt, Homo Sapiens
uucuaagaauaaagcuguucguuguaucauga

SEQ ID NO: 362768 - RNA, 32 nt, Homo Sapiens
agagggugcagccugggaagggcggccuugcu

SEQ ID NO: 362769 - RNA, 32 nt, Homo Sapiens
auaagauuuuaaaaaauaaauggcaaagauau

SEQ ID NO: 362770 - RNA, 32 nt, Homo Sapiens
ugaaugggaaagguuuaaaugcuaaccaaagc

SEQ ID NO: 362771 - RNA, 32 nt, Homo Sapiens
uuuuucaauaaccaaaaagauuaaacaaaaaa

SEQ ID NO: 362772 - RNA, 32 nt, Homo Sapiens
gcuaucgcgggggguacuaguggcgccgccgc

SEQ ID NO: 362773 - RNA, 32 nt, Homo Sapiens
gccgaggagccgggcgcaauggagcggaagag

SEQ ID NO: 362774 - RNA, 32 nt, Homo Sapiens
cagccugagcuccacccuccccucuucuugcg

SEQ ID NO: 362775 - RNA, 32 nt, Homo Sapiens
cuucuuuuuccuuuuucuucaccuucauuuca

SEQ ID NO: 362776 - RNA, 32 nt, Homo Sapiens
cugccgcuuuuaaaaaauacccauuggcuaug

SEQ ID NO: 362777 - RNA, 32 nt, Homo Sapiens
uggcuuuuauauuuuuaacugcuguuaaaugu

SEQ ID NO: 362778 - RNA, 32 nt, Homo Sapiens
gcuuuuggagaaggccccauuaaagcucagca

SEQ ID NO: 362779 - RNA, 32 nt, Homo Sapiens
gugauaaacaauuaugcuuugguuuuuaguga

SEQ ID NO: 362780 - RNA, 31 nt, Homo Sapiens
cggggagcagcaccccugcccccgguggagg

SEQ ID NO: 362781 - RNA, 32 nt, Homo Sapiens
auuauuuaaguggcuuuugaucuguaaauaaa

SEQ ID NO: 362782 - RNA, 32 nt, Homo Sapiens
gccagauggaaauuuauuauuucuugcaauuc

SEQ ID NO: 362783 - RNA, 32 nt, Homo Sapiens
caaaacguccuaagaacaaaaugaaagaaaac

SEQ ID NO: 362784 - RNA, 32 nt, Homo Sapiens
ggugauugucuccucaggccuccugaagccac

SEQ ID NO: 362785 - RNA, 32 nt, Homo Sapiens
ccgggaggguugggccagaggaggcgguccug

SEQ ID NO: 362786 - RNA, 32 nt, Homo Sapiens
acucuuugaguccacacugccuuuaugagcug

SEQ ID NO: 362787 - RNA, 32 nt, Homo Sapiens
gaacagucacccaugauaggaccuccagguuc

SEQ ID NO: 362788 - RNA, 32 nt, Homo Sapiens
auaacagaauuauaaugagaauaugaauuugu

SEQ ID NO: 362789 - RNA, 32 nt, Homo Sapiens
ccaggcgagccggcccgcggcugccagucugc

SEQ ID NO: 362790 - RNA, 32 nt, Homo Sapiens
agauccgugcgcacaaaguggugcuggccucc

SEQ ID NO: 362791 - RNA, 32 nt, Homo Sapiens
uuuuuuuuaaaagucuuuuucuuagaaagcca

SEQ ID NO: 362792 - RNA, 32 nt, Homo Sapiens
gcaccuggaaacaucugccuucuuaaugcagu

SEQ ID NO: 362793 - RNA, 32 nt, Homo Sapiens
aaaaugaauuguuugucauuugcaauguuaaa

SEQ ID NO: 362794 - RNA, 32 nt, Homo Sapiens
caggaugccuguguccaccucccuccaccagg

SEQ ID NO: 362795 - RNA, 32 nt, Homo Sapiens
caaauagggccucuccuucucccgccgcccag

SEQ ID NO: 362796 - RNA, 32 nt, Homo Sapiens
ucaacgaggccuucccugcuuauuuaaaagga

SEQ ID NO: 362797 - RNA, 32 nt, Homo Sapiens
cccaaagaaacaggcauagaaucugccuccuu

SEQ ID NO: 362798 - RNA, 32 nt, Homo Sapiens
uggcucuguccucaugugcuaugugacccuga

SEQ ID NO: 362799 - RNA, 32 nt, Homo Sapiens
uugagcuccgcuguggcagagccuggagcuga

SEQ ID NO: 362800 - RNA, 32 nt, Homo Sapiens
ucagaggggccacagcccuucuccuccauggg

SEQ ID NO: 362801 - RNA, 32 nt, Homo Sapiens
uauggggcggugcggcagcgcgaagccugcag

SEQ ID NO: 362802 - RNA, 32 nt, Homo Sapiens
ccuuggcucccccggagggagcaagaaucuca

SEQ ID NO: 362803 - RNA, 32 nt, Homo Sapiens
cuccuuggccaccuugcauggaugcauguccu

SEQ ID NO: 362804 - RNA, 32 nt, Homo Sapiens
ccacccagaugccaguagugcccgccccaccc

SEQ ID NO: 362805 - RNA, 32 nt, Homo Sapiens
ggcuccagccgcggcucgcgcgcucgcucuga

SEQ ID NO: 362806 - RNA, 32 nt, Homo Sapiens
uuuuauccaaaacaggcaauagugaaugcuug

SEQ ID NO: 362807 - RNA, 32 nt, Homo Sapiens
gcccuggugaaggagcuuagcuugucuucuug

SEQ ID NO: 362808 - RNA, 32 nt, Homo Sapiens
ugcugcuugccagcucugugcuguggcaaguu

SEQ ID NO: 362809 - RNA, 32 nt, Homo Sapiens
cauuuggaguuuuauuauugcauaaaaucuuc

SEQ ID NO: 362810 - RNA, 32 nt, Homo Sapiens
ucagggugggagagggccccgggcugcccugu

SEQ ID NO: 362811 - RNA, 32 nt, Homo Sapiens
acggcaccugcgccgccuugcucgcgggucuc

SEQ ID NO: 362812 - RNA, 32 nt, Homo Sapiens
aagcuagcccugcccaccccagccccuggacc

SEQ ID NO: 362813 - RNA, 32 nt, Homo Sapiens
augggggaggccuggguccugcccuuggaaag

SEQ ID NO: 362814 - RNA, 32 nt, Homo Sapiens
ccuccuggauuguugaggaaaaagccagacua

SEQ ID NO: 362815 - RNA, 32 nt, Homo Sapiens
aacucugccuaucaguuuuacugcacauuacg

SEQ ID NO: 362816 - RNA, 32 nt, Homo Sapiens
ggauuuucccccuugauguuuugacagauuga

SEQ ID NO: 362817 - RNA, 32 nt, Homo Sapiens
ggaaggucgagguggguggaugaccugagguc

SEQ ID NO: 362818 - RNA, 32 nt, Homo Sapiens
agaaaugguuuaggaaaagcgucaggagcaaa

SEQ ID NO: 362819 - RNA, 32 nt, Homo Sapiens
gaaaaacuuaaaacagaagguauuaaaaaaac

SEQ ID NO: 362820 - RNA, 32 nt, Homo Sapiens
cuuagaaauaaaacuuugauggacuuucaaaa

SEQ ID NO: 362821 - RNA, 32 nt, Homo Sapiens
cuuuuaaauuuaacacuauuuucagucgcauu

SEQ ID NO: 362822 - RNA, 32 nt, Homo Sapiens
cgcauccagccccacacccucauuuauaccaa

SEQ ID NO: 362823 - RNA, 32 nt, Homo Sapiens
uuguguugauaugacauuacucucuuaggaga

SEQ ID NO: 362824 - RNA, 32 nt, Homo Sapiens
ucccuuucggggcuacaaaggaucucaagugu

SEQ ID NO: 362825 - RNA, 32 nt, Homo Sapiens
agagguccuaucgcucccagcgguuuccgcag

SEQ ID NO: 362826 - RNA, 32 nt, Homo Sapiens
gaaaccugggagccagcagcccggggcuccac

SEQ ID NO: 362827 - RNA, 32 nt, Homo Sapiens
ugaggaggaggcugugcugaguuuguguggcu

SEQ ID NO: 362828 - RNA, 30 nt, Homo Sapiens
ccacagggcaggcggggucccuggagcccu

SEQ ID NO: 362829 - RNA, 32 nt, Homo Sapiens
uagccugagcuugauucuuaggucuugagacu

SEQ ID NO: 362830 - RNA, 32 nt, Homo Sapiens
caggagccuggagcuuccgcugucccccugcc

SEQ ID NO: 362831 - RNA, 32 nt, Homo Sapiens
ucauuuuggucuuuuuaccacaucugucacaa

SEQ ID NO: 362832 - RNA, 32 nt, Homo Sapiens
uuaaauucaauacaugguuuuuaacaaaacag

SEQ ID NO: 362833 - RNA, 32 nt, Homo Sapiens
cuauuccccacccacacccccaggcaggguug

SEQ ID NO: 362834 - RNA, 32 nt, Homo Sapiens
ccuucaucccacuuaccgcagcuccagagccc

SEQ ID NO: 362835 - RNA, 32 nt, Homo Sapiens
cugaacuuggagagggggccggacccccguca

SEQ ID NO: 362836 - RNA, 32 nt, Homo Sapiens
gaacuuucuaaauaaacuuaaccuguuccaga

SEQ ID NO: 362837 - RNA, 32 nt, Homo Sapiens
ccuuccuuauuuuauagagacuaggaguuaag

SEQ ID NO: 362838 - RNA, 32 nt, Homo Sapiens
ggaaagaaugacccaugcacgcagcagcuugg

SEQ ID NO: 362839 - RNA, 32 nt, Homo Sapiens
uaaagcauuaaaguaaacaaugugcuauugug

SEQ ID NO: 362840 - RNA, 32 nt, Homo Sapiens
aaguauuucuaaguauaaaaaacaaaacaaaa

SEQ ID NO: 362841 - RNA, 32 nt, Homo Sapiens
cagcuaauuuuuauauuuuuuauagaaaccag

SEQ ID NO: 362842 - RNA, 32 nt, Homo Sapiens
ccgcgcacaccugaagcggccgggccaggccc

SEQ ID NO: 362843 - RNA, 32 nt, Homo Sapiens
acaucuuuguacauuuaagucuguauuauaau

SEQ ID NO: 362844 - RNA, 32 nt, Homo Sapiens
ccaggcccaaccccauuccaccagcaccccgc

SEQ ID NO: 362845 - RNA, 32 nt, Homo Sapiens
ucauggcccauuuagaccgucuggcuacaccc

SEQ ID NO: 362846 - RNA, 29 nt, Homo Sapiens
ggcacuuugagucucagucugaugaccca

SEQ ID NO: 362847 - RNA, 32 nt, Homo Sapiens
uccuccggggccaccuuccucaggccagugcu

SEQ ID NO: 362848 - RNA, 32 nt, Homo Sapiens
gcugcgcguggccguagaccuguggagccguc

SEQ ID NO: 362849 - RNA, 32 nt, Homo Sapiens
cgaaggccuugggcuccaguccgugugcccca

SEQ ID NO: 362850 - RNA, 32 nt, Homo Sapiens
accuagggacaucaguuuacucaucugcgaag

SEQ ID NO: 362851 - RNA, 32 nt, Homo Sapiens
ggguggggucaaugaagugcagccugaggaag

SEQ ID NO: 362852 - RNA, 32 nt, Homo Sapiens
ugaucaccaucgggagcaaaucucugaccucc

SEQ ID NO: 362853 - RNA, 32 nt, Homo Sapiens
ucuuugcggccugaggcagagaacaacccugg

SEQ ID NO: 362854 - RNA, 31 nt, Homo Sapiens
ucgcccugcuccacgcugccccgcgcccgcu

SEQ ID NO: 362855 - RNA, 32 nt, Homo Sapiens
ccaacagguacucuucuguuugugggcagagc

SEQ ID NO: 362856 - RNA, 32 nt, Homo Sapiens
ccaggauuucauuuuuauuuuaccacaucauu

SEQ ID NO: 362857 - RNA, 32 nt, Homo Sapiens
gcuuggcuguguuuaucucguuggggacuaag

SEQ ID NO: 362858 - RNA, 32 nt, Homo Sapiens
uuuuaaagaacaagaugggaaaauaauagaau

SEQ ID NO: 362859 - RNA, 32 nt, Homo Sapiens
agaugucccuccccucacugccccacauucuc

SEQ ID NO: 362860 - RNA, 32 nt, Homo Sapiens
ccgcuucucggcgcugccccgggauuccccag

SEQ ID NO: 362861 - RNA, 32 nt, Homo Sapiens
cucacugcgucaaagggcuggugcugucccug

SEQ ID NO: 362862 - RNA, 32 nt, Homo Sapiens
ucagacaucuucugauuucuucucaccuauau

SEQ ID NO: 362863 - RNA, 32 nt, Homo Sapiens
caacuuaguuuuucuuuuuuccugaaugcguc

SEQ ID NO: 362864 - RNA, 32 nt, Homo Sapiens
ggggugaauuucaaguugaaacacgaugaugu

SEQ ID NO: 362865 - RNA, 32 nt, Homo Sapiens
gguguguuccuuaagcugaacuuccguagauc

SEQ ID NO: 362866 - RNA, 30 nt, Homo Sapiens
cggcuuuggcggcuccgcgcagcgaggagc

SEQ ID NO: 362867 - RNA, 32 nt, Homo Sapiens
ugcucauucaugauggccuccuccuucaggcc

SEQ ID NO: 362868 - RNA, 32 nt, Homo Sapiens
caccgcaagagcuggccuggggugcggacagu

SEQ ID NO: 362869 - RNA, 32 nt, Homo Sapiens
agaauaucuucagaugggugaauaccaaaagg

SEQ ID NO: 362870 - RNA, 32 nt, Homo Sapiens
aauaauaauaauauaauacaauagcucuauag

SEQ ID NO: 362871 - RNA, 32 nt, Homo Sapiens
acaaaaauguggguuuccuaccuucagggagu

SEQ ID NO: 362872 - RNA, 32 nt, Homo Sapiens
ccgcugggcacuuggcaccuccccaagagcuu

SEQ ID NO: 362873 - RNA, 32 nt, Homo Sapiens
uugauucucauuucuauuuguaaauucuuaag

SEQ ID NO: 362874 - RNA, 32 nt, Homo Sapiens
aaggggaaagacuggcuauguaauuauaauuu

SEQ ID NO: 362875 - RNA, 32 nt, Homo Sapiens
gcucuucuagaaugccgcccucccagcucugc

SEQ ID NO: 362876 - RNA, 32 nt, Homo Sapiens
uaguuuuuauuacuauauuaaagcaucaacau

SEQ ID NO: 362877 - RNA, 32 nt, Homo Sapiens
ugaauggcucugcagagcuggacccuaguuuu

SEQ ID NO: 362878 - RNA, 30 nt, Homo Sapiens
uaggucgggcccgugcaggccggcgccuug

SEQ ID NO: 362879 - RNA, 32 nt, Homo Sapiens
cugaugcccuccccaccucaaccgccuucuca

SEQ ID NO: 362880 - RNA, 32 nt, Homo Sapiens
cugacuucaaggaaucagaaauuaccuagaag

SEQ ID NO: 362881 - RNA, 32 nt, Homo Sapiens
ucaaguacuguacaaugaaauuguuuaaauuu

SEQ ID NO: 362882 - RNA, 32 nt, Homo Sapiens
auccucaaccucagccacagcccuguguccau

SEQ ID NO: 362883 - RNA, 32 nt, Homo Sapiens
uucaaggaaaauuuuauuucauucaauucuua

SEQ ID NO: 362884 - RNA, 32 nt, Homo Sapiens
aaugggacacugggucauggccuggaguugcu

SEQ ID NO: 362885 - RNA, 32 nt, Homo Sapiens
caaccuaucgaaggcgccauggagcgaccggc

SEQ ID NO: 362886 - RNA, 32 nt, Homo Sapiens
cgcggcgggcccugcccacaccuccuggggcg

SEQ ID NO: 362887 - RNA, 32 nt, Homo Sapiens
cuuacucucuugaguucuuacauacacuucaa

SEQ ID NO: 362888 - RNA, 32 nt, Homo Sapiens
cugcuuggcuggaagugccaggggaauaacuc

SEQ ID NO: 362889 - RNA, 32 nt, Homo Sapiens
uuguuuuuuuuuauuuuguguuuguuauaaaa

SEQ ID NO: 362890 - RNA, 32 nt, Homo Sapiens
caccccagaggggugccagaugccccaguuuu

SEQ ID NO: 362891 - RNA, 32 nt, Homo Sapiens
aguauucuaccuuguaaauacuguuauuugua

SEQ ID NO: 362892 - RNA, 32 nt, Homo Sapiens
gaccacuaucauggagacugagagcgagcaga

SEQ ID NO: 362893 - RNA, 32 nt, Homo Sapiens
ucccccugguggugggggcugucagggagggc

SEQ ID NO: 362894 - RNA, 32 nt, Homo Sapiens
auucaaguuuagagaaaaugugauguauacag

SEQ ID NO: 362895 - RNA, 32 nt, Homo Sapiens
aacucucugagaaaugccaggaucguggcuca

SEQ ID NO: 362896 - RNA, 32 nt, Homo Sapiens
uggguuuuaaauaguuuuucugacccuucuga

SEQ ID NO: 362897 - RNA, 32 nt, Homo Sapiens
guacugaucuaaaaagauuaccuuuggcugga

SEQ ID NO: 362898 - RNA, 32 nt, Homo Sapiens
ugcuggugggucuggaaauuacauccagaguc

SEQ ID NO: 362899 - RNA, 32 nt, Homo Sapiens
acugugaggugaugugcccaccccucucuaag

SEQ ID NO: 362900 - RNA, 32 nt, Homo Sapiens
cgugagcagacaccuucacagcuuccucgcug

SEQ ID NO: 362901 - RNA, 32 nt, Homo Sapiens
accugguccgcuggggagcaggcggccauaaa

SEQ ID NO: 362902 - RNA, 32 nt, Homo Sapiens
accucuaggaccaacugggacucauuauggaa

SEQ ID NO: 362903 - RNA, 32 nt, Homo Sapiens
gcuccgccuacggcccggcccccacgcgcccu

SEQ ID NO: 362904 - RNA, 32 nt, Homo Sapiens
cuagagagggccacaagagggccacaggggug

SEQ ID NO: 362905 - RNA, 31 nt, Homo Sapiens
uggauccgcuccugccugcgcccgcagcuga

SEQ ID NO: 362906 - RNA, 30 nt, Homo Sapiens
gggagucagggagggggggaaaucucggaa

SEQ ID NO: 362907 - RNA, 32 nt, Homo Sapiens
aagggccugggcuggcuguggcccagugcuca

SEQ ID NO: 362908 - RNA, 32 nt, Homo Sapiens
uaaauuuaucuuaguguuuuuaaacuugguuu

SEQ ID NO: 362909 - RNA, 32 nt, Homo Sapiens
agauuucaagaaaaaauaaauggaaaucaucg

SEQ ID NO: 362910 - RNA, 32 nt, Homo Sapiens
augcuugugguuaguggacagcagccacccuu

SEQ ID NO: 362911 - RNA, 30 nt, Homo Sapiens
aaggggcuggauggcaugcuggacccaagc

SEQ ID NO: 362912 - RNA, 32 nt, Homo Sapiens
uuucacagggauaaaaauaucuuguggggcca

SEQ ID NO: 362913 - RNA, 32 nt, Homo Sapiens
aaggaaucaaugacuauaauuccacuaacuau

SEQ ID NO: 362914 - RNA, 32 nt, Homo Sapiens
cuugaacugggcgaaugucuuauuuaauuacc

SEQ ID NO: 362915 - RNA, 32 nt, Homo Sapiens
caaaauaggcacauuauaucaacacuuugcuc

SEQ ID NO: 362916 - RNA, 32 nt, Homo Sapiens
cuggggaucgggaccgcggcggcggcccgcga

SEQ ID NO: 362917 - RNA, 28 nt, Homo Sapiens
uuuaaaagagaaauaaauuccuuaaugg

SEQ ID NO: 362918 - RNA, 32 nt, Homo Sapiens
acaggcggacagggggugagggggccaggggg

SEQ ID NO: 362919 - RNA, 32 nt, Homo Sapiens
uucuuaaagagaaaaauugccuuuuuacuaga

SEQ ID NO: 362920 - RNA, 32 nt, Homo Sapiens
cacagcugccagcaugucuggcccagacauca

SEQ ID NO: 362921 - RNA, 32 nt, Homo Sapiens
uggcuaagcucugggggugcuuuugaugugcu

SEQ ID NO: 362922 - RNA, 32 nt, Homo Sapiens
agaagaaaucauaauugcauuucaguugacau

SEQ ID NO: 362923 - RNA, 32 nt, Homo Sapiens
ggucauucaaggaagucaaguuaacuuaaaca

SEQ ID NO: 362924 - RNA, 32 nt, Homo Sapiens
gccccccgcccgggccccggcgauggugacac

SEQ ID NO: 362925 - RNA, 32 nt, Homo Sapiens
uuccuuacagagcuaagaauccauagccaugg

SEQ ID NO: 362926 - RNA, 32 nt, Homo Sapiens
cucuucuugagcauaccaacuuuauuucuacu

SEQ ID NO: 362927 - RNA, 32 nt, Homo Sapiens
uuugcuaauguuuaauuuugcaucauaauuuc

SEQ ID NO: 362928 - RNA, 32 nt, Homo Sapiens
aaagggaaaauauuuuacuuuguaaguauuuu

SEQ ID NO: 362929 - RNA, 32 nt, Homo Sapiens
accauuaugcuguaccuccaagcauaaugaua

SEQ ID NO: 362930 - RNA, 32 nt, Homo Sapiens
cccaaccccccucucccagcccugguaggguu

SEQ ID NO: 362931 - RNA, 32 nt, Homo Sapiens
ccccucccuccggcccgugcuggucccgacgg

SEQ ID NO: 362932 - RNA, 32 nt, Homo Sapiens
ugugaugaaauauaaggccuagcaggcucaga

SEQ ID NO: 362933 - RNA, 32 nt, Homo Sapiens
ccugucucccaccucagcacuaguccaugcca

SEQ ID NO: 362934 - RNA, 32 nt, Homo Sapiens
cucguugcccaacccgguccccgcccccagac

SEQ ID NO: 362935 - RNA, 32 nt, Homo Sapiens
acugcccucugccucagcaguaccaguauaag

SEQ ID NO: 362936 - RNA, 32 nt, Homo Sapiens
acuucaugaaguucuaaugucuguguuccaaa

SEQ ID NO: 362937 - RNA, 32 nt, Homo Sapiens
uaaagagccggggcucagggggcuccacaccu

SEQ ID NO: 362938 - RNA, 31 nt, Homo Sapiens
cggaagccaggccaacugccccgcgucuuca

SEQ ID NO: 362939 - RNA, 32 nt, Homo Sapiens
gaccagagugggaggaaggcggggaguccagg

SEQ ID NO: 362940 - RNA, 32 nt, Homo Sapiens
uuugcugguuuggggcaugcccugggcaccag

SEQ ID NO: 362941 - RNA, 32 nt, Homo Sapiens
uagaagcuguccgggggcgcguagcccggagu

SEQ ID NO: 362942 - RNA, 32 nt, Homo Sapiens
ucuaucucugaacaucucuucaucccaugcuc

SEQ ID NO: 362943 - RNA, 32 nt, Homo Sapiens
gcgaugcccaauaaauguguguuuugcuguuu

SEQ ID NO: 362944 - RNA, 32 nt, Homo Sapiens
uuuaaucuuuugcagaaaccuuacuauuauaa

SEQ ID NO: 362945 - RNA, 32 nt, Homo Sapiens
ugaaugucuguguuggugauauuaucaagcua

SEQ ID NO: 362946 - RNA, 32 nt, Homo Sapiens
gagacugacuagguuuacaacuucugggagcu

SEQ ID NO: 362947 - RNA, 32 nt, Homo Sapiens
gauuauuauaaacaaaugcuuuccaagucuua

SEQ ID NO: 362948 - RNA, 32 nt, Homo Sapiens
gccuuuuuuccucuccuuuuggucuccaaaug

SEQ ID NO: 362949 - RNA, 32 nt, Homo Sapiens
uucaaugguguuggcuuccccuccccacccca

SEQ ID NO: 362950 - RNA, 32 nt, Homo Sapiens
gaaaauucauacucacuaaaaccccaugaaag

SEQ ID NO: 362951 - RNA, 32 nt, Homo Sapiens
uaaugguuuuuugauucuaugcacuaauuuuc

SEQ ID NO: 362952 - RNA, 32 nt, Homo Sapiens
cuacagagggagaggccagagaagcugcagaa

SEQ ID NO: 362953 - RNA, 32 nt, Homo Sapiens
ggccccauggcaggaacagccacuugcaucug

SEQ ID NO: 362954 - RNA, 32 nt, Homo Sapiens
cucugacacacacacgcacacacacacacaau

SEQ ID NO: 362955 - RNA, 32 nt, Homo Sapiens
cucacuaccugggugacaggaucauccauacc

SEQ ID NO: 362956 - RNA, 32 nt, Homo Sapiens
cuccuuuccauuccccugggugucucaugcug

SEQ ID NO: 362957 - RNA, 32 nt, Homo Sapiens
gugcccggccccacaccgccagcugcucggcg

SEQ ID NO: 362958 - RNA, 32 nt, Homo Sapiens
aggugagcaucugggcgccgggacgcugcagu

SEQ ID NO: 362959 - RNA, 32 nt, Homo Sapiens
cccauccuguccugagccggggccccccagcc

SEQ ID NO: 362960 - RNA, 32 nt, Homo Sapiens
cgaagggaggccgggugagccggcguacgcac

SEQ ID NO: 362961 - RNA, 32 nt, Homo Sapiens
caaacaaaacaaaaaagcuaaaacaaugauaa

SEQ ID NO: 362962 - RNA, 32 nt, Homo Sapiens
uuauuccauuuaaugaaggguuuguuuuguuu

SEQ ID NO: 362963 - RNA, 32 nt, Homo Sapiens
aggcaggaagaucacuugagcccgcaaguuug

SEQ ID NO: 362964 - RNA, 32 nt, Homo Sapiens
agcuggccucuuggguagcagccccggguaug

SEQ ID NO: 362965 - RNA, 32 nt, Homo Sapiens
uguacuuuaaaguuguaauauuacuagcacau

SEQ ID NO: 362966 - RNA, 32 nt, Homo Sapiens
agcagcagacaaaacaaaauauuuucacaaac

SEQ ID NO: 362967 - RNA, 32 nt, Homo Sapiens
uuugcuacaaauuuaugcauuucauucaaauc

SEQ ID NO: 362968 - RNA, 32 nt, Homo Sapiens
cucugcgcggagggcgucccuucccaaccagc

SEQ ID NO: 362969 - RNA, 32 nt, Homo Sapiens
gagccucugccagcagccgcucggcgccugcc

SEQ ID NO: 362970 - RNA, 32 nt, Homo Sapiens
acaugugccaaugggcgaucuugccuggaaua

SEQ ID NO: 362971 - RNA, 32 nt, Homo Sapiens
gccuucugucccccggccccagacccagagcc

SEQ ID NO: 362972 - RNA, 32 nt, Homo Sapiens
aggugcugcagggccucuaccaggcgccgcug

SEQ ID NO: 362973 - RNA, 32 nt, Homo Sapiens
ccauucuuuguaucuucaguguugguuuguuu

SEQ ID NO: 362974 - RNA, 30 nt, Homo Sapiens
gagcagaggccuggcaugcaggacccgcug

SEQ ID NO: 362975 - RNA, 32 nt, Homo Sapiens
uuguacaggacuguaaagauuuguugacagca

SEQ ID NO: 362976 - RNA, 31 nt, Homo Sapiens
aaguaacaagagguuguuuuucugaagggaa

SEQ ID NO: 362977 - RNA, 32 nt, Homo Sapiens
ggcgcuggcaggggcacugauuccuagcaaug

SEQ ID NO: 362978 - RNA, 32 nt, Homo Sapiens
ggaucgagugagcgccggcggcggcggcggcg

SEQ ID NO: 362979 - RNA, 32 nt, Homo Sapiens
ggccagaucugccugcuguuuccauggguuac

SEQ ID NO: 362980 - RNA, 32 nt, Homo Sapiens
gaaauaacucagcugaagcaucagauuaucuu

SEQ ID NO: 362981 - RNA, 32 nt, Homo Sapiens
uugauguuguugaaggagaaaagggugcggag

SEQ ID NO: 362982 - RNA, 32 nt, Homo Sapiens
ugcuugugggaacguaaaaugguucagcugcu

SEQ ID NO: 362983 - RNA, 32 nt, Homo Sapiens
cuugugucuguauuugguuaggauccauuuaa

SEQ ID NO: 362984 - RNA, 32 nt, Homo Sapiens
uacucaucuuggaaaagguuagucuuucagua

SEQ ID NO: 362985 - RNA, 32 nt, Homo Sapiens
caggaggguucaguguggagagcaaaaaagcu

SEQ ID NO: 362986 - RNA, 32 nt, Homo Sapiens
acucucagcucuuuucuaaucuuguaacuuag

SEQ ID NO: 362987 - RNA, 32 nt, Homo Sapiens
ucacugccuagguguucauaauaaaaaagaaa

SEQ ID NO: 362988 - RNA, 32 nt, Homo Sapiens
caaaucaaggacccgaaugugagcaggaccuc

SEQ ID NO: 362989 - RNA, 32 nt, Homo Sapiens
aguacagucaggaaacagaaaacuuaccacau

SEQ ID NO: 362990 - RNA, 30 nt, Homo Sapiens
gacugcccacucagaccccaucuuacccau

SEQ ID NO: 362991 - RNA, 32 nt, Homo Sapiens
accucguucuuugccuuucccuccccuuagcg

SEQ ID NO: 362992 - RNA, 32 nt, Homo Sapiens
ggcuucuccgggggcggaggaaacaccuauga

SEQ ID NO: 362993 - RNA, 32 nt, Homo Sapiens
gaaacagcugaauuuaugucacuugcccaaug

SEQ ID NO: 362994 - RNA, 32 nt, Homo Sapiens
gugacucaucuuccuguuguuccaauucugug

SEQ ID NO: 362995 - RNA, 32 nt, Homo Sapiens
cccuuccaugccagcccuuccugcugccuccc

SEQ ID NO: 362996 - RNA, 32 nt, Homo Sapiens
uucuggaagugacuuuggcugcaugcgagugc

SEQ ID NO: 362997 - RNA, 32 nt, Homo Sapiens
ugagcacuauggaggcagcaucagagaauggg

SEQ ID NO: 362998 - RNA, 32 nt, Homo Sapiens
aucacgaaaaggagaagucacagcaccuagaa

SEQ ID NO: 362999 - RNA, 26 nt, Homo Sapiens
aagugggcucaggaggucuggaucug

SEQ ID NO: 363000 - RNA, 32 nt, Homo Sapiens
uggaaagcccuuuguggaacaagccccauuug

SEQ ID NO: 363001 - RNA, 32 nt, Homo Sapiens
gaagugaaauaaugucuguggguuggcaaugg

SEQ ID NO: 363002 - RNA, 32 nt, Homo Sapiens
cccgcgcccgcggcgcccgguagccaggaugc

SEQ ID NO: 363003 - RNA, 32 nt, Homo Sapiens
auauuugccauuguuguuuaaauaccuaucac

SEQ ID NO: 363004 - RNA, 31 nt, Homo Sapiens
cggcggcggcacuuugccgccucaggcccug

SEQ ID NO: 363005 - RNA, 32 nt, Homo Sapiens
gguucaggucauaaguuucuacccacauucuu

SEQ ID NO: 363006 - RNA, 32 nt, Homo Sapiens
auuuccaauggacagugaugggcuuguuuuug

SEQ ID NO: 363007 - RNA, 28 nt, Homo Sapiens
accucugaaggaaaucauuugaauuuug

SEQ ID NO: 363008 - RNA, 32 nt, Homo Sapiens
ccauugagggaaacagaaaggggcagcucuug

SEQ ID NO: 363009 - RNA, 32 nt, Homo Sapiens
uuuugaagccccaaaguuuuuuauucugaugg

SEQ ID NO: 363010 - RNA, 32 nt, Homo Sapiens
ucauuuucaaagcuguuucucauuuuauuucu

SEQ ID NO: 363011 - RNA, 32 nt, Homo Sapiens
gagggagucugacugaaguuuacuuggaaaga

SEQ ID NO: 363012 - RNA, 32 nt, Homo Sapiens
auagguuacucauaaggcauauacaaauaaac

SEQ ID NO: 363013 - RNA, 32 nt, Homo Sapiens
aaaaugaaaguuaugacauuagcuuuaaaggu

SEQ ID NO: 363014 - RNA, 32 nt, Homo Sapiens
acccacucugaugaggagcuuccuccugauug

SEQ ID NO: 363015 - RNA, 32 nt, Homo Sapiens
gaagauaguauuuuaauauuuguacaaaguuu

SEQ ID NO: 363016 - RNA, 32 nt, Homo Sapiens
cucggugugcccgcgccgccagcccgcuccag

SEQ ID NO: 363017 - RNA, 32 nt, Homo Sapiens
uugcugcuuaucguaccccccaucaccugcac

SEQ ID NO: 363018 - RNA, 32 nt, Homo Sapiens
cugaggaaggaagauuugauguugugaaauaa

SEQ ID NO: 363019 - RNA, 32 nt, Homo Sapiens
cauaacuccaugaacauggcagugcuaugacu

SEQ ID NO: 363020 - RNA, 32 nt, Homo Sapiens
ugaguuuuguuauaucugaacuaguugaacug

SEQ ID NO: 363021 - RNA, 32 nt, Homo Sapiens
gcgcggggacgcggaggccgcgcauccuuucc

SEQ ID NO: 363022 - RNA, 32 nt, Homo Sapiens
accaggaaaaccaaauagaggacccccuucau

SEQ ID NO: 363023 - RNA, 32 nt, Homo Sapiens
uaggccuuucccucagguuuuccucuucccca

SEQ ID NO: 363024 - RNA, 32 nt, Homo Sapiens
agugcuggccuuaacccuaggcguggaagaga

SEQ ID NO: 363025 - RNA, 30 nt, Homo Sapiens
ucaguccuugugcagcaccaggaagaaacc

SEQ ID NO: 363026 - RNA, 32 nt, Homo Sapiens
caagacaaccucggggacauggacacaacaag

SEQ ID NO: 363027 - RNA, 32 nt, Homo Sapiens
cugagcgcccuccgcucgccccgagagagacc

SEQ ID NO: 363028 - RNA, 32 nt, Homo Sapiens
guuuucuuaaaauaaaaugcagagacauguuu

SEQ ID NO: 363029 - RNA, 32 nt, Homo Sapiens
cucccaugugacuuucucuccucuaccuaugu

SEQ ID NO: 363030 - RNA, 32 nt, Homo Sapiens
ggucauuuaaaauuauuucuugaugauagguc

SEQ ID NO: 363031 - RNA, 32 nt, Homo Sapiens
cagaauggggacguggggcagccaccccugcc

SEQ ID NO: 363032 - RNA, 32 nt, Homo Sapiens
acauguauauuuaaaauauauacgaaagaacu

SEQ ID NO: 363033 - RNA, 32 nt, Homo Sapiens
cgcagcgcgggccuccgccggccgcauugucc

SEQ ID NO: 363034 - RNA, 29 nt, Homo Sapiens
ccagaauaaaguucugaguguuuuuacua

SEQ ID NO: 363035 - RNA, 32 nt, Homo Sapiens
ggggagugaauuauaaauauuuuuauuucacc

SEQ ID NO: 363036 - RNA, 32 nt, Homo Sapiens
uguucccuuucugacugcccaaggggcucaga

SEQ ID NO: 363037 - RNA, 32 nt, Homo Sapiens
ggagcucgccgcgcgccggggaccaggaaccu

SEQ ID NO: 363038 - RNA, 32 nt, Homo Sapiens
cacaggguggacuggcugggcccuggucccag

SEQ ID NO: 363039 - RNA, 32 nt, Homo Sapiens
uuccccacuugaaucgggccgacggcuugggg

SEQ ID NO: 363040 - RNA, 32 nt, Homo Sapiens
gucuugcccaaguaguccugccaggcacaugc

SEQ ID NO: 363041 - RNA, 32 nt, Homo Sapiens
acccuggccugugugccgugaacucagucagc

SEQ ID NO: 363042 - RNA, 32 nt, Homo Sapiens
uuguguuagacaauuugcccaacuguaggaug

SEQ ID NO: 363043 - RNA, 32 nt, Homo Sapiens
aaaagccuccccagcccacacucguccacugg

SEQ ID NO: 363044 - RNA, 32 nt, Homo Sapiens
uucccucugcuguggguucugggcugucaugu

SEQ ID NO: 363045 - RNA, 32 nt, Homo Sapiens
ccgcugaggagagguaggguggagcggggcag

SEQ ID NO: 363046 - RNA, 32 nt, Homo Sapiens
ggcuggucuugaauuccugaccucaagugauc

SEQ ID NO: 363047 - RNA, 32 nt, Homo Sapiens
uucugagugaguccuuuuuuuaugguguccuc

SEQ ID NO: 363048 - RNA, 32 nt, Homo Sapiens
auaacugcaacuagagaaaacuguauaaaaac

SEQ ID NO: 363049 - RNA, 32 nt, Homo Sapiens
accaaagagcugguucugaugaacuaagcuca

SEQ ID NO: 363050 - RNA, 32 nt, Homo Sapiens
cagcucacuuuuccagagggauauuccugugg

SEQ ID NO: 363051 - RNA, 32 nt, Homo Sapiens
ggaacuuuuaauuugcaggggugcccgcuaug

SEQ ID NO: 363052 - RNA, 32 nt, Homo Sapiens
uugaagauauccucaacgugaggcucugcugc

SEQ ID NO: 363053 - RNA, 32 nt, Homo Sapiens
ucggggcugcccagcccuggcaccugcuucac

SEQ ID NO: 363054 - RNA, 32 nt, Homo Sapiens
ccuuaaguugugcuagcaacccuaauagguga

SEQ ID NO: 363055 - RNA, 32 nt, Homo Sapiens
ccuuuacugccauuuuuuuuuaaauguuuuca

SEQ ID NO: 363056 - RNA, 32 nt, Homo Sapiens
uccuuuaaauaaagguuaagaugauucucccu

SEQ ID NO: 363057 - RNA, 32 nt, Homo Sapiens
gauauguaucgugugugcauguacaugcaugg

SEQ ID NO: 363058 - RNA, 32 nt, Homo Sapiens
aggguggugggaggagauaagagauacaaacu

SEQ ID NO: 363059 - RNA, 32 nt, Homo Sapiens
cccaucugcucuguuuacacaccuggaccugg

SEQ ID NO: 363060 - RNA, 32 nt, Homo Sapiens
agccugcaugaaaucuguaacugagcaaggag

SEQ ID NO: 363061 - RNA, 32 nt, Homo Sapiens
uagaaugcugcuagaagacaagugauguccug

SEQ ID NO: 363062 - RNA, 32 nt, Homo Sapiens
uuaaguuguuauuugcauggaaauuaaguagg

SEQ ID NO: 363063 - RNA, 32 nt, Homo Sapiens
ggcuuggccgcgaggccgcggagcucccaacg

SEQ ID NO: 363064 - RNA, 32 nt, Homo Sapiens
aaguugggacucuggagagcggaggagagaga

SEQ ID NO: 363065 - RNA, 25 nt, Homo Sapiens
auggaucugcccgugggccccggcg

SEQ ID NO: 363066 - RNA, 32 nt, Homo Sapiens
aaaucucaaauggcagacuaucaucauuuaag

SEQ ID NO: 363067 - RNA, 32 nt, Homo Sapiens
gaauuuuguacuuuucagaauauuaucgugac

SEQ ID NO: 363068 - RNA, 32 nt, Homo Sapiens
aaacauccucucaaaaaucagaugggacauga

SEQ ID NO: 363069 - RNA, 30 nt, Homo Sapiens
aaauggucaggcggcggcggcggagaagga

SEQ ID NO: 363070 - RNA, 32 nt, Homo Sapiens
aaggcccggaggggcucugcguucuguagugg

SEQ ID NO: 363071 - RNA, 31 nt, Homo Sapiens
cucgccaugccucuccugcccccuccccugu

SEQ ID NO: 363072 - RNA, 32 nt, Homo Sapiens
guguaugguggauaagugggacuuaagacuaa

SEQ ID NO: 363073 - RNA, 32 nt, Homo Sapiens
uggauguuugagcgacacacacguguaacacu

SEQ ID NO: 363074 - RNA, 32 nt, Homo Sapiens
acauacaaaugaaauguacugucucagaauaa

SEQ ID NO: 363075 - RNA, 32 nt, Homo Sapiens
acaagaagaaaacugaccaccuuaaugaaauu

SEQ ID NO: 363076 - RNA, 32 nt, Homo Sapiens
gcguccugccagggcugaaaucucuuuaauga

SEQ ID NO: 363077 - RNA, 32 nt, Homo Sapiens
ugacuuuuggcuuuuuguagucucucuggagg

SEQ ID NO: 363078 - RNA, 32 nt, Homo Sapiens
guguggugguggcugaugguacuggaguaacu

SEQ ID NO: 363079 - RNA, 32 nt, Homo Sapiens
ucccgccaggcccagcggccccggccccucgu

SEQ ID NO: 363080 - RNA, 32 nt, Homo Sapiens
cugccuucugccaugaacccaggccacuaguc

SEQ ID NO: 363081 - RNA, 32 nt, Homo Sapiens
ucuuaguguuugcgucugggguguguuaucaa

SEQ ID NO: 363082 - RNA, 32 nt, Homo Sapiens
augaucuggaggaggaggaaaaagauacacgc

SEQ ID NO: 363083 - RNA, 32 nt, Homo Sapiens
gugccggaguuguguucucaccacccacuuug

SEQ ID NO: 363084 - RNA, 32 nt, Homo Sapiens
ccccagguccuuucucagccuccagcugggcu

SEQ ID NO: 363085 - RNA, 32 nt, Homo Sapiens
uuaagaaucuucacaacuauguuuucuuuuca

SEQ ID NO: 363086 - RNA, 32 nt, Homo Sapiens
cuuugauuauacauuuauuauugugucucucu

SEQ ID NO: 363087 - RNA, 32 nt, Homo Sapiens
cuuuccuccgcccgggguggggccccuacaga

SEQ ID NO: 363088 - RNA, 32 nt, Homo Sapiens
gcaugccuccaaggcccccuucaucccagucc

SEQ ID NO: 363089 - RNA, 32 nt, Homo Sapiens
aaacuuacugauauccucaucuguaaauuagc

SEQ ID NO: 363090 - RNA, 30 nt, Homo Sapiens
gagccauuugaaaugacccaucuccugcca

SEQ ID NO: 363091 - RNA, 32 nt, Homo Sapiens
gcugcagagugauuuuccccuccggcacugac

SEQ ID NO: 363092 - RNA, 32 nt, Homo Sapiens
cucgguggggagggugcacagagccucgaccc

SEQ ID NO: 363093 - RNA, 32 nt, Homo Sapiens
aauuucuccgaguggugcauaaucuuauuuug

SEQ ID NO: 363094 - RNA, 32 nt, Homo Sapiens
auauuaaaauuccaaauucauggcaugcuuaa

SEQ ID NO: 363095 - RNA, 32 nt, Homo Sapiens
aaaagguucuuacugcuugguccuugauuuau

SEQ ID NO: 363096 - RNA, 32 nt, Homo Sapiens
gccgcaggugaccccuuagcccagcuccagug

SEQ ID NO: 363097 - RNA, 32 nt, Homo Sapiens
ugccaauaagacuguggacuucaugauuguug

SEQ ID NO: 363098 - RNA, 32 nt, Homo Sapiens
aggugaaaggcacaucucacauggcagcagag

SEQ ID NO: 363099 - RNA, 32 nt, Homo Sapiens
aaaaagaaaaagaaaaagguguucuagcuguu

SEQ ID NO: 363100 - RNA, 32 nt, Homo Sapiens
ccuagccacacugucauagacacagacaugga

SEQ ID NO: 363101 - RNA, 32 nt, Homo Sapiens
cuuuuccaacugggugugcaugcuaaaaaccu

SEQ ID NO: 363102 - RNA, 32 nt, Homo Sapiens
caugcugagcuguaccagaauaaagaauagag

SEQ ID NO: 363103 - RNA, 30 nt, Homo Sapiens
gggccaugaagaagauuuuuaguaagaagg

SEQ ID NO: 363104 - RNA, 32 nt, Homo Sapiens
uagcauuuuaaaacuuaguuguaaucuuucuu

SEQ ID NO: 363105 - RNA, 32 nt, Homo Sapiens
ggcaggagcauggaaggcugugucaugugcgg

SEQ ID NO: 363106 - RNA, 32 nt, Homo Sapiens
ccucagccacccaaaaugcugggauuacaggc

SEQ ID NO: 363107 - RNA, 32 nt, Homo Sapiens
aaaaucugccuuagauucuauagugaagacaa

SEQ ID NO: 363108 - RNA, 32 nt, Homo Sapiens
accaagucaggcagaucacuuuaggucaggag

SEQ ID NO: 363109 - RNA, 32 nt, Homo Sapiens
ccccuucuucuacuccacggaggcgcugucuc

SEQ ID NO: 363110 - RNA, 32 nt, Homo Sapiens
caccaacuguugaaacaaaucccuagagacac

SEQ ID NO: 363111 - RNA, 32 nt, Homo Sapiens
ggccaggcgagguggcucacgccuguaaucuc

SEQ ID NO: 363112 - RNA, 32 nt, Homo Sapiens
ggggagugcaggguggacaucaccuuggaggc

SEQ ID NO: 363113 - RNA, 32 nt, Homo Sapiens
agcauguuugcaaauauugcagcccauugaaa

SEQ ID NO: 363114 - RNA, 32 nt, Homo Sapiens
gaggaagcggguggcgcugggacgcaugcucu

SEQ ID NO: 363115 - RNA, 32 nt, Homo Sapiens
aacacaaagggagaugggaugagggccauccu

SEQ ID NO: 363116 - RNA, 32 nt, Homo Sapiens
cccggcccugucacuccacugcuugccacuau

SEQ ID NO: 363117 - RNA, 32 nt, Homo Sapiens
uucuuacaccaauuucuucuuugcuuaaaucu

SEQ ID NO: 363118 - RNA, 32 nt, Homo Sapiens
uuaguuuuggggauggggcacagggcauagcu

SEQ ID NO: 363119 - RNA, 32 nt, Homo Sapiens
aggaagguggaguacuaacaaagguguugaau

SEQ ID NO: 363120 - RNA, 32 nt, Homo Sapiens
auguagaaaugauaauagcuuaccacaaauuc

SEQ ID NO: 363121 - RNA, 32 nt, Homo Sapiens
cuagcuucucugugucccagguggccaccuuc

SEQ ID NO: 363122 - RNA, 32 nt, Homo Sapiens
cuuucauucacgucccuuccugucucggucug

SEQ ID NO: 363123 - RNA, 32 nt, Homo Sapiens
cagaccugaaaaugagccauggcauugggaca

SEQ ID NO: 363124 - RNA, 32 nt, Homo Sapiens
gagaaggaggagaaggccaaggcgcugcggga

SEQ ID NO: 363125 - RNA, 32 nt, Homo Sapiens
aggugcugacuauucugaugccgaguuuccaa

SEQ ID NO: 363126 - RNA, 32 nt, Homo Sapiens
ugcucuggucugaccgaugugucucccagaac

SEQ ID NO: 363127 - RNA, 32 nt, Homo Sapiens
cucuucaaggccauauccaccugugcccuggg

SEQ ID NO: 363128 - RNA, 32 nt, Homo Sapiens
cgucucgcuugaguguguuguguuaugcccag

SEQ ID NO: 363129 - RNA, 32 nt, Homo Sapiens
uuuuuauauuuuacuucuuuuguuuuggggcu

SEQ ID NO: 363130 - RNA, 32 nt, Homo Sapiens
gaguuugcuuggagcuccuggggccuaacaaa

SEQ ID NO: 363131 - RNA, 32 nt, Homo Sapiens
uaagcauggacagccagagcuuucuauguacu

SEQ ID NO: 363132 - RNA, 32 nt, Homo Sapiens
ggaggcugggcagggccccggcgcuggagagg

SEQ ID NO: 363133 - RNA, 32 nt, Homo Sapiens
cccgagagaugggcgcaaggggugcuggggga

SEQ ID NO: 363134 - RNA, 32 nt, Homo Sapiens
ugauagcgcuggcgagggaagcagcuggaaag

SEQ ID NO: 363135 - RNA, 32 nt, Homo Sapiens
uuccucaguauuguaaugcuugaaauauuuga

SEQ ID NO: 363136 - RNA, 32 nt, Homo Sapiens
uauaaggcaucaauggcagaaacuacauauga

SEQ ID NO: 363137 - RNA, 32 nt, Homo Sapiens
ugagaagcugaagagaaagagaaggagggcau

SEQ ID NO: 363138 - RNA, 32 nt, Homo Sapiens
ucucuccauuccucuccaacccugcccaccuc

SEQ ID NO: 363139 - RNA, 32 nt, Homo Sapiens
uuucagaaaccgaaacagaaacgacauagaug

SEQ ID NO: 363140 - RNA, 32 nt, Homo Sapiens
ugauauagcuaauguucugaguagccuggauc

SEQ ID NO: 363141 - RNA, 32 nt, Homo Sapiens
uggaaguauaucuauuuuuguauuuugcaaaa

SEQ ID NO: 363142 - RNA, 32 nt, Homo Sapiens
agagcuauggucccuuucuccacugcacugga

SEQ ID NO: 363143 - RNA, 32 nt, Homo Sapiens
uuguauauaaucucaagcagauuguuuucuuu

SEQ ID NO: 363144 - RNA, 32 nt, Homo Sapiens
cacacuaaaucuuuaauuuuuuggggggaggu

SEQ ID NO: 363145 - RNA, 32 nt, Homo Sapiens
uuuaugucacuacucuaaagauuuugcuguug

SEQ ID NO: 363146 - RNA, 32 nt, Homo Sapiens
ggugggaggggucaggugugggacaugggagc

SEQ ID NO: 363147 - RNA, 32 nt, Homo Sapiens
uguuuggaagcaaagcaauguuguguguccuu

SEQ ID NO: 363148 - RNA, 32 nt, Homo Sapiens
guuuuuaauuuaauguauugagucuaauagac

SEQ ID NO: 363149 - RNA, 32 nt, Homo Sapiens
cgcagcgcgggaaggcggugggggcggggaag

SEQ ID NO: 363150 - RNA, 32 nt, Homo Sapiens
ugagggaugcuauguuaauguauuuuuaauua

SEQ ID NO: 363151 - RNA, 32 nt, Homo Sapiens
uaaauuccaauauacauucagugauaccacuc

SEQ ID NO: 363152 - RNA, 32 nt, Homo Sapiens
acugaggcggguggauugcuugagcccagaag

SEQ ID NO: 363153 - RNA, 32 nt, Homo Sapiens
agccgagauugugccauugcacuccagccugg

SEQ ID NO: 363154 - RNA, 32 nt, Homo Sapiens
auuggguguaauucuuuuugaaucccagaucc

SEQ ID NO: 363155 - RNA, 32 nt, Homo Sapiens
agccgagauugugccacugcacucuagccugg

SEQ ID NO: 363156 - RNA, 32 nt, Homo Sapiens
aauggauguacaaaagcaggucuguuuuaugu

SEQ ID NO: 363157 - RNA, 32 nt, Homo Sapiens
cagagccggagcgggggccgccggcgccgcau

SEQ ID NO: 363158 - RNA, 32 nt, Homo Sapiens
gacacugugcaggugaaacagaaccuccucag

SEQ ID NO: 363159 - RNA, 32 nt, Homo Sapiens
aggccuccugcagcuggacuccagcgccugcc

SEQ ID NO: 363160 - RNA, 32 nt, Homo Sapiens
ugcagguccccgcuccccuccccgugcguccg

SEQ ID NO: 363161 - RNA, 32 nt, Homo Sapiens
agaaaguguaccuugaguuugcuggcagcaca

SEQ ID NO: 363162 - RNA, 32 nt, Homo Sapiens
uaugcccguggcgguggcacggcgcuguaucc

SEQ ID NO: 363163 - RNA, 32 nt, Homo Sapiens
cgucuaaaaaauaugacucagacuauagccgu

SEQ ID NO: 363164 - RNA, 31 nt, Homo Sapiens
gcccagagggcggcgcugacacgggcgcgau

SEQ ID NO: 363165 - RNA, 32 nt, Homo Sapiens
agccccggguggcaggacccaccggcaccucu

SEQ ID NO: 363166 - RNA, 32 nt, Homo Sapiens
acagaaguuguauaacagcacaacaaagacaa

SEQ ID NO: 363167 - RNA, 32 nt, Homo Sapiens
ugggcgugcagggcccgcgggcucuggccgga

SEQ ID NO: 363168 - RNA, 32 nt, Homo Sapiens
gcucggcgcgggggcggggccuggcgggagua

SEQ ID NO: 363169 - RNA, 32 nt, Homo Sapiens
gggcaggcagaaaacuccggagggauaauugg

SEQ ID NO: 363170 - RNA, 32 nt, Homo Sapiens
aguuuuauaugcuuugucucaugacgcgaaag

SEQ ID NO: 363171 - RNA, 32 nt, Homo Sapiens
uggcucacaccuguaaucucggcacuuugggg

SEQ ID NO: 363172 - RNA, 32 nt, Homo Sapiens
cugcggccacccccuccuccccgagcuuuccu

SEQ ID NO: 363173 - RNA, 32 nt, Homo Sapiens
cagccaccggugccuuccuuucccgccgccgc

SEQ ID NO: 363174 - RNA, 32 nt, Homo Sapiens
uuuaaaauauauuaaauuguauuccaaaccug

SEQ ID NO: 363175 - RNA, 32 nt, Homo Sapiens
uuguaaagcccaguuuccugugugcaugucau

SEQ ID NO: 363176 - RNA, 32 nt, Homo Sapiens
ugggacaucuucugcucuucuguacauuucua

SEQ ID NO: 363177 - RNA, 32 nt, Homo Sapiens
caauagcuguggggaaagaaaaugaguuccga

SEQ ID NO: 363178 - RNA, 32 nt, Homo Sapiens
caggcuccaagcccuuguuccuggaagagaac

SEQ ID NO: 363179 - RNA, 32 nt, Homo Sapiens
ucucuuuuguuguuuucuuugagggacagccu

SEQ ID NO: 363180 - RNA, 32 nt, Homo Sapiens
cuggggcagacacugccccaucuccugccgcc

SEQ ID NO: 363181 - RNA, 32 nt, Homo Sapiens
ucuccuacgaccuguucggcagaugggcacag

SEQ ID NO: 363182 - RNA, 31 nt, Homo Sapiens
gucaagauggcggcugcggcaguggcggcgg

SEQ ID NO: 363183 - RNA, 32 nt, Homo Sapiens
ggaucucuguuguaacccucucagcauggcgg

SEQ ID NO: 363184 - RNA, 32 nt, Homo Sapiens
acacuugcuggacagcuaucuuccacauccuu

SEQ ID NO: 363185 - RNA, 32 nt, Homo Sapiens
uguaaucaggugguacauuuacaugcucauua

SEQ ID NO: 363186 - RNA, 32 nt, Homo Sapiens
gcggacgaguggaaccgagacugccccgcgga

SEQ ID NO: 363187 - RNA, 32 nt, Homo Sapiens
cagccuccgcggcucacuccagccaucccuuc

SEQ ID NO: 363188 - RNA, 32 nt, Homo Sapiens
auggggccugccagcccugccugccagguccc

SEQ ID NO: 363189 - RNA, 32 nt, Homo Sapiens
acucgccugugcugugagggacggccgguguc

SEQ ID NO: 363190 - RNA, 32 nt, Homo Sapiens
ccgcagccccggcuccucccucguccggcccc

SEQ ID NO: 363191 - RNA, 32 nt, Homo Sapiens
uauacugacagaggcaguauacaguuauagag

SEQ ID NO: 363192 - RNA, 32 nt, Homo Sapiens
uaaagauacuuaucuuuucagcaguauauaug

SEQ ID NO: 363193 - RNA, 32 nt, Homo Sapiens
cugcacauuguuaugcacuuuuccccaauuca

SEQ ID NO: 363194 - RNA, 32 nt, Homo Sapiens
gccugugccgcgcgcuggcgcugcuggaagac

SEQ ID NO: 363195 - RNA, 32 nt, Homo Sapiens
uccuugcugcaccugugccguccccagagcua

SEQ ID NO: 363196 - RNA, 32 nt, Homo Sapiens
cccuggccuuuaccuggaccuuguagggucuc

SEQ ID NO: 363197 - RNA, 32 nt, Homo Sapiens
guggcauggaggggugggaggggcugagaugg

SEQ ID NO: 363198 - RNA, 32 nt, Homo Sapiens
agagcaugagagagcccagagggaggaagaag

SEQ ID NO: 363199 - RNA, 32 nt, Homo Sapiens
uuacagauaaacggaagccggcugggguggug

SEQ ID NO: 363200 - RNA, 32 nt, Homo Sapiens
cccagccccgccgcgccgccccccgcaugcua

SEQ ID NO: 363201 - RNA, 32 nt, Homo Sapiens
cugaggaaaaauauuaggaauaaaauaugaua

SEQ ID NO: 363202 - RNA, 32 nt, Homo Sapiens
gaagugagcguggggcucagggaccaggccug

SEQ ID NO: 363203 - RNA, 32 nt, Homo Sapiens
uaccuccuuguacaucacuauacccaaaucag

SEQ ID NO: 363204 - RNA, 32 nt, Homo Sapiens
uccaucgguauuuuaaauguggggucacagau

SEQ ID NO: 363205 - RNA, 32 nt, Homo Sapiens
gccuggcugccucuuaggauaugacagcagag

SEQ ID NO: 363206 - RNA, 32 nt, Homo Sapiens
ggggauggugcgaucccgggcccgagggcauc

SEQ ID NO: 363207 - RNA, 32 nt, Homo Sapiens
guuuccaggucauuauuuaugacuccaguuuu

SEQ ID NO: 363208 - RNA, 30 nt, Homo Sapiens
ccugugcgcaggcgcguugguuucccgacc

SEQ ID NO: 363209 - RNA, 32 nt, Homo Sapiens
uaauucuuucccuaacucugguccaccugcaa

SEQ ID NO: 363210 - RNA, 32 nt, Homo Sapiens
acggcaguggcagcagcguccggagcagccgc

SEQ ID NO: 363211 - RNA, 32 nt, Homo Sapiens
acaggaaagcauuuauacuugagaaauauugu

SEQ ID NO: 363212 - RNA, 32 nt, Homo Sapiens
gcaaagagacuggcagaauuuugccccugccc

SEQ ID NO: 363213 - RNA, 32 nt, Homo Sapiens
uccuccauuuuuccuccccaagaauagcuggc

SEQ ID NO: 363214 - RNA, 32 nt, Homo Sapiens
aagggaucaaggaaaugacuauuccuccaaau

SEQ ID NO: 363215 - RNA, 32 nt, Homo Sapiens
aggcggacagaccaccugaggucaggaguucg

SEQ ID NO: 363216 - RNA, 32 nt, Homo Sapiens
gccagccccccgcugcucccgggacuguggcu

SEQ ID NO: 363217 - RNA, 26 nt, Homo Sapiens
caugucgggccggucgguccgggcgg

SEQ ID NO: 363218 - RNA, 32 nt, Homo Sapiens
gggaauaugauuaugcuuaaucuaugcucagu

SEQ ID NO: 363219 - RNA, 32 nt, Homo Sapiens
cugaccugcuccauucagaacaagacuggaug

SEQ ID NO: 363220 - RNA, 32 nt, Homo Sapiens
agagaucugucuaugggaccaguggcuuggau

SEQ ID NO: 363221 - RNA, 32 nt, Homo Sapiens
aucuguaauuuaauuuuaaguauaauguuuug

SEQ ID NO: 363222 - RNA, 32 nt, Homo Sapiens
ccucguuguucucacggccaccucugagugcu

SEQ ID NO: 363223 - RNA, 32 nt, Homo Sapiens
cugccuuccucggaggagccaucggugucgcg

SEQ ID NO: 363224 - RNA, 32 nt, Homo Sapiens
gcuugucauauuuuaaauuugccaucauucca

SEQ ID NO: 363225 - RNA, 32 nt, Homo Sapiens
aggagcggugggccgaagacgugcccuacccu

SEQ ID NO: 363226 - RNA, 32 nt, Homo Sapiens
uuuccuuguuuuucuccagaucacuuauuaug

SEQ ID NO: 363227 - RNA, 32 nt, Homo Sapiens
aguuucaauagcaaaauuaaauuuauugcuuu

SEQ ID NO: 363228 - RNA, 32 nt, Homo Sapiens
caaagccaguaguuaaaccaaacuacagucuc

SEQ ID NO: 363229 - RNA, 32 nt, Homo Sapiens
gucucucuugugaacucuggaacuguauuccc

SEQ ID NO: 363230 - RNA, 32 nt, Homo Sapiens
accuaaauaaagacauaaaaucuucaaagaaa

SEQ ID NO: 363231 - RNA, 32 nt, Homo Sapiens
agaaggcgccccccggccgggcucccgcucca

SEQ ID NO: 363232 - RNA, 32 nt, Homo Sapiens
cuaccuugggcucugcgccgccgagaagauag

SEQ ID NO: 363233 - RNA, 32 nt, Homo Sapiens
ugucugucgcccauggccgccgcgcugcucgc

SEQ ID NO: 363234 - RNA, 32 nt, Homo Sapiens
gugcacagccucuggaaggaaaggcagcgcug

SEQ ID NO: 363235 - RNA, 32 nt, Homo Sapiens
acuuugacuuucccacuguugcuggagacaaa

SEQ ID NO: 363236 - RNA, 32 nt, Homo Sapiens
cuaggugccagacgguccggaggcgggggcca

SEQ ID NO: 363237 - RNA, 32 nt, Homo Sapiens
ccuuuggguuuuuuaauauaaauuauuaguuu

SEQ ID NO: 363238 - RNA, 32 nt, Homo Sapiens
gucugguggaugucaccuaaaaaggaagaccg

SEQ ID NO: 363239 - RNA, 30 nt, Homo Sapiens
cccgagcgcgcgcagccaggugcgcuccuu

SEQ ID NO: 363240 - RNA, 31 nt, Homo Sapiens
ggggguggcgccugccugcccaucucugccc

SEQ ID NO: 363241 - RNA, 32 nt, Homo Sapiens
ccucugcugcuccgccucuccccuccccacug

SEQ ID NO: 363242 - RNA, 32 nt, Homo Sapiens
agucuggacaccuggugggggaugcaugggaa

SEQ ID NO: 363243 - RNA, 32 nt, Homo Sapiens
ucauucaccccuccccuccccacaguggaauu

SEQ ID NO: 363244 - RNA, 32 nt, Homo Sapiens
ggauacuauugcaacuugggaauacuggucug

SEQ ID NO: 363245 - RNA, 31 nt, Homo Sapiens
gagcggcggcacugcggcgcaggcggcggag

SEQ ID NO: 363246 - RNA, 32 nt, Homo Sapiens
cauuuuguccauaaacguuaugcugaauaguu

SEQ ID NO: 363247 - RNA, 32 nt, Homo Sapiens
aaugcucauugaaaauuaaauaaaacaaaaag

SEQ ID NO: 363248 - RNA, 32 nt, Homo Sapiens
gaauuugggauuagucauccuaauccccucac

SEQ ID NO: 363249 - RNA, 32 nt, Homo Sapiens
aucaucuggcugcaaagaagagaacacacugu

SEQ ID NO: 363250 - RNA, 32 nt, Homo Sapiens
ccacuuuuaauauauauacauauauauuuguu

SEQ ID NO: 363251 - RNA, 32 nt, Homo Sapiens
gaaaaagucugugguuuagaaaauauguccau

SEQ ID NO: 363252 - RNA, 32 nt, Homo Sapiens
ggcuccccuggagcuuccaugccagccggacu

SEQ ID NO: 363253 - RNA, 32 nt, Homo Sapiens
cccuauucauccuccuccccagccagcucacc

SEQ ID NO: 363254 - RNA, 32 nt, Homo Sapiens
aaaguacaggcuuuuucuucauuaccuuuuuu

SEQ ID NO: 363255 - RNA, 32 nt, Homo Sapiens
uggggggcuggggucuccaggggaugacuguu

SEQ ID NO: 363256 - RNA, 32 nt, Homo Sapiens
uggauuguguaaaaugcugaucauuuguuuau

SEQ ID NO: 363257 - RNA, 32 nt, Homo Sapiens
gaauggaaaaagaugucccaaugcugccccaa

SEQ ID NO: 363258 - RNA, 32 nt, Homo Sapiens
uagguaaggugauaacauggggggagguuuug

SEQ ID NO: 363259 - RNA, 32 nt, Homo Sapiens
aacaaggaaugccugugccaauaaaaguuuuc

SEQ ID NO: 363260 - RNA, 32 nt, Homo Sapiens
gaccccaaggacccuggggguggcccagagag

SEQ ID NO: 363261 - RNA, 32 nt, Homo Sapiens
agacagagagaggggcacaggauguggagucc

SEQ ID NO: 363262 - RNA, 32 nt, Homo Sapiens
ccuuuuaaauuuuuuccaaccauugcuugaua

SEQ ID NO: 363263 - RNA, 32 nt, Homo Sapiens
ugguauuaugagagcaauaacuuuaaaucugc

SEQ ID NO: 363264 - RNA, 32 nt, Homo Sapiens
uuuuuucaaaaguagaaaaauuccccucuaaa

SEQ ID NO: 363265 - RNA, 32 nt, Homo Sapiens
accucgggggcgaugcggcugcugccccugcu

SEQ ID NO: 363266 - RNA, 32 nt, Homo Sapiens
cguccacucacuccuuuucagaauagaaaucu

SEQ ID NO: 363267 - RNA, 32 nt, Homo Sapiens
gggagguguucccaucugagcccagagauaag

SEQ ID NO: 363268 - RNA, 32 nt, Homo Sapiens
ccaugcauucaauauugaucagcucagcacuu

SEQ ID NO: 363269 - RNA, 32 nt, Homo Sapiens
ccugcugggagcccaccccaccccaguccagc

SEQ ID NO: 363270 - RNA, 32 nt, Homo Sapiens
aaggucuuguuauauugaucucuccucgaacu

SEQ ID NO: 363271 - RNA, 32 nt, Homo Sapiens
acaggcucuaaagugcaauggagaacaauugc

SEQ ID NO: 363272 - RNA, 32 nt, Homo Sapiens
agggacacgguuugaggcagggguuugcagaa

SEQ ID NO: 363273 - RNA, 29 nt, Homo Sapiens
guaaugaguaucugguaccucaguauccu

SEQ ID NO: 363274 - RNA, 32 nt, Homo Sapiens
agguguuccuuccccuucgacucagcuucuuc

SEQ ID NO: 363275 - RNA, 32 nt, Homo Sapiens
uuuagugaugggucuugcugggugcugugugg

SEQ ID NO: 363276 - RNA, 32 nt, Homo Sapiens
ggcgcaaaggauuaauaauuaaccuacuaagg

SEQ ID NO: 363277 - RNA, 32 nt, Homo Sapiens
gggcccugucucccagccacuuucccuccugg

SEQ ID NO: 363278 - RNA, 32 nt, Homo Sapiens
gggaagguggauucuaggaaaagggagugccu

SEQ ID NO: 363279 - RNA, 32 nt, Homo Sapiens
ucguucccggccccggccccccacccaucccc

SEQ ID NO: 363280 - RNA, 32 nt, Homo Sapiens
gcuccgccgcccuugccuccagauggggucga

SEQ ID NO: 363281 - RNA, 32 nt, Homo Sapiens
cuuauagucaauguuucuuuuaucacgauauu

SEQ ID NO: 363282 - RNA, 32 nt, Homo Sapiens
auauuauucuguacaaaggcuuucaaacaaaa

SEQ ID NO: 363283 - RNA, 32 nt, Homo Sapiens
acucuucauuccuguuucuccucaguuccccu

SEQ ID NO: 363284 - RNA, 32 nt, Homo Sapiens
agaagucaaaaauugagguuugggaacugcug

SEQ ID NO: 363285 - RNA, 32 nt, Homo Sapiens
cuaguaacggccgccagugugcuggaauucgc

SEQ ID NO: 363286 - RNA, 32 nt, Homo Sapiens
uuguggauauaaaaugugcagaugcaauuguu

SEQ ID NO: 363287 - RNA, 32 nt, Homo Sapiens
aggucgggauggggcuuguagcagaaggcaag

SEQ ID NO: 363288 - RNA, 32 nt, Homo Sapiens
cacauaugggugcuggcagagcccccaaggac

SEQ ID NO: 363289 - RNA, 32 nt, Homo Sapiens
gcuggguggcaccagcagccuggacccugugg

SEQ ID NO: 363290 - RNA, 32 nt, Homo Sapiens
ucgcgggugacuccggccuccguggcuguccc

SEQ ID NO: 363291 - RNA, 32 nt, Homo Sapiens
uuaaauugcaguccuuuuuuuuuuuaaagaua

SEQ ID NO: 363292 - RNA, 32 nt, Homo Sapiens
aaucugucaggcacaaaagggauuguuuuggg

SEQ ID NO: 363293 - RNA, 32 nt, Homo Sapiens
cugguuaaugaauaacaagagauccaguuuca

SEQ ID NO: 363294 - RNA, 32 nt, Homo Sapiens
aauucuuuuuaaaaauauuuuuuggggcaaag

SEQ ID NO: 363295 - RNA, 32 nt, Homo Sapiens
gcggcggcgaagcagcagcugcggccgcgccc

SEQ ID NO: 363296 - RNA, 32 nt, Homo Sapiens
gaacaucuaaagaucugaaagauggaaaaaag

SEQ ID NO: 363297 - RNA, 32 nt, Homo Sapiens
ggaacugggaagcuuagucuaauuagugccug

SEQ ID NO: 363298 - RNA, 32 nt, Homo Sapiens
cuuaucuggugccuuucuuccaaaaaugcuca

SEQ ID NO: 363299 - RNA, 32 nt, Homo Sapiens
aucugguuuugcugaucucauuuuggauuuag

SEQ ID NO: 363300 - RNA, 32 nt, Homo Sapiens
cucuucaggccaagucagagcugcuguugcug

SEQ ID NO: 363301 - RNA, 32 nt, Homo Sapiens
uuauuuagauuucuacuacuccaauuauuaau

SEQ ID NO: 363302 - RNA, 32 nt, Homo Sapiens
agggaggagguagagguugcugucaccuuucu

SEQ ID NO: 363303 - RNA, 32 nt, Homo Sapiens
ggggacuuuacuaucuagcaccccaguaggcc

SEQ ID NO: 363304 - RNA, 32 nt, Homo Sapiens
ugccccaucccaugcuguccauccauucucac

SEQ ID NO: 363305 - RNA, 32 nt, Homo Sapiens
gcagucacacaacaggcauggggauguguggc

SEQ ID NO: 363306 - RNA, 32 nt, Homo Sapiens
gaagugcccuucaucacccugaugacaccagg

SEQ ID NO: 363307 - RNA, 30 nt, Homo Sapiens
aaugugaauaucccuggccagccuuuccac

SEQ ID NO: 363308 - RNA, 32 nt, Homo Sapiens
gugaggagugagcagagggucugggauuucug

SEQ ID NO: 363309 - RNA, 32 nt, Homo Sapiens
gccuccuuccccgccggccgcgcuccggagcc

SEQ ID NO: 363310 - RNA, 32 nt, Homo Sapiens
ucuuuugggaugcauggugcuccacauacagc

SEQ ID NO: 363311 - RNA, 31 nt, Homo Sapiens
ucucugaaauauagaacuguauaucaguugc

SEQ ID NO: 363312 - RNA, 28 nt, Homo Sapiens
acacaaguggcuauugugauguaugaug

SEQ ID NO: 363313 - RNA, 32 nt, Homo Sapiens
ugccagcaauccuagcacuuugggaggcugag

SEQ ID NO: 363314 - RNA, 32 nt, Homo Sapiens
ggcaggcgccuaccaccacaccugacuaauuu

SEQ ID NO: 363315 - RNA, 32 nt, Homo Sapiens
gugcuguaggaaagaggugaaaaggaaaaagg

SEQ ID NO: 363316 - RNA, 32 nt, Homo Sapiens
accagcccagaagaggcccacccucucggucc

SEQ ID NO: 363317 - RNA, 32 nt, Homo Sapiens
ugaagcaaaagcuaugugcgauccaggguagu

SEQ ID NO: 363318 - RNA, 32 nt, Homo Sapiens
gccccagagccugcggcuguggcaaggccugu

SEQ ID NO: 363319 - RNA, 32 nt, Homo Sapiens
augagauagaaccugauaaggagcuagggcaa

SEQ ID NO: 363320 - RNA, 32 nt, Homo Sapiens
agugggcuuccugcggccuccucuggccccug

SEQ ID NO: 363321 - RNA, 32 nt, Homo Sapiens
uuugcacagaaaacacauuaucuggagagaaa

SEQ ID NO: 363322 - RNA, 32 nt, Homo Sapiens
cucgccccgcggccgggcccauggcacuguga

SEQ ID NO: 363323 - RNA, 32 nt, Homo Sapiens
uuuauuaaacacacuccuaaaaauaaggaacc

SEQ ID NO: 363324 - RNA, 32 nt, Homo Sapiens
gcugauaauguuucauaucugcaacugcuuga

SEQ ID NO: 363325 - RNA, 32 nt, Homo Sapiens
agaaagacagagcugggauguuucugucacau

SEQ ID NO: 363326 - RNA, 32 nt, Homo Sapiens
aguaccagucaguaaagaaaaaugccaacuaa

SEQ ID NO: 363327 - RNA, 32 nt, Homo Sapiens
uccccaacuccaugggguucgagacuccaucu

SEQ ID NO: 363328 - RNA, 32 nt, Homo Sapiens
ccucaccaacaccucugcaguccucuucaggg

SEQ ID NO: 363329 - RNA, 32 nt, Homo Sapiens
acaccuguucuucccuaccuucucuuuuguua

SEQ ID NO: 363330 - RNA, 32 nt, Homo Sapiens
gcucaccuaacagauagcaaaugugucugguu

SEQ ID NO: 363331 - RNA, 32 nt, Homo Sapiens
gagagggggcguguugaacauccugcagucac

SEQ ID NO: 363332 - RNA, 32 nt, Homo Sapiens
gacucagaugccgaaaacucguccucccgaga

SEQ ID NO: 363333 - RNA, 32 nt, Homo Sapiens
cuauggguuucaauucugaaaaaagaaaauga

SEQ ID NO: 363334 - RNA, 32 nt, Homo Sapiens
uucuccucaaagcguauuuuugugaaaucuuu

SEQ ID NO: 363335 - RNA, 32 nt, Homo Sapiens
guugccugugaucccacccccaacccucaggu

SEQ ID NO: 363336 - RNA, 32 nt, Homo Sapiens
cuguccguguuccccagcacucugguuggaga

SEQ ID NO: 363337 - RNA, 32 nt, Homo Sapiens
agcucagagcgcagccccggcgccggcggcgg

SEQ ID NO: 363338 - RNA, 32 nt, Homo Sapiens
gucuccacuccucccccaucauguccuuccaa

SEQ ID NO: 363339 - RNA, 32 nt, Homo Sapiens
gcuaggaugucccacacuccuacaccaugcag

SEQ ID NO: 363340 - RNA, 32 nt, Homo Sapiens
ccuacacaggacuugacauuccgggucagcaa

SEQ ID NO: 363341 - RNA, 32 nt, Homo Sapiens
acaggugcgggugguggggaugaaggccugac

SEQ ID NO: 363342 - RNA, 32 nt, Homo Sapiens
guuugcucacagauggaggagaaggagcucua

SEQ ID NO: 363343 - RNA, 32 nt, Homo Sapiens
agccuccugucuccagcucucuccaggacagg

SEQ ID NO: 363344 - RNA, 32 nt, Homo Sapiens
uaggugugguggcucaugccuguaauccuagc

SEQ ID NO: 363345 - RNA, 30 nt, Homo Sapiens
cugcugcugcuacugccgccgccgcagcgg

SEQ ID NO: 363346 - RNA, 32 nt, Homo Sapiens
gaaggccccacuuggcuauuucauaucuaccu

SEQ ID NO: 363347 - RNA, 32 nt, Homo Sapiens
uuucauaacuuaaagaggcugaaaaugaugaa

SEQ ID NO: 363348 - RNA, 32 nt, Homo Sapiens
aggaggagagccacuguggucugaagagaugc

SEQ ID NO: 363349 - RNA, 32 nt, Homo Sapiens
uaaauuggagggaaacaaaguuuuagauccau

SEQ ID NO: 363350 - RNA, 32 nt, Homo Sapiens
augagccaccgcgcccggcccaaucauguguu

SEQ ID NO: 363351 - RNA, 32 nt, Homo Sapiens
cacacacacacacgugcacacacacacacauu

SEQ ID NO: 363352 - RNA, 32 nt, Homo Sapiens
uuccuucauugacuagcuauuucucuucaugu

SEQ ID NO: 363353 - RNA, 32 nt, Homo Sapiens
agcggaggcagagccgggaggcugcgugggcu

SEQ ID NO: 363354 - RNA, 32 nt, Homo Sapiens
aggaaguggcggugcuguccucagguggccau

SEQ ID NO: 363355 - RNA, 32 nt, Homo Sapiens
uuugguguauaugcuguauccuugcuaccaua

SEQ ID NO: 363356 - RNA, 32 nt, Homo Sapiens
guguucggggugggggcgucaggugagaacgu

SEQ ID NO: 363357 - RNA, 32 nt, Homo Sapiens
uguauaaaugacugaacaacuuagaugauuug

SEQ ID NO: 363358 - RNA, 32 nt, Homo Sapiens
aaugcggcauuugaaugcaauggguuuucaug

SEQ ID NO: 363359 - RNA, 32 nt, Homo Sapiens
agcuacucaggagacugagggagagaauugcu

SEQ ID NO: 363360 - RNA, 32 nt, Homo Sapiens
acucagccauucucuacccauccuuaguacau

SEQ ID NO: 363361 - RNA, 32 nt, Homo Sapiens
aauuagugccugcacccgcccgguggacguca

SEQ ID NO: 363362 - RNA, 32 nt, Homo Sapiens
cuguggucccccagcccuccaagaaaugccca

SEQ ID NO: 363363 - RNA, 31 nt, Homo Sapiens
agggcucaggccuccaccugagagguuauaa

SEQ ID NO: 363364 - RNA, 32 nt, Homo Sapiens
augcugcuucaguugcccguccuguccucaga

SEQ ID NO: 363365 - RNA, 32 nt, Homo Sapiens
uccugggaccuaguuuggaaaagcugguugug

SEQ ID NO: 363366 - RNA, 32 nt, Homo Sapiens
auugggaggaagaauccagaggugaagaggga

SEQ ID NO: 363367 - RNA, 32 nt, Homo Sapiens
gaccuacaaggcugcgcaaacaaaucgaggga

SEQ ID NO: 363368 - RNA, 32 nt, Homo Sapiens
aggcucucuaaagucauuuuugggagucugga

SEQ ID NO: 363369 - RNA, 32 nt, Homo Sapiens
uguuuuguucccucugccccagagagcucccc

SEQ ID NO: 363370 - RNA, 32 nt, Homo Sapiens
cuaaagaguuaaaauuucagugaucugcaauu

SEQ ID NO: 363371 - RNA, 32 nt, Homo Sapiens
gaguggucagagcuccggacuccagccccaug

SEQ ID NO: 363372 - RNA, 32 nt, Homo Sapiens
caggcaaggaggaggagucagaugaggcccug

SEQ ID NO: 363373 - RNA, 32 nt, Homo Sapiens
uaaauaaaugaauuacucaaucuccuaugacc

SEQ ID NO: 363374 - RNA, 32 nt, Homo Sapiens
gccucucacccaggcuuucucggccccucucc

SEQ ID NO: 363375 - RNA, 32 nt, Homo Sapiens
cgcugacuccgccccgcaucuggccagacccg

SEQ ID NO: 363376 - RNA, 32 nt, Homo Sapiens
uuuuucuccccgcuuuuuguuuuuaagcuucu

SEQ ID NO: 363377 - RNA, 32 nt, Homo Sapiens
acccaagcacugggcuacgcgccucuuccacg

SEQ ID NO: 363378 - RNA, 32 nt, Homo Sapiens
auuccacccccuccccugcuggggagaaugac

SEQ ID NO: 363379 - RNA, 32 nt, Homo Sapiens
aagaagcaaaaauucauuuuuaucuuuugaaa

SEQ ID NO: 363380 - RNA, 32 nt, Homo Sapiens
ucucaggaauaauugcaggaauucauagcuca

SEQ ID NO: 363381 - RNA, 32 nt, Homo Sapiens
uggcggcgcccaggguggcccgggcccuuucc

SEQ ID NO: 363382 - RNA, 32 nt, Homo Sapiens
ccaagagcugagcgccuucgcuccacaccgca

SEQ ID NO: 363383 - RNA, 32 nt, Homo Sapiens
ucuaaggggcaaacagauacuaguuaacugcc

SEQ ID NO: 363384 - RNA, 32 nt, Homo Sapiens
cccgaggucaccccggccgcccuggcaucggg

SEQ ID NO: 363385 - RNA, 32 nt, Homo Sapiens
cagcucugaugaugaauucuagugcgggcugc

SEQ ID NO: 363386 - RNA, 32 nt, Homo Sapiens
gagcggcuccgaggaccccccucccuagaacg

SEQ ID NO: 363387 - RNA, 32 nt, Homo Sapiens
gggucugaaaagcuuuuuuaacuucuugcuua

SEQ ID NO: 363388 - RNA, 32 nt, Homo Sapiens
acucgggacgauuuuaaaucuacaaugaagau

SEQ ID NO: 363389 - RNA, 32 nt, Homo Sapiens
cgcugccucuccagcccuuuugcagcccuguu

SEQ ID NO: 363390 - RNA, 32 nt, Homo Sapiens
cccgcccccacuuuuuuuuuuuuuuuuuuuua

SEQ ID NO: 363391 - RNA, 32 nt, Homo Sapiens
gaauugggccucuggacagagucagaaugagg

SEQ ID NO: 363392 - RNA, 32 nt, Homo Sapiens
acauguaggugacucacaaacuucuuggaaag

SEQ ID NO: 363393 - RNA, 32 nt, Homo Sapiens
uggguuuugauuacuuuuuuuuuuuccaaacc

SEQ ID NO: 363394 - RNA, 32 nt, Homo Sapiens
ccucuguuuuaaaaguguguaauguuugauua

SEQ ID NO: 363395 - RNA, 32 nt, Homo Sapiens
uggggaauugguuccaggauccuccacugaug

SEQ ID NO: 363396 - RNA, 32 nt, Homo Sapiens
agcggggcgccgagggggucggcggccuucgg

SEQ ID NO: 363397 - RNA, 31 nt, Homo Sapiens
aaguaagcaaacaaaaaacguguuggaauua

SEQ ID NO: 363398 - RNA, 32 nt, Homo Sapiens
augggguaagugcuguggaucuggagaagcug

SEQ ID NO: 363399 - RNA, 32 nt, Homo Sapiens
acucccuuagccauugccuuggaccaaaccac

SEQ ID NO: 363400 - RNA, 32 nt, Homo Sapiens
ccccucuuuuucuauggagaacguugccuuau

SEQ ID NO: 363401 - RNA, 32 nt, Homo Sapiens
uuaagaaaaaauacugccaauuaaacucuguc

SEQ ID NO: 363402 - RNA, 32 nt, Homo Sapiens
caacaauaaauacauuugauaagaaagauggc

SEQ ID NO: 363403 - RNA, 32 nt, Homo Sapiens
caugauuguaaauuuccugaggccuuccaguc

SEQ ID NO: 363404 - RNA, 32 nt, Homo Sapiens
ccugcccuggaaaucuggagccccuuggagcu

SEQ ID NO: 363405 - RNA, 32 nt, Homo Sapiens
gaggaagaagcggcggcgcggcggcggcggcu

SEQ ID NO: 363406 - RNA, 32 nt, Homo Sapiens
uaucuuauuuccaaaauguuccaauuaaaaaa

SEQ ID NO: 363407 - RNA, 32 nt, Homo Sapiens
cugugggccugccggucaggucgggcaccuac

SEQ ID NO: 363408 - RNA, 32 nt, Homo Sapiens
gauggcugcucuguuaaucacagcugcuuucc

SEQ ID NO: 363409 - RNA, 32 nt, Homo Sapiens
gcaucaagcugaugaguggauccuggacggca

SEQ ID NO: 363410 - RNA, 32 nt, Homo Sapiens
cuuaagaaauuuccuuccauagacagcugccu

SEQ ID NO: 363411 - RNA, 32 nt, Homo Sapiens
caacgcggccccgcgcgggggcgaagcgguuc

SEQ ID NO: 363412 - RNA, 32 nt, Homo Sapiens
ggcugaucucaaacuucugaccucaggugauc

SEQ ID NO: 363413 - RNA, 32 nt, Homo Sapiens
agauacuuguuuguuucuuucuuucuuucaca

SEQ ID NO: 363414 - RNA, 32 nt, Homo Sapiens
aauaaacuuuacaaauuuuucuuguaaaaaaa

SEQ ID NO: 363415 - RNA, 32 nt, Homo Sapiens
gagcagggugggguuuggagagaauggagccu

SEQ ID NO: 363416 - RNA, 32 nt, Homo Sapiens
gguagggcccgggcgcguccgcgcucugcagc

SEQ ID NO: 363417 - RNA, 32 nt, Homo Sapiens
uggacucugugugagcguguccacagaguuug

SEQ ID NO: 363418 - RNA, 32 nt, Homo Sapiens
gaacccuucuauuauaugaagcucaauguuuu

SEQ ID NO: 363419 - RNA, 31 nt, Homo Sapiens
cucagaugaggauguggcucgagccauuaac

SEQ ID NO: 363420 - RNA, 32 nt, Homo Sapiens
uuccuggugcugcuggccgccgcccggcaggc

SEQ ID NO: 363421 - RNA, 32 nt, Homo Sapiens
agauguacauauucauuauacuucugaccuuu

SEQ ID NO: 363422 - RNA, 32 nt, Homo Sapiens
gcccgcaguggcuccaauggccugcuggaugu

SEQ ID NO: 363423 - RNA, 32 nt, Homo Sapiens
gacacacaaggugaagaggacuccgaaguccu

SEQ ID NO: 363424 - RNA, 32 nt, Homo Sapiens
aacaaucuuuagaaacuagcuaccacacccug

SEQ ID NO: 363425 - RNA, 32 nt, Homo Sapiens
aguuugggacuuggcuggcaugugcugccaga

SEQ ID NO: 363426 - RNA, 32 nt, Homo Sapiens
ccacuaaccuucccucuggcugccgcuguuga

SEQ ID NO: 363427 - RNA, 32 nt, Homo Sapiens
uucccuagguguagcucuguuccuacaugcaa

SEQ ID NO: 363428 - RNA, 32 nt, Homo Sapiens
acauacauuguauaggccaucuguaaauaucc

SEQ ID NO: 363429 - RNA, 32 nt, Homo Sapiens
aaggggagcagcccagggccaagccccgcugc

SEQ ID NO: 363430 - RNA, 32 nt, Homo Sapiens
cuaaacccacccaagggaugauuucaggggga

SEQ ID NO: 363431 - RNA, 32 nt, Homo Sapiens
uugagcccaggaguuugagaccaaucuaggca

SEQ ID NO: 363432 - RNA, 32 nt, Homo Sapiens
auuuggcccucccucuccccucucuacuuuaa

SEQ ID NO: 363433 - RNA, 32 nt, Homo Sapiens
accuguuuacuugucuccauucuuauagauau

SEQ ID NO: 363434 - RNA, 32 nt, Homo Sapiens
aguccccggggucccggccgccaggccggagc

SEQ ID NO: 363435 - RNA, 32 nt, Homo Sapiens
cacugcaaccucagccuccugggcucaagcaa

SEQ ID NO: 363436 - RNA, 32 nt, Homo Sapiens
uagacuucauacauuuccaguacgacuuuagu

SEQ ID NO: 363437 - RNA, 32 nt, Homo Sapiens
uuuggguccccucccuuuguaugggagcucug

SEQ ID NO: 363438 - RNA, 32 nt, Homo Sapiens
uugggagaggggcgcagcuaagacugggggca

SEQ ID NO: 363439 - RNA, 32 nt, Homo Sapiens
ggcggcaggggaggagguggaacccgcggccg

SEQ ID NO: 363440 - RNA, 32 nt, Homo Sapiens
gcugcaguccgcacaagcugugaggcagaaaa

SEQ ID NO: 363441 - RNA, 32 nt, Homo Sapiens
cgccuguaaucccagcacuuucggaggcagag

SEQ ID NO: 363442 - RNA, 32 nt, Homo Sapiens
ggaccgcggggagggggcgccgagcggcucca

SEQ ID NO: 363443 - RNA, 32 nt, Homo Sapiens
auucagauguacacuaauauauuaucuauuaa

SEQ ID NO: 363444 - RNA, 32 nt, Homo Sapiens
uugcauugcagaaagagauugaagauauuuac

SEQ ID NO: 363445 - RNA, 32 nt, Homo Sapiens
ccucuguggauugauauuuacauaucaaugug

SEQ ID NO: 363446 - RNA, 32 nt, Homo Sapiens
ccaguggccacagcugcagagcacugcagcuc

SEQ ID NO: 363447 - RNA, 32 nt, Homo Sapiens
auuuaguaaucuacaaaggaaauaucaaagug

SEQ ID NO: 363448 - RNA, 32 nt, Homo Sapiens
cccagcccuccuuccuaaguacucaucaaauu

SEQ ID NO: 363449 - RNA, 32 nt, Homo Sapiens
acugcauauuguuuaucugcucugccagagua

SEQ ID NO: 363450 - RNA, 32 nt, Homo Sapiens
uguauaaagugauauugcaaaaaacuacagcu

SEQ ID NO: 363451 - RNA, 32 nt, Homo Sapiens
ggagcccuuggcgggggcaugcgugcgacaug

SEQ ID NO: 363452 - RNA, 32 nt, Homo Sapiens
acucaaccugcgccucgccgucccccauucgc

SEQ ID NO: 363453 - RNA, 32 nt, Homo Sapiens
uuuaguccucccgcccccgccaaggggcacca

SEQ ID NO: 363454 - RNA, 32 nt, Homo Sapiens
gacuggauaauuaagacugcauuaugaaaguc

SEQ ID NO: 363455 - RNA, 32 nt, Homo Sapiens
cagcuacacagcgaccccgcccccgccugccc

SEQ ID NO: 363456 - RNA, 28 nt, Homo Sapiens
agaagaaaggcuaccaggacagcauuua

SEQ ID NO: 363457 - RNA, 32 nt, Homo Sapiens
uuuguccacaguguagugugucucaguacuuc

SEQ ID NO: 363458 - RNA, 32 nt, Homo Sapiens
gacccugacaccugagcugggguugcaaaguc

SEQ ID NO: 363459 - RNA, 32 nt, Homo Sapiens
cucuuggcagggcgggggaggggggauaggag

SEQ ID NO: 363460 - RNA, 32 nt, Homo Sapiens
uuuuggcaaugacucaaagucugcucucauau

SEQ ID NO: 363461 - RNA, 32 nt, Homo Sapiens
gggaaccuguaaacgcucucggaauuauggcg

SEQ ID NO: 363462 - RNA, 32 nt, Homo Sapiens
auuuguucugaccacgagacaccccuggagcu

SEQ ID NO: 363463 - RNA, 32 nt, Homo Sapiens
cagcagggagguggggugggcgguaaacagac

SEQ ID NO: 363464 - RNA, 32 nt, Homo Sapiens
ucggacaggaggacggaggagcaacugccuuc

SEQ ID NO: 363465 - RNA, 32 nt, Homo Sapiens
guacccugaaguguuuuuuuuauugcccuaag

SEQ ID NO: 363466 - RNA, 32 nt, Homo Sapiens
uuuguuuucuaaaaaugcauuuugagauaguu

SEQ ID NO: 363467 - RNA, 32 nt, Homo Sapiens
agcggcugcggcggguccauggagaagggccc

SEQ ID NO: 363468 - RNA, 32 nt, Homo Sapiens
uguauaugucauuuauuuuguuuaaguggcuu

SEQ ID NO: 363469 - RNA, 32 nt, Homo Sapiens
ggcgggcgggcgggcgggagggagggagugga

SEQ ID NO: 363470 - RNA, 32 nt, Homo Sapiens
aaaggcaaugaaagugcucaagaaacaaaaga

SEQ ID NO: 363471 - RNA, 32 nt, Homo Sapiens
uacuuuuggccauuaugaauacugcagcuaug

SEQ ID NO: 363472 - RNA, 32 nt, Homo Sapiens
uuccacucugaucacaaaauaaacuccugggu

SEQ ID NO: 363473 - RNA, 32 nt, Homo Sapiens
cccagucgccuggcgcccgcggugcguuucag

SEQ ID NO: 363474 - RNA, 32 nt, Homo Sapiens
gggguggccccggcaggccuggcuccucacau

SEQ ID NO: 363475 - RNA, 32 nt, Homo Sapiens
cugauuuuguauguaaauaccaagagcaauuu

SEQ ID NO: 363476 - RNA, 32 nt, Homo Sapiens
aagugccggaccagcccugaugccuuugugca

SEQ ID NO: 363477 - RNA, 32 nt, Homo Sapiens
auaaaacauuuaucaauuuuuaaaagagguuu

SEQ ID NO: 363478 - RNA, 32 nt, Homo Sapiens
caguuaaaucauauaauguuuguaugauuaaa

SEQ ID NO: 363479 - RNA, 32 nt, Homo Sapiens
uuaaauaaaaauuuuguuaaagaaaaaaaaaa

SEQ ID NO: 363480 - RNA, 32 nt, Homo Sapiens
aauguuucuucuauccucucccacuccacguc

SEQ ID NO: 363481 - RNA, 32 nt, Homo Sapiens
auguuagagaaaaacuuuaugaggaugaaaug

SEQ ID NO: 363482 - RNA, 32 nt, Homo Sapiens
augauugauuugcacagcucaucuggccagaa

SEQ ID NO: 363483 - RNA, 32 nt, Homo Sapiens
agugacaaagcauaaaucauggacaccagaga

SEQ ID NO: 363484 - RNA, 32 nt, Homo Sapiens
auuuuuaaaaauuuagcuucuagauuccauuu

SEQ ID NO: 363485 - RNA, 32 nt, Homo Sapiens
ugucuuuuacuucuucuuucugugacccuccu

SEQ ID NO: 363486 - RNA, 32 nt, Homo Sapiens
guaccagaaacauuuucuuuuauuguuacuug

SEQ ID NO: 363487 - RNA, 32 nt, Homo Sapiens
uucgauguuucaugcucauguacuucaaauaa

SEQ ID NO: 363488 - RNA, 32 nt, Homo Sapiens
ggaacaaaugcuuuuccaacccaugagugcua

SEQ ID NO: 363489 - RNA, 32 nt, Homo Sapiens
ucuucucauucuucaggaaaauuuaguuggga

SEQ ID NO: 363490 - RNA, 32 nt, Homo Sapiens
agaguccagcucaaaaacaacaacaagaacaa

SEQ ID NO: 363491 - RNA, 32 nt, Homo Sapiens
ucuaaucacaguguugcauaugagccugcccu

SEQ ID NO: 363492 - RNA, 32 nt, Homo Sapiens
aauguccguuuucucucccuucccaccuccug

SEQ ID NO: 363493 - RNA, 32 nt, Homo Sapiens
caaaauuccaguuaauaaaauuuucauuuaaa

SEQ ID NO: 363494 - RNA, 32 nt, Homo Sapiens
ugguuaucaaaauaaaugauuaauaaggacau

SEQ ID NO: 363495 - RNA, 32 nt, Homo Sapiens
cuuacucaugucuccuuccacaguuuacuucc

SEQ ID NO: 363496 - RNA, 32 nt, Homo Sapiens
ugcuuguaaucccagcacuuugggaggcggag

SEQ ID NO: 363497 - RNA, 32 nt, Homo Sapiens
aaaaggggaaaagagauuacagacacagaaaa

SEQ ID NO: 363498 - RNA, 32 nt, Homo Sapiens
cugagcccaggaguuugagaccagucuaagca

SEQ ID NO: 363499 - RNA, 32 nt, Homo Sapiens
ucaauaauauuuuaaauacaguuuuucuuccu

SEQ ID NO: 363500 - RNA, 32 nt, Homo Sapiens
uccgcgcccagcgcgcccagcgacgugcgggc

SEQ ID NO: 363501 - RNA, 32 nt, Homo Sapiens
augcuacaaaaauugaacuaauuuauacuuua

SEQ ID NO: 363502 - RNA, 32 nt, Homo Sapiens
aaaaaguuuuaaaagcuucuaaaugucuaaua

SEQ ID NO: 363503 - RNA, 32 nt, Homo Sapiens
uaaggacaaaaaugaacugaaguuucacauga

SEQ ID NO: 363504 - RNA, 32 nt, Homo Sapiens
ggucuaggccgcugagcagagcccucacuccc

SEQ ID NO: 363505 - RNA, 32 nt, Homo Sapiens
cccaagacaccagggcauuugcugacaucuga

SEQ ID NO: 363506 - RNA, 32 nt, Homo Sapiens
uggccacaguugcagccaacgguucuugaaag

SEQ ID NO: 363507 - RNA, 32 nt, Homo Sapiens
aguuaauuguagauuuaaauugugugaaccua

SEQ ID NO: 363508 - RNA, 29 nt, Homo Sapiens
aucaucaugaagauucagagaauuuacac

SEQ ID NO: 363509 - RNA, 32 nt, Homo Sapiens
uggggguuugugccagaagagagguaaaacua

SEQ ID NO: 363510 - RNA, 32 nt, Homo Sapiens
uuuauacuuuugugaaauuuaauuucucucua

SEQ ID NO: 363511 - RNA, 32 nt, Homo Sapiens
uuuuuaaugagauaaucuuuuugauuuucuaa

SEQ ID NO: 363512 - RNA, 32 nt, Homo Sapiens
uccggccggccgcaaaguuucccgggcggcag

SEQ ID NO: 363513 - RNA, 32 nt, Homo Sapiens
uggugcuagagcuacaagaauaagguaaacag

SEQ ID NO: 363514 - RNA, 32 nt, Homo Sapiens
cugaucaggaaguuugagugcuaugcaaauaa

SEQ ID NO: 363515 - RNA, 32 nt, Homo Sapiens
gugugcggucccucccccucacguucucucuu

SEQ ID NO: 363516 - RNA, 32 nt, Homo Sapiens
ggacuuugauuagaaaaaguaaucaauaaaca

SEQ ID NO: 363517 - RNA, 32 nt, Homo Sapiens
accaaguagucuuuuguucagcuuuuacugga

SEQ ID NO: 363518 - RNA, 32 nt, Homo Sapiens
ccuagcccacaagaaugcaaacaucaaacaga

SEQ ID NO: 363519 - RNA, 30 nt, Homo Sapiens
ccuacugucuguguggucacagcuaguuuc

SEQ ID NO: 363520 - RNA, 32 nt, Homo Sapiens
uugaagacccucaagaguaaauguggcagagu

SEQ ID NO: 363521 - RNA, 32 nt, Homo Sapiens
ugucguggcuugcggcagggguggggcagggg

SEQ ID NO: 363522 - RNA, 28 nt, Homo Sapiens
acugcauuaaagagacauuugaaaagua

SEQ ID NO: 363523 - RNA, 32 nt, Homo Sapiens
gaaggaaggguggagguggggggagggccggc

SEQ ID NO: 363524 - RNA, 32 nt, Homo Sapiens
aauuuuaauuugcauuucucugauggcuaccg

SEQ ID NO: 363525 - RNA, 32 nt, Homo Sapiens
uguaaauucucauuugcugauuacaauaucuu

SEQ ID NO: 363526 - RNA, 32 nt, Homo Sapiens
ggauuaguaagaucucuuucuaaagacaggag

SEQ ID NO: 363527 - RNA, 32 nt, Homo Sapiens
uuacccgcgggaagggggcggggcuucccucc

SEQ ID NO: 363528 - RNA, 32 nt, Homo Sapiens
uugaugaaggauuguagauuuuugcuuuuucu

SEQ ID NO: 363529 - RNA, 32 nt, Homo Sapiens
uuuuccgggaacaaaaugaugucaugucagcu

SEQ ID NO: 363530 - RNA, 32 nt, Homo Sapiens
uaauuuaacaaguagauucuucuccaaagaau

SEQ ID NO: 363531 - RNA, 31 nt, Homo Sapiens
cuaugcuggagcucugcaggagucugcaggu

SEQ ID NO: 363532 - RNA, 32 nt, Homo Sapiens
uuuuuagccaugaacaaaguggcaaaguugug

SEQ ID NO: 363533 - RNA, 32 nt, Homo Sapiens
uccagcguuauguacuuugcgccuugugacgu

SEQ ID NO: 363534 - RNA, 32 nt, Homo Sapiens
cagguggcccacaugggaccagcaugggggca

SEQ ID NO: 363535 - RNA, 32 nt, Homo Sapiens
agaaguugaaguucuggguaucaaagcuaguu

SEQ ID NO: 363536 - RNA, 32 nt, Homo Sapiens
gcagaacacaucacacagaugccaggagagcu

SEQ ID NO: 363537 - RNA, 32 nt, Homo Sapiens
aguggacauguuuccuuggaaaacagugcagg

SEQ ID NO: 363538 - RNA, 32 nt, Homo Sapiens
ccgacgcaauuuauaaaaauuauguacucaag

SEQ ID NO: 363539 - RNA, 32 nt, Homo Sapiens
ggggagggcuuuuuccauuguuuaauguuuug

SEQ ID NO: 363540 - RNA, 32 nt, Homo Sapiens
acgcacaccugccugacucuuuccucacaggg

SEQ ID NO: 363541 - RNA, 32 nt, Homo Sapiens
uucucaguuuuuucagauauugccauacugaa

SEQ ID NO: 363542 - RNA, 32 nt, Homo Sapiens
aggugcuucuauuuugcuggacccucgcucug

SEQ ID NO: 363543 - RNA, 32 nt, Homo Sapiens
uuucuagagccugcuggaucucccagggcuac

SEQ ID NO: 363544 - RNA, 32 nt, Homo Sapiens
ugaacgcaugcgugcuguggucgccuaguaaa

SEQ ID NO: 363545 - RNA, 32 nt, Homo Sapiens
ggagucucgcucugucacccaggcuguagugg

SEQ ID NO: 363546 - RNA, 32 nt, Homo Sapiens
uauaucuuagaaaagcacuuuguuaaaaaaaa

SEQ ID NO: 363547 - RNA, 32 nt, Homo Sapiens
aggucucccuucccuuucaagguugucuuggg

SEQ ID NO: 363548 - RNA, 32 nt, Homo Sapiens
gcgaggaaauggcggcgggggcggcggcgccg

SEQ ID NO: 363549 - RNA, 32 nt, Homo Sapiens
auuuaaaauaaucaagucauucuuuuugaauc

SEQ ID NO: 363550 - RNA, 32 nt, Homo Sapiens
ggaaccagagggugggagcaggcggaauccaa

SEQ ID NO: 363551 - RNA, 32 nt, Homo Sapiens
aucggagugucagggcccgaggucaaggugcc

SEQ ID NO: 363552 - RNA, 32 nt, Homo Sapiens
gcagaagggaaugcauauguauaauaucuaug

SEQ ID NO: 363553 - RNA, 32 nt, Homo Sapiens
ugauuuugauaaaaacagaagauugaucauuu

SEQ ID NO: 363554 - RNA, 32 nt, Homo Sapiens
gaacugauccguucauuauauauuaugggaaa

SEQ ID NO: 363555 - RNA, 32 nt, Homo Sapiens
gauccccauaagucagcgaugaggggggccga

SEQ ID NO: 363556 - RNA, 32 nt, Homo Sapiens
cggugaaggugguggcucuggugguucucucc

SEQ ID NO: 363557 - RNA, 32 nt, Homo Sapiens
aaggcauguacaaagcugaguaacugcaucug

SEQ ID NO: 363558 - RNA, 32 nt, Homo Sapiens
uucaucuucuuaaauuauucucuagcagcucu

SEQ ID NO: 363559 - RNA, 32 nt, Homo Sapiens
gcagcggcagccguccgucacuccagagucuu

SEQ ID NO: 363560 - RNA, 32 nt, Homo Sapiens
ccgccgcuugcccgugacacgcagcgcguugg

SEQ ID NO: 363561 - RNA, 32 nt, Homo Sapiens
ggggaggcucugccccacuccucugagucccu

SEQ ID NO: 363562 - RNA, 32 nt, Homo Sapiens
aggaacgcgcucugcggggugagccggacucc

SEQ ID NO: 363563 - RNA, 32 nt, Homo Sapiens
gggcgugcucucucagacacacaacucagcua

SEQ ID NO: 363564 - RNA, 32 nt, Homo Sapiens
uuauuugaaguugucagggaaugccauuacac

SEQ ID NO: 363565 - RNA, 32 nt, Homo Sapiens
ggccuggcgcgguggcucaggccuguaauccc

SEQ ID NO: 363566 - RNA, 32 nt, Homo Sapiens
augcugccccugccuuggggucagguugacag

SEQ ID NO: 363567 - RNA, 32 nt, Homo Sapiens
aagaacuccaggaaacaugaauucuggaaucu

SEQ ID NO: 363568 - RNA, 32 nt, Homo Sapiens
uuauguucuugacuaguaugauguuaucugga

SEQ ID NO: 363569 - RNA, 32 nt, Homo Sapiens
accuaucuacugaguuuccugcccuuucucua

SEQ ID NO: 363570 - RNA, 32 nt, Homo Sapiens
cacacacacaugcauaugcacacacacacaua

SEQ ID NO: 363571 - RNA, 32 nt, Homo Sapiens
aucuagaaauguucacaagguaccccaaaacu

SEQ ID NO: 363572 - RNA, 32 nt, Homo Sapiens
ucccucacaaaacaagccuggcgagggcagcu

SEQ ID NO: 363573 - RNA, 32 nt, Homo Sapiens
cuggcgagggcaggggagagggggcauucugg

SEQ ID NO: 363574 - RNA, 32 nt, Homo Sapiens
ugcccugccuccagcaggaaaucuucaguccu

SEQ ID NO: 363575 - RNA, 32 nt, Homo Sapiens
uuccaaaggcguauguauuaaguaaaagucug

SEQ ID NO: 363576 - RNA, 32 nt, Homo Sapiens
guaggaggaaaacaaugacuaauuucuuccuu

SEQ ID NO: 363577 - RNA, 32 nt, Homo Sapiens
cagagugagagaguagaagagaagggagcaac

SEQ ID NO: 363578 - RNA, 32 nt, Homo Sapiens
guuuuuuuuucuucuuuuuagcugaucucauc

SEQ ID NO: 363579 - RNA, 32 nt, Homo Sapiens
gcuugugugcuggagguuguggucuacguggc

SEQ ID NO: 363580 - RNA, 32 nt, Homo Sapiens
aagugggucaagcccugggaacccucauccau

SEQ ID NO: 363581 - RNA, 32 nt, Homo Sapiens
gguugggagucugagaagucaccaccaugaag

SEQ ID NO: 363582 - RNA, 32 nt, Homo Sapiens
acaaacaaacaaacauagaaccaucguuagcu

SEQ ID NO: 363583 - RNA, 32 nt, Homo Sapiens
ggccccgggagggcccggggcgcguuuaagag

SEQ ID NO: 363584 - RNA, 32 nt, Homo Sapiens
cucagguucauuucuuuuuuuuuuuuuuuucu

SEQ ID NO: 363585 - RNA, 32 nt, Homo Sapiens
cucacacuggcguagaaguuuuuguacuguaa

SEQ ID NO: 363586 - RNA, 32 nt, Homo Sapiens
uuucuagaauaaaucuaaaacaauuaagagau

SEQ ID NO: 363587 - RNA, 32 nt, Homo Sapiens
uaguagagacuguuuuuguaguuuuacuuuca

SEQ ID NO: 363588 - RNA, 32 nt, Homo Sapiens
cuauggcggcgguguugagguuggguacggga

SEQ ID NO: 363589 - RNA, 31 nt, Homo Sapiens
gcagcaggagggagauuuaauccaguuccau

SEQ ID NO: 363590 - RNA, 32 nt, Homo Sapiens
uauuuaggaaaggggcugggugcaguggcuca

SEQ ID NO: 363591 - RNA, 32 nt, Homo Sapiens
gcaguucaucuucuugguguacugguuuccua

SEQ ID NO: 363592 - RNA, 32 nt, Homo Sapiens
aaggccaaaauauauauccagaagcacaaugc

SEQ ID NO: 363593 - RNA, 32 nt, Homo Sapiens
gauaguggaaaacuguucuuauaucuucagau

SEQ ID NO: 363594 - RNA, 32 nt, Homo Sapiens
auauuuaacuauaggcuucuuccuucuuguca

SEQ ID NO: 363595 - RNA, 32 nt, Homo Sapiens
uguuggccaggcuggucuagaacucgagacuu

SEQ ID NO: 363596 - RNA, 32 nt, Homo Sapiens
gugccagacucugaucugaggaccccgucggg

SEQ ID NO: 363597 - RNA, 32 nt, Homo Sapiens
ucaucuucccaauguugcuguaucuaagaggc

SEQ ID NO: 363598 - RNA, 32 nt, Homo Sapiens
uguggcaucauguggcagcugcuccucccaac

SEQ ID NO: 363599 - RNA, 32 nt, Homo Sapiens
uuguuccauccauggcgugcaugugccaagaa

SEQ ID NO: 363600 - RNA, 32 nt, Homo Sapiens
gugaagccagaaucucagggccaggcaucccc

SEQ ID NO: 363601 - RNA, 32 nt, Homo Sapiens
agccgaaaaaucaagggugcguuaaucccguc

SEQ ID NO: 363602 - RNA, 32 nt, Homo Sapiens
gcugaagaaaccucaggagccaaacuggugga

SEQ ID NO: 363603 - RNA, 32 nt, Homo Sapiens
ccgccaacuuccaccccggcaagccccucugu

SEQ ID NO: 363604 - RNA, 32 nt, Homo Sapiens
gcugacgauggggggcugauggcugccccugc

SEQ ID NO: 363605 - RNA, 32 nt, Homo Sapiens
auggaugccgacggcgccacguaccucccauc

SEQ ID NO: 363606 - RNA, 32 nt, Homo Sapiens
uaaaucagauuggaagacauggacaaaucagg

SEQ ID NO: 363607 - RNA, 32 nt, Homo Sapiens
ucucccucugcuucuuuucucuucugcccucc

SEQ ID NO: 363608 - RNA, 32 nt, Homo Sapiens
gaaggacaaaaauauauauguaugugacccua

SEQ ID NO: 363609 - RNA, 32 nt, Homo Sapiens
gucucaugagcuccaacacauucuucagugca

SEQ ID NO: 363610 - RNA, 29 nt, Homo Sapiens
acaguuagguguuuauauuauuuaguuau

SEQ ID NO: 363611 - RNA, 32 nt, Homo Sapiens
aucaagaacccuuaagaacauaaaaugaaugg

SEQ ID NO: 363612 - RNA, 30 nt, Homo Sapiens
cgaagaggcaggccguccuguagguccuag

SEQ ID NO: 363613 - RNA, 32 nt, Homo Sapiens
augugaaauauguauacuuuggggggaucuau

SEQ ID NO: 363614 - RNA, 30 nt, Homo Sapiens
uaccaaacucuugcugcagaguuucgagcg

SEQ ID NO: 363615 - RNA, 32 nt, Homo Sapiens
gugugguaaaaagccagaguaguuuuauacag

SEQ ID NO: 363616 - RNA, 32 nt, Homo Sapiens
auucacuuucaagauuuguuuuggugucaaaa

SEQ ID NO: 363617 - RNA, 32 nt, Homo Sapiens
cucaguccaaggaucccaaaacacaaaucuag

SEQ ID NO: 363618 - RNA, 32 nt, Homo Sapiens
uauaacagcugaugaagaaauacugauaauuu

SEQ ID NO: 363619 - RNA, 32 nt, Homo Sapiens
ucgcccugccgucggggcgcggcugcucaccc

SEQ ID NO: 363620 - RNA, 32 nt, Homo Sapiens
cauucaugaaaauaaaaauugcuggagcuccc

SEQ ID NO: 363621 - RNA, 32 nt, Homo Sapiens
agauggcugauguggcauuuaagggaagagag

SEQ ID NO: 363622 - RNA, 32 nt, Homo Sapiens
cuccaggcccaccuuggugggugcccgggguc

SEQ ID NO: 363623 - RNA, 29 nt, Homo Sapiens
uaauauugugauuucagagaaaaagcagg

SEQ ID NO: 363624 - RNA, 32 nt, Homo Sapiens
guaacauauauccuguaguaacauagacccaa

SEQ ID NO: 363625 - RNA, 32 nt, Homo Sapiens
acaggcuugcccaugucccgggccccauugcu

SEQ ID NO: 363626 - RNA, 32 nt, Homo Sapiens
aauguuuuucuuuuccccuuauaaauuguaau

SEQ ID NO: 363627 - RNA, 32 nt, Homo Sapiens
augucagugggucuuugagcccgggguccaau

SEQ ID NO: 363628 - RNA, 32 nt, Homo Sapiens
ggccgcuagaaaguacagaaggaacuuuggau

SEQ ID NO: 363629 - RNA, 32 nt, Homo Sapiens
augguaauagugguucuuucuggauugaagga

SEQ ID NO: 363630 - RNA, 32 nt, Homo Sapiens
gggagaugguggcaaauggagacugcgcccug

SEQ ID NO: 363631 - RNA, 32 nt, Homo Sapiens
acacuuucucuauagacuuagagcagcuuuca

SEQ ID NO: 363632 - RNA, 32 nt, Homo Sapiens
auuaucaauggcaaaugcaggcuccuccugug

SEQ ID NO: 363633 - RNA, 32 nt, Homo Sapiens
uuucuguucauuuuauugcaguauuaaaugcu

SEQ ID NO: 363634 - RNA, 32 nt, Homo Sapiens
ggcggucucuacaaaccuaccauuucacuuuc

SEQ ID NO: 363635 - RNA, 32 nt, Homo Sapiens
gugauaagggacugaggaauaaauugugcucu

SEQ ID NO: 363636 - RNA, 32 nt, Homo Sapiens
gccuucaccucuccgcggguagccucagcccc

SEQ ID NO: 363637 - RNA, 30 nt, Homo Sapiens
gccgcguggggcgcgugggcacggagcuuc

SEQ ID NO: 363638 - RNA, 32 nt, Homo Sapiens
ccaguaggacaaacgggcucgggucugggcag

SEQ ID NO: 363639 - RNA, 32 nt, Homo Sapiens
aguuuuaauuuagauagcaaaaauaaagauuu

SEQ ID NO: 363640 - RNA, 32 nt, Homo Sapiens
agcgggcgcggcggccccgcgcagccauggac

SEQ ID NO: 363641 - RNA, 31 nt, Homo Sapiens
gcgcgcucccuggaaaauuccacuccugugc

SEQ ID NO: 363642 - RNA, 31 nt, Homo Sapiens
caugagugaccucccauucacaauugcuuca

SEQ ID NO: 363643 - RNA, 32 nt, Homo Sapiens
cuccagccaucccacaccagcuccuaggcacu

SEQ ID NO: 363644 - RNA, 32 nt, Homo Sapiens
auuuuauaagggguuuccccuuuugcuuagcu

SEQ ID NO: 363645 - RNA, 32 nt, Homo Sapiens
uuugcacuggugauuccaacugcacaaaucuu

SEQ ID NO: 363646 - RNA, 32 nt, Homo Sapiens
guuauuaugcaaacaaguaauguuugaaauau

SEQ ID NO: 363647 - RNA, 32 nt, Homo Sapiens
cuaggacccgcgggggccucccaggccgcggc

SEQ ID NO: 363648 - RNA, 32 nt, Homo Sapiens
ccauccucaucccaccuuccuaugacugcgcc

SEQ ID NO: 363649 - RNA, 32 nt, Homo Sapiens
ucgaagagccuggccagagagggaagacacag

SEQ ID NO: 363650 - RNA, 32 nt, Homo Sapiens
auuuuaaaaccacagaauaaaaaugacaccug

SEQ ID NO: 363651 - RNA, 32 nt, Homo Sapiens
auguggcaguugcugucugcaguuuacaaugu

SEQ ID NO: 363652 - RNA, 32 nt, Homo Sapiens
uugaaaaauggcauucacucuuacagauggug

SEQ ID NO: 363653 - RNA, 32 nt, Homo Sapiens
uaagugaugccccuuccaaaccaucauccugu

SEQ ID NO: 363654 - RNA, 32 nt, Homo Sapiens
uucaccagucuuucccagggaacuccgaugaa

SEQ ID NO: 363655 - RNA, 32 nt, Homo Sapiens
agccuuucugcagucugucucaucuguuggga

SEQ ID NO: 363656 - RNA, 32 nt, Homo Sapiens
guucacuuuuacacgguagccuugaagugaag

SEQ ID NO: 363657 - RNA, 32 nt, Homo Sapiens
ccggagcccuggaggggagagcgcggacucua

SEQ ID NO: 363658 - RNA, 32 nt, Homo Sapiens
uggaggccaaaauggcggcucaggcggcggca

SEQ ID NO: 363659 - RNA, 32 nt, Homo Sapiens
gcccaccccucccacaccgucagccucccucc

SEQ ID NO: 363660 - RNA, 32 nt, Homo Sapiens
ucauuagaaaucaaagaauucacacaggggag

SEQ ID NO: 363661 - RNA, 32 nt, Homo Sapiens
uuguuuuguuuuauuaauuagucuuucacagg

SEQ ID NO: 363662 - RNA, 32 nt, Homo Sapiens
cucaauaaagauuugcagaauuuaauacagau

SEQ ID NO: 363663 - RNA, 32 nt, Homo Sapiens
gcacauggagagcggcgugccugcugcgggcc

SEQ ID NO: 363664 - RNA, 32 nt, Homo Sapiens
aacagaaacuaaaugaacauuucagaauaaau

SEQ ID NO: 363665 - RNA, 27 nt, Homo Sapiens
cuuaaauaaaaauuauguccaaaagcc

SEQ ID NO: 363666 - RNA, 32 nt, Homo Sapiens
agaaagcaauuauuuacaaauuugcauaguug

SEQ ID NO: 363667 - RNA, 32 nt, Homo Sapiens
agugugaugacuuuuuuuuaaaugagguucag

SEQ ID NO: 363668 - RNA, 32 nt, Homo Sapiens
cacaguucacgauaggguuuguccucugauga

SEQ ID NO: 363669 - RNA, 32 nt, Homo Sapiens
gcagaagaccugggcuuuugucgaaguucugc

SEQ ID NO: 363670 - RNA, 32 nt, Homo Sapiens
ggaaauguucuuccacauaaggcaccaguaaa

SEQ ID NO: 363671 - RNA, 32 nt, Homo Sapiens
uugugucguuuuugucacucagcauuguauaa

SEQ ID NO: 363672 - RNA, 31 nt, Homo Sapiens
cugugccccgaccccaccugaggcaggaggg

SEQ ID NO: 363673 - RNA, 32 nt, Homo Sapiens
ggcgauggggagcggcugggcggggagagccg

SEQ ID NO: 363674 - RNA, 32 nt, Homo Sapiens
gacggucgggcuuccccggcccgcugagggcu

SEQ ID NO: 363675 - RNA, 32 nt, Homo Sapiens
cauuuuaaaaauuuuuugguaaggccuaguuc

SEQ ID NO: 363676 - RNA, 32 nt, Homo Sapiens
agcuuauuuuuccauuugauauucauugauau

SEQ ID NO: 363677 - RNA, 32 nt, Homo Sapiens
cacugcacuccagccuggaggccagagugaga

SEQ ID NO: 363678 - RNA, 32 nt, Homo Sapiens
auaaaaacauacuagaugauaauuucaaaaaa

SEQ ID NO: 363679 - RNA, 32 nt, Homo Sapiens
acacugagauaauuuugaaaagaaauagaaau

SEQ ID NO: 363680 - RNA, 32 nt, Homo Sapiens
gcccugggcacccaccuccacccccgccacgg

SEQ ID NO: 363681 - RNA, 32 nt, Homo Sapiens
cuuagccacgucuggccuguguccuugggcag

SEQ ID NO: 363682 - RNA, 32 nt, Homo Sapiens
uaaaauuuucuuuuuucauauccuaaguagcu

SEQ ID NO: 363683 - RNA, 32 nt, Homo Sapiens
caauggcaucauuuauuuuaaaacagaagaau

SEQ ID NO: 363684 - RNA, 32 nt, Homo Sapiens
aggcccccuaaaaaucagggccucagcaagca

SEQ ID NO: 363685 - RNA, 32 nt, Homo Sapiens
uggagagaaacgcagauuuaggacccugagga

SEQ ID NO: 363686 - RNA, 32 nt, Homo Sapiens
cauccgguccgagggcgcacacaggcagaagg

SEQ ID NO: 363687 - RNA, 32 nt, Homo Sapiens
acccagggguccuggggucccugggauguugg

SEQ ID NO: 363688 - RNA, 32 nt, Homo Sapiens
aaacugucuaugcacaaaauucccgugggccu

SEQ ID NO: 363689 - RNA, 32 nt, Homo Sapiens
gacugcauuuaaaagaaguuaaagaguuccuc

SEQ ID NO: 363690 - RNA, 32 nt, Homo Sapiens
agcuuccgccgggagaccgcggcugcaggaac

SEQ ID NO: 363691 - RNA, 32 nt, Homo Sapiens
uuuuuagauaaggaaauaaaacauuuccaaua

SEQ ID NO: 363692 - RNA, 32 nt, Homo Sapiens
agaguggagaugggggcgggggugguggugaa

SEQ ID NO: 363693 - RNA, 32 nt, Homo Sapiens
cuuuuuuaugagucaguguuucugaauguuua

SEQ ID NO: 363694 - RNA, 32 nt, Homo Sapiens
auacaaaggcuuuauucaugugugauaguaaa

SEQ ID NO: 363695 - RNA, 29 nt, Homo Sapiens
auguuggcuuaguuuaauuuucuaaagag

SEQ ID NO: 363696 - RNA, 32 nt, Homo Sapiens
cccauggacacacacacccagcccugcugucc

SEQ ID NO: 363697 - RNA, 31 nt, Homo Sapiens
ggcgccgaggucugccugcagcgccugaggu

SEQ ID NO: 363698 - RNA, 32 nt, Homo Sapiens
guagcacauaucuaucguaauauauguaauau

SEQ ID NO: 363699 - RNA, 32 nt, Homo Sapiens
aagcaauauuuuccucuggcugaaaccaacca

SEQ ID NO: 363700 - RNA, 32 nt, Homo Sapiens
cagcugccggggcgacgcggcgcggagagggc

SEQ ID NO: 363701 - RNA, 32 nt, Homo Sapiens
accagugaggcacauguugccuuuuugucuuu

SEQ ID NO: 363702 - RNA, 32 nt, Homo Sapiens
caaagaggaggggacaccugccagcuugguca

SEQ ID NO: 363703 - RNA, 32 nt, Homo Sapiens
ugucauuuauauuuuccaaccuggcaugggug

SEQ ID NO: 363704 - RNA, 30 nt, Homo Sapiens
uuaucucuggugcugcagcucuguaagaag

SEQ ID NO: 363705 - RNA, 32 nt, Homo Sapiens
cggcggcuagcgggcguccgcgccauggagcg

SEQ ID NO: 363706 - RNA, 32 nt, Homo Sapiens
ggagccucaagggagccagcccugcccacgcc

SEQ ID NO: 363707 - RNA, 32 nt, Homo Sapiens
uaggcugagaagugucucuggagcaccuggga

SEQ ID NO: 363708 - RNA, 32 nt, Homo Sapiens
guaacucuucuccagauguccuccucagacuc

SEQ ID NO: 363709 - RNA, 32 nt, Homo Sapiens
agaaugaaaaauuugcaguagauagucaauaa

SEQ ID NO: 363710 - RNA, 32 nt, Homo Sapiens
guaccuuaaaauugaggauguuacucaguguu

SEQ ID NO: 363711 - RNA, 32 nt, Homo Sapiens
accaacuaggaucgaaaaaacacacaggagca

SEQ ID NO: 363712 - RNA, 29 nt, Homo Sapiens
gcauauauauguauuuuuaaauaguauug

SEQ ID NO: 363713 - RNA, 32 nt, Homo Sapiens
gggucugcgcggggcgggggcgcagcaagugc

SEQ ID NO: 363714 - RNA, 32 nt, Homo Sapiens
uucuccagccucagccucccaaguagccggga

SEQ ID NO: 363715 - RNA, 32 nt, Homo Sapiens
aacaaaccaagccgcggcgguguccgcggccc

SEQ ID NO: 363716 - RNA, 32 nt, Homo Sapiens
ccaguuugcauucugcagguuuuccauuuuag

SEQ ID NO: 363717 - RNA, 32 nt, Homo Sapiens
cugcucaccccucccucacuccaugggcaauu

SEQ ID NO: 363718 - RNA, 32 nt, Homo Sapiens
gcccccucugucaucacuccuuggcacccacc

SEQ ID NO: 363719 - RNA, 32 nt, Homo Sapiens
uggugggccaaggggcugucugcuagguccca

SEQ ID NO: 363720 - RNA, 32 nt, Homo Sapiens
cccucuggcuccuggcgugcccucgcucccuu

SEQ ID NO: 363721 - RNA, 32 nt, Homo Sapiens
gaaaacuaaaagacaaaaugaggcagauaaaa

SEQ ID NO: 363722 - RNA, 32 nt, Homo Sapiens
cuuacacgaaaauuauuuauugagaauauuca

SEQ ID NO: 363723 - RNA, 31 nt, Homo Sapiens
aacuucaaaauaaaauacauuuuuagguuuc

SEQ ID NO: 363724 - RNA, 32 nt, Homo Sapiens
aaagaaauguuauguagauguucuuuagaaga

SEQ ID NO: 363725 - RNA, 32 nt, Homo Sapiens
aguggaccugugguaagaagaauagaaaaggc

SEQ ID NO: 363726 - RNA, 32 nt, Homo Sapiens
ggugggaggugauuggaucaugggggcagaca

SEQ ID NO: 363727 - RNA, 32 nt, Homo Sapiens
uauuucacauugauaagguccuguuucauuuc

SEQ ID NO: 363728 - RNA, 32 nt, Homo Sapiens
ggucucgaaacaaggagggcagaauaggcaga

SEQ ID NO: 363729 - RNA, 32 nt, Homo Sapiens
uccgccuuucccuuuagccagucugcuguccu

SEQ ID NO: 363730 - RNA, 32 nt, Homo Sapiens
ggaaacuuuuucugcccauucugugguuccca

SEQ ID NO: 363731 - RNA, 32 nt, Homo Sapiens
aaauugaaaaggauauuuuacaaccaaauaca

SEQ ID NO: 363732 - RNA, 32 nt, Homo Sapiens
acuacaggagacgacggggccuuuucccuucg

SEQ ID NO: 363733 - RNA, 32 nt, Homo Sapiens
aauccugugaguuuucuauuaugaagguuaau

SEQ ID NO: 363734 - RNA, 32 nt, Homo Sapiens
agucacucucuguggucggcgaucccauugag

SEQ ID NO: 363735 - RNA, 32 nt, Homo Sapiens
uuuuaaagucauuguuucuugcucaugguggc

SEQ ID NO: 363736 - RNA, 32 nt, Homo Sapiens
uguuuuuaauuaucuaaaguaugaagcauuuu

SEQ ID NO: 363737 - RNA, 32 nt, Homo Sapiens
gcucaacagcauaugggugggauuuggcaaaa

SEQ ID NO: 363738 - RNA, 32 nt, Homo Sapiens
uuaaguaugaauucuagauacagcuacuuaug

SEQ ID NO: 363739 - RNA, 32 nt, Homo Sapiens
uccgcaugcacggcugccucuccagccaccuc

SEQ ID NO: 363740 - RNA, 32 nt, Homo Sapiens
aucaaggguauuuuaagugaugucauuugagc

SEQ ID NO: 363741 - RNA, 32 nt, Homo Sapiens
auccacaaaucaagauacaugugugugaaacc

SEQ ID NO: 363742 - RNA, 32 nt, Homo Sapiens
ccuuccuguugcucccuccauccacagaauaa

SEQ ID NO: 363743 - RNA, 32 nt, Homo Sapiens
gguggcaugacugucaggaggugcuggcauuu

SEQ ID NO: 363744 - RNA, 32 nt, Homo Sapiens
ugcagugccauccaccguggcuccgcugcccc

SEQ ID NO: 363745 - RNA, 32 nt, Homo Sapiens
guguugguuccuuuuucuuauugguugaaaau

SEQ ID NO: 363746 - RNA, 32 nt, Homo Sapiens
agccugcaacauuuaugucgcaugucaauccg

SEQ ID NO: 363747 - RNA, 32 nt, Homo Sapiens
gcuccucccccuccccagaaggccaagggaug

SEQ ID NO: 363748 - RNA, 32 nt, Homo Sapiens
guggaagaucuuguagggaaaagccaacgguu

SEQ ID NO: 363749 - RNA, 32 nt, Homo Sapiens
uucuaaggcuggggcugcuugcccugcuccuc

SEQ ID NO: 363750 - RNA, 30 nt, Homo Sapiens
agcucuucgcgcgcugugccggcgccgcgg

SEQ ID NO: 363751 - RNA, 32 nt, Homo Sapiens
aauuacaaaauaaaggcauauuaugaacucuu

SEQ ID NO: 363752 - RNA, 32 nt, Homo Sapiens
ugcguaagaagauuuaaauguguaugugauuu

SEQ ID NO: 363753 - RNA, 32 nt, Homo Sapiens
cagugcauugauggagcagcuggugcugcugg

SEQ ID NO: 363754 - RNA, 32 nt, Homo Sapiens
guaaaaaugaauuggguauuuuagaaaaacuu

SEQ ID NO: 363755 - RNA, 32 nt, Homo Sapiens
uguuugaugaauccucccuguuuaauguuuau

SEQ ID NO: 363756 - RNA, 29 nt, Homo Sapiens
uugaaguauguuuuauauuuaucuaaaac

SEQ ID NO: 363757 - RNA, 32 nt, Homo Sapiens
accggcuccccaagcccuccccaccaaggggu

SEQ ID NO: 363758 - RNA, 32 nt, Homo Sapiens
gugaaguuuugaaaauacuuugaaaaagagaa

SEQ ID NO: 363759 - RNA, 32 nt, Homo Sapiens
ucucagccgggcgcaguggcucacgccuguaa

SEQ ID NO: 363760 - RNA, 32 nt, Homo Sapiens
agagcuauuucccccguuuuugcuagagacca

SEQ ID NO: 363761 - RNA, 32 nt, Homo Sapiens
gcagaagucagauuguagagguccuggcggcu

SEQ ID NO: 363762 - RNA, 32 nt, Homo Sapiens
ggcaggcuuuggaguuguuuccauggugaugg

SEQ ID NO: 363763 - RNA, 32 nt, Homo Sapiens
cugaaguggagcuggcuguaggaaccccaggg

SEQ ID NO: 363764 - RNA, 32 nt, Homo Sapiens
cucacggcguccccgaggccccucaguccaga

SEQ ID NO: 363765 - RNA, 32 nt, Homo Sapiens
uauugcuaaguaaauuuguacuuguuugaaga

SEQ ID NO: 363766 - RNA, 32 nt, Homo Sapiens
ccgcgucuacugcgagucaggccgugauggcg

SEQ ID NO: 363767 - RNA, 32 nt, Homo Sapiens
agugccacguugaacagaacagugguuuagug

SEQ ID NO: 363768 - RNA, 32 nt, Homo Sapiens
agacccugacccucccucccaaggcucaaccg

SEQ ID NO: 363769 - RNA, 32 nt, Homo Sapiens
uucccugccuuggcaggcgucagcgugcuacc

SEQ ID NO: 363770 - RNA, 27 nt, Homo Sapiens
ccaggucacugcugcagcccccgcccc

SEQ ID NO: 363771 - RNA, 31 nt, Homo Sapiens
acaucuagugcugguuucagaaauuuaauga

SEQ ID NO: 363772 - RNA, 32 nt, Homo Sapiens
ucuuugccaggaugggggcgucugcagaacua

SEQ ID NO: 363773 - RNA, 32 nt, Homo Sapiens
gguggaugaugcccaccuggcugcugaugacu

SEQ ID NO: 363774 - RNA, 32 nt, Homo Sapiens
cagaacugggcccagggcaaaggccucucccc

SEQ ID NO: 363775 - RNA, 32 nt, Homo Sapiens
cgggaggagcagcuguguguccccggcaccuc

SEQ ID NO: 363776 - RNA, 32 nt, Homo Sapiens
acauuaaacaugaggcaagaaaaggaaaugag

SEQ ID NO: 363777 - RNA, 32 nt, Homo Sapiens
cagggacggccuuucucuuagagcagcugaua

SEQ ID NO: 363778 - RNA, 32 nt, Homo Sapiens
cuaugacucgaucuucaauuuauuuuuuacau

SEQ ID NO: 363779 - RNA, 32 nt, Homo Sapiens
agaaguuaaauauuuggugagauuuuagucug

SEQ ID NO: 363780 - RNA, 32 nt, Homo Sapiens
agugaguguugggguccuggggcaccugccuu

SEQ ID NO: 363781 - RNA, 32 nt, Homo Sapiens
ugagauuuuauccaaugaacacucuguacauc

SEQ ID NO: 363782 - RNA, 32 nt, Homo Sapiens
cgacgcggccgcgcuccgcucccgugaguaac

SEQ ID NO: 363783 - RNA, 32 nt, Homo Sapiens
uucugcagccagaggcuucucggcucugagcu

SEQ ID NO: 363784 - RNA, 30 nt, Homo Sapiens
gcccggcuccucccgccgccggcuccucag

SEQ ID NO: 363785 - RNA, 31 nt, Homo Sapiens
ccuacagaggguaaguuucagaauuguaauu

SEQ ID NO: 363786 - RNA, 32 nt, Homo Sapiens
ggacauguguccugugggucccugcagucgac

SEQ ID NO: 363787 - RNA, 32 nt, Homo Sapiens
uggccagugucugucccgggguccuguggcag

SEQ ID NO: 363788 - RNA, 32 nt, Homo Sapiens
acaucugcugugguuucucaccagagaacagu

SEQ ID NO: 363789 - RNA, 32 nt, Homo Sapiens
guaauauauuugauuaugaaagcaaaauaauu

SEQ ID NO: 363790 - RNA, 32 nt, Homo Sapiens
cggcugcgcuggggccucggcccgggaggagg

SEQ ID NO: 363791 - RNA, 32 nt, Homo Sapiens
gaccuacccagcucgcucacuucgcucgcucc

SEQ ID NO: 363792 - RNA, 32 nt, Homo Sapiens
ugcaucauuuccccucugagucucagauucuc

SEQ ID NO: 363793 - RNA, 32 nt, Homo Sapiens
ucagguuuuuaaagucauuguuucuugcucau

SEQ ID NO: 363794 - RNA, 32 nt, Homo Sapiens
ugugcuguguuagacugcaugcuugaguguuu

SEQ ID NO: 363795 - RNA, 28 nt, Homo Sapiens
aggaugcggcuguggaaggcgguggugg

SEQ ID NO: 363796 - RNA, 32 nt, Homo Sapiens
cauaaaugcauaauuuauggucuucaaccaag

SEQ ID NO: 363797 - RNA, 32 nt, Homo Sapiens
gucuggccccacuccccaaaacugaccccaau

SEQ ID NO: 363798 - RNA, 32 nt, Homo Sapiens
aaucccaggugcucuggagcuggauggugaag

SEQ ID NO: 363799 - RNA, 32 nt, Homo Sapiens
cagucaucuaaccaaagugaucuagugugaua

SEQ ID NO: 363800 - RNA, 32 nt, Homo Sapiens
cauccauccaacaaucauagaauuguucugag

SEQ ID NO: 363801 - RNA, 32 nt, Homo Sapiens
guugcucauguuccucuuuaaaacagaugaaa

SEQ ID NO: 363802 - RNA, 32 nt, Homo Sapiens
cccggcuccaggcucccacgggcaccaucauu

SEQ ID NO: 363803 - RNA, 32 nt, Homo Sapiens
cuuccucuguagaaccagcugcacggcagcug

SEQ ID NO: 363804 - RNA, 32 nt, Homo Sapiens
ugcugauccaaauauuguagauguguauggca

SEQ ID NO: 363805 - RNA, 32 nt, Homo Sapiens
gccugcuauguuacuaucaucaucuuccugac

SEQ ID NO: 363806 - RNA, 32 nt, Homo Sapiens
ugucaauuuuuucaggaccuuaguuccagcag

SEQ ID NO: 363807 - RNA, 32 nt, Homo Sapiens
ccgaggcaaccggcugcagaugggagcccgcg

SEQ ID NO: 363808 - RNA, 32 nt, Homo Sapiens
gaaggcaugcuuguggaugacucuguaacaga

SEQ ID NO: 363809 - RNA, 32 nt, Homo Sapiens
gcacuccugcuuccuugccugcuugcaguuca

SEQ ID NO: 363810 - RNA, 32 nt, Homo Sapiens
cuuguccuaguaccuuagcacaugguugcuga

SEQ ID NO: 363811 - RNA, 32 nt, Homo Sapiens
ccggaaucgacgugacuacuuacuacagcacc

SEQ ID NO: 363812 - RNA, 32 nt, Homo Sapiens
uugacccuguuucccaccucccgccccccagg

SEQ ID NO: 363813 - RNA, 32 nt, Homo Sapiens
gagccagcagagagggacugaggcggacagug

SEQ ID NO: 363814 - RNA, 32 nt, Homo Sapiens
aagguagccuacuagcuguacaugggugacaa

SEQ ID NO: 363815 - RNA, 32 nt, Homo Sapiens
ccaccuacccaggugucccucccuuuuguuuu

SEQ ID NO: 363816 - RNA, 32 nt, Homo Sapiens
ggacugaggguggggggaguagaggggccgcu

SEQ ID NO: 363817 - RNA, 32 nt, Homo Sapiens
cucaacuucagaugcauagaaagauucacacu

SEQ ID NO: 363818 - RNA, 32 nt, Homo Sapiens
gcugaugucagggcugcccacaaacuuaaaca

SEQ ID NO: 363819 - RNA, 32 nt, Homo Sapiens
uuccgucccagcgggagcugguguuagggguc

SEQ ID NO: 363820 - RNA, 32 nt, Homo Sapiens
gaaaucagagcagcacuaccccucccaccucc

SEQ ID NO: 363821 - RNA, 32 nt, Homo Sapiens
uuuccaaggacacuuaagacuugcugucccuu

SEQ ID NO: 363822 - RNA, 32 nt, Homo Sapiens
ggcuguccguacaucacccuguccccugcagg

SEQ ID NO: 363823 - RNA, 32 nt, Homo Sapiens
cuuccuggacacuguuaugguaucauugucac

SEQ ID NO: 363824 - RNA, 32 nt, Homo Sapiens
uuguauuuuaugucuuuuuuuuuuuuuuuuuu

SEQ ID NO: 363825 - RNA, 32 nt, Homo Sapiens
ugggcuucguucuuguggaaaucagucaagaa

SEQ ID NO: 363826 - RNA, 32 nt, Homo Sapiens
cuggagacguucuuggugaaagcuguggucua

SEQ ID NO: 363827 - RNA, 32 nt, Homo Sapiens
uccguuaauguuucucgcauuuauuuuuauac

SEQ ID NO: 363828 - RNA, 32 nt, Homo Sapiens
ccuguccucccucucccuaaguccuucccugc

SEQ ID NO: 363829 - RNA, 32 nt, Homo Sapiens
gacaaauucucuaaucucuuugguaucuauaa

SEQ ID NO: 363830 - RNA, 32 nt, Homo Sapiens
ugcauccugugcuccgcaggcugggccggaag

SEQ ID NO: 363831 - RNA, 32 nt, Homo Sapiens
ggcucuucagcggguggcccaggccgcagagc

SEQ ID NO: 363832 - RNA, 32 nt, Homo Sapiens
ccgcagcuucucuguaguggcucugucacagu

SEQ ID NO: 363833 - RNA, 32 nt, Homo Sapiens
gugggaauuggaaggauuuagcuguacuuuau

SEQ ID NO: 363834 - RNA, 31 nt, Homo Sapiens
cacuguaaauaaaaacaguauccguagcuau

SEQ ID NO: 363835 - RNA, 32 nt, Homo Sapiens
gagauuuuacacauguauaaaagagaaauagu

SEQ ID NO: 363836 - RNA, 32 nt, Homo Sapiens
augaaugaacucccauucacaauugcuacaga

SEQ ID NO: 363837 - RNA, 30 nt, Homo Sapiens
gggcgcggagggcgaaaugagucugguagg

SEQ ID NO: 363838 - RNA, 32 nt, Homo Sapiens
cccguucccuccccggaccccccggacccgcu

SEQ ID NO: 363839 - RNA, 32 nt, Homo Sapiens
gccccucuuguuuauuuucuaugugagucaca

SEQ ID NO: 363840 - RNA, 32 nt, Homo Sapiens
uaugucaggaccaggauuuucuacccagagac

SEQ ID NO: 363841 - RNA, 32 nt, Homo Sapiens
auugaauggaaaaggggccugaggaaauuuuc

SEQ ID NO: 363842 - RNA, 32 nt, Homo Sapiens
caugaagacuuuuccaacauggcugcuuacuu

SEQ ID NO: 363843 - RNA, 32 nt, Homo Sapiens
acucaugcuggaucucuuucauauuaauuucu

SEQ ID NO: 363844 - RNA, 32 nt, Homo Sapiens
aauggcguuugggagcucguguguguaugugu

SEQ ID NO: 363845 - RNA, 32 nt, Homo Sapiens
uucauuauucuauuuaccucacugaaguacuc

SEQ ID NO: 363846 - RNA, 32 nt, Homo Sapiens
ccagaaggggugccucuuuggggcucauuccu

SEQ ID NO: 363847 - RNA, 32 nt, Homo Sapiens
gagggaugcccccaggcagccaccaguggacc

SEQ ID NO: 363848 - RNA, 32 nt, Homo Sapiens
ucagucucagacccgggcucucgguccgccgc

SEQ ID NO: 363849 - RNA, 32 nt, Homo Sapiens
caguaaaauaccagagaagauguuuaguagca

SEQ ID NO: 363850 - RNA, 32 nt, Homo Sapiens
cccuuccucgaggccccccaccccugauuuuc

SEQ ID NO: 363851 - RNA, 32 nt, Homo Sapiens
uuaccucauuuucucuacaugaucuccaaugu

SEQ ID NO: 363852 - RNA, 32 nt, Homo Sapiens
cuucccacaauaaauuuuuagcagcucugaac

SEQ ID NO: 363853 - RNA, 32 nt, Homo Sapiens
uaacugacuguucccaccugcuccuuuucucc

SEQ ID NO: 363854 - RNA, 32 nt, Homo Sapiens
uuugaaauguguucauuuuucuuuguuuuauu

SEQ ID NO: 363855 - RNA, 32 nt, Homo Sapiens
ugaggugugacucccucaugcucuggugguga

SEQ ID NO: 363856 - RNA, 32 nt, Homo Sapiens
ugcaccaguggcuggauauuccuuaaaaugga

SEQ ID NO: 363857 - RNA, 32 nt, Homo Sapiens
ggagaaagggagcgaggucagaggagccggca

SEQ ID NO: 363858 - RNA, 32 nt, Homo Sapiens
agacuggggagcucgugccgauugucuucagg

SEQ ID NO: 363859 - RNA, 32 nt, Homo Sapiens
auauugucaauacaaucaucaaacacugcuca

SEQ ID NO: 363860 - RNA, 32 nt, Homo Sapiens
guuuagggugguuuuucauugauuaaaaauaa

SEQ ID NO: 363861 - RNA, 32 nt, Homo Sapiens
gggugcaguggggugcuuaaacaucaacaugg

SEQ ID NO: 363862 - RNA, 32 nt, Homo Sapiens
gccccauuguucuccuuucccuuauacuuuuu

SEQ ID NO: 363863 - RNA, 32 nt, Homo Sapiens
guuggacacuauacauaaggacaggcucacau

SEQ ID NO: 363864 - RNA, 32 nt, Homo Sapiens
cccagagcgcgcugcgcaggagacgcgguggc

SEQ ID NO: 363865 - RNA, 32 nt, Homo Sapiens
gauuugugcuauuuuauauucaauguuguuga

SEQ ID NO: 363866 - RNA, 32 nt, Homo Sapiens
uagaugugaaaauaaauguuauuuguugauca

SEQ ID NO: 363867 - RNA, 32 nt, Homo Sapiens
ucucaacacacacagcuccuuucacuccugcc

SEQ ID NO: 363868 - RNA, 32 nt, Homo Sapiens
ccgagauccuuccgaaucccagcccuggggcg

SEQ ID NO: 363869 - RNA, 32 nt, Homo Sapiens
guugaugacuucuuguggcauuucacacacug

SEQ ID NO: 363870 - RNA, 32 nt, Homo Sapiens
cuaggauaucacugaacucuucugccuucaua

SEQ ID NO: 363871 - RNA, 32 nt, Homo Sapiens
ugcaccacugcacagucugggcgacagagcaa

SEQ ID NO: 363872 - RNA, 32 nt, Homo Sapiens
cuuucaaaugacuuucaucaaaugacuuucaa

SEQ ID NO: 363873 - RNA, 32 nt, Homo Sapiens
cgaccuugcuccuggucacgugaccuggccgu

SEQ ID NO: 363874 - RNA, 32 nt, Homo Sapiens
uuaaauauaugaugugaacauuuuuacuaaag

SEQ ID NO: 363875 - RNA, 32 nt, Homo Sapiens
ccccggcccggguucuggggccccuuggcagu

SEQ ID NO: 363876 - RNA, 32 nt, Homo Sapiens
uuguucccugaacaucgcuguuauccuguucu

SEQ ID NO: 363877 - RNA, 32 nt, Homo Sapiens
cggaagaguagcugaggccaaccccugaagca

SEQ ID NO: 363878 - RNA, 32 nt, Homo Sapiens
gcagugagccaagauggcgccacugcacucca

SEQ ID NO: 363879 - RNA, 32 nt, Homo Sapiens
ccucucagguggcgggcucugcgacccugcga

SEQ ID NO: 363880 - RNA, 32 nt, Homo Sapiens
ccagcggcgcgguggacagucauggcggcccg

SEQ ID NO: 363881 - RNA, 32 nt, Homo Sapiens
acuugauuuguuuuccaagcaagugcuagaau

SEQ ID NO: 363882 - RNA, 32 nt, Homo Sapiens
acgacaccuuggcggggaggcucacccugucc

SEQ ID NO: 363883 - RNA, 32 nt, Homo Sapiens
aacgggcacucggccccugagccccgggccgg

SEQ ID NO: 363884 - RNA, 32 nt, Homo Sapiens
gcgcucacucccuccgcccgccucccuccucu

SEQ ID NO: 363885 - RNA, 32 nt, Homo Sapiens
gcagagucucaaagcugagaugcugagagaga

SEQ ID NO: 363886 - RNA, 32 nt, Homo Sapiens
gggcggugguggcaggaggccuuggacggagu

SEQ ID NO: 363887 - RNA, 32 nt, Homo Sapiens
ggcgcacacugacuuugacguccaggccuucc

SEQ ID NO: 363888 - RNA, 32 nt, Homo Sapiens
agaaacucuggcucagccugucucgggcugac

SEQ ID NO: 363889 - RNA, 32 nt, Homo Sapiens
cacggcacuccagccugggugacagagugaga

SEQ ID NO: 363890 - RNA, 32 nt, Homo Sapiens
cacugcacuccagccugggugacagagggaga

SEQ ID NO: 363891 - RNA, 32 nt, Homo Sapiens
acuugccugguuugaggguacacaguaccauu

SEQ ID NO: 363892 - RNA, 32 nt, Homo Sapiens
acaggaggaugaacuugcugaaaauaaaacuu

SEQ ID NO: 363893 - RNA, 32 nt, Homo Sapiens
gaccugcaaggagagaaaugcaaccauacaug

SEQ ID NO: 363894 - RNA, 32 nt, Homo Sapiens
ucccuuugcucccagccuggcuccaucagccu

SEQ ID NO: 363895 - RNA, 32 nt, Homo Sapiens
ggcaggcaucauaguugcugcagaacagucca

SEQ ID NO: 363896 - RNA, 32 nt, Homo Sapiens
ugagccagggucacugacacagcugagaccaa

SEQ ID NO: 363897 - RNA, 32 nt, Homo Sapiens
ucccagcacuuugggagggggaggcaggcgga

SEQ ID NO: 363898 - RNA, 29 nt, Homo Sapiens
aucucccugggacagagcaccugcaggaa

SEQ ID NO: 363899 - RNA, 32 nt, Homo Sapiens
agugggaggugauuggaugauggggguggcuu

SEQ ID NO: 363900 - RNA, 32 nt, Homo Sapiens
uguaguuuucuuuuuuaaauuaaucagaaacc

SEQ ID NO: 363901 - RNA, 32 nt, Homo Sapiens
ucuggugggcagcagagaccugcucugccaag

SEQ ID NO: 363902 - RNA, 32 nt, Homo Sapiens
aaaacaguaaaaauaaccacuuuuuguugggc

SEQ ID NO: 363903 - RNA, 32 nt, Homo Sapiens
ccuaccuucuaaauacuaggcacuuuuccuaa

SEQ ID NO: 363904 - RNA, 32 nt, Homo Sapiens
uuuuugaggcuuucuguugccauggugauggu

SEQ ID NO: 363905 - RNA, 32 nt, Homo Sapiens
cgaggaguguucugaccuacaaggcuguccaa

SEQ ID NO: 363906 - RNA, 32 nt, Homo Sapiens
cacauguguucccucuauccguccugcuuccu

SEQ ID NO: 363907 - RNA, 32 nt, Homo Sapiens
ucucugccccccacccuggcuuggagcacacc

SEQ ID NO: 363908 - RNA, 32 nt, Homo Sapiens
cauugugaggaaaaccacuuaguauuuuauag

SEQ ID NO: 363909 - RNA, 32 nt, Homo Sapiens
ccuccucccguccacaugggauggccuuccug

SEQ ID NO: 363910 - RNA, 32 nt, Homo Sapiens
ugcuaucccuccccccucccccgaccccacca

SEQ ID NO: 363911 - RNA, 32 nt, Homo Sapiens
uuccuaaguauuuuuauucugguguuuuaaau

SEQ ID NO: 363912 - RNA, 32 nt, Homo Sapiens
auacaacauuuucucuuuuaggacgugaauau

SEQ ID NO: 363913 - RNA, 32 nt, Homo Sapiens
uaccuagugcugggaguucaguucuuuuuccu

SEQ ID NO: 363914 - RNA, 32 nt, Homo Sapiens
cucuaccgcggcucagcccuggacuaaggcac

SEQ ID NO: 363915 - RNA, 32 nt, Homo Sapiens
ggaagggccagcaauugcuguuccacaacagc

SEQ ID NO: 363916 - RNA, 32 nt, Homo Sapiens
ucacacacaauuuucaucucuacaaaguaucu

SEQ ID NO: 363917 - RNA, 32 nt, Homo Sapiens
ggucaguacuauuuuuauacuuuauuaagcaa

SEQ ID NO: 363918 - RNA, 32 nt, Homo Sapiens
cccaccccaagcccccggccaagccuggacuc

SEQ ID NO: 363919 - RNA, 32 nt, Homo Sapiens
aacaaguaaauauauaugguccuauacauauu

SEQ ID NO: 363920 - RNA, 32 nt, Homo Sapiens
ggaggcgggaccagccgcugccgucuccgucu

SEQ ID NO: 363921 - RNA, 32 nt, Homo Sapiens
acuuuaaaacaaaaugaagaaaguaaggcuua

SEQ ID NO: 363922 - RNA, 32 nt, Homo Sapiens
acgacacacggggauggagagcaagaguuaug

SEQ ID NO: 363923 - RNA, 31 nt, Homo Sapiens
auuuuugcccauuuggcuccaaggaaggcuu

SEQ ID NO: 363924 - RNA, 32 nt, Homo Sapiens
guucuuucauauuuuaauuuaaucucugucaa

SEQ ID NO: 363925 - RNA, 32 nt, Homo Sapiens
cucucggaggccggagcggagccgcgucugac

SEQ ID NO: 363926 - RNA, 32 nt, Homo Sapiens
uacuaccccggccccagcacccgccaggaugu

SEQ ID NO: 363927 - RNA, 32 nt, Homo Sapiens
cugcaacguccgccucccggguugacaccauu

SEQ ID NO: 363928 - RNA, 32 nt, Homo Sapiens
ugcggccggaaagcggcgccaucuccgcaagu

SEQ ID NO: 363929 - RNA, 32 nt, Homo Sapiens
ugaggguccgguuuccuacuacugugccccuc

SEQ ID NO: 363930 - RNA, 32 nt, Homo Sapiens
uaauguugcauaauguucacuuuuuauagugu

SEQ ID NO: 363931 - RNA, 32 nt, Homo Sapiens
uuagaauaguuuccgauuaaacuuuuuagcuc

SEQ ID NO: 363932 - RNA, 32 nt, Homo Sapiens
uucaaggggccugggcugcugcucacggguau

SEQ ID NO: 363933 - RNA, 31 nt, Homo Sapiens
guacuggcucuaguccccgugagauguaaag

SEQ ID NO: 363934 - RNA, 32 nt, Homo Sapiens
gaauuagaacugagucauuccgacucugaaaa

SEQ ID NO: 363935 - RNA, 32 nt, Homo Sapiens
caaaaaauauaaaaauuaguuagguguggugg

SEQ ID NO: 363936 - RNA, 32 nt, Homo Sapiens
cugcccagagagagaccugcugcugcagagca

SEQ ID NO: 363937 - RNA, 32 nt, Homo Sapiens
gacaaauauucugaaucaccaauuaaaaaccu

SEQ ID NO: 363938 - RNA, 32 nt, Homo Sapiens
cuaugccaaccaagccacaucucggccuucgu

SEQ ID NO: 363939 - RNA, 32 nt, Homo Sapiens
uugguaaaggcacagauguuuugagaacuuua

SEQ ID NO: 363940 - RNA, 32 nt, Homo Sapiens
uccgaacaucagaaagaacaaacucuggacac

SEQ ID NO: 363941 - RNA, 32 nt, Homo Sapiens
gcuagcgcugcacuccauuuugcaauggccuc

SEQ ID NO: 363942 - RNA, 31 nt, Homo Sapiens
uuguugaaauaaaaugugucaauugucucug

SEQ ID NO: 363943 - RNA, 32 nt, Homo Sapiens
auuaaaaaauuaacaguuaauguuucagucaa

SEQ ID NO: 363944 - RNA, 32 nt, Homo Sapiens
uuauuauuuuaacucuucuccuuaggacacgc

SEQ ID NO: 363945 - RNA, 32 nt, Homo Sapiens
uuauggauguauuguucacauuauggcuuuaa

SEQ ID NO: 363946 - RNA, 32 nt, Homo Sapiens
agaucaaucaguacaucgaccacaugcagagc

SEQ ID NO: 363947 - RNA, 30 nt, Homo Sapiens
gagcgagcgcccgucggcgggugucgaggg

SEQ ID NO: 363948 - RNA, 32 nt, Homo Sapiens
cgcaagugcauuuuuucacugugggaagaaag

SEQ ID NO: 363949 - RNA, 32 nt, Homo Sapiens
ggguugggugggcaauggaaggagggaggaga

SEQ ID NO: 363950 - RNA, 32 nt, Homo Sapiens
agccccuucagccccuucuccccuccccgccu

SEQ ID NO: 363951 - RNA, 32 nt, Homo Sapiens
guccccucgucuuaagacccagcccgcucugu

SEQ ID NO: 363952 - RNA, 32 nt, Homo Sapiens
ucagcuccuccugcccuccccccaacgcccca

SEQ ID NO: 363953 - RNA, 32 nt, Homo Sapiens
cccacuucauauuuucaugccccccuguuggu

SEQ ID NO: 363954 - RNA, 32 nt, Homo Sapiens
uucgauaauuuauucuuguauuacaaucuuuu

SEQ ID NO: 363955 - RNA, 32 nt, Homo Sapiens
auuuauuggccaggaaguuggugcugcuaaga

SEQ ID NO: 363956 - RNA, 30 nt, Homo Sapiens
ggcgggcgcgcgcgagccaccgagcgaggu

SEQ ID NO: 363957 - RNA, 32 nt, Homo Sapiens
agggaugggcuggccauuguguccccgcagga

SEQ ID NO: 363958 - RNA, 32 nt, Homo Sapiens
auggggacgagggccgggagggcaccggguag

SEQ ID NO: 363959 - RNA, 32 nt, Homo Sapiens
cugccugccuccuggggagcccggugacccag

SEQ ID NO: 363960 - RNA, 32 nt, Homo Sapiens
cagagccucacagguccucgcuggcacugcag

SEQ ID NO: 363961 - RNA, 32 nt, Homo Sapiens
uggauacagaacagugccuggugcucaauaaa

SEQ ID NO: 363962 - RNA, 32 nt, Homo Sapiens
uugagcccgcaaguuugagaccacccugggca

SEQ ID NO: 363963 - RNA, 32 nt, Homo Sapiens
ggguuuccuggagcaaugggugugccagcccu

SEQ ID NO: 363964 - RNA, 32 nt, Homo Sapiens
cuggaggagcagcuuccuucugggacuggaca

SEQ ID NO: 363965 - RNA, 32 nt, Homo Sapiens
uaucuuuugucccugauguggggacuguguug

SEQ ID NO: 363966 - RNA, 32 nt, Homo Sapiens
cugaaguuugcucuucaaggaaugggaaccuu

SEQ ID NO: 363967 - RNA, 32 nt, Homo Sapiens
ucuaggcuaccuguugguuagauucaaggccc

SEQ ID NO: 363968 - RNA, 32 nt, Homo Sapiens
gauacaaaaccuuuuauaaaaaauauuguuuu

SEQ ID NO: 363969 - RNA, 30 nt, Homo Sapiens
agaggggaagagggcaugcagucuuaggcu

SEQ ID NO: 363970 - RNA, 32 nt, Homo Sapiens
auggggaguauuauggaaauccacaauaacaa

SEQ ID NO: 363971 - RNA, 32 nt, Homo Sapiens
cgccgccguggccuacgccgcgccgcacaaag

SEQ ID NO: 363972 - RNA, 32 nt, Homo Sapiens
ucagcugucugccuaugaaguucauuguguag

SEQ ID NO: 363973 - RNA, 32 nt, Homo Sapiens
cuuaaguagcaaguacauguaucggaacuuag

SEQ ID NO: 363974 - RNA, 32 nt, Homo Sapiens
gaagcagggucucacuauguugcuggcugguc

SEQ ID NO: 363975 - RNA, 28 nt, Homo Sapiens
uguagcuuguggaauauuauaaaaucau

SEQ ID NO: 363976 - RNA, 32 nt, Homo Sapiens
agagggcccgaaggccggggcccaccauggcc

SEQ ID NO: 363977 - RNA, 32 nt, Homo Sapiens
ucaacuccaaaaagaguaauuuaauaagcauu

SEQ ID NO: 363978 - RNA, 32 nt, Homo Sapiens
ggacggcgaugggccucacgggcccgcccagc

SEQ ID NO: 363979 - RNA, 32 nt, Homo Sapiens
aacuuucccccuccucaaaggauguguuucaa

SEQ ID NO: 363980 - RNA, 32 nt, Homo Sapiens
ccgggcgguaggcagcagcaggcugaagggau

SEQ ID NO: 363981 - RNA, 32 nt, Homo Sapiens
uauuucuucuaaaaaucuguauaccaggaacu

SEQ ID NO: 363982 - RNA, 32 nt, Homo Sapiens
ccagcugaauggaaguacaaucucuugcuaua

SEQ ID NO: 363983 - RNA, 32 nt, Homo Sapiens
ugugagccguaaacugaagcuacuucaguuaa

SEQ ID NO: 363984 - RNA, 32 nt, Homo Sapiens
ccaggcugaggguucugccgcgggcuaccggc

SEQ ID NO: 363985 - RNA, 32 nt, Homo Sapiens
ugcuccuggccuaccccucccccagcuccccg

SEQ ID NO: 363986 - RNA, 32 nt, Homo Sapiens
cucaaaccuaacgaugccgccggagcggagga

SEQ ID NO: 363987 - RNA, 32 nt, Homo Sapiens
cagcucuccuaaaaauacaaaaauuagcugga

SEQ ID NO: 363988 - RNA, 32 nt, Homo Sapiens
ccuccuuuaaacacaucaucugagguugaguu

SEQ ID NO: 363989 - RNA, 32 nt, Homo Sapiens
uccgccagaggccaccccggcccggccuccag

SEQ ID NO: 363990 - RNA, 32 nt, Homo Sapiens
cguagauggaaaucauaaacugacucuugguu

SEQ ID NO: 363991 - RNA, 32 nt, Homo Sapiens
agccccagcgagcggcugcagcggggccguga

SEQ ID NO: 363992 - RNA, 32 nt, Homo Sapiens
ugugaugccagcugcuugggaggcugaggugg

SEQ ID NO: 363993 - RNA, 32 nt, Homo Sapiens
aucauugaaaaccaccugugucuccuuuggga

SEQ ID NO: 363994 - RNA, 32 nt, Homo Sapiens
uuucgaauggcacaacacuuucuauuucacaa

SEQ ID NO: 363995 - RNA, 32 nt, Homo Sapiens
gcccagacucauuuuuaacuggaaaucaucac

SEQ ID NO: 363996 - RNA, 32 nt, Homo Sapiens
cagaaaugaggguggcaagcugggcaacccaa

SEQ ID NO: 363997 - RNA, 32 nt, Homo Sapiens
cuuuaaaaaggauuuuugugaagcaauugauu

SEQ ID NO: 363998 - RNA, 32 nt, Homo Sapiens
caccuguaaucccagcacuuuggguggcuaag

SEQ ID NO: 363999 - RNA, 32 nt, Homo Sapiens
aaaugauacuucucuuuuuuugcuguuccacc

SEQ ID NO: 364000 - RNA, 29 nt, Homo Sapiens
gaaucuuuuaccugacaccacaaaaugga

SEQ ID NO: 364001 - RNA, 32 nt, Homo Sapiens
ggguucuggcaccaccugagcccacugggcau

SEQ ID NO: 364002 - RNA, 32 nt, Homo Sapiens
acaucccgcauccggcaucccagcggccgggc

SEQ ID NO: 364003 - RNA, 32 nt, Homo Sapiens
gcugucaccauccacuaggauccaccauaacc

SEQ ID NO: 364004 - RNA, 32 nt, Homo Sapiens
aggcugcgcaggcgcugagaucgaguugcugg

SEQ ID NO: 364005 - RNA, 32 nt, Homo Sapiens
gugcugcugucaugaguggcgagcuucuguuu

SEQ ID NO: 364006 - RNA, 32 nt, Homo Sapiens
cgggaauauaauauuucuugaaugaacaaugc

SEQ ID NO: 364007 - RNA, 32 nt, Homo Sapiens
cuuccgucccacugaaggauuaaugaaaaccu

SEQ ID NO: 364008 - RNA, 32 nt, Homo Sapiens
ccucagagucacauucaugaaaagcacugaua

SEQ ID NO: 364009 - RNA, 32 nt, Homo Sapiens
aucucuugguucccucuuucugcugccagcuc

SEQ ID NO: 364010 - RNA, 32 nt, Homo Sapiens
gccgggcucuagccggccgucugguggcccga

SEQ ID NO: 364011 - RNA, 32 nt, Homo Sapiens
gaaugcuauugaaaaugugaauugcaugacuu

SEQ ID NO: 364012 - RNA, 32 nt, Homo Sapiens
gauauaagaacaaaguauaaggguuuaaaagu

SEQ ID NO: 364013 - RNA, 32 nt, Homo Sapiens
gggacggcccgcugcuggccgcucucuucucu

SEQ ID NO: 364014 - RNA, 32 nt, Homo Sapiens
uggguaucugguuuuuguuuucauauuugagu

SEQ ID NO: 364015 - RNA, 32 nt, Homo Sapiens
ugcauagacuauacacaugggguggaaaggcc

SEQ ID NO: 364016 - RNA, 31 nt, Homo Sapiens
uuaguuuuaguaaauuaauagguuuggccau

SEQ ID NO: 364017 - RNA, 32 nt, Homo Sapiens
caccuauaaucccagcacuuugggagggugag

SEQ ID NO: 364018 - RNA, 32 nt, Homo Sapiens
aagaaaaacagcauucuagaaauggcauuucu

SEQ ID NO: 364019 - RNA, 32 nt, Homo Sapiens
uggugccuggcacagccgcgggccaggaggcu

SEQ ID NO: 364020 - RNA, 32 nt, Homo Sapiens
cgcagggccaggagcugcagccauggcagcca

SEQ ID NO: 364021 - RNA, 32 nt, Homo Sapiens
aaaugacccacccagcuagagcacuguacacc

SEQ ID NO: 364022 - RNA, 32 nt, Homo Sapiens
cgugcuuggaggacuguggccauggugugugc

SEQ ID NO: 364023 - RNA, 32 nt, Homo Sapiens
uguuacaaaugagcaaaagaugaguccuugcu

SEQ ID NO: 364024 - RNA, 32 nt, Homo Sapiens
ggugcccaugcagcuguaguuguucacugcuu

SEQ ID NO: 364025 - RNA, 32 nt, Homo Sapiens
gugacaaacagccucgggcagaugaacacgga

SEQ ID NO: 364026 - RNA, 32 nt, Homo Sapiens
acgauauccuacugcuuguugguauuacccua

SEQ ID NO: 364027 - RNA, 32 nt, Homo Sapiens
agcaguaaagagacauuggucaauugcucuga

SEQ ID NO: 364028 - RNA, 32 nt, Homo Sapiens
ggccuuggaggacuuccaccgggcaggcguuc

SEQ ID NO: 364029 - RNA, 32 nt, Homo Sapiens
ucaugggagugcacagcauuagacaguauuug

SEQ ID NO: 364030 - RNA, 32 nt, Homo Sapiens
gggccagaugacccuugaaguagucauuaugu

SEQ ID NO: 364031 - RNA, 32 nt, Homo Sapiens
cccuuuaguuuauuuuugugagggcaaagggg

SEQ ID NO: 364032 - RNA, 32 nt, Homo Sapiens
gugccucccuuuccuuucccucccacaaagcc

SEQ ID NO: 364033 - RNA, 32 nt, Homo Sapiens
uaguguuauuuuuaccaguguuaauuuauuag

SEQ ID NO: 364034 - RNA, 30 nt, Homo Sapiens
aggaucugucccgugccgccgcugcucccc

SEQ ID NO: 364035 - RNA, 32 nt, Homo Sapiens
aauuuuuuagcauuugaguuguuccauuaaau

SEQ ID NO: 364036 - RNA, 32 nt, Homo Sapiens
augggcccucaaaauuuuuagggcaugguuuu

SEQ ID NO: 364037 - RNA, 32 nt, Homo Sapiens
ggacacccacccacccaaagagccaaagaaua

SEQ ID NO: 364038 - RNA, 32 nt, Homo Sapiens
ucgggagccgugagccgggaagagggagacgg

SEQ ID NO: 364039 - RNA, 32 nt, Homo Sapiens
uguguuauguagucaguacuuuucucauguau

SEQ ID NO: 364040 - RNA, 32 nt, Homo Sapiens
gacaauucugugucuggugggaucugaccuug

SEQ ID NO: 364041 - RNA, 32 nt, Homo Sapiens
ugccuuuucuuagguauaauaauuuauaaaug

SEQ ID NO: 364042 - RNA, 32 nt, Homo Sapiens
ugucccacaaauaguuuuuuguuuacgauuua

SEQ ID NO: 364043 - RNA, 32 nt, Homo Sapiens
uucucaaagcaucuccgucgugaacauggccc

SEQ ID NO: 364044 - RNA, 32 nt, Homo Sapiens
ggauaguucugccacuauauuuuacuucuuug

SEQ ID NO: 364045 - RNA, 32 nt, Homo Sapiens
gcuguucuagcacuucaucuggcugccuuugc

SEQ ID NO: 364046 - RNA, 32 nt, Homo Sapiens
guaaacaguuuuuguuucugauaguaauggac

SEQ ID NO: 364047 - RNA, 32 nt, Homo Sapiens
agaguuugcagcugguaaaaccagaggcuaca

SEQ ID NO: 364048 - RNA, 32 nt, Homo Sapiens
ucgcgcccgcggcauggugcccgccggccugc

SEQ ID NO: 364049 - RNA, 32 nt, Homo Sapiens
agaaauaaaaauuuaagaauuaaauugcugcc

SEQ ID NO: 364050 - RNA, 32 nt, Homo Sapiens
gccgggacccucgccagcgccacgcgcgccac

SEQ ID NO: 364051 - RNA, 32 nt, Homo Sapiens
caaagcacugggaauuucuacucuucaugccu

SEQ ID NO: 364052 - RNA, 32 nt, Homo Sapiens
cgcgaguuggaaaguuugcccgagggcuggug

SEQ ID NO: 364053 - RNA, 32 nt, Homo Sapiens
aaaagaauuguaaauaaaugguguauuuccuc

SEQ ID NO: 364054 - RNA, 32 nt, Homo Sapiens
ccgcccgucccgccccgccccgccgcccgccg

SEQ ID NO: 364055 - RNA, 32 nt, Homo Sapiens
uuaaaggcgaggggcggggcgcgcccggccca

SEQ ID NO: 364056 - RNA, 32 nt, Homo Sapiens
auggcuuugugauucccuccagugaagcagcc

SEQ ID NO: 364057 - RNA, 30 nt, Homo Sapiens
agaggcgaggagcgcgcgggccguggccag

SEQ ID NO: 364058 - RNA, 32 nt, Homo Sapiens
cucucgcugccccagccugugcucccaggggc

SEQ ID NO: 364059 - RNA, 32 nt, Homo Sapiens
cauugcaaaugcuuuagaaaucucugauaaug

SEQ ID NO: 364060 - RNA, 32 nt, Homo Sapiens
cggaggcugcgagggcgcgcgcggggaggaug

SEQ ID NO: 364061 - RNA, 32 nt, Homo Sapiens
uccagcgucaagccgaagagucauccucucac

SEQ ID NO: 364062 - RNA, 32 nt, Homo Sapiens
guacaagauuaucuuauuccccugcccaggug

SEQ ID NO: 364063 - RNA, 32 nt, Homo Sapiens
ugucucuggggucagcugcugcucaucagcug

SEQ ID NO: 364064 - RNA, 32 nt, Homo Sapiens
ucagagaggaauaaaagacauuuuauauuuua

SEQ ID NO: 364065 - RNA, 32 nt, Homo Sapiens
gggccucuugcucgcucuagcugcugggagga

SEQ ID NO: 364066 - RNA, 32 nt, Homo Sapiens
gggcagguuuuguagacuuucauagccaaaga

SEQ ID NO: 364067 - RNA, 32 nt, Homo Sapiens
augcugaugcuucaaggagaaauauuuucaca

SEQ ID NO: 364068 - RNA, 32 nt, Homo Sapiens
aacaguaccugcuacauaggaagugcuaucca

SEQ ID NO: 364069 - RNA, 32 nt, Homo Sapiens
gucaccagaggguggggcggaccgcgugcgcu

SEQ ID NO: 364070 - RNA, 32 nt, Homo Sapiens
ccaugcgcauccccacccacaacccuuuaccc

SEQ ID NO: 364071 - RNA, 32 nt, Homo Sapiens
ugucugucuuauggucaucauugucuucuuag

SEQ ID NO: 364072 - RNA, 32 nt, Homo Sapiens
cauuucuguggguggggguagggaauacuggc

SEQ ID NO: 364073 - RNA, 32 nt, Homo Sapiens
guauguguacuauucuuuggaaaugauuuucu

SEQ ID NO: 364074 - RNA, 32 nt, Homo Sapiens
cagccucaucugcuccuuuccuccccugccuc

SEQ ID NO: 364075 - RNA, 32 nt, Homo Sapiens
gaggcucaugguuuccugguuauuuucaccag

SEQ ID NO: 364076 - RNA, 32 nt, Homo Sapiens
aagagcccuaaacauugggaaccauucaccua

SEQ ID NO: 364077 - RNA, 31 nt, Homo Sapiens
cagcaaccacacugccugucauugugcuuua

SEQ ID NO: 364078 - RNA, 32 nt, Homo Sapiens
guauaaaaguuuugcaagagaaugaauuuuuu

SEQ ID NO: 364079 - RNA, 27 nt, Homo Sapiens
acaucuuccuucuuuaccucauuagca

SEQ ID NO: 364080 - RNA, 32 nt, Homo Sapiens
gugcuuuuacuuuacagauugauuggaauaag

SEQ ID NO: 364081 - RNA, 32 nt, Homo Sapiens
ggguggcaugacugauugaggugaagcucacg

SEQ ID NO: 364082 - RNA, 32 nt, Homo Sapiens
aucugggcagugccccucugaaucauccaugc

SEQ ID NO: 364083 - RNA, 32 nt, Homo Sapiens
gagaguccaaaaaccaaaucagaugaaucagg

SEQ ID NO: 364084 - RNA, 32 nt, Homo Sapiens
guuccgcagguuuuacggcugcggcggcuggu

SEQ ID NO: 364085 - RNA, 32 nt, Homo Sapiens
gaccccuuaggagcgccuggaagcagaaccag

SEQ ID NO: 364086 - RNA, 26 nt, Homo Sapiens
caugaaugagacaaacaaaacacuug

SEQ ID NO: 364087 - RNA, 32 nt, Homo Sapiens
uuucuccuuucugggccucauuugcacuagau

SEQ ID NO: 364088 - RNA, 32 nt, Homo Sapiens
cacuucagguggagcugaaauucugcuggcuc

SEQ ID NO: 364089 - RNA, 32 nt, Homo Sapiens
ggacggcggacgccagcgcucucggaucccca

SEQ ID NO: 364090 - RNA, 32 nt, Homo Sapiens
agccaucuuuugcuccguucaagaugguaggg

SEQ ID NO: 364091 - RNA, 32 nt, Homo Sapiens
auugcuaguuuauuuuguuaucagauauguga

SEQ ID NO: 364092 - RNA, 32 nt, Homo Sapiens
gguugaaaauguuuuucuuguguuuuaagaau

SEQ ID NO: 364093 - RNA, 32 nt, Homo Sapiens
cucuuaauggcuuuccucucucuuguuuuacc

SEQ ID NO: 364094 - RNA, 32 nt, Homo Sapiens
uuuggaguuaaauuauuuuaacaaauaaauuu

SEQ ID NO: 364095 - RNA, 32 nt, Homo Sapiens
agugacagccucagcccccucagcacagacaa

SEQ ID NO: 364096 - RNA, 31 nt, Homo Sapiens
cggcuggaaggagccauucaaggaggccugu

SEQ ID NO: 364097 - RNA, 32 nt, Homo Sapiens
agcgcuuaaccucauugggguggaggagaagg

SEQ ID NO: 364098 - RNA, 32 nt, Homo Sapiens
caucuuugcaagccagacacacuuccucuuga

SEQ ID NO: 364099 - RNA, 32 nt, Homo Sapiens
cuggucgcuguuucggggacucggggcggcca

SEQ ID NO: 364100 - RNA, 32 nt, Homo Sapiens
guuuuauuuugaugucuuuucuuuuggucgga

SEQ ID NO: 364101 - RNA, 32 nt, Homo Sapiens
aguuuacucuuuaaagcaaaaugugagcugua

SEQ ID NO: 364102 - RNA, 32 nt, Homo Sapiens
agcaagaccccauuucuauaaauaauuaaaaa

SEQ ID NO: 364103 - RNA, 32 nt, Homo Sapiens
agugaggagcggaggcgggcgcgggcggccgg

SEQ ID NO: 364104 - RNA, 28 nt, Homo Sapiens
gaagaacggggggugccgagguccccau

SEQ ID NO: 364105 - RNA, 32 nt, Homo Sapiens
cuuguuuauagcaaaaauguuuuccaauauuu

SEQ ID NO: 364106 - RNA, 32 nt, Homo Sapiens
aaacaagguuuuauguuaaaagaauauaucau

SEQ ID NO: 364107 - RNA, 32 nt, Homo Sapiens
ccagcuggcgcacagcaacaugaccaagggcc

SEQ ID NO: 364108 - RNA, 32 nt, Homo Sapiens
uguuccuguguaacaagaacugggcucaacgg

SEQ ID NO: 364109 - RNA, 32 nt, Homo Sapiens
gggagguugaggaggaguggccaggaaacaag

SEQ ID NO: 364110 - RNA, 32 nt, Homo Sapiens
uaagccccaguugcaccuacuaacugcagucc

SEQ ID NO: 364111 - RNA, 32 nt, Homo Sapiens
gaagagaaaaauacuguaaaacguguagugaa

SEQ ID NO: 364112 - RNA, 32 nt, Homo Sapiens
aaaguggaauaauguugauaacagugcuuggc

SEQ ID NO: 364113 - RNA, 32 nt, Homo Sapiens
caggcgaugcaggugggaugcuauggaauaug

SEQ ID NO: 364114 - RNA, 32 nt, Homo Sapiens
cauaaguacuuuguaaagauuugacauucaac

SEQ ID NO: 364115 - RNA, 32 nt, Homo Sapiens
cccggcgccacgccgccuccucuggguucggc

SEQ ID NO: 364116 - RNA, 32 nt, Homo Sapiens
ggacaacuaugaagugacgauggcugggggcc

SEQ ID NO: 364117 - RNA, 32 nt, Homo Sapiens
ggacuuuccagaaaucgacccucuaagucaau

SEQ ID NO: 364118 - RNA, 32 nt, Homo Sapiens
gaucacuugagcccaggagauugaggcugcag

SEQ ID NO: 364119 - RNA, 32 nt, Homo Sapiens
aauagaagauuuauauagcaaaaagagaauga

SEQ ID NO: 364120 - RNA, 32 nt, Homo Sapiens
cuuaacuuccaaacucaacucccuuucuagau

SEQ ID NO: 364121 - RNA, 32 nt, Homo Sapiens
gcucuucgcucaggcucccccggagacuugag

SEQ ID NO: 364122 - RNA, 32 nt, Homo Sapiens
gacauauauauuaaaauguaggaagaaaaaug

SEQ ID NO: 364123 - RNA, 32 nt, Homo Sapiens
uccuguuugaccaaagauugcccaagucuggc

SEQ ID NO: 364124 - RNA, 32 nt, Homo Sapiens
auuuguaugugcucugggcucaugaagauauu

SEQ ID NO: 364125 - RNA, 32 nt, Homo Sapiens
cccuccccaucuggagacucuuucucccuugc

SEQ ID NO: 364126 - RNA, 32 nt, Homo Sapiens
aggcgucgccgcgcccggcagcgugagcgcag

SEQ ID NO: 364127 - RNA, 32 nt, Homo Sapiens
ggccuggucgccuggaggaagccggaggccug

SEQ ID NO: 364128 - RNA, 32 nt, Homo Sapiens
cccaugcuguucucgugauagugagugaauuc

SEQ ID NO: 364129 - RNA, 32 nt, Homo Sapiens
cuuuguccaaaauacacaaaugaaaaugacaa

SEQ ID NO: 364130 - RNA, 32 nt, Homo Sapiens
cccagugucgccauuucacaccuaacacauau

SEQ ID NO: 364131 - RNA, 32 nt, Homo Sapiens
cucuguuuugcaugcauuggaaggaaaauggu

SEQ ID NO: 364132 - RNA, 32 nt, Homo Sapiens
uauuucgcggaaaggaaggcgaaggaggggag

SEQ ID NO: 364133 - RNA, 32 nt, Homo Sapiens
uaagaugauccauuuuaaauuuaauauaugcu

SEQ ID NO: 364134 - RNA, 32 nt, Homo Sapiens
uuaauuaguuuauuuauuuuuugagacggagu

SEQ ID NO: 364135 - RNA, 32 nt, Homo Sapiens
uugcucauucuaggguugggcaucauaguugg

SEQ ID NO: 364136 - RNA, 32 nt, Homo Sapiens
acgaggucaggaguucgagagcauccuggcca

SEQ ID NO: 364137 - RNA, 32 nt, Homo Sapiens
cacacccagcaggcgcaaccagagucucgugu

SEQ ID NO: 364138 - RNA, 32 nt, Homo Sapiens
aaagaaugaugaugauacauugauaggaauug

SEQ ID NO: 364139 - RNA, 32 nt, Homo Sapiens
ugccagagaacaaaggcugagauggcagugca

SEQ ID NO: 364140 - RNA, 29 nt, Homo Sapiens
cuaauuggggcacagaggaugucgcuaaa

SEQ ID NO: 364141 - RNA, 32 nt, Homo Sapiens
aguccgagcgggagccgagccgggcggggcga

SEQ ID NO: 364142 - RNA, 32 nt, Homo Sapiens
agaacaacaacaaagcaugcucaguauugaga

SEQ ID NO: 364143 - RNA, 32 nt, Homo Sapiens
gcagugcccacgcucugggaggcaacggacca

SEQ ID NO: 364144 - RNA, 32 nt, Homo Sapiens
agcccaugggccagaacacacucuacaaaaug

SEQ ID NO: 364145 - RNA, 32 nt, Homo Sapiens
ccgcgcccaagccccaccaagccccccgcccu

SEQ ID NO: 364146 - RNA, 32 nt, Homo Sapiens
cuccgggucccggccccugucccggcaucucu

SEQ ID NO: 364147 - RNA, 30 nt, Homo Sapiens
cucucggggaagagacggaugaugaacaag

SEQ ID NO: 364148 - RNA, 32 nt, Homo Sapiens
uaaacuaggacacuaacuggguuccaugugau

SEQ ID NO: 364149 - RNA, 32 nt, Homo Sapiens
ggagguagggaaggaaggcacccacggcgaau

SEQ ID NO: 364150 - RNA, 32 nt, Homo Sapiens
acuggaaggcuuuauucuuccaaguucauuca

SEQ ID NO: 364151 - RNA, 32 nt, Homo Sapiens
aguaugaaggauucugaccccugugccuccca

SEQ ID NO: 364152 - RNA, 32 nt, Homo Sapiens
auuggcuuuguuugggucucucuucuuucugu

SEQ ID NO: 364153 - RNA, 32 nt, Homo Sapiens
uggaauaauugaugacaucuauuuucaucugg

SEQ ID NO: 364154 - RNA, 32 nt, Homo Sapiens
cauauguuguuccucagcucuuuucuccagcu

SEQ ID NO: 364155 - RNA, 32 nt, Homo Sapiens
aaaugcaauggcaacugcuuguagauaucauu

SEQ ID NO: 364156 - RNA, 32 nt, Homo Sapiens
cgguccaacugcgcugcugccggagcgcucag

SEQ ID NO: 364157 - RNA, 32 nt, Homo Sapiens
guaugcuaaauagaaagcccucugcaauauau

SEQ ID NO: 364158 - RNA, 32 nt, Homo Sapiens
acgugggggaggaggaggcaggcagcaccagc

SEQ ID NO: 364159 - RNA, 32 nt, Homo Sapiens
aguuaugguggccuuccaggauguggcucgaa

SEQ ID NO: 364160 - RNA, 31 nt, Homo Sapiens
gcagguacagcacaaagucaggcaaggcuca

SEQ ID NO: 364161 - RNA, 29 nt, Homo Sapiens
ugaugaggcacuuuauauuuuuuauuaga

SEQ ID NO: 364162 - RNA, 31 nt, Homo Sapiens
gauucggagccccgucgaauuuggggguggg

SEQ ID NO: 364163 - RNA, 32 nt, Homo Sapiens
cggggcuggcggugccugaggaccccuucggc

SEQ ID NO: 364164 - RNA, 32 nt, Homo Sapiens
uaaaaaugaaacaaagugagugcucgucacug

SEQ ID NO: 364165 - RNA, 32 nt, Homo Sapiens
aguuucacauucaauaugguaggaguugaaac

SEQ ID NO: 364166 - RNA, 32 nt, Homo Sapiens
ggcuacguuguaacccacugcguccagaguca

SEQ ID NO: 364167 - RNA, 32 nt, Homo Sapiens
uucaaaagcacugauuacccaaugcaccuccc

SEQ ID NO: 364168 - RNA, 32 nt, Homo Sapiens
gguccagaacagaguuccugaugcuggacacu

SEQ ID NO: 364169 - RNA, 32 nt, Homo Sapiens
ccccccuccgagcccuccuucccggcccaacc

SEQ ID NO: 364170 - RNA, 32 nt, Homo Sapiens
cagucuauaaaguugucauuuacaauuacuga

SEQ ID NO: 364171 - RNA, 32 nt, Homo Sapiens
aaucauacuguaaggaaauguuauuggaagcu

SEQ ID NO: 364172 - RNA, 32 nt, Homo Sapiens
uggcuccaagccccggccucuauaguaauaug

SEQ ID NO: 364173 - RNA, 32 nt, Homo Sapiens
cugggucuugcuuuucuuucuguuaaaugaga

SEQ ID NO: 364174 - RNA, 32 nt, Homo Sapiens
acacggggcgggguuuggggcccccuaacguc

SEQ ID NO: 364175 - RNA, 32 nt, Homo Sapiens
gcgaucuuggcucacugcaacccccaccuccc

SEQ ID NO: 364176 - RNA, 32 nt, Homo Sapiens
gcugcagucaggaugccuugugguuugagugc

SEQ ID NO: 364177 - RNA, 32 nt, Homo Sapiens
acaguguuguucccucccucaaggcugggagg

SEQ ID NO: 364178 - RNA, 32 nt, Homo Sapiens
uagcucccucccuucuucccagcccuuugacc

SEQ ID NO: 364179 - RNA, 27 nt, Homo Sapiens
aaggaaauaaauaaauaauguuauccu

SEQ ID NO: 364180 - RNA, 32 nt, Homo Sapiens
ccucuccugcacccccuccccccgguuauuug

SEQ ID NO: 364181 - RNA, 32 nt, Homo Sapiens
auguuguuaugaacaacgaacaauggggaaaa

SEQ ID NO: 364182 - RNA, 32 nt, Homo Sapiens
auccacauauccacaagaagugccucuuaggu

SEQ ID NO: 364183 - RNA, 32 nt, Homo Sapiens
acagucccuggcccacugcccccuucccuggc

SEQ ID NO: 364184 - RNA, 32 nt, Homo Sapiens
guaaggaauauauuuuuuaaaauuuuucuuug

SEQ ID NO: 364185 - RNA, 32 nt, Homo Sapiens
aaauucuggaugauagagaugauaaaaauauu

SEQ ID NO: 364186 - RNA, 31 nt, Homo Sapiens
acauccucacggagauacaugugcucaaugu

SEQ ID NO: 364187 - RNA, 32 nt, Homo Sapiens
ccagggggagacgcugucucugggagaugaag

SEQ ID NO: 364188 - RNA, 32 nt, Homo Sapiens
uuuuuuaaguauaaaccaaugauccuuuggua

SEQ ID NO: 364189 - RNA, 32 nt, Homo Sapiens
cgugggcgcggagggggcgcggcgggguagag

SEQ ID NO: 364190 - RNA, 32 nt, Homo Sapiens
gggcggccgagaccugcacggcccagcgggca

SEQ ID NO: 364191 - RNA, 32 nt, Homo Sapiens
cgguucuucccgcugaggaagugucgcucaag

SEQ ID NO: 364192 - RNA, 32 nt, Homo Sapiens
auauauuaagucaacuaacaaaucauaagcau

SEQ ID NO: 364193 - RNA, 32 nt, Homo Sapiens
ccuuaugagacauaagaaaauucauaguaaag

SEQ ID NO: 364194 - RNA, 32 nt, Homo Sapiens
gcugcagcucuacucuggacaccugcagguca

SEQ ID NO: 364195 - RNA, 32 nt, Homo Sapiens
gcuccccgccccaacucacucuggccucagua

SEQ ID NO: 364196 - RNA, 32 nt, Homo Sapiens
ucauagcccagcugcacugacuccuccuccag

SEQ ID NO: 364197 - RNA, 32 nt, Homo Sapiens
ugcgucaggcacgucuccugcugcgugacaug

SEQ ID NO: 364198 - RNA, 32 nt, Homo Sapiens
gcauguuguuuggaauuuaucaccuuaagaaa

SEQ ID NO: 364199 - RNA, 32 nt, Homo Sapiens
uucuggacuuaaacauuacuguaauuuugugu

SEQ ID NO: 364200 - RNA, 32 nt, Homo Sapiens
acgcgcgcaugcaugcacacacacgcacgcac

SEQ ID NO: 364201 - RNA, 31 nt, Homo Sapiens
cacuuccaucgcugaggaaaguucugcugga

SEQ ID NO: 364202 - RNA, 32 nt, Homo Sapiens
gucugguagcagccugucacuccagacugucc

SEQ ID NO: 364203 - RNA, 32 nt, Homo Sapiens
gucacggagccccugcgccuuuuccuugcucg

SEQ ID NO: 364204 - RNA, 32 nt, Homo Sapiens
gcuuuagacuuccagggcucaccagaucaacc

SEQ ID NO: 364205 - RNA, 32 nt, Homo Sapiens
ugugggugggagggaagcuacugcagacugaa

SEQ ID NO: 364206 - RNA, 32 nt, Homo Sapiens
caccccagagauuuaagaagaaaaccucuaaa

SEQ ID NO: 364207 - RNA, 32 nt, Homo Sapiens
guauguguuaaaaagaaauuugcaacugugaa

SEQ ID NO: 364208 - RNA, 32 nt, Homo Sapiens
ugggaaacagagugaggcucugucugaaaaaa

SEQ ID NO: 364209 - RNA, 32 nt, Homo Sapiens
acuaucacaagauggcaaaaugcugaaaguuu

SEQ ID NO: 364210 - RNA, 32 nt, Homo Sapiens
ccauccggguggcggggagaucaacuccgagc

SEQ ID NO: 364211 - RNA, 32 nt, Homo Sapiens
ugcgggcggaagaggaagcaaggcccucuucc

SEQ ID NO: 364212 - RNA, 32 nt, Homo Sapiens
ggccacaggacacacuugcucgagaaccaaag

SEQ ID NO: 364213 - RNA, 32 nt, Homo Sapiens
ggcugggcauuuguuugaaauuagauaggaua

SEQ ID NO: 364214 - RNA, 32 nt, Homo Sapiens
aagccacccagcuuguggcacuuuguuacauc

SEQ ID NO: 364215 - RNA, 32 nt, Homo Sapiens
uaaaagccuguggcauuuuuccuccuucuccc

SEQ ID NO: 364216 - RNA, 32 nt, Homo Sapiens
uaaaaauuaaaauuauucauuaaaaacaucgu

SEQ ID NO: 364217 - RNA, 30 nt, Homo Sapiens
cuaauucaccuuaugggggaaaugcuucuu

SEQ ID NO: 364218 - RNA, 31 nt, Homo Sapiens
ccucaggugggcggaaaguccauccccuccg

SEQ ID NO: 364219 - RNA, 32 nt, Homo Sapiens
ucauauacuuuuugaggaugaugaugauaaca

SEQ ID NO: 364220 - RNA, 32 nt, Homo Sapiens
uauuuaugagugaaaaguuguagcacauuccu

SEQ ID NO: 364221 - RNA, 32 nt, Homo Sapiens
aauauucacagcagagcuuuauuacuugagag

SEQ ID NO: 364222 - RNA, 32 nt, Homo Sapiens
cuagagggaaagggcugcugcucugggaguca

SEQ ID NO: 364223 - RNA, 32 nt, Homo Sapiens
gguuuuauguugcuguuauuuauuuacgaacu

SEQ ID NO: 364224 - RNA, 32 nt, Homo Sapiens
aacugccaggcagcugcaguuagcacagagga

SEQ ID NO: 364225 - RNA, 32 nt, Homo Sapiens
gacaauacuaggaaacaaaaugucuucaguau

SEQ ID NO: 364226 - RNA, 32 nt, Homo Sapiens
caaagcaaaaauaacuauuugacuauaauaua

SEQ ID NO: 364227 - RNA, 27 nt, Homo Sapiens
ugaccucguccauucagccccugccag

SEQ ID NO: 364228 - RNA, 32 nt, Homo Sapiens
aaaaggauuaagcaucacuagggcuccaagug

SEQ ID NO: 364229 - RNA, 32 nt, Homo Sapiens
ccgagagggaggcgaggcgcugcuugucgaca

SEQ ID NO: 364230 - RNA, 32 nt, Homo Sapiens
cccagggacugcuccuggcagcucuguggcug

SEQ ID NO: 364231 - RNA, 32 nt, Homo Sapiens
aucgggcccugcuggcagggacuugcagugga

SEQ ID NO: 364232 - RNA, 32 nt, Homo Sapiens
uuuuacaggaacuauuugaaaauauugaggag

SEQ ID NO: 364233 - RNA, 32 nt, Homo Sapiens
agauccugugaagagggaggcagagauuggag

SEQ ID NO: 364234 - RNA, 32 nt, Homo Sapiens
ggagcgacgacacccccgcgcgugcacccgcu

SEQ ID NO: 364235 - RNA, 32 nt, Homo Sapiens
aggacauucagguaccagguagccccaaggag

SEQ ID NO: 364236 - RNA, 32 nt, Homo Sapiens
uaaccgggccuuaacuuuuugcgcucguuuug

SEQ ID NO: 364237 - RNA, 32 nt, Homo Sapiens
agaaguacuguaaauaaaugcuuguaaauauu

SEQ ID NO: 364238 - RNA, 32 nt, Homo Sapiens
gaguuacaaaagacagacaacagaucauuaac

SEQ ID NO: 364239 - RNA, 32 nt, Homo Sapiens
caaccuuucgucccggcccuuucgguagcuac

SEQ ID NO: 364240 - RNA, 32 nt, Homo Sapiens
ccaccccggccgcuggaagcaggggaggugaa

SEQ ID NO: 364241 - RNA, 32 nt, Homo Sapiens
caaaacccaccuuguuggagccugcagggugg

SEQ ID NO: 364242 - RNA, 32 nt, Homo Sapiens
auuuuagauacugaaauugaaggaaagaaaau

SEQ ID NO: 364243 - RNA, 32 nt, Homo Sapiens
ucuugcugcugucucuugaggauacauuccaa

SEQ ID NO: 364244 - RNA, 32 nt, Homo Sapiens
gcacagauaaaacuuugugccauaauccuaau

SEQ ID NO: 364245 - RNA, 32 nt, Homo Sapiens
agcaggcagaaauccgcuucugagagagggcu

SEQ ID NO: 364246 - RNA, 32 nt, Homo Sapiens
aggacauagcacccucaucugggaauagggaa

SEQ ID NO: 364247 - RNA, 32 nt, Homo Sapiens
gaccagcccagccccaggaugugucgcaccag

SEQ ID NO: 364248 - RNA, 32 nt, Homo Sapiens
aguauaaaaauauuuuggacaguugcuuaaca

SEQ ID NO: 364249 - RNA, 32 nt, Homo Sapiens
uggcgcugcucccagagccgugggucccagac

SEQ ID NO: 364250 - RNA, 32 nt, Homo Sapiens
gcucaagcauggcggcggcggcauugggcagc

SEQ ID NO: 364251 - RNA, 32 nt, Homo Sapiens
gugaugauauuuuuauucguugcuuuuuacuu

SEQ ID NO: 364252 - RNA, 32 nt, Homo Sapiens
cccaugcaggagggaaggcgucguagggacag

SEQ ID NO: 364253 - RNA, 32 nt, Homo Sapiens
ccucaguauacaucagagaacacacacaggag

SEQ ID NO: 364254 - RNA, 32 nt, Homo Sapiens
uguaaaucaaggaagccaucauuaaauuguuu

SEQ ID NO: 364255 - RNA, 32 nt, Homo Sapiens
uaggccaggaccagcucaugcguucucauucu

SEQ ID NO: 364256 - RNA, 32 nt, Homo Sapiens
guucggcgcgcccgcccaccccugccccuccu

SEQ ID NO: 364257 - RNA, 32 nt, Homo Sapiens
auuuuccucaguacaauuuugcuggccuuaac

SEQ ID NO: 364258 - RNA, 32 nt, Homo Sapiens
agggaguacuuuucuuuuuauauuucuaugcu

SEQ ID NO: 364259 - RNA, 32 nt, Homo Sapiens
uaccaaauuaagaugguaagaccucugagacc

SEQ ID NO: 364260 - RNA, 32 nt, Homo Sapiens
uucguaaucuucaucaagaaguuuuuaaaagg

SEQ ID NO: 364261 - RNA, 31 nt, Homo Sapiens
gcagaacuccagguccucugaguuaaaggaa

SEQ ID NO: 364262 - RNA, 32 nt, Homo Sapiens
gggugcacugccugggugccgugggagaggcc

SEQ ID NO: 364263 - RNA, 32 nt, Homo Sapiens
uccagagauuaaaaacagaaauauggaaaagc

SEQ ID NO: 364264 - RNA, 32 nt, Homo Sapiens
aaugcacugguaaaaacaaaauaaauagauga

SEQ ID NO: 364265 - RNA, 32 nt, Homo Sapiens
uacgaaucaauauauauguugauaucaugagu

SEQ ID NO: 364266 - RNA, 32 nt, Homo Sapiens
cuuggagcuggugggcaccucccuguucugca

SEQ ID NO: 364267 - RNA, 32 nt, Homo Sapiens
aaucucucagaggagcucugcaagucucagcu

SEQ ID NO: 364268 - RNA, 32 nt, Homo Sapiens
aggccuuccgccuuguggagaaauccugccca

SEQ ID NO: 364269 - RNA, 32 nt, Homo Sapiens
ggacucagguucgcccucugggccagguccuu

SEQ ID NO: 364270 - RNA, 32 nt, Homo Sapiens
cugguuuccuuccacucuccacggccgcacgc

SEQ ID NO: 364271 - RNA, 32 nt, Homo Sapiens
ucaccuaacaguuacuuuacaauuaaacucaa

SEQ ID NO: 364272 - RNA, 32 nt, Homo Sapiens
gauucaggaugacguggaccuccgugacacac

SEQ ID NO: 364273 - RNA, 32 nt, Homo Sapiens
acuuucuggaccgcgugcuggaggggcgggcg

SEQ ID NO: 364274 - RNA, 32 nt, Homo Sapiens
acaguggcugguuuuaaaaauucuuuccacac

SEQ ID NO: 364275 - RNA, 32 nt, Homo Sapiens
ccagcaggcaccgacccccagcuccugcucua

SEQ ID NO: 364276 - RNA, 32 nt, Homo Sapiens
aacacugacaaucaaggcaacauaaugcuguu

SEQ ID NO: 364277 - RNA, 28 nt, Homo Sapiens
accucaauggcgaguuuguagggggcug

SEQ ID NO: 364278 - RNA, 32 nt, Homo Sapiens
aaaauugggggaggagcccagggccacauacc

SEQ ID NO: 364279 - RNA, 32 nt, Homo Sapiens
cuagugggacauuuuuagacuuugaugcucua

SEQ ID NO: 364280 - RNA, 32 nt, Homo Sapiens
cugcucagcaacuccaccugcccgccgcagga

SEQ ID NO: 364281 - RNA, 32 nt, Homo Sapiens
gcacuuuaugaaucaauuuuauuuuuaaaaua

SEQ ID NO: 364282 - RNA, 29 nt, Homo Sapiens
uuaccuuaaaguuuuuuguucuguuuuga

SEQ ID NO: 364283 - RNA, 32 nt, Homo Sapiens
agcuuguuauaaaauaaaaguggggguaaaaa

SEQ ID NO: 364284 - RNA, 32 nt, Homo Sapiens
gaagcgcaggacgcgccgccgcccgcgcucac

SEQ ID NO: 364285 - RNA, 32 nt, Homo Sapiens
auggagcgaggguggagggcgcgucagccacg

SEQ ID NO: 364286 - RNA, 32 nt, Homo Sapiens
cagcagcagcagcagccccugcucucccgccg

SEQ ID NO: 364287 - RNA, 32 nt, Homo Sapiens
cggccccgcccccgacaaggagcucgcucguu

SEQ ID NO: 364288 - RNA, 32 nt, Homo Sapiens
ggagaccccccucaccugacgugauugugcuc

SEQ ID NO: 364289 - RNA, 32 nt, Homo Sapiens
caugggguccacucagacaugcuugcucauuc

SEQ ID NO: 364290 - RNA, 31 nt, Homo Sapiens
ccaugcuggggguccgcacguggcuggagga

SEQ ID NO: 364291 - RNA, 32 nt, Homo Sapiens
gacggggcggguggacguggagccacaguucc

SEQ ID NO: 364292 - RNA, 32 nt, Homo Sapiens
acaggguuggugccuggcacugguguugcucc

SEQ ID NO: 364293 - RNA, 32 nt, Homo Sapiens
cgggaucccugugcacccggcgcagccuaccc

SEQ ID NO: 364294 - RNA, 32 nt, Homo Sapiens
acagcccacccuccccgcaccuccaggucucu

SEQ ID NO: 364295 - RNA, 32 nt, Homo Sapiens
ggggccugguguggauaaaagagacgaaaaag

SEQ ID NO: 364296 - RNA, 32 nt, Homo Sapiens
aauugucauguuuauaguuuuuccaaguacau

SEQ ID NO: 364297 - RNA, 32 nt, Homo Sapiens
ccagccugccccagccugccccagccucccag

SEQ ID NO: 364298 - RNA, 32 nt, Homo Sapiens
uuuuuguguacuuuuuggguuuuuaaaaaauu

SEQ ID NO: 364299 - RNA, 32 nt, Homo Sapiens
aggagggggaggagaccccugagacccagagg

SEQ ID NO: 364300 - RNA, 32 nt, Homo Sapiens
cuggguauccucccuuucuguaacagccucaa

SEQ ID NO: 364301 - RNA, 32 nt, Homo Sapiens
agaugggcucccuggcccccagcccaugccuc

SEQ ID NO: 364302 - RNA, 32 nt, Homo Sapiens
aauugcaauauuuguugagucccuaaaugaag

SEQ ID NO: 364303 - RNA, 32 nt, Homo Sapiens
aaauauagaaaguugauauucaaccucacaag

SEQ ID NO: 364304 - RNA, 32 nt, Homo Sapiens
ugugaaaaucaucagaacucuucacugaagcu

SEQ ID NO: 364305 - RNA, 32 nt, Homo Sapiens
aagcccgccgcgggccggcgugcgcuggucac

SEQ ID NO: 364306 - RNA, 32 nt, Homo Sapiens
cucggccccucgcccggcuuugccuaaccgcc

SEQ ID NO: 364307 - RNA, 32 nt, Homo Sapiens
uggccucguccucccccaccuaggccacgugu

SEQ ID NO: 364308 - RNA, 32 nt, Homo Sapiens
gagaaggggauuacaaucacauacgagugauc

SEQ ID NO: 364309 - RNA, 32 nt, Homo Sapiens
aaaguuuucuuuucuuuuuuuuuugggccccu

SEQ ID NO: 364310 - RNA, 32 nt, Homo Sapiens
uucaccaucucuacaccuaaauggaacccaga

SEQ ID NO: 364311 - RNA, 32 nt, Homo Sapiens
cccccucgccuucccccggcgccgacggccac

SEQ ID NO: 364312 - RNA, 32 nt, Homo Sapiens
ggucuuugggcaucgcggucugggguugggac

SEQ ID NO: 364313 - RNA, 32 nt, Homo Sapiens
ccucgacauuuucucccucuuucuucccauga

SEQ ID NO: 364314 - RNA, 32 nt, Homo Sapiens
aagcccuuauugaauucacuccugcuuuccuc

SEQ ID NO: 364315 - RNA, 32 nt, Homo Sapiens
uuuuguuuuuauuauuguuaaucuuuucuaca

SEQ ID NO: 364316 - RNA, 32 nt, Homo Sapiens
acccaaauauauucaguccuuauuguuuuaau

SEQ ID NO: 364317 - RNA, 32 nt, Homo Sapiens
gggguggaggcacaaccucuccccuaacccug

SEQ ID NO: 364318 - RNA, 32 nt, Homo Sapiens
uaaaaacccagcugccuuggcugcacaucuga

SEQ ID NO: 364319 - RNA, 32 nt, Homo Sapiens
gucagaaaacaaguauugucagguauucucuc

SEQ ID NO: 364320 - RNA, 32 nt, Homo Sapiens
ccacaccagaaagggguauguugggggauugg

SEQ ID NO: 364321 - RNA, 32 nt, Homo Sapiens
caugcacuguguguaauuuaaaaauuaaaugg

SEQ ID NO: 364322 - RNA, 32 nt, Homo Sapiens
caucugacccggagcgcccccaucugucuuca

SEQ ID NO: 364323 - RNA, 32 nt, Homo Sapiens
uucuuacagaaauuuuucaaaggaaucaauuu

SEQ ID NO: 364324 - RNA, 32 nt, Homo Sapiens
acugcgggcuccugagccugcuucugccugcu

SEQ ID NO: 364325 - RNA, 32 nt, Homo Sapiens
cuauuuuaccuggccuccagggccuguugaug

SEQ ID NO: 364326 - RNA, 32 nt, Homo Sapiens
cuggcucccggggaacauucagagcaugauug

SEQ ID NO: 364327 - RNA, 32 nt, Homo Sapiens
cccuuaaugucauuccucucucuguguaucug

SEQ ID NO: 364328 - RNA, 32 nt, Homo Sapiens
aggcgggacgcacgcacccggcgaagguugcu

SEQ ID NO: 364329 - RNA, 32 nt, Homo Sapiens
gcauagucaggaacuuuuuuuauuucuuuuag

SEQ ID NO: 364330 - RNA, 32 nt, Homo Sapiens
ugagaacacuuuccccaccucccuccacagac

SEQ ID NO: 364331 - RNA, 32 nt, Homo Sapiens
gcugcccgaggaccggccgccccgccaaagcg

SEQ ID NO: 364332 - RNA, 32 nt, Homo Sapiens
cuaugcuccgaguagaguucaucuuuauauua

SEQ ID NO: 364333 - RNA, 32 nt, Homo Sapiens
ggggagggcaucucccugcuccccucaacccc

SEQ ID NO: 364334 - RNA, 32 nt, Homo Sapiens
ccccgagcgccgcuccggcugcaccgcgcucg

SEQ ID NO: 364335 - RNA, 32 nt, Homo Sapiens
uaauaucguuuuuguuaaacugaauagaauug

SEQ ID NO: 364336 - RNA, 32 nt, Homo Sapiens
uacugcaauauuuggauugucauucuuacaaa

SEQ ID NO: 364337 - RNA, 32 nt, Homo Sapiens
gacaacaauuuaaugucacuaauuuucaaaau

SEQ ID NO: 364338 - RNA, 32 nt, Homo Sapiens
acucccggcugccuuuuucaccucugacagag

SEQ ID NO: 364339 - RNA, 32 nt, Homo Sapiens
cugucaguguuuggugcacgcuggggaagaau

SEQ ID NO: 364340 - RNA, 32 nt, Homo Sapiens
guuccccugauccccaggacaucggcuuccac

SEQ ID NO: 364341 - RNA, 32 nt, Homo Sapiens
agggcuggagagaggguggcggggcugcgggc

SEQ ID NO: 364342 - RNA, 32 nt, Homo Sapiens
auuaaaaguuaaaaguucuuacuaauaguagu

SEQ ID NO: 364343 - RNA, 32 nt, Homo Sapiens
uguguaccaaaaugugaauuacuuuguacgau

SEQ ID NO: 364344 - RNA, 32 nt, Homo Sapiens
gcugucaggcauuucguuguuguuuuuaaacu

SEQ ID NO: 364345 - RNA, 32 nt, Homo Sapiens
aaagaaaaacgaauguucaucugcuuuaauca

SEQ ID NO: 364346 - RNA, 32 nt, Homo Sapiens
gcgcgcgggcgcggccgacagugccugauuug

SEQ ID NO: 364347 - RNA, 32 nt, Homo Sapiens
uaauacuugaugcaugcacacacacacacaca

SEQ ID NO: 364348 - RNA, 32 nt, Homo Sapiens
cuuuaagaaaauaguuuaaacaauuugucaaa

SEQ ID NO: 364349 - RNA, 32 nt, Homo Sapiens
agggcgcgcauagcgcccacgcacgcgcacug

SEQ ID NO: 364350 - RNA, 32 nt, Homo Sapiens
gcgaugguucaacagcucgcccugccccaagu

SEQ ID NO: 364351 - RNA, 32 nt, Homo Sapiens
guguuauggaagauaauuuuguacugugcugu

SEQ ID NO: 364352 - RNA, 32 nt, Homo Sapiens
acuuaugccucacuccccuccucccgcuccaa

SEQ ID NO: 364353 - RNA, 32 nt, Homo Sapiens
caugauaaaugcaagaaagaaaacauuuugau

SEQ ID NO: 364354 - RNA, 31 nt, Homo Sapiens
gaacgagggcagguuuuuaauauggcauaaa

SEQ ID NO: 364355 - RNA, 32 nt, Homo Sapiens
aauuugauaauuauaggacguuagcaugcaua

SEQ ID NO: 364356 - RNA, 32 nt, Homo Sapiens
uucuguccuguuugccacuucauuucauuucc

SEQ ID NO: 364357 - RNA, 32 nt, Homo Sapiens
ucuggagggcagcaggaaggcuggggaauucc

SEQ ID NO: 364358 - RNA, 32 nt, Homo Sapiens
aggguggaaggggcccugggcgagccuguaga

SEQ ID NO: 364359 - RNA, 32 nt, Homo Sapiens
uucagagauagauaauguuccaaacucuugag

SEQ ID NO: 364360 - RNA, 32 nt, Homo Sapiens
accuuuuugucaacacucuguaucuaguuaau

SEQ ID NO: 364361 - RNA, 32 nt, Homo Sapiens
augaacucuaagauuauuaaauaguauauuuu

SEQ ID NO: 364362 - RNA, 32 nt, Homo Sapiens
guggguaggggucucguaaggcagauggcgaa

SEQ ID NO: 364363 - RNA, 32 nt, Homo Sapiens
ucagcgaugaggggggccgagcaggggcugcc

SEQ ID NO: 364364 - RNA, 32 nt, Homo Sapiens
cccagcccaccccaccgucccacacauugcug

SEQ ID NO: 364365 - RNA, 32 nt, Homo Sapiens
agcuguggucugaccuaguuaauuuacaaaua

SEQ ID NO: 364366 - RNA, 32 nt, Homo Sapiens
cccaauggacacacuccaaaauggccaguggg

SEQ ID NO: 364367 - RNA, 32 nt, Homo Sapiens
gaaaaaccaccaucgugucacgucgacgaugc

SEQ ID NO: 364368 - RNA, 32 nt, Homo Sapiens
uucuaaggaaaagaagcuuugggggcucauuu

SEQ ID NO: 364369 - RNA, 32 nt, Homo Sapiens
aguguggagauuagauuaaauguauguaagac

SEQ ID NO: 364370 - RNA, 32 nt, Homo Sapiens
aagguccucugaggaucagaucaugcaugcgc

SEQ ID NO: 364371 - RNA, 32 nt, Homo Sapiens
gacuagaauuaauauauuuauaaagaaagaga

SEQ ID NO: 364372 - RNA, 32 nt, Homo Sapiens
acuuuccucccauuuuaccacuuuaaacaccc

SEQ ID NO: 364373 - RNA, 32 nt, Homo Sapiens
ucuaaagugcaacaaggaugaauagaaugggc

SEQ ID NO: 364374 - RNA, 32 nt, Homo Sapiens
gaaaaugucuguuuuccaaagauaauguuaua

SEQ ID NO: 364375 - RNA, 32 nt, Homo Sapiens
ugcaguuaaugucuuauuuuggcugugauucu

SEQ ID NO: 364376 - RNA, 32 nt, Homo Sapiens
gagacagaaaauaccuuauuaucugcagggac

SEQ ID NO: 364377 - RNA, 32 nt, Homo Sapiens
aucugguuaccaaacauaaaugcugaacauuc

SEQ ID NO: 364378 - RNA, 32 nt, Homo Sapiens
ugucaccagaaagcugcuguuuuggguucugc

SEQ ID NO: 364379 - RNA, 32 nt, Homo Sapiens
agccagccugacguggcugccuuccucaugag

SEQ ID NO: 364380 - RNA, 32 nt, Homo Sapiens
gugcagcacuguaauguaaaugaacuuuacuc

SEQ ID NO: 364381 - RNA, 32 nt, Homo Sapiens
caggccuaggagaggacaggugcagcucuugc

SEQ ID NO: 364382 - RNA, 32 nt, Homo Sapiens
ccuuggccggugacggcugugacagugauggc

SEQ ID NO: 364383 - RNA, 32 nt, Homo Sapiens
ucugcaguuguacagccacuguacagcuaaca

SEQ ID NO: 364384 - RNA, 32 nt, Homo Sapiens
cagauguauuauguaugaacuuuguacuaugu

SEQ ID NO: 364385 - RNA, 32 nt, Homo Sapiens
gcaacuacaaauagcagagugagccaggcggu

SEQ ID NO: 364386 - RNA, 32 nt, Homo Sapiens
cugagcauauuuaaaacaaagaagcuagaaau

SEQ ID NO: 364387 - RNA, 32 nt, Homo Sapiens
uucuguucgggcccuccuuuggugggaaggca

SEQ ID NO: 364388 - RNA, 32 nt, Homo Sapiens
aucacaaauuucacuuauaccugcuaucagca

SEQ ID NO: 364389 - RNA, 32 nt, Homo Sapiens
aagagaaacuugcagugaaaaggaguuuuuuc

SEQ ID NO: 364390 - RNA, 32 nt, Homo Sapiens
aguccaaugaaaccucuuuuuguuccccguuu

SEQ ID NO: 364391 - RNA, 32 nt, Homo Sapiens
uaauguuccagcuuuaccccagccuuaaucuu

SEQ ID NO: 364392 - RNA, 32 nt, Homo Sapiens
uauagccccugcuucuggauagaguaaagaaa

SEQ ID NO: 364393 - RNA, 32 nt, Homo Sapiens
ucaguuauuacugucacuaucacucaggauga

SEQ ID NO: 364394 - RNA, 32 nt, Homo Sapiens
ucuuagggauacuugaacacaaacacugguag

SEQ ID NO: 364395 - RNA, 32 nt, Homo Sapiens
ucggcucgcggauccagcugcagagcgacgug

SEQ ID NO: 364396 - RNA, 32 nt, Homo Sapiens
uaggucagggagugggggagggggcaaaugag

SEQ ID NO: 364397 - RNA, 32 nt, Homo Sapiens
aacaauagugauugauagaguguuaucaguca

SEQ ID NO: 364398 - RNA, 32 nt, Homo Sapiens
ccgccuugccguccagccuguccuuggugugg

SEQ ID NO: 364399 - RNA, 32 nt, Homo Sapiens
agaagcaauacagcauaucugcuuuugccuuc

SEQ ID NO: 364400 - RNA, 32 nt, Homo Sapiens
uugauucucuuucuccuucucucagggcuuuu

SEQ ID NO: 364401 - RNA, 32 nt, Homo Sapiens
uaggcgagagccugggguggggcgggaggggg

SEQ ID NO: 364402 - RNA, 32 nt, Homo Sapiens
aagaguaucuucugcucuacauuacuggaaac

SEQ ID NO: 364403 - RNA, 29 nt, Homo Sapiens
agaaauggaggccagagacaaacaaguac

SEQ ID NO: 364404 - RNA, 32 nt, Homo Sapiens
ccuucagugagccccuccccagccagcccuuc

SEQ ID NO: 364405 - RNA, 32 nt, Homo Sapiens
auaggagggcaccacccacauggcaucagccu

SEQ ID NO: 364406 - RNA, 31 nt, Homo Sapiens
auguuaacaaauuuuagagauaauguauuuu

SEQ ID NO: 364407 - RNA, 32 nt, Homo Sapiens
guguuccugcuucuaacagacuuuguucuuag

SEQ ID NO: 364408 - RNA, 32 nt, Homo Sapiens
ccaucguugcugugauuucuuacacuggcuau

SEQ ID NO: 364409 - RNA, 32 nt, Homo Sapiens
cucccuccagcaugggccugugucucagcucu

SEQ ID NO: 364410 - RNA, 32 nt, Homo Sapiens
caucugcccgucucccuggcccaccauguggc

SEQ ID NO: 364411 - RNA, 32 nt, Homo Sapiens
ucauaggacucaauggagagugaggcagcugg

SEQ ID NO: 364412 - RNA, 32 nt, Homo Sapiens
auuuuaagggaagagagagaaaaacacccuua

SEQ ID NO: 364413 - RNA, 32 nt, Homo Sapiens
aaauuuuguaugguaaaggaucaauaaaauga

SEQ ID NO: 364414 - RNA, 32 nt, Homo Sapiens
agacacacagcagaggcacacacacacuuggg

SEQ ID NO: 364415 - RNA, 32 nt, Homo Sapiens
aggcuauuuccaagucccccaaagauggucac

SEQ ID NO: 364416 - RNA, 32 nt, Homo Sapiens
uucccggcuuucgguccggaggaggcgggagc

SEQ ID NO: 364417 - RNA, 32 nt, Homo Sapiens
cagcauggaaaacaauguaacuuuagaacauu

SEQ ID NO: 364418 - RNA, 32 nt, Homo Sapiens
ccaacucuucaccacacccuguauucuacaac

SEQ ID NO: 364419 - RNA, 32 nt, Homo Sapiens
agcugugaacaaagcucauuuauuugaaauaa

SEQ ID NO: 364420 - RNA, 32 nt, Homo Sapiens
ccccaacaggacagggcuucccugcccagaau

SEQ ID NO: 364421 - RNA, 32 nt, Homo Sapiens
aauuugugugaagagcauaaggcgcuguuucu

SEQ ID NO: 364422 - RNA, 32 nt, Homo Sapiens
uaacuauuuuaaaaucguauucuauuuugggg

SEQ ID NO: 364423 - RNA, 32 nt, Homo Sapiens
gcugccaucagggaucuuccccugccccgcaa

SEQ ID NO: 364424 - RNA, 32 nt, Homo Sapiens
cuuccuuaaaaugucauucauaggagauguac

SEQ ID NO: 364425 - RNA, 32 nt, Homo Sapiens
aaauaggcccccgggggcgguggcggcggcgg

SEQ ID NO: 364426 - RNA, 32 nt, Homo Sapiens
ugucaugucugcuugucaaaagaaauaauccc

SEQ ID NO: 364427 - RNA, 32 nt, Homo Sapiens
gcaccguuuuuaccauugaugaaaccacaggg

SEQ ID NO: 364428 - RNA, 32 nt, Homo Sapiens
auucuuaugucuauagacuuccaaucagaagu

SEQ ID NO: 364429 - RNA, 32 nt, Homo Sapiens
uuucuguaauuuucuuaccaucggguauuuuu

SEQ ID NO: 364430 - RNA, 32 nt, Homo Sapiens
agagggaaaaggaaaaaacaagccggcuacgg

SEQ ID NO: 364431 - RNA, 32 nt, Homo Sapiens
auuggcauugcuggauuauaaacucuauaucu

SEQ ID NO: 364432 - RNA, 29 nt, Homo Sapiens
uaucagaaguagcuguauuuucuacagau

SEQ ID NO: 364433 - RNA, 32 nt, Homo Sapiens
uaaaacaaucugggauggaacagaggaaauau

SEQ ID NO: 364434 - RNA, 27 nt, Homo Sapiens
ugacauuaauaaaauguucaacacuuu

SEQ ID NO: 364435 - RNA, 32 nt, Homo Sapiens
cuccucgcccgacuucggccugucccucucuc

SEQ ID NO: 364436 - RNA, 32 nt, Homo Sapiens
aguggcuaggucuccuuggacugagcauggac

SEQ ID NO: 364437 - RNA, 32 nt, Homo Sapiens
ucaagccaauuucagucagggauuugaauugu

SEQ ID NO: 364438 - RNA, 32 nt, Homo Sapiens
ucucagggaagcccagcuccagggccagauga

SEQ ID NO: 364439 - RNA, 32 nt, Homo Sapiens
acucucauuuuaaacuucuccucuccccagau

SEQ ID NO: 364440 - RNA, 32 nt, Homo Sapiens
gggacagggagaaaaaaguuguggagaguagc

SEQ ID NO: 364441 - RNA, 29 nt, Homo Sapiens
ccgcaugagagaugacucugcuaugcgac

SEQ ID NO: 364442 - RNA, 32 nt, Homo Sapiens
ugugggcugcgguggcucuggagcuggucagc

SEQ ID NO: 364443 - RNA, 32 nt, Homo Sapiens
ugagccgcaggaguucuuagcuccucagcgag

SEQ ID NO: 364444 - RNA, 32 nt, Homo Sapiens
cacccagagcccccuccccagcccucaggccc

SEQ ID NO: 364445 - RNA, 32 nt, Homo Sapiens
ucuccccggccgcgucacugcggugucgccca

SEQ ID NO: 364446 - RNA, 32 nt, Homo Sapiens
cuucuguggccuccauccccucaugggugcug

SEQ ID NO: 364447 - RNA, 32 nt, Homo Sapiens
uuacguuuacgacuuucuucugaacugccgua

SEQ ID NO: 364448 - RNA, 29 nt, Homo Sapiens
ccuggauaaaguuccucauuucaaacagu

SEQ ID NO: 364449 - RNA, 32 nt, Homo Sapiens
ucccuagaccucuggacccagcauaaggcucc

SEQ ID NO: 364450 - RNA, 31 nt, Homo Sapiens
agccaccagcacugccuggcuccacgugccu

SEQ ID NO: 364451 - RNA, 32 nt, Homo Sapiens
cugaggcccucuaggaggaaagcccagaggga

SEQ ID NO: 364452 - RNA, 32 nt, Homo Sapiens
uacgugugcagggcccaaggcugggccucccu

SEQ ID NO: 364453 - RNA, 32 nt, Homo Sapiens
auuugaauuuaaauauguuuaguacaauccac

SEQ ID NO: 364454 - RNA, 32 nt, Homo Sapiens
uuuuacaaggugauguaaucagcuuguuguag

SEQ ID NO: 364455 - RNA, 32 nt, Homo Sapiens
guaguauaauuggacaggauuuuccuccagaa

SEQ ID NO: 364456 - RNA, 32 nt, Homo Sapiens
agacugaagcccuuugggccagcccuucccuc

SEQ ID NO: 364457 - RNA, 32 nt, Homo Sapiens
cgccuguaaucccagcacuuugagaggccgag

SEQ ID NO: 364458 - RNA, 32 nt, Homo Sapiens
uggccaagcagggugcccaggggggugggcag

SEQ ID NO: 364459 - RNA, 32 nt, Homo Sapiens
uuacauuccauccagccugggcgacaagagca

SEQ ID NO: 364460 - RNA, 32 nt, Homo Sapiens
agccaggugggagccccgcagaugaggucucu

SEQ ID NO: 364461 - RNA, 32 nt, Homo Sapiens
cucccccuuccagaaaacccaggcaacagcca

SEQ ID NO: 364462 - RNA, 32 nt, Homo Sapiens
guaucucucauggugacuaauuccuugcuugu

SEQ ID NO: 364463 - RNA, 32 nt, Homo Sapiens
aagacguccggccgccuugacccaggcuaccc

SEQ ID NO: 364464 - RNA, 32 nt, Homo Sapiens
cccgagggcgguucccgggagccccguggguc

SEQ ID NO: 364465 - RNA, 28 nt, Homo Sapiens
gucuguguaguaaauuuuugacuaggaa

SEQ ID NO: 364466 - RNA, 32 nt, Homo Sapiens
uccccacacucuugcuucuccugggcaucugg

SEQ ID NO: 364467 - RNA, 28 nt, Homo Sapiens
uuuuugaaagauuagcucuguuuguaag

SEQ ID NO: 364468 - RNA, 32 nt, Homo Sapiens
ccucgcugcugucaucccacuccggcuccucu

SEQ ID NO: 364469 - RNA, 32 nt, Homo Sapiens
cauuuuuguuccagccucuucagacugugcau

SEQ ID NO: 364470 - RNA, 32 nt, Homo Sapiens
uggaucgcuccgccuguuuccuccccagcacc

SEQ ID NO: 364471 - RNA, 32 nt, Homo Sapiens
aagaggaaggacccugaaauguugccagaaau

SEQ ID NO: 364472 - RNA, 32 nt, Homo Sapiens
acaugauuugcaugauauuaacuuuuuggagu

SEQ ID NO: 364473 - RNA, 32 nt, Homo Sapiens
auauggagucucugcccugagaucuuccccau

SEQ ID NO: 364474 - RNA, 32 nt, Homo Sapiens
acaauggccccgggccucuucuacccauccau

SEQ ID NO: 364475 - RNA, 32 nt, Homo Sapiens
gcuggccuagcggccuggccccagugcgguuc

SEQ ID NO: 364476 - RNA, 32 nt, Homo Sapiens
cuuuaucagucuuuuuauuuuaugauuggugc

SEQ ID NO: 364477 - RNA, 32 nt, Homo Sapiens
gacgcgccccccaccccgcgcucccugaacug

SEQ ID NO: 364478 - RNA, 32 nt, Homo Sapiens
gauaugggccggggcggggggcagggaccccc

SEQ ID NO: 364479 - RNA, 32 nt, Homo Sapiens
cccagauagcugguggugggcgcuaauccucc

SEQ ID NO: 364480 - RNA, 32 nt, Homo Sapiens
auuucuugugugugcacaucacaccauuuccu

SEQ ID NO: 364481 - RNA, 32 nt, Homo Sapiens
uuuuugcauacuuauuucuacaugguuuaaau

SEQ ID NO: 364482 - RNA, 32 nt, Homo Sapiens
aaguagacaucuccccaccucuacccuaucag

SEQ ID NO: 364483 - RNA, 32 nt, Homo Sapiens
augcgaaaauacaaacaaaggacuuucucucc

SEQ ID NO: 364484 - RNA, 31 nt, Homo Sapiens
gaugggguuucacccuguuagccaggaaguu

SEQ ID NO: 364485 - RNA, 32 nt, Homo Sapiens
ccuuuagcagaugucauuauuuugauuuauuu

SEQ ID NO: 364486 - RNA, 32 nt, Homo Sapiens
ggaacacaauaaagauguauuuuuguaaaaaa

SEQ ID NO: 364487 - RNA, 32 nt, Homo Sapiens
caggcaggccaagcucuugguuaccugugcca

SEQ ID NO: 364488 - RNA, 32 nt, Homo Sapiens
gaugauggagaaucgugugaucagugugcuaa

SEQ ID NO: 364489 - RNA, 32 nt, Homo Sapiens
gcacaauuugaaaaugaugaacgaauuacacc

SEQ ID NO: 364490 - RNA, 32 nt, Homo Sapiens
acaagccuuugugccugcaucuccaggauguc

SEQ ID NO: 364491 - RNA, 32 nt, Homo Sapiens
cugaggaggggucaccugaggucaggauguca

SEQ ID NO: 364492 - RNA, 32 nt, Homo Sapiens
gauacccuugcgugcuguggagacccuacucu

SEQ ID NO: 364493 - RNA, 32 nt, Homo Sapiens
ggagcuuugugagcugcaggcauggcgauggu

SEQ ID NO: 364494 - RNA, 32 nt, Homo Sapiens
cugccuggagggcagggagugggagccaauga

SEQ ID NO: 364495 - RNA, 32 nt, Homo Sapiens
ugaguggcaaaauaaagaauagcaauuaaaaa

SEQ ID NO: 364496 - RNA, 32 nt, Homo Sapiens
gucuccucucuccgccauggcgugugcucgcc

SEQ ID NO: 364497 - RNA, 32 nt, Homo Sapiens
acacuaacuuuuaaaucaguguguguacugca

SEQ ID NO: 364498 - RNA, 32 nt, Homo Sapiens
augugggcgcccaaccugggcuccacacagca

SEQ ID NO: 364499 - RNA, 32 nt, Homo Sapiens
ugucacccuggcccuucucugcuuggauggug

SEQ ID NO: 364500 - RNA, 29 nt, Homo Sapiens
ccuuucaaaagaaaauauuuucuauuaug

SEQ ID NO: 364501 - RNA, 32 nt, Homo Sapiens
ucuuuuauuucuguuguuuccuuauuaaaaug

SEQ ID NO: 364502 - RNA, 32 nt, Homo Sapiens
aguccuccucccugguucuccucagccgcugu

SEQ ID NO: 364503 - RNA, 32 nt, Homo Sapiens
cccacccccacccaagauggagucuggcuuug

SEQ ID NO: 364504 - RNA, 30 nt, Homo Sapiens
cuugguggcugugcugcugauuaagccgua

SEQ ID NO: 364505 - RNA, 32 nt, Homo Sapiens
auuuuagccaagcuuauuuaagaucacaguga

SEQ ID NO: 364506 - RNA, 32 nt, Homo Sapiens
guggcguugggcccgcgcgggcgcucggguga

SEQ ID NO: 364507 - RNA, 32 nt, Homo Sapiens
auugucagcaugcacaaugccucugauucugc

SEQ ID NO: 364508 - RNA, 32 nt, Homo Sapiens
cucccaggcccaagcucugugugacccagaga

SEQ ID NO: 364509 - RNA, 32 nt, Homo Sapiens
aauuuauaacaugacucuggcuccacaguggu

SEQ ID NO: 364510 - RNA, 32 nt, Homo Sapiens
accccagcccgucccuuccccccgucuguaua

SEQ ID NO: 364511 - RNA, 32 nt, Homo Sapiens
ugugcuucucaguugcagaaaaugaacugcuu

SEQ ID NO: 364512 - RNA, 32 nt, Homo Sapiens
cacaauuuauauaaugacccagcaaaacacau

SEQ ID NO: 364513 - RNA, 32 nt, Homo Sapiens
ccugccacaucacacaguaucauuccaaauuc

SEQ ID NO: 364514 - RNA, 32 nt, Homo Sapiens
ucucagggccuccccccuccccgcucccuccc

SEQ ID NO: 364515 - RNA, 32 nt, Homo Sapiens
cagcugcuuucuguugucauugcuguuguccc

SEQ ID NO: 364516 - RNA, 32 nt, Homo Sapiens
gcuggccaccccacccacaccugucccuggcc

SEQ ID NO: 364517 - RNA, 32 nt, Homo Sapiens
uguuuuuugacuguugggcuuugggaagaugu

SEQ ID NO: 364518 - RNA, 32 nt, Homo Sapiens
ucagaaugaagauauagagaaacaaggaagaa

SEQ ID NO: 364519 - RNA, 32 nt, Homo Sapiens
ucaauguggaaagccagaaagagaugaagggc

SEQ ID NO: 364520 - RNA, 32 nt, Homo Sapiens
uaaauacauuuuaaaaaauuuuucugacaccc

SEQ ID NO: 364521 - RNA, 32 nt, Homo Sapiens
aaucugggaaaggguggggugcaagcuaacca

SEQ ID NO: 364522 - RNA, 32 nt, Homo Sapiens
gggagcggcagccgcaccggcccauagagcgc

SEQ ID NO: 364523 - RNA, 32 nt, Homo Sapiens
ucaggaacccucauccuucaaagacagccuca

SEQ ID NO: 364524 - RNA, 32 nt, Homo Sapiens
gaguucugcaguuuuuugaaguuuacaaauug

SEQ ID NO: 364525 - RNA, 32 nt, Homo Sapiens
ccuaugcuuccacuuuccuuuucccuccacca

SEQ ID NO: 364526 - RNA, 32 nt, Homo Sapiens
cccuccuucagcguccaggaggagcuggauuu

SEQ ID NO: 364527 - RNA, 32 nt, Homo Sapiens
accagcccuucgaggacaccccgguggugcaa

SEQ ID NO: 364528 - RNA, 32 nt, Homo Sapiens
gcagcggaggugccggcugcgcgggccccagu

SEQ ID NO: 364529 - RNA, 32 nt, Homo Sapiens
ugguggugugguucggagugaacuucuccuau

SEQ ID NO: 364530 - RNA, 32 nt, Homo Sapiens
gacugggaggaaaccaggcuggaccugggcag

SEQ ID NO: 364531 - RNA, 32 nt, Homo Sapiens
gaggcuccagcaucucuaguacuaccugaagg

SEQ ID NO: 364532 - RNA, 32 nt, Homo Sapiens
aaaugguaucuuuuuaaugaugcugagguaaa

SEQ ID NO: 364533 - RNA, 32 nt, Homo Sapiens
acuccagacuucuccuucuuuuuugcccuugg

SEQ ID NO: 364534 - RNA, 32 nt, Homo Sapiens
aauuaaaacugggaaauagaaacaugaacuga

SEQ ID NO: 364535 - RNA, 32 nt, Homo Sapiens
uccauuauacccaugacauagccuauggucau

SEQ ID NO: 364536 - RNA, 32 nt, Homo Sapiens
ucccguaggcucgguuccccccggcccuacag

SEQ ID NO: 364537 - RNA, 30 nt, Homo Sapiens
aaagacuugcuaauguuugagagugaacgu

SEQ ID NO: 364538 - RNA, 32 nt, Homo Sapiens
gaagaggagcagcuuugccuggaaggggccuc

SEQ ID NO: 364539 - RNA, 32 nt, Homo Sapiens
caccguuuuuuaaacacccccaucccucggga

SEQ ID NO: 364540 - RNA, 32 nt, Homo Sapiens
ccccccagccccuccccuccccauaccaaagu

SEQ ID NO: 364541 - RNA, 32 nt, Homo Sapiens
ccacgaacccaccagaaggaagaaacucagaa

SEQ ID NO: 364542 - RNA, 32 nt, Homo Sapiens
uccguuucauuauuuggaacucugccaauaag

SEQ ID NO: 364543 - RNA, 32 nt, Homo Sapiens
acaguggcccccagccucggccaggccugcuc

SEQ ID NO: 364544 - RNA, 32 nt, Homo Sapiens
caggcgcagccggccacgauccugcccauccu

SEQ ID NO: 364545 - RNA, 32 nt, Homo Sapiens
agaagugccucagaugcauccuccccuucucu

SEQ ID NO: 364546 - RNA, 32 nt, Homo Sapiens
ucuaggucuaaaaagcacuucaugagaugcua

SEQ ID NO: 364547 - RNA, 32 nt, Homo Sapiens
ccagcccagcccaguccgagcgcggacccggc

SEQ ID NO: 364548 - RNA, 32 nt, Homo Sapiens
ucucggcaccagugccucagugcugcaauuga

SEQ ID NO: 364549 - RNA, 32 nt, Homo Sapiens
auuugugaaucuugauuucaguuuuuuaugua

SEQ ID NO: 364550 - RNA, 32 nt, Homo Sapiens
gaguggguggccgcgcucggagggaggugccg

SEQ ID NO: 364551 - RNA, 32 nt, Homo Sapiens
caacucggggccgcaucaacgacucagcuuug

SEQ ID NO: 364552 - RNA, 32 nt, Homo Sapiens
gccaccugcaacuuaugugcacuguuguaaac

SEQ ID NO: 364553 - RNA, 32 nt, Homo Sapiens
uuuggacucccacucucaagacuccucacuug

SEQ ID NO: 364554 - RNA, 32 nt, Homo Sapiens
uggggauucagagccagcggcggaaggaacac

SEQ ID NO: 364555 - RNA, 32 nt, Homo Sapiens
uagcucagugacuguguugugauucauaguac

SEQ ID NO: 364556 - RNA, 32 nt, Homo Sapiens
acuuacaaacaagcccacauauuuucaugaaa

SEQ ID NO: 364557 - RNA, 32 nt, Homo Sapiens
gcggggagagggcgcgggagcggcucgugcgg

SEQ ID NO: 364558 - RNA, 32 nt, Homo Sapiens
uucagugccucccaggaagacacauggccuuu

SEQ ID NO: 364559 - RNA, 32 nt, Homo Sapiens
auccugaaauaccaagagcagaucauauauuu

SEQ ID NO: 364560 - RNA, 32 nt, Homo Sapiens
gccagccgcggcggcgcgacucgggcuccgga

SEQ ID NO: 364561 - RNA, 32 nt, Homo Sapiens
gggagguucagcaaggugucuaguccagcucc

SEQ ID NO: 364562 - RNA, 32 nt, Homo Sapiens
auuucugcagcagugguugcgcugcuuugaac

SEQ ID NO: 364563 - RNA, 31 nt, Homo Sapiens
gggcuuccacccucaugaacacagggauugg

SEQ ID NO: 364564 - RNA, 32 nt, Homo Sapiens
acuucaugguuagcagaaaugacuucaucugu

SEQ ID NO: 364565 - RNA, 32 nt, Homo Sapiens
guaauuacucaacugaauaaaugacugagaac

SEQ ID NO: 364566 - RNA, 32 nt, Homo Sapiens
auccgccgcccggauccucgccgcccucccua

SEQ ID NO: 364567 - RNA, 32 nt, Homo Sapiens
agaaauucuucuguuccuuccaucuaacugua

SEQ ID NO: 364568 - RNA, 32 nt, Homo Sapiens
ggcuuucuaauuucagguuaaucuucaugacu

SEQ ID NO: 364569 - RNA, 32 nt, Homo Sapiens
gaguuggauuagauguuuuucuuacugucacu

SEQ ID NO: 364570 - RNA, 32 nt, Homo Sapiens
cagccaugcuuccuguacggccugcagaacug

SEQ ID NO: 364571 - RNA, 32 nt, Homo Sapiens
acucccccgcccugcuggccuccgcuuuccuc

SEQ ID NO: 364572 - RNA, 32 nt, Homo Sapiens
uaucgauguugcaauaauacaaaccaauguac

SEQ ID NO: 364573 - RNA, 32 nt, Homo Sapiens
uggcggggcuggagggcuggggugcacuuuag

SEQ ID NO: 364574 - RNA, 32 nt, Homo Sapiens
gacuuaaaguuccacauggcuggggaggccuc

SEQ ID NO: 364575 - RNA, 32 nt, Homo Sapiens
caccugucauuccagcacuuugagaggccaag

SEQ ID NO: 364576 - RNA, 32 nt, Homo Sapiens
cuacauguuuaaaaucuugggaaucugcuuga

SEQ ID NO: 364577 - RNA, 32 nt, Homo Sapiens
ucgguccucuuuuuccucucucgcuuuaguuu

SEQ ID NO: 364578 - RNA, 32 nt, Homo Sapiens
gcggcccggcuagcucugccuacgcgcucagc

SEQ ID NO: 364579 - RNA, 32 nt, Homo Sapiens
gguccggggucugggcgccgcgucgacggcgg

SEQ ID NO: 364580 - RNA, 32 nt, Homo Sapiens
gccgugcgcucccgggcugcgaggucuggcua

SEQ ID NO: 364581 - RNA, 32 nt, Homo Sapiens
cgccaccucuggucccuggcccugaacccugc

SEQ ID NO: 364582 - RNA, 32 nt, Homo Sapiens
ccucaccacggggcuccugugagucugggggg

SEQ ID NO: 364583 - RNA, 32 nt, Homo Sapiens
uuacuguauuaguccauuuucacgcugcugau

SEQ ID NO: 364584 - RNA, 32 nt, Homo Sapiens
gggacaauaaguuguggaaagccacaagaggc

SEQ ID NO: 364585 - RNA, 32 nt, Homo Sapiens
gccacacaucccgcccccucccggaggcagcu

SEQ ID NO: 364586 - RNA, 32 nt, Homo Sapiens
gagguuccgccgcuccucugcugucagcgccg

SEQ ID NO: 364587 - RNA, 32 nt, Homo Sapiens
gcccggcucucgugcucuaggaccugcacggg

SEQ ID NO: 364588 - RNA, 32 nt, Homo Sapiens
uccuggugcagggccgaggggacacaaggacc

SEQ ID NO: 364589 - RNA, 32 nt, Homo Sapiens
ccucuuccccucaaccccggcccaggccgccc

SEQ ID NO: 364590 - RNA, 32 nt, Homo Sapiens
augguaagcguaaaguuuuuuuuuguuuuugu

SEQ ID NO: 364591 - RNA, 32 nt, Homo Sapiens
gacaacagacgagugccuccuuuacguuagag

SEQ ID NO: 364592 - RNA, 32 nt, Homo Sapiens
aguccgucuuguaaauguuuggcacuuugcua

SEQ ID NO: 364593 - RNA, 32 nt, Homo Sapiens
uuccugugaaauggaaaaacucaugaggcuga

SEQ ID NO: 364594 - RNA, 32 nt, Homo Sapiens
acccuagagcugugacguagaauaugugcugu

SEQ ID NO: 364595 - RNA, 32 nt, Homo Sapiens
uuucuguauaaaauguauaaagugggguuucu

SEQ ID NO: 364596 - RNA, 32 nt, Homo Sapiens
uuugcuguauaaauuauaagcaaugcuguaua

SEQ ID NO: 364597 - RNA, 32 nt, Homo Sapiens
guggggaaaguauguagauauacacaaauaua

SEQ ID NO: 364598 - RNA, 32 nt, Homo Sapiens
uguagucuguaaguaacaaacauuuuguuucc

SEQ ID NO: 364599 - RNA, 32 nt, Homo Sapiens
ccagggacaugaugaagagguuggugagcguc

SEQ ID NO: 364600 - RNA, 32 nt, Homo Sapiens
aguaggcauuaccauagacgacuccuagagga

SEQ ID NO: 364601 - RNA, 32 nt, Homo Sapiens
acagaagaugaccccagacagggcccugagga

SEQ ID NO: 364602 - RNA, 32 nt, Homo Sapiens
aguccccgacucgucccggcccguucggagcc

SEQ ID NO: 364603 - RNA, 32 nt, Homo Sapiens
ucagaacuaaaagggaacuuuuuuauguaaaa

SEQ ID NO: 364604 - RNA, 32 nt, Homo Sapiens
auaagcaggaccacugcuauccaucuuuuaug

SEQ ID NO: 364605 - RNA, 32 nt, Homo Sapiens
gcggggccgagcagggcggggcgggggcuuga

SEQ ID NO: 364606 - RNA, 32 nt, Homo Sapiens
cucaccguguggaaggccggccgcaaggagga

SEQ ID NO: 364607 - RNA, 32 nt, Homo Sapiens
agaagacucagggagcaggcucugccaaccca

SEQ ID NO: 364608 - RNA, 32 nt, Homo Sapiens
cgggggccugcuuacagaagcauucuggccau

SEQ ID NO: 364609 - RNA, 32 nt, Homo Sapiens
guugguguguuucauuuuuuuaagguuuaaau

SEQ ID NO: 364610 - RNA, 32 nt, Homo Sapiens
gcggaucugcccgccccgcucucccgaagcug

SEQ ID NO: 364611 - RNA, 32 nt, Homo Sapiens
gguguuucuuuuuguuggcuuuucauacucuc

SEQ ID NO: 364612 - RNA, 32 nt, Homo Sapiens
ucuaggguaauuacauauaugacuguaucaau

SEQ ID NO: 364613 - RNA, 32 nt, Homo Sapiens
ggcggcggcagcugcgcaaagugcggagugug

SEQ ID NO: 364614 - RNA, 32 nt, Homo Sapiens
ugcgggccgcccaggcccacuccagcuggcug

SEQ ID NO: 364615 - RNA, 32 nt, Homo Sapiens
cagcucgagacacccucgcucccccucacagu

SEQ ID NO: 364616 - RNA, 32 nt, Homo Sapiens
ugggauauuaaggcccuggugucuuacagaaa

SEQ ID NO: 364617 - RNA, 32 nt, Homo Sapiens
aaaugcaaaauaaacaaacaaacaaauaaaac

SEQ ID NO: 364618 - RNA, 32 nt, Homo Sapiens
guggcagcggcgacggcagcugcgacagcaac

SEQ ID NO: 364619 - RNA, 32 nt, Homo Sapiens
acccaagagcuuugggaggaaaugcucaguuc

SEQ ID NO: 364620 - RNA, 32 nt, Homo Sapiens
uucccacauaucuagugugaccuuuaaaaacc

SEQ ID NO: 364621 - RNA, 32 nt, Homo Sapiens
cugcuguccccucuugccccaacccccagcac

SEQ ID NO: 364622 - RNA, 32 nt, Homo Sapiens
ccugaggcccagagaccugcuguccuuuuucu

SEQ ID NO: 364623 - RNA, 32 nt, Homo Sapiens
uucgucccauucucguccucaugguggacaag

SEQ ID NO: 364624 - RNA, 32 nt, Homo Sapiens
cugaaguucagauauaauggaugguuugugac

SEQ ID NO: 364625 - RNA, 32 nt, Homo Sapiens
ggagccgagcgcggcgcggggccgagggacuc

SEQ ID NO: 364626 - RNA, 32 nt, Homo Sapiens
ugugucgggcuacuccacccuguccaccaugg

SEQ ID NO: 364627 - RNA, 32 nt, Homo Sapiens
gagcgcccgcggcugccuggccucagaagcga

SEQ ID NO: 364628 - RNA, 32 nt, Homo Sapiens
agggccucagaacucacaugucucucugaccu

SEQ ID NO: 364629 - RNA, 32 nt, Homo Sapiens
cauugugguuugcugcacccaucaacccguca

SEQ ID NO: 364630 - RNA, 32 nt, Homo Sapiens
gcaggcaucugauuugcauauucauucaugga

SEQ ID NO: 364631 - RNA, 32 nt, Homo Sapiens
acugcucggccgcggcugcccgcgcccccauc

SEQ ID NO: 364632 - RNA, 30 nt, Homo Sapiens
ugucuggccugugcugcgugggagccacug

SEQ ID NO: 364633 - RNA, 32 nt, Homo Sapiens
agggggaguugagcaggcgccagggcugucau

SEQ ID NO: 364634 - RNA, 32 nt, Homo Sapiens
caagaaagauaaaacuuaaaaucucccucucu

SEQ ID NO: 364635 - RNA, 32 nt, Homo Sapiens
guaugcccuuucgugacaagugccaagauugu

SEQ ID NO: 364636 - RNA, 32 nt, Homo Sapiens
aagaaauacuuauuauccacuugguaacagug

SEQ ID NO: 364637 - RNA, 32 nt, Homo Sapiens
cuaaacauauaaguagauuacaguauacuuau

SEQ ID NO: 364638 - RNA, 32 nt, Homo Sapiens
cuacccccacccaccuagccgccgggaccaug

SEQ ID NO: 364639 - RNA, 32 nt, Homo Sapiens
cguacaauccccagcccuuccagcuugggaac

SEQ ID NO: 364640 - RNA, 32 nt, Homo Sapiens
cugauggagcagcccagugucuggggcaaagu

SEQ ID NO: 364641 - RNA, 32 nt, Homo Sapiens
cuucagagagcacuucucucuuaugggguuca

SEQ ID NO: 364642 - RNA, 32 nt, Homo Sapiens
ggcagacaccucuggccugaagucacagcaga

SEQ ID NO: 364643 - RNA, 32 nt, Homo Sapiens
aguuuuauuucaaaagauuagguuucccaacu

SEQ ID NO: 364644 - RNA, 32 nt, Homo Sapiens
ccacuaguaggaagaaggaucuaaguaguuga

SEQ ID NO: 364645 - RNA, 32 nt, Homo Sapiens
gcugaugcacaauuacuuuuaagauuuaucaa

SEQ ID NO: 364646 - RNA, 32 nt, Homo Sapiens
acccgggaguccaggcccccagccccuccucc

SEQ ID NO: 364647 - RNA, 32 nt, Homo Sapiens
ccuuuuguucugcggcugccagccugccccac

SEQ ID NO: 364648 - RNA, 32 nt, Homo Sapiens
cuugaaagaaacaaagaucguguuuuugccac

SEQ ID NO: 364649 - RNA, 32 nt, Homo Sapiens
agagguuucagcgcugaggaggccugaguucc

SEQ ID NO: 364650 - RNA, 32 nt, Homo Sapiens
ggauuaagagggagggcggggacaacuggguc

SEQ ID NO: 364651 - RNA, 32 nt, Homo Sapiens
agggccgguguccgcgggaggguggcgcugcc

SEQ ID NO: 364652 - RNA, 32 nt, Homo Sapiens
auuuuuaaaauuugaaucuauuugagcuuuag

SEQ ID NO: 364653 - RNA, 32 nt, Homo Sapiens
aggccugccuccauguuacucccuuucucuua

SEQ ID NO: 364654 - RNA, 32 nt, Homo Sapiens
agcgggaggccccacccacuggagagccccgc

SEQ ID NO: 364655 - RNA, 32 nt, Homo Sapiens
accggcugccagcagggaaaugguccaggagu

SEQ ID NO: 364656 - RNA, 32 nt, Homo Sapiens
caggcgcgcgcccaaaggcuuugcgaggcuca

SEQ ID NO: 364657 - RNA, 31 nt, Homo Sapiens
uaugguuuaaauuguaaauguguuuuccccu

SEQ ID NO: 364658 - RNA, 32 nt, Homo Sapiens
agugggaagggcugggggagggggcacccagc

SEQ ID NO: 364659 - RNA, 32 nt, Homo Sapiens
uuauuuuagaaaaaacguacgaguuacauuua

SEQ ID NO: 364660 - RNA, 32 nt, Homo Sapiens
cggggccacaaggcgcugcgggcccaggugug

SEQ ID NO: 364661 - RNA, 32 nt, Homo Sapiens
auugggccaaaauguuucgaauuuauagaaau

SEQ ID NO: 364662 - RNA, 32 nt, Homo Sapiens
accaggaaagcgccuccaacccuagcaaaagu

SEQ ID NO: 364663 - RNA, 32 nt, Homo Sapiens
auauguacuuuuuaaugaacacgugucucaca

SEQ ID NO: 364664 - RNA, 32 nt, Homo Sapiens
agcacccugccaggccccugggcaucgccgga

SEQ ID NO: 364665 - RNA, 32 nt, Homo Sapiens
ggagaaugaagauaaguaauuuaccuguccag

SEQ ID NO: 364666 - RNA, 32 nt, Homo Sapiens
gccuggccucauauggcaugagggggagcugg

SEQ ID NO: 364667 - RNA, 32 nt, Homo Sapiens
gucaccccagaagccagagagacgcaucuguu

SEQ ID NO: 364668 - RNA, 32 nt, Homo Sapiens
gcagagccuguaccccuaacccuaacagcuaa

SEQ ID NO: 364669 - RNA, 32 nt, Homo Sapiens
uaugaaaauuuauuaagauaugacuuacaucc

SEQ ID NO: 364670 - RNA, 32 nt, Homo Sapiens
agccccggucccagcccaaacucaggcuggag

SEQ ID NO: 364671 - RNA, 32 nt, Homo Sapiens
cucauacauacugccgccugaggugccauggc

SEQ ID NO: 364672 - RNA, 32 nt, Homo Sapiens
ggagaggugucugcuaccuuuucacccagcau

SEQ ID NO: 364673 - RNA, 32 nt, Homo Sapiens
agcuaaacucggccaaccaaggcacgcagcau

SEQ ID NO: 364674 - RNA, 28 nt, Homo Sapiens
uuuuaaguuacagguuaaugagcaagca

SEQ ID NO: 364675 - RNA, 32 nt, Homo Sapiens
gcucugucugcguggcagcugguccccagccc

SEQ ID NO: 364676 - RNA, 32 nt, Homo Sapiens
agacccuggggugggaucagggaccaccccuc

SEQ ID NO: 364677 - RNA, 32 nt, Homo Sapiens
gaauaaucuauucauauccaucuucuggggac

SEQ ID NO: 364678 - RNA, 32 nt, Homo Sapiens
cccggcuuuuuuuuuucuuucuccuggccuuu

SEQ ID NO: 364679 - RNA, 32 nt, Homo Sapiens
ggaggaaacccccuugggugccccacacaggg

SEQ ID NO: 364680 - RNA, 32 nt, Homo Sapiens
aaccuuaguuuuuucuucuguccuuggagauu

SEQ ID NO: 364681 - RNA, 32 nt, Homo Sapiens
cacuagguugccucagaagcccuaagacugau

SEQ ID NO: 364682 - RNA, 32 nt, Homo Sapiens
cagaugucauguuagcugggagucuucccaca

SEQ ID NO: 364683 - RNA, 26 nt, Homo Sapiens
agacgcuuuccucuccuccuuuagag

SEQ ID NO: 364684 - RNA, 31 nt, Homo Sapiens
uuggagcggcacuggcacccgaguguacaag

SEQ ID NO: 364685 - RNA, 32 nt, Homo Sapiens
cugccacacaucuucccaguucucacauaggu

SEQ ID NO: 364686 - RNA, 32 nt, Homo Sapiens
ccuugcugccgccucucgccucacgcccccag

SEQ ID NO: 364687 - RNA, 32 nt, Homo Sapiens
gccugagcugucugucucguuucuguccgcgc

SEQ ID NO: 364688 - RNA, 32 nt, Homo Sapiens
aauacccaauacuauaguuuucaagacacaca

SEQ ID NO: 364689 - RNA, 32 nt, Homo Sapiens
acaguauuauaaaaucaaaauauggguaaaag

SEQ ID NO: 364690 - RNA, 32 nt, Homo Sapiens
guuggcuaaaagacguuacagccgcgagaccc

SEQ ID NO: 364691 - RNA, 32 nt, Homo Sapiens
gaggagggaauggcucuuucucagggacuguu

SEQ ID NO: 364692 - RNA, 32 nt, Homo Sapiens
uuaaacuaguuauuaaauuuguuuccuuccug

SEQ ID NO: 364693 - RNA, 32 nt, Homo Sapiens
uagggaauaugauagcuucgcaugguggugug

SEQ ID NO: 364694 - RNA, 32 nt, Homo Sapiens
uuauccugacacauuuucaagugauacaacug

SEQ ID NO: 364695 - RNA, 32 nt, Homo Sapiens
gcguagagggugcagggagcagacgggaggau

SEQ ID NO: 364696 - RNA, 32 nt, Homo Sapiens
agaggagaaaagggcuugggcccccagcccca

SEQ ID NO: 364697 - RNA, 32 nt, Homo Sapiens
gcaggguuuggaaaccugucucuaaguaaugc

SEQ ID NO: 364698 - RNA, 29 nt, Homo Sapiens
agugucucuauuucauaccacaaaggaac

SEQ ID NO: 364699 - RNA, 32 nt, Homo Sapiens
cggucggugaccacgcguugucccucggcuuu

SEQ ID NO: 364700 - RNA, 30 nt, Homo Sapiens
guuaucuccgguagcuucagggaaguaucg

SEQ ID NO: 364701 - RNA, 32 nt, Homo Sapiens
uggcccuuucccucuuugcaguucagucuaag

SEQ ID NO: 364702 - RNA, 30 nt, Homo Sapiens
uugccuaguaucccugcagcaauuuuuuaa

SEQ ID NO: 364703 - RNA, 32 nt, Homo Sapiens
ucugauuuuuauuuuugagguuuugucaacug

SEQ ID NO: 364704 - RNA, 32 nt, Homo Sapiens
cuaacagcaucucagggaauguccaucuggag

SEQ ID NO: 364705 - RNA, 32 nt, Homo Sapiens
aacugcggacauaauucuuuuauuauacaguu

SEQ ID NO: 364706 - RNA, 32 nt, Homo Sapiens
accuccugcccccacuuccacccuggcugcug

SEQ ID NO: 364707 - RNA, 32 nt, Homo Sapiens
aauauggacaccauggaaguacaggaucugag

SEQ ID NO: 364708 - RNA, 32 nt, Homo Sapiens
acugcaugaucaaagaugauguuucccucuuu

SEQ ID NO: 364709 - RNA, 32 nt, Homo Sapiens
gcugacuccacggauggagggcacacucccau

SEQ ID NO: 364710 - RNA, 32 nt, Homo Sapiens
acuacaggaugguggagcagggggcaucuuuu

SEQ ID NO: 364711 - RNA, 32 nt, Homo Sapiens
uugaagaauuuuauuguuuuuaucuuaaaauc

SEQ ID NO: 364712 - RNA, 32 nt, Homo Sapiens
uucucaacuucaucuauauaaaaucaggcuuu

SEQ ID NO: 364713 - RNA, 32 nt, Homo Sapiens
uggaaaaccuuauggaaaauaauuauaguaca

SEQ ID NO: 364714 - RNA, 31 nt, Homo Sapiens
auuuagcauuuuaugagagugcuguuggaaa

SEQ ID NO: 364715 - RNA, 32 nt, Homo Sapiens
caaaagaaaaagauuacccaaaaacugucuuu

SEQ ID NO: 364716 - RNA, 32 nt, Homo Sapiens
ucaaggcaaaggaaacagaccaccaccaacaa

SEQ ID NO: 364717 - RNA, 32 nt, Homo Sapiens
gauacuucucagucuucucuacucauucaaca

SEQ ID NO: 364718 - RNA, 32 nt, Homo Sapiens
gagccccaaggcguggggggaucacgucuguc

SEQ ID NO: 364719 - RNA, 32 nt, Homo Sapiens
agugaggaauggguccguacagccucugucug

SEQ ID NO: 364720 - RNA, 32 nt, Homo Sapiens
gagccuuucucugccucuuccuccccugucuu

SEQ ID NO: 364721 - RNA, 32 nt, Homo Sapiens
gggcacuguucgaugggcacggcgguccugca

SEQ ID NO: 364722 - RNA, 32 nt, Homo Sapiens
aggugucuaaauaguuuuaauuuuuguuacug

SEQ ID NO: 364723 - RNA, 32 nt, Homo Sapiens
ugaacacagguucugauguggaggaggcggug

SEQ ID NO: 364724 - RNA, 23 nt, Homo Sapiens
guaauaaaaaucauugucuuaag

SEQ ID NO: 364725 - RNA, 32 nt, Homo Sapiens
ccgaugcugaggccacccacugacccaacuga

SEQ ID NO: 364726 - RNA, 30 nt, Homo Sapiens
ggagcaggaggugggcgugcgggcguucga

SEQ ID NO: 364727 - RNA, 32 nt, Homo Sapiens
uauaaggugaauugugauuuaacuagugagaa

SEQ ID NO: 364728 - RNA, 32 nt, Homo Sapiens
cugaagcagauccuguauuugcuggagaaauu

SEQ ID NO: 364729 - RNA, 32 nt, Homo Sapiens
cuguucauuuauuuuucuucauugcaguggau

SEQ ID NO: 364730 - RNA, 32 nt, Homo Sapiens
ucggagggcgcuaugucguggcugggaagaug

SEQ ID NO: 364731 - RNA, 32 nt, Homo Sapiens
aaaaauaaaaaauaaaaaauaaauuuauccuu

SEQ ID NO: 364732 - RNA, 32 nt, Homo Sapiens
uucagacggaacaagcaucuuugcagucggaa

SEQ ID NO: 364733 - RNA, 32 nt, Homo Sapiens
cugcugaaguaucuccauguaaucacaauauc

SEQ ID NO: 364734 - RNA, 32 nt, Homo Sapiens
ugaauugucuuaauuuuagacccauuaaaaaa

SEQ ID NO: 364735 - RNA, 32 nt, Homo Sapiens
cccaaccccaaugggcauugacuguagaauac

SEQ ID NO: 364736 - RNA, 32 nt, Homo Sapiens
cugacucgcagaugaauccugccacacaugcu

SEQ ID NO: 364737 - RNA, 32 nt, Homo Sapiens
cagaacccuucuauuauauaaagcucaauguu

SEQ ID NO: 364738 - RNA, 32 nt, Homo Sapiens
uaaaaacaugcauauuuacugcagaaaauuug

SEQ ID NO: 364739 - RNA, 32 nt, Homo Sapiens
aggagguccugcugcuggcccgguagacggac

SEQ ID NO: 364740 - RNA, 32 nt, Homo Sapiens
cauguuauauuuuugguuucucucuacugauc

SEQ ID NO: 364741 - RNA, 32 nt, Homo Sapiens
caagcuuuccacucgaugggugccaaaaccgu

SEQ ID NO: 364742 - RNA, 32 nt, Homo Sapiens
cucagaggaagcagcccucccucgauggccuc

SEQ ID NO: 364743 - RNA, 32 nt, Homo Sapiens
acacauuuacuugaauaguacaaccuagagua

SEQ ID NO: 364744 - RNA, 32 nt, Homo Sapiens
cgccgcggucccauggaggaggaggcgagccg

SEQ ID NO: 364745 - RNA, 32 nt, Homo Sapiens
guacuugcucuugaugccuggcgggguggggu

SEQ ID NO: 364746 - RNA, 32 nt, Homo Sapiens
cccacccaaaaauaagcuaccauauagcuuau

SEQ ID NO: 364747 - RNA, 32 nt, Homo Sapiens
aaaaagccaaaauaaauauucuuccugauuaa

SEQ ID NO: 364748 - RNA, 32 nt, Homo Sapiens
auuuaaaaucauccugaaaguggugcuuuauc

SEQ ID NO: 364749 - RNA, 32 nt, Homo Sapiens
uauagaaguggaaacgcgcaguauuuguccuu

SEQ ID NO: 364750 - RNA, 32 nt, Homo Sapiens
gucgcgcugggccgccccggcgcagcugaacc

SEQ ID NO: 364751 - RNA, 32 nt, Homo Sapiens
gucgagcgugaagggggcuccgggccagggug

SEQ ID NO: 364752 - RNA, 32 nt, Homo Sapiens
gggaaguuuuaacuauaaagaaaagugauacc

SEQ ID NO: 364753 - RNA, 32 nt, Homo Sapiens
uuaaaucugcaccucucucuauuuuauuugcc

SEQ ID NO: 364754 - RNA, 32 nt, Homo Sapiens
ugcauuugaaacaaagugcuggcuuuuuugaa

SEQ ID NO: 364755 - RNA, 32 nt, Homo Sapiens
aaauuuuaaagguaauugauaauuaguauuua

SEQ ID NO: 364756 - RNA, 32 nt, Homo Sapiens
cucgucuuggccccaccgcccgggcugggcac

SEQ ID NO: 364757 - RNA, 32 nt, Homo Sapiens
aauuuccugacaccuuuccccagugagcgccc

SEQ ID NO: 364758 - RNA, 32 nt, Homo Sapiens
acgacgagggcuuauuuggcacacccagccug

SEQ ID NO: 364759 - RNA, 32 nt, Homo Sapiens
ucuucauggccauagcuuuuauucauuagcug

SEQ ID NO: 364760 - RNA, 32 nt, Homo Sapiens
aaagguccaugagcggaaggugaggcaccuga

SEQ ID NO: 364761 - RNA, 32 nt, Homo Sapiens
gacaggccagguggugggcauucucucuccaa

SEQ ID NO: 364762 - RNA, 32 nt, Homo Sapiens
gccugcuggccgugguccuggugcuggucauu

SEQ ID NO: 364763 - RNA, 32 nt, Homo Sapiens
cuacuugaguagacgaugaacuaguaaacaaa

SEQ ID NO: 364764 - RNA, 32 nt, Homo Sapiens
guauuugaacaaagcagaagguuaagucaggg

SEQ ID NO: 364765 - RNA, 32 nt, Homo Sapiens
ccccucccccgcagcagcgggccuugccgucg

SEQ ID NO: 364766 - RNA, 32 nt, Homo Sapiens
uguucuuaaaaugcuacuuaaaacuuugguug

SEQ ID NO: 364767 - RNA, 32 nt, Homo Sapiens
ugaaucacauucaacagagauauauucuagaa

SEQ ID NO: 364768 - RNA, 31 nt, Homo Sapiens
cggggugaugcaguugccccccgcgcugugc

SEQ ID NO: 364769 - RNA, 32 nt, Homo Sapiens
aauacugaacucugucugagugggaugguaug

SEQ ID NO: 364770 - RNA, 32 nt, Homo Sapiens
ccucccucgucccacccccacccaggcaggaa

SEQ ID NO: 364771 - RNA, 32 nt, Homo Sapiens
ggaaaguagcaaacagaagucaauaaauauuu

SEQ ID NO: 364772 - RNA, 32 nt, Homo Sapiens
gacugcccugagggcgggaaaggguggucacu

SEQ ID NO: 364773 - RNA, 32 nt, Homo Sapiens
cugacugcauuuuaaacaauuguucugguaac

SEQ ID NO: 364774 - RNA, 32 nt, Homo Sapiens
uugcuaaaaauuuacaaauuuucauuuugcag

SEQ ID NO: 364775 - RNA, 32 nt, Homo Sapiens
uagucgugccuccuuccaccucccucccggca

SEQ ID NO: 364776 - RNA, 32 nt, Homo Sapiens
augugggacuucgcuguuuuuaucuccaauaa

SEQ ID NO: 364777 - RNA, 32 nt, Homo Sapiens
uuuuguguacuuuuaaaauuguaucuuuccag

SEQ ID NO: 364778 - RNA, 32 nt, Homo Sapiens
agucaacuauuauuagauauuaacuuauuuuu

SEQ ID NO: 364779 - RNA, 32 nt, Homo Sapiens
ugccuucugaccaaccucuccccaucguugcc

SEQ ID NO: 364780 - RNA, 32 nt, Homo Sapiens
ccagcggccuccgcccucccccauucacacua

SEQ ID NO: 364781 - RNA, 32 nt, Homo Sapiens
auguguggucccucacgccgucccgcaccuug

SEQ ID NO: 364782 - RNA, 32 nt, Homo Sapiens
uacccuaacgcuucuuuaaaagaaaguaggua

SEQ ID NO: 364783 - RNA, 32 nt, Homo Sapiens
agagaugcgcucucguguagccgucagggccu

SEQ ID NO: 364784 - RNA, 32 nt, Homo Sapiens
gcucaucuuuaacagaacugggccuagugucu

SEQ ID NO: 364785 - RNA, 32 nt, Homo Sapiens
acuggaaaaaaauuauauuuuauagauaggca

SEQ ID NO: 364786 - RNA, 32 nt, Homo Sapiens
augccaccuccccacaccacccaagccuagcu

SEQ ID NO: 364787 - RNA, 32 nt, Homo Sapiens
uacacacucaaauuggguaauuugagcagagc

SEQ ID NO: 364788 - RNA, 32 nt, Homo Sapiens
ggccucugucuccauagcucugguuucccugg

SEQ ID NO: 364789 - RNA, 32 nt, Homo Sapiens
cccuccccagcuuggugggcgccucuuuccuu

SEQ ID NO: 364790 - RNA, 32 nt, Homo Sapiens
ucuguguccacuguccugacccuaacucaauc

SEQ ID NO: 364791 - RNA, 32 nt, Homo Sapiens
ugaagcaggugacaccagaagacaaggacacu

SEQ ID NO: 364792 - RNA, 32 nt, Homo Sapiens
ccacucuagcguuuugucacgucuuacauuuu

SEQ ID NO: 364793 - RNA, 32 nt, Homo Sapiens
gauccaacugaauaaauagggaccaauucaga

SEQ ID NO: 364794 - RNA, 32 nt, Homo Sapiens
uucuacgccaccuugcccagcccuggccaagc

SEQ ID NO: 364795 - RNA, 32 nt, Homo Sapiens
gcgcgguugcuguuucuucucaggcucaggga

SEQ ID NO: 364796 - RNA, 32 nt, Homo Sapiens
ccugauuuuuugcugauaaucacucucaaugg

SEQ ID NO: 364797 - RNA, 32 nt, Homo Sapiens
aaagagcagcauaacggaagggcuuggucugg

SEQ ID NO: 364798 - RNA, 32 nt, Homo Sapiens
uccauaggcuuuucuuuuuucagguuugaugu

SEQ ID NO: 364799 - RNA, 32 nt, Homo Sapiens
guauauaauaaucucuuacaaucuuguucaua

SEQ ID NO: 364800 - RNA, 32 nt, Homo Sapiens
cgaggccuggggagauguuguuuucaugcugc

SEQ ID NO: 364801 - RNA, 32 nt, Homo Sapiens
auaucuaaaagcuagggauggcauugcugaua

SEQ ID NO: 364802 - RNA, 32 nt, Homo Sapiens
ccagccuggugcccauccucccgaccccuacc

SEQ ID NO: 364803 - RNA, 32 nt, Homo Sapiens
gccucuguucuucccccaccugccacguacag

SEQ ID NO: 364804 - RNA, 32 nt, Homo Sapiens
agcaucacuguggaccaggcguggugaugggg

SEQ ID NO: 364805 - RNA, 32 nt, Homo Sapiens
cgcggcgccccggagcuucuccgcggaaccgc

SEQ ID NO: 364806 - RNA, 32 nt, Homo Sapiens
gcuguacagaucuauuuucauuguauauuuga

SEQ ID NO: 364807 - RNA, 32 nt, Homo Sapiens
cgcggcucgggugacagcgucgcggccgccgg

SEQ ID NO: 364808 - RNA, 32 nt, Homo Sapiens
agaagguacagcuuuggcccucaagagcccac

SEQ ID NO: 364809 - RNA, 30 nt, Homo Sapiens
agcuuucuggacugauucuucgugucacgc

SEQ ID NO: 364810 - RNA, 32 nt, Homo Sapiens
uggaaauagauaagugguuaagucuagaaaca

SEQ ID NO: 364811 - RNA, 32 nt, Homo Sapiens
cuuuuuaguuaauggaagaauucaccaauuuu

SEQ ID NO: 364812 - RNA, 32 nt, Homo Sapiens
aucccagaaaacaaaacaaaauaaugcuuuuc

SEQ ID NO: 364813 - RNA, 32 nt, Homo Sapiens
ccaucuggaccuuugcagaaguuagagauuca

SEQ ID NO: 364814 - RNA, 32 nt, Homo Sapiens
gcagccgggcagugcccuccccgucccaugcu

SEQ ID NO: 364815 - RNA, 32 nt, Homo Sapiens
acucccggcgcacgcccucccgcgagucccgg

SEQ ID NO: 364816 - RNA, 32 nt, Homo Sapiens
ggacgccccuccccuugcaccccucgcagcug

SEQ ID NO: 364817 - RNA, 32 nt, Homo Sapiens
gcaaaggaagcagcugagacuguuggagaacg

SEQ ID NO: 364818 - RNA, 32 nt, Homo Sapiens
cccacuauggucaucuuuuucucuaaaauagc

SEQ ID NO: 364819 - RNA, 32 nt, Homo Sapiens
guuacagaggguguuagaaaacaaagggcaga

SEQ ID NO: 364820 - RNA, 32 nt, Homo Sapiens
cauucugucuguuuuucuuuuuuugcuuuguu

SEQ ID NO: 364821 - RNA, 32 nt, Homo Sapiens
gucacccuugugccuuagccucaugggcugcc

SEQ ID NO: 364822 - RNA, 32 nt, Homo Sapiens
uaauuucuguuguuucuaauuaaagucccuga

SEQ ID NO: 364823 - RNA, 32 nt, Homo Sapiens
ccugggccuccagccuccuucgguggggugug

SEQ ID NO: 364824 - RNA, 32 nt, Homo Sapiens
acaaacuggcaggugcuuaauuaggggacuuu

SEQ ID NO: 364825 - RNA, 32 nt, Homo Sapiens
ugggcagcugggugggccugggcagcugggug

SEQ ID NO: 364826 - RNA, 32 nt, Homo Sapiens
cuccaugcuguaaccuuucuucgaacuccuga

SEQ ID NO: 364827 - RNA, 32 nt, Homo Sapiens
uuuguguguaucccuacaauaaaacucagugg

SEQ ID NO: 364828 - RNA, 32 nt, Homo Sapiens
cucccacgucuggcaagccucuuucaguauaa

SEQ ID NO: 364829 - RNA, 30 nt, Homo Sapiens
cagagauggcgacugcgacucggcugcugg

SEQ ID NO: 364830 - RNA, 32 nt, Homo Sapiens
cauaguuucuucaccaugugcauuuucuauga

SEQ ID NO: 364831 - RNA, 32 nt, Homo Sapiens
ccugagugacagccuggcccgcggccgccuac

SEQ ID NO: 364832 - RNA, 32 nt, Homo Sapiens
aaguugcagcaucagcuggaugagccaaaacu

SEQ ID NO: 364833 - RNA, 32 nt, Homo Sapiens
cauucagaguguuugcuguugugugaacugaa

SEQ ID NO: 364834 - RNA, 32 nt, Homo Sapiens
gucacucucaggggccucuuucagcuggggcu

SEQ ID NO: 364835 - RNA, 32 nt, Homo Sapiens
uguaucuagucacuuaaauacauacacggguu

SEQ ID NO: 364836 - RNA, 32 nt, Homo Sapiens
gccagugcccccgacacccccggcccggcacc

SEQ ID NO: 364837 - RNA, 32 nt, Homo Sapiens
uuuugaauucguuggaaguacacgcugcugag

SEQ ID NO: 364838 - RNA, 32 nt, Homo Sapiens
ucuccgaggaagacccagggaacuggauaucu

SEQ ID NO: 364839 - RNA, 32 nt, Homo Sapiens
uccacccucgggcuggcuggcucagugggcag

SEQ ID NO: 364840 - RNA, 32 nt, Homo Sapiens
cgaagccugugcuacugugagucuugccggaa

SEQ ID NO: 364841 - RNA, 32 nt, Homo Sapiens
acauacuucuuccuccuucggaagggcuggua

SEQ ID NO: 364842 - RNA, 32 nt, Homo Sapiens
aggccaccagcagcagcugugcagcauggaac

SEQ ID NO: 364843 - RNA, 32 nt, Homo Sapiens
gcagcaguuccacagcacagccuggucagucc

SEQ ID NO: 364844 - RNA, 32 nt, Homo Sapiens
caccucccccuuccaucccaccagcugccagu

SEQ ID NO: 364845 - RNA, 32 nt, Homo Sapiens
aaagaaugaagaaaccaacaaaacacuuggug

SEQ ID NO: 364846 - RNA, 32 nt, Homo Sapiens
gagaagacauucuggugaccagacuuuugcuu

SEQ ID NO: 364847 - RNA, 32 nt, Homo Sapiens
agggauucuucugccuccacuucagguuuuag

SEQ ID NO: 364848 - RNA, 32 nt, Homo Sapiens
aggcuauaguguuuuguaaacuucuguuucua

SEQ ID NO: 364849 - RNA, 32 nt, Homo Sapiens
ucucaccucugccugcuuaugugggguguggc

SEQ ID NO: 364850 - RNA, 32 nt, Homo Sapiens
aggagcccggagcccuugccccugcccgcgcc

SEQ ID NO: 364851 - RNA, 32 nt, Homo Sapiens
uugguggagacgggguuucaccguguuggccg

SEQ ID NO: 364852 - RNA, 32 nt, Homo Sapiens
acacaugaucagcuucucauguuccauauuca

SEQ ID NO: 364853 - RNA, 32 nt, Homo Sapiens
guagccgccugccugcccugcucugcggcugu

SEQ ID NO: 364854 - RNA, 32 nt, Homo Sapiens
agccccaacuuagauugccuucugggaaaucc

SEQ ID NO: 364855 - RNA, 32 nt, Homo Sapiens
cacccuggcuccaugacccaccccacucugga

SEQ ID NO: 364856 - RNA, 32 nt, Homo Sapiens
cucuccuucacuuuuccuagccuccucaccac

SEQ ID NO: 364857 - RNA, 32 nt, Homo Sapiens
gcauauuuuaucaaccccuuauuucuaauugc

SEQ ID NO: 364858 - RNA, 32 nt, Homo Sapiens
gggcaggggaggagggaggggcgccagcaccu

SEQ ID NO: 364859 - RNA, 32 nt, Homo Sapiens
gcaagaaagaaauaaaccuuuucuaauuaugc

SEQ ID NO: 364860 - RNA, 32 nt, Homo Sapiens
aaggaaauaagucaucuguaugcugacugggg

SEQ ID NO: 364861 - RNA, 32 nt, Homo Sapiens
ucuugcgggaggagggggacuaaacucaaccu

SEQ ID NO: 364862 - RNA, 32 nt, Homo Sapiens
cuccucugagcucuucuuucugaucaagcccu

SEQ ID NO: 364863 - RNA, 32 nt, Homo Sapiens
gaccaaaaaugaagcuuguaacgaccauggau

SEQ ID NO: 364864 - RNA, 32 nt, Homo Sapiens
uagggaucaagcauguaaacaccaacuggucc

SEQ ID NO: 364865 - RNA, 32 nt, Homo Sapiens
caguguagcuaauaaacaccagcaggcgcaac

SEQ ID NO: 364866 - RNA, 32 nt, Homo Sapiens
ugugcugggccuuggaggaagggggccgagac

SEQ ID NO: 364867 - RNA, 32 nt, Homo Sapiens
agaggauggaauugugugcacaagaacugugg

SEQ ID NO: 364868 - RNA, 32 nt, Homo Sapiens
uuacuauuuccucuccuuccggcuuauuugug

SEQ ID NO: 364869 - RNA, 32 nt, Homo Sapiens
aucaugguuucaugagcauuaaaaagcaaagg

SEQ ID NO: 364870 - RNA, 32 nt, Homo Sapiens
agauccacaaaguggagauagcaguagcacca

SEQ ID NO: 364871 - RNA, 32 nt, Homo Sapiens
uucccuccagucagggccaggcguggacgccg

SEQ ID NO: 364872 - RNA, 32 nt, Homo Sapiens
uguaccacaaguguugucaaguacagugugug

SEQ ID NO: 364873 - RNA, 32 nt, Homo Sapiens
gaccugaugaccagcucugugugaaacuccac

SEQ ID NO: 364874 - RNA, 32 nt, Homo Sapiens
cuguagaaagaccagucugccacuguauggca

SEQ ID NO: 364875 - RNA, 32 nt, Homo Sapiens
caaguagcuggugcuaauuauuauaagacuaa

SEQ ID NO: 364876 - RNA, 32 nt, Homo Sapiens
ccgccacuccuuguccggaccccgcgcccggg

SEQ ID NO: 364877 - RNA, 32 nt, Homo Sapiens
caagacugacuggcaggaagcggguggggggc

SEQ ID NO: 364878 - RNA, 32 nt, Homo Sapiens
ccccagcugccccuccuucuagaaccucugca

SEQ ID NO: 364879 - RNA, 32 nt, Homo Sapiens
gccgccgcaggugguggcgcgcggugaggaga

SEQ ID NO: 364880 - RNA, 32 nt, Homo Sapiens
caccuagaagaggugaugauagcuuuggagac

SEQ ID NO: 364881 - RNA, 32 nt, Homo Sapiens
uaauauuuaaguguuuacuaucuauugcugua

SEQ ID NO: 364882 - RNA, 32 nt, Homo Sapiens
uaguagacuugggccagaaaaaacagaccuca

SEQ ID NO: 364883 - RNA, 32 nt, Homo Sapiens
caccagaccgugccucccggccgcccgggccc

SEQ ID NO: 364884 - RNA, 32 nt, Homo Sapiens
agaaacugccuuguccacgggccccgccucag

SEQ ID NO: 364885 - RNA, 32 nt, Homo Sapiens
caugucccgggcuccacugggcaccaacauaa

SEQ ID NO: 364886 - RNA, 32 nt, Homo Sapiens
uguucuugucucuuuuuucagucauuuucugc

SEQ ID NO: 364887 - RNA, 32 nt, Homo Sapiens
ccaggcccaggagagcucugagcucuggccaa

SEQ ID NO: 364888 - RNA, 32 nt, Homo Sapiens
ggcgacggcggcggccccucgggcagcuacca

SEQ ID NO: 364889 - RNA, 32 nt, Homo Sapiens
caggaggcgcgguggggcugcguggaggaggg

SEQ ID NO: 364890 - RNA, 32 nt, Homo Sapiens
gcccaacccccaccucccgguguaugcagugg

SEQ ID NO: 364891 - RNA, 32 nt, Homo Sapiens
ggagggaggggaggucuguuaccacuggggaa

SEQ ID NO: 364892 - RNA, 32 nt, Homo Sapiens
cugagcuuuuucugaauaaaccugccugcuca

SEQ ID NO: 364893 - RNA, 32 nt, Homo Sapiens
ggcgggcccggcccgagcuuguccuugucgcg

SEQ ID NO: 364894 - RNA, 28 nt, Homo Sapiens
cuaaagacguaggcgaugagacuagacc

SEQ ID NO: 364895 - RNA, 32 nt, Homo Sapiens
cuguguugugauucauaguacauuaaaaagag

SEQ ID NO: 364896 - RNA, 32 nt, Homo Sapiens
aggaguucgccagcaaagccaggcaggccaag

SEQ ID NO: 364897 - RNA, 30 nt, Homo Sapiens
cugaggccuggacccacccaucuuuguccc

SEQ ID NO: 364898 - RNA, 32 nt, Homo Sapiens
gagugugaaggagagaggacacaggggaugac

SEQ ID NO: 364899 - RNA, 32 nt, Homo Sapiens
cgcaggaggaggaggaucggcggacugugggg

SEQ ID NO: 364900 - RNA, 32 nt, Homo Sapiens
ggucccucuccagcugcaggugaggccugcgg

SEQ ID NO: 364901 - RNA, 32 nt, Homo Sapiens
gcauauuaaaaauaaauauguaaagaaaaaaa

SEQ ID NO: 364902 - RNA, 32 nt, Homo Sapiens
uccuccggagaaaaaaccucaacaagcggaga

SEQ ID NO: 364903 - RNA, 32 nt, Homo Sapiens
cugcauuguaaaacaaaugguguaaacuaguu

SEQ ID NO: 364904 - RNA, 32 nt, Homo Sapiens
cugcgaggccaaggcugcagcaggcugugauu

SEQ ID NO: 364905 - RNA, 32 nt, Homo Sapiens
ucuguucaguaagaaucaugucuuacugaucu

SEQ ID NO: 364906 - RNA, 32 nt, Homo Sapiens
uggaaauauauucaagagauuaugauucugua

SEQ ID NO: 364907 - RNA, 32 nt, Homo Sapiens
aaguuuaggcguuuguuguucuccagugaugu

SEQ ID NO: 364908 - RNA, 32 nt, Homo Sapiens
gcaauauuuccacuucaacuuccacucuucag

SEQ ID NO: 364909 - RNA, 32 nt, Homo Sapiens
agcagcaggaggaauaccagggccacggaggg

SEQ ID NO: 364910 - RNA, 32 nt, Homo Sapiens
uaaauaaauaaaacucaaucaugacuuuggca

SEQ ID NO: 364911 - RNA, 32 nt, Homo Sapiens
auucauuaaaaacacuacagguguugaauggu

SEQ ID NO: 364912 - RNA, 32 nt, Homo Sapiens
gcucuucuccaaaugaagagccaggaagaggu

SEQ ID NO: 364913 - RNA, 32 nt, Homo Sapiens
gggcagggucccaaggccccagccaaccucuc

SEQ ID NO: 364914 - RNA, 32 nt, Homo Sapiens
aaccuuuuuuaaauacaauacugauaguuaga

SEQ ID NO: 364915 - RNA, 32 nt, Homo Sapiens
gugugugguggguagacugcugccggggaauc

SEQ ID NO: 364916 - RNA, 32 nt, Homo Sapiens
aaauagaaaaagaauugaagcaaauggagcua

SEQ ID NO: 364917 - RNA, 28 nt, Homo Sapiens
ucucaccagaaagaacauuugaaucugg

SEQ ID NO: 364918 - RNA, 32 nt, Homo Sapiens
ugaggagccccaguucccuccucccucgguua

SEQ ID NO: 364919 - RNA, 32 nt, Homo Sapiens
agccccuuucccucucucggacucgguuuccc

SEQ ID NO: 364920 - RNA, 32 nt, Homo Sapiens
ggccuagugucuggaacaacucacagaaaaau

SEQ ID NO: 364921 - RNA, 32 nt, Homo Sapiens
ucuauaaauauugcugcuuauuagauugaagu

SEQ ID NO: 364922 - RNA, 32 nt, Homo Sapiens
uuguccugaagucgggcucucccggcccugcc

SEQ ID NO: 364923 - RNA, 32 nt, Homo Sapiens
caccuggucuguggagauggacucaggaucca

SEQ ID NO: 364924 - RNA, 32 nt, Homo Sapiens
agggaagaaacagaagcaguguuccauuuucu

SEQ ID NO: 364925 - RNA, 32 nt, Homo Sapiens
ucuuugaugauuauacauauugguuucaaauc

SEQ ID NO: 364926 - RNA, 32 nt, Homo Sapiens
cuccaccucugcggggaccccuugcucaguuu

SEQ ID NO: 364927 - RNA, 32 nt, Homo Sapiens
gacccacgaaaguuauauaaugcuucaacaug

SEQ ID NO: 364928 - RNA, 32 nt, Homo Sapiens
agccuggcucuaggaccugaagaacucucgaa

SEQ ID NO: 364929 - RNA, 32 nt, Homo Sapiens
cuuccaggcugagguaccuggaucuuggguuc

SEQ ID NO: 364930 - RNA, 32 nt, Homo Sapiens
uuauauaaaaauaaaggucauucugaauauca

SEQ ID NO: 364931 - RNA, 32 nt, Homo Sapiens
uaauaagccaagggcuaggcucuuguuugagu

SEQ ID NO: 364932 - RNA, 30 nt, Homo Sapiens
uuacaggcgcccgccacggcgcccagucag

SEQ ID NO: 364933 - RNA, 32 nt, Homo Sapiens
gagcuccccuuagugaucucaguucaaauauu

SEQ ID NO: 364934 - RNA, 32 nt, Homo Sapiens
auuaagguaucuuuuuauucauugcccucagg

SEQ ID NO: 364935 - RNA, 32 nt, Homo Sapiens
uuacuuaaagcucauuuuuguuuucugucuuu

SEQ ID NO: 364936 - RNA, 32 nt, Homo Sapiens
aaacacugaauuuuugucuguuucauagaaaa

SEQ ID NO: 364937 - RNA, 32 nt, Homo Sapiens
cucuacacccaccuucaguauuucauauuaga

SEQ ID NO: 364938 - RNA, 32 nt, Homo Sapiens
ucucucucccauggagccccagcccccuuugg

SEQ ID NO: 364939 - RNA, 32 nt, Homo Sapiens
uucaagaucaacaaagcauuccucaagaucac

SEQ ID NO: 364940 - RNA, 32 nt, Homo Sapiens
aaccucaccaaaacaauuuauaccuugugucc

SEQ ID NO: 364941 - RNA, 32 nt, Homo Sapiens
gcacagucuccaugugugugccaagcccuggc

SEQ ID NO: 364942 - RNA, 32 nt, Homo Sapiens
ccagugccggcgaggaaggaggcggcggggaa

SEQ ID NO: 364943 - RNA, 32 nt, Homo Sapiens
aagagaacagguuuuucuuuuccuuuuuaauu

SEQ ID NO: 364944 - RNA, 32 nt, Homo Sapiens
gucaaaaauuagcaauuuuaugcugggcaugg

SEQ ID NO: 364945 - RNA, 32 nt, Homo Sapiens
aguaagugucaaguacagaugcucuuugacuu

SEQ ID NO: 364946 - RNA, 31 nt, Homo Sapiens
ggcugggcaucgaguacgacgaggauguugu

SEQ ID NO: 364947 - RNA, 32 nt, Homo Sapiens
cagcuauggagagggauacagcugcgucucca

SEQ ID NO: 364948 - RNA, 32 nt, Homo Sapiens
ccuccccagacacaacucccuuccccaugcac

SEQ ID NO: 364949 - RNA, 26 nt, Homo Sapiens
cauggacaagguggugaccuucgccg

SEQ ID NO: 364950 - RNA, 32 nt, Homo Sapiens
cuacuuagagauauguaucauaaaaauaaaau

SEQ ID NO: 364951 - RNA, 32 nt, Homo Sapiens
gucccgaguccgcugcucgccggcggccgccc

SEQ ID NO: 364952 - RNA, 32 nt, Homo Sapiens
ucaggcuggucucaaacugaccucaggugauc

SEQ ID NO: 364953 - RNA, 32 nt, Homo Sapiens
ucaaaacaaaacaaaacaaaauuagcugagca

SEQ ID NO: 364954 - RNA, 32 nt, Homo Sapiens
auaacauuuuugguggucuuuaaugugaugga

SEQ ID NO: 364955 - RNA, 32 nt, Homo Sapiens
ggacucuuggaccucucuguucuucaagcauc

SEQ ID NO: 364956 - RNA, 32 nt, Homo Sapiens
uacgugaaucuucuuggaauuuuucucaugug

SEQ ID NO: 364957 - RNA, 32 nt, Homo Sapiens
ggcguuggaaccagagcaacuccaucuugaac

SEQ ID NO: 364958 - RNA, 32 nt, Homo Sapiens
gaaagauauauucgaauuguaaagaugcuuuu

SEQ ID NO: 364959 - RNA, 32 nt, Homo Sapiens
gccgcccugccuuguuaccuggaagcacagcc

SEQ ID NO: 364960 - RNA, 32 nt, Homo Sapiens
ucuuccuggaagccuuccucuuuuccaccauc

SEQ ID NO: 364961 - RNA, 32 nt, Homo Sapiens
ugugggaaggguuuuucuucuuuuucuuggaa

SEQ ID NO: 364962 - RNA, 32 nt, Homo Sapiens
ggaguauuuccauuuuaaccggaaacaauccc

SEQ ID NO: 364963 - RNA, 32 nt, Homo Sapiens
caaggcauccucaccaggggccccgccugcug

SEQ ID NO: 364964 - RNA, 32 nt, Homo Sapiens
ggcgaaauauaaaacugagacuguauauguug

SEQ ID NO: 364965 - RNA, 32 nt, Homo Sapiens
cugcauggagggcaggccaggauggagcccag

SEQ ID NO: 364966 - RNA, 32 nt, Homo Sapiens
uucaguuacugauuuuauaguuggaauuugau

SEQ ID NO: 364967 - RNA, 32 nt, Homo Sapiens
ucuccacgucuccaaccccgggcucggcggcg

SEQ ID NO: 364968 - RNA, 32 nt, Homo Sapiens
aggaagggacgcccgagcccuugaggcggcgg

SEQ ID NO: 364969 - RNA, 32 nt, Homo Sapiens
ucacauugucccauuccccaaacugcaggcuu

SEQ ID NO: 364970 - RNA, 32 nt, Homo Sapiens
ucaggcagccccggugggaggcugcggaccau

SEQ ID NO: 364971 - RNA, 32 nt, Homo Sapiens
acacucgauuaaaaauguuaagcuaucugaaa

SEQ ID NO: 364972 - RNA, 32 nt, Homo Sapiens
gcagccuaaccccauuccugugcggacagccc

SEQ ID NO: 364973 - RNA, 32 nt, Homo Sapiens
ccucaccacagugcuguguggucuauaccuca

SEQ ID NO: 364974 - RNA, 32 nt, Homo Sapiens
uaaauaaaauuuugaagaggcuagaaccccgc

SEQ ID NO: 364975 - RNA, 32 nt, Homo Sapiens
uuuuaaaaaggcaguguaaauuccuaacccgc

SEQ ID NO: 364976 - RNA, 32 nt, Homo Sapiens
ugcaagauggggagugagaggcugggaaugga

SEQ ID NO: 364977 - RNA, 32 nt, Homo Sapiens
ggcccagccccuccagcuccagcgaccccacc

SEQ ID NO: 364978 - RNA, 32 nt, Homo Sapiens
gccaucugaccacuuuuuauugggugacauau

SEQ ID NO: 364979 - RNA, 32 nt, Homo Sapiens
cacagcugcacuuggcuuagaagugcuacuuu

SEQ ID NO: 364980 - RNA, 32 nt, Homo Sapiens
uaauauauacuucuaucaaguggaaaggaaau

SEQ ID NO: 364981 - RNA, 32 nt, Homo Sapiens
uuuagagucagagauaacuuugaaauuucaua

SEQ ID NO: 364982 - RNA, 32 nt, Homo Sapiens
agccugugagacggggugacggcggcuaccag

SEQ ID NO: 364983 - RNA, 32 nt, Homo Sapiens
ucaccagggcacagcccuccaggcccgccuca

SEQ ID NO: 364984 - RNA, 32 nt, Homo Sapiens
acgaggcaacgcuuacuauccaccggguaaca

SEQ ID NO: 364985 - RNA, 32 nt, Homo Sapiens
ucuagccacugggaacccagccguggacaggg

SEQ ID NO: 364986 - RNA, 30 nt, Homo Sapiens
ccagcgggaggugggaugugagacagccca

SEQ ID NO: 364987 - RNA, 32 nt, Homo Sapiens
cuucaucuguagaaacagccacuucccauccc

SEQ ID NO: 364988 - RNA, 32 nt, Homo Sapiens
cagcaauugcagcagcagcagucacugcagcu

SEQ ID NO: 364989 - RNA, 32 nt, Homo Sapiens
caaccuugggaaaauuguuuuaucuuugugcg

SEQ ID NO: 364990 - RNA, 32 nt, Homo Sapiens
caagaaguuuuuaaaaggcaagcaaaaacaga

SEQ ID NO: 364991 - RNA, 30 nt, Homo Sapiens
cauugggaaauggcugaugaguucacauuu

SEQ ID NO: 364992 - RNA, 32 nt, Homo Sapiens
ccagcucugguuuccuucucgguuuauucugu

SEQ ID NO: 364993 - RNA, 32 nt, Homo Sapiens
gguggcgggggguggggugugagguaauccag

SEQ ID NO: 364994 - RNA, 32 nt, Homo Sapiens
uucaaauguaaauuccugaauguaccauuaaa

SEQ ID NO: 364995 - RNA, 32 nt, Homo Sapiens
gcgcgucacugucgggucggcgagccacgggg

SEQ ID NO: 364996 - RNA, 32 nt, Homo Sapiens
ucaugggauagcacguggagcucuuggcuggg

SEQ ID NO: 364997 - RNA, 32 nt, Homo Sapiens
ggcccugcacugggcugcaggugcagggcacg

SEQ ID NO: 364998 - RNA, 32 nt, Homo Sapiens
uacauuaauguaaccaguauuuauugagcauc

SEQ ID NO: 364999 - RNA, 32 nt, Homo Sapiens
gaucuaugugcacuuuuacuuguaaaauggaa

SEQ ID NO: 365000 - RNA, 32 nt, Homo Sapiens
cugagauccagccacagcacuccagccugggu

SEQ ID NO: 365001 - RNA, 32 nt, Homo Sapiens
aagugacauaauucuuuuucucuuuguuaagu

SEQ ID NO: 365002 - RNA, 32 nt, Homo Sapiens
guacucagaaaauggaugcaagaguagaagcu

SEQ ID NO: 365003 - RNA, 32 nt, Homo Sapiens
gugcugcugggcccgcaccccaugucccuugu

SEQ ID NO: 365004 - RNA, 32 nt, Homo Sapiens
acccuagaccucugcagcccauaccaggucuc

SEQ ID NO: 365005 - RNA, 31 nt, Homo Sapiens
uccgugaugucagucaucaguucaucuaccu

SEQ ID NO: 365006 - RNA, 32 nt, Homo Sapiens
aaggcacagguguaaauauaguagcaggauga

SEQ ID NO: 365007 - RNA, 32 nt, Homo Sapiens
agcgcagacacagccacaggcaugucauugaa

SEQ ID NO: 365008 - RNA, 32 nt, Homo Sapiens
auauggaauguuuacuggacaguuggaaaacc

SEQ ID NO: 365009 - RNA, 32 nt, Homo Sapiens
ggcccaaguaaauggaaauguuuucuaacaua

SEQ ID NO: 365010 - RNA, 32 nt, Homo Sapiens
aauaaauggacaucaaaagaaaacauuucuua

SEQ ID NO: 365011 - RNA, 32 nt, Homo Sapiens
aauauuucaguuggaaggcuguagaaguaaug

SEQ ID NO: 365012 - RNA, 32 nt, Homo Sapiens
uuucacccaaacuuguauauuuauuacaauuu

SEQ ID NO: 365013 - RNA, 32 nt, Homo Sapiens
uuuaagucugcgccuguugugaugcuucugug

SEQ ID NO: 365014 - RNA, 32 nt, Homo Sapiens
ggucaggcgcugucuuuccuucccucccugcu

SEQ ID NO: 365015 - RNA, 32 nt, Homo Sapiens
cgaaucgcuuucuggaggaggaggggacccgc

SEQ ID NO: 365016 - RNA, 32 nt, Homo Sapiens
uauucaaauaucuauuuaaagacauuuauauu

SEQ ID NO: 365017 - RNA, 32 nt, Homo Sapiens
cccucggaacagagccccugugucauucugug

SEQ ID NO: 365018 - RNA, 32 nt, Homo Sapiens
gauguuccuucuauuguuuucuuagccaucug

SEQ ID NO: 365019 - RNA, 32 nt, Homo Sapiens
uccaggauauuuucuuuuuaaaugucuuucuu

SEQ ID NO: 365020 - RNA, 32 nt, Homo Sapiens
cccagugcgucugucgcacguccccaggccgu

SEQ ID NO: 365021 - RNA, 32 nt, Homo Sapiens
cauuucugacucgaguccccgccgcgcuuguc

SEQ ID NO: 365022 - RNA, 32 nt, Homo Sapiens
agcaacaguuauuuuucuuaucuucaggguua

SEQ ID NO: 365023 - RNA, 32 nt, Homo Sapiens
guuggguccagaugugggggccuguccaaggg

SEQ ID NO: 365024 - RNA, 32 nt, Homo Sapiens
ugggugguguuugguagguuucccuccagguc

SEQ ID NO: 365025 - RNA, 32 nt, Homo Sapiens
uuuaguuuuuucccuuugauuaguauguguua

SEQ ID NO: 365026 - RNA, 32 nt, Homo Sapiens
ugccugaaggugcugcugaggacauggaugag

SEQ ID NO: 365027 - RNA, 32 nt, Homo Sapiens
uccuacagguggcuggagcagcugcuuugcaa

SEQ ID NO: 365028 - RNA, 32 nt, Homo Sapiens
uuugcaagccagaugaguaaccagagggcaug

SEQ ID NO: 365029 - RNA, 32 nt, Homo Sapiens
aguacaugaugguggauagcgcauauaucaga

SEQ ID NO: 365030 - RNA, 32 nt, Homo Sapiens
uucauuaguuuaugcuguagugacaacaacaa

SEQ ID NO: 365031 - RNA, 32 nt, Homo Sapiens
aggcagguagccagacaagagcaggcaaggaa

SEQ ID NO: 365032 - RNA, 32 nt, Homo Sapiens
uccaggaacuggaguuauucuacgcuaaugga

SEQ ID NO: 365033 - RNA, 32 nt, Homo Sapiens
cagcggggagaggcuggggcgaggggaggagg

SEQ ID NO: 365034 - RNA, 32 nt, Homo Sapiens
guaucagaaucaucagagaugagcccagaagc

SEQ ID NO: 365035 - RNA, 32 nt, Homo Sapiens
auuguuaguaaaaaaaauuaaauugaaguagu

SEQ ID NO: 365036 - RNA, 32 nt, Homo Sapiens
cgucuuccaggcugcguggacccggcgccccg

SEQ ID NO: 365037 - RNA, 32 nt, Homo Sapiens
aguaaccucaauaaguuuauuucuuaaaucua

SEQ ID NO: 365038 - RNA, 32 nt, Homo Sapiens
ggacugggcacaucaucaauacgauagagaac

SEQ ID NO: 365039 - RNA, 32 nt, Homo Sapiens
uccugccggagcagcccucccaaauccaucug

SEQ ID NO: 365040 - RNA, 32 nt, Homo Sapiens
cuuuagcuuuaaaggaaagaguuguuggugcc

SEQ ID NO: 365041 - RNA, 32 nt, Homo Sapiens
uacagagcagaagucaguggcugcucaccaga

SEQ ID NO: 365042 - RNA, 32 nt, Homo Sapiens
ggggacccggcgggcucggggcagggacucac

SEQ ID NO: 365043 - RNA, 32 nt, Homo Sapiens
ggacaccccccgccccccaccuuugggaucag

SEQ ID NO: 365044 - RNA, 32 nt, Homo Sapiens
cggugcacggggaagagugggcggcggacgug

SEQ ID NO: 365045 - RNA, 32 nt, Homo Sapiens
uuagacacccaccagcagcauuagagaguucc

SEQ ID NO: 365046 - RNA, 32 nt, Homo Sapiens
uaauguuaaaaucagcacuuuuagagacaacg

SEQ ID NO: 365047 - RNA, 32 nt, Homo Sapiens
aacaagcaguauuuuuacuuucguuuuuauua

SEQ ID NO: 365048 - RNA, 32 nt, Homo Sapiens
gcagccgagcgcggccggggaagggcucuccu

SEQ ID NO: 365049 - RNA, 32 nt, Homo Sapiens
ucuuccucuccagccagucuccuguggcuccc

SEQ ID NO: 365050 - RNA, 32 nt, Homo Sapiens
uggccucggcccggggcaccuucggcuggucc

SEQ ID NO: 365051 - RNA, 32 nt, Homo Sapiens
cucucuuaaugcaugauacagaauaauaauaa

SEQ ID NO: 365052 - RNA, 32 nt, Homo Sapiens
cuguauuguuuuuauuuguauuauguuuuauu

SEQ ID NO: 365053 - RNA, 32 nt, Homo Sapiens
gcggaccaucggcuggcagagcccagcggcca

SEQ ID NO: 365054 - RNA, 32 nt, Homo Sapiens
gccuggccugcauuuucuuaacugccagugag

SEQ ID NO: 365055 - RNA, 32 nt, Homo Sapiens
auccugacugaucuuaaccauuagcacagagu

SEQ ID NO: 365056 - RNA, 32 nt, Homo Sapiens
uuugcuggggaagagggggugaaacucugaau

SEQ ID NO: 365057 - RNA, 32 nt, Homo Sapiens
agcgggcagggcggggagaggcgguggcugug

SEQ ID NO: 365058 - RNA, 32 nt, Homo Sapiens
cccgucccaucucccauaucccauuuccagcu

SEQ ID NO: 365059 - RNA, 32 nt, Homo Sapiens
aagaucaggcaccaccugacagaauucucaag

SEQ ID NO: 365060 - RNA, 32 nt, Homo Sapiens
ggggcuuucugugugggugcugcaguugcuuu

SEQ ID NO: 365061 - RNA, 32 nt, Homo Sapiens
caacagucugagccucauguccugcugcccag

SEQ ID NO: 365062 - RNA, 32 nt, Homo Sapiens
uucuuaagcaccuacuuagaucuuuucaguau

SEQ ID NO: 365063 - RNA, 32 nt, Homo Sapiens
auugcaauaaaagugcuuuaugcuggcuuuuc

SEQ ID NO: 365064 - RNA, 32 nt, Homo Sapiens
accuggccgcgucaggcagaucaucgccuggg

SEQ ID NO: 365065 - RNA, 30 nt, Homo Sapiens
acugucagcgcaaugggggagaagagguua

SEQ ID NO: 365066 - RNA, 32 nt, Homo Sapiens
gccacggggccuugggucccugcccucccacc

SEQ ID NO: 365067 - RNA, 32 nt, Homo Sapiens
aaucacuuugccaccguuuacauccugaagcu

SEQ ID NO: 365068 - RNA, 32 nt, Homo Sapiens
aaaaaccagcccggcgcuggcggagacgcgcu

SEQ ID NO: 365069 - RNA, 32 nt, Homo Sapiens
uguggagaggggcuacgcagcugccccagccc

SEQ ID NO: 365070 - RNA, 32 nt, Homo Sapiens
uuguuaauauuuuaauuccauggcuuuguagg

SEQ ID NO: 365071 - RNA, 32 nt, Homo Sapiens
uggacaggcuacuggugaccaaaguugguucc

SEQ ID NO: 365072 - RNA, 32 nt, Homo Sapiens
gcgcucccugcagcugcgacucagguccugcg

SEQ ID NO: 365073 - RNA, 32 nt, Homo Sapiens
cuuucaggcagcaaaugaacuugaaagguugc

SEQ ID NO: 365074 - RNA, 32 nt, Homo Sapiens
gcuauucuuugccugccccugggguucucugc

SEQ ID NO: 365075 - RNA, 32 nt, Homo Sapiens
gagaccccagagauggaguccugggcucgggg

SEQ ID NO: 365076 - RNA, 32 nt, Homo Sapiens
caguagggccgugggcucggcccggaccuggc

SEQ ID NO: 365077 - RNA, 32 nt, Homo Sapiens
guacuuaaaaugcauagcauuauuaaaaacaa

SEQ ID NO: 365078 - RNA, 32 nt, Homo Sapiens
uucuacagaagccccaguccauggucaccugu

SEQ ID NO: 365079 - RNA, 32 nt, Homo Sapiens
aucccaggaaauuuaaaacccaaaauauaguu

SEQ ID NO: 365080 - RNA, 32 nt, Homo Sapiens
gacauggccguggagggaggcaucaugggcau

SEQ ID NO: 365081 - RNA, 32 nt, Homo Sapiens
auuguuacugagguuaacuuuacuacaacaag

SEQ ID NO: 365082 - RNA, 32 nt, Homo Sapiens
ccaggugugugauggcggcugcaaucugucuu

SEQ ID NO: 365083 - RNA, 32 nt, Homo Sapiens
gccugguccccccaagucuccaucgcgcagcg

SEQ ID NO: 365084 - RNA, 30 nt, Homo Sapiens
ccaagugucugugguccgcagcaccugcuc

SEQ ID NO: 365085 - RNA, 32 nt, Homo Sapiens
uaggcugugggaagaugaagaugguuuggagg

SEQ ID NO: 365086 - RNA, 32 nt, Homo Sapiens
uugguaccaagcccacccuugggguuccugcu

SEQ ID NO: 365087 - RNA, 32 nt, Homo Sapiens
ugaccuggcaccgcugcuacggcggccuagca

SEQ ID NO: 365088 - RNA, 32 nt, Homo Sapiens
acccgccccgccccgacgcgccgcccacucac

SEQ ID NO: 365089 - RNA, 32 nt, Homo Sapiens
cuucaccuuauauauguucuuccacugugacu

SEQ ID NO: 365090 - RNA, 32 nt, Homo Sapiens
gcuggaccugggcaggcgggauguguuggcca

SEQ ID NO: 365091 - RNA, 32 nt, Homo Sapiens
aggacacacacacagacacacacacacacaca

SEQ ID NO: 365092 - RNA, 31 nt, Homo Sapiens
uaacaugguccaggaucaucauucuucugac

SEQ ID NO: 365093 - RNA, 32 nt, Homo Sapiens
acgugcguuguaacaagcccucaucacaugug

SEQ ID NO: 365094 - RNA, 32 nt, Homo Sapiens
uaaccaaggagcagugaacagcagcuacuaca

SEQ ID NO: 365095 - RNA, 32 nt, Homo Sapiens
cucucgccuuuugucuuuuagaagauaaucca

SEQ ID NO: 365096 - RNA, 32 nt, Homo Sapiens
uugugaaaaauauauuguauuucuuuugaugu

SEQ ID NO: 365097 - RNA, 32 nt, Homo Sapiens
gggauugggggaggaguggggacaagauuuuu

SEQ ID NO: 365098 - RNA, 32 nt, Homo Sapiens
ugcuuccuccaagucacauguauuuccucuuc

SEQ ID NO: 365099 - RNA, 32 nt, Homo Sapiens
ugcuguaugugagcuguaaaaauguuacguga

SEQ ID NO: 365100 - RNA, 32 nt, Homo Sapiens
ugaauucugugccuuucaucacauuccuagcc

SEQ ID NO: 365101 - RNA, 32 nt, Homo Sapiens
gcaacucuuuucuccuucccgucgcucacaac

SEQ ID NO: 365102 - RNA, 32 nt, Homo Sapiens
accgcuggaggggcggcgacggcggccguagc

SEQ ID NO: 365103 - RNA, 32 nt, Homo Sapiens
agggaugcgcaccagcagacagggccaagaau

SEQ ID NO: 365104 - RNA, 32 nt, Homo Sapiens
cgacaguaacccaugcgaccacuucucugugu

SEQ ID NO: 365105 - RNA, 32 nt, Homo Sapiens
cagcguggggaugucuaggagcucgaaggugg

SEQ ID NO: 365106 - RNA, 32 nt, Homo Sapiens
aguucuauuguuggcuucagcgguggaccaag

SEQ ID NO: 365107 - RNA, 32 nt, Homo Sapiens
accagguuuguuuguagaugucuuaggcaaca

SEQ ID NO: 365108 - RNA, 32 nt, Homo Sapiens
uuuccacauccccacccuccccucuccugagc

SEQ ID NO: 365109 - RNA, 32 nt, Homo Sapiens
uagacuuaccuuauuucuuucaguguguaggg

SEQ ID NO: 365110 - RNA, 32 nt, Homo Sapiens
gguuuuuggcuguuucucaucaucucauggaa

SEQ ID NO: 365111 - RNA, 32 nt, Homo Sapiens
ugaccccugugcucagccuggaauuguuauag

SEQ ID NO: 365112 - RNA, 32 nt, Homo Sapiens
uuuaacauuuuuccuuuccuucucaaugagaa

SEQ ID NO: 365113 - RNA, 32 nt, Homo Sapiens
gucugauguccaccuggaaugcuugagcuugg

SEQ ID NO: 365114 - RNA, 32 nt, Homo Sapiens
cugaugcuccagcauuggggcaggggcauggu

SEQ ID NO: 365115 - RNA, 30 nt, Homo Sapiens
ccuuccccaugggugggggaaccuguguuu

SEQ ID NO: 365116 - RNA, 32 nt, Homo Sapiens
cugcgccuccuucagacgucagggccgugcac

SEQ ID NO: 365117 - RNA, 32 nt, Homo Sapiens
aagaacaagggaaaauuuaguauuuuaacuuu

SEQ ID NO: 365118 - RNA, 32 nt, Homo Sapiens
ccgggucagggugaccucuggggugaggaaac

SEQ ID NO: 365119 - RNA, 32 nt, Homo Sapiens
aguccuccacaucacagcauuuagacauaugg

SEQ ID NO: 365120 - RNA, 32 nt, Homo Sapiens
cauguccuaaugcuugcugcugauuuaaacac

SEQ ID NO: 365121 - RNA, 32 nt, Homo Sapiens
gaguuucugccuguaagaacuacucuccuuuu

SEQ ID NO: 365122 - RNA, 32 nt, Homo Sapiens
agaguggacccuaauuaacauaaagaccauuc

SEQ ID NO: 365123 - RNA, 32 nt, Homo Sapiens
ggugaagcccaagguugaagggggcggcuucc

SEQ ID NO: 365124 - RNA, 32 nt, Homo Sapiens
gccagagagcgaaaugucaucagugcagucac

SEQ ID NO: 365125 - RNA, 32 nt, Homo Sapiens
guaugguaaaaagccagguauaauguaacuuc

SEQ ID NO: 365126 - RNA, 32 nt, Homo Sapiens
ccagucccugucaccacccaguuuuccccucu

SEQ ID NO: 365127 - RNA, 32 nt, Homo Sapiens
aacguuuccaggcauuuugucuccagggcucc

SEQ ID NO: 365128 - RNA, 32 nt, Homo Sapiens
cagccgugcgucgcgcucgccagcggcucccc

SEQ ID NO: 365129 - RNA, 32 nt, Homo Sapiens
auaaaugauagcaauaucuuggacacauuuga

SEQ ID NO: 365130 - RNA, 32 nt, Homo Sapiens
cuugcacgcucgcuagcagcugguaaggucuu

SEQ ID NO: 365131 - RNA, 32 nt, Homo Sapiens
ucccaaaauauuaaauuuuggaauauuuccac

SEQ ID NO: 365132 - RNA, 31 nt, Homo Sapiens
gucccccaaaacgugcauggauaugugccag

SEQ ID NO: 365133 - RNA, 32 nt, Homo Sapiens
cccccacccccucccccacugauggaguccga

SEQ ID NO: 365134 - RNA, 32 nt, Homo Sapiens
cgccuuucccaccgcccucccuccccagcucc

SEQ ID NO: 365135 - RNA, 32 nt, Homo Sapiens
aaagguuguaaaaauagugcauguuaugugau

SEQ ID NO: 365136 - RNA, 32 nt, Homo Sapiens
cuuugaagaugaacaauacaaacaaaugaauu

SEQ ID NO: 365137 - RNA, 32 nt, Homo Sapiens
ggagggcgcgucggguuuggcccagcuucugg

SEQ ID NO: 365138 - RNA, 32 nt, Homo Sapiens
ugcuggcccucuaucauuugaccugacuuuag

SEQ ID NO: 365139 - RNA, 32 nt, Homo Sapiens
uccaugccauuuagcaaucucaucuccuaaau

SEQ ID NO: 365140 - RNA, 32 nt, Homo Sapiens
caaaauuaccaaacaaagcaaaaaauacccuu

SEQ ID NO: 365141 - RNA, 32 nt, Homo Sapiens
cugcuaggauguagaaauauuuguuugugauu

SEQ ID NO: 365142 - RNA, 30 nt, Homo Sapiens
acuacuugaaaccacuacugaggguaauuu

SEQ ID NO: 365143 - RNA, 32 nt, Homo Sapiens
gugugccugucauucuucuccuuucagcugag

SEQ ID NO: 365144 - RNA, 32 nt, Homo Sapiens
gagguuacauaucaggaacauaugaguugagc

SEQ ID NO: 365145 - RNA, 32 nt, Homo Sapiens
augggcucaauuauuauguuugucaggauaau

SEQ ID NO: 365146 - RNA, 31 nt, Homo Sapiens
ucgguccucaaugcaugucuuugagugacuu

SEQ ID NO: 365147 - RNA, 32 nt, Homo Sapiens
auacccuuccugaaaugacucccuucugaaug

SEQ ID NO: 365148 - RNA, 32 nt, Homo Sapiens
uucuuccaaaucaaguauuuuacuucucccuu

SEQ ID NO: 365149 - RNA, 32 nt, Homo Sapiens
gcccagaaaggagcuuccccugccugccugag

SEQ ID NO: 365150 - RNA, 32 nt, Homo Sapiens
aaagauaccugaaaaacuuaaacuacuagaua

SEQ ID NO: 365151 - RNA, 32 nt, Homo Sapiens
agagugcagucaaccaguaaacugcagauucu

SEQ ID NO: 365152 - RNA, 32 nt, Homo Sapiens
gugucagggcuuuguccaguuaucuucauaug

SEQ ID NO: 365153 - RNA, 32 nt, Homo Sapiens
cugugcacgcaccuuccagugaacagagacuc

SEQ ID NO: 365154 - RNA, 32 nt, Homo Sapiens
uguggcucaaacuaaccgcccacacauggggu

SEQ ID NO: 365155 - RNA, 32 nt, Homo Sapiens
cucgaguuugaccagcagcaggggucggugug

SEQ ID NO: 365156 - RNA, 32 nt, Homo Sapiens
acagccucccugguccuccccagcgcucccug

SEQ ID NO: 365157 - RNA, 32 nt, Homo Sapiens
uaauuucuuacuguauucgaugcugauaaagg

SEQ ID NO: 365158 - RNA, 32 nt, Homo Sapiens
gcuccaccgacccuccucccacccccucccac

SEQ ID NO: 365159 - RNA, 30 nt, Homo Sapiens
ucuuauuugccuuuuugggaaaccaauuaa

SEQ ID NO: 365160 - RNA, 32 nt, Homo Sapiens
uguauugcaaaguuguaaauuuucauaaacaa

SEQ ID NO: 365161 - RNA, 32 nt, Homo Sapiens
auuuucuaguuuguuucuuaauuuauuuguag

SEQ ID NO: 365162 - RNA, 32 nt, Homo Sapiens
augguggaaaggaaagccaggaagcagucggu

SEQ ID NO: 365163 - RNA, 32 nt, Homo Sapiens
gaauuugagaaugggaacaggucaugguucua

SEQ ID NO: 365164 - RNA, 32 nt, Homo Sapiens
caaacgugugauuuagauaugacugauuuaga

SEQ ID NO: 365165 - RNA, 32 nt, Homo Sapiens
ccucucuugaauuucuaguuagcaaucuuaag

SEQ ID NO: 365166 - RNA, 32 nt, Homo Sapiens
uaagcuccaagcaugucugggccaggcagagg

SEQ ID NO: 365167 - RNA, 32 nt, Homo Sapiens
gaaaacauucccuuuuuuaggaaccaaaugau

SEQ ID NO: 365168 - RNA, 32 nt, Homo Sapiens
ggagaccccgguuauuuccucagcuauuucca

SEQ ID NO: 365169 - RNA, 32 nt, Homo Sapiens
agacauguuuuuccuucauaugcuagacuuuu

SEQ ID NO: 365170 - RNA, 32 nt, Homo Sapiens
cacuaguauuuuccucuugccaucggcggcca

SEQ ID NO: 365171 - RNA, 32 nt, Homo Sapiens
uuucccuccacuuuuggagcuuaucagguaaa

SEQ ID NO: 365172 - RNA, 32 nt, Homo Sapiens
cuguaaauuagugaagagugaauguaacuuau

SEQ ID NO: 365173 - RNA, 32 nt, Homo Sapiens
accauccccacuuuugcuccuuggauacuuug

SEQ ID NO: 365174 - RNA, 32 nt, Homo Sapiens
uccucuggcgauccaucaguuaacuggauacu

SEQ ID NO: 365175 - RNA, 32 nt, Homo Sapiens
gugcucuuuucucaaaaaagaaaagaaaaaag

SEQ ID NO: 365176 - RNA, 32 nt, Homo Sapiens
cauacuguaaaaagaguaugugaauaguagca

SEQ ID NO: 365177 - RNA, 32 nt, Homo Sapiens
aguugguuuaaaaugcuuggaacuucccaaac

SEQ ID NO: 365178 - RNA, 32 nt, Homo Sapiens
auugccaacaauuuaauguuuauguguugcca

SEQ ID NO: 365179 - RNA, 32 nt, Homo Sapiens
uugaucauucccuuuuccauauaggaaacaua

SEQ ID NO: 365180 - RNA, 32 nt, Homo Sapiens
guauaauacuaccaccuagaggaacuuccaaa

SEQ ID NO: 365181 - RNA, 32 nt, Homo Sapiens
uauuuugcacuuucuuauguauaaaguuggua

SEQ ID NO: 365182 - RNA, 32 nt, Homo Sapiens
auguuuuaagauugcaccuggcagugugccuu

SEQ ID NO: 365183 - RNA, 32 nt, Homo Sapiens
gcgcagggagccaggcgggcugccggcgggug

SEQ ID NO: 365184 - RNA, 32 nt, Homo Sapiens
uggcuccugugguccugcagagacccuguggg

SEQ ID NO: 365185 - RNA, 32 nt, Homo Sapiens
auuucuggugguuucugcccugcagaugucua

SEQ ID NO: 365186 - RNA, 32 nt, Homo Sapiens
gauucccaugagagggcugaggucugggggcu

SEQ ID NO: 365187 - RNA, 32 nt, Homo Sapiens
ggauucccugacuuugacacagauggucaccu

SEQ ID NO: 365188 - RNA, 32 nt, Homo Sapiens
gagcuguuuuuaaugauguuauucuagaaugu

SEQ ID NO: 365189 - RNA, 32 nt, Homo Sapiens
cguaggcugugacuggcuccagcugauccuua

SEQ ID NO: 365190 - RNA, 32 nt, Homo Sapiens
uacugggucuggugcagcagguccucugggaa

SEQ ID NO: 365191 - RNA, 32 nt, Homo Sapiens
uccccucucccucccccucccccgccggugga

SEQ ID NO: 365192 - RNA, 32 nt, Homo Sapiens
cugcagguauugggagauccacagcugaggga

SEQ ID NO: 365193 - RNA, 32 nt, Homo Sapiens
agcauuugaaggcacaaugcaggggcucagau

SEQ ID NO: 365194 - RNA, 32 nt, Homo Sapiens
auggccaggaaagaagccagcacaggguuaaa

SEQ ID NO: 365195 - RNA, 32 nt, Homo Sapiens
cugcggggccgcggcggcgcugcccacuaugg

SEQ ID NO: 365196 - RNA, 32 nt, Homo Sapiens
aaggaaauauauuauuauuccuguuugaugug

SEQ ID NO: 365197 - RNA, 32 nt, Homo Sapiens
gcaggaggggggcugugaccccugcccuuucc

SEQ ID NO: 365198 - RNA, 32 nt, Homo Sapiens
ggggagucaguuugaggccuagcaucacuuaa

SEQ ID NO: 365199 - RNA, 32 nt, Homo Sapiens
ggaggcacugccuugguugguuuaccugaacu

SEQ ID NO: 365200 - RNA, 32 nt, Homo Sapiens
gacaagcgauuuuggaggaaacaagaauccca

SEQ ID NO: 365201 - RNA, 32 nt, Homo Sapiens
uccuaacuguaucucugcuagagaacugaaga

SEQ ID NO: 365202 - RNA, 32 nt, Homo Sapiens
agguuauggccauuuugugucuuuugagguug

SEQ ID NO: 365203 - RNA, 32 nt, Homo Sapiens
uaguuucugugcccugcagcagcccaagugcu

SEQ ID NO: 365204 - RNA, 32 nt, Homo Sapiens
uugaaucuuuaaugagaaaaaauauauauacu

SEQ ID NO: 365205 - RNA, 32 nt, Homo Sapiens
uccaaaucaaaccacaguauauguuguaacaa

SEQ ID NO: 365206 - RNA, 32 nt, Homo Sapiens
auauaugcuuugcagagaacucauaaaggagc

SEQ ID NO: 365207 - RNA, 32 nt, Homo Sapiens
uucucuuuuucaaaacauuuuacuuuaaaagg

SEQ ID NO: 365208 - RNA, 32 nt, Homo Sapiens
ugcuuucuuuaccaacuggcuagaacggaaca

SEQ ID NO: 365209 - RNA, 32 nt, Homo Sapiens
acugcaguucccuccccacccucuacccagua

SEQ ID NO: 365210 - RNA, 32 nt, Homo Sapiens
acagguguaaaacaggcagagcauucuaaaac

SEQ ID NO: 365211 - RNA, 32 nt, Homo Sapiens
ucuccaugccagcagggugccuuuuauaugag

SEQ ID NO: 365212 - RNA, 32 nt, Homo Sapiens
uguauguguguuuuuucuuuuuuuuuaaguuc

SEQ ID NO: 365213 - RNA, 30 nt, Homo Sapiens
uggacaggcaggccccaaggccccagaggc

SEQ ID NO: 365214 - RNA, 32 nt, Homo Sapiens
accauaacagggaagcaggggaggcggaaaaa

SEQ ID NO: 365215 - RNA, 32 nt, Homo Sapiens
gugccucugugugaggggagggggccgugccg

SEQ ID NO: 365216 - RNA, 32 nt, Homo Sapiens
gagaaaauaucugagacaaaauguauacaaau

SEQ ID NO: 365217 - RNA, 32 nt, Homo Sapiens
gaaagcuggaagcgugcgagggggguggggug

SEQ ID NO: 365218 - RNA, 32 nt, Homo Sapiens
agagcagggguacuuccgccuugccguuagcu

SEQ ID NO: 365219 - RNA, 32 nt, Homo Sapiens
cagguguaacugugucugagagcacgugcguc

SEQ ID NO: 365220 - RNA, 32 nt, Homo Sapiens
cauuaaguuguacaaugguagauggagugaug

SEQ ID NO: 365221 - RNA, 32 nt, Homo Sapiens
aaaaugugggucugacaaguauuuaaaaagca

SEQ ID NO: 365222 - RNA, 32 nt, Homo Sapiens
aaauaacauuuuaauguauauuguucuaacaa

SEQ ID NO: 365223 - RNA, 32 nt, Homo Sapiens
aaaauagccugccuugggacagguguguaaug

SEQ ID NO: 365224 - RNA, 32 nt, Homo Sapiens
ccucacuccccucccuccuaguuggcuuuguc

SEQ ID NO: 365225 - RNA, 32 nt, Homo Sapiens
cgggcacugggcuuuucuucugauguucauua

SEQ ID NO: 365226 - RNA, 32 nt, Homo Sapiens
gugcuuaaauccaguagcuguugucaauaugc

SEQ ID NO: 365227 - RNA, 32 nt, Homo Sapiens
ucgaggcccgauagccgagaacaggagcaaga

SEQ ID NO: 365228 - RNA, 32 nt, Homo Sapiens
auagaaggacuuuuuuccccuugaaaaaauuu

SEQ ID NO: 365229 - RNA, 32 nt, Homo Sapiens
cugaaaagagaaaccacugccuguuggaagaa

SEQ ID NO: 365230 - RNA, 32 nt, Homo Sapiens
gugggaugggagugcauagaaauucucaggac

SEQ ID NO: 365231 - RNA, 32 nt, Homo Sapiens
gacagcaacucagagaauaaccagagaacaac

SEQ ID NO: 365232 - RNA, 32 nt, Homo Sapiens
ugccuguaaucgcagcacuuugggaggccgag

SEQ ID NO: 365233 - RNA, 32 nt, Homo Sapiens
ggugacugaggaccagcuccucaugcuugagg

SEQ ID NO: 365234 - RNA, 32 nt, Homo Sapiens
acuugaaacugggguccugaggagauacaaac

SEQ ID NO: 365235 - RNA, 32 nt, Homo Sapiens
cuuacguucagguguuuguaacuuggccuuau

SEQ ID NO: 365236 - RNA, 32 nt, Homo Sapiens
uuacaggugugagccaucacgcucggccaaga

SEQ ID NO: 365237 - RNA, 32 nt, Homo Sapiens
gccuauagaacuuuuuucaagucggaaggucc

SEQ ID NO: 365238 - RNA, 32 nt, Homo Sapiens
guaaaaaggggagauuucgguaggcacaggug

SEQ ID NO: 365239 - RNA, 32 nt, Homo Sapiens
guaguuuguuuuuaauuucaagcaaaaucuua

SEQ ID NO: 365240 - RNA, 32 nt, Homo Sapiens
uuauauuuuuguauaguuguuuucauagauuu

SEQ ID NO: 365241 - RNA, 32 nt, Homo Sapiens
aagcgggagaggaggagcacuuacucauguug

SEQ ID NO: 365242 - RNA, 32 nt, Homo Sapiens
ucaaaauguuguccuuuccccccuccgugcuu

SEQ ID NO: 365243 - RNA, 32 nt, Homo Sapiens
cagcagugggugugggggcgcugcugggcuca

SEQ ID NO: 365244 - RNA, 32 nt, Homo Sapiens
ccuggccaugggcccggcccagccccgacucc

SEQ ID NO: 365245 - RNA, 28 nt, Homo Sapiens
ccgcgaguuacagccggccaacuggggc

SEQ ID NO: 365246 - RNA, 32 nt, Homo Sapiens
uggguggccccuuaaggugacaucaggaugcu

SEQ ID NO: 365247 - RNA, 32 nt, Homo Sapiens
gcaaaaauucagucuguaauuuaaaaugugug

SEQ ID NO: 365248 - RNA, 31 nt, Homo Sapiens
ugccaccacgcucagcccugaguuaguuucu

SEQ ID NO: 365249 - RNA, 32 nt, Homo Sapiens
caccuuuuccauaaccaugucuaggcccggca

SEQ ID NO: 365250 - RNA, 32 nt, Homo Sapiens
uuuucccuaccuuccaugguccugguuggccc

SEQ ID NO: 365251 - RNA, 32 nt, Homo Sapiens
cccagguagugggaccccgggcccccuucugc

SEQ ID NO: 365252 - RNA, 32 nt, Homo Sapiens
acucgggagggaacauccugcugcaugaccua

SEQ ID NO: 365253 - RNA, 32 nt, Homo Sapiens
guauccaaagacuguuuauguugauguaugga

SEQ ID NO: 365254 - RNA, 32 nt, Homo Sapiens
uugauuuuccuauuuuaacaguaccaacuagu

SEQ ID NO: 365255 - RNA, 32 nt, Homo Sapiens
auacaacaagaaagcacauugaaaauaauuug

SEQ ID NO: 365256 - RNA, 32 nt, Homo Sapiens
uaucuguuuugcucagaaauggaccacgauag

SEQ ID NO: 365257 - RNA, 32 nt, Homo Sapiens
ccagagauaauuauuuuuuacggacugaauga

SEQ ID NO: 365258 - RNA, 32 nt, Homo Sapiens
acugcuccuacccaccaaggggauaaagaagg

SEQ ID NO: 365259 - RNA, 32 nt, Homo Sapiens
auugggggguuguaaauaucaacuauucaaca

SEQ ID NO: 365260 - RNA, 32 nt, Homo Sapiens
uccccucauggucacaaaguggcugccaccac

SEQ ID NO: 365261 - RNA, 32 nt, Homo Sapiens
aagaaaaauaaauguucugaaauugauuaugu

SEQ ID NO: 365262 - RNA, 32 nt, Homo Sapiens
ccaggcgacuuccucucaaaggacaugaguag

SEQ ID NO: 365263 - RNA, 32 nt, Homo Sapiens
aagacaugaaauuauucauauuucagagaaac

SEQ ID NO: 365264 - RNA, 32 nt, Homo Sapiens
ggggcggagccgguggcacgggcccgggggaa

SEQ ID NO: 365265 - RNA, 32 nt, Homo Sapiens
gugcugcucugcgcucuccgcuucgcccgccu

SEQ ID NO: 365266 - RNA, 32 nt, Homo Sapiens
uauagcugagauugggaugucaacacucaggc

SEQ ID NO: 365267 - RNA, 32 nt, Homo Sapiens
agguugguguauuuuuaauagcucgacaccuu

SEQ ID NO: 365268 - RNA, 32 nt, Homo Sapiens
caccugucauggaaacaauccuagagagcuca

SEQ ID NO: 365269 - RNA, 32 nt, Homo Sapiens
augaucccacugaccuacucuugccugcugga

SEQ ID NO: 365270 - RNA, 32 nt, Homo Sapiens
ccacggccucccccuuuugccaguauguccag

SEQ ID NO: 365271 - RNA, 32 nt, Homo Sapiens
cuuuacucagugcuuaauauauguucuguauu

SEQ ID NO: 365272 - RNA, 32 nt, Homo Sapiens
uccuguuaugagucaugaggaaacugaaucac

SEQ ID NO: 365273 - RNA, 32 nt, Homo Sapiens
uccaauuauauuucccaaguauaucuagaacu

SEQ ID NO: 365274 - RNA, 32 nt, Homo Sapiens
cagucgugucugaccuacauugggcuuuucuc

SEQ ID NO: 365275 - RNA, 32 nt, Homo Sapiens
uuucuauguauuauuuuuuggggaagugaggu

SEQ ID NO: 365276 - RNA, 32 nt, Homo Sapiens
gggaaucaagcaaggcacuuuggcaucaccag

SEQ ID NO: 365277 - RNA, 32 nt, Homo Sapiens
caugaagcaaacaaugcucuaaucacaauauu

SEQ ID NO: 365278 - RNA, 32 nt, Homo Sapiens
guugccaaaccagccagggaaccaaccuggga

SEQ ID NO: 365279 - RNA, 32 nt, Homo Sapiens
ggcugggcgagguggcucacgccuguaaucuc

SEQ ID NO: 365280 - RNA, 32 nt, Homo Sapiens
gaugccagucccgccugaggggccaaggcaaa

SEQ ID NO: 365281 - RNA, 32 nt, Homo Sapiens
ggagucaccgggagggcgucuuuaagugcccc

SEQ ID NO: 365282 - RNA, 32 nt, Homo Sapiens
gcagaggaggacccgggcgggggcagggucug

SEQ ID NO: 365283 - RNA, 32 nt, Homo Sapiens
aaccccauagcuuuaagaaguaccugcaaggg

SEQ ID NO: 365284 - RNA, 32 nt, Homo Sapiens
agguaggugucugagccaugaaguauaaauac

SEQ ID NO: 365285 - RNA, 32 nt, Homo Sapiens
auaucuugaggguaaaacuaguccucaaaccu

SEQ ID NO: 365286 - RNA, 32 nt, Homo Sapiens
cacgcuccuguuacccuuucucuucccuguuc

SEQ ID NO: 365287 - RNA, 32 nt, Homo Sapiens
aauaaaguaauuauggaaaauauuuuaaacuc

SEQ ID NO: 365288 - RNA, 32 nt, Homo Sapiens
ugacagugucugucgggagucgggagucucca

SEQ ID NO: 365289 - RNA, 32 nt, Homo Sapiens
gagccccuaccccacaccaggccguccucccg

SEQ ID NO: 365290 - RNA, 32 nt, Homo Sapiens
aggcaaguuuaaaagccagauguccuuuuucc

SEQ ID NO: 365291 - RNA, 32 nt, Homo Sapiens
uaaagccauuuggucuuaauucugaccaauaa

SEQ ID NO: 365292 - RNA, 32 nt, Homo Sapiens
ucaaauccaaauagcaugaaugcuucucugua

SEQ ID NO: 365293 - RNA, 32 nt, Homo Sapiens
uguccagcgguggcccaccucuuccucccacu

SEQ ID NO: 365294 - RNA, 32 nt, Homo Sapiens
guugaauucuucauuuuugccaucuuuaacug

SEQ ID NO: 365295 - RNA, 32 nt, Homo Sapiens
ggucuggucagcagggacuuggucaauguggg

SEQ ID NO: 365296 - RNA, 32 nt, Homo Sapiens
ugcugaccacccaaauaugacugugaauugug

SEQ ID NO: 365297 - RNA, 32 nt, Homo Sapiens
uacccagaaugggagacgugccuccccuuccc

SEQ ID NO: 365298 - RNA, 28 nt, Homo Sapiens
aaaucuaaauggaccaggaugaacaaau

SEQ ID NO: 365299 - RNA, 32 nt, Homo Sapiens
aggucuccagcuggagggaacgucacccugca

SEQ ID NO: 365300 - RNA, 32 nt, Homo Sapiens
ccauuucauaugugaaugggugggcaguuugc

SEQ ID NO: 365301 - RNA, 32 nt, Homo Sapiens
gguuuuggauuagggauuguuuucucacuuac

SEQ ID NO: 365302 - RNA, 32 nt, Homo Sapiens
ccguucagagcccgggcgaggaccccuccagg

SEQ ID NO: 365303 - RNA, 32 nt, Homo Sapiens
uuccuuggauacuuuugguaagucauuuaucc

SEQ ID NO: 365304 - RNA, 32 nt, Homo Sapiens
agccuuaauucucaucauguauaaauuaacau

SEQ ID NO: 365305 - RNA, 32 nt, Homo Sapiens
ucgacucccuggugacgcuccucccagaucgc

SEQ ID NO: 365306 - RNA, 32 nt, Homo Sapiens
uucagguaguuuugcauaaaccagagggcaga

SEQ ID NO: 365307 - RNA, 32 nt, Homo Sapiens
cuucuguucauuuuccaacugcacuaauugug

SEQ ID NO: 365308 - RNA, 32 nt, Homo Sapiens
ucuucaggcagacaaauagaagauauguuucu

SEQ ID NO: 365309 - RNA, 32 nt, Homo Sapiens
ucccucacccucagucccaggagcuggaagcg

SEQ ID NO: 365310 - RNA, 32 nt, Homo Sapiens
uagaugaguugcccuccaccuggcuggagaga

SEQ ID NO: 365311 - RNA, 32 nt, Homo Sapiens
guuucauuccuugguccuuacuccaugccagg

SEQ ID NO: 365312 - RNA, 32 nt, Homo Sapiens
aggcagguggguggagggggaugcugggaguu

SEQ ID NO: 365313 - RNA, 32 nt, Homo Sapiens
uucagaggaacucagaccccagcccucagcug

SEQ ID NO: 365314 - RNA, 32 nt, Homo Sapiens
ccugacgcacggaggggccgggacgcgauuug

SEQ ID NO: 365315 - RNA, 32 nt, Homo Sapiens
ccgggguggaggagggagccaggcuucgcuuc

SEQ ID NO: 365316 - RNA, 32 nt, Homo Sapiens
guucgcucuugcguuucuuccccuccccaaga

SEQ ID NO: 365317 - RNA, 32 nt, Homo Sapiens
uagacgaaaaucaacucuagauggauuaaaga

SEQ ID NO: 365318 - RNA, 32 nt, Homo Sapiens
acaugcauacuguccaaagauuaggguuggug

SEQ ID NO: 365319 - RNA, 32 nt, Homo Sapiens
auguuuggggauaaguuaaaugucugagcuau

SEQ ID NO: 365320 - RNA, 32 nt, Homo Sapiens
uuucccagaggaaugccuggaaugggaggggg

SEQ ID NO: 365321 - RNA, 32 nt, Homo Sapiens
uucagugccaaaaacaacaacaaaaugaaacg

SEQ ID NO: 365322 - RNA, 32 nt, Homo Sapiens
cucugcacugguuuguuuaaaggacuucuucc

SEQ ID NO: 365323 - RNA, 32 nt, Homo Sapiens
gauguggcuucccagacacgcugcucuuccag

SEQ ID NO: 365324 - RNA, 32 nt, Homo Sapiens
gagcuccccuggagccagcagggcugugaugg

SEQ ID NO: 365325 - RNA, 32 nt, Homo Sapiens
ccuguguaaaaugcuaccaaauggcaaaaagc

SEQ ID NO: 365326 - RNA, 32 nt, Homo Sapiens
accucagccauguggaggaaggcuggagcuug

SEQ ID NO: 365327 - RNA, 32 nt, Homo Sapiens
ggcgccgcgggggguguggcgcggagaaugau

SEQ ID NO: 365328 - RNA, 32 nt, Homo Sapiens
aauaagauuuuaauguugauaauucuguuauu

SEQ ID NO: 365329 - RNA, 32 nt, Homo Sapiens
agacauugcccccaauuuucagaugguagacu

SEQ ID NO: 365330 - RNA, 32 nt, Homo Sapiens
gaugaugacaaugauauuauguaggaauauag

SEQ ID NO: 365331 - RNA, 31 nt, Homo Sapiens
accagcucggacgcacugccccgcggggccg

SEQ ID NO: 365332 - RNA, 32 nt, Homo Sapiens
augaaauugaauaugcacaagcagcuguaaaa

SEQ ID NO: 365333 - RNA, 32 nt, Homo Sapiens
caaauagcuucaaguagcucuccgcggguggc

SEQ ID NO: 365334 - RNA, 32 nt, Homo Sapiens
gcucuuauuucugaauucaaagcuugugaaaa

SEQ ID NO: 365335 - RNA, 32 nt, Homo Sapiens
agauuuuaauuguuuucauacuucauagaaau

SEQ ID NO: 365336 - RNA, 32 nt, Homo Sapiens
guauuccgaacagacacuaaaaauagcuguca

SEQ ID NO: 365337 - RNA, 32 nt, Homo Sapiens
gugauggcaacgccagcgggcgcauauacagc

SEQ ID NO: 365338 - RNA, 27 nt, Homo Sapiens
aucagugccuucuucagcucuaucugg

SEQ ID NO: 365339 - RNA, 32 nt, Homo Sapiens
aaugugaagcguuauagaagauaacuggccuc

SEQ ID NO: 365340 - RNA, 32 nt, Homo Sapiens
ccaguccugagcucagcuuaagggaggcuucu

SEQ ID NO: 365341 - RNA, 32 nt, Homo Sapiens
acuucugcucuuuuuucuuuguuuguuuuuuu

SEQ ID NO: 365342 - RNA, 32 nt, Homo Sapiens
cuucaucucgccaaccuagcgcgccguuggga

SEQ ID NO: 365343 - RNA, 32 nt, Homo Sapiens
uaaaguuggcgauugguugaauuuauaucuau

SEQ ID NO: 365344 - RNA, 32 nt, Homo Sapiens
guuaggagggauccgacagagaagaccauuuc

SEQ ID NO: 365345 - RNA, 32 nt, Homo Sapiens
uuuacuaauauuaaaaguuuggggaacauauu

SEQ ID NO: 365346 - RNA, 32 nt, Homo Sapiens
gucccccuccagguauuugaaacuacaggugu

SEQ ID NO: 365347 - RNA, 32 nt, Homo Sapiens
cacagagacagaggggaacaaguagcauuuau

SEQ ID NO: 365348 - RNA, 32 nt, Homo Sapiens
gggcccaaagccaccaccguccuuccaaagcc

SEQ ID NO: 365349 - RNA, 32 nt, Homo Sapiens
agguauaccugcacacaugugaaacagugcau

SEQ ID NO: 365350 - RNA, 32 nt, Homo Sapiens
agguguguguacaaguguguguaaaaauauau

SEQ ID NO: 365351 - RNA, 32 nt, Homo Sapiens
ucaaauggaaguuuucccaugaacuaagaauu

SEQ ID NO: 365352 - RNA, 32 nt, Homo Sapiens
acagagggccccgcagccgucaugcuuuccgc

SEQ ID NO: 365353 - RNA, 32 nt, Homo Sapiens
uagccuguggggcuugccagaacucggguucc

SEQ ID NO: 365354 - RNA, 32 nt, Homo Sapiens
aaaauuuaguggaauguguaaaaacuaaugaa

SEQ ID NO: 365355 - RNA, 32 nt, Homo Sapiens
gaauuacguuagcuacuuugguuccauagaac

SEQ ID NO: 365356 - RNA, 28 nt, Homo Sapiens
caaucaugcaguuaacauuugaaagugc

SEQ ID NO: 365357 - RNA, 28 nt, Homo Sapiens
aaucuaguuacagaaguaaggcauacac

SEQ ID NO: 365358 - RNA, 32 nt, Homo Sapiens
guuuucugaaccuuuuucaggacauuucaacc

SEQ ID NO: 365359 - RNA, 32 nt, Homo Sapiens
cauauuuuuuaaaauauugaauccaaggaaga

SEQ ID NO: 365360 - RNA, 32 nt, Homo Sapiens
auuuuugaccuugcccuuggcagugccccaca

SEQ ID NO: 365361 - RNA, 32 nt, Homo Sapiens
ggggugggagaauguggggugaggguucuuac

SEQ ID NO: 365362 - RNA, 32 nt, Homo Sapiens
ggaaaggauuugagcaagagaacaagaaggag

SEQ ID NO: 365363 - RNA, 32 nt, Homo Sapiens
aaaaucaguguuuauucaccaguaggagguug

SEQ ID NO: 365364 - RNA, 32 nt, Homo Sapiens
ccaccgcucccggcccgcuccgcccagagucc

SEQ ID NO: 365365 - RNA, 32 nt, Homo Sapiens
cuucuggauugugaaauuggcucucugggggc

SEQ ID NO: 365366 - RNA, 32 nt, Homo Sapiens
uaaaugucagcaguuggaaaaaucgucacgaa

SEQ ID NO: 365367 - RNA, 32 nt, Homo Sapiens
caggguggucgcgggguuggcggccgcagcgc

SEQ ID NO: 365368 - RNA, 32 nt, Homo Sapiens
acuggugugggaaggggcagcaccuggggagu

SEQ ID NO: 365369 - RNA, 32 nt, Homo Sapiens
ggucucaaagcuucgaaagauagcuucugaua

SEQ ID NO: 365370 - RNA, 32 nt, Homo Sapiens
aacucuccguccccccggggcccuccggaggg

SEQ ID NO: 365371 - RNA, 32 nt, Homo Sapiens
acggacaaccccagccccccgccuucacugau

SEQ ID NO: 365372 - RNA, 32 nt, Homo Sapiens
acuugccuucccuccccuccgggugagccugu

SEQ ID NO: 365373 - RNA, 32 nt, Homo Sapiens
agaacucuuuugcuggucagagauucccugag

SEQ ID NO: 365374 - RNA, 32 nt, Homo Sapiens
agaggcuucugggaacccaggcugggccuggu

SEQ ID NO: 365375 - RNA, 32 nt, Homo Sapiens
ccaaguggcagagcaacuugcacaacagccug

SEQ ID NO: 365376 - RNA, 32 nt, Homo Sapiens
ccacccgaacuuaacauagccuuuuuauacau

SEQ ID NO: 365377 - RNA, 32 nt, Homo Sapiens
aggacagaacagagacuagguuuggugagaug

SEQ ID NO: 365378 - RNA, 32 nt, Homo Sapiens
cugauucagagguaaacacagaucaagauauu

SEQ ID NO: 365379 - RNA, 32 nt, Homo Sapiens
ucacucccuuguccuguaaaucguguauucau

SEQ ID NO: 365380 - RNA, 32 nt, Homo Sapiens
accgggcccuccagcccuccccugcccagaua

SEQ ID NO: 365381 - RNA, 32 nt, Homo Sapiens
cucccguugcuauggcgcccaggccgcaaccc

SEQ ID NO: 365382 - RNA, 32 nt, Homo Sapiens
auuguaugugacucacuuucaugcacgugaug

SEQ ID NO: 365383 - RNA, 32 nt, Homo Sapiens
ccgggcccuggccacaaugaccucuuugcccu

SEQ ID NO: 365384 - RNA, 32 nt, Homo Sapiens
gugugagcgcggugggugcggaggggcgugug

SEQ ID NO: 365385 - RNA, 32 nt, Homo Sapiens
aggauuuuggaccuaagucuuauucuuuaguu

SEQ ID NO: 365386 - RNA, 32 nt, Homo Sapiens
aacuggauacacugaauauacucuuuaauaac

SEQ ID NO: 365387 - RNA, 32 nt, Homo Sapiens
ucuggcugcccggcugcagagagcugacccgg

SEQ ID NO: 365388 - RNA, 32 nt, Homo Sapiens
aaaagacuuuguaguguaaaggguguuauaca

SEQ ID NO: 365389 - RNA, 29 nt, Homo Sapiens
uuguauguguguauguauaucaugaauuu

SEQ ID NO: 365390 - RNA, 32 nt, Homo Sapiens
guucauuuacuuuguaauuccaauaaucauag

SEQ ID NO: 365391 - RNA, 32 nt, Homo Sapiens
uuuggcuguuuuggcaaugacucugaauuaaa

SEQ ID NO: 365392 - RNA, 32 nt, Homo Sapiens
gagacacaucugccuuccucugcagggauccu

SEQ ID NO: 365393 - RNA, 32 nt, Homo Sapiens
acagccaggaggaagggcagcuuggcagagcc

SEQ ID NO: 365394 - RNA, 32 nt, Homo Sapiens
aauguaaagcuacagagguuaauguauuguau

SEQ ID NO: 365395 - RNA, 32 nt, Homo Sapiens
aaggcccccugccugcccugucaggaggcaga

SEQ ID NO: 365396 - RNA, 32 nt, Homo Sapiens
cuauuaaaugaacuaacugaaaauaauaauua

SEQ ID NO: 365397 - RNA, 32 nt, Homo Sapiens
uuccucucagagccuugggcuccuccucugag

SEQ ID NO: 365398 - RNA, 32 nt, Homo Sapiens
ccgcggacaguaccgccuuccuccccucuguc

SEQ ID NO: 365399 - RNA, 32 nt, Homo Sapiens
acccugaagauaaucaaggccaguuacucauc

SEQ ID NO: 365400 - RNA, 32 nt, Homo Sapiens
gggucccgcggccgcuucuucaucucaggaau

SEQ ID NO: 365401 - RNA, 31 nt, Homo Sapiens
gaggauugcuuaucugcaggaguucaagacc

SEQ ID NO: 365402 - RNA, 32 nt, Homo Sapiens
aaagcacugaacaauuaagaaauuuuccaaga

SEQ ID NO: 365403 - RNA, 32 nt, Homo Sapiens
ccggcaggccgcggcgggagcugcuuucgcuc

SEQ ID NO: 365404 - RNA, 32 nt, Homo Sapiens
ccccggcggucacuucugggccccggucagcc

SEQ ID NO: 365405 - RNA, 32 nt, Homo Sapiens
gcagcagcuugaugaucugcaccgcguggagg

SEQ ID NO: 365406 - RNA, 32 nt, Homo Sapiens
gggguugucugggauugugugaaagaaaauua

SEQ ID NO: 365407 - RNA, 32 nt, Homo Sapiens
ucacccucagucuuaauccauccaccagaguc

SEQ ID NO: 365408 - RNA, 32 nt, Homo Sapiens
acauucagugauuauuugucuucaccgaagaa

SEQ ID NO: 365409 - RNA, 32 nt, Homo Sapiens
ucucaggccccgggcuucccuucuccccagcc

SEQ ID NO: 365410 - RNA, 32 nt, Homo Sapiens
agcccucaaaaauacugucucaacagcuggaa

SEQ ID NO: 365411 - RNA, 32 nt, Homo Sapiens
uggugcuuaguagacuugauaacuauuuuaaa

SEQ ID NO: 365412 - RNA, 32 nt, Homo Sapiens
cccccgccccugugucuccgcgagccggcugu

SEQ ID NO: 365413 - RNA, 32 nt, Homo Sapiens
aacucuccauucucuuauccccucaagcccug

SEQ ID NO: 365414 - RNA, 32 nt, Homo Sapiens
ugccaauggaaauucagaaguaguaaaacucc

SEQ ID NO: 365415 - RNA, 32 nt, Homo Sapiens
ugacccuugacaaaucuaucggugcuugguac

SEQ ID NO: 365416 - RNA, 32 nt, Homo Sapiens
gaaggcauauucaaaucaacaagguuauuuug

SEQ ID NO: 365417 - RNA, 32 nt, Homo Sapiens
uacugaaaaugacagcacuuuuaacaccuuuc

SEQ ID NO: 365418 - RNA, 32 nt, Homo Sapiens
cguggacagcgaagucugcgguuccugagccg

SEQ ID NO: 365419 - RNA, 32 nt, Homo Sapiens
ccagaccucgguuuccucauccacaaaauggg

SEQ ID NO: 365420 - RNA, 32 nt, Homo Sapiens
uuggcugccccggaccccgggcagggcagugg

SEQ ID NO: 365421 - RNA, 32 nt, Homo Sapiens
auuaaacuaaacacugugcuucauauuuguac

SEQ ID NO: 365422 - RNA, 32 nt, Homo Sapiens
ucugugcauaguuuugucucauuuuaacgacu

SEQ ID NO: 365423 - RNA, 32 nt, Homo Sapiens
auccacuaugggugcagcugguguugagaaac

SEQ ID NO: 365424 - RNA, 32 nt, Homo Sapiens
ugacacagcaaggaugacucagcacugccccu

SEQ ID NO: 365425 - RNA, 32 nt, Homo Sapiens
acuauaccuuggcugggcauagugacuaguga

SEQ ID NO: 365426 - RNA, 32 nt, Homo Sapiens
auucauauaugcauuucuuuauauagaaaagu

SEQ ID NO: 365427 - RNA, 32 nt, Homo Sapiens
acguuuugagaaaugugucauuaggcgauuuc

SEQ ID NO: 365428 - RNA, 32 nt, Homo Sapiens
auacaucucuccccaacccuagguucccuguu

SEQ ID NO: 365429 - RNA, 32 nt, Homo Sapiens
cucuuguugaucuuguauucagucagguuaaa

SEQ ID NO: 365430 - RNA, 32 nt, Homo Sapiens
cugugcacccccagcccugccccuuggccgca

SEQ ID NO: 365431 - RNA, 32 nt, Homo Sapiens
ucauauugaagaagagauguaccuucaauuga

SEQ ID NO: 365432 - RNA, 32 nt, Homo Sapiens
ggcagccgccgacggcgggucgccggggcggg

SEQ ID NO: 365433 - RNA, 32 nt, Homo Sapiens
cugccgagggaccccgcggcccgccccggugc

SEQ ID NO: 365434 - RNA, 31 nt, Homo Sapiens
cccacgcgcccacgcguccgcggacgcgugg

SEQ ID NO: 365435 - RNA, 32 nt, Homo Sapiens
uguucuccaucccaacacaucacuuaccacuu

SEQ ID NO: 365436 - RNA, 32 nt, Homo Sapiens
caagcauuccucccaccuuggucucccaaaau

SEQ ID NO: 365437 - RNA, 32 nt, Homo Sapiens
ccugaacuccagccaugccauuuuaauaccag

SEQ ID NO: 365438 - RNA, 32 nt, Homo Sapiens
ugggcgagggugggcauugggggagaggggga

SEQ ID NO: 365439 - RNA, 32 nt, Homo Sapiens
uuuuucucauugauuaauggacaugaugcuga

SEQ ID NO: 365440 - RNA, 32 nt, Homo Sapiens
uuguuccagaaagcuuuaaugugugugggagu

SEQ ID NO: 365441 - RNA, 32 nt, Homo Sapiens
acacaccuauuauuauauucugauuaaauaca

SEQ ID NO: 365442 - RNA, 32 nt, Homo Sapiens
uuuugggaaauuuuaaaguaaaaguuucaaag

SEQ ID NO: 365443 - RNA, 32 nt, Homo Sapiens
gaggcagcgucccccaguggcuuauaacucag

SEQ ID NO: 365444 - RNA, 32 nt, Homo Sapiens
agccggauccccucagccuuccagguccucaa

SEQ ID NO: 365445 - RNA, 32 nt, Homo Sapiens
aaauaugcaauaauauacaaagcacuuugagc

SEQ ID NO: 365446 - RNA, 32 nt, Homo Sapiens
ucaccaggcaugucugcagagccuggacacca

SEQ ID NO: 365447 - RNA, 32 nt, Homo Sapiens
uuucuucucccuccccacaaggucuauuuuua

SEQ ID NO: 365448 - RNA, 32 nt, Homo Sapiens
uggggaaaacgcagcuacaccuggagcaaggu

SEQ ID NO: 365449 - RNA, 32 nt, Homo Sapiens
gagaaauauaucgcuuguuuuguuuuuuauag

SEQ ID NO: 365450 - RNA, 32 nt, Homo Sapiens
auaaccacagaaaauauuuaugaagacuauaa

SEQ ID NO: 365451 - RNA, 32 nt, Homo Sapiens
ggaaaaagagaaaaaagacaauuaaaauacaa

SEQ ID NO: 365452 - RNA, 32 nt, Homo Sapiens
acuacauagguuaauuuuuuaagggauguugc

SEQ ID NO: 365453 - RNA, 32 nt, Homo Sapiens
gaaaaaucucuguaggacuuucuggggcuuca

SEQ ID NO: 365454 - RNA, 32 nt, Homo Sapiens
uaugugaggaccagugcuuucucucuuugcac

SEQ ID NO: 365455 - RNA, 32 nt, Homo Sapiens
uagauagggaccguggacucgggggcccuuug

SEQ ID NO: 365456 - RNA, 32 nt, Homo Sapiens
guugccagguacuggaggaagagagaagaggc

SEQ ID NO: 365457 - RNA, 32 nt, Homo Sapiens
cauuuacaaucgucuuaauuuuguacucagaa

SEQ ID NO: 365458 - RNA, 32 nt, Homo Sapiens
gagggggucugugccugaagcucaggagugug

SEQ ID NO: 365459 - RNA, 32 nt, Homo Sapiens
caaaaggcugggcguaguggcucacaccugua

SEQ ID NO: 365460 - RNA, 32 nt, Homo Sapiens
gaaaccuaauuuauauacaaucuauaccuaaa

SEQ ID NO: 365461 - RNA, 32 nt, Homo Sapiens
uccagcaaaaauauuuuuuaaaaauuagccgg

SEQ ID NO: 365462 - RNA, 32 nt, Homo Sapiens
cgccgcgcuccgaaccccggcccggcccccgc

SEQ ID NO: 365463 - RNA, 28 nt, Homo Sapiens
aagauggugaugcugcugcugcugcuuu

SEQ ID NO: 365464 - RNA, 32 nt, Homo Sapiens
cacucaacaacccuuuaaugagccuguaagga

SEQ ID NO: 365465 - RNA, 32 nt, Homo Sapiens
ggcacgaggcucugccugugcgaccgccgccc

SEQ ID NO: 365466 - RNA, 32 nt, Homo Sapiens
gucagcaaggcacaacaauguuguuacaaagg

SEQ ID NO: 365467 - RNA, 32 nt, Homo Sapiens
caucagauuuaaggaaaagacuuuuuagccau

SEQ ID NO: 365468 - RNA, 32 nt, Homo Sapiens
gauguuuugggugacaaugcacacaugcuggg

SEQ ID NO: 365469 - RNA, 32 nt, Homo Sapiens
ggggaaauuggaaaucauuacauuguaaagac

SEQ ID NO: 365470 - RNA, 32 nt, Homo Sapiens
uuuaggggcagguuaugcgagauggaaauggc

SEQ ID NO: 365471 - RNA, 32 nt, Homo Sapiens
auagggucacuuugccauuaugcaaauggaga

SEQ ID NO: 365472 - RNA, 32 nt, Homo Sapiens
caguaaaaaugaaacaauguuauuaugguuua

SEQ ID NO: 365473 - RNA, 32 nt, Homo Sapiens
augaauuggguauuuuagaaaaacuuuauuau

SEQ ID NO: 365474 - RNA, 32 nt, Homo Sapiens
acuccaagcgagccagcccucucuuggacuag

SEQ ID NO: 365475 - RNA, 32 nt, Homo Sapiens
caccacccggccugugccccagcucuccccga

SEQ ID NO: 365476 - RNA, 32 nt, Homo Sapiens
acgaagucaggagauugagaccauccuggcua

SEQ ID NO: 365477 - RNA, 32 nt, Homo Sapiens
uuugcagcaauacagcagcaucaggaggacug

SEQ ID NO: 365478 - RNA, 32 nt, Homo Sapiens
gagaacugcuccauguuggcucagcagaaugu

SEQ ID NO: 365479 - RNA, 32 nt, Homo Sapiens
uugggaagcugauuucacuuuaaacugaaagu

SEQ ID NO: 365480 - RNA, 32 nt, Homo Sapiens
caacuggaaaauuuuuaguuuuucuagccagg

SEQ ID NO: 365481 - RNA, 32 nt, Homo Sapiens
gugcuacugauccaugaggccaagagggagug

SEQ ID NO: 365482 - RNA, 32 nt, Homo Sapiens
cccaaauuuaauguggaagacaaaguguugga

SEQ ID NO: 365483 - RNA, 32 nt, Homo Sapiens
ccgagggaggacugaggcgggccucaccccag

SEQ ID NO: 365484 - RNA, 32 nt, Homo Sapiens
cuguucauauggaaacaaagaccuggcuguga

SEQ ID NO: 365485 - RNA, 32 nt, Homo Sapiens
ccuggccagauccgcucccagacggccuugga

SEQ ID NO: 365486 - RNA, 32 nt, Homo Sapiens
gcagggccagcuugggucaggaugcuggguua

SEQ ID NO: 365487 - RNA, 30 nt, Homo Sapiens
aagcugcuucugccgccgccggccgccugg

SEQ ID NO: 365488 - RNA, 32 nt, Homo Sapiens
ucccagucuugcugagcccacccgcucucucu

SEQ ID NO: 365489 - RNA, 32 nt, Homo Sapiens
uuccacuuaccuccaucagcuaacucuacaga

SEQ ID NO: 365490 - RNA, 32 nt, Homo Sapiens
guuaguuuccaaguccagucaauuuuacauga

SEQ ID NO: 365491 - RNA, 32 nt, Homo Sapiens
uaguauuagcauagcauucuuaaaggaaugca

SEQ ID NO: 365492 - RNA, 30 nt, Homo Sapiens
gacauuugagguggcaggcaggaugccugc

SEQ ID NO: 365493 - RNA, 32 nt, Homo Sapiens
agccgagccugcuaaccgcagcuccgcacuug

SEQ ID NO: 365494 - RNA, 32 nt, Homo Sapiens
agaagagagaaaacagaaaaugaagggagaag

SEQ ID NO: 365495 - RNA, 32 nt, Homo Sapiens
aggaccucgucuuuaugaaacacacaccugga

SEQ ID NO: 365496 - RNA, 32 nt, Homo Sapiens
guggcacgcagagccccaggcgcggagcugag

SEQ ID NO: 365497 - RNA, 32 nt, Homo Sapiens
guaauaacagaaaauaccagcaaggaagaaga

SEQ ID NO: 365498 - RNA, 32 nt, Homo Sapiens
gccaccuuccauaucaucuaccccaugccaca

SEQ ID NO: 365499 - RNA, 32 nt, Homo Sapiens
uguauccuuuucuccuuguuauuugcccuuca

SEQ ID NO: 365500 - RNA, 32 nt, Homo Sapiens
aucagagaacuuucuugaggcuuguccuaaag

SEQ ID NO: 365501 - RNA, 32 nt, Homo Sapiens
ucggagcggagcaggguagggaccguguacag

SEQ ID NO: 365502 - RNA, 32 nt, Homo Sapiens
cuucuguaggaaacagcagagaccagguggaa

SEQ ID NO: 365503 - RNA, 32 nt, Homo Sapiens
ucugaguagcugagugaauccaaagccauaau

SEQ ID NO: 365504 - RNA, 32 nt, Homo Sapiens
uagaucucuaaaguuucauauaaaucaaagcu

SEQ ID NO: 365505 - RNA, 32 nt, Homo Sapiens
uaaaggcccugcuguggccacccagugcucug

SEQ ID NO: 365506 - RNA, 32 nt, Homo Sapiens
auuuuugagaaguugcuucuuuuacaucagaa

SEQ ID NO: 365507 - RNA, 32 nt, Homo Sapiens
cgcggucgggcggaccacugcagacugagcgg

SEQ ID NO: 365508 - RNA, 29 nt, Homo Sapiens
cccucuuggggacagggagggggugcccu

SEQ ID NO: 365509 - RNA, 32 nt, Homo Sapiens
gccugcagugagcggugacgccgccuggcuug

SEQ ID NO: 365510 - RNA, 32 nt, Homo Sapiens
gugggauuuuuccuugugucucagaauugcag

SEQ ID NO: 365511 - RNA, 32 nt, Homo Sapiens
aaaaucaauauuuaaaacaaaguucaauuuag

SEQ ID NO: 365512 - RNA, 32 nt, Homo Sapiens
cucuaugcaacaccccauccuugccgcaccga

SEQ ID NO: 365513 - RNA, 32 nt, Homo Sapiens
cugcugcacugacggcgggugcccgcgccuca

SEQ ID NO: 365514 - RNA, 32 nt, Homo Sapiens
gagucuccuucauagacuugaauaacucuuuu

SEQ ID NO: 365515 - RNA, 32 nt, Homo Sapiens
guuaccuauccuguguccccacccccuuggca

SEQ ID NO: 365516 - RNA, 32 nt, Homo Sapiens
ucccuuuuuuauuuucauuucuaaauucuggu

SEQ ID NO: 365517 - RNA, 32 nt, Homo Sapiens
agucugggggagagggcagagaauggauuuau

SEQ ID NO: 365518 - RNA, 32 nt, Homo Sapiens
uugagucuaaaaugggcauaauaguuuaccuc

SEQ ID NO: 365519 - RNA, 32 nt, Homo Sapiens
uuggagagccacugcgcagggcauggaagguu

SEQ ID NO: 365520 - RNA, 32 nt, Homo Sapiens
ggacuggacugccuuagaucacaugugugucc

SEQ ID NO: 365521 - RNA, 32 nt, Homo Sapiens
gugcaucaacugccuccauaacaccacugggu

SEQ ID NO: 365522 - RNA, 32 nt, Homo Sapiens
uguuuuguuuuguuuuucugguaaccuagcag

SEQ ID NO: 365523 - RNA, 32 nt, Homo Sapiens
auuuuggggcuuugggaguacacaggacuacu

SEQ ID NO: 365524 - RNA, 32 nt, Homo Sapiens
ucagggggcaguagcacacuuugcacacgaua

SEQ ID NO: 365525 - RNA, 32 nt, Homo Sapiens
ugccaccaaagguaaaugaaacuguaaaauac

SEQ ID NO: 365526 - RNA, 32 nt, Homo Sapiens
uuuuccuuuucuuuuucuuuccuuucauuuuu

SEQ ID NO: 365527 - RNA, 32 nt, Homo Sapiens
uguguuggaacucuuuaaaauaaagaaaagag

SEQ ID NO: 365528 - RNA, 32 nt, Homo Sapiens
aaaucuucaggcaggguacuauuuaaggugca

SEQ ID NO: 365529 - RNA, 32 nt, Homo Sapiens
ucuucacuuugucucuggcaucuagcauggug

SEQ ID NO: 365530 - RNA, 32 nt, Homo Sapiens
gcgcugccuggcgggggccgcggaggagccga

SEQ ID NO: 365531 - RNA, 32 nt, Homo Sapiens
gcgucagaccugccuccacgugccugugggaa

SEQ ID NO: 365532 - RNA, 32 nt, Homo Sapiens
cagcccaugcuggaaucauguuuaccuccuag

SEQ ID NO: 365533 - RNA, 32 nt, Homo Sapiens
cggcacuaccgcuggccggcgcccgggugggc

SEQ ID NO: 365534 - RNA, 32 nt, Homo Sapiens
acacaaaggcugggaauaaaauucuggguauu

SEQ ID NO: 365535 - RNA, 32 nt, Homo Sapiens
acagccggcccccggcccacguuuucggugga

SEQ ID NO: 365536 - RNA, 29 nt, Homo Sapiens
agcugcugaaguucccauuuucuacauac

SEQ ID NO: 365537 - RNA, 32 nt, Homo Sapiens
gaugcuuggcccccauacccccaaccuugucc

SEQ ID NO: 365538 - RNA, 32 nt, Homo Sapiens
ccucucaccacauugcccuccugggcaccccc

SEQ ID NO: 365539 - RNA, 32 nt, Homo Sapiens
auggauaaagaugcaguauuccuuauucugua

SEQ ID NO: 365540 - RNA, 32 nt, Homo Sapiens
ggaaacaaggacagcugcacgggugcccacac

SEQ ID NO: 365541 - RNA, 32 nt, Homo Sapiens
uaauaaauuaauucuuugcucuaguaauagau

SEQ ID NO: 365542 - RNA, 32 nt, Homo Sapiens
ccgcucuccccggcugcaggcggcgugcagga

SEQ ID NO: 365543 - RNA, 32 nt, Homo Sapiens
guuuuugaaaauauguauuucucccauuucuc

SEQ ID NO: 365544 - RNA, 32 nt, Homo Sapiens
auuuuuaaaaaaugcaguaguguguuagagac

SEQ ID NO: 365545 - RNA, 32 nt, Homo Sapiens
gagcugcgcguggaggaguccaggcugcagcc

SEQ ID NO: 365546 - RNA, 32 nt, Homo Sapiens
ccuagcuaaugcuuggaguagucuguggguga

SEQ ID NO: 365547 - RNA, 32 nt, Homo Sapiens
caacaagauguaaacaggaaagaaaucuaguu

SEQ ID NO: 365548 - RNA, 32 nt, Homo Sapiens
acugucuucccuccccucccccagcugaggug

SEQ ID NO: 365549 - RNA, 32 nt, Homo Sapiens
aauagcauuuaaaauggaaagcuguguuugga

SEQ ID NO: 365550 - RNA, 32 nt, Homo Sapiens
ccaggcucuccccugacccauccucgcucccc

SEQ ID NO: 365551 - RNA, 32 nt, Homo Sapiens
cagggcagcacuggaaauugcugcuggagccu

SEQ ID NO: 365552 - RNA, 32 nt, Homo Sapiens
uaaucucaaggagcuuccagugcagagggaau

SEQ ID NO: 365553 - RNA, 32 nt, Homo Sapiens
aguggugucugaacuagauuugaaagggugag

SEQ ID NO: 365554 - RNA, 32 nt, Homo Sapiens
ccuucauuagagacggcuguggagagcgccgc

SEQ ID NO: 365555 - RNA, 32 nt, Homo Sapiens
uuauaaugaccuuuauuuucuauuuuugugcu

SEQ ID NO: 365556 - RNA, 32 nt, Homo Sapiens
cuugugauaaauugauuaauguuuacaacaug

SEQ ID NO: 365557 - RNA, 32 nt, Homo Sapiens
uucccuggaggcauaaguggcugggguagaga

SEQ ID NO: 365558 - RNA, 32 nt, Homo Sapiens
cacucucggggaagagauggcggcggagcggg

SEQ ID NO: 365559 - RNA, 32 nt, Homo Sapiens
agugggacuuguauuuugaucuuaauaaaaaa

SEQ ID NO: 365560 - RNA, 32 nt, Homo Sapiens
agccauuuuauuauuuuaguguauuaguuaug

SEQ ID NO: 365561 - RNA, 32 nt, Homo Sapiens
cgacggggcccgacugcgggaccgagggcugc

SEQ ID NO: 365562 - RNA, 32 nt, Homo Sapiens
acuuuuucauucaaaauggguauucuugauuu

SEQ ID NO: 365563 - RNA, 32 nt, Homo Sapiens
caagcugccgacagcuuucuccauccagauug

SEQ ID NO: 365564 - RNA, 32 nt, Homo Sapiens
gaagcagaauaaagcugucugcccaggagaaa

SEQ ID NO: 365565 - RNA, 32 nt, Homo Sapiens
ugaccggggagaagccgugugcucuucauuau

SEQ ID NO: 365566 - RNA, 32 nt, Homo Sapiens
ugggacucugaguuccugagccccacaacaag

SEQ ID NO: 365567 - RNA, 32 nt, Homo Sapiens
aggugagcagaucaccugaggucaggaguuca

SEQ ID NO: 365568 - RNA, 32 nt, Homo Sapiens
cuccaggaagcaguguguccacgacuccaguc

SEQ ID NO: 365569 - RNA, 32 nt, Homo Sapiens
ucugaucaaagucuauuuugcauaaaaugucc

SEQ ID NO: 365570 - RNA, 32 nt, Homo Sapiens
accccuggggccugggugcccugagugguggu

SEQ ID NO: 365571 - RNA, 32 nt, Homo Sapiens
aaaaacggaaggguucagcugcugcucccaau

SEQ ID NO: 365572 - RNA, 32 nt, Homo Sapiens
agcacauuuuuagaucuuuuuucaaauggcuu

SEQ ID NO: 365573 - RNA, 32 nt, Homo Sapiens
cauuuuuaagaccccaaacaaacaaaaaacaa

SEQ ID NO: 365574 - RNA, 32 nt, Homo Sapiens
uucuguauaugauauauauuaucuuauacuga

SEQ ID NO: 365575 - RNA, 32 nt, Homo Sapiens
augagccagggccaguuuuccuaguuauagag

SEQ ID NO: 365576 - RNA, 32 nt, Homo Sapiens
auggauaaaaauuauuuugugaucauaacucu

SEQ ID NO: 365577 - RNA, 32 nt, Homo Sapiens
aaauuaauaagcugccuauugagugguauagc

SEQ ID NO: 365578 - RNA, 32 nt, Homo Sapiens
cuuucucagaauccucuuuccuccccauuugg

SEQ ID NO: 365579 - RNA, 32 nt, Homo Sapiens
uggaaguuucccuuuacuuucagggauugguc

SEQ ID NO: 365580 - RNA, 32 nt, Homo Sapiens
ugccguguaaaacaaccugccucauauauuuc

SEQ ID NO: 365581 - RNA, 32 nt, Homo Sapiens
gggaaaaagggagaaagccuggcagaggguug

SEQ ID NO: 365582 - RNA, 32 nt, Homo Sapiens
cccccaucucagcccuuuauuuuaucuuucau

SEQ ID NO: 365583 - RNA, 32 nt, Homo Sapiens
gccgaguaggggugggggugggauggcaggag

SEQ ID NO: 365584 - RNA, 32 nt, Homo Sapiens
ccuccacgccuggcuccccaggacgcaacuga

SEQ ID NO: 365585 - RNA, 32 nt, Homo Sapiens
gcgacauguaaaauaaaagucauaaaaugcaa

SEQ ID NO: 365586 - RNA, 32 nt, Homo Sapiens
uagcagaggagcugcagauuuccugcuuguau

SEQ ID NO: 365587 - RNA, 32 nt, Homo Sapiens
cuguuuugucugcuuucuuaauuucuuauaag

SEQ ID NO: 365588 - RNA, 32 nt, Homo Sapiens
aagucgcggcugcaggauccuugccuccaacg

SEQ ID NO: 365589 - RNA, 32 nt, Homo Sapiens
agggaaagaggguggggcugcaggcagucuac

SEQ ID NO: 365590 - RNA, 32 nt, Homo Sapiens
cguuaaaacaaaucacacguucugaaagucca

SEQ ID NO: 365591 - RNA, 32 nt, Homo Sapiens
cucuucugccucagccucccaaguagcuggga

SEQ ID NO: 365592 - RNA, 32 nt, Homo Sapiens
ucucuggcaauguacagaaauauuguauauac

SEQ ID NO: 365593 - RNA, 32 nt, Homo Sapiens
ggggacugaggguggggggaguagaggggccg

SEQ ID NO: 365594 - RNA, 32 nt, Homo Sapiens
cccugugucauauuuuacuaagauuuugugcc

SEQ ID NO: 365595 - RNA, 32 nt, Homo Sapiens
uccgccggcccugcgggccgccggugaaauac

SEQ ID NO: 365596 - RNA, 32 nt, Homo Sapiens
aaccaggaaugaauuaauccauucauaagggc

SEQ ID NO: 365597 - RNA, 32 nt, Homo Sapiens
aaaaacaggcucaaaguggggcugggaccugg

SEQ ID NO: 365598 - RNA, 32 nt, Homo Sapiens
ggaauuugaccucacagauguuacaacuugau

SEQ ID NO: 365599 - RNA, 32 nt, Homo Sapiens
guaaaagaucuguucaaggaaaacuauaagac

SEQ ID NO: 365600 - RNA, 32 nt, Homo Sapiens
uccagcugcccagcucuucccccgcccggccg

SEQ ID NO: 365601 - RNA, 32 nt, Homo Sapiens
acaugaguggagagugcauuugccauaccugu

SEQ ID NO: 365602 - RNA, 32 nt, Homo Sapiens
caugucuuguacuugcuuucugauucauaauu

SEQ ID NO: 365603 - RNA, 32 nt, Homo Sapiens
cugcuugcaucugcagccccacuucccccaca

SEQ ID NO: 365604 - RNA, 32 nt, Homo Sapiens
ccugccaauggugguguuaaauuuguguagaa

SEQ ID NO: 365605 - RNA, 32 nt, Homo Sapiens
ccaagccuggggagggguuccucagugcagga

SEQ ID NO: 365606 - RNA, 32 nt, Homo Sapiens
guaccaguagaguggguugcugcuguaaauac

SEQ ID NO: 365607 - RNA, 32 nt, Homo Sapiens
aauugccugaggaaagggauaugagagaacuu

SEQ ID NO: 365608 - RNA, 32 nt, Homo Sapiens
aggcuggacagaggcuguagccaacacaauca

SEQ ID NO: 365609 - RNA, 32 nt, Homo Sapiens
gagagaaauaauaacuaaaaaauauacccuuu

SEQ ID NO: 365610 - RNA, 31 nt, Homo Sapiens
auauguaaaguguaaaaugugcuguuucagc

SEQ ID NO: 365611 - RNA, 32 nt, Homo Sapiens
cacuggccgaggacuggacacccaccagggaa

SEQ ID NO: 365612 - RNA, 27 nt, Homo Sapiens
ucuucagccucccucagcccccaggau

SEQ ID NO: 365613 - RNA, 32 nt, Homo Sapiens
uuuuucugaaggaaagcugcuuccucauaugu

SEQ ID NO: 365614 - RNA, 32 nt, Homo Sapiens
cggcugcggcgcccgcgcgagucgcgucuaag

SEQ ID NO: 365615 - RNA, 32 nt, Homo Sapiens
ggggcccgcggagacuccacggggcgccccgg

SEQ ID NO: 365616 - RNA, 32 nt, Homo Sapiens
aagccugcgcugauuugagccaucgcccagaa

SEQ ID NO: 365617 - RNA, 32 nt, Homo Sapiens
agccucccauccucugguggucugggaggauc

SEQ ID NO: 365618 - RNA, 32 nt, Homo Sapiens
aagggucccagagacuccauagauggccucac

SEQ ID NO: 365619 - RNA, 32 nt, Homo Sapiens
cauuuggaaaggaaaagucaaccaggcacagu

SEQ ID NO: 365620 - RNA, 32 nt, Homo Sapiens
uaauuuggguugaauuguguugaacuaaccug

SEQ ID NO: 365621 - RNA, 32 nt, Homo Sapiens
auugcucucuccuaagccccaaccccacucca

SEQ ID NO: 365622 - RNA, 32 nt, Homo Sapiens
ggaauauuuauguuuguguacauauuugaugu

SEQ ID NO: 365623 - RNA, 32 nt, Homo Sapiens
uaauucuuuucuuuuccauuuaguaacaguug

SEQ ID NO: 365624 - RNA, 28 nt, Homo Sapiens
ccaaugcugagcucagucugcgucucgu

SEQ ID NO: 365625 - RNA, 32 nt, Homo Sapiens
gaaauagaaggccugcccuuccuuucucuguu

SEQ ID NO: 365626 - RNA, 32 nt, Homo Sapiens
agucugauauuguaguauuagcacagacuguu

SEQ ID NO: 365627 - RNA, 32 nt, Homo Sapiens
auccuccgcgcgcacgagcucagucccuacug

SEQ ID NO: 365628 - RNA, 32 nt, Homo Sapiens
cggcgccgcugcuguaggggaccagcgcgggu

SEQ ID NO: 365629 - RNA, 32 nt, Homo Sapiens
aaaauauuguaguuugaauauuuaagcaauaa

SEQ ID NO: 365630 - RNA, 32 nt, Homo Sapiens
gccgcccgcccggcagucaggcagcgucgccg

SEQ ID NO: 365631 - RNA, 32 nt, Homo Sapiens
gggcggugccgcugacucgccggagcgcacag

SEQ ID NO: 365632 - RNA, 32 nt, Homo Sapiens
ugagacugauuagggaggggauuugcacaggg

SEQ ID NO: 365633 - RNA, 32 nt, Homo Sapiens
gagagauugucugugagacucccuuuagguug

SEQ ID NO: 365634 - RNA, 32 nt, Homo Sapiens
aggccagggcagugcugcugcagagcuagaag

SEQ ID NO: 365635 - RNA, 32 nt, Homo Sapiens
ccuuucucagacuagagccuucugccuauccc

SEQ ID NO: 365636 - RNA, 32 nt, Homo Sapiens
uucacugugugggguuauucguagcuaucuuu

SEQ ID NO: 365637 - RNA, 32 nt, Homo Sapiens
aaaaguuguguuuucuaauaccaaagaggagg

SEQ ID NO: 365638 - RNA, 32 nt, Homo Sapiens
gcugguucgcgcccuccucaucucgcucaucc

SEQ ID NO: 365639 - RNA, 32 nt, Homo Sapiens
ugaugccacugaugaagaagaaguacagguug

SEQ ID NO: 365640 - RNA, 32 nt, Homo Sapiens
cccgaucgcugcgcccgcggccagggccgagg

SEQ ID NO: 365641 - RNA, 32 nt, Homo Sapiens
gcgccggcgucggcugcgucuccggcguuuga

SEQ ID NO: 365642 - RNA, 32 nt, Homo Sapiens
ucgcgguccucccagggagcugcgggugaugu

SEQ ID NO: 365643 - RNA, 32 nt, Homo Sapiens
uuaaagugauuuuuuggucacaguguuuuguu

SEQ ID NO: 365644 - RNA, 32 nt, Homo Sapiens
caguaaaaauagcgaggauaauacuaaccaug

SEQ ID NO: 365645 - RNA, 32 nt, Homo Sapiens
caguaaagcaucuauuuuuuuagcacuuaagc

SEQ ID NO: 365646 - RNA, 32 nt, Homo Sapiens
aauuuuaacuccggggagccauaaucugcaac

SEQ ID NO: 365647 - RNA, 28 nt, Homo Sapiens
uuaggguaguuggccaggaugccgaaua

SEQ ID NO: 365648 - RNA, 32 nt, Homo Sapiens
cagguuuuucuuuuucauuuauucagcaacua

SEQ ID NO: 365649 - RNA, 32 nt, Homo Sapiens
cuagccuggaagcucggcauuugguuucacua

SEQ ID NO: 365650 - RNA, 32 nt, Homo Sapiens
uggaguaaggguagcagcucuugccgcacgug

SEQ ID NO: 365651 - RNA, 32 nt, Homo Sapiens
uugaggucaggaguucaagaccagucuggcca

SEQ ID NO: 365652 - RNA, 32 nt, Homo Sapiens
ccucuuccacacuccuugcugugauucugucc

SEQ ID NO: 365653 - RNA, 32 nt, Homo Sapiens
agcagagacagcccguucccccugccgccuga

SEQ ID NO: 365654 - RNA, 32 nt, Homo Sapiens
cccagccugcggggcguucccacugccuggau

SEQ ID NO: 365655 - RNA, 32 nt, Homo Sapiens
auggaauguaaauauccagagaauuugggucu

SEQ ID NO: 365656 - RNA, 32 nt, Homo Sapiens
ucgugguuccugccuuucccagacgaccgugc

SEQ ID NO: 365657 - RNA, 32 nt, Homo Sapiens
ucuuuccauucauuuuaacugaguuccagaaa

SEQ ID NO: 365658 - RNA, 32 nt, Homo Sapiens
ccgccggcugcugugggagcggcggccguccu

SEQ ID NO: 365659 - RNA, 32 nt, Homo Sapiens
gaggaagacucuugggaccccuggguguucuc

SEQ ID NO: 365660 - RNA, 32 nt, Homo Sapiens
gagcagcauccaccccaccccaucuuugcugc

SEQ ID NO: 365661 - RNA, 32 nt, Homo Sapiens
auccaugugguaaugguagacuuuuuaggugg

SEQ ID NO: 365662 - RNA, 32 nt, Homo Sapiens
uggcacguccacguggcccagcccucauagag

SEQ ID NO: 365663 - RNA, 32 nt, Homo Sapiens
gccagugauaguaaacaaaaucugugcagagg

SEQ ID NO: 365664 - RNA, 32 nt, Homo Sapiens
ucgagucacagcaaacuguacaauggcaguug

SEQ ID NO: 365665 - RNA, 32 nt, Homo Sapiens
ccaccgcgccuggccaaaaggcauuucauucu

SEQ ID NO: 365666 - RNA, 32 nt, Homo Sapiens
gaggaggccuccugggguuuccccagggcagu

SEQ ID NO: 365667 - RNA, 32 nt, Homo Sapiens
uuuucuguaaagggcuagccagcaaauauucu

SEQ ID NO: 365668 - RNA, 32 nt, Homo Sapiens
cgggggucgcgaagcccgcagccccggaccgc

SEQ ID NO: 365669 - RNA, 32 nt, Homo Sapiens
uaguauuugggagagggaaaggcuguacuaua

SEQ ID NO: 365670 - RNA, 32 nt, Homo Sapiens
cuggacccauucuuuuuugcguagcccuggga

SEQ ID NO: 365671 - RNA, 32 nt, Homo Sapiens
ccacuuagacugccuccguuucauacccaaag

SEQ ID NO: 365672 - RNA, 32 nt, Homo Sapiens
gcagugcccagccgcacagggaacgugggcgg

SEQ ID NO: 365673 - RNA, 32 nt, Homo Sapiens
uccaggagcugaugaugcacccugcugacacc

SEQ ID NO: 365674 - RNA, 27 nt, Homo Sapiens
ugauucuccugccucagccccccaagu

SEQ ID NO: 365675 - RNA, 32 nt, Homo Sapiens
gggccauaggcacuucuuuccccgcccguuuc

SEQ ID NO: 365676 - RNA, 27 nt, Homo Sapiens
gcuguggaugucuucagccucugggug

SEQ ID NO: 365677 - RNA, 32 nt, Homo Sapiens
ggugcaguccccagcccccaccccucaggucu

SEQ ID NO: 365678 - RNA, 32 nt, Homo Sapiens
ccagggcaagcacugugaggcuuccugcgugc

SEQ ID NO: 365679 - RNA, 32 nt, Homo Sapiens
uuuggagcuaaaugcagauaaccaucauuuua

SEQ ID NO: 365680 - RNA, 32 nt, Homo Sapiens
ccauucauuaugucuggcuguauuagaaugac

SEQ ID NO: 365681 - RNA, 32 nt, Homo Sapiens
gggaaaaaucaaguuuaauucccuuuaucugg

SEQ ID NO: 365682 - RNA, 32 nt, Homo Sapiens
ugcugccucagcacagagagccagaacucuau

SEQ ID NO: 365683 - RNA, 32 nt, Homo Sapiens
gggauggucaccuggugauuucaaugauggca

SEQ ID NO: 365684 - RNA, 32 nt, Homo Sapiens
aggggucagcagugacauagcaucugaauccc

SEQ ID NO: 365685 - RNA, 32 nt, Homo Sapiens
acugggcuuggaugcuuugggccuuugacugc

SEQ ID NO: 365686 - RNA, 32 nt, Homo Sapiens
cccucccacagccuggcagccauccagaggag

SEQ ID NO: 365687 - RNA, 32 nt, Homo Sapiens
guauuguagagacaccaauauuagcuaaugua

SEQ ID NO: 365688 - RNA, 32 nt, Homo Sapiens
ucuucuguaucaucauuuuuuaucaaguggca

SEQ ID NO: 365689 - RNA, 32 nt, Homo Sapiens
uuuaauguuuuggcuuucauuacuucaucuua

SEQ ID NO: 365690 - RNA, 32 nt, Homo Sapiens
uuuccaggccuuucccaaggaguagcugaaag

SEQ ID NO: 365691 - RNA, 32 nt, Homo Sapiens
ccgcccaggaccagucugcccacugccuaaau

SEQ ID NO: 365692 - RNA, 32 nt, Homo Sapiens
gacaucccuaauggaaauacugaauggcagau

SEQ ID NO: 365693 - RNA, 32 nt, Homo Sapiens
uguuagaauaauauuauguauuagauaucgcu

SEQ ID NO: 365694 - RNA, 30 nt, Homo Sapiens
uuacaggggacccagcccgcagcgacaggc

SEQ ID NO: 365695 - RNA, 32 nt, Homo Sapiens
aguucuugauucauuuuuaccauucuuuccau

SEQ ID NO: 365696 - RNA, 32 nt, Homo Sapiens
cggcguccgcggcuggaauggugcuggcugug

SEQ ID NO: 365697 - RNA, 32 nt, Homo Sapiens
gugacuuagcugugucccuguagcucuggaac

SEQ ID NO: 365698 - RNA, 32 nt, Homo Sapiens
cucaguacugaaucaggaccucacucagaaag

SEQ ID NO: 365699 - RNA, 32 nt, Homo Sapiens
ucucagggacgccuccauccccggcuccccua

SEQ ID NO: 365700 - RNA, 29 nt, Homo Sapiens
uguuuuuaaaguuucuuuuguagaccgaa

SEQ ID NO: 365701 - RNA, 32 nt, Homo Sapiens
uuuauugugucuauggcagguuugggaaaggu

SEQ ID NO: 365702 - RNA, 32 nt, Homo Sapiens
gggacgcggcgguacucuggcgucuuccgacu

SEQ ID NO: 365703 - RNA, 32 nt, Homo Sapiens
ggaggccgcucggugauccgcggcggcggcag

SEQ ID NO: 365704 - RNA, 32 nt, Homo Sapiens
cuaguuuuucuuuguauuuuuaucucuaucuc

SEQ ID NO: 365705 - RNA, 32 nt, Homo Sapiens
acaauaacacuauauuuauuuuuggguuuggc

SEQ ID NO: 365706 - RNA, 32 nt, Homo Sapiens
auuuugcucaguucuacuuccaaacauaugaa

SEQ ID NO: 365707 - RNA, 32 nt, Homo Sapiens
cugacuuucaaguuauauaccguggaauggag

SEQ ID NO: 365708 - RNA, 32 nt, Homo Sapiens
gaagcauaaaaauuauucacaguugcacccuu

SEQ ID NO: 365709 - RNA, 32 nt, Homo Sapiens
cauuccuuacaccccuuccccauccugcuccg

SEQ ID NO: 365710 - RNA, 32 nt, Homo Sapiens
ucccugccccgcaccgcuuccacaaaauagca

SEQ ID NO: 365711 - RNA, 32 nt, Homo Sapiens
uuggauaggagagcugggacuccaucucgacc

SEQ ID NO: 365712 - RNA, 32 nt, Homo Sapiens
guguguauauuaccauucuccaaugaaauaau

SEQ ID NO: 365713 - RNA, 32 nt, Homo Sapiens
aguaggaaauccaaugaaauggcuguuuccac

SEQ ID NO: 365714 - RNA, 32 nt, Homo Sapiens
cuaaguguaaaauuauuuaauaaugucuauua

SEQ ID NO: 365715 - RNA, 32 nt, Homo Sapiens
gguccccgaugccgcccggggguccucacguc

SEQ ID NO: 365716 - RNA, 32 nt, Homo Sapiens
gcaagccucggcggcccggaaccggccucgga

SEQ ID NO: 365717 - RNA, 32 nt, Homo Sapiens
aacacuguccaugcauuuauuaaucuuuuaaa

SEQ ID NO: 365718 - RNA, 32 nt, Homo Sapiens
ugacccacaccuguaaucccagcacuuuggga

SEQ ID NO: 365719 - RNA, 32 nt, Homo Sapiens
gggauaguucaaguuugaaauaauuaaguggu

SEQ ID NO: 365720 - RNA, 32 nt, Homo Sapiens
gacggguucgcggcugccgccggacugcggcc

SEQ ID NO: 365721 - RNA, 32 nt, Homo Sapiens
gugcuccuggucuccauccccaucccggcaag

SEQ ID NO: 365722 - RNA, 32 nt, Homo Sapiens
acauccacauucagcaucacuccaaggaugug

SEQ ID NO: 365723 - RNA, 32 nt, Homo Sapiens
auggacucguaggcugacccaggcccaaaggg

SEQ ID NO: 365724 - RNA, 32 nt, Homo Sapiens
gucacacugggagcugcagaccggagcuguuc

SEQ ID NO: 365725 - RNA, 32 nt, Homo Sapiens
cugcugaguuugccuuguuaaucuucaauagu

SEQ ID NO: 365726 - RNA, 32 nt, Homo Sapiens
ccuuacucauuucuaagugcaauaagggagug

SEQ ID NO: 365727 - RNA, 32 nt, Homo Sapiens
gagauucugugccugcuuuaucugugcuuggc

SEQ ID NO: 365728 - RNA, 32 nt, Homo Sapiens
aggaggugccuagagggaaaaguuauuuuugu

SEQ ID NO: 365729 - RNA, 32 nt, Homo Sapiens
aagucgccgcugcacgacgucuggccggcgcu

SEQ ID NO: 365730 - RNA, 32 nt, Homo Sapiens
ggaauucccuuaaagaauuagaagugcgucuc

SEQ ID NO: 365731 - RNA, 30 nt, Homo Sapiens
acgggguuucacuguguuagccaggauggu

SEQ ID NO: 365732 - RNA, 32 nt, Homo Sapiens
cagccacgcuuccuguacagccugcagaacuc

SEQ ID NO: 365733 - RNA, 32 nt, Homo Sapiens
ccauuuguucuucuccagcaucucuaaggccc

SEQ ID NO: 365734 - RNA, 32 nt, Homo Sapiens
ggcggcaggacucggcgcgccauggacaggcc

SEQ ID NO: 365735 - RNA, 32 nt, Homo Sapiens
uauugcacagauacuguacuaaaauuacagca

SEQ ID NO: 365736 - RNA, 32 nt, Homo Sapiens
uggguuuugugauuuuuguauugaauauugcu

SEQ ID NO: 365737 - RNA, 32 nt, Homo Sapiens
ccuugcuuuucucacuuggagccgagggugcu

SEQ ID NO: 365738 - RNA, 32 nt, Homo Sapiens
ggucgaucuggugauccaagaccucaagcagc

SEQ ID NO: 365739 - RNA, 32 nt, Homo Sapiens
ggagucucaaagcuucauaaauuuauaacuuu

SEQ ID NO: 365740 - RNA, 32 nt, Homo Sapiens
augaugcaguguucuaucauaaguaauucugg

SEQ ID NO: 365741 - RNA, 32 nt, Homo Sapiens
caaaauaggcaaaagacacaugcugaagaacu

SEQ ID NO: 365742 - RNA, 32 nt, Homo Sapiens
ccuccgacacugggcugcagcgggaauucgca

SEQ ID NO: 365743 - RNA, 32 nt, Homo Sapiens
cguguaacaauaacccaugagaacacacaugu

SEQ ID NO: 365744 - RNA, 32 nt, Homo Sapiens
aaaauauuuuuagaagucuuuuuguaaacuaa

SEQ ID NO: 365745 - RNA, 32 nt, Homo Sapiens
auugguuaaaaauuauuuucuauugcagagag

SEQ ID NO: 365746 - RNA, 32 nt, Homo Sapiens
aaagaaauuaaagauagcacagagaaagaauu

SEQ ID NO: 365747 - RNA, 32 nt, Homo Sapiens
aaggagcucagguacaggacuggucuaagcug

SEQ ID NO: 365748 - RNA, 32 nt, Homo Sapiens
uggcggggcagcaaagagaaguggauuuggug

SEQ ID NO: 365749 - RNA, 32 nt, Homo Sapiens
cgaggucccgggccccggggcgcucgcucagg

SEQ ID NO: 365750 - RNA, 32 nt, Homo Sapiens
ccaaaugccaggcuuuucccacuacaccagca

SEQ ID NO: 365751 - RNA, 32 nt, Homo Sapiens
uguagaguuuugaaaagucacuuuuauuuuua

SEQ ID NO: 365752 - RNA, 32 nt, Homo Sapiens
ggacccgcgugccccaggccucgcgcugcccg

SEQ ID NO: 365753 - RNA, 32 nt, Homo Sapiens
gaaacacuaugaauguaaugaauuuggaaaau

SEQ ID NO: 365754 - RNA, 32 nt, Homo Sapiens
cuggcucugugccugccugccuccaggagcag

SEQ ID NO: 365755 - RNA, 32 nt, Homo Sapiens
gaaugcuaggguggcucucaccacuggccgcc

SEQ ID NO: 365756 - RNA, 32 nt, Homo Sapiens
uuguuuguuuaauuuguauaugucuaaaggua

SEQ ID NO: 365757 - RNA, 32 nt, Homo Sapiens
acauaguuauuuaaacaagaaacucucagaau

SEQ ID NO: 365758 - RNA, 32 nt, Homo Sapiens
gaguccccuuucccugucccagccccaucugu

SEQ ID NO: 365759 - RNA, 32 nt, Homo Sapiens
augccuccaagacucucugugccagcccggag

SEQ ID NO: 365760 - RNA, 32 nt, Homo Sapiens
uggacagucaacacgggcaccaugaagcacuu

SEQ ID NO: 365761 - RNA, 32 nt, Homo Sapiens
ggcuggcgucccgcacugggguguccucgcug

SEQ ID NO: 365762 - RNA, 32 nt, Homo Sapiens
aauacaugcuguaugcaaccacuucucaucac

SEQ ID NO: 365763 - RNA, 32 nt, Homo Sapiens
aauuauccaaaauuauuuuauuaaauauugca

SEQ ID NO: 365764 - RNA, 32 nt, Homo Sapiens
ugccccaagucccagacacauuucagcagcuu

SEQ ID NO: 365765 - RNA, 32 nt, Homo Sapiens
acgcccccucuccauuguuuccacacucggau

SEQ ID NO: 365766 - RNA, 32 nt, Homo Sapiens
aagaugaaaacaacaaaacaaacaagaaaaac

SEQ ID NO: 365767 - RNA, 32 nt, Homo Sapiens
cagcaccacacacacgcacacacacacacacg

SEQ ID NO: 365768 - RNA, 32 nt, Homo Sapiens
gaacuguguuuguggguaugagucuguguggc

SEQ ID NO: 365769 - RNA, 32 nt, Homo Sapiens
caugcauauuuuaauaucuguuuggauaguca

SEQ ID NO: 365770 - RNA, 32 nt, Homo Sapiens
ggcgcggccguggcccgggcccugguccagca

SEQ ID NO: 365771 - RNA, 32 nt, Homo Sapiens
cgagguuccccucucagucuuccuccagggaa

SEQ ID NO: 365772 - RNA, 32 nt, Homo Sapiens
uggagcagugagcugccuccucuccuagcacc

SEQ ID NO: 365773 - RNA, 32 nt, Homo Sapiens
uuuaccaucaugucccuguguauuacgcaaag

SEQ ID NO: 365774 - RNA, 32 nt, Homo Sapiens
cgccguguuccagcuccgcguuguuccgcgag

SEQ ID NO: 365775 - RNA, 32 nt, Homo Sapiens
ccggcuuccccucuggcuaccccagaggucuc

SEQ ID NO: 365776 - RNA, 32 nt, Homo Sapiens
caccccuaccccccaaacuacccucuuccugg

SEQ ID NO: 365777 - RNA, 32 nt, Homo Sapiens
agagauaauccaaaaucaggguuugguuuggg

SEQ ID NO: 365778 - RNA, 32 nt, Homo Sapiens
gcgggugcgcgaggagaaagccccagcccugg

SEQ ID NO: 365779 - RNA, 32 nt, Homo Sapiens
cgcucuggccaggcucgggcuccggaggacag

SEQ ID NO: 365780 - RNA, 32 nt, Homo Sapiens
cgcggcggccgcggccggugcaugugcggcug

SEQ ID NO: 365781 - RNA, 32 nt, Homo Sapiens
uucuagcuaauaaaauacauaauccugaaagu

SEQ ID NO: 365782 - RNA, 32 nt, Homo Sapiens
acccaccuuucugcacauaaguuaugguuuuc

SEQ ID NO: 365783 - RNA, 32 nt, Homo Sapiens
aaugccugucuccccgcggaucaugggcuccu

SEQ ID NO: 365784 - RNA, 32 nt, Homo Sapiens
guguggcccucccuugcuuaccagcugacagg

SEQ ID NO: 365785 - RNA, 32 nt, Homo Sapiens
ugaucuuugaggaaacagaccuggagggaggu

SEQ ID NO: 365786 - RNA, 32 nt, Homo Sapiens
gguauuugucauauuucuuuaguaugcaauaa

SEQ ID NO: 365787 - RNA, 32 nt, Homo Sapiens
aguagacaaaugcagcagcaagucaauuguau

SEQ ID NO: 365788 - RNA, 32 nt, Homo Sapiens
agauuucccuggggcuucggagggauccgaga

SEQ ID NO: 365789 - RNA, 32 nt, Homo Sapiens
gcagucuggucaggaaccuugguuucuugaga

SEQ ID NO: 365790 - RNA, 32 nt, Homo Sapiens
cugaauggaagaguggaacaaaagucagucgu

SEQ ID NO: 365791 - RNA, 32 nt, Homo Sapiens
gaaaaguguggcugggucuucgaggagccgaa

SEQ ID NO: 365792 - RNA, 32 nt, Homo Sapiens
gacagugaaaauaaacgauuggcucuuaucaa

SEQ ID NO: 365793 - RNA, 32 nt, Homo Sapiens
auuaaaggaauacacacacacacacacacaca

SEQ ID NO: 365794 - RNA, 30 nt, Homo Sapiens
gaaggugggaagaugggggaaccugaagac

SEQ ID NO: 365795 - RNA, 32 nt, Homo Sapiens
acugauaaaacaaaaacaaaaguauguuuuaa

SEQ ID NO: 365796 - RNA, 32 nt, Homo Sapiens
guuacauacacacacacacacacacacacaca

SEQ ID NO: 365797 - RNA, 32 nt, Homo Sapiens
cgcugaucuucagaguguuggaaggcuucggg

SEQ ID NO: 365798 - RNA, 32 nt, Homo Sapiens
uggggucucgcacugucccccaggcuggagug

SEQ ID NO: 365799 - RNA, 32 nt, Homo Sapiens
acccaccuccccgcguucccacuuccccgcac

SEQ ID NO: 365800 - RNA, 32 nt, Homo Sapiens
caagugguagaguauacaggauaacgaaguaa

SEQ ID NO: 365801 - RNA, 32 nt, Homo Sapiens
cuugugggguggagggaagagaauagcaugau

SEQ ID NO: 365802 - RNA, 32 nt, Homo Sapiens
caucgcucuccugcuaacagucuugcaggucu

SEQ ID NO: 365803 - RNA, 32 nt, Homo Sapiens
guucagucuccaucauggcaugccauacucuc

SEQ ID NO: 365804 - RNA, 32 nt, Homo Sapiens
uuuugccgccuccgccuuugccuucgcagccg

SEQ ID NO: 365805 - RNA, 32 nt, Homo Sapiens
cacauuuaucuaggggcauuucagguuuccaa

SEQ ID NO: 365806 - RNA, 32 nt, Homo Sapiens
ggcagggucugcuugggcaguugagaggccuu

SEQ ID NO: 365807 - RNA, 32 nt, Homo Sapiens
aagugccuuucugcaguuuuucaggagcgcaa

SEQ ID NO: 365808 - RNA, 32 nt, Homo Sapiens
uaguugggauugcaggcacgcgccaccacgcc

SEQ ID NO: 365809 - RNA, 32 nt, Homo Sapiens
acuggcacgcgacgaggacgcauuccaaauca

SEQ ID NO: 365810 - RNA, 32 nt, Homo Sapiens
aagccuggcauuuggggugcuccuugcaacgu

SEQ ID NO: 365811 - RNA, 30 nt, Homo Sapiens
ugaagguggggcggggcagugagggguggg

SEQ ID NO: 365812 - RNA, 32 nt, Homo Sapiens
auaaacagggagaacaacaauggaaucaagaa

SEQ ID NO: 365813 - RNA, 32 nt, Homo Sapiens
caggcgcuucugcggcggcuccaguguggggu

SEQ ID NO: 365814 - RNA, 32 nt, Homo Sapiens
guuaagaaaaugcaggcaguaucccucaucuu

SEQ ID NO: 365815 - RNA, 32 nt, Homo Sapiens
cagugaaaaaucuauuuaugauuucgggagua

SEQ ID NO: 365816 - RNA, 32 nt, Homo Sapiens
gccggacgcaggugcugcggcgcgggccccuc

SEQ ID NO: 365817 - RNA, 32 nt, Homo Sapiens
gggacuauuuccaccacccccaguuagcacca

SEQ ID NO: 365818 - RNA, 32 nt, Homo Sapiens
gccccgcgcucaagccgccuucuccugccggu

SEQ ID NO: 365819 - RNA, 32 nt, Homo Sapiens
ggcuggagcugggcugggaucccgagcucggc

SEQ ID NO: 365820 - RNA, 32 nt, Homo Sapiens
uauauuuuuuuuuuuuuuuuuacuuauuuuuu

SEQ ID NO: 365821 - RNA, 32 nt, Homo Sapiens
gcccacugugucuccuuccccuaccugcaacc

SEQ ID NO: 365822 - RNA, 32 nt, Homo Sapiens
uauuugcauauauauuuuguccuuccaauaua

SEQ ID NO: 365823 - RNA, 31 nt, Homo Sapiens
agucaucucgcggccguucagaauuauaagg

SEQ ID NO: 365824 - RNA, 32 nt, Homo Sapiens
acuaggagugugcccuuuuaaucuuuacuagu

SEQ ID NO: 365825 - RNA, 32 nt, Homo Sapiens
uaaccuauaugauuuauaguuuguacaugcau

SEQ ID NO: 365826 - RNA, 32 nt, Homo Sapiens
cgcccggcggcauccgcuugcugcugccaccg

SEQ ID NO: 365827 - RNA, 32 nt, Homo Sapiens
uuacuaucuuggcaccuuuauuauuaaugggu

SEQ ID NO: 365828 - RNA, 32 nt, Homo Sapiens
uuuuauuucugcaaguucaaauuaauguauua

SEQ ID NO: 365829 - RNA, 32 nt, Homo Sapiens
aaguuuuuucuuucuuccuuuccugaauacac

SEQ ID NO: 365830 - RNA, 32 nt, Homo Sapiens
gcugcgcccuggauccucacacuacagaucag

SEQ ID NO: 365831 - RNA, 32 nt, Homo Sapiens
aacccccaaagcaggucuccucacucaccggg

SEQ ID NO: 365832 - RNA, 32 nt, Homo Sapiens
ggcuuuuccagaaacaaaaaaucugugagggu

SEQ ID NO: 365833 - RNA, 32 nt, Homo Sapiens
uacguaaacuauaaaggugggauggcuuuaau

SEQ ID NO: 365834 - RNA, 32 nt, Homo Sapiens
uggaguccacagagccaggaauggagaguggg

SEQ ID NO: 365835 - RNA, 32 nt, Homo Sapiens
ucccagcuuugaugaaauacaugaaucuagau

SEQ ID NO: 365836 - RNA, 32 nt, Homo Sapiens
gcugcgcuccagcacugcggggcuuuucugca

SEQ ID NO: 365837 - RNA, 32 nt, Homo Sapiens
ucagguucaccagcagaaacgcgcucacuaga

SEQ ID NO: 365838 - RNA, 32 nt, Homo Sapiens
aauugaucaaggaaucucaauuacuuucaaau

SEQ ID NO: 365839 - RNA, 32 nt, Homo Sapiens
ccacuacauguaaaaauagcauucuacuugau

SEQ ID NO: 365840 - RNA, 32 nt, Homo Sapiens
uguuuuauguagauuucuuuuuaaauguuuug

SEQ ID NO: 365841 - RNA, 32 nt, Homo Sapiens
caagcugcccgcagacagcagugucccgcaga

SEQ ID NO: 365842 - RNA, 32 nt, Homo Sapiens
cggacuaguucgggcccuggggucuugcuggg

SEQ ID NO: 365843 - RNA, 32 nt, Homo Sapiens
uauaacauggggcauuguaacuuuaaaguagu

SEQ ID NO: 365844 - RNA, 32 nt, Homo Sapiens
ucagaaguagaguauauuaacaaauacagaca

SEQ ID NO: 365845 - RNA, 31 nt, Homo Sapiens
guuuagaucauaugacacucgagcacagaag

SEQ ID NO: 365846 - RNA, 32 nt, Homo Sapiens
cacagagcccaguuuuucaaguuugcuuucac

SEQ ID NO: 365847 - RNA, 32 nt, Homo Sapiens
acaaggaugcccucucucaccacuccuguuca

SEQ ID NO: 365848 - RNA, 32 nt, Homo Sapiens
gcagccuggggaggagugugacgacgguaaca

SEQ ID NO: 365849 - RNA, 32 nt, Homo Sapiens
uaauggucucuaccuaauggaccuccguggcc

SEQ ID NO: 365850 - RNA, 29 nt, Homo Sapiens
ccugaguggggacagaguugaucguccac

SEQ ID NO: 365851 - RNA, 32 nt, Homo Sapiens
acguacuaccuaaaaggaugucuaaauguuug

SEQ ID NO: 365852 - RNA, 32 nt, Homo Sapiens
gcaagauauuuuuucuuuuuuauagugugaag

SEQ ID NO: 365853 - RNA, 32 nt, Homo Sapiens
gaaaaagaaaauuuaacuuaaaauauuuuagc

SEQ ID NO: 365854 - RNA, 32 nt, Homo Sapiens
cuucagauucuucguaaacuuuucugcaguug

SEQ ID NO: 365855 - RNA, 32 nt, Homo Sapiens
ccggcgcaucccgauggagcgcggcggcggcg

SEQ ID NO: 365856 - RNA, 32 nt, Homo Sapiens
auaggauggucgucuguacaccagaagucagg

SEQ ID NO: 365857 - RNA, 32 nt, Homo Sapiens
agccaaggccacucccggggccccucaggggc

SEQ ID NO: 365858 - RNA, 32 nt, Homo Sapiens
aaaucauuucucuggaugaauuuuauaaaaug

SEQ ID NO: 365859 - RNA, 32 nt, Homo Sapiens
cugcccucaccccacaccucaagaccauccca

SEQ ID NO: 365860 - RNA, 32 nt, Homo Sapiens
cccuuuuugcuuucuuuuacgaccacaugaaa

SEQ ID NO: 365861 - RNA, 32 nt, Homo Sapiens
aguccugcccucacuccccagugaauccucaa

SEQ ID NO: 365862 - RNA, 32 nt, Homo Sapiens
gccauaagggacaugucuuuggcuucagaauu

SEQ ID NO: 365863 - RNA, 32 nt, Homo Sapiens
gcuuuagcauucugagaaaugucuaauuggua

SEQ ID NO: 365864 - RNA, 32 nt, Homo Sapiens
ucuaacccuguucugagcugccccuugcccac

SEQ ID NO: 365865 - RNA, 30 nt, Homo Sapiens
cgaacauggcggccgaaauccacuccaggc

SEQ ID NO: 365866 - RNA, 32 nt, Homo Sapiens
gaaagucaaaaacuaagauacuguagacugga

SEQ ID NO: 365867 - RNA, 32 nt, Homo Sapiens
guugauucccaggagugccauauuucagcuac

SEQ ID NO: 365868 - RNA, 32 nt, Homo Sapiens
aauuuacuguguuuggcuuucuguaaauguag

SEQ ID NO: 365869 - RNA, 32 nt, Homo Sapiens
ucagagacuguggccugggggcagcgucuuuc

SEQ ID NO: 365870 - RNA, 32 nt, Homo Sapiens
gccgagaaaucuagcaccuugcaugcuggauc

SEQ ID NO: 365871 - RNA, 32 nt, Homo Sapiens
ccagaaauuuuagccccuacuaucaagaacaa

SEQ ID NO: 365872 - RNA, 32 nt, Homo Sapiens
caucuuugccugcacagcacucuuccuguggg

SEQ ID NO: 365873 - RNA, 32 nt, Homo Sapiens
uguaacaaugaaaaagaaaaagcauuuuauau

SEQ ID NO: 365874 - RNA, 32 nt, Homo Sapiens
ccuccccgccgggaggccaggcuccgggacgc

SEQ ID NO: 365875 - RNA, 32 nt, Homo Sapiens
gugacaaauaaucauuuucaucuuggcagcaa

SEQ ID NO: 365876 - RNA, 32 nt, Homo Sapiens
gccagggccggcgggggcacugcgcacuggcc

SEQ ID NO: 365877 - RNA, 32 nt, Homo Sapiens
uaauucauuuuuccuuaaccaguugugcaagg

SEQ ID NO: 365878 - RNA, 32 nt, Homo Sapiens
cagugaaaagcaaaccagaacaaaacaaaaag

SEQ ID NO: 365879 - RNA, 32 nt, Homo Sapiens
cucugcucgccccccaucucaccccccaagcg

SEQ ID NO: 365880 - RNA, 32 nt, Homo Sapiens
gaggaaguuacaaauaagcuuguuacaacauc

SEQ ID NO: 365881 - RNA, 32 nt, Homo Sapiens
ucagugucucuacuccaccccuguaguaagua

SEQ ID NO: 365882 - RNA, 32 nt, Homo Sapiens
aucacuuaucccauuguauuauaauuaucugu

SEQ ID NO: 365883 - RNA, 32 nt, Homo Sapiens
gcuucugggcguccagaaggccaggcauuugc

SEQ ID NO: 365884 - RNA, 32 nt, Homo Sapiens
ggccacacccucaggauuuccaaggugcaauu

SEQ ID NO: 365885 - RNA, 27 nt, Homo Sapiens
ggacauucuccuuucagcccuucuggg

SEQ ID NO: 365886 - RNA, 32 nt, Homo Sapiens
cucugacaaccuguggcaugcugcagggucag

SEQ ID NO: 365887 - RNA, 29 nt, Homo Sapiens
ucagcauuaaaauaaauguaauuaaaagg

SEQ ID NO: 365888 - RNA, 27 nt, Homo Sapiens
ucaugucguggcggccucagcccugcu

SEQ ID NO: 365889 - RNA, 32 nt, Homo Sapiens
cgcgagcccgcggguggcgcgcggcgcauggu

SEQ ID NO: 365890 - RNA, 32 nt, Homo Sapiens
agguggguggaucaccugaggucagggguucg

SEQ ID NO: 365891 - RNA, 32 nt, Homo Sapiens
cuuuucccaacccccagcccccacccgguggu

SEQ ID NO: 365892 - RNA, 32 nt, Homo Sapiens
aggaggaggaggagccgucgcaggaugaagga

SEQ ID NO: 365893 - RNA, 32 nt, Homo Sapiens
cggcccuccgcggggcaggggcugcugcgagc

SEQ ID NO: 365894 - RNA, 32 nt, Homo Sapiens
aacagggaagcaaguagaagcaagcugacaca

SEQ ID NO: 365895 - RNA, 32 nt, Homo Sapiens
agggugcguggugcgcggcggcggcggaacga

SEQ ID NO: 365896 - RNA, 32 nt, Homo Sapiens
agaugcauuuggauucuugucuuccccaaccu

SEQ ID NO: 365897 - RNA, 32 nt, Homo Sapiens
gcccgcggccccaccaaccuccguuccggccc

SEQ ID NO: 365898 - RNA, 32 nt, Homo Sapiens
cacacgcacucuccccgcucaggggccuggag

SEQ ID NO: 365899 - RNA, 32 nt, Homo Sapiens
gugagaaauggcauccaagaugcuuuuacuga

SEQ ID NO: 365900 - RNA, 32 nt, Homo Sapiens
ucuugaauauauuuacuuugugucucuuaacu

SEQ ID NO: 365901 - RNA, 32 nt, Homo Sapiens
guuaacgcggccccuccacaccuggaggucag

SEQ ID NO: 365902 - RNA, 32 nt, Homo Sapiens
gagagugacggcggcccggccgacgggagccg

SEQ ID NO: 365903 - RNA, 32 nt, Homo Sapiens
ucuugggcucucacuaucugccuaaauaauuu

SEQ ID NO: 365904 - RNA, 32 nt, Homo Sapiens
ucguuguuaacccauccuucauuuuacucaua

SEQ ID NO: 365905 - RNA, 32 nt, Homo Sapiens
ggcauggcggccugcauugcagcggggcacug

SEQ ID NO: 365906 - RNA, 32 nt, Homo Sapiens
gggccgggcagacauuuaugcucugagcagca

SEQ ID NO: 365907 - RNA, 29 nt, Homo Sapiens
acuaaauguuugucuuuaaaggcagcugg

SEQ ID NO: 365908 - RNA, 32 nt, Homo Sapiens
gaaggugcucuugucaugggguggaggggaaa

SEQ ID NO: 365909 - RNA, 28 nt, Homo Sapiens
caaaugcuugcuugcuuuccuuguuuuc

SEQ ID NO: 365910 - RNA, 32 nt, Homo Sapiens
gccaugauguaggugcuugauacuguuugggu

SEQ ID NO: 365911 - RNA, 32 nt, Homo Sapiens
ccccagaagacgggaaaguucgcggccggagc

SEQ ID NO: 365912 - RNA, 32 nt, Homo Sapiens
cuuuguaggcagccaaucccagagaagcagac

SEQ ID NO: 365913 - RNA, 32 nt, Homo Sapiens
accuuuauacuuguagcaaauuguuuuaauuc

SEQ ID NO: 365914 - RNA, 32 nt, Homo Sapiens
guauuuauuuauauuuuuuuuaauagagacga

SEQ ID NO: 365915 - RNA, 32 nt, Homo Sapiens
gggucuugguuagcccacuuucccucuccaug

SEQ ID NO: 365916 - RNA, 32 nt, Homo Sapiens
aaucacccauauauuuuagugaccagaaucuu

SEQ ID NO: 365917 - RNA, 32 nt, Homo Sapiens
augauuuaaaagauuauaaaacuuuauuacug

SEQ ID NO: 365918 - RNA, 32 nt, Homo Sapiens
agaaaugugaauguaguaaggggcugaagaga

SEQ ID NO: 365919 - RNA, 32 nt, Homo Sapiens
uagaccaggaagcugcauccacagcagaccuc

SEQ ID NO: 365920 - RNA, 32 nt, Homo Sapiens
ggaccgagcuggcggcgggcggcgcgcgcuuc

SEQ ID NO: 365921 - RNA, 32 nt, Homo Sapiens
gaaauaaaauuccucgguguauuaaucuaagg

SEQ ID NO: 365922 - RNA, 32 nt, Homo Sapiens
augaauuacuaauccaguauuacuacacuaug

SEQ ID NO: 365923 - RNA, 32 nt, Homo Sapiens
ggcccgcggagagccccggccccggcagccau

SEQ ID NO: 365924 - RNA, 32 nt, Homo Sapiens
agcugucgggucccggccccgcucugcccaca

SEQ ID NO: 365925 - RNA, 32 nt, Homo Sapiens
auggggagggucagcaguccacggccgacauc

SEQ ID NO: 365926 - RNA, 32 nt, Homo Sapiens
cuuggaagccaccagccagcaagcauuaaugg

SEQ ID NO: 365927 - RNA, 32 nt, Homo Sapiens
uuauguuugauauucaccuggauuuuaauaca

SEQ ID NO: 365928 - RNA, 32 nt, Homo Sapiens
guuccaucaagguucuaguugcuggcccugug

SEQ ID NO: 365929 - RNA, 32 nt, Homo Sapiens
uucagauuguuuacuauuuaagauguacuuuu

SEQ ID NO: 365930 - RNA, 32 nt, Homo Sapiens
guuuuuccucaauaacuuguuucccaggccua

SEQ ID NO: 365931 - RNA, 32 nt, Homo Sapiens
uugaaaaaagagcagcagcaucugagaguaac

SEQ ID NO: 365932 - RNA, 32 nt, Homo Sapiens
aggaagcucucucuccucucccugcuuccccu

SEQ ID NO: 365933 - RNA, 32 nt, Homo Sapiens
accaaaaaugaaauaagacauguagcuaaagu

SEQ ID NO: 365934 - RNA, 32 nt, Homo Sapiens
gauucgagggucacagagcaggcugacccaga

SEQ ID NO: 365935 - RNA, 32 nt, Homo Sapiens
gccuaucugauccauucuuacagcaacaugga

SEQ ID NO: 365936 - RNA, 32 nt, Homo Sapiens
ggaagcucugaggcccggggcuuccggagguc

SEQ ID NO: 365937 - RNA, 32 nt, Homo Sapiens
cugauuccauucucugacuugacccagcuccu

SEQ ID NO: 365938 - RNA, 31 nt, Homo Sapiens
ggauauuuaacccuuuaagugcuguuuuggg

SEQ ID NO: 365939 - RNA, 32 nt, Homo Sapiens
ccaucaccacacucaaggggccgcuaagacag

SEQ ID NO: 365940 - RNA, 32 nt, Homo Sapiens
acuugucaauuucuacaacaacaacaacaaaa

SEQ ID NO: 365941 - RNA, 32 nt, Homo Sapiens
uccuguggcuccgacuucuuccaagaccuuaa

SEQ ID NO: 365942 - RNA, 32 nt, Homo Sapiens
uguaauacaaccucagugugucauugggcagu

SEQ ID NO: 365943 - RNA, 32 nt, Homo Sapiens
uuuuauugccuucaggacagcuggcgccccuc

SEQ ID NO: 365944 - RNA, 32 nt, Homo Sapiens
gaucgcggaggaucgcggagggcgcgccgagg

SEQ ID NO: 365945 - RNA, 32 nt, Homo Sapiens
acuagaagaacaaaaaagagcuguugaugaaa

SEQ ID NO: 365946 - RNA, 32 nt, Homo Sapiens
cgggagcgcuaggccuggucccucuuccuaga

SEQ ID NO: 365947 - RNA, 32 nt, Homo Sapiens
acuucacguggggggccuggccugcugugggu

SEQ ID NO: 365948 - RNA, 32 nt, Homo Sapiens
gcggagcgggggucggugguggauggcccagc

SEQ ID NO: 365949 - RNA, 32 nt, Homo Sapiens
gaucuagaaauuauuucauauauaaaucagaa

SEQ ID NO: 365950 - RNA, 32 nt, Homo Sapiens
ugcagcagaugcuggccuccucuccuuggcag

SEQ ID NO: 365951 - RNA, 32 nt, Homo Sapiens
ccggcccggcagcuucggcaacgccacaggcu

SEQ ID NO: 365952 - RNA, 31 nt, Homo Sapiens
guucuccaagccagugaagaguuaucugcug

SEQ ID NO: 365953 - RNA, 32 nt, Homo Sapiens
gaaguggagauuccauaauuaugucaguguuu

SEQ ID NO: 365954 - RNA, 32 nt, Homo Sapiens
ugaauaaguugcugaagugccugauggacgug

SEQ ID NO: 365955 - RNA, 32 nt, Homo Sapiens
gcuuccaguccuccccuuccuccaugccucuc

SEQ ID NO: 365956 - RNA, 32 nt, Homo Sapiens
caggagcaaagagcugugauaaaccaugcuuu

SEQ ID NO: 365957 - RNA, 32 nt, Homo Sapiens
aucuggucacuggcagucugggcagguugccc

SEQ ID NO: 365958 - RNA, 32 nt, Homo Sapiens
gccgucuggaaccaccugggccccugagggca

SEQ ID NO: 365959 - RNA, 32 nt, Homo Sapiens
aggcggagggggcggggcuucggccggcuaag

SEQ ID NO: 365960 - RNA, 32 nt, Homo Sapiens
acgccgaacccguguugggcggcggccccggg

SEQ ID NO: 365961 - RNA, 32 nt, Homo Sapiens
ccuguuccuuggugccagcagcuggggcaggg

SEQ ID NO: 365962 - RNA, 32 nt, Homo Sapiens
gggacccgccgcggcgcugucgccggagaggg

SEQ ID NO: 365963 - RNA, 32 nt, Homo Sapiens
ucuucaguuguauuuuugugaauauuuuaaua

SEQ ID NO: 365964 - RNA, 32 nt, Homo Sapiens
uauauuaauuuuugauaaccauuugauuaacu

SEQ ID NO: 365965 - RNA, 32 nt, Homo Sapiens
uuuucaauauauauuucuuuaaaccuugugcu

SEQ ID NO: 365966 - RNA, 32 nt, Homo Sapiens
ccugggcaaggagggcccugcugcuggcuguc

SEQ ID NO: 365967 - RNA, 32 nt, Homo Sapiens
augugugauaauuuguuacagcagccacggga

SEQ ID NO: 365968 - RNA, 32 nt, Homo Sapiens
uccacgcgcgccccacuuuacgccuaaggucc

SEQ ID NO: 365969 - RNA, 32 nt, Homo Sapiens
gcagcgcuccacucggccggcagcggagccgc

SEQ ID NO: 365970 - RNA, 32 nt, Homo Sapiens
cugcgguccgcggcccggggaaucugaagcgu

SEQ ID NO: 365971 - RNA, 28 nt, Homo Sapiens
gagcaggggcggcucuccugguccccag

SEQ ID NO: 365972 - RNA, 32 nt, Homo Sapiens
uccaggggugagcggcagcgauggcgucccau

SEQ ID NO: 365973 - RNA, 32 nt, Homo Sapiens
uugcaaggaucuuauguccacaaaagucacag

SEQ ID NO: 365974 - RNA, 32 nt, Homo Sapiens
agacguggccccggcguccuagcuggcuugga

SEQ ID NO: 365975 - RNA, 32 nt, Homo Sapiens
cagugugugaccaaauauaagaucaguucuuu

SEQ ID NO: 365976 - RNA, 32 nt, Homo Sapiens
ccagcugucgugcuccaguugcuggggccucu

SEQ ID NO: 365977 - RNA, 32 nt, Homo Sapiens
uauccgguguccgccggcccccggcccugaaa

SEQ ID NO: 365978 - RNA, 32 nt, Homo Sapiens
ugcacgcgacagcccgcugaggaggcggggac

SEQ ID NO: 365979 - RNA, 32 nt, Homo Sapiens
gaaggcucucauaaguuucuguuaugauugcc

SEQ ID NO: 365980 - RNA, 32 nt, Homo Sapiens
gaccagcacaacauggaagaagccagggcagc

SEQ ID NO: 365981 - RNA, 32 nt, Homo Sapiens
uaugugugugccuugcacacacacccauaccu

SEQ ID NO: 365982 - RNA, 32 nt, Homo Sapiens
ucucguuguagcagaguugugcacuuucucag

SEQ ID NO: 365983 - RNA, 30 nt, Homo Sapiens
gccgcggguuucuuauuuagccagaucgac

SEQ ID NO: 365984 - RNA, 32 nt, Homo Sapiens
uauuuaaaguccuauuaagaaauauuugucuu

SEQ ID NO: 365985 - RNA, 32 nt, Homo Sapiens
ugucuucaguguucuucaggguaguugggauc

SEQ ID NO: 365986 - RNA, 32 nt, Homo Sapiens
cuggucuaacagacccgcgagaacgaaggacg

SEQ ID NO: 365987 - RNA, 32 nt, Homo Sapiens
acugggagagucaaaagugagcagaagcucuc

SEQ ID NO: 365988 - RNA, 32 nt, Homo Sapiens
aacuaugggaaaauaaauuuccauucacuaua

SEQ ID NO: 365989 - RNA, 32 nt, Homo Sapiens
aaaaauacagaauaaacuucauggugguugcc

SEQ ID NO: 365990 - RNA, 32 nt, Homo Sapiens
cgaggaccuguuuagcaguuugaaaggguaug

SEQ ID NO: 365991 - RNA, 32 nt, Homo Sapiens
ucaugaaagcacgagugacagcuccuaaccuc

SEQ ID NO: 365992 - RNA, 32 nt, Homo Sapiens
cccuuucuuuguuuuucuuucuuuuuuaaaag

SEQ ID NO: 365993 - RNA, 32 nt, Homo Sapiens
guuaucucaaaauaagaauauuuuguugagau

SEQ ID NO: 365994 - RNA, 32 nt, Homo Sapiens
uuugaggucucuuuaucuguguuuccuuuuua

SEQ ID NO: 365995 - RNA, 32 nt, Homo Sapiens
caggaacuuuaccaugagaaggcgcuucuaga

SEQ ID NO: 365996 - RNA, 32 nt, Homo Sapiens
auauuuacauaaaugcaaauaucacuugauau

SEQ ID NO: 365997 - RNA, 32 nt, Homo Sapiens
uguagugcaagauauauaaacauaggccgggc

SEQ ID NO: 365998 - RNA, 31 nt, Homo Sapiens
aaacagaacauauggacugcucugaccuuuu

SEQ ID NO: 365999 - RNA, 32 nt, Homo Sapiens
cuccggagugugccgccggauccucgcuccaa

SEQ ID NO: 366000 - RNA, 32 nt, Homo Sapiens
accaggaacaggucgcagccaggcuugucaag

SEQ ID NO: 366001 - RNA, 32 nt, Homo Sapiens
augugagagugaagaugaaccacaagcagaug

SEQ ID NO: 366002 - RNA, 32 nt, Homo Sapiens
acauguccggagcaacacuuugaaaaccaaag

SEQ ID NO: 366003 - RNA, 32 nt, Homo Sapiens
agucaaaagcgaagaaagucuuugaaaagguu

SEQ ID NO: 366004 - RNA, 32 nt, Homo Sapiens
uggcagguuuauaacuuagacacacgcacggu

SEQ ID NO: 366005 - RNA, 32 nt, Homo Sapiens
ggcucauggcuuguccuaauucugggacucgu

SEQ ID NO: 366006 - RNA, 32 nt, Homo Sapiens
uucuuugagugauucuuaaagcucugguuccu

SEQ ID NO: 366007 - RNA, 32 nt, Homo Sapiens
gcucuuuccuuccuuccuaagcuauccaaggg

SEQ ID NO: 366008 - RNA, 32 nt, Homo Sapiens
ggaaaugaaaggaauuuccaaacaaguuuucc

SEQ ID NO: 366009 - RNA, 32 nt, Homo Sapiens
uuaaaccugauccuccaccgcggccgccgcgu

SEQ ID NO: 366010 - RNA, 32 nt, Homo Sapiens
gcaagggauucagaucuuuguaccuuaucuua

SEQ ID NO: 366011 - RNA, 32 nt, Homo Sapiens
cuccugauacuaacaguuuuacgauuuaaaac

SEQ ID NO: 366012 - RNA, 32 nt, Homo Sapiens
cugcgagaaaucagaacugugucucccuccug

SEQ ID NO: 366013 - RNA, 32 nt, Homo Sapiens
ugugucacauucaucacagguuucauaccaac

SEQ ID NO: 366014 - RNA, 32 nt, Homo Sapiens
accuagcaaaccucagaauacuccaugugucc

SEQ ID NO: 366015 - RNA, 32 nt, Homo Sapiens
uagccacagaaagaaucuuguuuaucuaaagc

SEQ ID NO: 366016 - RNA, 32 nt, Homo Sapiens
guagacuugugcuuagcuauguucuagagggu

SEQ ID NO: 366017 - RNA, 32 nt, Homo Sapiens
aaagagaaccuuaugcaaccugacaaaccacu

SEQ ID NO: 366018 - RNA, 32 nt, Homo Sapiens
acugucgaauggaaacaacauaaccagcgccc

SEQ ID NO: 366019 - RNA, 32 nt, Homo Sapiens
uuuuuuaaugucuuccacaauguugugacuga

SEQ ID NO: 366020 - RNA, 32 nt, Homo Sapiens
gaagagugaaugugucccauccaaaggugcau

SEQ ID NO: 366021 - RNA, 32 nt, Homo Sapiens
cuuucagucagcugcucagaaacuacaauccu

SEQ ID NO: 366022 - RNA, 32 nt, Homo Sapiens
gcggaaaaggagggggagcggcuggucagcug

SEQ ID NO: 366023 - RNA, 32 nt, Homo Sapiens
cucgcugcccggcgaggcgcucgccgaccugc

SEQ ID NO: 366024 - RNA, 32 nt, Homo Sapiens
ggccggcaccgugccaguggaggcugcggggc

SEQ ID NO: 366025 - RNA, 32 nt, Homo Sapiens
agcuucuauggccacuccaucuacgcuacgcu

SEQ ID NO: 366026 - RNA, 32 nt, Homo Sapiens
guaccggcggcggcagcgccgcugcucuuccc

SEQ ID NO: 366027 - RNA, 32 nt, Homo Sapiens
uuauuauucacauuuucucucuuauagguuuu

SEQ ID NO: 366028 - RNA, 32 nt, Homo Sapiens
uuagcucucguaaauuuuauuuugaauggauu

SEQ ID NO: 366029 - RNA, 32 nt, Homo Sapiens
uugcuagacaaaggggcuugcuuggaugaaug

SEQ ID NO: 366030 - RNA, 32 nt, Homo Sapiens
ucugcuucucuccucaucaucauucccaacaa

SEQ ID NO: 366031 - RNA, 32 nt, Homo Sapiens
agacagcggggcgggggucuaucaggcgcggg

SEQ ID NO: 366032 - RNA, 32 nt, Homo Sapiens
acaccaauaugaugaugguuuucaugacuuug

SEQ ID NO: 366033 - RNA, 32 nt, Homo Sapiens
acccacaugccuaagcuggagcuccucacucu

SEQ ID NO: 366034 - RNA, 32 nt, Homo Sapiens
agccgaggccccagcuucauccagcuucaacc

SEQ ID NO: 366035 - RNA, 32 nt, Homo Sapiens
auacaguguauauaaacaaaauugcacccuga

SEQ ID NO: 366036 - RNA, 32 nt, Homo Sapiens
uguccccagcuccuccucucccgccugccugg

SEQ ID NO: 366037 - RNA, 32 nt, Homo Sapiens
uccagaaagcaccaaggaaaaagcagagaaug

SEQ ID NO: 366038 - RNA, 32 nt, Homo Sapiens
uugcuguggacacuuuuaagaaacuuagaacc

SEQ ID NO: 366039 - RNA, 32 nt, Homo Sapiens
agguugaggcugcagugagcugugacugcgcc

SEQ ID NO: 366040 - RNA, 32 nt, Homo Sapiens
uacauuuaaaacaaaaucucacagcucgguuu

SEQ ID NO: 366041 - RNA, 32 nt, Homo Sapiens
cagauaacgugggacaucgauucgggccagaa

SEQ ID NO: 366042 - RNA, 32 nt, Homo Sapiens
ugccaaugcauuccagccuggaugauggagcg

SEQ ID NO: 366043 - RNA, 32 nt, Homo Sapiens
cucacaggcacaucaggcugcagaaugcgcuu

SEQ ID NO: 366044 - RNA, 32 nt, Homo Sapiens
uaugaacugauuaugaucugcauguucucucu

SEQ ID NO: 366045 - RNA, 32 nt, Homo Sapiens
aguccucuuugcauccuguauacccaugauca

SEQ ID NO: 366046 - RNA, 32 nt, Homo Sapiens
auauuuccaaaauauuuuggugauuuaguggg

SEQ ID NO: 366047 - RNA, 32 nt, Homo Sapiens
gcuucuagguagggcugcgccacccaccuacu

SEQ ID NO: 366048 - RNA, 32 nt, Homo Sapiens
caagcgagccccagccuucucuauggugguga

SEQ ID NO: 366049 - RNA, 32 nt, Homo Sapiens
ggaaugaaguacugaggcauguuacaacauga

SEQ ID NO: 366050 - RNA, 32 nt, Homo Sapiens
ggguuuaggaauuuauaucacaugguaauugu

SEQ ID NO: 366051 - RNA, 32 nt, Homo Sapiens
uuuuuggucaacauggaggaaaaaagacggcg

SEQ ID NO: 366052 - RNA, 32 nt, Homo Sapiens
aaacagaagcagucaguaauccagccgguggc

SEQ ID NO: 366053 - RNA, 32 nt, Homo Sapiens
cagugaugaugaugaugaugaugauaucuaga

SEQ ID NO: 366054 - RNA, 31 nt, Homo Sapiens
cuacuggacauccagaaccacagcaagaaac

SEQ ID NO: 366055 - RNA, 32 nt, Homo Sapiens
gaaaugagcugggcuguuuucugucuuauuuc

SEQ ID NO: 366056 - RNA, 32 nt, Homo Sapiens
ugagucuccacuuuuuugguggagaaaggcug

SEQ ID NO: 366057 - RNA, 32 nt, Homo Sapiens
guagcauguaguuauuaaaaaagaauaaggaa

SEQ ID NO: 366058 - RNA, 32 nt, Homo Sapiens
agauacauuucccucuuaggccccugggagaa

SEQ ID NO: 366059 - RNA, 32 nt, Homo Sapiens
ggacuaagcucugauuuuuuuaucuugcccaa

SEQ ID NO: 366060 - RNA, 32 nt, Homo Sapiens
ugcuggcuuugaugaaacgcacauguguuucu

SEQ ID NO: 366061 - RNA, 32 nt, Homo Sapiens
ccaucaccuccagccugacucccugucugccc

SEQ ID NO: 366062 - RNA, 32 nt, Homo Sapiens
uucugaaacaggaaaagagagaaggaagacag

SEQ ID NO: 366063 - RNA, 32 nt, Homo Sapiens
uuguuggauuucauaaaaaauuucuggcagga

SEQ ID NO: 366064 - RNA, 32 nt, Homo Sapiens
aaaccauuacaauuaauguuuaucacaccuuu

SEQ ID NO: 366065 - RNA, 32 nt, Homo Sapiens
cacguucgcccucgccgccgcggccgcgcugc

SEQ ID NO: 366066 - RNA, 32 nt, Homo Sapiens
ugcaugacaccgcccauccugccucgcgugua

SEQ ID NO: 366067 - RNA, 32 nt, Homo Sapiens
caauucgaagacaagaguucuuugccuuucuc

SEQ ID NO: 366068 - RNA, 32 nt, Homo Sapiens
uuuuggagucaugguccgguguccuuuucacu

SEQ ID NO: 366069 - RNA, 32 nt, Homo Sapiens
caacacucaccccuuguccccccgcaggguua

SEQ ID NO: 366070 - RNA, 32 nt, Homo Sapiens
uuuguggcuguggauuuuuuuaacugcuagua

SEQ ID NO: 366071 - RNA, 32 nt, Homo Sapiens
uuuaguuuugcagagaauaaaaagagaaguug

SEQ ID NO: 366072 - RNA, 32 nt, Homo Sapiens
aggaagacguucuugcauccucagccuguguc

SEQ ID NO: 366073 - RNA, 30 nt, Homo Sapiens
caaaucagcagaaugggggagacaaagccc

SEQ ID NO: 366074 - RNA, 32 nt, Homo Sapiens
agggaaggucagaggagaaggcaggcagggcc

SEQ ID NO: 366075 - RNA, 32 nt, Homo Sapiens
ccggugacucagggaggcgggaggcgggggag

SEQ ID NO: 366076 - RNA, 32 nt, Homo Sapiens
ugaugcuuggccuggcaggaugacucaaaccu

SEQ ID NO: 366077 - RNA, 32 nt, Homo Sapiens
cugcagcugcaccagcaggugccaucacgcuu

SEQ ID NO: 366078 - RNA, 32 nt, Homo Sapiens
gagacauuaugaaaaggaugcuggacuuggua

SEQ ID NO: 366079 - RNA, 32 nt, Homo Sapiens
gccuggcuccugagacgcccaggcccggaaag

SEQ ID NO: 366080 - RNA, 28 nt, Homo Sapiens
ccgccgccgccgccgccgaggugacuga

SEQ ID NO: 366081 - RNA, 28 nt, Homo Sapiens
gcgccugggcggccgcacacguguccag

SEQ ID NO: 366082 - RNA, 32 nt, Homo Sapiens
gaacacuacauauuguucccuccaugggcuua

SEQ ID NO: 366083 - RNA, 32 nt, Homo Sapiens
aacacuucguacaguuugauaaagguggcauu

SEQ ID NO: 366084 - RNA, 32 nt, Homo Sapiens
uagcuuucccccaccucccacaaaaucaccca

SEQ ID NO: 366085 - RNA, 32 nt, Homo Sapiens
cucaccagggcucccugaggccugcugcaagc

SEQ ID NO: 366086 - RNA, 32 nt, Homo Sapiens
acacuaucuucgucuguaguauuuaugauguu

SEQ ID NO: 366087 - RNA, 32 nt, Homo Sapiens
guaccauacauuuuucucuccucucucacccu

SEQ ID NO: 366088 - RNA, 32 nt, Homo Sapiens
agaacauguaacauuuaaaaaauaacauuauu

SEQ ID NO: 366089 - RNA, 32 nt, Homo Sapiens
cuuacucacucugcacagaaacaaagaagaaa

SEQ ID NO: 366090 - RNA, 32 nt, Homo Sapiens
accuaagagcaauuauagugggacaucuaagg

SEQ ID NO: 366091 - RNA, 32 nt, Homo Sapiens
ccagagauugcccaaggacuggaccggcugag

SEQ ID NO: 366092 - RNA, 32 nt, Homo Sapiens
ucggaaugagagacucaaccauaauagaaaga

SEQ ID NO: 366093 - RNA, 32 nt, Homo Sapiens
auuucaacaucauggauauaguggcccaaaug

SEQ ID NO: 366094 - RNA, 32 nt, Homo Sapiens
cuuauugucuuuuuuauuaagauguuggaaaa

SEQ ID NO: 366095 - RNA, 32 nt, Homo Sapiens
ucccgcgccgcgcguccgcacuccucggcccu

SEQ ID NO: 366096 - RNA, 30 nt, Homo Sapiens
uggguggauguucauggagaagcucuguuc

SEQ ID NO: 366097 - RNA, 32 nt, Homo Sapiens
cccuguuuguggcuauuuuaaauucauauuau

SEQ ID NO: 366098 - RNA, 32 nt, Homo Sapiens
gucucauaagacuaucuguuucccuugacagg

SEQ ID NO: 366099 - RNA, 32 nt, Homo Sapiens
cauugcuguuguauguucgugcuggaguuuug

SEQ ID NO: 366100 - RNA, 31 nt, Homo Sapiens
ggccgggagcgcagcccuccgggaggcgggu

SEQ ID NO: 366101 - RNA, 32 nt, Homo Sapiens
ucaccacgaugacgccucuggaccucggugau

SEQ ID NO: 366102 - RNA, 32 nt, Homo Sapiens
gauaggugcggagcuuccugaacgaggcagga

SEQ ID NO: 366103 - RNA, 32 nt, Homo Sapiens
gguggcaggcagucagggaaaagcagaagcgu

SEQ ID NO: 366104 - RNA, 32 nt, Homo Sapiens
auuuaauccucauuaacaaauucauaagguag

SEQ ID NO: 366105 - RNA, 32 nt, Homo Sapiens
ccccagcgccuauauuugauaaacucuauuac

SEQ ID NO: 366106 - RNA, 32 nt, Homo Sapiens
uucugccuggucuauagcguguguguuugcuu

SEQ ID NO: 366107 - RNA, 30 nt, Homo Sapiens
ggaggaaguggcggcggcggcggcgggacu

SEQ ID NO: 366108 - RNA, 32 nt, Homo Sapiens
ggauacaggccacgauaaacauccuuucgugu

SEQ ID NO: 366109 - RNA, 32 nt, Homo Sapiens
ggagaggcacgguagggaaaagaacugcuggg

SEQ ID NO: 366110 - RNA, 32 nt, Homo Sapiens
uuauuccuugacaggccccacccccuucagaa

SEQ ID NO: 366111 - RNA, 32 nt, Homo Sapiens
aaagaagggguuuuaauacaaaccuucauaau

SEQ ID NO: 366112 - RNA, 32 nt, Homo Sapiens
acaaggaauggcauaaacuuuucauguguuuu

SEQ ID NO: 366113 - RNA, 32 nt, Homo Sapiens
aagcccugcuccugggagggcuccugccaccc

SEQ ID NO: 366114 - RNA, 32 nt, Homo Sapiens
gggaggacgggacggugucucuggccagcacu

SEQ ID NO: 366115 - RNA, 32 nt, Homo Sapiens
aagauguucuauguaauucagaagcagaacuc

SEQ ID NO: 366116 - RNA, 32 nt, Homo Sapiens
uaugucaacuuuugaaugggguugacuuaaau

SEQ ID NO: 366117 - RNA, 32 nt, Homo Sapiens
auaacuucuucagauacauuuguguaacuuua

SEQ ID NO: 366118 - RNA, 32 nt, Homo Sapiens
cugcggcgagaccgcaggcgcuguggugggcu

SEQ ID NO: 366119 - RNA, 32 nt, Homo Sapiens
acagcagcaggagaagcaguggccagagggga

SEQ ID NO: 366120 - RNA, 32 nt, Homo Sapiens
agcggccucugggguguuggggaaauacuuua

SEQ ID NO: 366121 - RNA, 32 nt, Homo Sapiens
uuucccugccccuguccggaccgccgauccca

SEQ ID NO: 366122 - RNA, 32 nt, Homo Sapiens
cauacacgugcaggugucuuuaucauagaauu

SEQ ID NO: 366123 - RNA, 32 nt, Homo Sapiens
gcaaagcucccucuucccacugcccuccccag

SEQ ID NO: 366124 - RNA, 32 nt, Homo Sapiens
cuuaauuugacuguccucgcagagaaugugaa

SEQ ID NO: 366125 - RNA, 32 nt, Homo Sapiens
gaagacaggagaggaguguuuaguuacaaaag

SEQ ID NO: 366126 - RNA, 32 nt, Homo Sapiens
aaaacaaacaaacaaaaacucaagauccucau

SEQ ID NO: 366127 - RNA, 32 nt, Homo Sapiens
gggguuauuuuuuauuuccauguucuaagaag

SEQ ID NO: 366128 - RNA, 32 nt, Homo Sapiens
ggccagcccggcugguuuuguaagaugcuggg

SEQ ID NO: 366129 - RNA, 32 nt, Homo Sapiens
ccggaggagcaggaggugggcgugcgggcguu

SEQ ID NO: 366130 - RNA, 32 nt, Homo Sapiens
aggguggagaaagcacuugcuuucauccucug

SEQ ID NO: 366131 - RNA, 32 nt, Homo Sapiens
uuggcucauucugugguucucuaggucagugu

SEQ ID NO: 366132 - RNA, 32 nt, Homo Sapiens
aaguuggacagcuacugagauaggguauuguu

SEQ ID NO: 366133 - RNA, 32 nt, Homo Sapiens
gauguguugcuguauaucaucucuuugaugau

SEQ ID NO: 366134 - RNA, 32 nt, Homo Sapiens
gugauauaaaucaacaaucagccuuaugaguu

SEQ ID NO: 366135 - RNA, 32 nt, Homo Sapiens
uggaccuggccgugggggcccggggccaggug

SEQ ID NO: 366136 - RNA, 32 nt, Homo Sapiens
uauuuuaaacucccgggccugcggacgcuaug

SEQ ID NO: 366137 - RNA, 32 nt, Homo Sapiens
ggucuuuuggcugccuggccccagggagaggc

SEQ ID NO: 366138 - RNA, 29 nt, Homo Sapiens
accgagaugaagaucucaugcggcagacu

SEQ ID NO: 366139 - RNA, 32 nt, Homo Sapiens
ccgggagccgcagccgcgguguucaugccgcg

SEQ ID NO: 366140 - RNA, 30 nt, Homo Sapiens
ugggggaaaaaauaaacuuaaaguaaaaac

SEQ ID NO: 366141 - RNA, 32 nt, Homo Sapiens
acccggggcugggcggggcgccggugcuagug

SEQ ID NO: 366142 - RNA, 32 nt, Homo Sapiens
gugugugcuccuguaccaacacugaaauccag

SEQ ID NO: 366143 - RNA, 32 nt, Homo Sapiens
ggagagacuacccuagucuuucugggguguuu

SEQ ID NO: 366144 - RNA, 32 nt, Homo Sapiens
ucagcaccagcgccugggcuggaggacagaga

SEQ ID NO: 366145 - RNA, 29 nt, Homo Sapiens
auuuuauaaaguucaacaguuuugaugau

SEQ ID NO: 366146 - RNA, 30 nt, Homo Sapiens
ccgcucggcaggcgagaggcguccuccggc

SEQ ID NO: 366147 - RNA, 32 nt, Homo Sapiens
aaucaaaaggagaauaauauuuuauagcaugu

SEQ ID NO: 366148 - RNA, 32 nt, Homo Sapiens
uggcauucuuuguaaaaaagaucauucccugc

SEQ ID NO: 366149 - RNA, 32 nt, Homo Sapiens
uuugugguguagcagcuuguaaaauuaaugca

SEQ ID NO: 366150 - RNA, 32 nt, Homo Sapiens
agccuggugggguggcggagggggagacugug

SEQ ID NO: 366151 - RNA, 30 nt, Homo Sapiens
uaauuaaugaacuauguguauauacuucaa

SEQ ID NO: 366152 - RNA, 30 nt, Homo Sapiens
cuguaugucuguguuuugaggaggagggug

SEQ ID NO: 366153 - RNA, 32 nt, Homo Sapiens
auagauuuugcuuggguuuucuuuuuuaaaaa

SEQ ID NO: 366154 - RNA, 32 nt, Homo Sapiens
agcuuauuuaacuuaucaaaacguauuuauug

SEQ ID NO: 366155 - RNA, 32 nt, Homo Sapiens
uccaugguucuuugcucuccccggguagugau

SEQ ID NO: 366156 - RNA, 32 nt, Homo Sapiens
ugagagaccgcgcagcggcgacaggaccggcu

SEQ ID NO: 366157 - RNA, 32 nt, Homo Sapiens
agcacaggugaccccuaggagcaacaggccaa

SEQ ID NO: 366158 - RNA, 32 nt, Homo Sapiens
gacaacagagugagacccccaucucuccaaaa

SEQ ID NO: 366159 - RNA, 32 nt, Homo Sapiens
aguagcugggaguacagcgucugccaccaugc

SEQ ID NO: 366160 - RNA, 31 nt, Homo Sapiens
cugaauccugguaauuaaaaguuugggugua

SEQ ID NO: 366161 - RNA, 32 nt, Homo Sapiens
cugcaccccccucugccggacugaggcggucc

SEQ ID NO: 366162 - RNA, 32 nt, Homo Sapiens
gaaagaugaggaccacugcagcucccaguggg

SEQ ID NO: 366163 - RNA, 32 nt, Homo Sapiens
uaacuaacucuuucuaaccaaccgugaugcca

SEQ ID NO: 366164 - RNA, 32 nt, Homo Sapiens
augccucagucagugccuaacugcacauacaa

SEQ ID NO: 366165 - RNA, 32 nt, Homo Sapiens
ggcucccacagcuucaugcacuccauggaccc

SEQ ID NO: 366166 - RNA, 32 nt, Homo Sapiens
aguaugugguugcaggaggcgguuguguucga

SEQ ID NO: 366167 - RNA, 32 nt, Homo Sapiens
uaggacccaaguuucuggacuacuucagaaua

SEQ ID NO: 366168 - RNA, 32 nt, Homo Sapiens
ccuuugcccccaacuuuuuuuuuuuuuuuugg

SEQ ID NO: 366169 - RNA, 32 nt, Homo Sapiens
guuuguuugcguuccaagaaauccauaauggc

SEQ ID NO: 366170 - RNA, 32 nt, Homo Sapiens
cuuuaggaugccugcucugugcucucccugcc

SEQ ID NO: 366171 - RNA, 32 nt, Homo Sapiens
ucaacuuuugauuuccucuucucucccuucaa

SEQ ID NO: 366172 - RNA, 32 nt, Homo Sapiens
gugccggcgucauggcggccuccgcgcacggc

SEQ ID NO: 366173 - RNA, 32 nt, Homo Sapiens
ucuuggaggcugauuacuuacugcaccaaagc

SEQ ID NO: 366174 - RNA, 32 nt, Homo Sapiens
gcuuugauuuuggggagacaaagggaaaugca

SEQ ID NO: 366175 - RNA, 32 nt, Homo Sapiens
cgccugagcccgcacccgccauggacaacuac

SEQ ID NO: 366176 - RNA, 31 nt, Homo Sapiens
guggaaguauugucuauuucagugugaaacu

SEQ ID NO: 366177 - RNA, 32 nt, Homo Sapiens
ugugaauaaaauggaaauugcauugaguuaau

SEQ ID NO: 366178 - RNA, 32 nt, Homo Sapiens
uaacuucagcgaagcuuacccugaaagaagca

SEQ ID NO: 366179 - RNA, 32 nt, Homo Sapiens
gguaucagcacuuuucuuucauuagggggaag

SEQ ID NO: 366180 - RNA, 32 nt, Homo Sapiens
caucuauaaaauuuagaacucuaauccauaaa

SEQ ID NO: 366181 - RNA, 32 nt, Homo Sapiens
cuuguccccgucugauucucagcgccaaacuu

SEQ ID NO: 366182 - RNA, 32 nt, Homo Sapiens
cccugcauccaccccuaccccuggcuccuucc

SEQ ID NO: 366183 - RNA, 32 nt, Homo Sapiens
uaaaccaggccucccaggauggcgagcuccag

SEQ ID NO: 366184 - RNA, 32 nt, Homo Sapiens
ucuagcagugaccagggcugcccggcgggggc

SEQ ID NO: 366185 - RNA, 32 nt, Homo Sapiens
agcacacagguguuugagucuguggaugaggu

SEQ ID NO: 366186 - RNA, 32 nt, Homo Sapiens
ugagcugucugucucguuucuguccgcgcgcc

SEQ ID NO: 366187 - RNA, 32 nt, Homo Sapiens
acggcccaaccaggggcugugcagacgugggg

SEQ ID NO: 366188 - RNA, 32 nt, Homo Sapiens
uuagaaaauaaaauguauaaagggcaacacau

SEQ ID NO: 366189 - RNA, 32 nt, Homo Sapiens
uuugaaauaauuacaguaagcugauggaauuc

SEQ ID NO: 366190 - RNA, 32 nt, Homo Sapiens
auaucagacgccaccaccuggucuuugaaguu

SEQ ID NO: 366191 - RNA, 32 nt, Homo Sapiens
aacucugaauggaugaauuuuuaaaagugggg

SEQ ID NO: 366192 - RNA, 32 nt, Homo Sapiens
cauaaagauugaaaggagauauuuuaucaagu

SEQ ID NO: 366193 - RNA, 32 nt, Homo Sapiens
aaaaacagaaacaaaaucaaaacagagaaagc

SEQ ID NO: 366194 - RNA, 32 nt, Homo Sapiens
ggccuagaugcauguuuauucagauuuuggua

SEQ ID NO: 366195 - RNA, 32 nt, Homo Sapiens
gcagccuccugccugcccuggccuugcugggg

SEQ ID NO: 366196 - RNA, 32 nt, Homo Sapiens
caccuauaaucccagcacuuugggaggcagag

SEQ ID NO: 366197 - RNA, 32 nt, Homo Sapiens
gccagcuagcuaaaguucagauuuuguuaggu

SEQ ID NO: 366198 - RNA, 32 nt, Homo Sapiens
caccaguaaucccagcacuuugggaggcuaag

SEQ ID NO: 366199 - RNA, 32 nt, Homo Sapiens
gaccaacccuucccucccuuuccccaccucuu

SEQ ID NO: 366200 - RNA, 32 nt, Homo Sapiens
augcauacaccugccugcaggcgcugcuccca

SEQ ID NO: 366201 - RNA, 30 nt, Homo Sapiens
agcgcaggcaggcaggggggucccgccgcg

SEQ ID NO: 366202 - RNA, 32 nt, Homo Sapiens
ccuaccagcuggaaggcgguuccgcaccagac

SEQ ID NO: 366203 - RNA, 28 nt, Homo Sapiens
ugugcggggcggccggcggaggagcagc

SEQ ID NO: 366204 - RNA, 32 nt, Homo Sapiens
uagcaaugcaagcagccuagcacagacuaagc

SEQ ID NO: 366205 - RNA, 32 nt, Homo Sapiens
gagcaguccauuuuguauuaugcugaauuuuc

SEQ ID NO: 366206 - RNA, 32 nt, Homo Sapiens
cuguggaacugcuauuuuccuguucuacccuu

SEQ ID NO: 366207 - RNA, 32 nt, Homo Sapiens
gaaggguaaaggccucgcgcaagcugccaguc

SEQ ID NO: 366208 - RNA, 32 nt, Homo Sapiens
ccccucccuccucgucugccaagccucgccuc

SEQ ID NO: 366209 - RNA, 32 nt, Homo Sapiens
aaaguagugguuucuucauuguuuccucacca

SEQ ID NO: 366210 - RNA, 32 nt, Homo Sapiens
uggccaagccucagccagcagaagcaagucug

SEQ ID NO: 366211 - RNA, 32 nt, Homo Sapiens
aacccaauaaaggagcuccaaaugucguuggg

SEQ ID NO: 366212 - RNA, 30 nt, Homo Sapiens
aggcaagaggcacugccgggucccggacgg

SEQ ID NO: 366213 - RNA, 32 nt, Homo Sapiens
uggaaggauuucugccccuccaagcuuccuuu

SEQ ID NO: 366214 - RNA, 32 nt, Homo Sapiens
uggcguagacacaguaagaaccuaguaaauau

SEQ ID NO: 366215 - RNA, 32 nt, Homo Sapiens
ccccaggaguggugugguggcgucagugaugu

SEQ ID NO: 366216 - RNA, 32 nt, Homo Sapiens
cuuuucgugcgcgccuucgaaaacugccugcc

SEQ ID NO: 366217 - RNA, 32 nt, Homo Sapiens
gaaaugcuggggucccuggugugguaagaaac

SEQ ID NO: 366218 - RNA, 32 nt, Homo Sapiens
aggccugcucagugacccuuucucuaggggga

SEQ ID NO: 366219 - RNA, 32 nt, Homo Sapiens
cucggagggagcccggccggcucggacugggc

SEQ ID NO: 366220 - RNA, 32 nt, Homo Sapiens
aaaaguuugaauuugcugggguguuuauucug

SEQ ID NO: 366221 - RNA, 32 nt, Homo Sapiens
cagucuggcagaccuccaccagccccaggagu

SEQ ID NO: 366222 - RNA, 32 nt, Homo Sapiens
agacaggauuuccaaaaacuuugucuucaaau

SEQ ID NO: 366223 - RNA, 32 nt, Homo Sapiens
uuuuucuauguauuucuuucugacuagacuug

SEQ ID NO: 366224 - RNA, 32 nt, Homo Sapiens
uguaguucccuauuuuaaccucaauuaugcau

SEQ ID NO: 366225 - RNA, 32 nt, Homo Sapiens
aaaucugugguaacuauagagguuuaacuuau

SEQ ID NO: 366226 - RNA, 32 nt, Homo Sapiens
cuguaucaauuucuaauguuuacuauauagaa

SEQ ID NO: 366227 - RNA, 32 nt, Homo Sapiens
acgggcccaucccaguccucccuucagcuaac

SEQ ID NO: 366228 - RNA, 32 nt, Homo Sapiens
gggucaaugauuuaaucauauaauuuaaugaa

SEQ ID NO: 366229 - RNA, 32 nt, Homo Sapiens
cugauuauaacccuguuuccccucagagaaga

SEQ ID NO: 366230 - RNA, 32 nt, Homo Sapiens
auaaaaaauaugugcagaauuugggagugaga

SEQ ID NO: 366231 - RNA, 32 nt, Homo Sapiens
auguucuguuuuguuuuuuuuaauaagaauuc

SEQ ID NO: 366232 - RNA, 32 nt, Homo Sapiens
acacggcaccuuuccccagagccccagcaucc

SEQ ID NO: 366233 - RNA, 32 nt, Homo Sapiens
gaacaccacuaucuuaauuuuacaauacacug

SEQ ID NO: 366234 - RNA, 32 nt, Homo Sapiens
uggaauauauuaauauauuacuguauauccac

SEQ ID NO: 366235 - RNA, 32 nt, Homo Sapiens
cucggggccccggcgugggcagccuccacgac

SEQ ID NO: 366236 - RNA, 32 nt, Homo Sapiens
ucuuaaaucuccuuucugugaucuuuuaauau

SEQ ID NO: 366237 - RNA, 32 nt, Homo Sapiens
ugaagcuaugcaagucuuuuauauuauuaaau

SEQ ID NO: 366238 - RNA, 31 nt, Homo Sapiens
cagcgagagccccaggaagguuugcacagcu

SEQ ID NO: 366239 - RNA, 32 nt, Homo Sapiens
cguguuuuuauuccucacuaaucuuggcuaua

SEQ ID NO: 366240 - RNA, 32 nt, Homo Sapiens
uuagaaucucugggccucuccucaacuguccu

SEQ ID NO: 366241 - RNA, 32 nt, Homo Sapiens
cuugaccuccugaccuaggugauccacugccu

SEQ ID NO: 366242 - RNA, 32 nt, Homo Sapiens
ccauaagcugugaaacaaaaucaaugagguca

SEQ ID NO: 366243 - RNA, 32 nt, Homo Sapiens
gcucuguauguggaucaaagcugucagcaucu

SEQ ID NO: 366244 - RNA, 32 nt, Homo Sapiens
gccuuaaaaaaaucuguaaauaguagggccug

SEQ ID NO: 366245 - RNA, 32 nt, Homo Sapiens
auacuauauuggcuguuucaaaauaguacuau

SEQ ID NO: 366246 - RNA, 32 nt, Homo Sapiens
caucuggcccugaccccacuggaccaaaaggg

SEQ ID NO: 366247 - RNA, 32 nt, Homo Sapiens
ugugugugugugugcgcgcgcgcgcgugcaug

SEQ ID NO: 366248 - RNA, 32 nt, Homo Sapiens
ugagacugaaagauuuagccauaauguaaacu

SEQ ID NO: 366249 - RNA, 32 nt, Homo Sapiens
caguuugcuucuacaugaugcuaaaggcugcg

SEQ ID NO: 366250 - RNA, 32 nt, Homo Sapiens
auuggggaaaauguacuagcuaaaaauggaua

SEQ ID NO: 366251 - RNA, 32 nt, Homo Sapiens
gcuuggggccgagcggcccaccuagugggucc

SEQ ID NO: 366252 - RNA, 32 nt, Homo Sapiens
aaugugagggaauaagaaaggcaagcuuugga

SEQ ID NO: 366253 - RNA, 32 nt, Homo Sapiens
uaagaugucuauuauaugcucugucugugcuu

SEQ ID NO: 366254 - RNA, 32 nt, Homo Sapiens
gcuaauaaacuguauuaaaucuuaaacaaugu

SEQ ID NO: 366255 - RNA, 32 nt, Homo Sapiens
agcacacacucccgcaggaucccgccauuguu

SEQ ID NO: 366256 - RNA, 32 nt, Homo Sapiens
gaaggccguggcgccggcuucucgggucccau

SEQ ID NO: 366257 - RNA, 32 nt, Homo Sapiens
cgccuuggaccagacaauuccuggacagagac

SEQ ID NO: 366258 - RNA, 32 nt, Homo Sapiens
aggcgcccucuggcccgggcccgggcccugca

SEQ ID NO: 366259 - RNA, 32 nt, Homo Sapiens
acucaccucccucuucauuuaggaucuccaga

SEQ ID NO: 366260 - RNA, 32 nt, Homo Sapiens
agggcaguggcugacacagaccacccacucca

SEQ ID NO: 366261 - RNA, 32 nt, Homo Sapiens
uugucuucaaggacugccucugacccuccccc

SEQ ID NO: 366262 - RNA, 32 nt, Homo Sapiens
cgccugaggaggaggaggagaagcggaugaga

SEQ ID NO: 366263 - RNA, 32 nt, Homo Sapiens
auauucuugaacaauuaguagauccagaaaga

SEQ ID NO: 366264 - RNA, 32 nt, Homo Sapiens
ggggauuuuuaaaaauaauguauagcuauaaa

SEQ ID NO: 366265 - RNA, 32 nt, Homo Sapiens
acaccaaccaccuaucucugcagaacaaccag

SEQ ID NO: 366266 - RNA, 32 nt, Homo Sapiens
cauucucuauagagccaaguccaaacuggcaa

SEQ ID NO: 366267 - RNA, 32 nt, Homo Sapiens
aacgacaucuucuguccagcaagcucgguuug

SEQ ID NO: 366268 - RNA, 32 nt, Homo Sapiens
aggcccggcagccgagcugcgcggcggcacca

SEQ ID NO: 366269 - RNA, 32 nt, Homo Sapiens
augacccaccucuggccggaggagcugagcug

SEQ ID NO: 366270 - RNA, 32 nt, Homo Sapiens
aaacaaacuaaauuauugcuuaugcuuguacu

SEQ ID NO: 366271 - RNA, 32 nt, Homo Sapiens
ccaauaaauaucuauuuauuauuaaauauuaa

SEQ ID NO: 366272 - RNA, 32 nt, Homo Sapiens
ggaucuggugccuccagacgugugcacauaaa

SEQ ID NO: 366273 - RNA, 32 nt, Homo Sapiens
uggagccccgguucccugaacagcacccagau

SEQ ID NO: 366274 - RNA, 31 nt, Homo Sapiens
cgaggaaaauaaaaagacugaugucagggau

SEQ ID NO: 366275 - RNA, 32 nt, Homo Sapiens
ugauggauauuuguauuuuuuauacuuuugug

SEQ ID NO: 366276 - RNA, 32 nt, Homo Sapiens
acagaauuuccacagcaagaauacacuuauuu

SEQ ID NO: 366277 - RNA, 32 nt, Homo Sapiens
ucaaaaauuuaacuuucuuuuaaaagagguac

SEQ ID NO: 366278 - RNA, 32 nt, Homo Sapiens
cguuacggggcccucugugccuuucccuaggc

SEQ ID NO: 366279 - RNA, 32 nt, Homo Sapiens
caccuuuaguguuuguuaaaagaauugauuuu

SEQ ID NO: 366280 - RNA, 32 nt, Homo Sapiens
aaccucuuguuuugugauacacagcaucuugu

SEQ ID NO: 366281 - RNA, 32 nt, Homo Sapiens
gucucauuauagaguucucagccauuggaccu

SEQ ID NO: 366282 - RNA, 32 nt, Homo Sapiens
aagggccugagucaaugugucugugggacagc

SEQ ID NO: 366283 - RNA, 32 nt, Homo Sapiens
uguccucagacgggaagguuugagaaggguca

SEQ ID NO: 366284 - RNA, 32 nt, Homo Sapiens
gagcgguggaccgaauugggaccgcuggcuua

SEQ ID NO: 366285 - RNA, 32 nt, Homo Sapiens
gacgagugguggccgaagcagggggacagcaa

SEQ ID NO: 366286 - RNA, 32 nt, Homo Sapiens
cugccuuguccaugccguuucccaacagggau

SEQ ID NO: 366287 - RNA, 32 nt, Homo Sapiens
aucugugguucuuuuguacuugccauagaugu

SEQ ID NO: 366288 - RNA, 32 nt, Homo Sapiens
gcgugcuggccccugcggcugcguuagggaac

SEQ ID NO: 366289 - RNA, 32 nt, Homo Sapiens
ggcguggagacgguugugugcaauggucugga

SEQ ID NO: 366290 - RNA, 32 nt, Homo Sapiens
gucuaauccaugucacauccucauacaauuua

SEQ ID NO: 366291 - RNA, 32 nt, Homo Sapiens
auaaaugacaccugcagugguacuuguuaaau

SEQ ID NO: 366292 - RNA, 32 nt, Homo Sapiens
agucugcacgaauuccaggcucuuuuauguua

SEQ ID NO: 366293 - RNA, 32 nt, Homo Sapiens
ccugaugcauuacugugagaaguuucugcacu

SEQ ID NO: 366294 - RNA, 32 nt, Homo Sapiens
aagaugaagagaaagccggagucuggccagag

SEQ ID NO: 366295 - RNA, 32 nt, Homo Sapiens
gccuuccagaaagcaggagcagcugugcugca

SEQ ID NO: 366296 - RNA, 32 nt, Homo Sapiens
uauaaauuacaauccacucauccaccugcccu

SEQ ID NO: 366297 - RNA, 32 nt, Homo Sapiens
cgguaguggucgcucucagaccccacugucca

SEQ ID NO: 366298 - RNA, 32 nt, Homo Sapiens
auuauaaaaugaagagacagacaugauuacuc

SEQ ID NO: 366299 - RNA, 32 nt, Homo Sapiens
cccuaaggaauuuuuuuuuuuaauuuagugug

SEQ ID NO: 366300 - RNA, 32 nt, Homo Sapiens
agaucagaccgagaagcagggugagagauucu

SEQ ID NO: 366301 - RNA, 32 nt, Homo Sapiens
ucuuuuguagauacaucagcuacauggaagca

SEQ ID NO: 366302 - RNA, 32 nt, Homo Sapiens
gucugucugcagggagcccccgguagccacuc

SEQ ID NO: 366303 - RNA, 32 nt, Homo Sapiens
gcauuuugggauucuucgcauuuuguguguau

SEQ ID NO: 366304 - RNA, 32 nt, Homo Sapiens
gucucagcuugacuaugaaguucccagggaaa

SEQ ID NO: 366305 - RNA, 32 nt, Homo Sapiens
uucuccuaacucaaggacuuggacccaugacu

SEQ ID NO: 366306 - RNA, 29 nt, Homo Sapiens
gaggaugaugagauuuccccuguugucac

SEQ ID NO: 366307 - RNA, 32 nt, Homo Sapiens
uauuucuuacaucaaagcaacaaaauuguguu

SEQ ID NO: 366308 - RNA, 32 nt, Homo Sapiens
ucugcucuaaucuuuauuauuauuauaaucau

SEQ ID NO: 366309 - RNA, 32 nt, Homo Sapiens
gcauucgaggaggccagagguggcgaggcagg

SEQ ID NO: 366310 - RNA, 29 nt, Homo Sapiens
uuuaugaugaagauccugagcggagguua

SEQ ID NO: 366311 - RNA, 32 nt, Homo Sapiens
aauaauaaaagcuaggcguguuugaugcgcuu

SEQ ID NO: 366312 - RNA, 32 nt, Homo Sapiens
cguaggaacaagggcugcggcccaccgcgaca

SEQ ID NO: 366313 - RNA, 32 nt, Homo Sapiens
aagggcuagaaaagaauguaaucugauaugga

SEQ ID NO: 366314 - RNA, 31 nt, Homo Sapiens
aacuugggaaacacugucaucagcuugaggg

SEQ ID NO: 366315 - RNA, 31 nt, Homo Sapiens
acauggaaccucacaaaguccauuuuaagag

SEQ ID NO: 366316 - RNA, 32 nt, Homo Sapiens
caugccugaaacagucagaaggguuggccaaa

SEQ ID NO: 366317 - RNA, 32 nt, Homo Sapiens
agaggcuuuuuacaauaaaguagcguaacucu

SEQ ID NO: 366318 - RNA, 31 nt, Homo Sapiens
acgcugcgcccggcccugccccgggccuucc

SEQ ID NO: 366319 - RNA, 32 nt, Homo Sapiens
agccugcccuaccccaccuacccugccucagc

SEQ ID NO: 366320 - RNA, 32 nt, Homo Sapiens
caggagcccgugccgccucuggugccaccuga

SEQ ID NO: 366321 - RNA, 32 nt, Homo Sapiens
agucauaauugaaaaaugauuguuuuccuuau

SEQ ID NO: 366322 - RNA, 32 nt, Homo Sapiens
gugccgccgccgccgcuuuguaagaggcacau

SEQ ID NO: 366323 - RNA, 32 nt, Homo Sapiens
cguccuccugcagcuggagccuucaggccgua

SEQ ID NO: 366324 - RNA, 32 nt, Homo Sapiens
gcgggacaggacuugugcgccggcgccccgga

SEQ ID NO: 366325 - RNA, 29 nt, Homo Sapiens
cgacaugcugcgccgcgcucugcugugcc

SEQ ID NO: 366326 - RNA, 32 nt, Homo Sapiens
cuucuccaaugcacuuccagaugaucuccgaa

SEQ ID NO: 366327 - RNA, 32 nt, Homo Sapiens
uaaagauacucuauguacucucacauggcaug

SEQ ID NO: 366328 - RNA, 32 nt, Homo Sapiens
ggucuggguuuuuugaggaagggacauagugg

SEQ ID NO: 366329 - RNA, 32 nt, Homo Sapiens
cagucugccaaggagcugcuuuuccugacuac

SEQ ID NO: 366330 - RNA, 32 nt, Homo Sapiens
uuuccugaggccuguggaaauaaaccuuuaug

SEQ ID NO: 366331 - RNA, 32 nt, Homo Sapiens
ccugucucuggccauuucuuccaguuucccua

SEQ ID NO: 366332 - RNA, 32 nt, Homo Sapiens
uuauggauuccuuuuuaccgugucacauuuac

SEQ ID NO: 366333 - RNA, 32 nt, Homo Sapiens
agauuuguaaaaauuguauuuguuaacacugu

SEQ ID NO: 366334 - RNA, 32 nt, Homo Sapiens
gcaguugugaaugggauuauguuucugauuug

SEQ ID NO: 366335 - RNA, 32 nt, Homo Sapiens
uuuaguuuuuaaaauauuccguggucaaaauu

SEQ ID NO: 366336 - RNA, 32 nt, Homo Sapiens
auacuggcucuuccggcccccagauugcagau

SEQ ID NO: 366337 - RNA, 32 nt, Homo Sapiens
aucuccccggcggccucccuuggcccuuccuc

SEQ ID NO: 366338 - RNA, 32 nt, Homo Sapiens
caaacugcucaaaagaaugacucuuaaugaaa

SEQ ID NO: 366339 - RNA, 32 nt, Homo Sapiens
uguaacgggucgugcucaugucuguuaauaaa

SEQ ID NO: 366340 - RNA, 32 nt, Homo Sapiens
uuguuuuucuaaaagcaggauuugcuuccgua

SEQ ID NO: 366341 - RNA, 32 nt, Homo Sapiens
uuccuuuuuaucauccccacgcuguguaagug

SEQ ID NO: 366342 - RNA, 32 nt, Homo Sapiens
auguuucuaauaaaacagagacgauaauauuc

SEQ ID NO: 366343 - RNA, 32 nt, Homo Sapiens
cauauccuggacgccccuccccccucuggccc

SEQ ID NO: 366344 - RNA, 32 nt, Homo Sapiens
cucuuggcugcccauggaccaauccgcacaca

SEQ ID NO: 366345 - RNA, 32 nt, Homo Sapiens
ugaaggcuggaacacuugcuacuggauaaucg

SEQ ID NO: 366346 - RNA, 32 nt, Homo Sapiens
agaaggcagcauuuuuccucucugauacuuuu

SEQ ID NO: 366347 - RNA, 32 nt, Homo Sapiens
ccccuugaaaaauaaauuugcagagugugaau

SEQ ID NO: 366348 - RNA, 32 nt, Homo Sapiens
ugguggaauuguaaguggauuugcaggccagg

SEQ ID NO: 366349 - RNA, 32 nt, Homo Sapiens
ugcgggcgcgccccaccaccgcccucaccaug

SEQ ID NO: 366350 - RNA, 32 nt, Homo Sapiens
aauuagccaggcauaguggugcaugccuguag

SEQ ID NO: 366351 - RNA, 32 nt, Homo Sapiens
uagcacuacuaaaaguuuagaacuugcagugu

SEQ ID NO: 366352 - RNA, 32 nt, Homo Sapiens
aggacuaucuuggaccuucucaucccagcaaa

SEQ ID NO: 366353 - RNA, 32 nt, Homo Sapiens
accugcgcaccccggugaccaagccccugcuu

SEQ ID NO: 366354 - RNA, 32 nt, Homo Sapiens
aagccagcgacccaccauggagacccgcuaca

SEQ ID NO: 366355 - RNA, 32 nt, Homo Sapiens
uuaaucaaucccauucuucagaaggagauggg

SEQ ID NO: 366356 - RNA, 32 nt, Homo Sapiens
ucuuccauacucaagaguacgcacggucugau

SEQ ID NO: 366357 - RNA, 32 nt, Homo Sapiens
gguguuuuuuuuuuuucuuuuuguccccccca

SEQ ID NO: 366358 - RNA, 24 nt, Homo Sapiens
uggaggcggcggccgagccuggaa

SEQ ID NO: 366359 - RNA, 32 nt, Homo Sapiens
ccaguuaucuucccuggccauuccuuguccca

SEQ ID NO: 366360 - RNA, 32 nt, Homo Sapiens
cacaccucccugccucgccccgagggcgucac

SEQ ID NO: 366361 - RNA, 32 nt, Homo Sapiens
uucgugcagcauaugaggaugcagagucagca

SEQ ID NO: 366362 - RNA, 32 nt, Homo Sapiens
cuccuuccucuuugcuuggguuccuuuuucac

SEQ ID NO: 366363 - RNA, 32 nt, Homo Sapiens
uccaaauugagacucucagaaaaggaagauug

SEQ ID NO: 366364 - RNA, 32 nt, Homo Sapiens
auguugccucgucggaguuugcuggugaugac

SEQ ID NO: 366365 - RNA, 32 nt, Homo Sapiens
uguggagagcaagaaaauaaaaauggagagag

SEQ ID NO: 366366 - RNA, 32 nt, Homo Sapiens
auccagauuuguauaugaaaucuuaccauuuu

SEQ ID NO: 366367 - RNA, 32 nt, Homo Sapiens
ccacuggguuaggaccugaggaccucacuugg

SEQ ID NO: 366368 - RNA, 32 nt, Homo Sapiens
cugacacgaugggaaaugcaccgcacccagac

SEQ ID NO: 366369 - RNA, 32 nt, Homo Sapiens
agggucuggggcagcagagccaucgcaucaug

SEQ ID NO: 366370 - RNA, 32 nt, Homo Sapiens
auucaaaaacugagaguggagaucugggauaa

SEQ ID NO: 366371 - RNA, 32 nt, Homo Sapiens
acuugccguggaagagacaguugugagauucc

SEQ ID NO: 366372 - RNA, 32 nt, Homo Sapiens
gaagccguggacccucacggugaguguuacaa

SEQ ID NO: 366373 - RNA, 32 nt, Homo Sapiens
cuucuugcucaggcuccugaaggguugauucu

SEQ ID NO: 366374 - RNA, 32 nt, Homo Sapiens
gaacgcagcugcggcggcugcgggucucgugg

SEQ ID NO: 366375 - RNA, 32 nt, Homo Sapiens
ccuggguucaggugauucuccucccuagucuc

SEQ ID NO: 366376 - RNA, 32 nt, Homo Sapiens
cugggccuuggcugcugucaacagaugggcug

SEQ ID NO: 366377 - RNA, 32 nt, Homo Sapiens
cuucucuuugcaaggggagcugagaaucuggu

SEQ ID NO: 366378 - RNA, 32 nt, Homo Sapiens
guuuugaguacaaaccuuaaauccaaaggcuc

SEQ ID NO: 366379 - RNA, 32 nt, Homo Sapiens
cccgaagacgccagccgcgccacgcacugccu

SEQ ID NO: 366380 - RNA, 30 nt, Homo Sapiens
aucaguacuguugagggggaaauuuuuugu

SEQ ID NO: 366381 - RNA, 32 nt, Homo Sapiens
uccaguguaggagagagcugguccugggccug

SEQ ID NO: 366382 - RNA, 32 nt, Homo Sapiens
ggaugguuaaaggcaacuuaugaaggcaaaac

SEQ ID NO: 366383 - RNA, 31 nt, Homo Sapiens
aauggcaggaugucuuuuaaucugguuuuuu

SEQ ID NO: 366384 - RNA, 32 nt, Homo Sapiens
cuggauuaaggguacagguugaaauaguucug

SEQ ID NO: 366385 - RNA, 32 nt, Homo Sapiens
aucuuugugcuaaaugugcccgagggacaccu

SEQ ID NO: 366386 - RNA, 29 nt, Homo Sapiens
accuaugauuguuuuucugguuuuuaaac

SEQ ID NO: 366387 - RNA, 32 nt, Homo Sapiens
uuggaccaguucuugugccauuggcaggauga

SEQ ID NO: 366388 - RNA, 32 nt, Homo Sapiens
cccugccccaggccuggacgggcccuccuucc

SEQ ID NO: 366389 - RNA, 32 nt, Homo Sapiens
auugucuuuuucuggcagcugaaacugcacac

SEQ ID NO: 366390 - RNA, 32 nt, Homo Sapiens
gguggagucgccuccgccugauccccggccug

SEQ ID NO: 366391 - RNA, 32 nt, Homo Sapiens
aauauuuuuugcacuugugauccuuggccccu

SEQ ID NO: 366392 - RNA, 32 nt, Homo Sapiens
ccaaucagcaagcacauccuccccucugaggu

SEQ ID NO: 366393 - RNA, 32 nt, Homo Sapiens
aagaagaacugggguuguuagagcugagauga

SEQ ID NO: 366394 - RNA, 29 nt, Homo Sapiens
cuguggggacgucuucagugugcuaagca

SEQ ID NO: 366395 - RNA, 32 nt, Homo Sapiens
auaugucagagcuguucuaaauuuaucaacug

SEQ ID NO: 366396 - RNA, 32 nt, Homo Sapiens
aaaggcagagagccucuugcccugagccucac

SEQ ID NO: 366397 - RNA, 32 nt, Homo Sapiens
ccaguucucucacuacuuuuuccuccucugug

SEQ ID NO: 366398 - RNA, 32 nt, Homo Sapiens
aguccaccugucccuccugggcugcuggauug

SEQ ID NO: 366399 - RNA, 32 nt, Homo Sapiens
aguguaaaaugcaaguggcaaaacacuaugua

SEQ ID NO: 366400 - RNA, 32 nt, Homo Sapiens
uuugguuugcagagaacacagccugauacuua

SEQ ID NO: 366401 - RNA, 32 nt, Homo Sapiens
gagaagggccucuggagcaggucuggaggggc

SEQ ID NO: 366402 - RNA, 32 nt, Homo Sapiens
ggcgggcaggaucugcugggcuggguuguccu

SEQ ID NO: 366403 - RNA, 28 nt, Homo Sapiens
aauagaguguggaauauuauaaaacugg

SEQ ID NO: 366404 - RNA, 32 nt, Homo Sapiens
ccauggccgcugggcucugccuuccacacaga

SEQ ID NO: 366405 - RNA, 32 nt, Homo Sapiens
gccgcacuaaaaccucuuuccaaaaaaaaaaa

SEQ ID NO: 366406 - RNA, 32 nt, Homo Sapiens
aauugcuuugacaacagcgcaguuggugaaau

SEQ ID NO: 366407 - RNA, 32 nt, Homo Sapiens
gaaggguugagaagaggaaaagaacuucucau

SEQ ID NO: 366408 - RNA, 32 nt, Homo Sapiens
ggaacagcugaaagauugauuaaugaacuauu

SEQ ID NO: 366409 - RNA, 32 nt, Homo Sapiens
ccuuuguuauguuguuaugacugcuuagaaau

SEQ ID NO: 366410 - RNA, 32 nt, Homo Sapiens
ugugguuuggggauuugcuugggcucccccuu

SEQ ID NO: 366411 - RNA, 32 nt, Homo Sapiens
ucccuugguuuucgccugcccagcguugcugu

SEQ ID NO: 366412 - RNA, 32 nt, Homo Sapiens
augguguauauuacaugguuaacaucaaaagg

SEQ ID NO: 366413 - RNA, 32 nt, Homo Sapiens
uuuucuuguaaaugcuguucaauuauuaaugu

SEQ ID NO: 366414 - RNA, 32 nt, Homo Sapiens
uauuuaaugggaauaaaauguaaguaucagua

SEQ ID NO: 366415 - RNA, 32 nt, Homo Sapiens
agcuauguuggggcacauguccugcaaauaug

SEQ ID NO: 366416 - RNA, 32 nt, Homo Sapiens
uauuucgcccccacccccauccccugccuuuu

SEQ ID NO: 366417 - RNA, 32 nt, Homo Sapiens
uugcugaggcccagcccagcccagcauagccc

SEQ ID NO: 366418 - RNA, 32 nt, Homo Sapiens
agggguuaauugugucuauaucuuucaaaaac

SEQ ID NO: 366419 - RNA, 32 nt, Homo Sapiens
uaagaguccauauuucuaguggauuuguaaaa

SEQ ID NO: 366420 - RNA, 32 nt, Homo Sapiens
ugaacgcgggccaggcagcugcggccuggggg

SEQ ID NO: 366421 - RNA, 32 nt, Homo Sapiens
gccccuugccagcaggccaggcucaccauggu

SEQ ID NO: 366422 - RNA, 32 nt, Homo Sapiens
cgcuccugagcagcugcuagguuucccaagcg

SEQ ID NO: 366423 - RNA, 32 nt, Homo Sapiens
acaaaauaauuuuuaaaaauuagccaagcaug

SEQ ID NO: 366424 - RNA, 32 nt, Homo Sapiens
cuguggguuuugggggcucagcagugaccugg

SEQ ID NO: 366425 - RNA, 32 nt, Homo Sapiens
acaggaggguggccacgugaaaagcaaugaag

SEQ ID NO: 366426 - RNA, 32 nt, Homo Sapiens
gagaaggaacagggagcagagagacccaacug

SEQ ID NO: 366427 - RNA, 32 nt, Homo Sapiens
uacauccucagguauuguaaccacugggccuu

SEQ ID NO: 366428 - RNA, 32 nt, Homo Sapiens
acugauagcucuucuuuauugacuuaaagaag

SEQ ID NO: 366429 - RNA, 32 nt, Homo Sapiens
uggguuuucuuccucuuccccagacuccaguc

SEQ ID NO: 366430 - RNA, 32 nt, Homo Sapiens
uccccggguggcugcaggcagcuccagcccgg

SEQ ID NO: 366431 - RNA, 32 nt, Homo Sapiens
ccugggaguaggggcacagacuugugccucgc

SEQ ID NO: 366432 - RNA, 32 nt, Homo Sapiens
cuucaccguugacuuaaguuacuuggcgcugc

SEQ ID NO: 366433 - RNA, 32 nt, Homo Sapiens
aauaccaaauacugaugaggauacaaacugga

SEQ ID NO: 366434 - RNA, 32 nt, Homo Sapiens
cuucugaugugccucccauggagggagccggg

SEQ ID NO: 366435 - RNA, 32 nt, Homo Sapiens
cugcucacagccuuucugaggacaccagugaa

SEQ ID NO: 366436 - RNA, 32 nt, Homo Sapiens
gcagcccuuucugcccuugggcccccggacuu

SEQ ID NO: 366437 - RNA, 32 nt, Homo Sapiens
ccaaggcgauggcaucacuggugggcuuuggg

SEQ ID NO: 366438 - RNA, 32 nt, Homo Sapiens
gguuugaggauacaguguuggcagcuucaaga

SEQ ID NO: 366439 - RNA, 31 nt, Homo Sapiens
cugacggugcugcccccuccaaggacgauua

SEQ ID NO: 366440 - RNA, 32 nt, Homo Sapiens
uaauguacuaauauuucugucaauuauaucua

SEQ ID NO: 366441 - RNA, 32 nt, Homo Sapiens
agcgggaaccuuccugagguguccuugggcca

SEQ ID NO: 366442 - RNA, 32 nt, Homo Sapiens
cuugcuggggacggggggccccagucagccuc

SEQ ID NO: 366443 - RNA, 32 nt, Homo Sapiens
ccaaugcccaggugcugagcgacaguguccca

SEQ ID NO: 366444 - RNA, 32 nt, Homo Sapiens
agccauggagggaggcggcggcggcggcggcg

SEQ ID NO: 366445 - RNA, 32 nt, Homo Sapiens
ugauucauuuuucuguuagacuaggcaaauug

SEQ ID NO: 366446 - RNA, 32 nt, Homo Sapiens
uucuucacucuguuugaagaaaauagucagug

SEQ ID NO: 366447 - RNA, 32 nt, Homo Sapiens
gguagcagcuguugaguaacuuucauuggagg

SEQ ID NO: 366448 - RNA, 32 nt, Homo Sapiens
uacaaguccucaggauggcacaaaacaaaggu

SEQ ID NO: 366449 - RNA, 32 nt, Homo Sapiens
acaaaaagacauucauaauguuaggaagauga

SEQ ID NO: 366450 - RNA, 32 nt, Homo Sapiens
aaugccuucacgcugcguggauauugcccagc

SEQ ID NO: 366451 - RNA, 32 nt, Homo Sapiens
uauuuucucuuuguuuuuaaaacucuauccuu

SEQ ID NO: 366452 - RNA, 32 nt, Homo Sapiens
acuuuagaucaucaaagaaaaccauuguuacu

SEQ ID NO: 366453 - RNA, 32 nt, Homo Sapiens
uuacuucaauucucuuugaaauguagagugcu

SEQ ID NO: 366454 - RNA, 32 nt, Homo Sapiens
ucauccuugucucuccgcuuguccucuuguga

SEQ ID NO: 366455 - RNA, 32 nt, Homo Sapiens
ugccacugagaacagcgugaccucaggcaagg

SEQ ID NO: 366456 - RNA, 32 nt, Homo Sapiens
acauguaaguacagcauauuccccucagucuu

SEQ ID NO: 366457 - RNA, 32 nt, Homo Sapiens
aguaaaaugauuuguuuuauaauuuauccacc

SEQ ID NO: 366458 - RNA, 32 nt, Homo Sapiens
cuuucuggucuuugcacuuccauccucuccca

SEQ ID NO: 366459 - RNA, 32 nt, Homo Sapiens
cagacuuaaacaaaauauacaaugcaaaugua

SEQ ID NO: 366460 - RNA, 32 nt, Homo Sapiens
gacuaaauuucugacacaauuaaauauuuugg

SEQ ID NO: 366461 - RNA, 32 nt, Homo Sapiens
cagccccaggcgggcuaagucuccaagaugcc

SEQ ID NO: 366462 - RNA, 32 nt, Homo Sapiens
acaggcugcccggagggauggcguggggcggc

SEQ ID NO: 366463 - RNA, 32 nt, Homo Sapiens
acugagcaggcugugggguggagcacuggacu

SEQ ID NO: 366464 - RNA, 32 nt, Homo Sapiens
guccaccucuccugggggccuggagaggacug

SEQ ID NO: 366465 - RNA, 32 nt, Homo Sapiens
cuggauggauuugaaugauugggaugauacau

SEQ ID NO: 366466 - RNA, 32 nt, Homo Sapiens
aaaaucucucugaagcuuaaagucuuauguau

SEQ ID NO: 366467 - RNA, 32 nt, Homo Sapiens
aaccgcaggcaccugcgccgggcgucuuacuc

SEQ ID NO: 366468 - RNA, 32 nt, Homo Sapiens
cacucuguugcccaagcuggagaacaguggca

SEQ ID NO: 366469 - RNA, 32 nt, Homo Sapiens
uuaccaauuacauuuauacauuucaaccucag

SEQ ID NO: 366470 - RNA, 32 nt, Homo Sapiens
ugggaguggggagccagagggagcagcucccc

SEQ ID NO: 366471 - RNA, 32 nt, Homo Sapiens
auguucuagaucuauuugguugcucuauaguc

SEQ ID NO: 366472 - RNA, 32 nt, Homo Sapiens
ugugagaguuaaaaucauucuguaauuucccc

SEQ ID NO: 366473 - RNA, 32 nt, Homo Sapiens
gagaacagccugcuccaccuacaggaugacuu

SEQ ID NO: 366474 - RNA, 32 nt, Homo Sapiens
uacuucauuguguuguacuggaugcaaagcua

SEQ ID NO: 366475 - RNA, 32 nt, Homo Sapiens
gcgccgggcagcgaccccugcagcggagacag

SEQ ID NO: 366476 - RNA, 32 nt, Homo Sapiens
cgccaccguucccauccaggcuugucggcggc

SEQ ID NO: 366477 - RNA, 32 nt, Homo Sapiens
auuagcagauuaaauaguggucuuaaaacucc

SEQ ID NO: 366478 - RNA, 30 nt, Homo Sapiens
gacagaggcaggccagaagguucucucugc

SEQ ID NO: 366479 - RNA, 32 nt, Homo Sapiens
ucccacuccuuccccuucuccccucuaaaccu

SEQ ID NO: 366480 - RNA, 32 nt, Homo Sapiens
cugagagggucucuaaagcagagugugguugg

SEQ ID NO: 366481 - RNA, 32 nt, Homo Sapiens
uccaguuccgggagagcggcugcccgacucag

SEQ ID NO: 366482 - RNA, 32 nt, Homo Sapiens
ccauacaauuuaauagaauuuagcaccuaaaa

SEQ ID NO: 366483 - RNA, 32 nt, Homo Sapiens
gcaacaaaaacaaaaauagacaagugauaccu

SEQ ID NO: 366484 - RNA, 32 nt, Homo Sapiens
uugcaaauaaugcuacuaugaacauaggcaua

SEQ ID NO: 366485 - RNA, 32 nt, Homo Sapiens
guuugagcaucgcuuaggagaagucuucuauu

SEQ ID NO: 366486 - RNA, 32 nt, Homo Sapiens
aauaugagcucauuaguaaaaaugacuucacc

SEQ ID NO: 366487 - RNA, 32 nt, Homo Sapiens
cccgaaggaugcuuggggagugaggcgaagcu

SEQ ID NO: 366488 - RNA, 32 nt, Homo Sapiens
uuuuagaaaaagauaaaaaguuaacugaacua

SEQ ID NO: 366489 - RNA, 32 nt, Homo Sapiens
uaugugagaaaguuagaguacagauccucugg

SEQ ID NO: 366490 - RNA, 30 nt, Homo Sapiens
guccccuccgccgugccggcggcagcccca

SEQ ID NO: 366491 - RNA, 32 nt, Homo Sapiens
cauggaaauaaauaaaccugaauguacgugcu

SEQ ID NO: 366492 - RNA, 32 nt, Homo Sapiens
auaucagugggaagggcugggggagggggcac

SEQ ID NO: 366493 - RNA, 32 nt, Homo Sapiens
uguuuucauaacugguuuuucuaagccugaca

SEQ ID NO: 366494 - RNA, 32 nt, Homo Sapiens
aagccgcuggucucuucugccccucccugaca

SEQ ID NO: 366495 - RNA, 32 nt, Homo Sapiens
gccuggggcuccugugccggugggcggggggc

SEQ ID NO: 366496 - RNA, 32 nt, Homo Sapiens
uacucuaguuuccaucucuaucauuuuauaau

SEQ ID NO: 366497 - RNA, 32 nt, Homo Sapiens
caauugauagaguauuacccacggugcuuauu

SEQ ID NO: 366498 - RNA, 32 nt, Homo Sapiens
ucuaaaagcugaugguuauguaaguugcucag

SEQ ID NO: 366499 - RNA, 32 nt, Homo Sapiens
gcccacagacugcccccacguggaacauucug

SEQ ID NO: 366500 - RNA, 32 nt, Homo Sapiens
cuugggcgcccggccccugggacgccugugga

SEQ ID NO: 366501 - RNA, 32 nt, Homo Sapiens
ucaacguugcuggggagagaaaagcaguauag

SEQ ID NO: 366502 - RNA, 32 nt, Homo Sapiens
ucuugucuuccuccccuuccuccuccagagcc

SEQ ID NO: 366503 - RNA, 32 nt, Homo Sapiens
caaagagccaucucugaugggagagggugagg

SEQ ID NO: 366504 - RNA, 32 nt, Homo Sapiens
cugcugcucacagaagcagugaggaugaugcc

SEQ ID NO: 366505 - RNA, 32 nt, Homo Sapiens
uguuugucccccaugaccuccucccacccucc

SEQ ID NO: 366506 - RNA, 32 nt, Homo Sapiens
gccccccgccccccuccuuccccucccugaac

SEQ ID NO: 366507 - RNA, 32 nt, Homo Sapiens
ggaagccugcgagggagggugguguccacugc

SEQ ID NO: 366508 - RNA, 31 nt, Homo Sapiens
uucacacaauaaaaauaauuuauaucgaaaa

SEQ ID NO: 366509 - RNA, 32 nt, Homo Sapiens
aacacuguaucaguccacggaccugcugagcu

SEQ ID NO: 366510 - RNA, 32 nt, Homo Sapiens
ccccugccccggccucagccagcccugggacc

SEQ ID NO: 366511 - RNA, 32 nt, Homo Sapiens
ggcuuccugagagcccugggggugggaggcug

SEQ ID NO: 366512 - RNA, 32 nt, Homo Sapiens
agagccagccgggaauuucgugcgggugcuga

SEQ ID NO: 366513 - RNA, 32 nt, Homo Sapiens
uugcugcuaaacaaucauuggaucacaauccu

SEQ ID NO: 366514 - RNA, 32 nt, Homo Sapiens
uuaggcagaguucagguauggaucuaagaugg

SEQ ID NO: 366515 - RNA, 32 nt, Homo Sapiens
gggcgcccgcggcggcaccaugaguccccgcu

SEQ ID NO: 366516 - RNA, 32 nt, Homo Sapiens
gcacacacacgauggaauauggccauuccuac

SEQ ID NO: 366517 - RNA, 32 nt, Homo Sapiens
uuguccuggcacaggcugcugcugcuuccggc

SEQ ID NO: 366518 - RNA, 32 nt, Homo Sapiens
ggugacggggucaccuccaccugcgcggggcc

SEQ ID NO: 366519 - RNA, 32 nt, Homo Sapiens
uuaaauguacagauauuuugcuauaaaaucgg

SEQ ID NO: 366520 - RNA, 32 nt, Homo Sapiens
uuuggaucaauuacaggcuuuuagcuggcuug

SEQ ID NO: 366521 - RNA, 32 nt, Homo Sapiens
cuccacugcccccaaagaccuccguugaacau

SEQ ID NO: 366522 - RNA, 32 nt, Homo Sapiens
ucuauaggaaugcaugagagacccuggacguu

SEQ ID NO: 366523 - RNA, 32 nt, Homo Sapiens
cacaggcagaggaggacgaggaugacugggaa

SEQ ID NO: 366524 - RNA, 32 nt, Homo Sapiens
uuaguggcgugggacagggcaguggcccaagg

SEQ ID NO: 366525 - RNA, 32 nt, Homo Sapiens
caucugccgggaacgguuuuggguuccugagc

SEQ ID NO: 366526 - RNA, 32 nt, Homo Sapiens
uaucucagugaacacacuguauuuacuugaaa

SEQ ID NO: 366527 - RNA, 32 nt, Homo Sapiens
caccuugugcccugaugccgagguggagacca

SEQ ID NO: 366528 - RNA, 32 nt, Homo Sapiens
aagugaaaccauccaugcuacauuggauaauu

SEQ ID NO: 366529 - RNA, 32 nt, Homo Sapiens
cauauugccccucccucccccaucaaacuucc

SEQ ID NO: 366530 - RNA, 30 nt, Homo Sapiens
ugauaccaucaccacaaucaggguaauaaa

SEQ ID NO: 366531 - RNA, 32 nt, Homo Sapiens
cuauguggugcagacuccaugcucuuggcauu

SEQ ID NO: 366532 - RNA, 32 nt, Homo Sapiens
gcacugcacuucuuuguuuucuucuugcuccc

SEQ ID NO: 366533 - RNA, 32 nt, Homo Sapiens
uaaaugugaagaaggcuuuuaagauguggaac

SEQ ID NO: 366534 - RNA, 32 nt, Homo Sapiens
uguaugucauaaauaagcaaauuuguaaacuu

SEQ ID NO: 366535 - RNA, 32 nt, Homo Sapiens
aagcacuugacuguugguaugugauguucuaa

SEQ ID NO: 366536 - RNA, 32 nt, Homo Sapiens
cauacagagaucacacauuaugugggacaggg

SEQ ID NO: 366537 - RNA, 32 nt, Homo Sapiens
cacucaugucuccuccacaugcgguccacaca

SEQ ID NO: 366538 - RNA, 32 nt, Homo Sapiens
uucuggccucuggccugggaaaagggcaggag

SEQ ID NO: 366539 - RNA, 32 nt, Homo Sapiens
gacgaggcgacggcgagcgcgaggaaauggcg

SEQ ID NO: 366540 - RNA, 32 nt, Homo Sapiens
ccugccuguggugggagggcccgggaccgcag

SEQ ID NO: 366541 - RNA, 32 nt, Homo Sapiens
gagcugucauuauccuucucuuucugcacaag

SEQ ID NO: 366542 - RNA, 32 nt, Homo Sapiens
cccagggaagcaguaaaauaucaauuuucauu

SEQ ID NO: 366543 - RNA, 32 nt, Homo Sapiens
uagaaauucugaguuuucaacuguauauauau

SEQ ID NO: 366544 - RNA, 30 nt, Homo Sapiens
guguuucuggacugcacuguuguccuugcc

SEQ ID NO: 366545 - RNA, 32 nt, Homo Sapiens
uuauaauggauccauccucaugacacaaacac

SEQ ID NO: 366546 - RNA, 32 nt, Homo Sapiens
ccaggaauggauuuuuggucccuuucugcagg

SEQ ID NO: 366547 - RNA, 32 nt, Homo Sapiens
cuugaauguuuagacucuuaagaucauauccu

SEQ ID NO: 366548 - RNA, 32 nt, Homo Sapiens
uuucuacccacuuuuacccauaacuuuuccaa

SEQ ID NO: 366549 - RNA, 29 nt, Homo Sapiens
agaaguuguguuuucagaggugauuuuau

SEQ ID NO: 366550 - RNA, 32 nt, Homo Sapiens
uauauaacuauauauauugccaucacacacga

SEQ ID NO: 366551 - RNA, 32 nt, Homo Sapiens
guaaaguguuuccaugcuauuucauguuuugg

SEQ ID NO: 366552 - RNA, 32 nt, Homo Sapiens
aaaauacggccuucucgagaagcgacggcgga

SEQ ID NO: 366553 - RNA, 32 nt, Homo Sapiens
cagaggcucggggcuucaagaccgcugucugg

SEQ ID NO: 366554 - RNA, 32 nt, Homo Sapiens
aagcgcuuccuggaagugaagucgugcugucc

SEQ ID NO: 366555 - RNA, 32 nt, Homo Sapiens
cucagaaagcuggcucggagaaguccuugugu

SEQ ID NO: 366556 - RNA, 32 nt, Homo Sapiens
gaggcggacaguggucacggaccucccaggca

SEQ ID NO: 366557 - RNA, 32 nt, Homo Sapiens
uugccacugucuucuuuuuuuucugauauauc

SEQ ID NO: 366558 - RNA, 32 nt, Homo Sapiens
cgccacccaccucgcuuucucaccccgcgcuu

SEQ ID NO: 366559 - RNA, 32 nt, Homo Sapiens
guacauacuguaagguugguuuguaaauuauu

SEQ ID NO: 366560 - RNA, 32 nt, Homo Sapiens
aguaaauaauacgagugaauauuuucaaaugu

SEQ ID NO: 366561 - RNA, 32 nt, Homo Sapiens
uaugcucuguuguuccuguccugucuucacug

SEQ ID NO: 366562 - RNA, 32 nt, Homo Sapiens
uagauccgauucagugcuuuugccuuaugcau

SEQ ID NO: 366563 - RNA, 31 nt, Homo Sapiens
aagagcccacacccacgcugaguuagcucug

SEQ ID NO: 366564 - RNA, 32 nt, Homo Sapiens
gccgggcugcuauucuucccccggguuuaucg

SEQ ID NO: 366565 - RNA, 32 nt, Homo Sapiens
aaaaaaccaaaauguuauuuugauacgugaaa

SEQ ID NO: 366566 - RNA, 32 nt, Homo Sapiens
uugggccuuugccagcagcaagaggugaagcg

SEQ ID NO: 366567 - RNA, 32 nt, Homo Sapiens
gucacuguuuuaagcuauagauucuuaacauu

SEQ ID NO: 366568 - RNA, 32 nt, Homo Sapiens
accaguuaucacagacuucacuggccuuaaug

SEQ ID NO: 366569 - RNA, 32 nt, Homo Sapiens
caaacccagcucgcuaaccggcgcgggcagag

SEQ ID NO: 366570 - RNA, 32 nt, Homo Sapiens
gcuccgacuggcuuccucucucaggugcugga

SEQ ID NO: 366571 - RNA, 32 nt, Homo Sapiens
cagcaacagcagcagcagcaccaucaucacca

SEQ ID NO: 366572 - RNA, 32 nt, Homo Sapiens
cguggcuccaggcucauguuucccucagacuu

SEQ ID NO: 366573 - RNA, 32 nt, Homo Sapiens
gaccgccugcuucacaccccucagcgcucccu

SEQ ID NO: 366574 - RNA, 32 nt, Homo Sapiens
accuaacucuuuucuauuuuguuuuuuaagua

SEQ ID NO: 366575 - RNA, 32 nt, Homo Sapiens
cagcucucccuggaagaccuucugcguugguc

SEQ ID NO: 366576 - RNA, 32 nt, Homo Sapiens
aaagcuucuaacucuucuuguuguucauuuuu

SEQ ID NO: 366577 - RNA, 32 nt, Homo Sapiens
ugucagcauuggccucuguguacaaaccaaga

SEQ ID NO: 366578 - RNA, 32 nt, Homo Sapiens
cgaccacgccccaggaccuccggagcgcccug

SEQ ID NO: 366579 - RNA, 32 nt, Homo Sapiens
guacagugcucuguucauugcaagcuggcaaa

SEQ ID NO: 366580 - RNA, 32 nt, Homo Sapiens
ggcauugcgaaagacuugaaaacuaaugagua

SEQ ID NO: 366581 - RNA, 32 nt, Homo Sapiens
gcagggauagagagggagccagacggacagcc

SEQ ID NO: 366582 - RNA, 32 nt, Homo Sapiens
ccaauuugauucaaaaauauuuuuaacauugu

SEQ ID NO: 366583 - RNA, 32 nt, Homo Sapiens
uagcuccaaaugcaauuuuuaaaauggaaaac

SEQ ID NO: 366584 - RNA, 32 nt, Homo Sapiens
gcaggugccguggguucuccagagaccccagc

SEQ ID NO: 366585 - RNA, 32 nt, Homo Sapiens
ggggucuuugucucgcugcagcgggugcugca

SEQ ID NO: 366586 - RNA, 32 nt, Homo Sapiens
gcuuagggccagugcucugugccacucuggag

SEQ ID NO: 366587 - RNA, 32 nt, Homo Sapiens
acagucagcuaaaagcacuguggggaagagag

SEQ ID NO: 366588 - RNA, 30 nt, Homo Sapiens
caggccaugccugugccgccaucucucccu

SEQ ID NO: 366589 - RNA, 32 nt, Homo Sapiens
aguuuauuauuguuggauacaaaguucuucau

SEQ ID NO: 366590 - RNA, 32 nt, Homo Sapiens
aaaaaggcagcugccuguggcuccuguaccaa

SEQ ID NO: 366591 - RNA, 32 nt, Homo Sapiens
gcacgaacuagaccaagcgaagggcagcccac

SEQ ID NO: 366592 - RNA, 32 nt, Homo Sapiens
uuucuuuucaagaugccugaggaagugcacca

SEQ ID NO: 366593 - RNA, 32 nt, Homo Sapiens
uguggcucacaccuauaaucccagcacuuuag

SEQ ID NO: 366594 - RNA, 28 nt, Homo Sapiens
cuagcauggcggccgccggggcugcggc

SEQ ID NO: 366595 - RNA, 32 nt, Homo Sapiens
acccacagcuggaaguggugggcaggaaggag

SEQ ID NO: 366596 - RNA, 32 nt, Homo Sapiens
uggcugcaggccaagcucuucauugcugacca

SEQ ID NO: 366597 - RNA, 32 nt, Homo Sapiens
guguuauuggaagaaaaaugcuauuaaugggc

SEQ ID NO: 366598 - RNA, 31 nt, Homo Sapiens
acugugaaauaaagaauguuaaucaacuuug

SEQ ID NO: 366599 - RNA, 32 nt, Homo Sapiens
auguccuuaacucggcgucuccaggacgagcu

SEQ ID NO: 366600 - RNA, 32 nt, Homo Sapiens
auuuggguguuuauuuugcagaugagaaaaca

SEQ ID NO: 366601 - RNA, 32 nt, Homo Sapiens
gcuugcuuucccuucgucuucugccaugauug

SEQ ID NO: 366602 - RNA, 32 nt, Homo Sapiens
ggagaauuuuucccagcuuugauucagaaggu

SEQ ID NO: 366603 - RNA, 32 nt, Homo Sapiens
ggaugugcaacugguuugcacugcacacccca

SEQ ID NO: 366604 - RNA, 32 nt, Homo Sapiens
auauccuucugucuccuccccaccuugcaaaa

SEQ ID NO: 366605 - RNA, 32 nt, Homo Sapiens
uauuaauuuguuaaauucuaaacuugaauuuc

SEQ ID NO: 366606 - RNA, 32 nt, Homo Sapiens
gaccauucucuucgcgcccacccccguuauuc

SEQ ID NO: 366607 - RNA, 32 nt, Homo Sapiens
gaugaccgugcaggccggugacacggccgcac

SEQ ID NO: 366608 - RNA, 32 nt, Homo Sapiens
ucaaagcgauguucucuucugugcucuuagaa

SEQ ID NO: 366609 - RNA, 32 nt, Homo Sapiens
cgccccacagagcucuguucuuagccuccugu

SEQ ID NO: 366610 - RNA, 32 nt, Homo Sapiens
uggcgguggggaggagacgcagggcagcuuug

SEQ ID NO: 366611 - RNA, 32 nt, Homo Sapiens
augcaggaacaaaagaaggaaauguugggcaa

SEQ ID NO: 366612 - RNA, 32 nt, Homo Sapiens
gugcugcugaggcuauacacuagcuucuagaa

SEQ ID NO: 366613 - RNA, 32 nt, Homo Sapiens
ugacaggggacagguagagagaagggggccca

SEQ ID NO: 366614 - RNA, 32 nt, Homo Sapiens
aacuggggaaggcuacuguuuguuuuuguuug

SEQ ID NO: 366615 - RNA, 32 nt, Homo Sapiens
gaggccaccuggccccaccugcuccucagggc

SEQ ID NO: 366616 - RNA, 32 nt, Homo Sapiens
acuauggggaauucuguaaaaacauauaaaaa

SEQ ID NO: 366617 - RNA, 32 nt, Homo Sapiens
ugccgggcgugguggcucacgccuguaauccc

SEQ ID NO: 366618 - RNA, 30 nt, Homo Sapiens
aauaaucuggacuauuuucuauaggauaau

SEQ ID NO: 366619 - RNA, 32 nt, Homo Sapiens
uugguauaauucagaucauauuagcuuguugc

SEQ ID NO: 366620 - RNA, 32 nt, Homo Sapiens
acaguugaauugaaugucuauaaggucuaaag

SEQ ID NO: 366621 - RNA, 32 nt, Homo Sapiens
gguucccuugugggggcuuuggcagcuaugga

SEQ ID NO: 366622 - RNA, 32 nt, Homo Sapiens
aucuuccccaucucaguuuuccuuccaugaaa

SEQ ID NO: 366623 - RNA, 32 nt, Homo Sapiens
aagacagacauugcuuaaaccuguuccaauuu

SEQ ID NO: 366624 - RNA, 32 nt, Homo Sapiens
cgcucugugcgcgcccgcucuaugaugcuugc

SEQ ID NO: 366625 - RNA, 32 nt, Homo Sapiens
ucuuacagaaugccuuucuaaccugaaggaua

SEQ ID NO: 366626 - RNA, 32 nt, Homo Sapiens
aagugaagcaugccacugucaaauccgagaau

SEQ ID NO: 366627 - RNA, 32 nt, Homo Sapiens
uaaaccaccaauauuucuuaaaaucuaggucc

SEQ ID NO: 366628 - RNA, 32 nt, Homo Sapiens
uuuguuuaaauuauauagcugggauauuuugc

SEQ ID NO: 366629 - RNA, 32 nt, Homo Sapiens
aaugguagcauuuuaaacaaaauagaaaguug

SEQ ID NO: 366630 - RNA, 32 nt, Homo Sapiens
cugccccugugcugggugccaggagagcaggc

SEQ ID NO: 366631 - RNA, 32 nt, Homo Sapiens
cgggccgcguggagacgugaggcggccgccgu

SEQ ID NO: 366632 - RNA, 32 nt, Homo Sapiens
cuuuaaggagaugccgacagcuagugacagau

SEQ ID NO: 366633 - RNA, 32 nt, Homo Sapiens
gaaaaauucagcaaaccauuuuuaaaguagaa

SEQ ID NO: 366634 - RNA, 32 nt, Homo Sapiens
cggugggugccaugcggaggggcgcgcuucug

SEQ ID NO: 366635 - RNA, 32 nt, Homo Sapiens
uuggcucaauguuuuccaaacuuauuugaccc

SEQ ID NO: 366636 - RNA, 32 nt, Homo Sapiens
guauauuugaggaaagacaaacaaagaaacaa

SEQ ID NO: 366637 - RNA, 32 nt, Homo Sapiens
cuaaauaaaaauuucauaugcugaacucagaa

SEQ ID NO: 366638 - RNA, 30 nt, Homo Sapiens
uuugucagucucggcggcggcggcggcggc

SEQ ID NO: 366639 - RNA, 32 nt, Homo Sapiens
uuucuucccuguaagugccgggccccucaccc

SEQ ID NO: 366640 - RNA, 32 nt, Homo Sapiens
ugauaaaggauuaaauaaaaauuaucuaguaa

SEQ ID NO: 366641 - RNA, 32 nt, Homo Sapiens
uucguggcugccuggggugcucucugcgugaa

SEQ ID NO: 366642 - RNA, 32 nt, Homo Sapiens
cucucccgccugccggccugccugccacagcc

SEQ ID NO: 366643 - RNA, 32 nt, Homo Sapiens
ugucugauauuucagcagcauguccucuuaag

SEQ ID NO: 366644 - RNA, 32 nt, Homo Sapiens
gugcucaaaagucacaauccauuauuacagca

SEQ ID NO: 366645 - RNA, 32 nt, Homo Sapiens
caucugcaaugagagguaauuuuauucuccuc

SEQ ID NO: 366646 - RNA, 32 nt, Homo Sapiens
ugaaacuggguuaauucuuuauagaaauguga

SEQ ID NO: 366647 - RNA, 32 nt, Homo Sapiens
ugugaaauaaacguugcaguuuuuuaaaauaa

SEQ ID NO: 366648 - RNA, 32 nt, Homo Sapiens
uggacccaaugcacacaaaacaacccuagagu

SEQ ID NO: 366649 - RNA, 32 nt, Homo Sapiens
auccccacugucaggggcagccaggacuguuc

SEQ ID NO: 366650 - RNA, 32 nt, Homo Sapiens
cacauacacuuugaauaguuacauaucacaag

SEQ ID NO: 366651 - RNA, 32 nt, Homo Sapiens
ccagaucgggaacaaaugaucuguggaugcau

SEQ ID NO: 366652 - RNA, 32 nt, Homo Sapiens
uaauauuguguaaauguacucaccuuagggau

SEQ ID NO: 366653 - RNA, 32 nt, Homo Sapiens
cugugauggguugaguucauggagccuguauu

SEQ ID NO: 366654 - RNA, 31 nt, Homo Sapiens
cacgaggcggccucccugccccuucacggcc

SEQ ID NO: 366655 - RNA, 32 nt, Homo Sapiens
cuaaaucguuaauuuuaaccgcuauagaguau

SEQ ID NO: 366656 - RNA, 32 nt, Homo Sapiens
ucagaaagauaaacauagaacugucaucugac

SEQ ID NO: 366657 - RNA, 32 nt, Homo Sapiens
ucaccgcggggcggggagcguguggcugugcc

SEQ ID NO: 366658 - RNA, 32 nt, Homo Sapiens
aaaacaaguuaaaauucuggaacuuguaucug

SEQ ID NO: 366659 - RNA, 32 nt, Homo Sapiens
cucgggccucuagucagacauuccugcagagg

SEQ ID NO: 366660 - RNA, 32 nt, Homo Sapiens
auugguaaccugcugcuguauuucaugucuua

SEQ ID NO: 366661 - RNA, 32 nt, Homo Sapiens
cuguauuggagguuuuuuuuuaauuuacagau

SEQ ID NO: 366662 - RNA, 32 nt, Homo Sapiens
gugacacauucucuuuuuguuuauucccuuau

SEQ ID NO: 366663 - RNA, 32 nt, Homo Sapiens
acauuuaguguguguauguguauucauucuuu

SEQ ID NO: 366664 - RNA, 32 nt, Homo Sapiens
aaguagcagggccaggguagaccuggucagcg

SEQ ID NO: 366665 - RNA, 32 nt, Homo Sapiens
ccacguguuaucauuauagauuuuauaguugc

SEQ ID NO: 366666 - RNA, 32 nt, Homo Sapiens
ccaagcugccuggccacugggcugggcuggag

SEQ ID NO: 366667 - RNA, 32 nt, Homo Sapiens
ucuuguuucucuguguguuucugugggaacca

SEQ ID NO: 366668 - RNA, 28 nt, Homo Sapiens
gagaugaaauucccggccucggugcugg

SEQ ID NO: 366669 - RNA, 32 nt, Homo Sapiens
uaagagauugcacuuuuuguuugggguuuauu

SEQ ID NO: 366670 - RNA, 32 nt, Homo Sapiens
gcagguucuaaagaaaucuagaugagagaaag

SEQ ID NO: 366671 - RNA, 31 nt, Homo Sapiens
ucacuugcccugagcccaggaguccaagggc

SEQ ID NO: 366672 - RNA, 32 nt, Homo Sapiens
gagcucugggagucccuggccucagcccuggc

SEQ ID NO: 366673 - RNA, 32 nt, Homo Sapiens
gucucuucuguaaaaugugaaaagaugugcuc

SEQ ID NO: 366674 - RNA, 32 nt, Homo Sapiens
ggcugcgggcugcgcccccgcugcuggccagc

SEQ ID NO: 366675 - RNA, 32 nt, Homo Sapiens
aagaggccucugaggaggaaagccuccuaauu

SEQ ID NO: 366676 - RNA, 30 nt, Homo Sapiens
ccaaguggccgacuggcgccggcgcguucu

SEQ ID NO: 366677 - RNA, 32 nt, Homo Sapiens
uuaaagaagacauuucagugugagauucagac

SEQ ID NO: 366678 - RNA, 32 nt, Homo Sapiens
gagguaacguggaccuggacggugccugugag

SEQ ID NO: 366679 - RNA, 32 nt, Homo Sapiens
gcaggaagaaggaaaagauacccaaaggucaa

SEQ ID NO: 366680 - RNA, 32 nt, Homo Sapiens
auuuuuaucagagugagaaaauuaaaauuauu

SEQ ID NO: 366681 - RNA, 32 nt, Homo Sapiens
cacugggcucucccucccccagccuggagcac

SEQ ID NO: 366682 - RNA, 32 nt, Homo Sapiens
ugcugaguggaagagggaggccauggcggagg

SEQ ID NO: 366683 - RNA, 32 nt, Homo Sapiens
uggauccccgaaggccccccgccccgcccgcc

SEQ ID NO: 366684 - RNA, 32 nt, Homo Sapiens
gcauuguuuuuccacauuaguauuagggcauc

SEQ ID NO: 366685 - RNA, 32 nt, Homo Sapiens
cccugaggcugucuccugggaaugcuggacca

SEQ ID NO: 366686 - RNA, 32 nt, Homo Sapiens
ucgcccccgccgccagcucgccucacuuaugg

SEQ ID NO: 366687 - RNA, 32 nt, Homo Sapiens
cagcaucagaucuuggcuaauaugagcucuuc

SEQ ID NO: 366688 - RNA, 32 nt, Homo Sapiens
agacaggagaggggcacguaccggcgcuacgg

SEQ ID NO: 366689 - RNA, 32 nt, Homo Sapiens
agaaucuuagagguuguucagcagaagucuug

SEQ ID NO: 366690 - RNA, 32 nt, Homo Sapiens
auuuggcccaaguuugggauuuuggcaguagc

SEQ ID NO: 366691 - RNA, 32 nt, Homo Sapiens
augaccaucguuuucacuuugcugguaaccac

SEQ ID NO: 366692 - RNA, 30 nt, Homo Sapiens
ccacugcucugugcugacgggcuccgucuc

SEQ ID NO: 366693 - RNA, 32 nt, Homo Sapiens
gggcuggcgucccaccuuccaggugggggcug

SEQ ID NO: 366694 - RNA, 32 nt, Homo Sapiens
guuaguauuuuuguuguaguuaggauacuaaa

SEQ ID NO: 366695 - RNA, 32 nt, Homo Sapiens
acaugguauuuucuauaauuauagagaucuua

SEQ ID NO: 366696 - RNA, 32 nt, Homo Sapiens
ucaguguagagcucuuguuuuaugggaaaagg

SEQ ID NO: 366697 - RNA, 30 nt, Homo Sapiens
guagucuccagcggcggcgacgagggcuac

SEQ ID NO: 366698 - RNA, 32 nt, Homo Sapiens
uccugcguucgggugauugaccugucucggcc

SEQ ID NO: 366699 - RNA, 32 nt, Homo Sapiens
ugcaaaccuucgcuauaucugaugccauuccu

SEQ ID NO: 366700 - RNA, 32 nt, Homo Sapiens
ugaugaaucaaauuauugaauuaaauuucuuc

SEQ ID NO: 366701 - RNA, 32 nt, Homo Sapiens
caacaccuaaauaaugccuggcacauauuuuu

SEQ ID NO: 366702 - RNA, 32 nt, Homo Sapiens
uggaaucauggcugcaggcuuccacuuggucu

SEQ ID NO: 366703 - RNA, 32 nt, Homo Sapiens
augcagugggucugaagauggucaagucuguu

SEQ ID NO: 366704 - RNA, 32 nt, Homo Sapiens
aaggcucugcugucacaaggagagcaggcuga

SEQ ID NO: 366705 - RNA, 32 nt, Homo Sapiens
acuuaucuuuuggaggacuaauuuaccuuacu

SEQ ID NO: 366706 - RNA, 32 nt, Homo Sapiens
cccuuucccaucuaugccugggguuucguugg

SEQ ID NO: 366707 - RNA, 32 nt, Homo Sapiens
ccugggcccagcuguggguccugaagguaccu

SEQ ID NO: 366708 - RNA, 32 nt, Homo Sapiens
gugcgucauuggaacacagaaaacaugcuggu

SEQ ID NO: 366709 - RNA, 32 nt, Homo Sapiens
cuugucaucauuagauaugaguucuugauuau

SEQ ID NO: 366710 - RNA, 30 nt, Homo Sapiens
gggugggggcagauaaugauaugcauacaa

SEQ ID NO: 366711 - RNA, 32 nt, Homo Sapiens
uucaacagaccagggcaucuucuugugucuua

SEQ ID NO: 366712 - RNA, 32 nt, Homo Sapiens
agugccuguaaagauucgaauagauuagacuu

SEQ ID NO: 366713 - RNA, 32 nt, Homo Sapiens
cagagcacacaagcuucuaggacaagagccag

SEQ ID NO: 366714 - RNA, 32 nt, Homo Sapiens
aggacuggacaauauuaucuuauucuugagag

SEQ ID NO: 366715 - RNA, 32 nt, Homo Sapiens
cuguccaagaaugcuuccugucuugcaggggc

SEQ ID NO: 366716 - RNA, 32 nt, Homo Sapiens
cuuccuuuugggugucuuucucuucuccaacc

SEQ ID NO: 366717 - RNA, 32 nt, Homo Sapiens
cacaacagacuuucucuagaaaacacuaauga

SEQ ID NO: 366718 - RNA, 32 nt, Homo Sapiens
augaaugaauaaaaugcaaaauuauacuuuua

SEQ ID NO: 366719 - RNA, 32 nt, Homo Sapiens
uguuguaguuguccuggugccuccaucagacu

SEQ ID NO: 366720 - RNA, 32 nt, Homo Sapiens
guguuuuuucuuuuuucccauuuuuaaaaaua

SEQ ID NO: 366721 - RNA, 32 nt, Homo Sapiens
acaggaaacccacauuuuuagauggaaagagc

SEQ ID NO: 366722 - RNA, 32 nt, Homo Sapiens
accuuuaugucuagcucagggauuguaaauac

SEQ ID NO: 366723 - RNA, 32 nt, Homo Sapiens
aaaggcgggucguuccccccggacagcccuac

SEQ ID NO: 366724 - RNA, 32 nt, Homo Sapiens
uuacuaaggaaaauaacugaaaagauuaaaag

SEQ ID NO: 366725 - RNA, 32 nt, Homo Sapiens
aggggaggggagacagguaacgucuguaagcu

SEQ ID NO: 366726 - RNA, 32 nt, Homo Sapiens
auccuucuuauguuugcuuuaauguguauuga

SEQ ID NO: 366727 - RNA, 32 nt, Homo Sapiens
ucacuccuucuguggucaaugucuuccauuuc

SEQ ID NO: 366728 - RNA, 32 nt, Homo Sapiens
guuggguuugguuuuucuccuaaaauaaugcu

SEQ ID NO: 366729 - RNA, 32 nt, Homo Sapiens
gugaaugaaugugaaggccuagggcauuacug

SEQ ID NO: 366730 - RNA, 32 nt, Homo Sapiens
cagcaguuuccuuuuagcuuccguauuuccug

SEQ ID NO: 366731 - RNA, 31 nt, Homo Sapiens
ugaaaccucaaugaucgucuguuucuaauua

SEQ ID NO: 366732 - RNA, 32 nt, Homo Sapiens
ccaggccccccucccagcugccggaccccaca

SEQ ID NO: 366733 - RNA, 32 nt, Homo Sapiens
ugaccucucccuccccuggccacgugggacgg

SEQ ID NO: 366734 - RNA, 32 nt, Homo Sapiens
uuacugcuaaugaaaugggaaccucccccucc

SEQ ID NO: 366735 - RNA, 32 nt, Homo Sapiens
uuccaugggucuuuagagcauucuuuguacac

SEQ ID NO: 366736 - RNA, 32 nt, Homo Sapiens
cugacacaucagagagagcuuaauaaaaaucu

SEQ ID NO: 366737 - RNA, 32 nt, Homo Sapiens
cacuggugagaccuuccacaacuuuccuccag

SEQ ID NO: 366738 - RNA, 29 nt, Homo Sapiens
guauuguaagcuuuccauuuucuauaaga

SEQ ID NO: 366739 - RNA, 32 nt, Homo Sapiens
ucugucuuaaagguuuuuucugauugaagcuu

SEQ ID NO: 366740 - RNA, 32 nt, Homo Sapiens
guccuuaaauguuuaauaaacacugacauuuc

SEQ ID NO: 366741 - RNA, 32 nt, Homo Sapiens
uuucugcuucccuacaaagaucuuuaaaguua

SEQ ID NO: 366742 - RNA, 31 nt, Homo Sapiens
cagccuguggaggccucccaagauuguagga

SEQ ID NO: 366743 - RNA, 32 nt, Homo Sapiens
gccuggauccugccuccgccaggccggcugcc

SEQ ID NO: 366744 - RNA, 32 nt, Homo Sapiens
gccucaccugcagcugcgccuccuugcaccug

SEQ ID NO: 366745 - RNA, 32 nt, Homo Sapiens
ccgaaguagagcuuucugcucugcuccuggaa

SEQ ID NO: 366746 - RNA, 32 nt, Homo Sapiens
agggggaagcaggggcgcagcugcugggcgug

SEQ ID NO: 366747 - RNA, 32 nt, Homo Sapiens
uucauauauaugauaucauuuauuuuucgcaa

SEQ ID NO: 366748 - RNA, 30 nt, Homo Sapiens
aaaacuaauaaaccucccucuuuuucauuu

SEQ ID NO: 366749 - RNA, 32 nt, Homo Sapiens
agccccagccccagccccaggcccagcugccu

SEQ ID NO: 366750 - RNA, 32 nt, Homo Sapiens
aagacauuuuugguacuugcauuugacuuacg

SEQ ID NO: 366751 - RNA, 32 nt, Homo Sapiens
gaaaguauaaaaacaaaaguuguaauuuaaaa

SEQ ID NO: 366752 - RNA, 32 nt, Homo Sapiens
augauguuaccuggguuugaguucuuggcauu

SEQ ID NO: 366753 - RNA, 32 nt, Homo Sapiens
uguuaaugucauaggauuuuuaaaagagcuau

SEQ ID NO: 366754 - RNA, 32 nt, Homo Sapiens
aggagucccagggccugaugaacagaggagau

SEQ ID NO: 366755 - RNA, 32 nt, Homo Sapiens
ucaguugccgccgccgccgccggcgcccaggg

SEQ ID NO: 366756 - RNA, 32 nt, Homo Sapiens
acaccuuugauccuuuccugugugugucccua

SEQ ID NO: 366757 - RNA, 32 nt, Homo Sapiens
uuuuaauuuaagguuuaaaauuccuuugccaa

SEQ ID NO: 366758 - RNA, 32 nt, Homo Sapiens
uuuuuagggcagauuuugguugguuuuuacau

SEQ ID NO: 366759 - RNA, 32 nt, Homo Sapiens
cuuacuugcacuguuacucuuaauuuuaaaga

SEQ ID NO: 366760 - RNA, 32 nt, Homo Sapiens
uuuuuccucugcauuuacacaaacacacacac

SEQ ID NO: 366761 - RNA, 29 nt, Homo Sapiens
aaauagagugaauuauauuuccuuaaaau

SEQ ID NO: 366762 - RNA, 32 nt, Homo Sapiens
acggcgggggugggggcgggggguugguacag

SEQ ID NO: 366763 - RNA, 32 nt, Homo Sapiens
auuuggaguugcaaagugacuaucuucccauu

SEQ ID NO: 366764 - RNA, 32 nt, Homo Sapiens
cgggugaacucgccgcccgggggccccgcgaa

SEQ ID NO: 366765 - RNA, 32 nt, Homo Sapiens
ccaaaccuccucuggagacugaccuccucuuu

SEQ ID NO: 366766 - RNA, 32 nt, Homo Sapiens
caagcugcugacgcaaacaacaacaaaugcug

SEQ ID NO: 366767 - RNA, 32 nt, Homo Sapiens
ggguuagcacggggcgcacgcacacacgcgcg

SEQ ID NO: 366768 - RNA, 32 nt, Homo Sapiens
uuuuuaaaaaagaaacaaaguuaugggguuaa

SEQ ID NO: 366769 - RNA, 32 nt, Homo Sapiens
ucauauagaggugaccaguuugccauguggau

SEQ ID NO: 366770 - RNA, 32 nt, Homo Sapiens
auaacuauuuuuccucauuaauagcugccuuc

SEQ ID NO: 366771 - RNA, 32 nt, Homo Sapiens
uguuaagauaaugcggguaacagacaauauaa

SEQ ID NO: 366772 - RNA, 32 nt, Homo Sapiens
uugcccccucccugggccuccaucaccccuga

SEQ ID NO: 366773 - RNA, 32 nt, Homo Sapiens
ccccucuccccucccugcacacagugucaccu

SEQ ID NO: 366774 - RNA, 32 nt, Homo Sapiens
augaauuguuugguaaccccuaucaagagagg

SEQ ID NO: 366775 - RNA, 32 nt, Homo Sapiens
cccuggcuggcaggggugcugcuggcugcuag

SEQ ID NO: 366776 - RNA, 32 nt, Homo Sapiens
uucuauggaaauaaauuuuguauuuguauuaa

SEQ ID NO: 366777 - RNA, 32 nt, Homo Sapiens
ugcccacccuccccaacccacauaccuccauu

SEQ ID NO: 366778 - RNA, 32 nt, Homo Sapiens
ugauagcugcgcaacagccuggguucuugagc

SEQ ID NO: 366779 - RNA, 32 nt, Homo Sapiens
aaaguauguuugguguucuccuuguauaucug

SEQ ID NO: 366780 - RNA, 32 nt, Homo Sapiens
ccuucuguguggaaacugccuccagccucccu

SEQ ID NO: 366781 - RNA, 32 nt, Homo Sapiens
auucaaaacaagaaacaaaacaaaaaaaauua

SEQ ID NO: 366782 - RNA, 32 nt, Homo Sapiens
agaugcaucuucugggcccuucucuccuuuag

SEQ ID NO: 366783 - RNA, 32 nt, Homo Sapiens
uuuugccaaaccucaggguaagaauauaaacu

SEQ ID NO: 366784 - RNA, 32 nt, Homo Sapiens
acugguuuaaauaguuuaccuuuuccuccagg

SEQ ID NO: 366785 - RNA, 32 nt, Homo Sapiens
guuuucuaaaaauuauauuuaaaauuguaauc

SEQ ID NO: 366786 - RNA, 32 nt, Homo Sapiens
agagugagccccacaguaaccuaggugggguc

SEQ ID NO: 366787 - RNA, 32 nt, Homo Sapiens
caagggguucccuccuccucucucccaaggag

SEQ ID NO: 366788 - RNA, 32 nt, Homo Sapiens
ugcagucauuggcagccuagugugcggccugc

SEQ ID NO: 366789 - RNA, 32 nt, Homo Sapiens
uggaguaaauacagcucuguguucccuagcag

SEQ ID NO: 366790 - RNA, 32 nt, Homo Sapiens
cucaggaggccucccggguccucgggagauga

SEQ ID NO: 366791 - RNA, 32 nt, Homo Sapiens
uauuaaauauucucuguaaaucaguaaacaug

SEQ ID NO: 366792 - RNA, 32 nt, Homo Sapiens
gaugggauccugcugcccuuuaugcugcucuc

SEQ ID NO: 366793 - RNA, 32 nt, Homo Sapiens
uuggaacgacucuuuagccuucugucaccugg

SEQ ID NO: 366794 - RNA, 32 nt, Homo Sapiens
uaagcacgcauuuuuguugccuugguuuuacc

SEQ ID NO: 366795 - RNA, 32 nt, Homo Sapiens
guucagcgugggcgccguggacuucgagcugc

SEQ ID NO: 366796 - RNA, 32 nt, Homo Sapiens
aacaaacaacaucaaggcaaauccaauaauca

SEQ ID NO: 366797 - RNA, 32 nt, Homo Sapiens
ucagucucagcaccaccuaacgcaccaccuug

SEQ ID NO: 366798 - RNA, 32 nt, Homo Sapiens
accucuguggagguacaaugguggugcacugu

SEQ ID NO: 366799 - RNA, 32 nt, Homo Sapiens
ggguucugcaguugggaguugguuucuggguu

SEQ ID NO: 366800 - RNA, 32 nt, Homo Sapiens
aguuguuugaguuccuuaucuauuuugaagcu

SEQ ID NO: 366801 - RNA, 32 nt, Homo Sapiens
uacauccucuagagggaacauaaaaagauacc

SEQ ID NO: 366802 - RNA, 32 nt, Homo Sapiens
ccucccggguggcugggauugcaggcacccac

SEQ ID NO: 366803 - RNA, 32 nt, Homo Sapiens
ggcuggggguuuccgugggagcuccagaacuu

SEQ ID NO: 366804 - RNA, 32 nt, Homo Sapiens
cugacccuggaaacaaacagcugcuccuccaa

SEQ ID NO: 366805 - RNA, 32 nt, Homo Sapiens
cucuggaucuagcuguccuucuccgaguggca

SEQ ID NO: 366806 - RNA, 32 nt, Homo Sapiens
uugcggcggccgcggcagcaugguggugccgg

SEQ ID NO: 366807 - RNA, 32 nt, Homo Sapiens
ggggagggagugauugccgucauggggccaga

SEQ ID NO: 366808 - RNA, 31 nt, Homo Sapiens
ggcgguccgccggucguggagggcguguccu

SEQ ID NO: 366809 - RNA, 32 nt, Homo Sapiens
cagugugcccaucccucaaccuccucagugau

SEQ ID NO: 366810 - RNA, 32 nt, Homo Sapiens
aaauggggcuccugggcccaguccugcuagug

SEQ ID NO: 366811 - RNA, 32 nt, Homo Sapiens
gcaacgggaaagguguuuauggucuuucuucc

SEQ ID NO: 366812 - RNA, 32 nt, Homo Sapiens
ugugagauaccagaauggaaacauacagcucc

SEQ ID NO: 366813 - RNA, 32 nt, Homo Sapiens
uuaagaacuuccacaaaauauuucauggagag

SEQ ID NO: 366814 - RNA, 32 nt, Homo Sapiens
augguagaauacuggggucccccagcucuuag

SEQ ID NO: 366815 - RNA, 32 nt, Homo Sapiens
ccgccaccauugcccccggcccgcagcccagu

SEQ ID NO: 366816 - RNA, 32 nt, Homo Sapiens
ugucugacacguaugaaccaaacuaugggaca

SEQ ID NO: 366817 - RNA, 32 nt, Homo Sapiens
ccuggguacugacuuugagaggagugagugug

SEQ ID NO: 366818 - RNA, 32 nt, Homo Sapiens
gugcaauguucuauguuuauuuuaauuguuau

SEQ ID NO: 366819 - RNA, 32 nt, Homo Sapiens
ccuggccaagugaggaaggaaagcagaaaggu

SEQ ID NO: 366820 - RNA, 32 nt, Homo Sapiens
gucgcccuucucccggcccucacuaagccccg

SEQ ID NO: 366821 - RNA, 32 nt, Homo Sapiens
uagaguaaacuuauugcauauuuucauaauca

SEQ ID NO: 366822 - RNA, 32 nt, Homo Sapiens
cucaguuuuuucugccuuaauucccauuuacc

SEQ ID NO: 366823 - RNA, 32 nt, Homo Sapiens
ggucgccccggccacacccuuggucuccccgc

SEQ ID NO: 366824 - RNA, 32 nt, Homo Sapiens
aaaaauugcacagauaguguauauaagcuguu

SEQ ID NO: 366825 - RNA, 32 nt, Homo Sapiens
agggggccgggguugaccuuucugugggggau

SEQ ID NO: 366826 - RNA, 32 nt, Homo Sapiens
uucugccaugucuucucuuuuacaggcuguuu

SEQ ID NO: 366827 - RNA, 32 nt, Homo Sapiens
ggcagguaugugcaggauacaguguguuucau

SEQ ID NO: 366828 - RNA, 32 nt, Homo Sapiens
augggugggcagcccugauguccgcccgagag

SEQ ID NO: 366829 - RNA, 32 nt, Homo Sapiens
ggcaaggagcucuugcauuugcugucuccucu

SEQ ID NO: 366830 - RNA, 31 nt, Homo Sapiens
agcugcuguuuuuagacuccaaggaguggaa

SEQ ID NO: 366831 - RNA, 32 nt, Homo Sapiens
agggccuucccuucugcccccaggcgggcucc

SEQ ID NO: 366832 - RNA, 32 nt, Homo Sapiens
uaaauauuuaaguuugcuaauaugcguaagua

SEQ ID NO: 366833 - RNA, 32 nt, Homo Sapiens
agaaagguggugagggcggaggggccgcucca

SEQ ID NO: 366834 - RNA, 32 nt, Homo Sapiens
gaucucggcucacugcaacuucugccucccgg

SEQ ID NO: 366835 - RNA, 32 nt, Homo Sapiens
gaucucagcucacugcaacuucugccucccag

SEQ ID NO: 366836 - RNA, 32 nt, Homo Sapiens
uaguauucacuacuccagaccuuuuucaaguu

SEQ ID NO: 366837 - RNA, 32 nt, Homo Sapiens
uucuaggacagaggggccucccagucuccccc

SEQ ID NO: 366838 - RNA, 32 nt, Homo Sapiens
augacagaauaaugugguaucuucuucugcac

SEQ ID NO: 366839 - RNA, 32 nt, Homo Sapiens
gccaggaggcuggagcccagccaggcagccuc

SEQ ID NO: 366840 - RNA, 32 nt, Homo Sapiens
ucaggguagcagcuguggcuggaaauccuaaa

SEQ ID NO: 366841 - RNA, 32 nt, Homo Sapiens
cugaggucgggaguuugagaccagucugacca

SEQ ID NO: 366842 - RNA, 32 nt, Homo Sapiens
cccucucuuugggucuccagagcgcuugcauc

SEQ ID NO: 366843 - RNA, 32 nt, Homo Sapiens
cagcugcucagcuccccucccccgccccgcgc

SEQ ID NO: 366844 - RNA, 32 nt, Homo Sapiens
gaaguuccagccccagcuccugcucaggaacc

SEQ ID NO: 366845 - RNA, 32 nt, Homo Sapiens
ccagagccucucccggccccagcggaggugcc

SEQ ID NO: 366846 - RNA, 32 nt, Homo Sapiens
auagccgccccuccccgcccacugugccuguu

SEQ ID NO: 366847 - RNA, 32 nt, Homo Sapiens
ucaauuuugacacuuuaaaaacgugugaaagg

SEQ ID NO: 366848 - RNA, 32 nt, Homo Sapiens
gaaagcggaaacaaaaccuucaccgcucuuug

SEQ ID NO: 366849 - RNA, 32 nt, Homo Sapiens
gagcuccugcuccucccugccuugccuuguuu

SEQ ID NO: 366850 - RNA, 32 nt, Homo Sapiens
aguucagacagcucuguaaaauguauugauaa

SEQ ID NO: 366851 - RNA, 32 nt, Homo Sapiens
agcccaggcgguaggccuggcccgcagagccu

SEQ ID NO: 366852 - RNA, 32 nt, Homo Sapiens
aauccagggagauacuucuuauagaaaaacaa

SEQ ID NO: 366853 - RNA, 32 nt, Homo Sapiens
caagcagaaugaauuuggacucaguuacaggc

SEQ ID NO: 366854 - RNA, 32 nt, Homo Sapiens
acgauuauuuuagauuucuaccaccgugugau

SEQ ID NO: 366855 - RNA, 32 nt, Homo Sapiens
cggggcuggcccugcccucccccacggccguc

SEQ ID NO: 366856 - RNA, 32 nt, Homo Sapiens
caggcgcagcggggagcugcuccccaggccac

SEQ ID NO: 366857 - RNA, 32 nt, Homo Sapiens
ucggagccucgggccgcguccaggguuucggc

SEQ ID NO: 366858 - RNA, 32 nt, Homo Sapiens
auccugaugcccuuuuaccauugcugguugag

SEQ ID NO: 366859 - RNA, 32 nt, Homo Sapiens
guuaugaaauguuucaguaaaauauuguuuac

SEQ ID NO: 366860 - RNA, 32 nt, Homo Sapiens
ucaaaaacaaaacaaaaaaaccacauaacaua

SEQ ID NO: 366861 - RNA, 32 nt, Homo Sapiens
ggauuugguucguuugcucuucugggaagaga

SEQ ID NO: 366862 - RNA, 32 nt, Homo Sapiens
uuacauggguugaaaacuguuuuuacacggaa

SEQ ID NO: 366863 - RNA, 32 nt, Homo Sapiens
cucuuuccauucucuuucaauucugugauauu

SEQ ID NO: 366864 - RNA, 32 nt, Homo Sapiens
uuugcuugcucuauguuucaguagcagauuuu

SEQ ID NO: 366865 - RNA, 32 nt, Homo Sapiens
agguccacaucccacccaacccccaggaccuc

SEQ ID NO: 366866 - RNA, 32 nt, Homo Sapiens
ggcagggccccggcgcuggagaggugcccugc

SEQ ID NO: 366867 - RNA, 32 nt, Homo Sapiens
aggaguuaauaaaauuuguuuacuugguccca

SEQ ID NO: 366868 - RNA, 27 nt, Homo Sapiens
uaugcggggcucuucagcccuccuggg

SEQ ID NO: 366869 - RNA, 32 nt, Homo Sapiens
ccucugugggagaggcagcugccuuguguuau

SEQ ID NO: 366870 - RNA, 32 nt, Homo Sapiens
gccgccggggcacaacauggcggagcccucgg

SEQ ID NO: 366871 - RNA, 32 nt, Homo Sapiens
guugucauaaaugcauauguugugaaaucaga

SEQ ID NO: 366872 - RNA, 32 nt, Homo Sapiens
cgccuagcgacacccccaaccucccacuccuc

SEQ ID NO: 366873 - RNA, 32 nt, Homo Sapiens
agcacaucucucugcccucucccuguguucug

SEQ ID NO: 366874 - RNA, 32 nt, Homo Sapiens
guacaucaccaaguaucuuuggcauucuuggu

SEQ ID NO: 366875 - RNA, 32 nt, Homo Sapiens
caccugcccucccccauccucucccacacaca

SEQ ID NO: 366876 - RNA, 32 nt, Homo Sapiens
agcugccauccuuuccucucuccucagggcgc

SEQ ID NO: 366877 - RNA, 32 nt, Homo Sapiens
acagcaaaacaucaauuauggaugacaaaagu

SEQ ID NO: 366878 - RNA, 32 nt, Homo Sapiens
cucauauauaucuaucuuauauacuuacuauu

SEQ ID NO: 366879 - RNA, 32 nt, Homo Sapiens
augcaagggauguuuugaaaagaaaaaauugg

SEQ ID NO: 366880 - RNA, 32 nt, Homo Sapiens
guuuaauccacuucuuuuuuaugagucagugu

SEQ ID NO: 366881 - RNA, 32 nt, Homo Sapiens
ggauuucugugcuauuauaauuaggaaaucaa

SEQ ID NO: 366882 - RNA, 32 nt, Homo Sapiens
auagcagagauauuuuuacuuagauuacuuug

SEQ ID NO: 366883 - RNA, 32 nt, Homo Sapiens
ggcccagagggagagaguagcagaaggcuuuu

SEQ ID NO: 366884 - RNA, 32 nt, Homo Sapiens
ugaaaccccaauggggccuuggcacuaagacu

SEQ ID NO: 366885 - RNA, 32 nt, Homo Sapiens
ccccuccccucgcgcgcucgcggaccucgcug

SEQ ID NO: 366886 - RNA, 32 nt, Homo Sapiens
aggaggcuucgggcuccugggauuucuguccg

SEQ ID NO: 366887 - RNA, 32 nt, Homo Sapiens
aacacccucacagacacacucaggaucaaugc

SEQ ID NO: 366888 - RNA, 32 nt, Homo Sapiens
augucauucuaccccucgcuaaacgaagauau

SEQ ID NO: 366889 - RNA, 32 nt, Homo Sapiens
aagguacugauuagccugaggaccuuccugag

SEQ ID NO: 366890 - RNA, 29 nt, Homo Sapiens
uucucauuuuguaucagaggcauaucaua

SEQ ID NO: 366891 - RNA, 32 nt, Homo Sapiens
aaauuccaggcuccucagcugcaggauggcuc

SEQ ID NO: 366892 - RNA, 32 nt, Homo Sapiens
acccgccgcccggcuccucucgggaaagcggg

SEQ ID NO: 366893 - RNA, 32 nt, Homo Sapiens
cugcaugagaaaggauggcaagucucugaggu

SEQ ID NO: 366894 - RNA, 32 nt, Homo Sapiens
gccaaggcgggggcgcuggacgguggcggcau

SEQ ID NO: 366895 - RNA, 32 nt, Homo Sapiens
cucgaucagcccgccggcuccggagcggcucu

SEQ ID NO: 366896 - RNA, 32 nt, Homo Sapiens
uccaggugguauuugggggucuucuuaggagu

SEQ ID NO: 366897 - RNA, 32 nt, Homo Sapiens
gcaugauaauacuuuuaguauaaaaucuaaac

SEQ ID NO: 366898 - RNA, 32 nt, Homo Sapiens
cgcggugucuucugcccuucugcagccgucga

SEQ ID NO: 366899 - RNA, 32 nt, Homo Sapiens
uguguccucugaaauaagcagaugaagaugaa

SEQ ID NO: 366900 - RNA, 32 nt, Homo Sapiens
acaaggcuccacucagacagguagguuaauaa

SEQ ID NO: 366901 - RNA, 32 nt, Homo Sapiens
cagcaagugcccuucuccggccugcagccucc

SEQ ID NO: 366902 - RNA, 32 nt, Homo Sapiens
guuagcugcuuggguaaguuauagaaacugug

SEQ ID NO: 366903 - RNA, 32 nt, Homo Sapiens
uugacaaagccucuucuguuuccaaugggguu

SEQ ID NO: 366904 - RNA, 32 nt, Homo Sapiens
cuccgccuuagccccgugggccccacggagug

SEQ ID NO: 366905 - RNA, 32 nt, Homo Sapiens
cuccccagaugauuccuguguacauuaaaucu

SEQ ID NO: 366906 - RNA, 32 nt, Homo Sapiens
cggggucagauaccuggggguggggaggggcc

SEQ ID NO: 366907 - RNA, 32 nt, Homo Sapiens
gacccugcagacccagauggugucucacugug

SEQ ID NO: 366908 - RNA, 32 nt, Homo Sapiens
aagaacaaacaaaauacauuucaaauauagga

SEQ ID NO: 366909 - RNA, 32 nt, Homo Sapiens
auggagugaaauucuuguuuuguggguauuag

SEQ ID NO: 366910 - RNA, 32 nt, Homo Sapiens
cuugccuucccuccccuccgggugagccuguc

SEQ ID NO: 366911 - RNA, 32 nt, Homo Sapiens
gauaccuguuacuacuguauuguuuuuagagu

SEQ ID NO: 366912 - RNA, 32 nt, Homo Sapiens
caucaccccuuacauacucacacugggagccu

SEQ ID NO: 366913 - RNA, 32 nt, Homo Sapiens
aggguuuuuucuuuuucuuuuuuuuuuuuuuu

SEQ ID NO: 366914 - RNA, 32 nt, Homo Sapiens
uagggcagagaagaagcaagaccauggugggg

SEQ ID NO: 366915 - RNA, 32 nt, Homo Sapiens
cccuuggaauggguuaguguacaggcucagaa

SEQ ID NO: 366916 - RNA, 32 nt, Homo Sapiens
ugcacccuuucccuccuuuggaaugcuguauu

SEQ ID NO: 366917 - RNA, 32 nt, Homo Sapiens
uaaauccaaacaagaguguaauauugguuagg

SEQ ID NO: 366918 - RNA, 32 nt, Homo Sapiens
uccggcccgggcggcgagagugcccggcgguc

SEQ ID NO: 366919 - RNA, 32 nt, Homo Sapiens
ugagauuuuucuggccugagacuugcagggag

SEQ ID NO: 366920 - RNA, 32 nt, Homo Sapiens
ggccuccucuauaaaucagggguccgugcucc

SEQ ID NO: 366921 - RNA, 32 nt, Homo Sapiens
augggaaauuaagagauccaggaccauauuug

SEQ ID NO: 366922 - RNA, 32 nt, Homo Sapiens
gccugcucucccuggcccuaucagccugugaa

SEQ ID NO: 366923 - RNA, 32 nt, Homo Sapiens
gggaugcagaggugaugcagcugggguccagc

SEQ ID NO: 366924 - RNA, 32 nt, Homo Sapiens
uaugucaucuaggaaaguacuauuucaugguc

SEQ ID NO: 366925 - RNA, 32 nt, Homo Sapiens
uguaccauggaaaacuaaauuuaaaaaaccag

SEQ ID NO: 366926 - RNA, 32 nt, Homo Sapiens
cgagcccgggguggaggagggagccaggcuuc

SEQ ID NO: 366927 - RNA, 32 nt, Homo Sapiens
ggggacucgccccuccucucgucccugugccu

SEQ ID NO: 366928 - RNA, 32 nt, Homo Sapiens
uaagcugcauccuuuugagggauuggaacccc

SEQ ID NO: 366929 - RNA, 32 nt, Homo Sapiens
uccgggacugccgcgccgcuccccguugccuu

SEQ ID NO: 366930 - RNA, 32 nt, Homo Sapiens
gccagcagagcggcaauguccacucacacaac

SEQ ID NO: 366931 - RNA, 32 nt, Homo Sapiens
aguaauguaaauuguaauuauaaauaaacaug

SEQ ID NO: 366932 - RNA, 32 nt, Homo Sapiens
gagggccagccgggaaggaggcguggauaugg

SEQ ID NO: 366933 - RNA, 32 nt, Homo Sapiens
acuugaauaauacugugaacuaaccaaaccaa

SEQ ID NO: 366934 - RNA, 32 nt, Homo Sapiens
ugacuacuuugaugaaacugcugguuuaaaaa

SEQ ID NO: 366935 - RNA, 32 nt, Homo Sapiens
uuuacuguauaaaugucuuuugggauguuucc

SEQ ID NO: 366936 - RNA, 32 nt, Homo Sapiens
uggaaguggggcagggaggcgcagccacacuc

SEQ ID NO: 366937 - RNA, 32 nt, Homo Sapiens
cuccagggcuccuggauguccuuccucaacuc

SEQ ID NO: 366938 - RNA, 32 nt, Homo Sapiens
cgcuccucaaucuaacccuccuccccuggggc

SEQ ID NO: 366939 - RNA, 32 nt, Homo Sapiens
agacagauuugggucuccaugagcagagagua

SEQ ID NO: 366940 - RNA, 32 nt, Homo Sapiens
caucaccaaagggcagaaaacaacagcucaag

SEQ ID NO: 366941 - RNA, 32 nt, Homo Sapiens
aguuagacgaaacugcaucucuguuguacgug

SEQ ID NO: 366942 - RNA, 32 nt, Homo Sapiens
cucaagguccucuggauggcaggugaguaaag

SEQ ID NO: 366943 - RNA, 32 nt, Homo Sapiens
aauucaaagugcccuuauaagacauaaacaca

SEQ ID NO: 366944 - RNA, 32 nt, Homo Sapiens
ggcuuuuguaaauuaugcauuuauuguaauua

SEQ ID NO: 366945 - RNA, 32 nt, Homo Sapiens
gaaauggacauuuuuucuuaauuuauguauaa

SEQ ID NO: 366946 - RNA, 32 nt, Homo Sapiens
agaaugagaagcuuugcugugcaccaggaccu

SEQ ID NO: 366947 - RNA, 32 nt, Homo Sapiens
cacggcaagggccagccuguuuccucccgguc

SEQ ID NO: 366948 - RNA, 32 nt, Homo Sapiens
guggggcuucgggaccccggggaugagccggg

SEQ ID NO: 366949 - RNA, 32 nt, Homo Sapiens
auuucuggcucuuuccucuucgccuuaaauuc

SEQ ID NO: 366950 - RNA, 32 nt, Homo Sapiens
cgcuggcucagucuccuucugaaaagcuggau

SEQ ID NO: 366951 - RNA, 32 nt, Homo Sapiens
ggaugggagagcccccugggugcugcuggggc

SEQ ID NO: 366952 - RNA, 31 nt, Homo Sapiens
guaccacaagaggguugaccagauggcccca

SEQ ID NO: 366953 - RNA, 32 nt, Homo Sapiens
uuucucaaacuccuuuuuaagccaauuucaaa

SEQ ID NO: 366954 - RNA, 32 nt, Homo Sapiens
acccggcuuugccugccaccucugcccaggac

SEQ ID NO: 366955 - RNA, 32 nt, Homo Sapiens
uggggcagucggugggggaggcaggcgguggu

SEQ ID NO: 366956 - RNA, 31 nt, Homo Sapiens
ucggggauggacugcggcucggucggcggcc

SEQ ID NO: 366957 - RNA, 32 nt, Homo Sapiens
guucuagccugccuuggacaagggggccccag

SEQ ID NO: 366958 - RNA, 32 nt, Homo Sapiens
ccuucaggacuucugggcccagcccucuugcc

SEQ ID NO: 366959 - RNA, 32 nt, Homo Sapiens
gcaagcccuggccuuccguucaucucuggccu

SEQ ID NO: 366960 - RNA, 32 nt, Homo Sapiens
cucaacuuguaacucaauaaacagaagugaca

SEQ ID NO: 366961 - RNA, 32 nt, Homo Sapiens
accuuacuuugaguccagacucugccacuuaa

SEQ ID NO: 366962 - RNA, 32 nt, Homo Sapiens
cucucuauggcacuguuuuuuaucacaaauau

SEQ ID NO: 366963 - RNA, 32 nt, Homo Sapiens
aaccucaacgaccagucuggcaacggcgaccg

SEQ ID NO: 366964 - RNA, 32 nt, Homo Sapiens
uguuuuucuuugcugauauuucugggguaaua

SEQ ID NO: 366965 - RNA, 32 nt, Homo Sapiens
accccuguuggccacuuguugaccucucauag

SEQ ID NO: 366966 - RNA, 32 nt, Homo Sapiens
guugacauugaauaaaagaacaugacaaaccc

SEQ ID NO: 366967 - RNA, 32 nt, Homo Sapiens
aaaaggaaagaggacuacaagcaagauggcgg

SEQ ID NO: 366968 - RNA, 32 nt, Homo Sapiens
ccccggugcuggcaucugguggagcggaccca

SEQ ID NO: 366969 - RNA, 32 nt, Homo Sapiens
uaccaccgcguucggguguagaauuuggaauc

SEQ ID NO: 366970 - RNA, 32 nt, Homo Sapiens
ggacaguucacagcaaauuguuuacuuacaug

SEQ ID NO: 366971 - RNA, 32 nt, Homo Sapiens
auauuuuuaaaauuauuuuauuaaauaaggua

SEQ ID NO: 366972 - RNA, 32 nt, Homo Sapiens
cucgccacuggccacuccucuguucucauugc

SEQ ID NO: 366973 - RNA, 28 nt, Homo Sapiens
uccaaauauaucuauaaguuacuacgug

SEQ ID NO: 366974 - RNA, 32 nt, Homo Sapiens
ucaggacccacccacccuaugccggcuucugu

SEQ ID NO: 366975 - RNA, 32 nt, Homo Sapiens
aguauugaucacuacuggaaaaacacuuaagg

SEQ ID NO: 366976 - RNA, 32 nt, Homo Sapiens
gaagggaagggaggaggaggaggacgccgguc

SEQ ID NO: 366977 - RNA, 32 nt, Homo Sapiens
uaccguucgggaaaggcuuuugaaaggacgga

SEQ ID NO: 366978 - RNA, 32 nt, Homo Sapiens
cucuccgcgggaggcgucggggcccgcggcug

SEQ ID NO: 366979 - RNA, 30 nt, Homo Sapiens
guuaacgagaugcaguuugagucugggaua

SEQ ID NO: 366980 - RNA, 32 nt, Homo Sapiens
uuguccuggccgcgaccugagaccuccaugag

SEQ ID NO: 366981 - RNA, 32 nt, Homo Sapiens
aauauguguauuguaauuuauugaucuggaug

SEQ ID NO: 366982 - RNA, 32 nt, Homo Sapiens
caucuugauuuggagagaggcuaauauuaugc

SEQ ID NO: 366983 - RNA, 32 nt, Homo Sapiens
uguuguuauagaacacaugaaaggaauacaug

SEQ ID NO: 366984 - RNA, 32 nt, Homo Sapiens
agggaaagaaugcggccacguggccuauuuuc

SEQ ID NO: 366985 - RNA, 32 nt, Homo Sapiens
auggagagaaagggcuuccaggccccuccaag

SEQ ID NO: 366986 - RNA, 32 nt, Homo Sapiens
guagucaaggaccucugugguuaugcucuugg

SEQ ID NO: 366987 - RNA, 32 nt, Homo Sapiens
gccccucugcagccggccgcugguaccuuccc

SEQ ID NO: 366988 - RNA, 32 nt, Homo Sapiens
acucccaacuccauccacggauccccccucac

SEQ ID NO: 366989 - RNA, 32 nt, Homo Sapiens
gacucuggcacccacccacaaagcaagaccug

SEQ ID NO: 366990 - RNA, 32 nt, Homo Sapiens
ccuuagaaggauuuuuugaagcucuuggcgcu

SEQ ID NO: 366991 - RNA, 32 nt, Homo Sapiens
gcagaacaaaugaagacaaaacauacauuuug

SEQ ID NO: 366992 - RNA, 30 nt, Homo Sapiens
caggugucaggagcugcagaagcuuaagac

SEQ ID NO: 366993 - RNA, 32 nt, Homo Sapiens
agacuucuggacaauuuuucacuuucacagau

SEQ ID NO: 366994 - RNA, 32 nt, Homo Sapiens
uaguagaggcggaguuucgccauguuggucag

SEQ ID NO: 366995 - RNA, 32 nt, Homo Sapiens
ggaauuaugucaacacucauacuucaucucau

SEQ ID NO: 366996 - RNA, 32 nt, Homo Sapiens
gggguuccucagaccaucuccuucauucuggg

SEQ ID NO: 366997 - RNA, 32 nt, Homo Sapiens
cugcuguaugugugcgcgugcacgugugugug

SEQ ID NO: 366998 - RNA, 32 nt, Homo Sapiens
cuaccuguuugaaggggagagagggaaaauca

SEQ ID NO: 366999 - RNA, 32 nt, Homo Sapiens
uuacuuucuuggauguuaaacauuacacuacu

SEQ ID NO: 367000 - RNA, 32 nt, Homo Sapiens
cugguguauucaguaauauauaguaaaguaau

SEQ ID NO: 367001 - RNA, 32 nt, Homo Sapiens
uccagugguuggaaacucuagguuuguaccau

SEQ ID NO: 367002 - RNA, 32 nt, Homo Sapiens
cuuccuuuucuuuucucagaucccuccagugu

SEQ ID NO: 367003 - RNA, 32 nt, Homo Sapiens
cuucugcaaaacaaaaauacauuuguuaguuc

SEQ ID NO: 367004 - RNA, 32 nt, Homo Sapiens
ggccuuauuacugcuuaauccaaauguguacc

SEQ ID NO: 367005 - RNA, 32 nt, Homo Sapiens
gcggauggggccugggccuccuuccuacaggg

SEQ ID NO: 367006 - RNA, 32 nt, Homo Sapiens
gaaaggacccgggacuugaacaguguugugcg

SEQ ID NO: 367007 - RNA, 32 nt, Homo Sapiens
ugggaugauaagaaacaaaaauaaucccaacu

SEQ ID NO: 367008 - RNA, 32 nt, Homo Sapiens
uaagagggacuacccaugagagugggguucug

SEQ ID NO: 367009 - RNA, 32 nt, Homo Sapiens
aucuugcuauagaauaaacacauuucaguaaa

SEQ ID NO: 367010 - RNA, 32 nt, Homo Sapiens
ccccacgccccaccccacucccccagaguacu

SEQ ID NO: 367011 - RNA, 32 nt, Homo Sapiens
gaggacccgucuuuuugcagugccaggcaggg

SEQ ID NO: 367012 - RNA, 32 nt, Homo Sapiens
gaaggggaaaggaccccagagaaguggcugug

SEQ ID NO: 367013 - RNA, 32 nt, Homo Sapiens
ugaggggaaagagagaugggccaggcagagaa

SEQ ID NO: 367014 - RNA, 32 nt, Homo Sapiens
cuggagcgcugggccuucgcuggccgcaccgg

SEQ ID NO: 367015 - RNA, 32 nt, Homo Sapiens
uucccaguaaauuuauauagcagugaagaauu

SEQ ID NO: 367016 - RNA, 32 nt, Homo Sapiens
gauggccugacaggccuauuaaguagauguga

SEQ ID NO: 367017 - RNA, 32 nt, Homo Sapiens
cccuuuuggaauguacaaaauaaaaucauucu

SEQ ID NO: 367018 - RNA, 32 nt, Homo Sapiens
guuuauuuauagauauaucuuuccaacacaac

SEQ ID NO: 367019 - RNA, 32 nt, Homo Sapiens
cugcuuucaggagcuagcagaaaauaacucaa

SEQ ID NO: 367020 - RNA, 32 nt, Homo Sapiens
aaggagcgcagaauugucaugaaaauauaauu

SEQ ID NO: 367021 - RNA, 32 nt, Homo Sapiens
aggcccugaggcggaggcugugcuccgccaug

SEQ ID NO: 367022 - RNA, 32 nt, Homo Sapiens
uguggguucugcacccuggaaauggugaugac

SEQ ID NO: 367023 - RNA, 32 nt, Homo Sapiens
aaacaagauugugauagugucuacuuugagcu

SEQ ID NO: 367024 - RNA, 32 nt, Homo Sapiens
ugacacuuucacugucagucuuucuaggaguc

SEQ ID NO: 367025 - RNA, 32 nt, Homo Sapiens
agauuuuauagcauacaucauugugagggauu

SEQ ID NO: 367026 - RNA, 32 nt, Homo Sapiens
aaauucuggaaauggauagcgaugaugguugc

SEQ ID NO: 367027 - RNA, 31 nt, Homo Sapiens
aguuaguauuuguuuuucagaaaugaccacu

SEQ ID NO: 367028 - RNA, 32 nt, Homo Sapiens
uaaugagaaauauuuugugacuuuaauuggua

SEQ ID NO: 367029 - RNA, 32 nt, Homo Sapiens
gggcagaucgaccccugaccuaaucgguuaug

SEQ ID NO: 367030 - RNA, 32 nt, Homo Sapiens
acuuucuuaagugaucccaugaaauaaaaguc

SEQ ID NO: 367031 - RNA, 32 nt, Homo Sapiens
uaugcccaccgccaugguuuugucagcucugu

SEQ ID NO: 367032 - RNA, 29 nt, Homo Sapiens
ccuaccugguggcagaggacgucugacgc

SEQ ID NO: 367033 - RNA, 32 nt, Homo Sapiens
auuuaacuuaggaggcuccuccaauuugccuc

SEQ ID NO: 367034 - RNA, 32 nt, Homo Sapiens
uuugucuacauaugaucugucuguggcaaaag

SEQ ID NO: 367035 - RNA, 32 nt, Homo Sapiens
gagaaggagaauacuggaagauaaugcacaaa

SEQ ID NO: 367036 - RNA, 32 nt, Homo Sapiens
uugcugcccugugcuccuccccgcaggacaug

SEQ ID NO: 367037 - RNA, 32 nt, Homo Sapiens
cgcugggacagagggccccgcagccgucaugc

SEQ ID NO: 367038 - RNA, 32 nt, Homo Sapiens
aauguccucagcacguucuucagcugcugggg

SEQ ID NO: 367039 - RNA, 32 nt, Homo Sapiens
cuccuacuccccacccaccucugcgaaucugc

SEQ ID NO: 367040 - RNA, 32 nt, Homo Sapiens
uucaaaauucaacuuuuagaguauuuuagcaa

SEQ ID NO: 367041 - RNA, 32 nt, Homo Sapiens
gugcauaaggaagaacucuacagcagcccaau

SEQ ID NO: 367042 - RNA, 32 nt, Homo Sapiens
ugcuguugcucccgaaagccgugcucuccagc

SEQ ID NO: 367043 - RNA, 32 nt, Homo Sapiens
ggaaccuugcuguccugaucugugauaguuca

SEQ ID NO: 367044 - RNA, 32 nt, Homo Sapiens
cgacuuuugagauuuugaaacuuggacugagc

SEQ ID NO: 367045 - RNA, 32 nt, Homo Sapiens
cagagcgaggccaccacuccccugccccagcu

SEQ ID NO: 367046 - RNA, 32 nt, Homo Sapiens
cagaguuuuuaaacuacucacuucuuuauuuc

SEQ ID NO: 367047 - RNA, 32 nt, Homo Sapiens
aaaaccacagaaaacuggaagugggaaaucga

SEQ ID NO: 367048 - RNA, 32 nt, Homo Sapiens
gcaggucccgucuggcuccagcccuugucaga

SEQ ID NO: 367049 - RNA, 32 nt, Homo Sapiens
aacuccauauauauugagaaaagcauauguuu

SEQ ID NO: 367050 - RNA, 32 nt, Homo Sapiens
accccugcuguacacaucaggcaguugaggcc

SEQ ID NO: 367051 - RNA, 32 nt, Homo Sapiens
cuuucaaguauuuuuaaaaauaugcuagucau

SEQ ID NO: 367052 - RNA, 32 nt, Homo Sapiens
agcuuggcuucccucccaugggaagugcugga

SEQ ID NO: 367053 - RNA, 32 nt, Homo Sapiens
cucccuggcaugaggugcccacuuccccuuuc

SEQ ID NO: 367054 - RNA, 32 nt, Homo Sapiens
ggagaaugaugaugauaguuuccuucugucua

SEQ ID NO: 367055 - RNA, 32 nt, Homo Sapiens
cacacacauacacaaacacacacacacacuag

SEQ ID NO: 367056 - RNA, 32 nt, Homo Sapiens
aguguuaugugacuuguugaacuuuuuaaaaa

SEQ ID NO: 367057 - RNA, 32 nt, Homo Sapiens
gauggugucagcaaauagaugauuuuaaagac

SEQ ID NO: 367058 - RNA, 32 nt, Homo Sapiens
uaguaaauuauguacaauuuuaugacuagcuu

SEQ ID NO: 367059 - RNA, 32 nt, Homo Sapiens
aucuuucaacuauuagguucuugaaccaucuu

SEQ ID NO: 367060 - RNA, 32 nt, Homo Sapiens
ugaagacuaugaagaugacuuugagguuugug

SEQ ID NO: 367061 - RNA, 32 nt, Homo Sapiens
ucuuuuugaacaggcccgcggcuccuccagca

SEQ ID NO: 367062 - RNA, 32 nt, Homo Sapiens
guggcuucuggugaggggaaguuuacuccagu

SEQ ID NO: 367063 - RNA, 32 nt, Homo Sapiens
agcgggucacguuguuucgcgggagaaauucg

SEQ ID NO: 367064 - RNA, 32 nt, Homo Sapiens
ucggcuugugaggcuucccacuauuuauuacu

SEQ ID NO: 367065 - RNA, 32 nt, Homo Sapiens
agcuccagaagcuguuggaguugaggauuugu

SEQ ID NO: 367066 - RNA, 32 nt, Homo Sapiens
ggcaggcuauuccggacgccagcccuggaagc

SEQ ID NO: 367067 - RNA, 32 nt, Homo Sapiens
agaauuccagcaggaagaaguacacauuucca

SEQ ID NO: 367068 - RNA, 32 nt, Homo Sapiens
agaugaagcauuuggguaaacaguccaggcac

SEQ ID NO: 367069 - RNA, 32 nt, Homo Sapiens
gcagagcggaggaggugcuuggcgcuucucag

SEQ ID NO: 367070 - RNA, 32 nt, Homo Sapiens
acacagggagacgggggccuggagccagcccu

SEQ ID NO: 367071 - RNA, 32 nt, Homo Sapiens
aagucagccagccccgaaguccccucagugug

SEQ ID NO: 367072 - RNA, 32 nt, Homo Sapiens
ugccaaacuaaauacuguaacacuguauaaca

SEQ ID NO: 367073 - RNA, 32 nt, Homo Sapiens
ccgccgccgccucugagccgcggccgagcuuc

SEQ ID NO: 367074 - RNA, 29 nt, Homo Sapiens
agcuauguauguauggaggccagucgcag

SEQ ID NO: 367075 - RNA, 32 nt, Homo Sapiens
cgauaaugagagacagaccagaggacugcuac

SEQ ID NO: 367076 - RNA, 32 nt, Homo Sapiens
ccuguguucuauuugagaggcgccugucugga

SEQ ID NO: 367077 - RNA, 32 nt, Homo Sapiens
ccuacugccccaccucagagaagugcagcggg

SEQ ID NO: 367078 - RNA, 32 nt, Homo Sapiens
aguggguucaacggagcagggauuuuuaaaac

SEQ ID NO: 367079 - RNA, 32 nt, Homo Sapiens
cuaccuguuguauucuuccccccguuuaaauc

SEQ ID NO: 367080 - RNA, 32 nt, Homo Sapiens
gauaauauaugauaaauuauguucugauaucc

SEQ ID NO: 367081 - RNA, 32 nt, Homo Sapiens
cggcccccggucugcugugcgccuuugggauu

SEQ ID NO: 367082 - RNA, 29 nt, Homo Sapiens
ugagcaguguguauguacuagcuguggug

SEQ ID NO: 367083 - RNA, 32 nt, Homo Sapiens
auggagaacacuuuaaaaauaauaacaauuau

SEQ ID NO: 367084 - RNA, 32 nt, Homo Sapiens
auacucuucuauuuuccagcacuugucaguag

SEQ ID NO: 367085 - RNA, 32 nt, Homo Sapiens
caggcagacaguaccucugugucuaugagaaa

SEQ ID NO: 367086 - RNA, 31 nt, Homo Sapiens
cgggcucgcgucauccugcccccgcugcgau

SEQ ID NO: 367087 - RNA, 30 nt, Homo Sapiens
cagccuggguuacagagggaaaccuugucu

SEQ ID NO: 367088 - RNA, 32 nt, Homo Sapiens
aaucaaagaauauuuugucugagagcuuuaag

SEQ ID NO: 367089 - RNA, 32 nt, Homo Sapiens
cuguaccccccacuuccacuccauguccccau

SEQ ID NO: 367090 - RNA, 32 nt, Homo Sapiens
aaauagcucagguguacccugcacuugcagac

SEQ ID NO: 367091 - RNA, 32 nt, Homo Sapiens
gugcuacugccaaauguucugauacuuagagu

SEQ ID NO: 367092 - RNA, 32 nt, Homo Sapiens
ugggagagcgucgggcgggaggcggugguccu

SEQ ID NO: 367093 - RNA, 32 nt, Homo Sapiens
uuggguccugguuugggaccaugaagcggcuc

SEQ ID NO: 367094 - RNA, 32 nt, Homo Sapiens
gugcacugagaauaaacucuuuccugccacca

SEQ ID NO: 367095 - RNA, 32 nt, Homo Sapiens
gcacuuaugggaacagucugugagauugaugu

SEQ ID NO: 367096 - RNA, 32 nt, Homo Sapiens
ccgcuuccaaaauggcggcggcggcgguaucu

SEQ ID NO: 367097 - RNA, 27 nt, Homo Sapiens
ggcaucucuacccucagcccccugcac

SEQ ID NO: 367098 - RNA, 32 nt, Homo Sapiens
uaaaagauguaccaccugucaucuucuaaauu

SEQ ID NO: 367099 - RNA, 32 nt, Homo Sapiens
augaucccccuccccuucuccuccaguaaaua

SEQ ID NO: 367100 - RNA, 32 nt, Homo Sapiens
uggguccuugcagcugugaugguuucagagcu

SEQ ID NO: 367101 - RNA, 32 nt, Homo Sapiens
guccuaagaaacuccacucuggacagcgccag

SEQ ID NO: 367102 - RNA, 32 nt, Homo Sapiens
gcucucuccugggcucagcagcugcguccucc

SEQ ID NO: 367103 - RNA, 32 nt, Homo Sapiens
uguuuucuuucugggaagaaaaguguguucua

SEQ ID NO: 367104 - RNA, 32 nt, Homo Sapiens
auuggauaccccauuaaaucugacagucucaa

SEQ ID NO: 367105 - RNA, 32 nt, Homo Sapiens
cauucugaguauagguuuuucuccauuuacag

SEQ ID NO: 367106 - RNA, 32 nt, Homo Sapiens
gccugggcugggggcggggaccaggcggggca

SEQ ID NO: 367107 - RNA, 32 nt, Homo Sapiens
cugggagagggacagcagcagcggcuguucca

SEQ ID NO: 367108 - RNA, 32 nt, Homo Sapiens
ugggacacagaguugacccagccagggggaaa

SEQ ID NO: 367109 - RNA, 32 nt, Homo Sapiens
ucuuugaaaaaauaaacauuuuuuaaaaaacu

SEQ ID NO: 367110 - RNA, 32 nt, Homo Sapiens
uaccuuugcuucuccuucuccuucugccauga

SEQ ID NO: 367111 - RNA, 32 nt, Homo Sapiens
gggucgugaccuguguggagccccacacugag

SEQ ID NO: 367112 - RNA, 32 nt, Homo Sapiens
gcuccaaacuaaaagugguuggaggaucuacu

SEQ ID NO: 367113 - RNA, 32 nt, Homo Sapiens
ccuacaggugcccuuuuuggcuuuuguuguug

SEQ ID NO: 367114 - RNA, 32 nt, Homo Sapiens
gacucugggggccagccagagcccuggccguc

SEQ ID NO: 367115 - RNA, 32 nt, Homo Sapiens
agacguuccacuuguggagaucccaccugccg

SEQ ID NO: 367116 - RNA, 32 nt, Homo Sapiens
uaauacaaaaaguuucagacaaguauuaaaga

SEQ ID NO: 367117 - RNA, 32 nt, Homo Sapiens
uacuuaaaaugccugggauaguucuugggacu

SEQ ID NO: 367118 - RNA, 27 nt, Homo Sapiens
uuucuugcuuucuucagcacaucuuau

SEQ ID NO: 367119 - RNA, 32 nt, Homo Sapiens
aauauuuuaugcaguacauuauauuauucugu

SEQ ID NO: 367120 - RNA, 32 nt, Homo Sapiens
cgugaaauauaaaaagcaagucuugcccaaua

SEQ ID NO: 367121 - RNA, 32 nt, Homo Sapiens
uguucccacucccagaugguuuuaucaauagc

SEQ ID NO: 367122 - RNA, 32 nt, Homo Sapiens
acggaagccuggggaugacgucgggcagcuuu

SEQ ID NO: 367123 - RNA, 32 nt, Homo Sapiens
gugguagcaaaauaaaaguaauccaaaaguua

SEQ ID NO: 367124 - RNA, 32 nt, Homo Sapiens
guguuuuucuucaguugugccucuuccucucu

SEQ ID NO: 367125 - RNA, 32 nt, Homo Sapiens
caaggaggggguaguugaaaaaucccagcuuc

SEQ ID NO: 367126 - RNA, 32 nt, Homo Sapiens
aacccaggagacggagguugcagugagccgag

SEQ ID NO: 367127 - RNA, 32 nt, Homo Sapiens
gcccuagcggcuugcggggggacaugcggacc

SEQ ID NO: 367128 - RNA, 32 nt, Homo Sapiens
caaaagacaaagaaauuguuguccuccaacuc

SEQ ID NO: 367129 - RNA, 32 nt, Homo Sapiens
ugugcagcugggcucagacgugucucagcucu

SEQ ID NO: 367130 - RNA, 32 nt, Homo Sapiens
ggccaggugugguggcucaagccuguaauccc

SEQ ID NO: 367131 - RNA, 32 nt, Homo Sapiens
gcgacguagcccggcggucccggcggcgagag

SEQ ID NO: 367132 - RNA, 32 nt, Homo Sapiens
cauuuuuggggauuugucgacucauuuugucu

SEQ ID NO: 367133 - RNA, 32 nt, Homo Sapiens
ccugugcguggccuuaaacauugagaagugcu

SEQ ID NO: 367134 - RNA, 32 nt, Homo Sapiens
gguguuuuaaagcuagaguggucuuuauccac

SEQ ID NO: 367135 - RNA, 32 nt, Homo Sapiens
gggccgucaaggaaagggcaguggacgugcug

SEQ ID NO: 367136 - RNA, 32 nt, Homo Sapiens
aaauguuuucuuuacaacaaauaaugcacaga

SEQ ID NO: 367137 - RNA, 32 nt, Homo Sapiens
acuaucggccccaauuccucagcccuaccugc

SEQ ID NO: 367138 - RNA, 32 nt, Homo Sapiens
gacacacacacacacacacacacacacaccac

SEQ ID NO: 367139 - RNA, 32 nt, Homo Sapiens
uuguggcuaucaaaugaaaucuguaaauagga

SEQ ID NO: 367140 - RNA, 32 nt, Homo Sapiens
cagcagacgacaggccgcacugucccaccugg

SEQ ID NO: 367141 - RNA, 32 nt, Homo Sapiens
uccaagaaauugaguagggaaauauuuguuuu

SEQ ID NO: 367142 - RNA, 32 nt, Homo Sapiens
accucaacccuguaauauaacccauuaaaaug

SEQ ID NO: 367143 - RNA, 32 nt, Homo Sapiens
uucuaacuccugcuccuucucuuguccuucca

SEQ ID NO: 367144 - RNA, 32 nt, Homo Sapiens
cggagccgccgggagucgcgcaacagguuucc

SEQ ID NO: 367145 - RNA, 31 nt, Homo Sapiens
agagcaauggcggugucugccggguccgcgc

SEQ ID NO: 367146 - RNA, 32 nt, Homo Sapiens
uuuugggccaccugggguacugcccucaagag

SEQ ID NO: 367147 - RNA, 32 nt, Homo Sapiens
ugucuacagccacugaauccuguccuacauuu

SEQ ID NO: 367148 - RNA, 32 nt, Homo Sapiens
cgggaagcugcguucccgaacacuagcagccc

SEQ ID NO: 367149 - RNA, 32 nt, Homo Sapiens
gucugacaagguggucaacaacauuccucaaa

SEQ ID NO: 367150 - RNA, 32 nt, Homo Sapiens
ccgaggggaugaagcugagaugaugcuuguau

SEQ ID NO: 367151 - RNA, 32 nt, Homo Sapiens
auuugauucuaugacugaaguacuggaauuua

SEQ ID NO: 367152 - RNA, 32 nt, Homo Sapiens
gcggccggguggcgggggugaguggggccagc

SEQ ID NO: 367153 - RNA, 32 nt, Homo Sapiens
gauagaugagagaucaugaaaaccaaauuuua

SEQ ID NO: 367154 - RNA, 32 nt, Homo Sapiens
uucccaaagcagauccuggcugcgaguccauc

SEQ ID NO: 367155 - RNA, 32 nt, Homo Sapiens
aggaagcacgggggagugagacaggcuggguc

SEQ ID NO: 367156 - RNA, 32 nt, Homo Sapiens
gccgcggcagguagggccggccgcgggcugag

SEQ ID NO: 367157 - RNA, 32 nt, Homo Sapiens
uucccucggcccagcacgccccggccccgccc

SEQ ID NO: 367158 - RNA, 32 nt, Homo Sapiens
guucaagucgcaggaaaggucacggcagggaa

SEQ ID NO: 367159 - RNA, 32 nt, Homo Sapiens
gugggugaaagauaaauguuuuagggaacaga

SEQ ID NO: 367160 - RNA, 32 nt, Homo Sapiens
cuaaaagaucaacuacauuagaugcuggaaau

SEQ ID NO: 367161 - RNA, 32 nt, Homo Sapiens
uuugcccuuucugcuucacugcauggauacag

SEQ ID NO: 367162 - RNA, 32 nt, Homo Sapiens
ucuagggaggcuucaagaagcuuauaauugug

SEQ ID NO: 367163 - RNA, 32 nt, Homo Sapiens
ccaguugcuaaucccggcucugccacucaauc

SEQ ID NO: 367164 - RNA, 32 nt, Homo Sapiens
ugagggggguggccacaggagauggggagagg

SEQ ID NO: 367165 - RNA, 32 nt, Homo Sapiens
agugaaaaaaauuuaugauauaauaaaucuuu

SEQ ID NO: 367166 - RNA, 32 nt, Homo Sapiens
uaagaaagaaagagacccgcuccuccacuuuc

SEQ ID NO: 367167 - RNA, 32 nt, Homo Sapiens
gaaggaagggaagauggaacaggcucagaucu

SEQ ID NO: 367168 - RNA, 32 nt, Homo Sapiens
ugacccauuauguccuaguuaaucaucauuuu

SEQ ID NO: 367169 - RNA, 32 nt, Homo Sapiens
guacaauuaacauuugagucugucugagucau

SEQ ID NO: 367170 - RNA, 32 nt, Homo Sapiens
cagccagguauuuuaagauucugcugcuguuu

SEQ ID NO: 367171 - RNA, 32 nt, Homo Sapiens
gcugccagggaagacagagcaggcuuugugag

SEQ ID NO: 367172 - RNA, 32 nt, Homo Sapiens
cgcugggccugaccggccccccagccccuaca

SEQ ID NO: 367173 - RNA, 32 nt, Homo Sapiens
aauaguuuuuaaaauaaaucucgauuuguuag

SEQ ID NO: 367174 - RNA, 32 nt, Homo Sapiens
guugccaucuaaaaauaaccucuauuuuaguu

SEQ ID NO: 367175 - RNA, 32 nt, Homo Sapiens
uacaugagauauucugauacaaacaugcaaug

SEQ ID NO: 367176 - RNA, 32 nt, Homo Sapiens
uucaagcaauccucccaccucaacccacaagu

SEQ ID NO: 367177 - RNA, 32 nt, Homo Sapiens
cgucauauaacucaagaauaaaugguguuuug

SEQ ID NO: 367178 - RNA, 32 nt, Homo Sapiens
acuuuuauuauuaaauuguuauaaguugguug

SEQ ID NO: 367179 - RNA, 32 nt, Homo Sapiens
ucugauauuugaaagcacuuuuguaguuuuga

SEQ ID NO: 367180 - RNA, 32 nt, Homo Sapiens
ccauccaccccugguuucuccuccugggaguc

SEQ ID NO: 367181 - RNA, 32 nt, Homo Sapiens
gcugcagggcuggcaaaccuccccuuagccag

SEQ ID NO: 367182 - RNA, 32 nt, Homo Sapiens
gauucagguucagaaacagcauauuuagaaaa

SEQ ID NO: 367183 - RNA, 32 nt, Homo Sapiens
cccacugcacgcugcagcagggcccagggagu

SEQ ID NO: 367184 - RNA, 32 nt, Homo Sapiens
ugcauaauucaggaacaaaaccagcuugcuuu

SEQ ID NO: 367185 - RNA, 32 nt, Homo Sapiens
aacaacuugcacaccucuacuccggagcugag

SEQ ID NO: 367186 - RNA, 32 nt, Homo Sapiens
ugaaagagcaagggaacuuaaaaaauaucacu

SEQ ID NO: 367187 - RNA, 32 nt, Homo Sapiens
guuugaguugcuaucaugucaaacgugaaaau

SEQ ID NO: 367188 - RNA, 32 nt, Homo Sapiens
ugacagggaaagggaggcagggacuuggggcu

SEQ ID NO: 367189 - RNA, 31 nt, Homo Sapiens
aaaugcacguuuaaaaaacguguugaaugua

SEQ ID NO: 367190 - RNA, 32 nt, Homo Sapiens
gaggaaaggaagggcugggaaagaccccagaa

SEQ ID NO: 367191 - RNA, 32 nt, Homo Sapiens
uaugcuuagccauauuuaaaucuuaaauuuaa

SEQ ID NO: 367192 - RNA, 32 nt, Homo Sapiens
uagcaggcucagaguuauuaaugaauuguacu

SEQ ID NO: 367193 - RNA, 30 nt, Homo Sapiens
uuugacuacuaauugggggaaauuuuagau

SEQ ID NO: 367194 - RNA, 32 nt, Homo Sapiens
uagauagggucucacuauauugcccagcucac

SEQ ID NO: 367195 - RNA, 32 nt, Homo Sapiens
guuuuuuacuaugcuuuggucuguaaaaauau

SEQ ID NO: 367196 - RNA, 32 nt, Homo Sapiens
gggaucuggugacgcuggggcuggaauuugac

SEQ ID NO: 367197 - RNA, 32 nt, Homo Sapiens
cgccggagggagaggggagcugcgggccagag

SEQ ID NO: 367198 - RNA, 32 nt, Homo Sapiens
caaaccugucuccuugauggccucaaccccau

SEQ ID NO: 367199 - RNA, 32 nt, Homo Sapiens
aauguuugaagaagagaauagugacaaguggg

SEQ ID NO: 367200 - RNA, 32 nt, Homo Sapiens
cacacagacucaggaagcugggggugucaggg

SEQ ID NO: 367201 - RNA, 32 nt, Homo Sapiens
guuggugccgccccgcacccccggcccaggcc

SEQ ID NO: 367202 - RNA, 32 nt, Homo Sapiens
gagaacugccccacccaguaucuucugugcca

SEQ ID NO: 367203 - RNA, 32 nt, Homo Sapiens
ucugucuccagaagcuucuagcucuggggucu

SEQ ID NO: 367204 - RNA, 32 nt, Homo Sapiens
acaagaaaugacugaaggaucaagacuagaac

SEQ ID NO: 367205 - RNA, 32 nt, Homo Sapiens
uuuugcuuugguuuuuaauuauagagagcaaa

SEQ ID NO: 367206 - RNA, 32 nt, Homo Sapiens
guacuucaguuauuguaaauagugagcuaaac

SEQ ID NO: 367207 - RNA, 32 nt, Homo Sapiens
auuuuaauuuaaaugacgcuuugcuaauuuua

SEQ ID NO: 367208 - RNA, 32 nt, Homo Sapiens
gagcuccggcccgggcgagcgggugcgucugc

SEQ ID NO: 367209 - RNA, 32 nt, Homo Sapiens
uugccacuacacaacuaugauggcaugugcuu

SEQ ID NO: 367210 - RNA, 30 nt, Homo Sapiens
aaauuaaauaaaagaaagaaugcaaaccag

SEQ ID NO: 367211 - RNA, 32 nt, Homo Sapiens
uaagguuuucuuuuuuguuuuaauggagaaua

SEQ ID NO: 367212 - RNA, 32 nt, Homo Sapiens
accugcuuuccacaguggcuaaacuaauuuac

SEQ ID NO: 367213 - RNA, 32 nt, Homo Sapiens
agcggcccaagccccaaccccaccucgagcuc

SEQ ID NO: 367214 - RNA, 32 nt, Homo Sapiens
acucaugcaguggucagggguuucgauuccag

SEQ ID NO: 367215 - RNA, 32 nt, Homo Sapiens
gauguucuauaagugugagaaaguauaugcuu

SEQ ID NO: 367216 - RNA, 32 nt, Homo Sapiens
uauccaccucgcgcucuguugcaggcucaacg

SEQ ID NO: 367217 - RNA, 28 nt, Homo Sapiens
auaaggcuggcuaccagcuuugacacag

SEQ ID NO: 367218 - RNA, 32 nt, Homo Sapiens
aagcgccagcaucuccaccuuccccggaagcc

SEQ ID NO: 367219 - RNA, 31 nt, Homo Sapiens
gccagcacauccugccugcuguugcagccug

SEQ ID NO: 367220 - RNA, 32 nt, Homo Sapiens
gcucaguguggugcuccuggagugccuggccc

SEQ ID NO: 367221 - RNA, 32 nt, Homo Sapiens
ggccuggugugguggcucacgccuguagcccc

SEQ ID NO: 367222 - RNA, 32 nt, Homo Sapiens
ccugaggccaggacgucugggguguggggauu

SEQ ID NO: 367223 - RNA, 32 nt, Homo Sapiens
aggcaacagugggcagacaaagggcucccugg

SEQ ID NO: 367224 - RNA, 32 nt, Homo Sapiens
caagggucuagggagagacccuuguuugauuu

SEQ ID NO: 367225 - RNA, 32 nt, Homo Sapiens
uaccuggaaauuucagacuucucuaucaacuc

SEQ ID NO: 367226 - RNA, 32 nt, Homo Sapiens
gccccgaggacuguccggaggaggguggccag

SEQ ID NO: 367227 - RNA, 32 nt, Homo Sapiens
uauuuuagauauacucuuucucaagggaagug

SEQ ID NO: 367228 - RNA, 32 nt, Homo Sapiens
gcagagaaauauaguuuccuuuccuaggauug

SEQ ID NO: 367229 - RNA, 32 nt, Homo Sapiens
acgccgccgccacgaccgacuccggagccacg

SEQ ID NO: 367230 - RNA, 32 nt, Homo Sapiens
cccugucaccaagcucacaguuccucgcccug

SEQ ID NO: 367231 - RNA, 32 nt, Homo Sapiens
caagggucuuauuuuucuuauucaugucugua

SEQ ID NO: 367232 - RNA, 32 nt, Homo Sapiens
caauuuuugauuuauaaaguacucacacaagu

SEQ ID NO: 367233 - RNA, 32 nt, Homo Sapiens
uauucuguaaaaaggugacuguuuuauaaauu

SEQ ID NO: 367234 - RNA, 32 nt, Homo Sapiens
uaauugugaguuaauuugauaaagaucuccag

SEQ ID NO: 367235 - RNA, 32 nt, Homo Sapiens
gguuucaccauguuggucaggcuggucucgau

SEQ ID NO: 367236 - RNA, 31 nt, Homo Sapiens
ggccagccagacugccuguccacaugcgugu

SEQ ID NO: 367237 - RNA, 32 nt, Homo Sapiens
accucccucacagcagaaacuagacgucaggu

SEQ ID NO: 367238 - RNA, 32 nt, Homo Sapiens
acaggcgugugagccaccacgcccggccauga

SEQ ID NO: 367239 - RNA, 32 nt, Homo Sapiens
cgucuccgccggggcgcugcggagaggaggcc

SEQ ID NO: 367240 - RNA, 32 nt, Homo Sapiens
cccagucccgccugcaugugccugcagccacc

SEQ ID NO: 367241 - RNA, 32 nt, Homo Sapiens
gcaucauuauuuuuagccuuuccuguuaauaa

SEQ ID NO: 367242 - RNA, 32 nt, Homo Sapiens
aucggcacugcaggcccuccccacccaggacu

SEQ ID NO: 367243 - RNA, 32 nt, Homo Sapiens
cuuugccuaaaaauauugcagugacuuuuuag

SEQ ID NO: 367244 - RNA, 32 nt, Homo Sapiens
caagauccaauauaucuuaugauaaaauuuau

SEQ ID NO: 367245 - RNA, 32 nt, Homo Sapiens
ccccggccagcgcccaccccagccuucugccc

SEQ ID NO: 367246 - RNA, 32 nt, Homo Sapiens
cucuccuugacaagggcugagcucucgggcac

SEQ ID NO: 367247 - RNA, 32 nt, Homo Sapiens
caccuccccauucacacccccauuccuccugg

SEQ ID NO: 367248 - RNA, 32 nt, Homo Sapiens
aucuagguccuauuacuaaucuaugucugcaa

SEQ ID NO: 367249 - RNA, 32 nt, Homo Sapiens
gauuucaaacccaauuauguacagggagcugu

SEQ ID NO: 367250 - RNA, 32 nt, Homo Sapiens
uucuuccauguugauuuaauucuaagaugaac

SEQ ID NO: 367251 - RNA, 32 nt, Homo Sapiens
cccagaacaugauggauucccagucauauucu

SEQ ID NO: 367252 - RNA, 32 nt, Homo Sapiens
aauccacaccucagcaggaucaaggaggugau

SEQ ID NO: 367253 - RNA, 32 nt, Homo Sapiens
cugcaugugaccaaggaccugcugugggagcc

SEQ ID NO: 367254 - RNA, 30 nt, Homo Sapiens
auuuaaggacuguugggggaaauugaucac

SEQ ID NO: 367255 - RNA, 32 nt, Homo Sapiens
gauggucuugcuggauggggacacggucacau

SEQ ID NO: 367256 - RNA, 32 nt, Homo Sapiens
ugugcucccuccucggcggccacgcgcgcucg

SEQ ID NO: 367257 - RNA, 32 nt, Homo Sapiens
augaguguguguccccccuucuccgagacgcu

SEQ ID NO: 367258 - RNA, 32 nt, Homo Sapiens
aaaacaagaggcugaggauugcguuagagaua

SEQ ID NO: 367259 - RNA, 32 nt, Homo Sapiens
aagggaauuugcuggugaaaagaggcuggauc

SEQ ID NO: 367260 - RNA, 32 nt, Homo Sapiens
acacuuacagcuuuucauuugaucaggucuga

SEQ ID NO: 367261 - RNA, 32 nt, Homo Sapiens
cagagcugcuuccucagcaacaggagccggac

SEQ ID NO: 367262 - RNA, 32 nt, Homo Sapiens
accccucguggcggucccgcccguccccgcgc

SEQ ID NO: 367263 - RNA, 32 nt, Homo Sapiens
gauugcacuuuuuguuugggguuuauucagcu

SEQ ID NO: 367264 - RNA, 32 nt, Homo Sapiens
aucuguuccuccugggaagaugcagaggcuca

SEQ ID NO: 367265 - RNA, 32 nt, Homo Sapiens
gcgcccauaaaugaucucuagaaggacuguua

SEQ ID NO: 367266 - RNA, 32 nt, Homo Sapiens
uuuuuuccagauuuaaagacuaauaggagaug

SEQ ID NO: 367267 - RNA, 32 nt, Homo Sapiens
acuugcugagaggaggcggggaggcgcggagc

SEQ ID NO: 367268 - RNA, 32 nt, Homo Sapiens
cagaggagugaagcuggaaccaucagggaaca

SEQ ID NO: 367269 - RNA, 32 nt, Homo Sapiens
gugaccuuggcccaucuccacccuccaaccug

SEQ ID NO: 367270 - RNA, 32 nt, Homo Sapiens
caguuauuuuaaaaucugauccccucucuacc

SEQ ID NO: 367271 - RNA, 32 nt, Homo Sapiens
cacuggugguaguuugcuagugcuucuaaaag

SEQ ID NO: 367272 - RNA, 32 nt, Homo Sapiens
cuaaaagccgguuccuugaaaagagugauaaa

SEQ ID NO: 367273 - RNA, 32 nt, Homo Sapiens
ggaggaggagcaggggcguggagggcguggag

SEQ ID NO: 367274 - RNA, 32 nt, Homo Sapiens
agggugcacgucuucccuccugucccagcucc

SEQ ID NO: 367275 - RNA, 32 nt, Homo Sapiens
ccgcgggcugggagccggggcccgcaggugga

SEQ ID NO: 367276 - RNA, 30 nt, Homo Sapiens
cgcggcggcgguggcggcggggaagauggc

SEQ ID NO: 367277 - RNA, 32 nt, Homo Sapiens
ucagggcgacaggcccggggcuacgcgaagaa

SEQ ID NO: 367278 - RNA, 32 nt, Homo Sapiens
cccccgcccuccccacccagcuccgcuucuug

SEQ ID NO: 367279 - RNA, 32 nt, Homo Sapiens
gaacgaccgaggaggaggagcgcucugcccgg

SEQ ID NO: 367280 - RNA, 32 nt, Homo Sapiens
gugcacccacccacccaccacacuggacuuuu

SEQ ID NO: 367281 - RNA, 32 nt, Homo Sapiens
guugaguaacaaguugguacaguuacuuuagc

SEQ ID NO: 367282 - RNA, 32 nt, Homo Sapiens
gaagaagggacaggauauacagacgggggcag

SEQ ID NO: 367283 - RNA, 32 nt, Homo Sapiens
ugagaaaguuuccaucuuauucuuuuauaugg

SEQ ID NO: 367284 - RNA, 32 nt, Homo Sapiens
gagguagugcuggauaugugucuuacaaauuu

SEQ ID NO: 367285 - RNA, 32 nt, Homo Sapiens
agauaagucccggcgcuugcgcggcggcggcu

SEQ ID NO: 367286 - RNA, 32 nt, Homo Sapiens
agaccagaauuuauucuugguuugucaagcca

SEQ ID NO: 367287 - RNA, 32 nt, Homo Sapiens
accaguagcccauuugcagcuaguacaaacac

SEQ ID NO: 367288 - RNA, 32 nt, Homo Sapiens
agcauuucuuuuuuuuuuuucuugagacggag

SEQ ID NO: 367289 - RNA, 32 nt, Homo Sapiens
cccugcacggacccucacagucaggacaaggg

SEQ ID NO: 367290 - RNA, 32 nt, Homo Sapiens
agcuggaauucauuuucuuuucguuucauguu

SEQ ID NO: 367291 - RNA, 32 nt, Homo Sapiens
ccacugggcuccuggguaguguguguggcagg

SEQ ID NO: 367292 - RNA, 32 nt, Homo Sapiens
ugagggaaccaucagcuagcagaugagcaccg

SEQ ID NO: 367293 - RNA, 32 nt, Homo Sapiens
cucaccaaucccgugcgccgcggcugggccgu

SEQ ID NO: 367294 - RNA, 32 nt, Homo Sapiens
agcaugggaaauguaaaggcagucuuucccug

SEQ ID NO: 367295 - RNA, 32 nt, Homo Sapiens
ccgcucccgcggcuccacccgacccagacccu

SEQ ID NO: 367296 - RNA, 32 nt, Homo Sapiens
gagucccuggggagcagauggacccuacugga

SEQ ID NO: 367297 - RNA, 32 nt, Homo Sapiens
guuguaagugguuuuuaauggucuggaugcca

SEQ ID NO: 367298 - RNA, 32 nt, Homo Sapiens
uucaggugaaauaaauggguuacuucugccag

SEQ ID NO: 367299 - RNA, 32 nt, Homo Sapiens
cuguaaugcgugaacuaacaaaccugugaacu

SEQ ID NO: 367300 - RNA, 32 nt, Homo Sapiens
gauucgggagggcugagggcgcggccgagaga

SEQ ID NO: 367301 - RNA, 32 nt, Homo Sapiens
gccgaccaguucgcagcuccgcgccacggcag

SEQ ID NO: 367302 - RNA, 32 nt, Homo Sapiens
acacugaaagaaaguugugucaauuuuacuca

SEQ ID NO: 367303 - RNA, 32 nt, Homo Sapiens
gucguugggagcacgcuccuucugccugauug

SEQ ID NO: 367304 - RNA, 32 nt, Homo Sapiens
cacuaggcauuuggcaauucuuagagacauuu

SEQ ID NO: 367305 - RNA, 32 nt, Homo Sapiens
cggaagauuuuuuggaggaaguaacagcuacg

SEQ ID NO: 367306 - RNA, 32 nt, Homo Sapiens
cguguccccucuauguucuccuuggagagggg

SEQ ID NO: 367307 - RNA, 32 nt, Homo Sapiens
ggacggucacuuuuuccaacaaaacccacucc

SEQ ID NO: 367308 - RNA, 32 nt, Homo Sapiens
aaguauggccaaaagcacuuuaaugcugcuga

SEQ ID NO: 367309 - RNA, 30 nt, Homo Sapiens
accaaaaugugcccugccucaacucuggcc

SEQ ID NO: 367310 - RNA, 32 nt, Homo Sapiens
ggcugggcaaggaaaaagaaaauaaagacaac

SEQ ID NO: 367311 - RNA, 32 nt, Homo Sapiens
aggucuuccugcuuuccaugggcccgcugccu

SEQ ID NO: 367312 - RNA, 32 nt, Homo Sapiens
ugcucgauaugguuguguuguuuucuagcagu

SEQ ID NO: 367313 - RNA, 32 nt, Homo Sapiens
aaaauuccaaaaaaucugaaguuuuagcuaau

SEQ ID NO: 367314 - RNA, 32 nt, Homo Sapiens
agugcagccaguccgcuaaaaauacacugggc

SEQ ID NO: 367315 - RNA, 32 nt, Homo Sapiens
gugacuaccugcuccuggggccccacagaguc

SEQ ID NO: 367316 - RNA, 30 nt, Homo Sapiens
agagugaccaagcagcaccagcaggccugc

SEQ ID NO: 367317 - RNA, 32 nt, Homo Sapiens
ccaugugugguacauuugguccagccacagcc

SEQ ID NO: 367318 - RNA, 29 nt, Homo Sapiens
uaagauaaaauuguauauuuuuuccaucu

SEQ ID NO: 367319 - RNA, 32 nt, Homo Sapiens
uccuggaagaucuggauuugguggaagaccag

SEQ ID NO: 367320 - RNA, 32 nt, Homo Sapiens
uugcuugagccuggggaguucaaggccagcau

SEQ ID NO: 367321 - RNA, 32 nt, Homo Sapiens
cacuagagggccuggaggaagaugaggaugau

SEQ ID NO: 367322 - RNA, 32 nt, Homo Sapiens
gcugcuauuaaacauauuuguaaaugguuuaa

SEQ ID NO: 367323 - RNA, 32 nt, Homo Sapiens
caccucuucucugccgcccaccaccggccgac

SEQ ID NO: 367324 - RNA, 32 nt, Homo Sapiens
caggaacuguggaacugugauguugucuuuug

SEQ ID NO: 367325 - RNA, 32 nt, Homo Sapiens
ggcauccagggccaggcaccgccuaguuccca

SEQ ID NO: 367326 - RNA, 32 nt, Homo Sapiens
caacagacacaguguaucccccugcuucuguu

SEQ ID NO: 367327 - RNA, 32 nt, Homo Sapiens
gacggagucguuuucugccacccaggcuggag

SEQ ID NO: 367328 - RNA, 32 nt, Homo Sapiens
uagaagucugucacggcaagcuacugcagaau

SEQ ID NO: 367329 - RNA, 32 nt, Homo Sapiens
ucccuucuccugugaugugucaguuaguguag

SEQ ID NO: 367330 - RNA, 32 nt, Homo Sapiens
cuuugucguuuuucuuuuuuaaacaaaacaug

SEQ ID NO: 367331 - RNA, 32 nt, Homo Sapiens
cagugguggaccugaccugcuccuggccccuu

SEQ ID NO: 367332 - RNA, 32 nt, Homo Sapiens
cuuguguacacacacacacacacacacacaca

SEQ ID NO: 367333 - RNA, 32 nt, Homo Sapiens
caaguguuuaggaaacaagcauagaagcauua

SEQ ID NO: 367334 - RNA, 32 nt, Homo Sapiens
uacagugcuaaaaugauuucugauaaaauggu

SEQ ID NO: 367335 - RNA, 30 nt, Homo Sapiens
acccaaauuaaagagaggauaugcaaaggc

SEQ ID NO: 367336 - RNA, 32 nt, Homo Sapiens
gaacauuucuucacuuuguucuuuuucugaag

SEQ ID NO: 367337 - RNA, 32 nt, Homo Sapiens
aagaaacauaaagugguucucuuaauaaaacu

SEQ ID NO: 367338 - RNA, 32 nt, Homo Sapiens
acaaagaggccgcuggggacggaggcuuugau

SEQ ID NO: 367339 - RNA, 32 nt, Homo Sapiens
guccaugcucaagaugggucccuggccaccau

SEQ ID NO: 367340 - RNA, 32 nt, Homo Sapiens
uuguccagucaguguucuuucaucucaccaca

SEQ ID NO: 367341 - RNA, 31 nt, Homo Sapiens
uugggcauaaauuguaacauaaguguauguu

SEQ ID NO: 367342 - RNA, 32 nt, Homo Sapiens
ggaagaggaugcugaggccuucuuccaagacc

SEQ ID NO: 367343 - RNA, 32 nt, Homo Sapiens
auugcucaaacacacaugcuguauaauuugug

SEQ ID NO: 367344 - RNA, 32 nt, Homo Sapiens
cguaaguacuuugauuauuuaauauuuguaag

SEQ ID NO: 367345 - RNA, 32 nt, Homo Sapiens
guucucugccuugucucucuuugucuuaaaau

SEQ ID NO: 367346 - RNA, 32 nt, Homo Sapiens
uggcuuggcucgggauccuuggcaguuccccc

SEQ ID NO: 367347 - RNA, 32 nt, Homo Sapiens
ggaacaaauaaguggaagggcagcuauuacca

SEQ ID NO: 367348 - RNA, 32 nt, Homo Sapiens
cuuuucucagcacguguuccucacuagaagaa

SEQ ID NO: 367349 - RNA, 32 nt, Homo Sapiens
aaagugaguuccaggaagguuagaggccacag

SEQ ID NO: 367350 - RNA, 32 nt, Homo Sapiens
aagucaccacacuccagccugggugacagagc

SEQ ID NO: 367351 - RNA, 32 nt, Homo Sapiens
ucacccgagacugucacaggcuugccauaccu

SEQ ID NO: 367352 - RNA, 32 nt, Homo Sapiens
ggccaggcgcgguggcucacguuuguaauccc

SEQ ID NO: 367353 - RNA, 32 nt, Homo Sapiens
ugcacuccagcaugcaugacagagugagaccc

SEQ ID NO: 367354 - RNA, 32 nt, Homo Sapiens
gauccccuaggccuaucugagacccauacagg

SEQ ID NO: 367355 - RNA, 32 nt, Homo Sapiens
ucugaaggcccucccggcaccucugccaaggc

SEQ ID NO: 367356 - RNA, 32 nt, Homo Sapiens
uguuuuuagagcaugcaaucuuaacuuuguua

SEQ ID NO: 367357 - RNA, 32 nt, Homo Sapiens
uauauauuuauuucuaaauguuuugacugggc

SEQ ID NO: 367358 - RNA, 32 nt, Homo Sapiens
cagcuaucuuagcuccuccucuccccucuccu

SEQ ID NO: 367359 - RNA, 32 nt, Homo Sapiens
ggaccagccugggcuauauagcaagaccccau

SEQ ID NO: 367360 - RNA, 32 nt, Homo Sapiens
cuggaugggacacguggggagugggguggggg

SEQ ID NO: 367361 - RNA, 32 nt, Homo Sapiens
cgccaggccuggaagcgcuggugcacgcagau

SEQ ID NO: 367362 - RNA, 32 nt, Homo Sapiens
aguagaauuuaaaacuuggaugcuuaagaggc

SEQ ID NO: 367363 - RNA, 32 nt, Homo Sapiens
ggccacauucccgcccuccugggcagauuggg

SEQ ID NO: 367364 - RNA, 32 nt, Homo Sapiens
cagagcugcucccgaacuugugaccuucucug

SEQ ID NO: 367365 - RNA, 32 nt, Homo Sapiens
gucuuucuuauguuucuguguuuuugguaugc

SEQ ID NO: 367366 - RNA, 32 nt, Homo Sapiens
acaguuuccuaagcgcauaguuuuugguccug

SEQ ID NO: 367367 - RNA, 32 nt, Homo Sapiens
cugcccugugccccggcccaccuggcugccca

SEQ ID NO: 367368 - RNA, 32 nt, Homo Sapiens
aacaagaggcaucugcuagaaaacauucuauu

SEQ ID NO: 367369 - RNA, 32 nt, Homo Sapiens
accucgccuccagcugaccugcccuguccucu

SEQ ID NO: 367370 - RNA, 32 nt, Homo Sapiens
gaguggggcugugccaugagaccuccaguauu

SEQ ID NO: 367371 - RNA, 32 nt, Homo Sapiens
cuguauauaaaauuauuuuuaucaugauguau

SEQ ID NO: 367372 - RNA, 32 nt, Homo Sapiens
gggcaccuugugcuaaggccaaggcugagcga

SEQ ID NO: 367373 - RNA, 32 nt, Homo Sapiens
uuuuuuguuuuauuuuuucucuagcuuauccc

SEQ ID NO: 367374 - RNA, 32 nt, Homo Sapiens
guuccuggacagccuucuacugccugggaagu

SEQ ID NO: 367375 - RNA, 32 nt, Homo Sapiens
ggcagaucuugguagcacuuuauauguucacc

SEQ ID NO: 367376 - RNA, 32 nt, Homo Sapiens
cugggccugcagccuuccucuucugggacugc

SEQ ID NO: 367377 - RNA, 32 nt, Homo Sapiens
ccuuggugccccccuccucugguggucagcuc

SEQ ID NO: 367378 - RNA, 32 nt, Homo Sapiens
cuccacaggcagcccgaaugggcaugcacagc

SEQ ID NO: 367379 - RNA, 32 nt, Homo Sapiens
gaagcccggguggcccgagggcgcgacucuag

SEQ ID NO: 367380 - RNA, 32 nt, Homo Sapiens
uguucacauguccagcguuggugcuggcuguc

SEQ ID NO: 367381 - RNA, 32 nt, Homo Sapiens
augucuaaaaauuuucaggaaaauggaaucuu

SEQ ID NO: 367382 - RNA, 32 nt, Homo Sapiens
gucuuuauuuaaaaugaugaaucuagucugaa

SEQ ID NO: 367383 - RNA, 32 nt, Homo Sapiens
auucaaucauaggagcaaagaacuugcaaaau

SEQ ID NO: 367384 - RNA, 32 nt, Homo Sapiens
ggaggagccggcccucacgcccgccccgcgcc

SEQ ID NO: 367385 - RNA, 32 nt, Homo Sapiens
ucuuuugaccuguggugcaaaagcagaaaaua

SEQ ID NO: 367386 - RNA, 32 nt, Homo Sapiens
gggacagccaccuggugcugacauggacgggc

SEQ ID NO: 367387 - RNA, 32 nt, Homo Sapiens
uaugaagaugcuucagagcucaugcgcguuac

SEQ ID NO: 367388 - RNA, 32 nt, Homo Sapiens
cagagaaagaggccucuuggcaaagggccucu

SEQ ID NO: 367389 - RNA, 32 nt, Homo Sapiens
guuuuagggagcaacaguauuuaacuggaaga

SEQ ID NO: 367390 - RNA, 32 nt, Homo Sapiens
cccccaacucgcguccugcaaaggccgccggg

SEQ ID NO: 367391 - RNA, 32 nt, Homo Sapiens
uacuuucccacccgcuuucucucuggucuucu

SEQ ID NO: 367392 - RNA, 32 nt, Homo Sapiens
uggaccucuagcgcccuccccccaccccgccg

SEQ ID NO: 367393 - RNA, 32 nt, Homo Sapiens
cgcucuccccguguccucuccacgacucgcuc

SEQ ID NO: 367394 - RNA, 32 nt, Homo Sapiens
cuuggucuccuucccaggaucccacaccaugc

SEQ ID NO: 367395 - RNA, 32 nt, Homo Sapiens
acuguauauagaagucuaaaacacaccuaaga

SEQ ID NO: 367396 - RNA, 32 nt, Homo Sapiens
gcauuuuuucuuugcuuuuauaaaauaaaugu

SEQ ID NO: 367397 - RNA, 32 nt, Homo Sapiens
ggaggggcggggggcuggugcggaaucggaau

SEQ ID NO: 367398 - RNA, 32 nt, Homo Sapiens
gggcuucgcggggccuggcccaaggucuccag

SEQ ID NO: 367399 - RNA, 32 nt, Homo Sapiens
ggggccacuuggaccaagcuccagucaguuga

SEQ ID NO: 367400 - RNA, 32 nt, Homo Sapiens
gucuggccuggccguguggugaugaggcuuag

SEQ ID NO: 367401 - RNA, 32 nt, Homo Sapiens
guggggcagguuggcacuucccucuggcucuc

SEQ ID NO: 367402 - RNA, 32 nt, Homo Sapiens
uggcuuauguguuugaacucugucguguuuaa

SEQ ID NO: 367403 - RNA, 32 nt, Homo Sapiens
aauuagccaggugugguggugcaugccugugg

SEQ ID NO: 367404 - RNA, 32 nt, Homo Sapiens
ugcacgaccugcuccuacagccggcgauccac

SEQ ID NO: 367405 - RNA, 32 nt, Homo Sapiens
aauauucggucuuuugggacuggcuucccaaa

SEQ ID NO: 367406 - RNA, 32 nt, Homo Sapiens
guccgaaagcuugaaucuguuccuccucgaau

SEQ ID NO: 367407 - RNA, 32 nt, Homo Sapiens
uguccuagucggucuaucuggacuugcccuug

SEQ ID NO: 367408 - RNA, 32 nt, Homo Sapiens
agcccaaaacaucagccuaauggcucauguca

SEQ ID NO: 367409 - RNA, 32 nt, Homo Sapiens
cagccggccaguccucccggaggagaaggcgc

SEQ ID NO: 367410 - RNA, 32 nt, Homo Sapiens
ugggcccugcugucacguggcuggugcggcuu

SEQ ID NO: 367411 - RNA, 32 nt, Homo Sapiens
ccuugaguuuugcuguugccaaccuaaaacau

SEQ ID NO: 367412 - RNA, 32 nt, Homo Sapiens
gcuaggagcugaugcugcaucguaauaacauu

SEQ ID NO: 367413 - RNA, 32 nt, Homo Sapiens
auugauuuuuauuugacucuguggcucuaaga

SEQ ID NO: 367414 - RNA, 32 nt, Homo Sapiens
agacucuagaggcguggaccaaggggcaugga

SEQ ID NO: 367415 - RNA, 32 nt, Homo Sapiens
ggccgucuggagcucccccgcgcggacgaugc

SEQ ID NO: 367416 - RNA, 32 nt, Homo Sapiens
ucuacuaaaaauacaaaaauuaucugggcuug

SEQ ID NO: 367417 - RNA, 32 nt, Homo Sapiens
ugugaacuuggaagaaagaauaggugcacaca

SEQ ID NO: 367418 - RNA, 30 nt, Homo Sapiens
aaaaauaaaaagcagcccugcaucaauccc

SEQ ID NO: 367419 - RNA, 32 nt, Homo Sapiens
auuagcagcucuucaucagccugcugucuacu

SEQ ID NO: 367420 - RNA, 32 nt, Homo Sapiens
cugauugcugauugcaguaaacaguugcugua

SEQ ID NO: 367421 - RNA, 32 nt, Homo Sapiens
aaccaaagguuuugcagccgccgaaaaacagg

SEQ ID NO: 367422 - RNA, 32 nt, Homo Sapiens
ucuuuaucgugacuccacggagacccacccuc

SEQ ID NO: 367423 - RNA, 32 nt, Homo Sapiens
gaaagaugacauguauuugcacaaaaauucuc

SEQ ID NO: 367424 - RNA, 32 nt, Homo Sapiens
aaccucgugggcucagcccgggagaaagggcc

SEQ ID NO: 367425 - RNA, 32 nt, Homo Sapiens
agugaagauucuuucagcuguuuguguaaggc

SEQ ID NO: 367426 - RNA, 32 nt, Homo Sapiens
aguggaagaagcagaacccggcugggcccccg

SEQ ID NO: 367427 - RNA, 32 nt, Homo Sapiens
ccuguggccaugagcccuccccggugcuccug

SEQ ID NO: 367428 - RNA, 32 nt, Homo Sapiens
ugaagaugaggauaagaaacaaggaaaaugaa

SEQ ID NO: 367429 - RNA, 32 nt, Homo Sapiens
uaagguaaauguuuaagcacacagugaacuuc

SEQ ID NO: 367430 - RNA, 32 nt, Homo Sapiens
ucaggguguucuuguccucaucuacccucuaa

SEQ ID NO: 367431 - RNA, 32 nt, Homo Sapiens
gccccaaacccaccuaccuagcaaggcucaac

SEQ ID NO: 367432 - RNA, 32 nt, Homo Sapiens
cccuagaaacagauauagaacaauggaaguga

SEQ ID NO: 367433 - RNA, 32 nt, Homo Sapiens
gcugccuaauuaaugaaagaugaaaauaggaa

SEQ ID NO: 367434 - RNA, 32 nt, Homo Sapiens
gaauauguuucauuuguuccggugccaagaau

SEQ ID NO: 367435 - RNA, 32 nt, Homo Sapiens
cggcugugaugaugacauugguggcaaggaau

SEQ ID NO: 367436 - RNA, 32 nt, Homo Sapiens
cuggcuguaacacauuucuacucugagaucuu

SEQ ID NO: 367437 - RNA, 32 nt, Homo Sapiens
cgucaagugcgguggugguggcggcggcggcg

SEQ ID NO: 367438 - RNA, 32 nt, Homo Sapiens
gccugagcccgcugcgcagaggcgcggcggcu

SEQ ID NO: 367439 - RNA, 32 nt, Homo Sapiens
augaguucagacccuggggccuggacauaaga

SEQ ID NO: 367440 - RNA, 29 nt, Homo Sapiens
cuccaugggggacagcuggacggugucua

SEQ ID NO: 367441 - RNA, 32 nt, Homo Sapiens
uaucaggauaaaacauuuugacacaucguaaa

SEQ ID NO: 367442 - RNA, 32 nt, Homo Sapiens
ugguggucuccauggcaacuuggagccagcca

SEQ ID NO: 367443 - RNA, 32 nt, Homo Sapiens
aaacagguacaguguuuuuuaccagcuuuaua

SEQ ID NO: 367444 - RNA, 32 nt, Homo Sapiens
ggcagcccaagagcucagggagccagggaccc

SEQ ID NO: 367445 - RNA, 32 nt, Homo Sapiens
gacagaggcagacgccggggcuggcggcgaug

SEQ ID NO: 367446 - RNA, 32 nt, Homo Sapiens
ggcgccacccucgggccccuggagcggggcac

SEQ ID NO: 367447 - RNA, 32 nt, Homo Sapiens
uaagccccuaaaaugucgagauuuguacaaga

SEQ ID NO: 367448 - RNA, 32 nt, Homo Sapiens
cucaguaaacucccgagggauugcaagcuggc

SEQ ID NO: 367449 - RNA, 32 nt, Homo Sapiens
cgcgcguuucuggcccugccagugucuccgcc

SEQ ID NO: 367450 - RNA, 32 nt, Homo Sapiens
uucaugggauugugagcugcacugcuugugga

SEQ ID NO: 367451 - RNA, 32 nt, Homo Sapiens
ggccgcugcccccucgucgccgcaucacacuc

SEQ ID NO: 367452 - RNA, 32 nt, Homo Sapiens
ccagccccuggccuguuauacaccccuuuuca

SEQ ID NO: 367453 - RNA, 32 nt, Homo Sapiens
ccugcaucaguucuugguuuugccuaucuacc

SEQ ID NO: 367454 - RNA, 32 nt, Homo Sapiens
cugaagauuugccugcccucagugguuaacuu

SEQ ID NO: 367455 - RNA, 32 nt, Homo Sapiens
cagcaucguaccugugcaguuccacuaugugu

SEQ ID NO: 367456 - RNA, 32 nt, Homo Sapiens
gcuuuaguauuguaaaauaaacaugagaacaa

SEQ ID NO: 367457 - RNA, 32 nt, Homo Sapiens
gcaaaacagugguacagacauggagucuagaa

SEQ ID NO: 367458 - RNA, 27 nt, Homo Sapiens
gagaagagcuucuucagccaccuucug

SEQ ID NO: 367459 - RNA, 32 nt, Homo Sapiens
uuuccaaaacaguuaaauugucuguuuggauu

SEQ ID NO: 367460 - RNA, 32 nt, Homo Sapiens
cauauuuauuaagauuguauuauuggaaaugu

SEQ ID NO: 367461 - RNA, 32 nt, Homo Sapiens
gagcuggucucugggcugggggcccccgggcc

SEQ ID NO: 367462 - RNA, 32 nt, Homo Sapiens
ucacugacugccgccgauuccacaccagacug

SEQ ID NO: 367463 - RNA, 32 nt, Homo Sapiens
guaccucugugguuaaaaauggaaacuguucu

SEQ ID NO: 367464 - RNA, 32 nt, Homo Sapiens
gaggcuacacagcugcccacuccuccugggga

SEQ ID NO: 367465 - RNA, 32 nt, Homo Sapiens
uggauguuauuggcuaauccacugcaugguuu

SEQ ID NO: 367466 - RNA, 32 nt, Homo Sapiens
aggcgucgaccugguggggcccggggccaagc

SEQ ID NO: 367467 - RNA, 32 nt, Homo Sapiens
accuggacaccguguagaaugcuugauuacuu

SEQ ID NO: 367468 - RNA, 32 nt, Homo Sapiens
cauuggugcacaugugcguguuuacaugugua

SEQ ID NO: 367469 - RNA, 32 nt, Homo Sapiens
ccucacccaccacacaccccugauccucuggc

SEQ ID NO: 367470 - RNA, 32 nt, Homo Sapiens
gagccaggccugcguccggacaucagccggag

SEQ ID NO: 367471 - RNA, 32 nt, Homo Sapiens
aaugauguuguaauaaaauacucucauuuccu

SEQ ID NO: 367472 - RNA, 32 nt, Homo Sapiens
cggcggcgcgagaacgacccggcggccaguuc

SEQ ID NO: 367473 - RNA, 32 nt, Homo Sapiens
aagagaaaugauaaugcuuccaaacuguagcu

SEQ ID NO: 367474 - RNA, 32 nt, Homo Sapiens
uucaagcuaugaaauugugaucuagcugcugg

SEQ ID NO: 367475 - RNA, 32 nt, Homo Sapiens
caugggaccgcccacaugggaccgcccacaua

SEQ ID NO: 367476 - RNA, 32 nt, Homo Sapiens
ugccagcggcuuuggcugggguuggucugaag

SEQ ID NO: 367477 - RNA, 32 nt, Homo Sapiens
aaauuagccgggcauggugacacacaccugua

SEQ ID NO: 367478 - RNA, 31 nt, Homo Sapiens
gacucuaucugagccauuagaauaaugaaua

SEQ ID NO: 367479 - RNA, 32 nt, Homo Sapiens
uaacaagggaugccucuugggauagaacuagg

SEQ ID NO: 367480 - RNA, 32 nt, Homo Sapiens
ucugcuggaggaagcgaggaggcggccggccg

SEQ ID NO: 367481 - RNA, 32 nt, Homo Sapiens
gaaggacacgugugacccuuaagaauccaguu

SEQ ID NO: 367482 - RNA, 32 nt, Homo Sapiens
ucugcccuggggaugggccggguuggggggug

SEQ ID NO: 367483 - RNA, 32 nt, Homo Sapiens
guccuccccuccccggcccucccacagcugcu

SEQ ID NO: 367484 - RNA, 32 nt, Homo Sapiens
aacugguuugugggacaggggcagcuugcuca

SEQ ID NO: 367485 - RNA, 32 nt, Homo Sapiens
uagcucugcuccagguggagaagggggaugau

SEQ ID NO: 367486 - RNA, 32 nt, Homo Sapiens
ggacagaaaauuuacgaaaaucuuagauuuug

SEQ ID NO: 367487 - RNA, 32 nt, Homo Sapiens
gcccaguaauuuccugaccauuuaugcaucag

SEQ ID NO: 367488 - RNA, 32 nt, Homo Sapiens
gagacucgcggaaggccccguccccagcggag

SEQ ID NO: 367489 - RNA, 32 nt, Homo Sapiens
cccuggaggaucuggagccaguaccgagaacu

SEQ ID NO: 367490 - RNA, 32 nt, Homo Sapiens
cccgagcgcgcccccuucgugcucucggccgc

SEQ ID NO: 367491 - RNA, 32 nt, Homo Sapiens
uacugccuccccugcugcuccuccugagccuc

SEQ ID NO: 367492 - RNA, 32 nt, Homo Sapiens
ugggcggggugguggggggugccugaggcacu

SEQ ID NO: 367493 - RNA, 32 nt, Homo Sapiens
ggggcugccuccccggcucccggugcagacac

SEQ ID NO: 367494 - RNA, 32 nt, Homo Sapiens
auaugaauuucagugauauuuucauccauuug

SEQ ID NO: 367495 - RNA, 32 nt, Homo Sapiens
gcccucuugcacuuccucucccagaacccagc

SEQ ID NO: 367496 - RNA, 32 nt, Homo Sapiens
ggccacauggguccaggccacccccucagccu

SEQ ID NO: 367497 - RNA, 32 nt, Homo Sapiens
uggccgcgacgcaggagcugcugcugcaguug

SEQ ID NO: 367498 - RNA, 32 nt, Homo Sapiens
ucccuauaagaguuucagcaugagcuuaauua

SEQ ID NO: 367499 - RNA, 32 nt, Homo Sapiens
auaauauacuaaaaugguaaguuuucuuguaa

SEQ ID NO: 367500 - RNA, 32 nt, Homo Sapiens
aacuugaggguggggggagggcaccggagccu

SEQ ID NO: 367501 - RNA, 32 nt, Homo Sapiens
uggacaauccucccuuuuaguagcagaguuga

SEQ ID NO: 367502 - RNA, 32 nt, Homo Sapiens
uuguuacucugcaacuaugugucaaggccuua

SEQ ID NO: 367503 - RNA, 32 nt, Homo Sapiens
gugaucccagguuuccuccuggcccgucccau

SEQ ID NO: 367504 - RNA, 32 nt, Homo Sapiens
gcaguuccaggccgaccucugcucuccacggc

SEQ ID NO: 367505 - RNA, 32 nt, Homo Sapiens
aagcaguugcugugguaccugcgcugcccgag

SEQ ID NO: 367506 - RNA, 32 nt, Homo Sapiens
cccugaggccagaggcggggccugggccggga

SEQ ID NO: 367507 - RNA, 32 nt, Homo Sapiens
uuucccuguggguggggagcuggggcaagaug

SEQ ID NO: 367508 - RNA, 32 nt, Homo Sapiens
uggaguugggauguggaaguggggcuggaaca

SEQ ID NO: 367509 - RNA, 32 nt, Homo Sapiens
gcaggcagguccugaggccugggguuggggug

SEQ ID NO: 367510 - RNA, 32 nt, Homo Sapiens
acaugcaaaaauagaaaauuauuuguuaaauu

SEQ ID NO: 367511 - RNA, 32 nt, Homo Sapiens
agaaaggcuggggcaugaguccugcuuggggu

SEQ ID NO: 367512 - RNA, 32 nt, Homo Sapiens
gcagccgccgccgcgccgccgucgcucuccaa

SEQ ID NO: 367513 - RNA, 32 nt, Homo Sapiens
agaagagcacugggcuaauuuguauguuucca

SEQ ID NO: 367514 - RNA, 32 nt, Homo Sapiens
uagucugugggugaauggauguguguugaauu

SEQ ID NO: 367515 - RNA, 32 nt, Homo Sapiens
aaaggguucacaguaacagacuaauuagagca

SEQ ID NO: 367516 - RNA, 32 nt, Homo Sapiens
ccggugccagcaugagagcaggcacagaagga

SEQ ID NO: 367517 - RNA, 32 nt, Homo Sapiens
ugacaaguaaauuuauacaggacugaaaaccg

SEQ ID NO: 367518 - RNA, 29 nt, Homo Sapiens
uuuaauguauguauguauaauggcuguac

SEQ ID NO: 367519 - RNA, 32 nt, Homo Sapiens
cguguucccuccccggcucagagccacuccuc

SEQ ID NO: 367520 - RNA, 32 nt, Homo Sapiens
caugucauacccauaaagauaguuuaugcauu

SEQ ID NO: 367521 - RNA, 32 nt, Homo Sapiens
aggcagccgcacccuggcauuuucagauacua

SEQ ID NO: 367522 - RNA, 32 nt, Homo Sapiens
agcaauguggcaaagcuuucucuucuuccagu

SEQ ID NO: 367523 - RNA, 32 nt, Homo Sapiens
augcgccuuccuuuccucuccagagcaggcug

SEQ ID NO: 367524 - RNA, 32 nt, Homo Sapiens
uggcaucuggcugugcaaggaagacccggcuu

SEQ ID NO: 367525 - RNA, 32 nt, Homo Sapiens
accuucaucuucugccucaacuguaaaccaca

SEQ ID NO: 367526 - RNA, 32 nt, Homo Sapiens
aucccugggguggaguugggauguguggcuag

SEQ ID NO: 367527 - RNA, 32 nt, Homo Sapiens
uuauuacuguucagcaucaucuugguuauaua

SEQ ID NO: 367528 - RNA, 32 nt, Homo Sapiens
uuugaaaguuaccaacucauggccaaucauuu

SEQ ID NO: 367529 - RNA, 32 nt, Homo Sapiens
auucccaacaauuucuguaaaacuuucaauga

SEQ ID NO: 367530 - RNA, 32 nt, Homo Sapiens
aucacaagauggagucucacucugucaaccag

SEQ ID NO: 367531 - RNA, 32 nt, Homo Sapiens
agugauucuaguugggagaguuggagagaagg

SEQ ID NO: 367532 - RNA, 32 nt, Homo Sapiens
gaacugugauugcgccacagcauuccagccug

SEQ ID NO: 367533 - RNA, 32 nt, Homo Sapiens
agggcgggccagggccgcacuccggagacucg

SEQ ID NO: 367534 - RNA, 30 nt, Homo Sapiens
gucccagcgucugucccgccggccgggcgg

SEQ ID NO: 367535 - RNA, 32 nt, Homo Sapiens
gagcccagccgagcguccgccgcugcccgugc

SEQ ID NO: 367536 - RNA, 32 nt, Homo Sapiens
ucggcuuccgcagauagucgggcccccgacac

SEQ ID NO: 367537 - RNA, 32 nt, Homo Sapiens
aauauacaacucggucaguaagaucaaggcau

SEQ ID NO: 367538 - RNA, 30 nt, Homo Sapiens
cugggucuggacuggcucuggcggaucccc

SEQ ID NO: 367539 - RNA, 32 nt, Homo Sapiens
ggaaaacaaagucuccaagaaaacacuucugu

SEQ ID NO: 367540 - RNA, 32 nt, Homo Sapiens
acaaguguggaggugaaaagguacaauagugc

SEQ ID NO: 367541 - RNA, 32 nt, Homo Sapiens
ggcugagauggcugcuggcccggccuccaaga

SEQ ID NO: 367542 - RNA, 32 nt, Homo Sapiens
gguuuuauguauauauuugagagcuccacauc

SEQ ID NO: 367543 - RNA, 32 nt, Homo Sapiens
uaguagaaccucacuaaacggaaaggcuguac

SEQ ID NO: 367544 - RNA, 32 nt, Homo Sapiens
uagacagaaaguacauuagaaaacaggacuua

SEQ ID NO: 367545 - RNA, 32 nt, Homo Sapiens
auuucuuuggcuuuuucucuauggugguguuu

SEQ ID NO: 367546 - RNA, 32 nt, Homo Sapiens
cgacacgcggcgggcgcugaggcgggaauggc

SEQ ID NO: 367547 - RNA, 32 nt, Homo Sapiens
ugugguuccuuccuguuagugcugcuggacac

SEQ ID NO: 367548 - RNA, 32 nt, Homo Sapiens
cuguaagaauacugacuuucuggaguaaugag

SEQ ID NO: 367549 - RNA, 32 nt, Homo Sapiens
cgcucuacuccauggccucccaagccaguggc

SEQ ID NO: 367550 - RNA, 32 nt, Homo Sapiens
cgucggggccgggcccgccaguucuuuuccgg

SEQ ID NO: 367551 - RNA, 32 nt, Homo Sapiens
cuccgcuaggcgauaucagggacugugcucau

SEQ ID NO: 367552 - RNA, 32 nt, Homo Sapiens
aaguauuuauucaggaaaaaugcuuuuguguc

SEQ ID NO: 367553 - RNA, 32 nt, Homo Sapiens
ugagcaaaggauugguaugugacucugaugcc

SEQ ID NO: 367554 - RNA, 29 nt, Homo Sapiens
gugagucggggacaggccagcggggggac

SEQ ID NO: 367555 - RNA, 32 nt, Homo Sapiens
cggggcggcggcuggaggcagcgcaccgaguu

SEQ ID NO: 367556 - RNA, 32 nt, Homo Sapiens
cagaagcaugagguucaugacucuccucuucc

SEQ ID NO: 367557 - RNA, 32 nt, Homo Sapiens
gcacgagccccaaaaacucuagguucugggca

SEQ ID NO: 367558 - RNA, 32 nt, Homo Sapiens
agcagccggcugugcugucagcggggccuggc

SEQ ID NO: 367559 - RNA, 32 nt, Homo Sapiens
auaucaugaucaucuuccucauccccuaccuu

SEQ ID NO: 367560 - RNA, 32 nt, Homo Sapiens
ccugcuguggucagcauagcuacaggaaaagu

SEQ ID NO: 367561 - RNA, 32 nt, Homo Sapiens
cuugcaguuguuggacaugaaauugugguggg

SEQ ID NO: 367562 - RNA, 32 nt, Homo Sapiens
ugcuuucauuuucuuuacaguuauuauaaaau

SEQ ID NO: 367563 - RNA, 32 nt, Homo Sapiens
gcacugccaggaccuccuguggcacccuucaa

SEQ ID NO: 367564 - RNA, 32 nt, Homo Sapiens
uaucaaaaauggaaaaaaguuacuuuguaaaa

SEQ ID NO: 367565 - RNA, 32 nt, Homo Sapiens
ccucugccaggugggagcugccuuccccagcc

SEQ ID NO: 367566 - RNA, 32 nt, Homo Sapiens
uauuaauaguuaccaaaggaauaaaagacuaa

SEQ ID NO: 367567 - RNA, 32 nt, Homo Sapiens
gcacuaauaaaacuuggauugauuccagauug

SEQ ID NO: 367568 - RNA, 32 nt, Homo Sapiens
uuuuuuguaagcuccauagaaacagccugaga

SEQ ID NO: 367569 - RNA, 32 nt, Homo Sapiens
auuauccauuuucugaugaauauuacauggag

SEQ ID NO: 367570 - RNA, 32 nt, Homo Sapiens
uaaguccccggccgugacccaggcccggggag

SEQ ID NO: 367571 - RNA, 32 nt, Homo Sapiens
cuagaaaguauuuuauuuuaaauuuacauagg

SEQ ID NO: 367572 - RNA, 29 nt, Homo Sapiens
cauugauuugggagguaccacaaaccagg

SEQ ID NO: 367573 - RNA, 31 nt, Homo Sapiens
auccccccacccuacaacugagcacaaccuc

SEQ ID NO: 367574 - RNA, 32 nt, Homo Sapiens
cccuaagacugugacaacugucuaacuuuaga

SEQ ID NO: 367575 - RNA, 32 nt, Homo Sapiens
uucagcaaacuuaaugaauguuuucauguaga

SEQ ID NO: 367576 - RNA, 32 nt, Homo Sapiens
uuuucauccugugguuuuucuaauggacuuuc

SEQ ID NO: 367577 - RNA, 32 nt, Homo Sapiens
aauacaggaaauguucucagaugcugauguuu

SEQ ID NO: 367578 - RNA, 32 nt, Homo Sapiens
aaauaaaaauuaacuguauggcaugaucagug

SEQ ID NO: 367579 - RNA, 32 nt, Homo Sapiens
uucacagcccaaauggcgggaccguccagggg

SEQ ID NO: 367580 - RNA, 32 nt, Homo Sapiens
cugccugccugccugccugucugccuauguga

SEQ ID NO: 367581 - RNA, 32 nt, Homo Sapiens
cuugacgucccgggccugugggcccgcuuucu

SEQ ID NO: 367582 - RNA, 32 nt, Homo Sapiens
cuccucacuggaggagcagcuuccuucuggga

SEQ ID NO: 367583 - RNA, 32 nt, Homo Sapiens
ggccuccuagggagggcggggguuguggugag

SEQ ID NO: 367584 - RNA, 32 nt, Homo Sapiens
gucauguuuugaagauaacugacuccaucuaa

SEQ ID NO: 367585 - RNA, 32 nt, Homo Sapiens
ugugggccaucggcgaguaccugucggugacc

SEQ ID NO: 367586 - RNA, 32 nt, Homo Sapiens
cgccucccgcggcgcucgggacagccguaccc

SEQ ID NO: 367587 - RNA, 32 nt, Homo Sapiens
ugccucugcuaccugcccguuggucacucacu

SEQ ID NO: 367588 - RNA, 32 nt, Homo Sapiens
uuacucgguuuuaaguuuuuguaauuuugaua

SEQ ID NO: 367589 - RNA, 32 nt, Homo Sapiens
gugcaggcgagguuugucaggguguggcccca

SEQ ID NO: 367590 - RNA, 32 nt, Homo Sapiens
uagggccggccgcgggcugagcgcgccuggug

SEQ ID NO: 367591 - RNA, 32 nt, Homo Sapiens
gguaggaauucuguucuguguuguguuuaaag

SEQ ID NO: 367592 - RNA, 29 nt, Homo Sapiens
cuggauggugccugaguggguuugggaca

SEQ ID NO: 367593 - RNA, 30 nt, Homo Sapiens
accaggcagcggcggccgccggcgggaucg

SEQ ID NO: 367594 - RNA, 32 nt, Homo Sapiens
ggugaggcugcacuucgcuguguuugaggaga

SEQ ID NO: 367595 - RNA, 32 nt, Homo Sapiens
uugcauaugggguugaagcagcccacugagcc

SEQ ID NO: 367596 - RNA, 32 nt, Homo Sapiens
agccacccaagagcugcacucuugugccacag

SEQ ID NO: 367597 - RNA, 32 nt, Homo Sapiens
caccuacccacccccaucauggaagugagcug

SEQ ID NO: 367598 - RNA, 32 nt, Homo Sapiens
ugcuggguuugaaauaaaaauguuucuuaucc

SEQ ID NO: 367599 - RNA, 32 nt, Homo Sapiens
ccuaagccugacgccugcaccgggcccuccgg

SEQ ID NO: 367600 - RNA, 32 nt, Homo Sapiens
ggcugugaggggcauccaggucuagccgugug

SEQ ID NO: 367601 - RNA, 32 nt, Homo Sapiens
auaaggucugaauaauagcagaaaaaccaaca

SEQ ID NO: 367602 - RNA, 32 nt, Homo Sapiens
ccagcccucuucagcccuccccaguccucccc

SEQ ID NO: 367603 - RNA, 32 nt, Homo Sapiens
uuaugaaaaucgucgaugaaagagaaaaaaau

SEQ ID NO: 367604 - RNA, 32 nt, Homo Sapiens
accuccagaaaguauuugauagguacaagagc

SEQ ID NO: 367605 - RNA, 32 nt, Homo Sapiens
ucgcagucuuccaccgaggaugacucagugga

SEQ ID NO: 367606 - RNA, 32 nt, Homo Sapiens
gguucugacaacaguacccaucccccacagua

SEQ ID NO: 367607 - RNA, 32 nt, Homo Sapiens
cauugccccggcugcucuccaaccccugaguu

SEQ ID NO: 367608 - RNA, 32 nt, Homo Sapiens
cgagacagucucaaaaacaacaacaacaacaa

SEQ ID NO: 367609 - RNA, 32 nt, Homo Sapiens
uugucccuccaaggaguucauuuuugggaaac

SEQ ID NO: 367610 - RNA, 32 nt, Homo Sapiens
ugagggacugcggcugcagaggcgcugcagcu

SEQ ID NO: 367611 - RNA, 32 nt, Homo Sapiens
aaaaggaaagaaaacuaacaaccaaccaacca

SEQ ID NO: 367612 - RNA, 32 nt, Homo Sapiens
cagugaugauuaaacaaaagaaaaacccauaa

SEQ ID NO: 367613 - RNA, 32 nt, Homo Sapiens
gagaagcucccucuccccuucaucuucugcuc

SEQ ID NO: 367614 - RNA, 32 nt, Homo Sapiens
uggauggagcuggaggccauuauucuaaguga

SEQ ID NO: 367615 - RNA, 27 nt, Homo Sapiens
cgauucuccugcuucagccuccggagu

SEQ ID NO: 367616 - RNA, 32 nt, Homo Sapiens
caucaauaaauuuacuggucuuauucuauugg

SEQ ID NO: 367617 - RNA, 32 nt, Homo Sapiens
ugccaacucuguuggaagaaaagcagagagca

SEQ ID NO: 367618 - RNA, 32 nt, Homo Sapiens
aucaagaaacaaugucgagugaugauaaaagu

SEQ ID NO: 367619 - RNA, 32 nt, Homo Sapiens
ucccaaaaggauuuugguggaaaacuaguugu

SEQ ID NO: 367620 - RNA, 32 nt, Homo Sapiens
aauccccaauacuuuacuuauucacaugaagu

SEQ ID NO: 367621 - RNA, 32 nt, Homo Sapiens
uuuuccuuauuuuaaugaccgccuuucccucc

SEQ ID NO: 367622 - RNA, 32 nt, Homo Sapiens
ccaccucccucaggugugcccgcgggaccugu

SEQ ID NO: 367623 - RNA, 32 nt, Homo Sapiens
auggauguguguauauguacagugaaaauguu

SEQ ID NO: 367624 - RNA, 32 nt, Homo Sapiens
guaguagaauguuuucaagaaauguacacugu

SEQ ID NO: 367625 - RNA, 32 nt, Homo Sapiens
cugaccaccgauugagacgucuccaggaccuu

SEQ ID NO: 367626 - RNA, 32 nt, Homo Sapiens
cuuagaacaacaacaaauacauggucugcuga

SEQ ID NO: 367627 - RNA, 32 nt, Homo Sapiens
gguucauaacauaggccaaauucuagagaugu

SEQ ID NO: 367628 - RNA, 32 nt, Homo Sapiens
uggccaguggaaugggagcaaaaacccuaggu

SEQ ID NO: 367629 - RNA, 31 nt, Homo Sapiens
gggcgguggcgggcgcuggugaaggagucuc

SEQ ID NO: 367630 - RNA, 32 nt, Homo Sapiens
guccguggguccgucugcccagccaucugcug

SEQ ID NO: 367631 - RNA, 32 nt, Homo Sapiens
gaccucaggugauccgcccaccuaggccucuc

SEQ ID NO: 367632 - RNA, 32 nt, Homo Sapiens
uucaaacuguaaaaauaacauaauauguaauu

SEQ ID NO: 367633 - RNA, 32 nt, Homo Sapiens
ggaaugaggugauuucugagggcugagaaaaa

SEQ ID NO: 367634 - RNA, 32 nt, Homo Sapiens
augguuuaaucaaggcuuuauuuuggaaguaa

SEQ ID NO: 367635 - RNA, 32 nt, Homo Sapiens
gcucucuccccacaucgucuucccaucugggu

SEQ ID NO: 367636 - RNA, 32 nt, Homo Sapiens
auggccccguggagccgagaggcggugcugag

SEQ ID NO: 367637 - RNA, 32 nt, Homo Sapiens
auuuucuuagaacucaagacuccauaacuaug

SEQ ID NO: 367638 - RNA, 32 nt, Homo Sapiens
cauggaggaggaaggagauggcauggcuuacc

SEQ ID NO: 367639 - RNA, 32 nt, Homo Sapiens
uuuuaaagucacuuuaugcguuuuccacuuuu

SEQ ID NO: 367640 - RNA, 32 nt, Homo Sapiens
aggucugccggggccggcaggggguuggggaa

SEQ ID NO: 367641 - RNA, 32 nt, Homo Sapiens
aacugaugaugugaaaauuuuauuuucuggga

SEQ ID NO: 367642 - RNA, 32 nt, Homo Sapiens
aaacgcaggaggagggagcagcaucuccugug

SEQ ID NO: 367643 - RNA, 31 nt, Homo Sapiens
gcggcucugcggagaaaccacgaccaccgcg

SEQ ID NO: 367644 - RNA, 32 nt, Homo Sapiens
gcugcaggacccgcgccgcugggacccccagg

SEQ ID NO: 367645 - RNA, 32 nt, Homo Sapiens
ucccugcaacagcagaguugaguguugcaaca

SEQ ID NO: 367646 - RNA, 32 nt, Homo Sapiens
gcugagggaguacauuucaaaugucucaccgu

SEQ ID NO: 367647 - RNA, 31 nt, Homo Sapiens
ugugcuaaauaaaaaguguuauuaauugcug

SEQ ID NO: 367648 - RNA, 32 nt, Homo Sapiens
gugcgcgcugugggccgcggcgcgggugggug

SEQ ID NO: 367649 - RNA, 32 nt, Homo Sapiens
gacauaacaagauuuuccauacuaaacaucac

SEQ ID NO: 367650 - RNA, 32 nt, Homo Sapiens
gucaacugacaguccaaaggcuccacagcuca

SEQ ID NO: 367651 - RNA, 32 nt, Homo Sapiens
uuuucaugcagugagauucaguuaagcaaaaa

SEQ ID NO: 367652 - RNA, 32 nt, Homo Sapiens
agacaggucuuacucugucacccaggcuguag

SEQ ID NO: 367653 - RNA, 32 nt, Homo Sapiens
acuggggugugugaaaguauucgaugccagga

SEQ ID NO: 367654 - RNA, 32 nt, Homo Sapiens
augugucugaaugaaucagccaauuaauaaaa

SEQ ID NO: 367655 - RNA, 32 nt, Homo Sapiens
ugagucugcuaagguagcucucacacaccucg

SEQ ID NO: 367656 - RNA, 32 nt, Homo Sapiens
gagaaguguggauuagauucuuccucacagcc

SEQ ID NO: 367657 - RNA, 32 nt, Homo Sapiens
aauacccauuuuccuuuuauucauggugcuuu

SEQ ID NO: 367658 - RNA, 32 nt, Homo Sapiens
ugaugcgggggagaagacagauaccccacagg

SEQ ID NO: 367659 - RNA, 32 nt, Homo Sapiens
ccaauucuaaaauguacagagaaguacagaaa

SEQ ID NO: 367660 - RNA, 32 nt, Homo Sapiens
aagcugguucccucucuggcccccuggccugg

SEQ ID NO: 367661 - RNA, 32 nt, Homo Sapiens
accuguucaucaggaauguuguagaagaaaug

SEQ ID NO: 367662 - RNA, 32 nt, Homo Sapiens
uugcauuccaugaaaagugucuuggccucaga

SEQ ID NO: 367663 - RNA, 32 nt, Homo Sapiens
uuaaagagaaagucaaucuaaugccaagggga

SEQ ID NO: 367664 - RNA, 32 nt, Homo Sapiens
uguaugucuucuuuugagaagugucuguucau

SEQ ID NO: 367665 - RNA, 32 nt, Homo Sapiens
uccaccucgccagcuccacccagggccggcuu

SEQ ID NO: 367666 - RNA, 29 nt, Homo Sapiens
aagagauaaaguuuagcuucuuuuuacua

SEQ ID NO: 367667 - RNA, 32 nt, Homo Sapiens
gacuggauccgacggguggagcagccagguga

SEQ ID NO: 367668 - RNA, 32 nt, Homo Sapiens
uccugacccccgcuucuguccccuuccugucu

SEQ ID NO: 367669 - RNA, 32 nt, Homo Sapiens
uggcggguuccuguaguccuagcugcucagga

SEQ ID NO: 367670 - RNA, 32 nt, Homo Sapiens
uuggagugauuuuuuucuuucuaaacagggaa

SEQ ID NO: 367671 - RNA, 31 nt, Homo Sapiens
uaaaugcuaccaaccauagacaauaaauaau

SEQ ID NO: 367672 - RNA, 29 nt, Homo Sapiens
guuguugugaagauuaaaugagguaauac

SEQ ID NO: 367673 - RNA, 32 nt, Homo Sapiens
cccuccuccccucccccaucauaaagauauuu

SEQ ID NO: 367674 - RNA, 31 nt, Homo Sapiens
uuuggggcagaguauggcgugagacguauug

SEQ ID NO: 367675 - RNA, 32 nt, Homo Sapiens
uuguuuuuacugcaauuguauuuuaaaauauu

SEQ ID NO: 367676 - RNA, 32 nt, Homo Sapiens
gagaaaauuagaaaaaagaaacccuuauaugu

SEQ ID NO: 367677 - RNA, 32 nt, Homo Sapiens
ccgcgggcggguggaggcgcgucuccggcacg

SEQ ID NO: 367678 - RNA, 32 nt, Homo Sapiens
ggccugggguagucuccuuucuggacugagaa

SEQ ID NO: 367679 - RNA, 32 nt, Homo Sapiens
gccacugguuuaagaagugcugacuuuguuuu

SEQ ID NO: 367680 - RNA, 32 nt, Homo Sapiens
aggggaaaaagcaaauaaaaauaguaaaauuu

SEQ ID NO: 367681 - RNA, 32 nt, Homo Sapiens
aaugucuuguuaaugauuuucauguugauugc

SEQ ID NO: 367682 - RNA, 32 nt, Homo Sapiens
agaauuuaaaugaauacuuuuacaaagucuac

SEQ ID NO: 367683 - RNA, 32 nt, Homo Sapiens
gcuuucauauccuugcugugggucguggauaa

SEQ ID NO: 367684 - RNA, 30 nt, Homo Sapiens
ccgccaugaggagaagugaggugcuggcgg

SEQ ID NO: 367685 - RNA, 32 nt, Homo Sapiens
ugagggcugggcgggguggggccuccagagcu

SEQ ID NO: 367686 - RNA, 32 nt, Homo Sapiens
gcugagccaagagcuccuagcugccccuuuug

SEQ ID NO: 367687 - RNA, 32 nt, Homo Sapiens
cugggccugggguggggacguccccaagccaa

SEQ ID NO: 367688 - RNA, 32 nt, Homo Sapiens
ggaaguaaauguucacuuaaaugaaauugaaa

SEQ ID NO: 367689 - RNA, 32 nt, Homo Sapiens
gugccggcuccgguccccggcgcggcuguccg

SEQ ID NO: 367690 - RNA, 32 nt, Homo Sapiens
uuuagaacaccaggucuguuuccacuggcggc

SEQ ID NO: 367691 - RNA, 32 nt, Homo Sapiens
cuucccccgcggcagucgggaccgggagaauc

SEQ ID NO: 367692 - RNA, 32 nt, Homo Sapiens
gacggagucucauucugucacccaggccggag

SEQ ID NO: 367693 - RNA, 32 nt, Homo Sapiens
cagggaugcccccaggcggcccagguuagaug

SEQ ID NO: 367694 - RNA, 32 nt, Homo Sapiens
ggaagagaacacauuagaauauuuuauccccu

SEQ ID NO: 367695 - RNA, 32 nt, Homo Sapiens
ggugcuacugggcguggaccgccacccccuga

SEQ ID NO: 367696 - RNA, 32 nt, Homo Sapiens
ucugcagguccagccggcuggcacccuccaug

SEQ ID NO: 367697 - RNA, 32 nt, Homo Sapiens
gauggggagguagcccaggggugcucacccag

SEQ ID NO: 367698 - RNA, 32 nt, Homo Sapiens
agccugucccucggccucggcccgggacgucu

SEQ ID NO: 367699 - RNA, 32 nt, Homo Sapiens
ucucuacaaaaauuuuuuaaaaaauuagccag

SEQ ID NO: 367700 - RNA, 32 nt, Homo Sapiens
auacaacggacuuugacuaaaagcagugaagg

SEQ ID NO: 367701 - RNA, 32 nt, Homo Sapiens
auguucuuuuaauucugaguccaaauaaauua

SEQ ID NO: 367702 - RNA, 32 nt, Homo Sapiens
acuugaguguggaaggcugcccggggcacugg

SEQ ID NO: 367703 - RNA, 32 nt, Homo Sapiens
aaagaaguuugccuuuauucuacuccauccac

SEQ ID NO: 367704 - RNA, 32 nt, Homo Sapiens
uuuuguuugcuuuucuugaauucaucagaaca

SEQ ID NO: 367705 - RNA, 32 nt, Homo Sapiens
acucauggaucugguagagaccauagacauga

SEQ ID NO: 367706 - RNA, 32 nt, Homo Sapiens
agcuaguguucuagacuagaggccacaugcuu

SEQ ID NO: 367707 - RNA, 32 nt, Homo Sapiens
agaggaggaaacugaggcagggacaggggcuu

SEQ ID NO: 367708 - RNA, 32 nt, Homo Sapiens
guaauuuaaaugauauacuaaauuuguguaug

SEQ ID NO: 367709 - RNA, 32 nt, Homo Sapiens
aauuuauguuaaaauagcauuaauaaaucagu

SEQ ID NO: 367710 - RNA, 32 nt, Homo Sapiens
cgcaguccggggaucgggucgaggggagaaga

SEQ ID NO: 367711 - RNA, 32 nt, Homo Sapiens
agaagcccaggggagaaacaaagggaaugauc

SEQ ID NO: 367712 - RNA, 32 nt, Homo Sapiens
ucgucaaaagauuuuugcuuggaauaagcaug

SEQ ID NO: 367713 - RNA, 32 nt, Homo Sapiens
gcauccugaagcucagccugccuacuccuucu

SEQ ID NO: 367714 - RNA, 32 nt, Homo Sapiens
uuucuuuagugucauugccgauuuuggcuaua

SEQ ID NO: 367715 - RNA, 32 nt, Homo Sapiens
uuggauauuuuuguacuugauuugaugugacu

SEQ ID NO: 367716 - RNA, 32 nt, Homo Sapiens
accaagcgaugcaugccaggggcccccauggc

SEQ ID NO: 367717 - RNA, 32 nt, Homo Sapiens
gcggcuccgcacuggcgaaccgagggcagaaa

SEQ ID NO: 367718 - RNA, 32 nt, Homo Sapiens
auccaggcagccucugaccuuccuccuuaucc

SEQ ID NO: 367719 - RNA, 32 nt, Homo Sapiens
ugacuggauauguaaagucguuuaauguggug

SEQ ID NO: 367720 - RNA, 32 nt, Homo Sapiens
ugagcauuugaaaaccugaauauaauuugaaa

SEQ ID NO: 367721 - RNA, 32 nt, Homo Sapiens
gaggggcugccgugggcggccgugacagucac

SEQ ID NO: 367722 - RNA, 32 nt, Homo Sapiens
gccugagagucuuuuugccuuucagaguuaag

SEQ ID NO: 367723 - RNA, 32 nt, Homo Sapiens
ggcaugaucucggcucacuguaccucugucuc

SEQ ID NO: 367724 - RNA, 32 nt, Homo Sapiens
cagucggaugcaggcugagaccauccuggagg

SEQ ID NO: 367725 - RNA, 32 nt, Homo Sapiens
guguuuggaaguuccaagguguguucaaagag

SEQ ID NO: 367726 - RNA, 32 nt, Homo Sapiens
acugguguucagcuccuucucuucccccaaca

SEQ ID NO: 367727 - RNA, 32 nt, Homo Sapiens
gggccgcauggugccgagagcgcagaccagac

SEQ ID NO: 367728 - RNA, 32 nt, Homo Sapiens
accuggaguaccggcccggcgaagcgcgccgc

SEQ ID NO: 367729 - RNA, 32 nt, Homo Sapiens
ccucaaggacuucggcagauacugucucuuuc

SEQ ID NO: 367730 - RNA, 32 nt, Homo Sapiens
ggcggguccgcggccgcggcgggaacauggag

SEQ ID NO: 367731 - RNA, 32 nt, Homo Sapiens
aagggaccaggccauucaugagggauccuccc

SEQ ID NO: 367732 - RNA, 32 nt, Homo Sapiens
uucuugggagagaggggaagagucgggacuug

SEQ ID NO: 367733 - RNA, 32 nt, Homo Sapiens
cuggucccgacggcaucgccacgggcggcggc

SEQ ID NO: 367734 - RNA, 32 nt, Homo Sapiens
cccgcggcggccugggcagcgccugugcagac

SEQ ID NO: 367735 - RNA, 32 nt, Homo Sapiens
uucagggacaaagggaaugaggaugaucuuug

SEQ ID NO: 367736 - RNA, 32 nt, Homo Sapiens
auugaugauauuggcuaauacauauuagcacc

SEQ ID NO: 367737 - RNA, 32 nt, Homo Sapiens
agagaacaaacccgaaaagaguguggcuaacu

SEQ ID NO: 367738 - RNA, 31 nt, Homo Sapiens
guuacagggaagaaaaauaugaaaagaccua

SEQ ID NO: 367739 - RNA, 32 nt, Homo Sapiens
caggcggcgaggccaccacaccugcagagcgc

SEQ ID NO: 367740 - RNA, 32 nt, Homo Sapiens
aaaacaaaacaaacaaaaaagaagugugggca

SEQ ID NO: 367741 - RNA, 32 nt, Homo Sapiens
ccccugcuccucugcugguggugggcuaauaa

SEQ ID NO: 367742 - RNA, 32 nt, Homo Sapiens
uagaccaugaacuggcaguggggguguccagg

SEQ ID NO: 367743 - RNA, 32 nt, Homo Sapiens
caggacccgaggcuaccaagcagcaggugcag

SEQ ID NO: 367744 - RNA, 32 nt, Homo Sapiens
ugaguccccuccccaacccccugacucucaca

SEQ ID NO: 367745 - RNA, 32 nt, Homo Sapiens
ucuauugugauaaaaaucagaauaguaauugc

SEQ ID NO: 367746 - RNA, 32 nt, Homo Sapiens
aaucuaaaagaaauauauacauacaguguaua

SEQ ID NO: 367747 - RNA, 32 nt, Homo Sapiens
agguuuugguaguucugcaaauguuaguguca

SEQ ID NO: 367748 - RNA, 32 nt, Homo Sapiens
gucccugcaauaagccccugcauuugccaagc

SEQ ID NO: 367749 - RNA, 32 nt, Homo Sapiens
ccguccccuuaaacaugcuccuccugcacgga

SEQ ID NO: 367750 - RNA, 32 nt, Homo Sapiens
gccuucggccccaaggcugucgccugcaccuu

SEQ ID NO: 367751 - RNA, 32 nt, Homo Sapiens
uuuuuacaaaauugcaccuuguguccaaaggg

SEQ ID NO: 367752 - RNA, 32 nt, Homo Sapiens
gcgguagccgcagcgggauggaggcggcgcgc

SEQ ID NO: 367753 - RNA, 32 nt, Homo Sapiens
auaugauuuauuuagauugcuaaucccacuca

SEQ ID NO: 367754 - RNA, 32 nt, Homo Sapiens
ucuuagacauucuccuugguccucguucagcu

SEQ ID NO: 367755 - RNA, 32 nt, Homo Sapiens
ggcuggggcucugugcuccuccaggucucacu

SEQ ID NO: 367756 - RNA, 32 nt, Homo Sapiens
cuugagggauuaaaugcaaagagaucacacca

SEQ ID NO: 367757 - RNA, 32 nt, Homo Sapiens
ccuaccucuagcauuguaacgaccacauagua

SEQ ID NO: 367758 - RNA, 32 nt, Homo Sapiens
gaguccucacaggcgugcugcaggcugccaga

SEQ ID NO: 367759 - RNA, 32 nt, Homo Sapiens
ggucaggagacggggcugacggcacggguggc

SEQ ID NO: 367760 - RNA, 32 nt, Homo Sapiens
caguuuuaaugcaguugucaacaaguagaacc

SEQ ID NO: 367761 - RNA, 32 nt, Homo Sapiens
agugugagcugaugacacagugguuuuacacc

SEQ ID NO: 367762 - RNA, 32 nt, Homo Sapiens
ccaggaacacuccuuccacuccccucucuacc

SEQ ID NO: 367763 - RNA, 32 nt, Homo Sapiens
gaucccacacuggcagagauggggccaccccu

SEQ ID NO: 367764 - RNA, 32 nt, Homo Sapiens
cagggcccgggcgggcgagugggcgagcgggu

SEQ ID NO: 367765 - RNA, 32 nt, Homo Sapiens
uuauuauuuugguccuggucagggcccucaag

SEQ ID NO: 367766 - RNA, 32 nt, Homo Sapiens
uuuuucuggugccacugacaccugggcugccc

SEQ ID NO: 367767 - RNA, 32 nt, Homo Sapiens
gccugcggucuugggccacccuugcgcuuggc

SEQ ID NO: 367768 - RNA, 32 nt, Homo Sapiens
agaagaaacaaaagaaagcaucaugugaauaa

SEQ ID NO: 367769 - RNA, 32 nt, Homo Sapiens
ccgccccgaugcccagcuccgcgccgcgcgga

SEQ ID NO: 367770 - RNA, 32 nt, Homo Sapiens
gguaggcagccugccgcaaacacacggauggc

SEQ ID NO: 367771 - RNA, 32 nt, Homo Sapiens
ggccagguucccucgugccagcugccgggagg

SEQ ID NO: 367772 - RNA, 32 nt, Homo Sapiens
ccuccauuacauacaaaagaaaaaauaacugg

SEQ ID NO: 367773 - RNA, 32 nt, Homo Sapiens
ccacuucccucauacuucagcaugggcuagac

SEQ ID NO: 367774 - RNA, 32 nt, Homo Sapiens
acggaauucuuugccggcuggcuccccacucu

SEQ ID NO: 367775 - RNA, 32 nt, Homo Sapiens
ucuggaggcuuugggcagcugucaggcuagug

SEQ ID NO: 367776 - RNA, 32 nt, Homo Sapiens
aagaaguucucauucaaugacauauuuuuauu

SEQ ID NO: 367777 - RNA, 32 nt, Homo Sapiens
uugccagagagauaaaauuuuugcucaaaacc

SEQ ID NO: 367778 - RNA, 32 nt, Homo Sapiens
ugccucguuguccccuggcgcuacccggacau

SEQ ID NO: 367779 - RNA, 32 nt, Homo Sapiens
uugguuucucccugucaccgucauccaccacc

SEQ ID NO: 367780 - RNA, 32 nt, Homo Sapiens
cuaaugcuugauaaaaucauuggugaaaaaag

SEQ ID NO: 367781 - RNA, 32 nt, Homo Sapiens
aacccugagagaaagauauuguuguccccacu

SEQ ID NO: 367782 - RNA, 31 nt, Homo Sapiens
cacagacacaggagaaagccgccuccgcugg

SEQ ID NO: 367783 - RNA, 32 nt, Homo Sapiens
gagaccuugucuccacaaaaauaaaaaagaaa

SEQ ID NO: 367784 - RNA, 32 nt, Homo Sapiens
uuucaaaauauuugcaaugggacccucacauu

SEQ ID NO: 367785 - RNA, 30 nt, Homo Sapiens
cacagaagcccauugucgccggcguccggc

SEQ ID NO: 367786 - RNA, 32 nt, Homo Sapiens
acagaaaacaacauuaacacaaaucuaagagu

SEQ ID NO: 367787 - RNA, 32 nt, Homo Sapiens
ggacugucaauauucagaaaaccaaaaauaaa

SEQ ID NO: 367788 - RNA, 32 nt, Homo Sapiens
ucaccaggaugaacacugagcuuuuguaccug

SEQ ID NO: 367789 - RNA, 30 nt, Homo Sapiens
gcaggagucugugcugggcucucaggcugg

SEQ ID NO: 367790 - RNA, 32 nt, Homo Sapiens
gcgcuggguguggaaugcugcugcaccugucc

SEQ ID NO: 367791 - RNA, 32 nt, Homo Sapiens
uuucaucuaccuuguggggaaccugguauaaa

SEQ ID NO: 367792 - RNA, 32 nt, Homo Sapiens
ucuccuggggcuguguucugcaggcagccaga

SEQ ID NO: 367793 - RNA, 32 nt, Homo Sapiens
acugccaccaugcuggccucagggcugcuucu

SEQ ID NO: 367794 - RNA, 32 nt, Homo Sapiens
auauaguuucuugauaggauagauacccacau

SEQ ID NO: 367795 - RNA, 32 nt, Homo Sapiens
agcgcacagaaucuuggaccaggucucucuuc

SEQ ID NO: 367796 - RNA, 32 nt, Homo Sapiens
cgggacgagcuucccaggauuccccgaccuuc

SEQ ID NO: 367797 - RNA, 32 nt, Homo Sapiens
agggguagguggggaggggccacgcggacccc

SEQ ID NO: 367798 - RNA, 32 nt, Homo Sapiens
acuugcucugcagcucccagagguggugguug

SEQ ID NO: 367799 - RNA, 32 nt, Homo Sapiens
acccagagccccugaccccccgcgcccucccc

SEQ ID NO: 367800 - RNA, 32 nt, Homo Sapiens
cucugaccuucacagggacagaucugauuuau

SEQ ID NO: 367801 - RNA, 32 nt, Homo Sapiens
acaccagaacagaagagauuuuuuacuauuau

SEQ ID NO: 367802 - RNA, 32 nt, Homo Sapiens
aaccuacauacuuguuauuaauugcuacuggg

SEQ ID NO: 367803 - RNA, 32 nt, Homo Sapiens
auuuucccucguuuuucuuucucucuuucccc

SEQ ID NO: 367804 - RNA, 32 nt, Homo Sapiens
cagccuuuccaagaaaguguguguucucucaa

SEQ ID NO: 367805 - RNA, 32 nt, Homo Sapiens
uauauauuccaugcuuguuuucucauucacug

SEQ ID NO: 367806 - RNA, 32 nt, Homo Sapiens
uauggcaaaggcuuuaacuaguccucaguucu

SEQ ID NO: 367807 - RNA, 32 nt, Homo Sapiens
uaagucgucuucugcuugaguauccuaauauu

SEQ ID NO: 367808 - RNA, 32 nt, Homo Sapiens
ccuuaaaaacaauaggccugggaguguuuguu

SEQ ID NO: 367809 - RNA, 32 nt, Homo Sapiens
ucagguuaucugcggcuacuguauuggcaugg

SEQ ID NO: 367810 - RNA, 32 nt, Homo Sapiens
uccccgcccagccccaggucuccccgccucac

SEQ ID NO: 367811 - RNA, 30 nt, Homo Sapiens
auccuuguggacugccacugcuggcugccu

SEQ ID NO: 367812 - RNA, 32 nt, Homo Sapiens
ucaauggaauaaguaaaacauaaagucuauac

SEQ ID NO: 367813 - RNA, 32 nt, Homo Sapiens
acaagguauggauuuuaaauggaugaaacuuc

SEQ ID NO: 367814 - RNA, 32 nt, Homo Sapiens
aguagggcucugccgugguggccggcugcguc

SEQ ID NO: 367815 - RNA, 32 nt, Homo Sapiens
uuucugaagugauuauacuaauuuauauucuc

SEQ ID NO: 367816 - RNA, 32 nt, Homo Sapiens
gcuuuaccuccuugcccuugugucucaggugu

SEQ ID NO: 367817 - RNA, 32 nt, Homo Sapiens
ccacuccuagauuuuguugaccucaacaaugg

SEQ ID NO: 367818 - RNA, 32 nt, Homo Sapiens
cucugcaguuccgccgggggucgggcagcuau

SEQ ID NO: 367819 - RNA, 32 nt, Homo Sapiens
uaaauuauucccuccccgacccagcccagugc

SEQ ID NO: 367820 - RNA, 32 nt, Homo Sapiens
guccaggggauuuugccuuaugcugaggucaa

SEQ ID NO: 367821 - RNA, 32 nt, Homo Sapiens
cucccacugauccacucagcgcacagccuuga

SEQ ID NO: 367822 - RNA, 32 nt, Homo Sapiens
cuccaggcccccagccugggacagcccugggg

SEQ ID NO: 367823 - RNA, 32 nt, Homo Sapiens
cucuuaggugucauaccuaagaucaguguguu

SEQ ID NO: 367824 - RNA, 32 nt, Homo Sapiens
gcauaaugagagaauaaacuuauuuuauuuaa

SEQ ID NO: 367825 - RNA, 32 nt, Homo Sapiens
caaaggucccagccuuccuucuuccuuuccuu

SEQ ID NO: 367826 - RNA, 32 nt, Homo Sapiens
ugcauaccagaauugaauauaccauaugggau

SEQ ID NO: 367827 - RNA, 32 nt, Homo Sapiens
aaacugcuuuugcugcaucccguaaguuuuaa

SEQ ID NO: 367828 - RNA, 32 nt, Homo Sapiens
ucccaucaguagcaauacaagguuauacauuu

SEQ ID NO: 367829 - RNA, 27 nt, Homo Sapiens
ugguccuacauccucagccccucugcc

SEQ ID NO: 367830 - RNA, 32 nt, Homo Sapiens
acagaaauugucauuaaauagaauuaagauac

SEQ ID NO: 367831 - RNA, 32 nt, Homo Sapiens
guaggaccaggggcacguggaacuucugggcc

SEQ ID NO: 367832 - RNA, 32 nt, Homo Sapiens
acauaugugaggaugguaaagaccauaugcag

SEQ ID NO: 367833 - RNA, 32 nt, Homo Sapiens
gccuggccuucagcccucacagaugcccagcc

SEQ ID NO: 367834 - RNA, 32 nt, Homo Sapiens
ccgucgggugcaccgggggcugcccgaggccg

SEQ ID NO: 367835 - RNA, 32 nt, Homo Sapiens
acagucaccgacaacaugcugugugcuggaga

SEQ ID NO: 367836 - RNA, 32 nt, Homo Sapiens
uaugcaauauccauauauacuuucacagaaca

SEQ ID NO: 367837 - RNA, 32 nt, Homo Sapiens
gaaauacagaucggaagugcugaugaguuaua

SEQ ID NO: 367838 - RNA, 32 nt, Homo Sapiens
cccucucugcgguugagggcccagaggacaga

SEQ ID NO: 367839 - RNA, 32 nt, Homo Sapiens
ugggccucaggaucccacccuccaucccgucu

SEQ ID NO: 367840 - RNA, 32 nt, Homo Sapiens
caauggcggcggugugggagacaaggccagga

SEQ ID NO: 367841 - RNA, 32 nt, Homo Sapiens
uaguucccauucuccuuuauuuucuucccguc

SEQ ID NO: 367842 - RNA, 32 nt, Homo Sapiens
gcggggcugcacggacugcggcugggggcugg

SEQ ID NO: 367843 - RNA, 29 nt, Homo Sapiens
aauuugugaaguuuauaguucuauugucu

SEQ ID NO: 367844 - RNA, 32 nt, Homo Sapiens
gaugaaaagaguucuagagaucuguugcauga

SEQ ID NO: 367845 - RNA, 32 nt, Homo Sapiens
acuacugauuuuuuuuuuuucuuaaaacuaaa

SEQ ID NO: 367846 - RNA, 32 nt, Homo Sapiens
agagaaaaauuccacaugaaagaggaugacca

SEQ ID NO: 367847 - RNA, 32 nt, Homo Sapiens
aacuuagcccucggcuucuccuuaccuuucag

SEQ ID NO: 367848 - RNA, 32 nt, Homo Sapiens
agucccgggcccggcguguccgcgcugcgcgg

SEQ ID NO: 367849 - RNA, 32 nt, Homo Sapiens
cucaccugucuccugcccagggacgccaccca

SEQ ID NO: 367850 - RNA, 32 nt, Homo Sapiens
agacauguuuuuccuagucguguagaaacuag

SEQ ID NO: 367851 - RNA, 28 nt, Homo Sapiens
aaugcaguuacaggauccugggaagcag

SEQ ID NO: 367852 - RNA, 32 nt, Homo Sapiens
accugcugagccacaguuguccugcuggaugu

SEQ ID NO: 367853 - RNA, 32 nt, Homo Sapiens
agugauggauuugcacuuuucuauccucauac

SEQ ID NO: 367854 - RNA, 32 nt, Homo Sapiens
agggagacggggcuccuggggugguuaaggac

SEQ ID NO: 367855 - RNA, 32 nt, Homo Sapiens
ggaguuacagaaaacuguuaaauagggaagaa

SEQ ID NO: 367856 - RNA, 32 nt, Homo Sapiens
ggcgcggugcauuuccaggcgcugcucuccgu

SEQ ID NO: 367857 - RNA, 32 nt, Homo Sapiens
uggcucauuuuucauagcauuccuuguguaag

SEQ ID NO: 367858 - RNA, 32 nt, Homo Sapiens
cguccaccugcggaaccuguguuuccuggcgc

SEQ ID NO: 367859 - RNA, 32 nt, Homo Sapiens
uuugaaugucacuauuugauuaucaucaucau

SEQ ID NO: 367860 - RNA, 32 nt, Homo Sapiens
uccugggcacguggggcgcccaggggggcugg

SEQ ID NO: 367861 - RNA, 32 nt, Homo Sapiens
uucaccauucguggagauauggaccaaaacga

SEQ ID NO: 367862 - RNA, 32 nt, Homo Sapiens
acuggcagcgagugugguggaugggcagaagg

SEQ ID NO: 367863 - RNA, 32 nt, Homo Sapiens
cccugcacuucuuguuccaugcuugggguccu

SEQ ID NO: 367864 - RNA, 32 nt, Homo Sapiens
cugaggcgggagaccgguggucugcaccgucc

SEQ ID NO: 367865 - RNA, 32 nt, Homo Sapiens
gcccggggaaaggcaagguccggcccaucccc

SEQ ID NO: 367866 - RNA, 32 nt, Homo Sapiens
uuggauucugcuuuccucucucaccuuccucc

SEQ ID NO: 367867 - RNA, 32 nt, Homo Sapiens
aaagauguaacacuuauuugcugucaaauucu

SEQ ID NO: 367868 - RNA, 32 nt, Homo Sapiens
uuccugaggcaaaggccaucuccuauggacca

SEQ ID NO: 367869 - RNA, 32 nt, Homo Sapiens
auuauuuugcaacagacacuuuuucucaggac

SEQ ID NO: 367870 - RNA, 32 nt, Homo Sapiens
cugcauucuccagacucugugcuuuccuaaga

SEQ ID NO: 367871 - RNA, 31 nt, Homo Sapiens
accucagagaccaggcucagagccugacauc

SEQ ID NO: 367872 - RNA, 32 nt, Homo Sapiens
ucaugagaaaaacguaguuuggggcuguuggu

SEQ ID NO: 367873 - RNA, 32 nt, Homo Sapiens
cucuacccucagcccccugcacggccaggugg

SEQ ID NO: 367874 - RNA, 32 nt, Homo Sapiens
uuccuugguguucaaaaaccacguucuuagcc

SEQ ID NO: 367875 - RNA, 32 nt, Homo Sapiens
accagccguuuggccuggcuaaaauuggguaa

SEQ ID NO: 367876 - RNA, 32 nt, Homo Sapiens
ggaccccugggcuggcuguguucauccccgcu

SEQ ID NO: 367877 - RNA, 32 nt, Homo Sapiens
uucaccccauucugucccugccccuagucacc

SEQ ID NO: 367878 - RNA, 32 nt, Homo Sapiens
uggccgugaguccccgccccagcaaagacuuc

SEQ ID NO: 367879 - RNA, 32 nt, Homo Sapiens
ugcccagggagaggcugcggcuccuccugaaa

SEQ ID NO: 367880 - RNA, 31 nt, Homo Sapiens
cagcgccaggcccaaaaccaggccugggccu

SEQ ID NO: 367881 - RNA, 32 nt, Homo Sapiens
gaaugcagcuuuuuugaguugucacagaggcu

SEQ ID NO: 367882 - RNA, 32 nt, Homo Sapiens
ggagugcccuggcgcgaucuuggcucaccgca

SEQ ID NO: 367883 - RNA, 32 nt, Homo Sapiens
auguaagauuuaucucuaggggccuaccuucc

SEQ ID NO: 367884 - RNA, 31 nt, Homo Sapiens
augaugguaaccccaugagugcuguuaaagc

SEQ ID NO: 367885 - RNA, 32 nt, Homo Sapiens
uggccccaaacagggauucagaaaccaaaaaa

SEQ ID NO: 367886 - RNA, 32 nt, Homo Sapiens
ugcaucccaagccccucaugcuccugccuucc

SEQ ID NO: 367887 - RNA, 32 nt, Homo Sapiens
cgaugugccaccugcaguaguggaucaugugg

SEQ ID NO: 367888 - RNA, 32 nt, Homo Sapiens
uuaaacacuguuaacugaaauguuuugaugau

SEQ ID NO: 367889 - RNA, 32 nt, Homo Sapiens
uuuuuacuguuuucuuaagaaaacaguuaaau

SEQ ID NO: 367890 - RNA, 32 nt, Homo Sapiens
uaaacuccaccacuccucccauuccagcuuaa

SEQ ID NO: 367891 - RNA, 32 nt, Homo Sapiens
cuguaucgcauauugcugaguuuucuauuuuu

SEQ ID NO: 367892 - RNA, 32 nt, Homo Sapiens
ccauagcugucauggccucaccuggagcggag

SEQ ID NO: 367893 - RNA, 32 nt, Homo Sapiens
aguguguggcaguucucgcagauguuaccuaa

SEQ ID NO: 367894 - RNA, 32 nt, Homo Sapiens
aacugagacuuuugaggccuuugggaugagau

SEQ ID NO: 367895 - RNA, 32 nt, Homo Sapiens
uuguuacaggagauuauaggcuagucuguaau

SEQ ID NO: 367896 - RNA, 32 nt, Homo Sapiens
aggccggcaucgagugucaucaauuucuacca

SEQ ID NO: 367897 - RNA, 32 nt, Homo Sapiens
uuccucuucuauuaugaaagaaguuuauuugu

SEQ ID NO: 367898 - RNA, 32 nt, Homo Sapiens
ggacuucggaccauaggggaucuuuggaaggc

SEQ ID NO: 367899 - RNA, 32 nt, Homo Sapiens
uccgcggcaacgccuccuuggugucguccgcu

SEQ ID NO: 367900 - RNA, 32 nt, Homo Sapiens
ccagauccgagaccuggaggaccggcuagccc

SEQ ID NO: 367901 - RNA, 31 nt, Homo Sapiens
uuauaucauuugagaaugaaaaaauaagcuu

SEQ ID NO: 367902 - RNA, 32 nt, Homo Sapiens
aaaugugcaugggaagcagagccccgguucca

SEQ ID NO: 367903 - RNA, 32 nt, Homo Sapiens
ccuacugucuggaguugucuggcaccguccuu

SEQ ID NO: 367904 - RNA, 32 nt, Homo Sapiens
aagugagugaguuugcagaaagcaggugguga

SEQ ID NO: 367905 - RNA, 32 nt, Homo Sapiens
acguccgcagccccggccuggcugcggugcuc

SEQ ID NO: 367906 - RNA, 32 nt, Homo Sapiens
cuuccucauucugcacccagaacccaagaaaa

SEQ ID NO: 367907 - RNA, 32 nt, Homo Sapiens
aggaacuaacuuacuguccaccaguuuauaca

SEQ ID NO: 367908 - RNA, 32 nt, Homo Sapiens
uuuaaagaaaaauuauaugaucugaagauaag

SEQ ID NO: 367909 - RNA, 30 nt, Homo Sapiens
uuauuuauauauucuuacaagaguguaagg

SEQ ID NO: 367910 - RNA, 32 nt, Homo Sapiens
cucccucugcacccccuugccggaagcaguca

SEQ ID NO: 367911 - RNA, 32 nt, Homo Sapiens
uuaauuuuggaaacagaaggagaagcacugcc

SEQ ID NO: 367912 - RNA, 32 nt, Homo Sapiens
aaaagcuagaaacacuugggguugucaacaug

SEQ ID NO: 367913 - RNA, 32 nt, Homo Sapiens
aaaguguucucccagaaagugcucucaccucc

SEQ ID NO: 367914 - RNA, 32 nt, Homo Sapiens
cccuuggcggcuggacggaggggggacuugcu

SEQ ID NO: 367915 - RNA, 32 nt, Homo Sapiens
cagaauacagcaugguucccacaugcauuuau

SEQ ID NO: 367916 - RNA, 32 nt, Homo Sapiens
ggcugcagccugccacaccucccaccacucag

SEQ ID NO: 367917 - RNA, 32 nt, Homo Sapiens
gcacgagcuuaaguuccccuguucaaggcaua

SEQ ID NO: 367918 - RNA, 32 nt, Homo Sapiens
ucucaaagccccauuaacugcuuccuauaauu

SEQ ID NO: 367919 - RNA, 32 nt, Homo Sapiens
gcaucaaaaugucaguuguaauuuagccucug

SEQ ID NO: 367920 - RNA, 32 nt, Homo Sapiens
acgugaugaugaucuguggccagugggagaug

SEQ ID NO: 367921 - RNA, 32 nt, Homo Sapiens
agaccaagaacccaccaauuccagacacagug

SEQ ID NO: 367922 - RNA, 32 nt, Homo Sapiens
ucccccgccucucgcucaccccggcccacucc

SEQ ID NO: 367923 - RNA, 32 nt, Homo Sapiens
gggcuuugcuccacuuggagucagcugauuga

SEQ ID NO: 367924 - RNA, 32 nt, Homo Sapiens
guccuuguucuuccuauuucaccuccaggaaa

SEQ ID NO: 367925 - RNA, 32 nt, Homo Sapiens
acaguguuuuaccagagugaaaucacaggaua

SEQ ID NO: 367926 - RNA, 32 nt, Homo Sapiens
cccuaagggaagggcuggccgcucacugcuug

SEQ ID NO: 367927 - RNA, 32 nt, Homo Sapiens
augggccugcaccuaccucuggcauguuuuuc

SEQ ID NO: 367928 - RNA, 32 nt, Homo Sapiens
uccucccagccccggcccauuccuccccugca

SEQ ID NO: 367929 - RNA, 32 nt, Homo Sapiens
auucccucggcgggccgagccuccccucucuc

SEQ ID NO: 367930 - RNA, 32 nt, Homo Sapiens
guaucuacacucugagggcccuggacugggcc

SEQ ID NO: 367931 - RNA, 32 nt, Homo Sapiens
cgcgcaagggcacagugcugcagccagugcug

SEQ ID NO: 367932 - RNA, 32 nt, Homo Sapiens
acuuugcgccucuggggugcuagagguggggc

SEQ ID NO: 367933 - RNA, 32 nt, Homo Sapiens
gccgcauuucugaccugagccccgggucucgg

SEQ ID NO: 367934 - RNA, 32 nt, Homo Sapiens
cgccgguucccggccccguggauccuacuucu

SEQ ID NO: 367935 - RNA, 32 nt, Homo Sapiens
cagaagguggagguggcagugagccgagauca

SEQ ID NO: 367936 - RNA, 32 nt, Homo Sapiens
gggcugcugauggucagcucugagacaguggu

SEQ ID NO: 367937 - RNA, 32 nt, Homo Sapiens
ugccaggguugcaguucacgugucagacgagc

SEQ ID NO: 367938 - RNA, 32 nt, Homo Sapiens
guaggccacagcaccacacacacugcaaacca

SEQ ID NO: 367939 - RNA, 32 nt, Homo Sapiens
cugaagaaucugaaguuuuuuuuaccaccauc

SEQ ID NO: 367940 - RNA, 32 nt, Homo Sapiens
ugcuuuuguaaauacguaaaacuguaauuuuu

SEQ ID NO: 367941 - RNA, 32 nt, Homo Sapiens
acucgccgcccggagaccccgaggcuccaacg

SEQ ID NO: 367942 - RNA, 32 nt, Homo Sapiens
gcucguguggccgccuaccucccccaccugcg

SEQ ID NO: 367943 - RNA, 32 nt, Homo Sapiens
cgcugggccccggcaccugcgcacuggcaccc

SEQ ID NO: 367944 - RNA, 32 nt, Homo Sapiens
ugauuuuaugacugagccuuuuccugucccaa

SEQ ID NO: 367945 - RNA, 32 nt, Homo Sapiens
ccugggaucuuccgcuggcccggggugcuccc

SEQ ID NO: 367946 - RNA, 32 nt, Homo Sapiens
gacguggagaggaggagggacacggcaugggg

SEQ ID NO: 367947 - RNA, 32 nt, Homo Sapiens
caagcaguccagggggacccucccugggcaca

SEQ ID NO: 367948 - RNA, 32 nt, Homo Sapiens
ucaaaucauguuugaaucuacauucacuuuuu

SEQ ID NO: 367949 - RNA, 32 nt, Homo Sapiens
ucugacuuccuuucuuccccaucaacugcaac

SEQ ID NO: 367950 - RNA, 32 nt, Homo Sapiens
agugaagaacaccagcauccgaguggcugacu

SEQ ID NO: 367951 - RNA, 28 nt, Homo Sapiens
gugacggggcggccagcagggacgcgcc

SEQ ID NO: 367952 - RNA, 32 nt, Homo Sapiens
agauaugccacauccgagcaguucuuuuccuu

SEQ ID NO: 367953 - RNA, 32 nt, Homo Sapiens
gagaaaguuccagugcacacuucccaugcuuc

SEQ ID NO: 367954 - RNA, 32 nt, Homo Sapiens
uuaaucgagcuguuaucuccaugguauuacuu

SEQ ID NO: 367955 - RNA, 32 nt, Homo Sapiens
gguuuccaccgcccccuccucgcuccacguca

SEQ ID NO: 367956 - RNA, 32 nt, Homo Sapiens
cgccagcccgggagguggcccuggacagccgg

SEQ ID NO: 367957 - RNA, 32 nt, Homo Sapiens
gaguaagcacuuaaaaaauauuugucauauga

SEQ ID NO: 367958 - RNA, 32 nt, Homo Sapiens
cugguugguugggugaugugggggcuguguga

SEQ ID NO: 367959 - RNA, 32 nt, Homo Sapiens
cgcaggugagagggggcggggagggccugacc

SEQ ID NO: 367960 - RNA, 32 nt, Homo Sapiens
cgaagaacgaauguauuuuuuguguaagaagg

SEQ ID NO: 367961 - RNA, 32 nt, Homo Sapiens
uaagaaaugcaaauauacugaaaauugacauc

SEQ ID NO: 367962 - RNA, 32 nt, Homo Sapiens
cucugagcuggaucuagccuucugugugggga

SEQ ID NO: 367963 - RNA, 32 nt, Homo Sapiens
cuacacuagggaauuugcuccuguucugucac

SEQ ID NO: 367964 - RNA, 32 nt, Homo Sapiens
cgaggcaggaggaagaagggggcacugggggg

SEQ ID NO: 367965 - RNA, 32 nt, Homo Sapiens
ugugccugcuucuccuucgccuucuaacauga

SEQ ID NO: 367966 - RNA, 32 nt, Homo Sapiens
ccacacgagacggggcuucagccggggauggu

SEQ ID NO: 367967 - RNA, 32 nt, Homo Sapiens
cgucugcgccugucucucgccacgccuauugc

SEQ ID NO: 367968 - RNA, 30 nt, Homo Sapiens
cgaaugggcugugagccgccgguggaggug

SEQ ID NO: 367969 - RNA, 32 nt, Homo Sapiens
ccuccuggggucaagcaguucugccucagccu

SEQ ID NO: 367970 - RNA, 32 nt, Homo Sapiens
uguugccccuguucugccuuucugggauggga

SEQ ID NO: 367971 - RNA, 32 nt, Homo Sapiens
uaaaaugcagguuuuucuucuucaguuuagcu

SEQ ID NO: 367972 - RNA, 32 nt, Homo Sapiens
cccugcugucccauuuuccccagcuggccgca

SEQ ID NO: 367973 - RNA, 32 nt, Homo Sapiens
uuaaucuagaaaaugaaaagauggaguuguau

SEQ ID NO: 367974 - RNA, 32 nt, Homo Sapiens
aaagauguggguucuuuuucuugucauuaaca

SEQ ID NO: 367975 - RNA, 30 nt, Homo Sapiens
uggggucgcucuuugggggaaacggguucc

SEQ ID NO: 367976 - RNA, 32 nt, Homo Sapiens
uuaaauuuuuaaagcuguaauaagacugggca

SEQ ID NO: 367977 - RNA, 31 nt, Homo Sapiens
accagcccccugcgcguguccacucugaucc

SEQ ID NO: 367978 - RNA, 32 nt, Homo Sapiens
acagaaugaggaauggagauuuuuguauuuau

SEQ ID NO: 367979 - RNA, 32 nt, Homo Sapiens
ggcugccguccucuccuccucgcgccccaccu

SEQ ID NO: 367980 - RNA, 32 nt, Homo Sapiens
uuaaagcuggaacauuugauauuuuuccauuu

SEQ ID NO: 367981 - RNA, 32 nt, Homo Sapiens
aauuccaaacuuagugaaauggccuuaagcau

SEQ ID NO: 367982 - RNA, 32 nt, Homo Sapiens
auuuuuaauaaagauuuuauuuuuuagagcag

SEQ ID NO: 367983 - RNA, 32 nt, Homo Sapiens
caggaacgguccccggcuucgcgccccaauuu

SEQ ID NO: 367984 - RNA, 32 nt, Homo Sapiens
ggccacccuggaaucagaacugcacaaucaag

SEQ ID NO: 367985 - RNA, 30 nt, Homo Sapiens
uguagugucuguguuguuuucccuugaccc

SEQ ID NO: 367986 - RNA, 32 nt, Homo Sapiens
auugcaugugguaagaaauugugauuuaagau

SEQ ID NO: 367987 - RNA, 32 nt, Homo Sapiens
gccaucugccgggaacgguuuuggguuccuga

SEQ ID NO: 367988 - RNA, 32 nt, Homo Sapiens
uggguagaucuggguuaggagcugggaaguug

SEQ ID NO: 367989 - RNA, 32 nt, Homo Sapiens
gccucuguguuucuuucccugguccugaacug

SEQ ID NO: 367990 - RNA, 32 nt, Homo Sapiens
auuuguguacuucuuuguuuaauuuagaaaua

SEQ ID NO: 367991 - RNA, 32 nt, Homo Sapiens
uacgcccccguuuuauggguuuggcuuaguug

SEQ ID NO: 367992 - RNA, 32 nt, Homo Sapiens
uuuaaucaucuuaaaguaugauuugauauaau

SEQ ID NO: 367993 - RNA, 32 nt, Homo Sapiens
gaccaaggcuaggcuuuuuuauuucaauaggu

SEQ ID NO: 367994 - RNA, 32 nt, Homo Sapiens
ggagcuggcccgcuccuccccgccgagccggc

SEQ ID NO: 367995 - RNA, 32 nt, Homo Sapiens
aaggagcugccagccaucuaacugggcucguc

SEQ ID NO: 367996 - RNA, 32 nt, Homo Sapiens
ugaaaaauauuaaauucccaauuuaaaguauu

SEQ ID NO: 367997 - RNA, 32 nt, Homo Sapiens
uguacuauuguaacuucuaguucccuaagagg

SEQ ID NO: 367998 - RNA, 32 nt, Homo Sapiens
gugaggaugauuugguagcuuuauugggguca

SEQ ID NO: 367999 - RNA, 32 nt, Homo Sapiens
auccucccaccucggccucccaaaguucuggg

SEQ ID NO: 368000 - RNA, 32 nt, Homo Sapiens
cagguugccugcccaaugggagagguaggguu

SEQ ID NO: 368001 - RNA, 32 nt, Homo Sapiens
cugaauaaagcacgugcaaggacucccggagc

SEQ ID NO: 368002 - RNA, 32 nt, Homo Sapiens
augcuugauauaugaggccuaguaauaacgau

SEQ ID NO: 368003 - RNA, 32 nt, Homo Sapiens
augcagaaggcacuagcuuccugggccccuca

SEQ ID NO: 368004 - RNA, 32 nt, Homo Sapiens
cuucaggucccuuccuuggugagagacagggg

SEQ ID NO: 368005 - RNA, 32 nt, Homo Sapiens
cacaaugaaauagugauuaugaaaauacagug

SEQ ID NO: 368006 - RNA, 32 nt, Homo Sapiens
cacaauuucccgccuuuuuuuuuuuuugugaa

SEQ ID NO: 368007 - RNA, 32 nt, Homo Sapiens
gacuguucuaaaauauaauagaauacccuaaa

SEQ ID NO: 368008 - RNA, 32 nt, Homo Sapiens
uacugaauuaaucugaaauguacaagcccugg

SEQ ID NO: 368009 - RNA, 32 nt, Homo Sapiens
uaaucucaauuucggagguuucacaaaaugga

SEQ ID NO: 368010 - RNA, 30 nt, Homo Sapiens
caggcucuggacuggagcucucuggcaugg

SEQ ID NO: 368011 - RNA, 32 nt, Homo Sapiens
aacugaccucggaggacgagaggggaaggagg

SEQ ID NO: 368012 - RNA, 32 nt, Homo Sapiens
aggcaggggcaguggcauccuugccguagcag

SEQ ID NO: 368013 - RNA, 32 nt, Homo Sapiens
aggccggagcuuccuuccuuagccgggaagcu

SEQ ID NO: 368014 - RNA, 32 nt, Homo Sapiens
agccagcaacacagagcacuagguucaauucc

SEQ ID NO: 368015 - RNA, 32 nt, Homo Sapiens
cgucaucccgcggaaugggggcccagggggug

SEQ ID NO: 368016 - RNA, 32 nt, Homo Sapiens
cucaucacauaaagaaauucaagaaguauuuu

SEQ ID NO: 368017 - RNA, 28 nt, Homo Sapiens
aaguaaacaugguuacauuugaaucucu

SEQ ID NO: 368018 - RNA, 32 nt, Homo Sapiens
gggccaccacaccacacccaagcccauacaac

SEQ ID NO: 368019 - RNA, 32 nt, Homo Sapiens
uuccauaguucauccuggaucccggaaacaug

SEQ ID NO: 368020 - RNA, 32 nt, Homo Sapiens
uucguuuaaguaaagguuaaucuugaugauau

SEQ ID NO: 368021 - RNA, 32 nt, Homo Sapiens
ugcagaauaguuuuuucccuauugacugucag

SEQ ID NO: 368022 - RNA, 32 nt, Homo Sapiens
aguuggcuaagaaaauguucuucuaugcuccc

SEQ ID NO: 368023 - RNA, 32 nt, Homo Sapiens
ggccuguaaucucagcacuuugggaggccgag

SEQ ID NO: 368024 - RNA, 32 nt, Homo Sapiens
guguccgcgaguuuuuguuccgcuccgcagcg

SEQ ID NO: 368025 - RNA, 32 nt, Homo Sapiens
acuacaaucaccgaaucuacuguauucaauau

SEQ ID NO: 368026 - RNA, 32 nt, Homo Sapiens
ucuagucguuucugcauuuccuuuaaaaauag

SEQ ID NO: 368027 - RNA, 32 nt, Homo Sapiens
uccagcccauguuuccccaucaucaagccaug

SEQ ID NO: 368028 - RNA, 32 nt, Homo Sapiens
cccagguggugcgggggcuggugggcgggcgg

SEQ ID NO: 368029 - RNA, 30 nt, Homo Sapiens
gcaauaccgcuugccacauccucucuauuu

SEQ ID NO: 368030 - RNA, 32 nt, Homo Sapiens
uuuacauuaacgagcaggccucugucuuaaaa

SEQ ID NO: 368031 - RNA, 32 nt, Homo Sapiens
agggugggagccuaaggaagcgugggguagca

SEQ ID NO: 368032 - RNA, 32 nt, Homo Sapiens
gcaaggaaggaggcggugacagacgggcugaa

SEQ ID NO: 368033 - RNA, 32 nt, Homo Sapiens
uaccggcggcggcgcgcagcgugucaggcgga

SEQ ID NO: 368034 - RNA, 32 nt, Homo Sapiens
caggcaccucaaagcgguuuaaccacauuaau

SEQ ID NO: 368035 - RNA, 32 nt, Homo Sapiens
caauucugccucagccucccaaguagcuggga

SEQ ID NO: 368036 - RNA, 32 nt, Homo Sapiens
caucccuugccgcugccacgggcagccccagc

SEQ ID NO: 368037 - RNA, 32 nt, Homo Sapiens
auuugaaacacuuuucuggcucuguuaguggc

SEQ ID NO: 368038 - RNA, 32 nt, Homo Sapiens
ggccgcgggucgggcucugugucagcagccgg

SEQ ID NO: 368039 - RNA, 32 nt, Homo Sapiens
aaauccacauucuccaucgcuucucagccuuu

SEQ ID NO: 368040 - RNA, 32 nt, Homo Sapiens
ggucacaaccaccgugggauccacuuacagag

SEQ ID NO: 368041 - RNA, 32 nt, Homo Sapiens
acuuaguauuucugccccgaguuuugccacac

SEQ ID NO: 368042 - RNA, 32 nt, Homo Sapiens
acacauaauuccauuuugaaaauccauucuua

SEQ ID NO: 368043 - RNA, 32 nt, Homo Sapiens
accgucccuggccauugggacugcuucugaug

SEQ ID NO: 368044 - RNA, 32 nt, Homo Sapiens
uaaccuuucagccacacccucccaaaaggcuu

SEQ ID NO: 368045 - RNA, 32 nt, Homo Sapiens
ucacccugugcccgaagagacccggaaccaag

SEQ ID NO: 368046 - RNA, 32 nt, Homo Sapiens
aacucaggcaguuuaccucugauggcugcucu

SEQ ID NO: 368047 - RNA, 32 nt, Homo Sapiens
ugcagggcuuugauggcaucguguggagcagg

SEQ ID NO: 368048 - RNA, 32 nt, Homo Sapiens
cucuggccgugacgguggcugcagcuucccca

SEQ ID NO: 368049 - RNA, 32 nt, Homo Sapiens
auuucuccuuggauaggggaccagagagagcu

SEQ ID NO: 368050 - RNA, 32 nt, Homo Sapiens
uucggggagaaggcccuuggagccgggcuggc

SEQ ID NO: 368051 - RNA, 32 nt, Homo Sapiens
aaaauaagaauaccuuuauuaaggggaauucu

SEQ ID NO: 368052 - RNA, 32 nt, Homo Sapiens
uggagaaggcauuuuuccuaacacugauacua

SEQ ID NO: 368053 - RNA, 32 nt, Homo Sapiens
caguugcgcuggcucagcggggccggaacaug

SEQ ID NO: 368054 - RNA, 32 nt, Homo Sapiens
caaagcugaaagauuugaugagggauuggaau

SEQ ID NO: 368055 - RNA, 32 nt, Homo Sapiens
aauucaguucccugaauggagucaggugcugg

SEQ ID NO: 368056 - RNA, 32 nt, Homo Sapiens
cccugcucugcccucccuggcuccuggacuag

SEQ ID NO: 368057 - RNA, 32 nt, Homo Sapiens
ucugacugacuucuauuuaacagcuugaguau

SEQ ID NO: 368058 - RNA, 32 nt, Homo Sapiens
cuggccggcgccgcagucggcgcgggccgcgc

SEQ ID NO: 368059 - RNA, 32 nt, Homo Sapiens
acucacguggaaaugugaacugucccggcucu

SEQ ID NO: 368060 - RNA, 32 nt, Homo Sapiens
cguuggagguccugaggccagccuaagucgcu

SEQ ID NO: 368061 - RNA, 32 nt, Homo Sapiens
gucaaaaaauggaaacaaccgaaaugcccacc

SEQ ID NO: 368062 - RNA, 32 nt, Homo Sapiens
ucauucauggggggcugcuaccugacccuugg

SEQ ID NO: 368063 - RNA, 32 nt, Homo Sapiens
cgccgccucccaagccugcaaccccggcgacc

SEQ ID NO: 368064 - RNA, 32 nt, Homo Sapiens
ugagaaaggucuuucuuuuuauagaaaagauc

SEQ ID NO: 368065 - RNA, 32 nt, Homo Sapiens
uuggggcaaagacauuuccauuuccgaucucc

SEQ ID NO: 368066 - RNA, 32 nt, Homo Sapiens
accucaccauguguccuccccuccccucccuu

SEQ ID NO: 368067 - RNA, 32 nt, Homo Sapiens
agccuuguuuggcuuccacuuuucggcccgcc

SEQ ID NO: 368068 - RNA, 32 nt, Homo Sapiens
agcgagcagauccaguccggcccgcagcgcaa

SEQ ID NO: 368069 - RNA, 32 nt, Homo Sapiens
aaagaccugggguggggguuucugcauccggg

SEQ ID NO: 368070 - RNA, 32 nt, Homo Sapiens
gcugaauaaaugucuuuuuuuuaaugugcugu

SEQ ID NO: 368071 - RNA, 32 nt, Homo Sapiens
gacacccgaucgugagaccugcugagccagcc

SEQ ID NO: 368072 - RNA, 32 nt, Homo Sapiens
guggugcugcucagccuucucugccccuccug

SEQ ID NO: 368073 - RNA, 32 nt, Homo Sapiens
cgcgggcacuuggcgcgcucuccugggaccgu

SEQ ID NO: 368074 - RNA, 32 nt, Homo Sapiens
cuccaucugugcccucgccccagccgcagcua

SEQ ID NO: 368075 - RNA, 32 nt, Homo Sapiens
ccuuuccuaucccauuucccccacggaagcac

SEQ ID NO: 368076 - RNA, 32 nt, Homo Sapiens
augcuaggguugauauuuaggcuuauaacaaa

SEQ ID NO: 368077 - RNA, 32 nt, Homo Sapiens
uaaaugucuuuuuuauucuuauuuccucucuc

SEQ ID NO: 368078 - RNA, 32 nt, Homo Sapiens
gaaagccacggggguguacggucgcagcgugg

SEQ ID NO: 368079 - RNA, 32 nt, Homo Sapiens
uugccacccccaccccacggacguguugcagu

SEQ ID NO: 368080 - RNA, 32 nt, Homo Sapiens
cucggaggggaccggcugugcagacgccaugg

SEQ ID NO: 368081 - RNA, 32 nt, Homo Sapiens
cuccgugugcccuggacucgccgcccgcggcu

SEQ ID NO: 368082 - RNA, 32 nt, Homo Sapiens
cggugcucggccaguuacaaaagaaaugguca

SEQ ID NO: 368083 - RNA, 32 nt, Homo Sapiens
agaaaaagaaacaaagauaaggauaaaaacug

SEQ ID NO: 368084 - RNA, 32 nt, Homo Sapiens
cauucugggcuuugcuguaucuaucuagugcc

SEQ ID NO: 368085 - RNA, 32 nt, Homo Sapiens
aacacaagcuuaguguuagaucuuguaggaaa

SEQ ID NO: 368086 - RNA, 32 nt, Homo Sapiens
aaccacuuccacaguuuggacaaggagcuuca

SEQ ID NO: 368087 - RNA, 32 nt, Homo Sapiens
acgaaaucuaccaagcuugcaagaccaguuga

SEQ ID NO: 368088 - RNA, 32 nt, Homo Sapiens
ccccgaaacuuucacgcgagcgggaaauaugg

SEQ ID NO: 368089 - RNA, 32 nt, Homo Sapiens
ggucuggggucgccggagccugcgggaaucca

SEQ ID NO: 368090 - RNA, 32 nt, Homo Sapiens
ccuggacaaccuggacccagaugcaagacacu

SEQ ID NO: 368091 - RNA, 31 nt, Homo Sapiens
agggcggggugccccauuuaggccuggcuca

SEQ ID NO: 368092 - RNA, 32 nt, Homo Sapiens
aaugcaccaaagggccagauuucuaucuucag

SEQ ID NO: 368093 - RNA, 32 nt, Homo Sapiens
guuucaaacauucacaugauaauuaaacuaac

SEQ ID NO: 368094 - RNA, 32 nt, Homo Sapiens
ugucaggaaugggaauguuuuugaaaacagac

SEQ ID NO: 368095 - RNA, 32 nt, Homo Sapiens
uuguugaucucaggcgaugcuugugaugaagc

SEQ ID NO: 368096 - RNA, 32 nt, Homo Sapiens
ccuagagguagagaaaccguggagaucgcuuu

SEQ ID NO: 368097 - RNA, 32 nt, Homo Sapiens
uuguuuauaaaguuuggguaauuuauaacaaa

SEQ ID NO: 368098 - RNA, 32 nt, Homo Sapiens
ggggcgggagacggggcgguucugucuggcag

SEQ ID NO: 368099 - RNA, 32 nt, Homo Sapiens
gaagggaagagacagcccaggauacuggcaca

SEQ ID NO: 368100 - RNA, 32 nt, Homo Sapiens
ugcucucccucccccagccccccaccccauga

SEQ ID NO: 368101 - RNA, 32 nt, Homo Sapiens
agcaaguguggccacacaauggucaaguugga

SEQ ID NO: 368102 - RNA, 32 nt, Homo Sapiens
gacaacagggcuuaugaggucuauguaccuua

SEQ ID NO: 368103 - RNA, 32 nt, Homo Sapiens
cuaaacccauagaaggaguuggaccaaggcga

SEQ ID NO: 368104 - RNA, 32 nt, Homo Sapiens
gguuuccuuuuggaacauuucuuucuugcugg

SEQ ID NO: 368105 - RNA, 32 nt, Homo Sapiens
gucaguggcucuugcgaaugccccauagcaga

SEQ ID NO: 368106 - RNA, 32 nt, Homo Sapiens
aucuuuaucaugaagcacaucaauuacaagcu

SEQ ID NO: 368107 - RNA, 32 nt, Homo Sapiens
accuuuguauucucuccuguaccucuugagcc

SEQ ID NO: 368108 - RNA, 32 nt, Homo Sapiens
uuccggaccccaugggcccagccccugcccau

SEQ ID NO: 368109 - RNA, 32 nt, Homo Sapiens
uagagggcgcaucgccggcccggggcccuugg

SEQ ID NO: 368110 - RNA, 32 nt, Homo Sapiens
auuauuauuauuauuuuuuuuacauuaggaca

SEQ ID NO: 368111 - RNA, 32 nt, Homo Sapiens
agacugaaaauguuucuuauuacauauaaauc

SEQ ID NO: 368112 - RNA, 32 nt, Homo Sapiens
ggcgaucaaaaccgaagaaacaaaaucuuaaa

SEQ ID NO: 368113 - RNA, 32 nt, Homo Sapiens
uuuggacccuguaaagggucagggugaaucag

SEQ ID NO: 368114 - RNA, 32 nt, Homo Sapiens
ggaggcgcggggggccugggccaggcaugaug

SEQ ID NO: 368115 - RNA, 32 nt, Homo Sapiens
cggccccagggagugcagagccagggagaggg

SEQ ID NO: 368116 - RNA, 32 nt, Homo Sapiens
ugcauccucagcacaggaaguacccacaugga

SEQ ID NO: 368117 - RNA, 32 nt, Homo Sapiens
ccaugauagaagucuguaaauaccuuggugac

SEQ ID NO: 368118 - RNA, 32 nt, Homo Sapiens
gagguccaucaauggcuucuuaaaggaaaagg

SEQ ID NO: 368119 - RNA, 32 nt, Homo Sapiens
auggaaaaaggcuaaguaauaugugaauauca

SEQ ID NO: 368120 - RNA, 32 nt, Homo Sapiens
uaaauguagaugccuccaugaguucugugggc

SEQ ID NO: 368121 - RNA, 29 nt, Homo Sapiens
uuuuacauauguauguauuuauaaaugca

SEQ ID NO: 368122 - RNA, 32 nt, Homo Sapiens
uucauucagaaaccaugguugguggucaucau

SEQ ID NO: 368123 - RNA, 32 nt, Homo Sapiens
aguccaguuucuuuucaacauagggugaaaau

SEQ ID NO: 368124 - RNA, 32 nt, Homo Sapiens
gcgggggcccgagggauucugaaggaagauuu

SEQ ID NO: 368125 - RNA, 32 nt, Homo Sapiens
cagauacgaggaauguauccccugccuauuuu

SEQ ID NO: 368126 - RNA, 32 nt, Homo Sapiens
aguuaaagaccugugugcucugcugcauuuau

SEQ ID NO: 368127 - RNA, 32 nt, Homo Sapiens
guacccccucuccgcaggucuuucucccaaua

SEQ ID NO: 368128 - RNA, 28 nt, Homo Sapiens
uguucaguuuuucaaaucuguuuuccug

SEQ ID NO: 368129 - RNA, 32 nt, Homo Sapiens
augaaucuauaguuacagaaaucagguaagug

SEQ ID NO: 368130 - RNA, 32 nt, Homo Sapiens
cucucgggagacgugggcccucggaaccuuuu

SEQ ID NO: 368131 - RNA, 32 nt, Homo Sapiens
ugucgcuugggguugcugcauaaaugcuagga

SEQ ID NO: 368132 - RNA, 30 nt, Homo Sapiens
guauuccaugcucaguauuuuuuauugucc

SEQ ID NO: 368133 - RNA, 32 nt, Homo Sapiens
aggcccgggcucggggaccuuucgcacucggg

SEQ ID NO: 368134 - RNA, 32 nt, Homo Sapiens
cuuuguuaggcaugaacgucuuuauuaaucca

SEQ ID NO: 368135 - RNA, 32 nt, Homo Sapiens
caggcucugaauucuuugauguaccaauguau

SEQ ID NO: 368136 - RNA, 32 nt, Homo Sapiens
uaaauaucacauuuugucauuaacacagcuau

SEQ ID NO: 368137 - RNA, 32 nt, Homo Sapiens
ucuguagauauguuugaauauagaaacuuuuu

SEQ ID NO: 368138 - RNA, 32 nt, Homo Sapiens
acucccagggccccacucuccuccccucauua

SEQ ID NO: 368139 - RNA, 32 nt, Homo Sapiens
ccuaaacauaauuguggauuauaaaaaaugua

SEQ ID NO: 368140 - RNA, 32 nt, Homo Sapiens
gaggauggaagaccaggcuugugugucuugug

SEQ ID NO: 368141 - RNA, 32 nt, Homo Sapiens
uaaaauaauaauuuauaggacaguuuuucuac

SEQ ID NO: 368142 - RNA, 32 nt, Homo Sapiens
uccagcagccccucuucagagccccuguaaau

SEQ ID NO: 368143 - RNA, 32 nt, Homo Sapiens
uugaaauauaaagaagaagagaaagccuucag

SEQ ID NO: 368144 - RNA, 32 nt, Homo Sapiens
uuguagggaauggacuaauaucaguguguuag

SEQ ID NO: 368145 - RNA, 32 nt, Homo Sapiens
gagcacuauaaaaucaaaaaccaaugaaaugg

SEQ ID NO: 368146 - RNA, 32 nt, Homo Sapiens
uggaccugccaccaucacuuucugggucagga

SEQ ID NO: 368147 - RNA, 32 nt, Homo Sapiens
ccuggccuuauggggauccuggagcggguugu

SEQ ID NO: 368148 - RNA, 32 nt, Homo Sapiens
caucuguacauguauuuuuuuauuuuuuauca

SEQ ID NO: 368149 - RNA, 32 nt, Homo Sapiens
uggcccugccucugccuggccggcgccgcagu

SEQ ID NO: 368150 - RNA, 32 nt, Homo Sapiens
uauuggccuaaaacguauucuguaaagcuuaa

SEQ ID NO: 368151 - RNA, 32 nt, Homo Sapiens
gcuguggcugcacuggccccaguccauagagg

SEQ ID NO: 368152 - RNA, 32 nt, Homo Sapiens
agugacuuucggucuugguuauauggagaauu

SEQ ID NO: 368153 - RNA, 32 nt, Homo Sapiens
acgaggucaggagacagagaccauccuggcca

SEQ ID NO: 368154 - RNA, 32 nt, Homo Sapiens
acgaggucaggagaucgagaccauccuggcuc

SEQ ID NO: 368155 - RNA, 32 nt, Homo Sapiens
ugagaccuauuauauauugaauaccugcugua

SEQ ID NO: 368156 - RNA, 32 nt, Homo Sapiens
gccucccucucucuccggcacccauuaccucu

SEQ ID NO: 368157 - RNA, 32 nt, Homo Sapiens
gaccaccuacuucauaggguugcaauaaggau

SEQ ID NO: 368158 - RNA, 32 nt, Homo Sapiens
gguagagcuggguauggaugcuuagugcccuc

SEQ ID NO: 368159 - RNA, 32 nt, Homo Sapiens
gccaaaucuaaauggaccaggaugaacaaauu

SEQ ID NO: 368160 - RNA, 32 nt, Homo Sapiens
gagcccaccccaccccaguccagccaugaggg

SEQ ID NO: 368161 - RNA, 32 nt, Homo Sapiens
guaucggguguucugauguggaaaaaagaaau

SEQ ID NO: 368162 - RNA, 32 nt, Homo Sapiens
aauagcaaaaagacauuuaaaauucaagaagc

SEQ ID NO: 368163 - RNA, 32 nt, Homo Sapiens
acuugguacgugaggaaaaaacacggaagagg

SEQ ID NO: 368164 - RNA, 32 nt, Homo Sapiens
auucacggggaucccaggcuagugggacucga

SEQ ID NO: 368165 - RNA, 32 nt, Homo Sapiens
ugugcugggagcagcucugugacucccccucu

SEQ ID NO: 368166 - RNA, 32 nt, Homo Sapiens
agucaggauaacacugacgcucccuggcaucc

SEQ ID NO: 368167 - RNA, 32 nt, Homo Sapiens
cggcgcccuggugaggcccaaaccucccgcca

SEQ ID NO: 368168 - RNA, 32 nt, Homo Sapiens
cuucacuuagggcaucgcagauguuugcagaa

SEQ ID NO: 368169 - RNA, 31 nt, Homo Sapiens
acauucauguacaaguuuuuguuugaaugcc

SEQ ID NO: 368170 - RNA, 32 nt, Homo Sapiens
caacaagacauuccuagagggaaagggcugcu

SEQ ID NO: 368171 - RNA, 32 nt, Homo Sapiens
ucucugagcauuuuaaacaucuucccauuuaa

SEQ ID NO: 368172 - RNA, 32 nt, Homo Sapiens
caggugcucccucccuuccugcaggcccaccu

SEQ ID NO: 368173 - RNA, 32 nt, Homo Sapiens
guugaaggauaauuaaacuuuucauuaggagu

SEQ ID NO: 368174 - RNA, 32 nt, Homo Sapiens
gugccgugguggccaaccggacccaggccuuc

SEQ ID NO: 368175 - RNA, 32 nt, Homo Sapiens
aauuagccagguaugauggugcaugcuuguag

SEQ ID NO: 368176 - RNA, 32 nt, Homo Sapiens
aaccaaagauuccacaucggcaguuccaaugg

SEQ ID NO: 368177 - RNA, 32 nt, Homo Sapiens
uuuuaguagagacgggguuuugccauguuucc

SEQ ID NO: 368178 - RNA, 32 nt, Homo Sapiens
ccuugcauuuuuccugucagugccuuagccaa

SEQ ID NO: 368179 - RNA, 32 nt, Homo Sapiens
cauuccucgaaccccaggagccaagaagggcc

SEQ ID NO: 368180 - RNA, 32 nt, Homo Sapiens
aauaagugcuacuuugccauuaaggcagacua

SEQ ID NO: 368181 - RNA, 32 nt, Homo Sapiens
ggaaaagaagaggacaacuagaagagaguucc

SEQ ID NO: 368182 - RNA, 32 nt, Homo Sapiens
cgagccgcugccuccgcuccuggcgccggacg

SEQ ID NO: 368183 - RNA, 32 nt, Homo Sapiens
uuucaaaaaugaaggcaaaauaaagacuguuu

SEQ ID NO: 368184 - RNA, 32 nt, Homo Sapiens
ugugucuuuuucuuuugaaacucuaaacacuu

SEQ ID NO: 368185 - RNA, 32 nt, Homo Sapiens
aaacugggcuccugcuuuauugucucugugac

SEQ ID NO: 368186 - RNA, 32 nt, Homo Sapiens
agcagguccgccagaccacccgcugggacuca

SEQ ID NO: 368187 - RNA, 32 nt, Homo Sapiens
cuacaagguugugcccuccaccuaccugccgg

SEQ ID NO: 368188 - RNA, 32 nt, Homo Sapiens
auuaauguaaaaauggaacuuauuuuugucaa

SEQ ID NO: 368189 - RNA, 32 nt, Homo Sapiens
ccuucgccgcucgggccgcccgggggaaaaca

SEQ ID NO: 368190 - RNA, 30 nt, Homo Sapiens
cuuccgggccccgugccccugacugggaug

SEQ ID NO: 368191 - RNA, 32 nt, Homo Sapiens
augaaugcagacuggagucacugcacacacuu

SEQ ID NO: 368192 - RNA, 32 nt, Homo Sapiens
cccccuccgccgugagaagcaguucgugggcu

SEQ ID NO: 368193 - RNA, 32 nt, Homo Sapiens
gcauggguaaaauuauuaaauaguuguauaau

SEQ ID NO: 368194 - RNA, 31 nt, Homo Sapiens
gaugggagggcgguggaggcucuguacccug

SEQ ID NO: 368195 - RNA, 32 nt, Homo Sapiens
ccuggccugccccccacccccaaccuguccca

SEQ ID NO: 368196 - RNA, 32 nt, Homo Sapiens
cuuugguucaaccaggugcuuuucucaucgca

SEQ ID NO: 368197 - RNA, 32 nt, Homo Sapiens
gacaaaagauuuucuuggcaaaauauuucuau

SEQ ID NO: 368198 - RNA, 32 nt, Homo Sapiens
uuaaacuaguaacagcaggccuuuugcguuua

SEQ ID NO: 368199 - RNA, 32 nt, Homo Sapiens
aaagcaauuguuaaauacucuuuagaacuacc

SEQ ID NO: 368200 - RNA, 32 nt, Homo Sapiens
uccuggugagacauguggcuuaacucacaggu

SEQ ID NO: 368201 - RNA, 32 nt, Homo Sapiens
cgggggcgguggcucacgccuguaaucccaac

SEQ ID NO: 368202 - RNA, 32 nt, Homo Sapiens
uugaaaugacucugucuguggggcagcagaaa

SEQ ID NO: 368203 - RNA, 32 nt, Homo Sapiens
gagugggauagauggguuuucuggccauguug

SEQ ID NO: 368204 - RNA, 32 nt, Homo Sapiens
gcacaacauacuagaauucacacuggagagaa

SEQ ID NO: 368205 - RNA, 32 nt, Homo Sapiens
accauucuguaccccuuccccagccugggccu

SEQ ID NO: 368206 - RNA, 32 nt, Homo Sapiens
cuugcuggaggaucaaaagaaaaaauagacau

SEQ ID NO: 368207 - RNA, 32 nt, Homo Sapiens
gguacugcuauauaaauauucacucacauuau

SEQ ID NO: 368208 - RNA, 32 nt, Homo Sapiens
ugucuuuuuuuuucuuuuuccaguguucuauu

SEQ ID NO: 368209 - RNA, 32 nt, Homo Sapiens
cgagaucgcgcagcugcacuccagccugggca

SEQ ID NO: 368210 - RNA, 32 nt, Homo Sapiens
ucccucaaccucauccucuccacagcugccuc

SEQ ID NO: 368211 - RNA, 32 nt, Homo Sapiens
cuguuccccgcaccccccacagcugcagugac

SEQ ID NO: 368212 - RNA, 32 nt, Homo Sapiens
aaaagguuuuaaaaauuguauccuagggaaca

SEQ ID NO: 368213 - RNA, 32 nt, Homo Sapiens
gcucugccuugcaucacccucagccuaaggga

SEQ ID NO: 368214 - RNA, 32 nt, Homo Sapiens
accucaugaaggaaacacaguccugccaagga

SEQ ID NO: 368215 - RNA, 32 nt, Homo Sapiens
gaaagucgcggcgggggcgcggcccggucucc

SEQ ID NO: 368216 - RNA, 32 nt, Homo Sapiens
caggaaggcugggggagggaguuuacaaccca

SEQ ID NO: 368217 - RNA, 32 nt, Homo Sapiens
agcccuggaugcuauccacacccaccuauccc

SEQ ID NO: 368218 - RNA, 32 nt, Homo Sapiens
uggauacuaaaauaaauauaguuaucauugcu

SEQ ID NO: 368219 - RNA, 32 nt, Homo Sapiens
gaacugugaaauaauaaauguguauuguuggc

SEQ ID NO: 368220 - RNA, 32 nt, Homo Sapiens
uguccugcaggguggggagguggcagcugccu

SEQ ID NO: 368221 - RNA, 32 nt, Homo Sapiens
gaauacauuuccccucccuuuucuuuauuucc

SEQ ID NO: 368222 - RNA, 32 nt, Homo Sapiens
agauuuuucacucccaugagugccaagacggu

SEQ ID NO: 368223 - RNA, 32 nt, Homo Sapiens
uuccccacaaggaccugccauaaaaaucgacu

SEQ ID NO: 368224 - RNA, 32 nt, Homo Sapiens
aagggagagguggucaagauccccucccgcgu

SEQ ID NO: 368225 - RNA, 32 nt, Homo Sapiens
gcuucucccuccccaaccaccucaugguauau

SEQ ID NO: 368226 - RNA, 32 nt, Homo Sapiens
cccugcaggcucccuccacccaccuugagacc

SEQ ID NO: 368227 - RNA, 32 nt, Homo Sapiens
agccgagaggacccgaguggggccgaggccag

SEQ ID NO: 368228 - RNA, 32 nt, Homo Sapiens
cauccgcucccucucacacgcugagggggagg

SEQ ID NO: 368229 - RNA, 32 nt, Homo Sapiens
ucugaugauaggaacagaaugcaguugauaca

SEQ ID NO: 368230 - RNA, 32 nt, Homo Sapiens
caguguucuacuuuuuacaucauuucuauguu

SEQ ID NO: 368231 - RNA, 32 nt, Homo Sapiens
gaaaucucggaagagggaggagucugggagug

SEQ ID NO: 368232 - RNA, 32 nt, Homo Sapiens
uugacugauucacuuuuucauaaagugagcau

SEQ ID NO: 368233 - RNA, 32 nt, Homo Sapiens
auguugacccucacagggagggauaauuuaga

SEQ ID NO: 368234 - RNA, 32 nt, Homo Sapiens
uuggggugucucuguuuuuuccauccccacuu

SEQ ID NO: 368235 - RNA, 32 nt, Homo Sapiens
auggggacggagagaggagccagucuccagac

SEQ ID NO: 368236 - RNA, 32 nt, Homo Sapiens
cgcugaugaaaguuagagcugcuuccuccagg

SEQ ID NO: 368237 - RNA, 30 nt, Homo Sapiens
ccguccgcgccgcagcacagccgcugggag

SEQ ID NO: 368238 - RNA, 32 nt, Homo Sapiens
ccgcugcccgcccgcaguucccggccccgcug

SEQ ID NO: 368239 - RNA, 32 nt, Homo Sapiens
aaguacuguuuaccauuuuucauucacuucuc

SEQ ID NO: 368240 - RNA, 32 nt, Homo Sapiens
uaguguaaauuaacuucagaaauaugcaguca

SEQ ID NO: 368241 - RNA, 32 nt, Homo Sapiens
ucuaaguaguuaaaauuagaaaucacagcaag

SEQ ID NO: 368242 - RNA, 32 nt, Homo Sapiens
gucuguuggaaccuuacccagccaugaacaug

SEQ ID NO: 368243 - RNA, 27 nt, Homo Sapiens
agaugccggcggccgcggugcaggaag

SEQ ID NO: 368244 - RNA, 32 nt, Homo Sapiens
gugccgcgagccaggcugaccaggcgcccggg

SEQ ID NO: 368245 - RNA, 32 nt, Homo Sapiens
ugaucccuugcuucccucccccagugcguucu

SEQ ID NO: 368246 - RNA, 32 nt, Homo Sapiens
uuugacauuuuucuuuagaaaaaggaacagcu

SEQ ID NO: 368247 - RNA, 32 nt, Homo Sapiens
ugguguucuaauaguuuuaguuuuauguucug

SEQ ID NO: 368248 - RNA, 32 nt, Homo Sapiens
ggguuuuggggauguguggaguucaaggacug

SEQ ID NO: 368249 - RNA, 32 nt, Homo Sapiens
auuuauuauuuuuucuuuuugagauggagucu

SEQ ID NO: 368250 - RNA, 32 nt, Homo Sapiens
cauugcacuccagccugggugacaagagcgaa

SEQ ID NO: 368251 - RNA, 32 nt, Homo Sapiens
aauugcaauuuaaacuguuaagcuguguucag

SEQ ID NO: 368252 - RNA, 32 nt, Homo Sapiens
uggaagauugucagcauguaaaucaggaacaa

SEQ ID NO: 368253 - RNA, 32 nt, Homo Sapiens
auuguccgugcuucugugaggcacgaaggagc

SEQ ID NO: 368254 - RNA, 32 nt, Homo Sapiens
cuggcggcccguaccccucccccaugaucccc

SEQ ID NO: 368255 - RNA, 31 nt, Homo Sapiens
acaaauguuagagccauucggguaggauucu

SEQ ID NO: 368256 - RNA, 32 nt, Homo Sapiens
augaaaauguccauuuacacguauuugaaugg

SEQ ID NO: 368257 - RNA, 32 nt, Homo Sapiens
aagaaucuccagcugggaguguucuuauguau

SEQ ID NO: 368258 - RNA, 32 nt, Homo Sapiens
accccagccugccugcugccucggaacuguga

SEQ ID NO: 368259 - RNA, 32 nt, Homo Sapiens
uuuaaaauugguugugaagguggaugcccaac

SEQ ID NO: 368260 - RNA, 32 nt, Homo Sapiens
ccauugacccucaccugaauaagggacuuugg

SEQ ID NO: 368261 - RNA, 32 nt, Homo Sapiens
gcaggcuggccacacagcugcccccaucgccu

SEQ ID NO: 368262 - RNA, 32 nt, Homo Sapiens
uauacuuuuaaaaaauacucugcuauuucucu

SEQ ID NO: 368263 - RNA, 31 nt, Homo Sapiens
acgugccaggcgguguuggcgcucggggcga

SEQ ID NO: 368264 - RNA, 32 nt, Homo Sapiens
gccuugggggaggagggaaagauuagcuuuga

SEQ ID NO: 368265 - RNA, 32 nt, Homo Sapiens
accugaaauauauuuuaaauguggaaugaugu

SEQ ID NO: 368266 - RNA, 32 nt, Homo Sapiens
uugggagaugcauacaaaaggagagaacccuu

SEQ ID NO: 368267 - RNA, 32 nt, Homo Sapiens
gggugugugucugcacccacauccucacacau

SEQ ID NO: 368268 - RNA, 32 nt, Homo Sapiens
gcgcggggugacugggguguggggcggaaagg

SEQ ID NO: 368269 - RNA, 32 nt, Homo Sapiens
ggguggcugccauggccgcagccccggcccca

SEQ ID NO: 368270 - RNA, 32 nt, Homo Sapiens
cucgggccgcguguacaggcgcgggaagcuga

SEQ ID NO: 368271 - RNA, 32 nt, Homo Sapiens
ggaacgggaaaagcuuuuugcuuauuugucuu

SEQ ID NO: 368272 - RNA, 32 nt, Homo Sapiens
uggucccgcgcgccagcaugggagagcgaggg

SEQ ID NO: 368273 - RNA, 32 nt, Homo Sapiens
aaaucauccucccacaccuucuccccgacuuu

SEQ ID NO: 368274 - RNA, 32 nt, Homo Sapiens
auuacucucucugacgaguccaucaccugcaa

SEQ ID NO: 368275 - RNA, 32 nt, Homo Sapiens
aaguacacccacaaaacaauaugaauauggag

SEQ ID NO: 368276 - RNA, 32 nt, Homo Sapiens
ccccaagggaggcugcugcugcucuuggcugg

SEQ ID NO: 368277 - RNA, 32 nt, Homo Sapiens
aguccagaggggccgccugagcuucugagaac

SEQ ID NO: 368278 - RNA, 32 nt, Homo Sapiens
ccacgcaguauuuuuuaaauuauuaauuagau

SEQ ID NO: 368279 - RNA, 32 nt, Homo Sapiens
gaaccuaaaaauuuauaucuuaaaagaucaaa

SEQ ID NO: 368280 - RNA, 32 nt, Homo Sapiens
uauucuguguugcauuucuccccacucccugc

SEQ ID NO: 368281 - RNA, 32 nt, Homo Sapiens
gugguggagacggcaccagauguaccaguuuu

SEQ ID NO: 368282 - RNA, 32 nt, Homo Sapiens
aaagcaaaucaucugcaugugcaucaaggcca

SEQ ID NO: 368283 - RNA, 32 nt, Homo Sapiens
cuacuaguauugcauacuuguuuuucuggaau

SEQ ID NO: 368284 - RNA, 32 nt, Homo Sapiens
ccgggcgugggcguggacucgggcgugggcac

SEQ ID NO: 368285 - RNA, 32 nt, Homo Sapiens
gauguggagaccgaggcccaucuccgcauccc

SEQ ID NO: 368286 - RNA, 32 nt, Homo Sapiens
guuugaaaucaucuaguguguuguaugcaguu

SEQ ID NO: 368287 - RNA, 32 nt, Homo Sapiens
aacgcaaugaauuuugggggugcgaggccugu

SEQ ID NO: 368288 - RNA, 32 nt, Homo Sapiens
ggaacauaguugcaggugugucgggugucaca

SEQ ID NO: 368289 - RNA, 32 nt, Homo Sapiens
aauugcggcuagccaguaagccuugcuaaucu

SEQ ID NO: 368290 - RNA, 32 nt, Homo Sapiens
ugcgaaggcggcugggguguucggauuuccaa

SEQ ID NO: 368291 - RNA, 32 nt, Homo Sapiens
aggggagcgcgguggcgcugcgagcuggcccc

SEQ ID NO: 368292 - RNA, 32 nt, Homo Sapiens
acuguauauuuuaaaguauacucucagauaug

SEQ ID NO: 368293 - RNA, 32 nt, Homo Sapiens
cugggccuuggcaggugcacagacgggcgggc

SEQ ID NO: 368294 - RNA, 32 nt, Homo Sapiens
guugugcugggagaccggacccggggcugcag

SEQ ID NO: 368295 - RNA, 32 nt, Homo Sapiens
gacucagaauuaaaccccgguguuggcacugu

SEQ ID NO: 368296 - RNA, 32 nt, Homo Sapiens
aucaaaggaaaacagaaguugugaguucuucu

SEQ ID NO: 368297 - RNA, 32 nt, Homo Sapiens
uuuagcucaaggaaagacaguagccaagcaac

SEQ ID NO: 368298 - RNA, 32 nt, Homo Sapiens
ucuaaggugcugaagcuucccaagcaucaguc

SEQ ID NO: 368299 - RNA, 31 nt, Homo Sapiens
ucaauaucaagcagugaaauaugauaauaaa

SEQ ID NO: 368300 - RNA, 32 nt, Homo Sapiens
aucauugaaaauaagagaaguaaucccagaua

SEQ ID NO: 368301 - RNA, 32 nt, Homo Sapiens
gaaguagugucugaucaaacagaugacauucc

SEQ ID NO: 368302 - RNA, 32 nt, Homo Sapiens
gugccuccuccucuccuuagcuggcccguugg

SEQ ID NO: 368303 - RNA, 30 nt, Homo Sapiens
ccgaggaccagucugaucgcccaggacuaa

SEQ ID NO: 368304 - RNA, 32 nt, Homo Sapiens
gaaguuaaaauaaguauuagugcaauuuucag

SEQ ID NO: 368305 - RNA, 32 nt, Homo Sapiens
acuggcuaccccuacugcgcggcggcccagga

SEQ ID NO: 368306 - RNA, 32 nt, Homo Sapiens
cagguggcugucuacaaacauuugaccaaaac

SEQ ID NO: 368307 - RNA, 32 nt, Homo Sapiens
auagguuuuuaaaacuauaaauguugucuuuu

SEQ ID NO: 368308 - RNA, 32 nt, Homo Sapiens
ggauggcaucaccuuaccaucagagcagugca

SEQ ID NO: 368309 - RNA, 30 nt, Homo Sapiens
gugguccuggacugccguccucagugagag

SEQ ID NO: 368310 - RNA, 32 nt, Homo Sapiens
agacauacacuuuuugaguaggcaauauguuc

SEQ ID NO: 368311 - RNA, 27 nt, Homo Sapiens
aaaaauccuuauaaguuuauguaaagc

SEQ ID NO: 368312 - RNA, 32 nt, Homo Sapiens
gacccguaauuucucuucuccugcuguccuuu

SEQ ID NO: 368313 - RNA, 32 nt, Homo Sapiens
ggcucuuuuuaaugcugaaccaaaaugugccu

SEQ ID NO: 368314 - RNA, 32 nt, Homo Sapiens
uuguccuggaggacagaagagcagguuaaggc

SEQ ID NO: 368315 - RNA, 32 nt, Homo Sapiens
ucauuuuccagauaagaaauaacaguucaagu

SEQ ID NO: 368316 - RNA, 32 nt, Homo Sapiens
augcacguggaagagggcgacauccuguacac

SEQ ID NO: 368317 - RNA, 32 nt, Homo Sapiens
uguauacacacacacacacacacacacacaca

SEQ ID NO: 368318 - RNA, 32 nt, Homo Sapiens
gugggaaauaaucuuugucuucuuuggaguaa

SEQ ID NO: 368319 - RNA, 32 nt, Homo Sapiens
uccaugcaccucaguaagaaguggaucugccu

SEQ ID NO: 368320 - RNA, 32 nt, Homo Sapiens
agcugugucuuacuugauuuauucuuuaaaaa

SEQ ID NO: 368321 - RNA, 32 nt, Homo Sapiens
gagaauguuucauacaguuaugacuccugaca

SEQ ID NO: 368322 - RNA, 32 nt, Homo Sapiens
agggguaaaacaacuuuuucaugggucaaaau

SEQ ID NO: 368323 - RNA, 32 nt, Homo Sapiens
gcccucgagacgggaccgagagcaucaugggc

SEQ ID NO: 368324 - RNA, 32 nt, Homo Sapiens
aagccuaccccugcaacaaaauagaagcucaa

SEQ ID NO: 368325 - RNA, 32 nt, Homo Sapiens
uagagaucaguuuguuucuuucugugcuggua

SEQ ID NO: 368326 - RNA, 32 nt, Homo Sapiens
cgcccgccgugcacgcagcauuaacugggaug

SEQ ID NO: 368327 - RNA, 32 nt, Homo Sapiens
gaagaggcccuccccaggagccaggucugccc

SEQ ID NO: 368328 - RNA, 32 nt, Homo Sapiens
aaacaguacuuccaaauuuuaagguauggaau

SEQ ID NO: 368329 - RNA, 32 nt, Homo Sapiens
aaugccaguugugacgaaaugaggaauguaua

SEQ ID NO: 368330 - RNA, 32 nt, Homo Sapiens
guggcuauggaaagaacacagaagccaagguc

SEQ ID NO: 368331 - RNA, 32 nt, Homo Sapiens
ucaccucucccuccccaccagcagaaacaucc

SEQ ID NO: 368332 - RNA, 32 nt, Homo Sapiens
gugaagagaaaauacacagacacaauaauggc

SEQ ID NO: 368333 - RNA, 32 nt, Homo Sapiens
uacuuuucaaagcugggaagacccuuucagaa

SEQ ID NO: 368334 - RNA, 32 nt, Homo Sapiens
cgccgagugucugcacaccucgcucugccugc

SEQ ID NO: 368335 - RNA, 32 nt, Homo Sapiens
aaaacauccaagaucuuuuuugaaaguuuuau

SEQ ID NO: 368336 - RNA, 32 nt, Homo Sapiens
aggcucccugaacaguccuguucaugugugua

SEQ ID NO: 368337 - RNA, 32 nt, Homo Sapiens
guuuuccuuucagggccuguccuuccaguuua

SEQ ID NO: 368338 - RNA, 32 nt, Homo Sapiens
ugaaguugaagcaaauuuugcauuuugugguu

SEQ ID NO: 368339 - RNA, 32 nt, Homo Sapiens
uccuucugccccagcagggcuggcccgucagu

SEQ ID NO: 368340 - RNA, 32 nt, Homo Sapiens
uuuucugauaauuauuacacaauuuaaaacaa

SEQ ID NO: 368341 - RNA, 32 nt, Homo Sapiens
aaaauacaaaaauuauccagucgugguggugc

SEQ ID NO: 368342 - RNA, 30 nt, Homo Sapiens
acgaggggaggugucacagaaaaaaaacuc

SEQ ID NO: 368343 - RNA, 32 nt, Homo Sapiens
auggacuauuuauuaaagugcaaacaaacuca

SEQ ID NO: 368344 - RNA, 32 nt, Homo Sapiens
agauucuugacaaggauuuuagaucuuaaugg

SEQ ID NO: 368345 - RNA, 32 nt, Homo Sapiens
uggguacacacacagaggagaccucagccuca

SEQ ID NO: 368346 - RNA, 32 nt, Homo Sapiens
aaggaaaacaacauuucauaagguucuaguug

SEQ ID NO: 368347 - RNA, 32 nt, Homo Sapiens
uuucaacugguuuuuaaauauucaauauuggu

SEQ ID NO: 368348 - RNA, 32 nt, Homo Sapiens
uacaauuugauuuugaacuaagauuugauaua

SEQ ID NO: 368349 - RNA, 32 nt, Homo Sapiens
acuucuaucacgucucucuuuuauuucuggga

SEQ ID NO: 368350 - RNA, 32 nt, Homo Sapiens
gaaaagaaauauuacagccaugccuaagugac

SEQ ID NO: 368351 - RNA, 32 nt, Homo Sapiens
caaaaucugggggcgagcaaccucaaggaaca

SEQ ID NO: 368352 - RNA, 32 nt, Homo Sapiens
cggcgaaaguccaguauguggguccaggguca

SEQ ID NO: 368353 - RNA, 32 nt, Homo Sapiens
ccagaggaaggauugauuugcaaccagaaagg

SEQ ID NO: 368354 - RNA, 32 nt, Homo Sapiens
agcaucuucccugggaagucuuucuggccaag

SEQ ID NO: 368355 - RNA, 32 nt, Homo Sapiens
agucccgggaccaggcguucucuccucucgcc

SEQ ID NO: 368356 - RNA, 32 nt, Homo Sapiens
gaaauggacacagucuaacaaauuccaaauuc

SEQ ID NO: 368357 - RNA, 32 nt, Homo Sapiens
acuguaaauccggcauugauguuuccgccaug

SEQ ID NO: 368358 - RNA, 32 nt, Homo Sapiens
aacaguccaaaaaaguguuuauuuuuuaugga

SEQ ID NO: 368359 - RNA, 32 nt, Homo Sapiens
uaaacccagaucuauuucugaguaugugguuc

SEQ ID NO: 368360 - RNA, 32 nt, Homo Sapiens
uuuuaagugauaauuauaaaucuuauauuuaa

SEQ ID NO: 368361 - RNA, 32 nt, Homo Sapiens
agccuggcuaacacagugaaaccccgucucuu

SEQ ID NO: 368362 - RNA, 32 nt, Homo Sapiens
gaggauuuggagagggcagggugauggggagc

SEQ ID NO: 368363 - RNA, 29 nt, Homo Sapiens
uggaauggccgcgggcggcucgacgcagc

SEQ ID NO: 368364 - RNA, 32 nt, Homo Sapiens
auuuaaauccuggaaaacauuuuuuagaaacc

SEQ ID NO: 368365 - RNA, 32 nt, Homo Sapiens
ccgccaccccaggaggccccaggccuguccug

SEQ ID NO: 368366 - RNA, 32 nt, Homo Sapiens
uuauuggugagaaaacaaaauuauuggugaga

SEQ ID NO: 368367 - RNA, 29 nt, Homo Sapiens
ccugggaugaagaugaaugaagaacaugg

SEQ ID NO: 368368 - RNA, 28 nt, Homo Sapiens
ugaaugagacuucaagcaaauaccaaag

SEQ ID NO: 368369 - RNA, 30 nt, Homo Sapiens
ggcagagguggcggcggcggcaugggugcc

SEQ ID NO: 368370 - RNA, 32 nt, Homo Sapiens
aagggggugucugcggaucugcccgguuaucg

SEQ ID NO: 368371 - RNA, 32 nt, Homo Sapiens
uaccaggcgagggggccaaggguggaucccuc

SEQ ID NO: 368372 - RNA, 28 nt, Homo Sapiens
ggccaggggcggccccgaaauuaggaag

SEQ ID NO: 368373 - RNA, 32 nt, Homo Sapiens
gagggcacgucuaugauccaggcccuggccau

SEQ ID NO: 368374 - RNA, 32 nt, Homo Sapiens
uuuaaaaacuacaaugugauuaacucgagccu

SEQ ID NO: 368375 - RNA, 32 nt, Homo Sapiens
gccaguaaauuguauuuuuuuaaugacaucau

SEQ ID NO: 368376 - RNA, 32 nt, Homo Sapiens
acauggaacagguuggugcaggaagccuaaga

SEQ ID NO: 368377 - RNA, 32 nt, Homo Sapiens
gcuuccagauucuccagccuucugccagcuuu

SEQ ID NO: 368378 - RNA, 32 nt, Homo Sapiens
guccagcuaauuuuuauauuuucgcucugucu

SEQ ID NO: 368379 - RNA, 32 nt, Homo Sapiens
uuuauaaacuaaaaauuuuuacaaauccacug

SEQ ID NO: 368380 - RNA, 32 nt, Homo Sapiens
uaggaggguuuuuuuuacccagggcucuggaa

SEQ ID NO: 368381 - RNA, 32 nt, Homo Sapiens
auagauuugucaaaacgacauuuaagucaugu

SEQ ID NO: 368382 - RNA, 32 nt, Homo Sapiens
aggagcagccucaggaguugaaggggauccug

SEQ ID NO: 368383 - RNA, 32 nt, Homo Sapiens
guguacuggaucuggaaugguguuuugguuug

SEQ ID NO: 368384 - RNA, 32 nt, Homo Sapiens
uuuccucauguguuuccuuaugacucaguaag

SEQ ID NO: 368385 - RNA, 32 nt, Homo Sapiens
gugccaagggaagacccaggauggcccaucaa

SEQ ID NO: 368386 - RNA, 32 nt, Homo Sapiens
uuaugcuauaaggauauaucugagacugggua

SEQ ID NO: 368387 - RNA, 32 nt, Homo Sapiens
aaaacagugaaggauuagcugaaaauauauga

SEQ ID NO: 368388 - RNA, 32 nt, Homo Sapiens
aagcuuagggcuucuuuuuuuuccuccccucu

SEQ ID NO: 368389 - RNA, 32 nt, Homo Sapiens
gcagugagccgagaucgugcugcugcacucca

SEQ ID NO: 368390 - RNA, 32 nt, Homo Sapiens
ucuaucaacuauaaugauaaauccauuuugaa

SEQ ID NO: 368391 - RNA, 32 nt, Homo Sapiens
ggcuggagggauccaagagcuuggggauucag

SEQ ID NO: 368392 - RNA, 32 nt, Homo Sapiens
ugcugcugacgcugcugcugcccggccucggg

SEQ ID NO: 368393 - RNA, 32 nt, Homo Sapiens
gccaucauccacuugggaccagugacagcccu

SEQ ID NO: 368394 - RNA, 32 nt, Homo Sapiens
aaaugaauuuuagagaagaugaaaagagcccu

SEQ ID NO: 368395 - RNA, 32 nt, Homo Sapiens
gcugugucaguuccuguuucuucccauuuccu

SEQ ID NO: 368396 - RNA, 32 nt, Homo Sapiens
acauaugggacaccccaccgcccccggcucug

SEQ ID NO: 368397 - RNA, 32 nt, Homo Sapiens
aaguccucccggguugcccccgcggcgucaga

SEQ ID NO: 368398 - RNA, 31 nt, Homo Sapiens
agcugaagccacuugcucagagccgcacagc

SEQ ID NO: 368399 - RNA, 32 nt, Homo Sapiens
accccacucccuccccagagcaucccgagggc

SEQ ID NO: 368400 - RNA, 32 nt, Homo Sapiens
agucucuucagauuucugaaaaugaaaacuau

SEQ ID NO: 368401 - RNA, 32 nt, Homo Sapiens
uagcagagauggauguuugaagucuauaccuu

SEQ ID NO: 368402 - RNA, 32 nt, Homo Sapiens
uucccaacccaccacacagccauggacgggaa

SEQ ID NO: 368403 - RNA, 32 nt, Homo Sapiens
ggccguggcccaccccgagacggaggcgcaga

SEQ ID NO: 368404 - RNA, 32 nt, Homo Sapiens
cccagccaguacccguggaggacccgggaaau

SEQ ID NO: 368405 - RNA, 32 nt, Homo Sapiens
auaauguagugggaagucaggaggguucugca

SEQ ID NO: 368406 - RNA, 32 nt, Homo Sapiens
acacugcccucccaacugccagacuuccuggg

SEQ ID NO: 368407 - RNA, 32 nt, Homo Sapiens
aguauuuaauuugaagcaccauuugaauguuc

SEQ ID NO: 368408 - RNA, 28 nt, Homo Sapiens
caagugguagguuaacauuagaauagga

SEQ ID NO: 368409 - RNA, 32 nt, Homo Sapiens
guuuccuacauucuuuuccauguguaaaauca

SEQ ID NO: 368410 - RNA, 32 nt, Homo Sapiens
cauucgaccggguggggggugacggggggucg

SEQ ID NO: 368411 - RNA, 32 nt, Homo Sapiens
agagaaagaaauaaauggcauuauuuuuaaau

SEQ ID NO: 368412 - RNA, 32 nt, Homo Sapiens
uauguggagcugcggcaguaggcccccagccc

SEQ ID NO: 368413 - RNA, 32 nt, Homo Sapiens
acacuaagcaguucaucaaaauguagggauua

SEQ ID NO: 368414 - RNA, 32 nt, Homo Sapiens
augcagagcugcucucacuucuccucgggaaa

SEQ ID NO: 368415 - RNA, 32 nt, Homo Sapiens
uggggaggcugggcccagcagcugccccugga

SEQ ID NO: 368416 - RNA, 32 nt, Homo Sapiens
ccuggcgggggugauacucucccgcggggcuu

SEQ ID NO: 368417 - RNA, 32 nt, Homo Sapiens
aaagaagaaaucauucgacccguccgccagag

SEQ ID NO: 368418 - RNA, 32 nt, Homo Sapiens
uaaaagauauuucuuuccuggggacaaaguga

SEQ ID NO: 368419 - RNA, 32 nt, Homo Sapiens
aacuagauagaacauuaagagauuuucaagau

SEQ ID NO: 368420 - RNA, 32 nt, Homo Sapiens
uagaaauagaaagaaaagaaaauugaacauac

SEQ ID NO: 368421 - RNA, 32 nt, Homo Sapiens
uaucgcggccaucgugaucgccgcccugcugg

SEQ ID NO: 368422 - RNA, 30 nt, Homo Sapiens
uucaaguaucaccuccuucaaguggucuuu

SEQ ID NO: 368423 - RNA, 32 nt, Homo Sapiens
ucccugucuaaccugcucuuucucuuuggugc

SEQ ID NO: 368424 - RNA, 32 nt, Homo Sapiens
aggcuaaacucugauaggaaaagcacuuuaaa

SEQ ID NO: 368425 - RNA, 32 nt, Homo Sapiens
gugagccacagugguuaucuccaagcucaggg

SEQ ID NO: 368426 - RNA, 32 nt, Homo Sapiens
ucacaucgcccguuuuuuccucugacagccua

SEQ ID NO: 368427 - RNA, 32 nt, Homo Sapiens
ucucauggcucauguucacuucccuuuucaag

SEQ ID NO: 368428 - RNA, 32 nt, Homo Sapiens
aaagagcguugaauauaagaaaaaauacuucc

SEQ ID NO: 368429 - RNA, 32 nt, Homo Sapiens
acuauccugccccgcgaguucuacgccuggau

SEQ ID NO: 368430 - RNA, 32 nt, Homo Sapiens
gcggcgacuuaccuuucagucgugcgcuccug

SEQ ID NO: 368431 - RNA, 29 nt, Homo Sapiens
gccccaugguucaugucuauagaagucca

SEQ ID NO: 368432 - RNA, 32 nt, Homo Sapiens
ggacugcggguuuggauaccacugcuguaaug

SEQ ID NO: 368433 - RNA, 29 nt, Homo Sapiens
uauacaauagugauguuacuaguaaaaaa

SEQ ID NO: 368434 - RNA, 32 nt, Homo Sapiens
acuuuauuuuuggaguuauuguuggcaauaaa

SEQ ID NO: 368435 - RNA, 32 nt, Homo Sapiens
guaauauguuuugaauuggauuuuuucucaga

SEQ ID NO: 368436 - RNA, 32 nt, Homo Sapiens
gcauuugcaucucuaccauaaauagaagacca

SEQ ID NO: 368437 - RNA, 32 nt, Homo Sapiens
ggcaagcagcuagacuggugaauugggggaaa

SEQ ID NO: 368438 - RNA, 32 nt, Homo Sapiens
cuuuguuucaaauccccaacccugguggcggu

SEQ ID NO: 368439 - RNA, 32 nt, Homo Sapiens
uauagccguuccuucccccucuaggccuugua

SEQ ID NO: 368440 - RNA, 32 nt, Homo Sapiens
agagugccauguauuucuuucuugacaggaca

SEQ ID NO: 368441 - RNA, 32 nt, Homo Sapiens
gggccugagccagggcugggaauguguccacu

SEQ ID NO: 368442 - RNA, 32 nt, Homo Sapiens
gccgucuggagcucccccgcgcggacgaugcc

SEQ ID NO: 368443 - RNA, 32 nt, Homo Sapiens
cuccucggcgauggcuuugauugucuuguguu

SEQ ID NO: 368444 - RNA, 31 nt, Homo Sapiens
ccaguuuagugauaacagguaugcacaagaa

SEQ ID NO: 368445 - RNA, 32 nt, Homo Sapiens
caaaagagucauauuuacaaaaaucuguacac

SEQ ID NO: 368446 - RNA, 32 nt, Homo Sapiens
gucugaacagagcugcguccacuuucuucuuc

SEQ ID NO: 368447 - RNA, 32 nt, Homo Sapiens
uacauaagaaaauuauuuucagguugaugaca

SEQ ID NO: 368448 - RNA, 32 nt, Homo Sapiens
ccgugacuugcauguuugcuucugggacgucu

SEQ ID NO: 368449 - RNA, 32 nt, Homo Sapiens
gaaguagugucuucuuuugcaagcugggggag

SEQ ID NO: 368450 - RNA, 32 nt, Homo Sapiens
ggacgguguuugugucugagggagcugcuggc

SEQ ID NO: 368451 - RNA, 32 nt, Homo Sapiens
aggucacagcuauggauguggaagagauagga

SEQ ID NO: 368452 - RNA, 32 nt, Homo Sapiens
uagcucacuccagccuccaacuccugggcuca

SEQ ID NO: 368453 - RNA, 32 nt, Homo Sapiens
aagugauuuuuccaguucaaagucaagacagg

SEQ ID NO: 368454 - RNA, 32 nt, Homo Sapiens
uuuuuagguauauguacauuuauauuucuauc

SEQ ID NO: 368455 - RNA, 32 nt, Homo Sapiens
ccuucuuuucccuuuuccuucccuauuugaaa

SEQ ID NO: 368456 - RNA, 32 nt, Homo Sapiens
uauaagugaaacaaaaguauucuccguuucua

SEQ ID NO: 368457 - RNA, 32 nt, Homo Sapiens
gcauuucagguggauaauuuaugguuuauucu

SEQ ID NO: 368458 - RNA, 32 nt, Homo Sapiens
auucaugcuuagguggagaaaagcagggcuag

SEQ ID NO: 368459 - RNA, 32 nt, Homo Sapiens
ggucagcuguucccaccuuucuacgccccuuc

SEQ ID NO: 368460 - RNA, 32 nt, Homo Sapiens
cuggaucucuuuacccagcagugauggccugg

SEQ ID NO: 368461 - RNA, 32 nt, Homo Sapiens
aaugaaaacaaaugauggucauguugcaguuu

SEQ ID NO: 368462 - RNA, 32 nt, Homo Sapiens
uguugccuaaauuuauaaugaucaugaaaccc

SEQ ID NO: 368463 - RNA, 32 nt, Homo Sapiens
gcccgggugacggcgguaggggaccagcaacu

SEQ ID NO: 368464 - RNA, 32 nt, Homo Sapiens
uaccuaauaaagauuauagaugacagugauuc

SEQ ID NO: 368465 - RNA, 32 nt, Homo Sapiens
cggaucauagauuguuuacugcugccacaugc

SEQ ID NO: 368466 - RNA, 32 nt, Homo Sapiens
gccccugcaugcagcccucccgcccgcccuuc

SEQ ID NO: 368467 - RNA, 32 nt, Homo Sapiens
gguagcucugucugcggcggcccgccagccug

SEQ ID NO: 368468 - RNA, 32 nt, Homo Sapiens
aaucuacgauguuaaaacaaauuaaaaacacc

SEQ ID NO: 368469 - RNA, 32 nt, Homo Sapiens
cuuuauacuagauucuaucaaaaucuugcaaa

SEQ ID NO: 368470 - RNA, 32 nt, Homo Sapiens
uaccacaagucuuuuuggcaaucuugaacuuu

SEQ ID NO: 368471 - RNA, 32 nt, Homo Sapiens
gggcugccaccccacuucuccccacagagaau

SEQ ID NO: 368472 - RNA, 32 nt, Homo Sapiens
ucuuccuaaaauuuauagugauuuuaaaggau

SEQ ID NO: 368473 - RNA, 32 nt, Homo Sapiens
agagaugaaaccgaagacuacaagaaauacuc

SEQ ID NO: 368474 - RNA, 32 nt, Homo Sapiens
gcucucacccugggguccccagccucucaccg

SEQ ID NO: 368475 - RNA, 32 nt, Homo Sapiens
auucccuucuauuuuagcucuuaauuaguugc

SEQ ID NO: 368476 - RNA, 32 nt, Homo Sapiens
cggaguggacaucaaacagagaagugggcaac

SEQ ID NO: 368477 - RNA, 32 nt, Homo Sapiens
gccgggggaaggguggggaggggaugggcugg

SEQ ID NO: 368478 - RNA, 32 nt, Homo Sapiens
auuuugauaaaaacagaagauugaucauuuug

SEQ ID NO: 368479 - RNA, 32 nt, Homo Sapiens
ggggcuccggggcggcagcagagcuggcacac

SEQ ID NO: 368480 - RNA, 32 nt, Homo Sapiens
guagccaucauuuaagucaggaacagucagaa

SEQ ID NO: 368481 - RNA, 32 nt, Homo Sapiens
aauguauagaaaguaaagguaggaugcucagg

SEQ ID NO: 368482 - RNA, 32 nt, Homo Sapiens
aaaauucgaccccugaccuagcaacugauguu

SEQ ID NO: 368483 - RNA, 32 nt, Homo Sapiens
cagugcaggucuuaguuuuucuuuuuucucau

SEQ ID NO: 368484 - RNA, 30 nt, Homo Sapiens
ugguuauggcuggccugagcggcgcgcaga

SEQ ID NO: 368485 - RNA, 32 nt, Homo Sapiens
caguccucaggacccacccccaguugaguccc

SEQ ID NO: 368486 - RNA, 32 nt, Homo Sapiens
aaucauagugaacaucaauacuuguucccuau

SEQ ID NO: 368487 - RNA, 32 nt, Homo Sapiens
agggaggccccggggcuccagacagccgccuu

SEQ ID NO: 368488 - RNA, 32 nt, Homo Sapiens
ugggaaaagaacagguuuguauuuucaggaag

SEQ ID NO: 368489 - RNA, 32 nt, Homo Sapiens
auguacuaaaaugcauaugaccuugggaauag

SEQ ID NO: 368490 - RNA, 29 nt, Homo Sapiens
gcacaauggaaauuauauuuucuacuuua

SEQ ID NO: 368491 - RNA, 32 nt, Homo Sapiens
ggccaugccccaccccccuccucccccuuugg

SEQ ID NO: 368492 - RNA, 32 nt, Homo Sapiens
uuuuaaacaucaguuuccaaguuuauaucaua

SEQ ID NO: 368493 - RNA, 32 nt, Homo Sapiens
gguucagcgcggggcggggccgcugcccagug

SEQ ID NO: 368494 - RNA, 32 nt, Homo Sapiens
aggagacuuccaccugugccuuacuuucucuu

SEQ ID NO: 368495 - RNA, 32 nt, Homo Sapiens
agaccccggagccccagccccaccaugacccu

SEQ ID NO: 368496 - RNA, 32 nt, Homo Sapiens
guuguugcugucuguguuguugcuguggccua

SEQ ID NO: 368497 - RNA, 32 nt, Homo Sapiens
uugagugcucuuucacucuccuccgccaugcc

SEQ ID NO: 368498 - RNA, 32 nt, Homo Sapiens
gaagugcccaaggcugcccacuggagacgccu

SEQ ID NO: 368499 - RNA, 32 nt, Homo Sapiens
acauauuugaaaaagauaugucugcacuuuga

SEQ ID NO: 368500 - RNA, 32 nt, Homo Sapiens
guggaacuuguacuaacuuaugauagaaugua

SEQ ID NO: 368501 - RNA, 32 nt, Homo Sapiens
aaagguuacaagccugcacaauaaaaauguuu

SEQ ID NO: 368502 - RNA, 32 nt, Homo Sapiens
gccacuuuggauugcuuggaugcuucgaacag

SEQ ID NO: 368503 - RNA, 32 nt, Homo Sapiens
uacacaucugcuccgcagugccugcaggggag

SEQ ID NO: 368504 - RNA, 30 nt, Homo Sapiens
accaaaggcaggccuggcugggugcagugg

SEQ ID NO: 368505 - RNA, 32 nt, Homo Sapiens
ugauuacguagcgggcggggccggaagugccg

SEQ ID NO: 368506 - RNA, 32 nt, Homo Sapiens
agaagcuaaaauugaucuccauuuugauuuau

SEQ ID NO: 368507 - RNA, 32 nt, Homo Sapiens
cauaagcuuccauuuuaauuuuaaagugcaaa

SEQ ID NO: 368508 - RNA, 32 nt, Homo Sapiens
aggagagaugaccucucauuuugccgagagau

SEQ ID NO: 368509 - RNA, 32 nt, Homo Sapiens
ccagcuguucuuccugccagagccucuuccug

SEQ ID NO: 368510 - RNA, 32 nt, Homo Sapiens
cugcaaccagagcagccaccaagcauuacuua

SEQ ID NO: 368511 - RNA, 32 nt, Homo Sapiens
uaaguacagaagauagaagugauuuaaauggc

SEQ ID NO: 368512 - RNA, 32 nt, Homo Sapiens
cgagcccccuccccuggcccagcccgacuccc

SEQ ID NO: 368513 - RNA, 30 nt, Homo Sapiens
uuguucggcggcggcggcggcgguaagaug

SEQ ID NO: 368514 - RNA, 32 nt, Homo Sapiens
uccgucaaauucaaauuauuauuuugguccug

SEQ ID NO: 368515 - RNA, 32 nt, Homo Sapiens
uaaucauuaaggagcggaggcuuuuggagcug

SEQ ID NO: 368516 - RNA, 32 nt, Homo Sapiens
ucauucucugggcccuucuccuccucagggcc

SEQ ID NO: 368517 - RNA, 32 nt, Homo Sapiens
cccgggcgcgcgcggucgugugggaguuguag

SEQ ID NO: 368518 - RNA, 32 nt, Homo Sapiens
agggguagggguucuccugagggugcagggga

SEQ ID NO: 368519 - RNA, 32 nt, Homo Sapiens
aacuuacucaaggucacgcagauagugaauga

SEQ ID NO: 368520 - RNA, 32 nt, Homo Sapiens
guagcugaugaaacuuuuaaaaaaucucauca

SEQ ID NO: 368521 - RNA, 32 nt, Homo Sapiens
cugcuugccugccaaugauggaauuuuacugu

SEQ ID NO: 368522 - RNA, 32 nt, Homo Sapiens
uaaaaagucuauuuuccaguguggucuuguuc

SEQ ID NO: 368523 - RNA, 32 nt, Homo Sapiens
uuauugagugccuacuauaugccaggcacaau

SEQ ID NO: 368524 - RNA, 32 nt, Homo Sapiens
guuaguguucuauauagcacaaacuugaaucu

SEQ ID NO: 368525 - RNA, 32 nt, Homo Sapiens
uuauauuaauauucuuuccccucuggccuucu

SEQ ID NO: 368526 - RNA, 32 nt, Homo Sapiens
augaaaaugugagcacuguuagcagaugccua

SEQ ID NO: 368527 - RNA, 32 nt, Homo Sapiens
aagaggcugcgggcgguauuagcguuugcagc

SEQ ID NO: 368528 - RNA, 32 nt, Homo Sapiens
agaaacaggcagaguuggaagcagccaaauca

SEQ ID NO: 368529 - RNA, 32 nt, Homo Sapiens
cccccugcgcgaggaagaucugcagauucaug

SEQ ID NO: 368530 - RNA, 32 nt, Homo Sapiens
accucacccugcccuccuccccagccuggaau

SEQ ID NO: 368531 - RNA, 32 nt, Homo Sapiens
acgcggcgcgcacgcuccggccugcgcagccc

SEQ ID NO: 368532 - RNA, 32 nt, Homo Sapiens
cgguggccaggccucugcugcagccgcugguu

SEQ ID NO: 368533 - RNA, 32 nt, Homo Sapiens
ucuguuaaaauaacauaacauuucaauuacac

SEQ ID NO: 368534 - RNA, 32 nt, Homo Sapiens
uucuacccugaacauaccucacagauccuccc

SEQ ID NO: 368535 - RNA, 32 nt, Homo Sapiens
gagcccuucaggauuaauccucuugcaccagc

SEQ ID NO: 368536 - RNA, 32 nt, Homo Sapiens
ggaucaaaugaggggcuccacccacggcaaag

SEQ ID NO: 368537 - RNA, 32 nt, Homo Sapiens
cuugucgggggcccaaguggggugcucugguc

SEQ ID NO: 368538 - RNA, 32 nt, Homo Sapiens
augcugaccccucgucguaugaacugugcaua

SEQ ID NO: 368539 - RNA, 32 nt, Homo Sapiens
guugaggaauuuccucuaccaccuuuguugcu

SEQ ID NO: 368540 - RNA, 32 nt, Homo Sapiens
ccuguguucauucuccuuccugccaccuugug

SEQ ID NO: 368541 - RNA, 32 nt, Homo Sapiens
ccccggugcccggcucccagcagaacauacua

SEQ ID NO: 368542 - RNA, 32 nt, Homo Sapiens
ucccuucugcugucauaguucuuccaacucag

SEQ ID NO: 368543 - RNA, 32 nt, Homo Sapiens
auuuauuguaaauuuugauuugaggaagccgc

SEQ ID NO: 368544 - RNA, 32 nt, Homo Sapiens
uuaggauaguaaaucauuucuguuauaugaga

SEQ ID NO: 368545 - RNA, 32 nt, Homo Sapiens
ccugggccucccagcccuccaguggccugugg

SEQ ID NO: 368546 - RNA, 32 nt, Homo Sapiens
cgcuaaagcgggucaagcguccuccuuuucuc

SEQ ID NO: 368547 - RNA, 32 nt, Homo Sapiens
gauguguuuaccucuuuuuucaggccucagga

SEQ ID NO: 368548 - RNA, 32 nt, Homo Sapiens
uuguggggccauaaguuaaacagugcugccug

SEQ ID NO: 368549 - RNA, 32 nt, Homo Sapiens
aaucagaaacaucauggcaaccccuaagaaua

SEQ ID NO: 368550 - RNA, 32 nt, Homo Sapiens
cuuggcgcgggguggggagcgggcaacgcccc

SEQ ID NO: 368551 - RNA, 32 nt, Homo Sapiens
ugcgaagguggcggccgagguggcggccgagg

SEQ ID NO: 368552 - RNA, 32 nt, Homo Sapiens
gccggcccucccagcccucuccgcgcggcucc

SEQ ID NO: 368553 - RNA, 32 nt, Homo Sapiens
guccuggaggaaugugauaacuaguuggggcu

SEQ ID NO: 368554 - RNA, 32 nt, Homo Sapiens
uaccccgaccaccuugggcacauguucucagg

SEQ ID NO: 368555 - RNA, 32 nt, Homo Sapiens
ggcugcgacggccaugcuggggcaggugagug

SEQ ID NO: 368556 - RNA, 32 nt, Homo Sapiens
ucgccgcggcugccgcgccgccgcugcaggau

SEQ ID NO: 368557 - RNA, 32 nt, Homo Sapiens
gcugacuguguguauuugaugauauuugggaa

SEQ ID NO: 368558 - RNA, 32 nt, Homo Sapiens
ccaggcacacacccgcuucuggacgucgggga

SEQ ID NO: 368559 - RNA, 32 nt, Homo Sapiens
ucccagcuacucuggagggugaggcaggagaa

SEQ ID NO: 368560 - RNA, 32 nt, Homo Sapiens
acugcugccagaccugcccccaggagcgcagc

SEQ ID NO: 368561 - RNA, 32 nt, Homo Sapiens
ugaaaauguugcacauucuauaguugcaaaac

SEQ ID NO: 368562 - RNA, 32 nt, Homo Sapiens
gccaucgggaggaccagcacggcgggccuggg

SEQ ID NO: 368563 - RNA, 32 nt, Homo Sapiens
ggcuaaaaugcuuaacuaucacucacaaacaa

SEQ ID NO: 368564 - RNA, 32 nt, Homo Sapiens
cggaccgugcgcgccgcgggcgccagaugugc

SEQ ID NO: 368565 - RNA, 32 nt, Homo Sapiens
ggucggggcucgggaccggcugccaucuuagu

SEQ ID NO: 368566 - RNA, 32 nt, Homo Sapiens
ccuuugcuagcugguaccuucuaguaaucaaa

SEQ ID NO: 368567 - RNA, 32 nt, Homo Sapiens
agaaagcaaaaaauauaaaugaaguacuugua

SEQ ID NO: 368568 - RNA, 32 nt, Homo Sapiens
uguuguugggagcauuuccaggcaucuuuuaa

SEQ ID NO: 368569 - RNA, 32 nt, Homo Sapiens
agcagaucaaggaaacuucuguugagcuaggc

SEQ ID NO: 368570 - RNA, 32 nt, Homo Sapiens
gggccagaaaccgaggugaaaccgaagagaag

SEQ ID NO: 368571 - RNA, 32 nt, Homo Sapiens
ccgggccaguaggcacggggcccgcgcgguga

SEQ ID NO: 368572 - RNA, 32 nt, Homo Sapiens
uggaaauaugacuguuacauaauuacacuuau

SEQ ID NO: 368573 - RNA, 32 nt, Homo Sapiens
gucauggccaggggccaccgcggccagccggg

SEQ ID NO: 368574 - RNA, 32 nt, Homo Sapiens
ucacaugacuagcacauggcaaggucaggauu

SEQ ID NO: 368575 - RNA, 32 nt, Homo Sapiens
cccagcuacuauggagguugaggugggaggau

SEQ ID NO: 368576 - RNA, 32 nt, Homo Sapiens
gcagcuguuuaaauguuuuucuauguaguuua

SEQ ID NO: 368577 - RNA, 32 nt, Homo Sapiens
uuuugcauaggaaaaauugagaaggaaguaaa

SEQ ID NO: 368578 - RNA, 31 nt, Homo Sapiens
agaaucuggucuagggcaggaguccagcgga

SEQ ID NO: 368579 - RNA, 32 nt, Homo Sapiens
ggggccgggcgguguaaacagccccggaggcg

SEQ ID NO: 368580 - RNA, 32 nt, Homo Sapiens
acagcacaggcgggaguucaaaacgaaacugg

SEQ ID NO: 368581 - RNA, 32 nt, Homo Sapiens
ccggaaccagcgcuaccacauccacgccaacc

SEQ ID NO: 368582 - RNA, 32 nt, Homo Sapiens
aauaugaaacgaauuuaagagaacauaucaaa

SEQ ID NO: 368583 - RNA, 32 nt, Homo Sapiens
agcaucuuuuuuuuuuuuuuuacaaucauucc

SEQ ID NO: 368584 - RNA, 32 nt, Homo Sapiens
uccccgaccaaaaagagcccccugcugccccc

SEQ ID NO: 368585 - RNA, 31 nt, Homo Sapiens
ugcuuggcugagugaaggaaugauauucaua

SEQ ID NO: 368586 - RNA, 32 nt, Homo Sapiens
cugaaaaguacaaaguaguacaguauauuguu

SEQ ID NO: 368587 - RNA, 32 nt, Homo Sapiens
uccugaggaaagggcuucugugaacugcgguu

SEQ ID NO: 368588 - RNA, 32 nt, Homo Sapiens
gacucacugucguagaaggaaguuuauuauau

SEQ ID NO: 368589 - RNA, 32 nt, Homo Sapiens
uuguuuuaaaucuauaaaaucaacgaaugagg

SEQ ID NO: 368590 - RNA, 27 nt, Homo Sapiens
ucucaguccuucugcaacgcccagugc

SEQ ID NO: 368591 - RNA, 32 nt, Homo Sapiens
uacagaaaaguggaagcagauuggcugggcuu

SEQ ID NO: 368592 - RNA, 32 nt, Homo Sapiens
gcaacacgggcucgcgucuaaaagagcugugc

SEQ ID NO: 368593 - RNA, 32 nt, Homo Sapiens
caaaacacaugccaccugagcaaaacugccug

SEQ ID NO: 368594 - RNA, 32 nt, Homo Sapiens
gguacauaaaauguguaugaaaaaucuacaau

SEQ ID NO: 368595 - RNA, 32 nt, Homo Sapiens
uucugauugugucuaccaacucuccuauuagg

SEQ ID NO: 368596 - RNA, 32 nt, Homo Sapiens
cacuggcaccucaugcaaguguaggaaggcac

SEQ ID NO: 368597 - RNA, 32 nt, Homo Sapiens
gcaggcucuggguggggcugccguuaaggcac

SEQ ID NO: 368598 - RNA, 32 nt, Homo Sapiens
gauugaaugaauuaaugagcagaaagagagga

SEQ ID NO: 368599 - RNA, 32 nt, Homo Sapiens
uucguuaaagcaaaaaucuuguuuuggucaaa

SEQ ID NO: 368600 - RNA, 32 nt, Homo Sapiens
cuaugguagcgucagcgucggaggcgguagug

SEQ ID NO: 368601 - RNA, 32 nt, Homo Sapiens
uucauucuuuugcuuguggaucuccacuuguc

SEQ ID NO: 368602 - RNA, 32 nt, Homo Sapiens
acugagugauuugaguagaaccacugaugaug

SEQ ID NO: 368603 - RNA, 32 nt, Homo Sapiens
gugccuaauuugagucaugcaaaccugaguuc

SEQ ID NO: 368604 - RNA, 32 nt, Homo Sapiens
uagacacagaucauagcucuacaggaguuuau

SEQ ID NO: 368605 - RNA, 32 nt, Homo Sapiens
uauuuauuucuaguucuuuccucccccugcaa

SEQ ID NO: 368606 - RNA, 32 nt, Homo Sapiens
guagcugggaauacaggcacccgccaccaugc

SEQ ID NO: 368607 - RNA, 32 nt, Homo Sapiens
cgaggcuuuguucuccugggguugcuuccugg

SEQ ID NO: 368608 - RNA, 32 nt, Homo Sapiens
auucaguuguuagaaauugauuuugcggagcu

SEQ ID NO: 368609 - RNA, 32 nt, Homo Sapiens
aaagcuggaggaagaggagucgcagagaaacc

SEQ ID NO: 368610 - RNA, 32 nt, Homo Sapiens
caguuaggggagacacgaggggaggugucaca

SEQ ID NO: 368611 - RNA, 32 nt, Homo Sapiens
ggccuccuuuugguuccucacauauuauuggu

SEQ ID NO: 368612 - RNA, 32 nt, Homo Sapiens
agcccugugggagcuggcacacacacugucac

SEQ ID NO: 368613 - RNA, 32 nt, Homo Sapiens
gugaacagacaagguucaaaaacuagcaucca

SEQ ID NO: 368614 - RNA, 32 nt, Homo Sapiens
uugaugacguuuugauuuuaauauguuugcug

SEQ ID NO: 368615 - RNA, 32 nt, Homo Sapiens
aauuggaaaaauacucacagaauucuucaaug

SEQ ID NO: 368616 - RNA, 32 nt, Homo Sapiens
uccacagucugaauggccauguuuccucuuca

SEQ ID NO: 368617 - RNA, 32 nt, Homo Sapiens
guauaccagguauuauuuugggguaagcuaac

SEQ ID NO: 368618 - RNA, 32 nt, Homo Sapiens
uugcuugugcugucauuugcauacagaaagcu

SEQ ID NO: 368619 - RNA, 32 nt, Homo Sapiens
ggugccgcggccuuugucucgcagucaggagg

SEQ ID NO: 368620 - RNA, 32 nt, Homo Sapiens
ccaaacaaaaacaaaaugcaggccgagcgcgg

SEQ ID NO: 368621 - RNA, 32 nt, Homo Sapiens
aacccaauuuaacugauaacuaaccagccauc

SEQ ID NO: 368622 - RNA, 32 nt, Homo Sapiens
cuucaauuuugcaccuuuucuuggggagaaac

SEQ ID NO: 368623 - RNA, 32 nt, Homo Sapiens
acaggggaagagaauacaugggaaaauauuga

SEQ ID NO: 368624 - RNA, 32 nt, Homo Sapiens
gcgcgccgcgggcaggaugcgugcgcacuccc

SEQ ID NO: 368625 - RNA, 32 nt, Homo Sapiens
augguuuuuaauccuggaaauugugauuguga

SEQ ID NO: 368626 - RNA, 32 nt, Homo Sapiens
cggaaggaggguguggggagggguggggcagg

SEQ ID NO: 368627 - RNA, 32 nt, Homo Sapiens
gaaugagcucggcgaagggggugcugguguuu

SEQ ID NO: 368628 - RNA, 32 nt, Homo Sapiens
uggguuuggccauaagcucauaugcugccccc

SEQ ID NO: 368629 - RNA, 32 nt, Homo Sapiens
ugagcccgccggcggcuccccggagcucaccc

SEQ ID NO: 368630 - RNA, 32 nt, Homo Sapiens
agcuuucauuuuuauuuuuuccaauugcuauu

SEQ ID NO: 368631 - RNA, 32 nt, Homo Sapiens
ugcagggauaaaacuuuugagguggccagacc

SEQ ID NO: 368632 - RNA, 32 nt, Homo Sapiens
ccggcgcccuccccgugccagcacacacgagu

SEQ ID NO: 368633 - RNA, 32 nt, Homo Sapiens
guuuuguuuccaaguuaagugauuccuccuuu

SEQ ID NO: 368634 - RNA, 32 nt, Homo Sapiens
gggcagggggucuggaaccagacagagccuga

SEQ ID NO: 368635 - RNA, 32 nt, Homo Sapiens
ugacuaccugaauugcaagggauuuuuauaua

SEQ ID NO: 368636 - RNA, 32 nt, Homo Sapiens
agccuacgccuggccgcgccuuggguuccugc

SEQ ID NO: 368637 - RNA, 32 nt, Homo Sapiens
aagguggugggucuuuacccacagcgcaaaca

SEQ ID NO: 368638 - RNA, 32 nt, Homo Sapiens
guguuccuuggcacaagaacucacuugaacua

SEQ ID NO: 368639 - RNA, 29 nt, Homo Sapiens
acaugccuguauuacugaaagcuaaaucc

SEQ ID NO: 368640 - RNA, 32 nt, Homo Sapiens
aggcugaugaauugugaaaauuccucaaaagg

SEQ ID NO: 368641 - RNA, 32 nt, Homo Sapiens
acaucuggcuuggccuggcauccaaggccucu

SEQ ID NO: 368642 - RNA, 32 nt, Homo Sapiens
ccuucacugccauccccgcuguccuugccgcc

SEQ ID NO: 368643 - RNA, 31 nt, Homo Sapiens
cugcggaggagcugccugcuuggcccggccg

SEQ ID NO: 368644 - RNA, 32 nt, Homo Sapiens
uguaauccaagcauuuugagaggccaaggagg

SEQ ID NO: 368645 - RNA, 32 nt, Homo Sapiens
gacacauucagagguuugauugguugagauua

SEQ ID NO: 368646 - RNA, 32 nt, Homo Sapiens
cagcagcaaccgggcccggccagguucggcgu

SEQ ID NO: 368647 - RNA, 27 nt, Homo Sapiens
aacaaucauuaauucuucgauauuucu

SEQ ID NO: 368648 - RNA, 32 nt, Homo Sapiens
acuguggcuaaguguggggaccagacaggacu

SEQ ID NO: 368649 - RNA, 32 nt, Homo Sapiens
uggaacugcaugccgugaaaacuccuaauggu

SEQ ID NO: 368650 - RNA, 32 nt, Homo Sapiens
aaccuuugccagccuugugggagggggcuagg

SEQ ID NO: 368651 - RNA, 32 nt, Homo Sapiens
ggaucccugugcucuaucucagugcagcagau

SEQ ID NO: 368652 - RNA, 32 nt, Homo Sapiens
uagggcccucucccugccccagcuuuccccga

SEQ ID NO: 368653 - RNA, 32 nt, Homo Sapiens
uaaguuuccuucccuacccaguccccauuuuc

SEQ ID NO: 368654 - RNA, 32 nt, Homo Sapiens
uuguggcaggaaagaaagaacagggguuuuac

SEQ ID NO: 368655 - RNA, 32 nt, Homo Sapiens
cugcccagcccgacccugccccggccccgcuu

SEQ ID NO: 368656 - RNA, 32 nt, Homo Sapiens
ugcucaacccccagcccaccccacccucccug

SEQ ID NO: 368657 - RNA, 32 nt, Homo Sapiens
caauuggcaagaaagggagauuucaaaauuau

SEQ ID NO: 368658 - RNA, 32 nt, Homo Sapiens
ccugguguuucaucauauauacgacuaagaua

SEQ ID NO: 368659 - RNA, 32 nt, Homo Sapiens
cugaggccugacacggcagaucagccccauag

SEQ ID NO: 368660 - RNA, 32 nt, Homo Sapiens
aacuaugccauaggcuccugugcuagauaaau

SEQ ID NO: 368661 - RNA, 32 nt, Homo Sapiens
aggagcaugucuuccuuuaccucccccuaagg

SEQ ID NO: 368662 - RNA, 32 nt, Homo Sapiens
cugcccgcgcuuuaugaaaugacugucagaaa

SEQ ID NO: 368663 - RNA, 32 nt, Homo Sapiens
gaguacaagguuaucacuguguagaaccugga

SEQ ID NO: 368664 - RNA, 32 nt, Homo Sapiens
ggcuggcguccgccgcgcccaggaguugggga

SEQ ID NO: 368665 - RNA, 32 nt, Homo Sapiens
uaaaaaacaauacuuugaaaucuuaccaaaug

SEQ ID NO: 368666 - RNA, 32 nt, Homo Sapiens
ccuccgccagcgccugucgccgucacucucca

SEQ ID NO: 368667 - RNA, 32 nt, Homo Sapiens
cucccccgccgcgcgccuccugcaugcggggc

SEQ ID NO: 368668 - RNA, 32 nt, Homo Sapiens
gacucaaugagaagaauaauuagugaaugugu

SEQ ID NO: 368669 - RNA, 32 nt, Homo Sapiens
cucuugauuuaauuauaaaaugucuacgucuu

SEQ ID NO: 368670 - RNA, 32 nt, Homo Sapiens
cgcggggacaaaguggcaacgacuuggacauc

SEQ ID NO: 368671 - RNA, 32 nt, Homo Sapiens
ggacuuccacacuggagcuggcaaucaguauc

SEQ ID NO: 368672 - RNA, 32 nt, Homo Sapiens
cauccucagccccacaccagcucuauuucagg

SEQ ID NO: 368673 - RNA, 32 nt, Homo Sapiens
gcagagaagagauuucaacaaaaguuuggaaa

SEQ ID NO: 368674 - RNA, 32 nt, Homo Sapiens
cagcccgggcugccuccagggucuggcugagu

SEQ ID NO: 368675 - RNA, 32 nt, Homo Sapiens
ucuguaagguugcaaacaagguccuggaagau

SEQ ID NO: 368676 - RNA, 32 nt, Homo Sapiens
uuccuggaagaaaaggagaaaagggagaugag

SEQ ID NO: 368677 - RNA, 32 nt, Homo Sapiens
uguauuuauaaaugcauagauauauguauaaa

SEQ ID NO: 368678 - RNA, 32 nt, Homo Sapiens
aagugguguaaucuccuucucuacaucuguug

SEQ ID NO: 368679 - RNA, 32 nt, Homo Sapiens
guaguggcaaugaaauagaauuauuaguauau

SEQ ID NO: 368680 - RNA, 32 nt, Homo Sapiens
uuuuaauaaaaagaguuuuucugaaucucaau

SEQ ID NO: 368681 - RNA, 32 nt, Homo Sapiens
ccuuuuuggcagccuaccaaugccaaaaggau

SEQ ID NO: 368682 - RNA, 32 nt, Homo Sapiens
guucuaccuccucauucagacuguaggcuucu

SEQ ID NO: 368683 - RNA, 32 nt, Homo Sapiens
gauuuugugucuaugguugugggucuggaaac

SEQ ID NO: 368684 - RNA, 32 nt, Homo Sapiens
ccauuucccccuccucagauggggcaccaaua

SEQ ID NO: 368685 - RNA, 32 nt, Homo Sapiens
aaaacaaaaaaaaaaaucauguggguauugcu

SEQ ID NO: 368686 - RNA, 32 nt, Homo Sapiens
uguuaaagaauauuuuuaacagcugacuuaca

SEQ ID NO: 368687 - RNA, 32 nt, Homo Sapiens
cucucaccagaacugcagcaaaacugcauuuu

SEQ ID NO: 368688 - RNA, 32 nt, Homo Sapiens
acaaaaauuagccaggcauaguggugcaugcc

SEQ ID NO: 368689 - RNA, 32 nt, Homo Sapiens
ccaccaucuucagaucuguuccucuggagcuu

SEQ ID NO: 368690 - RNA, 32 nt, Homo Sapiens
ucuuguccugguuuccuuucuugugaccaucu

SEQ ID NO: 368691 - RNA, 32 nt, Homo Sapiens
ccacaagcuuccagguugggguuggagccugg

SEQ ID NO: 368692 - RNA, 32 nt, Homo Sapiens
ccauauggccccaguuuuuucugucucuucug

SEQ ID NO: 368693 - RNA, 32 nt, Homo Sapiens
caccucccauuggcagaaugaccgcugagcca

SEQ ID NO: 368694 - RNA, 32 nt, Homo Sapiens
ggcacugaucucucuuggucucggauuugagg

SEQ ID NO: 368695 - RNA, 32 nt, Homo Sapiens
acaugugauuagaaugaucuauauuaauguuu

SEQ ID NO: 368696 - RNA, 32 nt, Homo Sapiens
aaacuuuauugugagugaugcuaucggucauc

SEQ ID NO: 368697 - RNA, 32 nt, Homo Sapiens
agccuggcaacauggcaagacccugccucuuu

SEQ ID NO: 368698 - RNA, 32 nt, Homo Sapiens
ucuguuguuugggauagaaaaaucauaaagag

SEQ ID NO: 368699 - RNA, 32 nt, Homo Sapiens
agggggaaggauucugcuggccucugcgagug

SEQ ID NO: 368700 - RNA, 32 nt, Homo Sapiens
cgcucaauaggaccaggauccagccucacuuc

SEQ ID NO: 368701 - RNA, 32 nt, Homo Sapiens
ucuggagugagcaaacaagagcaagaaacaaa

SEQ ID NO: 368702 - RNA, 32 nt, Homo Sapiens
cuuuccuaggcuuuuuugggggccuaacccac

SEQ ID NO: 368703 - RNA, 32 nt, Homo Sapiens
gcagaaagggaagcacaggguaaggagaccug

SEQ ID NO: 368704 - RNA, 32 nt, Homo Sapiens
gauuugugcagccaaggacacacagcaaguua

SEQ ID NO: 368705 - RNA, 32 nt, Homo Sapiens
cugggacugccagcugggccuggagacgcugg

SEQ ID NO: 368706 - RNA, 32 nt, Homo Sapiens
ucgcugcgcgucgagcgccucgcccuggcuga

SEQ ID NO: 368707 - RNA, 32 nt, Homo Sapiens
caggggccuggcgcggggcuccgcggaaaacc

SEQ ID NO: 368708 - RNA, 32 nt, Homo Sapiens
ccuuccugucccaccucuucucuuccuguaac

SEQ ID NO: 368709 - RNA, 30 nt, Homo Sapiens
ucaggugaggggcgcgcgagcggcuccugg

SEQ ID NO: 368710 - RNA, 32 nt, Homo Sapiens
cauuuucggaagcugaagaauaagcuagccca

SEQ ID NO: 368711 - RNA, 32 nt, Homo Sapiens
cugagcacagacccgggccuccccuggggaag

SEQ ID NO: 368712 - RNA, 32 nt, Homo Sapiens
gucauuuuuuaaaaaacuaauuuguauugucu

SEQ ID NO: 368713 - RNA, 32 nt, Homo Sapiens
guagcauuaggauguguggagagaggagaaau

SEQ ID NO: 368714 - RNA, 32 nt, Homo Sapiens
cccccgcccugccccagggaagccugggcuuc

SEQ ID NO: 368715 - RNA, 32 nt, Homo Sapiens
aauacuuguauauauuguuuacaacuuguuuu

SEQ ID NO: 368716 - RNA, 32 nt, Homo Sapiens
cucagugcuggggacaggaguuuugcccaacg

SEQ ID NO: 368717 - RNA, 32 nt, Homo Sapiens
ucaugcggugcguaauuguagaugcauguacu

SEQ ID NO: 368718 - RNA, 32 nt, Homo Sapiens
ucacccugucuccugcauucuccugaaaccuu

SEQ ID NO: 368719 - RNA, 32 nt, Homo Sapiens
gggcugcaguugcagggggcgccauggggcua

SEQ ID NO: 368720 - RNA, 32 nt, Homo Sapiens
gaucuuguuucugaagaugguuuaaguuauag

SEQ ID NO: 368721 - RNA, 32 nt, Homo Sapiens
cccuaggagagccccauagacuaagagcuaca

SEQ ID NO: 368722 - RNA, 32 nt, Homo Sapiens
gcaaacaagggcagugguuuuguuuguguuuu

SEQ ID NO: 368723 - RNA, 32 nt, Homo Sapiens
gacgcucggucccgcgcugcgcauccccgcgg

SEQ ID NO: 368724 - RNA, 28 nt, Homo Sapiens
aaauacguuuguuauauguguuuugccc

SEQ ID NO: 368725 - RNA, 32 nt, Homo Sapiens
gcacugcacugacgguuuggagaccugagccu

SEQ ID NO: 368726 - RNA, 32 nt, Homo Sapiens
aggcugggggugggggaacagcagguauaaga

SEQ ID NO: 368727 - RNA, 32 nt, Homo Sapiens
ucaucccuguaggaaagccuaauuguauagga

SEQ ID NO: 368728 - RNA, 32 nt, Homo Sapiens
ucuauauauauucucguaugucuuauucuacc

SEQ ID NO: 368729 - RNA, 32 nt, Homo Sapiens
cgacgcaaggucggcugcggcggcggcccgag

SEQ ID NO: 368730 - RNA, 32 nt, Homo Sapiens
ugcauugugcgcgcaccgaggcaggagcggau

SEQ ID NO: 368731 - RNA, 32 nt, Homo Sapiens
gguaacauugauuuuuaacauggcucaaaccu

SEQ ID NO: 368732 - RNA, 30 nt, Homo Sapiens
guccaugucugugcuggcuggaagagggcu

SEQ ID NO: 368733 - RNA, 32 nt, Homo Sapiens
ccaaggguucuccauggauggauccaagucau

SEQ ID NO: 368734 - RNA, 32 nt, Homo Sapiens
ugaagaagacgacgaguacuccccucggggau

SEQ ID NO: 368735 - RNA, 32 nt, Homo Sapiens
ucugucuuuguacagagcuaagcacuuguuug

SEQ ID NO: 368736 - RNA, 32 nt, Homo Sapiens
gugcuuuuaagugaaaauggucgagaaagagg

SEQ ID NO: 368737 - RNA, 32 nt, Homo Sapiens
ggggcagucccgaacucugugcuuggcaccgc

SEQ ID NO: 368738 - RNA, 32 nt, Homo Sapiens
ggggccucugagaugcucccaagugccaggga

SEQ ID NO: 368739 - RNA, 32 nt, Homo Sapiens
aaauaaauauuuggaauuacuaauuugucauu

SEQ ID NO: 368740 - RNA, 32 nt, Homo Sapiens
agucaggagacggcuccaggcacucagggucg

SEQ ID NO: 368741 - RNA, 32 nt, Homo Sapiens
guccuggcucucccggcccugcucugauuagg

SEQ ID NO: 368742 - RNA, 32 nt, Homo Sapiens
cugaagaaguaccccaucguguggcagggccu

SEQ ID NO: 368743 - RNA, 32 nt, Homo Sapiens
ccuggagcggacccuccucuuugggccuugug

SEQ ID NO: 368744 - RNA, 32 nt, Homo Sapiens
aggauggagggauacagaagucugcacagcug

SEQ ID NO: 368745 - RNA, 32 nt, Homo Sapiens
aaggaguuuuucccucuuucuuacgguucaaa

SEQ ID NO: 368746 - RNA, 32 nt, Homo Sapiens
ugucccauuuuuaucugcuacucuuuauuuca

SEQ ID NO: 368747 - RNA, 31 nt, Homo Sapiens
gaaugaccugugucuugaagaaguuggcuuu

SEQ ID NO: 368748 - RNA, 32 nt, Homo Sapiens
caugggggaaugguuuccccuaugcuguucuu

SEQ ID NO: 368749 - RNA, 32 nt, Homo Sapiens
accauccaguugcaggaaaacaagcuuaacac

SEQ ID NO: 368750 - RNA, 32 nt, Homo Sapiens
cccuaguacaagacauaguauuuuuauucgaa

SEQ ID NO: 368751 - RNA, 32 nt, Homo Sapiens
cuccuacacacacacacacacacacacacgcu

SEQ ID NO: 368752 - RNA, 32 nt, Homo Sapiens
ugucaauaaaauguaucuggcgugaacagcag

SEQ ID NO: 368753 - RNA, 32 nt, Homo Sapiens
uuuaauuugcagagauuugcugccaggaauca

SEQ ID NO: 368754 - RNA, 32 nt, Homo Sapiens
acguaagagggagagcaauggggacgggcagg

SEQ ID NO: 368755 - RNA, 32 nt, Homo Sapiens
ucucauugcccgcgcuuucucauugccucuuu

SEQ ID NO: 368756 - RNA, 32 nt, Homo Sapiens
agagcgcgaggcugcgcaaugccgcggcggug

SEQ ID NO: 368757 - RNA, 32 nt, Homo Sapiens
aaaacuacgggcggcgacggcuucucggaagu

SEQ ID NO: 368758 - RNA, 32 nt, Homo Sapiens
augugcugucacgcacaagggcacgugaaguc

SEQ ID NO: 368759 - RNA, 32 nt, Homo Sapiens
ccucuugacaaugggaaacugggugguuaacc

SEQ ID NO: 368760 - RNA, 32 nt, Homo Sapiens
ugucccgaggcccggccaggggcugggcaggg

SEQ ID NO: 368761 - RNA, 32 nt, Homo Sapiens
aaacaaugacagcuguaguaacuaugaugggu

SEQ ID NO: 368762 - RNA, 32 nt, Homo Sapiens
uaggaagagggagaagugucagaauuccuccc

SEQ ID NO: 368763 - RNA, 32 nt, Homo Sapiens
acacaagugucugccucugaagacuauccaua

SEQ ID NO: 368764 - RNA, 32 nt, Homo Sapiens
gguuggugguggcagugcagcaggggagggac

SEQ ID NO: 368765 - RNA, 32 nt, Homo Sapiens
auccugucuguuuguugcacaauggaaaucac

SEQ ID NO: 368766 - RNA, 32 nt, Homo Sapiens
aggcagccuuggcgguuuaucgcccuggcagg

SEQ ID NO: 368767 - RNA, 32 nt, Homo Sapiens
aagggguuuuaacauaauuuagaaugugaaaa

SEQ ID NO: 368768 - RNA, 30 nt, Homo Sapiens
aagcaugcugacugcauccgaaaggccccc

SEQ ID NO: 368769 - RNA, 32 nt, Homo Sapiens
ggccagcccuucccuccuucucacugcguguc

SEQ ID NO: 368770 - RNA, 32 nt, Homo Sapiens
gaauggaaugugaaaauuauuuuuguuaaaac

SEQ ID NO: 368771 - RNA, 32 nt, Homo Sapiens
auuaacuuguggaugauucagaguuaaaagau

SEQ ID NO: 368772 - RNA, 32 nt, Homo Sapiens
aacuuguguaaauuuugauacuguauuaaaac

SEQ ID NO: 368773 - RNA, 32 nt, Homo Sapiens
ugaaaguaaaauguucccugugcauaaagcau

SEQ ID NO: 368774 - RNA, 32 nt, Homo Sapiens
agccccuggggccaaugacacggaguacgaga

SEQ ID NO: 368775 - RNA, 32 nt, Homo Sapiens
cuccuaauauuuugauucauuuucugccuauc

SEQ ID NO: 368776 - RNA, 32 nt, Homo Sapiens
guugggcgggaccaggaugccugaccgggaca

SEQ ID NO: 368777 - RNA, 32 nt, Homo Sapiens
aguugaacuuggcagagagaaagggaaaccag

SEQ ID NO: 368778 - RNA, 32 nt, Homo Sapiens
uacauucccacuuuauauacaguaggauucua

SEQ ID NO: 368779 - RNA, 32 nt, Homo Sapiens
uuuggucuuaacuagguagauguaauauauga

SEQ ID NO: 368780 - RNA, 32 nt, Homo Sapiens
cauagcuuauugucucgggggcugguucccgc

SEQ ID NO: 368781 - RNA, 32 nt, Homo Sapiens
cgagggggccgcggucuggcuagggagccgcg

SEQ ID NO: 368782 - RNA, 32 nt, Homo Sapiens
gaccccgcucuacuccauggccucccaagcca

SEQ ID NO: 368783 - RNA, 32 nt, Homo Sapiens
gauggugcuuggauuccagccuaaggaaggcu

SEQ ID NO: 368784 - RNA, 29 nt, Homo Sapiens
cuuuccuuauaugagugaggcucccagcu

SEQ ID NO: 368785 - RNA, 32 nt, Homo Sapiens
acagcccaguguucuccuugggggcaggaacc

SEQ ID NO: 368786 - RNA, 32 nt, Homo Sapiens
gcagguccuuuuuccuccugcugagcugagca

SEQ ID NO: 368787 - RNA, 32 nt, Homo Sapiens
guuuuaacguagauuucuuuuugcaccccaug

SEQ ID NO: 368788 - RNA, 32 nt, Homo Sapiens
ugcuucaccaaccgcucggcgcaguuugaggc

SEQ ID NO: 368789 - RNA, 31 nt, Homo Sapiens
uugguuacaaagaagaaagaugcuccuccag

SEQ ID NO: 368790 - RNA, 32 nt, Homo Sapiens
gaagcgagagagcggaggcgccgaggauccga

SEQ ID NO: 368791 - RNA, 32 nt, Homo Sapiens
acugcaaaacaaacaggauaguuaccaauaug

SEQ ID NO: 368792 - RNA, 32 nt, Homo Sapiens
gaaacugacauacccaacccacuuccucaaac

SEQ ID NO: 368793 - RNA, 32 nt, Homo Sapiens
ugccuuauguguuucaagaugauccuuaccuu

SEQ ID NO: 368794 - RNA, 31 nt, Homo Sapiens
uuugcauugcugucccugcccccucaucacu

SEQ ID NO: 368795 - RNA, 32 nt, Homo Sapiens
ugaguggcaaaauguaaugaaaacuuuacaug

SEQ ID NO: 368796 - RNA, 32 nt, Homo Sapiens
uuaaaauguauguguagauauaacuuaaauau

SEQ ID NO: 368797 - RNA, 32 nt, Homo Sapiens
ugggggcagcguccuuccuucucucggccccu

SEQ ID NO: 368798 - RNA, 32 nt, Homo Sapiens
acucaacagcuaugauuuacugcagcaaaaaa

SEQ ID NO: 368799 - RNA, 32 nt, Homo Sapiens
ccuaacuaacuggcaggggagacaggagccua

SEQ ID NO: 368800 - RNA, 32 nt, Homo Sapiens
ggaaauuuccuaacaaacaaacaaacaaacaa

SEQ ID NO: 368801 - RNA, 32 nt, Homo Sapiens
aaaacaacaacaaccauauuugucacagaaau

SEQ ID NO: 368802 - RNA, 32 nt, Homo Sapiens
uaaccccaguguuaucugcagaccaucugagg

SEQ ID NO: 368803 - RNA, 32 nt, Homo Sapiens
acgauaaaagggaacccugagcagaacacaug

SEQ ID NO: 368804 - RNA, 32 nt, Homo Sapiens
uccaguuugaaaaaacaaaaugccauucaacc

SEQ ID NO: 368805 - RNA, 32 nt, Homo Sapiens
accccaagcgcuggaaacauguugcacaaugg

SEQ ID NO: 368806 - RNA, 32 nt, Homo Sapiens
cccugugcucucuggggugccguucuggucuc

SEQ ID NO: 368807 - RNA, 32 nt, Homo Sapiens
cgucuuguggucugcgaguucuggccaacugg

SEQ ID NO: 368808 - RNA, 32 nt, Homo Sapiens
gucgccccggggcagcagcggcagcagcagca

SEQ ID NO: 368809 - RNA, 32 nt, Homo Sapiens
gggucugcagaagguugggaauuuagaaaaua

SEQ ID NO: 368810 - RNA, 32 nt, Homo Sapiens
agacaagaaucuuuucgcugggaaagacucag

SEQ ID NO: 368811 - RNA, 32 nt, Homo Sapiens
uugccagcggacgucagcacucacggccugcg

SEQ ID NO: 368812 - RNA, 32 nt, Homo Sapiens
uuuaaaugcuaacauuugaugaauguaaguuu

SEQ ID NO: 368813 - RNA, 32 nt, Homo Sapiens
gaacuucccacgccccgcccagccccucacac

SEQ ID NO: 368814 - RNA, 32 nt, Homo Sapiens
cuccaccccgcgggcucuccaggagccucagc

SEQ ID NO: 368815 - RNA, 32 nt, Homo Sapiens
ggaccuuuagugcucccugcaccaaccuccca

SEQ ID NO: 368816 - RNA, 32 nt, Homo Sapiens
agucggcgaaguagcagcagcagcgccgccgc

SEQ ID NO: 368817 - RNA, 32 nt, Homo Sapiens
cuuuccccaucccuggccccgugacucagucc

SEQ ID NO: 368818 - RNA, 32 nt, Homo Sapiens
gagugagcccugugcaugcacacacacuuacg

SEQ ID NO: 368819 - RNA, 31 nt, Homo Sapiens
cauaaccgaaagaauaaauguuuuguucugu

SEQ ID NO: 368820 - RNA, 32 nt, Homo Sapiens
uacaugacaaaaugcucugauuccuagugcca

SEQ ID NO: 368821 - RNA, 32 nt, Homo Sapiens
uuugcuguauaaagugagcauuacuuaauuug

SEQ ID NO: 368822 - RNA, 32 nt, Homo Sapiens
ggguccaugugugacccuuguuucucuaugug

SEQ ID NO: 368823 - RNA, 32 nt, Homo Sapiens
cgucaaguuauguguuuaaaacaugugcaccu

SEQ ID NO: 368824 - RNA, 31 nt, Homo Sapiens
aacgucaugauuacaaauaaucauaauagag

SEQ ID NO: 368825 - RNA, 32 nt, Homo Sapiens
ccaccuguuuguccaucuguccaauuaccugu

SEQ ID NO: 368826 - RNA, 32 nt, Homo Sapiens
cugcagcuccacgggaggcuugccggggcuaa

SEQ ID NO: 368827 - RNA, 32 nt, Homo Sapiens
ccaguauccuauaguuugugauuugagaugau

SEQ ID NO: 368828 - RNA, 32 nt, Homo Sapiens
aucaggggaaggagaccccuaucuguccuucu

SEQ ID NO: 368829 - RNA, 32 nt, Homo Sapiens
guaaacccacauuaaggaaaccacuacggguc

SEQ ID NO: 368830 - RNA, 32 nt, Homo Sapiens
ccuccugccugccucuccaaggacuccacgcc

SEQ ID NO: 368831 - RNA, 32 nt, Homo Sapiens
cacugccccgcaacauccauaauagcaacagu

SEQ ID NO: 368832 - RNA, 32 nt, Homo Sapiens
augguggaagcaguucacuuaaaggccaugag

SEQ ID NO: 368833 - RNA, 32 nt, Homo Sapiens
ugucuuagcaaccugauagguuagcauagggg

SEQ ID NO: 368834 - RNA, 32 nt, Homo Sapiens
uccgcagccacacggcccggcgcggggcgggc

SEQ ID NO: 368835 - RNA, 30 nt, Homo Sapiens
ccuuugcagaauuccacccaucuuucaagg

SEQ ID NO: 368836 - RNA, 32 nt, Homo Sapiens
ugcccauuaaaauaaaguuauccuguaccaua

SEQ ID NO: 368837 - RNA, 32 nt, Homo Sapiens
acuggcaggacacguccucacagaaaauugaa

SEQ ID NO: 368838 - RNA, 32 nt, Homo Sapiens
acugugugugcugaagaguacgugggagcucu

SEQ ID NO: 368839 - RNA, 32 nt, Homo Sapiens
ucucucauuuuucuugguguggcuugggguuu

SEQ ID NO: 368840 - RNA, 29 nt, Homo Sapiens
ucaucugugacuuagucugucguaguggu

SEQ ID NO: 368841 - RNA, 32 nt, Homo Sapiens
gacucacaaggcuaagcugugcaugggggcug

SEQ ID NO: 368842 - RNA, 32 nt, Homo Sapiens
ucccucaguggaugucuucccucccccgaccc

SEQ ID NO: 368843 - RNA, 32 nt, Homo Sapiens
aggucccaguguucagauggggagcgaucagu

SEQ ID NO: 368844 - RNA, 32 nt, Homo Sapiens
gcccacccgggcggccguagggcggucacgau

SEQ ID NO: 368845 - RNA, 32 nt, Homo Sapiens
uccaccacaacaacccugggagagaaaaacau

SEQ ID NO: 368846 - RNA, 32 nt, Homo Sapiens
gggacgcugucauguacggcgcgagcgggggc

SEQ ID NO: 368847 - RNA, 32 nt, Homo Sapiens
ucaucauuucucucaccucucaucuuuggaac

SEQ ID NO: 368848 - RNA, 32 nt, Homo Sapiens
gcgaugcugcaccucccaugauguccuggcuu

SEQ ID NO: 368849 - RNA, 32 nt, Homo Sapiens
auuaaugcagaaacagaaaaucacauaccaca

SEQ ID NO: 368850 - RNA, 32 nt, Homo Sapiens
aucacuaaaaauacaaaaauuacccgggcaug

SEQ ID NO: 368851 - RNA, 32 nt, Homo Sapiens
cugcguuccccucccuggcuguuagggucugg

SEQ ID NO: 368852 - RNA, 32 nt, Homo Sapiens
cccagccgaacacagcccacccgcccagcucc

SEQ ID NO: 368853 - RNA, 32 nt, Homo Sapiens
agaagaugaagaaggaaaccaggugaacucag

SEQ ID NO: 368854 - RNA, 32 nt, Homo Sapiens
ccaccuccugcccugcugggguccagccaugu

SEQ ID NO: 368855 - RNA, 32 nt, Homo Sapiens
ucuccuggcccccucaguucucccagguuguu

SEQ ID NO: 368856 - RNA, 30 nt, Homo Sapiens
auauuugagaagcuugguaaauuaucugua

SEQ ID NO: 368857 - RNA, 32 nt, Homo Sapiens
uuuccagcaucuuugccacccuugcuuuuuuc

SEQ ID NO: 368858 - RNA, 31 nt, Homo Sapiens
agaucacggcacugcgcugcagccugggcaa

SEQ ID NO: 368859 - RNA, 32 nt, Homo Sapiens
gcaaaaagaugaugaggauaccagagaggcau

SEQ ID NO: 368860 - RNA, 32 nt, Homo Sapiens
uccguuauuuuaggaggucccuggccaaagau

SEQ ID NO: 368861 - RNA, 32 nt, Homo Sapiens
gcuguggcggcacucgccccggugcuggucug

SEQ ID NO: 368862 - RNA, 32 nt, Homo Sapiens
ggacggaucagccauuugaaugacuuguccau

SEQ ID NO: 368863 - RNA, 32 nt, Homo Sapiens
gauguuaauuaugauuuuaacucucaagauca

SEQ ID NO: 368864 - RNA, 32 nt, Homo Sapiens
aguuucuugcuuucuucagcacaucuuauagu

SEQ ID NO: 368865 - RNA, 32 nt, Homo Sapiens
cuuugcucuggaggaaguucuccagcuucagc

SEQ ID NO: 368866 - RNA, 32 nt, Homo Sapiens
uaauuuguauagauuauauauauuagaucuug

SEQ ID NO: 368867 - RNA, 32 nt, Homo Sapiens
guaaaacucauuuuuucuuguucuuaauuuau

SEQ ID NO: 368868 - RNA, 32 nt, Homo Sapiens
gagccacugugccuggcuuccauccucuucua

SEQ ID NO: 368869 - RNA, 32 nt, Homo Sapiens
guggagguugguuuuguaguucugccuugagg

SEQ ID NO: 368870 - RNA, 32 nt, Homo Sapiens
ugugauuuguaucagacuuugaggagggaagg

SEQ ID NO: 368871 - RNA, 32 nt, Homo Sapiens
ggggccugcccgugcccgccucagggauggca

SEQ ID NO: 368872 - RNA, 32 nt, Homo Sapiens
uuggcucggcgcgcuccggccggccgcaaagu

SEQ ID NO: 368873 - RNA, 32 nt, Homo Sapiens
agcggauuuccgccuccggguggcgcuucccg

SEQ ID NO: 368874 - RNA, 32 nt, Homo Sapiens
uccgaaggaacuguacucccccugcccucccc

SEQ ID NO: 368875 - RNA, 32 nt, Homo Sapiens
auuuucuaaaagacacaucucuugaaaaauga

SEQ ID NO: 368876 - RNA, 32 nt, Homo Sapiens
acaugaaguauuuauccaccuguuuuauuuuc

SEQ ID NO: 368877 - RNA, 32 nt, Homo Sapiens
cguuaacauggaccuggaaaacaaagugaaga

SEQ ID NO: 368878 - RNA, 26 nt, Homo Sapiens
caugagccuccuccucuccuucuacc

SEQ ID NO: 368879 - RNA, 32 nt, Homo Sapiens
gcagugagggaagaaaggauccugcuggggau

SEQ ID NO: 368880 - RNA, 32 nt, Homo Sapiens
gaggccaguuuucaggacaugggaauuugaau

SEQ ID NO: 368881 - RNA, 32 nt, Homo Sapiens
cucucacugugauuccucuccuuccuccgugg

SEQ ID NO: 368882 - RNA, 32 nt, Homo Sapiens
cucaaggcaaaggugggauaucauggcaucua

SEQ ID NO: 368883 - RNA, 32 nt, Homo Sapiens
uuaaaguguucaguaacuauuagcuguuacug

SEQ ID NO: 368884 - RNA, 32 nt, Homo Sapiens
acugacuuuuuuuuuucuuuuauuuugagaca

SEQ ID NO: 368885 - RNA, 32 nt, Homo Sapiens
guacacugcauuuugcagaaaaaaaaaaaaaa

SEQ ID NO: 368886 - RNA, 32 nt, Homo Sapiens
uggguaacagagccaccuucugcguccugcug

SEQ ID NO: 368887 - RNA, 32 nt, Homo Sapiens
ucuugcuuuuuaccccaccgccacccaguccc

SEQ ID NO: 368888 - RNA, 30 nt, Homo Sapiens
ggugacagagagagacccugucucaaaaac

SEQ ID NO: 368889 - RNA, 32 nt, Homo Sapiens
gccagcuuccaagaacuggaaugcguacgucu

SEQ ID NO: 368890 - RNA, 32 nt, Homo Sapiens
auuuuauuugcugugcagaaauguuuuaauuc

SEQ ID NO: 368891 - RNA, 32 nt, Homo Sapiens
cucuggcuccuguccucuggcuccaccugcac

SEQ ID NO: 368892 - RNA, 32 nt, Homo Sapiens
uuaauucgaugguaucauuagaacccagcaca

SEQ ID NO: 368893 - RNA, 32 nt, Homo Sapiens
gaagaauggugacuguguuuuuauugaaggaa

SEQ ID NO: 368894 - RNA, 32 nt, Homo Sapiens
ugauauacuucuauguuuuuaauguacagcau

SEQ ID NO: 368895 - RNA, 32 nt, Homo Sapiens
cccccgagaccaccgcccggccccaccuggcu

SEQ ID NO: 368896 - RNA, 32 nt, Homo Sapiens
caacaaaaggauuguacuguauuaagaaccga

SEQ ID NO: 368897 - RNA, 32 nt, Homo Sapiens
gaaugcuuugauauuuuauuaagggacucugc

SEQ ID NO: 368898 - RNA, 32 nt, Homo Sapiens
cggagucugggaggagagcagcugcgggcgcg

SEQ ID NO: 368899 - RNA, 32 nt, Homo Sapiens
augucaucauuggcagaauuacuugucuugaa

SEQ ID NO: 368900 - RNA, 32 nt, Homo Sapiens
gggucggggagcggcuccgggcggcagcuaug

SEQ ID NO: 368901 - RNA, 32 nt, Homo Sapiens
aucugccccgcggucuccggccucuccacccu

SEQ ID NO: 368902 - RNA, 32 nt, Homo Sapiens
gggcuccagcagaucccuuguuuuccugucag

SEQ ID NO: 368903 - RNA, 32 nt, Homo Sapiens
cugcagggccuucuccagcucccuuugguuag

SEQ ID NO: 368904 - RNA, 32 nt, Homo Sapiens
cgaccugggcccacacugcugccuucucccag

SEQ ID NO: 368905 - RNA, 32 nt, Homo Sapiens
uagcauauguaauugcaaaaugauuuagaaug

SEQ ID NO: 368906 - RNA, 32 nt, Homo Sapiens
cuuuaaauuguaaacuaacagcaagaacucac

SEQ ID NO: 368907 - RNA, 32 nt, Homo Sapiens
auaucuuggguuuuuggucagaugaaacugca

SEQ ID NO: 368908 - RNA, 32 nt, Homo Sapiens
ggcuuuccuguugacuggcccggagcuguacu

SEQ ID NO: 368909 - RNA, 32 nt, Homo Sapiens
ucacauguuucaguuuguguauaauauuaaua

SEQ ID NO: 368910 - RNA, 32 nt, Homo Sapiens
ggugacucugaugcaggcgccacagccacacu

SEQ ID NO: 368911 - RNA, 32 nt, Homo Sapiens
auauacaggguauguccuaacauggaguuaac

SEQ ID NO: 368912 - RNA, 32 nt, Homo Sapiens
cgcugucugaccagaugucaguacugcagaga

SEQ ID NO: 368913 - RNA, 32 nt, Homo Sapiens
aggcggccgcggcucagccgugggcucuaacg

SEQ ID NO: 368914 - RNA, 32 nt, Homo Sapiens
ccugcucuuucugccucugggcucauguaucu

SEQ ID NO: 368915 - RNA, 32 nt, Homo Sapiens
ucagauguugugcacagacaucaucaaaauua

SEQ ID NO: 368916 - RNA, 32 nt, Homo Sapiens
auuguggcauauacaugaaagggugagugcuu

SEQ ID NO: 368917 - RNA, 32 nt, Homo Sapiens
uuggagaguauuuuucuuuaugauuauuuuag

SEQ ID NO: 368918 - RNA, 32 nt, Homo Sapiens
ccgugcugagggugggaucucccagagucuaa

SEQ ID NO: 368919 - RNA, 32 nt, Homo Sapiens
ccaguucuggcccagucuccucuucuucugga

SEQ ID NO: 368920 - RNA, 32 nt, Homo Sapiens
agcaggcccucuugcccucccagccuucugac

SEQ ID NO: 368921 - RNA, 32 nt, Homo Sapiens
uguggaugguguggggccggccucuggccugg

SEQ ID NO: 368922 - RNA, 32 nt, Homo Sapiens
cgcgccagccucggcgguggcaagcgcugucc

SEQ ID NO: 368923 - RNA, 32 nt, Homo Sapiens
augucuguuucuaacaaauccacaaauagccc

SEQ ID NO: 368924 - RNA, 32 nt, Homo Sapiens
agcaagauccugucucuacaagaaauuuuuua

SEQ ID NO: 368925 - RNA, 32 nt, Homo Sapiens
agcaaucugaagacucugacuaacaugcagaa

SEQ ID NO: 368926 - RNA, 32 nt, Homo Sapiens
ugcauguuugaaaaauauuucaaagaauaguu

SEQ ID NO: 368927 - RNA, 32 nt, Homo Sapiens
ccguggaaccccgaagccuggcgggagagaga

SEQ ID NO: 368928 - RNA, 32 nt, Homo Sapiens
cacagagugagaaacuccaugggaaaaugagc

SEQ ID NO: 368929 - RNA, 32 nt, Homo Sapiens
cacggugggacgggacugcagccucccagagg

SEQ ID NO: 368930 - RNA, 32 nt, Homo Sapiens
ccacacugcugcugugccaagaagguguacag

SEQ ID NO: 368931 - RNA, 32 nt, Homo Sapiens
ugcaucaugcuuguaacaggcauuucauuuau

SEQ ID NO: 368932 - RNA, 32 nt, Homo Sapiens
cucaagccuuguacaagcacauaucauguaga

SEQ ID NO: 368933 - RNA, 32 nt, Homo Sapiens
uauuuacaaaaaugguucacguauauuaccac

SEQ ID NO: 368934 - RNA, 32 nt, Homo Sapiens
acaaucaccuuuacuuuguacucuguguguau

SEQ ID NO: 368935 - RNA, 32 nt, Homo Sapiens
cuggguuuaucucaaggcagcagccugagccc

SEQ ID NO: 368936 - RNA, 32 nt, Homo Sapiens
ucucugauuuguaaugagcaccuggacauguc

SEQ ID NO: 368937 - RNA, 32 nt, Homo Sapiens
gccagugccuggugcucuggccccucucgugg

SEQ ID NO: 368938 - RNA, 32 nt, Homo Sapiens
guacagccaaaauaauguauauauggaaagug

SEQ ID NO: 368939 - RNA, 32 nt, Homo Sapiens
agcaucaaaaauacccuacuaauauacucccc

SEQ ID NO: 368940 - RNA, 32 nt, Homo Sapiens
gccgaacuccuaaccucaggugccaaaucccc

SEQ ID NO: 368941 - RNA, 32 nt, Homo Sapiens
ucucaugauacuagucauaaaauauuuuaugg

SEQ ID NO: 368942 - RNA, 32 nt, Homo Sapiens
cagcugagaggacuuucacaccauaaggagau

SEQ ID NO: 368943 - RNA, 32 nt, Homo Sapiens
gugguauuuaggauguaauauguuuuccucca

SEQ ID NO: 368944 - RNA, 32 nt, Homo Sapiens
ccaacucaaggaugugcagguguuguucaugc

SEQ ID NO: 368945 - RNA, 27 nt, Homo Sapiens
uguaaaguaaauaaauucuucaaaaug

SEQ ID NO: 368946 - RNA, 32 nt, Homo Sapiens
uuuuuguaauuuucuucauugucagauuuuau

SEQ ID NO: 368947 - RNA, 32 nt, Homo Sapiens
ccacuauacuguccuuuuuuuguauucugggu

SEQ ID NO: 368948 - RNA, 32 nt, Homo Sapiens
gaaauucucaggacacacccaggccucaagac

SEQ ID NO: 368949 - RNA, 30 nt, Homo Sapiens
ccugcugucauucagaacaagaguacuagc

SEQ ID NO: 368950 - RNA, 32 nt, Homo Sapiens
gccguaaaagugcuuguaaaucuuuuuuuuuu

SEQ ID NO: 368951 - RNA, 28 nt, Homo Sapiens
gagccaguggcuacagugucacaggugg

SEQ ID NO: 368952 - RNA, 32 nt, Homo Sapiens
aaagaaggaaauguugggcaaacauuuuugug

SEQ ID NO: 368953 - RNA, 32 nt, Homo Sapiens
gggaaaaugucuauggaugaagcucuggagaa

SEQ ID NO: 368954 - RNA, 32 nt, Homo Sapiens
agacaucauguuggaaagauguuguagaaaug

SEQ ID NO: 368955 - RNA, 32 nt, Homo Sapiens
cggggccgggggauugccggcgcaucagggcc

SEQ ID NO: 368956 - RNA, 32 nt, Homo Sapiens
guuugucuguggggaaagaaaagcagaauacu

SEQ ID NO: 368957 - RNA, 32 nt, Homo Sapiens
acagauuccucccuccuccccgccugcagcuc

SEQ ID NO: 368958 - RNA, 32 nt, Homo Sapiens
cacggccucaucguaacuaaguauagucagca

SEQ ID NO: 368959 - RNA, 32 nt, Homo Sapiens
aggugaaaauggaaaaguuauucccaaaacug

SEQ ID NO: 368960 - RNA, 32 nt, Homo Sapiens
aagguaaaacaggcaaugaacucgcucuucaa

SEQ ID NO: 368961 - RNA, 32 nt, Homo Sapiens
uuccagugagccaaaaucaugccaauguauuc

SEQ ID NO: 368962 - RNA, 32 nt, Homo Sapiens
ugggauuucaacaagucugcagucaacauugc

SEQ ID NO: 368963 - RNA, 32 nt, Homo Sapiens
uguuucucggagaagcucccgaguguccggcc

SEQ ID NO: 368964 - RNA, 32 nt, Homo Sapiens
gcgggccgcaagaggagaagggggcguggcug

SEQ ID NO: 368965 - RNA, 31 nt, Homo Sapiens
ugaucucccggagaagccuccacuccauugu

SEQ ID NO: 368966 - RNA, 32 nt, Homo Sapiens
cccagugaacucuccuuuugugcuuaucaugu

SEQ ID NO: 368967 - RNA, 32 nt, Homo Sapiens
ucaaucuuucugcaauaagaucuaaagccugg

SEQ ID NO: 368968 - RNA, 32 nt, Homo Sapiens
uggcauauuagaaaaauuccugauugauagag

SEQ ID NO: 368969 - RNA, 32 nt, Homo Sapiens
uuuauuucaaauaguuuggaaauuguuguacc

SEQ ID NO: 368970 - RNA, 32 nt, Homo Sapiens
accaccaauggauauacaaauggcaaacaauu

SEQ ID NO: 368971 - RNA, 32 nt, Homo Sapiens
acaaagcaugaagaugugaaaauaucaucuua

SEQ ID NO: 368972 - RNA, 32 nt, Homo Sapiens
auuaugaagcccuaaguaaaucuaaauuaacu

SEQ ID NO: 368973 - RNA, 32 nt, Homo Sapiens
uccccacccucccuccccaccuccucaggcca

SEQ ID NO: 368974 - RNA, 32 nt, Homo Sapiens
ugcuguuaaaauugcucaugauuucgacguau

SEQ ID NO: 368975 - RNA, 32 nt, Homo Sapiens
cgcccgcucccgcucccgaucucugauugcuc

SEQ ID NO: 368976 - RNA, 32 nt, Homo Sapiens
agcccggccagccagcucuacugcagggcgca

SEQ ID NO: 368977 - RNA, 32 nt, Homo Sapiens
cugggggcuuguuuuucuuuucuucuuucaaa

SEQ ID NO: 368978 - RNA, 32 nt, Homo Sapiens
gcggaggcugcuuuucugaguguuuacaagca

SEQ ID NO: 368979 - RNA, 32 nt, Homo Sapiens
caaacacacgcgcacgcaaacagcagugagga

SEQ ID NO: 368980 - RNA, 32 nt, Homo Sapiens
ggacuagccugggcaacauagcaagaucccac

SEQ ID NO: 368981 - RNA, 32 nt, Homo Sapiens
cucgggaacccaauaucgaccggagccaucuu

SEQ ID NO: 368982 - RNA, 32 nt, Homo Sapiens
aaaguuuuaagugacucuaggagagcaggaga

SEQ ID NO: 368983 - RNA, 32 nt, Homo Sapiens
uucacacuagccuauaaaguggcugccugaga

SEQ ID NO: 368984 - RNA, 32 nt, Homo Sapiens
uuacaucacagcaaucuagucacucccugguc

SEQ ID NO: 368985 - RNA, 32 nt, Homo Sapiens
uuaacucuuuuagguaacuagagcaguacuug

SEQ ID NO: 368986 - RNA, 31 nt, Homo Sapiens
ccccagccucagagcgcuccaagaggcaggu

SEQ ID NO: 368987 - RNA, 32 nt, Homo Sapiens
gugcuaauauauuauccuaucuguuaaaauau

SEQ ID NO: 368988 - RNA, 32 nt, Homo Sapiens
auuugacaaaaauuagccgggugugguggcag

SEQ ID NO: 368989 - RNA, 32 nt, Homo Sapiens
aaucauucaaccaagagaagagucaagugaau

SEQ ID NO: 368990 - RNA, 32 nt, Homo Sapiens
uucacacagaccuuuugccuuuuuuagcugca

SEQ ID NO: 368991 - RNA, 32 nt, Homo Sapiens
auauucuuuaucccuuuuuuuguuguuguuuu

SEQ ID NO: 368992 - RNA, 32 nt, Homo Sapiens
ugugcauaaauuucagaaaacaccacagggau

SEQ ID NO: 368993 - RNA, 32 nt, Homo Sapiens
aguggugaugauauuucuuucaaucuguauug

SEQ ID NO: 368994 - RNA, 32 nt, Homo Sapiens
acauauucccuggccuagagugggcugacaau

SEQ ID NO: 368995 - RNA, 32 nt, Homo Sapiens
ccauagaucagggaaacuuaugucuuggugaa

SEQ ID NO: 368996 - RNA, 32 nt, Homo Sapiens
auccgccugugcuuugagaggaagaagauggu

SEQ ID NO: 368997 - RNA, 28 nt, Homo Sapiens
acguguguuguguauaugugugugucug

SEQ ID NO: 368998 - RNA, 32 nt, Homo Sapiens
agugaaauccaagaucaacaaucuugucauaa

SEQ ID NO: 368999 - RNA, 32 nt, Homo Sapiens
ugaaagaagaacugggguuguuagagcugaga

SEQ ID NO: 369000 - RNA, 32 nt, Homo Sapiens
ccuccgcugcgcgaccccaccucugccgccgc

SEQ ID NO: 369001 - RNA, 31 nt, Homo Sapiens
cuucggccugccugccugccugccugagguc

SEQ ID NO: 369002 - RNA, 32 nt, Homo Sapiens
ucuagacccggagagcccugugcggauccuga

SEQ ID NO: 369003 - RNA, 32 nt, Homo Sapiens
ugaguccauuuucuagcugccuuuauucacau

SEQ ID NO: 369004 - RNA, 32 nt, Homo Sapiens
gaagguccuagagcuuccucagugcagcugga

SEQ ID NO: 369005 - RNA, 32 nt, Homo Sapiens
uaauuguguacuuuucaguuuuuugucuguua

SEQ ID NO: 369006 - RNA, 32 nt, Homo Sapiens
cgugggcccagcugugggcccucugagcaacu

SEQ ID NO: 369007 - RNA, 32 nt, Homo Sapiens
caagugggaaagggucccaagcaguccagaga

SEQ ID NO: 369008 - RNA, 32 nt, Homo Sapiens
uuauggauuucgcaguucaacucucaaccaua

SEQ ID NO: 369009 - RNA, 32 nt, Homo Sapiens
gucacuuuuuucugccuugcuagccaaaaucu

SEQ ID NO: 369010 - RNA, 31 nt, Homo Sapiens
acugcccugggcgcccugccccucccgcugc

SEQ ID NO: 369011 - RNA, 31 nt, Homo Sapiens
ggaauggaauaaaaacaauaugaguagugua

SEQ ID NO: 369012 - RNA, 31 nt, Homo Sapiens
uuguucauggauuuugucgcuggagccaucg

SEQ ID NO: 369013 - RNA, 32 nt, Homo Sapiens
uuguuuggauugguucuaauuaaugaaaauaa

SEQ ID NO: 369014 - RNA, 32 nt, Homo Sapiens
aaugagucagagaacacagaggugauguuugg

SEQ ID NO: 369015 - RNA, 32 nt, Homo Sapiens
ugggucuccaagaaaauuucugcacagccagu

SEQ ID NO: 369016 - RNA, 32 nt, Homo Sapiens
uucucuuaaaagauuaguuuuauuaauuuugu

SEQ ID NO: 369017 - RNA, 32 nt, Homo Sapiens
accaauggcugcggguagccggaggcuuggca

SEQ ID NO: 369018 - RNA, 32 nt, Homo Sapiens
cgcugccgcacgagccccacgagccgcucacc

SEQ ID NO: 369019 - RNA, 32 nt, Homo Sapiens
uggggaaggccauguugcagcugcugaucaga

SEQ ID NO: 369020 - RNA, 32 nt, Homo Sapiens
cuuggcuucucuuuccucuguucuugaugaga

SEQ ID NO: 369021 - RNA, 32 nt, Homo Sapiens
cuccccggccccagcucuggacgcucacccca

SEQ ID NO: 369022 - RNA, 32 nt, Homo Sapiens
acccuguuacaucauaacaacuucugaaacac

SEQ ID NO: 369023 - RNA, 32 nt, Homo Sapiens
auucuguugcuguugaacguaauguaaucuua

SEQ ID NO: 369024 - RNA, 32 nt, Homo Sapiens
caacauggggauggagaagagaauuagcguuu

SEQ ID NO: 369025 - RNA, 32 nt, Homo Sapiens
ugguuggcgagaagguaaaacaacaaccccgc

SEQ ID NO: 369026 - RNA, 32 nt, Homo Sapiens
gaaccacuaugaauguaaugaauguggagaaa

SEQ ID NO: 369027 - RNA, 32 nt, Homo Sapiens
ccccuacucccucuucacuguggccacagccc

SEQ ID NO: 369028 - RNA, 32 nt, Homo Sapiens
cggcaguguugcacuguguuugaguagaacgu

SEQ ID NO: 369029 - RNA, 32 nt, Homo Sapiens
agacccacuccaucuuuuuucuccaucuucug

SEQ ID NO: 369030 - RNA, 32 nt, Homo Sapiens
guggaaggacauucuaugaguaaacagcaagu

SEQ ID NO: 369031 - RNA, 32 nt, Homo Sapiens
gaaccuuggagguggagguuguggugagccau

SEQ ID NO: 369032 - RNA, 32 nt, Homo Sapiens
ggcgaagcggggcaaaguucccugcccaccga

SEQ ID NO: 369033 - RNA, 32 nt, Homo Sapiens
ucuacauauuauauguaggagcuccuaguguu

SEQ ID NO: 369034 - RNA, 31 nt, Homo Sapiens
gcaaggaaauaaaaagcuagguaugauuucc

SEQ ID NO: 369035 - RNA, 32 nt, Homo Sapiens
uaucuugcuucaguugguuuccuccuaaauau

SEQ ID NO: 369036 - RNA, 32 nt, Homo Sapiens
gcuucccagccugcagaauggccaccuugcag

SEQ ID NO: 369037 - RNA, 32 nt, Homo Sapiens
ggaacgguguuacgauugccugcguuuaggag

SEQ ID NO: 369038 - RNA, 32 nt, Homo Sapiens
uaacauguuguucuguuuuguaaagugugugu

SEQ ID NO: 369039 - RNA, 32 nt, Homo Sapiens
uaguacacuauuuaaugguuauacauggcaua

SEQ ID NO: 369040 - RNA, 32 nt, Homo Sapiens
uuucuccuuuucucuucagugguuauguugcu

SEQ ID NO: 369041 - RNA, 32 nt, Homo Sapiens
ggaucugugcuacacaaaauaugccaggaccu

SEQ ID NO: 369042 - RNA, 32 nt, Homo Sapiens
gccagagucaagggcugcagcacugcccgaua

SEQ ID NO: 369043 - RNA, 32 nt, Homo Sapiens
ggaaucuuaaagugauacaugcuaacuguaga

SEQ ID NO: 369044 - RNA, 32 nt, Homo Sapiens
cuuuaacuaugaaauguuacuguguaguauau

SEQ ID NO: 369045 - RNA, 32 nt, Homo Sapiens
caaaaauguauuaaaaauaggaucccaugaga

SEQ ID NO: 369046 - RNA, 29 nt, Homo Sapiens
gucccugugacuuuauugccacaugcuuu

SEQ ID NO: 369047 - RNA, 32 nt, Homo Sapiens
guccugaaaaauuuuuguugagaauccacugg

SEQ ID NO: 369048 - RNA, 32 nt, Homo Sapiens
agucaucagggucuggcuguguagaaguucaa

SEQ ID NO: 369049 - RNA, 32 nt, Homo Sapiens
cucgccugcgccgagagccguccgcguagagc

SEQ ID NO: 369050 - RNA, 32 nt, Homo Sapiens
auugauaggaauucuaucacuauagguuaguu

SEQ ID NO: 369051 - RNA, 32 nt, Homo Sapiens
gggcagcccucccuggcugccaggaggcucug

SEQ ID NO: 369052 - RNA, 32 nt, Homo Sapiens
cagccagaggccgcgugguuuugggggacguc

SEQ ID NO: 369053 - RNA, 32 nt, Homo Sapiens
gcuccgucugccgccgcacgccgcgaucccaa

SEQ ID NO: 369054 - RNA, 32 nt, Homo Sapiens
gcuagcaauagagagacaagugagggaauuag

SEQ ID NO: 369055 - RNA, 32 nt, Homo Sapiens
ccacccacuuccaucacccauccaauaaaaug

SEQ ID NO: 369056 - RNA, 32 nt, Homo Sapiens
aaagagcccagguuugcuccuguuuguaacua

SEQ ID NO: 369057 - RNA, 32 nt, Homo Sapiens
gguugaggaccccuguucuauaaggucgggag

SEQ ID NO: 369058 - RNA, 32 nt, Homo Sapiens
uugggccuucuuuuccagucaggugggacggc

SEQ ID NO: 369059 - RNA, 32 nt, Homo Sapiens
ccccugccugccugcccggcccugcacaacau

SEQ ID NO: 369060 - RNA, 32 nt, Homo Sapiens
ccuaucccggcggagucuccccauccuccuuu

SEQ ID NO: 369061 - RNA, 32 nt, Homo Sapiens
cggccccaccuggagcccccgccccgcgccau

SEQ ID NO: 369062 - RNA, 32 nt, Homo Sapiens
gaaggcccugagcgucacugcugcugggcgga

SEQ ID NO: 369063 - RNA, 32 nt, Homo Sapiens
ccuauuuuugacaauugacuuaauuuuaccca

SEQ ID NO: 369064 - RNA, 32 nt, Homo Sapiens
cgggagccucugcgggcccagcuccugccagu

SEQ ID NO: 369065 - RNA, 30 nt, Homo Sapiens
ggaccgaaguuuggcggcggcuccgggagg

SEQ ID NO: 369066 - RNA, 32 nt, Homo Sapiens
gggccacuuuuuucuuuuuuuuuuauuguguc

SEQ ID NO: 369067 - RNA, 32 nt, Homo Sapiens
gcccgagcuucagcuuccaggaugcuucucug

SEQ ID NO: 369068 - RNA, 32 nt, Homo Sapiens
auaauauguuuccucagcauaggagcuaugau

SEQ ID NO: 369069 - RNA, 32 nt, Homo Sapiens
ggagugccacuguuccucucuucacuccugag

SEQ ID NO: 369070 - RNA, 32 nt, Homo Sapiens
ucuuuacacugacuucaggauagauguuggga

SEQ ID NO: 369071 - RNA, 32 nt, Homo Sapiens
uuccccccuccgagcccuccuucccggcccaa

SEQ ID NO: 369072 - RNA, 32 nt, Homo Sapiens
aucuacacguucuuaaaaaauuuuuugagaca

SEQ ID NO: 369073 - RNA, 32 nt, Homo Sapiens
gcccgagccggggccauggcgaagcugcugag

SEQ ID NO: 369074 - RNA, 30 nt, Homo Sapiens
gcuggggcgcccgauccccuccgcagcugg

SEQ ID NO: 369075 - RNA, 32 nt, Homo Sapiens
auugggucagugcgguaccaggucuuggaggu

SEQ ID NO: 369076 - RNA, 32 nt, Homo Sapiens
uaugggcuccgucuucucaagucacauaggga

SEQ ID NO: 369077 - RNA, 32 nt, Homo Sapiens
aaauucauaacauaaugacuucauuguuauga

SEQ ID NO: 369078 - RNA, 32 nt, Homo Sapiens
gcccugucgugcauaacuguguagaaguguug

SEQ ID NO: 369079 - RNA, 32 nt, Homo Sapiens
uguuccucaaggaagcaguaccuuugaagaga

SEQ ID NO: 369080 - RNA, 32 nt, Homo Sapiens
gugauaguuucccccauccuuucauugacauu

SEQ ID NO: 369081 - RNA, 32 nt, Homo Sapiens
agcugcccuagugaggccccagccuaccugca

SEQ ID NO: 369082 - RNA, 32 nt, Homo Sapiens
caguagauaugcaacgccucuugcuccugccc

SEQ ID NO: 369083 - RNA, 32 nt, Homo Sapiens
ucuucucuuccucgcgcgcccagccgccucgg

SEQ ID NO: 369084 - RNA, 32 nt, Homo Sapiens
cucucgcuaccacuuccucuuccaacuacaua

SEQ ID NO: 369085 - RNA, 32 nt, Homo Sapiens
agcugagucugcuuaggggacugcaugggaag

SEQ ID NO: 369086 - RNA, 30 nt, Homo Sapiens
uaaaugaauaucccugcucugcuggucaau

SEQ ID NO: 369087 - RNA, 32 nt, Homo Sapiens
uccuaagaaaccgcugauaaccaggacaaaac

SEQ ID NO: 369088 - RNA, 32 nt, Homo Sapiens
caagaaccuuggacguuugacugacucuaucc

SEQ ID NO: 369089 - RNA, 32 nt, Homo Sapiens
ccccaccccucuuuuccaguccuugccuucca

SEQ ID NO: 369090 - RNA, 32 nt, Homo Sapiens
ugcagauacacacacacacacacacacacaca

SEQ ID NO: 369091 - RNA, 32 nt, Homo Sapiens
cccuccaucugcauacaccucccugucuucaa

SEQ ID NO: 369092 - RNA, 32 nt, Homo Sapiens
gcagccgguucccuccucuccaggcccccucc

SEQ ID NO: 369093 - RNA, 32 nt, Homo Sapiens
cauuucaggcagccagcucuuccucacccacu

SEQ ID NO: 369094 - RNA, 32 nt, Homo Sapiens
ggaaauccaucccacccaccucugucccucca

SEQ ID NO: 369095 - RNA, 28 nt, Homo Sapiens
ugaauggggcggcaauugcggggcccac

SEQ ID NO: 369096 - RNA, 32 nt, Homo Sapiens
gcauuccagaaucuugacuuucugauugguga

SEQ ID NO: 369097 - RNA, 32 nt, Homo Sapiens
auguuacuaaaugaaagaauuaaugaggcaga

SEQ ID NO: 369098 - RNA, 32 nt, Homo Sapiens
gggacuuaguggaguucucaucccuucaaugc

SEQ ID NO: 369099 - RNA, 32 nt, Homo Sapiens
aguggauuauagcucuguuuucuucuuuccaa

SEQ ID NO: 369100 - RNA, 32 nt, Homo Sapiens
ggccuggccuccuggguucuuugcugaaauua

SEQ ID NO: 369101 - RNA, 32 nt, Homo Sapiens
aaguuauucuguaaauacaacagaaucaguug

SEQ ID NO: 369102 - RNA, 32 nt, Homo Sapiens
gcagguccugagggccugugccccacagcccc

SEQ ID NO: 369103 - RNA, 32 nt, Homo Sapiens
uuuuuaugaaccaaaaucauugcagcuaauaa

SEQ ID NO: 369104 - RNA, 32 nt, Homo Sapiens
aaccaggcccugcauuuuuuuauauucugaau

SEQ ID NO: 369105 - RNA, 32 nt, Homo Sapiens
auuucccacguuuucccuucagugcaguuaaa

SEQ ID NO: 369106 - RNA, 32 nt, Homo Sapiens
gguccugcggccgcgauggccguggaagguuc

SEQ ID NO: 369107 - RNA, 32 nt, Homo Sapiens
cucgccuccccucggcacccccggccccggag

SEQ ID NO: 369108 - RNA, 32 nt, Homo Sapiens
uugccuacugucaguggcuuugccaagauggg

SEQ ID NO: 369109 - RNA, 32 nt, Homo Sapiens
cuucuuugccuugagccucaucacucagaagc

SEQ ID NO: 369110 - RNA, 32 nt, Homo Sapiens
gcugagauuuguuaaguuaccaaacuagucuu

SEQ ID NO: 369111 - RNA, 32 nt, Homo Sapiens
aucagucaggagacggcugugaauccugugga

SEQ ID NO: 369112 - RNA, 32 nt, Homo Sapiens
auccacucauugacuggaugaaguuuugcgau

SEQ ID NO: 369113 - RNA, 32 nt, Homo Sapiens
cuaaugcuuuuaagguaacaguucuaucucgu

SEQ ID NO: 369114 - RNA, 32 nt, Homo Sapiens
gaccgggagcagugggcagagcccggacccuc

SEQ ID NO: 369115 - RNA, 32 nt, Homo Sapiens
gggcucggcuacucuccggcccgggguacugg

SEQ ID NO: 369116 - RNA, 32 nt, Homo Sapiens
uccucggcuuccuuccucucugcaaugaccuu

SEQ ID NO: 369117 - RNA, 32 nt, Homo Sapiens
aagacuggauacuucuguaucugugaaguugg

SEQ ID NO: 369118 - RNA, 32 nt, Homo Sapiens
ugucagaagggagauugaagaaggugggccca

SEQ ID NO: 369119 - RNA, 32 nt, Homo Sapiens
cuguguaacaguaaaaucaucucuagugacug

SEQ ID NO: 369120 - RNA, 32 nt, Homo Sapiens
ucuuucccugucuucuuucagauuaucucauu

SEQ ID NO: 369121 - RNA, 32 nt, Homo Sapiens
cccgacggcgggagucgcaggugcugggugca

SEQ ID NO: 369122 - RNA, 32 nt, Homo Sapiens
gggcagaggaacuuacguuaugauaguacaag

SEQ ID NO: 369123 - RNA, 32 nt, Homo Sapiens
uucagaauguguauuuaaaaagaaaaggaauu

SEQ ID NO: 369124 - RNA, 32 nt, Homo Sapiens
caagauguauggugugucauuugugaaaauag

SEQ ID NO: 369125 - RNA, 28 nt, Homo Sapiens
cugaauaaugcuaccaggaugcuaaaga

SEQ ID NO: 369126 - RNA, 32 nt, Homo Sapiens
auuuuuugauccugugauacaugugcuguagc

SEQ ID NO: 369127 - RNA, 32 nt, Homo Sapiens
auuguagccugcuacagccuugaacucauggg

SEQ ID NO: 369128 - RNA, 32 nt, Homo Sapiens
ucuucuucucugugucccacaacucuggccuc

SEQ ID NO: 369129 - RNA, 32 nt, Homo Sapiens
aaauccucuucuauauugcagugucucuaaag

SEQ ID NO: 369130 - RNA, 32 nt, Homo Sapiens
gcuugugaauacugugagacagcugcugucug

SEQ ID NO: 369131 - RNA, 32 nt, Homo Sapiens
gaagcaggauggcagagcugugccaaugggaa

SEQ ID NO: 369132 - RNA, 32 nt, Homo Sapiens
accaaggguacagauccccagccccuccuccc

SEQ ID NO: 369133 - RNA, 32 nt, Homo Sapiens
uccggcucccgacucuucggcccgcuggcauc

SEQ ID NO: 369134 - RNA, 32 nt, Homo Sapiens
gcgcaugcggucucagcgcccggccuucccgc

SEQ ID NO: 369135 - RNA, 32 nt, Homo Sapiens
aagucccgcucuccccgcggcucugaguugga

SEQ ID NO: 369136 - RNA, 31 nt, Homo Sapiens
acagggagggcggucggucgcggcgagcagc

SEQ ID NO: 369137 - RNA, 32 nt, Homo Sapiens
cagagugcuuuaccaauugaaguaaaaugugg

SEQ ID NO: 369138 - RNA, 32 nt, Homo Sapiens
uguggcagugaagagaacaggucuuucaaaaa

SEQ ID NO: 369139 - RNA, 32 nt, Homo Sapiens
uacaggcgugugccaccacaccuagcuaauuu

SEQ ID NO: 369140 - RNA, 32 nt, Homo Sapiens
uacaggcaugcgccaccacaccuggccaauuu

SEQ ID NO: 369141 - RNA, 32 nt, Homo Sapiens
uaaagcuuacacaacaaaauucacaaaagugu

SEQ ID NO: 369142 - RNA, 30 nt, Homo Sapiens
auccucucugcagacgaggaaaccgaggac

SEQ ID NO: 369143 - RNA, 32 nt, Homo Sapiens
cugcccucaaauaccucccagcccugcagcag

SEQ ID NO: 369144 - RNA, 32 nt, Homo Sapiens
ugggauaaccaccuugaauguguacuuuuguu

SEQ ID NO: 369145 - RNA, 32 nt, Homo Sapiens
cuggucacucugucccugcacuccauguauag

SEQ ID NO: 369146 - RNA, 32 nt, Homo Sapiens
cccaucuaugaauagcacuuuaugauguaggc

SEQ ID NO: 369147 - RNA, 32 nt, Homo Sapiens
gcgcggagacaguggccgccggcggcccaacc

SEQ ID NO: 369148 - RNA, 32 nt, Homo Sapiens
gugcuguguucuagaccccccauauuauccca

SEQ ID NO: 369149 - RNA, 32 nt, Homo Sapiens
acagaaaacuaaaaaggaagaaaaaagauccc

SEQ ID NO: 369150 - RNA, 32 nt, Homo Sapiens
ccuguuaggggauaaacaucacaauaaucuga

SEQ ID NO: 369151 - RNA, 32 nt, Homo Sapiens
aggggcuucccgcaccugaucgcgagacccca

SEQ ID NO: 369152 - RNA, 32 nt, Homo Sapiens
caucaucaaauuagaauguugguucuuuuccu

SEQ ID NO: 369153 - RNA, 32 nt, Homo Sapiens
cccccacccacccaaggaauggugcugucaau

SEQ ID NO: 369154 - RNA, 32 nt, Homo Sapiens
uuuuuuuuuugacaucuuucuguggcaaagcu

SEQ ID NO: 369155 - RNA, 32 nt, Homo Sapiens
acguugaggggagggcauucaggacgcccucu

SEQ ID NO: 369156 - RNA, 32 nt, Homo Sapiens
uuauuuuccugugauuucuccucugggccacu

SEQ ID NO: 369157 - RNA, 32 nt, Homo Sapiens
aguucccuccucagcaauuucaucucuugaac

SEQ ID NO: 369158 - RNA, 32 nt, Homo Sapiens
gcugcaccgccccucgcucccccuccccuggg

SEQ ID NO: 369159 - RNA, 32 nt, Homo Sapiens
gcauuuccaagcccguggucugguuuuuaaaa

SEQ ID NO: 369160 - RNA, 32 nt, Homo Sapiens
gguccccgcggcgcgcagcggcugaaggaggc

SEQ ID NO: 369161 - RNA, 32 nt, Homo Sapiens
gaggcgcugcugcugggcgcgggguugcugcu

SEQ ID NO: 369162 - RNA, 32 nt, Homo Sapiens
gagucgcggacgccagcuccgagcucccucuc

SEQ ID NO: 369163 - RNA, 32 nt, Homo Sapiens
uccuuaucaaggaaaaagcaccuaacagcucc

SEQ ID NO: 369164 - RNA, 32 nt, Homo Sapiens
cuaauuguaaaaagucuugcuuuuuaaaacaa

SEQ ID NO: 369165 - RNA, 32 nt, Homo Sapiens
caaauccauguugaaauguaauccccaauguu

SEQ ID NO: 369166 - RNA, 32 nt, Homo Sapiens
cggaaggagaggcucucggagcagaagaggcc

SEQ ID NO: 369167 - RNA, 31 nt, Homo Sapiens
ucccuuucguguaaaauggugcuguuauuac

SEQ ID NO: 369168 - RNA, 32 nt, Homo Sapiens
caagaauugggguuuggaaaccuucgccuaga

SEQ ID NO: 369169 - RNA, 31 nt, Homo Sapiens
cacugccuguucuucucuccaaggaggcuuc

SEQ ID NO: 369170 - RNA, 32 nt, Homo Sapiens
aagaggauagagaacaguuuuacaauagacau

SEQ ID NO: 369171 - RNA, 32 nt, Homo Sapiens
cuauaaaguauuuuuagaggaucagauuauuu

SEQ ID NO: 369172 - RNA, 32 nt, Homo Sapiens
uccccaccuugauguuacaugacucuggaaca

SEQ ID NO: 369173 - RNA, 32 nt, Homo Sapiens
aguuuauaacaaaggaaugaugaugauuuaaa

SEQ ID NO: 369174 - RNA, 32 nt, Homo Sapiens
cucucuuccagccuccgaccgcccuccgauuu

SEQ ID NO: 369175 - RNA, 32 nt, Homo Sapiens
gcauccguguggaauugcgugcagccugugug

SEQ ID NO: 369176 - RNA, 32 nt, Homo Sapiens
aagugagcucuuacaagaaacuaaucaguguu

SEQ ID NO: 369177 - RNA, 32 nt, Homo Sapiens
agcuuuacuauuucaaaaauugucaaauuaau

SEQ ID NO: 369178 - RNA, 32 nt, Homo Sapiens
cucagccgccugaguagcugcacuauaggcac

SEQ ID NO: 369179 - RNA, 32 nt, Homo Sapiens
ccaccuuggggguggggggcggguuuuauaaa

SEQ ID NO: 369180 - RNA, 32 nt, Homo Sapiens
uuucugggcuccuggagagcccuguagccgcg

SEQ ID NO: 369181 - RNA, 32 nt, Homo Sapiens
guagaauucauuguauuaauucuuuugaaauu

SEQ ID NO: 369182 - RNA, 32 nt, Homo Sapiens
cgccccaggugcccgcgcgcguggugagcagc

SEQ ID NO: 369183 - RNA, 32 nt, Homo Sapiens
cuucugaagaggaaaagucaaaguguugcugu

SEQ ID NO: 369184 - RNA, 32 nt, Homo Sapiens
uugccacugucuucuuuuuuuucucauauauc

SEQ ID NO: 369185 - RNA, 32 nt, Homo Sapiens
agucccccggcggcgccgcuggcgucucuauc

SEQ ID NO: 369186 - RNA, 32 nt, Homo Sapiens
cugcaaaaguggcugcuuuggaugccagccca

SEQ ID NO: 369187 - RNA, 32 nt, Homo Sapiens
augccagauuccacuggagaucugccuuccca

SEQ ID NO: 369188 - RNA, 32 nt, Homo Sapiens
aauuuuuucugccuauuuaaagacaaauuaug

SEQ ID NO: 369189 - RNA, 32 nt, Homo Sapiens
augucacccggccuccucuccugucuucugca

SEQ ID NO: 369190 - RNA, 32 nt, Homo Sapiens
ccauggccacuaccccacuguuugcucuccug

SEQ ID NO: 369191 - RNA, 32 nt, Homo Sapiens
gaggcgcuguuccaggccuccuuccuggguau

SEQ ID NO: 369192 - RNA, 30 nt, Homo Sapiens
agggaugcacuugccacauuuuggaaagac

SEQ ID NO: 369193 - RNA, 32 nt, Homo Sapiens
guaaacauucuauuucucuauggucuacagca

SEQ ID NO: 369194 - RNA, 32 nt, Homo Sapiens
uccgcgcccccggcugcugcucacgccccgcc

SEQ ID NO: 369195 - RNA, 32 nt, Homo Sapiens
gaccucuuuucucuguacauagugaagcccgu

SEQ ID NO: 369196 - RNA, 32 nt, Homo Sapiens
uucacccguaacccaccgccauggccgaggaa

SEQ ID NO: 369197 - RNA, 32 nt, Homo Sapiens
uuuuucuuuccuuagacuuuggcuuacuggaa

SEQ ID NO: 369198 - RNA, 32 nt, Homo Sapiens
uggggacguccugccaccuggggcagucaccu

SEQ ID NO: 369199 - RNA, 32 nt, Homo Sapiens
caccaccuagugcaugaggcacagggcagagu

SEQ ID NO: 369200 - RNA, 32 nt, Homo Sapiens
ggucaggauaucuggaacaaaauauggaggug

SEQ ID NO: 369201 - RNA, 32 nt, Homo Sapiens
ggcugagcucagagccucuccuccuuccuguc

SEQ ID NO: 369202 - RNA, 32 nt, Homo Sapiens
aauauuucccugccuuuuuuuuucuuuuuuua

SEQ ID NO: 369203 - RNA, 32 nt, Homo Sapiens
cacggcccacagggguguagcccgagacccac

SEQ ID NO: 369204 - RNA, 32 nt, Homo Sapiens
gcugggaagaucuggauucucguuucagguca

SEQ ID NO: 369205 - RNA, 32 nt, Homo Sapiens
gcaagaggccaacagauuaagggaugcucagg

SEQ ID NO: 369206 - RNA, 32 nt, Homo Sapiens
ggaggcugcugcuuucaggggcccgugcuugu

SEQ ID NO: 369207 - RNA, 32 nt, Homo Sapiens
ucuuuccccuccccuggcauggacaccuugug

SEQ ID NO: 369208 - RNA, 32 nt, Homo Sapiens
augaaguacuuugccaaauaaaacgaggaugg

SEQ ID NO: 369209 - RNA, 32 nt, Homo Sapiens
ggaacacugucaaacuauaaauccauucagug

SEQ ID NO: 369210 - RNA, 32 nt, Homo Sapiens
caguuuugugcagcugacugucucagccaaac

SEQ ID NO: 369211 - RNA, 32 nt, Homo Sapiens
aucuauauaauagaaacgcacacacacgaaaa

SEQ ID NO: 369212 - RNA, 32 nt, Homo Sapiens
caccgguggcagcggcgacggcagcugcgaca

SEQ ID NO: 369213 - RNA, 32 nt, Homo Sapiens
cauuccugggauuagagcugccuuucccaggg

SEQ ID NO: 369214 - RNA, 32 nt, Homo Sapiens
uuuguuuuuugucucagcaucaguauauccca

SEQ ID NO: 369215 - RNA, 32 nt, Homo Sapiens
gcggcccuggagcgcuacaaggcgcggcguuc

SEQ ID NO: 369216 - RNA, 32 nt, Homo Sapiens
gcuaaaaugaaucaacggcucauucauaguua

SEQ ID NO: 369217 - RNA, 32 nt, Homo Sapiens
ugcuaggccugcggaaaacguccuagcgacac

SEQ ID NO: 369218 - RNA, 32 nt, Homo Sapiens
uguggauucccagggccuauuccacuagaagc

SEQ ID NO: 369219 - RNA, 32 nt, Homo Sapiens
aaugaagaugaccugaggcacaauuauugcua

SEQ ID NO: 369220 - RNA, 29 nt, Homo Sapiens
auauguguauguaugcguauguauguaug

SEQ ID NO: 369221 - RNA, 32 nt, Homo Sapiens
aaugacugccagcaguggaaaugccagacgcu

SEQ ID NO: 369222 - RNA, 32 nt, Homo Sapiens
ccgcccggaccucggcgcuuucuucuaggauc

SEQ ID NO: 369223 - RNA, 32 nt, Homo Sapiens
auaggggaaguguuauuuuaaaaaauucuaaa

SEQ ID NO: 369224 - RNA, 32 nt, Homo Sapiens
uuuagaaguauuuugccuccaauauucaacca

SEQ ID NO: 369225 - RNA, 32 nt, Homo Sapiens
agcacgggggaagaggcagggauccuucauua

SEQ ID NO: 369226 - RNA, 32 nt, Homo Sapiens
cgagaggccaagaccauggcugcuacaggagg

SEQ ID NO: 369227 - RNA, 32 nt, Homo Sapiens
ugcuuaguuccgagagugcgguuugcacucag

SEQ ID NO: 369228 - RNA, 32 nt, Homo Sapiens
ucuguucuuguauuucuauagcaccucucuau

SEQ ID NO: 369229 - RNA, 32 nt, Homo Sapiens
uggggguagcugucaccuccagguaugauuga

SEQ ID NO: 369230 - RNA, 32 nt, Homo Sapiens
ccuggaggagggggucgcgcgaagugccagau

SEQ ID NO: 369231 - RNA, 32 nt, Homo Sapiens
ugaggaucaaggaaaagccguggaaguggccg

SEQ ID NO: 369232 - RNA, 32 nt, Homo Sapiens
aagaugguaaggaaacaagaaaauuaaaugaa

SEQ ID NO: 369233 - RNA, 32 nt, Homo Sapiens
guggucuccuugcacuuucucaguucagaguu

SEQ ID NO: 369234 - RNA, 32 nt, Homo Sapiens
ccuucuggucaguacccaccccugcccccaag

SEQ ID NO: 369235 - RNA, 32 nt, Homo Sapiens
gauucuugcauuugaggcaucuguaaaaaugu

SEQ ID NO: 369236 - RNA, 32 nt, Homo Sapiens
cugggucucagauucugagacuguuguuuagc

SEQ ID NO: 369237 - RNA, 32 nt, Homo Sapiens
uacauggcuuuuaccuucuguauaucagaugu

SEQ ID NO: 369238 - RNA, 32 nt, Homo Sapiens
uugcuuucauuguuuuauuucuuaauugcuau

SEQ ID NO: 369239 - RNA, 32 nt, Homo Sapiens
aggggucaccauggcucuggcccgaggcagcc

SEQ ID NO: 369240 - RNA, 32 nt, Homo Sapiens
acacuaaccacuuuuucgauaauuaaaagaau

SEQ ID NO: 369241 - RNA, 32 nt, Homo Sapiens
gauagccuuuucugcaggcuucauguccuuag

SEQ ID NO: 369242 - RNA, 32 nt, Homo Sapiens
accagaggcagucgagcagagaggccaaacgc

SEQ ID NO: 369243 - RNA, 32 nt, Homo Sapiens
agggguaacugaucaggugucuauaacauuuu

SEQ ID NO: 369244 - RNA, 32 nt, Homo Sapiens
agcuugaagaaccaaaacagaaggaauaugua

SEQ ID NO: 369245 - RNA, 32 nt, Homo Sapiens
ccugccacguguccaguaucaguuggacacug

SEQ ID NO: 369246 - RNA, 28 nt, Homo Sapiens
caccgagggcggccucugacaugugugc

SEQ ID NO: 369247 - RNA, 32 nt, Homo Sapiens
ccgacggagccgggaaagaagagccggagccu

SEQ ID NO: 369248 - RNA, 32 nt, Homo Sapiens
ccgccagcgcccuggaggaagaggaagaggaa

SEQ ID NO: 369249 - RNA, 32 nt, Homo Sapiens
cggcagcugaggugagagacggcggcggcggc

SEQ ID NO: 369250 - RNA, 32 nt, Homo Sapiens
cuuuagaagagucuauacuaaguucuuggugc

SEQ ID NO: 369251 - RNA, 32 nt, Homo Sapiens
uuugcucucuacaaauggauagaaaaguuuau

SEQ ID NO: 369252 - RNA, 32 nt, Homo Sapiens
uaaaaauacauaucgcugacuucauggaaugg

SEQ ID NO: 369253 - RNA, 32 nt, Homo Sapiens
cggucuccgugucgccgccgccgcccggcauc

SEQ ID NO: 369254 - RNA, 32 nt, Homo Sapiens
cagagcuguggguagcagcauguugggucagg

SEQ ID NO: 369255 - RNA, 32 nt, Homo Sapiens
uaccuucggcccggccugggugccccucuaug

SEQ ID NO: 369256 - RNA, 32 nt, Homo Sapiens
cgguggagacgcugcuccauucugccuggauc

SEQ ID NO: 369257 - RNA, 32 nt, Homo Sapiens
cuuggggucaggaugccugggucucuucccgu

SEQ ID NO: 369258 - RNA, 32 nt, Homo Sapiens
uugaguuaauauauuuuuaugaagauauuuga

SEQ ID NO: 369259 - RNA, 32 nt, Homo Sapiens
ugauuggcuggggagucgagggggcgggauca

SEQ ID NO: 369260 - RNA, 32 nt, Homo Sapiens
gagaagugucuaaaaacaccaaaaagggaucc

SEQ ID NO: 369261 - RNA, 32 nt, Homo Sapiens
gcgcgcucucgagaggcggcggcggccagggu

SEQ ID NO: 369262 - RNA, 32 nt, Homo Sapiens
gcggggcccgucugcagcaagugaccgacggc

SEQ ID NO: 369263 - RNA, 32 nt, Homo Sapiens
ucuguccaguugcuccuucuucuauugacccu

SEQ ID NO: 369264 - RNA, 32 nt, Homo Sapiens
ucugggcucaggugauccucccgccuuggccu

SEQ ID NO: 369265 - RNA, 28 nt, Homo Sapiens
uuuagauuaaaauuauauaccugcuccu

SEQ ID NO: 369266 - RNA, 32 nt, Homo Sapiens
auaguucauaaugugaauauuagaaacuguua

SEQ ID NO: 369267 - RNA, 32 nt, Homo Sapiens
agugguggcuggcgcgcuuucgcacuguggca

SEQ ID NO: 369268 - RNA, 32 nt, Homo Sapiens
gucccgcccagcugcagacccuccaggcugga

SEQ ID NO: 369269 - RNA, 28 nt, Homo Sapiens
uuuuaucaggacuaacauuuucagaaau

SEQ ID NO: 369270 - RNA, 32 nt, Homo Sapiens
guccggguggggcgcgcguggacuaugggccc

SEQ ID NO: 369271 - RNA, 32 nt, Homo Sapiens
cucagucagcaauuuagaacagcaaaucuacu

SEQ ID NO: 369272 - RNA, 32 nt, Homo Sapiens
cgugcuuuuagcccuccugagccaaagaaacc

SEQ ID NO: 369273 - RNA, 32 nt, Homo Sapiens
cuuaaugcagccugcauagugaaaugguuauu

SEQ ID NO: 369274 - RNA, 32 nt, Homo Sapiens
auagauaauaauuuauauaacagguuuucugu

SEQ ID NO: 369275 - RNA, 32 nt, Homo Sapiens
ugagcugagggagagggagaggggacccgagg

SEQ ID NO: 369276 - RNA, 32 nt, Homo Sapiens
cccucuaaagcacuuucuuuccuuuacuugcg

SEQ ID NO: 369277 - RNA, 32 nt, Homo Sapiens
cggcccggcgaccgagcugggcccgugagcca

SEQ ID NO: 369278 - RNA, 32 nt, Homo Sapiens
ccucacaggccacacacacacacacacaagag

SEQ ID NO: 369279 - RNA, 32 nt, Homo Sapiens
gaauagggaaucaacauuuuaaugaagugucu

SEQ ID NO: 369280 - RNA, 32 nt, Homo Sapiens
auauaacaugcaucuuguuuuggauuuguguc

SEQ ID NO: 369281 - RNA, 32 nt, Homo Sapiens
aggcccagcuuggcucccccugcccgagcucc

SEQ ID NO: 369282 - RNA, 32 nt, Homo Sapiens
caccccucccccacccaacugcucucuuaaaa

SEQ ID NO: 369283 - RNA, 32 nt, Homo Sapiens
gccgggcccagaaaacaaaaugaauuaucuac

SEQ ID NO: 369284 - RNA, 32 nt, Homo Sapiens
cuauaguauaaugaaaagaaugaccuauaaua

SEQ ID NO: 369285 - RNA, 32 nt, Homo Sapiens
auuccaggaaggcagggacaccacugaguguu

SEQ ID NO: 369286 - RNA, 32 nt, Homo Sapiens
uuuacuacacgauguaaauucacgucaaauuc

SEQ ID NO: 369287 - RNA, 32 nt, Homo Sapiens
aucacuguccuuuaguuaacgcccugugaccu

SEQ ID NO: 369288 - RNA, 32 nt, Homo Sapiens
aaauugccauauccccucaguuccucaccccu

SEQ ID NO: 369289 - RNA, 32 nt, Homo Sapiens
uaaaacggguaauaugucaugcucuuagucau

SEQ ID NO: 369290 - RNA, 32 nt, Homo Sapiens
uggaguccccaucccauucucuagccucaccu

SEQ ID NO: 369291 - RNA, 32 nt, Homo Sapiens
gaggguaucugacaaugcugagguuaugaaca

SEQ ID NO: 369292 - RNA, 32 nt, Homo Sapiens
uuacaacuuuugugaggauguguuucaaacau

SEQ ID NO: 369293 - RNA, 32 nt, Homo Sapiens
agaggacgagguggcgcagagaccgcgggaga

SEQ ID NO: 369294 - RNA, 32 nt, Homo Sapiens
cccagcaccaacuccgacgccaagcguuacac

SEQ ID NO: 369295 - RNA, 32 nt, Homo Sapiens
acuccggauugcguuccuccccgccuuccgcc

SEQ ID NO: 369296 - RNA, 32 nt, Homo Sapiens
agggagagcuguguccccgccggcgcccccca

SEQ ID NO: 369297 - RNA, 32 nt, Homo Sapiens
ggaaggggcucugggaggcauuuuccugcuuu

SEQ ID NO: 369298 - RNA, 32 nt, Homo Sapiens
cuccugucccagaacgucaucuccgggcccaa

SEQ ID NO: 369299 - RNA, 32 nt, Homo Sapiens
ccgcccgccaucgccgucgccauguuguggcu

SEQ ID NO: 369300 - RNA, 32 nt, Homo Sapiens
ugguugcccuuuagauuuuguaaggaugcggu

SEQ ID NO: 369301 - RNA, 32 nt, Homo Sapiens
uugcugggaccuuggcuccacccagccagcga

SEQ ID NO: 369302 - RNA, 32 nt, Homo Sapiens
guuuucaccauguugaccaggcuggucucgaa

SEQ ID NO: 369303 - RNA, 32 nt, Homo Sapiens
cggaaaauguaucucagagaagggaaaggcug

SEQ ID NO: 369304 - RNA, 27 nt, Homo Sapiens
uugaucucagacuucagccuccagaac

SEQ ID NO: 369305 - RNA, 32 nt, Homo Sapiens
auuucacuucagaagcacuuguaggucuuuac

SEQ ID NO: 369306 - RNA, 32 nt, Homo Sapiens
cgcucgagggguccggccggacggugucggga

SEQ ID NO: 369307 - RNA, 32 nt, Homo Sapiens
gaaaguggaaaacugaaccaguuaucugaaua

SEQ ID NO: 369308 - RNA, 32 nt, Homo Sapiens
aaaugugaaaauauuuguguuuguuuugucug

SEQ ID NO: 369309 - RNA, 32 nt, Homo Sapiens
gcugguccccucuccuucccuccuuccagcug

SEQ ID NO: 369310 - RNA, 32 nt, Homo Sapiens
cucuuccaggagaacugauucuguggauggau

SEQ ID NO: 369311 - RNA, 32 nt, Homo Sapiens
uaggcaccuacuuuucccuccacccuaaacac

SEQ ID NO: 369312 - RNA, 32 nt, Homo Sapiens
gagaagguuuaucccgccgauagagggacggc

SEQ ID NO: 369313 - RNA, 32 nt, Homo Sapiens
aaugcuggguugaaaaauguuuugaaagccuu

SEQ ID NO: 369314 - RNA, 32 nt, Homo Sapiens
cuccuaauagaaccucgugcuuccucaugugg

SEQ ID NO: 369315 - RNA, 32 nt, Homo Sapiens
augaaacaccucagcaaggagcuugaaguaaa

SEQ ID NO: 369316 - RNA, 32 nt, Homo Sapiens
uaucugaacccaagucagaugaugguuugaca

SEQ ID NO: 369317 - RNA, 32 nt, Homo Sapiens
uccacacuuccacuuuguccuccucguccccu

SEQ ID NO: 369318 - RNA, 32 nt, Homo Sapiens
cagccuuuauagcuccugggaauaccccuauu

SEQ ID NO: 369319 - RNA, 32 nt, Homo Sapiens
cacuauugacauuuggggcuggaucauucuuu

SEQ ID NO: 369320 - RNA, 32 nt, Homo Sapiens
caacaaacuuugcuugaauuuguauaguuacc

SEQ ID NO: 369321 - RNA, 32 nt, Homo Sapiens
aagagagcaccgugaaucuagucuugacugcc

SEQ ID NO: 369322 - RNA, 32 nt, Homo Sapiens
ucuuaaauacucaacagagaggcugagcagag

SEQ ID NO: 369323 - RNA, 32 nt, Homo Sapiens
ccaaaaacuaaauggugcuuuauauuuagauu

SEQ ID NO: 369324 - RNA, 32 nt, Homo Sapiens
auuuugguagaguauauacauaccucacugcc

SEQ ID NO: 369325 - RNA, 32 nt, Homo Sapiens
uuucccccuaaaaugucauaagagcacugaag

SEQ ID NO: 369326 - RNA, 32 nt, Homo Sapiens
gcggccuccagggggcugggaauagccgcuca

SEQ ID NO: 369327 - RNA, 32 nt, Homo Sapiens
gugggcuuuaaauguucucaccacaaaaaaau

SEQ ID NO: 369328 - RNA, 32 nt, Homo Sapiens
ccagcacuucgggagaccaaggugggcggauc

SEQ ID NO: 369329 - RNA, 32 nt, Homo Sapiens
gagagaguacuuuugauuaaaugauucugaug

SEQ ID NO: 369330 - RNA, 32 nt, Homo Sapiens
agacauugacauuauuacuggagucaagcccu

SEQ ID NO: 369331 - RNA, 32 nt, Homo Sapiens
acucccuccuuccccaguuguucccuucagac

SEQ ID NO: 369332 - RNA, 32 nt, Homo Sapiens
gccccuccugcugccuggccaagccccacacc

SEQ ID NO: 369333 - RNA, 30 nt, Homo Sapiens
aaacuagccaggcgcgguggugcaugccug

SEQ ID NO: 369334 - RNA, 32 nt, Homo Sapiens
cccucucuucccuggcuggacuugcggagucc

SEQ ID NO: 369335 - RNA, 32 nt, Homo Sapiens
ggcuuguugggaaacccuggcuccgucaggac

SEQ ID NO: 369336 - RNA, 30 nt, Homo Sapiens
guaaaaaguaucccugcugcucuccaggga

SEQ ID NO: 369337 - RNA, 32 nt, Homo Sapiens
aguucuuugucaauagauuugagacgcuuucu

SEQ ID NO: 369338 - RNA, 32 nt, Homo Sapiens
gucuccagucaugacagagagaaggcauuccu

SEQ ID NO: 369339 - RNA, 32 nt, Homo Sapiens
uagggaaguuucuggggugcuauaaauauuuu

SEQ ID NO: 369340 - RNA, 32 nt, Homo Sapiens
guuacuuugcugcuccucccgcucgcuauguc

SEQ ID NO: 369341 - RNA, 32 nt, Homo Sapiens
acuuagauuuuugcugugauaauugauaaagu

SEQ ID NO: 369342 - RNA, 32 nt, Homo Sapiens
ggcgcgaccugggcuccugggugcucauuggc

SEQ ID NO: 369343 - RNA, 32 nt, Homo Sapiens
cucagucggcccagccccucucaguccucccc

SEQ ID NO: 369344 - RNA, 32 nt, Homo Sapiens
agaaacugacuaaucgcgauggcugccccuga

SEQ ID NO: 369345 - RNA, 32 nt, Homo Sapiens
ccggggcucggggccaccucccggggcugcug

SEQ ID NO: 369346 - RNA, 32 nt, Homo Sapiens
uugugcaaaugaaaacguguguaucaaguaug

SEQ ID NO: 369347 - RNA, 32 nt, Homo Sapiens
cugggcuccagaugccugucucaaaaacagug

SEQ ID NO: 369348 - RNA, 32 nt, Homo Sapiens
uaccucaagucugugugaccacucacagcccc

SEQ ID NO: 369349 - RNA, 32 nt, Homo Sapiens
ugaggccaauacugcuguuuugggaacuaugc

SEQ ID NO: 369350 - RNA, 29 nt, Homo Sapiens
ggguggaggaacugggcacugggagcgug

SEQ ID NO: 369351 - RNA, 32 nt, Homo Sapiens
cgcgccuggggaggaggcggaggcagcggcug

SEQ ID NO: 369352 - RNA, 32 nt, Homo Sapiens
gcucaggccccgaggcugaagaggagccaugu

SEQ ID NO: 369353 - RNA, 32 nt, Homo Sapiens
uacuaaauguauauauuuaauaaugucaugua

SEQ ID NO: 369354 - RNA, 32 nt, Homo Sapiens
caauuuaaucagguggaaaugaucuuccuggc

SEQ ID NO: 369355 - RNA, 32 nt, Homo Sapiens
acccaggauucccccaacacacguucuuuucu

SEQ ID NO: 369356 - RNA, 32 nt, Homo Sapiens
gucgguccccgcgcggccgccaugaccuggag

SEQ ID NO: 369357 - RNA, 32 nt, Homo Sapiens
ccucccgcaccuccucgguugcgcacucccgc

SEQ ID NO: 369358 - RNA, 32 nt, Homo Sapiens
caaagggaaugggucugcacagauucuuuuuu

SEQ ID NO: 369359 - RNA, 32 nt, Homo Sapiens
ggacgcagcaucuggugggcccggggcugcug

SEQ ID NO: 369360 - RNA, 32 nt, Homo Sapiens
cacugucugaagaugaggaaucaucuguguac

SEQ ID NO: 369361 - RNA, 32 nt, Homo Sapiens
cagaaaaaacaaauagaagaaaaugaggguua

SEQ ID NO: 369362 - RNA, 32 nt, Homo Sapiens
aaauuagcuggguguguuggcacaugccugua

SEQ ID NO: 369363 - RNA, 32 nt, Homo Sapiens
ugcucucuggugucccaauacucucugauguc

SEQ ID NO: 369364 - RNA, 32 nt, Homo Sapiens
cggggucaagacguccggccucgggggcccgg

SEQ ID NO: 369365 - RNA, 32 nt, Homo Sapiens
ucaauuaaacauuguggugcuggcaaaaaaaa

SEQ ID NO: 369366 - RNA, 32 nt, Homo Sapiens
gccgagcggccgcgauuucccggggacugcug

SEQ ID NO: 369367 - RNA, 32 nt, Homo Sapiens
caugacagcgucugcuugcguugugucuguuu

SEQ ID NO: 369368 - RNA, 32 nt, Homo Sapiens
caucgcugccgccuccuucuucugcagcuccu

SEQ ID NO: 369369 - RNA, 32 nt, Homo Sapiens
ucuucaugcaccagcccucccggcaggcccgg

SEQ ID NO: 369370 - RNA, 32 nt, Homo Sapiens
ugcugaaaaaggaaacguccacacugaauguu

SEQ ID NO: 369371 - RNA, 32 nt, Homo Sapiens
accaacaaucauuauagaacguuuauaauggu

SEQ ID NO: 369372 - RNA, 32 nt, Homo Sapiens
cuaacagaccaggagaucuggggguugcacca

SEQ ID NO: 369373 - RNA, 32 nt, Homo Sapiens
agccggauccaggacguggcccggggccacca

SEQ ID NO: 369374 - RNA, 32 nt, Homo Sapiens
agccaggugugguggcucaugccuguaguccc

SEQ ID NO: 369375 - RNA, 32 nt, Homo Sapiens
gcugcccggcccggagcccgagacgcgcgcac

SEQ ID NO: 369376 - RNA, 32 nt, Homo Sapiens
ccuucucuguuguaucaguacuuugagugaga

SEQ ID NO: 369377 - RNA, 32 nt, Homo Sapiens
uaaaauuguccccucuauucuaaggauuucau

SEQ ID NO: 369378 - RNA, 32 nt, Homo Sapiens
cucuauucgcuguauuuuuucuuuaauuuaua

SEQ ID NO: 369379 - RNA, 30 nt, Homo Sapiens
auggcaugcaagaaagcacaaugccugagu

SEQ ID NO: 369380 - RNA, 32 nt, Homo Sapiens
ucuguguaucacccuuggagaagucugcauug

SEQ ID NO: 369381 - RNA, 32 nt, Homo Sapiens
guugccaguagguaucucuguguuaagauuag

SEQ ID NO: 369382 - RNA, 32 nt, Homo Sapiens
aacuacuguacuuuuccauauggaauaaagac

SEQ ID NO: 369383 - RNA, 32 nt, Homo Sapiens
gguggcugccgcgccuacagugagagggcacg

SEQ ID NO: 369384 - RNA, 32 nt, Homo Sapiens
gaggcaggagaauggcaagaaccugggaggcg

SEQ ID NO: 369385 - RNA, 30 nt, Homo Sapiens
aaacuugucugugauauggugccucuuuga

SEQ ID NO: 369386 - RNA, 32 nt, Homo Sapiens
caaagucacggaguaaagccagcaaagccacc

SEQ ID NO: 369387 - RNA, 32 nt, Homo Sapiens
gaaaugcaccugcagcugggugcugccagcag

SEQ ID NO: 369388 - RNA, 32 nt, Homo Sapiens
uuuaugauaacgucacaucacucucauauuua

SEQ ID NO: 369389 - RNA, 32 nt, Homo Sapiens
acccagcgacuggauuuucuucugccucucug

SEQ ID NO: 369390 - RNA, 32 nt, Homo Sapiens
agaaggugggcagggcgggggaggcagggaca

SEQ ID NO: 369391 - RNA, 32 nt, Homo Sapiens
aguggcccugcaugggccccagcugagagcag

SEQ ID NO: 369392 - RNA, 32 nt, Homo Sapiens
accguucgcggaggaaaggcgaacuaguguug

SEQ ID NO: 369393 - RNA, 32 nt, Homo Sapiens
gauggcugggaccuggcggacgcggaggucgu

SEQ ID NO: 369394 - RNA, 32 nt, Homo Sapiens
auggguggaaucugaggccucugcuggcagaa

SEQ ID NO: 369395 - RNA, 32 nt, Homo Sapiens
gucuguuuucuucgcugucauuuccuuaguag

SEQ ID NO: 369396 - RNA, 32 nt, Homo Sapiens
gaucucauucagaauacuacuuucauucaggc

SEQ ID NO: 369397 - RNA, 32 nt, Homo Sapiens
ggagcaaccccuguaaucuacuccuuggaagg

SEQ ID NO: 369398 - RNA, 32 nt, Homo Sapiens
auacucauuuuucauuagauacaguaguguca

SEQ ID NO: 369399 - RNA, 32 nt, Homo Sapiens
cauaaagugccuguaucuuguaaaacuucauu

SEQ ID NO: 369400 - RNA, 32 nt, Homo Sapiens
gccuaaggcguuucaucuuuuaugauauaaaa

SEQ ID NO: 369401 - RNA, 32 nt, Homo Sapiens
guuuuuuaauccauuucuuuugccacccuaua

SEQ ID NO: 369402 - RNA, 32 nt, Homo Sapiens
aaggaaaaggauuuagagguaaaaguacacua

SEQ ID NO: 369403 - RNA, 32 nt, Homo Sapiens
uaaaguuguaaauaaagaccaucauacauuaa

SEQ ID NO: 369404 - RNA, 31 nt, Homo Sapiens
ugugugugaaacacuucaaaacugauuuaaa

SEQ ID NO: 369405 - RNA, 32 nt, Homo Sapiens
cccucccaagcacacaccccgcuucccuugga

SEQ ID NO: 369406 - RNA, 32 nt, Homo Sapiens
aguuucaccaugguggucaggcuggucuugaa

SEQ ID NO: 369407 - RNA, 32 nt, Homo Sapiens
gggcucuguccucauacuuccugcggagcuua

SEQ ID NO: 369408 - RNA, 32 nt, Homo Sapiens
guuuuuaugugcucuguggccuuggaugaguc

SEQ ID NO: 369409 - RNA, 32 nt, Homo Sapiens
cccggcgaaguccucagcccgccccgcuugcc

SEQ ID NO: 369410 - RNA, 32 nt, Homo Sapiens
uauaugugaaaugagucuuugguauuucauau

SEQ ID NO: 369411 - RNA, 32 nt, Homo Sapiens
ugugucuuuauucuugauacaacaccaccucg

SEQ ID NO: 369412 - RNA, 32 nt, Homo Sapiens
accauuucccacuuacgcacugcauucgucag

SEQ ID NO: 369413 - RNA, 32 nt, Homo Sapiens
gacccuagugcgcgugcgcgcugguggcuccg

SEQ ID NO: 369414 - RNA, 32 nt, Homo Sapiens
uguucccacuauuugcuuacagccacauaugc

SEQ ID NO: 369415 - RNA, 32 nt, Homo Sapiens
ggagcgcccuccccaccccaggagcgcccugc

SEQ ID NO: 369416 - RNA, 32 nt, Homo Sapiens
gcucaguccccuugucuguccucccccacuuc

SEQ ID NO: 369417 - RNA, 32 nt, Homo Sapiens
ccaggugaagguggccauugaguuucucaggg

SEQ ID NO: 369418 - RNA, 32 nt, Homo Sapiens
uuuccgugagcaugcauggcaggaggcugucu

SEQ ID NO: 369419 - RNA, 32 nt, Homo Sapiens
ccuccccugccagcucugggcuucagagauaa

SEQ ID NO: 369420 - RNA, 32 nt, Homo Sapiens
uguaguuuuuaaauugucgauuuuuagcuauu

SEQ ID NO: 369421 - RNA, 32 nt, Homo Sapiens
cagacaggcccucccugucuccagggccccca

SEQ ID NO: 369422 - RNA, 32 nt, Homo Sapiens
ugaggugaugaggaugaagaccuuuaugauga

SEQ ID NO: 369423 - RNA, 32 nt, Homo Sapiens
aacugcucaaggauuaguuuuccaggacucug

SEQ ID NO: 369424 - RNA, 32 nt, Homo Sapiens
gugccccucagcugcugaacaagcauuuguag

SEQ ID NO: 369425 - RNA, 32 nt, Homo Sapiens
cccuggaucccucucccaggcucuggccccuu

SEQ ID NO: 369426 - RNA, 32 nt, Homo Sapiens
gcuuuuuuauuuuuaacacuuuauugagguau

SEQ ID NO: 369427 - RNA, 32 nt, Homo Sapiens
aucuccagggaguccccuccccggcccuacca

SEQ ID NO: 369428 - RNA, 32 nt, Homo Sapiens
cacuuuaaauauacuuaacacaugacagcauu

SEQ ID NO: 369429 - RNA, 32 nt, Homo Sapiens
acacuccucacagagaucuguagcguagguac

SEQ ID NO: 369430 - RNA, 31 nt, Homo Sapiens
uaucuucauuugaaugucuucuagauaugua

SEQ ID NO: 369431 - RNA, 32 nt, Homo Sapiens
uagggccccccucuuccugcuggggcucuggg

SEQ ID NO: 369432 - RNA, 32 nt, Homo Sapiens
ggcacuaaucuggauuaacauucgaggaaauc

SEQ ID NO: 369433 - RNA, 32 nt, Homo Sapiens
ucaccuagcggcaauggcugcagaggcuggaa

SEQ ID NO: 369434 - RNA, 32 nt, Homo Sapiens
gccccucagagcucagugccucugaggcuggg

SEQ ID NO: 369435 - RNA, 32 nt, Homo Sapiens
uccuccugccccaccagcucucaaguaccuuu

SEQ ID NO: 369436 - RNA, 32 nt, Homo Sapiens
uaauguuaugggacaaaaaucaauuaucucau

SEQ ID NO: 369437 - RNA, 30 nt, Homo Sapiens
gcgaggcggcccgugcaguccgugcucagg

SEQ ID NO: 369438 - RNA, 32 nt, Homo Sapiens
auaccacccuaccacuaacaaaaugguauaaa

SEQ ID NO: 369439 - RNA, 32 nt, Homo Sapiens
ggccguucgaagagucgugagggggugacggg

SEQ ID NO: 369440 - RNA, 32 nt, Homo Sapiens
ucccucucucugcuccuccauucgcaaguguc

SEQ ID NO: 369441 - RNA, 32 nt, Homo Sapiens
agacacccugacgcaggcggcccuucccugaa

SEQ ID NO: 369442 - RNA, 32 nt, Homo Sapiens
acgaguucgugggugcccggcgcagaagcaca

SEQ ID NO: 369443 - RNA, 32 nt, Homo Sapiens
cagacaaaugaaauuggcuugauaacugauug

SEQ ID NO: 369444 - RNA, 30 nt, Homo Sapiens
ggucuggggcccgugccagccggcagcccc

SEQ ID NO: 369445 - RNA, 32 nt, Homo Sapiens
auaaauagagcuuuuucuuuuaucaguccguu

SEQ ID NO: 369446 - RNA, 32 nt, Homo Sapiens
cugcaggcucugccuccuggguuccagcuauu

SEQ ID NO: 369447 - RNA, 32 nt, Homo Sapiens
guuuuuguauuauuaguagacacggggguuuc

SEQ ID NO: 369448 - RNA, 32 nt, Homo Sapiens
agauuggcugugccagcuuccaacagguuacu

SEQ ID NO: 369449 - RNA, 32 nt, Homo Sapiens
aaaagcggggcucauccaggauugguggugug

SEQ ID NO: 369450 - RNA, 32 nt, Homo Sapiens
aggugugacugaauuucuuuugccguuauuaa

SEQ ID NO: 369451 - RNA, 32 nt, Homo Sapiens
ucccagcugcucuggaggcugaggcaggagaa

SEQ ID NO: 369452 - RNA, 32 nt, Homo Sapiens
caggagacguucuagacccagugucuucagug

SEQ ID NO: 369453 - RNA, 32 nt, Homo Sapiens
ccucugccccaaggcugcccggcggccgggau

SEQ ID NO: 369454 - RNA, 32 nt, Homo Sapiens
acuuugagaagcugaggcgggaggaucacuug

SEQ ID NO: 369455 - RNA, 32 nt, Homo Sapiens
gaggacccagacccaguggggaggcggacguu

SEQ ID NO: 369456 - RNA, 32 nt, Homo Sapiens
cggccuaccaucuuuaagugggacauauugau

SEQ ID NO: 369457 - RNA, 32 nt, Homo Sapiens
gcuccugccuuucaaugaccucuuuaggcccc

SEQ ID NO: 369458 - RNA, 32 nt, Homo Sapiens
uccuaccaccugugccucagaaugggacuaug

SEQ ID NO: 369459 - RNA, 32 nt, Homo Sapiens
aaauagcaacccagaauguaaaaaagaaaaaa

SEQ ID NO: 369460 - RNA, 32 nt, Homo Sapiens
agccucgcaagcugaaaccuccccucggcuca

SEQ ID NO: 369461 - RNA, 32 nt, Homo Sapiens
cucuccgcccucgcccucggaguaggggguag

SEQ ID NO: 369462 - RNA, 32 nt, Homo Sapiens
guuucgcugaauguuuuucucuagacuggauu

SEQ ID NO: 369463 - RNA, 32 nt, Homo Sapiens
uuucccaauuuaaccuuagguuucuguugcuu

SEQ ID NO: 369464 - RNA, 32 nt, Homo Sapiens
cacgguagucagugacuuaaccugaauuguaa

SEQ ID NO: 369465 - RNA, 32 nt, Homo Sapiens
agaggucaacugagauuuggaaaucaucuuug

SEQ ID NO: 369466 - RNA, 32 nt, Homo Sapiens
caguuaaaaaauauacacugaacuugcugaga

SEQ ID NO: 369467 - RNA, 32 nt, Homo Sapiens
aagagcuaaaacuugcugagagcuuacuaugc

SEQ ID NO: 369468 - RNA, 32 nt, Homo Sapiens
uuuguaguccagggcagcaguucuuaacauug

SEQ ID NO: 369469 - RNA, 32 nt, Homo Sapiens
acugagccguccuccccccaccucugagcaca

SEQ ID NO: 369470 - RNA, 32 nt, Homo Sapiens
gauucgaucuuggauugacuguagaagaaggg

SEQ ID NO: 369471 - RNA, 31 nt, Homo Sapiens
gcuguugugugacaauggagagccugcccaa

SEQ ID NO: 369472 - RNA, 32 nt, Homo Sapiens
uccacucuccggccggccgccugcccgccgcc

SEQ ID NO: 369473 - RNA, 32 nt, Homo Sapiens
acauguccacacucccaacugguggcucuccc

SEQ ID NO: 369474 - RNA, 32 nt, Homo Sapiens
uuuuuccuuucugaugagaauugcacaaaauc

SEQ ID NO: 369475 - RNA, 32 nt, Homo Sapiens
ccugcccgcgccugcgcagcgucccgggccga

SEQ ID NO: 369476 - RNA, 32 nt, Homo Sapiens
uccggacugugagcggcuguuagugcgucgca

SEQ ID NO: 369477 - RNA, 32 nt, Homo Sapiens
cuugaacaagguggccgguucccugggagaag

SEQ ID NO: 369478 - RNA, 32 nt, Homo Sapiens
gcgcugcccagauggaauauuaaauuauuuuu

SEQ ID NO: 369479 - RNA, 32 nt, Homo Sapiens
ugugagggccccagcuccacccaggcuuuggg

SEQ ID NO: 369480 - RNA, 31 nt, Homo Sapiens
gggagacgagcggugucauggccgccgacag

SEQ ID NO: 369481 - RNA, 32 nt, Homo Sapiens
aagauauuccaggaaccuaagagcgcacacca

SEQ ID NO: 369482 - RNA, 32 nt, Homo Sapiens
uuuauuugccuuuauuuuucugucccagaagg

SEQ ID NO: 369483 - RNA, 32 nt, Homo Sapiens
augggcuuccuuugggccuccuuggucagccu

SEQ ID NO: 369484 - RNA, 32 nt, Homo Sapiens
cacugcacuccagccagggcaacagugagacu

SEQ ID NO: 369485 - RNA, 32 nt, Homo Sapiens
uaugugguuucuaaguuuuauaugaugacaau

SEQ ID NO: 369486 - RNA, 32 nt, Homo Sapiens
aaaacaguuuacaugagaaaaggcaaguucuu

SEQ ID NO: 369487 - RNA, 32 nt, Homo Sapiens
cagcgggauggggcccucggccucgucccaug

SEQ ID NO: 369488 - RNA, 32 nt, Homo Sapiens
cuguacuagacaagguuaccaagugcggaauu

SEQ ID NO: 369489 - RNA, 32 nt, Homo Sapiens
gcugagagggagaggagcagagaugcugcuga

SEQ ID NO: 369490 - RNA, 32 nt, Homo Sapiens
ggcggcgcggaguagguggcggcggccauggc

SEQ ID NO: 369491 - RNA, 32 nt, Homo Sapiens
cugucuaaaggcaugaaucuccucuuggagca

SEQ ID NO: 369492 - RNA, 32 nt, Homo Sapiens
aguccccuccaaggcauccagucuuugguggu

SEQ ID NO: 369493 - RNA, 32 nt, Homo Sapiens
ggcgacagcgacggcggggagcuccucgggga

SEQ ID NO: 369494 - RNA, 32 nt, Homo Sapiens
ucggaagaaaucaauuacuuucaauguuugaa

SEQ ID NO: 369495 - RNA, 32 nt, Homo Sapiens
acagcucaaacgcccacccccacucccaccau

SEQ ID NO: 369496 - RNA, 32 nt, Homo Sapiens
aacuauuuauguacaaaaacucauacaauuau

SEQ ID NO: 369497 - RNA, 32 nt, Homo Sapiens
gcuguggaauaaaauggauugugaugaaaaaa

SEQ ID NO: 369498 - RNA, 32 nt, Homo Sapiens
gcagcuugggaggaauaacaguucugaacuca

SEQ ID NO: 369499 - RNA, 32 nt, Homo Sapiens
gauguagagcgcgguuuuauuuuuguacugac

SEQ ID NO: 369500 - RNA, 32 nt, Homo Sapiens
ugcugaccagcagagucacuaguggaugcuga

SEQ ID NO: 369501 - RNA, 32 nt, Homo Sapiens
gaaggcuaaggaaauggggauuugagcacaac

SEQ ID NO: 369502 - RNA, 32 nt, Homo Sapiens
agaccagaugagccaguuuaucguuaugggug

SEQ ID NO: 369503 - RNA, 32 nt, Homo Sapiens
gauuuuggaaauuuauauuagauuaaaaugaa

SEQ ID NO: 369504 - RNA, 32 nt, Homo Sapiens
uuacucaugccuauguuauucuuugaucugca

SEQ ID NO: 369505 - RNA, 32 nt, Homo Sapiens
gcauguggguggcaaccagggcugggcagggc

SEQ ID NO: 369506 - RNA, 31 nt, Homo Sapiens
agaacggagccccaggccucuguguccuucc

SEQ ID NO: 369507 - RNA, 32 nt, Homo Sapiens
auggaguugugaacauaaugcuauaugaucgc

SEQ ID NO: 369508 - RNA, 32 nt, Homo Sapiens
ucggccuggaggagggggucgcgcgaagugcc

SEQ ID NO: 369509 - RNA, 32 nt, Homo Sapiens
cauccuuaggauaaauccuacuuuuuaaugug

SEQ ID NO: 369510 - RNA, 32 nt, Homo Sapiens
aucaccaacugggaugacauggagaagaucug

SEQ ID NO: 369511 - RNA, 32 nt, Homo Sapiens
cugcucaguggguaaaauuagaugcauguuga

SEQ ID NO: 369512 - RNA, 32 nt, Homo Sapiens
uuuuaaauuucuuuuuacauuguuucgaaagu

SEQ ID NO: 369513 - RNA, 32 nt, Homo Sapiens
ggggagaaugacuuucccuuuuuugccccaua

SEQ ID NO: 369514 - RNA, 32 nt, Homo Sapiens
accgcucucccucucauuccugaugagcccuc

SEQ ID NO: 369515 - RNA, 32 nt, Homo Sapiens
guauuuacagcuuguuaaauuagagacaugca

SEQ ID NO: 369516 - RNA, 31 nt, Homo Sapiens
gucagggagccccuggaggagugacccaguu

SEQ ID NO: 369517 - RNA, 32 nt, Homo Sapiens
gagcccaugcugggcucugugcccucuguguc

SEQ ID NO: 369518 - RNA, 32 nt, Homo Sapiens
ggucccguccgcaccggcacccggcccagccg

SEQ ID NO: 369519 - RNA, 27 nt, Homo Sapiens
cugccuuuguaguucugguauucacuu

SEQ ID NO: 369520 - RNA, 32 nt, Homo Sapiens
uuuccucuggccccuccucuccaagaaaauua

SEQ ID NO: 369521 - RNA, 32 nt, Homo Sapiens
cucucugucuaccucagcauuucugggguuca

SEQ ID NO: 369522 - RNA, 32 nt, Homo Sapiens
ugauuauuguguugucacuggaaguacuguca

SEQ ID NO: 369523 - RNA, 32 nt, Homo Sapiens
gacaauccuuucuauucauuccaggucucuac

SEQ ID NO: 369524 - RNA, 32 nt, Homo Sapiens
gagccaccgcgcccggcccucuuuagcccacu

SEQ ID NO: 369525 - RNA, 32 nt, Homo Sapiens
ugccaggugccagcuguacugugcaccugcag

SEQ ID NO: 369526 - RNA, 32 nt, Homo Sapiens
acagauuuuuauuuuguuucugucuucaacau

SEQ ID NO: 369527 - RNA, 32 nt, Homo Sapiens
gaaagaggugcauaauaaaacuacuaaccaga

SEQ ID NO: 369528 - RNA, 32 nt, Homo Sapiens
ggcuccuguuaggggagggagaaauguugaau

SEQ ID NO: 369529 - RNA, 29 nt, Homo Sapiens
ugauugaauaaauguuagcucuucucauu

SEQ ID NO: 369530 - RNA, 32 nt, Homo Sapiens
gccuggugauacagcucuggcuuucugagcac

SEQ ID NO: 369531 - RNA, 32 nt, Homo Sapiens
cugugggcaagggcugggcucuuggagguagg

SEQ ID NO: 369532 - RNA, 32 nt, Homo Sapiens
uggauucuuuucaaaucaggaaagauuagaaa

SEQ ID NO: 369533 - RNA, 32 nt, Homo Sapiens
guggaaucaagccccagugcugccugcuuggu

SEQ ID NO: 369534 - RNA, 32 nt, Homo Sapiens
cugccagccccgcucggacgcucguuugcccc

SEQ ID NO: 369535 - RNA, 32 nt, Homo Sapiens
accaacauuuagugguaaauccauuccuggua

SEQ ID NO: 369536 - RNA, 32 nt, Homo Sapiens
caugacauuuccccuaugauuucacaaaagaa

SEQ ID NO: 369537 - RNA, 32 nt, Homo Sapiens
uuuguaaugguaguuuguuuguugcuggagaa

SEQ ID NO: 369538 - RNA, 32 nt, Homo Sapiens
guuuagcacuauccccuuggugguguccuuaa

SEQ ID NO: 369539 - RNA, 32 nt, Homo Sapiens
gcagcucugguuucuauuacggugacuugaau

SEQ ID NO: 369540 - RNA, 32 nt, Homo Sapiens
ccagggugcccauuuaaacuagaugugcaugu

SEQ ID NO: 369541 - RNA, 32 nt, Homo Sapiens
uuggcuugagggugggguuuugucagggaccc

SEQ ID NO: 369542 - RNA, 30 nt, Homo Sapiens
ggccgagagaagcuguauucuggagaucag

SEQ ID NO: 369543 - RNA, 32 nt, Homo Sapiens
ggagugucgcuuguauguuaucguacagcuga

SEQ ID NO: 369544 - RNA, 32 nt, Homo Sapiens
cuacuuaacaaggugguuugagccaaguaugu

SEQ ID NO: 369545 - RNA, 30 nt, Homo Sapiens
aguccccauguugagggggaaaaugcagua

SEQ ID NO: 369546 - RNA, 32 nt, Homo Sapiens
cacgugaccagccccguguagccccgggcuga

SEQ ID NO: 369547 - RNA, 32 nt, Homo Sapiens
gauuuuccucuggagagacagaucugaauguu

SEQ ID NO: 369548 - RNA, 32 nt, Homo Sapiens
ggaaacggguuguguuucuucauuucuuuuuu

SEQ ID NO: 369549 - RNA, 32 nt, Homo Sapiens
cggcugccccaagacuggcccggggcuggucc

SEQ ID NO: 369550 - RNA, 32 nt, Homo Sapiens
cuaguauaauuucuuuguaauaugugaaacuu

SEQ ID NO: 369551 - RNA, 32 nt, Homo Sapiens
auugcggagucugguccccuccccuccgcucc

SEQ ID NO: 369552 - RNA, 32 nt, Homo Sapiens
caaaugaaaauauuuuauguuuucucaucacu

SEQ ID NO: 369553 - RNA, 32 nt, Homo Sapiens
cuacuaggaguuuuuaaugaugugguauuuaa

SEQ ID NO: 369554 - RNA, 32 nt, Homo Sapiens
cuccaucgcugcgggggugcugcagcagcagg

SEQ ID NO: 369555 - RNA, 32 nt, Homo Sapiens
accaccaucacagucagacucugcuucuucac

SEQ ID NO: 369556 - RNA, 32 nt, Homo Sapiens
ccaagcccagccuuccccggcgcgcagccccg

SEQ ID NO: 369557 - RNA, 32 nt, Homo Sapiens
agagaacacccgugagagagacuugaaacugc

SEQ ID NO: 369558 - RNA, 32 nt, Homo Sapiens
cuaccucagccgccgcccacggcacggcagcc

SEQ ID NO: 369559 - RNA, 32 nt, Homo Sapiens
aguguuugccucugugcuuccacuguggcuca

SEQ ID NO: 369560 - RNA, 32 nt, Homo Sapiens
ugaggcauccugaaaaucguauagugaggaag

SEQ ID NO: 369561 - RNA, 32 nt, Homo Sapiens
cugggcaguggggaagcccccgggggcgagug

SEQ ID NO: 369562 - RNA, 32 nt, Homo Sapiens
accaggcacugacaccgcaggcagagguugcu

SEQ ID NO: 369563 - RNA, 32 nt, Homo Sapiens
aaagaauguagccauagaugcuaugggguuuu

SEQ ID NO: 369564 - RNA, 32 nt, Homo Sapiens
aagacagugucuuggacgcccagcggaacacc

SEQ ID NO: 369565 - RNA, 32 nt, Homo Sapiens
auuacuuucauccauccauuauaacaaaccug

SEQ ID NO: 369566 - RNA, 32 nt, Homo Sapiens
ggcggggggugcugagggaggggagugaguca

SEQ ID NO: 369567 - RNA, 32 nt, Homo Sapiens
ucaagucaccugcagauuuagcauuagacauc

SEQ ID NO: 369568 - RNA, 32 nt, Homo Sapiens
gcaccuugccuggccccuccccaggcucccug

SEQ ID NO: 369569 - RNA, 32 nt, Homo Sapiens
cugcucuguugcuggcucuccuugaagacaag

SEQ ID NO: 369570 - RNA, 32 nt, Homo Sapiens
aacccccagagguggcccuuguuuacagugag

SEQ ID NO: 369571 - RNA, 32 nt, Homo Sapiens
auauccaauauuaaaagauuauaggaacugag

SEQ ID NO: 369572 - RNA, 32 nt, Homo Sapiens
aguguacaagauacaguuucccugggacauaa

SEQ ID NO: 369573 - RNA, 32 nt, Homo Sapiens
aaaaauacaaacaaaauuagcugggcauggug

SEQ ID NO: 369574 - RNA, 32 nt, Homo Sapiens
agaggcuguuggucuuccaaguauuccuguuc

SEQ ID NO: 369575 - RNA, 32 nt, Homo Sapiens
ggagccaauuuaagaagacccuuauggagacc

SEQ ID NO: 369576 - RNA, 32 nt, Homo Sapiens
ggcuugcgacaggcgguguauaaaaacuaaug

SEQ ID NO: 369577 - RNA, 32 nt, Homo Sapiens
cagcccaagagcucagggagccagggacccca

SEQ ID NO: 369578 - RNA, 30 nt, Homo Sapiens
gucaguguggaggucauccgucugggccac

SEQ ID NO: 369579 - RNA, 32 nt, Homo Sapiens
aggggugguggcagaggcgccugcgguuacug

SEQ ID NO: 369580 - RNA, 32 nt, Homo Sapiens
ucuucugcacacauaucacacaucaguacugu

SEQ ID NO: 369581 - RNA, 32 nt, Homo Sapiens
agaggugagugcaggaaaaguaccucagcacu

SEQ ID NO: 369582 - RNA, 32 nt, Homo Sapiens
uguuaaaauaaauguuccuacuguauauuuaa

SEQ ID NO: 369583 - RNA, 32 nt, Homo Sapiens
ugauacucagauuguggauaauaauugaauug

SEQ ID NO: 369584 - RNA, 32 nt, Homo Sapiens
acgcagucuguucccggcacccggugcgugug

SEQ ID NO: 369585 - RNA, 32 nt, Homo Sapiens
acuugccuggcccuccucccccuccgccccca

SEQ ID NO: 369586 - RNA, 32 nt, Homo Sapiens
ggcugggccaggucgggggcucagucugggag

SEQ ID NO: 369587 - RNA, 32 nt, Homo Sapiens
ugcagcucagugcccaguggccgcaugcacac

SEQ ID NO: 369588 - RNA, 32 nt, Homo Sapiens
uucagugagagaaggaaaguuguaaacuagcc

SEQ ID NO: 369589 - RNA, 32 nt, Homo Sapiens
ucuccccgcuccccagccucgggcgaggccgu

SEQ ID NO: 369590 - RNA, 32 nt, Homo Sapiens
ugugacgcacgggguggcgcgcgugggacccg

SEQ ID NO: 369591 - RNA, 32 nt, Homo Sapiens
caagcugagagggaaacugaagcaagaugucg

SEQ ID NO: 369592 - RNA, 32 nt, Homo Sapiens
aacuacacauggaaaugaaacuagcugaagcc

SEQ ID NO: 369593 - RNA, 32 nt, Homo Sapiens
cccggugcuuggauugcagcacaugggccagc

SEQ ID NO: 369594 - RNA, 32 nt, Homo Sapiens
ucguuugcugcggggagggaaugaaugggcgc

SEQ ID NO: 369595 - RNA, 32 nt, Homo Sapiens
aagagggcacccagcccuucccccucccucau

SEQ ID NO: 369596 - RNA, 32 nt, Homo Sapiens
cuaggaccccuccaugugggcuaguugggcuu

SEQ ID NO: 369597 - RNA, 32 nt, Homo Sapiens
uuaguuuugcuucgcagaugggccgugguggu

SEQ ID NO: 369598 - RNA, 32 nt, Homo Sapiens
agucuuggcagagccuuugcaacaccuuaagu

SEQ ID NO: 369599 - RNA, 32 nt, Homo Sapiens
ucccuuauaagcacauuacuuuuacacuuaau

SEQ ID NO: 369600 - RNA, 32 nt, Homo Sapiens
guguauuucuucaauagccggguauuuggauu

SEQ ID NO: 369601 - RNA, 31 nt, Homo Sapiens
ugaccacggcgcagccauggggaccgcgcuu

SEQ ID NO: 369602 - RNA, 32 nt, Homo Sapiens
ccgcccugccccacccacccagugccuugcug

SEQ ID NO: 369603 - RNA, 32 nt, Homo Sapiens
cagcccagccccacccacagauccccugcucc

SEQ ID NO: 369604 - RNA, 32 nt, Homo Sapiens
ggcucgagcccugggggugcuccuggaagccc

SEQ ID NO: 369605 - RNA, 32 nt, Homo Sapiens
uugugaccacaaaacaucuuuuuuacaugaag

SEQ ID NO: 369606 - RNA, 29 nt, Homo Sapiens
cggcaugcucugcggccgcccgcggucca

SEQ ID NO: 369607 - RNA, 32 nt, Homo Sapiens
aggggcuccccucccgugcauggacauuuuuu

SEQ ID NO: 369608 - RNA, 32 nt, Homo Sapiens
aaucgcuugagccugggagcgcagguugcaau

SEQ ID NO: 369609 - RNA, 32 nt, Homo Sapiens
uauggguaaaauguuauuucuagugaauuguu

SEQ ID NO: 369610 - RNA, 32 nt, Homo Sapiens
guguuaauauuuuuauuugcagauuucguuuc

SEQ ID NO: 369611 - RNA, 32 nt, Homo Sapiens
cagccccucccuccccagccggaggcgucauc

SEQ ID NO: 369612 - RNA, 31 nt, Homo Sapiens
caagcaaaauaaaacugcaguugucaacauu

SEQ ID NO: 369613 - RNA, 32 nt, Homo Sapiens
ggcacgaggcuggagacagcugcguguucauc

SEQ ID NO: 369614 - RNA, 32 nt, Homo Sapiens
cuccuuucuuugagggucaggguuggaggccc

SEQ ID NO: 369615 - RNA, 29 nt, Homo Sapiens
uugauaguggauuucagaggaaggugaga

SEQ ID NO: 369616 - RNA, 32 nt, Homo Sapiens
cagaacucuguucccagcauaagauuuggggg

SEQ ID NO: 369617 - RNA, 32 nt, Homo Sapiens
cagaaugugcuaaugugauuaccucauauuag

SEQ ID NO: 369618 - RNA, 32 nt, Homo Sapiens
agcuugugagauuacuuuaccuaguguuuaua

SEQ ID NO: 369619 - RNA, 32 nt, Homo Sapiens
cuuucuguacaauauugauucccaucuggcau

SEQ ID NO: 369620 - RNA, 32 nt, Homo Sapiens
cccugccagucucccccucuucugccagccuc

SEQ ID NO: 369621 - RNA, 32 nt, Homo Sapiens
ggagaagugaaaguucaguuauagaacuuucc

SEQ ID NO: 369622 - RNA, 32 nt, Homo Sapiens
cuggaagucgggcccugggcugcccgaucgcc

SEQ ID NO: 369623 - RNA, 32 nt, Homo Sapiens
cauccugaugccuggaaggggcgugggguuuu

SEQ ID NO: 369624 - RNA, 32 nt, Homo Sapiens
gaauuguuccccgaagacccgaccccgcugca

SEQ ID NO: 369625 - RNA, 32 nt, Homo Sapiens
gagccugugucuuuaagcagcuggcguguuac

SEQ ID NO: 369626 - RNA, 32 nt, Homo Sapiens
cggcagcggcggcggcagcuguagcugcagca

SEQ ID NO: 369627 - RNA, 32 nt, Homo Sapiens
ucauucugaugcuugacccccauacucccaac

SEQ ID NO: 369628 - RNA, 32 nt, Homo Sapiens
cgcuuaaauuuauagugcuauuugguuucucc

SEQ ID NO: 369629 - RNA, 32 nt, Homo Sapiens
cgccagugggacugcuggcccugacucugcag

SEQ ID NO: 369630 - RNA, 32 nt, Homo Sapiens
aaugcauguauucacuaaaauaaaauuuaaaa

SEQ ID NO: 369631 - RNA, 32 nt, Homo Sapiens
aguuaggaccucugguggaaaaaauuauugcc

SEQ ID NO: 369632 - RNA, 32 nt, Homo Sapiens
gcggugaggaccgcggccacagcucggcgcca

SEQ ID NO: 369633 - RNA, 32 nt, Homo Sapiens
uagugaaucacguaaagcuagaaaugaucccc

SEQ ID NO: 369634 - RNA, 32 nt, Homo Sapiens
auuggugugggguagcuuguccugcuacuugc

SEQ ID NO: 369635 - RNA, 32 nt, Homo Sapiens
ccgaaagccaaguuucucccugccucacagca

SEQ ID NO: 369636 - RNA, 32 nt, Homo Sapiens
ccaaucucacauucaaguguucaccaaccacu

SEQ ID NO: 369637 - RNA, 32 nt, Homo Sapiens
cuccaguguauccguggaccuuaacauuucug

SEQ ID NO: 369638 - RNA, 32 nt, Homo Sapiens
auguugagacugagacuuacgaaacugugaau

SEQ ID NO: 369639 - RNA, 32 nt, Homo Sapiens
cacacuuuccaggcugagcauuuccuuuugug

SEQ ID NO: 369640 - RNA, 32 nt, Homo Sapiens
uuagaauuaaaaaacccugauauuuguauuua

SEQ ID NO: 369641 - RNA, 32 nt, Homo Sapiens
ugaaaaaaaaauuuacuuugaucucuguuuuu

SEQ ID NO: 369642 - RNA, 30 nt, Homo Sapiens
cggaguggagggcgcgcggucccagcccuc

SEQ ID NO: 369643 - RNA, 31 nt, Homo Sapiens
uuagacuauugagccauaaaauuuugguuug

SEQ ID NO: 369644 - RNA, 32 nt, Homo Sapiens
ccggacugucgcggcccgcgguggcgacggcg

SEQ ID NO: 369645 - RNA, 32 nt, Homo Sapiens
uuagacugucacugcacauggaccucugggaa

SEQ ID NO: 369646 - RNA, 32 nt, Homo Sapiens
ccccagcacguucucuuuuggcugcuggcucc

SEQ ID NO: 369647 - RNA, 32 nt, Homo Sapiens
cugccauggugcagcccuccucuccucaccug

SEQ ID NO: 369648 - RNA, 32 nt, Homo Sapiens
aauggcaaaaacaaaacaugauuuugugcaau

SEQ ID NO: 369649 - RNA, 32 nt, Homo Sapiens
ugucuggaagcagggcccacguggcgguccgc

SEQ ID NO: 369650 - RNA, 30 nt, Homo Sapiens
uguggugcgcgcacugcggguccugauugg

SEQ ID NO: 369651 - RNA, 32 nt, Homo Sapiens
auggugagcagcggacuucaaaaacugucaaa

SEQ ID NO: 369652 - RNA, 32 nt, Homo Sapiens
cguacccguucacucgugggucuuaaaauggu

SEQ ID NO: 369653 - RNA, 32 nt, Homo Sapiens
cauguuggauuacguuuguccuguuaauucac

SEQ ID NO: 369654 - RNA, 32 nt, Homo Sapiens
uuucacuuugccuuuuucugccaaaacaauaa

SEQ ID NO: 369655 - RNA, 32 nt, Homo Sapiens
cgcuggaggagaagguguuucaagauggugac

SEQ ID NO: 369656 - RNA, 32 nt, Homo Sapiens
cugggcccgccuuuuccgcccgcgccccaggc

SEQ ID NO: 369657 - RNA, 30 nt, Homo Sapiens
cuuauagagaagcucggaacuuugaauaca

SEQ ID NO: 369658 - RNA, 32 nt, Homo Sapiens
auaaucugcauaauucuacuuaagguguguaa

SEQ ID NO: 369659 - RNA, 32 nt, Homo Sapiens
uugaacuacuuaccaaaauuagaaguuaaaau

SEQ ID NO: 369660 - RNA, 32 nt, Homo Sapiens
gcagcccucggguccauguguuguucagacau

SEQ ID NO: 369661 - RNA, 32 nt, Homo Sapiens
auguauaaaacuguacccuuugugauaauauu

SEQ ID NO: 369662 - RNA, 32 nt, Homo Sapiens
uugaauuuuauaagcuuguacacaauauuuaa

SEQ ID NO: 369663 - RNA, 31 nt, Homo Sapiens
cagcaaugguuccagaaccaacuguguguau

SEQ ID NO: 369664 - RNA, 32 nt, Homo Sapiens
uguucucuucugcucuagacagauggcuccau

SEQ ID NO: 369665 - RNA, 32 nt, Homo Sapiens
cugcugcugccucuuuccuccucacucaggcu

SEQ ID NO: 369666 - RNA, 32 nt, Homo Sapiens
uacuggagggagaggcgcgcgggaagaacagg

SEQ ID NO: 369667 - RNA, 32 nt, Homo Sapiens
ggaaucuggaggaaaacugaccagguggcuug

SEQ ID NO: 369668 - RNA, 32 nt, Homo Sapiens
guaauuuuucccuuuuuugaaacuauuuuuuc

SEQ ID NO: 369669 - RNA, 32 nt, Homo Sapiens
auuaaagaacgcugcagcuuuuuuaugucacu

SEQ ID NO: 369670 - RNA, 32 nt, Homo Sapiens
cucgcucgccggccgcgcgucccggccaugaa

SEQ ID NO: 369671 - RNA, 32 nt, Homo Sapiens
gccuugccagcacuaacauucuagaguauucc

SEQ ID NO: 369672 - RNA, 32 nt, Homo Sapiens
gacccugcccggcuccucccugaccgguccuu

SEQ ID NO: 369673 - RNA, 32 nt, Homo Sapiens
auuauuguauaaaggaagcuaagaauauuauu

SEQ ID NO: 369674 - RNA, 32 nt, Homo Sapiens
uucccucucuggcguccccggcugcuuguacu

SEQ ID NO: 369675 - RNA, 32 nt, Homo Sapiens
aacuaucagauaaaguuuaggagauaggaaga

SEQ ID NO: 369676 - RNA, 32 nt, Homo Sapiens
gccugggcaggcgcuugugcugccagggcgcc

SEQ ID NO: 369677 - RNA, 32 nt, Homo Sapiens
aguggcgccucccaggaaaggcugggagaaga

SEQ ID NO: 369678 - RNA, 32 nt, Homo Sapiens
ggggcugcggacagcacacacccuggaaggcc

SEQ ID NO: 369679 - RNA, 32 nt, Homo Sapiens
aguaaauuaauaugguaacuaguggagcgugc

SEQ ID NO: 369680 - RNA, 32 nt, Homo Sapiens
ggccuggacuucugagcagcuuuagccaggcu

SEQ ID NO: 369681 - RNA, 28 nt, Homo Sapiens
caaguggagcuaaccaggauaaucuuug

SEQ ID NO: 369682 - RNA, 32 nt, Homo Sapiens
gugggggaagggggcaggagaggcacaagaau

SEQ ID NO: 369683 - RNA, 32 nt, Homo Sapiens
aaccaggauccaaaugaagagaacucuuuuaa

SEQ ID NO: 369684 - RNA, 32 nt, Homo Sapiens
aagaucgccuccuccccuccagcccugagucc

SEQ ID NO: 369685 - RNA, 32 nt, Homo Sapiens
cuuuaacaaaaauuauaaaaauugaggcaaag

SEQ ID NO: 369686 - RNA, 32 nt, Homo Sapiens
gcaggauggcugcuaccaaaacacuagacagu

SEQ ID NO: 369687 - RNA, 32 nt, Homo Sapiens
aacauagcuugagcuuccagaaacggugcucc

SEQ ID NO: 369688 - RNA, 32 nt, Homo Sapiens
cuuagaaauauuugaauagacaccuuagaaau

SEQ ID NO: 369689 - RNA, 32 nt, Homo Sapiens
ugcaggggcagagaaggaagggaccaggggac

SEQ ID NO: 369690 - RNA, 32 nt, Homo Sapiens
ggucgcugaggguugccuggaguuuauacaga

SEQ ID NO: 369691 - RNA, 32 nt, Homo Sapiens
ccgcaucugcccgugggcgccccacagcugcc

SEQ ID NO: 369692 - RNA, 32 nt, Homo Sapiens
acccuaccuucggcccggccugggugccccuc

SEQ ID NO: 369693 - RNA, 32 nt, Homo Sapiens
caauugauaggccuuucacagauucuucugau

SEQ ID NO: 369694 - RNA, 32 nt, Homo Sapiens
auggacaaugcuagugacugcacaauauugug

SEQ ID NO: 369695 - RNA, 32 nt, Homo Sapiens
cccagagggcuuuguggaggacaggccuugcc

SEQ ID NO: 369696 - RNA, 32 nt, Homo Sapiens
agguuuauuaaaccucuguugguccgacuuac

SEQ ID NO: 369697 - RNA, 32 nt, Homo Sapiens
acuaggcauucuuuucuuacaucucuauauga

SEQ ID NO: 369698 - RNA, 32 nt, Homo Sapiens
cuugaacagugaaggacaaaaaucaugauugu

SEQ ID NO: 369699 - RNA, 31 nt, Homo Sapiens
agugagcagcgcaccagauguagcgugcuac

SEQ ID NO: 369700 - RNA, 32 nt, Homo Sapiens
gagcggaaaaucaauggcuccagugauuaaua

SEQ ID NO: 369701 - RNA, 32 nt, Homo Sapiens
aauggguauauuuggagcauuacuucaaauac

SEQ ID NO: 369702 - RNA, 32 nt, Homo Sapiens
cuccggcccggcuccuucuccgcucguuaacg

SEQ ID NO: 369703 - RNA, 32 nt, Homo Sapiens
uccaagucaacacucuucuugagcagaccgug

SEQ ID NO: 369704 - RNA, 32 nt, Homo Sapiens
ucuuuagcccagcucauuccucacgucggcca

SEQ ID NO: 369705 - RNA, 32 nt, Homo Sapiens
cuauccgcgcgcgucgccggcccaguccuguc

SEQ ID NO: 369706 - RNA, 32 nt, Homo Sapiens
gcuggggaagcaguugcgauuuagccauggcu

SEQ ID NO: 369707 - RNA, 32 nt, Homo Sapiens
uucagcgucacuuuucuaaguacuuauacaua

SEQ ID NO: 369708 - RNA, 32 nt, Homo Sapiens
agauuagugaguaagaaagaugaugugcaugu

SEQ ID NO: 369709 - RNA, 32 nt, Homo Sapiens
gccaggucacaccaggagggguggggcagggc

SEQ ID NO: 369710 - RNA, 32 nt, Homo Sapiens
uacaguguuuugggcguccggcuuccacguuc

SEQ ID NO: 369711 - RNA, 32 nt, Homo Sapiens
ucggcaaacccuaugaaaguggaauuuucuaa

SEQ ID NO: 369712 - RNA, 31 nt, Homo Sapiens
cucacuguggaggagcugacggccugggccc

SEQ ID NO: 369713 - RNA, 32 nt, Homo Sapiens
gccuaccguggcgggggcgggcagggguuccc

SEQ ID NO: 369714 - RNA, 32 nt, Homo Sapiens
uggcuucgucuucgguuuuucucuuccuucgc

SEQ ID NO: 369715 - RNA, 29 nt, Homo Sapiens
agcaaugucugugcagguagcggcuccug

SEQ ID NO: 369716 - RNA, 32 nt, Homo Sapiens
cuccccagacugcugcccaccuugggacucag

SEQ ID NO: 369717 - RNA, 32 nt, Homo Sapiens
gcaguucaauuucaaaauugcuaaaauguguu

SEQ ID NO: 369718 - RNA, 32 nt, Homo Sapiens
cgagcuauagggcaucagguggugggaacagc

SEQ ID NO: 369719 - RNA, 29 nt, Homo Sapiens
aaugcccugguuuuccugcuugaaucugu

SEQ ID NO: 369720 - RNA, 32 nt, Homo Sapiens
auggacaugaccagcuuuuggcugugaagacc

SEQ ID NO: 369721 - RNA, 29 nt, Homo Sapiens
uaaggcauauguaugugauauucuuggaa

SEQ ID NO: 369722 - RNA, 32 nt, Homo Sapiens
cggccuggcgcggcgcuccgcugugucagcgu

SEQ ID NO: 369723 - RNA, 32 nt, Homo Sapiens
gagguggcagcggcccgggaggccggagccaa

SEQ ID NO: 369724 - RNA, 32 nt, Homo Sapiens
gaucauuucuacguggauguuugguuagaaac

SEQ ID NO: 369725 - RNA, 32 nt, Homo Sapiens
uauauacauacacacacacacacacacaccuu

SEQ ID NO: 369726 - RNA, 32 nt, Homo Sapiens
uuuaaacaugagaauaaagauacuuuuuacug

SEQ ID NO: 369727 - RNA, 32 nt, Homo Sapiens
ucaccugaggucggcaguuugagaccagccug

SEQ ID NO: 369728 - RNA, 32 nt, Homo Sapiens
uggaugacuguaaagacuccugcuauagacug

SEQ ID NO: 369729 - RNA, 28 nt, Homo Sapiens
gggggcgggcggcccgguauggagagca

SEQ ID NO: 369730 - RNA, 32 nt, Homo Sapiens
ucugcagggcuuugcagccacacagcgagguc

SEQ ID NO: 369731 - RNA, 32 nt, Homo Sapiens
gagaagacaucccuaauggaaauacugaaugg

SEQ ID NO: 369732 - RNA, 32 nt, Homo Sapiens
gaggacucuggucccaggaugucucccaggac

SEQ ID NO: 369733 - RNA, 32 nt, Homo Sapiens
ccauacuaaaagacugguaacagcagcagcag

SEQ ID NO: 369734 - RNA, 32 nt, Homo Sapiens
caaagacgagguuucaccauguugaccaggcu

SEQ ID NO: 369735 - RNA, 32 nt, Homo Sapiens
gaaggagucccugacaccgaccucaaccccaa

SEQ ID NO: 369736 - RNA, 32 nt, Homo Sapiens
gaucuggcagccccuccucaggaagcccauga

SEQ ID NO: 369737 - RNA, 32 nt, Homo Sapiens
uaaauguauuguuuuucuuuguugugaugucc

SEQ ID NO: 369738 - RNA, 32 nt, Homo Sapiens
caggagaucuuuccuuguggugguuucuguga

SEQ ID NO: 369739 - RNA, 32 nt, Homo Sapiens
ggguggaggagcugugccugcaugcuggcagg

SEQ ID NO: 369740 - RNA, 32 nt, Homo Sapiens
uguccucugcaggccuggcacggaggagggcc

SEQ ID NO: 369741 - RNA, 32 nt, Homo Sapiens
guaguaaauccugaugcugaccaucugaaaug

SEQ ID NO: 369742 - RNA, 32 nt, Homo Sapiens
gccaccuaaucucucugagacuguguaaaaca

SEQ ID NO: 369743 - RNA, 32 nt, Homo Sapiens
agaggcaaggccuuacugcugcaacuacgaga

SEQ ID NO: 369744 - RNA, 32 nt, Homo Sapiens
gggcugggguggagggcgggacagaggggcug

SEQ ID NO: 369745 - RNA, 32 nt, Homo Sapiens
aaagucaaaaauauuugcuaucuggucccuua

SEQ ID NO: 369746 - RNA, 32 nt, Homo Sapiens
agucuagacuaaaagauugagaaguuacuuuc

SEQ ID NO: 369747 - RNA, 32 nt, Homo Sapiens
ggagggaguaaaaaccagauacguuaaauaaa

SEQ ID NO: 369748 - RNA, 32 nt, Homo Sapiens
ggauaauuugaaaagaaguggguuuaugucac

SEQ ID NO: 369749 - RNA, 32 nt, Homo Sapiens
auaggcugguccucaccuccagagccagccag

SEQ ID NO: 369750 - RNA, 32 nt, Homo Sapiens
accaguauaauggcauugcugugucuggcacu

SEQ ID NO: 369751 - RNA, 32 nt, Homo Sapiens
guggggcccgagggacggcaaguuuuguguac

SEQ ID NO: 369752 - RNA, 32 nt, Homo Sapiens
agucagacaaauggcucuguguuucuagagca

SEQ ID NO: 369753 - RNA, 32 nt, Homo Sapiens
cacaccuaagcccaaauauaaaaacagacucu

SEQ ID NO: 369754 - RNA, 32 nt, Homo Sapiens
ucccaauuccgggcagaccccugacaccugcu

SEQ ID NO: 369755 - RNA, 30 nt, Homo Sapiens
accagacucugugcugcuucugcuuuauac

SEQ ID NO: 369756 - RNA, 32 nt, Homo Sapiens
ucauuuacaaauauagaugcagagauccuaaa

SEQ ID NO: 369757 - RNA, 31 nt, Homo Sapiens
gcuuuugcaagguggggaguagcuugggacu

SEQ ID NO: 369758 - RNA, 32 nt, Homo Sapiens
auuuucaccaaaauauaguuugcacuuuuuaa

SEQ ID NO: 369759 - RNA, 31 nt, Homo Sapiens
uggaguuugugcuaugcagcaguguuagcca

SEQ ID NO: 369760 - RNA, 32 nt, Homo Sapiens
ucaaaggccuucaggaccccagccucuuucca

SEQ ID NO: 369761 - RNA, 32 nt, Homo Sapiens
agcuuuguucuuucgauguuugcaauaaaucu

SEQ ID NO: 369762 - RNA, 32 nt, Homo Sapiens
uccacaaagcaaacagaguucagucucaucuu

SEQ ID NO: 369763 - RNA, 32 nt, Homo Sapiens
guugggagggugguggggacagguaaguggca

SEQ ID NO: 369764 - RNA, 32 nt, Homo Sapiens
gagacgggcgcaugugggcgcuuugcucgcug

SEQ ID NO: 369765 - RNA, 32 nt, Homo Sapiens
gguacuacuguaagagacaugaauggagacuu

SEQ ID NO: 369766 - RNA, 31 nt, Homo Sapiens
uugugaaugggcugccugcccuguaguuagc

SEQ ID NO: 369767 - RNA, 32 nt, Homo Sapiens
accuccgcuuugcauggaagaaucuggaugcu

SEQ ID NO: 369768 - RNA, 32 nt, Homo Sapiens
ugcggaggcagacgagagcccagcgcccucga

SEQ ID NO: 369769 - RNA, 32 nt, Homo Sapiens
gguggagaagggaucagauagcuccucagaga

SEQ ID NO: 369770 - RNA, 32 nt, Homo Sapiens
cagugcauguggaaaguaucagaguaagccuc

SEQ ID NO: 369771 - RNA, 32 nt, Homo Sapiens
guuuuucagaucuucauuaaauuuuuuccuua

SEQ ID NO: 369772 - RNA, 32 nt, Homo Sapiens
ugcccugggauaacccagcaagugagcacugg

SEQ ID NO: 369773 - RNA, 32 nt, Homo Sapiens
cagagagaauacuucgagcucaugcugagaga

SEQ ID NO: 369774 - RNA, 32 nt, Homo Sapiens
uggaagaaucucagccagaguccugaacagca

SEQ ID NO: 369775 - RNA, 32 nt, Homo Sapiens
acuccagucauccucccccauccaugguuucu

SEQ ID NO: 369776 - RNA, 32 nt, Homo Sapiens
ccuguuccucacugcggauggugcugcugucc

SEQ ID NO: 369777 - RNA, 32 nt, Homo Sapiens
ccagcucccguuagccaggacuuguccccugg

SEQ ID NO: 369778 - RNA, 32 nt, Homo Sapiens
ugccuugggacucgcgagcccgcacucccgcc

SEQ ID NO: 369779 - RNA, 32 nt, Homo Sapiens
ccucugcagggcccaggcgcccuuggccuuag

SEQ ID NO: 369780 - RNA, 32 nt, Homo Sapiens
cucugcacccgccucgaccuccccacccgcuc

SEQ ID NO: 369781 - RNA, 32 nt, Homo Sapiens
caguggguugggguuguuuuuacuacaaaaua

SEQ ID NO: 369782 - RNA, 32 nt, Homo Sapiens
accaucuucuauuuccagcuccugauucccca

SEQ ID NO: 369783 - RNA, 32 nt, Homo Sapiens
gugcaggaggccggcugccagugccuggggcu

SEQ ID NO: 369784 - RNA, 32 nt, Homo Sapiens
uccgcggcugcaccggccccaugagcccgcgg

SEQ ID NO: 369785 - RNA, 32 nt, Homo Sapiens
ccagauggggagcuuuaugacaugacaggcgg

SEQ ID NO: 369786 - RNA, 32 nt, Homo Sapiens
caucagaucugugcaccauuaaugugaguggc

SEQ ID NO: 369787 - RNA, 32 nt, Homo Sapiens
aauaugcccagcacauuuuguaaaacaguccu

SEQ ID NO: 369788 - RNA, 32 nt, Homo Sapiens
acccgggaagcagagucugcagugagccaaga

SEQ ID NO: 369789 - RNA, 30 nt, Homo Sapiens
uccaggggagguggcgcugaacugggaaua

SEQ ID NO: 369790 - RNA, 32 nt, Homo Sapiens
uuugguauuuaguaaggaaucaauuaaauuaa

SEQ ID NO: 369791 - RNA, 32 nt, Homo Sapiens
caacuacaacagauugucucauuuucccaggg

SEQ ID NO: 369792 - RNA, 32 nt, Homo Sapiens
gcuggaguccuugcuuugcugcugcugagcug

SEQ ID NO: 369793 - RNA, 32 nt, Homo Sapiens
uacacccaucauggucaucuaucaucaagaga

SEQ ID NO: 369794 - RNA, 30 nt, Homo Sapiens
aggugggguccgcggccgccggagcguucc

SEQ ID NO: 369795 - RNA, 32 nt, Homo Sapiens
ccuacgagucuugcuugcuaaacuacaguggc

SEQ ID NO: 369796 - RNA, 32 nt, Homo Sapiens
cuuaaucuugagauaaauccaauagaacuuuu

SEQ ID NO: 369797 - RNA, 32 nt, Homo Sapiens
uaggacuagaguuccuugugggauuggaccag

SEQ ID NO: 369798 - RNA, 32 nt, Homo Sapiens
caaauucugauggaucuucuuuauugcuguuu

SEQ ID NO: 369799 - RNA, 32 nt, Homo Sapiens
aggcugcucccuccccuuuuuccugcccaguc

SEQ ID NO: 369800 - RNA, 32 nt, Homo Sapiens
cccaggggacaagggauuugaggugaggguug

SEQ ID NO: 369801 - RNA, 32 nt, Homo Sapiens
acgugacaaugagacugaccuuucucaggaau

SEQ ID NO: 369802 - RNA, 32 nt, Homo Sapiens
gugccccacccuccccacagagcucuuccuca

SEQ ID NO: 369803 - RNA, 32 nt, Homo Sapiens
ggggcccauuguaucuggagagccuggauucc

SEQ ID NO: 369804 - RNA, 32 nt, Homo Sapiens
augaauuucguuagcuucucuuugaaaauggc

SEQ ID NO: 369805 - RNA, 32 nt, Homo Sapiens
aaggaccuuuugcugccuaaauccacucugca

SEQ ID NO: 369806 - RNA, 32 nt, Homo Sapiens
aggagaggggagaaaggaggugcaccuggcag

SEQ ID NO: 369807 - RNA, 32 nt, Homo Sapiens
ucuaccaucuccaccaugaacucuguuaagga

SEQ ID NO: 369808 - RNA, 32 nt, Homo Sapiens
caguucugccucugacgccucauuccagccau

SEQ ID NO: 369809 - RNA, 32 nt, Homo Sapiens
cauagaccaaauaucccccaauaaaaaaggug

SEQ ID NO: 369810 - RNA, 32 nt, Homo Sapiens
uggcgcgaccucaggacucuccguguccccuc

SEQ ID NO: 369811 - RNA, 32 nt, Homo Sapiens
cgcucuaaacaaaacagugguagguuaaugug

SEQ ID NO: 369812 - RNA, 32 nt, Homo Sapiens
auccccuugagagagcaucugauucaaaauuc

SEQ ID NO: 369813 - RNA, 32 nt, Homo Sapiens
auccacuucuuuugguuccccaguccaaaaca

SEQ ID NO: 369814 - RNA, 32 nt, Homo Sapiens
ccagucccaagccucaccugccugcccagcgc

SEQ ID NO: 369815 - RNA, 32 nt, Homo Sapiens
auaaaaccccuucagacuucuacauuaaugau

SEQ ID NO: 369816 - RNA, 30 nt, Homo Sapiens
aagagaguucugaugggggaaaaacacagg

SEQ ID NO: 369817 - RNA, 32 nt, Homo Sapiens
gaaaauaaacacauuaaaggcugggcgcggug

SEQ ID NO: 369818 - RNA, 32 nt, Homo Sapiens
ggguagaggucuuuucaccgagcugcugcugg

SEQ ID NO: 369819 - RNA, 32 nt, Homo Sapiens
aaaaguauuuaguugauuacuuuucaguuuug

SEQ ID NO: 369820 - RNA, 32 nt, Homo Sapiens
uugcccaggguggagugcagcggugcgaucuc

SEQ ID NO: 369821 - RNA, 32 nt, Homo Sapiens
gcagaaugaugaaaugacuucggcgagguacc

SEQ ID NO: 369822 - RNA, 32 nt, Homo Sapiens
ugaggacacuguggugaguggagcacgugaga

SEQ ID NO: 369823 - RNA, 32 nt, Homo Sapiens
gaaacaaaaaucaacacaaaucuuuauuuuuu

SEQ ID NO: 369824 - RNA, 32 nt, Homo Sapiens
ugucuuguacuaaagaacugacuccagauggu

SEQ ID NO: 369825 - RNA, 32 nt, Homo Sapiens
aggcgccccguccggucagcccucgcgcccuc

SEQ ID NO: 369826 - RNA, 32 nt, Homo Sapiens
gcggggccggagcggccuucccggaguccuuu

SEQ ID NO: 369827 - RNA, 32 nt, Homo Sapiens
ggggcuggacgcugaccgcccgggccagcacc

SEQ ID NO: 369828 - RNA, 32 nt, Homo Sapiens
aaaugauuucaucucugccaucucuaaagcac

SEQ ID NO: 369829 - RNA, 32 nt, Homo Sapiens
cugagggagccagaggaguccuguaggcaggc

SEQ ID NO: 369830 - RNA, 32 nt, Homo Sapiens
cgaucgugguggccccagcggccugggcguug

SEQ ID NO: 369831 - RNA, 32 nt, Homo Sapiens
gaucgaagagcagacguaccccugccccaccu

SEQ ID NO: 369832 - RNA, 32 nt, Homo Sapiens
ugggagggucagcuccgguccugggucgggag

SEQ ID NO: 369833 - RNA, 32 nt, Homo Sapiens
cauucuggcaaagcuggaccaaggcuaaccuu

SEQ ID NO: 369834 - RNA, 32 nt, Homo Sapiens
ucgccguccucuccccgcagccggaccggaac

SEQ ID NO: 369835 - RNA, 32 nt, Homo Sapiens
gcucggcgucuuccuuccuccucccggucagc

SEQ ID NO: 369836 - RNA, 32 nt, Homo Sapiens
aggcgcugccccagcaccuucuccuccccagg

SEQ ID NO: 369837 - RNA, 32 nt, Homo Sapiens
aaucuggaauguuuuucuuccaaaucugagug

SEQ ID NO: 369838 - RNA, 32 nt, Homo Sapiens
gcauaugccauuguggcuuacuugucauuucu

SEQ ID NO: 369839 - RNA, 32 nt, Homo Sapiens
gggucgcgccccacugcgcugcugaccuuccu

SEQ ID NO: 369840 - RNA, 32 nt, Homo Sapiens
aaguggucgggcgggcggacgaggcgggcgau

SEQ ID NO: 369841 - RNA, 32 nt, Homo Sapiens
gggcgggcgcucgggcgggacauggcagccug

SEQ ID NO: 369842 - RNA, 31 nt, Homo Sapiens
ugagaacaagaggucuagucccauaugugga

SEQ ID NO: 369843 - RNA, 32 nt, Homo Sapiens
ggccggagcgggggcgggugggggcguaagcc

SEQ ID NO: 369844 - RNA, 32 nt, Homo Sapiens
auuggcaugaauuuugugaauuaggguguuaa

SEQ ID NO: 369845 - RNA, 32 nt, Homo Sapiens
agaucuguuguacagcuuggugacuguaauua

SEQ ID NO: 369846 - RNA, 32 nt, Homo Sapiens
gccaggacugcgcuaacagcaaggacugcagc

SEQ ID NO: 369847 - RNA, 32 nt, Homo Sapiens
acacucagaauccuagcagcucuguccuuaac

SEQ ID NO: 369848 - RNA, 32 nt, Homo Sapiens
gguuuucucuucguuccagauaccaaauaaau

SEQ ID NO: 369849 - RNA, 32 nt, Homo Sapiens
uugggaggcugaggcgcguggaucaccugagg

SEQ ID NO: 369850 - RNA, 32 nt, Homo Sapiens
ggucaaucaguguuaacuugcauauuguuggc

SEQ ID NO: 369851 - RNA, 31 nt, Homo Sapiens
gaaacccggcgcagccgggcgcauugggccg

SEQ ID NO: 369852 - RNA, 32 nt, Homo Sapiens
ucacagugggcagccggcacccggcaccacuu

SEQ ID NO: 369853 - RNA, 32 nt, Homo Sapiens
ucauuuguaaaaaugagucauuuguuuaaaca

SEQ ID NO: 369854 - RNA, 32 nt, Homo Sapiens
uuaaauugacagccuuccauuuuucgagaaag

SEQ ID NO: 369855 - RNA, 32 nt, Homo Sapiens
agagggaggagaggcgcggggagccaggccuc

SEQ ID NO: 369856 - RNA, 32 nt, Homo Sapiens
gaaagagccuuuuccuucuccuuuucuuacuc

SEQ ID NO: 369857 - RNA, 32 nt, Homo Sapiens
ugucuuuagacuaaaauauucuguugcccugg

SEQ ID NO: 369858 - RNA, 32 nt, Homo Sapiens
gaacagguggccuggggugcuggaggcaggcc

SEQ ID NO: 369859 - RNA, 32 nt, Homo Sapiens
cucaacaagagaaaaagcucuaguuauagggc

SEQ ID NO: 369860 - RNA, 32 nt, Homo Sapiens
agcccccugccagaccaggggaccucggagag

SEQ ID NO: 369861 - RNA, 32 nt, Homo Sapiens
gcgggggcccucgcguggacacccgccccugc

SEQ ID NO: 369862 - RNA, 32 nt, Homo Sapiens
ugcguggcgcagcgucuggcuccgccaucucu

SEQ ID NO: 369863 - RNA, 32 nt, Homo Sapiens
cauaaaguuccgaaucccccaugugucucuuu

SEQ ID NO: 369864 - RNA, 32 nt, Homo Sapiens
ggugaccuccguccucuccccagccuggcaca

SEQ ID NO: 369865 - RNA, 30 nt, Homo Sapiens
cggugauggcggugcgugaacgcgcggcgg

SEQ ID NO: 369866 - RNA, 32 nt, Homo Sapiens
ccucccugacuuggacaagggcagugcccugg

SEQ ID NO: 369867 - RNA, 32 nt, Homo Sapiens
ucugccgcaggcccgcgggccgcccgggaauu

SEQ ID NO: 369868 - RNA, 32 nt, Homo Sapiens
uucaaaugucauuuaucaggcauagcucugaa

SEQ ID NO: 369869 - RNA, 32 nt, Homo Sapiens
uccacaggcagacagcccagcgccacaccaug

SEQ ID NO: 369870 - RNA, 32 nt, Homo Sapiens
gcggcagcuguagcugcagcagcagguaaaga

SEQ ID NO: 369871 - RNA, 32 nt, Homo Sapiens
agacaugaauauuaccuagaaaauuuauuucc

SEQ ID NO: 369872 - RNA, 32 nt, Homo Sapiens
ccugcuggggagagggagaaggcaggccucag

SEQ ID NO: 369873 - RNA, 32 nt, Homo Sapiens
uauguucuguuguuuuuaggauggagcugguu

SEQ ID NO: 369874 - RNA, 32 nt, Homo Sapiens
aucacagugcugagaccccccaccaccagccg

SEQ ID NO: 369875 - RNA, 32 nt, Homo Sapiens
guaaagcccggcccguguacuccaccugcccc

SEQ ID NO: 369876 - RNA, 32 nt, Homo Sapiens
uuuuguuuuuguuuucuggagacaaggucuug

SEQ ID NO: 369877 - RNA, 32 nt, Homo Sapiens
guuauuguucaagagugagaucuuguagagug

SEQ ID NO: 369878 - RNA, 32 nt, Homo Sapiens
gaaauagcugaauguaaauagcagggaggaag

SEQ ID NO: 369879 - RNA, 32 nt, Homo Sapiens
cauccaguucaucuuagaaugucuaugauuag

SEQ ID NO: 369880 - RNA, 32 nt, Homo Sapiens
agucaacggcgcgguugcugcggccgccgcgc

SEQ ID NO: 369881 - RNA, 32 nt, Homo Sapiens
ggucuuugccuggccccaucccuagggggcgg

SEQ ID NO: 369882 - RNA, 32 nt, Homo Sapiens
cgacacggcggcggcgccgcgcugcucccgcu

SEQ ID NO: 369883 - RNA, 32 nt, Homo Sapiens
uuccaucgcgucugucggguauuguuccuuaa

SEQ ID NO: 369884 - RNA, 32 nt, Homo Sapiens
gccuucccgcgccccgcagcgccccgcagagc

SEQ ID NO: 369885 - RNA, 32 nt, Homo Sapiens
uggugaagauuccacauaaaaauuuucugagg

SEQ ID NO: 369886 - RNA, 32 nt, Homo Sapiens
uuuuuuaauuuuuauaauguacugaugugguu

SEQ ID NO: 369887 - RNA, 32 nt, Homo Sapiens
guguggcccacgcagagcuggugcaggucuga

SEQ ID NO: 369888 - RNA, 32 nt, Homo Sapiens
ggacacuccagaugugguuggaagcauaugug

SEQ ID NO: 369889 - RNA, 32 nt, Homo Sapiens
ugcuggugcugcuucuuacccugccccugcac

SEQ ID NO: 369890 - RNA, 30 nt, Homo Sapiens
gggucauggcugggccgcggggcgcgcugc

SEQ ID NO: 369891 - RNA, 32 nt, Homo Sapiens
ggaagaacuguaaaagaaaaaaguauauauca

SEQ ID NO: 369892 - RNA, 32 nt, Homo Sapiens
cgaagucaauacaugauaauagcaauccuuga

SEQ ID NO: 369893 - RNA, 32 nt, Homo Sapiens
uaacuacaaagguuuaaaugaacaagagaagc

SEQ ID NO: 369894 - RNA, 32 nt, Homo Sapiens
caaggaacuaugugagccacuccaguguuccc

SEQ ID NO: 369895 - RNA, 32 nt, Homo Sapiens
caggucucaucccacacucuugagaagccuug

SEQ ID NO: 369896 - RNA, 32 nt, Homo Sapiens
gacacagaugaccucuacgggagucugaacgc

SEQ ID NO: 369897 - RNA, 32 nt, Homo Sapiens
uuuuaaacucccucccuugcuuucuuucucuu

SEQ ID NO: 369898 - RNA, 32 nt, Homo Sapiens
cuguguccagcauucuuugcaauaaauacuuu

SEQ ID NO: 369899 - RNA, 32 nt, Homo Sapiens
ggcuccgccaugccggccgccgggaguaacga

SEQ ID NO: 369900 - RNA, 32 nt, Homo Sapiens
uauacguaaaaauuaagauuuuauauuuuauc

SEQ ID NO: 369901 - RNA, 32 nt, Homo Sapiens
aaugccaggaacggcucaagugccaggugcag

SEQ ID NO: 369902 - RNA, 32 nt, Homo Sapiens
aaagcuuugcuuuucuccuccuccccuuccca

SEQ ID NO: 369903 - RNA, 32 nt, Homo Sapiens
ccacccuccacccacccaccucgcggucccca

SEQ ID NO: 369904 - RNA, 32 nt, Homo Sapiens
aaaauucaugcaaacuuggacauauccuuacc

SEQ ID NO: 369905 - RNA, 32 nt, Homo Sapiens
guggacuucagcacccagacaagccaaaaaca

SEQ ID NO: 369906 - RNA, 32 nt, Homo Sapiens
ugcucaggggagauggaacccugagcagccca

SEQ ID NO: 369907 - RNA, 32 nt, Homo Sapiens
uagaaauccagauuuuauguguguguaauuug

SEQ ID NO: 369908 - RNA, 32 nt, Homo Sapiens
aauaagaagugugacaaccuugacuguucugu

SEQ ID NO: 369909 - RNA, 32 nt, Homo Sapiens
aggucucagcagaggcccauggagagggaaug

SEQ ID NO: 369910 - RNA, 32 nt, Homo Sapiens
cgguggcucacgccuguaaucccggcacuuug

SEQ ID NO: 369911 - RNA, 32 nt, Homo Sapiens
acacugggcagcaaggcugcugccggaaucac

SEQ ID NO: 369912 - RNA, 32 nt, Homo Sapiens
gccugagcugccgcucuccgccgcccgaaaac

SEQ ID NO: 369913 - RNA, 32 nt, Homo Sapiens
aaaauggggugaugaagaagaugaugaugaua

SEQ ID NO: 369914 - RNA, 32 nt, Homo Sapiens
acucuuaagaauggaaagggaugacauuuacc

SEQ ID NO: 369915 - RNA, 29 nt, Homo Sapiens
uaucauguucggcucagaggcagggagga

SEQ ID NO: 369916 - RNA, 32 nt, Homo Sapiens
acuagcuuggccaacauagugaaaccccaucu

SEQ ID NO: 369917 - RNA, 32 nt, Homo Sapiens
cuauggagaaagugggauggaagccuucaaag

SEQ ID NO: 369918 - RNA, 32 nt, Homo Sapiens
cuucccccacccagagacugggcagcuguguc

SEQ ID NO: 369919 - RNA, 32 nt, Homo Sapiens
ccgugugguuuagagucauacauccucacagg

SEQ ID NO: 369920 - RNA, 31 nt, Homo Sapiens
uggggugagccccaggaggaaguugggacaa

SEQ ID NO: 369921 - RNA, 32 nt, Homo Sapiens
gcagugaagggagaggcccugggugggggaca

SEQ ID NO: 369922 - RNA, 32 nt, Homo Sapiens
ggcaggaaccaagacaguucugcacagccguc

SEQ ID NO: 369923 - RNA, 32 nt, Homo Sapiens
cauuaccaauacuauuuauuaugcucaaauau

SEQ ID NO: 369924 - RNA, 32 nt, Homo Sapiens
acccccacccccaugcucuggaccucauggcu

SEQ ID NO: 369925 - RNA, 32 nt, Homo Sapiens
gaacucagugccauccugggugcccagggcag

SEQ ID NO: 369926 - RNA, 32 nt, Homo Sapiens
agaagaaguuauuaauaaguauaauuaagaac

SEQ ID NO: 369927 - RNA, 32 nt, Homo Sapiens
ugcauaccacugucuguaaacccaacaaaauu

SEQ ID NO: 369928 - RNA, 32 nt, Homo Sapiens
ucaauucucuuucaaaauuuuacagaauguua

SEQ ID NO: 369929 - RNA, 32 nt, Homo Sapiens
aacuguauugaacacaacaaaauacauugaau

SEQ ID NO: 369930 - RNA, 32 nt, Homo Sapiens
ccagcuggugacugugguggcuccauccugca

SEQ ID NO: 369931 - RNA, 32 nt, Homo Sapiens
uggggcucacaucuccuuccucuggccagucc

SEQ ID NO: 369932 - RNA, 32 nt, Homo Sapiens
uguguuuaaaggaaacaaaaugggagaaauaa

SEQ ID NO: 369933 - RNA, 32 nt, Homo Sapiens
uuguucauuuuaccucuuucuuacucuuacua

SEQ ID NO: 369934 - RNA, 32 nt, Homo Sapiens
ucauaaggaggaaguuauucaacaucagacaa

SEQ ID NO: 369935 - RNA, 32 nt, Homo Sapiens
cuaccccucggccuugaagcucccucgggcug

SEQ ID NO: 369936 - RNA, 32 nt, Homo Sapiens
gugccgucacccuggcaagggccgugagggcg

SEQ ID NO: 369937 - RNA, 31 nt, Homo Sapiens
cugcugauugugaaucucagagucuuaagag

SEQ ID NO: 369938 - RNA, 32 nt, Homo Sapiens
cuguauagaaauaaacugauuuuuguacacug

SEQ ID NO: 369939 - RNA, 32 nt, Homo Sapiens
agcggcgucgucgcgggccgggccccagcaau

SEQ ID NO: 369940 - RNA, 32 nt, Homo Sapiens
agaaagaaccaaaaagugaauuuuauuuuaaa

SEQ ID NO: 369941 - RNA, 32 nt, Homo Sapiens
aucaguaaugugugucuuuguaucucaugugu

SEQ ID NO: 369942 - RNA, 32 nt, Homo Sapiens
agcagacucugcauugaugggcuguuggcuga

SEQ ID NO: 369943 - RNA, 32 nt, Homo Sapiens
aucccuccccagacauccauccugcuacucac

SEQ ID NO: 369944 - RNA, 32 nt, Homo Sapiens
gccucucgaguccacacccacucaccguccuu

SEQ ID NO: 369945 - RNA, 32 nt, Homo Sapiens
uaauguauuuggcuauuagaucacuagcacug

SEQ ID NO: 369946 - RNA, 32 nt, Homo Sapiens
acuggaaggguguaaagcaguucuucggcccg

SEQ ID NO: 369947 - RNA, 30 nt, Homo Sapiens
agaagagaucagaaugaugaguccagaacc

SEQ ID NO: 369948 - RNA, 32 nt, Homo Sapiens
uauugaaauuaaaauuguauuacuucuguuuu

SEQ ID NO: 369949 - RNA, 32 nt, Homo Sapiens
ucauaacugucaaauguucuuuuaauucugag

SEQ ID NO: 369950 - RNA, 32 nt, Homo Sapiens
gaucacuugagcucaggagcucaagaucagcc

SEQ ID NO: 369951 - RNA, 32 nt, Homo Sapiens
aaggggcuugccaccucugugcucccuccugc

SEQ ID NO: 369952 - RNA, 32 nt, Homo Sapiens
acugccaucgccacuaccauccugucaccagu

SEQ ID NO: 369953 - RNA, 32 nt, Homo Sapiens
cugucauauggcuguuuugcaaaccuguggag

SEQ ID NO: 369954 - RNA, 32 nt, Homo Sapiens
auuuaccuaugauauuuacugugcaguuuguc

SEQ ID NO: 369955 - RNA, 32 nt, Homo Sapiens
accgagccauccugccucgccuccccccacgc

SEQ ID NO: 369956 - RNA, 32 nt, Homo Sapiens
gaguucagagguuuccuuucccaccuucucag

SEQ ID NO: 369957 - RNA, 32 nt, Homo Sapiens
guguuggaggucggcgccggcccccgccuucc

SEQ ID NO: 369958 - RNA, 32 nt, Homo Sapiens
agacuguauguccuuacuaaguuucauuuuca

SEQ ID NO: 369959 - RNA, 23 nt, Homo Sapiens
uuaaauuuuuauugucccacuua

SEQ ID NO: 369960 - RNA, 32 nt, Homo Sapiens
cuccagcagcgggcgcggcgggcgcgagcacg

SEQ ID NO: 369961 - RNA, 32 nt, Homo Sapiens
uaaaagugaagggauauuuuucuuauauuugu

SEQ ID NO: 369962 - RNA, 32 nt, Homo Sapiens
uuuaauauaaagacauauuuucaaaucaaaau

SEQ ID NO: 369963 - RNA, 32 nt, Homo Sapiens
uuuuuuagaaaucuuaaaauugccuuugcacu

SEQ ID NO: 369964 - RNA, 32 nt, Homo Sapiens
uuuuuuaauuuauuuuauucucucucccuuuu

SEQ ID NO: 369965 - RNA, 32 nt, Homo Sapiens
uucauaaaacuuuuuuuuuuuacuuuuuuccc

SEQ ID NO: 369966 - RNA, 32 nt, Homo Sapiens
auuuuggagaaauuauuuaauaaaaaaacaau

SEQ ID NO: 369967 - RNA, 32 nt, Homo Sapiens
uuugccacugucagaaucugaaucucacuggc

SEQ ID NO: 369968 - RNA, 32 nt, Homo Sapiens
augcuccugugcuuccuggggccaguagcagc

SEQ ID NO: 369969 - RNA, 32 nt, Homo Sapiens
acaguccgcauucauuuuuacucuucucuaau

SEQ ID NO: 369970 - RNA, 32 nt, Homo Sapiens
gcguaguaguuacuuuguacugagagaacuug

SEQ ID NO: 369971 - RNA, 32 nt, Homo Sapiens
acaguauuugucauaccaguuuauaaccacag

SEQ ID NO: 369972 - RNA, 32 nt, Homo Sapiens
cucuuucaccacucuuucccccaguccauccu

SEQ ID NO: 369973 - RNA, 32 nt, Homo Sapiens
uucuucuguccaaacaaacaaacaaaaacuaa

SEQ ID NO: 369974 - RNA, 32 nt, Homo Sapiens
ccccuucgcccaccuccgcccccgucaccucg

SEQ ID NO: 369975 - RNA, 32 nt, Homo Sapiens
ccucuuaucuucugccaggaucaccuccgaga

SEQ ID NO: 369976 - RNA, 32 nt, Homo Sapiens
aguauuuuuuaaaaggcucaacuguaagccuc

SEQ ID NO: 369977 - RNA, 32 nt, Homo Sapiens
cuaccagggucucucagggauggagggaagac

SEQ ID NO: 369978 - RNA, 32 nt, Homo Sapiens
ucaguuuccauccccaggauccacuuggucug

SEQ ID NO: 369979 - RNA, 30 nt, Homo Sapiens
aagccagauaaaaguggaaugaggaaugca

SEQ ID NO: 369980 - RNA, 32 nt, Homo Sapiens
gugcuuauuuuuccugcuguauaugggggugg

SEQ ID NO: 369981 - RNA, 32 nt, Homo Sapiens
uuuguaaaaacaaaaaggggaagaguagacac

SEQ ID NO: 369982 - RNA, 32 nt, Homo Sapiens
aauuaauucucuucuuuuuugaguuguaguga

SEQ ID NO: 369983 - RNA, 32 nt, Homo Sapiens
auugcauugucguuuugguuugagauaggaag

SEQ ID NO: 369984 - RNA, 32 nt, Homo Sapiens
agcugcugaagagcuuuggugaggacaagauc

SEQ ID NO: 369985 - RNA, 32 nt, Homo Sapiens
acgcuguuuuccccauuuccagaugggaggcc

SEQ ID NO: 369986 - RNA, 32 nt, Homo Sapiens
gcgccagaggucggcgcgcgcacacccgcacc

SEQ ID NO: 369987 - RNA, 32 nt, Homo Sapiens
ucuccacccuccccacacucugcgcuucucgc

SEQ ID NO: 369988 - RNA, 32 nt, Homo Sapiens
uuuuuaaucugugccaaaaauguguuuucaga

SEQ ID NO: 369989 - RNA, 32 nt, Homo Sapiens
gaaggggcgacguucgggcaccccccgaaugg

SEQ ID NO: 369990 - RNA, 32 nt, Homo Sapiens
caauuucuuuuuucuuuuuuuuuuuuuuuuuu

SEQ ID NO: 369991 - RNA, 32 nt, Homo Sapiens
aauuaugugucuguguuauacuguauagguac

SEQ ID NO: 369992 - RNA, 32 nt, Homo Sapiens
uacuuugcuucuuuuuauguuuguaaucugua

SEQ ID NO: 369993 - RNA, 32 nt, Homo Sapiens
gcuuuccccuugagauguaaaccgggaacggg

SEQ ID NO: 369994 - RNA, 32 nt, Homo Sapiens
ucugaguaacaagacaucuccuugcagcuguu

SEQ ID NO: 369995 - RNA, 32 nt, Homo Sapiens
uugugggaccucggcuucugcucgaagccuac

SEQ ID NO: 369996 - RNA, 32 nt, Homo Sapiens
agguacuagaauugauaaauguguacaacagg

SEQ ID NO: 369997 - RNA, 32 nt, Homo Sapiens
gcaucaaaagacuuaaaaauacggacguccuu

SEQ ID NO: 369998 - RNA, 32 nt, Homo Sapiens
aaaugugaaaaacaggcugggcgugguggcuc

SEQ ID NO: 369999 - RNA, 32 nt, Homo Sapiens
gugcgcaccuccccggcccuggcccaccuucu

SEQ ID NO: 370000 - RNA, 32 nt, Homo Sapiens
gagggcggccccagaaccccagguagguagag

SEQ ID NO: 370001 - RNA, 32 nt, Homo Sapiens
cccugugcuuggagagaaaggggccggugcug

SEQ ID NO: 370002 - RNA, 32 nt, Homo Sapiens
cagacagcucaucagcagcagcagcuguauug

SEQ ID NO: 370003 - RNA, 32 nt, Homo Sapiens
uuguguuuguuuguuugcagucucucucugcc

SEQ ID NO: 370004 - RNA, 32 nt, Homo Sapiens
ugaaugacaaugaaagcacuguguagaaacac

SEQ ID NO: 370005 - RNA, 32 nt, Homo Sapiens
ugaugagaagaacacaucaggcacugcgccac

SEQ ID NO: 370006 - RNA, 32 nt, Homo Sapiens
gcgucguggccauggcggcggcuaucgccagc

SEQ ID NO: 370007 - RNA, 32 nt, Homo Sapiens
aaucaaaacauuuaaguuuccuuuaaauugua

SEQ ID NO: 370008 - RNA, 32 nt, Homo Sapiens
cccacauuucacuguauuuggugcugggucau

SEQ ID NO: 370009 - RNA, 32 nt, Homo Sapiens
gaguuuugucugucucccuccccucucagaac

SEQ ID NO: 370010 - RNA, 32 nt, Homo Sapiens
gggcuaggcugagacgcuucggaccccgggaa

SEQ ID NO: 370011 - RNA, 32 nt, Homo Sapiens
aaacccuuccccacccaccuccugcucccucc

SEQ ID NO: 370012 - RNA, 32 nt, Homo Sapiens
acgguguugcugcaccugaagaacgagcugaa

SEQ ID NO: 370013 - RNA, 32 nt, Homo Sapiens
cggcuauacauauacauacauaaaauugauuu

SEQ ID NO: 370014 - RNA, 32 nt, Homo Sapiens
cucaucucaucugccgcuuggugcgugugcgu

SEQ ID NO: 370015 - RNA, 32 nt, Homo Sapiens
cggcuccauucggcgcccgcagcccucagggg

SEQ ID NO: 370016 - RNA, 32 nt, Homo Sapiens
uggcccuggcgccgcccgccucgggcgcucca

SEQ ID NO: 370017 - RNA, 32 nt, Homo Sapiens
caguaauaaugauuugaacaccacugagaagc

SEQ ID NO: 370018 - RNA, 32 nt, Homo Sapiens
gggaggggguguuaugggagggggacacauug

SEQ ID NO: 370019 - RNA, 32 nt, Homo Sapiens
cauagccuuucuguauuuaagaaacuuaagca

SEQ ID NO: 370020 - RNA, 32 nt, Homo Sapiens
gcuuuaacaaaauaaaucuucaugguagaaaa

SEQ ID NO: 370021 - RNA, 32 nt, Homo Sapiens
agcaguuccuacugaacaauggagcacucagc

SEQ ID NO: 370022 - RNA, 32 nt, Homo Sapiens
ccuuuccagccaugcgauauuccccuuggaag

SEQ ID NO: 370023 - RNA, 32 nt, Homo Sapiens
ucacauuuaucugcaacaaaauauagauuuaa

SEQ ID NO: 370024 - RNA, 32 nt, Homo Sapiens
gaugcccaccgaggagccccagccccguccca

SEQ ID NO: 370025 - RNA, 32 nt, Homo Sapiens
cccuugcagacacaugccccuuucacggcucc

SEQ ID NO: 370026 - RNA, 32 nt, Homo Sapiens
ggugguggagagcgggggcggggauucagcgc

SEQ ID NO: 370027 - RNA, 32 nt, Homo Sapiens
cgcgaggaucccgaugaggggauggaccgcgc

SEQ ID NO: 370028 - RNA, 32 nt, Homo Sapiens
ugugcccccucuaccauuugcagaguccugca

SEQ ID NO: 370029 - RNA, 32 nt, Homo Sapiens
cugggcuugggaaggggagguggaggccaggu

SEQ ID NO: 370030 - RNA, 32 nt, Homo Sapiens
cuauaccuggacacccaccuccccagacacaa

SEQ ID NO: 370031 - RNA, 32 nt, Homo Sapiens
uaggcuggucccugucggcuccagcccaccag

SEQ ID NO: 370032 - RNA, 32 nt, Homo Sapiens
gaggguaggaggagggugcacauaacccuuac

SEQ ID NO: 370033 - RNA, 32 nt, Homo Sapiens
agcaauacugucaacagagaaccaggaaauga

SEQ ID NO: 370034 - RNA, 32 nt, Homo Sapiens
cuuauccuuccucuccuuccuuguuacccaug

SEQ ID NO: 370035 - RNA, 32 nt, Homo Sapiens
gaaauaauugguuguuggcaccaucucaccac

SEQ ID NO: 370036 - RNA, 32 nt, Homo Sapiens
ugagcaggggagaaauagcagaggggcuugga

SEQ ID NO: 370037 - RNA, 32 nt, Homo Sapiens
gguuuuuuccucucacaggccccagagccucc

SEQ ID NO: 370038 - RNA, 32 nt, Homo Sapiens
cagcuucccucaugguggcagccuaaccugca

SEQ ID NO: 370039 - RNA, 32 nt, Homo Sapiens
guagggaaaggggacuugugguaguggaccau

SEQ ID NO: 370040 - RNA, 32 nt, Homo Sapiens
ucuggagcuauuuuuaagauguguguguuaaa

SEQ ID NO: 370041 - RNA, 32 nt, Homo Sapiens
gcccauggagccucagaaaugccacccggcug

SEQ ID NO: 370042 - RNA, 32 nt, Homo Sapiens
auuagacuuuuaaauuuucuuuguaguuggug

SEQ ID NO: 370043 - RNA, 32 nt, Homo Sapiens
gagugucuugcaguuaauugcauauugucaga

SEQ ID NO: 370044 - RNA, 32 nt, Homo Sapiens
uuagcauuaaaaauaaaaguuguaccuugacc

SEQ ID NO: 370045 - RNA, 32 nt, Homo Sapiens
ggcugggcagggcccuguggcuccaggagcag

SEQ ID NO: 370046 - RNA, 32 nt, Homo Sapiens
ucucucuguuuuuuauaguaggaacagccuuu

SEQ ID NO: 370047 - RNA, 32 nt, Homo Sapiens
gguggacacucuugaagccaucucuaaucaag

SEQ ID NO: 370048 - RNA, 32 nt, Homo Sapiens
cccaaccaccuaagcaaagagaauuugacauu

SEQ ID NO: 370049 - RNA, 32 nt, Homo Sapiens
aguguuucagugcuggcauauuuuggaauucu

SEQ ID NO: 370050 - RNA, 32 nt, Homo Sapiens
caggcacccagcugggcauuucaccugcuguc

SEQ ID NO: 370051 - RNA, 32 nt, Homo Sapiens
ucugcauuuacacacacacacacacacacacg

SEQ ID NO: 370052 - RNA, 32 nt, Homo Sapiens
ccugugcucccucugugcccagagccccacga

SEQ ID NO: 370053 - RNA, 32 nt, Homo Sapiens
aaugauauaacuccugugcaaugaaggugaua

SEQ ID NO: 370054 - RNA, 28 nt, Homo Sapiens
gagauggccuccccgccgcggugcuccc

SEQ ID NO: 370055 - RNA, 29 nt, Homo Sapiens
ccacccuuucuggugucuauaggaaugca

SEQ ID NO: 370056 - RNA, 32 nt, Homo Sapiens
aggguccccuggaagaggcccgagagggggcu

SEQ ID NO: 370057 - RNA, 32 nt, Homo Sapiens
guggaguacauaugcauagaaacggcuucugu

SEQ ID NO: 370058 - RNA, 32 nt, Homo Sapiens
cccagaggucccuggaggaagcuggaucuuga

SEQ ID NO: 370059 - RNA, 32 nt, Homo Sapiens
cgcaucaugcgcagggcccgggacgcugggcc

SEQ ID NO: 370060 - RNA, 32 nt, Homo Sapiens
auugucucuucauuuuaagacuuuuaauacaa

SEQ ID NO: 370061 - RNA, 30 nt, Homo Sapiens
guagcugaaaauaaaaugacgucacaagac

SEQ ID NO: 370062 - RNA, 32 nt, Homo Sapiens
cauucugcuccugcugcuggagacccuuggag

SEQ ID NO: 370063 - RNA, 31 nt, Homo Sapiens
auccggaaauaaaauagaaauaugucuuuuu

SEQ ID NO: 370064 - RNA, 32 nt, Homo Sapiens
gaacauccacuacaauagaacaucccacuaaa

SEQ ID NO: 370065 - RNA, 32 nt, Homo Sapiens
gaggagagaggaauccacaggaccaccagaag

SEQ ID NO: 370066 - RNA, 32 nt, Homo Sapiens
uacugaggccgcguccgacccccuugagccga

SEQ ID NO: 370067 - RNA, 32 nt, Homo Sapiens
cugggggaaaagacauaaaauaucaacaagaa

SEQ ID NO: 370068 - RNA, 32 nt, Homo Sapiens
aaguaagccagcugcuggauuuggcucugggc

SEQ ID NO: 370069 - RNA, 32 nt, Homo Sapiens
gcagacucacuuuuaaugcuuaucuuucaaag

SEQ ID NO: 370070 - RNA, 32 nt, Homo Sapiens
cacagacaacacaacuaaagaacugauaauau

SEQ ID NO: 370071 - RNA, 32 nt, Homo Sapiens
uugcuugaccccuggacccauaaaccagucca

SEQ ID NO: 370072 - RNA, 32 nt, Homo Sapiens
aaaagaaaaaauagacaugaaaaaacugcuuc

SEQ ID NO: 370073 - RNA, 32 nt, Homo Sapiens
cccaaaacagaacagacccccaucccugggcu

SEQ ID NO: 370074 - RNA, 32 nt, Homo Sapiens
aguguccccuccccucaggcucugccuuggcc

SEQ ID NO: 370075 - RNA, 32 nt, Homo Sapiens
gagcugccguuucuccuucaggggcuggcauu

SEQ ID NO: 370076 - RNA, 32 nt, Homo Sapiens
agcagagccaaggagcugcuucucucuucucc

SEQ ID NO: 370077 - RNA, 32 nt, Homo Sapiens
acaguggaauccauguaaaacucucugugcau

SEQ ID NO: 370078 - RNA, 32 nt, Homo Sapiens
gcagcagcagcagcaggugccugugacauacc

SEQ ID NO: 370079 - RNA, 32 nt, Homo Sapiens
cccuccccacccacaagggacacaggccuaac

SEQ ID NO: 370080 - RNA, 32 nt, Homo Sapiens
uuggaauauuuccaccauuauguaaauguuuu

SEQ ID NO: 370081 - RNA, 31 nt, Homo Sapiens
gcaaccaugcgugagugcaucuccauccacg

SEQ ID NO: 370082 - RNA, 32 nt, Homo Sapiens
uccaagagcaagauggauacacuuggauugaa

SEQ ID NO: 370083 - RNA, 32 nt, Homo Sapiens
cgcucagagggccagcagcugagcacacucga

SEQ ID NO: 370084 - RNA, 32 nt, Homo Sapiens
ggcagacaugcuggcccaccccggcggcccau

SEQ ID NO: 370085 - RNA, 32 nt, Homo Sapiens
agcugaggacagggcgggaggaggggcacaca

SEQ ID NO: 370086 - RNA, 32 nt, Homo Sapiens
gccucccaccucagacucauaagaagagagcu

SEQ ID NO: 370087 - RNA, 32 nt, Homo Sapiens
cggagggacccgcgccgcuguggugcggaagc

SEQ ID NO: 370088 - RNA, 32 nt, Homo Sapiens
gugcaguggccgccgccucuuccgccgccggg

SEQ ID NO: 370089 - RNA, 32 nt, Homo Sapiens
ggaagcuuucuggagacaaguuacauucucuu

SEQ ID NO: 370090 - RNA, 32 nt, Homo Sapiens
gagccaucaccuugauaaugggaugaauggaa

SEQ ID NO: 370091 - RNA, 32 nt, Homo Sapiens
cucaaagaaacaaacaaacaaacaaacaaaca

SEQ ID NO: 370092 - RNA, 32 nt, Homo Sapiens
cugcuuuaugaguagaaauugugagaaauauu

SEQ ID NO: 370093 - RNA, 32 nt, Homo Sapiens
caucagcaacugugucccauuaccuguggaaa

SEQ ID NO: 370094 - RNA, 32 nt, Homo Sapiens
gaacaacugucaaucuauuauauauuuguaca

SEQ ID NO: 370095 - RNA, 30 nt, Homo Sapiens
ccaucaugccggccguguccaagggcgaug

SEQ ID NO: 370096 - RNA, 32 nt, Homo Sapiens
uuuuucuuagauauuucuccuaauacaaugag

SEQ ID NO: 370097 - RNA, 32 nt, Homo Sapiens
uauacacaauaaaggacagucucacagaaaaa

SEQ ID NO: 370098 - RNA, 31 nt, Homo Sapiens
cagcagcugcgcagccucauggaguuuucca

SEQ ID NO: 370099 - RNA, 32 nt, Homo Sapiens
accuaccugcaccggguggcccgggcgggucg

SEQ ID NO: 370100 - RNA, 32 nt, Homo Sapiens
accagaaacaauuugcuuagauuaaaauucag

SEQ ID NO: 370101 - RNA, 32 nt, Homo Sapiens
ucagccugggcugggaggcagccccgggacac

SEQ ID NO: 370102 - RNA, 31 nt, Homo Sapiens
uugcgcugccggccacguccccgcgccgggc

SEQ ID NO: 370103 - RNA, 32 nt, Homo Sapiens
auccccccaucccccaucuaagaauccuaaga

SEQ ID NO: 370104 - RNA, 32 nt, Homo Sapiens
cagagacuacacagaaaacuacaagaugugug

SEQ ID NO: 370105 - RNA, 32 nt, Homo Sapiens
ggaaguucggccccaaacugcugcagcuguug

SEQ ID NO: 370106 - RNA, 30 nt, Homo Sapiens
gcggccggcgcgcuuagcgcccugaacaug

SEQ ID NO: 370107 - RNA, 32 nt, Homo Sapiens
aacccucuacauauugaaaggcaccaaaugua

SEQ ID NO: 370108 - RNA, 31 nt, Homo Sapiens
ggcccgguggaggcugcagugagacgagauc

SEQ ID NO: 370109 - RNA, 32 nt, Homo Sapiens
aucucaguuaguagcaaccuuuguuccgcagc

SEQ ID NO: 370110 - RNA, 32 nt, Homo Sapiens
uucugucuaccuggggaccccugucugcacac

SEQ ID NO: 370111 - RNA, 32 nt, Homo Sapiens
uucuuucucaaauguuuuuucuuuuauuuaaa

SEQ ID NO: 370112 - RNA, 32 nt, Homo Sapiens
gaaugcaaacacaugguaaagccuuaagaugu

SEQ ID NO: 370113 - RNA, 32 nt, Homo Sapiens
uguaacagaguacaaagaacauccuagaaauu

SEQ ID NO: 370114 - RNA, 32 nt, Homo Sapiens
cccucccgacucccuaauaaaccccgugaacc

SEQ ID NO: 370115 - RNA, 32 nt, Homo Sapiens
uauauuuuuuaaaaauaucuuuagcaguuugu

SEQ ID NO: 370116 - RNA, 32 nt, Homo Sapiens
uuaaacuggcuccaucggaagacguugaaggg

SEQ ID NO: 370117 - RNA, 32 nt, Homo Sapiens
ccaugccuccaagacucucugugccagcccgg

SEQ ID NO: 370118 - RNA, 32 nt, Homo Sapiens
uggaagcaggugaugcgcaaccauaguuucaa

SEQ ID NO: 370119 - RNA, 32 nt, Homo Sapiens
ugagggggccccagcccucguaccaccccugu

SEQ ID NO: 370120 - RNA, 32 nt, Homo Sapiens
ugugauacacugaaaggaaaaauguacuuaaa

SEQ ID NO: 370121 - RNA, 32 nt, Homo Sapiens
ggggugcggggacggagacaaaugacggccuu

SEQ ID NO: 370122 - RNA, 32 nt, Homo Sapiens
cugggggaauacgggcaacagcagucaggagg

SEQ ID NO: 370123 - RNA, 32 nt, Homo Sapiens
uacacacaggacuuggucugcuggccuggccu

SEQ ID NO: 370124 - RNA, 32 nt, Homo Sapiens
gagguuucaggaaugucuuuugaaaucagacc

SEQ ID NO: 370125 - RNA, 32 nt, Homo Sapiens
uuaaaggaagacuguguguagaaucuuacgua

SEQ ID NO: 370126 - RNA, 32 nt, Homo Sapiens
cccggccggcgacaaugaccacuucccugcaa

SEQ ID NO: 370127 - RNA, 32 nt, Homo Sapiens
auagagaugucuguguucuuggaguauuucac

SEQ ID NO: 370128 - RNA, 32 nt, Homo Sapiens
uuccgguuuguuaaucuuauucaccaaauguu

SEQ ID NO: 370129 - RNA, 32 nt, Homo Sapiens
caucccugcaugccguccguauacaaccccuc

SEQ ID NO: 370130 - RNA, 32 nt, Homo Sapiens
uuagauacaauuuuuuaacacuuuuauauacu

SEQ ID NO: 370131 - RNA, 32 nt, Homo Sapiens
uuuuuaaauaaucccaacuuuucuuuaaaaga

SEQ ID NO: 370132 - RNA, 32 nt, Homo Sapiens
uggcccagagaggagcucaugugucuaaagug

SEQ ID NO: 370133 - RNA, 32 nt, Homo Sapiens
ugguuuuaguguugcuugguuguuuaauuauu

SEQ ID NO: 370134 - RNA, 32 nt, Homo Sapiens
aagggaaauaaauguaauugccauuuuucaaa

SEQ ID NO: 370135 - RNA, 32 nt, Homo Sapiens
ugagccguggguggagccgcugggucagucuc

SEQ ID NO: 370136 - RNA, 32 nt, Homo Sapiens
cucuugucuuccccggccaguggcuuggaaau

SEQ ID NO: 370137 - RNA, 32 nt, Homo Sapiens
gaagaaggaagugauccacagcauucaggcca

SEQ ID NO: 370138 - RNA, 32 nt, Homo Sapiens
agggaccugcccgcggcccgccggcgugugca

SEQ ID NO: 370139 - RNA, 32 nt, Homo Sapiens
accuuccaagaacaacaaaaccauaucagugu

SEQ ID NO: 370140 - RNA, 32 nt, Homo Sapiens
ugaaugcauuuuccccucuccuccucccugcu

SEQ ID NO: 370141 - RNA, 32 nt, Homo Sapiens
gagcagggaagggaagcagaucuagggaggaa

SEQ ID NO: 370142 - RNA, 32 nt, Homo Sapiens
auagaggcauuuguaauauggagaaaauaauu

SEQ ID NO: 370143 - RNA, 30 nt, Homo Sapiens
uagucaugucggauucuggaaguuacgguc

SEQ ID NO: 370144 - RNA, 32 nt, Homo Sapiens
gacaaggaaauauuuaauuagguaaaacuaaa

SEQ ID NO: 370145 - RNA, 32 nt, Homo Sapiens
gcauuauuucucuuuuaauguaucauuucagu

SEQ ID NO: 370146 - RNA, 32 nt, Homo Sapiens
ucccauugcugauuuucuguauugauggacuc

SEQ ID NO: 370147 - RNA, 32 nt, Homo Sapiens
cagcuacuauaagauguacuaaggagauggaa

SEQ ID NO: 370148 - RNA, 32 nt, Homo Sapiens
cugguaguuaguagcauguugagccaggccug

SEQ ID NO: 370149 - RNA, 32 nt, Homo Sapiens
uuaucagaaauuauacuauauuuuauagaacc

SEQ ID NO: 370150 - RNA, 32 nt, Homo Sapiens
guuuucucgcucuagggagauucuucaagcaa

SEQ ID NO: 370151 - RNA, 32 nt, Homo Sapiens
uggugccguuuuccuuguaacaaggauuuauu

SEQ ID NO: 370152 - RNA, 32 nt, Homo Sapiens
ugaugaccagugccagccuuggaguugccagu

SEQ ID NO: 370153 - RNA, 29 nt, Homo Sapiens
acaacucggggacaaauggggacaggaag

SEQ ID NO: 370154 - RNA, 32 nt, Homo Sapiens
cuggcucauaaaauaauaauaauaauaaauaa

SEQ ID NO: 370155 - RNA, 32 nt, Homo Sapiens
ggucccaaacuccugaccucauguaauccacc

SEQ ID NO: 370156 - RNA, 32 nt, Homo Sapiens
aaaggacagauucauguuuuaaaauuaagaug

SEQ ID NO: 370157 - RNA, 30 nt, Homo Sapiens
ucccccggcuccaugccgccgccgcugccg

SEQ ID NO: 370158 - RNA, 32 nt, Homo Sapiens
uggcauacaaauaggauacuaucgccaguagu

SEQ ID NO: 370159 - RNA, 32 nt, Homo Sapiens
ugcucuguuccauuuuaacaacugcucuuacu

SEQ ID NO: 370160 - RNA, 32 nt, Homo Sapiens
cugacagcaugugccacaaaucucuaaauccc

SEQ ID NO: 370161 - RNA, 32 nt, Homo Sapiens
agcuccgagccgagccugggagcugaugaccc

SEQ ID NO: 370162 - RNA, 32 nt, Homo Sapiens
aagaaauggcuaugaacagaaacuacauuucu

SEQ ID NO: 370163 - RNA, 32 nt, Homo Sapiens
uuggagggcaccaaagagcugguucugaugaa

SEQ ID NO: 370164 - RNA, 32 nt, Homo Sapiens
aguuauuuuacaguuccagggauugugaaaua

SEQ ID NO: 370165 - RNA, 32 nt, Homo Sapiens
ggccagucuuagcauguuuucuuaaugucaca

SEQ ID NO: 370166 - RNA, 32 nt, Homo Sapiens
ccuauuguuaaagauuugcaugugaagaucuu

SEQ ID NO: 370167 - RNA, 32 nt, Homo Sapiens
ccacuuuuuguaauacuuuuguaaucuauucc

SEQ ID NO: 370168 - RNA, 32 nt, Homo Sapiens
aaacacauguggucuuuuuccuugcuuugcac

SEQ ID NO: 370169 - RNA, 32 nt, Homo Sapiens
guagguccagaaaacuaauuauuggcaucagu

SEQ ID NO: 370170 - RNA, 32 nt, Homo Sapiens
ccagguucgcuggccgcacgucuucagguccu

SEQ ID NO: 370171 - RNA, 32 nt, Homo Sapiens
ugcuugagacagacuucuuuuauguaguucuu

SEQ ID NO: 370172 - RNA, 32 nt, Homo Sapiens
ucauaauaugaagagaaagaaaaggaaaaaca

SEQ ID NO: 370173 - RNA, 32 nt, Homo Sapiens
guguccuagagcucagcgucugcagucaaguc

SEQ ID NO: 370174 - RNA, 32 nt, Homo Sapiens
gggccucccgcacagucggccacgcccgcugc

SEQ ID NO: 370175 - RNA, 32 nt, Homo Sapiens
ugucauaaacagaugaauaaacugaauuugua

SEQ ID NO: 370176 - RNA, 32 nt, Homo Sapiens
gccaacagccccagcugugacccccaggcuuc

SEQ ID NO: 370177 - RNA, 32 nt, Homo Sapiens
ggaacacucagacauucugugcauguuguucc

SEQ ID NO: 370178 - RNA, 32 nt, Homo Sapiens
ccuccgucugcacacaguguucgucugcacag

SEQ ID NO: 370179 - RNA, 32 nt, Homo Sapiens
acagccaugcuucaaggccggggcaggggagc

SEQ ID NO: 370180 - RNA, 32 nt, Homo Sapiens
uccuccuucccuccccuccccguccacagggc

SEQ ID NO: 370181 - RNA, 32 nt, Homo Sapiens
ggauuaagugagccagucaugcaugggccgag

SEQ ID NO: 370182 - RNA, 32 nt, Homo Sapiens
ucuuucuagauauuaggccuuugaauaaaauu

SEQ ID NO: 370183 - RNA, 32 nt, Homo Sapiens
ggaaggaauggaggagucucaacauguguuuc

SEQ ID NO: 370184 - RNA, 29 nt, Homo Sapiens
ggcaauggggcagacuccauggaaagaug

SEQ ID NO: 370185 - RNA, 32 nt, Homo Sapiens
cuggggcucgaggucucuccuccggagggaaa

SEQ ID NO: 370186 - RNA, 32 nt, Homo Sapiens
cugccugacaccugggacaggcugggcagagg

SEQ ID NO: 370187 - RNA, 32 nt, Homo Sapiens
aggcaaaguuugcagaacugucuuaaggacau

SEQ ID NO: 370188 - RNA, 32 nt, Homo Sapiens
gcucccccaggggcuccugggggccccgcuug

SEQ ID NO: 370189 - RNA, 32 nt, Homo Sapiens
aggccacauuuguuuuuuaacaguaacguggc

SEQ ID NO: 370190 - RNA, 32 nt, Homo Sapiens
cgucuuccuuauuaaccuugaauccucauuaa

SEQ ID NO: 370191 - RNA, 32 nt, Homo Sapiens
uuucuucugaagauucuuaaaaauugaaugug

SEQ ID NO: 370192 - RNA, 32 nt, Homo Sapiens
accuuagacaaggaaaguuugaagucaccauc

SEQ ID NO: 370193 - RNA, 32 nt, Homo Sapiens
aauuacuugcaaacaaauaaacaauuaacucc

SEQ ID NO: 370194 - RNA, 32 nt, Homo Sapiens
uuuuuaugaaauauuucuuuuaaaagccccag

SEQ ID NO: 370195 - RNA, 32 nt, Homo Sapiens
ugggagaggagcuuuggaaccagcuggcgacu

SEQ ID NO: 370196 - RNA, 32 nt, Homo Sapiens
gcagcuacccucagccuccaaugcauuggccu

SEQ ID NO: 370197 - RNA, 32 nt, Homo Sapiens
caagaaaaagauauuucuuuaucauagagguc

SEQ ID NO: 370198 - RNA, 32 nt, Homo Sapiens
ggaggcuaaaacacggggguccugagacugag

SEQ ID NO: 370199 - RNA, 32 nt, Homo Sapiens
ucaaaaaguauuaaaacuaaaaaggaccagag

SEQ ID NO: 370200 - RNA, 32 nt, Homo Sapiens
ggccuccccuccccgcaggaagccccgcccuc

SEQ ID NO: 370201 - RNA, 32 nt, Homo Sapiens
cccugccccguccccugggccacccuucacgc

SEQ ID NO: 370202 - RNA, 32 nt, Homo Sapiens
cuauuccagaaucaaugcugcagaauguguua

SEQ ID NO: 370203 - RNA, 32 nt, Homo Sapiens
uuuccccggggucuuuugcccaggagaaguuu

SEQ ID NO: 370204 - RNA, 32 nt, Homo Sapiens
ccaaguuccuuuuuccucuuuuccaauccuag

SEQ ID NO: 370205 - RNA, 32 nt, Homo Sapiens
uugguggcggugguacuggaaaaacuacuuug

SEQ ID NO: 370206 - RNA, 32 nt, Homo Sapiens
cccagggccucuuuccucucuuugagauugcc

SEQ ID NO: 370207 - RNA, 32 nt, Homo Sapiens
cgcagcugggguggcagcggcgcaggaggggu

SEQ ID NO: 370208 - RNA, 32 nt, Homo Sapiens
ccaugaguguugugacugauggucaacccagg

SEQ ID NO: 370209 - RNA, 32 nt, Homo Sapiens
uucugccggcguggaccugaugagagucgguc

SEQ ID NO: 370210 - RNA, 32 nt, Homo Sapiens
guugagucgcuggugcccaccgagggcccagg

SEQ ID NO: 370211 - RNA, 32 nt, Homo Sapiens
acuagcauacguuuuucuuaguuguuaucagc

SEQ ID NO: 370212 - RNA, 32 nt, Homo Sapiens
ucagauuguaaaaaacaaaaacaaagaaacua

SEQ ID NO: 370213 - RNA, 32 nt, Homo Sapiens
uucuaagcggcgacgcgcgggugcugggaggc

SEQ ID NO: 370214 - RNA, 32 nt, Homo Sapiens
cuccccaugccagcuguggcuccgaggaaaau

SEQ ID NO: 370215 - RNA, 32 nt, Homo Sapiens
ugggacuucucucccucccccaucuacacaga

SEQ ID NO: 370216 - RNA, 32 nt, Homo Sapiens
cccucucagcugcccacagaguuccaccugcu

SEQ ID NO: 370217 - RNA, 32 nt, Homo Sapiens
cgcaggccgccgugcacccgggacgcuucccc

SEQ ID NO: 370218 - RNA, 32 nt, Homo Sapiens
uccucggccuggggcucuggccaaggaugggc

SEQ ID NO: 370219 - RNA, 32 nt, Homo Sapiens
ccccaggggaggaggaccaggucaagggacgu

SEQ ID NO: 370220 - RNA, 32 nt, Homo Sapiens
cccugcuuucccuaaggacuuccacuuuguuc

SEQ ID NO: 370221 - RNA, 32 nt, Homo Sapiens
aggggcugcuccagugggcagggguagcuagc

SEQ ID NO: 370222 - RNA, 32 nt, Homo Sapiens
ucccccuccuucccagcugccccucccugcca

SEQ ID NO: 370223 - RNA, 32 nt, Homo Sapiens
auucacugccuugccacuccaucucccuccgu

SEQ ID NO: 370224 - RNA, 32 nt, Homo Sapiens
augaacagucuggccaagaggauccuugaugu

SEQ ID NO: 370225 - RNA, 32 nt, Homo Sapiens
ugacagcauauccugaugugugugaugguuuu

SEQ ID NO: 370226 - RNA, 32 nt, Homo Sapiens
uuuuuaccuugauguagaaucaugguggaaaa

SEQ ID NO: 370227 - RNA, 32 nt, Homo Sapiens
aaaaaaaugcaaaaaauccaugaugaauaaaa

SEQ ID NO: 370228 - RNA, 32 nt, Homo Sapiens
acaaacagacaaaaaauaaaacaaaacuugag

SEQ ID NO: 370229 - RNA, 32 nt, Homo Sapiens
aagcggaaagcagucagcggagaggaccccau

SEQ ID NO: 370230 - RNA, 32 nt, Homo Sapiens
cugugacuaauauaaauuucuugcagaaucag

SEQ ID NO: 370231 - RNA, 32 nt, Homo Sapiens
ccuuugccuugcagcacuccaaguaagggucc

SEQ ID NO: 370232 - RNA, 32 nt, Homo Sapiens
ucucucggaggggggaagggcuggggcagugg

SEQ ID NO: 370233 - RNA, 32 nt, Homo Sapiens
aguuugccaaccccaacaauugugugaauuaa

SEQ ID NO: 370234 - RNA, 32 nt, Homo Sapiens
uauaaguauguacauacaguuucacuucaaaa

SEQ ID NO: 370235 - RNA, 32 nt, Homo Sapiens
gugcuuuaaaaauuauuguccauucgauuaca

SEQ ID NO: 370236 - RNA, 32 nt, Homo Sapiens
ugcucggcgccugcagcuccggcucgggggcu

SEQ ID NO: 370237 - RNA, 32 nt, Homo Sapiens
cagagagaagugugcauguacacacaccacac

SEQ ID NO: 370238 - RNA, 32 nt, Homo Sapiens
uucaucuuagggcaucgcucuuccucacacca

SEQ ID NO: 370239 - RNA, 32 nt, Homo Sapiens
gccugggccagggcccacggacccgcagcuca

SEQ ID NO: 370240 - RNA, 32 nt, Homo Sapiens
ucuugugcuucuuuguagcaggguaaaucguc

SEQ ID NO: 370241 - RNA, 32 nt, Homo Sapiens
ccucaauuccaucaaaaacuaaagggaugugg

SEQ ID NO: 370242 - RNA, 32 nt, Homo Sapiens
gaggcccuggccggcccucccccugcucugcu

SEQ ID NO: 370243 - RNA, 32 nt, Homo Sapiens
uguaccuguuaaguauguauuagcucaaacag

SEQ ID NO: 370244 - RNA, 32 nt, Homo Sapiens
uccaauuucauccugaauuccaaaaaauucuc

SEQ ID NO: 370245 - RNA, 32 nt, Homo Sapiens
ugaugucugcugugggugcgguggugaggagu

SEQ ID NO: 370246 - RNA, 32 nt, Homo Sapiens
ggcuguaagcuuaccuuaauuaaacuuucagu

SEQ ID NO: 370247 - RNA, 32 nt, Homo Sapiens
cggggcuguagggagggcagggggaggagagu

SEQ ID NO: 370248 - RNA, 32 nt, Homo Sapiens
gaguggccauggugcugcugcugcugguggcc

SEQ ID NO: 370249 - RNA, 32 nt, Homo Sapiens
cugauuuagccagguggcaaucaugagugaau

SEQ ID NO: 370250 - RNA, 32 nt, Homo Sapiens
ggaucaaauuccugacuuacauuugcacuggc

SEQ ID NO: 370251 - RNA, 32 nt, Homo Sapiens
uccuccucguguagcagcuugagaagaggcuu

SEQ ID NO: 370252 - RNA, 32 nt, Homo Sapiens
ucuauucuuuuuuuuucuuuuuucuuuuuuuu

SEQ ID NO: 370253 - RNA, 32 nt, Homo Sapiens
acagaaggaagacauguacgugcuguucuacu

SEQ ID NO: 370254 - RNA, 32 nt, Homo Sapiens
acugccuuaggguuuuaaaaccuucccuacag

SEQ ID NO: 370255 - RNA, 32 nt, Homo Sapiens
aacugccaguuauagauaaauaugaugccagg

SEQ ID NO: 370256 - RNA, 32 nt, Homo Sapiens
ccagagcccgucuguuccccuucggguccaaa

SEQ ID NO: 370257 - RNA, 32 nt, Homo Sapiens
ugacuaaauaaauguauagacacacauuacuu

SEQ ID NO: 370258 - RNA, 32 nt, Homo Sapiens
uuucuuccaaggaaacaggagagacugaauua

SEQ ID NO: 370259 - RNA, 32 nt, Homo Sapiens
uuugaaacuauuuuuucuucuuuuauuuuuga

SEQ ID NO: 370260 - RNA, 32 nt, Homo Sapiens
gaggacgcacccucacuccccugcugccuuca

SEQ ID NO: 370261 - RNA, 32 nt, Homo Sapiens
uagcaccccacuuuccacauaguguucgauaa

SEQ ID NO: 370262 - RNA, 32 nt, Homo Sapiens
ccccucugggagaggggaggggccggcuuuug

SEQ ID NO: 370263 - RNA, 32 nt, Homo Sapiens
auugccaugaacuggagcacugggccaauaua

SEQ ID NO: 370264 - RNA, 32 nt, Homo Sapiens
agccaccucccucucccucuucaggucucacu

SEQ ID NO: 370265 - RNA, 32 nt, Homo Sapiens
cagcgcaggaccaccgcgugugcuccggcucc

SEQ ID NO: 370266 - RNA, 32 nt, Homo Sapiens
cgccgggcgggugagagaaagcccgggcagga

SEQ ID NO: 370267 - RNA, 32 nt, Homo Sapiens
gcugcuuuucuuuuucuacacgaaguuuucau

SEQ ID NO: 370268 - RNA, 32 nt, Homo Sapiens
agcccuuggggauccagcugagagcaaucucu

SEQ ID NO: 370269 - RNA, 32 nt, Homo Sapiens
uccuugagaaaguuguggaaagcccuccucag

SEQ ID NO: 370270 - RNA, 32 nt, Homo Sapiens
ggaacccucuguccuggcuuugaaagagaaac

SEQ ID NO: 370271 - RNA, 32 nt, Homo Sapiens
cgcuagagccgccuucccggugggagcccucu

SEQ ID NO: 370272 - RNA, 32 nt, Homo Sapiens
auaucaggaggggaagaggccuuucuagaauu

SEQ ID NO: 370273 - RNA, 32 nt, Homo Sapiens
aagugccuuuugcugcgcaccaaugcccagca

SEQ ID NO: 370274 - RNA, 32 nt, Homo Sapiens
aaaagcguggauuguggaaaauacagaaaaac

SEQ ID NO: 370275 - RNA, 32 nt, Homo Sapiens
aauauauaauuuaaguacaaguuuaggcuggg

SEQ ID NO: 370276 - RNA, 32 nt, Homo Sapiens
cccucauuagauuuuuuuuucuuaagcauaag

SEQ ID NO: 370277 - RNA, 32 nt, Homo Sapiens
gaagagaaagaguauauuccaaugcaucccug

SEQ ID NO: 370278 - RNA, 32 nt, Homo Sapiens
aggcugccugcgcgcgguucgcuccgggggag

SEQ ID NO: 370279 - RNA, 32 nt, Homo Sapiens
cuccagggggcuucgaagccuccggcgcccug

SEQ ID NO: 370280 - RNA, 31 nt, Homo Sapiens
ugaugggagccccccaggaggggucagaugc

SEQ ID NO: 370281 - RNA, 32 nt, Homo Sapiens
gagauauuuagaauauuugacaaugguuugag

SEQ ID NO: 370282 - RNA, 32 nt, Homo Sapiens
ccccgccaaccccccgcccccgggguuuccag

SEQ ID NO: 370283 - RNA, 32 nt, Homo Sapiens
uacauuaaacucccuuucauguuaaucaaaca

SEQ ID NO: 370284 - RNA, 32 nt, Homo Sapiens
ggcagcagggccgacgaugucaccuggugccu

SEQ ID NO: 370285 - RNA, 32 nt, Homo Sapiens
ggccaggcuucugcccucugcagcugggaccc

SEQ ID NO: 370286 - RNA, 32 nt, Homo Sapiens
cuaaaagaguaaggcaugucccugcccagaaa

SEQ ID NO: 370287 - RNA, 30 nt, Homo Sapiens
gcgucccccaccgugccgcugcagcucggg

SEQ ID NO: 370288 - RNA, 32 nt, Homo Sapiens
ggauggccaggggagggggucuguggaagauu

SEQ ID NO: 370289 - RNA, 32 nt, Homo Sapiens
cccgacugaggcugcgcaagccccggggucug

SEQ ID NO: 370290 - RNA, 32 nt, Homo Sapiens
uggcgaagcuggugcugugagugauguuuccc

SEQ ID NO: 370291 - RNA, 32 nt, Homo Sapiens
ggucaaaguuucucuuuaaaauuuauuuugag

SEQ ID NO: 370292 - RNA, 32 nt, Homo Sapiens
gcucaguaaacacuuaaggaaguugccgugca

SEQ ID NO: 370293 - RNA, 32 nt, Homo Sapiens
ggugucaccauguuggccaggcuggucucaaa

SEQ ID NO: 370294 - RNA, 32 nt, Homo Sapiens
agacauggcaaaacaauaauggcuguuugcuu

SEQ ID NO: 370295 - RNA, 32 nt, Homo Sapiens
cacgagggacgugugccagagcccccucccuc

SEQ ID NO: 370296 - RNA, 32 nt, Homo Sapiens
caguguuggccaugaugacaacuacagaaaaa

SEQ ID NO: 370297 - RNA, 32 nt, Homo Sapiens
uccuucccucccuuccucucccaccaugcgau

SEQ ID NO: 370298 - RNA, 32 nt, Homo Sapiens
guccagagggucagaugcugcugugagaggca

SEQ ID NO: 370299 - RNA, 32 nt, Homo Sapiens
ccuccauggcacagcccuccugcugccaggac

SEQ ID NO: 370300 - RNA, 32 nt, Homo Sapiens
aggugaucgguguggcggcggcggcggcggcg

SEQ ID NO: 370301 - RNA, 32 nt, Homo Sapiens
aaaaagcagagccugcucuacuggccaucaug

SEQ ID NO: 370302 - RNA, 32 nt, Homo Sapiens
aacaucccauauaaaugaaacugucaugcugu

SEQ ID NO: 370303 - RNA, 32 nt, Homo Sapiens
gucuagcucccucccuucuucccagcccuuug

SEQ ID NO: 370304 - RNA, 32 nt, Homo Sapiens
ccuguugcugucagccuugguucuaguuuaua

SEQ ID NO: 370305 - RNA, 32 nt, Homo Sapiens
uuguuaaaugucaguuuauccaucuuauccuu

SEQ ID NO: 370306 - RNA, 32 nt, Homo Sapiens
cgcuguuuccuccucccuccucuucccaauac

SEQ ID NO: 370307 - RNA, 32 nt, Homo Sapiens
ucucgcacucagucagagagcccugcacugga

SEQ ID NO: 370308 - RNA, 32 nt, Homo Sapiens
aaggcugcuguaaaguugaggggagaggaaau

SEQ ID NO: 370309 - RNA, 32 nt, Homo Sapiens
uuccccaccuggcgcgcaccugcucaagacca

SEQ ID NO: 370310 - RNA, 32 nt, Homo Sapiens
gcuugugccugccugugcagagggagaggccc

SEQ ID NO: 370311 - RNA, 32 nt, Homo Sapiens
cggcgcucggcgggcgcgcccuccugaaggaa

SEQ ID NO: 370312 - RNA, 32 nt, Homo Sapiens
gccauccugguggccugggagcgugaggagag

SEQ ID NO: 370313 - RNA, 32 nt, Homo Sapiens
gcccccagcuccgccccugcuccccaucccgg

SEQ ID NO: 370314 - RNA, 32 nt, Homo Sapiens
aaaauggggaggucuuuuuuuucuccuuucuu

SEQ ID NO: 370315 - RNA, 32 nt, Homo Sapiens
ggaacaaucaguaaaucagauucuguccucuu

SEQ ID NO: 370316 - RNA, 32 nt, Homo Sapiens
acauucaagaacuccagucuguuucuguggau

SEQ ID NO: 370317 - RNA, 32 nt, Homo Sapiens
caguacuaaaauuaaugcagauuucucuuuag

SEQ ID NO: 370318 - RNA, 32 nt, Homo Sapiens
uaaucgcuuugauaauacuuccaaauuuuaug

SEQ ID NO: 370319 - RNA, 32 nt, Homo Sapiens
caaccgucccgcaacuguccugucccagacuu

SEQ ID NO: 370320 - RNA, 32 nt, Homo Sapiens
uguuuauugaaccucuuuauuaaaccucuaac

SEQ ID NO: 370321 - RNA, 31 nt, Homo Sapiens
ggcucacagcguguccugccccgguuugcgg

SEQ ID NO: 370322 - RNA, 32 nt, Homo Sapiens
auguucauuuccaaauuuuguaucauaagagu

SEQ ID NO: 370323 - RNA, 32 nt, Homo Sapiens
uguccuauaacaaagcagcaucaagucccaag

SEQ ID NO: 370324 - RNA, 32 nt, Homo Sapiens
guccguuccccgucucggagcucacacagaga

SEQ ID NO: 370325 - RNA, 32 nt, Homo Sapiens
gcagcuggcaccagcccucccggccccggccg

SEQ ID NO: 370326 - RNA, 32 nt, Homo Sapiens
gcacuggcauuugaacagggugagacagucca

SEQ ID NO: 370327 - RNA, 32 nt, Homo Sapiens
ucugcuccuggcauggcgcugcggcaccucgc

SEQ ID NO: 370328 - RNA, 32 nt, Homo Sapiens
acuugcccacugacagucaauaucugucaccu

SEQ ID NO: 370329 - RNA, 32 nt, Homo Sapiens
aguaauaggaccagagcgguaucucuggcacc

SEQ ID NO: 370330 - RNA, 32 nt, Homo Sapiens
aaaucaggauaaaaacagacaucaguggaauc

SEQ ID NO: 370331 - RNA, 31 nt, Homo Sapiens
gagaaaaugacugcugguucagugugugucc

SEQ ID NO: 370332 - RNA, 32 nt, Homo Sapiens
ugcuccgcuuccccauaccccagcccgaggug

SEQ ID NO: 370333 - RNA, 32 nt, Homo Sapiens
ggcccccaacgcaauguguguuugucaaacca

SEQ ID NO: 370334 - RNA, 32 nt, Homo Sapiens
caugcuucagaauucagaggguucagggaaug

SEQ ID NO: 370335 - RNA, 32 nt, Homo Sapiens
acauaaccaugcuggugauuggcaccgucaua

SEQ ID NO: 370336 - RNA, 32 nt, Homo Sapiens
aaaguguucaauuuguauuuaagcaaacagug

SEQ ID NO: 370337 - RNA, 32 nt, Homo Sapiens
aacuguauaaagacauacuaaagggaacagau

SEQ ID NO: 370338 - RNA, 32 nt, Homo Sapiens
uuuguuucuaguuugggguaacuacacacaau

SEQ ID NO: 370339 - RNA, 32 nt, Homo Sapiens
agacguuacgcgggcucgagcguccucgggga

SEQ ID NO: 370340 - RNA, 32 nt, Homo Sapiens
gaccgagucuucuuuuuuuuuaaacaaaaaca

SEQ ID NO: 370341 - RNA, 32 nt, Homo Sapiens
gccauccugccagccgugggaauggcugggcu

SEQ ID NO: 370342 - RNA, 32 nt, Homo Sapiens
agaagauguauuaugcauauguuuaaguuaau

SEQ ID NO: 370343 - RNA, 32 nt, Homo Sapiens
aggcccacacccagcccuucugccucccaauu

SEQ ID NO: 370344 - RNA, 32 nt, Homo Sapiens
gguuucaucauguuggccaggcuggucucgaa

SEQ ID NO: 370345 - RNA, 32 nt, Homo Sapiens
acuaugucaaggaacuuagaacauuacugagc

SEQ ID NO: 370346 - RNA, 30 nt, Homo Sapiens
gaauggcccgggcgcgcgcggucguguggg

SEQ ID NO: 370347 - RNA, 32 nt, Homo Sapiens
caguugcucaggugcuucgguaucacagccaa

SEQ ID NO: 370348 - RNA, 30 nt, Homo Sapiens
cauggcgggccccgcgcggggauccggcug

SEQ ID NO: 370349 - RNA, 29 nt, Homo Sapiens
ccaggcccgguccgguuccagccucugcc

SEQ ID NO: 370350 - RNA, 31 nt, Homo Sapiens
aagccgcacgugagaaagucugggcaucugg

SEQ ID NO: 370351 - RNA, 32 nt, Homo Sapiens
ucaacauagagaaaagcugaaaaaaugcaaag

SEQ ID NO: 370352 - RNA, 32 nt, Homo Sapiens
ugccaagaaaggaaacaaaugaacuaaggcgc

SEQ ID NO: 370353 - RNA, 32 nt, Homo Sapiens
uugccacuacccaaaaacaaugugagaugugu

SEQ ID NO: 370354 - RNA, 32 nt, Homo Sapiens
ugaguugaacaaaaggaaaacucuagucuucc

SEQ ID NO: 370355 - RNA, 32 nt, Homo Sapiens
ccuaucgguucuccuccaccuggacaggauga

SEQ ID NO: 370356 - RNA, 32 nt, Homo Sapiens
uuuauggauguaauuuuacaaaacacucuugg

SEQ ID NO: 370357 - RNA, 32 nt, Homo Sapiens
guuccucggcauugcgggccuggugggcagaa

SEQ ID NO: 370358 - RNA, 32 nt, Homo Sapiens
uugcugacuuuuuguuuuuuuauauauuuaua

SEQ ID NO: 370359 - RNA, 32 nt, Homo Sapiens
gcgggucgaacacguuuauuuauuuuuuauuu

SEQ ID NO: 370360 - RNA, 32 nt, Homo Sapiens
caccuguaauuccagcacuuugugaggcugag

SEQ ID NO: 370361 - RNA, 30 nt, Homo Sapiens
guggcuucuugugcugcagaagcucguuga

SEQ ID NO: 370362 - RNA, 32 nt, Homo Sapiens
ggucuugcucuaccacccaggcuggagugcag

SEQ ID NO: 370363 - RNA, 32 nt, Homo Sapiens
agccuuaucucagaccugcuuaccugcaugau

SEQ ID NO: 370364 - RNA, 32 nt, Homo Sapiens
agaggaggccaugggcgcgcgcggggcgcugc

SEQ ID NO: 370365 - RNA, 32 nt, Homo Sapiens
acacguucggguuuugguuuuguuucguucac

SEQ ID NO: 370366 - RNA, 32 nt, Homo Sapiens
uagaaauguuucuguucauauuacuuuuuccu

SEQ ID NO: 370367 - RNA, 30 nt, Homo Sapiens
ucgucucccagcggcggcgggaggcgcguc

SEQ ID NO: 370368 - RNA, 32 nt, Homo Sapiens
gaagaaugucuucgaauauuguguggaguccc

SEQ ID NO: 370369 - RNA, 32 nt, Homo Sapiens
aagcugcgggacgaguucuguucuggccggag

SEQ ID NO: 370370 - RNA, 32 nt, Homo Sapiens
gggcaacaugauauuuggguagcugaugucau

SEQ ID NO: 370371 - RNA, 32 nt, Homo Sapiens
cagcggcggaggaggagugaaggcggcggcgg

SEQ ID NO: 370372 - RNA, 28 nt, Homo Sapiens
uguaugaaugaaaaaaugcauuaugaaa

SEQ ID NO: 370373 - RNA, 32 nt, Homo Sapiens
acccaggaggagugggcuuugcuggguccuuc

SEQ ID NO: 370374 - RNA, 32 nt, Homo Sapiens
guaaauugugauaggaacuuuggaccuugaac

SEQ ID NO: 370375 - RNA, 32 nt, Homo Sapiens
ccccgcaccgaaacgcggucuuucucuagacg

SEQ ID NO: 370376 - RNA, 32 nt, Homo Sapiens
aaaaauuaguaacugcagaaaucagaauauuc

SEQ ID NO: 370377 - RNA, 32 nt, Homo Sapiens
cauuauugagggucauucuuuauucuuuacua

SEQ ID NO: 370378 - RNA, 32 nt, Homo Sapiens
aauuuauuuucuucuuuuuuuaacaaguggaa

SEQ ID NO: 370379 - RNA, 32 nt, Homo Sapiens
gacauggacccaggccgaccccggccgccgcg

SEQ ID NO: 370380 - RNA, 32 nt, Homo Sapiens
agacaucugggucagagaaaaaguauuuaagg

SEQ ID NO: 370381 - RNA, 32 nt, Homo Sapiens
ucuacuaaaaauacaaaagaaaauuagccggg

SEQ ID NO: 370382 - RNA, 32 nt, Homo Sapiens
ccccauccucgucgucgcccggcacagcgcga

SEQ ID NO: 370383 - RNA, 32 nt, Homo Sapiens
cccuccccacccaggacugagaggcuggagac

SEQ ID NO: 370384 - RNA, 32 nt, Homo Sapiens
gcagggccucgcguaaggaacugcuggaaccc

SEQ ID NO: 370385 - RNA, 32 nt, Homo Sapiens
cuuuugcaguugcaaacuguggcuggugagug

SEQ ID NO: 370386 - RNA, 32 nt, Homo Sapiens
gcucccugugaaugaaacuuugacuguagaga

SEQ ID NO: 370387 - RNA, 32 nt, Homo Sapiens
auuuaugaaaaauuauuaacaaugaaaaauug

SEQ ID NO: 370388 - RNA, 32 nt, Homo Sapiens
gccaaggcgagugccgcgcgggccaccauggc

SEQ ID NO: 370389 - RNA, 32 nt, Homo Sapiens
cucuuuggaaacuguuauccuuccaucaugac

SEQ ID NO: 370390 - RNA, 31 nt, Homo Sapiens
cauaguggguucccuuggucagcaacagugc

SEQ ID NO: 370391 - RNA, 32 nt, Homo Sapiens
gcugccuucagcggccgugacggggccagcug

SEQ ID NO: 370392 - RNA, 32 nt, Homo Sapiens
cauuccuccccucccccuagccaugaaaggaa

SEQ ID NO: 370393 - RNA, 32 nt, Homo Sapiens
uugacaaaauaaauuuacugaacuugggcuaa

SEQ ID NO: 370394 - RNA, 32 nt, Homo Sapiens
uuccccaaaaccucuguaaaggguacgagagg

SEQ ID NO: 370395 - RNA, 32 nt, Homo Sapiens
uuuuauauaugcaggaaagaauagaagugauu

SEQ ID NO: 370396 - RNA, 32 nt, Homo Sapiens
aucuggcccacccaccugcagagugcggaggg

SEQ ID NO: 370397 - RNA, 32 nt, Homo Sapiens
aaacaacugugccuucuuuucuuucuuucuuu

SEQ ID NO: 370398 - RNA, 32 nt, Homo Sapiens
ggaaauauuguuaauaaaggucuucugucccu

SEQ ID NO: 370399 - RNA, 32 nt, Homo Sapiens
caggcagggccaagccuuggccccacuggagg

SEQ ID NO: 370400 - RNA, 32 nt, Homo Sapiens
uguaggcccccucccuggaggggaagagggca

SEQ ID NO: 370401 - RNA, 32 nt, Homo Sapiens
aaauauaauuuucugcuugcauuuauggacuc

SEQ ID NO: 370402 - RNA, 32 nt, Homo Sapiens
cuugucccuccuggccuccccggaggcacagc

SEQ ID NO: 370403 - RNA, 32 nt, Homo Sapiens
uaaugucaaagucugguaacauuuguuaguag

SEQ ID NO: 370404 - RNA, 32 nt, Homo Sapiens
auuuucuguauauaaauauaucuuuaaugugg

SEQ ID NO: 370405 - RNA, 32 nt, Homo Sapiens
ucuacaggaugaacaugcaaacaaagacuggc

SEQ ID NO: 370406 - RNA, 31 nt, Homo Sapiens
ucgggagagccccaggagaggccagcgccgc

SEQ ID NO: 370407 - RNA, 32 nt, Homo Sapiens
uuucucacaauuucucuaaucuuuacucaugu

SEQ ID NO: 370408 - RNA, 32 nt, Homo Sapiens
ugguggcgcaugccuauagucucagccuccag

SEQ ID NO: 370409 - RNA, 32 nt, Homo Sapiens
uuaaucaaaacuacccgcccccgccccgcccc

SEQ ID NO: 370410 - RNA, 32 nt, Homo Sapiens
ugugcggagcagccuuuaucaagagacuccug

SEQ ID NO: 370411 - RNA, 32 nt, Homo Sapiens
uuccccuuggacuuuagaacgauuuaggguug

SEQ ID NO: 370412 - RNA, 32 nt, Homo Sapiens
ccagagcuuggaaagaggcagcucugagauuu

SEQ ID NO: 370413 - RNA, 32 nt, Homo Sapiens
cuggagguagagacggacugcgcagguuaacu

SEQ ID NO: 370414 - RNA, 32 nt, Homo Sapiens
agcuugcugacuccuggaaacuucugguuuuu

SEQ ID NO: 370415 - RNA, 32 nt, Homo Sapiens
gucagagucaacaagaugaggucccugaggau

SEQ ID NO: 370416 - RNA, 32 nt, Homo Sapiens
uguucuaagcagccucuuuguuccagaagcug

SEQ ID NO: 370417 - RNA, 32 nt, Homo Sapiens
uccauuuaauaaauuuucuaaauuaaaaacug

SEQ ID NO: 370418 - RNA, 32 nt, Homo Sapiens
uucuucuccucuaucucauaaugcauuauggg

SEQ ID NO: 370419 - RNA, 32 nt, Homo Sapiens
ccugucuucuugagacucguugagaucuuugu

SEQ ID NO: 370420 - RNA, 32 nt, Homo Sapiens
gccuuaaacaaaugaggccguuucuggaagga

SEQ ID NO: 370421 - RNA, 32 nt, Homo Sapiens
aacagcuugugguuuucuuauuacucauuuuc

SEQ ID NO: 370422 - RNA, 32 nt, Homo Sapiens
cuacagcccagcugacucuguggcguuaagaa

SEQ ID NO: 370423 - RNA, 32 nt, Homo Sapiens
uauucauucuaaaaagaaauuuucuuacauug

SEQ ID NO: 370424 - RNA, 32 nt, Homo Sapiens
ccacccugcccccacccucacccacgcuucug

SEQ ID NO: 370425 - RNA, 32 nt, Homo Sapiens
uuuauugaauauuuauacuauaaaaugcagua

SEQ ID NO: 370426 - RNA, 29 nt, Homo Sapiens
gaauuuuuauguaugguacgaagugggac

SEQ ID NO: 370427 - RNA, 32 nt, Homo Sapiens
uuuaugcugaguuuuaaaaaugaaauacuuua

SEQ ID NO: 370428 - RNA, 32 nt, Homo Sapiens
ggggacuuuaucgaugaccgguuuuguggcau

SEQ ID NO: 370429 - RNA, 32 nt, Homo Sapiens
gacugaugcagaguacugauggucauccaguc

SEQ ID NO: 370430 - RNA, 31 nt, Homo Sapiens
gcggcgcagcgcagcuccugagguuuugguu

SEQ ID NO: 370431 - RNA, 32 nt, Homo Sapiens
ucuagggaacuccuucuucgccugcuggccuu

SEQ ID NO: 370432 - RNA, 32 nt, Homo Sapiens
ugaguucucaugagaucugauggguguuuuuu

SEQ ID NO: 370433 - RNA, 31 nt, Homo Sapiens
ggauggauaaauuguagcguaugcaccauuc

SEQ ID NO: 370434 - RNA, 32 nt, Homo Sapiens
agccuccgggaaggggucugcccgccuucuuc

SEQ ID NO: 370435 - RNA, 32 nt, Homo Sapiens
ucuguguucuccuggcgcuccuccccuaaguu

SEQ ID NO: 370436 - RNA, 32 nt, Homo Sapiens
ggaagagauaugacuauaaauaaauguucucu

SEQ ID NO: 370437 - RNA, 32 nt, Homo Sapiens
uggacuagauuggacuguaucaacauugauuu

SEQ ID NO: 370438 - RNA, 32 nt, Homo Sapiens
acgguuuccaugaaaacuuuccaaguuugguc

SEQ ID NO: 370439 - RNA, 32 nt, Homo Sapiens
uaaaaacuguacacaaugucaauagaagcauu

SEQ ID NO: 370440 - RNA, 32 nt, Homo Sapiens
aaaucccuauauauuuaaaauuauaguguauu

SEQ ID NO: 370441 - RNA, 32 nt, Homo Sapiens
aacagcuccagaagcugaacuccagcccuaag

SEQ ID NO: 370442 - RNA, 32 nt, Homo Sapiens
ugugcggcaccuccuuacugaccuccaggauc

SEQ ID NO: 370443 - RNA, 32 nt, Homo Sapiens
cuuuaaaauaucuauuuaucaaaggccagaca

SEQ ID NO: 370444 - RNA, 32 nt, Homo Sapiens
auuaaaagcagauccugcgcccgccccaucca

SEQ ID NO: 370445 - RNA, 32 nt, Homo Sapiens
ugacagagauuucuuuuuguuuuguuauucuu

SEQ ID NO: 370446 - RNA, 32 nt, Homo Sapiens
agaacagugagagcuucauuuugugauucuga

SEQ ID NO: 370447 - RNA, 32 nt, Homo Sapiens
gaagacuguacaauuugagccggguguuaggc

SEQ ID NO: 370448 - RNA, 28 nt, Homo Sapiens
gcuauguugcccuuuggagacaaaacaa

SEQ ID NO: 370449 - RNA, 32 nt, Homo Sapiens
guucaucacagugugguaagguugcaaauuca

SEQ ID NO: 370450 - RNA, 32 nt, Homo Sapiens
uucugugcuuuauauugauauguguauucuuu

SEQ ID NO: 370451 - RNA, 32 nt, Homo Sapiens
gauagaaguauuuguguaccuggauuaaugaa

SEQ ID NO: 370452 - RNA, 32 nt, Homo Sapiens
gcaaugcccucccucagacccagggccauccu

SEQ ID NO: 370453 - RNA, 32 nt, Homo Sapiens
accaaaaagagaaauguaaauaguuuuauaaa

SEQ ID NO: 370454 - RNA, 32 nt, Homo Sapiens
agaccagccugggcaagauagcaagaccuugc

SEQ ID NO: 370455 - RNA, 32 nt, Homo Sapiens
aucgcggcgcgcacagacccaggauuugugaa

SEQ ID NO: 370456 - RNA, 32 nt, Homo Sapiens
agggagggccuaaagcacuuguaacuuugaac

SEQ ID NO: 370457 - RNA, 32 nt, Homo Sapiens
ccugcuugugcuuccagcuuaagggacaggca

SEQ ID NO: 370458 - RNA, 32 nt, Homo Sapiens
ucgaucuugucuucccguuccuccccgcagug

SEQ ID NO: 370459 - RNA, 32 nt, Homo Sapiens
uuugggagggugggggcagggcgggaucaacu

SEQ ID NO: 370460 - RNA, 32 nt, Homo Sapiens
aguuuaaauggcaaauggaagggaauggguuc

SEQ ID NO: 370461 - RNA, 32 nt, Homo Sapiens
cuuugaagagaaacucaaaaccauuuugaaac

SEQ ID NO: 370462 - RNA, 32 nt, Homo Sapiens
gacugccugcuuucauggauagacauaaaaac

SEQ ID NO: 370463 - RNA, 32 nt, Homo Sapiens
uuggggaggaagaauggggagugacugcuaau

SEQ ID NO: 370464 - RNA, 32 nt, Homo Sapiens
agcgaccgcggucggugggcuccggcgggcuc

SEQ ID NO: 370465 - RNA, 32 nt, Homo Sapiens
cagaggccgagacccugcaggugauuccuggg

SEQ ID NO: 370466 - RNA, 32 nt, Homo Sapiens
ccguauuuuuuuuucuaacaaauaccuggugu

SEQ ID NO: 370467 - RNA, 32 nt, Homo Sapiens
cauggcccagggacccguggacagguugggga

SEQ ID NO: 370468 - RNA, 32 nt, Homo Sapiens
aaggccagccccccggcccaccagcuuucgga

SEQ ID NO: 370469 - RNA, 32 nt, Homo Sapiens
gaaggucgcugagguaggaacugcgccagucc

SEQ ID NO: 370470 - RNA, 31 nt, Homo Sapiens
auauggaaauaaaaucauggugacaucacug

SEQ ID NO: 370471 - RNA, 32 nt, Homo Sapiens
ucucacagaauccuagcuuaaaacagcaauga

SEQ ID NO: 370472 - RNA, 32 nt, Homo Sapiens
caggagccggggcagcggcggcagcucagugc

SEQ ID NO: 370473 - RNA, 32 nt, Homo Sapiens
aauuucucagagcauucucuccaggaagaauu

SEQ ID NO: 370474 - RNA, 32 nt, Homo Sapiens
guuccaguuuugagcagaggugaggcagaauc

SEQ ID NO: 370475 - RNA, 32 nt, Homo Sapiens
ccucaggugcuuuggggauugaaauucagacc

SEQ ID NO: 370476 - RNA, 32 nt, Homo Sapiens
auuauuuucuucauccaacuuauguuuuuaaa

SEQ ID NO: 370477 - RNA, 32 nt, Homo Sapiens
cacuuuuccaguccuggaacuacucuguccca

SEQ ID NO: 370478 - RNA, 32 nt, Homo Sapiens
cagcaggacaggcuccugaggaccccucaggc

SEQ ID NO: 370479 - RNA, 32 nt, Homo Sapiens
agccugugcagggggcugggcuucagcaaggg

SEQ ID NO: 370480 - RNA, 32 nt, Homo Sapiens
cgccaaguuucacuucccgccacugcugccag

SEQ ID NO: 370481 - RNA, 32 nt, Homo Sapiens
aguagucgauaaucagaaaagaugacaaaagu

SEQ ID NO: 370482 - RNA, 32 nt, Homo Sapiens
uuuauauaaaaauaacagauuggauagaugug

SEQ ID NO: 370483 - RNA, 32 nt, Homo Sapiens
ucuuuugucuucucauccaaacagucugccag

SEQ ID NO: 370484 - RNA, 32 nt, Homo Sapiens
cucauauugggaaugcuuaugaggaaauucau

SEQ ID NO: 370485 - RNA, 32 nt, Homo Sapiens
cugcugcaguguggcaucaucuaugcggacaa

SEQ ID NO: 370486 - RNA, 31 nt, Homo Sapiens
ucugggcgccagcucgcuccagggagugaug

SEQ ID NO: 370487 - RNA, 32 nt, Homo Sapiens
gagcgggucuucugccuucauuuuggaugcac

SEQ ID NO: 370488 - RNA, 32 nt, Homo Sapiens
gacuggaguuuccugcuucugucacuacaccu

SEQ ID NO: 370489 - RNA, 32 nt, Homo Sapiens
gacuggggcacgcacugcgcagacuccccgcu

SEQ ID NO: 370490 - RNA, 32 nt, Homo Sapiens
cggagaggagggcuacugccucacaucacugc

SEQ ID NO: 370491 - RNA, 32 nt, Homo Sapiens
uagaacuuaagccccaaggcgauggcaucacu

SEQ ID NO: 370492 - RNA, 32 nt, Homo Sapiens
ggacaucagggccaccccaaguccucaguguc

SEQ ID NO: 370493 - RNA, 32 nt, Homo Sapiens
auagcauguacuuugugaauuauuaucuuugu

SEQ ID NO: 370494 - RNA, 30 nt, Homo Sapiens
ccuguccaugcucuuuguuuuuaaacuugu

SEQ ID NO: 370495 - RNA, 32 nt, Homo Sapiens
agaccucagugcccaccaugggcuguggcgga

SEQ ID NO: 370496 - RNA, 32 nt, Homo Sapiens
uuaaauuaaacaaauaaacaaacagaacccaa

SEQ ID NO: 370497 - RNA, 32 nt, Homo Sapiens
cggccggcgagggcggcgacggggacccgcuu

SEQ ID NO: 370498 - RNA, 32 nt, Homo Sapiens
gggcugcccccgcuccagucaaugcucacuga

SEQ ID NO: 370499 - RNA, 32 nt, Homo Sapiens
ggaugucuucccucccccgaccccagccuguc

SEQ ID NO: 370500 - RNA, 32 nt, Homo Sapiens
cauggggucugcuucugucuugaaaggagguu

SEQ ID NO: 370501 - RNA, 32 nt, Homo Sapiens
gacaagucauucuacaaccugcacagagcucc

SEQ ID NO: 370502 - RNA, 32 nt, Homo Sapiens
augacgcgcugugggugggaggaggcagcgcc

SEQ ID NO: 370503 - RNA, 31 nt, Homo Sapiens
aacuagaaauaaaaugguguaaauaaagacc

SEQ ID NO: 370504 - RNA, 32 nt, Homo Sapiens
augacaguuagagaugcugauuuuuuuucuga

SEQ ID NO: 370505 - RNA, 32 nt, Homo Sapiens
cuuugcugaugcuauuugcuuauuugauguua

SEQ ID NO: 370506 - RNA, 32 nt, Homo Sapiens
acuuuggcuuugauucuggguggguacagugg

SEQ ID NO: 370507 - RNA, 32 nt, Homo Sapiens
uucacuuacagauaguaucuagcaaucacaac

SEQ ID NO: 370508 - RNA, 32 nt, Homo Sapiens
gcggcagguggggaagcgcggcugggccugcu

SEQ ID NO: 370509 - RNA, 32 nt, Homo Sapiens
cacugaggaacuccagggcauucugugggucu

SEQ ID NO: 370510 - RNA, 32 nt, Homo Sapiens
gucauuucaaagacaugaaaaaacucacacug

SEQ ID NO: 370511 - RNA, 32 nt, Homo Sapiens
gaucagguaaagaggagaggcugugccuaagg

SEQ ID NO: 370512 - RNA, 32 nt, Homo Sapiens
aacacacuguuguuuaguuaaguuuuaaauag

SEQ ID NO: 370513 - RNA, 32 nt, Homo Sapiens
gucugagacgaagcuuccagaggaaggaacag

SEQ ID NO: 370514 - RNA, 32 nt, Homo Sapiens
uaacaacuguacuuaaauuuuguuuucuagug

SEQ ID NO: 370515 - RNA, 32 nt, Homo Sapiens
ccucccgagccucaaggcaaguccaggacuca

SEQ ID NO: 370516 - RNA, 32 nt, Homo Sapiens
gaacauccaaggaguuauugaaaacuaucuua

SEQ ID NO: 370517 - RNA, 32 nt, Homo Sapiens
agaggauggcugcccauccucagcuccccucc

SEQ ID NO: 370518 - RNA, 32 nt, Homo Sapiens
ccauggggcgggggcgggaccagggagaauua

SEQ ID NO: 370519 - RNA, 32 nt, Homo Sapiens
caaagaagccaucuuaugugggacaggcuugg

SEQ ID NO: 370520 - RNA, 32 nt, Homo Sapiens
aaauaagauccgagcagaacugaaggagauag

SEQ ID NO: 370521 - RNA, 32 nt, Homo Sapiens
ucuaaacuucucaauuauuuuauggaaaaaac

SEQ ID NO: 370522 - RNA, 32 nt, Homo Sapiens
uaaaaucuuccuacacacaucuagacguucaa

SEQ ID NO: 370523 - RNA, 32 nt, Homo Sapiens
ggggaagggcagauggaggagggauuguaaug

SEQ ID NO: 370524 - RNA, 32 nt, Homo Sapiens
aaaugggguggaauagggaacuguaauggcca

SEQ ID NO: 370525 - RNA, 32 nt, Homo Sapiens
aauuuaauuaaaagaacaccacagugggcacc

SEQ ID NO: 370526 - RNA, 32 nt, Homo Sapiens
ugugauaagacaugaaaauuauauuauuaaaa

SEQ ID NO: 370527 - RNA, 32 nt, Homo Sapiens
ugagauaauggcaaagcagaugcuucaaaaau

SEQ ID NO: 370528 - RNA, 32 nt, Homo Sapiens
ggaaagaaacacccuaaucuagauaaaggucu

SEQ ID NO: 370529 - RNA, 32 nt, Homo Sapiens
gcuccgaacagguccggugugagccccugccc

SEQ ID NO: 370530 - RNA, 32 nt, Homo Sapiens
gcggagggggcgcggcgggguagagaggcgcg

SEQ ID NO: 370531 - RNA, 32 nt, Homo Sapiens
gaaagucuguugucuuagauauacaaauacau

SEQ ID NO: 370532 - RNA, 32 nt, Homo Sapiens
gacgggccaggcgggcggccuccugaaccgaa

SEQ ID NO: 370533 - RNA, 32 nt, Homo Sapiens
gcagggcuccagcucgggguuuaggggcuggg

SEQ ID NO: 370534 - RNA, 32 nt, Homo Sapiens
cgggcucugccagcagacagccuuggcacaca

SEQ ID NO: 370535 - RNA, 32 nt, Homo Sapiens
uuuuaucugguucuucguucucugucacucuu

SEQ ID NO: 370536 - RNA, 32 nt, Homo Sapiens
cacaaagauggucugagaaaagaaaauaaaag

SEQ ID NO: 370537 - RNA, 32 nt, Homo Sapiens
uuuggagacagaggaagaaccaggucagucug

SEQ ID NO: 370538 - RNA, 32 nt, Homo Sapiens
uaaacuuagacaaauuacauuauaaacaguuc

SEQ ID NO: 370539 - RNA, 32 nt, Homo Sapiens
cauuucuugcuugauugcuuuguugggggccu

SEQ ID NO: 370540 - RNA, 32 nt, Homo Sapiens
aauuuuaaaauguagaagaaagcaaaaaauaa

SEQ ID NO: 370541 - RNA, 32 nt, Homo Sapiens
aauaaagcuugccuuaaauuauuuuuauauga

SEQ ID NO: 370542 - RNA, 30 nt, Homo Sapiens
gccgcagagccucuccggccggcgcccauu

SEQ ID NO: 370543 - RNA, 32 nt, Homo Sapiens
gguuauacagcuucauuuuagaugagcauucu

SEQ ID NO: 370544 - RNA, 32 nt, Homo Sapiens
aaaacaaaacaaaaaucucuuaggaaaugucu

SEQ ID NO: 370545 - RNA, 32 nt, Homo Sapiens
ugagacauaauauaaacuuauuuacuuuccuu

SEQ ID NO: 370546 - RNA, 32 nt, Homo Sapiens
uuaauacugcaaacaaaucauaguggaacuaa

SEQ ID NO: 370547 - RNA, 32 nt, Homo Sapiens
agaacugugagggagugcgaaaaaagaaaggu

SEQ ID NO: 370548 - RNA, 32 nt, Homo Sapiens
uacccaugauuuccucagcugcuccaccuugg

SEQ ID NO: 370549 - RNA, 32 nt, Homo Sapiens
uucccugguugugaaaauacaugagauaaauc

SEQ ID NO: 370550 - RNA, 32 nt, Homo Sapiens
uggcccacugccaucacccagcaccccagauc

SEQ ID NO: 370551 - RNA, 32 nt, Homo Sapiens
acgggcaagcagcccacugaucuguuuuguag

SEQ ID NO: 370552 - RNA, 32 nt, Homo Sapiens
cccacgcgcguuuguucuugcgcacgggagag

SEQ ID NO: 370553 - RNA, 32 nt, Homo Sapiens
aaguagcugagauuacaggugugugccaccac

SEQ ID NO: 370554 - RNA, 32 nt, Homo Sapiens
ugaguugguccucccucugcacccccaccacc

SEQ ID NO: 370555 - RNA, 32 nt, Homo Sapiens
ugcuuggcugggcugcagcugcuaccccucgg

SEQ ID NO: 370556 - RNA, 32 nt, Homo Sapiens
aacauauguccuagaaaacauaaaauuaaaaa

SEQ ID NO: 370557 - RNA, 32 nt, Homo Sapiens
uucaccauuuccuuuucuuauuuugaauacau

SEQ ID NO: 370558 - RNA, 32 nt, Homo Sapiens
cccucuggagggccggaggcaggagguggaaa

SEQ ID NO: 370559 - RNA, 28 nt, Homo Sapiens
gccgcuuuugcuaugaggaugaccugcu

SEQ ID NO: 370560 - RNA, 32 nt, Homo Sapiens
cugcuagagaggguggcaggccugcugcugga

SEQ ID NO: 370561 - RNA, 32 nt, Homo Sapiens
gagacuuuuauuugaagggugaaucuuguuuu

SEQ ID NO: 370562 - RNA, 32 nt, Homo Sapiens
ugccaggaagcagcacagacacagcauagcag

SEQ ID NO: 370563 - RNA, 32 nt, Homo Sapiens
aucccccgaggcugcucggcccggccccaccu

SEQ ID NO: 370564 - RNA, 32 nt, Homo Sapiens
agugucuggugcccugguggccugccccagcu

SEQ ID NO: 370565 - RNA, 32 nt, Homo Sapiens
uuucugccuguucagaacuguuuaauagcagu

SEQ ID NO: 370566 - RNA, 32 nt, Homo Sapiens
uugaauucaggauuacagugcuccuuucauuc

SEQ ID NO: 370567 - RNA, 32 nt, Homo Sapiens
cauaugggauucccagaaaaccugacuaacgg

SEQ ID NO: 370568 - RNA, 32 nt, Homo Sapiens
gucuauucugcccacaccccagcccaaccugc

SEQ ID NO: 370569 - RNA, 32 nt, Homo Sapiens
ggggaaagaaaaugaaacuuuuuggugugaau

SEQ ID NO: 370570 - RNA, 32 nt, Homo Sapiens
cccuuucccucuggggucucugcccauucccu

SEQ ID NO: 370571 - RNA, 32 nt, Homo Sapiens
ucccgaucuccuggaaggcuguugugauuucc

SEQ ID NO: 370572 - RNA, 32 nt, Homo Sapiens
cugaggacaauuaggguauccuuggcugcuuu

SEQ ID NO: 370573 - RNA, 32 nt, Homo Sapiens
uacuaagaggauguuagcaaaccuguuccaug

SEQ ID NO: 370574 - RNA, 32 nt, Homo Sapiens
aaguacaugcuuaaugauauauuuucaaaagu

SEQ ID NO: 370575 - RNA, 32 nt, Homo Sapiens
uccuguucucaauaaaaguaauaaauuggauu

SEQ ID NO: 370576 - RNA, 32 nt, Homo Sapiens
guacugccacuacacacacgucauuuuauaug

SEQ ID NO: 370577 - RNA, 32 nt, Homo Sapiens
gcagggcugcagucacauccugcgcggguggg

SEQ ID NO: 370578 - RNA, 32 nt, Homo Sapiens
ugagaaaucuucugucuuaaacagccuccacc

SEQ ID NO: 370579 - RNA, 32 nt, Homo Sapiens
gcccuucucaagaccgaguguacaccacuuuc

SEQ ID NO: 370580 - RNA, 30 nt, Homo Sapiens
gcacacggaugcacagagauaugcacacac

SEQ ID NO: 370581 - RNA, 32 nt, Homo Sapiens
uauacaauacagaucaucuuggaacugcauuc

SEQ ID NO: 370582 - RNA, 32 nt, Homo Sapiens
cggcagaggugcagguccuggugcuugauggu

SEQ ID NO: 370583 - RNA, 32 nt, Homo Sapiens
ggggggcgcgcccaccgcuguguccucucugc

SEQ ID NO: 370584 - RNA, 32 nt, Homo Sapiens
uguauuuuggggaaugaacagcagcaaauacu

SEQ ID NO: 370585 - RNA, 32 nt, Homo Sapiens
ccgcggcucccccuuccacuacccaccugccc

SEQ ID NO: 370586 - RNA, 32 nt, Homo Sapiens
ugucucuuaaaauggugauggaugugacacuu

SEQ ID NO: 370587 - RNA, 32 nt, Homo Sapiens
gcuauacuucugugcuuuauauugauaugugu

SEQ ID NO: 370588 - RNA, 32 nt, Homo Sapiens
gcauaaaaacaauauagauaauauaaagaagu

SEQ ID NO: 370589 - RNA, 32 nt, Homo Sapiens
ugggugcugagcucagcugcccggaugaccuu

SEQ ID NO: 370590 - RNA, 32 nt, Homo Sapiens
uuuauaaaacguuauaguggagcccacaauug

SEQ ID NO: 370591 - RNA, 32 nt, Homo Sapiens
ccgauacucagacugcagcuggaccggcaagc

SEQ ID NO: 370592 - RNA, 32 nt, Homo Sapiens
aggaacuccuggcgcgccgcuggggccagcag

SEQ ID NO: 370593 - RNA, 30 nt, Homo Sapiens
aguuuccaugcuccuuucugucagguuuaa

SEQ ID NO: 370594 - RNA, 32 nt, Homo Sapiens
cuauacuggauccuuucuuucucuaauaaucc

SEQ ID NO: 370595 - RNA, 32 nt, Homo Sapiens
caaaauuaaagaguugggcaaccaucacugaa

SEQ ID NO: 370596 - RNA, 32 nt, Homo Sapiens
uucccagagauguaagacauguugcaaaagug

SEQ ID NO: 370597 - RNA, 32 nt, Homo Sapiens
ccccggcaggccuggggucugcaguccucuua

SEQ ID NO: 370598 - RNA, 32 nt, Homo Sapiens
gccguccuguccccagccugcuugugucccgu

SEQ ID NO: 370599 - RNA, 32 nt, Homo Sapiens
uuguagagacggguuuucgccauguugccuca

SEQ ID NO: 370600 - RNA, 32 nt, Homo Sapiens
gcucagcccucccugccccucccuucaaccau

SEQ ID NO: 370601 - RNA, 32 nt, Homo Sapiens
auagaaauauauuuaagguucuauuauguaca

SEQ ID NO: 370602 - RNA, 32 nt, Homo Sapiens
uuaggaggcagcaugagaacaguggcacacca

SEQ ID NO: 370603 - RNA, 32 nt, Homo Sapiens
cauauagcuauauauaaagagauaaggguguu

SEQ ID NO: 370604 - RNA, 32 nt, Homo Sapiens
acuguuacacuagggggcucagcaaauucaau

SEQ ID NO: 370605 - RNA, 32 nt, Homo Sapiens
uaaauaaauacuuuuuuuuaaauggaaagacu

SEQ ID NO: 370606 - RNA, 32 nt, Homo Sapiens
cucuguacccuuccuggugcugccgugccccc

SEQ ID NO: 370607 - RNA, 32 nt, Homo Sapiens
ugcacagcuacacagcgaccccgcccccgccu

SEQ ID NO: 370608 - RNA, 32 nt, Homo Sapiens
cacaggucaucccacaaccauccacacagaag

SEQ ID NO: 370609 - RNA, 32 nt, Homo Sapiens
ugaagaccaaaaugcccucaagguguaaaaua

SEQ ID NO: 370610 - RNA, 32 nt, Homo Sapiens
caaagacucaaguuaagauaagauacaucuac

SEQ ID NO: 370611 - RNA, 32 nt, Homo Sapiens
uugggccugggucuuugcugccagguggcccu

SEQ ID NO: 370612 - RNA, 32 nt, Homo Sapiens
ggacucgugagcugagugcagaugaccacauu

SEQ ID NO: 370613 - RNA, 32 nt, Homo Sapiens
cccugccuucucugcugguacccaguccuaaa

SEQ ID NO: 370614 - RNA, 32 nt, Homo Sapiens
uucucuggaaauaaauauaguuauuaaaggau

SEQ ID NO: 370615 - RNA, 32 nt, Homo Sapiens
gcccaucucagguggcccugcacgcgugugcc

SEQ ID NO: 370616 - RNA, 32 nt, Homo Sapiens
gugucacaagauaauuaauggacuuuguucuu

SEQ ID NO: 370617 - RNA, 32 nt, Homo Sapiens
uuuugcagaugcaauuaagguuaaggaccuug

SEQ ID NO: 370618 - RNA, 32 nt, Homo Sapiens
auuaaaaauagauaaacuucgcuggaaaugag

SEQ ID NO: 370619 - RNA, 32 nt, Homo Sapiens
gaauaauuuauuucuuuuuuuucuuuugcuuu

SEQ ID NO: 370620 - RNA, 32 nt, Homo Sapiens
guaacugccgguccagaaugugacggauucga

SEQ ID NO: 370621 - RNA, 32 nt, Homo Sapiens
agcggcggccgcggcgcgugcgucugugccuc

SEQ ID NO: 370622 - RNA, 32 nt, Homo Sapiens
aacgcccgagacccccaccucucacuuugcug

SEQ ID NO: 370623 - RNA, 32 nt, Homo Sapiens
ggggugggugggggaccugcugccgggagaug

SEQ ID NO: 370624 - RNA, 32 nt, Homo Sapiens
agguaagaccucucugaagagcugucaugaag

SEQ ID NO: 370625 - RNA, 32 nt, Homo Sapiens
cuaaagccuuauugagaaaacauguuauagau

SEQ ID NO: 370626 - RNA, 32 nt, Homo Sapiens
gucaccugccagcaccaccacgccaggccuca

SEQ ID NO: 370627 - RNA, 32 nt, Homo Sapiens
aggggcauuaucagccccugcugcugcuuuau

SEQ ID NO: 370628 - RNA, 32 nt, Homo Sapiens
ccugggaggcauaggagaagggucgggccagc

SEQ ID NO: 370629 - RNA, 32 nt, Homo Sapiens
gccggggaggucggcgcggguggcuggagaca

SEQ ID NO: 370630 - RNA, 32 nt, Homo Sapiens
aaacggguccuggcagugaggcagauguauaa

SEQ ID NO: 370631 - RNA, 31 nt, Homo Sapiens
ugaggacucaagcccaccugaguccacuccc

SEQ ID NO: 370632 - RNA, 32 nt, Homo Sapiens
cggugcgcugggggcgggagcagcgcggagcc

SEQ ID NO: 370633 - RNA, 32 nt, Homo Sapiens
aucaagaugaaagcccuaauauguaaagucaa

SEQ ID NO: 370634 - RNA, 32 nt, Homo Sapiens
uauuccagagcugccaguggggccugaggcuc

SEQ ID NO: 370635 - RNA, 32 nt, Homo Sapiens
cgccuguagucccagcacuuugggagcccgag

SEQ ID NO: 370636 - RNA, 32 nt, Homo Sapiens
ggggagcuuggcugcuggcuccagaaccuccc

SEQ ID NO: 370637 - RNA, 32 nt, Homo Sapiens
cgggguccggagagggcgcggcgcggagcgca

SEQ ID NO: 370638 - RNA, 32 nt, Homo Sapiens
aaagcagaucucggccagacacaauggcacau

SEQ ID NO: 370639 - RNA, 32 nt, Homo Sapiens
augaauaaaaauacuuauuaaaugauuacuuc

SEQ ID NO: 370640 - RNA, 32 nt, Homo Sapiens
uuugugggggccaaaccugggaccccgagcuu

SEQ ID NO: 370641 - RNA, 32 nt, Homo Sapiens
uaggaaauaaaauuauuuugcugaaacuugga

SEQ ID NO: 370642 - RNA, 32 nt, Homo Sapiens
uacaucccagagcgccacccucuucuugcgaa

SEQ ID NO: 370643 - RNA, 32 nt, Homo Sapiens
gcgcgcugugucuccgcugcguccgccgaggc

SEQ ID NO: 370644 - RNA, 32 nt, Homo Sapiens
cagcucacuccagcuucacaaaugugcugaga

SEQ ID NO: 370645 - RNA, 32 nt, Homo Sapiens
gcucaguaacaagaaggcauaaacuaaaguau

SEQ ID NO: 370646 - RNA, 32 nt, Homo Sapiens
cccacugugaguugaaaauaccaaaagucaaa

SEQ ID NO: 370647 - RNA, 32 nt, Homo Sapiens
auuauuuuugagggguccagcuccucaucaaa

SEQ ID NO: 370648 - RNA, 32 nt, Homo Sapiens
ccgcggauacugugcaggccaagcgcucggcc

SEQ ID NO: 370649 - RNA, 32 nt, Homo Sapiens
auguacacagcccugcuuuauuugaguucaaa

SEQ ID NO: 370650 - RNA, 32 nt, Homo Sapiens
cagcaaaguugagcucauauaaaccaaaagcu

SEQ ID NO: 370651 - RNA, 32 nt, Homo Sapiens
augccuucacgccaaggcuguucucaccagcu

SEQ ID NO: 370652 - RNA, 32 nt, Homo Sapiens
caaucgcuguuauuuuuuuuuaauguaauuug

SEQ ID NO: 370653 - RNA, 32 nt, Homo Sapiens
acccgcuuccucaccacccccacuguugggcc

SEQ ID NO: 370654 - RNA, 32 nt, Homo Sapiens
gccuggugucugcacauagugaaacauggcug

SEQ ID NO: 370655 - RNA, 32 nt, Homo Sapiens
caggugggagaggucuggccuauccgcgccug

SEQ ID NO: 370656 - RNA, 32 nt, Homo Sapiens
ugcguuccuucccccauaccugucccccacag

SEQ ID NO: 370657 - RNA, 32 nt, Homo Sapiens
gaagugcauaacccucccgugacagaggaggg

SEQ ID NO: 370658 - RNA, 32 nt, Homo Sapiens
gauacuguucuccucaucuacugcuuauguua

SEQ ID NO: 370659 - RNA, 32 nt, Homo Sapiens
gggguggccaaggggcguuuccucugcuuuug

SEQ ID NO: 370660 - RNA, 32 nt, Homo Sapiens
uugugaugauggaaacaaaagccuuggaacaa

SEQ ID NO: 370661 - RNA, 32 nt, Homo Sapiens
cgugggcacugcugaggaaugauccuaguggu

SEQ ID NO: 370662 - RNA, 32 nt, Homo Sapiens
ggaggaagggaaggcgguucagagauguugga

SEQ ID NO: 370663 - RNA, 32 nt, Homo Sapiens
cugaggucaggaguucgagaccagccugccua

SEQ ID NO: 370664 - RNA, 32 nt, Homo Sapiens
ggcaauguauauagauuuuuuaaaagaauaaa

SEQ ID NO: 370665 - RNA, 30 nt, Homo Sapiens
uccuuggauaaaaugugauauaugcaagua

SEQ ID NO: 370666 - RNA, 32 nt, Homo Sapiens
gaucugaguagccagcgucgccggcgaccgcg

SEQ ID NO: 370667 - RNA, 32 nt, Homo Sapiens
cauagccacucccauuuuaugagcuacucaca

SEQ ID NO: 370668 - RNA, 31 nt, Homo Sapiens
ugcccugccugguuucugccaagggcugcug

SEQ ID NO: 370669 - RNA, 32 nt, Homo Sapiens
uaucugugggcuccuggaaauuguguaugcca

SEQ ID NO: 370670 - RNA, 32 nt, Homo Sapiens
caacugcguggagcugcaggcuucagcugccu

SEQ ID NO: 370671 - RNA, 32 nt, Homo Sapiens
uauguguguauauaugguuuugucaggugugu

SEQ ID NO: 370672 - RNA, 32 nt, Homo Sapiens
cacagcggcugagacucgaucugcuccaagua

SEQ ID NO: 370673 - RNA, 32 nt, Homo Sapiens
caacuuaauagcagcagcugcccaaugccaug

SEQ ID NO: 370674 - RNA, 32 nt, Homo Sapiens
guugugguuuuccaucugauccuuccacuguu

SEQ ID NO: 370675 - RNA, 28 nt, Homo Sapiens
gccgcgguaggugccaggaugccaaggc

SEQ ID NO: 370676 - RNA, 32 nt, Homo Sapiens
uagggcauucugaaaacaaauggaggguuugu

SEQ ID NO: 370677 - RNA, 32 nt, Homo Sapiens
aagaaaauauuuuugucgauucuuauucuuuu

SEQ ID NO: 370678 - RNA, 28 nt, Homo Sapiens
cggcgggggcggcggcggggagaacuac

SEQ ID NO: 370679 - RNA, 32 nt, Homo Sapiens
uacucccagcuuucccauguauguuguuugau

SEQ ID NO: 370680 - RNA, 32 nt, Homo Sapiens
ggaauuccuggccagaucuguuuauucuuuua

SEQ ID NO: 370681 - RNA, 32 nt, Homo Sapiens
aggguguugcugucauggcugaaaaaaaaaaa

SEQ ID NO: 370682 - RNA, 32 nt, Homo Sapiens
agaaucugucuccauuggucaaaccauacuuc

SEQ ID NO: 370683 - RNA, 32 nt, Homo Sapiens
ccccggcacccgccucccggcgcugacggucu

SEQ ID NO: 370684 - RNA, 32 nt, Homo Sapiens
auccaugaaaauaaaaugcucuccuuuugugc

SEQ ID NO: 370685 - RNA, 32 nt, Homo Sapiens
gaguggauccugaaauguugucccgaacuguu

SEQ ID NO: 370686 - RNA, 32 nt, Homo Sapiens
uaaauccugcaccagcaacaacacuuguaaau

SEQ ID NO: 370687 - RNA, 32 nt, Homo Sapiens
gcuugcaguaguguuagacugaagauaaagua

SEQ ID NO: 370688 - RNA, 32 nt, Homo Sapiens
auaauaauaaaagaaggggagcgcgagagaag

SEQ ID NO: 370689 - RNA, 32 nt, Homo Sapiens
aacaaaagguguuuaaggaugaacuaaauauu

SEQ ID NO: 370690 - RNA, 32 nt, Homo Sapiens
aucacuacucguauuaguccauuuucacgcug

SEQ ID NO: 370691 - RNA, 32 nt, Homo Sapiens
cgaagcuggggucagaugagguugcuaccccu

SEQ ID NO: 370692 - RNA, 32 nt, Homo Sapiens
ggccgaggcaucuggaacuuucucugccugca

SEQ ID NO: 370693 - RNA, 32 nt, Homo Sapiens
uaaaggauugggacuagucugcucuccacucu

SEQ ID NO: 370694 - RNA, 32 nt, Homo Sapiens
caguucacaaacaguaaaggccaugugaagag

SEQ ID NO: 370695 - RNA, 32 nt, Homo Sapiens
gguggacguggcggcccagcugggcgaguauc

SEQ ID NO: 370696 - RNA, 32 nt, Homo Sapiens
gaauaaaacaccacgcgaggcuaacuggccua

SEQ ID NO: 370697 - RNA, 32 nt, Homo Sapiens
ggcuacaagcccugaccagacaucaccacagu

SEQ ID NO: 370698 - RNA, 32 nt, Homo Sapiens
acgcccaucuucugccucauaguggucacuca

SEQ ID NO: 370699 - RNA, 32 nt, Homo Sapiens
ugguguugggcacuggagaaaaacgaagccaa

SEQ ID NO: 370700 - RNA, 31 nt, Homo Sapiens
agaucgcaucgcagccaugagcaguaaggau

SEQ ID NO: 370701 - RNA, 32 nt, Homo Sapiens
aauuaaaaacaguauuugggggagaaacgugc

SEQ ID NO: 370702 - RNA, 32 nt, Homo Sapiens
acuuauaaaucagccuaacauaaaaaaaaaaa

SEQ ID NO: 370703 - RNA, 32 nt, Homo Sapiens
acaugugugguaccucacugcugcuguuuagg

SEQ ID NO: 370704 - RNA, 32 nt, Homo Sapiens
aaauaaaauaaaauaaaaugacguacagagau

SEQ ID NO: 370705 - RNA, 32 nt, Homo Sapiens
aaaccgaggcucagaugcugcagauggaauag

SEQ ID NO: 370706 - RNA, 32 nt, Homo Sapiens
ggauuuuauuuuucguuauuguggugguuuaa

SEQ ID NO: 370707 - RNA, 32 nt, Homo Sapiens
gaagccaccaucaaaacaaaggaugggauacg

SEQ ID NO: 370708 - RNA, 32 nt, Homo Sapiens
acuaggucaggagaucgagacuauccuggcua

SEQ ID NO: 370709 - RNA, 32 nt, Homo Sapiens
cacuugagaacaaaagugacuacucuuuuguc

SEQ ID NO: 370710 - RNA, 32 nt, Homo Sapiens
ccuuaaagauguuguuauuaacucgaguuagu

SEQ ID NO: 370711 - RNA, 32 nt, Homo Sapiens
cuaauuaaacgucuguguaaauuuaaaaaggg

SEQ ID NO: 370712 - RNA, 32 nt, Homo Sapiens
auggacacuacaauaaguauauggaaagugug

SEQ ID NO: 370713 - RNA, 32 nt, Homo Sapiens
cuauagcuuugugauuacuaguucuugacaug

SEQ ID NO: 370714 - RNA, 31 nt, Homo Sapiens
cccgacgcccccgccccgcgcguuucccgaa

SEQ ID NO: 370715 - RNA, 32 nt, Homo Sapiens
ugaauauguauguaaauauauacagaauaaua

SEQ ID NO: 370716 - RNA, 32 nt, Homo Sapiens
cuccccaagcuggcagaggggccguggcagga

SEQ ID NO: 370717 - RNA, 32 nt, Homo Sapiens
uacccugcauggcugagcugcccacagcaggc

SEQ ID NO: 370718 - RNA, 32 nt, Homo Sapiens
aaagauaaaaggaaaaugcuugguuaaauaua

SEQ ID NO: 370719 - RNA, 32 nt, Homo Sapiens
auuaaguaugugugauacuaagguuugacugc

SEQ ID NO: 370720 - RNA, 32 nt, Homo Sapiens
agacaagucagaauucacuuugaagagggucu

SEQ ID NO: 370721 - RNA, 31 nt, Homo Sapiens
ucuccugcaggguccgcaccagcaauccuca

SEQ ID NO: 370722 - RNA, 32 nt, Homo Sapiens
uucuuugccacuuuucccaccccaaaacagca

SEQ ID NO: 370723 - RNA, 32 nt, Homo Sapiens
caggcucucgcacccgcaacuggcacagagua

SEQ ID NO: 370724 - RNA, 32 nt, Homo Sapiens
uccccuaugcugccaacaugcagucuuuguuu

SEQ ID NO: 370725 - RNA, 32 nt, Homo Sapiens
uaaucuucccacugacuuuacugcacagguau

SEQ ID NO: 370726 - RNA, 32 nt, Homo Sapiens
acguagagugacuuagacauguuugcaugaau

SEQ ID NO: 370727 - RNA, 32 nt, Homo Sapiens
aaaagugucaaagugguuuguccgcuagcguc

SEQ ID NO: 370728 - RNA, 32 nt, Homo Sapiens
aauuagcuuauuucuucaacauuccauccuuu

SEQ ID NO: 370729 - RNA, 32 nt, Homo Sapiens
ucagggcuaccagaaaaauguuuccagauggu

SEQ ID NO: 370730 - RNA, 32 nt, Homo Sapiens
gccuucugacugcugcagagaccaucacccgg

SEQ ID NO: 370731 - RNA, 32 nt, Homo Sapiens
cuuguuacagcuaugugaagcagagcugucac

SEQ ID NO: 370732 - RNA, 32 nt, Homo Sapiens
cuaucuccaaaauagaaauguuuucauauaua

SEQ ID NO: 370733 - RNA, 32 nt, Homo Sapiens
aacauccuauagaagcaaauccuaaacaaaua

SEQ ID NO: 370734 - RNA, 32 nt, Homo Sapiens
aacauuuauuaagcacguauuuauuaacugcu

SEQ ID NO: 370735 - RNA, 32 nt, Homo Sapiens
gacauuccauaagaugaguuggcauuagaauu

SEQ ID NO: 370736 - RNA, 32 nt, Homo Sapiens
gauccucccucauggcucuggcacaguguaau

SEQ ID NO: 370737 - RNA, 32 nt, Homo Sapiens
cacauagcugggugucaggcugggguuaguga

SEQ ID NO: 370738 - RNA, 32 nt, Homo Sapiens
cgagccugaccccaccaaggcgcgagugcugu

SEQ ID NO: 370739 - RNA, 32 nt, Homo Sapiens
cugugagccaaggaggcaaacugcacaagcuu

SEQ ID NO: 370740 - RNA, 32 nt, Homo Sapiens
ugaacaugaugauguaacuuguaauagcagaa

SEQ ID NO: 370741 - RNA, 32 nt, Homo Sapiens
gaccuggaagcaguagugugucuucagccuuu

SEQ ID NO: 370742 - RNA, 32 nt, Homo Sapiens
ccacuccuuuuggagacggcaggaggccugag

SEQ ID NO: 370743 - RNA, 32 nt, Homo Sapiens
gcaggaagggaccccuggagcaggcuggcccg

SEQ ID NO: 370744 - RNA, 32 nt, Homo Sapiens
uguuuccccguccgcaguggguguugccucuu

SEQ ID NO: 370745 - RNA, 32 nt, Homo Sapiens
acaauuagcauuuuucuaauuguuagaauauc

SEQ ID NO: 370746 - RNA, 32 nt, Homo Sapiens
cucaaucuggugcagcagcaucuugucacugc

SEQ ID NO: 370747 - RNA, 31 nt, Homo Sapiens
gcuaaaacaacaacaacaaaaaagaaaaugg

SEQ ID NO: 370748 - RNA, 32 nt, Homo Sapiens
uucucuuugggguuuuaguaugugucaaacau

SEQ ID NO: 370749 - RNA, 31 nt, Homo Sapiens
aggaucuauugagcccuggaauucgaggaug

SEQ ID NO: 370750 - RNA, 32 nt, Homo Sapiens
acagaagcuugcccucuuucugaaauaucuaa

SEQ ID NO: 370751 - RNA, 32 nt, Homo Sapiens
gcucguccugcagaacuccaggaggcagcauu

SEQ ID NO: 370752 - RNA, 32 nt, Homo Sapiens
uccaccuccccucccccagcaucucucagaga

SEQ ID NO: 370753 - RNA, 32 nt, Homo Sapiens
uagggcagcucuuugugaaagugguuuauucc

SEQ ID NO: 370754 - RNA, 32 nt, Homo Sapiens
auuggaaaaugaacaaacugauugauugugca

SEQ ID NO: 370755 - RNA, 32 nt, Homo Sapiens
agcccucccucccacacugccccagcagggcu

SEQ ID NO: 370756 - RNA, 32 nt, Homo Sapiens
gaggcccugccaggcaccaagcacugcccugg

SEQ ID NO: 370757 - RNA, 32 nt, Homo Sapiens
agaagaagaugaugaagaaucuggacgauuac

SEQ ID NO: 370758 - RNA, 32 nt, Homo Sapiens
ccuggcuuccucugguucagccccacauaaug

SEQ ID NO: 370759 - RNA, 32 nt, Homo Sapiens
ucccucccagcguccacuggcuccaggcuccu

SEQ ID NO: 370760 - RNA, 31 nt, Homo Sapiens
ugaaaucauuugaaauuuuuguacaauaaaa

SEQ ID NO: 370761 - RNA, 32 nt, Homo Sapiens
agggaucugugcuacacaaaauaugccaggac

SEQ ID NO: 370762 - RNA, 32 nt, Homo Sapiens
augcgauuacuacauauaaucccaauaccuua

SEQ ID NO: 370763 - RNA, 32 nt, Homo Sapiens
ccucaacaaccugucaccagcgccgcaccugg

SEQ ID NO: 370764 - RNA, 32 nt, Homo Sapiens
ugguuuugugggcaguuuaauaaaccugaacc

SEQ ID NO: 370765 - RNA, 32 nt, Homo Sapiens
aggaggaggagaauguuuuaggcaggugguua

SEQ ID NO: 370766 - RNA, 32 nt, Homo Sapiens
aggccggugcgguggcucaugccuguaauccc

SEQ ID NO: 370767 - RNA, 32 nt, Homo Sapiens
aaagggauacacaggacugaaaagggaaucau

SEQ ID NO: 370768 - RNA, 32 nt, Homo Sapiens
ugccucacauuaggaagcacaaaauaccaauu

SEQ ID NO: 370769 - RNA, 32 nt, Homo Sapiens
aacacuaaaaagaaagagagauauauguaaug

SEQ ID NO: 370770 - RNA, 32 nt, Homo Sapiens
auguggcucacacagugccgggacaugccggg

SEQ ID NO: 370771 - RNA, 32 nt, Homo Sapiens
uuauuacaaaacaaaaugaacacuugaccaaa

SEQ ID NO: 370772 - RNA, 32 nt, Homo Sapiens
ggacaugucuucugcccagauauggccgccuu

SEQ ID NO: 370773 - RNA, 32 nt, Homo Sapiens
ggccccugaggcggcgggggccauggcugggg

SEQ ID NO: 370774 - RNA, 32 nt, Homo Sapiens
caucgcccccgacuguggagaaguguccgggg

SEQ ID NO: 370775 - RNA, 32 nt, Homo Sapiens
cuaggucauuguaagucauuuauuuagccaaa

SEQ ID NO: 370776 - RNA, 32 nt, Homo Sapiens
ucaagcgauucucccaccccagccucccaagu

SEQ ID NO: 370777 - RNA, 32 nt, Homo Sapiens
auucauucagcaugccuauaauuacauaaauu

SEQ ID NO: 370778 - RNA, 32 nt, Homo Sapiens
ugcucacuuuugcuucuuggccauccacucag

SEQ ID NO: 370779 - RNA, 32 nt, Homo Sapiens
cccugcacuccagccugggugacagagugaga

SEQ ID NO: 370780 - RNA, 32 nt, Homo Sapiens
uaacauugucuuucuuuuuuuucuuuuguuuc

SEQ ID NO: 370781 - RNA, 32 nt, Homo Sapiens
gaaucccagagccuccucucccucugugaggc

SEQ ID NO: 370782 - RNA, 32 nt, Homo Sapiens
uggaccacaggcaaagaaaaccacuaggacca

SEQ ID NO: 370783 - RNA, 27 nt, Homo Sapiens
guaugagcggcaccagcaccccggcca

SEQ ID NO: 370784 - RNA, 32 nt, Homo Sapiens
uuggguacugccugagcaagaagugcuggaga

SEQ ID NO: 370785 - RNA, 32 nt, Homo Sapiens
uugaagaacuaaaagaggauauucuuucauca

SEQ ID NO: 370786 - RNA, 32 nt, Homo Sapiens
ggggagcaccgccaccucuccuccuccacuug

SEQ ID NO: 370787 - RNA, 32 nt, Homo Sapiens
augagugaguauaguaacccaagaugccauaa

SEQ ID NO: 370788 - RNA, 32 nt, Homo Sapiens
uucuuguuuuauacaugugaucuuauaaagau

SEQ ID NO: 370789 - RNA, 32 nt, Homo Sapiens
agccgggcgugguggcgggcgccugugguccu

SEQ ID NO: 370790 - RNA, 32 nt, Homo Sapiens
agaccaaacgcaggaugaggaguacugcagag

SEQ ID NO: 370791 - RNA, 32 nt, Homo Sapiens
uguagcuauaucuauauauaauucuguacaua

SEQ ID NO: 370792 - RNA, 32 nt, Homo Sapiens
guccuccauggcggccccagccgggaaggcga

SEQ ID NO: 370793 - RNA, 32 nt, Homo Sapiens
cuggaauuguacauuuauuuuuuaaaacucaa

SEQ ID NO: 370794 - RNA, 32 nt, Homo Sapiens
gcagaggcccucgggggcccguggagaagaca

SEQ ID NO: 370795 - RNA, 32 nt, Homo Sapiens
cgcccgcccuccucugcccccucccccgcaga

SEQ ID NO: 370796 - RNA, 30 nt, Homo Sapiens
cugcuuuuuuuuaagggggaaaguaagaaa

SEQ ID NO: 370797 - RNA, 32 nt, Homo Sapiens
ccgcguccccgggacagcauggagcgcccgga

SEQ ID NO: 370798 - RNA, 32 nt, Homo Sapiens
cugcccgaggaccggccgccccgccaaagcgc

SEQ ID NO: 370799 - RNA, 32 nt, Homo Sapiens
gaccuggcacagagcaggccggcccuggcccc

SEQ ID NO: 370800 - RNA, 32 nt, Homo Sapiens
cccgaggcuuuacuucccgugcccacccaguc

SEQ ID NO: 370801 - RNA, 32 nt, Homo Sapiens
acugaagaauaaaaacuaaggaacaagaauga

SEQ ID NO: 370802 - RNA, 32 nt, Homo Sapiens
uggugccccccuccacccuaggaugugacucc

SEQ ID NO: 370803 - RNA, 32 nt, Homo Sapiens
uuuuuaagaaggaaaaagucaguauuucaagu

SEQ ID NO: 370804 - RNA, 32 nt, Homo Sapiens
gagggagagaacuuccuggggguagggugccc

SEQ ID NO: 370805 - RNA, 32 nt, Homo Sapiens
auggaaccaacuuuguacaucuuggccauguc

SEQ ID NO: 370806 - RNA, 32 nt, Homo Sapiens
uuauauaguuuaggaguaagagucuugcuuuu

SEQ ID NO: 370807 - RNA, 32 nt, Homo Sapiens
uauuauuagacaaauucauuauagaaaaaacc

SEQ ID NO: 370808 - RNA, 32 nt, Homo Sapiens
aacuucucuacccucuuccccauccccgcaag

SEQ ID NO: 370809 - RNA, 32 nt, Homo Sapiens
gcuucuucaggugagugcaggccaaggcgggg

SEQ ID NO: 370810 - RNA, 32 nt, Homo Sapiens
gaaggguaauuuccuuucugccugauuagcca

SEQ ID NO: 370811 - RNA, 32 nt, Homo Sapiens
agugauugaguacauuuaaaaauaccuuagcc

SEQ ID NO: 370812 - RNA, 32 nt, Homo Sapiens
agacgcugccagcaaggagcuugcagucuugu

SEQ ID NO: 370813 - RNA, 32 nt, Homo Sapiens
auuauuauuauuauuaaaaguuaauucaggac

SEQ ID NO: 370814 - RNA, 32 nt, Homo Sapiens
cugccugcacagcagagauaacccucuucccu

SEQ ID NO: 370815 - RNA, 32 nt, Homo Sapiens
ggaacucggaagcuacagccgaaggaaggugg

SEQ ID NO: 370816 - RNA, 32 nt, Homo Sapiens
accuggcagguuaaugcugauuauuccuuggc

SEQ ID NO: 370817 - RNA, 32 nt, Homo Sapiens
auguggcacugaccgcgucacauccacgcacu

SEQ ID NO: 370818 - RNA, 32 nt, Homo Sapiens
ugacaauuuugugaguuuuucaaaugugugua

SEQ ID NO: 370819 - RNA, 32 nt, Homo Sapiens
ucaggcuccgggccggccgaagggcgcaacuu

SEQ ID NO: 370820 - RNA, 32 nt, Homo Sapiens
agcuuuuauguaaaaauauauagugccuucag

SEQ ID NO: 370821 - RNA, 32 nt, Homo Sapiens
guuugaaggaacaagauuuucuuaagucaucc

SEQ ID NO: 370822 - RNA, 32 nt, Homo Sapiens
ccacaccccagcugcgacggcacaccaagcug

SEQ ID NO: 370823 - RNA, 32 nt, Homo Sapiens
uugggacuguccuuuuuccccugcccacuucc

SEQ ID NO: 370824 - RNA, 32 nt, Homo Sapiens
uuagcugggugugguggcgugugccuguaaug

SEQ ID NO: 370825 - RNA, 32 nt, Homo Sapiens
cucuggcuggcaucuggugggugccccucugg

SEQ ID NO: 370826 - RNA, 32 nt, Homo Sapiens
ccgccacaccacagccuaauucuuacugggac

SEQ ID NO: 370827 - RNA, 32 nt, Homo Sapiens
cggggggccuggugggggaggcagggcaggag

SEQ ID NO: 370828 - RNA, 32 nt, Homo Sapiens
aaggacagagccccagaauaaccccguugucc

SEQ ID NO: 370829 - RNA, 32 nt, Homo Sapiens
auucugaaauuuauugugauaauuuguauuuc

SEQ ID NO: 370830 - RNA, 32 nt, Homo Sapiens
aguagcaggacuugcucuaaauaaaaaauauu

SEQ ID NO: 370831 - RNA, 32 nt, Homo Sapiens
cucacuuucuaaaaugcuccuaccgucccauu

SEQ ID NO: 370832 - RNA, 32 nt, Homo Sapiens
gugucuuccaggugcugggccuagggaggcgc

SEQ ID NO: 370833 - RNA, 32 nt, Homo Sapiens
auugaucugcccguuucuucccugugcauuua

SEQ ID NO: 370834 - RNA, 32 nt, Homo Sapiens
cagguccucccgcgccaguguucgcagucccc

SEQ ID NO: 370835 - RNA, 32 nt, Homo Sapiens
gcagaauccaaaguaaauguccugcuagcuag

SEQ ID NO: 370836 - RNA, 32 nt, Homo Sapiens
ggaagugcgguguuaagcgccggcggcucgcg

SEQ ID NO: 370837 - RNA, 32 nt, Homo Sapiens
guaucaugaaccccacauuuaacacauuaagu

SEQ ID NO: 370838 - RNA, 32 nt, Homo Sapiens
agaccagugucuggaucccagcaucuucucca

SEQ ID NO: 370839 - RNA, 32 nt, Homo Sapiens
uguccacuucaucacaccccugcccugggccg

SEQ ID NO: 370840 - RNA, 32 nt, Homo Sapiens
aaaugaagucuaaaugugucagagaauuuaug

SEQ ID NO: 370841 - RNA, 32 nt, Homo Sapiens
aacuguacuguaaaguagcuccaaaacuuaau

SEQ ID NO: 370842 - RNA, 32 nt, Homo Sapiens
aaagguacaacagaauaaugcaugaugaacuc

SEQ ID NO: 370843 - RNA, 32 nt, Homo Sapiens
ucuguugcgccacugagacggcagagacccca

SEQ ID NO: 370844 - RNA, 32 nt, Homo Sapiens
aggaaaagauuauuauauaauuuuauaacugg

SEQ ID NO: 370845 - RNA, 32 nt, Homo Sapiens
ugcagcucacugacaggguugacaucaguaug

SEQ ID NO: 370846 - RNA, 32 nt, Homo Sapiens
ccccgcugcagugagagcugcgcccugguuuc

SEQ ID NO: 370847 - RNA, 32 nt, Homo Sapiens
acccucuauucuguuucuuccuccucacaugg

SEQ ID NO: 370848 - RNA, 32 nt, Homo Sapiens
ugggccgugcggcggcagcggcgccaagggau

SEQ ID NO: 370849 - RNA, 32 nt, Homo Sapiens
ccgcuggaacuuccgaagccuuggcgcggcag

SEQ ID NO: 370850 - RNA, 32 nt, Homo Sapiens
gccccuccggcucccacugccucccccgccgc

SEQ ID NO: 370851 - RNA, 32 nt, Homo Sapiens
ugaaccagcuccagcccucugcucuccucagc

SEQ ID NO: 370852 - RNA, 32 nt, Homo Sapiens
uguucaugcaaauauaaauuauguauucuaau

SEQ ID NO: 370853 - RNA, 32 nt, Homo Sapiens
ucugcaguggaggucgcgacugagggacggga

SEQ ID NO: 370854 - RNA, 32 nt, Homo Sapiens
agcuuuuaacgugagggucuuuauuggauagg

SEQ ID NO: 370855 - RNA, 32 nt, Homo Sapiens
gcagcgaguguuggguccucugcuuccugagc

SEQ ID NO: 370856 - RNA, 32 nt, Homo Sapiens
uugucugcuuugcaauagcaaagacuuggaac

SEQ ID NO: 370857 - RNA, 32 nt, Homo Sapiens
ccugcaaauuuauaucagacaacuucgcuuag

SEQ ID NO: 370858 - RNA, 32 nt, Homo Sapiens
ucgcgccugcuacaucaaagggcccgcgcaca

SEQ ID NO: 370859 - RNA, 32 nt, Homo Sapiens
cgguacugucgggccccggcccucuggagcuu

SEQ ID NO: 370860 - RNA, 32 nt, Homo Sapiens
aaucaaagggaagaggggagggauucgcaacu

SEQ ID NO: 370861 - RNA, 32 nt, Homo Sapiens
ucccucaggaggaagaggaguccugcagcgca

SEQ ID NO: 370862 - RNA, 32 nt, Homo Sapiens
uagguaaugaauuguagccaguuguuaauauc

SEQ ID NO: 370863 - RNA, 32 nt, Homo Sapiens
acuugggagcagccugcuggauccagaacaug

SEQ ID NO: 370864 - RNA, 32 nt, Homo Sapiens
agcacucugggggugucccccuccccccuuca

SEQ ID NO: 370865 - RNA, 32 nt, Homo Sapiens
gggcagggacccggggucuccuggaccuugac

SEQ ID NO: 370866 - RNA, 32 nt, Homo Sapiens
uggccgggaagguggcagcggcaccggaggga

SEQ ID NO: 370867 - RNA, 32 nt, Homo Sapiens
agcccaccaaccccuucacaccccccuucaca

SEQ ID NO: 370868 - RNA, 32 nt, Homo Sapiens
aaaauugcugagcagagcugagccagccagaa

SEQ ID NO: 370869 - RNA, 32 nt, Homo Sapiens
acaagagcuauaaucaaguagaauuaugcuuu

SEQ ID NO: 370870 - RNA, 30 nt, Homo Sapiens
aacgccggcgccuccguccccagccgcggc

SEQ ID NO: 370871 - RNA, 32 nt, Homo Sapiens
auaguaucuauagccauguacauauuacagca

SEQ ID NO: 370872 - RNA, 32 nt, Homo Sapiens
cugcggccacggucagagggccccacugugag

SEQ ID NO: 370873 - RNA, 32 nt, Homo Sapiens
agggcggagcugaguucuccucugcacagacu

SEQ ID NO: 370874 - RNA, 32 nt, Homo Sapiens
gaacgggucugagguggccgcgcagcccgcgg

SEQ ID NO: 370875 - RNA, 32 nt, Homo Sapiens
uguggccaacuccaucggaugaaugcacacgc

SEQ ID NO: 370876 - RNA, 32 nt, Homo Sapiens
acgacgcgggcauggcgggggcggccugcgag

SEQ ID NO: 370877 - RNA, 32 nt, Homo Sapiens
guggcuccuguccucccuccccaucccugacc

SEQ ID NO: 370878 - RNA, 32 nt, Homo Sapiens
gaggcccaacgcccccugaggaauucucuucc

SEQ ID NO: 370879 - RNA, 32 nt, Homo Sapiens
uguucuugugaguaaauaaaacuggcugguga

SEQ ID NO: 370880 - RNA, 32 nt, Homo Sapiens
aauaacaaacuccucugagcuaaaggagcaug

SEQ ID NO: 370881 - RNA, 32 nt, Homo Sapiens
aaaauuacagcuuuggaacugcaguggaugac

SEQ ID NO: 370882 - RNA, 30 nt, Homo Sapiens
cucugccaggaaaugggggaaggaacuaga

SEQ ID NO: 370883 - RNA, 32 nt, Homo Sapiens
ugaguagagauaaucaugguauuuucaucagc

SEQ ID NO: 370884 - RNA, 32 nt, Homo Sapiens
auggaaaugaaaauucuuaacuaaacuauaca

SEQ ID NO: 370885 - RNA, 32 nt, Homo Sapiens
cggggggcugccagcccugggaggccccaaca

SEQ ID NO: 370886 - RNA, 32 nt, Homo Sapiens
cgcaggggugggagggcggccgcaggcucucc

SEQ ID NO: 370887 - RNA, 32 nt, Homo Sapiens
uuaccauguuuuccagucuguuuaacuucugc

SEQ ID NO: 370888 - RNA, 32 nt, Homo Sapiens
aauguaauauauuaaagccuuauauauaauga

SEQ ID NO: 370889 - RNA, 32 nt, Homo Sapiens
cggcagggaaacggucucuuauggaaacuggg

SEQ ID NO: 370890 - RNA, 31 nt, Homo Sapiens
cuuaggguugguuccccuucauucuugagcu

SEQ ID NO: 370891 - RNA, 32 nt, Homo Sapiens
caaauuucaagacaauguuggaugcaaacgga

SEQ ID NO: 370892 - RNA, 32 nt, Homo Sapiens
gaccccgccucccagccccaggggugccugug

SEQ ID NO: 370893 - RNA, 32 nt, Homo Sapiens
auuuuggucccacagaggcaucagcuucagug

SEQ ID NO: 370894 - RNA, 32 nt, Homo Sapiens
uggacccugagugauggggccggcgccagcug

SEQ ID NO: 370895 - RNA, 32 nt, Homo Sapiens
uugcucccugguuuccuggucaccaacucgag

SEQ ID NO: 370896 - RNA, 31 nt, Homo Sapiens
gaggauuggcacugcuucccuccugugugag

SEQ ID NO: 370897 - RNA, 32 nt, Homo Sapiens
cauaaucacuugcaauuucauuguaaaaugaa

SEQ ID NO: 370898 - RNA, 32 nt, Homo Sapiens
uauuaaagaaguacugacuuuaccaaaagaau

SEQ ID NO: 370899 - RNA, 32 nt, Homo Sapiens
ugaaucucucucccuuguuuuuauuacguuuc

SEQ ID NO: 370900 - RNA, 30 nt, Homo Sapiens
gguaaacuggggcgcgcggguuggaggcgc

SEQ ID NO: 370901 - RNA, 32 nt, Homo Sapiens
acucuggcucugccaccugcugcuccugugac

SEQ ID NO: 370902 - RNA, 32 nt, Homo Sapiens
cuuaagucagccugcuggccuccccagcugcu

SEQ ID NO: 370903 - RNA, 32 nt, Homo Sapiens
ucacggcagggccucucuggggccuagaaguc

SEQ ID NO: 370904 - RNA, 32 nt, Homo Sapiens
ccugcccgcgcgccgggccgccugacugcacg

SEQ ID NO: 370905 - RNA, 32 nt, Homo Sapiens
uaguuuuagacuauguaugauguguuguugua

SEQ ID NO: 370906 - RNA, 32 nt, Homo Sapiens
ugaaguuaauguggcagaacuuccagaggaaa

SEQ ID NO: 370907 - RNA, 32 nt, Homo Sapiens
ucccaguguuuguggugguggaucugccuggu

SEQ ID NO: 370908 - RNA, 32 nt, Homo Sapiens
aaaucuucaaaaacuauuaaauggauaucagc

SEQ ID NO: 370909 - RNA, 32 nt, Homo Sapiens
ucugggugaacagcagcguguccgccggcagc

SEQ ID NO: 370910 - RNA, 30 nt, Homo Sapiens
uuugcagagaagcuggagucccugcugcac

SEQ ID NO: 370911 - RNA, 32 nt, Homo Sapiens
ucugccgagaccccaagaacucggggugucag

SEQ ID NO: 370912 - RNA, 32 nt, Homo Sapiens
accauucuggccaacauagugaaaccccgucu

SEQ ID NO: 370913 - RNA, 32 nt, Homo Sapiens
guccuggcaucauuagucccagauagcugcau

SEQ ID NO: 370914 - RNA, 32 nt, Homo Sapiens
guuucuuuaaacaacuuucagauucuguugac

SEQ ID NO: 370915 - RNA, 32 nt, Homo Sapiens
uuguagcgcgcccucuggguaggcggcuguag

SEQ ID NO: 370916 - RNA, 32 nt, Homo Sapiens
guacagaaaccacaacucugcagagaaccgca

SEQ ID NO: 370917 - RNA, 32 nt, Homo Sapiens
uguugaaguuuuaaaaagugauuuguauguca

SEQ ID NO: 370918 - RNA, 32 nt, Homo Sapiens
acagccugcagucuggagacaagcucuuccgg

SEQ ID NO: 370919 - RNA, 32 nt, Homo Sapiens
gaggggagugaacagugccuauuguugaaaag

SEQ ID NO: 370920 - RNA, 32 nt, Homo Sapiens
cuacgccgcccggucgccagggagagugaaua

SEQ ID NO: 370921 - RNA, 32 nt, Homo Sapiens
auguuauuaguguccuuuuuuauuucuaaugc

SEQ ID NO: 370922 - RNA, 32 nt, Homo Sapiens
gcccacauccugcauucauguaaacaguuugc

SEQ ID NO: 370923 - RNA, 32 nt, Homo Sapiens
guacgaggcacgcuaacaaggaugcuguacac

SEQ ID NO: 370924 - RNA, 32 nt, Homo Sapiens
agcgaggcuccagcuuggcugcacccagcuga

SEQ ID NO: 370925 - RNA, 32 nt, Homo Sapiens
acugcauuucccuuuggguuccauguuuuccu

SEQ ID NO: 370926 - RNA, 32 nt, Homo Sapiens
agacaaguagagugaggccuauggcuucauca

SEQ ID NO: 370927 - RNA, 32 nt, Homo Sapiens
uggucauuugucaauauucagucaccaauucu

SEQ ID NO: 370928 - RNA, 32 nt, Homo Sapiens
ccgggcggguggcagguggaggugucaggcug

SEQ ID NO: 370929 - RNA, 30 nt, Homo Sapiens
ucugaaucauaccacucccaucuuaggcuu

SEQ ID NO: 370930 - RNA, 32 nt, Homo Sapiens
uccugcugacaccccgcggugggucccuggag

SEQ ID NO: 370931 - RNA, 32 nt, Homo Sapiens
gcugagaaauuccacacaugaguauugugaug

SEQ ID NO: 370932 - RNA, 32 nt, Homo Sapiens
gaugguuggugguuuuccugcauuguaucuuu

SEQ ID NO: 370933 - RNA, 32 nt, Homo Sapiens
auugcugcgggcccgggcccucaccucaccug

SEQ ID NO: 370934 - RNA, 32 nt, Homo Sapiens
aaugcuguucuucucuccuaaguugaaaucag

SEQ ID NO: 370935 - RNA, 32 nt, Homo Sapiens
uugcugugguuuucccggauuguguguaggug

SEQ ID NO: 370936 - RNA, 32 nt, Homo Sapiens
gagcaugcgcuuccuuccucacuuccucucca

SEQ ID NO: 370937 - RNA, 30 nt, Homo Sapiens
gcauccuucugugcugcagcgggcagagug

SEQ ID NO: 370938 - RNA, 32 nt, Homo Sapiens
cagccaggccccagucccagccccaaccccag

SEQ ID NO: 370939 - RNA, 32 nt, Homo Sapiens
agcguggaaggggggcauucucugucaaugau

SEQ ID NO: 370940 - RNA, 30 nt, Homo Sapiens
acaucuuuuauaaugggggaagaaugcccu

SEQ ID NO: 370941 - RNA, 32 nt, Homo Sapiens
ccuugggcagggcagcagcugcugccacagcc

SEQ ID NO: 370942 - RNA, 32 nt, Homo Sapiens
caagcccgccucacugccccccgccagccagg

SEQ ID NO: 370943 - RNA, 27 nt, Homo Sapiens
ugacugguuuucuucagucccuuuauc

SEQ ID NO: 370944 - RNA, 32 nt, Homo Sapiens
gcccaggagugaauuauuuccaggcgccauca

SEQ ID NO: 370945 - RNA, 32 nt, Homo Sapiens
uccacugaaacaaggcuaaggauacuaccaac

SEQ ID NO: 370946 - RNA, 32 nt, Homo Sapiens
agagaaaaacaaaagucaacagacaguacugu

SEQ ID NO: 370947 - RNA, 32 nt, Homo Sapiens
ugcccagucccucuccucccagcccaugguaa

SEQ ID NO: 370948 - RNA, 32 nt, Homo Sapiens
agagauuuauuuuugcagacagacucuuccau

SEQ ID NO: 370949 - RNA, 32 nt, Homo Sapiens
gcuuagggagcccguccggccaugguggccgc

SEQ ID NO: 370950 - RNA, 32 nt, Homo Sapiens
gcccuguuaagacggcuuaaccacugagaucc

SEQ ID NO: 370951 - RNA, 29 nt, Homo Sapiens
ccgcgccggggacagucagggaugcuccc

SEQ ID NO: 370952 - RNA, 32 nt, Homo Sapiens
uguauuuguaaguuauugguggcucauuuaaa

SEQ ID NO: 370953 - RNA, 32 nt, Homo Sapiens
uguagagugggaagagauggagucugugaagc

SEQ ID NO: 370954 - RNA, 32 nt, Homo Sapiens
gcuauuaggaaauucugaugagcauuacuauu

SEQ ID NO: 370955 - RNA, 32 nt, Homo Sapiens
gccagcuggaggugaagugcaggaaaggaaag

SEQ ID NO: 370956 - RNA, 30 nt, Homo Sapiens
ucugcacaggguucucuugagucuguacug

SEQ ID NO: 370957 - RNA, 32 nt, Homo Sapiens
gacuguggcugcuagcacuuggagccaagggu

SEQ ID NO: 370958 - RNA, 32 nt, Homo Sapiens
aggccaggaccgaguuggacuguugguagaaa

SEQ ID NO: 370959 - RNA, 32 nt, Homo Sapiens
uaaggaggcaaauagaagaaugagauacugau

SEQ ID NO: 370960 - RNA, 32 nt, Homo Sapiens
uaacccgcgcgggggaggccgacgucggucgg

SEQ ID NO: 370961 - RNA, 32 nt, Homo Sapiens
uccuuccacacuuccacccccagcuccuuucc

SEQ ID NO: 370962 - RNA, 32 nt, Homo Sapiens
gcuccugccuccucacaccucauuccacaaau

SEQ ID NO: 370963 - RNA, 32 nt, Homo Sapiens
uaaucacaguugucugaccugauuccaacuua

SEQ ID NO: 370964 - RNA, 32 nt, Homo Sapiens
uuuuuguagaaaguuggcauuggaaucugugg

SEQ ID NO: 370965 - RNA, 32 nt, Homo Sapiens
cuugucccugaacuucguuguaccagugcaug

SEQ ID NO: 370966 - RNA, 32 nt, Homo Sapiens
uaaucgaaaugaauuuaucugaauauaggaag

SEQ ID NO: 370967 - RNA, 32 nt, Homo Sapiens
uugggagcggcuucgggagcgaaggagcugcu

SEQ ID NO: 370968 - RNA, 32 nt, Homo Sapiens
uccacaccaugcaaacaaaacucuaacagcaa

SEQ ID NO: 370969 - RNA, 32 nt, Homo Sapiens
gagcccgaggaagaggcaggcagaggcugagg

SEQ ID NO: 370970 - RNA, 32 nt, Homo Sapiens
gauaaaggaaagagauguggcuuuugugauau

SEQ ID NO: 370971 - RNA, 32 nt, Homo Sapiens
cccgacaugccuggcuuguugcagcuucugug

SEQ ID NO: 370972 - RNA, 32 nt, Homo Sapiens
agagcucuuuuugccuuuggcuuucaauucca

SEQ ID NO: 370973 - RNA, 32 nt, Homo Sapiens
ucuagaauggauuuuucccggagccggaagcc

SEQ ID NO: 370974 - RNA, 32 nt, Homo Sapiens
augcuuuaaguacgaaaggguuugugccaaua

SEQ ID NO: 370975 - RNA, 32 nt, Homo Sapiens
augaaaaaaugagguuaggagauacaaaguag

SEQ ID NO: 370976 - RNA, 32 nt, Homo Sapiens
gcuggggcgggaaggcgggcgcugggggcgcu

SEQ ID NO: 370977 - RNA, 32 nt, Homo Sapiens
ccaaacaucuucuguacgaccucacacagccu

SEQ ID NO: 370978 - RNA, 32 nt, Homo Sapiens
uaauuuuuucccuuuuugauuaggguuacaaa

SEQ ID NO: 370979 - RNA, 32 nt, Homo Sapiens
cagcaguuaugaacuugaguuuguaaauuguu

SEQ ID NO: 370980 - RNA, 32 nt, Homo Sapiens
ugcaucucccaccuccuccccagcgcugccug

SEQ ID NO: 370981 - RNA, 32 nt, Homo Sapiens
uaaggaaugaacugguucaaggcgcguccuac

SEQ ID NO: 370982 - RNA, 32 nt, Homo Sapiens
agccuucaggacugcuggccuggccuggccca

SEQ ID NO: 370983 - RNA, 32 nt, Homo Sapiens
gcagagacccucggaccccugcagggccugga

SEQ ID NO: 370984 - RNA, 32 nt, Homo Sapiens
gacugcaugucaaggagaaucuccaugaugac

SEQ ID NO: 370985 - RNA, 32 nt, Homo Sapiens
cauuggcacaugccaccuggcaaaggacccuu

SEQ ID NO: 370986 - RNA, 32 nt, Homo Sapiens
caauaaaaacuucuauuuuuuauuuuaaaaua

SEQ ID NO: 370987 - RNA, 32 nt, Homo Sapiens
ccuucaauauauuaucuguuggauuauuggau

SEQ ID NO: 370988 - RNA, 32 nt, Homo Sapiens
agcuggggagguuuggccccaacagcccuccu

SEQ ID NO: 370989 - RNA, 32 nt, Homo Sapiens
auuaacaauuuggacaagacagcaaaugcuau

SEQ ID NO: 370990 - RNA, 32 nt, Homo Sapiens
uugucugccaaaugcuugggaguuguuugauc

SEQ ID NO: 370991 - RNA, 32 nt, Homo Sapiens
uccugccgcccccagcuuugccuggacacuga

SEQ ID NO: 370992 - RNA, 32 nt, Homo Sapiens
caaacugaaaggaaagugacuucacacgagca

SEQ ID NO: 370993 - RNA, 32 nt, Homo Sapiens
agacugcgguaguguuuuccuucuuuccuugg

SEQ ID NO: 370994 - RNA, 32 nt, Homo Sapiens
ugcauaggcucuuuuuaaaggugcuuucacau

SEQ ID NO: 370995 - RNA, 32 nt, Homo Sapiens
uguauuuuaucuauaguuauuuagacauguuu

SEQ ID NO: 370996 - RNA, 32 nt, Homo Sapiens
gaggcugcgaggagccggcgcggucgcagucu

SEQ ID NO: 370997 - RNA, 30 nt, Homo Sapiens
cagucugucugugcucucaaaaacuuuagu

SEQ ID NO: 370998 - RNA, 32 nt, Homo Sapiens
guuuaucaaaaauauguuccgagugcaaugcc

SEQ ID NO: 370999 - RNA, 32 nt, Homo Sapiens
ccgcauccugacgaaauugucuggucaccaga

SEQ ID NO: 371000 - RNA, 32 nt, Homo Sapiens
uuuuuucucgcugggcagcuugaggggcuggg

SEQ ID NO: 371001 - RNA, 27 nt, Homo Sapiens
caacccaucuccuacagcccccugccu

SEQ ID NO: 371002 - RNA, 32 nt, Homo Sapiens
guggugcaggaccagcugggagccgcuguggu

SEQ ID NO: 371003 - RNA, 32 nt, Homo Sapiens
ccuuggcuggcauggcggcgagcgcgcugcga

SEQ ID NO: 371004 - RNA, 32 nt, Homo Sapiens
cguaauuucugcacuuugggagacugaggugg

SEQ ID NO: 371005 - RNA, 32 nt, Homo Sapiens
ggcuugaaggcacauggcuuucucauguaggg

SEQ ID NO: 371006 - RNA, 32 nt, Homo Sapiens
ggcugagauaaaagacuguuggggccaccuga

SEQ ID NO: 371007 - RNA, 32 nt, Homo Sapiens
agauuauaauuuccuugguuucuguuaccacu

SEQ ID NO: 371008 - RNA, 32 nt, Homo Sapiens
uucugucucccuuaaacuguuaaacuugaaga

SEQ ID NO: 371009 - RNA, 32 nt, Homo Sapiens
gaguaaugcucgucuguguguuuuaguuucau

SEQ ID NO: 371010 - RNA, 32 nt, Homo Sapiens
aucccaacagaagagaaaauauuuuuauauuu

SEQ ID NO: 371011 - RNA, 32 nt, Homo Sapiens
guugccaagaacugaaaacauaaaaaguuaaa

SEQ ID NO: 371012 - RNA, 32 nt, Homo Sapiens
guuauuaaauuuauuauuuaagaugguagcac

SEQ ID NO: 371013 - RNA, 30 nt, Homo Sapiens
gcgggacggaagugagcgggucccgccccu

SEQ ID NO: 371014 - RNA, 32 nt, Homo Sapiens
aaaguaugaacuggagaggguaccucaguuau

SEQ ID NO: 371015 - RNA, 32 nt, Homo Sapiens
ggcacgggguugcggaucccgcggccgcgguu

SEQ ID NO: 371016 - RNA, 32 nt, Homo Sapiens
gcugucagaaaagggcugggcuugggaagggg

SEQ ID NO: 371017 - RNA, 32 nt, Homo Sapiens
agugcaggcagaguccggaggcuggugcuuuc

SEQ ID NO: 371018 - RNA, 32 nt, Homo Sapiens
auuaauaccggcggcccgggaggggggcgcag

SEQ ID NO: 371019 - RNA, 32 nt, Homo Sapiens
gcgccacgcgccgcgcuucgugacgccccuca

SEQ ID NO: 371020 - RNA, 32 nt, Homo Sapiens
ugucacuccuugcuccucucccuccugccuca

SEQ ID NO: 371021 - RNA, 32 nt, Homo Sapiens
cauacuucuuuauuauugauaauuuuauuuuc

SEQ ID NO: 371022 - RNA, 32 nt, Homo Sapiens
uaccuuuucccugccucgcuccagguuuuagu

SEQ ID NO: 371023 - RNA, 32 nt, Homo Sapiens
ucacuuuguauccacugggcacagauauucua

SEQ ID NO: 371024 - RNA, 32 nt, Homo Sapiens
cauuuuccuuuauuccgauuauagaauaaagu

SEQ ID NO: 371025 - RNA, 32 nt, Homo Sapiens
gaggccgccccgcuccaucccgaggcagccag

SEQ ID NO: 371026 - RNA, 32 nt, Homo Sapiens
cguguuauagaaugaacuugcauaauuauaua

SEQ ID NO: 371027 - RNA, 32 nt, Homo Sapiens
uagauaaggauagcagcaaacaaucauuggag

SEQ ID NO: 371028 - RNA, 31 nt, Homo Sapiens
aauaaaaacagaaucuuuguauaucaaaauc

SEQ ID NO: 371029 - RNA, 31 nt, Homo Sapiens
auaucagaauaaaaauaaauguauacucacu

SEQ ID NO: 371030 - RNA, 32 nt, Homo Sapiens
uauaacaaaaauaccagaaacuggcagcuuau

SEQ ID NO: 371031 - RNA, 32 nt, Homo Sapiens
agcccuaucaguauaaaauuugaaagaaaaaa

SEQ ID NO: 371032 - RNA, 32 nt, Homo Sapiens
agcgguggcagacaccgcagaagcaaagagca

SEQ ID NO: 371033 - RNA, 32 nt, Homo Sapiens
aacucuuugucaaagucaucaucaauuuccau

SEQ ID NO: 371034 - RNA, 32 nt, Homo Sapiens
uaucccaugcuguuuaacuaucucuuccacag

SEQ ID NO: 371035 - RNA, 32 nt, Homo Sapiens
agguuuaggguacagggagagaagguaggacg

SEQ ID NO: 371036 - RNA, 32 nt, Homo Sapiens
acuucaaaaucaugcauaguaaaugagaaagc

SEQ ID NO: 371037 - RNA, 32 nt, Homo Sapiens
cacccaacgcucuggcagggucugcgcagccg

SEQ ID NO: 371038 - RNA, 29 nt, Homo Sapiens
cuguuugugacuuucaaccugaacuaugg

SEQ ID NO: 371039 - RNA, 32 nt, Homo Sapiens
gagcgguggcggcggcagaggcggcggcucca

SEQ ID NO: 371040 - RNA, 32 nt, Homo Sapiens
gggccauuacaaucaacaaggacacaaagcua

SEQ ID NO: 371041 - RNA, 32 nt, Homo Sapiens
ggaacagacaccuuuuauuauugucuucggaa

SEQ ID NO: 371042 - RNA, 32 nt, Homo Sapiens
ccuguccucacuccugcccaccccucaggcug

SEQ ID NO: 371043 - RNA, 32 nt, Homo Sapiens
caacauaauuuucuaagaauucauugaaauuu

SEQ ID NO: 371044 - RNA, 32 nt, Homo Sapiens
ggaaacuggagcuuaaauucuggcggcgagau

SEQ ID NO: 371045 - RNA, 32 nt, Homo Sapiens
cacgcucccuggcgcguacggccugccaccac

SEQ ID NO: 371046 - RNA, 32 nt, Homo Sapiens
gguuaggacucagaggaaauacggaaaaaaca

SEQ ID NO: 371047 - RNA, 32 nt, Homo Sapiens
acuucagcgaggaggaugugguguggcggaca

SEQ ID NO: 371048 - RNA, 32 nt, Homo Sapiens
ccucgggaacccccuggguccgcggcccuggc

SEQ ID NO: 371049 - RNA, 32 nt, Homo Sapiens
ggcgagcacccuucccaccccaucccaggccg

SEQ ID NO: 371050 - RNA, 32 nt, Homo Sapiens
cauggauuucguuuuucuugggguacucuuga

SEQ ID NO: 371051 - RNA, 28 nt, Homo Sapiens
aaauaaaacucuaagcaaauguguguac

SEQ ID NO: 371052 - RNA, 32 nt, Homo Sapiens
caccgauccagggaucauugucuaaauagguu

SEQ ID NO: 371053 - RNA, 32 nt, Homo Sapiens
gaauucagauguaauuuuuuaccuugauuugg

SEQ ID NO: 371054 - RNA, 32 nt, Homo Sapiens
cuggagggggagagggggaggaagaaguaugc

SEQ ID NO: 371055 - RNA, 31 nt, Homo Sapiens
cgcuugcagagagcgcgguccacucugcucu

SEQ ID NO: 371056 - RNA, 32 nt, Homo Sapiens
agaaagcaauagggcggggaaugccgcaccuc

SEQ ID NO: 371057 - RNA, 28 nt, Homo Sapiens
acuuuguuaaaauaaacaaauuaaaagg

SEQ ID NO: 371058 - RNA, 32 nt, Homo Sapiens
ggaucucgcagugggcagacgaccaccugcgc

SEQ ID NO: 371059 - RNA, 32 nt, Homo Sapiens
ccagccccggcguccgcccaggcaugguagcc

SEQ ID NO: 371060 - RNA, 32 nt, Homo Sapiens
uugccacucccacgguccuguguguuccagau

SEQ ID NO: 371061 - RNA, 32 nt, Homo Sapiens
acccucccaccccuccuccccgcgccaugcuu

SEQ ID NO: 371062 - RNA, 32 nt, Homo Sapiens
agcaccgcccccucccuggcccugccccuagc

SEQ ID NO: 371063 - RNA, 32 nt, Homo Sapiens
ccccaaacuucuuuucuuuucuacuguuuaac

SEQ ID NO: 371064 - RNA, 32 nt, Homo Sapiens
ggguguuacauaucuuccugugccccuucucc

SEQ ID NO: 371065 - RNA, 32 nt, Homo Sapiens
accccauuacuguaccucuggagucacuacug

SEQ ID NO: 371066 - RNA, 32 nt, Homo Sapiens
accugucccccuccucgcagcagccucgggac

SEQ ID NO: 371067 - RNA, 32 nt, Homo Sapiens
ucagaaaggaacugaggcuugccaauaaucau

SEQ ID NO: 371068 - RNA, 32 nt, Homo Sapiens
uuuaaguacaaauaaacaauauauugacuauc

SEQ ID NO: 371069 - RNA, 32 nt, Homo Sapiens
ugugcugccaaaccucuccucugcugcaguuu

SEQ ID NO: 371070 - RNA, 32 nt, Homo Sapiens
aaucaggagguugggcuagaucaguguuuuuc

SEQ ID NO: 371071 - RNA, 32 nt, Homo Sapiens
auucacucuuuguuuaccauucaaauggcuua

SEQ ID NO: 371072 - RNA, 32 nt, Homo Sapiens
caccgugucggaggcgaggcgaggaagggagc

SEQ ID NO: 371073 - RNA, 32 nt, Homo Sapiens
ggacaagucuuucuccucuuugagaccccagu

SEQ ID NO: 371074 - RNA, 32 nt, Homo Sapiens
ccguccugcccggcuccgguccggaucucgag

SEQ ID NO: 371075 - RNA, 32 nt, Homo Sapiens
aagaccaccaaaaagcgcccucagcgcacaac

SEQ ID NO: 371076 - RNA, 32 nt, Homo Sapiens
cgccagcgucccgugcgccugccgccccggga

SEQ ID NO: 371077 - RNA, 32 nt, Homo Sapiens
acaaguuggggaggaggagagacgcaaggccg

SEQ ID NO: 371078 - RNA, 32 nt, Homo Sapiens
ccccucuccagcugcauucgccucggcuaugu

SEQ ID NO: 371079 - RNA, 32 nt, Homo Sapiens
ggcuucacucuucgaaccuggaccacagucuc

SEQ ID NO: 371080 - RNA, 32 nt, Homo Sapiens
accuggguagcuucuuuuuugugacuuugggg

SEQ ID NO: 371081 - RNA, 32 nt, Homo Sapiens
gguaacuggaaaugaagacagaaggacuugag

SEQ ID NO: 371082 - RNA, 32 nt, Homo Sapiens
caacauucugcucugaacgaaaaguaauuuua

SEQ ID NO: 371083 - RNA, 32 nt, Homo Sapiens
uaggcuaucuuauauuugauauuuggaagaaa

SEQ ID NO: 371084 - RNA, 32 nt, Homo Sapiens
cguggguguggcuggcucucggcccugcccag

SEQ ID NO: 371085 - RNA, 31 nt, Homo Sapiens
ucugagcugccggugcucaaguccuugcuau

SEQ ID NO: 371086 - RNA, 32 nt, Homo Sapiens
accuggcuccuggcuccuggcucccuacucuu

SEQ ID NO: 371087 - RNA, 32 nt, Homo Sapiens
uggcuaaacaugucagaacaaacaaccaacca

SEQ ID NO: 371088 - RNA, 32 nt, Homo Sapiens
cgaaugcauuuaaaaauauuuucuaugugaga

SEQ ID NO: 371089 - RNA, 32 nt, Homo Sapiens
aacagguaaaaagccucacccagaugaccccc

SEQ ID NO: 371090 - RNA, 32 nt, Homo Sapiens
ggggcccugccagcuccagcaccacccuugcc

SEQ ID NO: 371091 - RNA, 32 nt, Homo Sapiens
caugaaugaagauagguuguaaacugaaugcu

SEQ ID NO: 371092 - RNA, 32 nt, Homo Sapiens
ccggccgcguccuccgggcauggaaggaggcg

SEQ ID NO: 371093 - RNA, 32 nt, Homo Sapiens
ugaauguaacaaguaugggaaagccuuuacuc

SEQ ID NO: 371094 - RNA, 32 nt, Homo Sapiens
cuuuuagguggaagaagugagggugcagcgug

SEQ ID NO: 371095 - RNA, 32 nt, Homo Sapiens
gggccggagggccagggucucccggaggugga

SEQ ID NO: 371096 - RNA, 32 nt, Homo Sapiens
gaacaggaagccaugcagauacccagcaugga

SEQ ID NO: 371097 - RNA, 32 nt, Homo Sapiens
uaucuccuucucggcuccccagcccagucuug

SEQ ID NO: 371098 - RNA, 32 nt, Homo Sapiens
aacuuuacugaauuucaguacauuaguuuuua

SEQ ID NO: 371099 - RNA, 32 nt, Homo Sapiens
ucuucuuaauaaaacuuuaaaauuuggcaaaa

SEQ ID NO: 371100 - RNA, 32 nt, Homo Sapiens
uagcagacgagcaauuccauuuguucuucucc

SEQ ID NO: 371101 - RNA, 32 nt, Homo Sapiens
cauguagauuuguuaaauguguguguauagua

SEQ ID NO: 371102 - RNA, 32 nt, Homo Sapiens
gcgcggagcucgccggagacgccggguggccg

SEQ ID NO: 371103 - RNA, 32 nt, Homo Sapiens
aaucuuuuugucuuuauagugaaacaaagcca

SEQ ID NO: 371104 - RNA, 32 nt, Homo Sapiens
cuucucuuugcaaucaugaacauauaagauau

SEQ ID NO: 371105 - RNA, 32 nt, Homo Sapiens
gacacccagugccaggggcugccucgcccgga

SEQ ID NO: 371106 - RNA, 32 nt, Homo Sapiens
ucaggggauacaugugcauguucgucacaggg

SEQ ID NO: 371107 - RNA, 32 nt, Homo Sapiens
cccgaguuccuuccccucccccgagccucugc

SEQ ID NO: 371108 - RNA, 32 nt, Homo Sapiens
acauaucucacauauaauguaauuucccuaaa

SEQ ID NO: 371109 - RNA, 32 nt, Homo Sapiens
ggcuggucucgaacuucgggccccaagccauc

SEQ ID NO: 371110 - RNA, 32 nt, Homo Sapiens
gcgggucccucauacaggugugugcuuagcca

SEQ ID NO: 371111 - RNA, 32 nt, Homo Sapiens
ggcugguccggccccaggugugggguccgcuc

SEQ ID NO: 371112 - RNA, 32 nt, Homo Sapiens
ugggccguggaggugggggcgguggugcugga

SEQ ID NO: 371113 - RNA, 32 nt, Homo Sapiens
ugagacggccugggcaggccgaggcugagaaa

SEQ ID NO: 371114 - RNA, 32 nt, Homo Sapiens
ccuaccgccuuggccuggcacccgcgggcagg

SEQ ID NO: 371115 - RNA, 32 nt, Homo Sapiens
agcaguguuugcacggcaagcgcagcuuuuau

SEQ ID NO: 371116 - RNA, 32 nt, Homo Sapiens
uacaaagcacugccucuacugggcgugcugcc

SEQ ID NO: 371117 - RNA, 32 nt, Homo Sapiens
uaauucuaagacuuuugaauuuucauuuuuua

SEQ ID NO: 371118 - RNA, 32 nt, Homo Sapiens
cuccugccuugaugaagcccguguccugccuu

SEQ ID NO: 371119 - RNA, 32 nt, Homo Sapiens
aaugcccuggagguggcggggaguuguugauu

SEQ ID NO: 371120 - RNA, 32 nt, Homo Sapiens
cugcucaggaagaacucagagaagauccagau

SEQ ID NO: 371121 - RNA, 32 nt, Homo Sapiens
gaugccuucuaaaagaacaacugcuuuuuuac

SEQ ID NO: 371122 - RNA, 32 nt, Homo Sapiens
guuugugguucuggaugaaaucuuugcaaagg

SEQ ID NO: 371123 - RNA, 32 nt, Homo Sapiens
auauauacauauauauauauuauaaauauugc

SEQ ID NO: 371124 - RNA, 32 nt, Homo Sapiens
uugaaugcagaugcaauuuaauauaauagauu

SEQ ID NO: 371125 - RNA, 32 nt, Homo Sapiens
gugggccgugcagcugguuccucucgagcgag

SEQ ID NO: 371126 - RNA, 32 nt, Homo Sapiens
accacugcacuccagccugggcgacagaccga

SEQ ID NO: 371127 - RNA, 32 nt, Homo Sapiens
gcuauuuuuggagccagaauuuucaugucuga

SEQ ID NO: 371128 - RNA, 32 nt, Homo Sapiens
ccaaaagggccccuccuugccaggggagagac

SEQ ID NO: 371129 - RNA, 32 nt, Homo Sapiens
gcacacccugcccgcuggccccaggaccugca

SEQ ID NO: 371130 - RNA, 32 nt, Homo Sapiens
ucugcagagccugagcugcugcuguggugugg

SEQ ID NO: 371131 - RNA, 32 nt, Homo Sapiens
ccuccgacgaucggggacccuggcgggcggca

SEQ ID NO: 371132 - RNA, 32 nt, Homo Sapiens
acagcauggaggcagauguggggcugagcugg

SEQ ID NO: 371133 - RNA, 32 nt, Homo Sapiens
aaacaaggagggcagaauaggcagaggccucu

SEQ ID NO: 371134 - RNA, 32 nt, Homo Sapiens
ccaaaaaugaauucagaaguuccauagaugga

SEQ ID NO: 371135 - RNA, 32 nt, Homo Sapiens
ugauaaacaaagucuauaaaauaaaacauggg

SEQ ID NO: 371136 - RNA, 32 nt, Homo Sapiens
uuaaaaagcugagaugcaucccaggaggcaaa

SEQ ID NO: 371137 - RNA, 32 nt, Homo Sapiens
gcagccaaaccagcugaugaagaacugcugcc

SEQ ID NO: 371138 - RNA, 32 nt, Homo Sapiens
ucccaucuuuugccugcaggcagggaaagugu

SEQ ID NO: 371139 - RNA, 32 nt, Homo Sapiens
gggaccugaaccuggagcacuuaccgcauuag

SEQ ID NO: 371140 - RNA, 32 nt, Homo Sapiens
gauaccacauaaaagaauguagaauggcugaa

SEQ ID NO: 371141 - RNA, 32 nt, Homo Sapiens
uauuaaaaaugaaagcucaaaauggcuaggug

SEQ ID NO: 371142 - RNA, 32 nt, Homo Sapiens
acugaaggcgccuggguucccggacucggcca

SEQ ID NO: 371143 - RNA, 32 nt, Homo Sapiens
agaagagugacuuauuuugucuuauucuuaag

SEQ ID NO: 371144 - RNA, 32 nt, Homo Sapiens
uuuuuaaucuguguucaaaaauggaguucaua

SEQ ID NO: 371145 - RNA, 32 nt, Homo Sapiens
ucuaaaccgcuugccuuaaaucuuugaccuuc

SEQ ID NO: 371146 - RNA, 32 nt, Homo Sapiens
uacaucaaccucaagccagccagaaaguaccg

SEQ ID NO: 371147 - RNA, 32 nt, Homo Sapiens
cucguccgcgcgcagcucccucagcuucgcag

SEQ ID NO: 371148 - RNA, 32 nt, Homo Sapiens
gcugcuggaagagaagcaggagggguguuuuu

SEQ ID NO: 371149 - RNA, 32 nt, Homo Sapiens
caucccagggaagaaggaggggacugcgugua

SEQ ID NO: 371150 - RNA, 32 nt, Homo Sapiens
gagguccgcgcagcugcuggggaagagcccac

SEQ ID NO: 371151 - RNA, 32 nt, Homo Sapiens
aaguugucucuugauguacaaaccccaaagca

SEQ ID NO: 371152 - RNA, 32 nt, Homo Sapiens
acauguuuacagaacuguuguuuacuuguugc

SEQ ID NO: 371153 - RNA, 32 nt, Homo Sapiens
cuauaacaccccugaugguggugcuguccauu

SEQ ID NO: 371154 - RNA, 32 nt, Homo Sapiens
acuaucuuagaauaaacuucauguggauauau

SEQ ID NO: 371155 - RNA, 32 nt, Homo Sapiens
gauguagugcguaauugaucagagcaaaacau

SEQ ID NO: 371156 - RNA, 32 nt, Homo Sapiens
ggccuuggaaaacgacugucuucuucugccaa

SEQ ID NO: 371157 - RNA, 28 nt, Homo Sapiens
guuccacaguuguugauguguuugugug

SEQ ID NO: 371158 - RNA, 32 nt, Homo Sapiens
ucgguggaauccugggguccuccaaaucuacc

SEQ ID NO: 371159 - RNA, 32 nt, Homo Sapiens
gaucuugaaccgucuguggaggaggcaagaua

SEQ ID NO: 371160 - RNA, 32 nt, Homo Sapiens
ugugccugaccugcugcagacucagcgaggca

SEQ ID NO: 371161 - RNA, 32 nt, Homo Sapiens
uagauaucuaugaauuugauauauauuuguac

SEQ ID NO: 371162 - RNA, 32 nt, Homo Sapiens
ugcauaucaaauucuguaaauguuuuguaaac

SEQ ID NO: 371163 - RNA, 32 nt, Homo Sapiens
gacacccagagcugugcggggaggcagggauc

SEQ ID NO: 371164 - RNA, 32 nt, Homo Sapiens
augcugccgcggcugccgcgccgcccuccgag

SEQ ID NO: 371165 - RNA, 32 nt, Homo Sapiens
agcguuugcgggaaaauaaaccacugguccca

SEQ ID NO: 371166 - RNA, 32 nt, Homo Sapiens
cuuuucuuauaacugagcucagccaaggaaac

SEQ ID NO: 371167 - RNA, 32 nt, Homo Sapiens
uuuccacaggaacaacagcaucuuucaccaag

SEQ ID NO: 371168 - RNA, 32 nt, Homo Sapiens
uguccacugccucucuccuccccucccugccg

SEQ ID NO: 371169 - RNA, 32 nt, Homo Sapiens
accagccuggguaacauagugagaccuugucu

SEQ ID NO: 371170 - RNA, 32 nt, Homo Sapiens
uacauaugucuuugccuauuaaagauauuauc

SEQ ID NO: 371171 - RNA, 28 nt, Homo Sapiens
uuuuuaaaaaagaaacauuugguaaggg

SEQ ID NO: 371172 - RNA, 32 nt, Homo Sapiens
aaaaacuuucucuuccacggacuuuaagcccg

SEQ ID NO: 371173 - RNA, 32 nt, Homo Sapiens
cugggcccuggccuccuucccuucuugggaaa

SEQ ID NO: 371174 - RNA, 32 nt, Homo Sapiens
uugggcccacuacucauagcagcuccugaggc

SEQ ID NO: 371175 - RNA, 32 nt, Homo Sapiens
ccgcuuuggcuggagcucucagugcguuccuc

SEQ ID NO: 371176 - RNA, 28 nt, Homo Sapiens
ggaggaagaugucagaaauguuugcccu

SEQ ID NO: 371177 - RNA, 32 nt, Homo Sapiens
agaagcugaagccccacgcucugguuucuauc

SEQ ID NO: 371178 - RNA, 32 nt, Homo Sapiens
ucaccagccuacugcagaagugcagggcacag

SEQ ID NO: 371179 - RNA, 30 nt, Homo Sapiens
uuugaggccaggcgcgguggcucacgucug

SEQ ID NO: 371180 - RNA, 32 nt, Homo Sapiens
augauuuuugccauuuacuagaggaagauguu

SEQ ID NO: 371181 - RNA, 32 nt, Homo Sapiens
ccaugccuggccaugauucuuaagagaauuga

SEQ ID NO: 371182 - RNA, 32 nt, Homo Sapiens
cgccgccgcggccgaggcgcccggcgccggcg

SEQ ID NO: 371183 - RNA, 32 nt, Homo Sapiens
cagagccaccaaagauuccaugucccagagcu

SEQ ID NO: 371184 - RNA, 32 nt, Homo Sapiens
gacacacagagacacgcuccuugccucaccaa

SEQ ID NO: 371185 - RNA, 32 nt, Homo Sapiens
aacaagacugaagaaugugcugauggagcagu

SEQ ID NO: 371186 - RNA, 32 nt, Homo Sapiens
ugcuugccaaacuuagcuuugccagugauagu

SEQ ID NO: 371187 - RNA, 32 nt, Homo Sapiens
cacucaccucaucaucacugagaugaguauuu

SEQ ID NO: 371188 - RNA, 32 nt, Homo Sapiens
uggauggcugccucaccucucaccucccaacg

SEQ ID NO: 371189 - RNA, 32 nt, Homo Sapiens
auuaaaaaaaaauuaucaauguagaaaguaau

SEQ ID NO: 371190 - RNA, 32 nt, Homo Sapiens
acagggagggcaaagagugaaaaggaagcauc

SEQ ID NO: 371191 - RNA, 32 nt, Homo Sapiens
uccauguguuucaucaaauuuauauuacugua

SEQ ID NO: 371192 - RNA, 32 nt, Homo Sapiens
uaaauagcucuuucgaguuaaggaaauugcau

SEQ ID NO: 371193 - RNA, 32 nt, Homo Sapiens
ucaauauaaaaauuauuaaugaguuauuuuac

SEQ ID NO: 371194 - RNA, 32 nt, Homo Sapiens
gccacagccgccgcugcagccggagcauccgg

SEQ ID NO: 371195 - RNA, 32 nt, Homo Sapiens
ucggagccccgcccugcauccuggacaugccu

SEQ ID NO: 371196 - RNA, 32 nt, Homo Sapiens
cuuuauuuuuauuuuuaaccuuuugacaagac

SEQ ID NO: 371197 - RNA, 32 nt, Homo Sapiens
aaauggcuccagcgcugacuagcggccaccuc

SEQ ID NO: 371198 - RNA, 32 nt, Homo Sapiens
uuucauaauuguaggucauuagcaugcauauc

SEQ ID NO: 371199 - RNA, 32 nt, Homo Sapiens
uguuugugauagauaccccagaguaguuauua

SEQ ID NO: 371200 - RNA, 32 nt, Homo Sapiens
uuugugaggcuuuauuuuagauguuuagcaug

SEQ ID NO: 371201 - RNA, 32 nt, Homo Sapiens
cugaaggcagggccuuuccaguccucacaacc

SEQ ID NO: 371202 - RNA, 28 nt, Homo Sapiens
acuaggguuacaggcaugagccggggcu

SEQ ID NO: 371203 - RNA, 32 nt, Homo Sapiens
uuuucuuuuucuuuuucuuucuuuguuucuuu

SEQ ID NO: 371204 - RNA, 32 nt, Homo Sapiens
ugugacuugaaauaaacuuugaacacaauuuu

SEQ ID NO: 371205 - RNA, 32 nt, Homo Sapiens
ucucuuauucaguaaaaaacaacuucuuugua

SEQ ID NO: 371206 - RNA, 32 nt, Homo Sapiens
cuugacuuuccacaguccugagguucccaaaa

SEQ ID NO: 371207 - RNA, 32 nt, Homo Sapiens
uaaugccagcgcuuugggaggcggaggcagga

SEQ ID NO: 371208 - RNA, 32 nt, Homo Sapiens
gugcagcaggcuuuaauuuaauguagauucau

SEQ ID NO: 371209 - RNA, 32 nt, Homo Sapiens
aauuggauggaaagaaauucugugugcuccca

SEQ ID NO: 371210 - RNA, 32 nt, Homo Sapiens
accacucacugcugcgccuggaccucgaccgu

SEQ ID NO: 371211 - RNA, 32 nt, Homo Sapiens
cgcauuggugacucacuucaaugugucauuuc

SEQ ID NO: 371212 - RNA, 32 nt, Homo Sapiens
cucuucucaaggaaaugggugucaucaauuuu

SEQ ID NO: 371213 - RNA, 32 nt, Homo Sapiens
ugcacuaaugucuggugacagaguuggacucu

SEQ ID NO: 371214 - RNA, 32 nt, Homo Sapiens
accucgauauucugacauuuggaaaaacacau

SEQ ID NO: 371215 - RNA, 32 nt, Homo Sapiens
acgacaacaaaauaaauguuccugcagccuga

SEQ ID NO: 371216 - RNA, 32 nt, Homo Sapiens
ggagacaggaggaguaggaggaggcagggccu

SEQ ID NO: 371217 - RNA, 32 nt, Homo Sapiens
gucuuagcauccuccuguguauggaagagaca

SEQ ID NO: 371218 - RNA, 32 nt, Homo Sapiens
gucaagccggggagggcgaaaagggaaccugg

SEQ ID NO: 371219 - RNA, 32 nt, Homo Sapiens
ucuauuaauacacagucaaucuguaaguuauu

SEQ ID NO: 371220 - RNA, 32 nt, Homo Sapiens
cgucugcccucccugcagccaccguucagagc

SEQ ID NO: 371221 - RNA, 32 nt, Homo Sapiens
aagccggaaugggaaucgcugaggcucugauc

SEQ ID NO: 371222 - RNA, 32 nt, Homo Sapiens
gggagccggcgggaccccgggcgagcggcgcg

SEQ ID NO: 371223 - RNA, 32 nt, Homo Sapiens
ggcuuccgcccggucuccuggcaacgcugcgg

SEQ ID NO: 371224 - RNA, 32 nt, Homo Sapiens
ugagcauggcaaauuuaaaaaauaacacaauu

SEQ ID NO: 371225 - RNA, 32 nt, Homo Sapiens
ccaccuuguggagaggccaggcgggagaacua

SEQ ID NO: 371226 - RNA, 32 nt, Homo Sapiens
gguacucauuuguaaucagaugagcugcagcu

SEQ ID NO: 371227 - RNA, 32 nt, Homo Sapiens
auaaagauuugggcugcuaauuuuuucccagg

SEQ ID NO: 371228 - RNA, 32 nt, Homo Sapiens
aagacuuccccucccugcagggugcuguuucc

SEQ ID NO: 371229 - RNA, 32 nt, Homo Sapiens
uucugguuuuucuguuggagaucuauaggucc

SEQ ID NO: 371230 - RNA, 32 nt, Homo Sapiens
guguuuaaaaauuuccuuuuggggggaagaaa

SEQ ID NO: 371231 - RNA, 30 nt, Homo Sapiens
uaacggucaucugugccgccccuggugcgg

SEQ ID NO: 371232 - RNA, 32 nt, Homo Sapiens
ugagcuaguauuuuuaugagucgaguuuuuua

SEQ ID NO: 371233 - RNA, 32 nt, Homo Sapiens
cugcuucccucuauuuucuccaaguuagaggu

SEQ ID NO: 371234 - RNA, 32 nt, Homo Sapiens
ggacagcugggcaggggcugcagagggaggug

SEQ ID NO: 371235 - RNA, 32 nt, Homo Sapiens
ccgcaccaccucagcgggcaggaggucccacc

SEQ ID NO: 371236 - RNA, 32 nt, Homo Sapiens
gagccccuggcacaacucuagcauaucuguga

SEQ ID NO: 371237 - RNA, 32 nt, Homo Sapiens
ggacgugggcgugcaggacgcgggcgugcagg

SEQ ID NO: 371238 - RNA, 32 nt, Homo Sapiens
ugauuguguggguugucuuuuuacuuuuuuaa

SEQ ID NO: 371239 - RNA, 32 nt, Homo Sapiens
cgggccgcaucucggcggcggcgagggcugag

SEQ ID NO: 371240 - RNA, 32 nt, Homo Sapiens
agguggaggggggauggggggaugcugcugga

SEQ ID NO: 371241 - RNA, 32 nt, Homo Sapiens
auugaggugucugaugaggauguacuuuggug

SEQ ID NO: 371242 - RNA, 32 nt, Homo Sapiens
accaugccugucugcugucccuguacuccagg

SEQ ID NO: 371243 - RNA, 32 nt, Homo Sapiens
acaagauucuggauaccuggaacuuagcugug

SEQ ID NO: 371244 - RNA, 32 nt, Homo Sapiens
uuggaguuucuaguaaugauaauuaaugccau

SEQ ID NO: 371245 - RNA, 32 nt, Homo Sapiens
aaauacucuuucuucuacuggcacauagagau

SEQ ID NO: 371246 - RNA, 32 nt, Homo Sapiens
cucagcuccacuuuugaggcugcaguccauuc

SEQ ID NO: 371247 - RNA, 32 nt, Homo Sapiens
cccacccaggacuuagccucaguugaugauag

SEQ ID NO: 371248 - RNA, 32 nt, Homo Sapiens
uuuuuuguuuuguuuuuuuuuaauaaggucca

SEQ ID NO: 371249 - RNA, 32 nt, Homo Sapiens
cccuaccgauccucugcccccuuugcgggccu

SEQ ID NO: 371250 - RNA, 32 nt, Homo Sapiens
gucugcuaguuagauucaaaacaucauaaaga

SEQ ID NO: 371251 - RNA, 32 nt, Homo Sapiens
auauuggacuucccagccucccaaaccaugag

SEQ ID NO: 371252 - RNA, 32 nt, Homo Sapiens
guggugggugcucccccucccuaagcuccagg

SEQ ID NO: 371253 - RNA, 32 nt, Homo Sapiens
ucuucagcuucccagacacugauucuggaaug

SEQ ID NO: 371254 - RNA, 32 nt, Homo Sapiens
aaugugauuuugcuguaggugauuauccaaac

SEQ ID NO: 371255 - RNA, 32 nt, Homo Sapiens
caugauuuaacucuguuaguaccugugccugc

SEQ ID NO: 371256 - RNA, 32 nt, Homo Sapiens
ccaagaacccaccaauuccggacacuguggag

SEQ ID NO: 371257 - RNA, 32 nt, Homo Sapiens
caggaggacuuccaauggagacucuccaucga

SEQ ID NO: 371258 - RNA, 32 nt, Homo Sapiens
ccugguccuauucucugcuuuauuuuuuccca

SEQ ID NO: 371259 - RNA, 32 nt, Homo Sapiens
gcugcaugaguggcugccccaacugcgugugg

SEQ ID NO: 371260 - RNA, 32 nt, Homo Sapiens
cuuuucaaucuggcguauugcuguuugaccuu

SEQ ID NO: 371261 - RNA, 32 nt, Homo Sapiens
gagaccaaggucuagcucuacuguugguacuu

SEQ ID NO: 371262 - RNA, 32 nt, Homo Sapiens
cugaacauaaaauuauaauuaaaauauuaaaa

SEQ ID NO: 371263 - RNA, 32 nt, Homo Sapiens
aguauacagacaccuuguacuuuuccucaacu

SEQ ID NO: 371264 - RNA, 32 nt, Homo Sapiens
uuuuuguugucucuagaaauagagggguuaug

SEQ ID NO: 371265 - RNA, 32 nt, Homo Sapiens
ucaaagaaauggugcuaaauauuucuaugaau

SEQ ID NO: 371266 - RNA, 32 nt, Homo Sapiens
uuacagaaaaauuugugccuaauauuaaccaa

SEQ ID NO: 371267 - RNA, 32 nt, Homo Sapiens
cagaagugacagaugcggaugaaaauagugac

SEQ ID NO: 371268 - RNA, 26 nt, Homo Sapiens
cauggggcccaucucagccccuuccu

SEQ ID NO: 371269 - RNA, 32 nt, Homo Sapiens
acaugagaaaaaagcacaugauaauuguuugg

SEQ ID NO: 371270 - RNA, 32 nt, Homo Sapiens
cccaccccaaccccggccgcuggcccucuggu

SEQ ID NO: 371271 - RNA, 32 nt, Homo Sapiens
caucuauacauaauaugcauagauaaaacauu

SEQ ID NO: 371272 - RNA, 32 nt, Homo Sapiens
aggacggaagaggcccggcggaggcggcggug

SEQ ID NO: 371273 - RNA, 32 nt, Homo Sapiens
ucuuccugaaaugaguuuggugauuagaaauc

SEQ ID NO: 371274 - RNA, 32 nt, Homo Sapiens
uuuuagucuugugauagcacaauccaucacuu

SEQ ID NO: 371275 - RNA, 32 nt, Homo Sapiens
aaugugucuggacuugcuggcuccucgcuccu

SEQ ID NO: 371276 - RNA, 32 nt, Homo Sapiens
aggcucccacuccuccuucucuggaacccucu

SEQ ID NO: 371277 - RNA, 32 nt, Homo Sapiens
ccuacuggauaugaaacugaaaguaauguuuu

SEQ ID NO: 371278 - RNA, 32 nt, Homo Sapiens
ggcugggugugguggcucaugcauguaauccc

SEQ ID NO: 371279 - RNA, 32 nt, Homo Sapiens
gaugcaauauuuuuaugucaugugaugcucuu

SEQ ID NO: 371280 - RNA, 32 nt, Homo Sapiens
ucauaguacauuuaaacaaaacaucaauuuaa

SEQ ID NO: 371281 - RNA, 32 nt, Homo Sapiens
aacucuuuauuaaaaauucagaagggggaaug

SEQ ID NO: 371282 - RNA, 32 nt, Homo Sapiens
auuuugcugucaucucagcugauagaugucag

SEQ ID NO: 371283 - RNA, 32 nt, Homo Sapiens
uauuuucauucaaaugaggaugaugagucacu

SEQ ID NO: 371284 - RNA, 32 nt, Homo Sapiens
gaccugaaagagaagaagauguaaaguuccuc

SEQ ID NO: 371285 - RNA, 32 nt, Homo Sapiens
gugucuggauacuucccuguacaugcauaaau

SEQ ID NO: 371286 - RNA, 32 nt, Homo Sapiens
uacauccuuuuguagaaaguuuaacauaaaag

SEQ ID NO: 371287 - RNA, 32 nt, Homo Sapiens
gcugcgaugcucugcuggucgcggacggaccc

SEQ ID NO: 371288 - RNA, 32 nt, Homo Sapiens
uccucuccggugcaauccccuguccuuuccac

SEQ ID NO: 371289 - RNA, 32 nt, Homo Sapiens
aacaguggcuacugccugugacagccucuucu

SEQ ID NO: 371290 - RNA, 32 nt, Homo Sapiens
cuccuggggucuugcacaguggcaggugacau

SEQ ID NO: 371291 - RNA, 32 nt, Homo Sapiens
gagccgcagcggggaugccguucugagugccu

SEQ ID NO: 371292 - RNA, 32 nt, Homo Sapiens
ucgugccucugcgcccauucucuucucacgca

SEQ ID NO: 371293 - RNA, 32 nt, Homo Sapiens
uguacggagagugcuggaccgaggggagcugg

SEQ ID NO: 371294 - RNA, 32 nt, Homo Sapiens
agagacgugccagcuguucaccaccgagcuag

SEQ ID NO: 371295 - RNA, 32 nt, Homo Sapiens
agcccugugucggcuuccugugugcucaccua

SEQ ID NO: 371296 - RNA, 32 nt, Homo Sapiens
cucucccauacuugucugaaaagggagacaaa

SEQ ID NO: 371297 - RNA, 32 nt, Homo Sapiens
cccugggacaucugugguggcuuuugucgcgc

SEQ ID NO: 371298 - RNA, 32 nt, Homo Sapiens
caagauacauauauuuuuauuuugaccuaaau

SEQ ID NO: 371299 - RNA, 32 nt, Homo Sapiens
ccuaucuguucuagcuucuccugccccuggug

SEQ ID NO: 371300 - RNA, 32 nt, Homo Sapiens
cacaaagauacaaaacagaauugaaguguguu

SEQ ID NO: 371301 - RNA, 30 nt, Homo Sapiens
gccacauggagcccgggcuggagcacgcac

SEQ ID NO: 371302 - RNA, 32 nt, Homo Sapiens
cagcaguggccgaggcgcuaggacaggaagga

SEQ ID NO: 371303 - RNA, 32 nt, Homo Sapiens
auuuuugaauucuggagggguuaggcagagag

SEQ ID NO: 371304 - RNA, 32 nt, Homo Sapiens
agggaauuugaaacauagauuuuaaugagcug

SEQ ID NO: 371305 - RNA, 32 nt, Homo Sapiens
gacuuuggauucguccccggcgugcgcaagaa

SEQ ID NO: 371306 - RNA, 32 nt, Homo Sapiens
cccgggccaacucggacaguuugcucauuuau

SEQ ID NO: 371307 - RNA, 32 nt, Homo Sapiens
agcgugggguagucccugggcucaguccuagc

SEQ ID NO: 371308 - RNA, 32 nt, Homo Sapiens
ggggaguccccgagacacccugaagggcuggc

SEQ ID NO: 371309 - RNA, 32 nt, Homo Sapiens
gcuggggaggagaaaacaaacacaucaauauc

SEQ ID NO: 371310 - RNA, 32 nt, Homo Sapiens
uuaucuuuuccuuucuucagacuccguccaag

SEQ ID NO: 371311 - RNA, 32 nt, Homo Sapiens
uauuugaacaauuugaauauaaauucaucauu

SEQ ID NO: 371312 - RNA, 32 nt, Homo Sapiens
auaccuaaguaaacauaacauuaauaccuaag

SEQ ID NO: 371313 - RNA, 32 nt, Homo Sapiens
ucugcagugguuggguagguccugcuuaggag

SEQ ID NO: 371314 - RNA, 32 nt, Homo Sapiens
gguucagcagugccucucuagcagcugugcgg

SEQ ID NO: 371315 - RNA, 32 nt, Homo Sapiens
cacuggucuugucagucauguacacacagaaa

SEQ ID NO: 371316 - RNA, 32 nt, Homo Sapiens
uuugaggaccauucacuaacgcuucucugcag

SEQ ID NO: 371317 - RNA, 32 nt, Homo Sapiens
cugggucgaaggcucugcugacugcuguccuu

SEQ ID NO: 371318 - RNA, 32 nt, Homo Sapiens
cccggaccauggggugcugcccgggggacugc

SEQ ID NO: 371319 - RNA, 32 nt, Homo Sapiens
ccacauuccccauuuuaacgggcguugcucuc

SEQ ID NO: 371320 - RNA, 32 nt, Homo Sapiens
ucugcccccaucguguuucucauuuccgugga

SEQ ID NO: 371321 - RNA, 32 nt, Homo Sapiens
aaauuacagaacaauuguuccuuucaagauuu

SEQ ID NO: 371322 - RNA, 32 nt, Homo Sapiens
ggcaagaggucccaggggcauucucuggagcu

SEQ ID NO: 371323 - RNA, 32 nt, Homo Sapiens
uccauaauuuaaaauaaaauccuagauccagu

SEQ ID NO: 371324 - RNA, 32 nt, Homo Sapiens
gccucagcuucucuccauggacacggcgggcg

SEQ ID NO: 371325 - RNA, 32 nt, Homo Sapiens
agcagcgagggggcugcguccaggccggcuuu

SEQ ID NO: 371326 - RNA, 32 nt, Homo Sapiens
uuuugaaacaacacucaagggucucaaauggc

SEQ ID NO: 371327 - RNA, 32 nt, Homo Sapiens
ggaaaccugaagcccagagaaguaaaggcacu

SEQ ID NO: 371328 - RNA, 32 nt, Homo Sapiens
ugggagggauuuuuaacaaacaugcacuaaua

SEQ ID NO: 371329 - RNA, 32 nt, Homo Sapiens
aucugcggcggcgacccggcgccgcgucacgc

SEQ ID NO: 371330 - RNA, 32 nt, Homo Sapiens
guuggccugucuuuuuugaagcauguguguua

SEQ ID NO: 371331 - RNA, 32 nt, Homo Sapiens
uuuaucuuuuuuuuuucuuucuuuaaguagua

SEQ ID NO: 371332 - RNA, 32 nt, Homo Sapiens
gguguuccuccuccccucuccuaucagcccua

SEQ ID NO: 371333 - RNA, 32 nt, Homo Sapiens
ggaggggccugggccuggccagaccagagggc

SEQ ID NO: 371334 - RNA, 32 nt, Homo Sapiens
uacaggagugugccaccacaccuggcuaaugu

SEQ ID NO: 371335 - RNA, 32 nt, Homo Sapiens
gucuuauuuggaauuauaucaacacugaacac

SEQ ID NO: 371336 - RNA, 32 nt, Homo Sapiens
agaccccugccucauucagcugugacucugcu

SEQ ID NO: 371337 - RNA, 32 nt, Homo Sapiens
uaggguggggcaaugugucauucugcauugga

SEQ ID NO: 371338 - RNA, 32 nt, Homo Sapiens
cacccacucugaacaugacaaaaguugccaga

SEQ ID NO: 371339 - RNA, 32 nt, Homo Sapiens
ggggcggaugcagagcccggggcccccaccgg

SEQ ID NO: 371340 - RNA, 32 nt, Homo Sapiens
ggagggaggaggggagggucgcggccggccgc

SEQ ID NO: 371341 - RNA, 32 nt, Homo Sapiens
gagcuggagucucccccuuccuccugugcccu

SEQ ID NO: 371342 - RNA, 32 nt, Homo Sapiens
gauaguuugcauucuuuuuucauaugaaaucu

SEQ ID NO: 371343 - RNA, 30 nt, Homo Sapiens
aagagcgaagugucugcggguccugaaggg

SEQ ID NO: 371344 - RNA, 32 nt, Homo Sapiens
cuuguuaagcaaguauggucuugauaaugcau

SEQ ID NO: 371345 - RNA, 32 nt, Homo Sapiens
ccugcggcccgcgcccccggcgucaccgccuc

SEQ ID NO: 371346 - RNA, 32 nt, Homo Sapiens
agcaaggacacgcucuccccaacagggugcuu

SEQ ID NO: 371347 - RNA, 32 nt, Homo Sapiens
gcccaggaugaccccgaacccucuagcucagc

SEQ ID NO: 371348 - RNA, 32 nt, Homo Sapiens
ucgugggccacacaaugcugugugacccucuc

SEQ ID NO: 371349 - RNA, 32 nt, Homo Sapiens
cggcucuggugcccauccucccagcacgcucu

SEQ ID NO: 371350 - RNA, 31 nt, Homo Sapiens
ccacgguagcgcagccgcucugaguagaacu

SEQ ID NO: 371351 - RNA, 32 nt, Homo Sapiens
uucuaccccucuaaaugggcugccauguggcu

SEQ ID NO: 371352 - RNA, 32 nt, Homo Sapiens
uccucccuucccccggccccccgggccucaug

SEQ ID NO: 371353 - RNA, 32 nt, Homo Sapiens
ugagccauaaaauuuugguuuguaguagagau

SEQ ID NO: 371354 - RNA, 32 nt, Homo Sapiens
gauuccucugggugggcuuuggcagguggcuc

SEQ ID NO: 371355 - RNA, 32 nt, Homo Sapiens
aaucuccugauccacggguugcacagaucugu

SEQ ID NO: 371356 - RNA, 32 nt, Homo Sapiens
cugcaguuuuauucccuuuagucuucauugcu

SEQ ID NO: 371357 - RNA, 32 nt, Homo Sapiens
cguggaucucagucucucugucucucuuucuc

SEQ ID NO: 371358 - RNA, 32 nt, Homo Sapiens
gucacugcacuccagccugggcgacagaggga

SEQ ID NO: 371359 - RNA, 32 nt, Homo Sapiens
agcaugcgcgagagccgccccggagcgccccg

SEQ ID NO: 371360 - RNA, 32 nt, Homo Sapiens
ccgccgcucucgcgccagccgguccccgcgug

SEQ ID NO: 371361 - RNA, 32 nt, Homo Sapiens
cccgucaccccgcucuucccaaguccucgccc

SEQ ID NO: 371362 - RNA, 32 nt, Homo Sapiens
acggcugggcacaggagacgcugcuggcgccu

SEQ ID NO: 371363 - RNA, 32 nt, Homo Sapiens
gagcucuuugggaagagacgccgggcaggcag

SEQ ID NO: 371364 - RNA, 32 nt, Homo Sapiens
guccauaauaaauuauuggaaacuaggauguc

SEQ ID NO: 371365 - RNA, 32 nt, Homo Sapiens
gacuugagcuggccuuccuaucauggaugugg

SEQ ID NO: 371366 - RNA, 31 nt, Homo Sapiens
gacagugugcucacucucagagccauggauu

SEQ ID NO: 371367 - RNA, 32 nt, Homo Sapiens
ucuguagucauuaagaauuuugaugagguauu

SEQ ID NO: 371368 - RNA, 32 nt, Homo Sapiens
ucugcgcgcugcgcccgaagcggcggucggug

SEQ ID NO: 371369 - RNA, 32 nt, Homo Sapiens
ucaaacggggacuuguuccaugucugucuucu

SEQ ID NO: 371370 - RNA, 32 nt, Homo Sapiens
ccuuggccuugcagcuggcccacugcuggcug

SEQ ID NO: 371371 - RNA, 32 nt, Homo Sapiens
ccccgccugcuggccugagaugcccucauguu

SEQ ID NO: 371372 - RNA, 32 nt, Homo Sapiens
aucugaaaugacugagaaaaacuuuuuuauua

SEQ ID NO: 371373 - RNA, 32 nt, Homo Sapiens
uguugguugucauggcuacuguuucaugaacc

SEQ ID NO: 371374 - RNA, 32 nt, Homo Sapiens
aaaaaaaauuaauaaacuuuaguuguacauuu

SEQ ID NO: 371375 - RNA, 32 nt, Homo Sapiens
ccccacugcccucacucccaauuuuaaaaccu

SEQ ID NO: 371376 - RNA, 32 nt, Homo Sapiens
cuucaguguuuguuuugaccaaaguuuauuuu

SEQ ID NO: 371377 - RNA, 32 nt, Homo Sapiens
aauagucaaauuauauuacccaucuacauggu

SEQ ID NO: 371378 - RNA, 32 nt, Homo Sapiens
ggggaaggccccagccuccuccaccucccacu

SEQ ID NO: 371379 - RNA, 32 nt, Homo Sapiens
cuucuuagacaaauaacaaccaauagagauca

SEQ ID NO: 371380 - RNA, 32 nt, Homo Sapiens
agugcugugacaaagaggcagugaaauccugc

SEQ ID NO: 371381 - RNA, 32 nt, Homo Sapiens
uguuugccugccugcaggaggugcuggagagc

SEQ ID NO: 371382 - RNA, 32 nt, Homo Sapiens
ggaaaggcugcugccuccugcucuguccucau

SEQ ID NO: 371383 - RNA, 29 nt, Homo Sapiens
uuuccuuggcagcagaggacgcuagguuu

SEQ ID NO: 371384 - RNA, 32 nt, Homo Sapiens
uuacaguuugguugucaaaugguuucagaaug

SEQ ID NO: 371385 - RNA, 32 nt, Homo Sapiens
ccaugguaucuagggaggucugaaggaugguu

SEQ ID NO: 371386 - RNA, 32 nt, Homo Sapiens
ccugccccaccuuguuuucuguuccccuuuua

SEQ ID NO: 371387 - RNA, 32 nt, Homo Sapiens
uaaacaagacagaaacggucccugcccucgag

SEQ ID NO: 371388 - RNA, 32 nt, Homo Sapiens
guuuuucucaggaauguagaaaugaggcagag

SEQ ID NO: 371389 - RNA, 32 nt, Homo Sapiens
aaauaauaaaaauuagaacuucaaaugcgaug

SEQ ID NO: 371390 - RNA, 32 nt, Homo Sapiens
guugcaugucauuuggccuguuuucuaaauaa

SEQ ID NO: 371391 - RNA, 32 nt, Homo Sapiens
ugagugauaaaguuaaaaugugcugugcuucc

SEQ ID NO: 371392 - RNA, 32 nt, Homo Sapiens
gguucuuguagggacucaaugaucuaagacac

SEQ ID NO: 371393 - RNA, 32 nt, Homo Sapiens
uagccugcuaaaucauuguaugugucuguagu

SEQ ID NO: 371394 - RNA, 32 nt, Homo Sapiens
agaauagcaugggaaagacuggcccccaugau

SEQ ID NO: 371395 - RNA, 32 nt, Homo Sapiens
agaaagccagcugggcggcugcaguucacuuu

SEQ ID NO: 371396 - RNA, 32 nt, Homo Sapiens
cucggcugccagcuucccagccacagaggaug

SEQ ID NO: 371397 - RNA, 29 nt, Homo Sapiens
uuaaauuugaauguauucuuguaaaacau

SEQ ID NO: 371398 - RNA, 32 nt, Homo Sapiens
gcgguggcagcggccgauccccggcuccggcg

SEQ ID NO: 371399 - RNA, 32 nt, Homo Sapiens
ugucucuugcgugcgugggccggagguuagug

SEQ ID NO: 371400 - RNA, 32 nt, Homo Sapiens
gaaucaaagaggagguugugauuuggucgaag

SEQ ID NO: 371401 - RNA, 31 nt, Homo Sapiens
aagggcuggccccagaacccugcaagagagg

SEQ ID NO: 371402 - RNA, 32 nt, Homo Sapiens
uuauauuuacuuuuuauuguacauagauuucu

SEQ ID NO: 371403 - RNA, 30 nt, Homo Sapiens
agguggcaccagggcggcggcaggaagagg

SEQ ID NO: 371404 - RNA, 32 nt, Homo Sapiens
aaugauaaaacuucagaaaauaaaaugucagu

SEQ ID NO: 371405 - RNA, 32 nt, Homo Sapiens
ugacagguucugggcccgggcccucccuuugu

SEQ ID NO: 371406 - RNA, 32 nt, Homo Sapiens
uaaccgucucaucauucauggccaggugucau

SEQ ID NO: 371407 - RNA, 32 nt, Homo Sapiens
ccuggguuucauguuuccugcugcucuucuca

SEQ ID NO: 371408 - RNA, 32 nt, Homo Sapiens
gcaggcccgcggcggccugcaagucuggaagc

SEQ ID NO: 371409 - RNA, 32 nt, Homo Sapiens
augugaggucuggaacagcugcagccauuuug

SEQ ID NO: 371410 - RNA, 32 nt, Homo Sapiens
uccauuuuuuguauuuuaacuacuuuacuaaa

SEQ ID NO: 371411 - RNA, 32 nt, Homo Sapiens
cacugggcacugggcuggggucccugccuugu

SEQ ID NO: 371412 - RNA, 32 nt, Homo Sapiens
gaggggauggggccagggagggguuucugcuu

SEQ ID NO: 371413 - RNA, 32 nt, Homo Sapiens
gcaacauaauauuaggagaaaauauuugcaua

SEQ ID NO: 371414 - RNA, 32 nt, Homo Sapiens
gggcuucugcgcccccggcugcaccugccccc

SEQ ID NO: 371415 - RNA, 32 nt, Homo Sapiens
agcuggcaaagguggcucuccaguuaguucuc

SEQ ID NO: 371416 - RNA, 32 nt, Homo Sapiens
cuuuuuuagguaaaucuauaugcugaaaagua

SEQ ID NO: 371417 - RNA, 32 nt, Homo Sapiens
aguggcaacuucugccuuuuuccaagugguuu

SEQ ID NO: 371418 - RNA, 32 nt, Homo Sapiens
ggcugggugcgguggcucaugucuguaauccc

SEQ ID NO: 371419 - RNA, 32 nt, Homo Sapiens
guuccaaauguguuuuaauggcaccuggguga

SEQ ID NO: 371420 - RNA, 32 nt, Homo Sapiens
cagcagaguguaggucccacuucaccccauuc

SEQ ID NO: 371421 - RNA, 32 nt, Homo Sapiens
cagcuccccccgcccacccacgcauacacaca

SEQ ID NO: 371422 - RNA, 32 nt, Homo Sapiens
auuugcauuuuucacauuuuacgagggaguau

SEQ ID NO: 371423 - RNA, 32 nt, Homo Sapiens
acauuuauuaauuuauauuaaaauagcaugaa

SEQ ID NO: 371424 - RNA, 32 nt, Homo Sapiens
cccccagcuggccgcagggcccgccccaugga

SEQ ID NO: 371425 - RNA, 32 nt, Homo Sapiens
ucuacaggcacuguuccugaaaacgaucuuua

SEQ ID NO: 371426 - RNA, 32 nt, Homo Sapiens
uuuauaaagaaagauuaaauucuccaaugaua

SEQ ID NO: 371427 - RNA, 32 nt, Homo Sapiens
gugcagccuuuucucuccccuccugauagcau

SEQ ID NO: 371428 - RNA, 32 nt, Homo Sapiens
gaguggcagagggguaaggagagccuucuugg

SEQ ID NO: 371429 - RNA, 32 nt, Homo Sapiens
augacuuuucccuucucuagauuuuucucugc

SEQ ID NO: 371430 - RNA, 32 nt, Homo Sapiens
gcggagccaagccccacgcuggccggacaggg

SEQ ID NO: 371431 - RNA, 32 nt, Homo Sapiens
cacugguccugcugcuggcugccucucugcuc

SEQ ID NO: 371432 - RNA, 32 nt, Homo Sapiens
aucucuuugagcaucaguuuccucuaaugcca

SEQ ID NO: 371433 - RNA, 32 nt, Homo Sapiens
gugcagcugugugucugguuaugugaguggag

SEQ ID NO: 371434 - RNA, 32 nt, Homo Sapiens
uccgccacauuuuuauugauaaugugagguuu

SEQ ID NO: 371435 - RNA, 32 nt, Homo Sapiens
cuaaaggauacacaaaggaagaggcuaugugg

SEQ ID NO: 371436 - RNA, 32 nt, Homo Sapiens
ccuccguuagggccgccccugcucuccggacg

SEQ ID NO: 371437 - RNA, 32 nt, Homo Sapiens
gccuucacuccagcgcccccucaauccauuuc

SEQ ID NO: 371438 - RNA, 32 nt, Homo Sapiens
gaccccaggaaugaucauuugcugaagauggu

SEQ ID NO: 371439 - RNA, 32 nt, Homo Sapiens
ugcauauacuucuguuuauaaaaguaucaguu

SEQ ID NO: 371440 - RNA, 32 nt, Homo Sapiens
guucucuguuuucucugucugcugucuaaccc

SEQ ID NO: 371441 - RNA, 32 nt, Homo Sapiens
gagaauggugugaccuaggagucagcauccuu

SEQ ID NO: 371442 - RNA, 32 nt, Homo Sapiens
auguuggccauuauuuucuaauccauuuuuaa

SEQ ID NO: 371443 - RNA, 32 nt, Homo Sapiens
aaguugauauuguggguuauuaugccacaucu

SEQ ID NO: 371444 - RNA, 32 nt, Homo Sapiens
uaguucauuaccaaauacaggaaagugaaauu

SEQ ID NO: 371445 - RNA, 32 nt, Homo Sapiens
uccccgugggggugccugugccaggcaggccu

SEQ ID NO: 371446 - RNA, 32 nt, Homo Sapiens
ccucucacuuagggcaagagccagguauaguc

SEQ ID NO: 371447 - RNA, 32 nt, Homo Sapiens
augcacagaaaauaaacauuucuuaaaauaua

SEQ ID NO: 371448 - RNA, 32 nt, Homo Sapiens
ucuaaugacaaugacagguauuggugaaggag

SEQ ID NO: 371449 - RNA, 32 nt, Homo Sapiens
aauagaaguauuucugaacauaucaaauauaa

SEQ ID NO: 371450 - RNA, 32 nt, Homo Sapiens
uugagaagaagcugcucuggggagacgagggu

SEQ ID NO: 371451 - RNA, 32 nt, Homo Sapiens
ucuggacagcuguuuuccuguuuggaugguaa

SEQ ID NO: 371452 - RNA, 31 nt, Homo Sapiens
aaauggaaauaaaauauaugugcuuauuaaa

SEQ ID NO: 371453 - RNA, 32 nt, Homo Sapiens
cugucagaauuguuaacugaaacaaauauuug

SEQ ID NO: 371454 - RNA, 32 nt, Homo Sapiens
gcuuucaguuucaaaucaaaccuugaaagaca

SEQ ID NO: 371455 - RNA, 32 nt, Homo Sapiens
uggauaccaaaauuaguuuggauaaucuguuc

SEQ ID NO: 371456 - RNA, 32 nt, Homo Sapiens
guccagaaaugaaucugagcugauggugacuu

SEQ ID NO: 371457 - RNA, 32 nt, Homo Sapiens
accggccaggcguggugacucacgucuguaau

SEQ ID NO: 371458 - RNA, 32 nt, Homo Sapiens
cacccuuugcccagacacgaguggggaaagca

SEQ ID NO: 371459 - RNA, 32 nt, Homo Sapiens
cggguccuccacaggugaccccgguggacaca

SEQ ID NO: 371460 - RNA, 32 nt, Homo Sapiens
cuccaugcacaugcacgccgggauuccucugc

SEQ ID NO: 371461 - RNA, 32 nt, Homo Sapiens
uucuggauuggaguaggucauaaagaaauuug

SEQ ID NO: 371462 - RNA, 32 nt, Homo Sapiens
uucggagcgcggcggcagcugacugcgccuuc

SEQ ID NO: 371463 - RNA, 32 nt, Homo Sapiens
ccccaugcacgcugggagacucuuggagggga

SEQ ID NO: 371464 - RNA, 32 nt, Homo Sapiens
aucaccuccuggauggauuccacuguuagaca

SEQ ID NO: 371465 - RNA, 32 nt, Homo Sapiens
aggccagagucuuucucucaggggcuuccucg

SEQ ID NO: 371466 - RNA, 32 nt, Homo Sapiens
uugggaggaaauuuaugauagcaauuaugaag

SEQ ID NO: 371467 - RNA, 32 nt, Homo Sapiens
uuacaggacuaaaagagcaaacugaccggccu

SEQ ID NO: 371468 - RNA, 32 nt, Homo Sapiens
acccucagcccgcuccugcccgcccagcaccc

SEQ ID NO: 371469 - RNA, 32 nt, Homo Sapiens
cagcgcagccccagcccgcccaccccugccuc

SEQ ID NO: 371470 - RNA, 32 nt, Homo Sapiens
uuuguuugaagaaggaauauacagaaguaaaa

SEQ ID NO: 371471 - RNA, 32 nt, Homo Sapiens
cucugagaaaucaugggccgugcgguaggggu

SEQ ID NO: 371472 - RNA, 32 nt, Homo Sapiens
gcauuuuuacuuucuguacaacaaaaaagcuu

SEQ ID NO: 371473 - RNA, 32 nt, Homo Sapiens
accuuagagcaguggagauuugcuaccugguc

SEQ ID NO: 371474 - RNA, 32 nt, Homo Sapiens
gaacugugauuauugguauacuguuauauccu

SEQ ID NO: 371475 - RNA, 32 nt, Homo Sapiens
uggaguuguggagguagcaagcagaguugggg

SEQ ID NO: 371476 - RNA, 32 nt, Homo Sapiens
caaccagagggagaagagccccugcccacugc

SEQ ID NO: 371477 - RNA, 32 nt, Homo Sapiens
ugagaucagaucuuuacauacuaagagauggu

SEQ ID NO: 371478 - RNA, 32 nt, Homo Sapiens
uuuguuggccaggcccgggguccucaugcugu

SEQ ID NO: 371479 - RNA, 32 nt, Homo Sapiens
caauaacaaaauuuaucaagauauaguacuuu

SEQ ID NO: 371480 - RNA, 32 nt, Homo Sapiens
guucgggcucggggggcggggggacgcggagc

SEQ ID NO: 371481 - RNA, 32 nt, Homo Sapiens
acgaacagcgcucccucccccggaggcccccg

SEQ ID NO: 371482 - RNA, 32 nt, Homo Sapiens
ugcauuccaagcuuuuuuuuuaauuugguguu

SEQ ID NO: 371483 - RNA, 32 nt, Homo Sapiens
uguguuucauaaugacuuuuaacugguaaaaa

SEQ ID NO: 371484 - RNA, 32 nt, Homo Sapiens
gcguccaggcucuuugagagccaugggcugca

SEQ ID NO: 371485 - RNA, 32 nt, Homo Sapiens
cuacuggcccgcgcugcccccaccgcgcucuu

SEQ ID NO: 371486 - RNA, 32 nt, Homo Sapiens
ccuuucuggagcaucaguauuacugcaggauu

SEQ ID NO: 371487 - RNA, 32 nt, Homo Sapiens
cgcagggagcagagaccauggggccccucuca

SEQ ID NO: 371488 - RNA, 32 nt, Homo Sapiens
agcaacuucguaagauuauugaggaugugauu

SEQ ID NO: 371489 - RNA, 32 nt, Homo Sapiens
ccugaagacagaggauaaauaguugucaaugu

SEQ ID NO: 371490 - RNA, 32 nt, Homo Sapiens
auuaacuacauuuaugaguaacuauuauuaua

SEQ ID NO: 371491 - RNA, 28 nt, Homo Sapiens
gaaaggcgggcgccgccgagggcuggcu

SEQ ID NO: 371492 - RNA, 32 nt, Homo Sapiens
auguugaaagcagaacaauggagaaggaaguc

SEQ ID NO: 371493 - RNA, 32 nt, Homo Sapiens
gaggcucagcccggcgugccacugcugcuaca

SEQ ID NO: 371494 - RNA, 32 nt, Homo Sapiens
cauccugcagcucagcugggagcaucauucuc

SEQ ID NO: 371495 - RNA, 32 nt, Homo Sapiens
ggagggucaggcuguggccuucuggagcaggu

SEQ ID NO: 371496 - RNA, 32 nt, Homo Sapiens
agcagcgaucccuagcacuuuaugaagaccag

SEQ ID NO: 371497 - RNA, 32 nt, Homo Sapiens
uacaaugggugccucaauaguuucauaaucuu

SEQ ID NO: 371498 - RNA, 32 nt, Homo Sapiens
gaaaauacuucaccuauugggaugccaauauu

SEQ ID NO: 371499 - RNA, 32 nt, Homo Sapiens
aggagcagcuggagacucugcucuaccagggg

SEQ ID NO: 371500 - RNA, 32 nt, Homo Sapiens
aaaaacugcugugguuuugcugcuacacuaag

SEQ ID NO: 371501 - RNA, 31 nt, Homo Sapiens
cccaacacaaagaaaugauaaauguuugaga

SEQ ID NO: 371502 - RNA, 32 nt, Homo Sapiens
ucuucugaggagagcgcuggcugggguugacu

SEQ ID NO: 371503 - RNA, 32 nt, Homo Sapiens
aaaaugaaaaaauaaagcaauaugacaaaaag

SEQ ID NO: 371504 - RNA, 32 nt, Homo Sapiens
gcggaggacgcuuccuuccucagaugcaccga

SEQ ID NO: 371505 - RNA, 32 nt, Homo Sapiens
gcuaccggacuggcgacggcggcggccccucg

SEQ ID NO: 371506 - RNA, 32 nt, Homo Sapiens
ggaaguggauccgccgcugccggagcagcccg

SEQ ID NO: 371507 - RNA, 32 nt, Homo Sapiens
cgucugccuucuccauucaaugugugaaauac

SEQ ID NO: 371508 - RNA, 32 nt, Homo Sapiens
cuuucuguaccauugccaaucaccuuuuugga

SEQ ID NO: 371509 - RNA, 30 nt, Homo Sapiens
gucucugcaagcuuggucgcccugggaugg

SEQ ID NO: 371510 - RNA, 32 nt, Homo Sapiens
auuacaugcauuuuuguaagucuuaauguuug

SEQ ID NO: 371511 - RNA, 32 nt, Homo Sapiens
uacggaaccguggucagccucuacuauccagc

SEQ ID NO: 371512 - RNA, 32 nt, Homo Sapiens
agauucauaaaacagguuuuuagagaccucug

SEQ ID NO: 371513 - RNA, 32 nt, Homo Sapiens
aggaauuugaagcucagaaagguugaggggcu

SEQ ID NO: 371514 - RNA, 32 nt, Homo Sapiens
ggcaugguuauuucaacauuaauagcauguca

SEQ ID NO: 371515 - RNA, 32 nt, Homo Sapiens
ugccacucacacucggccccagggcccaggag

SEQ ID NO: 371516 - RNA, 32 nt, Homo Sapiens
gccccuagccccagcagcccuggucucgcagc

SEQ ID NO: 371517 - RNA, 32 nt, Homo Sapiens
cauccauguuuccugaugcuuguuuuauucau

SEQ ID NO: 371518 - RNA, 32 nt, Homo Sapiens
caaauaaaaauuuuauacuauaaaaaaaaaaa

SEQ ID NO: 371519 - RNA, 32 nt, Homo Sapiens
uuauauuucucauaaagagucuucccuauccc

SEQ ID NO: 371520 - RNA, 32 nt, Homo Sapiens
aguggagaggccggaagugagacgggcagacg

SEQ ID NO: 371521 - RNA, 32 nt, Homo Sapiens
uuccgagacauucuaagaagauauuuugauuc

SEQ ID NO: 371522 - RNA, 32 nt, Homo Sapiens
guccugaggaggaucauaaggccuggcucagg

SEQ ID NO: 371523 - RNA, 32 nt, Homo Sapiens
gaccggcugccgccugcuccccggaaaagggc

SEQ ID NO: 371524 - RNA, 32 nt, Homo Sapiens
ugcgcucagaucuucucuggugaugaagaggc

SEQ ID NO: 371525 - RNA, 32 nt, Homo Sapiens
ccaacuucaggacugauugaucaugacuucua

SEQ ID NO: 371526 - RNA, 32 nt, Homo Sapiens
gcgcaggcugcagagcccggccccaccucccu

SEQ ID NO: 371527 - RNA, 32 nt, Homo Sapiens
uuuaaaacaggguaaauauucaggcaucauua

SEQ ID NO: 371528 - RNA, 32 nt, Homo Sapiens
ggauccugauguaugaggaaaaagcgagagaa

SEQ ID NO: 371529 - RNA, 32 nt, Homo Sapiens
caucuggcuugaacuuuuuuuguccuuccugg

SEQ ID NO: 371530 - RNA, 32 nt, Homo Sapiens
uccuacuggugccuucuuuucuuccagaggau

SEQ ID NO: 371531 - RNA, 32 nt, Homo Sapiens
ccacgggcucugccagcagacagccuuggcac

SEQ ID NO: 371532 - RNA, 32 nt, Homo Sapiens
uuggucaagguuugugccccacuacagaacag

SEQ ID NO: 371533 - RNA, 32 nt, Homo Sapiens
aaggcccugucuccaaauaccaucccauuggg

SEQ ID NO: 371534 - RNA, 32 nt, Homo Sapiens
aguuuuauauuuccaaaaauaugccaaaagga

SEQ ID NO: 371535 - RNA, 32 nt, Homo Sapiens
ccaaauuaggaugugacagagaagggauaggg

SEQ ID NO: 371536 - RNA, 32 nt, Homo Sapiens
agagaggucagaaauagcaagcaaaaagcagg

SEQ ID NO: 371537 - RNA, 32 nt, Homo Sapiens
cuuuuuagagugcacugagugcacuuuacauc

SEQ ID NO: 371538 - RNA, 32 nt, Homo Sapiens
caaggggaaguaugagacuucucugaggaagc

SEQ ID NO: 371539 - RNA, 32 nt, Homo Sapiens
gccagguucugcguuagaccugcaucuuagca

SEQ ID NO: 371540 - RNA, 32 nt, Homo Sapiens
acccggcaccacacagaccccauccccgcccu

SEQ ID NO: 371541 - RNA, 32 nt, Homo Sapiens
uacagaauauccaaagaauaaggaggaggaug

SEQ ID NO: 371542 - RNA, 32 nt, Homo Sapiens
aggacguucuuuuuagaagcaguucuuccagc

SEQ ID NO: 371543 - RNA, 32 nt, Homo Sapiens
gcuuacugucuccaggaccacaaaccaaucaa

SEQ ID NO: 371544 - RNA, 30 nt, Homo Sapiens
ugcaugugaguauguuugcaaaauaauaaa

SEQ ID NO: 371545 - RNA, 32 nt, Homo Sapiens
auccccuuccucccucaccacuccaugugcgu

SEQ ID NO: 371546 - RNA, 32 nt, Homo Sapiens
aagaaaggcugcuguacugaaguaaaacaaac

SEQ ID NO: 371547 - RNA, 32 nt, Homo Sapiens
ugggccacccuacccaggaucuccacccuggg

SEQ ID NO: 371548 - RNA, 32 nt, Homo Sapiens
auuauuggcauauuaauauauuauuauuggua

SEQ ID NO: 371549 - RNA, 32 nt, Homo Sapiens
uaugauaaaucauucuucuucacgucaauaca

SEQ ID NO: 371550 - RNA, 32 nt, Homo Sapiens
uuuuuguuuuuuguuuuccaguaggggauuag

SEQ ID NO: 371551 - RNA, 32 nt, Homo Sapiens
gagccagacaaauggaggaauaugacggaaga

SEQ ID NO: 371552 - RNA, 32 nt, Homo Sapiens
aauaaaauuuaaaaaacuccugucuugcuaga

SEQ ID NO: 371553 - RNA, 32 nt, Homo Sapiens
aaauauuugggguugaaauaaaccagugggag

SEQ ID NO: 371554 - RNA, 29 nt, Homo Sapiens
uguaaauaaaguuaaauuucuaagccuuu

SEQ ID NO: 371555 - RNA, 32 nt, Homo Sapiens
uucgcaugcggcugccgggccggaggugguag

SEQ ID NO: 371556 - RNA, 32 nt, Homo Sapiens
cccugagguuuccaugccucucccauuuuagu

SEQ ID NO: 371557 - RNA, 32 nt, Homo Sapiens
ccaaauacccucaaggggagcagugugagggg

SEQ ID NO: 371558 - RNA, 32 nt, Homo Sapiens
uaagauguuuccauucuccugugaauuuuaac

SEQ ID NO: 371559 - RNA, 32 nt, Homo Sapiens
gggggcaguugugacaaccuccagugcaugug

SEQ ID NO: 371560 - RNA, 32 nt, Homo Sapiens
cuggaaaaccugguuuuggaugcuuuuggguc

SEQ ID NO: 371561 - RNA, 32 nt, Homo Sapiens
gcuuuccggagggauucacaccuggcacaaca

SEQ ID NO: 371562 - RNA, 32 nt, Homo Sapiens
agcccucccccagcaguugaaugacaacagaa

SEQ ID NO: 371563 - RNA, 32 nt, Homo Sapiens
agaagcaaaaauuuuugaaauuucaaaugagc

SEQ ID NO: 371564 - RNA, 32 nt, Homo Sapiens
aaaggaaauaauacaacaaaaaggaggcuucu

SEQ ID NO: 371565 - RNA, 32 nt, Homo Sapiens
gggugggcggcaccauuguccagcagcugagu

SEQ ID NO: 371566 - RNA, 32 nt, Homo Sapiens
auggcuagaaaugucuuuuucuuucuuuucuc

SEQ ID NO: 371567 - RNA, 32 nt, Homo Sapiens
auugagcuccagcccugguuuuccuacccaug

SEQ ID NO: 371568 - RNA, 32 nt, Homo Sapiens
gggcgggcccgcggccucccucccgcacacuc

SEQ ID NO: 371569 - RNA, 32 nt, Homo Sapiens
uccacaguaaggaugccaaugaugcaaagguc

SEQ ID NO: 371570 - RNA, 32 nt, Homo Sapiens
auuaaacguggccuccacggcuuccaaccccc

SEQ ID NO: 371571 - RNA, 32 nt, Homo Sapiens
gcagaccaagguucuuuuuguuuacauaauac

SEQ ID NO: 371572 - RNA, 32 nt, Homo Sapiens
uucagaucuaauguaaaaggcagauguccccu

SEQ ID NO: 371573 - RNA, 32 nt, Homo Sapiens
uuuucucugugcuaguauagucauggcacauc

SEQ ID NO: 371574 - RNA, 32 nt, Homo Sapiens
uauauuugcauaagcauagaaguaaucuagag

SEQ ID NO: 371575 - RNA, 32 nt, Homo Sapiens
guauguauauauaauauauauagaaaucugga

SEQ ID NO: 371576 - RNA, 32 nt, Homo Sapiens
caguggcccauccaguucaucuccaggcaccc

SEQ ID NO: 371577 - RNA, 32 nt, Homo Sapiens
aauuguucacuuuaaagaaaaugacguaccaa

SEQ ID NO: 371578 - RNA, 32 nt, Homo Sapiens
ugucgggaaagaagggcuggggccugccguuc

SEQ ID NO: 371579 - RNA, 32 nt, Homo Sapiens
uggucaccugccuuaggcuccacagcccugcu

SEQ ID NO: 371580 - RNA, 32 nt, Homo Sapiens
cucaugaggcaaacuuucuaaaacagucuuag

SEQ ID NO: 371581 - RNA, 32 nt, Homo Sapiens
cgccucgucuuucgucgccccgugcccucacg

SEQ ID NO: 371582 - RNA, 32 nt, Homo Sapiens
gcagguuaaaacuacagaaccacaucccaaag

SEQ ID NO: 371583 - RNA, 32 nt, Homo Sapiens
ugcaauggugaguuucuauccaaauaucccag

SEQ ID NO: 371584 - RNA, 32 nt, Homo Sapiens
caauacccagcacacccacuuccaacuaucug

SEQ ID NO: 371585 - RNA, 32 nt, Homo Sapiens
agaaaacgcugggucagcagcaagcuguaguu

SEQ ID NO: 371586 - RNA, 32 nt, Homo Sapiens
ugauuuguaaaaauaaaaucuuuaaaucucuc

SEQ ID NO: 371587 - RNA, 32 nt, Homo Sapiens
uggcggugccggauccugacggcggccuuccc

SEQ ID NO: 371588 - RNA, 32 nt, Homo Sapiens
aucauacauguacauacucacacacaccacac

SEQ ID NO: 371589 - RNA, 32 nt, Homo Sapiens
cgggucccaucccauggacucccacucugggg

SEQ ID NO: 371590 - RNA, 32 nt, Homo Sapiens
aaagugcgcuguacuucuuaauguuuauuaaa

SEQ ID NO: 371591 - RNA, 32 nt, Homo Sapiens
uuccagucauuucaauaaauuauucuuaagca

SEQ ID NO: 371592 - RNA, 32 nt, Homo Sapiens
uccuacccaaggcuaggaccgcccugcggaaa

SEQ ID NO: 371593 - RNA, 32 nt, Homo Sapiens
aauauuuauaccaaaaauauagauaagaaaag

SEQ ID NO: 371594 - RNA, 32 nt, Homo Sapiens
ggggugcccagcugccugucagacccugagga

SEQ ID NO: 371595 - RNA, 32 nt, Homo Sapiens
auauuuuugaguuuuccauauuuugaaacuuu

SEQ ID NO: 371596 - RNA, 32 nt, Homo Sapiens
aauugauuccucgcgacaucuuucucaaccuu

SEQ ID NO: 371597 - RNA, 32 nt, Homo Sapiens
aagucucugucagagaggaaagagggaguuaa

SEQ ID NO: 371598 - RNA, 32 nt, Homo Sapiens
ugcccuuccuucccauaacggccugcuggacg

SEQ ID NO: 371599 - RNA, 32 nt, Homo Sapiens
ugagcaccugccuggagcugcccagaaacagc

SEQ ID NO: 371600 - RNA, 32 nt, Homo Sapiens
uucaaauuucagauuuucagauuagggauaau

SEQ ID NO: 371601 - RNA, 32 nt, Homo Sapiens
cuguuugagaaaacucuuucugaguuugagcu

SEQ ID NO: 371602 - RNA, 32 nt, Homo Sapiens
cggggccaccgaccccacccccugccuggaaa

SEQ ID NO: 371603 - RNA, 32 nt, Homo Sapiens
ugaaaugggaauugagccuguuagaauuaaaa

SEQ ID NO: 371604 - RNA, 32 nt, Homo Sapiens
ggaggaggagcuccaacugugcucuuugaugg

SEQ ID NO: 371605 - RNA, 32 nt, Homo Sapiens
cuuauucugaagauuuuugcacacucaggcua

SEQ ID NO: 371606 - RNA, 32 nt, Homo Sapiens
uuugccuauguaauaggauauauccuaagugg

SEQ ID NO: 371607 - RNA, 32 nt, Homo Sapiens
gcacacagggaugagccacuagguaucccaug

SEQ ID NO: 371608 - RNA, 32 nt, Homo Sapiens
aaaauugaaacacagaguuguucugcugauag

SEQ ID NO: 371609 - RNA, 32 nt, Homo Sapiens
ccggcccacgccagcucccggccgcggcacag

SEQ ID NO: 371610 - RNA, 32 nt, Homo Sapiens
gcccccugcccgcuccccacuuccuagaaagc

SEQ ID NO: 371611 - RNA, 32 nt, Homo Sapiens
uaugucuuugccacgugugcugugacuucucu

SEQ ID NO: 371612 - RNA, 32 nt, Homo Sapiens
cgcccaugccaggcccggggaccugugccaca

SEQ ID NO: 371613 - RNA, 32 nt, Homo Sapiens
aaacagaucucagauagcaucagagcacacac

SEQ ID NO: 371614 - RNA, 32 nt, Homo Sapiens
guuuuguuuuauucuuuuuuuccagaaauuca

SEQ ID NO: 371615 - RNA, 32 nt, Homo Sapiens
cagagagacaugaauaaaaugggccucaacaa

SEQ ID NO: 371616 - RNA, 32 nt, Homo Sapiens
gagccuguuguaugcucuuaaucucaauuuug

SEQ ID NO: 371617 - RNA, 32 nt, Homo Sapiens
cagcccugccuugcugcagccccagcccagau

SEQ ID NO: 371618 - RNA, 32 nt, Homo Sapiens
ugaaaaaauaucagccaccaaaauaguuaugu

SEQ ID NO: 371619 - RNA, 32 nt, Homo Sapiens
aguucaguauaguacguaauucuuguaagagu

SEQ ID NO: 371620 - RNA, 32 nt, Homo Sapiens
aaaucuguacuauguaaaaguugcuuucugcu

SEQ ID NO: 371621 - RNA, 32 nt, Homo Sapiens
agugcagcagugacaugaucauagcucacugc

SEQ ID NO: 371622 - RNA, 32 nt, Homo Sapiens
aaucccgccgcaacuguuuucuguucuguugu

SEQ ID NO: 371623 - RNA, 32 nt, Homo Sapiens
cauuauuguaaguagccuuuauggccaaagcu

SEQ ID NO: 371624 - RNA, 32 nt, Homo Sapiens
auagagaaagagagcagcauguaguagaaaua

SEQ ID NO: 371625 - RNA, 32 nt, Homo Sapiens
aguacaaauggccaccugaugaaacaggagaa

SEQ ID NO: 371626 - RNA, 32 nt, Homo Sapiens
uuaacuuuuaucauuuaacucucucauguuug

SEQ ID NO: 371627 - RNA, 30 nt, Homo Sapiens
ugagggagcgcgcaguagccgggcagaagu

SEQ ID NO: 371628 - RNA, 32 nt, Homo Sapiens
ccccucaccccagcugacaggcuguugcugug

SEQ ID NO: 371629 - RNA, 32 nt, Homo Sapiens
ccccaucgggcaccccacucucuccgaggugu

SEQ ID NO: 371630 - RNA, 32 nt, Homo Sapiens
auaagugaagauccaccuccaguggcugcucu

SEQ ID NO: 371631 - RNA, 32 nt, Homo Sapiens
gacagagaaggagaagcaggcccuggaucaca

SEQ ID NO: 371632 - RNA, 32 nt, Homo Sapiens
gugugauucugggcagccggccuggcuugaag

SEQ ID NO: 371633 - RNA, 32 nt, Homo Sapiens
auuuauugcuacuuccugccuggucuccugcc

SEQ ID NO: 371634 - RNA, 32 nt, Homo Sapiens
gcguccccaccgugaccugccuggccuccccu

SEQ ID NO: 371635 - RNA, 32 nt, Homo Sapiens
accgugccuggccaggccccuucucuuuuaau

SEQ ID NO: 371636 - RNA, 32 nt, Homo Sapiens
acccagaccccuaaauucuccuccucccccau

SEQ ID NO: 371637 - RNA, 32 nt, Homo Sapiens
uauuggagcuagaauaauaauaaucgagcguu

SEQ ID NO: 371638 - RNA, 32 nt, Homo Sapiens
ucucucucucucucuuuuuuuuuuuugacaga

SEQ ID NO: 371639 - RNA, 32 nt, Homo Sapiens
agaugauacugaauagauauaaauuacaugua

SEQ ID NO: 371640 - RNA, 32 nt, Homo Sapiens
uggucuuaaggguugggcuugggaauaggcag

SEQ ID NO: 371641 - RNA, 32 nt, Homo Sapiens
guggcugucacgcagaaucaaagagauggauu

SEQ ID NO: 371642 - RNA, 32 nt, Homo Sapiens
ugcccgagguuaauguaguuguuuguuagacc

SEQ ID NO: 371643 - RNA, 32 nt, Homo Sapiens
gccugcggccugaccacugauuguagggaugc

SEQ ID NO: 371644 - RNA, 32 nt, Homo Sapiens
cacuccgaggggggcgucacuuugccauaggc

SEQ ID NO: 371645 - RNA, 32 nt, Homo Sapiens
auguucaaaugauguagauugucuuagaauga

SEQ ID NO: 371646 - RNA, 32 nt, Homo Sapiens
gucuuccagcccuccuuccccccguuacuccu

SEQ ID NO: 371647 - RNA, 32 nt, Homo Sapiens
uacgggcgagauguggacgauuugagcagcau

SEQ ID NO: 371648 - RNA, 32 nt, Homo Sapiens
uuggaaaauaaggaucugauugagucuuugaa

SEQ ID NO: 371649 - RNA, 32 nt, Homo Sapiens
uguuuguuuuuaacucaaaaaauguacuguag

SEQ ID NO: 371650 - RNA, 32 nt, Homo Sapiens
gagagugugcuggagcagauggagcacagaga

SEQ ID NO: 371651 - RNA, 32 nt, Homo Sapiens
agaacuagcucauguaaaaauaaaauaacauu

SEQ ID NO: 371652 - RNA, 32 nt, Homo Sapiens
ccucauaaauuaaugauucugaagcuuauguu

SEQ ID NO: 371653 - RNA, 32 nt, Homo Sapiens
uacucuguaaggauggaaugguagaaagauga

SEQ ID NO: 371654 - RNA, 32 nt, Homo Sapiens
auagaucucuuaccuuuuuucuugauauuaua

SEQ ID NO: 371655 - RNA, 32 nt, Homo Sapiens
ucauugggagcauuuuaaacuuuucuacauaa

SEQ ID NO: 371656 - RNA, 32 nt, Homo Sapiens
uuguuuuaucagugccaagaugaccuguugug

SEQ ID NO: 371657 - RNA, 32 nt, Homo Sapiens
ccagaguguauuacaacaaucuggagauacua

SEQ ID NO: 371658 - RNA, 29 nt, Homo Sapiens
caccaugaagcugcugcugcugcacccgg

SEQ ID NO: 371659 - RNA, 32 nt, Homo Sapiens
gugugccuggccuggguccagccugugggcgc

SEQ ID NO: 371660 - RNA, 32 nt, Homo Sapiens
uaucuuuuauaaacagaagcauuugaagucau

SEQ ID NO: 371661 - RNA, 32 nt, Homo Sapiens
gaauuuuagucuuuuaagcaaaguuuacgaau

SEQ ID NO: 371662 - RNA, 32 nt, Homo Sapiens
ccccauguggagaggacuaugaggaagagggc

SEQ ID NO: 371663 - RNA, 32 nt, Homo Sapiens
caaaaagauuguguguuugucugcuuuuguga

SEQ ID NO: 371664 - RNA, 32 nt, Homo Sapiens
cucuggagggaagauagucagaggucagcuga

SEQ ID NO: 371665 - RNA, 32 nt, Homo Sapiens
gagguucucgaucuccuucuggaaccucuucu

SEQ ID NO: 371666 - RNA, 32 nt, Homo Sapiens
cuagcugguuccucuguaguccugcugggacu

SEQ ID NO: 371667 - RNA, 32 nt, Homo Sapiens
gcaggagccagacguguggagucccagcagag

SEQ ID NO: 371668 - RNA, 32 nt, Homo Sapiens
cugauuucaacacuaacauuccaucuucugaa

SEQ ID NO: 371669 - RNA, 32 nt, Homo Sapiens
gcacaaauguucacagcaucuuucucuguaau

SEQ ID NO: 371670 - RNA, 32 nt, Homo Sapiens
ucucugagacucuguuaauuuauuuaaaaaau

SEQ ID NO: 371671 - RNA, 32 nt, Homo Sapiens
aucuuuugacuauauggaguagacugcauaca

SEQ ID NO: 371672 - RNA, 32 nt, Homo Sapiens
acgggacuccggaagaagacgucuccacggag

SEQ ID NO: 371673 - RNA, 32 nt, Homo Sapiens
cucuuggggucuguuucugguauuuuacaaaa

SEQ ID NO: 371674 - RNA, 32 nt, Homo Sapiens
ccagacugucuccacggccugcccagucgacg

SEQ ID NO: 371675 - RNA, 32 nt, Homo Sapiens
ugauacaacuuucuaccaaacuuuuggcauaa

SEQ ID NO: 371676 - RNA, 32 nt, Homo Sapiens
ccucaggccgcggcgacuggguuagagaugcc

SEQ ID NO: 371677 - RNA, 32 nt, Homo Sapiens
uugucccgccucagccucccaaggcugggauu

SEQ ID NO: 371678 - RNA, 32 nt, Homo Sapiens
auuauuaaaaauugagucuuaaauuuaaaugg

SEQ ID NO: 371679 - RNA, 32 nt, Homo Sapiens
cucuuugacugcuugugucaauaaaaggagaa

SEQ ID NO: 371680 - RNA, 32 nt, Homo Sapiens
cgcugugaugacgagcuggcugauuggcccug

SEQ ID NO: 371681 - RNA, 32 nt, Homo Sapiens
aagcauuggugcccucauggcccauguggacg

SEQ ID NO: 371682 - RNA, 32 nt, Homo Sapiens
auuuuuucuucagaauaugguauacuuaaaau

SEQ ID NO: 371683 - RNA, 32 nt, Homo Sapiens
guccgagcccaagccccuccccuccacucccc

SEQ ID NO: 371684 - RNA, 32 nt, Homo Sapiens
ucuucuggggccggcgcuugccacuagggcuc

SEQ ID NO: 371685 - RNA, 32 nt, Homo Sapiens
agacuccuggucugagcccaauaaagacuguu

SEQ ID NO: 371686 - RNA, 32 nt, Homo Sapiens
aaauguggacauuuuaaaggccucuggauuuu

SEQ ID NO: 371687 - RNA, 32 nt, Homo Sapiens
cugcaacccaccugcccccagcccugccccuc

SEQ ID NO: 371688 - RNA, 32 nt, Homo Sapiens
aaccugcaucauuccccgacacugccaagcca

SEQ ID NO: 371689 - RNA, 32 nt, Homo Sapiens
caucuguaaucccagcacuuugggaggccgag

SEQ ID NO: 371690 - RNA, 32 nt, Homo Sapiens
caccuguaauucuagcacuuugggaggcugag

SEQ ID NO: 371691 - RNA, 30 nt, Homo Sapiens
ugauauuccauaguggauucucgaagacuu

SEQ ID NO: 371692 - RNA, 32 nt, Homo Sapiens
uggcuaccaaacaugugcuacaugaccccuca

SEQ ID NO: 371693 - RNA, 32 nt, Homo Sapiens
gauuccacauaaaaugucacacuuguuucuug

SEQ ID NO: 371694 - RNA, 32 nt, Homo Sapiens
aaaaauguuggucuuucuuugacauguugcaa

SEQ ID NO: 371695 - RNA, 32 nt, Homo Sapiens
ucucauccauuuccuuuucaauggagacuaca

SEQ ID NO: 371696 - RNA, 32 nt, Homo Sapiens
aguuucaaucguauguccacuaccuccuggcc

SEQ ID NO: 371697 - RNA, 32 nt, Homo Sapiens
cacccucaaaggacauagacuuugaaacaagc

SEQ ID NO: 371698 - RNA, 32 nt, Homo Sapiens
uaagaaccucuuccucauaugccagcugcaac

SEQ ID NO: 371699 - RNA, 32 nt, Homo Sapiens
cugcguccuccuucagcugccccuccccggcg

SEQ ID NO: 371700 - RNA, 32 nt, Homo Sapiens
ccugcuggucccugucgccccauccccgaccc

SEQ ID NO: 371701 - RNA, 32 nt, Homo Sapiens
acuccggauccgagugcgccgagcugggaugg

SEQ ID NO: 371702 - RNA, 32 nt, Homo Sapiens
ucaacauacuaaauagcaggcacuugaaaaug

SEQ ID NO: 371703 - RNA, 32 nt, Homo Sapiens
gggucucagcuaagcagaaggugcuggaaggc

SEQ ID NO: 371704 - RNA, 32 nt, Homo Sapiens
uaagaaccguuuauaaucagugcuuucccaac

SEQ ID NO: 371705 - RNA, 32 nt, Homo Sapiens
cacucgcucccucucuggcuaaggcaugcauu

SEQ ID NO: 371706 - RNA, 32 nt, Homo Sapiens
cuuuagcucucugcucgccgccgccgcugucg

SEQ ID NO: 371707 - RNA, 32 nt, Homo Sapiens
uguaaaaauggcaaucaagagagucuaauaua

SEQ ID NO: 371708 - RNA, 32 nt, Homo Sapiens
cuggccugcccuccccggugggggccaggaug

SEQ ID NO: 371709 - RNA, 32 nt, Homo Sapiens
gaagaugaaacaguuucuucuacuuuauugga

SEQ ID NO: 371710 - RNA, 32 nt, Homo Sapiens
ucccagcucccaggacccccaggccggcagcg

SEQ ID NO: 371711 - RNA, 32 nt, Homo Sapiens
uuacaggugugagccaccacaccaggccagag

SEQ ID NO: 371712 - RNA, 32 nt, Homo Sapiens
aggguaccaggagagcuggcgaugacugaacu

SEQ ID NO: 371713 - RNA, 32 nt, Homo Sapiens
gaggcagauaguugcaaaguuagucuaagguu

SEQ ID NO: 371714 - RNA, 32 nt, Homo Sapiens
gguggggggagcggggcggggagauggauaaa

SEQ ID NO: 371715 - RNA, 32 nt, Homo Sapiens
aauuaauguaucuauuugcugcauuguauaug

SEQ ID NO: 371716 - RNA, 32 nt, Homo Sapiens
cucugcuccacccuccauuccuccuccccugg

SEQ ID NO: 371717 - RNA, 32 nt, Homo Sapiens
ucuaacagccugccugucccccgggaacguuc

SEQ ID NO: 371718 - RNA, 32 nt, Homo Sapiens
cuaauucaacugaguagucugaaccucuaaug

SEQ ID NO: 371719 - RNA, 32 nt, Homo Sapiens
cucagaccugacugaggaaguuagcugcgggc

SEQ ID NO: 371720 - RNA, 32 nt, Homo Sapiens
acuauguuccaagcaaucagccaggccuuggg

SEQ ID NO: 371721 - RNA, 32 nt, Homo Sapiens
gacgccaguugguggucuugaguuuucucuuu

SEQ ID NO: 371722 - RNA, 32 nt, Homo Sapiens
gucuuccagaucugggccaaucauccuggaca

SEQ ID NO: 371723 - RNA, 32 nt, Homo Sapiens
caccggggccgugggcccgagccccggacuuc

SEQ ID NO: 371724 - RNA, 32 nt, Homo Sapiens
aggucacacuccaauuaugauggaagauauuu

SEQ ID NO: 371725 - RNA, 32 nt, Homo Sapiens
guacaaaguggaauaaucuuuaccagaggcug

SEQ ID NO: 371726 - RNA, 32 nt, Homo Sapiens
acuuuccuuccgcuccucacguguccuguauu

SEQ ID NO: 371727 - RNA, 32 nt, Homo Sapiens
gacgcuggcggcggcggcggcuccuccacgcc

SEQ ID NO: 371728 - RNA, 32 nt, Homo Sapiens
ugaagaucuucagaacaaugacuuccaacugu

SEQ ID NO: 371729 - RNA, 32 nt, Homo Sapiens
ggcuucuugguccuagcaaguuucgauuucgc

SEQ ID NO: 371730 - RNA, 32 nt, Homo Sapiens
gauuaaagaagaaaagcgcguuguguauauua

SEQ ID NO: 371731 - RNA, 32 nt, Homo Sapiens
ucuggaaguguggcuguguuugguaaauaaca

SEQ ID NO: 371732 - RNA, 32 nt, Homo Sapiens
gcgcggggcccccuccuaggccccacccucac

SEQ ID NO: 371733 - RNA, 32 nt, Homo Sapiens
cuucugugucuccuccucucuguguccacugu

SEQ ID NO: 371734 - RNA, 32 nt, Homo Sapiens
acuuccaaauaaauucauaucuagauuuucaa

SEQ ID NO: 371735 - RNA, 32 nt, Homo Sapiens
aaaugccaaaguuugaaaaauagguauguuug

SEQ ID NO: 371736 - RNA, 32 nt, Homo Sapiens
cccauuagaagucugggaauuccauuaucggu

SEQ ID NO: 371737 - RNA, 32 nt, Homo Sapiens
uugagagcgggcgaugaugacaguggcggcuu

SEQ ID NO: 371738 - RNA, 32 nt, Homo Sapiens
gcagagggucgcgcggcugugugugaggagug

SEQ ID NO: 371739 - RNA, 32 nt, Homo Sapiens
aaagcaaaaaacaaaaacaagucccauguccu

SEQ ID NO: 371740 - RNA, 32 nt, Homo Sapiens
gcuagacaccaaugacgagagugauguuagca

SEQ ID NO: 371741 - RNA, 32 nt, Homo Sapiens
agacccaccggacugaaagagaaggacgaggu

SEQ ID NO: 371742 - RNA, 32 nt, Homo Sapiens
uuggccucuaaagcuccuaggugagagacgua

SEQ ID NO: 371743 - RNA, 30 nt, Homo Sapiens
aaccugggagguggaaguugcagugagccg

SEQ ID NO: 371744 - RNA, 32 nt, Homo Sapiens
acgggcuguccccgcgcgaacggaacguugga

SEQ ID NO: 371745 - RNA, 32 nt, Homo Sapiens
accgcucuccuggccuggccuggcuguggaga

SEQ ID NO: 371746 - RNA, 32 nt, Homo Sapiens
uuuuggaagaucugguaacagcagcccgcauu

SEQ ID NO: 371747 - RNA, 32 nt, Homo Sapiens
gaggaagcaccaaaauggaaaacuacuuuaau

SEQ ID NO: 371748 - RNA, 32 nt, Homo Sapiens
gaaaaaugccacuuguaucaacuuuacugccu

SEQ ID NO: 371749 - RNA, 32 nt, Homo Sapiens
ugcgucuucucucagcccuccacacacacuca

SEQ ID NO: 371750 - RNA, 32 nt, Homo Sapiens
aaucucuugcugucugguagggaccaggcaaa

SEQ ID NO: 371751 - RNA, 32 nt, Homo Sapiens
accccugcucuaguccuugccacacaugcccu

SEQ ID NO: 371752 - RNA, 32 nt, Homo Sapiens
ugagguuggcauuuuagugauuauuaagcacu

SEQ ID NO: 371753 - RNA, 32 nt, Homo Sapiens
gugccgggacuccggccgcagugucgccgcca

SEQ ID NO: 371754 - RNA, 32 nt, Homo Sapiens
ugcagcucagagcggcgcacgcggcggccggg

SEQ ID NO: 371755 - RNA, 32 nt, Homo Sapiens
ccuuuuguuuuagaagauuguuuacuuuccuu

SEQ ID NO: 371756 - RNA, 32 nt, Homo Sapiens
ggaaggcuagauggggcacccuggacaaagaa

SEQ ID NO: 371757 - RNA, 31 nt, Homo Sapiens
uccaccccgucugucauccucaucccacccu

SEQ ID NO: 371758 - RNA, 32 nt, Homo Sapiens
gaacgggaagucggugccuugguuucagcuga

SEQ ID NO: 371759 - RNA, 32 nt, Homo Sapiens
ucugugcaucuggccugggggcuguuagcuca

SEQ ID NO: 371760 - RNA, 32 nt, Homo Sapiens
ugcccuuugcguuauauuguauaauaccaacg

SEQ ID NO: 371761 - RNA, 32 nt, Homo Sapiens
agcccguucgcuccgcgccggcggccuguccc

SEQ ID NO: 371762 - RNA, 32 nt, Homo Sapiens
ugauuauucaacaaaaucaugaccgacugcug

SEQ ID NO: 371763 - RNA, 32 nt, Homo Sapiens
cuuauuauuuaguguuaaacagguuuaaugac

SEQ ID NO: 371764 - RNA, 32 nt, Homo Sapiens
cacucccccuccccauaccccuagucauccuc

SEQ ID NO: 371765 - RNA, 32 nt, Homo Sapiens
acugggguggcacuggagagccauggcagucg

SEQ ID NO: 371766 - RNA, 32 nt, Homo Sapiens
gcuucuaccuccccucccaggaccccgagaca

SEQ ID NO: 371767 - RNA, 32 nt, Homo Sapiens
ggcauuuaaagauguuucuggcauuuucuuuu

SEQ ID NO: 371768 - RNA, 32 nt, Homo Sapiens
ccacauuuuccccaauggauagaugucacuua

SEQ ID NO: 371769 - RNA, 32 nt, Homo Sapiens
uggagcggggaggcgaggagggggcugugagu

SEQ ID NO: 371770 - RNA, 32 nt, Homo Sapiens
acauccauuuucuuugugaacauauuagugau

SEQ ID NO: 371771 - RNA, 32 nt, Homo Sapiens
ccuacagacuugcugugugaccucaggccagu

SEQ ID NO: 371772 - RNA, 32 nt, Homo Sapiens
gaccaggcgcggucgcucacgccuguaauccc

SEQ ID NO: 371773 - RNA, 32 nt, Homo Sapiens
ucccuccucccucuucauuccuguccccaugg

SEQ ID NO: 371774 - RNA, 32 nt, Homo Sapiens
ccggggacgaggcccuggagcccugggucucg

SEQ ID NO: 371775 - RNA, 31 nt, Homo Sapiens
aguccuuuuaaagcaaccugaguuaaugaag

SEQ ID NO: 371776 - RNA, 32 nt, Homo Sapiens
aacuuuuuuaaccaaagugcaguuuauguuca

SEQ ID NO: 371777 - RNA, 32 nt, Homo Sapiens
ucuucucagaggugguugcguacuaugagcac

SEQ ID NO: 371778 - RNA, 32 nt, Homo Sapiens
cugccccucccucuagaggcugccugggccug

SEQ ID NO: 371779 - RNA, 32 nt, Homo Sapiens
uuggggccccucuccuccccagcccuucuccu

SEQ ID NO: 371780 - RNA, 32 nt, Homo Sapiens
aucuuacauuauggcuggggaucuuacucuuu

SEQ ID NO: 371781 - RNA, 32 nt, Homo Sapiens
accugggaggggcugcagccccagcuggacuc

SEQ ID NO: 371782 - RNA, 32 nt, Homo Sapiens
acccaggagagccacucuggucagaggggcuc

SEQ ID NO: 371783 - RNA, 32 nt, Homo Sapiens
auuuuugugguaacuguacagcacuuuaaagu

SEQ ID NO: 371784 - RNA, 32 nt, Homo Sapiens
guuuaguguagaagggaagagaauuggugcug

SEQ ID NO: 371785 - RNA, 32 nt, Homo Sapiens
ucccuacccccuggccccacaauaaacaugau

SEQ ID NO: 371786 - RNA, 32 nt, Homo Sapiens
gucaucuugaaguaaauagaagaucaagccuu

SEQ ID NO: 371787 - RNA, 32 nt, Homo Sapiens
auggacccacuacccuucuccuuuccuuccca

SEQ ID NO: 371788 - RNA, 32 nt, Homo Sapiens
gcgagucccgcggcggcggcgacgauggggcu

SEQ ID NO: 371789 - RNA, 32 nt, Homo Sapiens
gccaaacauaucuggacaguuacaaccuaauc

SEQ ID NO: 371790 - RNA, 32 nt, Homo Sapiens
ucacagcaauuuucuucacauuauuccuuuuc

SEQ ID NO: 371791 - RNA, 32 nt, Homo Sapiens
ugccaagcuugugaugauucaaaccuguacua

SEQ ID NO: 371792 - RNA, 32 nt, Homo Sapiens
auuuuaacuuuaauuuuaacugugauauaggc

SEQ ID NO: 371793 - RNA, 32 nt, Homo Sapiens
cuucacaaagcaggaaaugugcauguguaaug

SEQ ID NO: 371794 - RNA, 32 nt, Homo Sapiens
uuuugaaaauuccgucugugggauuuuuagac

SEQ ID NO: 371795 - RNA, 32 nt, Homo Sapiens
gaaguacuaugagccuucggaacuuguggaga

SEQ ID NO: 371796 - RNA, 32 nt, Homo Sapiens
cagccaugccugcagugcugcaggccucgcuu

SEQ ID NO: 371797 - RNA, 32 nt, Homo Sapiens
ugcgaacggaggaggaacuguguuggcacgug

SEQ ID NO: 371798 - RNA, 32 nt, Homo Sapiens
cagauagcaaaacaaaucaugaugcuguuaca

SEQ ID NO: 371799 - RNA, 32 nt, Homo Sapiens
cggccucuguauggaauugcuacuacacccag

SEQ ID NO: 371800 - RNA, 32 nt, Homo Sapiens
ggauaagacaugaguauaaaaagagacuccau

SEQ ID NO: 371801 - RNA, 32 nt, Homo Sapiens
cugcagagggugggggucucagggucuuaggu

SEQ ID NO: 371802 - RNA, 32 nt, Homo Sapiens
acagagagcaucaaaaucaggucagaaaaaug

SEQ ID NO: 371803 - RNA, 32 nt, Homo Sapiens
aaagcacuuuuguaguuuugaugaugaaaaau

SEQ ID NO: 371804 - RNA, 32 nt, Homo Sapiens
gaaggagggugguuaagaaauacaguggggcc

SEQ ID NO: 371805 - RNA, 32 nt, Homo Sapiens
cccagaauaggcggggcuuggaggcgguccca

SEQ ID NO: 371806 - RNA, 32 nt, Homo Sapiens
aucuauaauuuaaucugguaccauuauucaau

SEQ ID NO: 371807 - RNA, 32 nt, Homo Sapiens
uuccucaaccucagauucaggacaggcucggg

SEQ ID NO: 371808 - RNA, 32 nt, Homo Sapiens
ccuaccgccccacgcgcgacccggggauggcu

SEQ ID NO: 371809 - RNA, 32 nt, Homo Sapiens
ucucuccaguucuccuucccuuaccaaggaga

SEQ ID NO: 371810 - RNA, 32 nt, Homo Sapiens
ccuuccuagccuugcacuuucagacucucucu

SEQ ID NO: 371811 - RNA, 30 nt, Homo Sapiens
agcugugucuguggagcugcggccacucau

SEQ ID NO: 371812 - RNA, 32 nt, Homo Sapiens
ugggcugcugcagcugcaugggugccugcugc

SEQ ID NO: 371813 - RNA, 32 nt, Homo Sapiens
gucagagaccuuaagucugcaugugcagaggu

SEQ ID NO: 371814 - RNA, 32 nt, Homo Sapiens
uauuauuguaaauagaaaugaccacagcagaa

SEQ ID NO: 371815 - RNA, 32 nt, Homo Sapiens
uagguuaauguuuuauuugguugccugcauaa

SEQ ID NO: 371816 - RNA, 32 nt, Homo Sapiens
ccuuucccacucugaggcucuggccagaggga

SEQ ID NO: 371817 - RNA, 32 nt, Homo Sapiens
gaaaugauauugcauuucuaauuguuucucau

SEQ ID NO: 371818 - RNA, 26 nt, Homo Sapiens
aguuaauaaaaucaucgcauucacug

SEQ ID NO: 371819 - RNA, 32 nt, Homo Sapiens
acccagacguacugaggccaaguuccaugcca

SEQ ID NO: 371820 - RNA, 32 nt, Homo Sapiens
gggcuggcggccucgacggcagcugcggaacu

SEQ ID NO: 371821 - RNA, 32 nt, Homo Sapiens
cauaugcaaaaguccagcgccuugaaggagca

SEQ ID NO: 371822 - RNA, 32 nt, Homo Sapiens
ggcggggcugugcgggcgcccggacugaccga

SEQ ID NO: 371823 - RNA, 32 nt, Homo Sapiens
gugagugagugguggcggggcugcuccuuccc

SEQ ID NO: 371824 - RNA, 32 nt, Homo Sapiens
aacgccuccccugccccaaucccuuuauuacc

SEQ ID NO: 371825 - RNA, 30 nt, Homo Sapiens
gcuggaggcaggcccaaggguguuagaagg

SEQ ID NO: 371826 - RNA, 32 nt, Homo Sapiens
aauacacuuuuguuggaaauuuuguaacacaa

SEQ ID NO: 371827 - RNA, 32 nt, Homo Sapiens
ggccaguauucuuuuuaccauguuccaaauga

SEQ ID NO: 371828 - RNA, 32 nt, Homo Sapiens
cucagaggcgccgcggggagggguggccccgc

SEQ ID NO: 371829 - RNA, 32 nt, Homo Sapiens
gaagcgcgcccggcgucacggugagugcgggu

SEQ ID NO: 371830 - RNA, 32 nt, Homo Sapiens
uaaacgcacuuagucuaaccaagcccuaggau

SEQ ID NO: 371831 - RNA, 32 nt, Homo Sapiens
gagaguuugucauggggccucuggcugugccc

SEQ ID NO: 371832 - RNA, 32 nt, Homo Sapiens
uugcagugagcagagauugcccccgcuacacu

SEQ ID NO: 371833 - RNA, 32 nt, Homo Sapiens
ggucgaggggagaagaaaaaggggugcucggg

SEQ ID NO: 371834 - RNA, 32 nt, Homo Sapiens
agacaaaggguggaagauaacaggaggggggc

SEQ ID NO: 371835 - RNA, 32 nt, Homo Sapiens
gugggcuuggggugaguguaguucuggccuag

SEQ ID NO: 371836 - RNA, 32 nt, Homo Sapiens
cacuacuuccggcuuauggucuccaggcccuu

SEQ ID NO: 371837 - RNA, 32 nt, Homo Sapiens
aaaagaaacuguaaaggaaaccaagagauuuu

SEQ ID NO: 371838 - RNA, 32 nt, Homo Sapiens
gcuuugucuucagagaauuuacccuuaaccaa

SEQ ID NO: 371839 - RNA, 32 nt, Homo Sapiens
gaaaaggaaauaaaaaagccacugcuuuaaau

SEQ ID NO: 371840 - RNA, 32 nt, Homo Sapiens
uuuuccuagcagcuggcguucuuaucucaccc

SEQ ID NO: 371841 - RNA, 32 nt, Homo Sapiens
ugugauucucugagggagcagcugcgugagug

SEQ ID NO: 371842 - RNA, 32 nt, Homo Sapiens
agcccgcucugcagaccaccucuucuucuggg

SEQ ID NO: 371843 - RNA, 32 nt, Homo Sapiens
aagagauacuauuuuugcugagcaaccagugu

SEQ ID NO: 371844 - RNA, 32 nt, Homo Sapiens
cccacggcgccccgguuuuccuccccgcccug

SEQ ID NO: 371845 - RNA, 32 nt, Homo Sapiens
ggggcucagcacagcuuuccucauggaucuaa

SEQ ID NO: 371846 - RNA, 32 nt, Homo Sapiens
uccugcagauauauauuuauauuuauacauau

SEQ ID NO: 371847 - RNA, 32 nt, Homo Sapiens
uggugcugggccucucggugcugcugacggcg

SEQ ID NO: 371848 - RNA, 32 nt, Homo Sapiens
agagggaaaaauguauuuaauaaaaggcccug

SEQ ID NO: 371849 - RNA, 32 nt, Homo Sapiens
gggggcucagaaaggagaagggcugugaucuc

SEQ ID NO: 371850 - RNA, 32 nt, Homo Sapiens
ugcuuaauauaaagucuauuaagugguaaguc

SEQ ID NO: 371851 - RNA, 32 nt, Homo Sapiens
auacccugcccccaccauaucccuaccauccc

SEQ ID NO: 371852 - RNA, 32 nt, Homo Sapiens
aaugguguuucauaauaaaagucugaguuuaa

SEQ ID NO: 371853 - RNA, 32 nt, Homo Sapiens
aggcaaggggauaggcaaagggaccaguauca

SEQ ID NO: 371854 - RNA, 32 nt, Homo Sapiens
aagucucgagggggaaacuacugcauaaaaua

SEQ ID NO: 371855 - RNA, 32 nt, Homo Sapiens
uccaguguugggcuguuaacugcugcaccuca

SEQ ID NO: 371856 - RNA, 32 nt, Homo Sapiens
agaaggaggagaggaguguaaguccagauggc

SEQ ID NO: 371857 - RNA, 32 nt, Homo Sapiens
agacaggagaggcugcgccuuccccgcaccgg

SEQ ID NO: 371858 - RNA, 32 nt, Homo Sapiens
cuggcugcccggggcgggagcccugaacuaaa

SEQ ID NO: 371859 - RNA, 32 nt, Homo Sapiens
ggacagacuugcuggaggaggagaucaccaag

SEQ ID NO: 371860 - RNA, 32 nt, Homo Sapiens
auggauucugguuuuuuuucuuucuuuuuuuu

SEQ ID NO: 371861 - RNA, 32 nt, Homo Sapiens
cgcgaucccuccccgcgcccgccgagcacauc

SEQ ID NO: 371862 - RNA, 32 nt, Homo Sapiens
gguacaaggaaggcaagaaaacaaagacaaau

SEQ ID NO: 371863 - RNA, 32 nt, Homo Sapiens
acacuucugugagaggaccccugcacacauua

SEQ ID NO: 371864 - RNA, 32 nt, Homo Sapiens
ucccugcugucauugcuucuucugaggccuga

SEQ ID NO: 371865 - RNA, 32 nt, Homo Sapiens
cuccaggauagcaucugcauucugggaaggaa

SEQ ID NO: 371866 - RNA, 32 nt, Homo Sapiens
cccugccucccuuccucccuggcgauccucac

SEQ ID NO: 371867 - RNA, 30 nt, Homo Sapiens
uggggugccuccgugccgcuucgugcagca

SEQ ID NO: 371868 - RNA, 32 nt, Homo Sapiens
auaaagggacagaguacaaaagagagaaauuu

SEQ ID NO: 371869 - RNA, 32 nt, Homo Sapiens
ucccuccucccuccggccgcccgagcucccgg

SEQ ID NO: 371870 - RNA, 32 nt, Homo Sapiens
agcacgaccaugagcuucuccuccucauccuc

SEQ ID NO: 371871 - RNA, 32 nt, Homo Sapiens
uugagguucuuugguuuuguuaguaaaagcca

SEQ ID NO: 371872 - RNA, 32 nt, Homo Sapiens
cguagccgucgcggccgggacuccccgggcuc

SEQ ID NO: 371873 - RNA, 32 nt, Homo Sapiens
cauccaccucggagaccacccucccccagcca

SEQ ID NO: 371874 - RNA, 32 nt, Homo Sapiens
augcuggaaaacacagcagccccuacaccuug

SEQ ID NO: 371875 - RNA, 32 nt, Homo Sapiens
cugcuguguauauauaaaugguuucuacacac

SEQ ID NO: 371876 - RNA, 32 nt, Homo Sapiens
cggcaguuggaggaaggccagaggaacagcuu

SEQ ID NO: 371877 - RNA, 32 nt, Homo Sapiens
aaccccugcagccagcaggccuccugaaaaaa

SEQ ID NO: 371878 - RNA, 31 nt, Homo Sapiens
cuggauccggucugccugccucccugugcag

SEQ ID NO: 371879 - RNA, 32 nt, Homo Sapiens
acacauaaugaagacuaagaaaaggaagaaag

SEQ ID NO: 371880 - RNA, 32 nt, Homo Sapiens
auuauuuugugcuacauacagguuggcuaaug

SEQ ID NO: 371881 - RNA, 32 nt, Homo Sapiens
uuuauccuuacauuuuaugccucccccuaaau

SEQ ID NO: 371882 - RNA, 32 nt, Homo Sapiens
ucccagugccccacaagggcguacgcuuccua

SEQ ID NO: 371883 - RNA, 32 nt, Homo Sapiens
aauuucagagauauagaaaacaaaaugaacuc

SEQ ID NO: 371884 - RNA, 32 nt, Homo Sapiens
aaagaucacaguuuuuuuuuuacucuuacauc

SEQ ID NO: 371885 - RNA, 32 nt, Homo Sapiens
cacuggccacgauccccuccccggagcggagg

SEQ ID NO: 371886 - RNA, 32 nt, Homo Sapiens
uaaagccauaccaccaaaaguaccugugugug

SEQ ID NO: 371887 - RNA, 32 nt, Homo Sapiens
agagaauagauuguaucaaacaacggcaggga

SEQ ID NO: 371888 - RNA, 32 nt, Homo Sapiens
acccagagacucggggagacccgggcgguccg

SEQ ID NO: 371889 - RNA, 32 nt, Homo Sapiens
acaucagaaccuuggaagcugcugcugcugcu

SEQ ID NO: 371890 - RNA, 32 nt, Homo Sapiens
ccaaacagaacaugagaauacacacacacaca

SEQ ID NO: 371891 - RNA, 32 nt, Homo Sapiens
ucucucaauguuucuguuugucauuugagcau

SEQ ID NO: 371892 - RNA, 32 nt, Homo Sapiens
cuugcuacaucauaaugcugguuuugcugacu

SEQ ID NO: 371893 - RNA, 32 nt, Homo Sapiens
ggcggaggcagcgugcggcggucgccaggagc

SEQ ID NO: 371894 - RNA, 32 nt, Homo Sapiens
aaauuagcugggugugguggcacaugccuaua

SEQ ID NO: 371895 - RNA, 32 nt, Homo Sapiens
aaauuagcugggugugguggcgcaugccugua

SEQ ID NO: 371896 - RNA, 32 nt, Homo Sapiens
auaagaauauaaauaauagcaaacuacuauua

SEQ ID NO: 371897 - RNA, 32 nt, Homo Sapiens
gcaguuaacaaggcuggaugugaauuuuauuc

SEQ ID NO: 371898 - RNA, 29 nt, Homo Sapiens
ccgucgcuuggcaacaggacgccgccgag

SEQ ID NO: 371899 - RNA, 32 nt, Homo Sapiens
agcucagguaaagaagcugggaguuccagacu

SEQ ID NO: 371900 - RNA, 32 nt, Homo Sapiens
cccugcaggugaauuggaugcauguuaaaguc

SEQ ID NO: 371901 - RNA, 32 nt, Homo Sapiens
gaagagucauauuagaaauucguucagucuag

SEQ ID NO: 371902 - RNA, 32 nt, Homo Sapiens
cuuuaguguugggacaggggaaagggucugug

SEQ ID NO: 371903 - RNA, 32 nt, Homo Sapiens
augauagaaaauuuggaaagugcaaauaagca

SEQ ID NO: 371904 - RNA, 32 nt, Homo Sapiens
ugucuugauguuucuaucaacuauaucaugac

SEQ ID NO: 371905 - RNA, 32 nt, Homo Sapiens
cgcacaguagacggagcgcgcccggccgagcg

SEQ ID NO: 371906 - RNA, 30 nt, Homo Sapiens
ccccgugcccucacgccgccgggcucuggc

SEQ ID NO: 371907 - RNA, 32 nt, Homo Sapiens
uuuugaagugacuucgcggcgugcguugggug

SEQ ID NO: 371908 - RNA, 32 nt, Homo Sapiens
uggugaugaugaugaugaugauggcagcuuua

SEQ ID NO: 371909 - RNA, 32 nt, Homo Sapiens
auagccauccguccauguaacucuguauuuua

SEQ ID NO: 371910 - RNA, 32 nt, Homo Sapiens
aguauuuuuuaaaugcuguaucuuuaaagaaa

SEQ ID NO: 371911 - RNA, 32 nt, Homo Sapiens
uaccucccaagcaagggcuugguugagaagga

SEQ ID NO: 371912 - RNA, 32 nt, Homo Sapiens
ugaagaagcagcagccgcucgcccggagccua

SEQ ID NO: 371913 - RNA, 32 nt, Homo Sapiens
gaaagguugcugucugucucaguacaauccaa

SEQ ID NO: 371914 - RNA, 32 nt, Homo Sapiens
ggacccuauuugaagacuauguuguaauauca

SEQ ID NO: 371915 - RNA, 32 nt, Homo Sapiens
ggaacccugaucaucaccagacccugggauug

SEQ ID NO: 371916 - RNA, 32 nt, Homo Sapiens
ccccagacaggaccaguugcccucauuuccaa

SEQ ID NO: 371917 - RNA, 32 nt, Homo Sapiens
uuuacccccauugccuucuccauugucaacuc

SEQ ID NO: 371918 - RNA, 32 nt, Homo Sapiens
gcucgggagcagcagcugugcccgggaucccg

SEQ ID NO: 371919 - RNA, 32 nt, Homo Sapiens
caggugaagaucuggaggcacuccuaugaugu

SEQ ID NO: 371920 - RNA, 32 nt, Homo Sapiens
agagagagccacuuacaaagucgaucuugaga

SEQ ID NO: 371921 - RNA, 32 nt, Homo Sapiens
aggcguaugggguggggggugugcauggcagg

SEQ ID NO: 371922 - RNA, 32 nt, Homo Sapiens
agucuuuccccucccccaacgauguagcguuu

SEQ ID NO: 371923 - RNA, 32 nt, Homo Sapiens
uucaauaagaauuguuguauuuuuguauuugg

SEQ ID NO: 371924 - RNA, 32 nt, Homo Sapiens
gggcucgccucccugggacuagguuucagcgg

SEQ ID NO: 371925 - RNA, 32 nt, Homo Sapiens
caggccuggccucgggguucccccgcugccug

SEQ ID NO: 371926 - RNA, 32 nt, Homo Sapiens
auguccuucuaaauacacccccuacugcccac

SEQ ID NO: 371927 - RNA, 32 nt, Homo Sapiens
gcccaugcacugugugugcagacgcauggggc

SEQ ID NO: 371928 - RNA, 32 nt, Homo Sapiens
uuucauuguauauaggugguuuucccuggaau

SEQ ID NO: 371929 - RNA, 30 nt, Homo Sapiens
ucuccggcgcccgccccucagacguaaugu

SEQ ID NO: 371930 - RNA, 32 nt, Homo Sapiens
uggcccgcgcgggagggcgcgcggcgccaaac

SEQ ID NO: 371931 - RNA, 32 nt, Homo Sapiens
guuccgaggcauucagagcaucagagcaagua

SEQ ID NO: 371932 - RNA, 32 nt, Homo Sapiens
ugggaauucuuccuaaauuacucuggaaauuu

SEQ ID NO: 371933 - RNA, 32 nt, Homo Sapiens
auuugaaauuuaugauuggaugacuuuugucc

SEQ ID NO: 371934 - RNA, 32 nt, Homo Sapiens
gggggcuccgcgggccugggccucgggauucg

SEQ ID NO: 371935 - RNA, 31 nt, Homo Sapiens
cccagacaguugggcggccaggcaagcgcuc

SEQ ID NO: 371936 - RNA, 32 nt, Homo Sapiens
uugcauuucugcacuuuggugguucucccaug

SEQ ID NO: 371937 - RNA, 32 nt, Homo Sapiens
gcguucuucccgcagaucaggugcugguaggg

SEQ ID NO: 371938 - RNA, 32 nt, Homo Sapiens
acucuccaguaugucacgcaucuuuaacuuuu

SEQ ID NO: 371939 - RNA, 32 nt, Homo Sapiens
ugagcuccugaaaggagggaagcccccacacc

SEQ ID NO: 371940 - RNA, 32 nt, Homo Sapiens
aaacuuguagacuaaaccaaguauuguaaaau

SEQ ID NO: 371941 - RNA, 32 nt, Homo Sapiens
uuguugcaggcacuucuuccuuacuuggugcu

SEQ ID NO: 371942 - RNA, 32 nt, Homo Sapiens
accgaauuugaggaauacaggaucucaaccuu

SEQ ID NO: 371943 - RNA, 32 nt, Homo Sapiens
ccuggagaaaacagugauguggaucuuaucaa

SEQ ID NO: 371944 - RNA, 32 nt, Homo Sapiens
uaccauuccuuccucuuagccccaggagcaaa

SEQ ID NO: 371945 - RNA, 32 nt, Homo Sapiens
auugauguauuucuaucuuuuauauuuuuuag

SEQ ID NO: 371946 - RNA, 32 nt, Homo Sapiens
uacuggacucuucaaaaacuguuuuggguagc

SEQ ID NO: 371947 - RNA, 32 nt, Homo Sapiens
cucccaaauuuaauguggaagacaaaguguug

SEQ ID NO: 371948 - RNA, 32 nt, Homo Sapiens
ucuuuauugggaaugaguuuguuauaaaucag

SEQ ID NO: 371949 - RNA, 32 nt, Homo Sapiens
cucauuacuggggcuccugcugcggggcuggc

SEQ ID NO: 371950 - RNA, 32 nt, Homo Sapiens
cugcuguuaaagacauaccugagacuggguaa

SEQ ID NO: 371951 - RNA, 32 nt, Homo Sapiens
ucagccccggcggggaggagcgggugggugug

SEQ ID NO: 371952 - RNA, 28 nt, Homo Sapiens
aagcuaauggcgaaucacgaugaccuug

SEQ ID NO: 371953 - RNA, 32 nt, Homo Sapiens
aagcagaauaaaaaguauccuuugaaauuaaa

SEQ ID NO: 371954 - RNA, 28 nt, Homo Sapiens
auuccauuuguaggaccaagucgacaug

SEQ ID NO: 371955 - RNA, 32 nt, Homo Sapiens
gcugggaaucacggcccuuccuuuccucagau

SEQ ID NO: 371956 - RNA, 32 nt, Homo Sapiens
ucugcaccaaccccaggcuacugagccaccuu

SEQ ID NO: 371957 - RNA, 32 nt, Homo Sapiens
ggcccccagcuccuacccacuccccuugagga

SEQ ID NO: 371958 - RNA, 32 nt, Homo Sapiens
accccaccucaugccuggccccccuccaggca

SEQ ID NO: 371959 - RNA, 32 nt, Homo Sapiens
gaaggcuguuagauuauauagaaagaagggua

SEQ ID NO: 371960 - RNA, 32 nt, Homo Sapiens
ucccgucacacgcuggagcagugugccuggag

SEQ ID NO: 371961 - RNA, 32 nt, Homo Sapiens
guagggugguauaaaaaagaggucuucauuua

SEQ ID NO: 371962 - RNA, 32 nt, Homo Sapiens
uggaguaugcuguaaauaaaaauacaagcuag

SEQ ID NO: 371963 - RNA, 32 nt, Homo Sapiens
caacuagaauaaaacagucaucaugaacccuc

SEQ ID NO: 371964 - RNA, 32 nt, Homo Sapiens
cgcgaggcggccggggcuccugccgggcaccc

SEQ ID NO: 371965 - RNA, 32 nt, Homo Sapiens
guaaaacgcuuagcucuuaauaaauguuucug

SEQ ID NO: 371966 - RNA, 32 nt, Homo Sapiens
acugaacccaucaucaccacagccacuccugc

SEQ ID NO: 371967 - RNA, 32 nt, Homo Sapiens
ggaccaaggcuaggcuuuuuuauuucaauagg

SEQ ID NO: 371968 - RNA, 32 nt, Homo Sapiens
gucuggagccccagcagccccuggggcacugc

SEQ ID NO: 371969 - RNA, 32 nt, Homo Sapiens
ccauuccccuggaaauuuucauugucaccaug

SEQ ID NO: 371970 - RNA, 32 nt, Homo Sapiens
cgugcuugugucucuuuccccccuuuucugua

SEQ ID NO: 371971 - RNA, 32 nt, Homo Sapiens
agaaaucggaguuuguuugaccuguuucacag

SEQ ID NO: 371972 - RNA, 31 nt, Homo Sapiens
uuuaaaacaaauuuaaagggccuguuaauuc

SEQ ID NO: 371973 - RNA, 32 nt, Homo Sapiens
uggagacagcauggagcugucagugccucccc

SEQ ID NO: 371974 - RNA, 32 nt, Homo Sapiens
ugcuauuuugcaaagaaauaauuauaguuuuu

SEQ ID NO: 371975 - RNA, 32 nt, Homo Sapiens
auuuucuagacauacauagaaaucagaccacu

SEQ ID NO: 371976 - RNA, 32 nt, Homo Sapiens
ucucaggguuccugggucauucuugggccauc

SEQ ID NO: 371977 - RNA, 32 nt, Homo Sapiens
gcccucugccaccuugcuccccgggaacccau

SEQ ID NO: 371978 - RNA, 32 nt, Homo Sapiens
aaucgaagggagaggagaaaggcgcugcacuu

SEQ ID NO: 371979 - RNA, 32 nt, Homo Sapiens
ugcugugccucccaaaauuguuuugagcuuuc

SEQ ID NO: 371980 - RNA, 32 nt, Homo Sapiens
cuccucuuccuccgccauccucauuuauacug

SEQ ID NO: 371981 - RNA, 32 nt, Homo Sapiens
uagggcccagggggcggggaaggggggccggg

SEQ ID NO: 371982 - RNA, 32 nt, Homo Sapiens
cagcccucccccacccauuaaauugugagcuc

SEQ ID NO: 371983 - RNA, 32 nt, Homo Sapiens
aagaaccuuuugcuguuucuuccaacgcccac

SEQ ID NO: 371984 - RNA, 29 nt, Homo Sapiens
agaaguuggccccauguuacagaugggga

SEQ ID NO: 371985 - RNA, 32 nt, Homo Sapiens
gauucuugcauucuggguuuggcuuuuuucug

SEQ ID NO: 371986 - RNA, 32 nt, Homo Sapiens
cauuuuaguuuaucagauugguaacuuaucgc

SEQ ID NO: 371987 - RNA, 32 nt, Homo Sapiens
ugacaagcugguugaagcugguaaucaaugca

SEQ ID NO: 371988 - RNA, 32 nt, Homo Sapiens
aacauguaaaauguuuaauggugaaaguugga

SEQ ID NO: 371989 - RNA, 32 nt, Homo Sapiens
cucugugaacugugugugaaucugcuuuuccu

SEQ ID NO: 371990 - RNA, 32 nt, Homo Sapiens
uggacagcuuuauuuuaaaugugguuuuugau

SEQ ID NO: 371991 - RNA, 32 nt, Homo Sapiens
ccgcgaccacgggaaccagcggugaggccuga

SEQ ID NO: 371992 - RNA, 32 nt, Homo Sapiens
uuggugugauuccaaccuccagcuccccccac

SEQ ID NO: 371993 - RNA, 32 nt, Homo Sapiens
aauaaauauuuuugccauaaugacucagaaua

SEQ ID NO: 371994 - RNA, 32 nt, Homo Sapiens
cuucaacgauuuggaagucagaggaacgaagu

SEQ ID NO: 371995 - RNA, 32 nt, Homo Sapiens
ugauggaugcuguugggcauguccaauguaug

SEQ ID NO: 371996 - RNA, 32 nt, Homo Sapiens
gucacagcaaacggcagaacuaacaauaacca

SEQ ID NO: 371997 - RNA, 32 nt, Homo Sapiens
ccaaggcccaaucccagguccaggcucaaucc

SEQ ID NO: 371998 - RNA, 29 nt, Homo Sapiens
caagaugcgccuccaccugcuccugcugc

SEQ ID NO: 371999 - RNA, 32 nt, Homo Sapiens
aguagcauccacacuuucuccucaccagaugc

SEQ ID NO: 372000 - RNA, 32 nt, Homo Sapiens
uugucauuuuuauaaaacuuugaaaugaggaa

SEQ ID NO: 372001 - RNA, 32 nt, Homo Sapiens
gccuccacaaugauguaguccuggauuccagc

SEQ ID NO: 372002 - RNA, 32 nt, Homo Sapiens
gcggaacccggggcuccagggucuggggcagc

SEQ ID NO: 372003 - RNA, 32 nt, Homo Sapiens
caaccuggccccaggggcuucccuguggcugc

SEQ ID NO: 372004 - RNA, 32 nt, Homo Sapiens
uuuuagcucugugccugucuccagucaggcug

SEQ ID NO: 372005 - RNA, 32 nt, Homo Sapiens
ucucucugccuggccccaggcugcuuccacug

SEQ ID NO: 372006 - RNA, 28 nt, Homo Sapiens
aggcaguggcggccgcgaggggaggggg

SEQ ID NO: 372007 - RNA, 32 nt, Homo Sapiens
ggggcaaggggagggagagcauuagacaaaua

SEQ ID NO: 372008 - RNA, 32 nt, Homo Sapiens
uuuuucuaacuccaggguaguguuuaguguua

SEQ ID NO: 372009 - RNA, 32 nt, Homo Sapiens
gagcaguaguuaucuuagauuuuaaaaacaug

SEQ ID NO: 372010 - RNA, 32 nt, Homo Sapiens
gucuacuguggcuuucccgguggcucaggguu

SEQ ID NO: 372011 - RNA, 32 nt, Homo Sapiens
acacaaccaggacacuccaugagggagggacu

SEQ ID NO: 372012 - RNA, 32 nt, Homo Sapiens
guuuguaacacaaauaaaugcuugaggagaug

SEQ ID NO: 372013 - RNA, 32 nt, Homo Sapiens
cucauuaguuuauaauuguaugaaauacgauu

SEQ ID NO: 372014 - RNA, 32 nt, Homo Sapiens
ggaccccugccccuuccaagccuaucggggug

SEQ ID NO: 372015 - RNA, 32 nt, Homo Sapiens
uguggucucugucauccucgucucucuucuga

SEQ ID NO: 372016 - RNA, 31 nt, Homo Sapiens
uuaccgcaagagguguaaaaauccagguuca

SEQ ID NO: 372017 - RNA, 32 nt, Homo Sapiens
uucccacccagaaucuuuagguaaaugagauc

SEQ ID NO: 372018 - RNA, 32 nt, Homo Sapiens
cugugcugcauuguuggaugacaacucuuuuu

SEQ ID NO: 372019 - RNA, 31 nt, Homo Sapiens
cgccgcccucgcugccugccacuccgucuug

SEQ ID NO: 372020 - RNA, 32 nt, Homo Sapiens
agagugaauuugaccuaggcaaguuuguucaa

SEQ ID NO: 372021 - RNA, 32 nt, Homo Sapiens
uguccuuuauacauuucuguaguuaacagaac

SEQ ID NO: 372022 - RNA, 32 nt, Homo Sapiens
aaucaaaaaucauucccugaaaacagaaucua

SEQ ID NO: 372023 - RNA, 32 nt, Homo Sapiens
aaggagcugggguggggggcucucagcucucu

SEQ ID NO: 372024 - RNA, 32 nt, Homo Sapiens
ggugauagaguggcugggguccuacuuugcca

SEQ ID NO: 372025 - RNA, 32 nt, Homo Sapiens
cccuacuuuaaagauuuauucccuugacuucu

SEQ ID NO: 372026 - RNA, 32 nt, Homo Sapiens
gcuggucucaaaacuccugaccucaggugaug

SEQ ID NO: 372027 - RNA, 32 nt, Homo Sapiens
guuguuguuguuguuguuguuuucuagcccaa

SEQ ID NO: 372028 - RNA, 32 nt, Homo Sapiens
ggaggagggggcggccggcuucugcugcagcc

SEQ ID NO: 372029 - RNA, 32 nt, Homo Sapiens
guucccaugaccucccgagacuugccauaagu

SEQ ID NO: 372030 - RNA, 32 nt, Homo Sapiens
cggaugucugcucccggcaccgcgccuugguc

SEQ ID NO: 372031 - RNA, 32 nt, Homo Sapiens
aacguggugcggcggcggcggcggcggcgacu

SEQ ID NO: 372032 - RNA, 32 nt, Homo Sapiens
aggaacaauuuuuaaauauaaaacauucccaa

SEQ ID NO: 372033 - RNA, 32 nt, Homo Sapiens
agcauuugauaaauaauagcuguuauuguugu

SEQ ID NO: 372034 - RNA, 32 nt, Homo Sapiens
auguuuguuugcaugaugucuaccucagaauu

SEQ ID NO: 372035 - RNA, 32 nt, Homo Sapiens
ucugaguggugggacaacugcagccagagacu

SEQ ID NO: 372036 - RNA, 28 nt, Homo Sapiens
gugauggcgggggcugguuccgccgcug

SEQ ID NO: 372037 - RNA, 32 nt, Homo Sapiens
gcggccaccccguucccuccccagcuuccugc

SEQ ID NO: 372038 - RNA, 28 nt, Homo Sapiens
ugaacuagggagacgcauuugaacuuga

SEQ ID NO: 372039 - RNA, 32 nt, Homo Sapiens
agugagccaugauugugcuacugcacuccaau

SEQ ID NO: 372040 - RNA, 32 nt, Homo Sapiens
gaccugaagugaagcuccccaaggcuccugag

SEQ ID NO: 372041 - RNA, 32 nt, Homo Sapiens
uggccugagggcggggcgggcgcggggcagcu

SEQ ID NO: 372042 - RNA, 32 nt, Homo Sapiens
ugugaagugacaugucagaacaguccagacug

SEQ ID NO: 372043 - RNA, 32 nt, Homo Sapiens
aaacuucacaugccuauaauuggagggaaaaa

SEQ ID NO: 372044 - RNA, 31 nt, Homo Sapiens
cccggguggcacugccaggugguggccugug

SEQ ID NO: 372045 - RNA, 32 nt, Homo Sapiens
ccccucuugcauuuauuugucaauguuuucca

SEQ ID NO: 372046 - RNA, 32 nt, Homo Sapiens
uucaguggcugagacugugagcugggagcagu

SEQ ID NO: 372047 - RNA, 32 nt, Homo Sapiens
cagaagugcuucagucauucacauguguucgu

SEQ ID NO: 372048 - RNA, 32 nt, Homo Sapiens
agauguuaccuuuggguuuuuaaaagacaagu

SEQ ID NO: 372049 - RNA, 30 nt, Homo Sapiens
agcgccacugcucgcuggucuacguccccg

SEQ ID NO: 372050 - RNA, 32 nt, Homo Sapiens
ucuuuucugauccauggauaacaacucucacu

SEQ ID NO: 372051 - RNA, 32 nt, Homo Sapiens
uaaaggacauacauuuaauauuucuguggaaa

SEQ ID NO: 372052 - RNA, 30 nt, Homo Sapiens
ccccuaaaguguuccuucuaacucucccag

SEQ ID NO: 372053 - RNA, 32 nt, Homo Sapiens
ugccccguagcuucggccgccggcacuggcag

SEQ ID NO: 372054 - RNA, 32 nt, Homo Sapiens
gggucuggcugugcuccugggagcugugcuga

SEQ ID NO: 372055 - RNA, 32 nt, Homo Sapiens
acuccaugccccgccucccaacggaccuggac

SEQ ID NO: 372056 - RNA, 32 nt, Homo Sapiens
uguuauuuagagaucaaggaaggaagucaucc

SEQ ID NO: 372057 - RNA, 32 nt, Homo Sapiens
cagauucugcaccuggccauucccuguccugu

SEQ ID NO: 372058 - RNA, 32 nt, Homo Sapiens
gaagaaccaugaugaaggcugguucgaauugu

SEQ ID NO: 372059 - RNA, 32 nt, Homo Sapiens
guaaaaauaaccucauguaaguaagccauuuu

SEQ ID NO: 372060 - RNA, 32 nt, Homo Sapiens
agaaagaagcuaaagcacuuccagagccugcu

SEQ ID NO: 372061 - RNA, 32 nt, Homo Sapiens
gucccggguugguggggguggagcagcacuuc

SEQ ID NO: 372062 - RNA, 32 nt, Homo Sapiens
aucucuaagaaacaaccauaccacugaaugcu

SEQ ID NO: 372063 - RNA, 32 nt, Homo Sapiens
aguguaacgcgccggcucgggcggcgggcucc

SEQ ID NO: 372064 - RNA, 32 nt, Homo Sapiens
uugugaugaugauuauuuauuaguaacugguu

SEQ ID NO: 372065 - RNA, 30 nt, Homo Sapiens
ccugcacgcaugcgcgcggcucgccgcggu

SEQ ID NO: 372066 - RNA, 32 nt, Homo Sapiens
ccucugggggcagucgccgagagccuccuucc

SEQ ID NO: 372067 - RNA, 32 nt, Homo Sapiens
aauuccacuaacuauauagaaagauaccauua

SEQ ID NO: 372068 - RNA, 32 nt, Homo Sapiens
guuucaaccacguuggccaggcugguuuugaa

SEQ ID NO: 372069 - RNA, 32 nt, Homo Sapiens
gugccccuccaagcugacggcaccccacucca

SEQ ID NO: 372070 - RNA, 32 nt, Homo Sapiens
cauauuuugacucccucugugccucuucccag

SEQ ID NO: 372071 - RNA, 32 nt, Homo Sapiens
auauguacaguauauaaacauaaaacacacaa

SEQ ID NO: 372072 - RNA, 32 nt, Homo Sapiens
gguggggguggcggcgcgaucggccgggcugu

SEQ ID NO: 372073 - RNA, 32 nt, Homo Sapiens
aaagaaauuuaaaagacacuguuuacaagaaa

SEQ ID NO: 372074 - RNA, 32 nt, Homo Sapiens
gaaaaucugugcuauuuugaaauugauuuggc

SEQ ID NO: 372075 - RNA, 32 nt, Homo Sapiens
aacacccugagugcccugaaaacugcuuuugc

SEQ ID NO: 372076 - RNA, 32 nt, Homo Sapiens
cagcuucggagccaccucuggaugaacugccc

SEQ ID NO: 372077 - RNA, 32 nt, Homo Sapiens
ggcaaaggcagacaccguggagauggacauuu

SEQ ID NO: 372078 - RNA, 32 nt, Homo Sapiens
cuccucguccggcgccagcagcccgcgccccg

SEQ ID NO: 372079 - RNA, 32 nt, Homo Sapiens
gccggcagacguggagguccaggccggggugg

SEQ ID NO: 372080 - RNA, 32 nt, Homo Sapiens
ggaggucaucaugaagagcggcuggagugacu

SEQ ID NO: 372081 - RNA, 32 nt, Homo Sapiens
acuccagccugggcaauauagcaagaccccau

SEQ ID NO: 372082 - RNA, 32 nt, Homo Sapiens
acccccggcaggcgaggcgccuggccgcugag

SEQ ID NO: 372083 - RNA, 32 nt, Homo Sapiens
gucagagguucaaauuucacaggcacagcugg

SEQ ID NO: 372084 - RNA, 32 nt, Homo Sapiens
cugcccccaucccgcacccuuccaccuccucc

SEQ ID NO: 372085 - RNA, 31 nt, Homo Sapiens
gcccgccgcuaggucgcuccccggccaugcg

SEQ ID NO: 372086 - RNA, 32 nt, Homo Sapiens
agcccugcagaacccggccgaccuccaugggc

SEQ ID NO: 372087 - RNA, 32 nt, Homo Sapiens
uuuacuguuuugcaugauaggaaaauugagaa

SEQ ID NO: 372088 - RNA, 32 nt, Homo Sapiens
aaauaaauaaaacucaaucaugacuuuggcag

SEQ ID NO: 372089 - RNA, 32 nt, Homo Sapiens
uggcgcccauggagccagagcugcugguucgg

SEQ ID NO: 372090 - RNA, 32 nt, Homo Sapiens
ggaguaagcauuaagcgaauuuaaccaaguaa

SEQ ID NO: 372091 - RNA, 32 nt, Homo Sapiens
cugaagacgcagccuuucuccagguucugucu

SEQ ID NO: 372092 - RNA, 32 nt, Homo Sapiens
uguuugagaaaauuauuucuaggguuuaagua

SEQ ID NO: 372093 - RNA, 32 nt, Homo Sapiens
auaccuuuuuuuuuuuuuuuuaaaggacuaca

SEQ ID NO: 372094 - RNA, 32 nt, Homo Sapiens
uaauggacucagcucugucugcucaaugccau

SEQ ID NO: 372095 - RNA, 29 nt, Homo Sapiens
gaccagccuggucaacauggcaaaacaua

SEQ ID NO: 372096 - RNA, 32 nt, Homo Sapiens
uguuugucaucuuauaaagcaaaggggugaau

SEQ ID NO: 372097 - RNA, 32 nt, Homo Sapiens
uaccuuacccuuagagacuuugaaaaauguga

SEQ ID NO: 372098 - RNA, 32 nt, Homo Sapiens
uccugccccgucccaugccucagcuugcugcu

SEQ ID NO: 372099 - RNA, 32 nt, Homo Sapiens
guaaaaugaagauaacaacaggaccuaucucc

SEQ ID NO: 372100 - RNA, 32 nt, Homo Sapiens
caucccuauggccacugucucccuugaucccc

SEQ ID NO: 372101 - RNA, 31 nt, Homo Sapiens
ggguuugcugaaacugacagagccugggcuc

SEQ ID NO: 372102 - RNA, 32 nt, Homo Sapiens
uuuauuuuaauacauugguagucucuaugacu

SEQ ID NO: 372103 - RNA, 32 nt, Homo Sapiens
ugauccuggcaaaggucuugugucuuucugcc

SEQ ID NO: 372104 - RNA, 32 nt, Homo Sapiens
aaagaugcagauguuauaucacagcaauucuc

SEQ ID NO: 372105 - RNA, 31 nt, Homo Sapiens
uggaagcggcacucaagaugcugcgccgcga

SEQ ID NO: 372106 - RNA, 32 nt, Homo Sapiens
caaauacaguuucacuuagaaacugcaacccu

SEQ ID NO: 372107 - RNA, 32 nt, Homo Sapiens
aacaagcagggugaucucccacaguguggagc

SEQ ID NO: 372108 - RNA, 32 nt, Homo Sapiens
aauauuguucccauagucuuugaaaaaacuga

SEQ ID NO: 372109 - RNA, 32 nt, Homo Sapiens
acaaaacaggcaaugcaguaucagugcagaug

SEQ ID NO: 372110 - RNA, 32 nt, Homo Sapiens
auaaucucauauuuaugauaguuuuguuaggu

SEQ ID NO: 372111 - RNA, 32 nt, Homo Sapiens
uagguagguuacuacaguaaacuguaacucag

SEQ ID NO: 372112 - RNA, 32 nt, Homo Sapiens
gccuugcgcuagcagagccucuccuggcagcu

SEQ ID NO: 372113 - RNA, 32 nt, Homo Sapiens
agauaauuagaugauuauauauuguuguuacu

SEQ ID NO: 372114 - RNA, 32 nt, Homo Sapiens
gguuucuggggaagccugggggacgcggcugu

SEQ ID NO: 372115 - RNA, 32 nt, Homo Sapiens
gaucgagacauguagcagcaucauggagguuu

SEQ ID NO: 372116 - RNA, 32 nt, Homo Sapiens
ucuccuacccugggaucccauccaguuccaca

SEQ ID NO: 372117 - RNA, 32 nt, Homo Sapiens
ggugugcguggggucgaggcgccgggcggagu

SEQ ID NO: 372118 - RNA, 32 nt, Homo Sapiens
aagauauacuauuugagagggacagauuagcc

SEQ ID NO: 372119 - RNA, 32 nt, Homo Sapiens
uuuguuuggugauuguaauuucaggucuguca

SEQ ID NO: 372120 - RNA, 32 nt, Homo Sapiens
aaaguaugaugauguauuaaggauggaggagu

SEQ ID NO: 372121 - RNA, 32 nt, Homo Sapiens
agaaaauaugucugguaguuuuccuguguuua

SEQ ID NO: 372122 - RNA, 32 nt, Homo Sapiens
gugauuguacccccaaccaaccagcagcaaga

SEQ ID NO: 372123 - RNA, 32 nt, Homo Sapiens
guuaccuaaaauuuauggugucagaauaaagg

SEQ ID NO: 372124 - RNA, 32 nt, Homo Sapiens
gauugaaauuccaguugcaauucauaacuaau

SEQ ID NO: 372125 - RNA, 32 nt, Homo Sapiens
aaggauagagcuucauuccauaccaaagacuu

SEQ ID NO: 372126 - RNA, 32 nt, Homo Sapiens
ugcacacaauuuccuucuacugcuguuuugaa

SEQ ID NO: 372127 - RNA, 32 nt, Homo Sapiens
ucacggcaagauuagaaagauaccugagccca

SEQ ID NO: 372128 - RNA, 32 nt, Homo Sapiens
uaaaucagucuuguuuuugucuaacuugugug

SEQ ID NO: 372129 - RNA, 32 nt, Homo Sapiens
cggguagaagguggcaguucuucaugggaguc

SEQ ID NO: 372130 - RNA, 32 nt, Homo Sapiens
cuaccauuccuccucuccugauccccagcauc

SEQ ID NO: 372131 - RNA, 32 nt, Homo Sapiens
uaauuucaguaauucuuagaugauucagcuuc

SEQ ID NO: 372132 - RNA, 32 nt, Homo Sapiens
ggggcaggggacuaccuuccagugucucccuc

SEQ ID NO: 372133 - RNA, 32 nt, Homo Sapiens
ggaagauuuuauaaaagaauuuuugugggucg

SEQ ID NO: 372134 - RNA, 32 nt, Homo Sapiens
gaugagguuucuaugagaaggagucauuagag

SEQ ID NO: 372135 - RNA, 32 nt, Homo Sapiens
cugugccaaaucccaaccagccacgccucagc

SEQ ID NO: 372136 - RNA, 32 nt, Homo Sapiens
gccgcaagagauacgagaagggcgacgugucg

SEQ ID NO: 372137 - RNA, 32 nt, Homo Sapiens
agaggaagcugaugucauggcuggacaaaguc

SEQ ID NO: 372138 - RNA, 32 nt, Homo Sapiens
cucacucucuucccuugcagccucgaagcgga

SEQ ID NO: 372139 - RNA, 32 nt, Homo Sapiens
agggggaaaagagguugaaaagaggguuuccu

SEQ ID NO: 372140 - RNA, 32 nt, Homo Sapiens
aacggccacuggugugggaggggagcgcacga

SEQ ID NO: 372141 - RNA, 32 nt, Homo Sapiens
acacugaagaaacugaauaaaacagaugaaga

SEQ ID NO: 372142 - RNA, 32 nt, Homo Sapiens
augugguaaaaugauguuugagcauuaagaca

SEQ ID NO: 372143 - RNA, 32 nt, Homo Sapiens
cuuuuuauaauuacuuuuuuuaucauuuaauu

SEQ ID NO: 372144 - RNA, 28 nt, Homo Sapiens
agcgaggggcggcuggaccgacggcugc

SEQ ID NO: 372145 - RNA, 32 nt, Homo Sapiens
gcucuaaacuaaaauuguaucgaaauggcugc

SEQ ID NO: 372146 - RNA, 31 nt, Homo Sapiens
acagacaugauccaugggcgcagcgugcuuc

SEQ ID NO: 372147 - RNA, 28 nt, Homo Sapiens
auuuguugaguacuuauguguuuaucua

SEQ ID NO: 372148 - RNA, 32 nt, Homo Sapiens
cccuuuauuauugcugcagaaaacaaaagccu

SEQ ID NO: 372149 - RNA, 32 nt, Homo Sapiens
ccgagaucgcgccguugcacuccagccugggc

SEQ ID NO: 372150 - RNA, 32 nt, Homo Sapiens
ugggggccugaagggggcugaggggaugaugu

SEQ ID NO: 372151 - RNA, 32 nt, Homo Sapiens
caguuuggcccauggcggggcccauucacggg

SEQ ID NO: 372152 - RNA, 32 nt, Homo Sapiens
cugagaucgugccguugcacuccagccugggc

SEQ ID NO: 372153 - RNA, 32 nt, Homo Sapiens
guggaggagggcagaaacgcagacgggccuga

SEQ ID NO: 372154 - RNA, 30 nt, Homo Sapiens
uuggaagagaagcaucaugagccaauuuga

SEQ ID NO: 372155 - RNA, 32 nt, Homo Sapiens
guggauucaaccaacugcagaucaaaaauauu

SEQ ID NO: 372156 - RNA, 32 nt, Homo Sapiens
ccucccagucguugaagguuuggggagcagcu

SEQ ID NO: 372157 - RNA, 32 nt, Homo Sapiens
gaaucagacagagggcaaaaaccaauucgcuu

SEQ ID NO: 372158 - RNA, 32 nt, Homo Sapiens
cucuggugccuccauugcccucauggaacaga

SEQ ID NO: 372159 - RNA, 32 nt, Homo Sapiens
uagcuccggccgcgcugacgcgaguccccggc

SEQ ID NO: 372160 - RNA, 32 nt, Homo Sapiens
gugccuuuuuuguaaaacauuuucaugucuuu

SEQ ID NO: 372161 - RNA, 32 nt, Homo Sapiens
acugggaaauaccaccaguuuacccugaaaca

SEQ ID NO: 372162 - RNA, 32 nt, Homo Sapiens
agagguuaaaagacuugcacaggaucaccaag

SEQ ID NO: 372163 - RNA, 32 nt, Homo Sapiens
gggaaccaacugggacccgggcuuugaagcca

SEQ ID NO: 372164 - RNA, 32 nt, Homo Sapiens
aaaggaauauaaaauugccauuugaaaacuga

SEQ ID NO: 372165 - RNA, 32 nt, Homo Sapiens
ccccuugcaccucgcugcccaucagaaagccu

SEQ ID NO: 372166 - RNA, 32 nt, Homo Sapiens
agccccucggagcccaggcagcuguguccagu

SEQ ID NO: 372167 - RNA, 32 nt, Homo Sapiens
uagacuauguuuucuauucauuucuuuaaaau

SEQ ID NO: 372168 - RNA, 32 nt, Homo Sapiens
gaauuagagggccuugcuucucuucuuuccau

SEQ ID NO: 372169 - RNA, 32 nt, Homo Sapiens
uccuguucgaccgcccgaggggugugcgugug

SEQ ID NO: 372170 - RNA, 32 nt, Homo Sapiens
uggggaagugauauuugcaacaucucauacuu

SEQ ID NO: 372171 - RNA, 32 nt, Homo Sapiens
cgaugaccagauggcgcacagcuccuuuuuuc

SEQ ID NO: 372172 - RNA, 29 nt, Homo Sapiens
gcauugggaagacagagggcaaggaggcg

SEQ ID NO: 372173 - RNA, 32 nt, Homo Sapiens
ucaacauuucuauaaccuuguuuguauagccu

SEQ ID NO: 372174 - RNA, 32 nt, Homo Sapiens
ccaucaagaaaagcucugcugcucuuagcucu

SEQ ID NO: 372175 - RNA, 30 nt, Homo Sapiens
gccacccagggcucgcggggucccgguggg

SEQ ID NO: 372176 - RNA, 32 nt, Homo Sapiens
uuucagagggugggucaggugguuggggugag

SEQ ID NO: 372177 - RNA, 32 nt, Homo Sapiens
auuuauguauaaauaauaacagagccgacgug

SEQ ID NO: 372178 - RNA, 32 nt, Homo Sapiens
gaccggcuccgcccgcggccgccccgcagcua

SEQ ID NO: 372179 - RNA, 32 nt, Homo Sapiens
ccugcggggaggggcggggcccggcgacugag

SEQ ID NO: 372180 - RNA, 32 nt, Homo Sapiens
gaguucgcccuucccccaccuccuugucuuuc

SEQ ID NO: 372181 - RNA, 32 nt, Homo Sapiens
gaaauaaaaugaauugcuccccagauuauuuu

SEQ ID NO: 372182 - RNA, 32 nt, Homo Sapiens
auaaaacgggcacaguagcuaaaauuaacgcc

SEQ ID NO: 372183 - RNA, 31 nt, Homo Sapiens
cgguagcggcacucggcgugccccgggcgga

SEQ ID NO: 372184 - RNA, 32 nt, Homo Sapiens
auguaguugacuuuuccaaauuuauaaaggaa

SEQ ID NO: 372185 - RNA, 32 nt, Homo Sapiens
uggcucggaggccugugauauuucauagcagc

SEQ ID NO: 372186 - RNA, 27 nt, Homo Sapiens
gggagcguccucuucagcgucuuuucc

SEQ ID NO: 372187 - RNA, 32 nt, Homo Sapiens
cgccagcagcaaccgaacuuggaccaaguacg

SEQ ID NO: 372188 - RNA, 32 nt, Homo Sapiens
ccagugucuccaugcagaucagauggaggcgg

SEQ ID NO: 372189 - RNA, 32 nt, Homo Sapiens
gggcugugaacagaaugaaaugucaacaucca

SEQ ID NO: 372190 - RNA, 28 nt, Homo Sapiens
agaugucuuuugaaaauguguuuucggu

SEQ ID NO: 372191 - RNA, 32 nt, Homo Sapiens
aguccuggccgcguccccgucgcuagggaaac

SEQ ID NO: 372192 - RNA, 32 nt, Homo Sapiens
gagagggucuggccuugcccaaggccacucag

SEQ ID NO: 372193 - RNA, 32 nt, Homo Sapiens
ccuggcagacgccgcgaugcccggcccuuggu

SEQ ID NO: 372194 - RNA, 32 nt, Homo Sapiens
cugggggcgcgguggcuggcgcgcaggucccg

SEQ ID NO: 372195 - RNA, 29 nt, Homo Sapiens
caagaaugagcaauaauagauaugcacag

SEQ ID NO: 372196 - RNA, 32 nt, Homo Sapiens
agcgcggagcagcagccucugcugcccugacu

SEQ ID NO: 372197 - RNA, 32 nt, Homo Sapiens
aggccucccuagcaccucccccuaaccaaauu

SEQ ID NO: 372198 - RNA, 32 nt, Homo Sapiens
guccucuccgcuggccagcagcauccccaggc

SEQ ID NO: 372199 - RNA, 32 nt, Homo Sapiens
accaggcccagcugcagccacccggccucagg

SEQ ID NO: 372200 - RNA, 32 nt, Homo Sapiens
cugugcugagccccaggcucccggccccuuac

SEQ ID NO: 372201 - RNA, 32 nt, Homo Sapiens
accaaaguugaccaguagauaauagcaaacau

SEQ ID NO: 372202 - RNA, 32 nt, Homo Sapiens
uucuccauucucaccagcaccaucaucaugau

SEQ ID NO: 372203 - RNA, 32 nt, Homo Sapiens
gagcuggcucagggcguccgcuaggcucggac

SEQ ID NO: 372204 - RNA, 32 nt, Homo Sapiens
ugcacaauuuaaauuugauaaauuuuugauag

SEQ ID NO: 372205 - RNA, 32 nt, Homo Sapiens
ugccaccacacccagcucucuuucuugguuuu

SEQ ID NO: 372206 - RNA, 32 nt, Homo Sapiens
guggccccaagccccaaugcauaagcucaagg

SEQ ID NO: 372207 - RNA, 32 nt, Homo Sapiens
uuucucaugcuucauaucucucucccguccuc

SEQ ID NO: 372208 - RNA, 32 nt, Homo Sapiens
cacagucgaaaaggaagccaccacugaugccu

SEQ ID NO: 372209 - RNA, 32 nt, Homo Sapiens
acaguuuacaauguuauuauccagcuaauuuu

SEQ ID NO: 372210 - RNA, 32 nt, Homo Sapiens
auauuuaauguuuuccuuaauacucaagugau

SEQ ID NO: 372211 - RNA, 32 nt, Homo Sapiens
caucccggccccagcccagucgagcguccacu

SEQ ID NO: 372212 - RNA, 32 nt, Homo Sapiens
gcacugaccugccaugccucgccuggaggcuc

SEQ ID NO: 372213 - RNA, 32 nt, Homo Sapiens
caguagaagauaauggcaaguccagacugggg

SEQ ID NO: 372214 - RNA, 32 nt, Homo Sapiens
ggaagaucauguuuaagugacuccuguugccu

SEQ ID NO: 372215 - RNA, 32 nt, Homo Sapiens
ugcaagcagcauagcagggcauauaccaguca

SEQ ID NO: 372216 - RNA, 32 nt, Homo Sapiens
uuuguguugcuugcaccaaaucuguaugucuc

SEQ ID NO: 372217 - RNA, 32 nt, Homo Sapiens
guuuccaagcugguccaucacuggccucuguc

SEQ ID NO: 372218 - RNA, 31 nt, Homo Sapiens
ccuggugcgggaccugugccccgcgcuucag

SEQ ID NO: 372219 - RNA, 32 nt, Homo Sapiens
ucucuucacugccugccagguuguguuggggu

SEQ ID NO: 372220 - RNA, 32 nt, Homo Sapiens
cuucagauggauuaaaacuuugaauguaaaaa

SEQ ID NO: 372221 - RNA, 32 nt, Homo Sapiens
aagugcuggugcccucugccgcugcucccguc

SEQ ID NO: 372222 - RNA, 32 nt, Homo Sapiens
ucagucuuggugguucuaucaggggugcauuc

SEQ ID NO: 372223 - RNA, 32 nt, Homo Sapiens
auguauuauaggcaggaaguguuuuugcuacc

SEQ ID NO: 372224 - RNA, 32 nt, Homo Sapiens
cccucucugguccucagcuuccuccaucaugg

SEQ ID NO: 372225 - RNA, 32 nt, Homo Sapiens
cuggccuccagcugcgcaggagccugugguac

SEQ ID NO: 372226 - RNA, 32 nt, Homo Sapiens
agcuguuacaguguuacguuguguuuaaaaug

SEQ ID NO: 372227 - RNA, 32 nt, Homo Sapiens
cgugggcgugggcgcgggaggggcucggagcc

SEQ ID NO: 372228 - RNA, 32 nt, Homo Sapiens
cucucccuccccacaccccacccaaagcauac

SEQ ID NO: 372229 - RNA, 32 nt, Homo Sapiens
agcagagaugaauaauacggcagcuaguccaa

SEQ ID NO: 372230 - RNA, 32 nt, Homo Sapiens
uauuaaaguauuuccaacacuugaucauaagc

SEQ ID NO: 372231 - RNA, 32 nt, Homo Sapiens
caaggcacggacgacugugcagacacaucagc

SEQ ID NO: 372232 - RNA, 32 nt, Homo Sapiens
ucuuuuucuuaguuguauggccaggcaguccc

SEQ ID NO: 372233 - RNA, 31 nt, Homo Sapiens
gggaaggcgggcccgagauggguuagggugu

SEQ ID NO: 372234 - RNA, 32 nt, Homo Sapiens
acuauuaguuuauauuauaauaguaucaguuu

SEQ ID NO: 372235 - RNA, 32 nt, Homo Sapiens
gucuugcccucccagcucaaacccuccacugg

SEQ ID NO: 372236 - RNA, 32 nt, Homo Sapiens
guagccagcagggcucaguuccccucacucca

SEQ ID NO: 372237 - RNA, 32 nt, Homo Sapiens
ugcaauaauguuucuuugaucaggauggaaag

SEQ ID NO: 372238 - RNA, 32 nt, Homo Sapiens
agaauaccccaccagcagaacaaacucagauc

SEQ ID NO: 372239 - RNA, 32 nt, Homo Sapiens
ugcacaaugagcacaugaaaugugccuagugc

SEQ ID NO: 372240 - RNA, 32 nt, Homo Sapiens
auuucuuuuucuguauuuucucucuuugcugg

SEQ ID NO: 372241 - RNA, 28 nt, Homo Sapiens
cccaugcugcugucauggcuaacaguuc

SEQ ID NO: 372242 - RNA, 32 nt, Homo Sapiens
augaauccaggagcugguuuuuugaaaagguc

SEQ ID NO: 372243 - RNA, 32 nt, Homo Sapiens
cacaggggacacagcuuaacaaugcaacuuuu

SEQ ID NO: 372244 - RNA, 32 nt, Homo Sapiens
aagcauaaugaaaauguccugugacugaagua

SEQ ID NO: 372245 - RNA, 32 nt, Homo Sapiens
augcagagauccuaaauaaauaugagcauguc

SEQ ID NO: 372246 - RNA, 32 nt, Homo Sapiens
cccaucccugcuucccaaaaauugcacugugu

SEQ ID NO: 372247 - RNA, 32 nt, Homo Sapiens
cgccccgcgccucgccucuccuccgagcagcc

SEQ ID NO: 372248 - RNA, 32 nt, Homo Sapiens
uuguggcuguggauaucaaugaccuugguacc

SEQ ID NO: 372249 - RNA, 32 nt, Homo Sapiens
ccggaaucagcuccccggggccgccgcaacga

SEQ ID NO: 372250 - RNA, 32 nt, Homo Sapiens
caugugcauccacuucuuuucauccauugaga

SEQ ID NO: 372251 - RNA, 32 nt, Homo Sapiens
gaaaaguuuaacaugaacuaacauuucugcac

SEQ ID NO: 372252 - RNA, 32 nt, Homo Sapiens
auagugaaaccccgucucuaauaaaaauacaa

SEQ ID NO: 372253 - RNA, 32 nt, Homo Sapiens
cuaugcagguuuccccauuaugcauauagaaa

SEQ ID NO: 372254 - RNA, 32 nt, Homo Sapiens
ggaaaagccagagcuuccagauggaggugaug

SEQ ID NO: 372255 - RNA, 32 nt, Homo Sapiens
ccccacaccccucccccaagaaauucuggggg

SEQ ID NO: 372256 - RNA, 32 nt, Homo Sapiens
gggaaaaaaggaaaacaaaaacacugagggcu

SEQ ID NO: 372257 - RNA, 32 nt, Homo Sapiens
ccccuucccccgcagccuccgccccgccaggc

SEQ ID NO: 372258 - RNA, 32 nt, Homo Sapiens
cuucagccgagcccagaccuccccucuuccug

SEQ ID NO: 372259 - RNA, 32 nt, Homo Sapiens
cagaacuguuuaauagcaguuacucuugagug

SEQ ID NO: 372260 - RNA, 32 nt, Homo Sapiens
uggugacugggucuugggaucccaggccacgc

SEQ ID NO: 372261 - RNA, 32 nt, Homo Sapiens
uacauaaggaagagaagaaauugaguggcaua

SEQ ID NO: 372262 - RNA, 32 nt, Homo Sapiens
ccgacgccgcguucucggggccccgcagccgg

SEQ ID NO: 372263 - RNA, 32 nt, Homo Sapiens
uaauugagaaggaaaauuuuagcgugcucacu

SEQ ID NO: 372264 - RNA, 32 nt, Homo Sapiens
acaacaaagaacuccacuguggggaugaagcg

SEQ ID NO: 372265 - RNA, 31 nt, Homo Sapiens
uacuagggagaugcacccagagccugccagg

SEQ ID NO: 372266 - RNA, 32 nt, Homo Sapiens
agccgcccaucccgcagggccggucugccagc

SEQ ID NO: 372267 - RNA, 32 nt, Homo Sapiens
gggaguccccacuucccaggcuaucagaguca

SEQ ID NO: 372268 - RNA, 32 nt, Homo Sapiens
ccugagccauggagaccccagagguccccgug

SEQ ID NO: 372269 - RNA, 32 nt, Homo Sapiens
ccaauggguaucuauuuuugugugugauuaua

SEQ ID NO: 372270 - RNA, 32 nt, Homo Sapiens
agaggagaaaaaacagaagaacuuuaugauga

SEQ ID NO: 372271 - RNA, 32 nt, Homo Sapiens
ugguauuggagaacuuguuuccugcuauuugg

SEQ ID NO: 372272 - RNA, 32 nt, Homo Sapiens
aauguccccggggcgcccggcgcgcugacccc

SEQ ID NO: 372273 - RNA, 32 nt, Homo Sapiens
aaaaguuuuuccauuuaccaucaacauggaaa

SEQ ID NO: 372274 - RNA, 32 nt, Homo Sapiens
uugauauuuuguguuuguuuucuuguucuuau

SEQ ID NO: 372275 - RNA, 32 nt, Homo Sapiens
gugugugagggggcuccugcugugcugcugag

SEQ ID NO: 372276 - RNA, 32 nt, Homo Sapiens
acuggccugugcuacuuauuaccgggcuugua

SEQ ID NO: 372277 - RNA, 32 nt, Homo Sapiens
ucacccacucccuccuuccccaguuguucccu

SEQ ID NO: 372278 - RNA, 32 nt, Homo Sapiens
acagaaauuuaaauagaaauaguguauauaca

SEQ ID NO: 372279 - RNA, 32 nt, Homo Sapiens
cugagaggccccaggcuccccuccaggccccg

SEQ ID NO: 372280 - RNA, 32 nt, Homo Sapiens
ugcagcagcccguuccccuccucggugccgcc

SEQ ID NO: 372281 - RNA, 32 nt, Homo Sapiens
uuugucauuuaaaagaguauucucuggcugua

SEQ ID NO: 372282 - RNA, 32 nt, Homo Sapiens
gcauggcucugugccuuggagagggaaacagg

SEQ ID NO: 372283 - RNA, 32 nt, Homo Sapiens
gucucgaacuccugggcucaagccguucuccc

SEQ ID NO: 372284 - RNA, 32 nt, Homo Sapiens
cggcugcagcagauggcaaguggccgcgugga

SEQ ID NO: 372285 - RNA, 32 nt, Homo Sapiens
uuguuuauuuuugcuuuugugguugagggaag

SEQ ID NO: 372286 - RNA, 32 nt, Homo Sapiens
aauugaaaaguaccaggugauacauagccugg

SEQ ID NO: 372287 - RNA, 32 nt, Homo Sapiens
gggaggcauuccuuccugugucccagagcuuc

SEQ ID NO: 372288 - RNA, 32 nt, Homo Sapiens
ccuccuccugggacccuugcccugccccccuc

SEQ ID NO: 372289 - RNA, 32 nt, Homo Sapiens
gcucggcgcugggacgcgacugcgcucaguuc

SEQ ID NO: 372290 - RNA, 32 nt, Homo Sapiens
cgucaccuuuuggaaaugcccauugccgacuu

SEQ ID NO: 372291 - RNA, 32 nt, Homo Sapiens
cugaggaacaggauccacuuugaacaguccgc

SEQ ID NO: 372292 - RNA, 32 nt, Homo Sapiens
ggcugugcaccuuccugguguuuggacaggcu

SEQ ID NO: 372293 - RNA, 31 nt, Homo Sapiens
uccggacaggcgcugcugccccgaguggcag

SEQ ID NO: 372294 - RNA, 32 nt, Homo Sapiens
cgcccggccugccuggggcugggagccccaga

SEQ ID NO: 372295 - RNA, 32 nt, Homo Sapiens
ugcgcgugguggccauggcggccagcggggcu

SEQ ID NO: 372296 - RNA, 32 nt, Homo Sapiens
ucuugggugugugaaagggauaguggggcauc

SEQ ID NO: 372297 - RNA, 32 nt, Homo Sapiens
ugcggauggucucagcaguucuccaguuuggc

SEQ ID NO: 372298 - RNA, 32 nt, Homo Sapiens
uuaagcagcucuugcuaaucagugucucacac

SEQ ID NO: 372299 - RNA, 32 nt, Homo Sapiens
uucuuuguauauaggcuucucaccgcgaccaa

SEQ ID NO: 372300 - RNA, 32 nt, Homo Sapiens
ccagcucccuccuggggacccggagccgcggu

SEQ ID NO: 372301 - RNA, 32 nt, Homo Sapiens
cucgagcacaucuaagaucacccauuagguuu

SEQ ID NO: 372302 - RNA, 32 nt, Homo Sapiens
aaaagcaauagcaauaaacauuucauagacuc

SEQ ID NO: 372303 - RNA, 32 nt, Homo Sapiens
auuguauaaaagacacgacucagcugccguag

SEQ ID NO: 372304 - RNA, 32 nt, Homo Sapiens
aauuuaaguauaaaguaaaauaaugggcauua

SEQ ID NO: 372305 - RNA, 32 nt, Homo Sapiens
cguccucguggcggggcagcaggagcgguaga

SEQ ID NO: 372306 - RNA, 32 nt, Homo Sapiens
uuccuggccuucccucgacggagccgggccca

SEQ ID NO: 372307 - RNA, 32 nt, Homo Sapiens
cccucugcccuucucuguccacccccuccuaa

SEQ ID NO: 372308 - RNA, 32 nt, Homo Sapiens
cucaccaaauuaacucauguaucauacuuuua

SEQ ID NO: 372309 - RNA, 32 nt, Homo Sapiens
auguccgcauguccaggccuguuugggguugc

SEQ ID NO: 372310 - RNA, 32 nt, Homo Sapiens
caucucggaauuccagcagccauccagguaua

SEQ ID NO: 372311 - RNA, 32 nt, Homo Sapiens
ucuugcagcagaagaaagaagagacaggaggu

SEQ ID NO: 372312 - RNA, 30 nt, Homo Sapiens
uccuaaauauaccacuacaaagugagaguu

SEQ ID NO: 372313 - RNA, 32 nt, Homo Sapiens
cuguagcucccucccuaccuguaauuccaguc

SEQ ID NO: 372314 - RNA, 32 nt, Homo Sapiens
uuuggcuuaggacugauccacuuccauguuac

SEQ ID NO: 372315 - RNA, 32 nt, Homo Sapiens
aggcccagcuggaagccaccugaggguguccc

SEQ ID NO: 372316 - RNA, 32 nt, Homo Sapiens
agaaauguccuguauuccgaugaucauccugu

SEQ ID NO: 372317 - RNA, 32 nt, Homo Sapiens
ccucugcccuguaaaaaucagacucggaaccg

SEQ ID NO: 372318 - RNA, 32 nt, Homo Sapiens
uuagguguucccuaguguuucuuaauuucuuu

SEQ ID NO: 372319 - RNA, 32 nt, Homo Sapiens
aaccuacugaaacaaaaaaaauccaaaaugua

SEQ ID NO: 372320 - RNA, 32 nt, Homo Sapiens
uacauuuucagaugaaagauucaugacaguag

SEQ ID NO: 372321 - RNA, 32 nt, Homo Sapiens
agcucugcccuucccagcccagcccagccuac

SEQ ID NO: 372322 - RNA, 32 nt, Homo Sapiens
augaugcucauuuaaauacugacuugucuuuu

SEQ ID NO: 372323 - RNA, 32 nt, Homo Sapiens
gguggcgcuggauccgcggcugcccgaucguu

SEQ ID NO: 372324 - RNA, 32 nt, Homo Sapiens
acaguucucuccuucuuccccccgcugucagc

SEQ ID NO: 372325 - RNA, 32 nt, Homo Sapiens
gggagccuagcgccuggcugugugugcggccg

SEQ ID NO: 372326 - RNA, 32 nt, Homo Sapiens
guuggcaccggaggcauggaaaagcacaggcu

SEQ ID NO: 372327 - RNA, 32 nt, Homo Sapiens
cccgcgcuccgcugccaggggcgggagggagg

SEQ ID NO: 372328 - RNA, 32 nt, Homo Sapiens
uccuuccccgagugacucuggauuuggugcug

SEQ ID NO: 372329 - RNA, 32 nt, Homo Sapiens
ugucuggggggaggaggggaugauauccgugu

SEQ ID NO: 372330 - RNA, 32 nt, Homo Sapiens
auugcucagcuuuuuccuucugcaucucugua

SEQ ID NO: 372331 - RNA, 32 nt, Homo Sapiens
ucagugaaggcuuguuuggagaguggauccag

SEQ ID NO: 372332 - RNA, 32 nt, Homo Sapiens
uacuguagguaaauaaaaauacagaucuauau

SEQ ID NO: 372333 - RNA, 32 nt, Homo Sapiens
agcaaaugaaagauaguucaacucagcuaaug

SEQ ID NO: 372334 - RNA, 32 nt, Homo Sapiens
auaucgucuguucccucggaaaacgaaguguu

SEQ ID NO: 372335 - RNA, 32 nt, Homo Sapiens
cuguuaugccuucuaauuuagcaauugaguua

SEQ ID NO: 372336 - RNA, 32 nt, Homo Sapiens
cgagcacuguuggccuacuggaugcguguccg

SEQ ID NO: 372337 - RNA, 31 nt, Homo Sapiens
caggcgggcgcagcucugccccgcggggugc

SEQ ID NO: 372338 - RNA, 32 nt, Homo Sapiens
accggccuccuccuccuccccagccguccuug

SEQ ID NO: 372339 - RNA, 32 nt, Homo Sapiens
cccgcgagaaaguggugcugguguuucugcag

SEQ ID NO: 372340 - RNA, 32 nt, Homo Sapiens
gaaagcauggcucauucugcaaugagccauga

SEQ ID NO: 372341 - RNA, 32 nt, Homo Sapiens
uuugauuagucuuauuuuuuuauuuuuacagg

SEQ ID NO: 372342 - RNA, 32 nt, Homo Sapiens
agcaaagagaagggaagaagaucuguauuugc

SEQ ID NO: 372343 - RNA, 32 nt, Homo Sapiens
cagcccgccuaccagucccccaucccugcgcc

SEQ ID NO: 372344 - RNA, 32 nt, Homo Sapiens
ccagcccugccccuugcccccguggcuuccug

SEQ ID NO: 372345 - RNA, 32 nt, Homo Sapiens
ucugaccggcggcggcggcugcacaggagcga

SEQ ID NO: 372346 - RNA, 32 nt, Homo Sapiens
cagcuggcgcaucagaccgcagugaggaaugc

SEQ ID NO: 372347 - RNA, 32 nt, Homo Sapiens
cccaagucggagcggcguccccugcugagccc

SEQ ID NO: 372348 - RNA, 32 nt, Homo Sapiens
uaggccaccggugggaccaaaagggaacaggu

SEQ ID NO: 372349 - RNA, 32 nt, Homo Sapiens
accaucaagaaguggaaggcugaccaugauga

SEQ ID NO: 372350 - RNA, 32 nt, Homo Sapiens
cgucagcagcucagccagacguccaggauccc

SEQ ID NO: 372351 - RNA, 32 nt, Homo Sapiens
agcaguguauaaauggcaccuagguaagagca

SEQ ID NO: 372352 - RNA, 32 nt, Homo Sapiens
cgaccccgcgcgcgugaccccacacccaccca

SEQ ID NO: 372353 - RNA, 32 nt, Homo Sapiens
guaugcauuauuuuaaauguuguaucauuaaa

SEQ ID NO: 372354 - RNA, 32 nt, Homo Sapiens
ugagaaagacaauuuuaauguuuacaacaaua

SEQ ID NO: 372355 - RNA, 32 nt, Homo Sapiens
aauugcacuuuaauugauuaauccucaauuca

SEQ ID NO: 372356 - RNA, 32 nt, Homo Sapiens
aggcauacacuguccagugcauuuucauuagu

SEQ ID NO: 372357 - RNA, 32 nt, Homo Sapiens
caguguguggaagcugcaaacaaguaggccuu

SEQ ID NO: 372358 - RNA, 32 nt, Homo Sapiens
ccaugugucagaauuuucuuccuuuugaaggu

SEQ ID NO: 372359 - RNA, 32 nt, Homo Sapiens
aggauuucugcugccaucaucuuccaugggcu

SEQ ID NO: 372360 - RNA, 32 nt, Homo Sapiens
aagacauuauuucauuuuuuuauggcugaaua

SEQ ID NO: 372361 - RNA, 32 nt, Homo Sapiens
ucagaucuuuuaaaguggaaauccaaauugaa

SEQ ID NO: 372362 - RNA, 32 nt, Homo Sapiens
cgaacugagccaccuucgcggaccccgagagc

SEQ ID NO: 372363 - RNA, 32 nt, Homo Sapiens
gugagccccuccccagccagcccuucccuggc

SEQ ID NO: 372364 - RNA, 32 nt, Homo Sapiens
aaacacucaaaauaaauggucuuuagcaucuc

SEQ ID NO: 372365 - RNA, 32 nt, Homo Sapiens
ucuauuaucccaacagaagagaaaauauuuuu

SEQ ID NO: 372366 - RNA, 32 nt, Homo Sapiens
ugcccaguucccuucccaauccuacaaaggag

SEQ ID NO: 372367 - RNA, 32 nt, Homo Sapiens
uccaccucaccugugcugccacuuccuagugc

SEQ ID NO: 372368 - RNA, 32 nt, Homo Sapiens
agcagaugccagcaucaugcuugcugugcagc

SEQ ID NO: 372369 - RNA, 32 nt, Homo Sapiens
aguuuuccuuagugaguaaauucauaaggaug

SEQ ID NO: 372370 - RNA, 32 nt, Homo Sapiens
uucaccagcuuucuacuuauacacuuauuccu

SEQ ID NO: 372371 - RNA, 32 nt, Homo Sapiens
aaacagagagaaaaaacagagugaacauuuug

SEQ ID NO: 372372 - RNA, 32 nt, Homo Sapiens
auccccgcagggcgcugcgcgcgggguacuag

SEQ ID NO: 372373 - RNA, 32 nt, Homo Sapiens
cuuugaagccaaaauucuaguuuuccaauaua

SEQ ID NO: 372374 - RNA, 32 nt, Homo Sapiens
aucuuuauuuuuguuacauccaaggugaagag

SEQ ID NO: 372375 - RNA, 30 nt, Homo Sapiens
ugaccuugugcucaggccuauaggaaaaug

SEQ ID NO: 372376 - RNA, 32 nt, Homo Sapiens
uacuuguuuacagauaguuuaagacuauuuaa

SEQ ID NO: 372377 - RNA, 32 nt, Homo Sapiens
auggacuuuuuuaagccccagcccuggcauuc

SEQ ID NO: 372378 - RNA, 32 nt, Homo Sapiens
augcaagguucccauguuacggcagugaauga

SEQ ID NO: 372379 - RNA, 32 nt, Homo Sapiens
uaacauuccaagauuucagaucucuaaaucac

SEQ ID NO: 372380 - RNA, 32 nt, Homo Sapiens
agugagcucuggaugaagcucuggccaaccaa

SEQ ID NO: 372381 - RNA, 32 nt, Homo Sapiens
cccugccccgggcuccucccgcucgaccccca

SEQ ID NO: 372382 - RNA, 32 nt, Homo Sapiens
aguuugaccugccucucacugugaugccuuca

SEQ ID NO: 372383 - RNA, 32 nt, Homo Sapiens
aaugugauugguuauggugcugggagaaaggg

SEQ ID NO: 372384 - RNA, 32 nt, Homo Sapiens
ccuccagaacuaaggauagagcucuucaucuc

SEQ ID NO: 372385 - RNA, 32 nt, Homo Sapiens
aaggagcacaagaaccccucccugcccuccuu

SEQ ID NO: 372386 - RNA, 32 nt, Homo Sapiens
gcacccuuuucucuguggagcagggaugacau

SEQ ID NO: 372387 - RNA, 32 nt, Homo Sapiens
caaauccugccaggcugccuggcaucccuggg

SEQ ID NO: 372388 - RNA, 32 nt, Homo Sapiens
aaaagagguagcacuacaaacacaauauucaa

SEQ ID NO: 372389 - RNA, 32 nt, Homo Sapiens
gucggagccacaagugaggggcugggaagcag

SEQ ID NO: 372390 - RNA, 32 nt, Homo Sapiens
cguuggcgccgcggcccgggcgcuucagguag

SEQ ID NO: 372391 - RNA, 32 nt, Homo Sapiens
uaccgcggcccgcaugcuaggcguggaccugc

SEQ ID NO: 372392 - RNA, 32 nt, Homo Sapiens
guauguaugagagccgcucuccugcuaccucc

SEQ ID NO: 372393 - RNA, 32 nt, Homo Sapiens
gccccugcgccucggcgggaggcguccugccc

SEQ ID NO: 372394 - RNA, 32 nt, Homo Sapiens
gcagcaggggcaggcugcuuucuuauccauuu

SEQ ID NO: 372395 - RNA, 32 nt, Homo Sapiens
ccuugcccuggguuuaacacuccagugggaug

SEQ ID NO: 372396 - RNA, 32 nt, Homo Sapiens
uuuuaaaguaugcauuauuaaauuguaaaacu

SEQ ID NO: 372397 - RNA, 29 nt, Homo Sapiens
guauuauggaagauucgaagagggagaga

SEQ ID NO: 372398 - RNA, 32 nt, Homo Sapiens
cgcaguccgcauccacccggcgcggucagccc

SEQ ID NO: 372399 - RNA, 32 nt, Homo Sapiens
augcaugcugucagcaggagaaugaggagcac

SEQ ID NO: 372400 - RNA, 32 nt, Homo Sapiens
cuuucuuuaacacuaacucaccacugugcuuc

SEQ ID NO: 372401 - RNA, 32 nt, Homo Sapiens
ucuggugcgggggugggguggggggugaggcc

SEQ ID NO: 372402 - RNA, 32 nt, Homo Sapiens
uggggagagcagccuccacggccaggaucucg

SEQ ID NO: 372403 - RNA, 32 nt, Homo Sapiens
uuuguccccuccuggggucuugcacaguggca

SEQ ID NO: 372404 - RNA, 32 nt, Homo Sapiens
gagucuuauaaaauuaagugaagugcaaauaa

SEQ ID NO: 372405 - RNA, 32 nt, Homo Sapiens
cucuggccccgccccugacgguuccgggcccc

SEQ ID NO: 372406 - RNA, 32 nt, Homo Sapiens
aaugggugacuuagugcauugauucagauuuu

SEQ ID NO: 372407 - RNA, 32 nt, Homo Sapiens
aaaaaaaaaaagaaacaaaccaccucuacaua

SEQ ID NO: 372408 - RNA, 32 nt, Homo Sapiens
ccucaucucccuccccgcucccuggugcugcc

SEQ ID NO: 372409 - RNA, 32 nt, Homo Sapiens
cccaagcucucguaccagguucuacagggagg

SEQ ID NO: 372410 - RNA, 32 nt, Homo Sapiens
aaaggugaccucgggguccuguccaucaccac

SEQ ID NO: 372411 - RNA, 32 nt, Homo Sapiens
gagaggcuuuaaggugguaauuagaucuuuuc

SEQ ID NO: 372412 - RNA, 32 nt, Homo Sapiens
uuucauaccugugcaauacugaagaccucauu

SEQ ID NO: 372413 - RNA, 32 nt, Homo Sapiens
cguuuccaggcccucgccaggucuuugaacug

SEQ ID NO: 372414 - RNA, 32 nt, Homo Sapiens
ggcugccggaacaacagcggcuuucccagcaa

SEQ ID NO: 372415 - RNA, 32 nt, Homo Sapiens
aaguuaauguguuuacucucuuuccuucccac

SEQ ID NO: 372416 - RNA, 32 nt, Homo Sapiens
agaaacuucggguggagagggcggcggcguug

SEQ ID NO: 372417 - RNA, 32 nt, Homo Sapiens
ggcuggagugcaguggcaugaucauagcucac

SEQ ID NO: 372418 - RNA, 32 nt, Homo Sapiens
caggcaaagguuccuggugacccaggcucuca

SEQ ID NO: 372419 - RNA, 32 nt, Homo Sapiens
uugacuuuucuuccuugccugcagcugugauc

SEQ ID NO: 372420 - RNA, 32 nt, Homo Sapiens
cuuguggaaguggggcuucaacaucaugccau

SEQ ID NO: 372421 - RNA, 29 nt, Homo Sapiens
acacauauauguauauauacauauauaug

SEQ ID NO: 372422 - RNA, 32 nt, Homo Sapiens
ugaacaagaacaaggagaggaugaacugguuu

SEQ ID NO: 372423 - RNA, 32 nt, Homo Sapiens
aaauggcugauuucuuuuuaaaguaugaagau

SEQ ID NO: 372424 - RNA, 32 nt, Homo Sapiens
ccuggcccugaggcuccaccacuucuuccucc

SEQ ID NO: 372425 - RNA, 32 nt, Homo Sapiens
ucucauucagauucuuauuacaucucaccaaa

SEQ ID NO: 372426 - RNA, 32 nt, Homo Sapiens
ucuauauuauugcauaauuuugcugcuucuca

SEQ ID NO: 372427 - RNA, 32 nt, Homo Sapiens
uaaauguucccuuuuccauauuaaacauuuac

SEQ ID NO: 372428 - RNA, 32 nt, Homo Sapiens
cuggaugcugcuaguaacacauuguuuguauu

SEQ ID NO: 372429 - RNA, 32 nt, Homo Sapiens
acacuaaaaacaguuuucaaaguccagcauua

SEQ ID NO: 372430 - RNA, 32 nt, Homo Sapiens
agacugaacucagaauaaaggaaaucauagag

SEQ ID NO: 372431 - RNA, 32 nt, Homo Sapiens
uaucugaagaucuggaauggaacugacuugug

SEQ ID NO: 372432 - RNA, 32 nt, Homo Sapiens
cuauccccagaaccuugcacagauccuggaau

SEQ ID NO: 372433 - RNA, 32 nt, Homo Sapiens
aaagcaggcaccagggcugaccucaaggccgu

SEQ ID NO: 372434 - RNA, 32 nt, Homo Sapiens
acuuuccauccccacaccauugccugcuccuc

SEQ ID NO: 372435 - RNA, 32 nt, Homo Sapiens
cauagcccucaccauagacaccucugagccca

SEQ ID NO: 372436 - RNA, 32 nt, Homo Sapiens
ucuaaucagaaagcugcuugucgagggcaugg

SEQ ID NO: 372437 - RNA, 32 nt, Homo Sapiens
agcagccauuucagaggccuccccuuagaaau

SEQ ID NO: 372438 - RNA, 28 nt, Homo Sapiens
gaaaagccgcgccugccgaggugcugug

SEQ ID NO: 372439 - RNA, 32 nt, Homo Sapiens
ugauaaaauaccaguucaaugaugaguuuucu

SEQ ID NO: 372440 - RNA, 32 nt, Homo Sapiens
auggggcgcccacccccugcccugcccugacc

SEQ ID NO: 372441 - RNA, 32 nt, Homo Sapiens
gagcggggcggagaggcagcugcggggggagc

SEQ ID NO: 372442 - RNA, 32 nt, Homo Sapiens
gugccugggugcccggccugcucaguacaccc

SEQ ID NO: 372443 - RNA, 32 nt, Homo Sapiens
cucuuuacuguaaugacucaaaagguauuuaa

SEQ ID NO: 372444 - RNA, 32 nt, Homo Sapiens
cgcucgcucccucgcucacucgcucgcucgca

SEQ ID NO: 372445 - RNA, 32 nt, Homo Sapiens
uuagagaggaugagcagaaccacaggaccugc

SEQ ID NO: 372446 - RNA, 32 nt, Homo Sapiens
gagcacggagagccucauguugguggguuucc

SEQ ID NO: 372447 - RNA, 32 nt, Homo Sapiens
cucuauucauuagacagguaaaauuauauuuc

SEQ ID NO: 372448 - RNA, 32 nt, Homo Sapiens
ggucucacgcgccucgggagccagguuggcgg

SEQ ID NO: 372449 - RNA, 32 nt, Homo Sapiens
aacccaggagacggagcuugcagugagccgag

SEQ ID NO: 372450 - RNA, 32 nt, Homo Sapiens
caugucucuuugugggacccaggcucauggga

SEQ ID NO: 372451 - RNA, 32 nt, Homo Sapiens
caggggggaaaguuacaaaagaaggaucuggg

SEQ ID NO: 372452 - RNA, 32 nt, Homo Sapiens
uguuauuuauguuauuuauauuagcuaacagg

SEQ ID NO: 372453 - RNA, 32 nt, Homo Sapiens
aaucagcucgugccagguggggaccaggauau

SEQ ID NO: 372454 - RNA, 27 nt, Homo Sapiens
ggauggaggugaccggggacgccgggg

SEQ ID NO: 372455 - RNA, 32 nt, Homo Sapiens
caggggacuccagccugggcggggugauaaug

SEQ ID NO: 372456 - RNA, 32 nt, Homo Sapiens
guuucuguacuauacauuguuugguaauuaca

SEQ ID NO: 372457 - RNA, 32 nt, Homo Sapiens
ucaaauauaacucuuagagaaauguacauaaa

SEQ ID NO: 372458 - RNA, 32 nt, Homo Sapiens
guuacauucuaaaaauucuuaacuuuuaacau

SEQ ID NO: 372459 - RNA, 32 nt, Homo Sapiens
gaaauagcuacagugacagauuuuagagcaaa

SEQ ID NO: 372460 - RNA, 32 nt, Homo Sapiens
uggcgcgaggcagggaagccgguacccggguc

SEQ ID NO: 372461 - RNA, 32 nt, Homo Sapiens
cuccuuuuuaaugucaguaaggauaugagccu

SEQ ID NO: 372462 - RNA, 32 nt, Homo Sapiens
gagagaggggugaugccuggugcugguggaac

SEQ ID NO: 372463 - RNA, 32 nt, Homo Sapiens
cucugucugcuguguggauggagcagcaggag

SEQ ID NO: 372464 - RNA, 32 nt, Homo Sapiens
caggcccaccccacccagcaccccuggcgcag

SEQ ID NO: 372465 - RNA, 32 nt, Homo Sapiens
ugugugucugcacaucacuguguuuaugccca

SEQ ID NO: 372466 - RNA, 32 nt, Homo Sapiens
gagaagaugaccgagucaggcuucauagcuga

SEQ ID NO: 372467 - RNA, 32 nt, Homo Sapiens
aacauuuauagcauuuauuucccaaaucuguu

SEQ ID NO: 372468 - RNA, 32 nt, Homo Sapiens
ugguagucuuaauguaucuggcauuuggguga

SEQ ID NO: 372469 - RNA, 32 nt, Homo Sapiens
cuaauguuuguuacagaaaugaucccagagac

SEQ ID NO: 372470 - RNA, 32 nt, Homo Sapiens
accuggacagagccgccucccucugcuugccc

SEQ ID NO: 372471 - RNA, 32 nt, Homo Sapiens
cuguccagcagccacggcccgggguuuucaag

SEQ ID NO: 372472 - RNA, 32 nt, Homo Sapiens
ugugccucacuuuuuuucucagucugaaucuu

SEQ ID NO: 372473 - RNA, 32 nt, Homo Sapiens
uccccccggcccgggucaggccgugggagccg

SEQ ID NO: 372474 - RNA, 32 nt, Homo Sapiens
agccacugugacggggaguccaggcgcaggag

SEQ ID NO: 372475 - RNA, 32 nt, Homo Sapiens
cccacccagacuguuuaauccaaaucugcauu

SEQ ID NO: 372476 - RNA, 32 nt, Homo Sapiens
uuuaaugccaacaaaauugguuguaaucaaau

SEQ ID NO: 372477 - RNA, 32 nt, Homo Sapiens
uaaaaugaaaguacuuuuuacuuuuuaugaua

SEQ ID NO: 372478 - RNA, 32 nt, Homo Sapiens
uggaaaacacuuugaagacaaaaaagaaaucu

SEQ ID NO: 372479 - RNA, 32 nt, Homo Sapiens
ccuugaggccccaggaagcucugccgcccccu

SEQ ID NO: 372480 - RNA, 32 nt, Homo Sapiens
ugacuccuggaaacuucugguuuuuguuagua

SEQ ID NO: 372481 - RNA, 32 nt, Homo Sapiens
aagcagaaagagagaagauguuauuggcaaaa

SEQ ID NO: 372482 - RNA, 32 nt, Homo Sapiens
guguuaaacaauuuuacugauuuuuauaauaa

SEQ ID NO: 372483 - RNA, 32 nt, Homo Sapiens
ugacgaugacccucgcauguccuaggucccug

SEQ ID NO: 372484 - RNA, 32 nt, Homo Sapiens
cagccuuagaaaauuucaauucauuacacaca

SEQ ID NO: 372485 - RNA, 32 nt, Homo Sapiens
agauuuccaaauaguuguagccuuauccuggu

SEQ ID NO: 372486 - RNA, 32 nt, Homo Sapiens
agaaagaaagacugaaaaagaaauaaggucug

SEQ ID NO: 372487 - RNA, 31 nt, Homo Sapiens
ggaguuuugugcuucaaaguuuuuguuuuug

SEQ ID NO: 372488 - RNA, 32 nt, Homo Sapiens
auagguuugucaauaauagagcucagacaccu

SEQ ID NO: 372489 - RNA, 32 nt, Homo Sapiens
auaaaaaaugacagugucaaaaaggaaaagga

SEQ ID NO: 372490 - RNA, 32 nt, Homo Sapiens
gcacacaggaggagggaggagcugguagggag

SEQ ID NO: 372491 - RNA, 32 nt, Homo Sapiens
cugauugguccguuuugacagagugcugacua

SEQ ID NO: 372492 - RNA, 32 nt, Homo Sapiens
aggcaggagcagcaucccccuccuugacggug

SEQ ID NO: 372493 - RNA, 32 nt, Homo Sapiens
uuugcccugugaccugcagguacuggacgguc

SEQ ID NO: 372494 - RNA, 32 nt, Homo Sapiens
ugcaacuaccaccguguacaggugcgguccau

SEQ ID NO: 372495 - RNA, 32 nt, Homo Sapiens
auuccacauaucuauuuuauauaacaaguucu

SEQ ID NO: 372496 - RNA, 32 nt, Homo Sapiens
cagcuggcggcgggcugcucacccagccugug

SEQ ID NO: 372497 - RNA, 32 nt, Homo Sapiens
uucauuggcaccuuuaaggcuuuugacaagca

SEQ ID NO: 372498 - RNA, 32 nt, Homo Sapiens
gcucacccucaaacugucucagcccucuucac

SEQ ID NO: 372499 - RNA, 32 nt, Homo Sapiens
aggcuuuauuuuuuccauuuugacauuggcac

SEQ ID NO: 372500 - RNA, 32 nt, Homo Sapiens
caagggggcucuggccuuggggaccagcugag

SEQ ID NO: 372501 - RNA, 32 nt, Homo Sapiens
aagaaccagcugccuccaggcagccagcccuc

SEQ ID NO: 372502 - RNA, 32 nt, Homo Sapiens
aacugguauuuucucucguuuccuuguuuauu

SEQ ID NO: 372503 - RNA, 32 nt, Homo Sapiens
ugagggagcagaaacccuccucaccccagcca

SEQ ID NO: 372504 - RNA, 32 nt, Homo Sapiens
cauuuguaauucaucagucauuauuagcuuuu

SEQ ID NO: 372505 - RNA, 32 nt, Homo Sapiens
gagacggaagcaggugcgauacuaagccucag

SEQ ID NO: 372506 - RNA, 32 nt, Homo Sapiens
uugcuaagccccacuccggcuacagcucuugc

SEQ ID NO: 372507 - RNA, 32 nt, Homo Sapiens
aaagggccgaggguagacaggcagcuucugug

SEQ ID NO: 372508 - RNA, 32 nt, Homo Sapiens
aggaucagacauuucggggacuacuggacacu

SEQ ID NO: 372509 - RNA, 32 nt, Homo Sapiens
ucugaucaagguuacuaacaaugaaguaucuc

SEQ ID NO: 372510 - RNA, 32 nt, Homo Sapiens
cucaucucggccucccaaagugccaggauuau

SEQ ID NO: 372511 - RNA, 32 nt, Homo Sapiens
uucugccucugaaucccuaccuuuaaagucag

SEQ ID NO: 372512 - RNA, 32 nt, Homo Sapiens
ccugccuggugcccugucccagccccaggucc

SEQ ID NO: 372513 - RNA, 31 nt, Homo Sapiens
uccaguguggugugccugcccccuuccguca

SEQ ID NO: 372514 - RNA, 32 nt, Homo Sapiens
uuuuauggccccagggggagggggagagagca

SEQ ID NO: 372515 - RNA, 32 nt, Homo Sapiens
uguccucagaggaggaggaggaggaggcagcu

SEQ ID NO: 372516 - RNA, 32 nt, Homo Sapiens
gauaauuuaaaaaacucauucauagucucagu

SEQ ID NO: 372517 - RNA, 32 nt, Homo Sapiens
ccuaauaacuccuguaacauuccuccuucuga

SEQ ID NO: 372518 - RNA, 31 nt, Homo Sapiens
auaugguggagguggaggauaugaugguuac

SEQ ID NO: 372519 - RNA, 32 nt, Homo Sapiens
ggacacauauauaucauuauauuaaaauaaau

SEQ ID NO: 372520 - RNA, 32 nt, Homo Sapiens
gagcggcugcgcgaggaugcgcggugcccggu

SEQ ID NO: 372521 - RNA, 32 nt, Homo Sapiens
cgccggcuccgcgcuccaggggcugcugagcg

SEQ ID NO: 372522 - RNA, 32 nt, Homo Sapiens
gccucccuuugugaaaggggauggggagggga

SEQ ID NO: 372523 - RNA, 32 nt, Homo Sapiens
cggccgaggaggagggguggggguagcggcgg

SEQ ID NO: 372524 - RNA, 32 nt, Homo Sapiens
ccauguggacagagcugggagggccggaacca

SEQ ID NO: 372525 - RNA, 32 nt, Homo Sapiens
ggauacaaagacaggccugguuccuagcugug

SEQ ID NO: 372526 - RNA, 32 nt, Homo Sapiens
ccugcagcaccgucccaccucugccacccucc

SEQ ID NO: 372527 - RNA, 32 nt, Homo Sapiens
auuuaccaacuuuauugaaaauguuguuacau

SEQ ID NO: 372528 - RNA, 32 nt, Homo Sapiens
cgggaacccaaccgcggcgaccggacgugcac

SEQ ID NO: 372529 - RNA, 27 nt, Homo Sapiens
acauggcccgggggcccggcccgcuag

SEQ ID NO: 372530 - RNA, 32 nt, Homo Sapiens
ccuuaggcugaccccugauccagacugucuuc

SEQ ID NO: 372531 - RNA, 29 nt, Homo Sapiens
gguggagagauccaauaacaaaaaguuag

SEQ ID NO: 372532 - RNA, 32 nt, Homo Sapiens
aguguggaagcaggagacacaacaccuccuac

SEQ ID NO: 372533 - RNA, 32 nt, Homo Sapiens
auaagaugaugauauauauaaugaugauaugu

SEQ ID NO: 372534 - RNA, 32 nt, Homo Sapiens
gauggagucuuguucuguaacccaggcuggag

SEQ ID NO: 372535 - RNA, 32 nt, Homo Sapiens
uuuuuagccauuauuucuuuucuguuacuugc

SEQ ID NO: 372536 - RNA, 32 nt, Homo Sapiens
acaaauggacuauacauacuauaagaggacug

SEQ ID NO: 372537 - RNA, 32 nt, Homo Sapiens
uccccaaagaagaaacaaaaccaguugcaccu

SEQ ID NO: 372538 - RNA, 31 nt, Homo Sapiens
augcuccggagcugccugcucuaugcccuga

SEQ ID NO: 372539 - RNA, 32 nt, Homo Sapiens
uggccugcagcucgcgccgccauggacgcugc

SEQ ID NO: 372540 - RNA, 32 nt, Homo Sapiens
ucucuguuccccagcccaccuggcucacacac

SEQ ID NO: 372541 - RNA, 32 nt, Homo Sapiens
ucagagaaaaagauucugggguuacuugaccu

SEQ ID NO: 372542 - RNA, 32 nt, Homo Sapiens
auguuuguuugcuuguugaauuuuugaacagc

SEQ ID NO: 372543 - RNA, 32 nt, Homo Sapiens
uacuaaaaaguaccagcauguuaacuuuauua

SEQ ID NO: 372544 - RNA, 32 nt, Homo Sapiens
uaaguugguccucccucugccuuuccucucaa

SEQ ID NO: 372545 - RNA, 32 nt, Homo Sapiens
ucuuagcgcaguuguucagagcccugguggau

SEQ ID NO: 372546 - RNA, 32 nt, Homo Sapiens
uuaacuuuaucuacaguguauuacuguauauu

SEQ ID NO: 372547 - RNA, 32 nt, Homo Sapiens
ucuaaucuuggaauggcucugagccaguccau

SEQ ID NO: 372548 - RNA, 32 nt, Homo Sapiens
uggaggacuggcccaggcagggggacagggaa

SEQ ID NO: 372549 - RNA, 32 nt, Homo Sapiens
acucauuuggggauugauguuacugcacuaua

SEQ ID NO: 372550 - RNA, 32 nt, Homo Sapiens
caaaacuugagaaaaaauucucuaucacaucc

SEQ ID NO: 372551 - RNA, 32 nt, Homo Sapiens
agagagacugaucgcgcgugggccucgcgagg

SEQ ID NO: 372552 - RNA, 32 nt, Homo Sapiens
cuggcccccagcgagaugaucacggcucagag

SEQ ID NO: 372553 - RNA, 32 nt, Homo Sapiens
aacaugcuccgcgccuccagagaaaaguugcu

SEQ ID NO: 372554 - RNA, 32 nt, Homo Sapiens
ccccggcccgcggccugugagcccagguccug

SEQ ID NO: 372555 - RNA, 32 nt, Homo Sapiens
aagcauugcgauuugcagaguccaugaaacag

SEQ ID NO: 372556 - RNA, 32 nt, Homo Sapiens
ggggacacagaaaaagggaaggaaauuggcua

SEQ ID NO: 372557 - RNA, 32 nt, Homo Sapiens
uaguguaaaauuuaacauauuaacucucacga

SEQ ID NO: 372558 - RNA, 32 nt, Homo Sapiens
aaaaacaugcaccuggaguuuccccggagccc

SEQ ID NO: 372559 - RNA, 32 nt, Homo Sapiens
cacuguugucaugggggcucugccaagacccu

SEQ ID NO: 372560 - RNA, 32 nt, Homo Sapiens
aaagugucugccggcucgcgggccaggauccu

SEQ ID NO: 372561 - RNA, 32 nt, Homo Sapiens
guauccuucauuauccaccccaucccagacuc

SEQ ID NO: 372562 - RNA, 32 nt, Homo Sapiens
cagucgcugacuugguccuguuuucuauucuu

SEQ ID NO: 372563 - RNA, 32 nt, Homo Sapiens
ugauaacuuuaaaaauuagauacauuuucuua

SEQ ID NO: 372564 - RNA, 32 nt, Homo Sapiens
uuggcuguuucaugcaggacuuaauuauugcu

SEQ ID NO: 372565 - RNA, 32 nt, Homo Sapiens
ggccgccaucuugagaucccuucugcugaagg

SEQ ID NO: 372566 - RNA, 32 nt, Homo Sapiens
ggguccaccaccccaaaccccuccacgaagac

SEQ ID NO: 372567 - RNA, 32 nt, Homo Sapiens
aagaccagaaaaggagggggcaggugggagac

SEQ ID NO: 372568 - RNA, 32 nt, Homo Sapiens
auaauuucauuuccacauugauuaaagcugcu

SEQ ID NO: 372569 - RNA, 32 nt, Homo Sapiens
uccuguguuguccccagcaagggagagacugu

SEQ ID NO: 372570 - RNA, 32 nt, Homo Sapiens
ugucccccgccagcauucuggaugucagagga

SEQ ID NO: 372571 - RNA, 32 nt, Homo Sapiens
caguagggccccucccaggagcucuuggcugu

SEQ ID NO: 372572 - RNA, 32 nt, Homo Sapiens
auagcccuaaaaucaugagagugguugccccu

SEQ ID NO: 372573 - RNA, 32 nt, Homo Sapiens
cccugaugaaucuggaaaauauuuaaaauauu

SEQ ID NO: 372574 - RNA, 32 nt, Homo Sapiens
ugggugucuucuguuuuccugcugggguaagu

SEQ ID NO: 372575 - RNA, 32 nt, Homo Sapiens
guguauauaaaauagcaaauuaugacagaaca

SEQ ID NO: 372576 - RNA, 32 nt, Homo Sapiens
cggggaguuccccauucguucuccggggaggg

SEQ ID NO: 372577 - RNA, 32 nt, Homo Sapiens
cuucaaaagcuacuaaaaaugaacggcccuga

SEQ ID NO: 372578 - RNA, 32 nt, Homo Sapiens
gugccccgcgcgcacgcgcaaagcccgccgcg

SEQ ID NO: 372579 - RNA, 32 nt, Homo Sapiens
ccgcaccgcucccgggaucaugguguucuacu

SEQ ID NO: 372580 - RNA, 32 nt, Homo Sapiens
uacacuguugcugaaggucacucuguacacgu

SEQ ID NO: 372581 - RNA, 32 nt, Homo Sapiens
ugaaaaaugcauuguucauaugaaugucaucu

SEQ ID NO: 372582 - RNA, 32 nt, Homo Sapiens
cucacucuugucagagucggagcuacaggcag

SEQ ID NO: 372583 - RNA, 32 nt, Homo Sapiens
uuggcagcagggcuucaguucuccagaagaag

SEQ ID NO: 372584 - RNA, 32 nt, Homo Sapiens
aagaagaugggucuucauccuaacccacggaa

SEQ ID NO: 372585 - RNA, 32 nt, Homo Sapiens
uacuuuugcauucuuccucguuuucucuugcu

SEQ ID NO: 372586 - RNA, 32 nt, Homo Sapiens
guugaggaagcggccagccaugccgggcccac

SEQ ID NO: 372587 - RNA, 32 nt, Homo Sapiens
aagucuccccgcagcccucuccacccagaggu

SEQ ID NO: 372588 - RNA, 32 nt, Homo Sapiens
aauccagcauguuuuauuuaauuuugauuuca

SEQ ID NO: 372589 - RNA, 32 nt, Homo Sapiens
ugagugggcccugcccggggagcugcagagca

SEQ ID NO: 372590 - RNA, 28 nt, Homo Sapiens
cagcaggggcggcggcggcggaucgagg

SEQ ID NO: 372591 - RNA, 32 nt, Homo Sapiens
auguacccuaaaaucuaacccaauaaccuguc

SEQ ID NO: 372592 - RNA, 32 nt, Homo Sapiens
guucuguuaccccauccucccucccccagcca

SEQ ID NO: 372593 - RNA, 32 nt, Homo Sapiens
aacauaguaguugguggacggcagaugcaggu

SEQ ID NO: 372594 - RNA, 32 nt, Homo Sapiens
acauuguccauaugccaauuuuuuguuaaaac

SEQ ID NO: 372595 - RNA, 32 nt, Homo Sapiens
agcacgcgucccgcucgggcgcacucuccagc

SEQ ID NO: 372596 - RNA, 32 nt, Homo Sapiens
ggacguaugugccgagggccgcggcgucugac

SEQ ID NO: 372597 - RNA, 32 nt, Homo Sapiens
uaaaguauuuuugugaugaggaaaucccuaaa

SEQ ID NO: 372598 - RNA, 32 nt, Homo Sapiens
uuauuuugccucagccucccaagcagcuggga

SEQ ID NO: 372599 - RNA, 32 nt, Homo Sapiens
uguggauaaaccucagaaaauggccacccagc

SEQ ID NO: 372600 - RNA, 32 nt, Homo Sapiens
cgguggcggcgggucggggcgagggucuugcu

SEQ ID NO: 372601 - RNA, 32 nt, Homo Sapiens
aguguggcagguggagagguccuacaggggcu

SEQ ID NO: 372602 - RNA, 32 nt, Homo Sapiens
acuggugcugaaccccgccgcgcgcgcuuuga

SEQ ID NO: 372603 - RNA, 32 nt, Homo Sapiens
agcugagguagcuugcagcaucuuuucuaguu

SEQ ID NO: 372604 - RNA, 32 nt, Homo Sapiens
gaauuaugguaacuuuuaaugaucuauucagg

SEQ ID NO: 372605 - RNA, 32 nt, Homo Sapiens
gguguugaggucauguggcaguccucacgauu

SEQ ID NO: 372606 - RNA, 32 nt, Homo Sapiens
aagaaguuaugaacuuuagaaaggaucagggg

SEQ ID NO: 372607 - RNA, 32 nt, Homo Sapiens
aaauccugggccagcuggccgcugccuuaggg

SEQ ID NO: 372608 - RNA, 32 nt, Homo Sapiens
agaaccuucaauugagcaguugugaaaauugc

SEQ ID NO: 372609 - RNA, 32 nt, Homo Sapiens
ggagugcugaagauugaauggauuuaucagau

SEQ ID NO: 372610 - RNA, 32 nt, Homo Sapiens
uccuuucaaauuaaugaaccuggcugacuuau

SEQ ID NO: 372611 - RNA, 32 nt, Homo Sapiens
uccccgaucccacccccucccccagggcugcc

SEQ ID NO: 372612 - RNA, 32 nt, Homo Sapiens
ugacaagauagcuauuuaagauaguuccccug

SEQ ID NO: 372613 - RNA, 31 nt, Homo Sapiens
ggagcgcugccgggaguuccccgggagccuc

SEQ ID NO: 372614 - RNA, 32 nt, Homo Sapiens
cuguuucugugucuauggauugcaaaaaaaca

SEQ ID NO: 372615 - RNA, 32 nt, Homo Sapiens
ggugguggcagaacugccugugcgagcacggc

SEQ ID NO: 372616 - RNA, 32 nt, Homo Sapiens
augugaugaauguaggaaaacuuuuuaccaua

SEQ ID NO: 372617 - RNA, 32 nt, Homo Sapiens
aggucugaaacacuaaggagacuuggccugag

SEQ ID NO: 372618 - RNA, 32 nt, Homo Sapiens
cauugcugguagagacccccaggccuguccac

SEQ ID NO: 372619 - RNA, 32 nt, Homo Sapiens
cugggaggugggagccgcgucucaggcccggc

SEQ ID NO: 372620 - RNA, 32 nt, Homo Sapiens
cuuagugauaaugaaauucagcggcucccucc

SEQ ID NO: 372621 - RNA, 32 nt, Homo Sapiens
ugaaaauaagaugugcguauguguguguaugc

SEQ ID NO: 372622 - RNA, 32 nt, Homo Sapiens
cgcuucuccacgguagaggcguguucucaguu

SEQ ID NO: 372623 - RNA, 32 nt, Homo Sapiens
uugaagauaaauaauuuuuuuauacuuuauca

SEQ ID NO: 372624 - RNA, 32 nt, Homo Sapiens
aaagcauuuuuuagugaugugcacgaugccuu

SEQ ID NO: 372625 - RNA, 32 nt, Homo Sapiens
aucuucccacccauagacuggcugggccagga

SEQ ID NO: 372626 - RNA, 32 nt, Homo Sapiens
caggcucaacucacaagaaacuuuucaucuca

SEQ ID NO: 372627 - RNA, 32 nt, Homo Sapiens
cagggaguuauggaaacgugccuaugacuuca

SEQ ID NO: 372628 - RNA, 32 nt, Homo Sapiens
ugcaacguucccggcucgcgccccacacacgg

SEQ ID NO: 372629 - RNA, 30 nt, Homo Sapiens
aagcuaugacugcggccgcggguucggcgg

SEQ ID NO: 372630 - RNA, 32 nt, Homo Sapiens
ccaauagucgcccuccucucuuuccugugggc

SEQ ID NO: 372631 - RNA, 32 nt, Homo Sapiens
auucgguauauugcaauagaaauaucauagaa

SEQ ID NO: 372632 - RNA, 32 nt, Homo Sapiens
gcgauuuggcccgacgcgcuccgcuuucgcua

SEQ ID NO: 372633 - RNA, 32 nt, Homo Sapiens
ucuuggauuguuugcuggggacaacucgauuu

SEQ ID NO: 372634 - RNA, 32 nt, Homo Sapiens
uucuuuuuucccuuuggauacauuuuuaauua

SEQ ID NO: 372635 - RNA, 32 nt, Homo Sapiens
aauuguauaauuuuugugagguauacauauug

SEQ ID NO: 372636 - RNA, 32 nt, Homo Sapiens
gccccgcccugugucacccaugccugucucag

SEQ ID NO: 372637 - RNA, 32 nt, Homo Sapiens
cugggcuugaaucccggcucguguucuugcug

SEQ ID NO: 372638 - RNA, 32 nt, Homo Sapiens
auaccaauaagugugaauauguguguauguug

SEQ ID NO: 372639 - RNA, 30 nt, Homo Sapiens
auggugaaaccccgucacuaauaaaaauac

SEQ ID NO: 372640 - RNA, 32 nt, Homo Sapiens
gugagucgcugaccacggcuuccccugcagga

SEQ ID NO: 372641 - RNA, 32 nt, Homo Sapiens
gcaugggccuguuccuggcccgcagccgccac

SEQ ID NO: 372642 - RNA, 32 nt, Homo Sapiens
aacuuucaggacuuagaaaacaacagcuauuc

SEQ ID NO: 372643 - RNA, 32 nt, Homo Sapiens
cuggcugaauaucaaauugauaguaacaacag

SEQ ID NO: 372644 - RNA, 32 nt, Homo Sapiens
cucuaaggaaaaaaccuuuggaagacuuaguc

SEQ ID NO: 372645 - RNA, 32 nt, Homo Sapiens
cccggcgcaggguggcucugccaguccccgcg

SEQ ID NO: 372646 - RNA, 29 nt, Homo Sapiens
uccagucggggacagagacacaugugccc

SEQ ID NO: 372647 - RNA, 32 nt, Homo Sapiens
cgccgccgcccggucaccccucucgcugggug

SEQ ID NO: 372648 - RNA, 32 nt, Homo Sapiens
acagaggcaagaaggugcugcaggccgacugg

SEQ ID NO: 372649 - RNA, 32 nt, Homo Sapiens
gauuccucucugcgguagacgugcacuuauaa

SEQ ID NO: 372650 - RNA, 32 nt, Homo Sapiens
auuggacuucuguuguguucucaccacucgau

SEQ ID NO: 372651 - RNA, 32 nt, Homo Sapiens
ccgccagaugacggaggcucucgccagacccu

SEQ ID NO: 372652 - RNA, 32 nt, Homo Sapiens
aaacuaggucugacucuggggauuuuuuucca

SEQ ID NO: 372653 - RNA, 32 nt, Homo Sapiens
uuuuguuuuuaguuauuucuuggaccuugaca

SEQ ID NO: 372654 - RNA, 32 nt, Homo Sapiens
uggagauggccaguucuuucuaccucagagug

SEQ ID NO: 372655 - RNA, 32 nt, Homo Sapiens
ugcugcgcgggaaggcaccaccaccacagccg

SEQ ID NO: 372656 - RNA, 32 nt, Homo Sapiens
auaaaaauaaggaaacuggggccauuacaaug

SEQ ID NO: 372657 - RNA, 32 nt, Homo Sapiens
ccuauaaugcauauuucuucucaguuuaaaug

SEQ ID NO: 372658 - RNA, 30 nt, Homo Sapiens
ccuguucugugugugccgccgggcgacgug

SEQ ID NO: 372659 - RNA, 32 nt, Homo Sapiens
ugcuuaugccuggccugccugggggaaguggg

SEQ ID NO: 372660 - RNA, 32 nt, Homo Sapiens
uauacagcaguuuuugucaggggaacauaaaa

SEQ ID NO: 372661 - RNA, 32 nt, Homo Sapiens
gcagaaaggggcgggggaaaaggugcaaaagc

SEQ ID NO: 372662 - RNA, 32 nt, Homo Sapiens
gcgcgagggaggcgagccggagcccgagcacu

SEQ ID NO: 372663 - RNA, 32 nt, Homo Sapiens
ggcuucuuguagcugggauaucuuucauaggu

SEQ ID NO: 372664 - RNA, 32 nt, Homo Sapiens
aacaucgucauuuuuucuuagaacuucagcug

SEQ ID NO: 372665 - RNA, 32 nt, Homo Sapiens
ucgccguugcugucgauuuuauuuguaucaac

SEQ ID NO: 372666 - RNA, 32 nt, Homo Sapiens
acgaggucaggaggucaagaucagccugacca

SEQ ID NO: 372667 - RNA, 32 nt, Homo Sapiens
agacccauuggaagugggugggaaauaaggua

SEQ ID NO: 372668 - RNA, 32 nt, Homo Sapiens
ccuguccgcuguugcuggcccgcauccuagca

SEQ ID NO: 372669 - RNA, 32 nt, Homo Sapiens
ccucguagugggaaaacugggaggcggaacga

SEQ ID NO: 372670 - RNA, 32 nt, Homo Sapiens
uuuguaggguuccacauuugcaucuagaaauc

SEQ ID NO: 372671 - RNA, 32 nt, Homo Sapiens
ggccucgccuggcgggaccccgcagcagcccc

SEQ ID NO: 372672 - RNA, 32 nt, Homo Sapiens
cuaacaguugucccuuuaggaggacaaaaugg

SEQ ID NO: 372673 - RNA, 32 nt, Homo Sapiens
acacucugccagcaaagaggacucgcuuguaa

SEQ ID NO: 372674 - RNA, 32 nt, Homo Sapiens
gggcccuggcuggccuguuguggguguaccca

SEQ ID NO: 372675 - RNA, 32 nt, Homo Sapiens
cauucugaugcccagguuggggugcaguggca

SEQ ID NO: 372676 - RNA, 32 nt, Homo Sapiens
cucuucgcggagcggcgccgcguagcuuccau

SEQ ID NO: 372677 - RNA, 32 nt, Homo Sapiens
gccguaaaagccaaguuaaauuucauauuaaa

SEQ ID NO: 372678 - RNA, 32 nt, Homo Sapiens
gagcgcgcguucgggcgccgcggacgcugucc

SEQ ID NO: 372679 - RNA, 32 nt, Homo Sapiens
ugagugugaacagguuugccuacguuggugca

SEQ ID NO: 372680 - RNA, 32 nt, Homo Sapiens
cccaguaggcaguagucagaacuggaugggcu

SEQ ID NO: 372681 - RNA, 32 nt, Homo Sapiens
ccugcaccugcaccccagccuuggccccugcc

SEQ ID NO: 372682 - RNA, 29 nt, Homo Sapiens
ucuuagaguuuaaauuauuuucuuggggg

SEQ ID NO: 372683 - RNA, 32 nt, Homo Sapiens
uggauccaaaaguuuaaauuagugcauacauc

SEQ ID NO: 372684 - RNA, 32 nt, Homo Sapiens
uugagagugucuuuuuuauuucauucaugaac

SEQ ID NO: 372685 - RNA, 32 nt, Homo Sapiens
ugguggccaaaggauggugucuugugaaagga

SEQ ID NO: 372686 - RNA, 31 nt, Homo Sapiens
aaauuugcaagguuuuuaggcaacagucaaa

SEQ ID NO: 372687 - RNA, 32 nt, Homo Sapiens
cuuuacaggacacgugccaccaggaacagggg

SEQ ID NO: 372688 - RNA, 32 nt, Homo Sapiens
ggcccauguacuccuguggcuuucucacauuc

SEQ ID NO: 372689 - RNA, 32 nt, Homo Sapiens
ugguugauucaaaagaaagugauucuauuuuu

SEQ ID NO: 372690 - RNA, 32 nt, Homo Sapiens
ucauccucacucccuuucucuacugauaauug

SEQ ID NO: 372691 - RNA, 32 nt, Homo Sapiens
aguggaaaagaaaaaauaaaauggacaaccac

SEQ ID NO: 372692 - RNA, 32 nt, Homo Sapiens
gaaccacacuguggcgggucggcggcccucaa

SEQ ID NO: 372693 - RNA, 32 nt, Homo Sapiens
uacaugaacaaauggaaaguuacuucuagaaa

SEQ ID NO: 372694 - RNA, 32 nt, Homo Sapiens
agccgccgcugccgucgccgccgagccgcugc

SEQ ID NO: 372695 - RNA, 32 nt, Homo Sapiens
ucagauuuuuuaauguaacaaacuacauguua

SEQ ID NO: 372696 - RNA, 32 nt, Homo Sapiens
ucccccggccuggccccauuggcccacccucu

SEQ ID NO: 372697 - RNA, 32 nt, Homo Sapiens
acugcugcugcaggagccgcugcuggcugcgu

SEQ ID NO: 372698 - RNA, 32 nt, Homo Sapiens
augguguauauauguauaaauaaaauaucugc

SEQ ID NO: 372699 - RNA, 32 nt, Homo Sapiens
uacgauuguaauuuuucuuggcuuuuuguuca

SEQ ID NO: 372700 - RNA, 32 nt, Homo Sapiens
gauggauaguuguaagguaccuuuaagagagc

SEQ ID NO: 372701 - RNA, 32 nt, Homo Sapiens
uuuaaaaagaugaaaaagaauaaaaacuuuug

SEQ ID NO: 372702 - RNA, 32 nt, Homo Sapiens
cggggcccguuugcagagcccgcggcgccggg

SEQ ID NO: 372703 - RNA, 32 nt, Homo Sapiens
gaccugucuuacucagacagcaccagguguac

SEQ ID NO: 372704 - RNA, 32 nt, Homo Sapiens
uaguacaguuuagaaagagcacuuauuuuguu

SEQ ID NO: 372705 - RNA, 32 nt, Homo Sapiens
ugugucaguauuaagaucacuaaagugguucu

SEQ ID NO: 372706 - RNA, 32 nt, Homo Sapiens
gcucauggagggcagcccugugugucccugca

SEQ ID NO: 372707 - RNA, 32 nt, Homo Sapiens
gccagguccccucuccuuucgcucucccggcu

SEQ ID NO: 372708 - RNA, 32 nt, Homo Sapiens
cagaacaagggaagauugauauuuuuggauau

SEQ ID NO: 372709 - RNA, 32 nt, Homo Sapiens
ccugcgcgucccggcccggccccgggcucuga

SEQ ID NO: 372710 - RNA, 32 nt, Homo Sapiens
uauguaugugagcaguuggucuuaccagaauc

SEQ ID NO: 372711 - RNA, 32 nt, Homo Sapiens
cccugcuuuucaccuaucuacuccugagcuuc

SEQ ID NO: 372712 - RNA, 32 nt, Homo Sapiens
aagacugccugccuuggaggggucacaugagg

SEQ ID NO: 372713 - RNA, 32 nt, Homo Sapiens
gaggcugggcugcagcccacucagcuugcggg

SEQ ID NO: 372714 - RNA, 32 nt, Homo Sapiens
cuauccuuuaaucuguacuguaaauaaaaaau

SEQ ID NO: 372715 - RNA, 31 nt, Homo Sapiens
ucggggcugccggagcugcgggggaccgggc

SEQ ID NO: 372716 - RNA, 32 nt, Homo Sapiens
agacacggaacuucaccuuuucugggaccuuc

SEQ ID NO: 372717 - RNA, 32 nt, Homo Sapiens
gaucacuacaaguauuauuuuacaaucaacaa

SEQ ID NO: 372718 - RNA, 32 nt, Homo Sapiens
gagaugccguuugcaggccucaucucugcuug

SEQ ID NO: 372719 - RNA, 32 nt, Homo Sapiens
uuuuaauaaaaaauuuucaaaucauguuagcu

SEQ ID NO: 372720 - RNA, 32 nt, Homo Sapiens
cuccaguguuuuuucuguuggaccacacccgu

SEQ ID NO: 372721 - RNA, 32 nt, Homo Sapiens
cgccggagccccccagcccgcaggagauccug

SEQ ID NO: 372722 - RNA, 32 nt, Homo Sapiens
uagccgcgcgucugcucgcuucugguccgucg

SEQ ID NO: 372723 - RNA, 32 nt, Homo Sapiens
aaaucucccuccggggaccucugagacguuuc

SEQ ID NO: 372724 - RNA, 32 nt, Homo Sapiens
uuuuaaguacacaauacaguauuguuaacuau

SEQ ID NO: 372725 - RNA, 32 nt, Homo Sapiens
ugucaguuguguuuugggccugucggguccuu

SEQ ID NO: 372726 - RNA, 32 nt, Homo Sapiens
aacccaauguuuacauucucuucugucucugc

SEQ ID NO: 372727 - RNA, 32 nt, Homo Sapiens
augcaaaacauacacacacacacacacacaca

SEQ ID NO: 372728 - RNA, 32 nt, Homo Sapiens
caaagguccucaggguucuccucuucucucac

SEQ ID NO: 372729 - RNA, 32 nt, Homo Sapiens
ggaccugacuuccccuucucccauccugaaca

SEQ ID NO: 372730 - RNA, 32 nt, Homo Sapiens
gcagugacaaagauuauuugagugaccaagcu

SEQ ID NO: 372731 - RNA, 31 nt, Homo Sapiens
gaaaagaugguggaaaucauggcccaagagg

SEQ ID NO: 372732 - RNA, 32 nt, Homo Sapiens
caugacauaacacuccacacccgccccagcca

SEQ ID NO: 372733 - RNA, 32 nt, Homo Sapiens
agccauuucuaaaauggcagcuucaguucuag

SEQ ID NO: 372734 - RNA, 32 nt, Homo Sapiens
agcgaagggaagaggggagagaaggcaccgcu

SEQ ID NO: 372735 - RNA, 32 nt, Homo Sapiens
ucgauucuuuucucuuuuuuuucuucauuggc

SEQ ID NO: 372736 - RNA, 32 nt, Homo Sapiens
uccccuggacaaaguugcugacaagcugcuga

SEQ ID NO: 372737 - RNA, 32 nt, Homo Sapiens
gucaaaugaugauuaugaguucccuaaacaaa

SEQ ID NO: 372738 - RNA, 32 nt, Homo Sapiens
cagccacaccagcccagcccagcccagcucuc

SEQ ID NO: 372739 - RNA, 32 nt, Homo Sapiens
aaaguguggccucagcucuggaggccaccccc

SEQ ID NO: 372740 - RNA, 32 nt, Homo Sapiens
agauaaaaaaucauugucuuaagccacuaagu

SEQ ID NO: 372741 - RNA, 32 nt, Homo Sapiens
ggaaaucuggagaugcagauacuguguuuccu

SEQ ID NO: 372742 - RNA, 32 nt, Homo Sapiens
gcaucaggaagacuagcuccccugccccggag

SEQ ID NO: 372743 - RNA, 32 nt, Homo Sapiens
ccucugucaccagggcggcugggcucccgcag

SEQ ID NO: 372744 - RNA, 32 nt, Homo Sapiens
ugcugcgcuuccaguuccgaaaagcagauguu

SEQ ID NO: 372745 - RNA, 32 nt, Homo Sapiens
aaccuauaaaucaacaccuuaauaugcugcaa

SEQ ID NO: 372746 - RNA, 32 nt, Homo Sapiens
aaauuagcugggugugaugacaggugccugua

SEQ ID NO: 372747 - RNA, 32 nt, Homo Sapiens
gauuugcaugggcagggacagaauaauaugac

SEQ ID NO: 372748 - RNA, 32 nt, Homo Sapiens
ugagcguggagcugcccgggcugcuggcgcag

SEQ ID NO: 372749 - RNA, 32 nt, Homo Sapiens
uaguugacauauauuuuauauccucuucuguu

SEQ ID NO: 372750 - RNA, 32 nt, Homo Sapiens
uacguccuuccacuuccaagaucuuuuuccag

SEQ ID NO: 372751 - RNA, 32 nt, Homo Sapiens
ugugcggcuuccuguucucaauaaaaguaaua

SEQ ID NO: 372752 - RNA, 32 nt, Homo Sapiens
ccuuucgggcgguggcuugcguuugagccuca

SEQ ID NO: 372753 - RNA, 32 nt, Homo Sapiens
acaucuuugucaacaaacuguucguuuuuaag

SEQ ID NO: 372754 - RNA, 32 nt, Homo Sapiens
uaccaaagcuaaggggaagggcuuuccaugcc

SEQ ID NO: 372755 - RNA, 32 nt, Homo Sapiens
ugcugcgugcauuuuuaaaagaugccgauccu

SEQ ID NO: 372756 - RNA, 32 nt, Homo Sapiens
ugugcauguucccugucuggugccccuuugcc

SEQ ID NO: 372757 - RNA, 32 nt, Homo Sapiens
cggcaugagcuccgccccugcugcugccugua

SEQ ID NO: 372758 - RNA, 32 nt, Homo Sapiens
aguuauuauuagaguugcagaauagaaacuug

SEQ ID NO: 372759 - RNA, 32 nt, Homo Sapiens
aucaaugaauaaagguuuugaguguaucuuac

SEQ ID NO: 372760 - RNA, 32 nt, Homo Sapiens
uuuccuccccauuugugagcugugggacuuua

SEQ ID NO: 372761 - RNA, 32 nt, Homo Sapiens
uuauuccaggacuugugguggaguuaugguac

SEQ ID NO: 372762 - RNA, 32 nt, Homo Sapiens
gguguugaugguggaugacgcugcugaacaag

SEQ ID NO: 372763 - RNA, 32 nt, Homo Sapiens
caaagagauugugauggugauaauuugaauac

SEQ ID NO: 372764 - RNA, 32 nt, Homo Sapiens
gaaggcuugggguugaggacuugugaucagaa

SEQ ID NO: 372765 - RNA, 32 nt, Homo Sapiens
auauuuuauguaccaugguuauaugauuaauc

SEQ ID NO: 372766 - RNA, 31 nt, Homo Sapiens
aauauuucugugagaaaguucacuuuuccag

SEQ ID NO: 372767 - RNA, 32 nt, Homo Sapiens
caggcuuuaggaccagcugauuguuaugcuug

SEQ ID NO: 372768 - RNA, 32 nt, Homo Sapiens
agccuggcgugguggcgggcgccuguaguccc

SEQ ID NO: 372769 - RNA, 32 nt, Homo Sapiens
augcuaauuuacuaugagacauuaaggauaaa

SEQ ID NO: 372770 - RNA, 32 nt, Homo Sapiens
agcugggccgccggcccggguggcccauaacu

SEQ ID NO: 372771 - RNA, 32 nt, Homo Sapiens
cugcccguccccacccagucuugcccucccau

SEQ ID NO: 372772 - RNA, 32 nt, Homo Sapiens
gaaccucugugcuauaagcauggaaaauuggg

SEQ ID NO: 372773 - RNA, 32 nt, Homo Sapiens
uuauuggaagagagaaaggaaauauuuugguc

SEQ ID NO: 372774 - RNA, 32 nt, Homo Sapiens
uccucaucagaaucacuagaucaugacugacc

SEQ ID NO: 372775 - RNA, 32 nt, Homo Sapiens
gguauaucauuuccucuucauuaaagaacagc

SEQ ID NO: 372776 - RNA, 32 nt, Homo Sapiens
ccaauacacaagugcuagaaaauacacacaau

SEQ ID NO: 372777 - RNA, 32 nt, Homo Sapiens
uucugggcgggggguucgcccagcgucgugga

SEQ ID NO: 372778 - RNA, 32 nt, Homo Sapiens
ccagcggggagcacgggugcugccuuccgugc

SEQ ID NO: 372779 - RNA, 32 nt, Homo Sapiens
agccagggcggagcgcagcugcgccgggcuug

SEQ ID NO: 372780 - RNA, 32 nt, Homo Sapiens
aguuuuuguuuuuauguuuuucauugcugagu

SEQ ID NO: 372781 - RNA, 32 nt, Homo Sapiens
ggggccagggcacaacaucugaagccauccag

SEQ ID NO: 372782 - RNA, 31 nt, Homo Sapiens
gucugggagccccaggcuggccucagacugu

SEQ ID NO: 372783 - RNA, 32 nt, Homo Sapiens
ccaggagaauauguaaaaaauaaaaaggguaa

SEQ ID NO: 372784 - RNA, 32 nt, Homo Sapiens
gcuccugcugcuagucuccaauugccaaggga

SEQ ID NO: 372785 - RNA, 32 nt, Homo Sapiens
ggaauccauuggcuugagacacaugacccaaa

SEQ ID NO: 372786 - RNA, 32 nt, Homo Sapiens
acuauccuauuauuagcuucuaucucuuagug

SEQ ID NO: 372787 - RNA, 32 nt, Homo Sapiens
uacgggcuaagcgcccggccccggggccgcgg

SEQ ID NO: 372788 - RNA, 32 nt, Homo Sapiens
augacugcaauaauucauacuucuuaugucau

SEQ ID NO: 372789 - RNA, 32 nt, Homo Sapiens
uucucaacugggcuguuuuucuuaccaccuga

SEQ ID NO: 372790 - RNA, 32 nt, Homo Sapiens
aggcagggauggccggcccaggagggaggagg

SEQ ID NO: 372791 - RNA, 32 nt, Homo Sapiens
ccuggccucagagcuuccuggggaccaagauu

SEQ ID NO: 372792 - RNA, 32 nt, Homo Sapiens
acacucugugauguuauucguaauaucauagg

SEQ ID NO: 372793 - RNA, 32 nt, Homo Sapiens
gacugacaaccucauccaggcuaccauccgca

SEQ ID NO: 372794 - RNA, 32 nt, Homo Sapiens
acuggagcagcgguaaaggcgaggauggagac

SEQ ID NO: 372795 - RNA, 32 nt, Homo Sapiens
ugaguuucuucuuuggaaaccaucacuauuga

SEQ ID NO: 372796 - RNA, 32 nt, Homo Sapiens
ggugggcugcagaacggggugggaacuggggg

SEQ ID NO: 372797 - RNA, 32 nt, Homo Sapiens
uuuuguuuuucugcagccagaguugagaacca

SEQ ID NO: 372798 - RNA, 31 nt, Homo Sapiens
gcucagcugccgggcugcuccgguuggaaac

SEQ ID NO: 372799 - RNA, 32 nt, Homo Sapiens
ugccuguacuuuggggaaacagauggagcucu

SEQ ID NO: 372800 - RNA, 32 nt, Homo Sapiens
auacauagcaugguauuauauaucacauucug

SEQ ID NO: 372801 - RNA, 32 nt, Homo Sapiens
agacugcacgggggcagugcccgcagcauccc

SEQ ID NO: 372802 - RNA, 27 nt, Homo Sapiens
ugaagauucuucuucagaaucucaugc

SEQ ID NO: 372803 - RNA, 32 nt, Homo Sapiens
ugagcugugauugcaccacugcacuuuagucu

SEQ ID NO: 372804 - RNA, 32 nt, Homo Sapiens
agcuuugccucggaauggaaaagaauuuggau

SEQ ID NO: 372805 - RNA, 32 nt, Homo Sapiens
ccgcugaguggguuauugaugaucucaagagu

SEQ ID NO: 372806 - RNA, 32 nt, Homo Sapiens
cccacguguccggagauuuucaggacuuggug

SEQ ID NO: 372807 - RNA, 32 nt, Homo Sapiens
ccacucgcuucucccucgggucggguccgagc

SEQ ID NO: 372808 - RNA, 32 nt, Homo Sapiens
agauucgcuccucccccucaugccaaccccac

SEQ ID NO: 372809 - RNA, 32 nt, Homo Sapiens
agggagggggagagggcugccuuuggacuugu

SEQ ID NO: 372810 - RNA, 32 nt, Homo Sapiens
uauuaagagcacguauccauuauucuucucaa

SEQ ID NO: 372811 - RNA, 32 nt, Homo Sapiens
gucggggagcagcaccccugcccccgguggag

SEQ ID NO: 372812 - RNA, 32 nt, Homo Sapiens
aggagacagaucagggcccaccucccugccag

SEQ ID NO: 372813 - RNA, 32 nt, Homo Sapiens
ugaggaguggaggcugggcagcuccgacuccc

SEQ ID NO: 372814 - RNA, 32 nt, Homo Sapiens
aaggaaaauuuucaccauuucgagugucaagu

SEQ ID NO: 372815 - RNA, 32 nt, Homo Sapiens
aaagacauuggugauaaggugacauuugguca

SEQ ID NO: 372816 - RNA, 32 nt, Homo Sapiens
gaagagagaaagcaggaaaaacaaaauggucg

SEQ ID NO: 372817 - RNA, 32 nt, Homo Sapiens
gcugugugaugaaagcugaagacaccuaaugg

SEQ ID NO: 372818 - RNA, 32 nt, Homo Sapiens
cuuggauaaacuggauugaccaauuauacacu

SEQ ID NO: 372819 - RNA, 32 nt, Homo Sapiens
aaccgggccaagcgcaguggcucacaccucua

SEQ ID NO: 372820 - RNA, 30 nt, Homo Sapiens
caucccggcaggcgcucagccugcagacac

SEQ ID NO: 372821 - RNA, 32 nt, Homo Sapiens
ucacuguguacaaacuggccaagugcuucugu

SEQ ID NO: 372822 - RNA, 32 nt, Homo Sapiens
gucaagucacuggucuguuugcauuugauaca

SEQ ID NO: 372823 - RNA, 31 nt, Homo Sapiens
cccuggaugucccgcagcgcggcggccagcg

SEQ ID NO: 372824 - RNA, 32 nt, Homo Sapiens
uguaagcauguaagaguaaagaauuguaugau

SEQ ID NO: 372825 - RNA, 32 nt, Homo Sapiens
uccagagggcccugaaacuuuucaaauguuua

SEQ ID NO: 372826 - RNA, 32 nt, Homo Sapiens
cccacucaugaucaccauuuuauuuucauaau

SEQ ID NO: 372827 - RNA, 32 nt, Homo Sapiens
uaacucaagaggacagaggcuggugggaggua

SEQ ID NO: 372828 - RNA, 32 nt, Homo Sapiens
aacgguuucaacucauuuucuacauuucucua

SEQ ID NO: 372829 - RNA, 32 nt, Homo Sapiens
ggacuggaccuggaggauccucuucuuggugg

SEQ ID NO: 372830 - RNA, 32 nt, Homo Sapiens
cuuagggauucuccccaccccagccccacacc

SEQ ID NO: 372831 - RNA, 32 nt, Homo Sapiens
ucaaaauaaggaugacuuuagaauaauauugu

SEQ ID NO: 372832 - RNA, 32 nt, Homo Sapiens
ggggaggcucugccccaggccgcggccuugag

SEQ ID NO: 372833 - RNA, 32 nt, Homo Sapiens
aaaaaaaauaaauuauuuuuguuaaggcaagc

SEQ ID NO: 372834 - RNA, 32 nt, Homo Sapiens
aggcagaccugggccucccaggauggaggacg

SEQ ID NO: 372835 - RNA, 32 nt, Homo Sapiens
auuugaguagacagcaaugaucuuuacauagc

SEQ ID NO: 372836 - RNA, 32 nt, Homo Sapiens
uguuuuucaaagcguagugguccccauauuag

SEQ ID NO: 372837 - RNA, 32 nt, Homo Sapiens
ugggaugacaggcuaccugagugccuuuucuu

SEQ ID NO: 372838 - RNA, 32 nt, Homo Sapiens
agguccuuuaaguauuugaugaucaacugaac

SEQ ID NO: 372839 - RNA, 32 nt, Homo Sapiens
gucugguuaaaauuauauugacugguggccuu

SEQ ID NO: 372840 - RNA, 32 nt, Homo Sapiens
gggacacuuaacagaugcaaugugcuacugau

SEQ ID NO: 372841 - RNA, 32 nt, Homo Sapiens
cuggugggggagaggaagaaggaggguagaac

SEQ ID NO: 372842 - RNA, 32 nt, Homo Sapiens
aaaacgucuccauggcggggguaacaagauga

SEQ ID NO: 372843 - RNA, 32 nt, Homo Sapiens
gaaauuuagaguaguugaaaucuuuaggaaug

SEQ ID NO: 372844 - RNA, 32 nt, Homo Sapiens
ugaaguguuucaguagaaagugucacagcuag

SEQ ID NO: 372845 - RNA, 32 nt, Homo Sapiens
ggcaaaagggaccccuggagcccugccgccau

SEQ ID NO: 372846 - RNA, 32 nt, Homo Sapiens
aaccaauuauguuaauaauuuauuuaaugagu

SEQ ID NO: 372847 - RNA, 32 nt, Homo Sapiens
ugcaucuguauauagugugagcagcaaguaac

SEQ ID NO: 372848 - RNA, 32 nt, Homo Sapiens
aggagcagagagcaagauuagaucugagaaga

SEQ ID NO: 372849 - RNA, 32 nt, Homo Sapiens
gggaacaaguauuuaaacaauauuuagagcaa

SEQ ID NO: 372850 - RNA, 32 nt, Homo Sapiens
cuaagguauggcacaagguaacuaguaaguca

SEQ ID NO: 372851 - RNA, 32 nt, Homo Sapiens
ugccuuaaucaucaucagaguauccuacacaa

SEQ ID NO: 372852 - RNA, 32 nt, Homo Sapiens
uccgcucacaauccgauggcggcggccgugcu

SEQ ID NO: 372853 - RNA, 32 nt, Homo Sapiens
aaaauaauauaaaucccauaagggcagacguu

SEQ ID NO: 372854 - RNA, 32 nt, Homo Sapiens
ggauaaggggguaaaauaaccaauuaaguguc

SEQ ID NO: 372855 - RNA, 32 nt, Homo Sapiens
aguuuucaguuauaaguuuaguaaauauuaau

SEQ ID NO: 372856 - RNA, 32 nt, Homo Sapiens
ugaguggggaggaugcacugcugcugggcagg

SEQ ID NO: 372857 - RNA, 28 nt, Homo Sapiens
uauaaugaaaauaaaucuugagucguug

SEQ ID NO: 372858 - RNA, 32 nt, Homo Sapiens
aaaucaguggcaccgaggcgccugcagccgca

SEQ ID NO: 372859 - RNA, 32 nt, Homo Sapiens
ccuuugcgggggagaaaagaucugcaacacgu

SEQ ID NO: 372860 - RNA, 32 nt, Homo Sapiens
gcauagagaaucaacagugaacaagaugggca

SEQ ID NO: 372861 - RNA, 32 nt, Homo Sapiens
aagugauugauguuaaauucacagacaauuuu

SEQ ID NO: 372862 - RNA, 32 nt, Homo Sapiens
ccugcagacccgcaggagagcacaugugccuu

SEQ ID NO: 372863 - RNA, 32 nt, Homo Sapiens
ccaaagcuuucuuuguuuuguaccuuaaauug

SEQ ID NO: 372864 - RNA, 32 nt, Homo Sapiens
acaacuuggccuaguucacgugggaugggauu

SEQ ID NO: 372865 - RNA, 32 nt, Homo Sapiens
uguauuuagaccccccaccuguguuccucaau

SEQ ID NO: 372866 - RNA, 32 nt, Homo Sapiens
gaauuccggccgcucggcccgaccuccuuccc

SEQ ID NO: 372867 - RNA, 30 nt, Homo Sapiens
gccuaaacauccuuacacaagaguauugug

SEQ ID NO: 372868 - RNA, 32 nt, Homo Sapiens
ugacauacugucaaaguccucauaucuaggaa

SEQ ID NO: 372869 - RNA, 32 nt, Homo Sapiens
gggagcccgagccccagccgggccgcgcuucg

SEQ ID NO: 372870 - RNA, 32 nt, Homo Sapiens
gccgauguguaagaguaggaaauacuguguca

SEQ ID NO: 372871 - RNA, 31 nt, Homo Sapiens
gggaaguugcgcagccgaacuggccggcugg

SEQ ID NO: 372872 - RNA, 32 nt, Homo Sapiens
uaucuuguaaaaauaaauccaacuuugugucu

SEQ ID NO: 372873 - RNA, 32 nt, Homo Sapiens
auuuuuucaaaaaaccagcuccuagauucacu

SEQ ID NO: 372874 - RNA, 32 nt, Homo Sapiens
uuguauuauacuuuuuaaaucuugaacuuuau

SEQ ID NO: 372875 - RNA, 32 nt, Homo Sapiens
ccagacugucugccucccuucugacuguggcc

SEQ ID NO: 372876 - RNA, 32 nt, Homo Sapiens
ugcacuguagaauacaacaauaaaauacagcc

SEQ ID NO: 372877 - RNA, 32 nt, Homo Sapiens
acugucaggaguucuagauaaaacgcugagug

SEQ ID NO: 372878 - RNA, 32 nt, Homo Sapiens
gggggaaauauguaucaaauuaaaugaaggua

SEQ ID NO: 372879 - RNA, 32 nt, Homo Sapiens
ucaacagugagagacuccauaguuugggcuug

SEQ ID NO: 372880 - RNA, 32 nt, Homo Sapiens
caguccagcuggaacggcagcccaguccagcc

SEQ ID NO: 372881 - RNA, 32 nt, Homo Sapiens
aggggguggggagggagaaggugguagcuuau

SEQ ID NO: 372882 - RNA, 29 nt, Homo Sapiens
ugugauggaugaagagagguccaguaugc

SEQ ID NO: 372883 - RNA, 32 nt, Homo Sapiens
gaggauccaacaauaaauauuaauuuauaaaa

SEQ ID NO: 372884 - RNA, 32 nt, Homo Sapiens
aagggucucaucuuauuaaccauuucuugccu

SEQ ID NO: 372885 - RNA, 32 nt, Homo Sapiens
auuucuaaauguuuugacugggcauuuuucuu

SEQ ID NO: 372886 - RNA, 32 nt, Homo Sapiens
cuggccaauccacaccaauuauuuaaauucac

SEQ ID NO: 372887 - RNA, 32 nt, Homo Sapiens
gucagaauuuuuuccuccucgcuguucaauuu

SEQ ID NO: 372888 - RNA, 32 nt, Homo Sapiens
aagcauuauuuuuacucuuuugaggugaauau

SEQ ID NO: 372889 - RNA, 32 nt, Homo Sapiens
uggccuacacugccuuucaguuuaccuaggcc

SEQ ID NO: 372890 - RNA, 32 nt, Homo Sapiens
uccuggugaccaaaaaagauuacuaggguuuu

SEQ ID NO: 372891 - RNA, 32 nt, Homo Sapiens
aaggacagacaccuucaauuugugaaaucaaa

SEQ ID NO: 372892 - RNA, 32 nt, Homo Sapiens
agaacaugugaauaaacuuaagcuuauuuauu

SEQ ID NO: 372893 - RNA, 31 nt, Homo Sapiens
acugggaaauaaaauauagaguggcacuuca

SEQ ID NO: 372894 - RNA, 32 nt, Homo Sapiens
ucaugauuuacuaucuguaagagcauaagcuu

SEQ ID NO: 372895 - RNA, 32 nt, Homo Sapiens
auguucagcaaccugaaugguuauuuuuguua

SEQ ID NO: 372896 - RNA, 32 nt, Homo Sapiens
uauauauauuugucuguaagaauuauguuuua

SEQ ID NO: 372897 - RNA, 32 nt, Homo Sapiens
gaucugggauacuguucugcugcugaucacga

SEQ ID NO: 372898 - RNA, 32 nt, Homo Sapiens
uucccccuaaaaugucauaagagcacugaaga

SEQ ID NO: 372899 - RNA, 32 nt, Homo Sapiens
uagauuugugguguuugaugccacuaaaugua

SEQ ID NO: 372900 - RNA, 32 nt, Homo Sapiens
ugagacuuggaccuuccccagccccugggccc

SEQ ID NO: 372901 - RNA, 32 nt, Homo Sapiens
ggaugcaaaugaacaaggacugagcagcccga

SEQ ID NO: 372902 - RNA, 32 nt, Homo Sapiens
gcagcaggggccugggccauagcugggggagg

SEQ ID NO: 372903 - RNA, 32 nt, Homo Sapiens
aaucagugguauauauugagaaugucagucau

SEQ ID NO: 372904 - RNA, 29 nt, Homo Sapiens
auauguaaauuaaacaugaauacauucuc

SEQ ID NO: 372905 - RNA, 32 nt, Homo Sapiens
uagaaucccagcugcuggcucgggcugcaguu

SEQ ID NO: 372906 - RNA, 32 nt, Homo Sapiens
aaaauguuuuucugccagggagcuugaaaguu

SEQ ID NO: 372907 - RNA, 32 nt, Homo Sapiens
aagcugggaggggucuccugcugggguccuga

SEQ ID NO: 372908 - RNA, 32 nt, Homo Sapiens
caggcuuccugccuagcuauauauuacguugu

SEQ ID NO: 372909 - RNA, 30 nt, Homo Sapiens
auucugaucucacgaaacaagaguaaugau

SEQ ID NO: 372910 - RNA, 32 nt, Homo Sapiens
uuuuaaaauagaaaacaaaacugacuucugua

SEQ ID NO: 372911 - RNA, 32 nt, Homo Sapiens
ugugccaucuucuguagccccuccgcucuacu

SEQ ID NO: 372912 - RNA, 32 nt, Homo Sapiens
agagagcuguauaaaaucauaccaguagggua

SEQ ID NO: 372913 - RNA, 32 nt, Homo Sapiens
uuaauuuguucgcuuuugcuucucuuuggucu

SEQ ID NO: 372914 - RNA, 32 nt, Homo Sapiens
uuuguuugauucauguuuccacccuuccucuu

SEQ ID NO: 372915 - RNA, 31 nt, Homo Sapiens
agagaauguaacauauugcuguaucguuuga

SEQ ID NO: 372916 - RNA, 32 nt, Homo Sapiens
gcuuuguugggggccuggccacuuccuugcuu

SEQ ID NO: 372917 - RNA, 32 nt, Homo Sapiens
ggacaggcggggguggucuggagugcgcugca

SEQ ID NO: 372918 - RNA, 31 nt, Homo Sapiens
uacguccaagcccgccugcccuguguguugg

SEQ ID NO: 372919 - RNA, 32 nt, Homo Sapiens
cucucccugacccaggccccaggaccuccagg

SEQ ID NO: 372920 - RNA, 32 nt, Homo Sapiens
cagggcggcgcggcgucggucccgggagcaga

SEQ ID NO: 372921 - RNA, 30 nt, Homo Sapiens
auuggucaguucggcggugacguggggucg

SEQ ID NO: 372922 - RNA, 32 nt, Homo Sapiens
uguuccuccaaccccaggaggccaggcaagca

SEQ ID NO: 372923 - RNA, 32 nt, Homo Sapiens
aagaauuaaagaguuaaauaaaaaauaaacug

SEQ ID NO: 372924 - RNA, 32 nt, Homo Sapiens
uaaauuuguuaaucaccaguaagauuugaugu

SEQ ID NO: 372925 - RNA, 32 nt, Homo Sapiens
gagcgcagcgauggccgggcgagggggcagcg

SEQ ID NO: 372926 - RNA, 32 nt, Homo Sapiens
ucauggaaauaguugaugcagaugagaaaguu

SEQ ID NO: 372927 - RNA, 32 nt, Homo Sapiens
caaugagucaauugcagaugaugcuauaacac

SEQ ID NO: 372928 - RNA, 32 nt, Homo Sapiens
agaauuuuuguauuuuaauuauagagacgggg

SEQ ID NO: 372929 - RNA, 32 nt, Homo Sapiens
ggccggaggcagccuugagucccgagaccaaa

SEQ ID NO: 372930 - RNA, 32 nt, Homo Sapiens
gauguugcgcgagguucuccgcucguagcagu

SEQ ID NO: 372931 - RNA, 32 nt, Homo Sapiens
agguccgcgggccucgcagaucguagcccggg

SEQ ID NO: 372932 - RNA, 32 nt, Homo Sapiens
cuuccugagacggggccagcggaggcagagcc

SEQ ID NO: 372933 - RNA, 32 nt, Homo Sapiens
cuguaagauaauguugcuuucuuaucccagug

SEQ ID NO: 372934 - RNA, 32 nt, Homo Sapiens
auagccucuuagcagagccaaaagccagcaga

SEQ ID NO: 372935 - RNA, 32 nt, Homo Sapiens
ggcuaucauuccaugauuacaaauaggugguu

SEQ ID NO: 372936 - RNA, 32 nt, Homo Sapiens
ggaaacaccuccagcccgcgaccuccucccac

SEQ ID NO: 372937 - RNA, 32 nt, Homo Sapiens
gacgacugaaaccaccugggggcaggacccac

SEQ ID NO: 372938 - RNA, 32 nt, Homo Sapiens
cuccccaagcugcugcccuugcugugggaagg

SEQ ID NO: 372939 - RNA, 32 nt, Homo Sapiens
cuggccugcagcucgcgccgccauggacgcug

SEQ ID NO: 372940 - RNA, 32 nt, Homo Sapiens
uaaaacagauucuaagcaaacaguccaaucag

SEQ ID NO: 372941 - RNA, 32 nt, Homo Sapiens
aggcagccuccucagcuguggaguccagcagu

SEQ ID NO: 372942 - RNA, 32 nt, Homo Sapiens
gugaagugguuuuugcaugcugauucaucuuc

SEQ ID NO: 372943 - RNA, 32 nt, Homo Sapiens
cuaagggguuuuacuagcaagcauccuggcug

SEQ ID NO: 372944 - RNA, 32 nt, Homo Sapiens
uaaauuucuaugcacaaggaauaaagggccua

SEQ ID NO: 372945 - RNA, 30 nt, Homo Sapiens
cccugcacgguuccgauuggcugaguccca

SEQ ID NO: 372946 - RNA, 32 nt, Homo Sapiens
cccgcccugggcccgcugucgccggugcgacg

SEQ ID NO: 372947 - RNA, 29 nt, Homo Sapiens
aguuucugggaccucaguuuuaucauuuu

SEQ ID NO: 372948 - RNA, 32 nt, Homo Sapiens
gaccuauagaaagcugcugccccagcuaaggc

SEQ ID NO: 372949 - RNA, 32 nt, Homo Sapiens
uuuauauguagugaaaaucacuauuuguagaa

SEQ ID NO: 372950 - RNA, 32 nt, Homo Sapiens
ccuuggaaaauauuuuucuuacuuuaccaagg

SEQ ID NO: 372951 - RNA, 32 nt, Homo Sapiens
gcggcgacccuggugaggagcgcggcgcggga

SEQ ID NO: 372952 - RNA, 32 nt, Homo Sapiens
uuuguaaucagaauaacaccaccuggcaggga

SEQ ID NO: 372953 - RNA, 30 nt, Homo Sapiens
ugggggcuggacuggccuggucuggcuggg

SEQ ID NO: 372954 - RNA, 32 nt, Homo Sapiens
uccugcugcccccaagacaugcaggggcccug

SEQ ID NO: 372955 - RNA, 32 nt, Homo Sapiens
auguaacaugauuuuucuuuuuuaaaacagcc

SEQ ID NO: 372956 - RNA, 30 nt, Homo Sapiens
cugggcuuugcucgcucuuccgaagcagcu

SEQ ID NO: 372957 - RNA, 32 nt, Homo Sapiens
gucccacgccgucugcacgugccugugccuca

SEQ ID NO: 372958 - RNA, 32 nt, Homo Sapiens
cauuaugaagcagaaauuaaaaauagccaaga

SEQ ID NO: 372959 - RNA, 32 nt, Homo Sapiens
uuucauccuguaaaaguaagcauguagaagga

SEQ ID NO: 372960 - RNA, 32 nt, Homo Sapiens
ucuuaugcaugguuuauuccucuggcuuggau

SEQ ID NO: 372961 - RNA, 32 nt, Homo Sapiens
acgcagagccgccgccgccgccgcccuggguc

SEQ ID NO: 372962 - RNA, 32 nt, Homo Sapiens
auuacagaugucauuucccaguuucuugcuua

SEQ ID NO: 372963 - RNA, 32 nt, Homo Sapiens
cugaucaggaggagguucagcuggcugauaca

SEQ ID NO: 372964 - RNA, 32 nt, Homo Sapiens
cggagcucauuacugccuucccucccagggag

SEQ ID NO: 372965 - RNA, 32 nt, Homo Sapiens
ugaaguugcugccucccugugccuucuccagg

SEQ ID NO: 372966 - RNA, 32 nt, Homo Sapiens
uauuucugugagaaaguucacuuuuccagugg

SEQ ID NO: 372967 - RNA, 32 nt, Homo Sapiens
guugugcaauuuguggcaaggcuggcccagcu

SEQ ID NO: 372968 - RNA, 32 nt, Homo Sapiens
ccucccuccacccgccccccagccccgggacc

SEQ ID NO: 372969 - RNA, 32 nt, Homo Sapiens
ugggucaaacugugucccccaaauccaucugc

SEQ ID NO: 372970 - RNA, 32 nt, Homo Sapiens
gcuaucgcgcacggucccacgaccccaccccg

SEQ ID NO: 372971 - RNA, 32 nt, Homo Sapiens
aaguucuuguaaucauuauuuuagacaagcuu

SEQ ID NO: 372972 - RNA, 32 nt, Homo Sapiens
agcgcggggccugagcagcagcagccgccacu

SEQ ID NO: 372973 - RNA, 32 nt, Homo Sapiens
augugugcaacaccuuccagaaaaauggggag

SEQ ID NO: 372974 - RNA, 32 nt, Homo Sapiens
uagucuguuauccauggcuggcacuucacuua

SEQ ID NO: 372975 - RNA, 32 nt, Homo Sapiens
gcacaugguaauaaaaaguauaaauuauaaau

SEQ ID NO: 372976 - RNA, 32 nt, Homo Sapiens
aaagguaaaaaguacauuuguauauuacauau

SEQ ID NO: 372977 - RNA, 32 nt, Homo Sapiens
gauuuugccucccaacaccauuucuuuuuaaa

SEQ ID NO: 372978 - RNA, 32 nt, Homo Sapiens
accuaggguccaagguuaagccauaucccagc

SEQ ID NO: 372979 - RNA, 32 nt, Homo Sapiens
gggcauagacgagcgccccgggacgcagcuag

SEQ ID NO: 372980 - RNA, 32 nt, Homo Sapiens
cuguccgcugucucccuccugauucuaaaaug

SEQ ID NO: 372981 - RNA, 32 nt, Homo Sapiens
ugcugaucuguuaaauucuuagugaaguuucc

SEQ ID NO: 372982 - RNA, 32 nt, Homo Sapiens
gacugcccgggcgcaggauccaggcgcugccc

SEQ ID NO: 372983 - RNA, 32 nt, Homo Sapiens
gggcagcgacaucagcuuggugggcagccacc

SEQ ID NO: 372984 - RNA, 32 nt, Homo Sapiens
gcugugggcagguuagcguggagcuggguucu

SEQ ID NO: 372985 - RNA, 32 nt, Homo Sapiens
uuucaguacuuugaggcgacaacuuucaagua

SEQ ID NO: 372986 - RNA, 32 nt, Homo Sapiens
aagccucgcgcccuuccgcggagacucccagg

SEQ ID NO: 372987 - RNA, 32 nt, Homo Sapiens
aucugaggccgggaguggcaucugaggccagg

SEQ ID NO: 372988 - RNA, 32 nt, Homo Sapiens
auucuuggaugcagaagugcugagaugagcac

SEQ ID NO: 372989 - RNA, 32 nt, Homo Sapiens
gcgccugcugcaagcaucugcccgcaggcccc

SEQ ID NO: 372990 - RNA, 32 nt, Homo Sapiens
uagcaucauaaaugaagcuggagcugggagau

SEQ ID NO: 372991 - RNA, 32 nt, Homo Sapiens
caucuuguguuuuccagaaaauaaaaacagaa

SEQ ID NO: 372992 - RNA, 32 nt, Homo Sapiens
agugccagccccugcuggcuggugccugagcc

SEQ ID NO: 372993 - RNA, 32 nt, Homo Sapiens
gauauuguaagaaagaaagaaauacacaaaag

SEQ ID NO: 372994 - RNA, 32 nt, Homo Sapiens
cccggcccaucccuuagccccgcggcggccgu

SEQ ID NO: 372995 - RNA, 32 nt, Homo Sapiens
guuaauagggauuuuuucagcuuauuuugguu

SEQ ID NO: 372996 - RNA, 32 nt, Homo Sapiens
caaugccucauuucuuuuuucacuuaaucgua

SEQ ID NO: 372997 - RNA, 32 nt, Homo Sapiens
guuccaaaaggcuauuucaaaggaaccagccc

SEQ ID NO: 372998 - RNA, 32 nt, Homo Sapiens
uccucuuugacugagcaccgaggggcaguugg

SEQ ID NO: 372999 - RNA, 32 nt, Homo Sapiens
uaaucuaagaauuuauaugaaagauuuguauc

SEQ ID NO: 373000 - RNA, 32 nt, Homo Sapiens
cccaccgcaggcccgcggcgcccucugcaggc

SEQ ID NO: 373001 - RNA, 32 nt, Homo Sapiens
auaauuacauucaaaguauacuuuauuucuug

SEQ ID NO: 373002 - RNA, 32 nt, Homo Sapiens
cuucuaaggaagccagguuguuagaauuguua

SEQ ID NO: 373003 - RNA, 32 nt, Homo Sapiens
ucuuaaagguaaagacacgaaaacacuuccuc

SEQ ID NO: 373004 - RNA, 32 nt, Homo Sapiens
guuuaucuaauaaaugaauugaagauaaaauu

SEQ ID NO: 373005 - RNA, 32 nt, Homo Sapiens
caguaggauaaacaaccgacguucuucagcgu

SEQ ID NO: 373006 - RNA, 32 nt, Homo Sapiens
ugagcggcgaaagccgggagggcgagcgagag

SEQ ID NO: 373007 - RNA, 32 nt, Homo Sapiens
aaacuaggguuuagucaucauuugugcuuccu

SEQ ID NO: 373008 - RNA, 32 nt, Homo Sapiens
gaucucccugaacauuuuuaagguuuuacuuu

SEQ ID NO: 373009 - RNA, 32 nt, Homo Sapiens
acugaaauugguucaucccagugaccccgcgu

SEQ ID NO: 373010 - RNA, 32 nt, Homo Sapiens
acaggugugagccacggcacccagccuagcuc

SEQ ID NO: 373011 - RNA, 32 nt, Homo Sapiens
aagcugcguggcggccugaaugagggccguga

SEQ ID NO: 373012 - RNA, 32 nt, Homo Sapiens
cguccaucgaccugcgcgaccgucagggcugc

SEQ ID NO: 373013 - RNA, 32 nt, Homo Sapiens
ccuucagauaaaggauaacuuuuuacgguuuu

SEQ ID NO: 373014 - RNA, 32 nt, Homo Sapiens
gggucucccuccccugcccuuagcagcucugc

SEQ ID NO: 373015 - RNA, 32 nt, Homo Sapiens
uggccgcacuugcaggaaaagugcaacuuaaa

SEQ ID NO: 373016 - RNA, 32 nt, Homo Sapiens
aaaagaggcagacguguuucugugcaacauca

SEQ ID NO: 373017 - RNA, 32 nt, Homo Sapiens
uuguuucucccucuucucuuuguucgccacug

SEQ ID NO: 373018 - RNA, 32 nt, Homo Sapiens
auuuguauuuuauauuguuuuaucuaucuguc

SEQ ID NO: 373019 - RNA, 32 nt, Homo Sapiens
guaugguuucccuguucuacuauacauaacgu

SEQ ID NO: 373020 - RNA, 32 nt, Homo Sapiens
gucagcugcuaagagcaggaagaguccgagcg

SEQ ID NO: 373021 - RNA, 32 nt, Homo Sapiens
ggacuaauauccagaaucuauaaggagcucaa

SEQ ID NO: 373022 - RNA, 32 nt, Homo Sapiens
ugauuccaugaugucugcccuccaccucucug

SEQ ID NO: 373023 - RNA, 32 nt, Homo Sapiens
uuucuuaucuucugugcuuuuggucccuggaa

SEQ ID NO: 373024 - RNA, 32 nt, Homo Sapiens
augucagaacugccaaaggauaccaagugauc

SEQ ID NO: 373025 - RNA, 29 nt, Homo Sapiens
ucaaauauauguaucaucaaagguugcau

SEQ ID NO: 373026 - RNA, 27 nt, Homo Sapiens
gccaccgccuucuuccgccggccccgc

SEQ ID NO: 373027 - RNA, 32 nt, Homo Sapiens
agaggcaaaaauauuguuaaaaacuagacucu

SEQ ID NO: 373028 - RNA, 32 nt, Homo Sapiens
gucggugggaugggaauggggcguggggcugg

SEQ ID NO: 373029 - RNA, 32 nt, Homo Sapiens
gguugggauuaccggcaugagccacugcacca

SEQ ID NO: 373030 - RNA, 32 nt, Homo Sapiens
gaguggcuuccaugugguuucauuccagcaug

SEQ ID NO: 373031 - RNA, 32 nt, Homo Sapiens
ucucaccuuucuuuccuguuucugggacucug

SEQ ID NO: 373032 - RNA, 32 nt, Homo Sapiens
ccuauccuaccccaauccugaccuccaagggg

SEQ ID NO: 373033 - RNA, 32 nt, Homo Sapiens
cugcauuuggugccuggcaaauuacagugcuu

SEQ ID NO: 373034 - RNA, 32 nt, Homo Sapiens
gacgucucccauucugaacugccguguuuugg

SEQ ID NO: 373035 - RNA, 32 nt, Homo Sapiens
ugaaaugguagaauaugugagauacaaauauu

SEQ ID NO: 373036 - RNA, 32 nt, Homo Sapiens
ggccucccggugcgaccccggcugcgacucgg

SEQ ID NO: 373037 - RNA, 32 nt, Homo Sapiens
ugaguggggucuuuaagaguuuugguggcucu

SEQ ID NO: 373038 - RNA, 29 nt, Homo Sapiens
ggggggugggguuauuguuuaacgaguac

SEQ ID NO: 373039 - RNA, 32 nt, Homo Sapiens
cuugaugacaagaaacaaaacgcccuucauua

SEQ ID NO: 373040 - RNA, 32 nt, Homo Sapiens
uugauuacugaauccauacacucaaacuauag

SEQ ID NO: 373041 - RNA, 32 nt, Homo Sapiens
auuugugaauaucaucucugguuaaugauuac

SEQ ID NO: 373042 - RNA, 32 nt, Homo Sapiens
uuuuuguugcuguuguucagaaguuguuagug

SEQ ID NO: 373043 - RNA, 32 nt, Homo Sapiens
uggaggccucaccgugagaccuuacaaagccg

SEQ ID NO: 373044 - RNA, 32 nt, Homo Sapiens
cagcacagugagguguuuuaucaugaggaugu

SEQ ID NO: 373045 - RNA, 32 nt, Homo Sapiens
guagaugcauauaaaggguggaaugggagcca

SEQ ID NO: 373046 - RNA, 32 nt, Homo Sapiens
ggucaguccccagcccugugggcccccaccuc

SEQ ID NO: 373047 - RNA, 32 nt, Homo Sapiens
ugugugugcauuucuuuuuuauuauuauuaaa

SEQ ID NO: 373048 - RNA, 32 nt, Homo Sapiens
gaugugccuuucccugcaguccuuccaugugg

SEQ ID NO: 373049 - RNA, 32 nt, Homo Sapiens
aaaggggaggagcugcuguaguagcaagggug

SEQ ID NO: 373050 - RNA, 32 nt, Homo Sapiens
caagaagagacagaacuguauuaaacuuaucu

SEQ ID NO: 373051 - RNA, 32 nt, Homo Sapiens
auggugaagauaagugacaagcacacauuuuu

SEQ ID NO: 373052 - RNA, 32 nt, Homo Sapiens
aagauacacuggguaaucacuaacccauuauu

SEQ ID NO: 373053 - RNA, 32 nt, Homo Sapiens
uucucaagaccaacagaagauuuuuucaguua

SEQ ID NO: 373054 - RNA, 31 nt, Homo Sapiens
agugauuugugcagccaaggacacacagcaa

SEQ ID NO: 373055 - RNA, 32 nt, Homo Sapiens
gccucuuuuuugcugcuguuuugcuauucuua

SEQ ID NO: 373056 - RNA, 32 nt, Homo Sapiens
accagcagcuccuggggacgugcucaguggau

SEQ ID NO: 373057 - RNA, 29 nt, Homo Sapiens
cugagguaugguuguuggacgaggccgau

SEQ ID NO: 373058 - RNA, 32 nt, Homo Sapiens
gaacguguguggggcggguguggggcgggugu

SEQ ID NO: 373059 - RNA, 32 nt, Homo Sapiens
cucauaaaaguacugcaaggcaggugauaaua

SEQ ID NO: 373060 - RNA, 32 nt, Homo Sapiens
uuccuggcgagggugacuaggagccggcgaau

SEQ ID NO: 373061 - RNA, 32 nt, Homo Sapiens
ucuaguguaagauaagagaacuggguaggccu

SEQ ID NO: 373062 - RNA, 32 nt, Homo Sapiens
ucugugaucaaacuuaaaagucauugccauuc

SEQ ID NO: 373063 - RNA, 32 nt, Homo Sapiens
cggcggagaccccugugcggugcggagggggc

SEQ ID NO: 373064 - RNA, 32 nt, Homo Sapiens
auucuauuaaagaaaaucauuaggaaguggua

SEQ ID NO: 373065 - RNA, 32 nt, Homo Sapiens
cagaguggagcggccgccggagaugccugacg

SEQ ID NO: 373066 - RNA, 32 nt, Homo Sapiens
gagugggagcagcacaugcgcgugcuguggca

SEQ ID NO: 373067 - RNA, 32 nt, Homo Sapiens
ugccaucaaaaauaaggauuaauuuagaagau

SEQ ID NO: 373068 - RNA, 32 nt, Homo Sapiens
uaccuaagaauaguuaauaaaaaacugagugu

SEQ ID NO: 373069 - RNA, 32 nt, Homo Sapiens
ugauggagacguauaaauucuaccuccaauaa

SEQ ID NO: 373070 - RNA, 32 nt, Homo Sapiens
agacugccauucuccuugcagacuuggcucag

SEQ ID NO: 373071 - RNA, 32 nt, Homo Sapiens
uguuugugauacaguauuuguaaaauugauau

SEQ ID NO: 373072 - RNA, 32 nt, Homo Sapiens
ggaggcagauccaagaggcuuccuaagucaga

SEQ ID NO: 373073 - RNA, 32 nt, Homo Sapiens
gguuccagcuaucuaagauacacacacaacca

SEQ ID NO: 373074 - RNA, 32 nt, Homo Sapiens
guuaggucuugugcuuuuuuuuccuggccacu

SEQ ID NO: 373075 - RNA, 32 nt, Homo Sapiens
uuaugucuuaucuaacucuauaguaggcaugu

SEQ ID NO: 373076 - RNA, 32 nt, Homo Sapiens
aaaaagaagaaccuguucuauguuaacuaccc

SEQ ID NO: 373077 - RNA, 32 nt, Homo Sapiens
ccggcccaguguuuccucagcucauccgcccu

SEQ ID NO: 373078 - RNA, 32 nt, Homo Sapiens
gguaauuaaaagacuccacauaaguccauuaa

SEQ ID NO: 373079 - RNA, 32 nt, Homo Sapiens
ugcucucggagccccagccggcuccgcccgcu

SEQ ID NO: 373080 - RNA, 32 nt, Homo Sapiens
caagcaguuuccugcuucagacuuccaaguag

SEQ ID NO: 373081 - RNA, 32 nt, Homo Sapiens
cacccuugccccaguccggcccggccccuccc

SEQ ID NO: 373082 - RNA, 32 nt, Homo Sapiens
auauagagacaguaaacccugggguugaagau

SEQ ID NO: 373083 - RNA, 32 nt, Homo Sapiens
auggcugcguguccugccccacaugagcuggg

SEQ ID NO: 373084 - RNA, 32 nt, Homo Sapiens
aacgacuugggaaggcccuuucgggguaauag

SEQ ID NO: 373085 - RNA, 32 nt, Homo Sapiens
aauuaauauguaacuuacagcauuccagaggu

SEQ ID NO: 373086 - RNA, 32 nt, Homo Sapiens
cuguuaagccgcccugggggccccagaaccag

SEQ ID NO: 373087 - RNA, 32 nt, Homo Sapiens
auauuuugauuguuuucuuaacuuucuccuua

SEQ ID NO: 373088 - RNA, 32 nt, Homo Sapiens
cugagcccacacccucucggagcgggguucca

SEQ ID NO: 373089 - RNA, 32 nt, Homo Sapiens
ccacuccccuuccucauccccagcugugucuc

SEQ ID NO: 373090 - RNA, 32 nt, Homo Sapiens
acuauuugaauagaaauguguauguauaauau

SEQ ID NO: 373091 - RNA, 32 nt, Homo Sapiens
uugaggugcgccugggguccagauuggccgau

SEQ ID NO: 373092 - RNA, 32 nt, Homo Sapiens
ucugcuugaggacgucugcagcuccuccuaca

SEQ ID NO: 373093 - RNA, 32 nt, Homo Sapiens
uuuaacaaaacaaaaaggagaaaaaguaauaa

SEQ ID NO: 373094 - RNA, 32 nt, Homo Sapiens
ggcugugcugucagcggggccuggcgguggaa

SEQ ID NO: 373095 - RNA, 32 nt, Homo Sapiens
gcagcucugcccgcaccuccaacgcgaagccc

SEQ ID NO: 373096 - RNA, 32 nt, Homo Sapiens
gcuguaccaauauccauggaggaauaugggag

SEQ ID NO: 373097 - RNA, 30 nt, Homo Sapiens
ccucccuguaaaaugggggaaauaaugccu

SEQ ID NO: 373098 - RNA, 32 nt, Homo Sapiens
ucuugcccacccagaagaaggugcagggggcc

SEQ ID NO: 373099 - RNA, 32 nt, Homo Sapiens
caucaggggcaggcccugggaccgccugggaa

SEQ ID NO: 373100 - RNA, 31 nt, Homo Sapiens
caaauggggaauaaaaagauuuugugucaac

SEQ ID NO: 373101 - RNA, 32 nt, Homo Sapiens
uuuguuucuccuguuucccuguguggggaggg

SEQ ID NO: 373102 - RNA, 32 nt, Homo Sapiens
cauguuucuggguuggauuugcuguucuugcc

SEQ ID NO: 373103 - RNA, 32 nt, Homo Sapiens
uaugaggauggucaggugggcgaugccaacau

SEQ ID NO: 373104 - RNA, 32 nt, Homo Sapiens
uucaugcacgaggcccuugaaaauguugacag

SEQ ID NO: 373105 - RNA, 32 nt, Homo Sapiens
agcagcuaugaccgccacccagcccucccgcu

SEQ ID NO: 373106 - RNA, 30 nt, Homo Sapiens
ggcccggccgccagcgcgggucuuguccau

SEQ ID NO: 373107 - RNA, 32 nt, Homo Sapiens
uuugggacuauguugggaccguacaggugaau

SEQ ID NO: 373108 - RNA, 32 nt, Homo Sapiens
aguuuguuucuuuuuauuaccaaguacuauuu

SEQ ID NO: 373109 - RNA, 32 nt, Homo Sapiens
cugcagcucugugccagcuugggauccaaccc

SEQ ID NO: 373110 - RNA, 32 nt, Homo Sapiens
uacagaguaacaaaaaauaaagaauuuaaugu

SEQ ID NO: 373111 - RNA, 32 nt, Homo Sapiens
ccuuggggaccagcuugucagaggguagcccu

SEQ ID NO: 373112 - RNA, 32 nt, Homo Sapiens
aacuguucgaucaaaauaaaaguucuauucug

SEQ ID NO: 373113 - RNA, 32 nt, Homo Sapiens
acagaauucugguaacccgggaccacagggcc

SEQ ID NO: 373114 - RNA, 32 nt, Homo Sapiens
uacucuuguaaaucauagaagauguaucauaa

SEQ ID NO: 373115 - RNA, 32 nt, Homo Sapiens
agcagaccuggauucuaguucuggcuuuguca

SEQ ID NO: 373116 - RNA, 32 nt, Homo Sapiens
ucaaauaucugugccaugugggagcacacgag

SEQ ID NO: 373117 - RNA, 32 nt, Homo Sapiens
ugcacgcgugugcaggagcggcagauggggag

SEQ ID NO: 373118 - RNA, 29 nt, Homo Sapiens
uguaccauauguaugagccauuugcugcu

SEQ ID NO: 373119 - RNA, 32 nt, Homo Sapiens
gccuccccaagcagagcucaagccaaacgcuu

SEQ ID NO: 373120 - RNA, 32 nt, Homo Sapiens
ccaucgcuagaaaacuaaggauucgguguugg

SEQ ID NO: 373121 - RNA, 32 nt, Homo Sapiens
gcuugcccagcugcugccugggcccccauucu

SEQ ID NO: 373122 - RNA, 32 nt, Homo Sapiens
aucaucccauucuuguucacucuucagucauc

SEQ ID NO: 373123 - RNA, 32 nt, Homo Sapiens
ucaggagcugucugggguguugaugguggaug

SEQ ID NO: 373124 - RNA, 32 nt, Homo Sapiens
caaaccuaauuguccuggucuuaaguucugca

SEQ ID NO: 373125 - RNA, 32 nt, Homo Sapiens
aauuacauucauuguuuguuuuggccaaauaa

SEQ ID NO: 373126 - RNA, 32 nt, Homo Sapiens
uaauuauguauuaccagcaggguguuuuuaac

SEQ ID NO: 373127 - RNA, 32 nt, Homo Sapiens
cuucccgguaccggcaggccgcggcgggagcu

SEQ ID NO: 373128 - RNA, 32 nt, Homo Sapiens
uuugacaaccugcacaagacaagcagccuaaa

SEQ ID NO: 373129 - RNA, 32 nt, Homo Sapiens
uuuaugguuucccccuucuacauuucuuagac

SEQ ID NO: 373130 - RNA, 32 nt, Homo Sapiens
ccacccugcccccagcagcagccguccaucgu

SEQ ID NO: 373131 - RNA, 32 nt, Homo Sapiens
agggcagcgcgugcauuagccagucgccacug

SEQ ID NO: 373132 - RNA, 32 nt, Homo Sapiens
cagagaucaagagcuucucuugcaucuucuuc

SEQ ID NO: 373133 - RNA, 32 nt, Homo Sapiens
uaaaaaugcuaaaauaaaaauucagcuuauga

SEQ ID NO: 373134 - RNA, 32 nt, Homo Sapiens
uguguuuaauuucauauguuuucauguaauga

SEQ ID NO: 373135 - RNA, 32 nt, Homo Sapiens
guuuccgcuuugcuugcuuguuuaacaaaccc

SEQ ID NO: 373136 - RNA, 32 nt, Homo Sapiens
cucucuggcuucacauuucucaucacuaguug

SEQ ID NO: 373137 - RNA, 32 nt, Homo Sapiens
ccacaauggcuuuucucccaacuuuuuguuuu

SEQ ID NO: 373138 - RNA, 32 nt, Homo Sapiens
uucaguaaggucauauguggacaguagcuggc

SEQ ID NO: 373139 - RNA, 32 nt, Homo Sapiens
ugcuuuaauaaacagcaaaccaauaucuagga

SEQ ID NO: 373140 - RNA, 32 nt, Homo Sapiens
cuguauccacccaaaugucaccgauuucuucc

SEQ ID NO: 373141 - RNA, 32 nt, Homo Sapiens
acucuccuuuuuucuucagaucugcuccuggg

SEQ ID NO: 373142 - RNA, 32 nt, Homo Sapiens
gugcuuuaauaaagcuuucucacuugucaaaa

SEQ ID NO: 373143 - RNA, 32 nt, Homo Sapiens
aggagggacuaaaagagagggcagagucugga

SEQ ID NO: 373144 - RNA, 32 nt, Homo Sapiens
cuuuuuccuuuuucuuuuuucaccccugcccc

SEQ ID NO: 373145 - RNA, 32 nt, Homo Sapiens
uuggauguaccuaauuugauaauuaaaacaaa

SEQ ID NO: 373146 - RNA, 32 nt, Homo Sapiens
uggauuugauaaacuagugccuaugauuuuaa

SEQ ID NO: 373147 - RNA, 32 nt, Homo Sapiens
uguguauaauuuccugguaaggcuaacuccug

SEQ ID NO: 373148 - RNA, 32 nt, Homo Sapiens
ucaucucucuugcauuuucuguucuuuaauuu

SEQ ID NO: 373149 - RNA, 32 nt, Homo Sapiens
uuuuccaaacuuaggauauaagagggcuuuuu

SEQ ID NO: 373150 - RNA, 32 nt, Homo Sapiens
cccgcuuucauguuacuguugcagcuugugcu

SEQ ID NO: 373151 - RNA, 32 nt, Homo Sapiens
aacucccaauacuggcucugucugaguaagaa

SEQ ID NO: 373152 - RNA, 32 nt, Homo Sapiens
ggaccugugcacaugccuggaauugagagaca

SEQ ID NO: 373153 - RNA, 32 nt, Homo Sapiens
caacauguggagguggcugguucccaugaacg

SEQ ID NO: 373154 - RNA, 32 nt, Homo Sapiens
uccuaaacagugaaaauucauccaccaaauau

SEQ ID NO: 373155 - RNA, 32 nt, Homo Sapiens
ggacagccgccucaggccccagcucgaagcug

SEQ ID NO: 373156 - RNA, 32 nt, Homo Sapiens
cucccgucaggagagaagccgcgucuguggga

SEQ ID NO: 373157 - RNA, 32 nt, Homo Sapiens
gacuuuugauucaagaagcuuccuccaggcgg

SEQ ID NO: 373158 - RNA, 32 nt, Homo Sapiens
ccaggcuggugccucaggccuccccucuagua

SEQ ID NO: 373159 - RNA, 32 nt, Homo Sapiens
gcccugugcacgcacgcacacacacacacaca

SEQ ID NO: 373160 - RNA, 32 nt, Homo Sapiens
agagauuuaaacauucauuugauucagagcua

SEQ ID NO: 373161 - RNA, 32 nt, Homo Sapiens
gcucugaccguguggguggugauccuugucag

SEQ ID NO: 373162 - RNA, 32 nt, Homo Sapiens
ugaagaaaauauccagaaauuauuuucauuuu

SEQ ID NO: 373163 - RNA, 32 nt, Homo Sapiens
gcucggcgccaaccaccgcgggccucccagcc

SEQ ID NO: 373164 - RNA, 32 nt, Homo Sapiens
acgagcgggagcgcggagcagcagccucugcu

SEQ ID NO: 373165 - RNA, 32 nt, Homo Sapiens
ccaauaguguuuuuauuacuuucaucugaaac

SEQ ID NO: 373166 - RNA, 32 nt, Homo Sapiens
guggaugcgcggaggagcuagccugaaggauu

SEQ ID NO: 373167 - RNA, 32 nt, Homo Sapiens
ggaagggggugcccugccacccugagaacaau

SEQ ID NO: 373168 - RNA, 32 nt, Homo Sapiens
gcccgaggcaccaguguccuccccucaaggac

SEQ ID NO: 373169 - RNA, 32 nt, Homo Sapiens
guugcugugaccuggugacagaaauggaaacc

SEQ ID NO: 373170 - RNA, 32 nt, Homo Sapiens
ugacacucuucccuccucccaccugccaccag

SEQ ID NO: 373171 - RNA, 32 nt, Homo Sapiens
ucacugugccagcaugcuuccuccacaguaac

SEQ ID NO: 373172 - RNA, 32 nt, Homo Sapiens
cauuuuaaaaaaugcaccuuuuuauuuauuua

SEQ ID NO: 373173 - RNA, 32 nt, Homo Sapiens
gauuuucauuuucuacuaauuuucauguauca

SEQ ID NO: 373174 - RNA, 32 nt, Homo Sapiens
gcagcagagaauaaaauaucccuuugaacuug

SEQ ID NO: 373175 - RNA, 32 nt, Homo Sapiens
uuuuuauaccugauuugucacucgugacagua

SEQ ID NO: 373176 - RNA, 32 nt, Homo Sapiens
ccucgucguucuggaccugagccagaaucccu

SEQ ID NO: 373177 - RNA, 32 nt, Homo Sapiens
cgccgccgcccgggacagcccggagaaacucu

SEQ ID NO: 373178 - RNA, 32 nt, Homo Sapiens
gaaugaaauuugauaaagcaaauauaaaugag

SEQ ID NO: 373179 - RNA, 32 nt, Homo Sapiens
gucaagaagagugaagagagugccaaagcgga

SEQ ID NO: 373180 - RNA, 32 nt, Homo Sapiens
aauagcaaauauauuuuauaaagugaaaaucc

SEQ ID NO: 373181 - RNA, 32 nt, Homo Sapiens
cagaguuacacucgucucuuaauagcugccua

SEQ ID NO: 373182 - RNA, 30 nt, Homo Sapiens
acugcgggcaggcgcgaguucgcgcagcac

SEQ ID NO: 373183 - RNA, 32 nt, Homo Sapiens
cuaaauuucaugugcaaauaauuauauauaaa

SEQ ID NO: 373184 - RNA, 32 nt, Homo Sapiens
ccgccucccacccagaucgcgguauauagaga

SEQ ID NO: 373185 - RNA, 32 nt, Homo Sapiens
cugcacccaccgcugacccccggaguccuguc

SEQ ID NO: 373186 - RNA, 32 nt, Homo Sapiens
gggcuggguguucacgugugucugugucaugg

SEQ ID NO: 373187 - RNA, 32 nt, Homo Sapiens
gaaguggccuccuggggggccaggccacgagg

SEQ ID NO: 373188 - RNA, 32 nt, Homo Sapiens
cacccagaggcuggcuuuugugcuuuggguuu

SEQ ID NO: 373189 - RNA, 32 nt, Homo Sapiens
ugugguggucugcauugccgggcccccuggcu

SEQ ID NO: 373190 - RNA, 32 nt, Homo Sapiens
gcaaggagggcuuaaaagaaaagcagaaaucc

SEQ ID NO: 373191 - RNA, 32 nt, Homo Sapiens
gagcagcgacccgaaccagccccgugccagcc

SEQ ID NO: 373192 - RNA, 32 nt, Homo Sapiens
guuccaacaaaguaauaaauuccaacaaagca

SEQ ID NO: 373193 - RNA, 32 nt, Homo Sapiens
uugcuuuugaacagaacccuauauuacucucc

SEQ ID NO: 373194 - RNA, 32 nt, Homo Sapiens
ggggagcccagcugcggcccucagcccugccc

SEQ ID NO: 373195 - RNA, 32 nt, Homo Sapiens
acgucacuguggacaagguucucgaguuccca

SEQ ID NO: 373196 - RNA, 32 nt, Homo Sapiens
acagaaggaauuaguuuagauaccaggaagaa

SEQ ID NO: 373197 - RNA, 32 nt, Homo Sapiens
uuuuuuaaaaacuuacuuaaauuuguguguaa

SEQ ID NO: 373198 - RNA, 32 nt, Homo Sapiens
ucuguuuucuucauuauugggaugagcaucua

SEQ ID NO: 373199 - RNA, 32 nt, Homo Sapiens
uucuacagugaacauucuuuuuuacuuuuguu

SEQ ID NO: 373200 - RNA, 32 nt, Homo Sapiens
gcuuuuauagacgacgugauauuuccaacaca

SEQ ID NO: 373201 - RNA, 32 nt, Homo Sapiens
uaauguuugacaugcagugcuucuuucuguaa

SEQ ID NO: 373202 - RNA, 32 nt, Homo Sapiens
gcaggggcgccgccgcccagcccugaccagaa

SEQ ID NO: 373203 - RNA, 30 nt, Homo Sapiens
gggacauugugugcugcaaagccauugguu

SEQ ID NO: 373204 - RNA, 32 nt, Homo Sapiens
cagcgcgucgugggggcguccguucugcagcu

SEQ ID NO: 373205 - RNA, 32 nt, Homo Sapiens
aucuccacauucagaaccaagagauuaguuga

SEQ ID NO: 373206 - RNA, 32 nt, Homo Sapiens
guugcuucaugcugcaggcugcggccgucagc

SEQ ID NO: 373207 - RNA, 31 nt, Homo Sapiens
agcuaauuaaauuguaauguuucuaugucaa

SEQ ID NO: 373208 - RNA, 32 nt, Homo Sapiens
auugaaauccuugcuacuucucuuccuccuca

SEQ ID NO: 373209 - RNA, 32 nt, Homo Sapiens
cuuccaucuucaggacucgugccuucugcugu

SEQ ID NO: 373210 - RNA, 32 nt, Homo Sapiens
ccagacucaucccacucucucccagcauuuug

SEQ ID NO: 373211 - RNA, 32 nt, Homo Sapiens
uuccuggguguccucuucuccuccagcuccuu

SEQ ID NO: 373212 - RNA, 32 nt, Homo Sapiens
ccaagugacgaaaacauuguccccaaugaaua

SEQ ID NO: 373213 - RNA, 32 nt, Homo Sapiens
uguucauuuuuauagaauuaugcuguuaaaac

SEQ ID NO: 373214 - RNA, 32 nt, Homo Sapiens
uaaacaaagauuuuaauugaauguuccaucaa

SEQ ID NO: 373215 - RNA, 32 nt, Homo Sapiens
ucgagggucagaggagccuggaugcuaauguc

SEQ ID NO: 373216 - RNA, 32 nt, Homo Sapiens
uauuguuuacacaacgauuacucgaagaugac

SEQ ID NO: 373217 - RNA, 32 nt, Homo Sapiens
uacuuggagguuuugucuuuuacuacaaguuu

SEQ ID NO: 373218 - RNA, 32 nt, Homo Sapiens
auugaaccaaaccauuagagcacacaagauaa

SEQ ID NO: 373219 - RNA, 32 nt, Homo Sapiens
aaggacacggaggggguguggugcuggcuaga

SEQ ID NO: 373220 - RNA, 32 nt, Homo Sapiens
cggcuaccuggugauggugcugcguggcaucu

SEQ ID NO: 373221 - RNA, 32 nt, Homo Sapiens
ucaggcacagaaagaauagcaaagcugcuguc

SEQ ID NO: 373222 - RNA, 32 nt, Homo Sapiens
uucuuucuuauuucuuuuuuuaaggggaaaaa

SEQ ID NO: 373223 - RNA, 32 nt, Homo Sapiens
caagauaacgacccucaacagcggcggagagg

SEQ ID NO: 373224 - RNA, 32 nt, Homo Sapiens
gccacccgugggaugccugcuucucacuacca

SEQ ID NO: 373225 - RNA, 32 nt, Homo Sapiens
ggauggucauguuuuuucuccuccguuucccc

SEQ ID NO: 373226 - RNA, 31 nt, Homo Sapiens
ggaagagauauagagaacucgacuggcuauc

SEQ ID NO: 373227 - RNA, 32 nt, Homo Sapiens
ccuuucuccccaaggacaaaauguagaaagau

SEQ ID NO: 373228 - RNA, 32 nt, Homo Sapiens
uuuuucauuuuuccaggacaguuggauauugu

SEQ ID NO: 373229 - RNA, 32 nt, Homo Sapiens
aauuuugcuuuuccuuuauaauggggucauug

SEQ ID NO: 373230 - RNA, 32 nt, Homo Sapiens
gaucagggcagcugcucugugacaucccugag

SEQ ID NO: 373231 - RNA, 32 nt, Homo Sapiens
auggggacugguuuguaucugguuauaucucu

SEQ ID NO: 373232 - RNA, 32 nt, Homo Sapiens
guaaaaugaacaaaacccuacgaaagaauggc

SEQ ID NO: 373233 - RNA, 32 nt, Homo Sapiens
cuauaagaaaaguuaagggauguccuucaggc

SEQ ID NO: 373234 - RNA, 32 nt, Homo Sapiens
cucuccucccagccucugccugucccacagau

SEQ ID NO: 373235 - RNA, 28 nt, Homo Sapiens
ccucuggggcggcggucgagaacagcag

SEQ ID NO: 373236 - RNA, 32 nt, Homo Sapiens
uauguguagauauaacuuaaauauggagcuuu

SEQ ID NO: 373237 - RNA, 32 nt, Homo Sapiens
aguguugcccucgggcccuuggcagauugcca

SEQ ID NO: 373238 - RNA, 32 nt, Homo Sapiens
aaaccaaaugaaauauuuuaacugauaaaaaa

SEQ ID NO: 373239 - RNA, 30 nt, Homo Sapiens
ugaggauggcuuccucuuggaaacuaaugc

SEQ ID NO: 373240 - RNA, 32 nt, Homo Sapiens
cagcggcggcgucuggggcgcuuucgcaacau

SEQ ID NO: 373241 - RNA, 32 nt, Homo Sapiens
cgacacacaaaacagugcacauuuaguucacu

SEQ ID NO: 373242 - RNA, 32 nt, Homo Sapiens
aauuggggccacccuuaagauaccaagaaaag

SEQ ID NO: 373243 - RNA, 32 nt, Homo Sapiens
ggugauuuuuuggagaauuauaauuacauuug

SEQ ID NO: 373244 - RNA, 32 nt, Homo Sapiens
guauuuggaaaacaaucggcuaaccuugacau

SEQ ID NO: 373245 - RNA, 32 nt, Homo Sapiens
aggccggggucucacagcgacugcgcggacgg

SEQ ID NO: 373246 - RNA, 32 nt, Homo Sapiens
ucauugaugggacaugaagacaucuuuggaaa

SEQ ID NO: 373247 - RNA, 32 nt, Homo Sapiens
auccauguauuuuuggagaagagagaggaaag

SEQ ID NO: 373248 - RNA, 32 nt, Homo Sapiens
gucccaaaucauaaccauuuuaagaacagaug

SEQ ID NO: 373249 - RNA, 32 nt, Homo Sapiens
aaauauaacaauacuaaauaucacacugugau

SEQ ID NO: 373250 - RNA, 32 nt, Homo Sapiens
ccaaccugcugcgcguggugcugagucugcau

SEQ ID NO: 373251 - RNA, 32 nt, Homo Sapiens
auggaagugacuaaugcugaaaaaauugauua

SEQ ID NO: 373252 - RNA, 32 nt, Homo Sapiens
aggcccaguauuuuugaauacaauacucaucu

SEQ ID NO: 373253 - RNA, 32 nt, Homo Sapiens
guccccaccaucgcuaaccccuggcaaccacu

SEQ ID NO: 373254 - RNA, 32 nt, Homo Sapiens
gcuuguguacaucguacccauccauucggcuu

SEQ ID NO: 373255 - RNA, 32 nt, Homo Sapiens
uguuuuggugugggauuauuugaaagcaaaag

SEQ ID NO: 373256 - RNA, 32 nt, Homo Sapiens
cuucuuuuucuuuuccuuuaucuguuguccaa

SEQ ID NO: 373257 - RNA, 32 nt, Homo Sapiens
ugaacucugcaccuccuuccaggccaucuugu

SEQ ID NO: 373258 - RNA, 32 nt, Homo Sapiens
agcguacaacaggucccuccccggcuuccucc

SEQ ID NO: 373259 - RNA, 32 nt, Homo Sapiens
aagauuuuaugaaacgaaauggcuucccauuc

SEQ ID NO: 373260 - RNA, 32 nt, Homo Sapiens
cucuuagcucuuuuuugaucgaugaagcacuu

SEQ ID NO: 373261 - RNA, 32 nt, Homo Sapiens
cguucugcuucucacccucuggugacucugug

SEQ ID NO: 373262 - RNA, 32 nt, Homo Sapiens
uggaccaucuccaaggccugcgggaaaaacuu

SEQ ID NO: 373263 - RNA, 32 nt, Homo Sapiens
cccugucuugaagacccugaccucaagugauc

SEQ ID NO: 373264 - RNA, 32 nt, Homo Sapiens
accauauauuacguuuuuguuauuaaaaaacu

SEQ ID NO: 373265 - RNA, 32 nt, Homo Sapiens
cggcuucggcccgcagaggguucguggcccgg

SEQ ID NO: 373266 - RNA, 32 nt, Homo Sapiens
cuguguaaaugaauucauggguagaugauuug

SEQ ID NO: 373267 - RNA, 32 nt, Homo Sapiens
guauuguuuuaauaguuuuucuauuauuuugg

SEQ ID NO: 373268 - RNA, 32 nt, Homo Sapiens
caggccccaccucuccucccuaagagcuaaug

SEQ ID NO: 373269 - RNA, 32 nt, Homo Sapiens
ggagagcggccugcgggcgaucgggccgagcc

SEQ ID NO: 373270 - RNA, 32 nt, Homo Sapiens
uggaagagaacacauuagaauauuuuaucccc

SEQ ID NO: 373271 - RNA, 32 nt, Homo Sapiens
cuuaacugcacagauaccaucuucucggcuuc

SEQ ID NO: 373272 - RNA, 32 nt, Homo Sapiens
auauggcugcaggcuuccugauaguggacguc

SEQ ID NO: 373273 - RNA, 32 nt, Homo Sapiens
gaguccgggccagcugaggggcuggcgguggg

SEQ ID NO: 373274 - RNA, 32 nt, Homo Sapiens
caccccgccaucucuuggccggaucgugcgag

SEQ ID NO: 373275 - RNA, 32 nt, Homo Sapiens
acagccuuuccuucugugggcuugucacuuuu

SEQ ID NO: 373276 - RNA, 32 nt, Homo Sapiens
ggucuuauuuuuggaaacugaagagagaaugg

SEQ ID NO: 373277 - RNA, 25 nt, Homo Sapiens
auggcgggccagggccugccccugc

SEQ ID NO: 373278 - RNA, 32 nt, Homo Sapiens
ucauggguuggccugugaucugucccccagcc

SEQ ID NO: 373279 - RNA, 32 nt, Homo Sapiens
aaaaggugggaaugugcugcuguuccgugagc

SEQ ID NO: 373280 - RNA, 32 nt, Homo Sapiens
gccuucuguaauaguuuugagaugucuguccc

SEQ ID NO: 373281 - RNA, 32 nt, Homo Sapiens
uuuccuuguuuuuucuuuguuaaaaccaaacu

SEQ ID NO: 373282 - RNA, 32 nt, Homo Sapiens
uggauuuaaauggucugagccuaugccuaucu

SEQ ID NO: 373283 - RNA, 32 nt, Homo Sapiens
cgcauagaaaucaauaauuuguggugauuugg

SEQ ID NO: 373284 - RNA, 32 nt, Homo Sapiens
cuauccggggcaauuguagcguuuggguccuu

SEQ ID NO: 373285 - RNA, 32 nt, Homo Sapiens
gccagcgcagggggcgcaggcgcacaccgccu

SEQ ID NO: 373286 - RNA, 32 nt, Homo Sapiens
auaugcuuuaaauaaauuacauaucguaauca

SEQ ID NO: 373287 - RNA, 32 nt, Homo Sapiens
agguaauauaaaaacagguaaaauguauaaaa

SEQ ID NO: 373288 - RNA, 31 nt, Homo Sapiens
cuguguucaaggagaaagacauuccuucgaa

SEQ ID NO: 373289 - RNA, 32 nt, Homo Sapiens
ccuuuuuccaaacagggauauagaaguggugg

SEQ ID NO: 373290 - RNA, 32 nt, Homo Sapiens
gccccagcuuugcaugaugaaaagcuuuccug

SEQ ID NO: 373291 - RNA, 32 nt, Homo Sapiens
gggcggagccagcgccccggcgcaggguggcu

SEQ ID NO: 373292 - RNA, 32 nt, Homo Sapiens
guauauauccucaaaaauuaauguaauugaca

SEQ ID NO: 373293 - RNA, 32 nt, Homo Sapiens
uuaauuuguuuuuauuuauucugagaaguuga

SEQ ID NO: 373294 - RNA, 32 nt, Homo Sapiens
guaaaaaguugaaaauuugacuuuuuaguauu

SEQ ID NO: 373295 - RNA, 32 nt, Homo Sapiens
ggcuuuuucagacaagugcaucuccuaaccag

SEQ ID NO: 373296 - RNA, 32 nt, Homo Sapiens
gugcuucuauguauagagagcuuucaguucau

SEQ ID NO: 373297 - RNA, 32 nt, Homo Sapiens
auucugugaccuuacccccaaccccgugcucu

SEQ ID NO: 373298 - RNA, 30 nt, Homo Sapiens
ccuccucuggacucccauuuguucucuguc

SEQ ID NO: 373299 - RNA, 32 nt, Homo Sapiens
agccgugcacaccagugucgugucugcuguug

SEQ ID NO: 373300 - RNA, 32 nt, Homo Sapiens
uuaaaaaacaaaugcagcacuucaucuaggac

SEQ ID NO: 373301 - RNA, 32 nt, Homo Sapiens
uccauucccucucuggccccagccccgcggga

SEQ ID NO: 373302 - RNA, 32 nt, Homo Sapiens
uugguccaggucaucccuccccgggccugggg

SEQ ID NO: 373303 - RNA, 32 nt, Homo Sapiens
gcaucugcccgcgccagucaggcccaguggug

SEQ ID NO: 373304 - RNA, 31 nt, Homo Sapiens
ugccuguaaucccagaacuucgggaggccga

SEQ ID NO: 373305 - RNA, 32 nt, Homo Sapiens
cagauaucaaggaauugggaaauccuggccaa

SEQ ID NO: 373306 - RNA, 32 nt, Homo Sapiens
auuuucucagguguuugcaacaguguucuaac

SEQ ID NO: 373307 - RNA, 32 nt, Homo Sapiens
uugaagggaccucaccuggugcccugaccuca

SEQ ID NO: 373308 - RNA, 32 nt, Homo Sapiens
auucuacccagagccuucuccugccuacauuc

SEQ ID NO: 373309 - RNA, 32 nt, Homo Sapiens
guugaggacuaacauuagacaccuguguguag

SEQ ID NO: 373310 - RNA, 32 nt, Homo Sapiens
gcuggagaugaccccgagccccuccccguggg

SEQ ID NO: 373311 - RNA, 32 nt, Homo Sapiens
gaaauggagagcccugcgggaaccaugcuaca

SEQ ID NO: 373312 - RNA, 32 nt, Homo Sapiens
gauucuuaaaaauaauguaauguaacccuuac

SEQ ID NO: 373313 - RNA, 32 nt, Homo Sapiens
gcaaauuaaauggaaacuuauuuagauaacgu

SEQ ID NO: 373314 - RNA, 32 nt, Homo Sapiens
cgggaaugagguaauaauagaguuaacauguu

SEQ ID NO: 373315 - RNA, 32 nt, Homo Sapiens
uugucacaguuuuaucauaguucauaauuauu

SEQ ID NO: 373316 - RNA, 32 nt, Homo Sapiens
ugugugcgcgccccgcucugccacgcucccug

SEQ ID NO: 373317 - RNA, 32 nt, Homo Sapiens
acuucauguuggguucuuucugaaauguacau

SEQ ID NO: 373318 - RNA, 32 nt, Homo Sapiens
cggcuggaagcagcgagggucagagcgccgca

SEQ ID NO: 373319 - RNA, 32 nt, Homo Sapiens
cgacauggcgauuggugagcucccugaccaag

SEQ ID NO: 373320 - RNA, 32 nt, Homo Sapiens
uucagcagcucugcucagacaccuggggaggg

SEQ ID NO: 373321 - RNA, 32 nt, Homo Sapiens
gcaaggcauaauguaauuuagcuaguuuuuaa

SEQ ID NO: 373322 - RNA, 32 nt, Homo Sapiens
gagcgggagcggcggcagcuggcugaccgucu

SEQ ID NO: 373323 - RNA, 32 nt, Homo Sapiens
agggagacguguuguugagcugauugucguag

SEQ ID NO: 373324 - RNA, 32 nt, Homo Sapiens
ugggauacagaaaaauauaaauucuggacaaa

SEQ ID NO: 373325 - RNA, 32 nt, Homo Sapiens
gagacugcuuucuugauucagcuagagaaaua

SEQ ID NO: 373326 - RNA, 32 nt, Homo Sapiens
ccguucaccauuaugcugaauuuuauauuacu

SEQ ID NO: 373327 - RNA, 32 nt, Homo Sapiens
ugagucuuggccugccucccagcccugccagg

SEQ ID NO: 373328 - RNA, 32 nt, Homo Sapiens
cucaacagaaugugucccuaccaugugucccc

SEQ ID NO: 373329 - RNA, 32 nt, Homo Sapiens
cucugggacgaagcuuccagaggaaggaauac

SEQ ID NO: 373330 - RNA, 32 nt, Homo Sapiens
uugugugaggucggcacuuggacucacucaga

SEQ ID NO: 373331 - RNA, 32 nt, Homo Sapiens
gacaucugaggacauccgcagauucuugucag

SEQ ID NO: 373332 - RNA, 32 nt, Homo Sapiens
ccgucgggccgcggcaggaugauugccucgca

SEQ ID NO: 373333 - RNA, 32 nt, Homo Sapiens
ugaauaggaaaugguuacucauucuguauaaa

SEQ ID NO: 373334 - RNA, 32 nt, Homo Sapiens
auugaaauauuacuuaauuacuuuuuaaagga

SEQ ID NO: 373335 - RNA, 32 nt, Homo Sapiens
aacguccauuugcaugugugcccugguauuua

SEQ ID NO: 373336 - RNA, 32 nt, Homo Sapiens
auuaaauggccauuuuaaaauuagcuaguuuc

SEQ ID NO: 373337 - RNA, 32 nt, Homo Sapiens
cuggcccccuccccaaguccauccccucucug

SEQ ID NO: 373338 - RNA, 32 nt, Homo Sapiens
auugaucuuuacccaagagacuuguggaauuu

SEQ ID NO: 373339 - RNA, 32 nt, Homo Sapiens
cucgggccgagaccguucaccuccccuuaucc

SEQ ID NO: 373340 - RNA, 32 nt, Homo Sapiens
cucaugugggcgcuaucuccaacugucuuugc

SEQ ID NO: 373341 - RNA, 29 nt, Homo Sapiens
aaggauguggcucuuccacacucugcucu

SEQ ID NO: 373342 - RNA, 32 nt, Homo Sapiens
aacuucuuuucuuuucuacuguuuaacauaca

SEQ ID NO: 373343 - RNA, 32 nt, Homo Sapiens
uaugugcagaucccggccccugccacccagcc

SEQ ID NO: 373344 - RNA, 32 nt, Homo Sapiens
caucaggcgaggggcugggccugugcagcugg

SEQ ID NO: 373345 - RNA, 32 nt, Homo Sapiens
ugguggugacguccggggcugugcagugucgc

SEQ ID NO: 373346 - RNA, 32 nt, Homo Sapiens
ugagaguguuaaaaaaaauuuuacuaggcaaa

SEQ ID NO: 373347 - RNA, 32 nt, Homo Sapiens
uuaagucccugggcugcccccuuggggugccc

SEQ ID NO: 373348 - RNA, 32 nt, Homo Sapiens
augucucgccuggguugacuacugaucuguga

SEQ ID NO: 373349 - RNA, 32 nt, Homo Sapiens
agaaaauuuuaaaaucucugccacagucucau

SEQ ID NO: 373350 - RNA, 32 nt, Homo Sapiens
ggugggucugaaucuagcaccaugacggaacu

SEQ ID NO: 373351 - RNA, 32 nt, Homo Sapiens
aaaacaauaugaguaguguaaucuuguagaaa

SEQ ID NO: 373352 - RNA, 32 nt, Homo Sapiens
gacuccuccugggacagggcuggguccucugg

SEQ ID NO: 373353 - RNA, 32 nt, Homo Sapiens
gccuuccgcguggcugcccuggcagaagggga

SEQ ID NO: 373354 - RNA, 32 nt, Homo Sapiens
cauguuuugaagcagcagguccaggucacuuu

SEQ ID NO: 373355 - RNA, 32 nt, Homo Sapiens
ugacuugcgcugcuuuuuuagagcacuuggca

SEQ ID NO: 373356 - RNA, 32 nt, Homo Sapiens
acaaaacaaaacaaaacacugccaaacuguuu

SEQ ID NO: 373357 - RNA, 29 nt, Homo Sapiens
uaaacugucaucuagugaaagugaugaag

SEQ ID NO: 373358 - RNA, 32 nt, Homo Sapiens
aagaagauuacguuuuacaauguaacuauaau

SEQ ID NO: 373359 - RNA, 32 nt, Homo Sapiens
cauuuuaauuauaugcauuaaucuuaucuucu

SEQ ID NO: 373360 - RNA, 32 nt, Homo Sapiens
ggccggcggggcucagcccccggaaacggucg

SEQ ID NO: 373361 - RNA, 32 nt, Homo Sapiens
gccgcccagggaagagaguggccuggcccaag

SEQ ID NO: 373362 - RNA, 32 nt, Homo Sapiens
gucuccaagccgggcugcggcuccauccucgg

SEQ ID NO: 373363 - RNA, 32 nt, Homo Sapiens
ugaauuucucuuuacuucucuccaccuucucc

SEQ ID NO: 373364 - RNA, 32 nt, Homo Sapiens
ucccuaguuaguacucggacuccugugcuaau

SEQ ID NO: 373365 - RNA, 32 nt, Homo Sapiens
acccuggggcaccucugacccuggaccugcuu

SEQ ID NO: 373366 - RNA, 32 nt, Homo Sapiens
uuuuaucaaacacacuuccagcuggcauauag

SEQ ID NO: 373367 - RNA, 32 nt, Homo Sapiens
auuggaauaauuaacuggagauaauauccagu

SEQ ID NO: 373368 - RNA, 32 nt, Homo Sapiens
caaaaguuguggccacagugcaucauaagugc

SEQ ID NO: 373369 - RNA, 32 nt, Homo Sapiens
cuuauuguauaaauuucuaacauguauaaaaa

SEQ ID NO: 373370 - RNA, 32 nt, Homo Sapiens
ggaccaccucugccugcagauuuuuguuguug

SEQ ID NO: 373371 - RNA, 32 nt, Homo Sapiens
cggcgagccagcaguuccuagagcagucgcuc

SEQ ID NO: 373372 - RNA, 32 nt, Homo Sapiens
uggauaucaagacuaagugcugauaugaagac

SEQ ID NO: 373373 - RNA, 32 nt, Homo Sapiens
uuaugcaugagcagggucacuguuacacucau

SEQ ID NO: 373374 - RNA, 32 nt, Homo Sapiens
gauagcuuucuaaaccaugacccaauaggucu

SEQ ID NO: 373375 - RNA, 32 nt, Homo Sapiens
acaacagacaaugaaauaaguaggacugagua

SEQ ID NO: 373376 - RNA, 32 nt, Homo Sapiens
cuggagaccccauggacugaugccuccacugc

SEQ ID NO: 373377 - RNA, 32 nt, Homo Sapiens
uuucaccugaaauuauuuucuucuguggcaac

SEQ ID NO: 373378 - RNA, 32 nt, Homo Sapiens
aacuguuaauaaaaguuaaaggaauuuaaaaa

SEQ ID NO: 373379 - RNA, 32 nt, Homo Sapiens
gagcuuccccugugcuccccagccccaggacc

SEQ ID NO: 373380 - RNA, 31 nt, Homo Sapiens
cauuuucaauugacuuuauuaaaugaaaauc

SEQ ID NO: 373381 - RNA, 32 nt, Homo Sapiens
cagggguccgcauuucucaugcuuuucuauaa

SEQ ID NO: 373382 - RNA, 32 nt, Homo Sapiens
ccgggggcagccagugcccagccccaccaaug

SEQ ID NO: 373383 - RNA, 32 nt, Homo Sapiens
ggccaccugccuggaccaccacuuccccacag

SEQ ID NO: 373384 - RNA, 30 nt, Homo Sapiens
ccgagggauuucccugcccucccucuuccc

SEQ ID NO: 373385 - RNA, 32 nt, Homo Sapiens
ccagguuuaaacaucacuuguaccuuccacaa

SEQ ID NO: 373386 - RNA, 32 nt, Homo Sapiens
ggggcgggcagagcgcggucggcguuagcuuu

SEQ ID NO: 373387 - RNA, 32 nt, Homo Sapiens
cgucucucuuauuuuucuuuuguauuugccgc

SEQ ID NO: 373388 - RNA, 32 nt, Homo Sapiens
ccucaagugauccggccaccuuggccucccaa

SEQ ID NO: 373389 - RNA, 32 nt, Homo Sapiens
aauagcagcugggagaaauaucuauuaaaaua

SEQ ID NO: 373390 - RNA, 32 nt, Homo Sapiens
ucacaaccccugcuccaguccuggagggagug

SEQ ID NO: 373391 - RNA, 32 nt, Homo Sapiens
gcuguugaacguaauguaaucuuaauacugua

SEQ ID NO: 373392 - RNA, 32 nt, Homo Sapiens
uagcagcuuugguuuucccugggcugaugaug

SEQ ID NO: 373393 - RNA, 32 nt, Homo Sapiens
gaauggcguccuguaccugcagaugggguagu

SEQ ID NO: 373394 - RNA, 32 nt, Homo Sapiens
cgagcagcgccaugagcaacacuaccgucguc

SEQ ID NO: 373395 - RNA, 32 nt, Homo Sapiens
uuuggggagaaguuggcgugccacccccacaa

SEQ ID NO: 373396 - RNA, 32 nt, Homo Sapiens
ucaugcacuucucccagaugcuauaggguuuu

SEQ ID NO: 373397 - RNA, 32 nt, Homo Sapiens
gaauguaaacacauaguaaagccuuaauuuua

SEQ ID NO: 373398 - RNA, 32 nt, Homo Sapiens
uuuagacaagcacauguuacaccuguguugcc

SEQ ID NO: 373399 - RNA, 32 nt, Homo Sapiens
guccaugaacacacuugugaccuuaguacuug

SEQ ID NO: 373400 - RNA, 32 nt, Homo Sapiens
gcugagcccagcugugggagucccggaagcug

SEQ ID NO: 373401 - RNA, 32 nt, Homo Sapiens
uauauguucuguguuuaguuuacauauuguaa

SEQ ID NO: 373402 - RNA, 32 nt, Homo Sapiens
guggguaaaaucagcccuucucccaggccugu

SEQ ID NO: 373403 - RNA, 32 nt, Homo Sapiens
ggcuccccaaggugugcccagcagaagugcaa

SEQ ID NO: 373404 - RNA, 32 nt, Homo Sapiens
ucggccugagguuacccggcccggcccuuccu

SEQ ID NO: 373405 - RNA, 32 nt, Homo Sapiens
cuuauuagaguuuuugucugagcacaguagcc

SEQ ID NO: 373406 - RNA, 32 nt, Homo Sapiens
uuuuugucugauaccuggccccgggauaguca

SEQ ID NO: 373407 - RNA, 32 nt, Homo Sapiens
agcuaucaguguucuucucaaggacacauuug

SEQ ID NO: 373408 - RNA, 29 nt, Homo Sapiens
auaaagacauaugagcgaggccagcugag

SEQ ID NO: 373409 - RNA, 32 nt, Homo Sapiens
cggccggccccgggcuuccccagcagccacca

SEQ ID NO: 373410 - RNA, 32 nt, Homo Sapiens
uagauauaaaauguaacuuggauuuaaaggag

SEQ ID NO: 373411 - RNA, 32 nt, Homo Sapiens
guuucagaagcguugggcggcgggcgucccug

SEQ ID NO: 373412 - RNA, 32 nt, Homo Sapiens
acaaagcuaugcaugagcgaaauaucaaacuu

SEQ ID NO: 373413 - RNA, 32 nt, Homo Sapiens
uggccagguggaggagggaggggaggagcagg

SEQ ID NO: 373414 - RNA, 31 nt, Homo Sapiens
gggccgagggcggggcggcauggccaccacc

SEQ ID NO: 373415 - RNA, 32 nt, Homo Sapiens
augaguuagaaguggcagugggacaggagcgg

SEQ ID NO: 373416 - RNA, 32 nt, Homo Sapiens
acuaauggccucuauucucaccucccuuguga

SEQ ID NO: 373417 - RNA, 32 nt, Homo Sapiens
gagcuaaccccuucccacacuccacccaccca

SEQ ID NO: 373418 - RNA, 32 nt, Homo Sapiens
cucuuaggggagcagaagaaaagcaggaagaa

SEQ ID NO: 373419 - RNA, 32 nt, Homo Sapiens
agacuccuggaaaggaguugccucuucuccaa

SEQ ID NO: 373420 - RNA, 32 nt, Homo Sapiens
ggugucgcauguccugagccugcuugucaccu

SEQ ID NO: 373421 - RNA, 32 nt, Homo Sapiens
gacagcuuccugcucugucacccaggcuggag

SEQ ID NO: 373422 - RNA, 32 nt, Homo Sapiens
cgaagauuugaaaagucacuugaagaaaaggg

SEQ ID NO: 373423 - RNA, 32 nt, Homo Sapiens
augcaaauuagggcuacauuguaaucugcuuu

SEQ ID NO: 373424 - RNA, 32 nt, Homo Sapiens
aaaccaacaaauaaaagcaugauaaauugacu

SEQ ID NO: 373425 - RNA, 32 nt, Homo Sapiens
uuaacauuuuuacaauaaaacaugagguggac

SEQ ID NO: 373426 - RNA, 32 nt, Homo Sapiens
accccagcucaagcgauccaccccccucagcc

SEQ ID NO: 373427 - RNA, 32 nt, Homo Sapiens
uauggaauuuuuucaaauguuggaaggcgugu

SEQ ID NO: 373428 - RNA, 32 nt, Homo Sapiens
uucuguccuaugugccccggcggggcagccug

SEQ ID NO: 373429 - RNA, 32 nt, Homo Sapiens
acuugccaaccuuaauggcccuuacaauugau

SEQ ID NO: 373430 - RNA, 32 nt, Homo Sapiens
cgagccgggguucccuccucccggcccgcugc

SEQ ID NO: 373431 - RNA, 32 nt, Homo Sapiens
uuugcugagguuuaugagauuuucucacccca

SEQ ID NO: 373432 - RNA, 32 nt, Homo Sapiens
uccugcccaaguuuccuccuugcccugaggac

SEQ ID NO: 373433 - RNA, 32 nt, Homo Sapiens
aagagggucucacuuugucacccaggcuggaa

SEQ ID NO: 373434 - RNA, 32 nt, Homo Sapiens
cauaccuggagucgccauuaucccuggaauua

SEQ ID NO: 373435 - RNA, 32 nt, Homo Sapiens
auuaauguacuaaauccuauguuuacauuaau

SEQ ID NO: 373436 - RNA, 32 nt, Homo Sapiens
uucagaauauaaaauucaacaaacuuauuuuc

SEQ ID NO: 373437 - RNA, 32 nt, Homo Sapiens
auuccuuccuuccuccagcccccagcaaccac

SEQ ID NO: 373438 - RNA, 32 nt, Homo Sapiens
uucuugacugugaagagcugccugcagagagc

SEQ ID NO: 373439 - RNA, 32 nt, Homo Sapiens
uugugugauuuaaagacacuuuuuggacucaa

SEQ ID NO: 373440 - RNA, 32 nt, Homo Sapiens
uugaaaugguucagcccucuacugcaggacca

SEQ ID NO: 373441 - RNA, 32 nt, Homo Sapiens
gcugagcacccucuccgguuuggguugggaua

SEQ ID NO: 373442 - RNA, 32 nt, Homo Sapiens
cccuagcaaccacugguguuuucugucccucu

SEQ ID NO: 373443 - RNA, 32 nt, Homo Sapiens
cuaacaagguuccugacuaguaccucaguauu

SEQ ID NO: 373444 - RNA, 32 nt, Homo Sapiens
cugugcuuaucuucacuguauuacaauauugg

SEQ ID NO: 373445 - RNA, 32 nt, Homo Sapiens
gugacacccaccccaggguggauccaggaugg

SEQ ID NO: 373446 - RNA, 32 nt, Homo Sapiens
ggugggcagggccaacacuucagcagcuucug

SEQ ID NO: 373447 - RNA, 32 nt, Homo Sapiens
ggauaauugaagguuuacuaagauuagugaaa

SEQ ID NO: 373448 - RNA, 32 nt, Homo Sapiens
ccuuccucgcuaacguggugggaacgguggug

SEQ ID NO: 373449 - RNA, 32 nt, Homo Sapiens
ccugaugccacguccacccaucuaccugaaaa

SEQ ID NO: 373450 - RNA, 32 nt, Homo Sapiens
cagcccccugcugcccgcacacaacaugugga

SEQ ID NO: 373451 - RNA, 32 nt, Homo Sapiens
uucccugcuuuccuccucccugacugcccagc

SEQ ID NO: 373452 - RNA, 32 nt, Homo Sapiens
cuccugaaggugcauucuggcuccuuuaaauu

SEQ ID NO: 373453 - RNA, 32 nt, Homo Sapiens
ugcaggagggcccggggcccccugcccacccu

SEQ ID NO: 373454 - RNA, 32 nt, Homo Sapiens
cuggggcgggcuccugccaugccgcuaguccg

SEQ ID NO: 373455 - RNA, 32 nt, Homo Sapiens
gggagcguggggaggaggcggcugguuccagg

SEQ ID NO: 373456 - RNA, 30 nt, Homo Sapiens
acuucucuggacugauccuauucacagcuu

SEQ ID NO: 373457 - RNA, 32 nt, Homo Sapiens
caaccuacagaaaagaugcagaugcaagaaua

SEQ ID NO: 373458 - RNA, 32 nt, Homo Sapiens
auguuuagccauucuauugcugauggacaucu

SEQ ID NO: 373459 - RNA, 32 nt, Homo Sapiens
uauagauacucgugucccaauuccaaaacaca

SEQ ID NO: 373460 - RNA, 31 nt, Homo Sapiens
aggauugcccagcaaaccugaguuggggguu

SEQ ID NO: 373461 - RNA, 32 nt, Homo Sapiens
uaguugcauacucgugucucucauggauuguu

SEQ ID NO: 373462 - RNA, 32 nt, Homo Sapiens
uuccugguccuccugcucccaaagcugccuug

SEQ ID NO: 373463 - RNA, 32 nt, Homo Sapiens
ccucagcccuaccugcaaccaccgcuugccau

SEQ ID NO: 373464 - RNA, 32 nt, Homo Sapiens
gugagugucuugcccuuccccagcugggcaua

SEQ ID NO: 373465 - RNA, 32 nt, Homo Sapiens
uuucauccugccauaugacaccuaugagaaac

SEQ ID NO: 373466 - RNA, 32 nt, Homo Sapiens
cucugguacacgcuuucuccccagacggcacc

SEQ ID NO: 373467 - RNA, 32 nt, Homo Sapiens
uuuggguauguggguuauagcuaucaauauuu

SEQ ID NO: 373468 - RNA, 32 nt, Homo Sapiens
ccggcaccaaccccuuccucuggccccgcccc

SEQ ID NO: 373469 - RNA, 32 nt, Homo Sapiens
acaccccccuccccccggccccaagccccugu

SEQ ID NO: 373470 - RNA, 32 nt, Homo Sapiens
gcggccugggcagaagggcggcuggcuguccu

SEQ ID NO: 373471 - RNA, 32 nt, Homo Sapiens
auugggcaccagggcugcucccgagauucuca

SEQ ID NO: 373472 - RNA, 32 nt, Homo Sapiens
gcagagggaaacuuuacaaauguaaugauugu

SEQ ID NO: 373473 - RNA, 32 nt, Homo Sapiens
uggcucuuucccuugcuucucuuucugcucac

SEQ ID NO: 373474 - RNA, 32 nt, Homo Sapiens
auaauuuuuaucauccaauuaugggaagcaag

SEQ ID NO: 373475 - RNA, 32 nt, Homo Sapiens
auggccccaagcccuggccucuagugauacgc

SEQ ID NO: 373476 - RNA, 32 nt, Homo Sapiens
ucucaaaaaauaaaacaaaauaaaauaaagca

SEQ ID NO: 373477 - RNA, 32 nt, Homo Sapiens
cuccucugcgcccuugccgcccuccgagccac

SEQ ID NO: 373478 - RNA, 30 nt, Homo Sapiens
cacuuaccacuugcacuauucuuaauaggc

SEQ ID NO: 373479 - RNA, 32 nt, Homo Sapiens
ccucccacucccucccugaccucuucgccgca

SEQ ID NO: 373480 - RNA, 32 nt, Homo Sapiens
uagaaaagguacaguaaaaauaugguauaaaa

SEQ ID NO: 373481 - RNA, 32 nt, Homo Sapiens
cuuaaaauccuccaaugaggcagagguugcag

SEQ ID NO: 373482 - RNA, 32 nt, Homo Sapiens
ucgggcugcccggagucgcccgggagcaggug

SEQ ID NO: 373483 - RNA, 32 nt, Homo Sapiens
aaaaagggcuucaaggcccacuucuucucaga

SEQ ID NO: 373484 - RNA, 32 nt, Homo Sapiens
aggcacucuuaagcccaccucccccucuuguu

SEQ ID NO: 373485 - RNA, 32 nt, Homo Sapiens
auaauaauaaaauaaauaauuuuaaaaaaaag

SEQ ID NO: 373486 - RNA, 32 nt, Homo Sapiens
uucuccaaggauuuugccuuuuuuguuuguuu

SEQ ID NO: 373487 - RNA, 32 nt, Homo Sapiens
ugcuucagugcugcuccugagagaguagcagg

SEQ ID NO: 373488 - RNA, 32 nt, Homo Sapiens
guucccggguggcaggugcacagcugggaggg

SEQ ID NO: 373489 - RNA, 30 nt, Homo Sapiens
acugcuguccuuccugcagaaacaguuucu

SEQ ID NO: 373490 - RNA, 32 nt, Homo Sapiens
aagauuuuacugccucaccuaggauggaaaua

SEQ ID NO: 373491 - RNA, 32 nt, Homo Sapiens
gggaagaaguuccaggaucagagcucaccuuu

SEQ ID NO: 373492 - RNA, 32 nt, Homo Sapiens
cauuucuuuccuuauugauaaaacaagauaau

SEQ ID NO: 373493 - RNA, 32 nt, Homo Sapiens
cucuagcucccauuggcugaagacacugaagu

SEQ ID NO: 373494 - RNA, 32 nt, Homo Sapiens
uuaugccgucucauauuuuuacaaauaauuau

SEQ ID NO: 373495 - RNA, 32 nt, Homo Sapiens
aagaaaaaaugguaaaggauggcauuuaacga

SEQ ID NO: 373496 - RNA, 32 nt, Homo Sapiens
guugucauuuuuucauuuguccuuuucugcua

SEQ ID NO: 373497 - RNA, 32 nt, Homo Sapiens
caaguugaaacacgaugauguggucugcuugc

SEQ ID NO: 373498 - RNA, 32 nt, Homo Sapiens
gcguggggccgggucugagguucuugccugcc

SEQ ID NO: 373499 - RNA, 32 nt, Homo Sapiens
cagcuguggaagcucaggcgcugcgcgugaga

SEQ ID NO: 373500 - RNA, 32 nt, Homo Sapiens
gcauuuaaugaaaaauuuaugcuuaagaagua

SEQ ID NO: 373501 - RNA, 32 nt, Homo Sapiens
ccccuggacuccacacaguccuggccucauca

SEQ ID NO: 373502 - RNA, 32 nt, Homo Sapiens
ugagcacucuaagcagccaauuagaugcuggc

SEQ ID NO: 373503 - RNA, 32 nt, Homo Sapiens
gccaggccgggacuccuggggccuggcccccc

SEQ ID NO: 373504 - RNA, 32 nt, Homo Sapiens
ucgcacucaaauucucuuuucucugcuuccug

SEQ ID NO: 373505 - RNA, 32 nt, Homo Sapiens
cgguuuggaagacuuugccggccugcagauug

SEQ ID NO: 373506 - RNA, 32 nt, Homo Sapiens
ccaagaccuuagggauugacaccugggccuca

SEQ ID NO: 373507 - RNA, 32 nt, Homo Sapiens
aacuaaugugcaaauacaguggugauauauug

SEQ ID NO: 373508 - RNA, 32 nt, Homo Sapiens
ugcaggagccgcugcugagcugcgugccacau

SEQ ID NO: 373509 - RNA, 32 nt, Homo Sapiens
aucccugaacuaauuauagugaaacauacugc

SEQ ID NO: 373510 - RNA, 32 nt, Homo Sapiens
ugaacugguugugcagaacaaacaaggcauuc

SEQ ID NO: 373511 - RNA, 32 nt, Homo Sapiens
gaccgcuugagccugagagaugaagguugcag

SEQ ID NO: 373512 - RNA, 32 nt, Homo Sapiens
caagaauagauuuggugugauaccuuguguuu

SEQ ID NO: 373513 - RNA, 32 nt, Homo Sapiens
uuacugccgccucaagcuuccagccucaacuc

SEQ ID NO: 373514 - RNA, 32 nt, Homo Sapiens
caccacuggaccccaaaccaccuauccccagu

SEQ ID NO: 373515 - RNA, 32 nt, Homo Sapiens
agaugguggaccgcuggucaggcuccauugag

SEQ ID NO: 373516 - RNA, 32 nt, Homo Sapiens
guauauucgccucauucaaauggcaguagccu

SEQ ID NO: 373517 - RNA, 32 nt, Homo Sapiens
accggcugugguguuccaguccccacugacca

SEQ ID NO: 373518 - RNA, 32 nt, Homo Sapiens
gcggccaucuucugugaaaguauucucaggcg

SEQ ID NO: 373519 - RNA, 32 nt, Homo Sapiens
gccagcugaacuaacccacgugccaaacugug

SEQ ID NO: 373520 - RNA, 32 nt, Homo Sapiens
ugcucugcugguccggccgcuggagcgcccac

SEQ ID NO: 373521 - RNA, 32 nt, Homo Sapiens
gcgagcgagaggaggagcuccaguggcggcgg

SEQ ID NO: 373522 - RNA, 32 nt, Homo Sapiens
auccccuggcccauccucuccugcaguggauc

SEQ ID NO: 373523 - RNA, 32 nt, Homo Sapiens
gaaucuguagacauuucuuuauugauauggca

SEQ ID NO: 373524 - RNA, 32 nt, Homo Sapiens
uucacauguggcugcuuaauuccugccccucu

SEQ ID NO: 373525 - RNA, 32 nt, Homo Sapiens
aucagaaaaaagguguuuuguauuuuaaaggu

SEQ ID NO: 373526 - RNA, 32 nt, Homo Sapiens
cuuuguuuacauuuugaauauuaaaaugugca

SEQ ID NO: 373527 - RNA, 32 nt, Homo Sapiens
cuacagaaaaauuuuaaauuauuucaccauua

SEQ ID NO: 373528 - RNA, 32 nt, Homo Sapiens
caaaaaggacaccagcaagcuguucaaugagg

SEQ ID NO: 373529 - RNA, 32 nt, Homo Sapiens
cuccggacucgcgaucuuccuuccggagccau

SEQ ID NO: 373530 - RNA, 32 nt, Homo Sapiens
uuuuaauaaaauaaauaacauaaaucguugaa

SEQ ID NO: 373531 - RNA, 32 nt, Homo Sapiens
acuccggccccggccugcgcccucagaaaggu

SEQ ID NO: 373532 - RNA, 32 nt, Homo Sapiens
acugugagguggcaaugggauuugcucagaug

SEQ ID NO: 373533 - RNA, 32 nt, Homo Sapiens
aagggucacccucucccuccccagcccugaag

SEQ ID NO: 373534 - RNA, 32 nt, Homo Sapiens
ugugucugcagggcucccucuacaucacccuu

SEQ ID NO: 373535 - RNA, 32 nt, Homo Sapiens
acacuuggccccagcuucacugcuuggaagca

SEQ ID NO: 373536 - RNA, 32 nt, Homo Sapiens
aggcccagcuggaggacgagcaggcgcagcgg

SEQ ID NO: 373537 - RNA, 32 nt, Homo Sapiens
uuaauguggggagcgggcaggggugggguggg

SEQ ID NO: 373538 - RNA, 32 nt, Homo Sapiens
uaagacuucucguggccaugugucucacccua

SEQ ID NO: 373539 - RNA, 30 nt, Homo Sapiens
gcccuugcuccaauggggggaggagaucaa

SEQ ID NO: 373540 - RNA, 32 nt, Homo Sapiens
ggacagagccccacgcuguugacaucagccug

SEQ ID NO: 373541 - RNA, 32 nt, Homo Sapiens
ccaaacaaaaauagcuacaaauccacaaaaau

SEQ ID NO: 373542 - RNA, 32 nt, Homo Sapiens
caaaacaaacaaaacaccuugaaucaaguuug

SEQ ID NO: 373543 - RNA, 32 nt, Homo Sapiens
gguggaggccagugcagaccauccucugccca

SEQ ID NO: 373544 - RNA, 32 nt, Homo Sapiens
cagagcgcgcgguugggcuggccacggaggca

SEQ ID NO: 373545 - RNA, 29 nt, Homo Sapiens
agguauggccucacaagucuuggucuacc

SEQ ID NO: 373546 - RNA, 32 nt, Homo Sapiens
cagccauuguguccccugcaacauccuacaug

SEQ ID NO: 373547 - RNA, 32 nt, Homo Sapiens
accuugggggaccugauggagaagguagauug

SEQ ID NO: 373548 - RNA, 32 nt, Homo Sapiens
uuacauuuuugugauaaaugugauaaacuuug

SEQ ID NO: 373549 - RNA, 32 nt, Homo Sapiens
aaggucaaguccuccgcccgggccgggccgag

SEQ ID NO: 373550 - RNA, 32 nt, Homo Sapiens
cagcugcccuguaaauguucagcucagcgauu

SEQ ID NO: 373551 - RNA, 32 nt, Homo Sapiens
ccaaaagaugacccugcuguagcugggcccug

SEQ ID NO: 373552 - RNA, 32 nt, Homo Sapiens
aacaauacauaaaugcuguaaguguaugcuua

SEQ ID NO: 373553 - RNA, 32 nt, Homo Sapiens
gggaagcaugacccggguggcgggacaagacu

SEQ ID NO: 373554 - RNA, 32 nt, Homo Sapiens
guaguaaaauacaaucuaaaaagcacccaaug

SEQ ID NO: 373555 - RNA, 32 nt, Homo Sapiens
ccaugagaaaccuaaacaucugaaauauaaug

SEQ ID NO: 373556 - RNA, 32 nt, Homo Sapiens
caguaugcuuaacgugaaaagaaaauguguuc

SEQ ID NO: 373557 - RNA, 32 nt, Homo Sapiens
uaauucuuaggacuacuuuucuagucacagau

SEQ ID NO: 373558 - RNA, 32 nt, Homo Sapiens
ucuuuuuauuuuggaaguuucagacaaacucu

SEQ ID NO: 373559 - RNA, 32 nt, Homo Sapiens
auccaucuuaccacacaauauuucaugauuca

SEQ ID NO: 373560 - RNA, 32 nt, Homo Sapiens
caauagcuuucuucuuuauuuaaauaaacauu

SEQ ID NO: 373561 - RNA, 32 nt, Homo Sapiens
guuucaaaaaaguuuaagaaaauggaaauggg

SEQ ID NO: 373562 - RNA, 32 nt, Homo Sapiens
accugccccccuccccccgcagccgcgucgcc

SEQ ID NO: 373563 - RNA, 32 nt, Homo Sapiens
uuaacuacagaaaagacaaacaguagagaaca

SEQ ID NO: 373564 - RNA, 32 nt, Homo Sapiens
ugacucucuaccaagcuuucaauggccugaaa

SEQ ID NO: 373565 - RNA, 32 nt, Homo Sapiens
agucguagauaaccagaaaacaucggauuuac

SEQ ID NO: 373566 - RNA, 32 nt, Homo Sapiens
aaaacaguuucaucgggauauaauucgcaacc

SEQ ID NO: 373567 - RNA, 32 nt, Homo Sapiens
cuaauuuuacuuuguauucaguaucguaagug

SEQ ID NO: 373568 - RNA, 32 nt, Homo Sapiens
caaggggccccggggcucagguccaccaccca

SEQ ID NO: 373569 - RNA, 32 nt, Homo Sapiens
cucauugugaauguguauguaaaauaugaaga

SEQ ID NO: 373570 - RNA, 32 nt, Homo Sapiens
ccaggaguuuggacccucuaggucuuggggga

SEQ ID NO: 373571 - RNA, 32 nt, Homo Sapiens
aaauaaaacuuguucauaaaucuucauagcag

SEQ ID NO: 373572 - RNA, 32 nt, Homo Sapiens
gaccgaccgccagggguaaaacuagaggacac

SEQ ID NO: 373573 - RNA, 32 nt, Homo Sapiens
uguuguugacauuuugcagugauacaacagcu

SEQ ID NO: 373574 - RNA, 32 nt, Homo Sapiens
ucugcauucccaagccggcagcuacugcccag

SEQ ID NO: 373575 - RNA, 32 nt, Homo Sapiens
gagcuuguuuccugggguuuguguucggcugc

SEQ ID NO: 373576 - RNA, 32 nt, Homo Sapiens
gauuagagacaaaaacagaggauagggagggg

SEQ ID NO: 373577 - RNA, 32 nt, Homo Sapiens
cuccagggccaguucuuuucucucccuuccau

SEQ ID NO: 373578 - RNA, 32 nt, Homo Sapiens
ggagggagcuugcggugcguucugggaaaguu

SEQ ID NO: 373579 - RNA, 32 nt, Homo Sapiens
cccuacauguccggagcaacacuuugaaaacc

SEQ ID NO: 373580 - RNA, 32 nt, Homo Sapiens
gcucccggcccgcuccgcccagaguccgaugg

SEQ ID NO: 373581 - RNA, 32 nt, Homo Sapiens
uuuucauauuacucugcuuugugcacuuuaug

SEQ ID NO: 373582 - RNA, 32 nt, Homo Sapiens
ggacccucggaaccaagccccugacauggccc

SEQ ID NO: 373583 - RNA, 32 nt, Homo Sapiens
uuuccugcugccgcgccgccagcccccgcccu

SEQ ID NO: 373584 - RNA, 32 nt, Homo Sapiens
aggucccagcacucacacugcggggccgacaa

SEQ ID NO: 373585 - RNA, 30 nt, Homo Sapiens
uguucuaagcuaucuaucuaacucucagcc

SEQ ID NO: 373586 - RNA, 32 nt, Homo Sapiens
gggcacuugugcuugagccuguauuaaaggaa

SEQ ID NO: 373587 - RNA, 32 nt, Homo Sapiens
cuagggagguccuucagaaucuguggagcaag

SEQ ID NO: 373588 - RNA, 32 nt, Homo Sapiens
auuuagaggacauucuggaaaagcaaaacugu

SEQ ID NO: 373589 - RNA, 32 nt, Homo Sapiens
cagggccccccgccccucccucccagcccacc

SEQ ID NO: 373590 - RNA, 32 nt, Homo Sapiens
ggccugggggagcccgccagccugcugaguuc

SEQ ID NO: 373591 - RNA, 32 nt, Homo Sapiens
caaauuuguccucauugaguugacauccaaaa

SEQ ID NO: 373592 - RNA, 32 nt, Homo Sapiens
acuaucuaacuggcauuuguguuucuugcgag

SEQ ID NO: 373593 - RNA, 32 nt, Homo Sapiens
guuguuuaagaaauguauaaaaaaccugaaaa

SEQ ID NO: 373594 - RNA, 32 nt, Homo Sapiens
cucuuacuuaggauaauuguaggaacugacuu

SEQ ID NO: 373595 - RNA, 32 nt, Homo Sapiens
agggagcuugcucuccuucucggagggccgga

SEQ ID NO: 373596 - RNA, 32 nt, Homo Sapiens
acucaggaggguguuugcugcguugacaacag

SEQ ID NO: 373597 - RNA, 32 nt, Homo Sapiens
ugggaaaagggagagguaauggcuaaagggga

SEQ ID NO: 373598 - RNA, 32 nt, Homo Sapiens
agauuguucuuacuuacaagacuugcuccuac

SEQ ID NO: 373599 - RNA, 32 nt, Homo Sapiens
guucauauaaucucgggauacacacacacaca

SEQ ID NO: 373600 - RNA, 32 nt, Homo Sapiens
cugcaggaguccuggggccagcuggccucgau

SEQ ID NO: 373601 - RNA, 32 nt, Homo Sapiens
aguccccgggucgcccagcccacgcgcgcacg

SEQ ID NO: 373602 - RNA, 28 nt, Homo Sapiens
gccauggagaagcugcggcgaguccuga

SEQ ID NO: 373603 - RNA, 32 nt, Homo Sapiens
ugccagaacgcucaggacaucccggccugggu

SEQ ID NO: 373604 - RNA, 32 nt, Homo Sapiens
ucuagaaaacaaaaugaaagaaaacaaauaug

SEQ ID NO: 373605 - RNA, 32 nt, Homo Sapiens
aucuugacguaccuccugcgcagccucggaca

SEQ ID NO: 373606 - RNA, 32 nt, Homo Sapiens
ucugccucucagucagagucagggcugacaaa

SEQ ID NO: 373607 - RNA, 32 nt, Homo Sapiens
uuacugguucaacauuuuucugauauaugcag

SEQ ID NO: 373608 - RNA, 32 nt, Homo Sapiens
acuguggugucauggauagcuggcugucugcc

SEQ ID NO: 373609 - RNA, 32 nt, Homo Sapiens
ugccagggagggaggagaaagccgaagcgaaa

SEQ ID NO: 373610 - RNA, 32 nt, Homo Sapiens
uuugcaccaaaauagcaagcugugugcucuau

SEQ ID NO: 373611 - RNA, 32 nt, Homo Sapiens
cugucguuauuuaauauuuuguucaucaugga

SEQ ID NO: 373612 - RNA, 32 nt, Homo Sapiens
ccccugccugagggcucugugccuccugccuc

SEQ ID NO: 373613 - RNA, 32 nt, Homo Sapiens
cuaacuuguuaugcagcaauagauaaauaaua

SEQ ID NO: 373614 - RNA, 32 nt, Homo Sapiens
cugccgugggucugcagucgcugcaaccuacc

SEQ ID NO: 373615 - RNA, 32 nt, Homo Sapiens
uauucuuugccugccccugggguucucugcag

SEQ ID NO: 373616 - RNA, 32 nt, Homo Sapiens
uuggacaaaguugaaggccuucugucugaauu

SEQ ID NO: 373617 - RNA, 32 nt, Homo Sapiens
cuccugguguggguaaagggacaguuacaaac

SEQ ID NO: 373618 - RNA, 32 nt, Homo Sapiens
ugaaguagaagcuguccgggggcgcguagccc

SEQ ID NO: 373619 - RNA, 32 nt, Homo Sapiens
uuuaauuuauguaaguuuuuuguacauaauuc

SEQ ID NO: 373620 - RNA, 32 nt, Homo Sapiens
uuuagacacacaagauucuaaaaugcaaaugu

SEQ ID NO: 373621 - RNA, 32 nt, Homo Sapiens
ccaagucucccgccgccuccccggccugguga

SEQ ID NO: 373622 - RNA, 32 nt, Homo Sapiens
auugcucuuuucuccgcccacgcgggcguggc

SEQ ID NO: 373623 - RNA, 32 nt, Homo Sapiens
gggccccggccgcccagagaucaugcagagug

SEQ ID NO: 373624 - RNA, 32 nt, Homo Sapiens
ugcagaaugugggggguggggaggcagggcca

SEQ ID NO: 373625 - RNA, 32 nt, Homo Sapiens
caggcgugguggcucaugccuguaaucugagc

SEQ ID NO: 373626 - RNA, 32 nt, Homo Sapiens
cggcucuuccuccuccuucuccgggacccgcu

SEQ ID NO: 373627 - RNA, 32 nt, Homo Sapiens
gcaaccccaccugggcaacaagagggaaaccc

SEQ ID NO: 373628 - RNA, 32 nt, Homo Sapiens
acgccggagcuggccugcuggggaggggcggg

SEQ ID NO: 373629 - RNA, 32 nt, Homo Sapiens
ugugaagauaaaauaccaaauaaaauaauaua

SEQ ID NO: 373630 - RNA, 32 nt, Homo Sapiens
uuuccauauucucccuuauuagaaaugaccac

SEQ ID NO: 373631 - RNA, 32 nt, Homo Sapiens
uuccaugaugcacaguaucugcuguucuucag

SEQ ID NO: 373632 - RNA, 32 nt, Homo Sapiens
aaucuucaaagucagaaucuaucaccuuggua

SEQ ID NO: 373633 - RNA, 32 nt, Homo Sapiens
cauguggagggagucagggucugucuggaagc

SEQ ID NO: 373634 - RNA, 32 nt, Homo Sapiens
uguuccacggcuucuccuuccugggagcuggc

SEQ ID NO: 373635 - RNA, 32 nt, Homo Sapiens
ccagugucuaccuaauggauagaugccaaaaa

SEQ ID NO: 373636 - RNA, 32 nt, Homo Sapiens
ggggguuaugggggcgggaggguagacugaca

SEQ ID NO: 373637 - RNA, 32 nt, Homo Sapiens
cugccuaugucucagugacaagagaaaugaga

SEQ ID NO: 373638 - RNA, 32 nt, Homo Sapiens
aucagccugggcaacauagugaaaccuggucu

SEQ ID NO: 373639 - RNA, 32 nt, Homo Sapiens
ggaccuuggcugacauauguugguagguacuc

SEQ ID NO: 373640 - RNA, 32 nt, Homo Sapiens
cuugucgucgcaguauuuccuguucggauuau

SEQ ID NO: 373641 - RNA, 32 nt, Homo Sapiens
ggccacagacugcgaccgcgauugcagggagg

SEQ ID NO: 373642 - RNA, 32 nt, Homo Sapiens
aaaacuucaguauuuccacuugguuaugauuu

SEQ ID NO: 373643 - RNA, 32 nt, Homo Sapiens
ccucgagacgggugcugucguggugauggagg

SEQ ID NO: 373644 - RNA, 32 nt, Homo Sapiens
ggagaaaaaugaauuuuguugggcaggaagug

SEQ ID NO: 373645 - RNA, 32 nt, Homo Sapiens
agccgagggacccugguggggguggcuccuuc

SEQ ID NO: 373646 - RNA, 32 nt, Homo Sapiens
gagacucgcggccccaggcccaggccccaccc

SEQ ID NO: 373647 - RNA, 32 nt, Homo Sapiens
auaaguaauauagaguuuuucuugcuagguaa

SEQ ID NO: 373648 - RNA, 32 nt, Homo Sapiens
aaugccauucaagaacaaaaccacagaugcca

SEQ ID NO: 373649 - RNA, 32 nt, Homo Sapiens
gcauugggaaagggucacaauuaagaccgaaa

SEQ ID NO: 373650 - RNA, 32 nt, Homo Sapiens
guaugaaaacuuauuaggaaccuuuuuguuuu

SEQ ID NO: 373651 - RNA, 27 nt, Homo Sapiens
cagggggcccucuucagcgcauccugc

SEQ ID NO: 373652 - RNA, 32 nt, Homo Sapiens
uucaauaauugcucaacacuuacucaacacca

SEQ ID NO: 373653 - RNA, 32 nt, Homo Sapiens
cccuguuuguugaugcagcuuuuguugaacaa

SEQ ID NO: 373654 - RNA, 32 nt, Homo Sapiens
guuuccuguauaauucaaacauuacaaauaag

SEQ ID NO: 373655 - RNA, 32 nt, Homo Sapiens
cagcagccugcgcucggcaggaaggagcggcg

SEQ ID NO: 373656 - RNA, 32 nt, Homo Sapiens
agacuauguaaaucuuuuuuuaaucuucuucc

SEQ ID NO: 373657 - RNA, 32 nt, Homo Sapiens
cuacuuucuaagggcauuuuucccucucauuu

SEQ ID NO: 373658 - RNA, 32 nt, Homo Sapiens
cucccggccccgggcauucgcggagaacgagc

SEQ ID NO: 373659 - RNA, 32 nt, Homo Sapiens
gauggucccuccccugugcgccuuccucucag

SEQ ID NO: 373660 - RNA, 32 nt, Homo Sapiens
ggguucucauuccggccccccuggagaugacc

SEQ ID NO: 373661 - RNA, 32 nt, Homo Sapiens
aauaaaacauauauuauauugaacuauguguu

SEQ ID NO: 373662 - RNA, 32 nt, Homo Sapiens
uguccugcugcccgagugggccccacccuggg

SEQ ID NO: 373663 - RNA, 31 nt, Homo Sapiens
auuguuuuugguaauguaagcaguuaaaaac

SEQ ID NO: 373664 - RNA, 32 nt, Homo Sapiens
gucaagguguuucaguuuuucuuuacuucuuu

SEQ ID NO: 373665 - RNA, 32 nt, Homo Sapiens
gugaugcugcggucucuccuccccuuucccuc

SEQ ID NO: 373666 - RNA, 32 nt, Homo Sapiens
aaugguacaaggaaaugguagaacuagugauc

SEQ ID NO: 373667 - RNA, 32 nt, Homo Sapiens
uccaggcagccccagcagcagcaucuccucuu

SEQ ID NO: 373668 - RNA, 32 nt, Homo Sapiens
uggugcaggggaggaacgaagagacaugcaag

SEQ ID NO: 373669 - RNA, 32 nt, Homo Sapiens
cauaaacccuaccuucauuuuacaaugucacc

SEQ ID NO: 373670 - RNA, 32 nt, Homo Sapiens
agcuccucccaccucgaggcucuucuuccugc

SEQ ID NO: 373671 - RNA, 32 nt, Homo Sapiens
ccccaccucugucucccugucuucuuuagauc

SEQ ID NO: 373672 - RNA, 32 nt, Homo Sapiens
aggguuuauuccagcgcgaggugucagggcgg

SEQ ID NO: 373673 - RNA, 32 nt, Homo Sapiens
gcuuccgcuaacccgggcuggcgcugcuaacc

SEQ ID NO: 373674 - RNA, 32 nt, Homo Sapiens
ucuauaaaaaauaaacaucuuuugauugcuug

SEQ ID NO: 373675 - RNA, 32 nt, Homo Sapiens
auuuuagguuagaauuacauauuagaagcauu

SEQ ID NO: 373676 - RNA, 31 nt, Homo Sapiens
uuaacucuugguaguaugagagugaguuaag

SEQ ID NO: 373677 - RNA, 32 nt, Homo Sapiens
caagguguugcuggggcaaggcugcuccgaag

SEQ ID NO: 373678 - RNA, 32 nt, Homo Sapiens
ccugcauaaaaaggucuuuaaaauauuguuga

SEQ ID NO: 373679 - RNA, 32 nt, Homo Sapiens
uggcccagcugacuuugaaucugagggagggc

SEQ ID NO: 373680 - RNA, 32 nt, Homo Sapiens
agggcccggggcggggagggcggcaggugcug

SEQ ID NO: 373681 - RNA, 32 nt, Homo Sapiens
ccagcucagcguccaugaucuaaagauguaac

SEQ ID NO: 373682 - RNA, 32 nt, Homo Sapiens
auauguuuacuuguaucacagaucuuacugua

SEQ ID NO: 373683 - RNA, 32 nt, Homo Sapiens
ccuugauugggaagagaguuucaagggaggca

SEQ ID NO: 373684 - RNA, 32 nt, Homo Sapiens
ggcaccaacaacucagaaugggggcuuucggg

SEQ ID NO: 373685 - RNA, 32 nt, Homo Sapiens
agauuacaaaagacaucagguuaggaugucau

SEQ ID NO: 373686 - RNA, 32 nt, Homo Sapiens
gcuccuguccccuggggucucugcugcauuug

SEQ ID NO: 373687 - RNA, 32 nt, Homo Sapiens
cacgaacaccaagugucugcaaguaacaccug

SEQ ID NO: 373688 - RNA, 32 nt, Homo Sapiens
ccccaggaaggggccauagguaggucugaaca

SEQ ID NO: 373689 - RNA, 32 nt, Homo Sapiens
agucagagggcuuagacagugaggggggacag

SEQ ID NO: 373690 - RNA, 32 nt, Homo Sapiens
agguuucaaggaaguagaaacaaaauacaauu

SEQ ID NO: 373691 - RNA, 32 nt, Homo Sapiens
ucuaaccugugcuauauauacucgagcacucu

SEQ ID NO: 373692 - RNA, 32 nt, Homo Sapiens
uuauaugaaaacagugcaguaaguugaaaacu

SEQ ID NO: 373693 - RNA, 32 nt, Homo Sapiens
ccccccaacuccaucccucaccacaguugucu

SEQ ID NO: 373694 - RNA, 32 nt, Homo Sapiens
acgugucaagacugcuuccagcccuaggacag

SEQ ID NO: 373695 - RNA, 32 nt, Homo Sapiens
cacuggucaggugcuucucaccacgggaaagc

SEQ ID NO: 373696 - RNA, 32 nt, Homo Sapiens
cucggagcugaauacagccugggccucagcag

SEQ ID NO: 373697 - RNA, 32 nt, Homo Sapiens
cacgaggccccggccccggagcugccuggagg

SEQ ID NO: 373698 - RNA, 32 nt, Homo Sapiens
aaaauucuaucuuuagaaugggcuucaauauu

SEQ ID NO: 373699 - RNA, 32 nt, Homo Sapiens
ucaugcagauugcaggaugccugagagcacag

SEQ ID NO: 373700 - RNA, 32 nt, Homo Sapiens
gcuaaacccagcugugauaccucaguuggaaa

SEQ ID NO: 373701 - RNA, 32 nt, Homo Sapiens
guaaugguggaaugugggacacauauguguca

SEQ ID NO: 373702 - RNA, 32 nt, Homo Sapiens
ugccagcaccuugccuggccccuccccaggcu

SEQ ID NO: 373703 - RNA, 32 nt, Homo Sapiens
ccuuagacugaccccucaggccccuaggcugg

SEQ ID NO: 373704 - RNA, 32 nt, Homo Sapiens
ccagcuacugaauuauuaaucucacuuagcga

SEQ ID NO: 373705 - RNA, 32 nt, Homo Sapiens
gcccagaugggcgggggagcggccggacgcgg

SEQ ID NO: 373706 - RNA, 32 nt, Homo Sapiens
cgcccuuggugaaagaaaauucuuggaauacu

SEQ ID NO: 373707 - RNA, 32 nt, Homo Sapiens
auugauaagacauaucauuuugaaagauauac

SEQ ID NO: 373708 - RNA, 32 nt, Homo Sapiens
uaaaauguuuauugcuguuuugucuuucuuuu

SEQ ID NO: 373709 - RNA, 30 nt, Homo Sapiens
guaaaggcgcccgugaccgagugcuuuguc

SEQ ID NO: 373710 - RNA, 32 nt, Homo Sapiens
auaaacaaacaaaaacaaauagccaucugcua

SEQ ID NO: 373711 - RNA, 32 nt, Homo Sapiens
ugagugcacaagauggaaagagcgauuggagc

SEQ ID NO: 373712 - RNA, 23 nt, Homo Sapiens
acuugguaugaaauauaaagugu

SEQ ID NO: 373713 - RNA, 32 nt, Homo Sapiens
augagugugugcucugugucacuguggauugg

SEQ ID NO: 373714 - RNA, 32 nt, Homo Sapiens
cggcuguggaccguggacaggcccagcgcggc

SEQ ID NO: 373715 - RNA, 32 nt, Homo Sapiens
aaacccuuccccaagaauguuucuuuauagac

SEQ ID NO: 373716 - RNA, 32 nt, Homo Sapiens
cuugggauagaaaaauaguaugugcuaucucu

SEQ ID NO: 373717 - RNA, 32 nt, Homo Sapiens
acgacgucaccucgggcacgcccaaggagaag

SEQ ID NO: 373718 - RNA, 32 nt, Homo Sapiens
gguuugugcaauuugagaccggucggcacugu

SEQ ID NO: 373719 - RNA, 32 nt, Homo Sapiens
gggcucauuuugguuucauugaaacaguaucu

SEQ ID NO: 373720 - RNA, 32 nt, Homo Sapiens
uguuuuugauaaaguaauaaugugcaaaucug

SEQ ID NO: 373721 - RNA, 32 nt, Homo Sapiens
acuccuggguguuuuucuuucucauucgaauc

SEQ ID NO: 373722 - RNA, 32 nt, Homo Sapiens
gcgaaagguacaaugucuuuuagcuaauucua

SEQ ID NO: 373723 - RNA, 32 nt, Homo Sapiens
accucccuuccgacccucugggaaccucccag

SEQ ID NO: 373724 - RNA, 32 nt, Homo Sapiens
agccgcucggccacguccaccggagcauccug

SEQ ID NO: 373725 - RNA, 32 nt, Homo Sapiens
cacagcagcauauuuuagaggcacauacaaaa

SEQ ID NO: 373726 - RNA, 32 nt, Homo Sapiens
ucauguacugaucuuuccuguugaagaaaucc

SEQ ID NO: 373727 - RNA, 32 nt, Homo Sapiens
ggcccccgguugcgguaggcaaucaauaauac

SEQ ID NO: 373728 - RNA, 32 nt, Homo Sapiens
ggugaacugccccaagcucucguaccagguuc

SEQ ID NO: 373729 - RNA, 32 nt, Homo Sapiens
ccgacugagcagagccagacagacauuccuga

SEQ ID NO: 373730 - RNA, 32 nt, Homo Sapiens
cagacaguugggaugcagguccacccacagcc

SEQ ID NO: 373731 - RNA, 32 nt, Homo Sapiens
uugaagagggauuggggcaggggaggcagaag

SEQ ID NO: 373732 - RNA, 32 nt, Homo Sapiens
gaagggcagcggggcgcaccaggccgaaggcu

SEQ ID NO: 373733 - RNA, 32 nt, Homo Sapiens
ccuccagcccccagccuacucuccuaaugguc

SEQ ID NO: 373734 - RNA, 32 nt, Homo Sapiens
ccccugugaggcugaggcccgagcagguacug

SEQ ID NO: 373735 - RNA, 32 nt, Homo Sapiens
agccgggcacgguggcucacgccuguaacccc

SEQ ID NO: 373736 - RNA, 32 nt, Homo Sapiens
aagcauggacauuuucuugcgucauguacuau

SEQ ID NO: 373737 - RNA, 32 nt, Homo Sapiens
ggcacgagggagagagcgagaccugggaggga

SEQ ID NO: 373738 - RNA, 32 nt, Homo Sapiens
gucuuucuaaucuccuucuguuucucugaaua

SEQ ID NO: 373739 - RNA, 32 nt, Homo Sapiens
cgcuuucccgccccugaaccccggccccgcgg

SEQ ID NO: 373740 - RNA, 32 nt, Homo Sapiens
agcagugcccaacugaccaaucucccgcagcu

SEQ ID NO: 373741 - RNA, 32 nt, Homo Sapiens
cacucaccugucuaccuggacuccaauuucca

SEQ ID NO: 373742 - RNA, 32 nt, Homo Sapiens
ugccucugccccacccccaaaguaagaagaaa

SEQ ID NO: 373743 - RNA, 32 nt, Homo Sapiens
uaacgaucucugugacucugugccaaacugug

SEQ ID NO: 373744 - RNA, 32 nt, Homo Sapiens
ggcccugcucugcgaugggcauccugacuguc

SEQ ID NO: 373745 - RNA, 32 nt, Homo Sapiens
aaagagugaggacagcagcaccugccucgggg

SEQ ID NO: 373746 - RNA, 32 nt, Homo Sapiens
uucccgcagccguggacgauucuccaggacuc

SEQ ID NO: 373747 - RNA, 32 nt, Homo Sapiens
agaagacccaaguaucagaugcaggaggagcc

SEQ ID NO: 373748 - RNA, 32 nt, Homo Sapiens
aguacagugucaucaauuuacaguuaaggaaa

SEQ ID NO: 373749 - RNA, 32 nt, Homo Sapiens
ugagaugugcaagaggcgugggcuugcagggu

SEQ ID NO: 373750 - RNA, 32 nt, Homo Sapiens
uguauuucaucucauguuuucuuauugucaca

SEQ ID NO: 373751 - RNA, 32 nt, Homo Sapiens
gcagcuuuaagcucugcuucucucuuccucau

SEQ ID NO: 373752 - RNA, 32 nt, Homo Sapiens
ggaaaggucaccccauucuacuccauggccuc

SEQ ID NO: 373753 - RNA, 32 nt, Homo Sapiens
cgccgagaccccgaccccggccccacgggcgg

SEQ ID NO: 373754 - RNA, 32 nt, Homo Sapiens
gcugggcuucgggucuucaggagugggccuug

SEQ ID NO: 373755 - RNA, 32 nt, Homo Sapiens
ccucuccccccgggcuccgcccaccccacgcc

SEQ ID NO: 373756 - RNA, 32 nt, Homo Sapiens
ccuguccugacccauccaagcgcuguuggggc

SEQ ID NO: 373757 - RNA, 27 nt, Homo Sapiens
gggaccuccuucuuccccacuucucuc

SEQ ID NO: 373758 - RNA, 32 nt, Homo Sapiens
ucucaggagcagcccugagucugcuucccagg

SEQ ID NO: 373759 - RNA, 32 nt, Homo Sapiens
uccaccagcccggcuccugccucacgcuggcc

SEQ ID NO: 373760 - RNA, 32 nt, Homo Sapiens
cggcuggccgggcaggggggcuccucacuucc

SEQ ID NO: 373761 - RNA, 32 nt, Homo Sapiens
gccugcgccuacuccuccuccuccucucccgg

SEQ ID NO: 373762 - RNA, 32 nt, Homo Sapiens
guuucgagcugacaccaguugggaagauacag

SEQ ID NO: 373763 - RNA, 32 nt, Homo Sapiens
auaucuuuuucuucagaacaauguagacuucc

SEQ ID NO: 373764 - RNA, 32 nt, Homo Sapiens
agaaugcacauaacccauagugaaaugugcug

SEQ ID NO: 373765 - RNA, 32 nt, Homo Sapiens
ugggaaaaacaucuuugaaaucaggaaaucag

SEQ ID NO: 373766 - RNA, 32 nt, Homo Sapiens
cuuggggcuggagacucccaggugccccaggu

SEQ ID NO: 373767 - RNA, 32 nt, Homo Sapiens
agaagggcugguccagcggcggcggaggcugg

SEQ ID NO: 373768 - RNA, 32 nt, Homo Sapiens
auguuuaaauuuuuuuuaaaucuuaaaaccuu

SEQ ID NO: 373769 - RNA, 32 nt, Homo Sapiens
uaaaguuuuacagaaaguagugcugugauuga

SEQ ID NO: 373770 - RNA, 32 nt, Homo Sapiens
gucuucccaguguccuuggaguguugguucuu

SEQ ID NO: 373771 - RNA, 32 nt, Homo Sapiens
guggcccccuccccagcaccucugucugccau

SEQ ID NO: 373772 - RNA, 30 nt, Homo Sapiens
gaauaggcuacugccacccggcuuugggga

SEQ ID NO: 373773 - RNA, 32 nt, Homo Sapiens
cccauguuaagugguggggucucuuucugucu

SEQ ID NO: 373774 - RNA, 32 nt, Homo Sapiens
cuuuucccaugcauucucuuuccccgggaaag

SEQ ID NO: 373775 - RNA, 32 nt, Homo Sapiens
auuuaauaagaaacaugaugugagauuacuuu

SEQ ID NO: 373776 - RNA, 31 nt, Homo Sapiens
aacugggagccccgaaccgggcagcgugggg

SEQ ID NO: 373777 - RNA, 32 nt, Homo Sapiens
uccuggcuggccugggccuugcugugggacug

SEQ ID NO: 373778 - RNA, 31 nt, Homo Sapiens
uuuauuacauuguaugugccaaaugaaaaau

SEQ ID NO: 373779 - RNA, 32 nt, Homo Sapiens
aucagugcauguccuuagucuguuaguuaaac

SEQ ID NO: 373780 - RNA, 31 nt, Homo Sapiens
accugucccaggucuucuccaaggggcccag

SEQ ID NO: 373781 - RNA, 32 nt, Homo Sapiens
ccauggucaauacagucuuucuccaucuuugg

SEQ ID NO: 373782 - RNA, 32 nt, Homo Sapiens
gccaggaucccuuccuucuccucauuggcuga

SEQ ID NO: 373783 - RNA, 32 nt, Homo Sapiens
cuccuuccaagucuccugcgcgcguguuuuua

SEQ ID NO: 373784 - RNA, 32 nt, Homo Sapiens
ugagcuggccccucugccccagcugagaugga

SEQ ID NO: 373785 - RNA, 32 nt, Homo Sapiens
ugcugguccguagggauucauuggucggggug

SEQ ID NO: 373786 - RNA, 32 nt, Homo Sapiens
aaaauuugacauuauccagcugguuguguaca

SEQ ID NO: 373787 - RNA, 32 nt, Homo Sapiens
uuucuggggaggcagcuagauaccaaaccauu

SEQ ID NO: 373788 - RNA, 32 nt, Homo Sapiens
gcuccucaccgcagcacccccacugcaggcuc

SEQ ID NO: 373789 - RNA, 32 nt, Homo Sapiens
agucuggauuucacuguuuucuugcuuaauaa

SEQ ID NO: 373790 - RNA, 32 nt, Homo Sapiens
acuagguuggguuuggggaggggggaaaagag

SEQ ID NO: 373791 - RNA, 32 nt, Homo Sapiens
gaacugcgcagccuuacccaguccuaucugcg

SEQ ID NO: 373792 - RNA, 32 nt, Homo Sapiens
aagcaguuacagaaacagaauugaugugcugc

SEQ ID NO: 373793 - RNA, 32 nt, Homo Sapiens
agguccaggacccguggaggagcccacagcua

SEQ ID NO: 373794 - RNA, 32 nt, Homo Sapiens
uccauuggaucuuugauucugagaagucugcc

SEQ ID NO: 373795 - RNA, 32 nt, Homo Sapiens
uuccggcucucauggauuccacagcaaauaaa

SEQ ID NO: 373796 - RNA, 31 nt, Homo Sapiens
cccuggccagccuccaccugagcccagugag

SEQ ID NO: 373797 - RNA, 32 nt, Homo Sapiens
ggaagaaauuuaggaagcgaaauauuacagua

SEQ ID NO: 373798 - RNA, 32 nt, Homo Sapiens
uuguucuguuuuuauuggccacuaauaaucua

SEQ ID NO: 373799 - RNA, 32 nt, Homo Sapiens
uggcuagucugugccuggucaccagggaggcu

SEQ ID NO: 373800 - RNA, 32 nt, Homo Sapiens
gauuauuuaaaagggaagagggccugguuguu

SEQ ID NO: 373801 - RNA, 30 nt, Homo Sapiens
aggcaugcaccagugccgccugugcccacg

SEQ ID NO: 373802 - RNA, 32 nt, Homo Sapiens
guugggaggggagaggacgcgggcgaggaaga

SEQ ID NO: 373803 - RNA, 32 nt, Homo Sapiens
ucccucuugugcucugucacccuguucuugag

SEQ ID NO: 373804 - RNA, 32 nt, Homo Sapiens
ucgucacauggcaacagcuggcuaauacauau

SEQ ID NO: 373805 - RNA, 32 nt, Homo Sapiens
cagagacccacuuuauucaguucuguacauau

SEQ ID NO: 373806 - RNA, 32 nt, Homo Sapiens
uuguguauagaauggaagggggaucaucaagg

SEQ ID NO: 373807 - RNA, 32 nt, Homo Sapiens
gagguacuccggaaccuguaucucuaacuagg

SEQ ID NO: 373808 - RNA, 32 nt, Homo Sapiens
aagagacauuuccauaucaccagaccacaaac

SEQ ID NO: 373809 - RNA, 32 nt, Homo Sapiens
uuuugagugauaaguagucauguuguuuucau

SEQ ID NO: 373810 - RNA, 32 nt, Homo Sapiens
gcccuucugaugcuuugaaauggaaggauugu

SEQ ID NO: 373811 - RNA, 32 nt, Homo Sapiens
ucacauacugaauacuagucaaacaaguuuuu

SEQ ID NO: 373812 - RNA, 32 nt, Homo Sapiens
uauuuauagcauguuucuuuuugaaaaacuag

SEQ ID NO: 373813 - RNA, 32 nt, Homo Sapiens
cccgccgcgggcccuugaggcgcgcggagaca

SEQ ID NO: 373814 - RNA, 32 nt, Homo Sapiens
uggugucuuuugcuccacuugcugguguuuua

SEQ ID NO: 373815 - RNA, 32 nt, Homo Sapiens
gaaaaucccaugaacauuaaagagccagaaau

SEQ ID NO: 373816 - RNA, 32 nt, Homo Sapiens
ggauuuugcccucuccuuagcucuuagucucu

SEQ ID NO: 373817 - RNA, 32 nt, Homo Sapiens
accucugugguccuccuccccagaacucagaa

SEQ ID NO: 373818 - RNA, 32 nt, Homo Sapiens
gggcauggguaaaacuuaugaaaauuuccuca

SEQ ID NO: 373819 - RNA, 32 nt, Homo Sapiens
ccauccccaucccuaaccaccauaaaugcuaa

SEQ ID NO: 373820 - RNA, 32 nt, Homo Sapiens
uugguuugcugaccccacuuggacugguaggu

SEQ ID NO: 373821 - RNA, 32 nt, Homo Sapiens
gccugggcggguggauugggaccccgagagaa

SEQ ID NO: 373822 - RNA, 32 nt, Homo Sapiens
gugaagauuuacaaauaaucuuugaauaucug

SEQ ID NO: 373823 - RNA, 32 nt, Homo Sapiens
uagcugggacuacaagagugcgccaccacgcc

SEQ ID NO: 373824 - RNA, 32 nt, Homo Sapiens
gcacgcaugcgugcugaaaagccuuucacccu

SEQ ID NO: 373825 - RNA, 29 nt, Homo Sapiens
cagcuuuccugucauugaaagcuucggaa

SEQ ID NO: 373826 - RNA, 32 nt, Homo Sapiens
guagacuucuaaauagaauaaacacuugcagc

SEQ ID NO: 373827 - RNA, 32 nt, Homo Sapiens
guguaagcaaaauuuucuuuuguaaaagcaaa

SEQ ID NO: 373828 - RNA, 32 nt, Homo Sapiens
aaaauauuauuccuaauagaagaaauagaaau

SEQ ID NO: 373829 - RNA, 32 nt, Homo Sapiens
guauacgauugauuuucuuaaguaugugauug

SEQ ID NO: 373830 - RNA, 32 nt, Homo Sapiens
cacuuugacuuauuuucucuaauaguuuauuu

SEQ ID NO: 373831 - RNA, 32 nt, Homo Sapiens
cacucagacaggugcaguggcucacacaugua

SEQ ID NO: 373832 - RNA, 32 nt, Homo Sapiens
ccucuccaucagugccuuugccugcagcuacc

SEQ ID NO: 373833 - RNA, 32 nt, Homo Sapiens
ggggcccggggccgcgcgagcuagggugacag

SEQ ID NO: 373834 - RNA, 32 nt, Homo Sapiens
gggcugaagcaucugauaauaggaaaagaaaa

SEQ ID NO: 373835 - RNA, 32 nt, Homo Sapiens
uuuaggcggccagugaacugcugcuucagaag

SEQ ID NO: 373836 - RNA, 32 nt, Homo Sapiens
ugugaccccuguacaugucucuuuauucacuu

SEQ ID NO: 373837 - RNA, 32 nt, Homo Sapiens
ugcagagacagaguuaaugaugucaaagcuuc

SEQ ID NO: 373838 - RNA, 32 nt, Homo Sapiens
agacugaaagacuguaauuuuacacaauacac

SEQ ID NO: 373839 - RNA, 32 nt, Homo Sapiens
uccagcgguggcggcaugagccggcccccgcc

SEQ ID NO: 373840 - RNA, 32 nt, Homo Sapiens
cagggggugguuggccuggugcccagccagcc

SEQ ID NO: 373841 - RNA, 32 nt, Homo Sapiens
guucuaaaaugaagauguauggguacucuggc

SEQ ID NO: 373842 - RNA, 32 nt, Homo Sapiens
gucggucagcggggcguucucccaccuguagc

SEQ ID NO: 373843 - RNA, 32 nt, Homo Sapiens
ggagcucagaguccccaccugugcucuucaca

SEQ ID NO: 373844 - RNA, 30 nt, Homo Sapiens
cugcagcuggacuguggcagcuggagggag

SEQ ID NO: 373845 - RNA, 32 nt, Homo Sapiens
ugcucucucuacucccagguccagccucauca

SEQ ID NO: 373846 - RNA, 32 nt, Homo Sapiens
caugugucugaaccugaagaccucucuccuaa

SEQ ID NO: 373847 - RNA, 32 nt, Homo Sapiens
cuccugcauucuccccucuccuaggagcucuu

SEQ ID NO: 373848 - RNA, 32 nt, Homo Sapiens
gcuuuguuuggcuugauuaacuuugaucagaa

SEQ ID NO: 373849 - RNA, 32 nt, Homo Sapiens
caguguuugcaagggagguguuucugccuguc

SEQ ID NO: 373850 - RNA, 32 nt, Homo Sapiens
uugaaggugaccaguuguuuguagcuauucuu

SEQ ID NO: 373851 - RNA, 32 nt, Homo Sapiens
ugccucuaaucccagcacuuuggaagaccaag

SEQ ID NO: 373852 - RNA, 32 nt, Homo Sapiens
cuauguuguggacuacuuaagucugcauuugu

SEQ ID NO: 373853 - RNA, 32 nt, Homo Sapiens
agcugccucuuuacagcuuccacgagccaggg

SEQ ID NO: 373854 - RNA, 32 nt, Homo Sapiens
uuauuuccuucuuuuucuugcuuuugguauau

SEQ ID NO: 373855 - RNA, 32 nt, Homo Sapiens
gggcccgagugcccuccuuccuugggaugggu

SEQ ID NO: 373856 - RNA, 32 nt, Homo Sapiens
gugagacugagccugauguguuaacaaauagg

SEQ ID NO: 373857 - RNA, 32 nt, Homo Sapiens
aucgaguuguacaugauaaauauauacaauuu

SEQ ID NO: 373858 - RNA, 32 nt, Homo Sapiens
cuaggugggaagaaacaaaacaaccuuguaaa

SEQ ID NO: 373859 - RNA, 32 nt, Homo Sapiens
ugccccgcaccauggacuuuggccucaacgug

SEQ ID NO: 373860 - RNA, 32 nt, Homo Sapiens
cucagacuuggggagggagggguguggcuccc

SEQ ID NO: 373861 - RNA, 32 nt, Homo Sapiens
ugcuuggagcggcaggcagggcccguggacga

SEQ ID NO: 373862 - RNA, 32 nt, Homo Sapiens
ccgaguccucgccgaacgcccuccucgccgcc

SEQ ID NO: 373863 - RNA, 32 nt, Homo Sapiens
ggauggauauuguugaacuggggcacuggugc

SEQ ID NO: 373864 - RNA, 32 nt, Homo Sapiens
ugaacccauuuuccuccccugucccagccuuc

SEQ ID NO: 373865 - RNA, 32 nt, Homo Sapiens
aaguacauguuuuaaguauuuucaucguaguc

SEQ ID NO: 373866 - RNA, 32 nt, Homo Sapiens
gauaucuugcuguauuuugucuucuuucugau

SEQ ID NO: 373867 - RNA, 32 nt, Homo Sapiens
gagcagcagcagccacagccacagcagccgcc

SEQ ID NO: 373868 - RNA, 32 nt, Homo Sapiens
guucagacaaaggccuggccugaagccugggc

SEQ ID NO: 373869 - RNA, 32 nt, Homo Sapiens
ggagcaugggaagagggugagcugagggcugg

SEQ ID NO: 373870 - RNA, 32 nt, Homo Sapiens
aguagcagauaggagagcaauuaaacuguagg

SEQ ID NO: 373871 - RNA, 32 nt, Homo Sapiens
gcccuugccugccuuucuuuuaugcugaugcu

SEQ ID NO: 373872 - RNA, 32 nt, Homo Sapiens
auccacuguccacagcaucuuccuuuaaacca

SEQ ID NO: 373873 - RNA, 32 nt, Homo Sapiens
aaggaaaggggagcguggagacguguucgagg

SEQ ID NO: 373874 - RNA, 32 nt, Homo Sapiens
agaccagccugggcagcauagcaagacacauc

SEQ ID NO: 373875 - RNA, 32 nt, Homo Sapiens
agugauuauuuuuuaaagucuucuuucaugua

SEQ ID NO: 373876 - RNA, 32 nt, Homo Sapiens
ucugccaccgcccgcgcccacccggccacggc

SEQ ID NO: 373877 - RNA, 32 nt, Homo Sapiens
agagcauaaccaacuugacaggggugcccagu

SEQ ID NO: 373878 - RNA, 32 nt, Homo Sapiens
ugugcaguuacuguuugugucuuugauauugc

SEQ ID NO: 373879 - RNA, 32 nt, Homo Sapiens
acugcggacccgucacuauccagcacgugcac

SEQ ID NO: 373880 - RNA, 32 nt, Homo Sapiens
caagugcagggugacgccuccuuuuggaaaug

SEQ ID NO: 373881 - RNA, 32 nt, Homo Sapiens
aguguguguagcauggggguguguacaacuua

SEQ ID NO: 373882 - RNA, 32 nt, Homo Sapiens
uauuuguaaucuuuuaccacuuugggguugcu

SEQ ID NO: 373883 - RNA, 32 nt, Homo Sapiens
cuguucauuccuuuaggugcuauacauuauuc

SEQ ID NO: 373884 - RNA, 32 nt, Homo Sapiens
caaccuaggaaucuccugggaaucuaucccua

SEQ ID NO: 373885 - RNA, 32 nt, Homo Sapiens
gagggaaggaugcaggcacagcagaagcauuc

SEQ ID NO: 373886 - RNA, 32 nt, Homo Sapiens
ccugggaacuggccaccuccauuguucuuugc

SEQ ID NO: 373887 - RNA, 32 nt, Homo Sapiens
gaaggacaacagcacccgccucacaggcuaag

SEQ ID NO: 373888 - RNA, 32 nt, Homo Sapiens
uccuuaaaacuaauuaaauguacauuucuaua

SEQ ID NO: 373889 - RNA, 32 nt, Homo Sapiens
uccugaagaacaagaagaaugcaaaaauuauc

SEQ ID NO: 373890 - RNA, 32 nt, Homo Sapiens
uuuuuaaaauauauuucauguauacuuauaaa

SEQ ID NO: 373891 - RNA, 32 nt, Homo Sapiens
aaaaaaugggagacaauuucacauggacuuug

SEQ ID NO: 373892 - RNA, 32 nt, Homo Sapiens
ggcagggacaccuggacaauauuuauuuuugc

SEQ ID NO: 373893 - RNA, 32 nt, Homo Sapiens
acccuucugcucccggccgccgcuuuccgccg

SEQ ID NO: 373894 - RNA, 32 nt, Homo Sapiens
uguugcuuuuucuggugggggcaaggggagcu

SEQ ID NO: 373895 - RNA, 32 nt, Homo Sapiens
cccggauacugcgccugcgccgcggcagaggc

SEQ ID NO: 373896 - RNA, 32 nt, Homo Sapiens
caaucacuauuuuuuucuuuuuuaucugguaa

SEQ ID NO: 373897 - RNA, 30 nt, Homo Sapiens
cuggacugaugaaugggggugccuggugag

SEQ ID NO: 373898 - RNA, 32 nt, Homo Sapiens
cuuucagccuacuguagacucuggaaguauac

SEQ ID NO: 373899 - RNA, 32 nt, Homo Sapiens
ccugaggggagacagagcaaccccuggacccc

SEQ ID NO: 373900 - RNA, 32 nt, Homo Sapiens
uuauucuaucaacuuuuaaagguuuuaaaccu

SEQ ID NO: 373901 - RNA, 32 nt, Homo Sapiens
gcagucacuccagugugaugcaggugacuacu

SEQ ID NO: 373902 - RNA, 32 nt, Homo Sapiens
cugugaagcgugcaggaugugcuucacaucag

SEQ ID NO: 373903 - RNA, 32 nt, Homo Sapiens
gugagaauauaaacucaaugugaaucacguga

SEQ ID NO: 373904 - RNA, 32 nt, Homo Sapiens
uccaguaccgagcucgggccugguguggaauu

SEQ ID NO: 373905 - RNA, 32 nt, Homo Sapiens
uaagaauucuucaucagauuucauuucagaaa

SEQ ID NO: 373906 - RNA, 32 nt, Homo Sapiens
cuucuaaauaaauaaacuuugagaauaaccca

SEQ ID NO: 373907 - RNA, 32 nt, Homo Sapiens
uguagauuuuaccacaucaauucauagcagua

SEQ ID NO: 373908 - RNA, 32 nt, Homo Sapiens
cucugcugccaccucugacaggugugccugcc

SEQ ID NO: 373909 - RNA, 32 nt, Homo Sapiens
acacagccagcaugaacugggcauuucugcag

SEQ ID NO: 373910 - RNA, 32 nt, Homo Sapiens
cccuccuaccugcgcacguggugccgcugcug

SEQ ID NO: 373911 - RNA, 32 nt, Homo Sapiens
auaauuuuaaacagucauugcuuucaagauca

SEQ ID NO: 373912 - RNA, 32 nt, Homo Sapiens
caggcacgucccggaccuguggggccccagag

SEQ ID NO: 373913 - RNA, 32 nt, Homo Sapiens
uuacugaacucauugggacuacugugcuaguu

SEQ ID NO: 373914 - RNA, 32 nt, Homo Sapiens
ccgguggaaagaagagaagagaagguggacag

SEQ ID NO: 373915 - RNA, 32 nt, Homo Sapiens
auggugcccacuuucucgacuuuggccaggau

SEQ ID NO: 373916 - RNA, 32 nt, Homo Sapiens
cauggagccaagggugggguuucaccugcgaa

SEQ ID NO: 373917 - RNA, 32 nt, Homo Sapiens
guuucuguuccaaaugauuccauccaccuuuc

SEQ ID NO: 373918 - RNA, 32 nt, Homo Sapiens
agggaagagaggaaaaccaaccccagggugca

SEQ ID NO: 373919 - RNA, 32 nt, Homo Sapiens
uucauaaaagagaaaggauauuaaaauauaaa

SEQ ID NO: 373920 - RNA, 32 nt, Homo Sapiens
guauugacuaaaauaucauucgucagggaaau

SEQ ID NO: 373921 - RNA, 32 nt, Homo Sapiens
ggacccgagcgaaugugacaugugaaauaaaa

SEQ ID NO: 373922 - RNA, 32 nt, Homo Sapiens
ggcugacaugcccagggcuccacucucaucua

SEQ ID NO: 373923 - RNA, 32 nt, Homo Sapiens
cagaagcugguagucaugugggcuugccuucu

SEQ ID NO: 373924 - RNA, 32 nt, Homo Sapiens
uguuacagauaaauuuauggacuucucuuuug

SEQ ID NO: 373925 - RNA, 32 nt, Homo Sapiens
agcggcgacacacuaggagucccggccggcca

SEQ ID NO: 373926 - RNA, 32 nt, Homo Sapiens
acuuugccauauauggcauauuuguguaaaag

SEQ ID NO: 373927 - RNA, 32 nt, Homo Sapiens
ucugaguagcagcaauaggguuuucaucauuc

SEQ ID NO: 373928 - RNA, 32 nt, Homo Sapiens
ccugccgaagccagcugccugcugccucagca

SEQ ID NO: 373929 - RNA, 32 nt, Homo Sapiens
auuuaaaauauguuaaauuggcuugaaauuuu

SEQ ID NO: 373930 - RNA, 32 nt, Homo Sapiens
ccaucuggugccuuuccacacagaacuggcag

SEQ ID NO: 373931 - RNA, 32 nt, Homo Sapiens
ccacuuuucuccugggggcugggcuggggguu

SEQ ID NO: 373932 - RNA, 29 nt, Homo Sapiens
cacacucggggaccgcggguggccggagg

SEQ ID NO: 373933 - RNA, 32 nt, Homo Sapiens
gcaggccgcgguuuccuuuguggacguggcga

SEQ ID NO: 373934 - RNA, 32 nt, Homo Sapiens
ucagggguccccgaggccgagcagggucccga

SEQ ID NO: 373935 - RNA, 32 nt, Homo Sapiens
ccucccuccauccccacuuuggcguuugccuu

SEQ ID NO: 373936 - RNA, 32 nt, Homo Sapiens
uacucuggccccagcaugcugcuccuugggau

SEQ ID NO: 373937 - RNA, 32 nt, Homo Sapiens
caccuuggaugaaggauauuaauuaugucaug

SEQ ID NO: 373938 - RNA, 32 nt, Homo Sapiens
caccgcaggccugucuuccuauucaccguggg

SEQ ID NO: 373939 - RNA, 32 nt, Homo Sapiens
aacuggagaguaagaaugagcgguguggggcu

SEQ ID NO: 373940 - RNA, 32 nt, Homo Sapiens
gaggacaguggcacaaucauggcugauugcag

SEQ ID NO: 373941 - RNA, 32 nt, Homo Sapiens
aguuuccuuccuuccuucucggcagcgcuccg

SEQ ID NO: 373942 - RNA, 32 nt, Homo Sapiens
aucuauuuccacacccagugagcauuggaaac

SEQ ID NO: 373943 - RNA, 32 nt, Homo Sapiens
ucuguccgcgcgcccugcaucccggccccggg

SEQ ID NO: 373944 - RNA, 32 nt, Homo Sapiens
cccaauguuuauucuccagucauuucauuaag

SEQ ID NO: 373945 - RNA, 32 nt, Homo Sapiens
cgcugcgccgucugcgggcgcuuccgggccac

SEQ ID NO: 373946 - RNA, 32 nt, Homo Sapiens
cuccuacaagccucugguguuuuccgugccca

SEQ ID NO: 373947 - RNA, 32 nt, Homo Sapiens
auaauguucuuacuuuuuucuauucaauuuug

SEQ ID NO: 373948 - RNA, 32 nt, Homo Sapiens
uuuugaaacugcuuaguucagaauacaucgaa

SEQ ID NO: 373949 - RNA, 31 nt, Homo Sapiens
gcugcacagcgcagcgacacaggggacgaag

SEQ ID NO: 373950 - RNA, 30 nt, Homo Sapiens
caggcaccugucugcaucccucuggccagu

SEQ ID NO: 373951 - RNA, 32 nt, Homo Sapiens
aggacccugcaggacuucugugcccacugggu

SEQ ID NO: 373952 - RNA, 32 nt, Homo Sapiens
ugggcugaccagugcccgccucugggcuugac

SEQ ID NO: 373953 - RNA, 32 nt, Homo Sapiens
uucccugcucccucgcuggcaagccccaccac

SEQ ID NO: 373954 - RNA, 32 nt, Homo Sapiens
cuggguuugacugugcuuaccaaugagugguu

SEQ ID NO: 373955 - RNA, 32 nt, Homo Sapiens
gaggugcugucauggccugccucaacccggug

SEQ ID NO: 373956 - RNA, 28 nt, Homo Sapiens
ugggguccgcggccgccggagcguuccg

SEQ ID NO: 373957 - RNA, 32 nt, Homo Sapiens
agcacaggccuggcccugcuccaggugcagga

SEQ ID NO: 373958 - RNA, 32 nt, Homo Sapiens
guuacaagugucugguccuuucugagggaggc

SEQ ID NO: 373959 - RNA, 32 nt, Homo Sapiens
ccgaggggagucccgcgccgacuaugcccggg

SEQ ID NO: 373960 - RNA, 32 nt, Homo Sapiens
ucugggauuacagagacugaaaaacuuggcuc

SEQ ID NO: 373961 - RNA, 32 nt, Homo Sapiens
cacuguagccaggaaccugugcaugccaccca

SEQ ID NO: 373962 - RNA, 32 nt, Homo Sapiens
uuccaaggagugagccuaagacuuuuuucccc

SEQ ID NO: 373963 - RNA, 32 nt, Homo Sapiens
uacguuuguguauguguguacacgccauuauc

SEQ ID NO: 373964 - RNA, 32 nt, Homo Sapiens
ugucuuucaggaugaaugccauccacacaaaa

SEQ ID NO: 373965 - RNA, 30 nt, Homo Sapiens
gccggggaggucggcgcggguggcuggaga

SEQ ID NO: 373966 - RNA, 32 nt, Homo Sapiens
cugaguuagacuauuucccacauguucucugc

SEQ ID NO: 373967 - RNA, 32 nt, Homo Sapiens
gccaugguucccgcggcggcgccgggcgccug

SEQ ID NO: 373968 - RNA, 32 nt, Homo Sapiens
agcuaaagccccagagacgugcucagccccag

SEQ ID NO: 373969 - RNA, 32 nt, Homo Sapiens
gauauacaaauauauuuaauugugucauauua

SEQ ID NO: 373970 - RNA, 32 nt, Homo Sapiens
aguaaauaugcacuuuuaaaaugcaaucaaaa

SEQ ID NO: 373971 - RNA, 31 nt, Homo Sapiens
ccccucccagccgcagcaccaagggcuugcu

SEQ ID NO: 373972 - RNA, 32 nt, Homo Sapiens
aaauuugagugauguauacauaaaaaaaaaaa

SEQ ID NO: 373973 - RNA, 32 nt, Homo Sapiens
uucuugacuuuaaauacaaacaucugauauuc

SEQ ID NO: 373974 - RNA, 32 nt, Homo Sapiens
gaggagcaugcacacaaugucaacacugcuuu

SEQ ID NO: 373975 - RNA, 32 nt, Homo Sapiens
ugccacuucaggcuagagagcucgcacccucc

SEQ ID NO: 373976 - RNA, 32 nt, Homo Sapiens
auuaaagauuccuaaaaauauaauucugauuu

SEQ ID NO: 373977 - RNA, 32 nt, Homo Sapiens
cagggugggggagaggggcagggaccucggua

SEQ ID NO: 373978 - RNA, 32 nt, Homo Sapiens
ccugaaggccauccucuuucugcugugugucu

SEQ ID NO: 373979 - RNA, 32 nt, Homo Sapiens
aacucguagaucucauucccaaggcugguccu

SEQ ID NO: 373980 - RNA, 32 nt, Homo Sapiens
caucguuugggguuuuacuugauaccacuagc

SEQ ID NO: 373981 - RNA, 32 nt, Homo Sapiens
gugauguuaguaggugugauaugcaaccuggu

SEQ ID NO: 373982 - RNA, 32 nt, Homo Sapiens
uccccagccaaggggccggcucucgucacugg

SEQ ID NO: 373983 - RNA, 32 nt, Homo Sapiens
aaaguaacacaucaguaaaaugcagcuacuuu

SEQ ID NO: 373984 - RNA, 32 nt, Homo Sapiens
caugaacguuuucucuucaccgccguggggug

SEQ ID NO: 373985 - RNA, 32 nt, Homo Sapiens
ccgacggccggggccuucugacggucugaggu

SEQ ID NO: 373986 - RNA, 32 nt, Homo Sapiens
cggggaugggagaguacacagauucacaacuc

SEQ ID NO: 373987 - RNA, 31 nt, Homo Sapiens
uaacaaucaggcauuuuuaauuagauaaucc

SEQ ID NO: 373988 - RNA, 32 nt, Homo Sapiens
agguaggcaccgugacucggcugccugugcag

SEQ ID NO: 373989 - RNA, 30 nt, Homo Sapiens
ccuuaucauucuacaucccaucuuccugug

SEQ ID NO: 373990 - RNA, 32 nt, Homo Sapiens
cagggagcagagcuaucugcauuuguauuuag

SEQ ID NO: 373991 - RNA, 32 nt, Homo Sapiens
aucugcugaguuccuaucaagcaccauucuug

SEQ ID NO: 373992 - RNA, 32 nt, Homo Sapiens
ccucuuacuuuuggcgugcgcgcgcacacaca

SEQ ID NO: 373993 - RNA, 32 nt, Homo Sapiens
ccagagauucaccaccuggggcccaggaucag

SEQ ID NO: 373994 - RNA, 32 nt, Homo Sapiens
guucuuggauuucuggcagcagcccucauugg

SEQ ID NO: 373995 - RNA, 32 nt, Homo Sapiens
cuguccaagcucgcggacgccggcggcguuuu

SEQ ID NO: 373996 - RNA, 32 nt, Homo Sapiens
uacaacuaugguuuuuuaaugaucuuauuucu

SEQ ID NO: 373997 - RNA, 32 nt, Homo Sapiens
gcugcgaggaggaggcggcggcggcgcaggag

SEQ ID NO: 373998 - RNA, 32 nt, Homo Sapiens
cuuaaauuaaauuuaaacaacuaaugcucuuu

SEQ ID NO: 373999 - RNA, 32 nt, Homo Sapiens
gacuggcccgggagacacgaggcgcccagaag

SEQ ID NO: 374000 - RNA, 32 nt, Homo Sapiens
aggccugcuccucggcggagcggcgggcccgc

SEQ ID NO: 374001 - RNA, 32 nt, Homo Sapiens
cgccagguggccuuccucucccggucucggga

SEQ ID NO: 374002 - RNA, 32 nt, Homo Sapiens
auauuaauauaaaaugcauucaguuuucuuua

SEQ ID NO: 374003 - RNA, 32 nt, Homo Sapiens
uacuugcuguauaaguuuuccuuuuguccugg

SEQ ID NO: 374004 - RNA, 32 nt, Homo Sapiens
ccaaggcucccugccccuccucaugccccucu

SEQ ID NO: 374005 - RNA, 32 nt, Homo Sapiens
auucauguauugguuucaguaccaagugacug

SEQ ID NO: 374006 - RNA, 32 nt, Homo Sapiens
acugauuuuuaaaaagaaguaauuuuucuccc

SEQ ID NO: 374007 - RNA, 32 nt, Homo Sapiens
gcagugguggugacugauagggacaggaagga

SEQ ID NO: 374008 - RNA, 32 nt, Homo Sapiens
agccagcauuuccucagucucccuuugugguu

SEQ ID NO: 374009 - RNA, 32 nt, Homo Sapiens
gugggaaggugacaccggugagaagugggaac

SEQ ID NO: 374010 - RNA, 32 nt, Homo Sapiens
gcucacugcagccucuaccuccccaggcucag

SEQ ID NO: 374011 - RNA, 32 nt, Homo Sapiens
gggcugggaagucuuuagugcuaacauccccu

SEQ ID NO: 374012 - RNA, 32 nt, Homo Sapiens
cuaaaugcauuuuucuuuuuucguuaauguuc

SEQ ID NO: 374013 - RNA, 32 nt, Homo Sapiens
uccuaucucguuacucugucuccauuaucucc

SEQ ID NO: 374014 - RNA, 32 nt, Homo Sapiens
gcaaggcugccagcaucuuugcucuccaccuc

SEQ ID NO: 374015 - RNA, 32 nt, Homo Sapiens
ggagcggcgccagcacgagguucccagccgcu

SEQ ID NO: 374016 - RNA, 32 nt, Homo Sapiens
ggaaagcguuucuguguagaaacuggaagcug

SEQ ID NO: 374017 - RNA, 32 nt, Homo Sapiens
gaguguaaauguucguaugagcugugugugaa

SEQ ID NO: 374018 - RNA, 32 nt, Homo Sapiens
gccgggcugcugcugcugcugcuccaggugcu

SEQ ID NO: 374019 - RNA, 32 nt, Homo Sapiens
gauucccaaugagaaguucuauuuucauguuc

SEQ ID NO: 374020 - RNA, 32 nt, Homo Sapiens
uuaucuuauaugccagaggcaccaggccagau

SEQ ID NO: 374021 - RNA, 32 nt, Homo Sapiens
auuuuuaaagaguugguaaaucuuaccuguaa

SEQ ID NO: 374022 - RNA, 32 nt, Homo Sapiens
uucaguaugauucuuuccaaaguuugcugcug

SEQ ID NO: 374023 - RNA, 32 nt, Homo Sapiens
ucagaaggcugccuccugcugcugcuguacau

SEQ ID NO: 374024 - RNA, 32 nt, Homo Sapiens
uuuuuuuggguuuuuuuuuuuacuauauaucu

SEQ ID NO: 374025 - RNA, 32 nt, Homo Sapiens
ggccugaggagcucacucugggccuaccuggu

SEQ ID NO: 374026 - RNA, 32 nt, Homo Sapiens
ugcugccaggacuugguagagauggcaggaag

SEQ ID NO: 374027 - RNA, 32 nt, Homo Sapiens
acagacguucccucgcggcccuggcaccucca

SEQ ID NO: 374028 - RNA, 32 nt, Homo Sapiens
ucaccugaggucgggauuuugagaccagccug

SEQ ID NO: 374029 - RNA, 32 nt, Homo Sapiens
agcugccuggggacuggggagcagccacaugc

SEQ ID NO: 374030 - RNA, 32 nt, Homo Sapiens
caggacucgcgugcaaagcccaggcccgggcg

SEQ ID NO: 374031 - RNA, 32 nt, Homo Sapiens
cuggcaggguagggaaggaggaccccgggcac

SEQ ID NO: 374032 - RNA, 32 nt, Homo Sapiens
gaucuccaacucucucuguguccguguggagg

SEQ ID NO: 374033 - RNA, 32 nt, Homo Sapiens
gagcuggcuguggcuucucccucccccauccc

SEQ ID NO: 374034 - RNA, 32 nt, Homo Sapiens
ccgucacuccuccgccuguuuuuuaaacuuuu

SEQ ID NO: 374035 - RNA, 28 nt, Homo Sapiens
ugacaaguuacaguccaacuggucuucc

SEQ ID NO: 374036 - RNA, 32 nt, Homo Sapiens
gagaggaugcgcuccccggcgcccagcagcag

SEQ ID NO: 374037 - RNA, 32 nt, Homo Sapiens
ccaagaaaaugguguuggguuuguucuaggag

SEQ ID NO: 374038 - RNA, 32 nt, Homo Sapiens
gggccagccgcccacccccacccccagugcag

SEQ ID NO: 374039 - RNA, 32 nt, Homo Sapiens
agcauauuuaaacaaaccaacaaaaugaaaua

SEQ ID NO: 374040 - RNA, 32 nt, Homo Sapiens
cuuaugggcgucugcugcagucuggcugcggu

SEQ ID NO: 374041 - RNA, 32 nt, Homo Sapiens
ccaaggcugacaaugggacaagagggcggagg

SEQ ID NO: 374042 - RNA, 32 nt, Homo Sapiens
agcagagccaucucuugauggagucuaaguag

SEQ ID NO: 374043 - RNA, 32 nt, Homo Sapiens
aggaggauaugaaugggaccaguagccucaua

SEQ ID NO: 374044 - RNA, 32 nt, Homo Sapiens
guguaaaauaaucaguauaauaaaauucuaca

SEQ ID NO: 374045 - RNA, 32 nt, Homo Sapiens
ugcaugcccuuaaacauuggacagugagguca

SEQ ID NO: 374046 - RNA, 32 nt, Homo Sapiens
gaaauuuuguuucaacugaauuuguaauuaac

SEQ ID NO: 374047 - RNA, 32 nt, Homo Sapiens
ucgugcccuggaaggugagcgcggccgagcug

SEQ ID NO: 374048 - RNA, 32 nt, Homo Sapiens
aaugcaaaaaucagccgggcgugguggugggc

SEQ ID NO: 374049 - RNA, 32 nt, Homo Sapiens
uuaccucagugaacaaggggaagcucacaaca

SEQ ID NO: 374050 - RNA, 32 nt, Homo Sapiens
auucuuuccaugucucaucauucuuguuuuug

SEQ ID NO: 374051 - RNA, 32 nt, Homo Sapiens
ccacggggcuccuggcuugcagcuggugaugg

SEQ ID NO: 374052 - RNA, 32 nt, Homo Sapiens
cuuuguuugcaaacacugaaugagauuagggg

SEQ ID NO: 374053 - RNA, 32 nt, Homo Sapiens
agacaaagaaggaaaagaguaucaaaggcaga

SEQ ID NO: 374054 - RNA, 32 nt, Homo Sapiens
auuugugaaaauagaaacguuauuuuuccuag

SEQ ID NO: 374055 - RNA, 32 nt, Homo Sapiens
gauccaucuucagagcuucucuuucuucccca

SEQ ID NO: 374056 - RNA, 32 nt, Homo Sapiens
gcuccuggggggcaucagccacggccaggcag

SEQ ID NO: 374057 - RNA, 32 nt, Homo Sapiens
uagggucacacgcgugcccuguugcugaaugu

SEQ ID NO: 374058 - RNA, 32 nt, Homo Sapiens
gaaacuucacaguggugacuaugcugccauuu

SEQ ID NO: 374059 - RNA, 32 nt, Homo Sapiens
acggaaugcugaacucuuccuccagcuggaaa

SEQ ID NO: 374060 - RNA, 32 nt, Homo Sapiens
uuccgccgccgcugcuggcgccgcaggcuggc

SEQ ID NO: 374061 - RNA, 32 nt, Homo Sapiens
ucggcgucugcacuggcuucccgucauccgag

SEQ ID NO: 374062 - RNA, 32 nt, Homo Sapiens
uaaaccuugaaaugaauuuacuguaugaauag

SEQ ID NO: 374063 - RNA, 32 nt, Homo Sapiens
ugaaauaacuaaaaacuaucugaaaguauacu

SEQ ID NO: 374064 - RNA, 32 nt, Homo Sapiens
gcuucaagauucaaauucagaaauauacuauc

SEQ ID NO: 374065 - RNA, 31 nt, Homo Sapiens
gccaggcugccuugccugccuucagagcucu

SEQ ID NO: 374066 - RNA, 32 nt, Homo Sapiens
acuaugcugggcucuggaguuaugacaacucc

SEQ ID NO: 374067 - RNA, 32 nt, Homo Sapiens
aaugaggcggaccagcagguucccggggaucu

SEQ ID NO: 374068 - RNA, 32 nt, Homo Sapiens
aacccuggugucaucauccgugauccaugagg

SEQ ID NO: 374069 - RNA, 32 nt, Homo Sapiens
aaucauuccuucccaacaguuccccaaagucu

SEQ ID NO: 374070 - RNA, 32 nt, Homo Sapiens
aaggcuaauauauaauuuuucuuaauagcuga

SEQ ID NO: 374071 - RNA, 32 nt, Homo Sapiens
auguuagggguuggauccuagaguagaugccu

SEQ ID NO: 374072 - RNA, 32 nt, Homo Sapiens
agggugcacugacuauuagcuggcccauagga

SEQ ID NO: 374073 - RNA, 32 nt, Homo Sapiens
gcagccaccggccccgcucccggagcccagcg

SEQ ID NO: 374074 - RNA, 32 nt, Homo Sapiens
guccugugguuuuccaguuggugaccaccaug

SEQ ID NO: 374075 - RNA, 32 nt, Homo Sapiens
uguaguguacacucccccggugacagggugcu

SEQ ID NO: 374076 - RNA, 32 nt, Homo Sapiens
uggcgcagaggcgggaggcggaggcgggaggg

SEQ ID NO: 374077 - RNA, 31 nt, Homo Sapiens
uguuuucauuugauuuuguuaagagugcagu

SEQ ID NO: 374078 - RNA, 32 nt, Homo Sapiens
auccggguucgaaugaauaucucaaggcagga

SEQ ID NO: 374079 - RNA, 32 nt, Homo Sapiens
cgccuccucccuccccuugaggcuggagcgug

SEQ ID NO: 374080 - RNA, 32 nt, Homo Sapiens
agugaauggccagagugcgucuggagggaaca

SEQ ID NO: 374081 - RNA, 32 nt, Homo Sapiens
ccaauggcuccccucugcccagcccuucccag

SEQ ID NO: 374082 - RNA, 32 nt, Homo Sapiens
accagaguuugugcagaaugagcuugcugaca

SEQ ID NO: 374083 - RNA, 32 nt, Homo Sapiens
gcucccgccgcggcggcugccauggaggccau

SEQ ID NO: 374084 - RNA, 32 nt, Homo Sapiens
gcggaacuaugaaaagugggcuuggagauggc

SEQ ID NO: 374085 - RNA, 32 nt, Homo Sapiens
uuaugaaaaugaaauaugcaaaugauccaaug

SEQ ID NO: 374086 - RNA, 32 nt, Homo Sapiens
gcgggugugucugcggaaccuccaccugagcu

SEQ ID NO: 374087 - RNA, 32 nt, Homo Sapiens
ugggaaaggaacgagcaaacaucccucuaaga

SEQ ID NO: 374088 - RNA, 32 nt, Homo Sapiens
aaaggagagaagaucugcgacccuucggcaaa

SEQ ID NO: 374089 - RNA, 32 nt, Homo Sapiens
aauuuacacacacacacacacacacacacaca

SEQ ID NO: 374090 - RNA, 32 nt, Homo Sapiens
gacauccaugugggaauuauuuccuccucccu

SEQ ID NO: 374091 - RNA, 32 nt, Homo Sapiens
uuugaaaacaauucagaucgugucacaagaau

SEQ ID NO: 374092 - RNA, 32 nt, Homo Sapiens
ugggaagcugggacccacggacucuucacaca

SEQ ID NO: 374093 - RNA, 32 nt, Homo Sapiens
accuguaaucccaacacuuugggaggcuuugg

SEQ ID NO: 374094 - RNA, 32 nt, Homo Sapiens
gaggcaggagaauggagugaacccgggaggca

SEQ ID NO: 374095 - RNA, 32 nt, Homo Sapiens
gucuucacugucagaagcugaacugacuuggg

SEQ ID NO: 374096 - RNA, 32 nt, Homo Sapiens
agcucuugcuucccuuucagcuuucuuccauc

SEQ ID NO: 374097 - RNA, 32 nt, Homo Sapiens
cuacaauauuccacacagguuuuuggccacag

SEQ ID NO: 374098 - RNA, 32 nt, Homo Sapiens
acucaaaaccuguuuauaaccaaagaauucau

SEQ ID NO: 374099 - RNA, 32 nt, Homo Sapiens
aucagauucuguuugcagauggaucuguuugg

SEQ ID NO: 374100 - RNA, 32 nt, Homo Sapiens
cacagacuggcacuuuacccucucaguuugga

SEQ ID NO: 374101 - RNA, 32 nt, Homo Sapiens
cuugugaccuaauucuagagaaugggaagaag

SEQ ID NO: 374102 - RNA, 32 nt, Homo Sapiens
cuaggauuuggguucugccuguggcuauuugc

SEQ ID NO: 374103 - RNA, 32 nt, Homo Sapiens
aauaccuuagacagaggcuguccucuacacag

SEQ ID NO: 374104 - RNA, 32 nt, Homo Sapiens
gccacuccaaggggaaggaucccucuccucuc

SEQ ID NO: 374105 - RNA, 32 nt, Homo Sapiens
caggaaccaugagcccugcagccccggucccg

SEQ ID NO: 374106 - RNA, 32 nt, Homo Sapiens
aaccuguuuuccauuuguauuaacucaucucc

SEQ ID NO: 374107 - RNA, 32 nt, Homo Sapiens
ccacucuguucucugccuugucucucuuuguc

SEQ ID NO: 374108 - RNA, 30 nt, Homo Sapiens
ggcagaaguuggagugaugagucuacaagc

SEQ ID NO: 374109 - RNA, 32 nt, Homo Sapiens
gcugggcggcgcgcggacuggggccauggcgu

SEQ ID NO: 374110 - RNA, 32 nt, Homo Sapiens
ucccaggugcuuauuggacauccuucgagggg

SEQ ID NO: 374111 - RNA, 32 nt, Homo Sapiens
ggcggggugggggaggcggggagagugcgggg

SEQ ID NO: 374112 - RNA, 32 nt, Homo Sapiens
agaaaggcugcugggcuaggccugcugcuguu

SEQ ID NO: 374113 - RNA, 29 nt, Homo Sapiens
gucaucauauguaaaugcuauaugcacag

SEQ ID NO: 374114 - RNA, 32 nt, Homo Sapiens
gacauuaaauuugguggaccaagcccccagua

SEQ ID NO: 374115 - RNA, 32 nt, Homo Sapiens
ggaacugaggacugaggccaaagugaaucaag

SEQ ID NO: 374116 - RNA, 32 nt, Homo Sapiens
cugcuuuguaaaaaugaacaaacaugagacug

SEQ ID NO: 374117 - RNA, 32 nt, Homo Sapiens
uuauggaagcuacugaauaaaagaagggggua

SEQ ID NO: 374118 - RNA, 32 nt, Homo Sapiens
ccaggccaaggagacgggcgcuccaggguccc

SEQ ID NO: 374119 - RNA, 32 nt, Homo Sapiens
uuuauccaaauuuaguuguaacucuguuuaua

SEQ ID NO: 374120 - RNA, 32 nt, Homo Sapiens
aacaugauauauauuucuguagucuucuuuaa

SEQ ID NO: 374121 - RNA, 32 nt, Homo Sapiens
uucucaggggccuggggccuggaugggggcug

SEQ ID NO: 374122 - RNA, 32 nt, Homo Sapiens
auugccucauuuccccuggaaaagaaacaugg

SEQ ID NO: 374123 - RNA, 32 nt, Homo Sapiens
cuggaacaagcacucucuuuuucaccacauag

SEQ ID NO: 374124 - RNA, 32 nt, Homo Sapiens
cuccuggcacugggcuuggcaggugcaaaugu

SEQ ID NO: 374125 - RNA, 32 nt, Homo Sapiens
gacaugaacguuuuaacauaguaaauccucuu

SEQ ID NO: 374126 - RNA, 32 nt, Homo Sapiens
aaacagcaaagauagauuucagagcacagcag

SEQ ID NO: 374127 - RNA, 32 nt, Homo Sapiens
gccaccuucccugcaaugggugcacacgcggc

SEQ ID NO: 374128 - RNA, 32 nt, Homo Sapiens
acuuuaaagguuuccucugugcuuuuccugcg

SEQ ID NO: 374129 - RNA, 32 nt, Homo Sapiens
caauugguaugacaggggcauuacucuagugu

SEQ ID NO: 374130 - RNA, 32 nt, Homo Sapiens
gaaguccuggaagauagcaugcgugggaagua

SEQ ID NO: 374131 - RNA, 32 nt, Homo Sapiens
aagacguauauuauuuuacuauuaaagaaaaa

SEQ ID NO: 374132 - RNA, 32 nt, Homo Sapiens
gggcaaacagagcuacugagacuuggaaccuc

SEQ ID NO: 374133 - RNA, 32 nt, Homo Sapiens
uccuuugacaccuauuuuauugguguuuaaag

SEQ ID NO: 374134 - RNA, 32 nt, Homo Sapiens
auaccugaguaaaacuauccuuuuuaaaauca

SEQ ID NO: 374135 - RNA, 32 nt, Homo Sapiens
aacuuaaaaaggaagagagucaauuuagauuu

SEQ ID NO: 374136 - RNA, 32 nt, Homo Sapiens
cgggaggcgguggggcaugggaggaaggaggc

SEQ ID NO: 374137 - RNA, 32 nt, Homo Sapiens
ucugcgacgccccuccuucucuuaagccuuuc

SEQ ID NO: 374138 - RNA, 32 nt, Homo Sapiens
ggcuacccauccccuucagacauuccugaaaa

SEQ ID NO: 374139 - RNA, 32 nt, Homo Sapiens
gagagggcaguugggugugcuggcuguucuca

SEQ ID NO: 374140 - RNA, 32 nt, Homo Sapiens
ucauucaucacugcaucuccaacgccuagcac

SEQ ID NO: 374141 - RNA, 32 nt, Homo Sapiens
uuuaauauagcaucuuaucaaauaauucaucc

SEQ ID NO: 374142 - RNA, 32 nt, Homo Sapiens
cuuuggagaacaaaaugcagaagugaugcugu

SEQ ID NO: 374143 - RNA, 32 nt, Homo Sapiens
cgguucccaagccccaagacccgccucagaac

SEQ ID NO: 374144 - RNA, 32 nt, Homo Sapiens
ugaauacugcuggcccuggugccuuggcagag

SEQ ID NO: 374145 - RNA, 32 nt, Homo Sapiens
uuuauuuaucugagcaauaacuucuauguugg

SEQ ID NO: 374146 - RNA, 32 nt, Homo Sapiens
ccccaacaacugagucugaacgaaugccacgu

SEQ ID NO: 374147 - RNA, 32 nt, Homo Sapiens
gccuguaucaccugcccuucugcugacacucc

SEQ ID NO: 374148 - RNA, 32 nt, Homo Sapiens
cugauggacaaaugcucugugcucucuaguga

SEQ ID NO: 374149 - RNA, 32 nt, Homo Sapiens
cagucgaacaauuaacuucagauccagcaggu

SEQ ID NO: 374150 - RNA, 32 nt, Homo Sapiens
ucuaagaggagaaauaugauggaugaagagcu

SEQ ID NO: 374151 - RNA, 32 nt, Homo Sapiens
gggcacacuccagccugacuuuggcacucugc

SEQ ID NO: 374152 - RNA, 32 nt, Homo Sapiens
uccuagcggcccgggccgcgaccacgcugccc

SEQ ID NO: 374153 - RNA, 32 nt, Homo Sapiens
ucagcagaauaaacucuuuacaauuaauaacu

SEQ ID NO: 374154 - RNA, 32 nt, Homo Sapiens
gaaagacacacacccaggcaaccccugaggcu

SEQ ID NO: 374155 - RNA, 32 nt, Homo Sapiens
cuaaagggaaagggcuuuugcaucuaaucaca

SEQ ID NO: 374156 - RNA, 32 nt, Homo Sapiens
ccccacccccacacuuccacuccaccucacac

SEQ ID NO: 374157 - RNA, 32 nt, Homo Sapiens
uccuacgacuacuccggcuacgaugccagcuc

SEQ ID NO: 374158 - RNA, 32 nt, Homo Sapiens
uggcaugcaccuguaaucccaacuacucugga

SEQ ID NO: 374159 - RNA, 32 nt, Homo Sapiens
agagcuccccguuuccucccuccucccugucc

SEQ ID NO: 374160 - RNA, 31 nt, Homo Sapiens
aggugaggccggauccucagagccccgacac

SEQ ID NO: 374161 - RNA, 32 nt, Homo Sapiens
agcuagaagccuccggucggccugcagugccc

SEQ ID NO: 374162 - RNA, 32 nt, Homo Sapiens
cuucuuugauaaagauuacaucaacaagcacc

SEQ ID NO: 374163 - RNA, 32 nt, Homo Sapiens
ccgagccgcgcgcgacaugagccacgggaagg

SEQ ID NO: 374164 - RNA, 32 nt, Homo Sapiens
guaggagggagggugggcccacugcuuuggag

SEQ ID NO: 374165 - RNA, 32 nt, Homo Sapiens
cccucuccugguggcaggccacuucccuccca

SEQ ID NO: 374166 - RNA, 32 nt, Homo Sapiens
caagaccacagugugccuuggacaucagcagg

SEQ ID NO: 374167 - RNA, 32 nt, Homo Sapiens
acccuccaucccucaccuuccuccacucuaag

SEQ ID NO: 374168 - RNA, 32 nt, Homo Sapiens
aaauuggacaccuuugguacccuggucucagu

SEQ ID NO: 374169 - RNA, 32 nt, Homo Sapiens
aauuaguuuuauuuuucuuaacuuuaaauaua

SEQ ID NO: 374170 - RNA, 32 nt, Homo Sapiens
gacauauaaaaaguugguuuaaugccuuuauu

SEQ ID NO: 374171 - RNA, 32 nt, Homo Sapiens
gcauaaccuugauuggagagacauggguaccu

SEQ ID NO: 374172 - RNA, 32 nt, Homo Sapiens
cuccaagcugggagcuccugggcccccaccau

SEQ ID NO: 374173 - RNA, 32 nt, Homo Sapiens
acuuugcccucccuucuuccugucccaaagau

SEQ ID NO: 374174 - RNA, 32 nt, Homo Sapiens
cagguuaagccagcaauuucagggccaaccga

SEQ ID NO: 374175 - RNA, 32 nt, Homo Sapiens
agaaucugggggagggagcgcgugcagggagg

SEQ ID NO: 374176 - RNA, 32 nt, Homo Sapiens
gggggacagcgcagggccauggaggaggcggc

SEQ ID NO: 374177 - RNA, 32 nt, Homo Sapiens
auucccagguccugguacccagcccucaguug

SEQ ID NO: 374178 - RNA, 32 nt, Homo Sapiens
guuugggaagggagcugggggaggcaguggcg

SEQ ID NO: 374179 - RNA, 32 nt, Homo Sapiens
cuaaaauguuccccaggggccuucggcgaguc

SEQ ID NO: 374180 - RNA, 32 nt, Homo Sapiens
gcauugagugaacauccauccuuguaccuuga

SEQ ID NO: 374181 - RNA, 32 nt, Homo Sapiens
aaaccaaagggcaagaucucugcuuaugccuu

SEQ ID NO: 374182 - RNA, 32 nt, Homo Sapiens
gugaccuccagcuuggugagguugccugaaga

SEQ ID NO: 374183 - RNA, 32 nt, Homo Sapiens
gccgggaggauggccugggcugcggguggggc

SEQ ID NO: 374184 - RNA, 32 nt, Homo Sapiens
uuguguguuuaacguaaauauaugucagaguu

SEQ ID NO: 374185 - RNA, 32 nt, Homo Sapiens
agaauccucguucuuuuccccaaucguucggg

SEQ ID NO: 374186 - RNA, 28 nt, Homo Sapiens
uauaugucuaauucuauguguuuugucu

SEQ ID NO: 374187 - RNA, 32 nt, Homo Sapiens
cauuccauuggcugccccuccucccaccugcc

SEQ ID NO: 374188 - RNA, 32 nt, Homo Sapiens
ggcuaagugugguggcucaugccuguaguccc

SEQ ID NO: 374189 - RNA, 32 nt, Homo Sapiens
ucacuggacuaccaccuggcaggucuucuacc

SEQ ID NO: 374190 - RNA, 32 nt, Homo Sapiens
auucaauaaacauuuuaauuguuugaaaauau

SEQ ID NO: 374191 - RNA, 32 nt, Homo Sapiens
cugucgcagccaccgcuguggucgccagucag

SEQ ID NO: 374192 - RNA, 32 nt, Homo Sapiens
aguuauuaucuaaagaccuggaaucaagagaa

SEQ ID NO: 374193 - RNA, 32 nt, Homo Sapiens
guucuguaucuccucagccauguaucuuaaau

SEQ ID NO: 374194 - RNA, 32 nt, Homo Sapiens
uucauuguucacuucuaaaccaaaaauuaugu

SEQ ID NO: 374195 - RNA, 32 nt, Homo Sapiens
ucuggggcaggagagagaggccugggggccac

SEQ ID NO: 374196 - RNA, 32 nt, Homo Sapiens
cuacaucuauagauauagauauacacacauau

SEQ ID NO: 374197 - RNA, 32 nt, Homo Sapiens
agcaaaccagcuugggcuucuuuuuguuuuuu

SEQ ID NO: 374198 - RNA, 31 nt, Homo Sapiens
ugguggcuccagacccugccccaugcagaag

SEQ ID NO: 374199 - RNA, 32 nt, Homo Sapiens
ucuugggaaaauagacccccuugccuagagua

SEQ ID NO: 374200 - RNA, 32 nt, Homo Sapiens
uuauggucugugaucguagcugugauaaggga

SEQ ID NO: 374201 - RNA, 32 nt, Homo Sapiens
auauuucaauuuccaagagcugaggcaauucu

SEQ ID NO: 374202 - RNA, 32 nt, Homo Sapiens
aaacuggacuuucuuuguuuccucuuuaaaag

SEQ ID NO: 374203 - RNA, 32 nt, Homo Sapiens
ugacgcccggcagcggcuggcacgggcgcggc

SEQ ID NO: 374204 - RNA, 32 nt, Homo Sapiens
ucuuggaauggagagcgggagucugauguggu

SEQ ID NO: 374205 - RNA, 32 nt, Homo Sapiens
gcucacagcgacccuggccuccccuguggccu

SEQ ID NO: 374206 - RNA, 32 nt, Homo Sapiens
ugaagucgacauuuuugaagaguauagguguc

SEQ ID NO: 374207 - RNA, 32 nt, Homo Sapiens
aguguaagaaguuccugguuauagaagaaguu

SEQ ID NO: 374208 - RNA, 32 nt, Homo Sapiens
ugaauuucuguaaaauaaacuguauuugcaaa

SEQ ID NO: 374209 - RNA, 32 nt, Homo Sapiens
auauuuauuuucauguuucucuaaugcaaaga

SEQ ID NO: 374210 - RNA, 32 nt, Homo Sapiens
cgcaccgggcgcccacccuguccuccuccugc

SEQ ID NO: 374211 - RNA, 32 nt, Homo Sapiens
aagcagugaaugcaggauggugguugaaauuu

SEQ ID NO: 374212 - RNA, 32 nt, Homo Sapiens
aauagcacaacgagcgcagaguccacuggauc

SEQ ID NO: 374213 - RNA, 32 nt, Homo Sapiens
cugaucuagggcaggagucagcagucugggca

SEQ ID NO: 374214 - RNA, 32 nt, Homo Sapiens
aggguuccugaccccugccccuggacagcgac

SEQ ID NO: 374215 - RNA, 32 nt, Homo Sapiens
gcuccucccuccccuggcuuuuccuaccacuc

SEQ ID NO: 374216 - RNA, 32 nt, Homo Sapiens
acucgcgggaccggcguccccggcgcgaagag

SEQ ID NO: 374217 - RNA, 32 nt, Homo Sapiens
cuuaaagaauuccacuuuggaauuacuuccga

SEQ ID NO: 374218 - RNA, 32 nt, Homo Sapiens
aaaacguuuauaguguuuugcaugugaccuau

SEQ ID NO: 374219 - RNA, 30 nt, Homo Sapiens
caugggcacugcgugccgccugcacguggg

SEQ ID NO: 374220 - RNA, 32 nt, Homo Sapiens
uuuuauacuauaaaguuaugaaaaugccaaac

SEQ ID NO: 374221 - RNA, 32 nt, Homo Sapiens
acaggaccuccauugggcgcagcagcaggugg

SEQ ID NO: 374222 - RNA, 32 nt, Homo Sapiens
uuaauauguaugaagggcuuuaccaaagucca

SEQ ID NO: 374223 - RNA, 32 nt, Homo Sapiens
ggacgcgcacgcggcgagggcggcgggugagc

SEQ ID NO: 374224 - RNA, 32 nt, Homo Sapiens
ucuuuuggcggcgcccucugcuggccacuagg

SEQ ID NO: 374225 - RNA, 32 nt, Homo Sapiens
ccagaauggaaagccagagggaaccugagaau

SEQ ID NO: 374226 - RNA, 32 nt, Homo Sapiens
cugauuuucagcacggaugauuuuuucuucag

SEQ ID NO: 374227 - RNA, 32 nt, Homo Sapiens
uucacaagaugggacacauauuuguaugcuuu

SEQ ID NO: 374228 - RNA, 32 nt, Homo Sapiens
cugauguucauuuuaucuugggcaauacuucu

SEQ ID NO: 374229 - RNA, 32 nt, Homo Sapiens
caguucucaccaagccgcugugaaaaugggga

SEQ ID NO: 374230 - RNA, 32 nt, Homo Sapiens
ucaacaauuggaaaaauuaccaauuuguacau

SEQ ID NO: 374231 - RNA, 32 nt, Homo Sapiens
cagaugccgagaccgagugucccaccuccucc

SEQ ID NO: 374232 - RNA, 32 nt, Homo Sapiens
ugauucuuuguacaguuuauccugauguugcu

SEQ ID NO: 374233 - RNA, 32 nt, Homo Sapiens
uugguggccugcgcuaacgcugcgaguugggg

SEQ ID NO: 374234 - RNA, 32 nt, Homo Sapiens
agccuuuagaucuagaacuagcccuuagaaau

SEQ ID NO: 374235 - RNA, 32 nt, Homo Sapiens
cuuaaacacuaaccaaugacaguauuuguucc

SEQ ID NO: 374236 - RNA, 32 nt, Homo Sapiens
ccagauccuaacccgcgcccccgccccgccgc

SEQ ID NO: 374237 - RNA, 32 nt, Homo Sapiens
aaaggcagaaaaggaagaggggcugcagacag

SEQ ID NO: 374238 - RNA, 32 nt, Homo Sapiens
agaaauaaagagaauauguucuuuuuaaaaaa

SEQ ID NO: 374239 - RNA, 24 nt, Homo Sapiens
ugggagaugaagauugggaagcag

SEQ ID NO: 374240 - RNA, 32 nt, Homo Sapiens
gccaugugguaaaagaggcuuuccaagcccug

SEQ ID NO: 374241 - RNA, 32 nt, Homo Sapiens
cagcuguuacuaucuguaaaugauaugaugac

SEQ ID NO: 374242 - RNA, 32 nt, Homo Sapiens
gcccuccccucgcucaugcccucccgccccac

SEQ ID NO: 374243 - RNA, 32 nt, Homo Sapiens
agagugauucaggggcuccccgggggcagaca

SEQ ID NO: 374244 - RNA, 32 nt, Homo Sapiens
cugcccuggagccccagccccugcguccaucu

SEQ ID NO: 374245 - RNA, 32 nt, Homo Sapiens
acugcuaacaauuucuggaugguuuuucaagu

SEQ ID NO: 374246 - RNA, 32 nt, Homo Sapiens
augaauguaaugaguguggaaaagcauucagc

SEQ ID NO: 374247 - RNA, 32 nt, Homo Sapiens
cuccuuuuaggagaucauggugucacaguguu

SEQ ID NO: 374248 - RNA, 32 nt, Homo Sapiens
caagggcucguggaucccgagcagggugcgau

SEQ ID NO: 374249 - RNA, 32 nt, Homo Sapiens
uccaaaagagcaauaaaaaguuuucagugaaa

SEQ ID NO: 374250 - RNA, 32 nt, Homo Sapiens
gauccagaggcucagaauaaaaagaugcccuc

SEQ ID NO: 374251 - RNA, 32 nt, Homo Sapiens
ugugcacccacccacccaccacacuggacuuu

SEQ ID NO: 374252 - RNA, 32 nt, Homo Sapiens
ucgcuucuccccaagcucccagguuccauccc

SEQ ID NO: 374253 - RNA, 32 nt, Homo Sapiens
cgcggcgcggucgggccccuucgucaggagac

SEQ ID NO: 374254 - RNA, 32 nt, Homo Sapiens
cggucugcagcuguucccauggagcccggacu

SEQ ID NO: 374255 - RNA, 32 nt, Homo Sapiens
aacagaaaccugguugaaaugcuuaacuagag

SEQ ID NO: 374256 - RNA, 32 nt, Homo Sapiens
ucauuaaagauauuauucuggaugcaguuacc

SEQ ID NO: 374257 - RNA, 32 nt, Homo Sapiens
ucuguggccguggucuuagcccccaguuccac

SEQ ID NO: 374258 - RNA, 29 nt, Homo Sapiens
aucuuuagcagacagaggauugcuggagg

SEQ ID NO: 374259 - RNA, 32 nt, Homo Sapiens
ccugcuguauacuuaucagggacagugagcac

SEQ ID NO: 374260 - RNA, 32 nt, Homo Sapiens
gucgcucagguggccacucaugccugcauucc

SEQ ID NO: 374261 - RNA, 32 nt, Homo Sapiens
ggcuguggacgaagccuucacagugaaguguc

SEQ ID NO: 374262 - RNA, 32 nt, Homo Sapiens
ucggccauucugugggcugaugagaauucugg

SEQ ID NO: 374263 - RNA, 32 nt, Homo Sapiens
ucagugacauagugcagagguacagcagucag

SEQ ID NO: 374264 - RNA, 32 nt, Homo Sapiens
uuugaauccaugaaauugcuaugcuaaacagc

SEQ ID NO: 374265 - RNA, 32 nt, Homo Sapiens
uggaacuucagccauuuccccagguuguuacu

SEQ ID NO: 374266 - RNA, 32 nt, Homo Sapiens
gcugauucucugaccauccccagcugaacucc

SEQ ID NO: 374267 - RNA, 32 nt, Homo Sapiens
uagcuacccuccccgucuccagccugggcucc

SEQ ID NO: 374268 - RNA, 32 nt, Homo Sapiens
acuucugaaaagacaucagaguagagaaaaug

SEQ ID NO: 374269 - RNA, 32 nt, Homo Sapiens
ggucuugguaggugccugcaucugucugccuu

SEQ ID NO: 374270 - RNA, 32 nt, Homo Sapiens
aagucccccucgcgagugccuucuugcaauua

SEQ ID NO: 374271 - RNA, 32 nt, Homo Sapiens
ugguggugcuggggcuggccugcaggcugcag

SEQ ID NO: 374272 - RNA, 32 nt, Homo Sapiens
aaggagagaaaggagggaaaagccagucucuc

SEQ ID NO: 374273 - RNA, 32 nt, Homo Sapiens
cugcagugugugggguucgcggggcggcgggu

SEQ ID NO: 374274 - RNA, 32 nt, Homo Sapiens
agugaucacagcagcuucuacgguguaugguu

SEQ ID NO: 374275 - RNA, 32 nt, Homo Sapiens
uugcauuccagaaccaaaucuuaaaugagacc

SEQ ID NO: 374276 - RNA, 32 nt, Homo Sapiens
cagauaaacaaguaaacaaaggucucugguuu

SEQ ID NO: 374277 - RNA, 32 nt, Homo Sapiens
aacuguggaagagugacugcuagucccuuugc

SEQ ID NO: 374278 - RNA, 32 nt, Homo Sapiens
agccaggcgugguggcucaugcuugugguccc

SEQ ID NO: 374279 - RNA, 30 nt, Homo Sapiens
gccuugggagguguguggaauaaauuauuu

SEQ ID NO: 374280 - RNA, 32 nt, Homo Sapiens
ucuguucggaccugaccuggcuccucgccgcc

SEQ ID NO: 374281 - RNA, 32 nt, Homo Sapiens
ggagcccagggcggcucuggcccgaugauaug

SEQ ID NO: 374282 - RNA, 32 nt, Homo Sapiens
aucuaaaugauuuuuaaacuuuucucauagaa

SEQ ID NO: 374283 - RNA, 29 nt, Homo Sapiens
agaaguaaaaguuuaacuuuuuaacuaaa

SEQ ID NO: 374284 - RNA, 32 nt, Homo Sapiens
cauugucucaguguggaaacugaggcagacag

SEQ ID NO: 374285 - RNA, 32 nt, Homo Sapiens
ccagagguucuugcaaccauacaggauccaga

SEQ ID NO: 374286 - RNA, 32 nt, Homo Sapiens
ucuuggcugcugcacaugaugugcuuaaugaa

SEQ ID NO: 374287 - RNA, 32 nt, Homo Sapiens
aacgcuccucuucuccccuccuccuccugccg

SEQ ID NO: 374288 - RNA, 32 nt, Homo Sapiens
ugucucagaagcuccaccuccuccuggggcaa

SEQ ID NO: 374289 - RNA, 32 nt, Homo Sapiens
aucuccaguuguuuuaaggguguuaugaaaaa

SEQ ID NO: 374290 - RNA, 32 nt, Homo Sapiens
ucgaggaggguggggcagggaaagggcuggcc

SEQ ID NO: 374291 - RNA, 32 nt, Homo Sapiens
cuguggccaagccccacccuuuccuggucaug

SEQ ID NO: 374292 - RNA, 32 nt, Homo Sapiens
aaaccuucuucuucuuuuuuuuuuuuaaacug

SEQ ID NO: 374293 - RNA, 32 nt, Homo Sapiens
cuaagccugggauuugggccagagauaagaau

SEQ ID NO: 374294 - RNA, 32 nt, Homo Sapiens
ccgcggcggagcaggagccggauggucagagg

SEQ ID NO: 374295 - RNA, 32 nt, Homo Sapiens
gaugaggauaucugggcaagggccccacaugc

SEQ ID NO: 374296 - RNA, 32 nt, Homo Sapiens
agauauuugacuugagaacaaaagccaagugu

SEQ ID NO: 374297 - RNA, 32 nt, Homo Sapiens
uuuccuucuggugauuuaaugcaugaggacau

SEQ ID NO: 374298 - RNA, 32 nt, Homo Sapiens
cagccucucaguguguuggagagguaggggug

SEQ ID NO: 374299 - RNA, 32 nt, Homo Sapiens
ugcuccuccaugaaugacaauuccaggccucc

SEQ ID NO: 374300 - RNA, 32 nt, Homo Sapiens
uauuuuuauuuuuuccuuugacagaugguauc

SEQ ID NO: 374301 - RNA, 32 nt, Homo Sapiens
auuuucagaaagaucaaaaugaucuaggguuc

SEQ ID NO: 374302 - RNA, 32 nt, Homo Sapiens
gguaaaggacagagacccucagacugaugaaa

SEQ ID NO: 374303 - RNA, 32 nt, Homo Sapiens
gagaacagggguuggaaugcaguggcaccauu

SEQ ID NO: 374304 - RNA, 32 nt, Homo Sapiens
ccaggcgugggcuggcggcgggaccaggagga

SEQ ID NO: 374305 - RNA, 32 nt, Homo Sapiens
augugcuuuuacuauuugauauuucuucuauu

SEQ ID NO: 374306 - RNA, 28 nt, Homo Sapiens
cacuagaaagauuuaccugggaacuguc

SEQ ID NO: 374307 - RNA, 32 nt, Homo Sapiens
uggcccuggcacugcggacgcugcuccugguc

SEQ ID NO: 374308 - RNA, 32 nt, Homo Sapiens
ccaccccuucccgcccucccccugccagaggc

SEQ ID NO: 374309 - RNA, 32 nt, Homo Sapiens
ucaagaccagccuggccaacguggugaaaccu

SEQ ID NO: 374310 - RNA, 32 nt, Homo Sapiens
gaaucgcucugguggauggguguacagauuug

SEQ ID NO: 374311 - RNA, 32 nt, Homo Sapiens
cacaagcucccuagccucuuuggauccauugc

SEQ ID NO: 374312 - RNA, 32 nt, Homo Sapiens
uugcaaaugcccuuacacuuacuguuguccua

SEQ ID NO: 374313 - RNA, 32 nt, Homo Sapiens
uaaccugagucccucucagaaaacagagcuaa

SEQ ID NO: 374314 - RNA, 32 nt, Homo Sapiens
ggagaucaagaccauccuggcuaacauaguga

SEQ ID NO: 374315 - RNA, 32 nt, Homo Sapiens
gugggcucugccagagcagccugugacuaaug

SEQ ID NO: 374316 - RNA, 32 nt, Homo Sapiens
gccggccacacuggagcagcucccagcacagc

SEQ ID NO: 374317 - RNA, 32 nt, Homo Sapiens
gucuagaggauacaacugaauguuuuuaauuu

SEQ ID NO: 374318 - RNA, 32 nt, Homo Sapiens
gaccucucuggacuaauuucucuuccuagaca

SEQ ID NO: 374319 - RNA, 32 nt, Homo Sapiens
caucaguuaguagggugcaugucagaugauca

SEQ ID NO: 374320 - RNA, 32 nt, Homo Sapiens
ugcuuggagaggggcgggaccuggagagaggc

SEQ ID NO: 374321 - RNA, 32 nt, Homo Sapiens
gaauuccgccucugcggagccgggcucggguc

SEQ ID NO: 374322 - RNA, 32 nt, Homo Sapiens
uagacccuuucuguugaccuuguggcguuuuu

SEQ ID NO: 374323 - RNA, 32 nt, Homo Sapiens
uacuacgcccuccccuccccagccuuuuccag

SEQ ID NO: 374324 - RNA, 30 nt, Homo Sapiens
cggugccuguugcugccgccgccgcgggac

SEQ ID NO: 374325 - RNA, 32 nt, Homo Sapiens
auacuaaugaugagcauuuagcacaauuugag

SEQ ID NO: 374326 - RNA, 32 nt, Homo Sapiens
gugucaaugugaaaguuaaauaaaauuuaugu

SEQ ID NO: 374327 - RNA, 32 nt, Homo Sapiens
uaacuccugugcuuggcggacagacaggcgag

SEQ ID NO: 374328 - RNA, 32 nt, Homo Sapiens
gcggcgccucgcgaggcuccaguggccuugac

SEQ ID NO: 374329 - RNA, 32 nt, Homo Sapiens
uuuuacuuuuuuuuuuuuuuuaaauauuauua

SEQ ID NO: 374330 - RNA, 32 nt, Homo Sapiens
aauuaaacuuuaauuuuaauucuuaaaauuuc

SEQ ID NO: 374331 - RNA, 32 nt, Homo Sapiens
acagagucuuggcugcagacugagccuguacc

SEQ ID NO: 374332 - RNA, 32 nt, Homo Sapiens
ucuugcuuuucuggguaaauuuucagcuauua

SEQ ID NO: 374333 - RNA, 32 nt, Homo Sapiens
ggcagccgcgcgcuccccagccggccaccaau

SEQ ID NO: 374334 - RNA, 32 nt, Homo Sapiens
uuugcgguaucuacuugaaaucuuaccgaagu

SEQ ID NO: 374335 - RNA, 32 nt, Homo Sapiens
ucaaaaaugcuguuauaaaguauuugucuauu

SEQ ID NO: 374336 - RNA, 30 nt, Homo Sapiens
gccccucuguuuuugggggaacagggagca

SEQ ID NO: 374337 - RNA, 32 nt, Homo Sapiens
ccacaaauagguauguagcaguaucucauugc

SEQ ID NO: 374338 - RNA, 32 nt, Homo Sapiens
gaauaaaauaagcaaaagcuauuguuauuuac

SEQ ID NO: 374339 - RNA, 32 nt, Homo Sapiens
aggccagaauugacucuuugggccuaaauagc

SEQ ID NO: 374340 - RNA, 32 nt, Homo Sapiens
ucccguggaagcacacucuacuacuaaaggga

SEQ ID NO: 374341 - RNA, 32 nt, Homo Sapiens
gugaaggaucagaggacugaaaaaugauucug

SEQ ID NO: 374342 - RNA, 32 nt, Homo Sapiens
cgauuaaaaauguuaagcuaucugaaaaauaa

SEQ ID NO: 374343 - RNA, 32 nt, Homo Sapiens
aaaugcccccauccgguuccucuucuucccag

SEQ ID NO: 374344 - RNA, 32 nt, Homo Sapiens
ugugcugcauugcaggaaccugcucauuauca

SEQ ID NO: 374345 - RNA, 32 nt, Homo Sapiens
aaaaauagagguuuuucuucuuguuuuuuuuu

SEQ ID NO: 374346 - RNA, 32 nt, Homo Sapiens
cuaguguaaaagacaucaacgugcuuagccuu

SEQ ID NO: 374347 - RNA, 32 nt, Homo Sapiens
acucuucucucuaucagauaccauuuaugaga

SEQ ID NO: 374348 - RNA, 32 nt, Homo Sapiens
gacaguaucaauacugaugagcaaccuggcac

SEQ ID NO: 374349 - RNA, 32 nt, Homo Sapiens
cugcacuccaugagugcagcucuggagguacg

SEQ ID NO: 374350 - RNA, 32 nt, Homo Sapiens
uaaucugccucuccccggggcccacacauuug

SEQ ID NO: 374351 - RNA, 32 nt, Homo Sapiens
agccuggcaagagcuccugaaccaguuucauu

SEQ ID NO: 374352 - RNA, 32 nt, Homo Sapiens
uaaguuuaauuaucugcauuuaucuuuuuucc

SEQ ID NO: 374353 - RNA, 32 nt, Homo Sapiens
aacauuuuuaucauguuacaaaacaguaucau

SEQ ID NO: 374354 - RNA, 30 nt, Homo Sapiens
ccagugucuggcuggcuccguccgugugac

SEQ ID NO: 374355 - RNA, 32 nt, Homo Sapiens
uuacucugugacacugcagcucuccagagaga

SEQ ID NO: 374356 - RNA, 32 nt, Homo Sapiens
cauuugaaggcacaaugcaggggcucagauug

SEQ ID NO: 374357 - RNA, 32 nt, Homo Sapiens
gagacgaggaggaggaggacaugacuuuucuu

SEQ ID NO: 374358 - RNA, 32 nt, Homo Sapiens
ucccacuccagccccaggacaggaaacagaac

SEQ ID NO: 374359 - RNA, 32 nt, Homo Sapiens
uuucuuacuuuuuggagaaaugaagucuugcu

SEQ ID NO: 374360 - RNA, 32 nt, Homo Sapiens
ccugcuccccccaccccuagcccuugacccug

SEQ ID NO: 374361 - RNA, 32 nt, Homo Sapiens
ugguuaaggugauauggaggugggagagcuuu

SEQ ID NO: 374362 - RNA, 32 nt, Homo Sapiens
ucaugucaagagcaaagcugcagacguaaaag

SEQ ID NO: 374363 - RNA, 32 nt, Homo Sapiens
ugcagagaccagcggcuucgugggaggccugu

SEQ ID NO: 374364 - RNA, 32 nt, Homo Sapiens
uugguggugguuucuucagaaucaugaaguuc

SEQ ID NO: 374365 - RNA, 32 nt, Homo Sapiens
guaauuaaccuaacauaacauaaauguauuug

SEQ ID NO: 374366 - RNA, 32 nt, Homo Sapiens
guucagaugcaggcuggguggcugggacaggu

SEQ ID NO: 374367 - RNA, 32 nt, Homo Sapiens
acauacauauauauguguauauauguauacau

SEQ ID NO: 374368 - RNA, 32 nt, Homo Sapiens
acgugguguugcagccccguugaaggagucaa

SEQ ID NO: 374369 - RNA, 32 nt, Homo Sapiens
gcaucaucaguucuagguagcacaugaagcug

SEQ ID NO: 374370 - RNA, 32 nt, Homo Sapiens
caccuuggccuggugcauccacagaggauguu

SEQ ID NO: 374371 - RNA, 32 nt, Homo Sapiens
guaaucuaauauuaucucugauaauucaaaaa

SEQ ID NO: 374372 - RNA, 32 nt, Homo Sapiens
cuaaaggaaucagcugucaucauuuucaucau

SEQ ID NO: 374373 - RNA, 32 nt, Homo Sapiens
aaauacacuucgccuugacauuugcucggugu

SEQ ID NO: 374374 - RNA, 32 nt, Homo Sapiens
acccuggagcagcccaagugcuccugaguccu

SEQ ID NO: 374375 - RNA, 32 nt, Homo Sapiens
cucaacuccccggccccuggcucccaggaggu

SEQ ID NO: 374376 - RNA, 32 nt, Homo Sapiens
ggaauauuuuucguguucucuuuuaucugcuu

SEQ ID NO: 374377 - RNA, 32 nt, Homo Sapiens
ggagauguucacucagacugggggaugcaaug

SEQ ID NO: 374378 - RNA, 32 nt, Homo Sapiens
auaauuguucauuauuuugucaauguuauuug

SEQ ID NO: 374379 - RNA, 32 nt, Homo Sapiens
uccagugcugaauaagucacuacggaugccag

SEQ ID NO: 374380 - RNA, 32 nt, Homo Sapiens
aggagucugcccgcucgcgccguuucguccug

SEQ ID NO: 374381 - RNA, 32 nt, Homo Sapiens
uuuggagggacuucauacccuugccucuugug

SEQ ID NO: 374382 - RNA, 32 nt, Homo Sapiens
cuccuccucucacccaggaucacuuccgaaac

SEQ ID NO: 374383 - RNA, 32 nt, Homo Sapiens
caaaagauggcuuauucacauggaaauguaca

SEQ ID NO: 374384 - RNA, 30 nt, Homo Sapiens
ccuggccugcccgugcccuggugaaucacc

SEQ ID NO: 374385 - RNA, 32 nt, Homo Sapiens
uuaauucaaacacaagcauugugaucuacauu

SEQ ID NO: 374386 - RNA, 32 nt, Homo Sapiens
uuuucuguugucaaccucuccucuugccaguu

SEQ ID NO: 374387 - RNA, 32 nt, Homo Sapiens
ggucaggauauccccacccccacccugggaaa

SEQ ID NO: 374388 - RNA, 32 nt, Homo Sapiens
ucugauacuuuuuggcuuguaaauggcuucuu

SEQ ID NO: 374389 - RNA, 32 nt, Homo Sapiens
ccucuagauuguguaagcuuuuuacuguccau

SEQ ID NO: 374390 - RNA, 32 nt, Homo Sapiens
cccagaaaggucugggcugugcgugcuucagg

SEQ ID NO: 374391 - RNA, 32 nt, Homo Sapiens
ugaagaugcaaaacagaagauuuucaugcagg

SEQ ID NO: 374392 - RNA, 32 nt, Homo Sapiens
cugguagauuuaauguuuuucauucauuaaaa

SEQ ID NO: 374393 - RNA, 32 nt, Homo Sapiens
ccugacuccuggcuuuggggucaggcagacgu

SEQ ID NO: 374394 - RNA, 32 nt, Homo Sapiens
gucaccaaguaaaacaacaaauagcuaccacu

SEQ ID NO: 374395 - RNA, 32 nt, Homo Sapiens
ugagauguauguguucuuaauagagaaauagu

SEQ ID NO: 374396 - RNA, 32 nt, Homo Sapiens
uuuaaaagccaauucuuuuuuaucccuuuuag

SEQ ID NO: 374397 - RNA, 32 nt, Homo Sapiens
cuaccccuggccccuccuccagagggucugag

SEQ ID NO: 374398 - RNA, 32 nt, Homo Sapiens
cucccacaaccugguuccccacacauccauag

SEQ ID NO: 374399 - RNA, 32 nt, Homo Sapiens
cuuaauuaguaguuaguuuacaauugacugga

SEQ ID NO: 374400 - RNA, 32 nt, Homo Sapiens
cauagccuacugcaguaauccaaagugcuucu

SEQ ID NO: 374401 - RNA, 32 nt, Homo Sapiens
uacuugcuuuguuuuguuguuuuguuuuuuca

SEQ ID NO: 374402 - RNA, 32 nt, Homo Sapiens
ugccagucugccuucccccaaccccguguccu

SEQ ID NO: 374403 - RNA, 32 nt, Homo Sapiens
uaaaacuacaguagucacuucugcuagaguga

SEQ ID NO: 374404 - RNA, 32 nt, Homo Sapiens
gcuacccacuaaauaaaaacacagaaauaauu

SEQ ID NO: 374405 - RNA, 32 nt, Homo Sapiens
cuuccgugccccugguucuccuccccaucgag

SEQ ID NO: 374406 - RNA, 32 nt, Homo Sapiens
uucaguuucugcauguagauuuaaauaaaaaa

SEQ ID NO: 374407 - RNA, 32 nt, Homo Sapiens
guggcuucugcuccagaacucuauccacugua

SEQ ID NO: 374408 - RNA, 32 nt, Homo Sapiens
uuguuuaacuccuuuaccuuuccagcccuuug

SEQ ID NO: 374409 - RNA, 32 nt, Homo Sapiens
cuagguuucccucucuucugguucuucuccca

SEQ ID NO: 374410 - RNA, 30 nt, Homo Sapiens
gucacagccucuuccggcggcagcgugcac

SEQ ID NO: 374411 - RNA, 32 nt, Homo Sapiens
ggggacgucugcggcccgcgucggcgcugggg

SEQ ID NO: 374412 - RNA, 32 nt, Homo Sapiens
gcaccgcagccucugccccagccccggccacc

SEQ ID NO: 374413 - RNA, 32 nt, Homo Sapiens
caaguuuuccauuuuccaaguccaagggcaca

SEQ ID NO: 374414 - RNA, 32 nt, Homo Sapiens
ggggauugauucaaacauuaauacuuucaagc

SEQ ID NO: 374415 - RNA, 32 nt, Homo Sapiens
ggggagacuguaaaaacagaaaaauguaaaug

SEQ ID NO: 374416 - RNA, 32 nt, Homo Sapiens
uugcuuggccgcggccugguauuccggcgauu

SEQ ID NO: 374417 - RNA, 32 nt, Homo Sapiens
aaaugaucagaaaaagaaggaagccaaagaga

SEQ ID NO: 374418 - RNA, 32 nt, Homo Sapiens
guaaugauucaaagggaggauguuagaguaag

SEQ ID NO: 374419 - RNA, 32 nt, Homo Sapiens
ugaggaggagaugucuguuggauucaugucuu

SEQ ID NO: 374420 - RNA, 32 nt, Homo Sapiens
gccuggucccauaucauagugaaauggugccu

SEQ ID NO: 374421 - RNA, 32 nt, Homo Sapiens
auguugaggggaggaggccagccagugugacc

SEQ ID NO: 374422 - RNA, 32 nt, Homo Sapiens
gaggccccaucccguuauccgagacccuuccu

SEQ ID NO: 374423 - RNA, 32 nt, Homo Sapiens
aaccguaguuuuuguuuuuuuaaauacagaag

SEQ ID NO: 374424 - RNA, 32 nt, Homo Sapiens
augaggguaaauaaauauguguuauaacaagu

SEQ ID NO: 374425 - RNA, 32 nt, Homo Sapiens
cucggccauacacagauaacagagcacgagag

SEQ ID NO: 374426 - RNA, 32 nt, Homo Sapiens
caaggcgccuccccgccccgccgccccacacc

SEQ ID NO: 374427 - RNA, 32 nt, Homo Sapiens
cagagccuuucuggaacaaggagaaugccugu

SEQ ID NO: 374428 - RNA, 32 nt, Homo Sapiens
ugcgaccagagcaugaugccuccaucaagugg

SEQ ID NO: 374429 - RNA, 32 nt, Homo Sapiens
uuguuuuauuaagcauuaugucaugcuuuuug

SEQ ID NO: 374430 - RNA, 32 nt, Homo Sapiens
cuggucgugcuguguggccgcggccccagcgu

SEQ ID NO: 374431 - RNA, 32 nt, Homo Sapiens
ccaagaacccaccaauuccggacacaguugga

SEQ ID NO: 374432 - RNA, 32 nt, Homo Sapiens
acaucuccuggccaucccuucauuuaaccaag

SEQ ID NO: 374433 - RNA, 32 nt, Homo Sapiens
uuucuuuuuuuuucuuuuuuugagacggcgca

SEQ ID NO: 374434 - RNA, 32 nt, Homo Sapiens
augcagcccggugucugggcgggcucuuaccg

SEQ ID NO: 374435 - RNA, 32 nt, Homo Sapiens
augauucugcucuccacguccagguguacaca

SEQ ID NO: 374436 - RNA, 32 nt, Homo Sapiens
aaggcaggggcggggagaagggaaggacucga

SEQ ID NO: 374437 - RNA, 32 nt, Homo Sapiens
gaaauguacagagaacaaaacuauauuuucag

SEQ ID NO: 374438 - RNA, 28 nt, Homo Sapiens
gguggggcacggccgccggcaagaaacc

SEQ ID NO: 374439 - RNA, 32 nt, Homo Sapiens
cucaaaugguaucucacagggaauaggggagu

SEQ ID NO: 374440 - RNA, 32 nt, Homo Sapiens
gcugucggugacugaggacuggacugugguga

SEQ ID NO: 374441 - RNA, 32 nt, Homo Sapiens
augagggcaauaaucuccuuucuuccccacua

SEQ ID NO: 374442 - RNA, 32 nt, Homo Sapiens
auauuuacugaauacccccacugauucccaga

SEQ ID NO: 374443 - RNA, 32 nt, Homo Sapiens
gguuucaaaugagucaguggcuccugcagaua

SEQ ID NO: 374444 - RNA, 32 nt, Homo Sapiens
ccugacagggaagagcgcuggcagaggcugug

SEQ ID NO: 374445 - RNA, 32 nt, Homo Sapiens
cagaaauaaaaaggaagaaaauguagauuaga

SEQ ID NO: 374446 - RNA, 32 nt, Homo Sapiens
uaucaauguaggauucuuaaggagcuuuaagc

SEQ ID NO: 374447 - RNA, 32 nt, Homo Sapiens
ccaggagucuucauugcuucuguuauuacccc

SEQ ID NO: 374448 - RNA, 32 nt, Homo Sapiens
gacacggcccugcugggugaccucaggccuag

SEQ ID NO: 374449 - RNA, 32 nt, Homo Sapiens
aacagugccgacggcggugcuacugcccccuc

SEQ ID NO: 374450 - RNA, 32 nt, Homo Sapiens
accgacccucagccgcauccccgguggcugca

SEQ ID NO: 374451 - RNA, 32 nt, Homo Sapiens
cggggccggccgcuacuccggccccaggaugc

SEQ ID NO: 374452 - RNA, 32 nt, Homo Sapiens
gaacuggcacuaggcugagacuagggucuacc

SEQ ID NO: 374453 - RNA, 32 nt, Homo Sapiens
uuccauuccugcagugaaauuaacucgagcuu

SEQ ID NO: 374454 - RNA, 32 nt, Homo Sapiens
agccucuggcuuguuuucuacucccugucccu

SEQ ID NO: 374455 - RNA, 32 nt, Homo Sapiens
uauaacauggccauggacacucuucuuuuuua

SEQ ID NO: 374456 - RNA, 32 nt, Homo Sapiens
uuaauacuuucuuuuauuaauauaugggggaa

SEQ ID NO: 374457 - RNA, 32 nt, Homo Sapiens
ucagcuuggggauccgaucuggaagagagauu

SEQ ID NO: 374458 - RNA, 32 nt, Homo Sapiens
cucgcagcggcgcucggccgcacauugugggg

SEQ ID NO: 374459 - RNA, 32 nt, Homo Sapiens
uagcgcuccaggcuccugcugccgccccuggg

SEQ ID NO: 374460 - RNA, 32 nt, Homo Sapiens
acugcccggcucgcgccgccucgcgcucugcc

SEQ ID NO: 374461 - RNA, 32 nt, Homo Sapiens
ugucuuuuuuucuguuucagaguaguucacaa

SEQ ID NO: 374462 - RNA, 32 nt, Homo Sapiens
cccauccuuucugcgugaagauauuuaggaaa

SEQ ID NO: 374463 - RNA, 32 nt, Homo Sapiens
ugaagcugcuggugggggccuacgacgccgau

SEQ ID NO: 374464 - RNA, 31 nt, Homo Sapiens
gggcuuucgugagccauggauugagggccgu

SEQ ID NO: 374465 - RNA, 32 nt, Homo Sapiens
gaauguuccaguuucagagacuuugucuccac

SEQ ID NO: 374466 - RNA, 30 nt, Homo Sapiens
cauggugacuggcgucacgcagccacccga

SEQ ID NO: 374467 - RNA, 32 nt, Homo Sapiens
uaauauuauaugcuuguaauaaaagcaaagaa

SEQ ID NO: 374468 - RNA, 27 nt, Homo Sapiens
uaggaccauguauucugguguaacugu

SEQ ID NO: 374469 - RNA, 30 nt, Homo Sapiens
ucccagauccucccugccuggccugcucag

SEQ ID NO: 374470 - RNA, 29 nt, Homo Sapiens
gcagcuugagcggagaggacggcuuccgg

SEQ ID NO: 374471 - RNA, 32 nt, Homo Sapiens
caagucuaucugaaaagucuccagaggucuaa

SEQ ID NO: 374472 - RNA, 32 nt, Homo Sapiens
cugguggaacagagucauauuucucuucuuuc

SEQ ID NO: 374473 - RNA, 32 nt, Homo Sapiens
uuguuaguggcaguuuauccuguaauuucaaa

SEQ ID NO: 374474 - RNA, 32 nt, Homo Sapiens
ugcgcugggaccgcccgccgcgcaucugcccu

SEQ ID NO: 374475 - RNA, 32 nt, Homo Sapiens
ucaccuggccuuuucuuuuuuauucuuugacc

SEQ ID NO: 374476 - RNA, 32 nt, Homo Sapiens
aucaauguaauuauagaacacaauauacgauc

SEQ ID NO: 374477 - RNA, 32 nt, Homo Sapiens
aggagcaacucugcccagccgccccgucugag

SEQ ID NO: 374478 - RNA, 32 nt, Homo Sapiens
ugcugucucugacuuccagagcucaacccccu

SEQ ID NO: 374479 - RNA, 32 nt, Homo Sapiens
gcagacacccuguguccuccuucagcugaaga

SEQ ID NO: 374480 - RNA, 32 nt, Homo Sapiens
cacuuagcaucccacacucaccccuucuaauc

SEQ ID NO: 374481 - RNA, 32 nt, Homo Sapiens
cuggcguccccuuuccggccgguccccaugga

SEQ ID NO: 374482 - RNA, 32 nt, Homo Sapiens
cucuguaaaaccauuuaccugcuggccaaccu

SEQ ID NO: 374483 - RNA, 32 nt, Homo Sapiens
uaugugguucuucccugaucaccaggugccug

SEQ ID NO: 374484 - RNA, 32 nt, Homo Sapiens
aggcagccgcggugcccaaccacacuugucgg

SEQ ID NO: 374485 - RNA, 32 nt, Homo Sapiens
cccguuucugguggucuguuggcaggcuggcc

SEQ ID NO: 374486 - RNA, 32 nt, Homo Sapiens
agccuaaugaauugauggaaugcacaugaacc

SEQ ID NO: 374487 - RNA, 32 nt, Homo Sapiens
acaccuggucuuccuugguauuguugucacua

SEQ ID NO: 374488 - RNA, 32 nt, Homo Sapiens
uagguucaaguucaggcucuaucacuagcuag

SEQ ID NO: 374489 - RNA, 32 nt, Homo Sapiens
ucggugcuggaguggcucucgucgaagacugu

SEQ ID NO: 374490 - RNA, 30 nt, Homo Sapiens
cagcugggagguggacaaggugauaugggg

SEQ ID NO: 374491 - RNA, 32 nt, Homo Sapiens
ccaaacaccccucccccaggaugucggaggag

SEQ ID NO: 374492 - RNA, 32 nt, Homo Sapiens
ccagucacaguguggacuggggaccagacgca

SEQ ID NO: 374493 - RNA, 32 nt, Homo Sapiens
aaaucagaagauuggaggaacaaaagauaucu

SEQ ID NO: 374494 - RNA, 32 nt, Homo Sapiens
acgcuuguguuugcaacacuaggucuggaugg

SEQ ID NO: 374495 - RNA, 32 nt, Homo Sapiens
cuacacuuucccuuacuuggauuucagacucu

SEQ ID NO: 374496 - RNA, 32 nt, Homo Sapiens
agccuuuuaccaggaugacugaacaggagaaa

SEQ ID NO: 374497 - RNA, 32 nt, Homo Sapiens
gccuuuaaaaauuuacuucuuacuccacccaa

SEQ ID NO: 374498 - RNA, 32 nt, Homo Sapiens
guuuccugaggccucccagucaugcuuccugu

SEQ ID NO: 374499 - RNA, 32 nt, Homo Sapiens
caaguguagguaucauuuucugcauuuaaccg

SEQ ID NO: 374500 - RNA, 32 nt, Homo Sapiens
cacgcuucagccauucacugccaggcagucuu

SEQ ID NO: 374501 - RNA, 32 nt, Homo Sapiens
cccuacccucagaguaucuggaccucagagac

SEQ ID NO: 374502 - RNA, 32 nt, Homo Sapiens
gaaugcagacaaacacuccuauggaaauuuaa

SEQ ID NO: 374503 - RNA, 32 nt, Homo Sapiens
gauacagugucuggaacuauugguucuaagau

SEQ ID NO: 374504 - RNA, 32 nt, Homo Sapiens
ucauacaucuccaaauuguuuaaacuuacuuu

SEQ ID NO: 374505 - RNA, 32 nt, Homo Sapiens
ucggaauccuaccugcuuugucucuggcauca

SEQ ID NO: 374506 - RNA, 32 nt, Homo Sapiens
ccuuaaacuaugccacuggguggcagaggcug

SEQ ID NO: 374507 - RNA, 32 nt, Homo Sapiens
cauuuuuaaguauuauuuuacaaaauagaaaa

SEQ ID NO: 374508 - RNA, 32 nt, Homo Sapiens
acacgccggggccccaggacaacgcguuuccc

SEQ ID NO: 374509 - RNA, 32 nt, Homo Sapiens
acuuuuaagcuuuuuaaauuauuuucagaaaa

SEQ ID NO: 374510 - RNA, 32 nt, Homo Sapiens
aaauaguguaauauuucuuuugcuuuuaaaaa

SEQ ID NO: 374511 - RNA, 32 nt, Homo Sapiens
ccguuucuccugcucccuguguguguuagaau

SEQ ID NO: 374512 - RNA, 32 nt, Homo Sapiens
aaugauaucuagaaaauauuuauuuucagcca

SEQ ID NO: 374513 - RNA, 32 nt, Homo Sapiens
ucgguugacaauggucuccaggauggucucua

SEQ ID NO: 374514 - RNA, 32 nt, Homo Sapiens
caguuguugggucuuccaagagccagacauua

SEQ ID NO: 374515 - RNA, 32 nt, Homo Sapiens
agaggccuuugaccggccccagagcuaaaagc

SEQ ID NO: 374516 - RNA, 32 nt, Homo Sapiens
ccccauggguuuucuuuuuucuuuuuucuuuu

SEQ ID NO: 374517 - RNA, 32 nt, Homo Sapiens
aagggaaaauggugucauuuguugcagaaaaa

SEQ ID NO: 374518 - RNA, 32 nt, Homo Sapiens
acaguugcccuggccuuggggcccccaggaug

SEQ ID NO: 374519 - RNA, 32 nt, Homo Sapiens
cagccaccugaguagcugggaguacaggcaug

SEQ ID NO: 374520 - RNA, 32 nt, Homo Sapiens
ggcagaucacuugagcugggaguucaagacca

SEQ ID NO: 374521 - RNA, 32 nt, Homo Sapiens
aggaacauuugaaagaaaauguggguagacaa

SEQ ID NO: 374522 - RNA, 32 nt, Homo Sapiens
cucuaggcaugcaugaaagagccccccuggug

SEQ ID NO: 374523 - RNA, 32 nt, Homo Sapiens
uuuuuugguuuuccuuaacauguauccacugu

SEQ ID NO: 374524 - RNA, 32 nt, Homo Sapiens
ccuuucguuucuucuuuauuuuaucccauucu

SEQ ID NO: 374525 - RNA, 32 nt, Homo Sapiens
ugaggagggcuggaaggcagagcuuugggcca

SEQ ID NO: 374526 - RNA, 32 nt, Homo Sapiens
aagaggaagauuugugcagaccaagagcacca

SEQ ID NO: 374527 - RNA, 32 nt, Homo Sapiens
cacuuccugaacuucucuauuaucauagugac

SEQ ID NO: 374528 - RNA, 32 nt, Homo Sapiens
gcccagccuaaaggucagcaguucuuaagaag

SEQ ID NO: 374529 - RNA, 32 nt, Homo Sapiens
gcagagucuccaugggguugugaggagggcac

SEQ ID NO: 374530 - RNA, 32 nt, Homo Sapiens
gguugcauguaacaggcauguuuacucagcau

SEQ ID NO: 374531 - RNA, 27 nt, Homo Sapiens
ggaguaccauaauucugguagcuaaau

SEQ ID NO: 374532 - RNA, 32 nt, Homo Sapiens
gugcggggcgaccucgucugcgcggcgggcgu

SEQ ID NO: 374533 - RNA, 32 nt, Homo Sapiens
cccacaggguccugcagcuuguccuuucuggc

SEQ ID NO: 374534 - RNA, 32 nt, Homo Sapiens
gaggggccuccaugguggcaugggucagcaga

SEQ ID NO: 374535 - RNA, 32 nt, Homo Sapiens
ucggcuucucgggucggauuccgcggucccaa

SEQ ID NO: 374536 - RNA, 32 nt, Homo Sapiens
guaauguaaucucagcugggcguggcggcuca

SEQ ID NO: 374537 - RNA, 32 nt, Homo Sapiens
aauacaaaccucuuuauagaaaaccugauaaa

SEQ ID NO: 374538 - RNA, 32 nt, Homo Sapiens
aagaaaucaaauuugcagaauuuaaucuacaa

SEQ ID NO: 374539 - RNA, 32 nt, Homo Sapiens
cuacuguucuugacaaucaucuccaauggaaa

SEQ ID NO: 374540 - RNA, 32 nt, Homo Sapiens
gggacugguugccaugagagcagccgucugag

SEQ ID NO: 374541 - RNA, 32 nt, Homo Sapiens
cuacaaauauuuuuguacaagauuuuuuguaa

SEQ ID NO: 374542 - RNA, 32 nt, Homo Sapiens
uugcacuggacauauucccuaccuguuuuauu

SEQ ID NO: 374543 - RNA, 32 nt, Homo Sapiens
uggggugcucccuguuuguaaaggggaguuug

SEQ ID NO: 374544 - RNA, 32 nt, Homo Sapiens
cgcccacccgcgacccagaugugugucgccua

SEQ ID NO: 374545 - RNA, 32 nt, Homo Sapiens
acuuauaacuguaauauauagauucagaaaua

SEQ ID NO: 374546 - RNA, 32 nt, Homo Sapiens
uugggccugggguggggggaagguguuagagg

SEQ ID NO: 374547 - RNA, 32 nt, Homo Sapiens
acugagaaauuuauaaacuuuuuucuuacugu

SEQ ID NO: 374548 - RNA, 32 nt, Homo Sapiens
caugcccaccaguguuggucuuugccucaaag

SEQ ID NO: 374549 - RNA, 32 nt, Homo Sapiens
aaaaaggaagaggaacaucacuuuacaaauca

SEQ ID NO: 374550 - RNA, 32 nt, Homo Sapiens
aaaccuguucucuccuucauugugaugacauu

SEQ ID NO: 374551 - RNA, 32 nt, Homo Sapiens
gggaggcucagccccagccuggccuuccuggu

SEQ ID NO: 374552 - RNA, 32 nt, Homo Sapiens
cguguaaaacacaguuccuacugcacaaguac

SEQ ID NO: 374553 - RNA, 32 nt, Homo Sapiens
aauaugaaauuccagacagcugugauuauuuu

SEQ ID NO: 374554 - RNA, 32 nt, Homo Sapiens
ccuaagauauacuuuuucuccucuagaauuuu

SEQ ID NO: 374555 - RNA, 32 nt, Homo Sapiens
ugcauagauugaugccaaaaaagacauuucca

SEQ ID NO: 374556 - RNA, 32 nt, Homo Sapiens
ccccaauucaaucccggaagggacuuacuuag

SEQ ID NO: 374557 - RNA, 32 nt, Homo Sapiens
agcugucuauuaaucagcaguucucuccuagg

SEQ ID NO: 374558 - RNA, 32 nt, Homo Sapiens
uguggccaguguuuauuauaaagacauuucuu

SEQ ID NO: 374559 - RNA, 32 nt, Homo Sapiens
uacuuuuuguucagauggggauuugcuaaagg

SEQ ID NO: 374560 - RNA, 32 nt, Homo Sapiens
uguggaaaagggagagcagagaggaacugaga

SEQ ID NO: 374561 - RNA, 32 nt, Homo Sapiens
caaucuacuuuguuuaaaaaaggucugaauca

SEQ ID NO: 374562 - RNA, 32 nt, Homo Sapiens
aaagggccccuuuuuccaacuuauacuaaaga

SEQ ID NO: 374563 - RNA, 32 nt, Homo Sapiens
uauucucagaagaaaaagauauguaaggucuu

SEQ ID NO: 374564 - RNA, 32 nt, Homo Sapiens
ccaggacgccccagcuggcccagccccuccuc

SEQ ID NO: 374565 - RNA, 32 nt, Homo Sapiens
aaaagagagggucagggggaggcuggcugcuu

SEQ ID NO: 374566 - RNA, 32 nt, Homo Sapiens
ugaugagaucuggcucuggccgagggcgagac

SEQ ID NO: 374567 - RNA, 32 nt, Homo Sapiens
aggauugcuuaucugcaggaguucaagaccag

SEQ ID NO: 374568 - RNA, 32 nt, Homo Sapiens
aacucaguggcguuugcccugauucccggggc

SEQ ID NO: 374569 - RNA, 32 nt, Homo Sapiens
uucuguagagagggagucaggaugcugucuuc

SEQ ID NO: 374570 - RNA, 32 nt, Homo Sapiens
cagaucuagaacuugaauagguagugacuuuu

SEQ ID NO: 374571 - RNA, 32 nt, Homo Sapiens
gcuucuuccuccaguuaugucuuucuuccaaa

SEQ ID NO: 374572 - RNA, 32 nt, Homo Sapiens
ucacgucugccagcuggugagggcagaggcag

SEQ ID NO: 374573 - RNA, 32 nt, Homo Sapiens
gggcggcaaaugcgagaccaaauaucauuuug

SEQ ID NO: 374574 - RNA, 32 nt, Homo Sapiens
gaagucaccacagauuuucuagucuaguuagg

SEQ ID NO: 374575 - RNA, 32 nt, Homo Sapiens
uagcugcugcugcugcugcugcugcaaacugu

SEQ ID NO: 374576 - RNA, 32 nt, Homo Sapiens
guaggcauauauaucuauuaaauaaauugaag

SEQ ID NO: 374577 - RNA, 32 nt, Homo Sapiens
cgcuggcagccauuagacacacagggggguuu

SEQ ID NO: 374578 - RNA, 32 nt, Homo Sapiens
ugcagagcccggccccaccucccugcgcccuu

SEQ ID NO: 374579 - RNA, 32 nt, Homo Sapiens
aacugggagguagggguauuccuguuuucuuu

SEQ ID NO: 374580 - RNA, 32 nt, Homo Sapiens
caagcucagggcgggggcuggcacagcucugg

SEQ ID NO: 374581 - RNA, 32 nt, Homo Sapiens
cacucccgccccagccuagccccaagacuuug

SEQ ID NO: 374582 - RNA, 32 nt, Homo Sapiens
uggccuuggagggggaggagcgccgaggcagu

SEQ ID NO: 374583 - RNA, 32 nt, Homo Sapiens
cuagugagcguaugacacacacagccauacgg

SEQ ID NO: 374584 - RNA, 32 nt, Homo Sapiens
uagcuaggcuuuuucuuuucuuucucuuuuaa

SEQ ID NO: 374585 - RNA, 32 nt, Homo Sapiens
ugugugaaauuccagagcuuugggggagaauc

SEQ ID NO: 374586 - RNA, 32 nt, Homo Sapiens
acuuuagaaaauaaguaggucguuuuaaaaac

SEQ ID NO: 374587 - RNA, 32 nt, Homo Sapiens
gccaggcagggggcagucggcuccucaacugg

SEQ ID NO: 374588 - RNA, 32 nt, Homo Sapiens
cggugccgccgggaaagauggucguggcgcug

SEQ ID NO: 374589 - RNA, 32 nt, Homo Sapiens
guaacaaauacuuuaaaaauaaagauacacaa

SEQ ID NO: 374590 - RNA, 32 nt, Homo Sapiens
aauugacuucccuuuuuuaauguuucaugacc

SEQ ID NO: 374591 - RNA, 32 nt, Homo Sapiens
uaguguaguucacaauaauguauugaacauac

SEQ ID NO: 374592 - RNA, 32 nt, Homo Sapiens
cgacuuauuuuuguguucugaacauaaguucu

SEQ ID NO: 374593 - RNA, 32 nt, Homo Sapiens
uggaggacgcgcuggggccgggaccccgggag

SEQ ID NO: 374594 - RNA, 27 nt, Homo Sapiens
ugcucguccuucuccacacccagcacc

SEQ ID NO: 374595 - RNA, 32 nt, Homo Sapiens
cugacagaaaagacaucugagaaacaaaacaa

SEQ ID NO: 374596 - RNA, 32 nt, Homo Sapiens
cauagcaggggcucgccuccucccgagguugc

SEQ ID NO: 374597 - RNA, 32 nt, Homo Sapiens
ggacccuccagccccaggaaucugcuuuggag

SEQ ID NO: 374598 - RNA, 32 nt, Homo Sapiens
cuacuugaaugauuuuggaauuuuaugucaug

SEQ ID NO: 374599 - RNA, 30 nt, Homo Sapiens
cgcuuaggcaggcgguggcgcggcuggagu

SEQ ID NO: 374600 - RNA, 32 nt, Homo Sapiens
agcauagccaagggacguugaccuggacugaa

SEQ ID NO: 374601 - RNA, 32 nt, Homo Sapiens
cacacugcucagggaagagccugcuacggugg

SEQ ID NO: 374602 - RNA, 32 nt, Homo Sapiens
accgcuuguuuuucuccuuuugguguaauguu

SEQ ID NO: 374603 - RNA, 29 nt, Homo Sapiens
gaugggcgaggacagagcagggcccgagc

SEQ ID NO: 374604 - RNA, 32 nt, Homo Sapiens
gcuggggccccgcggggcuggcaauucugagg

SEQ ID NO: 374605 - RNA, 32 nt, Homo Sapiens
ccaagaagaaugcuaaguuugugucauuacuc

SEQ ID NO: 374606 - RNA, 32 nt, Homo Sapiens
uucuacugacuucuuaagucuuuagacaaagc

SEQ ID NO: 374607 - RNA, 32 nt, Homo Sapiens
uuuguucuaugggcugcccccagguggcaauu

SEQ ID NO: 374608 - RNA, 32 nt, Homo Sapiens
gggcaggggcagugggggcucgggcaggagca

SEQ ID NO: 374609 - RNA, 32 nt, Homo Sapiens
cggcagcggcggcggcagcaucucgcucucgg

SEQ ID NO: 374610 - RNA, 32 nt, Homo Sapiens
gcgcagcgggagcggcggggcgugccuggccu

SEQ ID NO: 374611 - RNA, 32 nt, Homo Sapiens
auaccagauaauaaggaaaacacucauaaaua

SEQ ID NO: 374612 - RNA, 32 nt, Homo Sapiens
aaaugagagagaaaauuaaugugacaaaaugu

SEQ ID NO: 374613 - RNA, 32 nt, Homo Sapiens
auaaggagaaaauuucagaacuaaguugagua

SEQ ID NO: 374614 - RNA, 32 nt, Homo Sapiens
ugaggcccagcuuggcucccccugcccgagcu

SEQ ID NO: 374615 - RNA, 32 nt, Homo Sapiens
cagacaaugggcagugcccaccccgcccacug

SEQ ID NO: 374616 - RNA, 32 nt, Homo Sapiens
cgguuugaccacggccggggccuugggcauuu

SEQ ID NO: 374617 - RNA, 32 nt, Homo Sapiens
aaggagcggcugcggcccccgccgggcggagg

SEQ ID NO: 374618 - RNA, 32 nt, Homo Sapiens
ggggaggcgacuguggggacaucagugaucgu

SEQ ID NO: 374619 - RNA, 32 nt, Homo Sapiens
agucugaggccggucugaggccggucagaggc

SEQ ID NO: 374620 - RNA, 32 nt, Homo Sapiens
gaaaaggcauugggagaagcagucugggggag

SEQ ID NO: 374621 - RNA, 32 nt, Homo Sapiens
auguucuguuauacauaacauuaaaauguuca

SEQ ID NO: 374622 - RNA, 32 nt, Homo Sapiens
acacggcuuuugcugaugacacggggcuccag

SEQ ID NO: 374623 - RNA, 32 nt, Homo Sapiens
auaauucaggaaaaugucuuuuguugugcaca

SEQ ID NO: 374624 - RNA, 32 nt, Homo Sapiens
cucuagagaagaaaagugaagaagucauguug

SEQ ID NO: 374625 - RNA, 32 nt, Homo Sapiens
cuuaguaggcaauuguaacacuuuuugaaagu

SEQ ID NO: 374626 - RNA, 32 nt, Homo Sapiens
cccgccgcaccccaagauggugucucacucug

SEQ ID NO: 374627 - RNA, 32 nt, Homo Sapiens
ccgagcuccuggaagcgcugacgcagagcgca

SEQ ID NO: 374628 - RNA, 31 nt, Homo Sapiens
ggcacaucaaagaaaugugaaauuaaaaaga

SEQ ID NO: 374629 - RNA, 32 nt, Homo Sapiens
ccacuuugcgucugcacugugaucgugacaaa

SEQ ID NO: 374630 - RNA, 32 nt, Homo Sapiens
uuuuuaaaaacgcguuuuguguagagaauaag

SEQ ID NO: 374631 - RNA, 32 nt, Homo Sapiens
uccuaaagcauuucuucagugcucagaucagu

SEQ ID NO: 374632 - RNA, 32 nt, Homo Sapiens
accaacacagaaagagaaaaccaaauacugca

SEQ ID NO: 374633 - RNA, 32 nt, Homo Sapiens
guuucuccuccaagcacacccgagaaaggcca

SEQ ID NO: 374634 - RNA, 32 nt, Homo Sapiens
guaucacaugaaacauucucucagauacuuug

SEQ ID NO: 374635 - RNA, 32 nt, Homo Sapiens
uacucuacugaauucuaacugaucuccugaaa

SEQ ID NO: 374636 - RNA, 32 nt, Homo Sapiens
gccgcccgccugcaccgccacccggcgaccua

SEQ ID NO: 374637 - RNA, 32 nt, Homo Sapiens
uaauaauuaccacugucaaagaggcaaaggug

SEQ ID NO: 374638 - RNA, 32 nt, Homo Sapiens
uuugccaucaugcuuuuucauauuccaaaacu

SEQ ID NO: 374639 - RNA, 32 nt, Homo Sapiens
uggggcaucgaugacccaagacuuuaucuucu

SEQ ID NO: 374640 - RNA, 32 nt, Homo Sapiens
caaaaagaugaccuuugucucaccucauagcu

SEQ ID NO: 374641 - RNA, 32 nt, Homo Sapiens
cacauucacaaagcaaacaucuaguacauguc

SEQ ID NO: 374642 - RNA, 32 nt, Homo Sapiens
uucggcuucuuuuuuucuuuguuuucuuguaa

SEQ ID NO: 374643 - RNA, 32 nt, Homo Sapiens
ugguauaaaaauuuaaacuaaucaaaguugug

SEQ ID NO: 374644 - RNA, 32 nt, Homo Sapiens
cuggcucccguuucuccuuggugagcccgggg

SEQ ID NO: 374645 - RNA, 32 nt, Homo Sapiens
ccagggaacuaaaacugaauaaugugaggaag

SEQ ID NO: 374646 - RNA, 32 nt, Homo Sapiens
uuuauuuccuuaaauguuuugccagccacuua

SEQ ID NO: 374647 - RNA, 32 nt, Homo Sapiens
auaaagacagcuaagugaauguguguaaagug

SEQ ID NO: 374648 - RNA, 32 nt, Homo Sapiens
uccccucgcucaugcccucccgccccacgcag

SEQ ID NO: 374649 - RNA, 32 nt, Homo Sapiens
ccuuaaaaggguaaaaguuuuuccauccaugu

SEQ ID NO: 374650 - RNA, 32 nt, Homo Sapiens
uaagaaaauugcaaagaagccuuaauguucaa

SEQ ID NO: 374651 - RNA, 32 nt, Homo Sapiens
auucaaauguugaugguggugccaagucuuua

SEQ ID NO: 374652 - RNA, 32 nt, Homo Sapiens
ucuuuuuuaaugguacggcauaaaaaguaacc

SEQ ID NO: 374653 - RNA, 32 nt, Homo Sapiens
augcauggccgguggcucucauggccacugag

SEQ ID NO: 374654 - RNA, 30 nt, Homo Sapiens
agcgagacagguggcaagaaccaugcacuu

SEQ ID NO: 374655 - RNA, 32 nt, Homo Sapiens
augucaccucuuccccagucccagcacagccu

SEQ ID NO: 374656 - RNA, 32 nt, Homo Sapiens
aguaaggcauuugggguuggggaagcuagaaa

SEQ ID NO: 374657 - RNA, 32 nt, Homo Sapiens
aguucauucccuccccagccaggugcaggcgu

SEQ ID NO: 374658 - RNA, 32 nt, Homo Sapiens
gccgcucggaagccauguccgaggagaagccc

SEQ ID NO: 374659 - RNA, 32 nt, Homo Sapiens
uugaauuggccuaggaggaaacccagaaauga

SEQ ID NO: 374660 - RNA, 32 nt, Homo Sapiens
guaacccuuucuguauugagugcaguguuuuu

SEQ ID NO: 374661 - RNA, 27 nt, Homo Sapiens
ggaggucccagcuccagccccccucug

SEQ ID NO: 374662 - RNA, 28 nt, Homo Sapiens
gggcacuaaaaguaacauuuggguuuca

SEQ ID NO: 374663 - RNA, 32 nt, Homo Sapiens
gagccgccugcgcgggggagacgcggggauca

SEQ ID NO: 374664 - RNA, 32 nt, Homo Sapiens
aucaugucugcauuuuaccauagauuggagug

SEQ ID NO: 374665 - RNA, 32 nt, Homo Sapiens
agucuuuuguguacgugcaggaccaugguggc

SEQ ID NO: 374666 - RNA, 32 nt, Homo Sapiens
cucggggaacagagcgagaccuugucucuaaa

SEQ ID NO: 374667 - RNA, 32 nt, Homo Sapiens
ccucuugaaguggauuuaacuaaagcgaagag

SEQ ID NO: 374668 - RNA, 32 nt, Homo Sapiens
acgggcagccccagcccccguccguccaggcu

SEQ ID NO: 374669 - RNA, 32 nt, Homo Sapiens
cugaagcuagacaugugcuuugaaaugauuau

SEQ ID NO: 374670 - RNA, 32 nt, Homo Sapiens
acauuuacugaauaagauuugaguaaugaaag

SEQ ID NO: 374671 - RNA, 32 nt, Homo Sapiens
accucuuaaaaaucaucaaggaccccaaaaag

SEQ ID NO: 374672 - RNA, 32 nt, Homo Sapiens
uuguuacaaaggaaacaaacucaauuuggccc

SEQ ID NO: 374673 - RNA, 32 nt, Homo Sapiens
auuccuuaaguacuaaagacaaaauagagggc

SEQ ID NO: 374674 - RNA, 32 nt, Homo Sapiens
guaaaaggggcagguguaauauguaaggaaca

SEQ ID NO: 374675 - RNA, 32 nt, Homo Sapiens
aauaagcuuuugcuguagauugccuaguaaaa

SEQ ID NO: 374676 - RNA, 32 nt, Homo Sapiens
uuacuuuuuuaaauacuugguugaucuucaag

SEQ ID NO: 374677 - RNA, 32 nt, Homo Sapiens
ggugaaacccguccugggagucgcccauaaac

SEQ ID NO: 374678 - RNA, 32 nt, Homo Sapiens
agcggcggccccggcuccuccucguccggcgc

SEQ ID NO: 374679 - RNA, 32 nt, Homo Sapiens
ggccagggugcaaaaaugcuuugcccaucugu

SEQ ID NO: 374680 - RNA, 32 nt, Homo Sapiens
cuguugauuguguaaaaauuuauuuucauuau

SEQ ID NO: 374681 - RNA, 32 nt, Homo Sapiens
ugaagggaggagaacagagucuagcaguuaug

SEQ ID NO: 374682 - RNA, 32 nt, Homo Sapiens
cuaguaaguguguuuuaacuuuaagaguugcc

SEQ ID NO: 374683 - RNA, 32 nt, Homo Sapiens
guccuuucuuccggccccuccccuccaaaaug

SEQ ID NO: 374684 - RNA, 32 nt, Homo Sapiens
aggaaugggcuucugacagacauccugaagaa

SEQ ID NO: 374685 - RNA, 32 nt, Homo Sapiens
accgccccgcgcuccgcugccaggggcgggag

SEQ ID NO: 374686 - RNA, 32 nt, Homo Sapiens
uuuuguagaaaauuauuaauuuugauuguauu

SEQ ID NO: 374687 - RNA, 32 nt, Homo Sapiens
auaaauaaaaauuuuuauuggaauaauuauua

SEQ ID NO: 374688 - RNA, 32 nt, Homo Sapiens
gcuacaacgaacgagggagugaaaauaucucu

SEQ ID NO: 374689 - RNA, 32 nt, Homo Sapiens
ucuuccuuucagaacacacucacauuuucuau

SEQ ID NO: 374690 - RNA, 32 nt, Homo Sapiens
gggagggggaggaggaggagcucacacccuca

SEQ ID NO: 374691 - RNA, 32 nt, Homo Sapiens
ucugccagccgauguguccucaucucaggccc

SEQ ID NO: 374692 - RNA, 32 nt, Homo Sapiens
ugaaugcagacccaccacgagggauggauucc

SEQ ID NO: 374693 - RNA, 32 nt, Homo Sapiens
ccugaaaaaccagaaaguaccuuuuacuguug

SEQ ID NO: 374694 - RNA, 32 nt, Homo Sapiens
gccgucaucuaccaccuuggaauccauguuau

SEQ ID NO: 374695 - RNA, 32 nt, Homo Sapiens
cccaacuaugaauaaagcuuugaaaggccaaa

SEQ ID NO: 374696 - RNA, 32 nt, Homo Sapiens
cccgccccgggugcuuucugcacaaagccuag

SEQ ID NO: 374697 - RNA, 32 nt, Homo Sapiens
agcuauuuuaucauuuccuucauauuuuucuc

SEQ ID NO: 374698 - RNA, 32 nt, Homo Sapiens
ucaucucggugauuuuuguaacuuuacgcagg

SEQ ID NO: 374699 - RNA, 32 nt, Homo Sapiens
cgcccaccccagccuucugcccgccccaucga

SEQ ID NO: 374700 - RNA, 32 nt, Homo Sapiens
gacucugcccccugcuggcucuucugcccaau

SEQ ID NO: 374701 - RNA, 32 nt, Homo Sapiens
gcccuucucuccagccccuggaugcagccuca

SEQ ID NO: 374702 - RNA, 32 nt, Homo Sapiens
uacacuggaagcguggggggaacacaugacau

SEQ ID NO: 374703 - RNA, 30 nt, Homo Sapiens
cgaagauggcggcgcgaucugugucgggca

SEQ ID NO: 374704 - RNA, 32 nt, Homo Sapiens
aaaguuuuacacacuuaaaacucagaucagua

SEQ ID NO: 374705 - RNA, 32 nt, Homo Sapiens
cuuggaagaagcugaggggccagcgaggccag

SEQ ID NO: 374706 - RNA, 32 nt, Homo Sapiens
gguugcagacaccagcagcccccuauugcugc

SEQ ID NO: 374707 - RNA, 32 nt, Homo Sapiens
cggaggaggaggaggacuagugugggguggaa

SEQ ID NO: 374708 - RNA, 32 nt, Homo Sapiens
gggauuucugaagauuugacugaggucucucu

SEQ ID NO: 374709 - RNA, 32 nt, Homo Sapiens
ucgacuucaugacauuugccaaaauaaaauuu

SEQ ID NO: 374710 - RNA, 32 nt, Homo Sapiens
ucucagacccaccccaccugcaggcccagacc

SEQ ID NO: 374711 - RNA, 32 nt, Homo Sapiens
aagaaggagagcccuggggauguggagaagcc

SEQ ID NO: 374712 - RNA, 32 nt, Homo Sapiens
ugcaucuaaaagacuacauaugucaagcuuau

SEQ ID NO: 374713 - RNA, 32 nt, Homo Sapiens
ccaccacacgagggcuuuuguauuguucuacu

SEQ ID NO: 374714 - RNA, 32 nt, Homo Sapiens
ggggaggacgaggaugugggaccgccagccgu

SEQ ID NO: 374715 - RNA, 31 nt, Homo Sapiens
uaauguauuaguaugguucaagauuguugau

SEQ ID NO: 374716 - RNA, 32 nt, Homo Sapiens
ccggggcccaggggcucugagcauuuccacaa

SEQ ID NO: 374717 - RNA, 32 nt, Homo Sapiens
gagcaggaaggcacuauucagagccuuguuuu

SEQ ID NO: 374718 - RNA, 32 nt, Homo Sapiens
auuucuuugugauuuauaaguacugagcauga

SEQ ID NO: 374719 - RNA, 32 nt, Homo Sapiens
gcaaagccagggcagggcguugcugugggaag

SEQ ID NO: 374720 - RNA, 32 nt, Homo Sapiens
cuuacaucauaucugugcuacccuuuccaaac

SEQ ID NO: 374721 - RNA, 32 nt, Homo Sapiens
uuggugggguaaguggaauggggcgggguggg

SEQ ID NO: 374722 - RNA, 32 nt, Homo Sapiens
aacauuuacgaauuauuuuuuuaaacuucagu

SEQ ID NO: 374723 - RNA, 32 nt, Homo Sapiens
aaugucagugugcaaugugucuggaggguggg

SEQ ID NO: 374724 - RNA, 32 nt, Homo Sapiens
cgguagaaggaguaguucaguuugucaauuca

SEQ ID NO: 374725 - RNA, 32 nt, Homo Sapiens
ugugaacaaaaauuauaacauuuacuuuugcu

SEQ ID NO: 374726 - RNA, 32 nt, Homo Sapiens
gcagauacuucauuuucuuagcguuucuggag

SEQ ID NO: 374727 - RNA, 32 nt, Homo Sapiens
gagggcgggaauguggccggcccucaggaagg

SEQ ID NO: 374728 - RNA, 32 nt, Homo Sapiens
aaguccuguucgcucuuuucagccccucgguc

SEQ ID NO: 374729 - RNA, 32 nt, Homo Sapiens
guuuuuauagcaaagaauauaaauuugcuguu

SEQ ID NO: 374730 - RNA, 32 nt, Homo Sapiens
ucugcuagcucuucagucuacaaaucgcuaug

SEQ ID NO: 374731 - RNA, 32 nt, Homo Sapiens
ugcuaaauauucuugaacaauuaguagaucca

SEQ ID NO: 374732 - RNA, 32 nt, Homo Sapiens
guaaccagcgccaaaaaguagauucaucaaac

SEQ ID NO: 374733 - RNA, 32 nt, Homo Sapiens
gcucccucuagcgccuuccccccggcccgacu

SEQ ID NO: 374734 - RNA, 32 nt, Homo Sapiens
aaaguggccugccuggcauccucugcuuauug

SEQ ID NO: 374735 - RNA, 32 nt, Homo Sapiens
cgcccgccggugccaccgccggccgugcuugu

SEQ ID NO: 374736 - RNA, 32 nt, Homo Sapiens
gcaggcugccuuguccccacucugccuacaug

SEQ ID NO: 374737 - RNA, 32 nt, Homo Sapiens
ucuuaggcauuccuggccccagggcccuaaua

SEQ ID NO: 374738 - RNA, 32 nt, Homo Sapiens
gcagcgccccgccccggcccccuccgcgcccu

SEQ ID NO: 374739 - RNA, 32 nt, Homo Sapiens
ggugggcgcaggcagacgauccugaugcucga

SEQ ID NO: 374740 - RNA, 32 nt, Homo Sapiens
ggcgucugcacccacccuuccacccucagggc

SEQ ID NO: 374741 - RNA, 32 nt, Homo Sapiens
agcuguggcugccggcggugggacgccccggc

SEQ ID NO: 374742 - RNA, 32 nt, Homo Sapiens
cucuggcaccugucgggguccaggccuagcau

SEQ ID NO: 374743 - RNA, 32 nt, Homo Sapiens
ccuagucugcccgcugcgcugcccucugccca

SEQ ID NO: 374744 - RNA, 32 nt, Homo Sapiens
aacagacuccuccuuuuuuagcuguauuuuuc

SEQ ID NO: 374745 - RNA, 32 nt, Homo Sapiens
gcaccgccccucaacagggaugacucagcacu

SEQ ID NO: 374746 - RNA, 32 nt, Homo Sapiens
auuuucuucuauuucaguuuuucauucuuuga

SEQ ID NO: 374747 - RNA, 32 nt, Homo Sapiens
gcaggaguuaccuggggaaacaaaacagggau

SEQ ID NO: 374748 - RNA, 32 nt, Homo Sapiens
ccagcccgcugggccgccauggagcgcuggcc

SEQ ID NO: 374749 - RNA, 32 nt, Homo Sapiens
ccuuccccgagcuuccccggacagcguacuuu

SEQ ID NO: 374750 - RNA, 32 nt, Homo Sapiens
aaggggagaaagggucccccuugcugucugcc

SEQ ID NO: 374751 - RNA, 32 nt, Homo Sapiens
uggcucaauaaagauuucaagauccucaaaaa

SEQ ID NO: 374752 - RNA, 32 nt, Homo Sapiens
auagccgcccccaccccauaccuugaucuacc

SEQ ID NO: 374753 - RNA, 32 nt, Homo Sapiens
uaugauccuuccacacuuuauuuccuuaauaa

SEQ ID NO: 374754 - RNA, 32 nt, Homo Sapiens
cccugucuccuccauccuggcugugcaguagg

SEQ ID NO: 374755 - RNA, 32 nt, Homo Sapiens
cuaaugagaauauuuugacuugacuucaauua

SEQ ID NO: 374756 - RNA, 30 nt, Homo Sapiens
ggcaggcagcugcgcgcggcuggagucaug

SEQ ID NO: 374757 - RNA, 32 nt, Homo Sapiens
uuucgaugaugaugaugaucaugaugaugaug

SEQ ID NO: 374758 - RNA, 32 nt, Homo Sapiens
agcagccuuugaaaugggaucuacacaucauu

SEQ ID NO: 374759 - RNA, 32 nt, Homo Sapiens
cccucugcgaccauggcugugcuggcggcacu

SEQ ID NO: 374760 - RNA, 32 nt, Homo Sapiens
ccucucccacaccccagccauccacacaucug

SEQ ID NO: 374761 - RNA, 32 nt, Homo Sapiens
auuguagauagccggcgccuuccucuucccau

SEQ ID NO: 374762 - RNA, 32 nt, Homo Sapiens
caugcaggggcuuaucugucuggaggcaguua

SEQ ID NO: 374763 - RNA, 32 nt, Homo Sapiens
ggugguuuaaaaaacuaaucaaacggcuuuag

SEQ ID NO: 374764 - RNA, 32 nt, Homo Sapiens
gaaaguauugccaggaaaauauaaggaaauac

SEQ ID NO: 374765 - RNA, 32 nt, Homo Sapiens
gacacaaagggaggggauggagcagauacccu

SEQ ID NO: 374766 - RNA, 32 nt, Homo Sapiens
uauggauggaaacaagcucuauggaaaauaaa

SEQ ID NO: 374767 - RNA, 32 nt, Homo Sapiens
uugagaugaacccugcaaguagacuuacguga

SEQ ID NO: 374768 - RNA, 32 nt, Homo Sapiens
uugcugguguaaaauacguuugaaauaguuga

SEQ ID NO: 374769 - RNA, 32 nt, Homo Sapiens
aauauauucuuugucagggauuuaacccuuuu

SEQ ID NO: 374770 - RNA, 29 nt, Homo Sapiens
uggcuauauuguuuuuauuuucuagauuc

SEQ ID NO: 374771 - RNA, 32 nt, Homo Sapiens
cccagugcuaucccuccccccucccccgaccc

SEQ ID NO: 374772 - RNA, 32 nt, Homo Sapiens
guauggagggauuuuucagguuucagcaugaa

SEQ ID NO: 374773 - RNA, 32 nt, Homo Sapiens
acacucggcuccuggguuccuagccccaaaau

SEQ ID NO: 374774 - RNA, 32 nt, Homo Sapiens
aggccaggccccagcccggcuccuucaacaag

SEQ ID NO: 374775 - RNA, 32 nt, Homo Sapiens
auguauagcuaauuacccaacuuuuuauuugc

SEQ ID NO: 374776 - RNA, 32 nt, Homo Sapiens
gaaauuguugaaaaagaaaacuuuuuaaagag

SEQ ID NO: 374777 - RNA, 32 nt, Homo Sapiens
uagcucuuguuuuucucacaguuucuuuaaaa

SEQ ID NO: 374778 - RNA, 32 nt, Homo Sapiens
ugagucgcggggcagcuccggucgcgucaagg

SEQ ID NO: 374779 - RNA, 32 nt, Homo Sapiens
uccgugcggcggggcgggcgggugccacaccu

SEQ ID NO: 374780 - RNA, 32 nt, Homo Sapiens
gggcuagcggcuuuguggagggaacacugggu

SEQ ID NO: 374781 - RNA, 32 nt, Homo Sapiens
cguccccagccacagcugggaugccgauggaa

SEQ ID NO: 374782 - RNA, 32 nt, Homo Sapiens
gcuaauaaacacauuuguaaauacauuguuug

SEQ ID NO: 374783 - RNA, 32 nt, Homo Sapiens
cauuuuaaacaaaaguauacagauauauaauc

SEQ ID NO: 374784 - RNA, 32 nt, Homo Sapiens
gaacauauuuuugaauuauaguucccaugacc

SEQ ID NO: 374785 - RNA, 32 nt, Homo Sapiens
auugagaccaaggggagaaccugguugcagga

SEQ ID NO: 374786 - RNA, 32 nt, Homo Sapiens
ggagcucuguuauuuugaguauaauauuucca

SEQ ID NO: 374787 - RNA, 32 nt, Homo Sapiens
ugcagaggcuggaagacggcagccgccggacu

SEQ ID NO: 374788 - RNA, 32 nt, Homo Sapiens
gcucccugcggugagugcuggccaggcuuucc

SEQ ID NO: 374789 - RNA, 32 nt, Homo Sapiens
cuguguaaagagcacuuuguccugcuucacgg

SEQ ID NO: 374790 - RNA, 32 nt, Homo Sapiens
ggugauuaccggcauuuuauuaaacuuaaaac

SEQ ID NO: 374791 - RNA, 32 nt, Homo Sapiens
gagagacagcuucaugagcgggcagugcagaa

SEQ ID NO: 374792 - RNA, 31 nt, Homo Sapiens
cacuuguagccccagcuacuagggaggcuga

SEQ ID NO: 374793 - RNA, 32 nt, Homo Sapiens
cuugacugcuugugagaccauuagcauugcag

SEQ ID NO: 374794 - RNA, 32 nt, Homo Sapiens
gaaaaccuuuuaaaccuuucugaaguucguua

SEQ ID NO: 374795 - RNA, 32 nt, Homo Sapiens
ucaagucugaagauuguuuucuuuguggaaga

SEQ ID NO: 374796 - RNA, 32 nt, Homo Sapiens
aaggcaggcagagggagaggcacucugagguc

SEQ ID NO: 374797 - RNA, 32 nt, Homo Sapiens
aauggucugucauugucugccuuuaaaauccu

SEQ ID NO: 374798 - RNA, 32 nt, Homo Sapiens
uuuuccaaugaaaacuguguaaauagagcauc

SEQ ID NO: 374799 - RNA, 32 nt, Homo Sapiens
uuuacccuucauuauuucauuuuuuauaguuc

SEQ ID NO: 374800 - RNA, 32 nt, Homo Sapiens
caucuccuccuggccugagauggaagucucug

SEQ ID NO: 374801 - RNA, 32 nt, Homo Sapiens
aggccccggccgcggcguccucgacaaccuau

SEQ ID NO: 374802 - RNA, 32 nt, Homo Sapiens
uuucgguagcguuuuaacuuuaucucagaauc

SEQ ID NO: 374803 - RNA, 32 nt, Homo Sapiens
ggaggugaguucuggaaggcaggggcucuggg

SEQ ID NO: 374804 - RNA, 32 nt, Homo Sapiens
cguuuggguuccggucuccgcuucuccagugg

SEQ ID NO: 374805 - RNA, 32 nt, Homo Sapiens
uaaagaaauauuaaaaguuagguacuguaagu

SEQ ID NO: 374806 - RNA, 32 nt, Homo Sapiens
gaccacuaggagagcggacggaggcggcgccu

SEQ ID NO: 374807 - RNA, 32 nt, Homo Sapiens
gaccuaggaggcggguuuggugcggccacucc

SEQ ID NO: 374808 - RNA, 32 nt, Homo Sapiens
agagauugucaucucauauaaaauggacacgu

SEQ ID NO: 374809 - RNA, 32 nt, Homo Sapiens
aggcugagccugcucauguaccucugauuaau

SEQ ID NO: 374810 - RNA, 32 nt, Homo Sapiens
cagaggccagugcgguagccuuugucccuuca

SEQ ID NO: 374811 - RNA, 32 nt, Homo Sapiens
uggaaacccagcugccaucgcuaugucucugc

SEQ ID NO: 374812 - RNA, 32 nt, Homo Sapiens
uguguaaacaaaaaauaaaauaaaauucugau

SEQ ID NO: 374813 - RNA, 32 nt, Homo Sapiens
ccuaaugugcugaccuaugugccugcauuuuu

SEQ ID NO: 374814 - RNA, 32 nt, Homo Sapiens
acuuuauuguaugauauguaggucuaaaauau

SEQ ID NO: 374815 - RNA, 32 nt, Homo Sapiens
cucucccccuccagcccuagccgagcuggucc

SEQ ID NO: 374816 - RNA, 32 nt, Homo Sapiens
uggaucuuuauguacuucuguuuggagagagc

SEQ ID NO: 374817 - RNA, 32 nt, Homo Sapiens
cucagacaaccuggggaugccuguccccuacc

SEQ ID NO: 374818 - RNA, 32 nt, Homo Sapiens
aaacgguugucaugguuuccagaugugugcaa

SEQ ID NO: 374819 - RNA, 32 nt, Homo Sapiens
ggaggacacaucagcccacuaccgcugccaac

SEQ ID NO: 374820 - RNA, 32 nt, Homo Sapiens
uaucacaaaaagccauuaagcauuuuaaaaug

SEQ ID NO: 374821 - RNA, 32 nt, Homo Sapiens
guacuugacaguguuaucugucacuuauuuaa

SEQ ID NO: 374822 - RNA, 32 nt, Homo Sapiens
agggcugcaaaggguacagggauugcaccagg

SEQ ID NO: 374823 - RNA, 32 nt, Homo Sapiens
ugcccuucaaggauuuuucacguaucauaaac

SEQ ID NO: 374824 - RNA, 32 nt, Homo Sapiens
gagacucagggugggcuuucucacacuuggau

SEQ ID NO: 374825 - RNA, 32 nt, Homo Sapiens
uaacuaaaggguaguuguuuuacaaugaagac

SEQ ID NO: 374826 - RNA, 32 nt, Homo Sapiens
gccuggggagccggaggcccugcccgacuccu

SEQ ID NO: 374827 - RNA, 29 nt, Homo Sapiens
guuugaaagucugauuauuuucuguccua

SEQ ID NO: 374828 - RNA, 32 nt, Homo Sapiens
augcagcccccgccagcugcccucaaaucccg

SEQ ID NO: 374829 - RNA, 32 nt, Homo Sapiens
gggacucgggugaggguggcgaguacugguuc

SEQ ID NO: 374830 - RNA, 32 nt, Homo Sapiens
uugauuucauuuacguuuuucuuuuucccaug

SEQ ID NO: 374831 - RNA, 32 nt, Homo Sapiens
ugugaugaggccagcggugucugccugcuggc

SEQ ID NO: 374832 - RNA, 32 nt, Homo Sapiens
cugcuuuuauucauuucccccauccugguuua

SEQ ID NO: 374833 - RNA, 32 nt, Homo Sapiens
cugcuuggucucuuccucuuuggccuaaucuc

SEQ ID NO: 374834 - RNA, 32 nt, Homo Sapiens
aaaucucucgcccugaguacucuucuugggag

SEQ ID NO: 374835 - RNA, 32 nt, Homo Sapiens
ggucccgcgccgcgcguccgcacuccucggcc

SEQ ID NO: 374836 - RNA, 31 nt, Homo Sapiens
cuguuaguuggaaguacccagaauuaucaga

SEQ ID NO: 374837 - RNA, 32 nt, Homo Sapiens
uccaggugccccaccuauuuaucugagcccac

SEQ ID NO: 374838 - RNA, 32 nt, Homo Sapiens
cugguccugacauucauccuccccuacauguc

SEQ ID NO: 374839 - RNA, 32 nt, Homo Sapiens
cccgcccgagccccgcuccucgcagccgccuc

SEQ ID NO: 374840 - RNA, 32 nt, Homo Sapiens
accaccccgcccuaggccgacccggcggacgc

SEQ ID NO: 374841 - RNA, 32 nt, Homo Sapiens
gggugggacucugcagggguguccuuguccac

SEQ ID NO: 374842 - RNA, 32 nt, Homo Sapiens
auuauucacccauuuuaaauuggugaccuagg

SEQ ID NO: 374843 - RNA, 30 nt, Homo Sapiens
cugggaggcaggcgcagugccccccucccg

SEQ ID NO: 374844 - RNA, 32 nt, Homo Sapiens
acgaggguggagccgagcggugcggagcagau

SEQ ID NO: 374845 - RNA, 32 nt, Homo Sapiens
agggccagggagagggcuugucuaucacagug

SEQ ID NO: 374846 - RNA, 32 nt, Homo Sapiens
ucgagaacugucuugucucuguguguuuauuu

SEQ ID NO: 374847 - RNA, 32 nt, Homo Sapiens
cuguguguggaggcuccugagcaccgggugcc

SEQ ID NO: 374848 - RNA, 32 nt, Homo Sapiens
gccccaacuuaccugcagacacuccuuuugcu

SEQ ID NO: 374849 - RNA, 32 nt, Homo Sapiens
auccacaucauaaguggaauuuuggagauauu

SEQ ID NO: 374850 - RNA, 32 nt, Homo Sapiens
gcgggcaggggagggucagccagggccugcga

SEQ ID NO: 374851 - RNA, 32 nt, Homo Sapiens
gaaacacacaaacacacacacacacacauuuu

SEQ ID NO: 374852 - RNA, 32 nt, Homo Sapiens
agaccucacaauucuuuuuuuuucuuuuucac

SEQ ID NO: 374853 - RNA, 32 nt, Homo Sapiens
gagcauccaagcccuggcccgucugugcacuc

SEQ ID NO: 374854 - RNA, 32 nt, Homo Sapiens
caaaacagcaaaacugucaccuuaaugaacuu

SEQ ID NO: 374855 - RNA, 30 nt, Homo Sapiens
cgcggcuuucugaugggggaaaaugccgcc

SEQ ID NO: 374856 - RNA, 32 nt, Homo Sapiens
gcccuggggggaggcccacgccugcuggacca

SEQ ID NO: 374857 - RNA, 32 nt, Homo Sapiens
ggaccccagggccaacucccccugccggcccu

SEQ ID NO: 374858 - RNA, 32 nt, Homo Sapiens
auguauuuguacacuaucuggcacauaugcgc

SEQ ID NO: 374859 - RNA, 32 nt, Homo Sapiens
uaaccacugucaauuguguuuaucccuagugc

SEQ ID NO: 374860 - RNA, 32 nt, Homo Sapiens
uauuauuaacugugcacagcuacacaaaggug

SEQ ID NO: 374861 - RNA, 32 nt, Homo Sapiens
gcuccaacacauucuucagugcaaucaguggc

SEQ ID NO: 374862 - RNA, 32 nt, Homo Sapiens
ucuggauggaaaggauugcugcucuccauuag

SEQ ID NO: 374863 - RNA, 32 nt, Homo Sapiens
ucugaaaacaaauaaagcagaugccuuuguuu

SEQ ID NO: 374864 - RNA, 32 nt, Homo Sapiens
cugcagcagcgggaagcucgguggcaagcccu

SEQ ID NO: 374865 - RNA, 32 nt, Homo Sapiens
uaaccagcuuaguaaccagaguaucuggauua

SEQ ID NO: 374866 - RNA, 32 nt, Homo Sapiens
cgcccucuugucaggacaacugccugcugcua

SEQ ID NO: 374867 - RNA, 32 nt, Homo Sapiens
aacccccuggggacugguucagcacauaaaag

SEQ ID NO: 374868 - RNA, 32 nt, Homo Sapiens
uuaccugucacuuuccgcaugcuaucuucaga

SEQ ID NO: 374869 - RNA, 32 nt, Homo Sapiens
cguaaccugguauaugcaacuaccauccucug

SEQ ID NO: 374870 - RNA, 31 nt, Homo Sapiens
cagaccucacccucacagaggcacaaaccca

SEQ ID NO: 374871 - RNA, 32 nt, Homo Sapiens
uugccacuuccacaucacauugccauuccucc

SEQ ID NO: 374872 - RNA, 32 nt, Homo Sapiens
aagagaaggcuuuaagaaagacgguauuaauc

SEQ ID NO: 374873 - RNA, 32 nt, Homo Sapiens
uuucacucuugauaauauucuuucucauauuu

SEQ ID NO: 374874 - RNA, 32 nt, Homo Sapiens
aucuagauaaaauggguaugaguauuauagaa

SEQ ID NO: 374875 - RNA, 32 nt, Homo Sapiens
caaguccccagaccugcuuucccggcccggcu

SEQ ID NO: 374876 - RNA, 32 nt, Homo Sapiens
ucuccagcuuccagcccuccuccccuaagccg

SEQ ID NO: 374877 - RNA, 32 nt, Homo Sapiens
aaaauacaaaaauuagccgggugugguggcau

SEQ ID NO: 374878 - RNA, 32 nt, Homo Sapiens
aaaauacaaaaauuguccgggugugguggcgg

SEQ ID NO: 374879 - RNA, 32 nt, Homo Sapiens
uggauucgccccacacaacucccccucuuuga

SEQ ID NO: 374880 - RNA, 32 nt, Homo Sapiens
uuaaauuuaaacaacuaaugcucuuugaagaa

SEQ ID NO: 374881 - RNA, 32 nt, Homo Sapiens
aagcccuccucacgcaguuacuaacaauagca

SEQ ID NO: 374882 - RNA, 32 nt, Homo Sapiens
aaccgcggcuccagcccucuccagccuccggc

SEQ ID NO: 374883 - RNA, 32 nt, Homo Sapiens
uccagccaucugauguugauccugucucaguc

SEQ ID NO: 374884 - RNA, 32 nt, Homo Sapiens
cucggaggccucccuuuccaagccugccuggg

SEQ ID NO: 374885 - RNA, 32 nt, Homo Sapiens
cucggagaccucccuuuccaagccugccugga

SEQ ID NO: 374886 - RNA, 32 nt, Homo Sapiens
caucuuaaguucauccagcagcuccaugagcc

SEQ ID NO: 374887 - RNA, 32 nt, Homo Sapiens
gagcugugcccuugaucaaaucugugcugugg

SEQ ID NO: 374888 - RNA, 32 nt, Homo Sapiens
gccaaggggcuauuacugcuguugggaaauac

SEQ ID NO: 374889 - RNA, 32 nt, Homo Sapiens
cuugaggagagaaaaaacacuuuaauaugucu

SEQ ID NO: 374890 - RNA, 32 nt, Homo Sapiens
ucaccaguauccccaaacuccaccuuugaguc

SEQ ID NO: 374891 - RNA, 32 nt, Homo Sapiens
aggacgugggcgugcaggacgcgggcgugcag

SEQ ID NO: 374892 - RNA, 32 nt, Homo Sapiens
ccacgauuugucgaguugcagggcucacccuu

SEQ ID NO: 374893 - RNA, 32 nt, Homo Sapiens
uaagauggucugacagggucccuuuugcugga

SEQ ID NO: 374894 - RNA, 32 nt, Homo Sapiens
ucuccuggguuugugcccaccauggugcgaau

SEQ ID NO: 374895 - RNA, 32 nt, Homo Sapiens
cugggcggucggcuuccacuccuucaggcguc

SEQ ID NO: 374896 - RNA, 32 nt, Homo Sapiens
gcgccuccacccgggccuuccucccccgugga

SEQ ID NO: 374897 - RNA, 31 nt, Homo Sapiens
uggaagaaauaaaagaaggagagugucaggu

SEQ ID NO: 374898 - RNA, 32 nt, Homo Sapiens
ucuuuacucaggugcaugguuacagccacagg

SEQ ID NO: 374899 - RNA, 32 nt, Homo Sapiens
guaaaguuugaggacauggaggugauaaaaaa

SEQ ID NO: 374900 - RNA, 32 nt, Homo Sapiens
cccggacccgcggcggcgcugacuuccgcgag

SEQ ID NO: 374901 - RNA, 32 nt, Homo Sapiens
agcacaucucuuaacugcauggugccagugcu

SEQ ID NO: 374902 - RNA, 32 nt, Homo Sapiens
guuuuaaaaaauuuauuaguuugacuauuuga

SEQ ID NO: 374903 - RNA, 32 nt, Homo Sapiens
aaucagccuagcaguuuaaaccccacuuuccu

SEQ ID NO: 374904 - RNA, 32 nt, Homo Sapiens
acaaaccuuucuggacggcagagcccaaguuu

SEQ ID NO: 374905 - RNA, 32 nt, Homo Sapiens
auuuuguuaaauaacuaacaugcugcucuauu

SEQ ID NO: 374906 - RNA, 32 nt, Homo Sapiens
cuccgcgcggggcgggcuccgcgccacgugac

SEQ ID NO: 374907 - RNA, 32 nt, Homo Sapiens
cccaagcucacccaccuguguagugggcuugg

SEQ ID NO: 374908 - RNA, 32 nt, Homo Sapiens
ggguggggcugggcauccguggaguggggcuu

SEQ ID NO: 374909 - RNA, 32 nt, Homo Sapiens
accuaccguuggaaccgcgaugccccguuccc

SEQ ID NO: 374910 - RNA, 32 nt, Homo Sapiens
ccucuuccuugcugucucuggauauugucaca

SEQ ID NO: 374911 - RNA, 32 nt, Homo Sapiens
ggaacuuccuguacagaauuuggucggggcuu

SEQ ID NO: 374912 - RNA, 32 nt, Homo Sapiens
auuaaagaacaggaaaaaauaauuauaagaug

SEQ ID NO: 374913 - RNA, 32 nt, Homo Sapiens
auuuaugaaaauaaaaaacuucauaacuaaac

SEQ ID NO: 374914 - RNA, 32 nt, Homo Sapiens
uucuccaagaggaggagggcgacgccaaggac

SEQ ID NO: 374915 - RNA, 32 nt, Homo Sapiens
ccgggucugacacuugcagaucaggcaggaca

SEQ ID NO: 374916 - RNA, 32 nt, Homo Sapiens
cuuccucuaucaaggccuucucuucuucucug

SEQ ID NO: 374917 - RNA, 32 nt, Homo Sapiens
gcaguguccugacuauaggggcccguucaugg

SEQ ID NO: 374918 - RNA, 32 nt, Homo Sapiens
cuuggaacguggcuucggcagcgcccccucua

SEQ ID NO: 374919 - RNA, 32 nt, Homo Sapiens
cagacguaggagaugccugggacaaggaggcc

SEQ ID NO: 374920 - RNA, 32 nt, Homo Sapiens
auuaauucucaaccucagauaucuucauuuau

SEQ ID NO: 374921 - RNA, 32 nt, Homo Sapiens
agaaaauagaugcauacugaaaaaagaauuuu

SEQ ID NO: 374922 - RNA, 32 nt, Homo Sapiens
gauccagcucuuucagcaucuugguugaacuu

SEQ ID NO: 374923 - RNA, 30 nt, Homo Sapiens
aauugguaucaccuccacacugacuagggu

SEQ ID NO: 374924 - RNA, 32 nt, Homo Sapiens
uagugcuuguuuucuucaacaaauaaaaaaua

SEQ ID NO: 374925 - RNA, 32 nt, Homo Sapiens
acaaagaacaauuuuuaaaauuuuguuuuuac

SEQ ID NO: 374926 - RNA, 32 nt, Homo Sapiens
augagaauuuaaagagucugugucuggccuau

SEQ ID NO: 374927 - RNA, 32 nt, Homo Sapiens
cacaucuuggaaagacugacucuguuauguaa

SEQ ID NO: 374928 - RNA, 32 nt, Homo Sapiens
uccugggaggaugugacgucaggugagaaggg

SEQ ID NO: 374929 - RNA, 32 nt, Homo Sapiens
aaggcggcuucgcguucugagaauagacagaa

SEQ ID NO: 374930 - RNA, 32 nt, Homo Sapiens
ggcccugcuuguagcuggacccuggaaccuuc

SEQ ID NO: 374931 - RNA, 32 nt, Homo Sapiens
gcuggcgcccggccaccccccacagccuccaa

SEQ ID NO: 374932 - RNA, 32 nt, Homo Sapiens
gcccaggacaccagcucccuggcuucugcggu

SEQ ID NO: 374933 - RNA, 32 nt, Homo Sapiens
caugguauaggcccuuuuuucuuaaacccagg

SEQ ID NO: 374934 - RNA, 32 nt, Homo Sapiens
auuuaauuuguuuacaaaaauguuuauugucu

SEQ ID NO: 374935 - RNA, 32 nt, Homo Sapiens
uggcauggagaaugcagaggugagccugucgu

SEQ ID NO: 374936 - RNA, 32 nt, Homo Sapiens
uacacaugggagggcauuugcauugugaugga

SEQ ID NO: 374937 - RNA, 32 nt, Homo Sapiens
cgcuaugggaccgcgcugagccgcccgcuggc

SEQ ID NO: 374938 - RNA, 32 nt, Homo Sapiens
gcccauuugacuggugaguaugugugcugggg

SEQ ID NO: 374939 - RNA, 32 nt, Homo Sapiens
aaaagcaacuguaacucagaaauuaaguuacu

SEQ ID NO: 374940 - RNA, 32 nt, Homo Sapiens
uuuuucaggacacuaguaagaagcucaguuca

SEQ ID NO: 374941 - RNA, 32 nt, Homo Sapiens
caaaugcaugugaaauguauaauuacaucuua

SEQ ID NO: 374942 - RNA, 32 nt, Homo Sapiens
gcuuuggagcagccuuucagagaccguuccaa

SEQ ID NO: 374943 - RNA, 32 nt, Homo Sapiens
ugcagugagccgagaucacaccaccgcacucc

SEQ ID NO: 374944 - RNA, 32 nt, Homo Sapiens
aaauuccuauuuucuuuuuuuuuuuuuuuuaa

SEQ ID NO: 374945 - RNA, 32 nt, Homo Sapiens
gccugcggcagagucgccuaagcauuugaaug

SEQ ID NO: 374946 - RNA, 32 nt, Homo Sapiens
ggaggccgcugcguagacccaacagcguccag

SEQ ID NO: 374947 - RNA, 32 nt, Homo Sapiens
ggacaguuagaaaaggcuaaaaauauuauugc

SEQ ID NO: 374948 - RNA, 32 nt, Homo Sapiens
guuuuaaaugucaguguuucuaugauuguaaa

SEQ ID NO: 374949 - RNA, 32 nt, Homo Sapiens
auaauuguugaaauuuugcaaauauaaacauc

SEQ ID NO: 374950 - RNA, 32 nt, Homo Sapiens
uaacaucugcuacuccaguaacagccucguac

SEQ ID NO: 374951 - RNA, 32 nt, Homo Sapiens
uuguggaugaggaaacaagaauaaacagaaug

SEQ ID NO: 374952 - RNA, 32 nt, Homo Sapiens
aggcuugaguacguguccggccgcauguguag

SEQ ID NO: 374953 - RNA, 32 nt, Homo Sapiens
acagguagcuacuguguauuauggacaaauga

SEQ ID NO: 374954 - RNA, 32 nt, Homo Sapiens
auagcuuugccaaaugcacggagcucugccau

SEQ ID NO: 374955 - RNA, 32 nt, Homo Sapiens
uucucagaauaaaucugucuucuacgaaaagc

SEQ ID NO: 374956 - RNA, 32 nt, Homo Sapiens
ucuucucuggaggcugcagaccagccagaucc

SEQ ID NO: 374957 - RNA, 32 nt, Homo Sapiens
gcacuagugcuguucugaccauucucuguguu

SEQ ID NO: 374958 - RNA, 28 nt, Homo Sapiens
ugguaggcauaggccauggcacuggacu

SEQ ID NO: 374959 - RNA, 32 nt, Homo Sapiens
uccccagauccgaauucgagauccaaaccaag

SEQ ID NO: 374960 - RNA, 32 nt, Homo Sapiens
cucggugcggcaaguuugaauuucguggaggc

SEQ ID NO: 374961 - RNA, 32 nt, Homo Sapiens
acauuugagagaaucggauguagugauaugac

SEQ ID NO: 374962 - RNA, 32 nt, Homo Sapiens
cuguuuguuucaaucucuaaucuuuaagucag

SEQ ID NO: 374963 - RNA, 32 nt, Homo Sapiens
gaggcaggcucgccggggcuggcgcugguggu

SEQ ID NO: 374964 - RNA, 32 nt, Homo Sapiens
auggcccagucuuuucauucucuggcagugag

SEQ ID NO: 374965 - RNA, 32 nt, Homo Sapiens
gugacaggaaaauaucuuggggccccagaauc

SEQ ID NO: 374966 - RNA, 32 nt, Homo Sapiens
aaacaucacgagaucauagagauggaaaacug

SEQ ID NO: 374967 - RNA, 32 nt, Homo Sapiens
ucucugucccgccgacuccugcccccauucug

SEQ ID NO: 374968 - RNA, 32 nt, Homo Sapiens
uuucuuuauaaucuuuucugcuuaccaaauua

SEQ ID NO: 374969 - RNA, 32 nt, Homo Sapiens
uggguggagagccugcggguaaaguaccaccu

SEQ ID NO: 374970 - RNA, 32 nt, Homo Sapiens
gaggcagaggcuggauuaaacacacacuguuu

SEQ ID NO: 374971 - RNA, 32 nt, Homo Sapiens
cuacgggcuaagcgcccggccccggggccgcg

SEQ ID NO: 374972 - RNA, 32 nt, Homo Sapiens
cugaaguaaaaagcccuuauaggauuaaaaau

SEQ ID NO: 374973 - RNA, 32 nt, Homo Sapiens
ccugaugaccuggagaucuaauacaggcuuga

SEQ ID NO: 374974 - RNA, 32 nt, Homo Sapiens
ucuuuuauguaaauuggauaaauacacacacc

SEQ ID NO: 374975 - RNA, 32 nt, Homo Sapiens
aauaacagcgguaaguuucacuuuuuauucug

SEQ ID NO: 374976 - RNA, 32 nt, Homo Sapiens
acaggauguaaccccaccuucugcuuacccuu

SEQ ID NO: 374977 - RNA, 32 nt, Homo Sapiens
gccaguuucugcaguggaggucgcgacugagg

SEQ ID NO: 374978 - RNA, 32 nt, Homo Sapiens
aagaagauggggaaaugagagaauacaucuuu

SEQ ID NO: 374979 - RNA, 32 nt, Homo Sapiens
ggacugguuaucuuguuauuauuguuaauaau

SEQ ID NO: 374980 - RNA, 32 nt, Homo Sapiens
gugauaucuauuauguagauaaauauauauag

SEQ ID NO: 374981 - RNA, 32 nt, Homo Sapiens
ugaggcagaugaagguuaccaaacuuguggac

SEQ ID NO: 374982 - RNA, 32 nt, Homo Sapiens
aaaugagugaauuuugaguaagaucaguggau

SEQ ID NO: 374983 - RNA, 32 nt, Homo Sapiens
gagggaggcacagagggaaacggcucucgcag

SEQ ID NO: 374984 - RNA, 32 nt, Homo Sapiens
auagaccucacaggguguucugaugcauaauc

SEQ ID NO: 374985 - RNA, 31 nt, Homo Sapiens
ucuuuccaagccaccacacuugcuggauggg

SEQ ID NO: 374986 - RNA, 30 nt, Homo Sapiens
cccuacggucccggcggcggcuggaggagg

SEQ ID NO: 374987 - RNA, 32 nt, Homo Sapiens
ggaccgagagacgcggcuguucggcggcccuc

SEQ ID NO: 374988 - RNA, 32 nt, Homo Sapiens
caucacgcagaaggggugaaagagacucggug

SEQ ID NO: 374989 - RNA, 32 nt, Homo Sapiens
auuagaaacuguuacagccugcaguuaccaua

SEQ ID NO: 374990 - RNA, 32 nt, Homo Sapiens
aauugcauggcuuuuccaaucagacgaaauuu

SEQ ID NO: 374991 - RNA, 32 nt, Homo Sapiens
ucacuucaauuucccaaugaauuuuauauugu

SEQ ID NO: 374992 - RNA, 32 nt, Homo Sapiens
acagcugcgggcggcccuggagcaggcccggg

SEQ ID NO: 374993 - RNA, 32 nt, Homo Sapiens
uaaaauuagcauaaccaucauaaaaaaaaaaa

SEQ ID NO: 374994 - RNA, 32 nt, Homo Sapiens
cugggcccaggccccaggagcugggcccaggc

SEQ ID NO: 374995 - RNA, 32 nt, Homo Sapiens
uuuagauuccuuucccuucucuccaguucucc

SEQ ID NO: 374996 - RNA, 32 nt, Homo Sapiens
cuucuuacagaaaaucaaauuuuaaaagaaca

SEQ ID NO: 374997 - RNA, 32 nt, Homo Sapiens
gcugcgggagugggcgggagggagagggguug

SEQ ID NO: 374998 - RNA, 32 nt, Homo Sapiens
ccugguccugaagaaauugggauacuuguggg

SEQ ID NO: 374999 - RNA, 32 nt, Homo Sapiens
cuccgaggcuuccaggagccccggccccgccg

SEQ ID NO: 375000 - RNA, 32 nt, Homo Sapiens
ccagaucccauuuagaaccaaccaggugcuga

SEQ ID NO: 375001 - RNA, 32 nt, Homo Sapiens
caggaaggccccaagaggacaauggauucugg

SEQ ID NO: 375002 - RNA, 32 nt, Homo Sapiens
aggugggaauuuccucuuccuaauaagccugg

SEQ ID NO: 375003 - RNA, 32 nt, Homo Sapiens
cuggaaggagucauauuggauuagguguuggg

SEQ ID NO: 375004 - RNA, 32 nt, Homo Sapiens
gauaagaaauuaggcugaacuugcuuguauag

SEQ ID NO: 375005 - RNA, 32 nt, Homo Sapiens
aauugcugugcuuuauggauaguaagaauggc

SEQ ID NO: 375006 - RNA, 32 nt, Homo Sapiens
cuugcuccccgggaacccauggaaggagaagc

SEQ ID NO: 375007 - RNA, 32 nt, Homo Sapiens
ggaggaccuaggcggccguuccgcggagcccg

SEQ ID NO: 375008 - RNA, 31 nt, Homo Sapiens
ugcguucccugcacuguuccccgcgcuguuc

SEQ ID NO: 375009 - RNA, 32 nt, Homo Sapiens
auaacaucuauuauuucuaguaaauucuccca

SEQ ID NO: 375010 - RNA, 32 nt, Homo Sapiens
ugcccaggaugagggacaggugcagcuuucau

SEQ ID NO: 375011 - RNA, 30 nt, Homo Sapiens
cgcaaggucggcugcggcggcggcccgagg

SEQ ID NO: 375012 - RNA, 32 nt, Homo Sapiens
caggagggcuggguugaccuguccuuggucac

SEQ ID NO: 375013 - RNA, 32 nt, Homo Sapiens
cagcaauuccuccauuuuuaugaaucuuguga

SEQ ID NO: 375014 - RNA, 32 nt, Homo Sapiens
ugaccggaagccuuuuccuucucucugauuua

SEQ ID NO: 375015 - RNA, 32 nt, Homo Sapiens
ugagauuugaagaggagcaacaguccaaagau

SEQ ID NO: 375016 - RNA, 32 nt, Homo Sapiens
ccguccugcuucucuguuuccacacguacaca

SEQ ID NO: 375017 - RNA, 32 nt, Homo Sapiens
ggacaggaaaggaaacaauggaaggaaaguga

SEQ ID NO: 375018 - RNA, 32 nt, Homo Sapiens
gaugugaaauuaugaaaguauuuuauuguuca

SEQ ID NO: 375019 - RNA, 32 nt, Homo Sapiens
cuauaauugguauuuacuuuuaccaaaaauuc

SEQ ID NO: 375020 - RNA, 32 nt, Homo Sapiens
guuuggaaaacagcccguuuacuuggcaagac

SEQ ID NO: 375021 - RNA, 32 nt, Homo Sapiens
gcaggguacuauuuaaagugcaauauugaaaa

SEQ ID NO: 375022 - RNA, 32 nt, Homo Sapiens
gucugaaucaacaucuaagagcuccgagaguu

SEQ ID NO: 375023 - RNA, 32 nt, Homo Sapiens
acauuugcuuuauuuuuauucacagagaaagu

SEQ ID NO: 375024 - RNA, 32 nt, Homo Sapiens
cccugcgugucugcgaacagaccuccggccuc

SEQ ID NO: 375025 - RNA, 32 nt, Homo Sapiens
gugccuguugucccggagugacaaagacccua

SEQ ID NO: 375026 - RNA, 32 nt, Homo Sapiens
gaugggggugggcaccugaggcccaauaauau

SEQ ID NO: 375027 - RNA, 32 nt, Homo Sapiens
augauagcaaaauaaagccauuuggggcugcu

SEQ ID NO: 375028 - RNA, 32 nt, Homo Sapiens
gggauguguuuccauuuguuuuugucaucugu

SEQ ID NO: 375029 - RNA, 32 nt, Homo Sapiens
gcagcaguuugacuuuaaaguugcaaacuggc

SEQ ID NO: 375030 - RNA, 32 nt, Homo Sapiens
aaugcccacaagugggucuucuguggaagaug

SEQ ID NO: 375031 - RNA, 30 nt, Homo Sapiens
gcaccaugucgcucauggucaucagcaugg

SEQ ID NO: 375032 - RNA, 32 nt, Homo Sapiens
cauuuuaaaaauuuaaugucaaagucugguaa

SEQ ID NO: 375033 - RNA, 32 nt, Homo Sapiens
gagaaagagucuugcuccaucgcccaggcugc

SEQ ID NO: 375034 - RNA, 32 nt, Homo Sapiens
ugaguuugccagcccccgagaagggaugccug

SEQ ID NO: 375035 - RNA, 32 nt, Homo Sapiens
cuuaguauuccaugguaucuauguaucacauu

SEQ ID NO: 375036 - RNA, 32 nt, Homo Sapiens
aaauuuuuuaaaaaugcaacccuaagaucuga

SEQ ID NO: 375037 - RNA, 32 nt, Homo Sapiens
ugcaguaccaaugacaaaaauauggugucaua

SEQ ID NO: 375038 - RNA, 32 nt, Homo Sapiens
uuaguggagacgggguuucaccguguuagcca

SEQ ID NO: 375039 - RNA, 29 nt, Homo Sapiens
uuagcauauuuuauguaccaugguuauau

SEQ ID NO: 375040 - RNA, 32 nt, Homo Sapiens
acagaaggccccacagugucucuuaaaggaug

SEQ ID NO: 375041 - RNA, 32 nt, Homo Sapiens
ugguauggaaaacauuuuucuuauuuuuaagu

SEQ ID NO: 375042 - RNA, 32 nt, Homo Sapiens
uccacacaaugcaacagagugaaagagcaggu

SEQ ID NO: 375043 - RNA, 32 nt, Homo Sapiens
ucguccucaaguuggccuccccgggcccagcu

SEQ ID NO: 375044 - RNA, 32 nt, Homo Sapiens
cuccacucuuacugccuucuuaaugaugggaa

SEQ ID NO: 375045 - RNA, 32 nt, Homo Sapiens
ggaaaauuuaucgggaaaauuacauaaucccu

SEQ ID NO: 375046 - RNA, 32 nt, Homo Sapiens
auggguacaagaugguuagauacaccgggcag

SEQ ID NO: 375047 - RNA, 32 nt, Homo Sapiens
gaaauuguuuuuaaauugaaguuucuuucuuc

SEQ ID NO: 375048 - RNA, 32 nt, Homo Sapiens
ggacaucuuuuauuuuuugucagagauccugu

SEQ ID NO: 375049 - RNA, 29 nt, Homo Sapiens
ucucuuucauaugaacugaaggcuaaagu

SEQ ID NO: 375050 - RNA, 32 nt, Homo Sapiens
agaauguggcuuucuucagucaaagcauuuuu

SEQ ID NO: 375051 - RNA, 32 nt, Homo Sapiens
aaaacaaaacaaaacgacacuucuggaggcca

SEQ ID NO: 375052 - RNA, 32 nt, Homo Sapiens
cuuggggagaccuggaggaacagugcagugua

SEQ ID NO: 375053 - RNA, 32 nt, Homo Sapiens
aaagauaauuggagguuaagagaauuagucag

SEQ ID NO: 375054 - RNA, 32 nt, Homo Sapiens
augcccaugcguauacauuguuuagcucccaa

SEQ ID NO: 375055 - RNA, 32 nt, Homo Sapiens
ggugagaaagagaauggagaguuuugcuacaa

SEQ ID NO: 375056 - RNA, 32 nt, Homo Sapiens
uugggggagggaagaggcagcccggcgagggg

SEQ ID NO: 375057 - RNA, 32 nt, Homo Sapiens
ucgcacgugcuuucugcucuucugggaauuuc

SEQ ID NO: 375058 - RNA, 32 nt, Homo Sapiens
gaaccuccuguaacuucuaucuguucuuuuuu

SEQ ID NO: 375059 - RNA, 32 nt, Homo Sapiens
cucauuguguuucuaccggagagagaauguau

SEQ ID NO: 375060 - RNA, 32 nt, Homo Sapiens
aggaugggcuuccaaucaaaccucagacuaaa

SEQ ID NO: 375061 - RNA, 32 nt, Homo Sapiens
auuuucuaucauggaauauuuauaggccaggg

SEQ ID NO: 375062 - RNA, 32 nt, Homo Sapiens
cggggccccggcucagcaccccggagagcucc

SEQ ID NO: 375063 - RNA, 32 nt, Homo Sapiens
uuuccuugggauuccgaccucccccucagaga

SEQ ID NO: 375064 - RNA, 32 nt, Homo Sapiens
uucaagaaaccuaaaucagggaaggaaagugg

SEQ ID NO: 375065 - RNA, 32 nt, Homo Sapiens
aggcgaggagagaggagggcgcagcucccgcc

SEQ ID NO: 375066 - RNA, 32 nt, Homo Sapiens
ucauuccccccgccaccuguacucacccucac

SEQ ID NO: 375067 - RNA, 32 nt, Homo Sapiens
ugauuuauaugcauauuuuucuguaaaucuac

SEQ ID NO: 375068 - RNA, 32 nt, Homo Sapiens
agcuggaagccaccugcugcugcacucccugc

SEQ ID NO: 375069 - RNA, 32 nt, Homo Sapiens
ggcaaugcugauggcaguguugguaacuaauu

SEQ ID NO: 375070 - RNA, 32 nt, Homo Sapiens
aguacugucugcuugucagacacgaugcagag

SEQ ID NO: 375071 - RNA, 32 nt, Homo Sapiens
cacgcguccgguaaaccagccggagcggcgcg

SEQ ID NO: 375072 - RNA, 32 nt, Homo Sapiens
guggcauuucuguggcucugcaguguuccucc

SEQ ID NO: 375073 - RNA, 32 nt, Homo Sapiens
aauguauauguaucaugaauuuuuauggauua

SEQ ID NO: 375074 - RNA, 32 nt, Homo Sapiens
ccuuccaggccugggaugagggggcgaugucu

SEQ ID NO: 375075 - RNA, 32 nt, Homo Sapiens
aacugaagaugaugaagaauauuaaccaagca

SEQ ID NO: 375076 - RNA, 32 nt, Homo Sapiens
acuuccaaaaauacccuuaagacugugaugag

SEQ ID NO: 375077 - RNA, 32 nt, Homo Sapiens
gggguucucuacaggccucuuccuguugugac

SEQ ID NO: 375078 - RNA, 32 nt, Homo Sapiens
cccuucccugaccccuaaguuauugcccgcuc

SEQ ID NO: 375079 - RNA, 32 nt, Homo Sapiens
cgcgcgccggauggcaggagaaguguccgcgg

SEQ ID NO: 375080 - RNA, 32 nt, Homo Sapiens
uuauaggugugagccaccacacccagccucua

SEQ ID NO: 375081 - RNA, 32 nt, Homo Sapiens
uuuuguuauagcaucucucuauuucaaagaca

SEQ ID NO: 375082 - RNA, 32 nt, Homo Sapiens
guguuccgaccccuuucccagcccacagggcu

SEQ ID NO: 375083 - RNA, 32 nt, Homo Sapiens
caugcccauuuucugcuguuucugauggguca

SEQ ID NO: 375084 - RNA, 32 nt, Homo Sapiens
uucgaguuugaaaaccauugauuaagugaaaa

SEQ ID NO: 375085 - RNA, 32 nt, Homo Sapiens
uguuguguauaaaagaagaaagacuggcaugu

SEQ ID NO: 375086 - RNA, 32 nt, Homo Sapiens
auaaggcugccggcccggagccgccgcgccgu

SEQ ID NO: 375087 - RNA, 32 nt, Homo Sapiens
uucucucugccagccuccuccucccccaucgg

SEQ ID NO: 375088 - RNA, 32 nt, Homo Sapiens
ccuccccccacccucccuguccccuguuggcc

SEQ ID NO: 375089 - RNA, 32 nt, Homo Sapiens
uauuucugcaguggcauagaaucuguuaaaau

SEQ ID NO: 375090 - RNA, 32 nt, Homo Sapiens
acgggccuuuugcuacauucuauccagagagc

SEQ ID NO: 375091 - RNA, 32 nt, Homo Sapiens
cucacuacccccagcuucccagaugggaaacu

SEQ ID NO: 375092 - RNA, 32 nt, Homo Sapiens
uuuuucugguuuuaaagagauguuggccauua

SEQ ID NO: 375093 - RNA, 32 nt, Homo Sapiens
uuuccucuguucacaaacuaccucuggacagu

SEQ ID NO: 375094 - RNA, 32 nt, Homo Sapiens
ggacauggcugauggcugcggaugcuggaacc

SEQ ID NO: 375095 - RNA, 32 nt, Homo Sapiens
cagccuugcugcucugcguggcgcaggugcca

SEQ ID NO: 375096 - RNA, 32 nt, Homo Sapiens
uuuguuuugagugauccacugaugguugagaa

SEQ ID NO: 375097 - RNA, 31 nt, Homo Sapiens
aagcugcagcgcagcagggcuacagugcuua

SEQ ID NO: 375098 - RNA, 32 nt, Homo Sapiens
aaaauaucugccaguuauuaaaaagcacaguu

SEQ ID NO: 375099 - RNA, 31 nt, Homo Sapiens
guuagagguuugacuuuuaaauaauuacuua

SEQ ID NO: 375100 - RNA, 32 nt, Homo Sapiens
gggacaggagggugggcuggugggcaaacauu

SEQ ID NO: 375101 - RNA, 32 nt, Homo Sapiens
uuguacagaggagaauaaaaaauggcugaggu

SEQ ID NO: 375102 - RNA, 32 nt, Homo Sapiens
aggaggugccaggucccuggugucacgggguu

SEQ ID NO: 375103 - RNA, 32 nt, Homo Sapiens
cgccagucccaccgccgccgccgcgauggcgc

SEQ ID NO: 375104 - RNA, 32 nt, Homo Sapiens
cucugucagugccuauggauuauggcagggaa

SEQ ID NO: 375105 - RNA, 32 nt, Homo Sapiens
agucugaggugacaccaucauuaaggauucga

SEQ ID NO: 375106 - RNA, 32 nt, Homo Sapiens
gcgcggaggucgcccggggugcccuggcuggg

SEQ ID NO: 375107 - RNA, 32 nt, Homo Sapiens
cccuccacuuccaagcaagcagaugggggugg

SEQ ID NO: 375108 - RNA, 32 nt, Homo Sapiens
auagcgcuggcgagggaagcagcuggaaagag

SEQ ID NO: 375109 - RNA, 32 nt, Homo Sapiens
caucccgucgcggggccggccgcuacuccggc

SEQ ID NO: 375110 - RNA, 32 nt, Homo Sapiens
ugucgaguauauauuuauuguguuuuacaaac

SEQ ID NO: 375111 - RNA, 32 nt, Homo Sapiens
cagcggccaggcccgccccuccccucgugaug

SEQ ID NO: 375112 - RNA, 32 nt, Homo Sapiens
cauugcccacugagucccacucgacugucuuc

SEQ ID NO: 375113 - RNA, 32 nt, Homo Sapiens
agccaagauugugccacugcacuccagcgugg

SEQ ID NO: 375114 - RNA, 32 nt, Homo Sapiens
aacucauauuguuugaccuuagcugauuggga

SEQ ID NO: 375115 - RNA, 32 nt, Homo Sapiens
ucgucgucggaucaaggagcgcggcggcguuu

SEQ ID NO: 375116 - RNA, 32 nt, Homo Sapiens
cauaauaaacacagaagauauucaccaccuca

SEQ ID NO: 375117 - RNA, 32 nt, Homo Sapiens
uaaccuagagauuguuuuuguuuuuuauucuc

SEQ ID NO: 375118 - RNA, 32 nt, Homo Sapiens
ggaugguucaucauugugaaagaaaugguuau

SEQ ID NO: 375119 - RNA, 32 nt, Homo Sapiens
gaugggagauacuguuguggucaccucuggaa

SEQ ID NO: 375120 - RNA, 32 nt, Homo Sapiens
ccgcggcaggcgaagagagaagagacuaucaa

SEQ ID NO: 375121 - RNA, 31 nt, Homo Sapiens
gcagcugcagacugccugccuagaacagccu

SEQ ID NO: 375122 - RNA, 32 nt, Homo Sapiens
uagauaaaaugguaaaauguuuuacugaaagc

SEQ ID NO: 375123 - RNA, 32 nt, Homo Sapiens
auauacucuagaugaauguuuacauuguugag

SEQ ID NO: 375124 - RNA, 28 nt, Homo Sapiens
gaaacuccgguguccccgaggugucggu

SEQ ID NO: 375125 - RNA, 32 nt, Homo Sapiens
uagcuccuucuguucucauuuaucuucugcug

SEQ ID NO: 375126 - RNA, 32 nt, Homo Sapiens
ccuauuuguauuuucugaugcuaucagacucu

SEQ ID NO: 375127 - RNA, 32 nt, Homo Sapiens
aucuauuuuagaucuaaggaaauacuacagag

SEQ ID NO: 375128 - RNA, 32 nt, Homo Sapiens
gagagagcuguugggguuucucugccaaugac

SEQ ID NO: 375129 - RNA, 32 nt, Homo Sapiens
ccaccuugcauuucauuguucuucacaagugc

SEQ ID NO: 375130 - RNA, 32 nt, Homo Sapiens
acugauuaucuaggaucuguguauuacuuaag

SEQ ID NO: 375131 - RNA, 32 nt, Homo Sapiens
acucuuuuucauauuuucagagaaaguuaccu

SEQ ID NO: 375132 - RNA, 32 nt, Homo Sapiens
ugucuccaaccuggggucccuggaggccagaa

SEQ ID NO: 375133 - RNA, 32 nt, Homo Sapiens
uuauuuuauacuuauauacacgcagguguaaa

SEQ ID NO: 375134 - RNA, 32 nt, Homo Sapiens
gagaagaaauguuacuuuuuaacuuuauacuc

SEQ ID NO: 375135 - RNA, 32 nt, Homo Sapiens
ccauuucuuuagagaccagaaaaacuaucuua

SEQ ID NO: 375136 - RNA, 32 nt, Homo Sapiens
uguuguuuaaaauaauguaaucaucaaaauga

SEQ ID NO: 375137 - RNA, 32 nt, Homo Sapiens
aaugaaguuuaucuuggaaaaauccaaaaagg

SEQ ID NO: 375138 - RNA, 32 nt, Homo Sapiens
gaacccauuacuuuuccaagaccagaaaaaaa

SEQ ID NO: 375139 - RNA, 32 nt, Homo Sapiens
uucaauacuauguaccauuguauuauaguaac

SEQ ID NO: 375140 - RNA, 32 nt, Homo Sapiens
uaauuaugaugauagaggcuggguuguaagua

SEQ ID NO: 375141 - RNA, 32 nt, Homo Sapiens
cccaccuucccaaaccuaauucuuguagaugc

SEQ ID NO: 375142 - RNA, 32 nt, Homo Sapiens
guccguuaugagugccaaaaaucugucuugaa

SEQ ID NO: 375143 - RNA, 32 nt, Homo Sapiens
agaaucuaaggacaaagaaugauccaaaaaua

SEQ ID NO: 375144 - RNA, 32 nt, Homo Sapiens
guaaaauccagaacuuggacuccaucguuaaa

SEQ ID NO: 375145 - RNA, 32 nt, Homo Sapiens
ggccacugcccccggcccccgccauggugcgg

SEQ ID NO: 375146 - RNA, 32 nt, Homo Sapiens
cgggcgggguuuguacuauccucggugcugug

SEQ ID NO: 375147 - RNA, 32 nt, Homo Sapiens
gaucagcugaaagaaacagauauuuuaaauug

SEQ ID NO: 375148 - RNA, 32 nt, Homo Sapiens
gagccccuuucccugggagcucccagaggaaa

SEQ ID NO: 375149 - RNA, 32 nt, Homo Sapiens
ggccuuuugugcuuguuuccuauaacuucagu

SEQ ID NO: 375150 - RNA, 32 nt, Homo Sapiens
uagauuauaaaauuauuuuuauuaaauaaaua

SEQ ID NO: 375151 - RNA, 32 nt, Homo Sapiens
cccggaccaguggcugggagccccacacagau

SEQ ID NO: 375152 - RNA, 32 nt, Homo Sapiens
aaugaaagcaccuguuauuuuuaaguuucuaa

SEQ ID NO: 375153 - RNA, 32 nt, Homo Sapiens
ucuaugugagcaugcauauauacuucacaaag

SEQ ID NO: 375154 - RNA, 32 nt, Homo Sapiens
cuccccuuaccuuuccucucuccauucaagca

SEQ ID NO: 375155 - RNA, 32 nt, Homo Sapiens
aacccucuuguuuaugugauuagcucagagca

SEQ ID NO: 375156 - RNA, 32 nt, Homo Sapiens
ccggguggccucgacuacggcgcgggcgaugg

SEQ ID NO: 375157 - RNA, 32 nt, Homo Sapiens
agugaagugugaauauuuuuugucaauggcuu

SEQ ID NO: 375158 - RNA, 32 nt, Homo Sapiens
uuggaauacauuucuccuuugauaaaauaaau

SEQ ID NO: 375159 - RNA, 32 nt, Homo Sapiens
caaaaagcuauuuacuuugguuuucuagaaag

SEQ ID NO: 375160 - RNA, 32 nt, Homo Sapiens
ugcgccuccccucccggcucccagccgggcgc

SEQ ID NO: 375161 - RNA, 32 nt, Homo Sapiens
ccucagccgggcgcggggagggggcuccgugc

SEQ ID NO: 375162 - RNA, 32 nt, Homo Sapiens
aaauuuggaaaauaaacuuuuuuuuguugaau

SEQ ID NO: 375163 - RNA, 32 nt, Homo Sapiens
gcuucccgggcucagcugggcuuuaucacaca

SEQ ID NO: 375164 - RNA, 32 nt, Homo Sapiens
cccagcccauucuccugucuggcuggguuggg

SEQ ID NO: 375165 - RNA, 32 nt, Homo Sapiens
uuguauuaccuguaaauugauuuacaaguacu

SEQ ID NO: 375166 - RNA, 32 nt, Homo Sapiens
guauugucaacauccuucuuaagcaaaguauu

SEQ ID NO: 375167 - RNA, 32 nt, Homo Sapiens
cuguauuaucagcacagcaaauuaaagaauga

SEQ ID NO: 375168 - RNA, 32 nt, Homo Sapiens
agcaccucccucccggccccucugccccuccu

SEQ ID NO: 375169 - RNA, 32 nt, Homo Sapiens
gcaccaccacacuccagccugggugacaagag

SEQ ID NO: 375170 - RNA, 32 nt, Homo Sapiens
ccuaccucuugugucccuggaaccuucuagaa

SEQ ID NO: 375171 - RNA, 32 nt, Homo Sapiens
cucgcccgcccggaccugcccuucucucggcu

SEQ ID NO: 375172 - RNA, 32 nt, Homo Sapiens
cccgacccccgacgcccuccccgagacccugg

SEQ ID NO: 375173 - RNA, 32 nt, Homo Sapiens
ggaaguacagaagaugcaggggugugguaucc

SEQ ID NO: 375174 - RNA, 32 nt, Homo Sapiens
caaaauacaugaagaacaauuucacgaagagg

SEQ ID NO: 375175 - RNA, 32 nt, Homo Sapiens
guuaauuaaaucugcaguuuuauuuuugaagg

SEQ ID NO: 375176 - RNA, 32 nt, Homo Sapiens
gcgcgggaaggggagaaaggggcugccagagg

SEQ ID NO: 375177 - RNA, 32 nt, Homo Sapiens
ugauucccaagccgcggggcggcuccgguggu

SEQ ID NO: 375178 - RNA, 32 nt, Homo Sapiens
uauuggagcaaaauaaaaagcucauuuuuuaa

SEQ ID NO: 375179 - RNA, 32 nt, Homo Sapiens
gaaggcgccggaacuacagcuaccuccgcggc

SEQ ID NO: 375180 - RNA, 32 nt, Homo Sapiens
ccaucauggaguaacuuaaaaauacauaucua

SEQ ID NO: 375181 - RNA, 32 nt, Homo Sapiens
cccacacagcuauguguuugagcagcgaagag

SEQ ID NO: 375182 - RNA, 32 nt, Homo Sapiens
gcugcugcagcggagggagcgcggcggcgcgg

SEQ ID NO: 375183 - RNA, 32 nt, Homo Sapiens
caugaguagagauugggcaagcauugguaaua

SEQ ID NO: 375184 - RNA, 32 nt, Homo Sapiens
agggcuuagagcauggaccuccugcccugggg

SEQ ID NO: 375185 - RNA, 32 nt, Homo Sapiens
cggucucccccuccccaucugauguguccugc

SEQ ID NO: 375186 - RNA, 32 nt, Homo Sapiens
cugcccuuuuggacagaggccuuguuugggga

SEQ ID NO: 375187 - RNA, 32 nt, Homo Sapiens
caauucagcucuucuuuuggaaugaaaguaua

SEQ ID NO: 375188 - RNA, 32 nt, Homo Sapiens
gguuuugugaggaauaaaugauaaugcuaaga

SEQ ID NO: 375189 - RNA, 32 nt, Homo Sapiens
ugcuaaaauauuauuguggaaaugaauauuuu

SEQ ID NO: 375190 - RNA, 32 nt, Homo Sapiens
ucuuccgugucugaugucuugcugaaugcugu

SEQ ID NO: 375191 - RNA, 32 nt, Homo Sapiens
acgcuuggguccccggagcucccgggcacauc

SEQ ID NO: 375192 - RNA, 32 nt, Homo Sapiens
ucucuugagcucccgggcguccggaggcgaag

SEQ ID NO: 375193 - RNA, 32 nt, Homo Sapiens
aauauuuuuuaaaauggcuuuuuguuguuugu

SEQ ID NO: 375194 - RNA, 32 nt, Homo Sapiens
cgccuaaucauguguuuauaggauaguacacg

SEQ ID NO: 375195 - RNA, 32 nt, Homo Sapiens
agaacacacccuccuccccgggacgccgcagc

SEQ ID NO: 375196 - RNA, 32 nt, Homo Sapiens
uuugucucauguugaccuuguuuagucacauu

SEQ ID NO: 375197 - RNA, 32 nt, Homo Sapiens
agaaaacaacgcgcgcccagcuggcuccccuc

SEQ ID NO: 375198 - RNA, 32 nt, Homo Sapiens
aaagaagggcuccuuucgcuccuuauuucgcc

SEQ ID NO: 375199 - RNA, 32 nt, Homo Sapiens
uucccugucuacgccucccgagaaaagaaagg

SEQ ID NO: 375200 - RNA, 32 nt, Homo Sapiens
auuaauuaauggucuguaaacaauaacaacug

SEQ ID NO: 375201 - RNA, 32 nt, Homo Sapiens
uguccuugggagagggcgucacccggucagag

SEQ ID NO: 375202 - RNA, 32 nt, Homo Sapiens
uuguuuaaaaagacauuuuauuauaauaaagu

SEQ ID NO: 375203 - RNA, 32 nt, Homo Sapiens
ugaaagggacauucuguggaucaguuugauua

SEQ ID NO: 375204 - RNA, 32 nt, Homo Sapiens
ggcaaacguuuagagaaggaaaaggaaauggg

SEQ ID NO: 375205 - RNA, 32 nt, Homo Sapiens
guuuuuguguggaaucuugucuuuccguauaa

SEQ ID NO: 375206 - RNA, 32 nt, Homo Sapiens
uuuuggcagccuaucacgcagaggcuaguggu

SEQ ID NO: 375207 - RNA, 32 nt, Homo Sapiens
cagcaaagcaaggacuccaugaccugcugugu

SEQ ID NO: 375208 - RNA, 32 nt, Homo Sapiens
gaggcuaucuuccuuuuccccaguaacauucc

SEQ ID NO: 375209 - RNA, 32 nt, Homo Sapiens
caagcuuucuaaaaccaauuuuuccaacaaca

SEQ ID NO: 375210 - RNA, 32 nt, Homo Sapiens
cauccgucagguggcguucagucucagaauac

SEQ ID NO: 375211 - RNA, 32 nt, Homo Sapiens
gcuguacugugcaccugcagcuccacacccuc

SEQ ID NO: 375212 - RNA, 32 nt, Homo Sapiens
uuuucaauaaugugaacugcugauuugaugga

SEQ ID NO: 375213 - RNA, 32 nt, Homo Sapiens
agaaacggaguccuccuguguugcccaggcug

SEQ ID NO: 375214 - RNA, 32 nt, Homo Sapiens
acaggcaugcaccaccacgucuggcuaauuuu

SEQ ID NO: 375215 - RNA, 32 nt, Homo Sapiens
ccugaauacacacacacacacacacacacgca

SEQ ID NO: 375216 - RNA, 32 nt, Homo Sapiens
uccggagcgcugggcgguguggagcgggcccg

SEQ ID NO: 375217 - RNA, 32 nt, Homo Sapiens
uuuuucuauuguggguuugcauuugaaaagca

SEQ ID NO: 375218 - RNA, 30 nt, Homo Sapiens
ccaaaggaggucgacucgccggcgcuuccu

SEQ ID NO: 375219 - RNA, 32 nt, Homo Sapiens
gagggaugccagcaggugcccccacgaguggg

SEQ ID NO: 375220 - RNA, 32 nt, Homo Sapiens
gacugcagagccuucaucgucuggcuggccaa

SEQ ID NO: 375221 - RNA, 32 nt, Homo Sapiens
gagagaaaucaucaaucuuuggugucaucuga

SEQ ID NO: 375222 - RNA, 32 nt, Homo Sapiens
gauggcaaacacacuggaaacaauugggccac

SEQ ID NO: 375223 - RNA, 32 nt, Homo Sapiens
ggaccaaaggacuuaagaauuuggggggaagu

SEQ ID NO: 375224 - RNA, 32 nt, Homo Sapiens
cacuggcaaagacacgcuggcugcuguggccg

SEQ ID NO: 375225 - RNA, 32 nt, Homo Sapiens
uaacaaggacauaauguaagauaauaaaguag

SEQ ID NO: 375226 - RNA, 32 nt, Homo Sapiens
agaggcauuauuacugcauuguuugucacugg

SEQ ID NO: 375227 - RNA, 31 nt, Homo Sapiens
aaauuuuauuugacuuauagagaauagcaua

SEQ ID NO: 375228 - RNA, 32 nt, Homo Sapiens
gcgccgcggggcagcgcggggucgccauggcu

SEQ ID NO: 375229 - RNA, 32 nt, Homo Sapiens
acagaaaaagagggccggggcugggcgcggug

SEQ ID NO: 375230 - RNA, 32 nt, Homo Sapiens
ugaugagccaaggucaugccacugcacuccag

SEQ ID NO: 375231 - RNA, 32 nt, Homo Sapiens
ccucacuuuacuaauaauguuuauuaucuuuc

SEQ ID NO: 375232 - RNA, 32 nt, Homo Sapiens
ccaugauuaugcugcugcacuccagccuggac

SEQ ID NO: 375233 - RNA, 32 nt, Homo Sapiens
aaaacauuugucaguaauuuaacaucacuaca

SEQ ID NO: 375234 - RNA, 32 nt, Homo Sapiens
accaguguuccagucuuaaaguagacaaaaua

SEQ ID NO: 375235 - RNA, 32 nt, Homo Sapiens
cgcggaucugccaucccuacagcccucccgcu

SEQ ID NO: 375236 - RNA, 28 nt, Homo Sapiens
cuuuugucuauuuauauguguaccaagu

SEQ ID NO: 375237 - RNA, 32 nt, Homo Sapiens
accuguugcagagucaagggacuugcaugugc

SEQ ID NO: 375238 - RNA, 32 nt, Homo Sapiens
aauaugguacuauuaauacaacuguaugggac

SEQ ID NO: 375239 - RNA, 32 nt, Homo Sapiens
uuuuaaguggcagguauuguaacuguuuuuug

SEQ ID NO: 375240 - RNA, 32 nt, Homo Sapiens
aaguucuggguguucagcauccucauccggcc

SEQ ID NO: 375241 - RNA, 29 nt, Homo Sapiens
augaaaaucuguuuguauuuucugcauau

SEQ ID NO: 375242 - RNA, 32 nt, Homo Sapiens
agccuggagcugcagccgcgcaaggcccaggc

SEQ ID NO: 375243 - RNA, 32 nt, Homo Sapiens
ugaggcauagccccuggacacacacacacaga

SEQ ID NO: 375244 - RNA, 32 nt, Homo Sapiens
cuucucagacggggugguugccaggcagaggg

SEQ ID NO: 375245 - RNA, 32 nt, Homo Sapiens
caccaucgccugggccugcccacagcacuggu

SEQ ID NO: 375246 - RNA, 32 nt, Homo Sapiens
gccugacauuuugcuguuuuuaucaaaaagga

SEQ ID NO: 375247 - RNA, 32 nt, Homo Sapiens
cuuuugaggagccuccuggggaauuggaggau

SEQ ID NO: 375248 - RNA, 32 nt, Homo Sapiens
gcaaaaauacucagugcaauggacugaauguu

SEQ ID NO: 375249 - RNA, 32 nt, Homo Sapiens
cgcacggguaggaagggcgaaaaggaaacccu

SEQ ID NO: 375250 - RNA, 32 nt, Homo Sapiens
ucagaugccugggaagcccagccccucaggug

SEQ ID NO: 375251 - RNA, 32 nt, Homo Sapiens
cugcucaauggacacccccagcccagacccgu

SEQ ID NO: 375252 - RNA, 32 nt, Homo Sapiens
uacagggacuugaauuagcagagucuaaaauc

SEQ ID NO: 375253 - RNA, 32 nt, Homo Sapiens
cacacaugggcaucaaaccagaggaacaaagu

SEQ ID NO: 375254 - RNA, 32 nt, Homo Sapiens
aaaauaugaacauggcugggcgcgguggcuua

SEQ ID NO: 375255 - RNA, 32 nt, Homo Sapiens
aucuuuuccagaugugaauggaaucagaugua

SEQ ID NO: 375256 - RNA, 32 nt, Homo Sapiens
ccugaccuuuucgacacuuaccuaguaaagua

SEQ ID NO: 375257 - RNA, 32 nt, Homo Sapiens
cuuuaaagacuugcaaagauugagagagaaag

SEQ ID NO: 375258 - RNA, 32 nt, Homo Sapiens
uucacugaagguuuuuuuuucuuaaaaaaaaa

SEQ ID NO: 375259 - RNA, 32 nt, Homo Sapiens
gccagcagcuccgacucauauuuccaaauccc

SEQ ID NO: 375260 - RNA, 32 nt, Homo Sapiens
cugccccuuucugcagccuaggcggcccaggu

SEQ ID NO: 375261 - RNA, 32 nt, Homo Sapiens
cacauccagaaucaccugaggaacuucaaaac

SEQ ID NO: 375262 - RNA, 32 nt, Homo Sapiens
ugugucuguccucauuuuucaaccauguauuc

SEQ ID NO: 375263 - RNA, 32 nt, Homo Sapiens
caggaaagcccucccccggagcuuccgaaacu

SEQ ID NO: 375264 - RNA, 32 nt, Homo Sapiens
acauaugcauauauuuuguguucauucuacug

SEQ ID NO: 375265 - RNA, 32 nt, Homo Sapiens
gaaucucuuugcccuuuccaacggcuauggca

SEQ ID NO: 375266 - RNA, 32 nt, Homo Sapiens
auugcuuagcauauguaaaguuguagucuaua

SEQ ID NO: 375267 - RNA, 29 nt, Homo Sapiens
agaucuucgguggggguacggguguuuua

SEQ ID NO: 375268 - RNA, 32 nt, Homo Sapiens
gggggcuguucauggcgguuccggggucucca

SEQ ID NO: 375269 - RNA, 32 nt, Homo Sapiens
cgccugcugagcggggucugugggagcuagcu

SEQ ID NO: 375270 - RNA, 32 nt, Homo Sapiens
gaguuccccuguccccucccccuucccucaca

SEQ ID NO: 375271 - RNA, 32 nt, Homo Sapiens
auuaugaauuaaagucaguaguuaaauuaaua

SEQ ID NO: 375272 - RNA, 32 nt, Homo Sapiens
acgguuacauugcaaagccuuacucuaaaagc

SEQ ID NO: 375273 - RNA, 32 nt, Homo Sapiens
guggugccuugggucaaagcuuccucaagccu

SEQ ID NO: 375274 - RNA, 32 nt, Homo Sapiens
ucucuuuccuuuccuuuuuuuaaaaaauuuua

SEQ ID NO: 375275 - RNA, 32 nt, Homo Sapiens
ccggggcagggcccaggcaucuucauuuugac

SEQ ID NO: 375276 - RNA, 32 nt, Homo Sapiens
cauuuuguauauauuucuuuguauauaauuuu

SEQ ID NO: 375277 - RNA, 32 nt, Homo Sapiens
gccccuuucuuaaauuucuagggcugaugcug

SEQ ID NO: 375278 - RNA, 32 nt, Homo Sapiens
ugcuguugauucagacuuucacaccauuaaug

SEQ ID NO: 375279 - RNA, 32 nt, Homo Sapiens
ugaagagaagauuuaagaagcaccuauagacu

SEQ ID NO: 375280 - RNA, 32 nt, Homo Sapiens
uggccugcccagggcuuggugcuggcgggguc

SEQ ID NO: 375281 - RNA, 31 nt, Homo Sapiens
auaaugacaaauugaaccauauguaaguaau

SEQ ID NO: 375282 - RNA, 32 nt, Homo Sapiens
agugucuuucagguauccguuccacuagcuac

SEQ ID NO: 375283 - RNA, 32 nt, Homo Sapiens
cuccuccagcagagacccucggaccccugcag

SEQ ID NO: 375284 - RNA, 32 nt, Homo Sapiens
uuuacuuugaagaucucaacugcuucuguguu

SEQ ID NO: 375285 - RNA, 32 nt, Homo Sapiens
ggcccgugcagggcucagcucggcagcagcuc

SEQ ID NO: 375286 - RNA, 31 nt, Homo Sapiens
uuucuuaugcugaccacuggaguccauggug

SEQ ID NO: 375287 - RNA, 32 nt, Homo Sapiens
gccucucgaaggccugcacgggccuggccucg

SEQ ID NO: 375288 - RNA, 32 nt, Homo Sapiens
ccacuagugccugagcucagugcugcuggaug

SEQ ID NO: 375289 - RNA, 32 nt, Homo Sapiens
ucuuuuuggaaugagauuaaaauacauuuuga

SEQ ID NO: 375290 - RNA, 32 nt, Homo Sapiens
cccuacgccucccagacccugagcuccagucu

SEQ ID NO: 375291 - RNA, 32 nt, Homo Sapiens
guggaaaucagacgggacccccugcagcuucc

SEQ ID NO: 375292 - RNA, 32 nt, Homo Sapiens
cgucucauccuccuuucaguucguugguagag

SEQ ID NO: 375293 - RNA, 32 nt, Homo Sapiens
guuaccaguaaaauauuacuguaauuucauau

SEQ ID NO: 375294 - RNA, 30 nt, Homo Sapiens
acgggguuucacuuuguuagccaggauggu

SEQ ID NO: 375295 - RNA, 32 nt, Homo Sapiens
gcuaagaucccacgggcgagggcuugcucugg

SEQ ID NO: 375296 - RNA, 32 nt, Homo Sapiens
auguccucggaaggggguggcuccugguagca

SEQ ID NO: 375297 - RNA, 32 nt, Homo Sapiens
ccccugucuccucuccuccuccagcccccagc

SEQ ID NO: 375298 - RNA, 32 nt, Homo Sapiens
gugacgucuuguaacuagcagugugugcacag

SEQ ID NO: 375299 - RNA, 32 nt, Homo Sapiens
caauagaguggaagucuguaguaguuaauaug

SEQ ID NO: 375300 - RNA, 32 nt, Homo Sapiens
uuuguguucuaauacuaacaagcuaugugacu

SEQ ID NO: 375301 - RNA, 32 nt, Homo Sapiens
gggagcggauacuacuuuuugccucacuguaa

SEQ ID NO: 375302 - RNA, 32 nt, Homo Sapiens
aaaaggaauuuaaaacaaaaaccacagaggcg

SEQ ID NO: 375303 - RNA, 32 nt, Homo Sapiens
cauuuccuccuguggcuacauagugcauauaa

SEQ ID NO: 375304 - RNA, 32 nt, Homo Sapiens
acuggcgagucuuugcccugccuccuccaagu

SEQ ID NO: 375305 - RNA, 32 nt, Homo Sapiens
cacucgcucagguggcauucaaagcgucauag

SEQ ID NO: 375306 - RNA, 32 nt, Homo Sapiens
gaugggggugcagcuuagaggacccccucuga

SEQ ID NO: 375307 - RNA, 32 nt, Homo Sapiens
gcuucuuaaaauugaguggcauuuuauaauga

SEQ ID NO: 375308 - RNA, 32 nt, Homo Sapiens
aggaaaaaugaaauuacuuuccugugcacaca

SEQ ID NO: 375309 - RNA, 32 nt, Homo Sapiens
gcagcgggcggcagcugcggcgcaaccggcuc

SEQ ID NO: 375310 - RNA, 32 nt, Homo Sapiens
gaggaggguggcggccgggcuuggcuucggcu

SEQ ID NO: 375311 - RNA, 32 nt, Homo Sapiens
ucuucucucccucccccuucaggggcucccug

SEQ ID NO: 375312 - RNA, 32 nt, Homo Sapiens
auauucaaaaauuuaugagugugaucucaugu

SEQ ID NO: 375313 - RNA, 32 nt, Homo Sapiens
gcgucucauggccucuagcagcucccuggugc

SEQ ID NO: 375314 - RNA, 32 nt, Homo Sapiens
cgucugggaaaacagccucaccccacucuccu

SEQ ID NO: 375315 - RNA, 32 nt, Homo Sapiens
ggcgaccucacgguugcacuuccauuccacca

SEQ ID NO: 375316 - RNA, 32 nt, Homo Sapiens
acaccauccagaagcuuugaauuaacauuucu

SEQ ID NO: 375317 - RNA, 32 nt, Homo Sapiens
augucaguuuauagaaauauuuauuguucaag

SEQ ID NO: 375318 - RNA, 32 nt, Homo Sapiens
gaaacauuacaauugaacaaugacucagcuau

SEQ ID NO: 375319 - RNA, 32 nt, Homo Sapiens
cugugcaaugcugugugcucccggggaucagu

SEQ ID NO: 375320 - RNA, 32 nt, Homo Sapiens
ucacagagguggcucacagagaaggauggcag

SEQ ID NO: 375321 - RNA, 32 nt, Homo Sapiens
agagaagaaaucagcggaccacgauuucaaga

SEQ ID NO: 375322 - RNA, 32 nt, Homo Sapiens
auuucucacagcauauuuucaguuuuuugucc

SEQ ID NO: 375323 - RNA, 27 nt, Homo Sapiens
uuuuuguucugcuucagccaugguuca

SEQ ID NO: 375324 - RNA, 32 nt, Homo Sapiens
ugucuucugccagcauccaugaaacuguggca

SEQ ID NO: 375325 - RNA, 32 nt, Homo Sapiens
aauuauguuauuuauuccccuuucucuucccc

SEQ ID NO: 375326 - RNA, 32 nt, Homo Sapiens
auugauuauuuuuauugugucaauacagagaa

SEQ ID NO: 375327 - RNA, 32 nt, Homo Sapiens
aaaaauaaaaaggcuauuuuauuguuauugcc

SEQ ID NO: 375328 - RNA, 32 nt, Homo Sapiens
cucaccuugcaacacacagacacacgcacaca

SEQ ID NO: 375329 - RNA, 32 nt, Homo Sapiens
aggucugcuacaaugcugcugcugcacagagc

SEQ ID NO: 375330 - RNA, 32 nt, Homo Sapiens
uugagaaaacaaaacaaaaggaacaauccaug

SEQ ID NO: 375331 - RNA, 32 nt, Homo Sapiens
ggaccaggaugaugacaaugaggcuugcagug

SEQ ID NO: 375332 - RNA, 29 nt, Homo Sapiens
ucucuuuaaaucuauauccagagccacua

SEQ ID NO: 375333 - RNA, 32 nt, Homo Sapiens
uccugaccacggaaacaagaucuccuuucugg

SEQ ID NO: 375334 - RNA, 32 nt, Homo Sapiens
auuuguguucuuuugcagaacucugauaagaa

SEQ ID NO: 375335 - RNA, 32 nt, Homo Sapiens
auauccuaaaauguauauuuugcauaaaagag

SEQ ID NO: 375336 - RNA, 32 nt, Homo Sapiens
ggccaaauucuauuuucauuggcugucacugc

SEQ ID NO: 375337 - RNA, 32 nt, Homo Sapiens
gcauuccuuuugcuuccaccaccacuagcuuc

SEQ ID NO: 375338 - RNA, 32 nt, Homo Sapiens
uuuaguaaauguuaucuuauacuguacaauaa

SEQ ID NO: 375339 - RNA, 32 nt, Homo Sapiens
uguaaauguaaacucagcaucaaaauauuuca

SEQ ID NO: 375340 - RNA, 32 nt, Homo Sapiens
aguacaugugacucaccagaugggguccuuag

SEQ ID NO: 375341 - RNA, 27 nt, Homo Sapiens
ccaugcuagccuugcgcguggcgcgcg

SEQ ID NO: 375342 - RNA, 32 nt, Homo Sapiens
caggggcagaagagacccaaccacuuccuauu

SEQ ID NO: 375343 - RNA, 32 nt, Homo Sapiens
agugccucugcucgugggucccuggacacggc

SEQ ID NO: 375344 - RNA, 32 nt, Homo Sapiens
cucucaaaucucauuugguacagucagaauag

SEQ ID NO: 375345 - RNA, 32 nt, Homo Sapiens
ugggggaugcccucuuuucuauauuuauuuca

SEQ ID NO: 375346 - RNA, 32 nt, Homo Sapiens
aaggaaauguaaguuuccagauuuaaaggaca

SEQ ID NO: 375347 - RNA, 32 nt, Homo Sapiens
ggguuccguuugcugaaguaaaaacacugauu

SEQ ID NO: 375348 - RNA, 32 nt, Homo Sapiens
cuacaaauauagguuugauucaacacuuaagu

SEQ ID NO: 375349 - RNA, 32 nt, Homo Sapiens
uuugcacuguuccagacaucgucaucuccauc

SEQ ID NO: 375350 - RNA, 32 nt, Homo Sapiens
cuuagaaugcucauuucuuuuaaaugguuuaa

SEQ ID NO: 375351 - RNA, 32 nt, Homo Sapiens
ggaaacaagugaauucaugguauuuuacuuuu

SEQ ID NO: 375352 - RNA, 32 nt, Homo Sapiens
gucucucuugucaagucagaacagccagguag

SEQ ID NO: 375353 - RNA, 32 nt, Homo Sapiens
cacacacacacacacacacacacacacucuuu

SEQ ID NO: 375354 - RNA, 32 nt, Homo Sapiens
aguaggauacauuauuagaaacuguuaggguc

SEQ ID NO: 375355 - RNA, 32 nt, Homo Sapiens
ccugggauauuccugacccaaucugguuuucu

SEQ ID NO: 375356 - RNA, 32 nt, Homo Sapiens
gaggaacaugaaauuugucuuuucucaugucc

SEQ ID NO: 375357 - RNA, 32 nt, Homo Sapiens
guacauuuuuacaguguuuucuuaucaauuug

SEQ ID NO: 375358 - RNA, 32 nt, Homo Sapiens
aaauucaaaaacaaaauuagccgggcaugaug

SEQ ID NO: 375359 - RNA, 32 nt, Homo Sapiens
aaaauacaaaaauuagcugagcauguugacac

SEQ ID NO: 375360 - RNA, 32 nt, Homo Sapiens
augcuggaccacaucuccugcuguucugggua

SEQ ID NO: 375361 - RNA, 32 nt, Homo Sapiens
ugcuacaaaaagacaucggucaguacgagcac

SEQ ID NO: 375362 - RNA, 32 nt, Homo Sapiens
caucuacaccgacuaccacggccugcagcaga

SEQ ID NO: 375363 - RNA, 32 nt, Homo Sapiens
gggcaagccaccuugccugucuaggccucuau

SEQ ID NO: 375364 - RNA, 32 nt, Homo Sapiens
auucugcagcuauaaauuuugaaccauugaug

SEQ ID NO: 375365 - RNA, 32 nt, Homo Sapiens
caauuuaaauuuccaucagggaacaucaaaug

SEQ ID NO: 375366 - RNA, 32 nt, Homo Sapiens
uuuguaaaaugggaauguuaacgugccuaccu

SEQ ID NO: 375367 - RNA, 32 nt, Homo Sapiens
cucccccgccccagucccgcaguccgggaggc

SEQ ID NO: 375368 - RNA, 32 nt, Homo Sapiens
aggucucaggggucuccaguccuccuucauca

SEQ ID NO: 375369 - RNA, 32 nt, Homo Sapiens
ugcauuucacugggcuguaacccgcaggggca

SEQ ID NO: 375370 - RNA, 32 nt, Homo Sapiens
cagccgggaagcugccagagcguggaaccaag

SEQ ID NO: 375371 - RNA, 32 nt, Homo Sapiens
guggaaaggauguagucuuaaucuuaacugug

SEQ ID NO: 375372 - RNA, 32 nt, Homo Sapiens
aacuucugcaaguuuaaauauuugagcuuuac

SEQ ID NO: 375373 - RNA, 32 nt, Homo Sapiens
ggaccagagaaguggaaggaagcaaaauggag

SEQ ID NO: 375374 - RNA, 32 nt, Homo Sapiens
ugcuggauucuaugauuggcagauuuaacauu

SEQ ID NO: 375375 - RNA, 32 nt, Homo Sapiens
ucggaaguggggucauuuucauauuuaggcuu

SEQ ID NO: 375376 - RNA, 32 nt, Homo Sapiens
ucaggccucccuccccagcacugguaucugag

SEQ ID NO: 375377 - RNA, 32 nt, Homo Sapiens
cccaagccagcgccuggcuguucucucauugu

SEQ ID NO: 375378 - RNA, 32 nt, Homo Sapiens
cuccuguuggagcccccauacgcccgagccac

SEQ ID NO: 375379 - RNA, 32 nt, Homo Sapiens
agcaguugccccacccuguguaguuguugagg

SEQ ID NO: 375380 - RNA, 32 nt, Homo Sapiens
augaacaucuuugauccuuccauuucauuuau

SEQ ID NO: 375381 - RNA, 32 nt, Homo Sapiens
ggggccuggggagacggaagggcgccaggggu

SEQ ID NO: 375382 - RNA, 32 nt, Homo Sapiens
auguugugaguuuggauuuucuuccaaacguu

SEQ ID NO: 375383 - RNA, 32 nt, Homo Sapiens
gcagcucgcgucgacccuggcuccucugccug

SEQ ID NO: 375384 - RNA, 32 nt, Homo Sapiens
agcuucuuguuauaugagauaauuacgcccuu

SEQ ID NO: 375385 - RNA, 31 nt, Homo Sapiens
ggauguguuaaggcauauugaguuaaaucuc

SEQ ID NO: 375386 - RNA, 32 nt, Homo Sapiens
cccgucgcgggccccugcaccccgagcauccg

SEQ ID NO: 375387 - RNA, 32 nt, Homo Sapiens
ugguggagauaaagauuucuugaguuuuguuu

SEQ ID NO: 375388 - RNA, 32 nt, Homo Sapiens
ugaacauagguggucaaaagaccuuuuuucua

SEQ ID NO: 375389 - RNA, 32 nt, Homo Sapiens
acuagagcuugcauuuccugacuuccagauua

SEQ ID NO: 375390 - RNA, 32 nt, Homo Sapiens
uaauagauaugcacaugaaagaugcaaacuug

SEQ ID NO: 375391 - RNA, 32 nt, Homo Sapiens
cggauugccugagcucaggaguucaagaccag

SEQ ID NO: 375392 - RNA, 32 nt, Homo Sapiens
gcgggauggagucucugucacccaggcuggag

SEQ ID NO: 375393 - RNA, 32 nt, Homo Sapiens
cccaauuaaaagauuauuauugucaauaaagc

SEQ ID NO: 375394 - RNA, 32 nt, Homo Sapiens
gucugggacugguggcaccggcggcggcguag

SEQ ID NO: 375395 - RNA, 32 nt, Homo Sapiens
gaguacaguggugcgaucuuggcucugcaacc

SEQ ID NO: 375396 - RNA, 32 nt, Homo Sapiens
uuuucuccauauauugauuucuuacugacgau

SEQ ID NO: 375397 - RNA, 32 nt, Homo Sapiens
guuuagaguuuuacuguaacuaugaauaauua

SEQ ID NO: 375398 - RNA, 32 nt, Homo Sapiens
caugagggugacugaggguuucacaggcaccu

SEQ ID NO: 375399 - RNA, 32 nt, Homo Sapiens
uuaguagagauggggucucaccauguuggcca

SEQ ID NO: 375400 - RNA, 32 nt, Homo Sapiens
ccgcugcggcagcagaggcggcuggccaggaa

SEQ ID NO: 375401 - RNA, 32 nt, Homo Sapiens
ugaguggacucuaucccucccccuuccaccgg

SEQ ID NO: 375402 - RNA, 32 nt, Homo Sapiens
uccaguuuuggaagcagcuggaucuuaguagu

SEQ ID NO: 375403 - RNA, 32 nt, Homo Sapiens
uugguuauuuaguuugucacagucuuggggac

SEQ ID NO: 375404 - RNA, 32 nt, Homo Sapiens
agaaggaaaaagaaaguaaugccacacauugu

SEQ ID NO: 375405 - RNA, 32 nt, Homo Sapiens
caauuccugcagcagagcaacuugugcaagua

SEQ ID NO: 375406 - RNA, 32 nt, Homo Sapiens
caaauccccucccccugccccucaccucccca

SEQ ID NO: 375407 - RNA, 32 nt, Homo Sapiens
cgcaccguccgccgccgcucccggggcuguug

SEQ ID NO: 375408 - RNA, 32 nt, Homo Sapiens
cucuuggccaaacugaguucucuucucuugua

SEQ ID NO: 375409 - RNA, 32 nt, Homo Sapiens
ugcuguggggagaguagaaagagggguuggca

SEQ ID NO: 375410 - RNA, 29 nt, Homo Sapiens
gcuccuaaauuagacaauccauucucuug

SEQ ID NO: 375411 - RNA, 32 nt, Homo Sapiens
gcacagucuccaccacccuggagccaaggguc

SEQ ID NO: 375412 - RNA, 32 nt, Homo Sapiens
cuuauuuguaauguuucuuuuaaauaaaagug

SEQ ID NO: 375413 - RNA, 32 nt, Homo Sapiens
uauaaaaucuauuuuucuuuaaaucuuggaaa

SEQ ID NO: 375414 - RNA, 29 nt, Homo Sapiens
guccauuuguguuucagaaucagcacagg

SEQ ID NO: 375415 - RNA, 32 nt, Homo Sapiens
ucagggccugguacucuacagcagccacaggg

SEQ ID NO: 375416 - RNA, 32 nt, Homo Sapiens
uugaagauuaauguaggaugacaggcucuccu

SEQ ID NO: 375417 - RNA, 32 nt, Homo Sapiens
ggagacuggugcccugagcuccaaccagcggg

SEQ ID NO: 375418 - RNA, 32 nt, Homo Sapiens
aaaaggaugucuuucaggauuauuuuaauuaa

SEQ ID NO: 375419 - RNA, 32 nt, Homo Sapiens
cccaugagauauauuuuuaaugauguuagguu

SEQ ID NO: 375420 - RNA, 32 nt, Homo Sapiens
ugaggagcgcggaccccggcgcucggcucccg

SEQ ID NO: 375421 - RNA, 32 nt, Homo Sapiens
cucgaaaaggaaaaccaccaucuuucuuuuaa

SEQ ID NO: 375422 - RNA, 32 nt, Homo Sapiens
guuuuucucuaaaauaugaauuuuauaauuga

SEQ ID NO: 375423 - RNA, 32 nt, Homo Sapiens
aagggggcucugccccaggcccuacuacccau

SEQ ID NO: 375424 - RNA, 32 nt, Homo Sapiens
uuggcacacaggugugauacaacuuaacagga

SEQ ID NO: 375425 - RNA, 32 nt, Homo Sapiens
gcuuugaagaaaaagcaaaaacaagaacaaaa

SEQ ID NO: 375426 - RNA, 32 nt, Homo Sapiens
uucaacuauguauuuuuaaauaaacuucauau

SEQ ID NO: 375427 - RNA, 32 nt, Homo Sapiens
uuaaggcugugcuugugcuuuauacaaagaga

SEQ ID NO: 375428 - RNA, 32 nt, Homo Sapiens
caggcggagacccgaggcucucgcugcccgcu

SEQ ID NO: 375429 - RNA, 32 nt, Homo Sapiens
cugagccgacacaaaaucugguuggauaucag

SEQ ID NO: 375430 - RNA, 32 nt, Homo Sapiens
ggacagaccagccccagccgcugggccaacuu

SEQ ID NO: 375431 - RNA, 30 nt, Homo Sapiens
ucacaucuggacuccacauccagcgaggag

SEQ ID NO: 375432 - RNA, 32 nt, Homo Sapiens
gugggggcagacgugccaaugagagagaaagg

SEQ ID NO: 375433 - RNA, 32 nt, Homo Sapiens
ccacagcccuccccacugugagccuuccugac

SEQ ID NO: 375434 - RNA, 32 nt, Homo Sapiens
cuccacaccugccucaucacggcggcgaggcu

SEQ ID NO: 375435 - RNA, 32 nt, Homo Sapiens
aguccuggaggcucagcccggcgugccacugc

SEQ ID NO: 375436 - RNA, 32 nt, Homo Sapiens
agauuaagugaaaucugauuuaacugaggucu

SEQ ID NO: 375437 - RNA, 32 nt, Homo Sapiens
uuucauuuuuuccauuauucugauuggguaau

SEQ ID NO: 375438 - RNA, 32 nt, Homo Sapiens
guggucgggauacaucuugguuuuauguauuu

SEQ ID NO: 375439 - RNA, 32 nt, Homo Sapiens
auugcugagaauucaaauaaaaagaggacuga

SEQ ID NO: 375440 - RNA, 32 nt, Homo Sapiens
gcagggaaaggcugcgcgggagaagccgcugu

SEQ ID NO: 375441 - RNA, 32 nt, Homo Sapiens
uaaauauuugacacagaagagacuauauugga

SEQ ID NO: 375442 - RNA, 32 nt, Homo Sapiens
cauugcacuccagccugggugacagugaaacu

SEQ ID NO: 375443 - RNA, 32 nt, Homo Sapiens
ucauuggaauaaaaugacauucaauaaauaaa

SEQ ID NO: 375444 - RNA, 32 nt, Homo Sapiens
aaacuccugaccucaagugauccaccacuucc

SEQ ID NO: 375445 - RNA, 32 nt, Homo Sapiens
gagacuaaauacaggcuuagaacuugcagagu

SEQ ID NO: 375446 - RNA, 32 nt, Homo Sapiens
cuuacuccagccaucugcaguacaccaguuuc

SEQ ID NO: 375447 - RNA, 32 nt, Homo Sapiens
uuagguaaaaacauagagaauaugaauauagg

SEQ ID NO: 375448 - RNA, 32 nt, Homo Sapiens
ccccaaaaaaagacaaacaggggagaacaaag

SEQ ID NO: 375449 - RNA, 32 nt, Homo Sapiens
ccgagggcggggggcagcggggggucucccuc

SEQ ID NO: 375450 - RNA, 32 nt, Homo Sapiens
aagauuuccagcccccucugggccauggacag

SEQ ID NO: 375451 - RNA, 32 nt, Homo Sapiens
agaugcccggcgguuaggggggccccccaaau

SEQ ID NO: 375452 - RNA, 32 nt, Homo Sapiens
ucuuccaucacuuuucccuaccagguccauua

SEQ ID NO: 375453 - RNA, 32 nt, Homo Sapiens
aguuugccacuacacuucagaccaaugggaca

SEQ ID NO: 375454 - RNA, 32 nt, Homo Sapiens
ggaccugggcuucagagacuccagguuccucg

SEQ ID NO: 375455 - RNA, 32 nt, Homo Sapiens
uauggggggagaacuuacauugugaaacuucu

SEQ ID NO: 375456 - RNA, 32 nt, Homo Sapiens
ccagugaugugcggugggugggcuguuuaggg

SEQ ID NO: 375457 - RNA, 32 nt, Homo Sapiens
ugagucugggcgggcgggaaaccugggcuagg

SEQ ID NO: 375458 - RNA, 32 nt, Homo Sapiens
agcaacuagaaaagaaaaagaaagguuccaag

SEQ ID NO: 375459 - RNA, 32 nt, Homo Sapiens
aggcggcggcgaaggcccgggcugggagcguu

SEQ ID NO: 375460 - RNA, 32 nt, Homo Sapiens
uagauuuaaaagcaucaaaacaacaacaaugg

SEQ ID NO: 375461 - RNA, 32 nt, Homo Sapiens
ccugacagcuccgucauggcacuuuuuaacgc

SEQ ID NO: 375462 - RNA, 32 nt, Homo Sapiens
aggaggucugcacuccugucaucgaacguuug

SEQ ID NO: 375463 - RNA, 32 nt, Homo Sapiens
auggaaucaaaggagauuauuguggaauuuuc

SEQ ID NO: 375464 - RNA, 32 nt, Homo Sapiens
aagacccagccccacaccgagagcucccuccu

SEQ ID NO: 375465 - RNA, 32 nt, Homo Sapiens
ugagaccaaggaccagguagcuaacucagccu

SEQ ID NO: 375466 - RNA, 32 nt, Homo Sapiens
ugggggugggggugggggccaacucuaggagc

SEQ ID NO: 375467 - RNA, 32 nt, Homo Sapiens
acaguaucucaccucccuaaacugguuaauag

SEQ ID NO: 375468 - RNA, 32 nt, Homo Sapiens
caucaaaagaaaccuguaaauaugaaagaaca

SEQ ID NO: 375469 - RNA, 32 nt, Homo Sapiens
cacccuggagccccgcuuuccacacagccuug

SEQ ID NO: 375470 - RNA, 32 nt, Homo Sapiens
aaaaaguuaucuccagagagagucccuuauga

SEQ ID NO: 375471 - RNA, 32 nt, Homo Sapiens
gcucaguaugaacgugaugguuaccaaaccca

SEQ ID NO: 375472 - RNA, 32 nt, Homo Sapiens
uguguaaaucauuaaguauaagaggaaacuau

SEQ ID NO: 375473 - RNA, 32 nt, Homo Sapiens
gucuguuuuccuucuucccaauagaagaauaa

SEQ ID NO: 375474 - RNA, 32 nt, Homo Sapiens
gaaggaauuuuuaaccuaaccaaagaagauag

SEQ ID NO: 375475 - RNA, 32 nt, Homo Sapiens
uaucauuaauaaauuaucugugggcaucauga

SEQ ID NO: 375476 - RNA, 32 nt, Homo Sapiens
gcggcugccgggcggagacgcuccucacuucc

SEQ ID NO: 375477 - RNA, 27 nt, Homo Sapiens
agccuguccuucugagcugccggugcu

SEQ ID NO: 375478 - RNA, 32 nt, Homo Sapiens
uguaaguauuuuccaauaaaacaagaaaauug

SEQ ID NO: 375479 - RNA, 32 nt, Homo Sapiens
ugaagucagauuugccauuaugcacaucacau

SEQ ID NO: 375480 - RNA, 32 nt, Homo Sapiens
agggacaaugugaacauuuguauuuggaagcu

SEQ ID NO: 375481 - RNA, 32 nt, Homo Sapiens
auuuuguuaaaauaaacucuuuuccuuuuuau

SEQ ID NO: 375482 - RNA, 32 nt, Homo Sapiens
gaaaggaccugaagguuaauuugaucaccaau

SEQ ID NO: 375483 - RNA, 32 nt, Homo Sapiens
uuggcaacaccauuaugacaucacaaccuauu

SEQ ID NO: 375484 - RNA, 32 nt, Homo Sapiens
gauuugaagccaggugaauccgagcccuuuuc

SEQ ID NO: 375485 - RNA, 32 nt, Homo Sapiens
gaaaagcuucgucuucacgucggcugcugcca

SEQ ID NO: 375486 - RNA, 32 nt, Homo Sapiens
gcccccuccgcaccccacacagccuugcucca

SEQ ID NO: 375487 - RNA, 32 nt, Homo Sapiens
uugggaggccggugggcagaucaugaggucag

SEQ ID NO: 375488 - RNA, 32 nt, Homo Sapiens
ccugcagcagagccggcucccggagcagcgcc

SEQ ID NO: 375489 - RNA, 32 nt, Homo Sapiens
uaauuuauauugcccuuggaacacauggugcc

SEQ ID NO: 375490 - RNA, 31 nt, Homo Sapiens
ugcggaaagcgcagccagccaucggccuguu

SEQ ID NO: 375491 - RNA, 32 nt, Homo Sapiens
ccgcaaggggguaugaucagcagcccacuugu

SEQ ID NO: 375492 - RNA, 32 nt, Homo Sapiens
auuaauuuuuauugaccuuccaugguccucac

SEQ ID NO: 375493 - RNA, 27 nt, Homo Sapiens
uaaugccacaaccacauccccauccua

SEQ ID NO: 375494 - RNA, 32 nt, Homo Sapiens
uugaaagagaaucauaaaaaacaaagaauuuc

SEQ ID NO: 375495 - RNA, 32 nt, Homo Sapiens
caccaucuugggauuccuccccuggaaguugu

SEQ ID NO: 375496 - RNA, 32 nt, Homo Sapiens
ugguuggagagccacugcgcagggcauggaag

SEQ ID NO: 375497 - RNA, 32 nt, Homo Sapiens
uauuuauuuucuccagaggcaggaugauccag

SEQ ID NO: 375498 - RNA, 32 nt, Homo Sapiens
gcgcugcguccucaugguacuguaggcagcug

SEQ ID NO: 375499 - RNA, 30 nt, Homo Sapiens
ugugaugugcguggcauggaaguuuuuggg

SEQ ID NO: 375500 - RNA, 32 nt, Homo Sapiens
caggaagccagacggucaggggaaagaugaca

SEQ ID NO: 375501 - RNA, 32 nt, Homo Sapiens
uguuucaccauguuggccaggcuggucuccau

SEQ ID NO: 375502 - RNA, 32 nt, Homo Sapiens
uccgggggccgcgcuugcagcuggccgagucc

SEQ ID NO: 375503 - RNA, 32 nt, Homo Sapiens
uaagugcuaauuacauauauguaaugcuuuau

SEQ ID NO: 375504 - RNA, 32 nt, Homo Sapiens
ugagauuuaccagaaacaguccuuugucuaga

SEQ ID NO: 375505 - RNA, 32 nt, Homo Sapiens
ugcuagaacucuucuuugaacuucucuguugc

SEQ ID NO: 375506 - RNA, 32 nt, Homo Sapiens
ccgggaaccccgagaggagagcccagccccug

SEQ ID NO: 375507 - RNA, 32 nt, Homo Sapiens
uuccugaucccggauuccgucccuucaccacc

SEQ ID NO: 375508 - RNA, 32 nt, Homo Sapiens
ggaggcagagacggggggaggggaagccucac

SEQ ID NO: 375509 - RNA, 32 nt, Homo Sapiens
ccuauuucauaccuguacacacuuccucguuu

SEQ ID NO: 375510 - RNA, 32 nt, Homo Sapiens
gggacagcaccgugaaggugugggaggcugac

SEQ ID NO: 375511 - RNA, 32 nt, Homo Sapiens
auuuauuaaauugauguaaaucagaucuuuuc

SEQ ID NO: 375512 - RNA, 32 nt, Homo Sapiens
uggacauuccucccugauacaucucacagagg

SEQ ID NO: 375513 - RNA, 32 nt, Homo Sapiens
uuagcccuuggccacuuucuccuggauccugc

SEQ ID NO: 375514 - RNA, 32 nt, Homo Sapiens
gccccccaaauggccuggccagaugcggcagg

SEQ ID NO: 375515 - RNA, 32 nt, Homo Sapiens
aagcgagcgaaaucuuuguacuucugaguucu

SEQ ID NO: 375516 - RNA, 32 nt, Homo Sapiens
cacccccugcuucaccgucguccccugggcac

SEQ ID NO: 375517 - RNA, 32 nt, Homo Sapiens
cgugccaggcauggcucugugagauucugugg

SEQ ID NO: 375518 - RNA, 32 nt, Homo Sapiens
ugcggcgcgggccauuucugagcaguggaggu

SEQ ID NO: 375519 - RNA, 32 nt, Homo Sapiens
uggcggagauccccuuccuucugggugcagac

SEQ ID NO: 375520 - RNA, 32 nt, Homo Sapiens
cccaggaggaagccagcugcaauguggagaca

SEQ ID NO: 375521 - RNA, 32 nt, Homo Sapiens
aagggguuugcagcugcuccgucaucgugcgg

SEQ ID NO: 375522 - RNA, 32 nt, Homo Sapiens
auuuuuaaaaauuuaguacaguuuagaaagag

SEQ ID NO: 375523 - RNA, 32 nt, Homo Sapiens
uaaaaaauuuaaaacucuuaugucaagauguu

SEQ ID NO: 375524 - RNA, 32 nt, Homo Sapiens
ccgggagagacuuuuuacaacucaucugcagc

SEQ ID NO: 375525 - RNA, 32 nt, Homo Sapiens
acagagcacauugaucaaaaccacaggaucua

SEQ ID NO: 375526 - RNA, 31 nt, Homo Sapiens
ccaaaggaacgagaagaguggaaggaaacaa

SEQ ID NO: 375527 - RNA, 32 nt, Homo Sapiens
uacaucuuucccuuucucuucuucaugaaugc

SEQ ID NO: 375528 - RNA, 32 nt, Homo Sapiens
aguggagacagagggcagacauucucuuugga

SEQ ID NO: 375529 - RNA, 32 nt, Homo Sapiens
guccagccagcuugccagggccacugccauga

SEQ ID NO: 375530 - RNA, 32 nt, Homo Sapiens
gcuucuaaaggaaagggagaugcuuagauuau

SEQ ID NO: 375531 - RNA, 32 nt, Homo Sapiens
acuguggauguuaugacuguuugucuucuaug

SEQ ID NO: 375532 - RNA, 32 nt, Homo Sapiens
aggggcugggguccaggcaucuguggacucaa

SEQ ID NO: 375533 - RNA, 32 nt, Homo Sapiens
cagaagcugcugguccugugucacaccaccuu

SEQ ID NO: 375534 - RNA, 32 nt, Homo Sapiens
uagaaaauccugaaauaauuuuugugauacag

SEQ ID NO: 375535 - RNA, 31 nt, Homo Sapiens
uuugagacaaauugcugcuggugguagagcu

SEQ ID NO: 375536 - RNA, 31 nt, Homo Sapiens
cuggugagggcgggugggcgccggccggccu

SEQ ID NO: 375537 - RNA, 32 nt, Homo Sapiens
aauggccgcugcgcucuggcccgggcaacacu

SEQ ID NO: 375538 - RNA, 32 nt, Homo Sapiens
auucguguggcugggguggggcugggaccaca

SEQ ID NO: 375539 - RNA, 32 nt, Homo Sapiens
aggaaggcuucguggaggaaguggcauuugac

SEQ ID NO: 375540 - RNA, 30 nt, Homo Sapiens
ccuaucaccuaauauuacaagaguugguaa

SEQ ID NO: 375541 - RNA, 32 nt, Homo Sapiens
gaagugagcggugggcgggcauuccugccuga

SEQ ID NO: 375542 - RNA, 32 nt, Homo Sapiens
uccugcccacugauagccccucuccccgcagu

SEQ ID NO: 375543 - RNA, 32 nt, Homo Sapiens
uuaauuccuauccaauaaaguacauuuuguac

SEQ ID NO: 375544 - RNA, 32 nt, Homo Sapiens
gacuggguguguccagccagagggaugucugu

SEQ ID NO: 375545 - RNA, 32 nt, Homo Sapiens
guguguugggucugaacgcgaaauaaagaaau

SEQ ID NO: 375546 - RNA, 32 nt, Homo Sapiens
cagcuauacuaaaauaaaacuuuauaugcuaa

SEQ ID NO: 375547 - RNA, 32 nt, Homo Sapiens
ggccggggcggggacaugggcaacuggaccag

SEQ ID NO: 375548 - RNA, 32 nt, Homo Sapiens
ucacccucccucugcugggaugagguccagga

SEQ ID NO: 375549 - RNA, 27 nt, Homo Sapiens
aauucgccagccuucagccucccaacg

SEQ ID NO: 375550 - RNA, 32 nt, Homo Sapiens
uagauguaucucuuguuaucugcaucucauug

SEQ ID NO: 375551 - RNA, 32 nt, Homo Sapiens
cauugagacagcgggagagcagagcacuggug

SEQ ID NO: 375552 - RNA, 32 nt, Homo Sapiens
gaggggauguagcuauaguggagcaugguaca

SEQ ID NO: 375553 - RNA, 32 nt, Homo Sapiens
agccucugucauuaaaucuaugcugaauaaau

SEQ ID NO: 375554 - RNA, 32 nt, Homo Sapiens
gcgcucgccauggccgacgaaaagcccaacca

SEQ ID NO: 375555 - RNA, 32 nt, Homo Sapiens
ugcggagagacgcggccccucccgcguggaca

SEQ ID NO: 375556 - RNA, 30 nt, Homo Sapiens
gggcgagaagauggcggcggcgggggaagc

SEQ ID NO: 375557 - RNA, 32 nt, Homo Sapiens
uccccucauuuccucuucuccuuacuaaggua

SEQ ID NO: 375558 - RNA, 32 nt, Homo Sapiens
cuggcagggcucccagaggagcaucaacucca

SEQ ID NO: 375559 - RNA, 32 nt, Homo Sapiens
cguccugccuguggcgccgucuccaggggcug

SEQ ID NO: 375560 - RNA, 32 nt, Homo Sapiens
cauuggaauauuaagcccaggaguugcuuugg

SEQ ID NO: 375561 - RNA, 29 nt, Homo Sapiens
cagcaugccgugggacgcgcggcggccug

SEQ ID NO: 375562 - RNA, 32 nt, Homo Sapiens
cugcccugcgcucggcgggcuggcaucgggcc

SEQ ID NO: 375563 - RNA, 32 nt, Homo Sapiens
ccuuuuuccagaauuccaaauucugaccugug

SEQ ID NO: 375564 - RNA, 32 nt, Homo Sapiens
cggcuucuugcugcaccugugcauucuccacc

SEQ ID NO: 375565 - RNA, 32 nt, Homo Sapiens
guccuuaaaaguucuuuuuuuaaguaaauugu

SEQ ID NO: 375566 - RNA, 32 nt, Homo Sapiens
ggagauccuggauucuuaauuguuggcuaagu

SEQ ID NO: 375567 - RNA, 32 nt, Homo Sapiens
guuuucuuucccuuguccugucagauuuccau

SEQ ID NO: 375568 - RNA, 32 nt, Homo Sapiens
cuccaccccacccauuaaugacuugagugggc

SEQ ID NO: 375569 - RNA, 32 nt, Homo Sapiens
acccuucgccucggcccggcccaauccaggcc

SEQ ID NO: 375570 - RNA, 32 nt, Homo Sapiens
agcgggcagagucugcagugcggagggggcgg

SEQ ID NO: 375571 - RNA, 32 nt, Homo Sapiens
ugagaaaaauauaccgugcauuauuauuacua

SEQ ID NO: 375572 - RNA, 32 nt, Homo Sapiens
ucucccuucacccagacaucucaaagagcagu

SEQ ID NO: 375573 - RNA, 32 nt, Homo Sapiens
aaaugauucuggguauagaaaaagguacagca

SEQ ID NO: 375574 - RNA, 32 nt, Homo Sapiens
uagugacguccuguuuccucugaagaguaaua

SEQ ID NO: 375575 - RNA, 32 nt, Homo Sapiens
gcuguuggccaucccuuccccagccacaggug

SEQ ID NO: 375576 - RNA, 32 nt, Homo Sapiens
ccguacucggcgcgcuccugcugagggucgcc

SEQ ID NO: 375577 - RNA, 32 nt, Homo Sapiens
ucaucccggccgccucgcggggccggacgcag

SEQ ID NO: 375578 - RNA, 32 nt, Homo Sapiens
caguuaaguauuuugaucacuguauuuuguuu

SEQ ID NO: 375579 - RNA, 32 nt, Homo Sapiens
aguaaccucuugagauuaaauuacauagucuu

SEQ ID NO: 375580 - RNA, 32 nt, Homo Sapiens
uaugacuucuaguguggaagugccaacagaag

SEQ ID NO: 375581 - RNA, 32 nt, Homo Sapiens
aggaccccagggccaccuggcuccugaacccc

SEQ ID NO: 375582 - RNA, 32 nt, Homo Sapiens
cugcuccuaccuucuccucugucuucuuugaa

SEQ ID NO: 375583 - RNA, 32 nt, Homo Sapiens
cucuuaucgcccaggcuggggugcaauggcgc

SEQ ID NO: 375584 - RNA, 32 nt, Homo Sapiens
aaaggccuugcagcugacccggcaccaacguu

SEQ ID NO: 375585 - RNA, 32 nt, Homo Sapiens
gccagggcugguguugggcccggagcagcauc

SEQ ID NO: 375586 - RNA, 32 nt, Homo Sapiens
aguccugguccucccuccccagccgccccuac

SEQ ID NO: 375587 - RNA, 32 nt, Homo Sapiens
cgcgcccagcucgcccgagguccgucggaggc

SEQ ID NO: 375588 - RNA, 32 nt, Homo Sapiens
guuggcacagcauucugauuuaccaaacccuc

SEQ ID NO: 375589 - RNA, 32 nt, Homo Sapiens
uggaaggcccaguccuaauguuagggguuugu

SEQ ID NO: 375590 - RNA, 32 nt, Homo Sapiens
guugggagaaggaaaaggcuuaugggccaggg

SEQ ID NO: 375591 - RNA, 32 nt, Homo Sapiens
caaucaccuauuaaugaugaaauauuuuacca

SEQ ID NO: 375592 - RNA, 32 nt, Homo Sapiens
acagugcccaugaaugggacaccuguaaugua

SEQ ID NO: 375593 - RNA, 32 nt, Homo Sapiens
ggagaggggacuguccuagaugggugaugggg

SEQ ID NO: 375594 - RNA, 32 nt, Homo Sapiens
ugggcgggagguaggggcgcggcuccgcgugc

SEQ ID NO: 375595 - RNA, 32 nt, Homo Sapiens
ucagggcagggauguuuauaucuuucauaagg

SEQ ID NO: 375596 - RNA, 32 nt, Homo Sapiens
uccagcgugacauggcugaagcgcaccaggcc

SEQ ID NO: 375597 - RNA, 32 nt, Homo Sapiens
auaugacuaaguaaacaaaagugagaaguaau

SEQ ID NO: 375598 - RNA, 32 nt, Homo Sapiens
uuguguucaaauuauuucuucaauugucauag

SEQ ID NO: 375599 - RNA, 32 nt, Homo Sapiens
ugcccucacucugcucggaaauccaucccacc

SEQ ID NO: 375600 - RNA, 32 nt, Homo Sapiens
aggugcuguauuuuucuaccucauggaguauu

SEQ ID NO: 375601 - RNA, 32 nt, Homo Sapiens
gggcuucucccucuacccagggcugggcugau

SEQ ID NO: 375602 - RNA, 32 nt, Homo Sapiens
ucaucuccugacccucccacucccaucuccuu

SEQ ID NO: 375603 - RNA, 32 nt, Homo Sapiens
uugaccugaaauuauuucauucuuuauauuaa

SEQ ID NO: 375604 - RNA, 32 nt, Homo Sapiens
ucccuguacuuugaaacagccauugugugcag

SEQ ID NO: 375605 - RNA, 32 nt, Homo Sapiens
cauugcacuccagccugggugacacagugaga

SEQ ID NO: 375606 - RNA, 32 nt, Homo Sapiens
aaaaguggagaaugaggccaggcgugguggcu

SEQ ID NO: 375607 - RNA, 32 nt, Homo Sapiens
gcccuaccuaccuugcccuuuggagcagccuc

SEQ ID NO: 375608 - RNA, 32 nt, Homo Sapiens
cucggggcccaagccccuccccagcccccucu

SEQ ID NO: 375609 - RNA, 32 nt, Homo Sapiens
ggaagcaagcgugcugcguggagcauccaugc

SEQ ID NO: 375610 - RNA, 32 nt, Homo Sapiens
agcuguccagcauaauauauacacagcaaagu

SEQ ID NO: 375611 - RNA, 32 nt, Homo Sapiens
ugggaggaaugggaagcagcuguucugguggc

SEQ ID NO: 375612 - RNA, 32 nt, Homo Sapiens
uagaaauuccccacccugaaagcccugagcuu

SEQ ID NO: 375613 - RNA, 32 nt, Homo Sapiens
ccgaccacggcucacauccuccugggugaaga

SEQ ID NO: 375614 - RNA, 32 nt, Homo Sapiens
ucccuagcgucuuuaaaagaguaggcaggcgc

SEQ ID NO: 375615 - RNA, 32 nt, Homo Sapiens
gauggucagcucugagacagugguuugagagc

SEQ ID NO: 375616 - RNA, 32 nt, Homo Sapiens
ccaagacagaggcgcauguuuccuuccgaacu

SEQ ID NO: 375617 - RNA, 32 nt, Homo Sapiens
aauaaaaauccagucuuaauuccagauuuacu

SEQ ID NO: 375618 - RNA, 32 nt, Homo Sapiens
ccaggcaggaggagguguggacagugauggua

SEQ ID NO: 375619 - RNA, 32 nt, Homo Sapiens
gccccuucccagccagcccgccgcccgccccu

SEQ ID NO: 375620 - RNA, 32 nt, Homo Sapiens
gcgugccugcccaugccagcacuuccuuaagu

SEQ ID NO: 375621 - RNA, 32 nt, Homo Sapiens
uacccaugauuuuuuucuugcucugugauacc

SEQ ID NO: 375622 - RNA, 32 nt, Homo Sapiens
auuugcugccaccagcguccccucccucagug

SEQ ID NO: 375623 - RNA, 32 nt, Homo Sapiens
agaagaggagucugaggauaacuaaacuucaa

SEQ ID NO: 375624 - RNA, 32 nt, Homo Sapiens
aagccguggaggccccacggggugugggcgac

SEQ ID NO: 375625 - RNA, 32 nt, Homo Sapiens
cgcugcuagaggggcugcuugcgccaggcgcc

SEQ ID NO: 375626 - RNA, 32 nt, Homo Sapiens
gcaauaaagggaggccucaccgcgggauaggg

SEQ ID NO: 375627 - RNA, 32 nt, Homo Sapiens
gaagacucacuuuucuuucuuucuuggauaga

SEQ ID NO: 375628 - RNA, 32 nt, Homo Sapiens
gcaggaaagaaugcaacaaaaaaguuaaccac

SEQ ID NO: 375629 - RNA, 32 nt, Homo Sapiens
aaaacuggggcucagaaagauaccauggagua

SEQ ID NO: 375630 - RNA, 32 nt, Homo Sapiens
gcccuugcccuggcugcccgagagcgagcucu

SEQ ID NO: 375631 - RNA, 32 nt, Homo Sapiens
gagacaguaaagacauuacucccauaaaaaug

SEQ ID NO: 375632 - RNA, 32 nt, Homo Sapiens
ccuuccagucuggaucuugaccuugaacugga

SEQ ID NO: 375633 - RNA, 32 nt, Homo Sapiens
aaacacaagaggcuucccuaguuuacaaguca

SEQ ID NO: 375634 - RNA, 32 nt, Homo Sapiens
agaagucgucgcggccgaccccgucgccuccg

SEQ ID NO: 375635 - RNA, 32 nt, Homo Sapiens
gaagaaaaaugccuacugauaauuccuuuagu

SEQ ID NO: 375636 - RNA, 32 nt, Homo Sapiens
uucgccuagagccgcagggacccacgcugucu

SEQ ID NO: 375637 - RNA, 32 nt, Homo Sapiens
guacagauccccagccccuccucccucagacc

SEQ ID NO: 375638 - RNA, 32 nt, Homo Sapiens
cuaaggaaccucugcugccagcccuuccucac

SEQ ID NO: 375639 - RNA, 32 nt, Homo Sapiens
ccuuuuccugggaugacagcccuaacaagaac

SEQ ID NO: 375640 - RNA, 32 nt, Homo Sapiens
auaauggaaaauugacuggaaauucaaaacuc

SEQ ID NO: 375641 - RNA, 32 nt, Homo Sapiens
acacacacuauaagagacaacugaaaucuugc

SEQ ID NO: 375642 - RNA, 32 nt, Homo Sapiens
ugagaugcaggauucaaggaagaaauuagacc

SEQ ID NO: 375643 - RNA, 32 nt, Homo Sapiens
ugccaucuuacaccauauuuuuguaaaaugua

SEQ ID NO: 375644 - RNA, 32 nt, Homo Sapiens
auauuaaugguuauuucuuuuucuuggauuuc

SEQ ID NO: 375645 - RNA, 32 nt, Homo Sapiens
gcuuggcucaggugcgcuucucccaccuggca

SEQ ID NO: 375646 - RNA, 32 nt, Homo Sapiens
ugugggaaaggcuacacuugucuugcaucccu

SEQ ID NO: 375647 - RNA, 32 nt, Homo Sapiens
cccuccuugcuccagcagcagugggagaggca

SEQ ID NO: 375648 - RNA, 32 nt, Homo Sapiens
ugucucagagguuaaaaccauucuggagaaag

SEQ ID NO: 375649 - RNA, 32 nt, Homo Sapiens
auccaaguuguauauuuuuuuaaucucucgac

SEQ ID NO: 375650 - RNA, 32 nt, Homo Sapiens
caggcaguugucagcagcugccggguagugug

SEQ ID NO: 375651 - RNA, 32 nt, Homo Sapiens
gaggaguggguugggauuuaugcugcauugcu

SEQ ID NO: 375652 - RNA, 32 nt, Homo Sapiens
uguucuauguucaccugccccagccccaccca

SEQ ID NO: 375653 - RNA, 32 nt, Homo Sapiens
aauuugaagaaaauggagauguuuacauuuuu

SEQ ID NO: 375654 - RNA, 32 nt, Homo Sapiens
gcggcgggcacgcacacugcgggcuccgaggg

SEQ ID NO: 375655 - RNA, 32 nt, Homo Sapiens
caaggagcccagccuucaccuucccccacccc

SEQ ID NO: 375656 - RNA, 32 nt, Homo Sapiens
gggagcgagccggugcugcugcaggcugaggc

SEQ ID NO: 375657 - RNA, 32 nt, Homo Sapiens
ggugcccgccuggcugguuuguguggagccuc

SEQ ID NO: 375658 - RNA, 32 nt, Homo Sapiens
aggagagguaauuucagaguagacaccuauuu

SEQ ID NO: 375659 - RNA, 32 nt, Homo Sapiens
aaaugguccuugugcccuccccacucauccuu

SEQ ID NO: 375660 - RNA, 32 nt, Homo Sapiens
guguauauauaaccuuuccuauggaaauguga

SEQ ID NO: 375661 - RNA, 32 nt, Homo Sapiens
auagugggaaaacaacaucuuucggaauauau

SEQ ID NO: 375662 - RNA, 32 nt, Homo Sapiens
gcggcgcugagccagcagggcgcugcccggug

SEQ ID NO: 375663 - RNA, 32 nt, Homo Sapiens
ccugugggcaagggcugggcucuuggagguag

SEQ ID NO: 375664 - RNA, 32 nt, Homo Sapiens
cucaggccuccuugaagcaucuacgcccgucc

SEQ ID NO: 375665 - RNA, 32 nt, Homo Sapiens
aauuuucauaguccugcuuccgaugccaccau

SEQ ID NO: 375666 - RNA, 32 nt, Homo Sapiens
caccgacuugggccucccuuucuauguggcau

SEQ ID NO: 375667 - RNA, 32 nt, Homo Sapiens
gguuggcaugacugucugugcaccgagaagag

SEQ ID NO: 375668 - RNA, 32 nt, Homo Sapiens
cuuuuuuuaguuccggcaaugaguugcgccgg

SEQ ID NO: 375669 - RNA, 32 nt, Homo Sapiens
caggcaccuccuuccccgccucugggggcugc

SEQ ID NO: 375670 - RNA, 32 nt, Homo Sapiens
ugucugcccucccaccagucaugcaaccugag

SEQ ID NO: 375671 - RNA, 32 nt, Homo Sapiens
aggcacugagcgccugcagaucccgcaggcuu

SEQ ID NO: 375672 - RNA, 32 nt, Homo Sapiens
guaacugggaacaauuuuccccaauacagaua

SEQ ID NO: 375673 - RNA, 32 nt, Homo Sapiens
uccagacuguaagcuuccuguggacaaggccu

SEQ ID NO: 375674 - RNA, 32 nt, Homo Sapiens
gccggcuccucgugucccacucccggcgcacg

SEQ ID NO: 375675 - RNA, 32 nt, Homo Sapiens
uuccggccugugcuccugugcugcugagcagg

SEQ ID NO: 375676 - RNA, 32 nt, Homo Sapiens
cgacggacgucgccccggcguccggauuuaac

SEQ ID NO: 375677 - RNA, 32 nt, Homo Sapiens
aguugaaugcaaaacaaaaaaaauauggaaaa

SEQ ID NO: 375678 - RNA, 32 nt, Homo Sapiens
uuugggauauacuuauacuaaaaaaaaauuau

SEQ ID NO: 375679 - RNA, 32 nt, Homo Sapiens
aucuguuaauaaauaucucaacuccagggugu

SEQ ID NO: 375680 - RNA, 32 nt, Homo Sapiens
ccugcuuuguguacaagauacucuuuggaucu

SEQ ID NO: 375681 - RNA, 32 nt, Homo Sapiens
uuuucugcaauaguaauuuaaacacacuuuuu

SEQ ID NO: 375682 - RNA, 32 nt, Homo Sapiens
aaaaagagaaacccgcgcucuccggggugaga

SEQ ID NO: 375683 - RNA, 32 nt, Homo Sapiens
cuaucaaaugcuuaaauucuguuuccuuuuuu

SEQ ID NO: 375684 - RNA, 32 nt, Homo Sapiens
gggcgcacacucucgcgcacccgcacgcucac

SEQ ID NO: 375685 - RNA, 32 nt, Homo Sapiens
guugagcgucguuuuucuuagugugacaagag

SEQ ID NO: 375686 - RNA, 32 nt, Homo Sapiens
cccccauuauacauuaugaucuuaagccagga

SEQ ID NO: 375687 - RNA, 32 nt, Homo Sapiens
agcuucggggagagaacagggauggccugagg

SEQ ID NO: 375688 - RNA, 31 nt, Homo Sapiens
aguccucgugguugccugccccacucccugc

SEQ ID NO: 375689 - RNA, 32 nt, Homo Sapiens
uugcacgaguguguuuuccucacacacuuuga

SEQ ID NO: 375690 - RNA, 32 nt, Homo Sapiens
ggacacggacccgacgugggagguccucaggc

SEQ ID NO: 375691 - RNA, 32 nt, Homo Sapiens
cuucugcugucauaguucuuccaacucaguug

SEQ ID NO: 375692 - RNA, 31 nt, Homo Sapiens
uguccugggagcugccugcucccggcccacc

SEQ ID NO: 375693 - RNA, 32 nt, Homo Sapiens
gaucucuuuuucugagcaggauaucagguuaa

SEQ ID NO: 375694 - RNA, 32 nt, Homo Sapiens
agcuccccguucuuccucucucaacauccaua

SEQ ID NO: 375695 - RNA, 32 nt, Homo Sapiens
uuuuaguagagaugggguuuugccauguuggu

SEQ ID NO: 375696 - RNA, 32 nt, Homo Sapiens
auuuguauuuugugaugaaucuacauuuguuu

SEQ ID NO: 375697 - RNA, 32 nt, Homo Sapiens
auauuugcacaaaaccuuuguuuaaagaucug

SEQ ID NO: 375698 - RNA, 32 nt, Homo Sapiens
acaaccuggagaccaucuggcuccugcugucc

SEQ ID NO: 375699 - RNA, 29 nt, Homo Sapiens
ccuaaggcguguuuccgacgcaccccagg

SEQ ID NO: 375700 - RNA, 32 nt, Homo Sapiens
aaucgcuggaaguucugcuguggaacagccag

SEQ ID NO: 375701 - RNA, 32 nt, Homo Sapiens
aauuuuuggaugcugaugauagacuugcaucu

SEQ ID NO: 375702 - RNA, 32 nt, Homo Sapiens
uggagaucaugaugaacuuuuggcugaaccuc

SEQ ID NO: 375703 - RNA, 32 nt, Homo Sapiens
aaauuaaaaaaaaaaaucauccgaaaaaaaaa

SEQ ID NO: 375704 - RNA, 32 nt, Homo Sapiens
gacuggcucccucaguccuauucuguagccuu

SEQ ID NO: 375705 - RNA, 32 nt, Homo Sapiens
acugaggccuguugaaagugcagagcucagcc

SEQ ID NO: 375706 - RNA, 32 nt, Homo Sapiens
aaaggucagagcucgucucuccaaaccgauga

SEQ ID NO: 375707 - RNA, 32 nt, Homo Sapiens
uauugaaaaugaaagcacucuuuacagggugg

SEQ ID NO: 375708 - RNA, 32 nt, Homo Sapiens
uauggucgccugggucccucugagccccgggg

SEQ ID NO: 375709 - RNA, 32 nt, Homo Sapiens
ggccgccagugcgcgcggagcugcugggcgcc

SEQ ID NO: 375710 - RNA, 32 nt, Homo Sapiens
aaggugccggggguaaucauggccagucaaua

SEQ ID NO: 375711 - RNA, 32 nt, Homo Sapiens
uauuauuggaauaguuuuaaccuuucaaauac

SEQ ID NO: 375712 - RNA, 32 nt, Homo Sapiens
acugcuuagugucauugucagcucacuucuaa

SEQ ID NO: 375713 - RNA, 32 nt, Homo Sapiens
cuucuuucccuaccuuuuuuuucuuuuuuucu

SEQ ID NO: 375714 - RNA, 32 nt, Homo Sapiens
ucccaucugaauccuuuauuuuuguaccaugg

SEQ ID NO: 375715 - RNA, 32 nt, Homo Sapiens
uacuuguuucuuuagcacuuugaagauagaaa

SEQ ID NO: 375716 - RNA, 32 nt, Homo Sapiens
aguuugggaaagcagaaaauuaaugaagacag

SEQ ID NO: 375717 - RNA, 32 nt, Homo Sapiens
uugguccuucacagggccugcuccaucccacc

SEQ ID NO: 375718 - RNA, 32 nt, Homo Sapiens
ucauucccaugcuuagcccacccagagcuaac

SEQ ID NO: 375719 - RNA, 32 nt, Homo Sapiens
cagcuaucuccuccccuucuccaccacaugcc

SEQ ID NO: 375720 - RNA, 32 nt, Homo Sapiens
gaguggggcuccugggugagaccuagccccca

SEQ ID NO: 375721 - RNA, 32 nt, Homo Sapiens
uguugguuaggcuggucuggaacuccugaccu

SEQ ID NO: 375722 - RNA, 32 nt, Homo Sapiens
aucaauaaauauaaguuucaucuuacacguaa

SEQ ID NO: 375723 - RNA, 29 nt, Homo Sapiens
cuaugauaaaguuguaaauaauuuucuaa

SEQ ID NO: 375724 - RNA, 32 nt, Homo Sapiens
acagcguuuccccccaucccuguugccugugu

SEQ ID NO: 375725 - RNA, 32 nt, Homo Sapiens
gugcagcuugguggcggcugagccggcagcgg

SEQ ID NO: 375726 - RNA, 32 nt, Homo Sapiens
ccacgucauccgcgcgcccgcggcccuagcag

SEQ ID NO: 375727 - RNA, 32 nt, Homo Sapiens
cagggcucuccccacccuccccagguucuccu

SEQ ID NO: 375728 - RNA, 30 nt, Homo Sapiens
ccagccauucaguugaaccaucuuauaaug

SEQ ID NO: 375729 - RNA, 32 nt, Homo Sapiens
acugaccugugaugacaucucuggccagguca

SEQ ID NO: 375730 - RNA, 32 nt, Homo Sapiens
cuggggcgguggggacagauguugacacaaau

SEQ ID NO: 375731 - RNA, 32 nt, Homo Sapiens
ugggaauauauuugggucuaauaacccugaag

SEQ ID NO: 375732 - RNA, 32 nt, Homo Sapiens
acuuaauugugguguauuuguaaagggacacg

SEQ ID NO: 375733 - RNA, 32 nt, Homo Sapiens
agugguguggcuuugcagaagucacuuaagcu

SEQ ID NO: 375734 - RNA, 32 nt, Homo Sapiens
ucagcagagcgucgguggggcugggccgucgu

SEQ ID NO: 375735 - RNA, 32 nt, Homo Sapiens
uucguuaucuucugauccuugcaccuucuuuu

SEQ ID NO: 375736 - RNA, 32 nt, Homo Sapiens
auacuguugaaucugaacuuaauagcauuacc

SEQ ID NO: 375737 - RNA, 30 nt, Homo Sapiens
cggaaggaggacugcauugugugcggccgc

SEQ ID NO: 375738 - RNA, 32 nt, Homo Sapiens
cugcucuaccuuggcgcccccggcgccaucuc

SEQ ID NO: 375739 - RNA, 32 nt, Homo Sapiens
ucccuuguucagagccucuuuccagguuccuc

SEQ ID NO: 375740 - RNA, 32 nt, Homo Sapiens
auuuugcaguccaauuauauaguugaggaugg

SEQ ID NO: 375741 - RNA, 32 nt, Homo Sapiens
uauuuaccaaagggguauuguuuuugcauuug

SEQ ID NO: 375742 - RNA, 32 nt, Homo Sapiens
gcucccacagaaaucagcccgagaagaaagcc

SEQ ID NO: 375743 - RNA, 32 nt, Homo Sapiens
uaauaggcuagggagagaggggugcugucugc

SEQ ID NO: 375744 - RNA, 32 nt, Homo Sapiens
ccgaggccccgccccgcacgccucgccugagg

SEQ ID NO: 375745 - RNA, 32 nt, Homo Sapiens
guuagguaugccacgugagcugaacggguuuc

SEQ ID NO: 375746 - RNA, 32 nt, Homo Sapiens
ugcaauggguaggagaucuggggaggcccugc

SEQ ID NO: 375747 - RNA, 32 nt, Homo Sapiens
aaauacuuuuuguauauaaucucuuugcccuc

SEQ ID NO: 375748 - RNA, 32 nt, Homo Sapiens
gguuggacucccucucugugccccugcuccag

SEQ ID NO: 375749 - RNA, 32 nt, Homo Sapiens
gcccucaaggacccuggcggggaagcaguagu

SEQ ID NO: 375750 - RNA, 32 nt, Homo Sapiens
ccgcgcccgcggccccaagcgguucccgagcc

SEQ ID NO: 375751 - RNA, 32 nt, Homo Sapiens
ccaggccaggagaucaaauuaagaggagguua

SEQ ID NO: 375752 - RNA, 32 nt, Homo Sapiens
ugaaccacccucaaaauagaagugaaugugaa

SEQ ID NO: 375753 - RNA, 32 nt, Homo Sapiens
aggaguugugcuggugguauguguguuggagg

SEQ ID NO: 375754 - RNA, 32 nt, Homo Sapiens
gauguacuguugacucuuucugucuguggguu

SEQ ID NO: 375755 - RNA, 32 nt, Homo Sapiens
ccaaaagcagaguauaagaaaucuuguggcuc

SEQ ID NO: 375756 - RNA, 32 nt, Homo Sapiens
auuuggacaaaauggaagguuggagacgugua

SEQ ID NO: 375757 - RNA, 32 nt, Homo Sapiens
augaaagacccugagcagaggacccaguuugg

SEQ ID NO: 375758 - RNA, 32 nt, Homo Sapiens
cucuauagccccagcucccucacaggccacac

SEQ ID NO: 375759 - RNA, 32 nt, Homo Sapiens
uauagcagcaggaagauuuuuuccaaggacug

SEQ ID NO: 375760 - RNA, 32 nt, Homo Sapiens
augucugauuguaauuguuucuuucuggugaa

SEQ ID NO: 375761 - RNA, 32 nt, Homo Sapiens
ugaaacagccuggaucuuauuccuguacuucc

SEQ ID NO: 375762 - RNA, 32 nt, Homo Sapiens
ucuuacauuuuacuuuuuccuggcucaucucu

SEQ ID NO: 375763 - RNA, 32 nt, Homo Sapiens
uggggagaggugggcucugcuuuucagaggaa

SEQ ID NO: 375764 - RNA, 29 nt, Homo Sapiens
gccacuaucacaaaauaccacagaccaaa

SEQ ID NO: 375765 - RNA, 32 nt, Homo Sapiens
ucuuuuauaugacuuuuaaguaaaagauuuau

SEQ ID NO: 375766 - RNA, 32 nt, Homo Sapiens
cuuuuauggcagugguggagugaggcagggau

SEQ ID NO: 375767 - RNA, 32 nt, Homo Sapiens
ucuuuuccuauuucuuuuuuuuaaggguuagu

SEQ ID NO: 375768 - RNA, 32 nt, Homo Sapiens
agcugggcgugguggcucaugccuguaauccc

SEQ ID NO: 375769 - RNA, 32 nt, Homo Sapiens
uucuuggcccuccucugcuccuccccacaccc

SEQ ID NO: 375770 - RNA, 32 nt, Homo Sapiens
agccgggcgugguggcucacgccuguaauccc

SEQ ID NO: 375771 - RNA, 32 nt, Homo Sapiens
cuuugcaggaaccaggaguccugagcacacug

SEQ ID NO: 375772 - RNA, 32 nt, Homo Sapiens
gagagccugcaucccaggaugcuggguggccc

SEQ ID NO: 375773 - RNA, 32 nt, Homo Sapiens
uggacaacaccguuagauguguauguaaaaau

SEQ ID NO: 375774 - RNA, 32 nt, Homo Sapiens
aaauuucauacucugcaacuugccuuuuuucu

SEQ ID NO: 375775 - RNA, 27 nt, Homo Sapiens
aggaauuccuucuuugccuucuugcca

SEQ ID NO: 375776 - RNA, 30 nt, Homo Sapiens
cggggauggggggugaggagcggggcguuc

SEQ ID NO: 375777 - RNA, 32 nt, Homo Sapiens
ucgacagagucuugcucugucgcccaggcugg

SEQ ID NO: 375778 - RNA, 28 nt, Homo Sapiens
ccgccucaggcugccaggauggaaacua

SEQ ID NO: 375779 - RNA, 32 nt, Homo Sapiens
acccacgaagguuacauuuaugcugaauacau

SEQ ID NO: 375780 - RNA, 32 nt, Homo Sapiens
aagcacaauggaaauaccccugaaccguuuua

SEQ ID NO: 375781 - RNA, 32 nt, Homo Sapiens
aaaaugagaaucugccagguccucagucgguc

SEQ ID NO: 375782 - RNA, 32 nt, Homo Sapiens
guuaaaauucaucaaagucuacauugaagugu

SEQ ID NO: 375783 - RNA, 32 nt, Homo Sapiens
caggggcugaugcacuggguguggagcugagc

SEQ ID NO: 375784 - RNA, 32 nt, Homo Sapiens
agcaagacucuugucucaaaaaaaacaaaaaa

SEQ ID NO: 375785 - RNA, 25 nt, Homo Sapiens
augggucggccccugcugcugcccc

SEQ ID NO: 375786 - RNA, 29 nt, Homo Sapiens
ucuaagucauauggggaggggugguuuuu

SEQ ID NO: 375787 - RNA, 32 nt, Homo Sapiens
ggagacguuuuuccuuacaagcagacugccug

SEQ ID NO: 375788 - RNA, 32 nt, Homo Sapiens
ggggucaaguguaacuccauggaaaugccacg

SEQ ID NO: 375789 - RNA, 32 nt, Homo Sapiens
aagaugucuauuauauuuacuuauuaguuuuu

SEQ ID NO: 375790 - RNA, 32 nt, Homo Sapiens
ggcuuuuuccuucuccauccacacugguccca

SEQ ID NO: 375791 - RNA, 32 nt, Homo Sapiens
gcucgggccuacuggcucaagaagacaugguu

SEQ ID NO: 375792 - RNA, 32 nt, Homo Sapiens
ccggcuccgcgcuccaggggcugcugagcgcc

SEQ ID NO: 375793 - RNA, 32 nt, Homo Sapiens
ucuagaccguuuggcugcgggaggaagcugua

SEQ ID NO: 375794 - RNA, 32 nt, Homo Sapiens
auuuaccuguuuuucuugucaaaccugagcac

SEQ ID NO: 375795 - RNA, 32 nt, Homo Sapiens
uugccacuuacugcucagauccugcuucagug

SEQ ID NO: 375796 - RNA, 32 nt, Homo Sapiens
ucucagguuuucucagucaaccagcuagaugc

SEQ ID NO: 375797 - RNA, 27 nt, Homo Sapiens
cagauggacuucuucaguguccuucac

SEQ ID NO: 375798 - RNA, 32 nt, Homo Sapiens
uuaacaucucuuaacagucucugagaaguacu

SEQ ID NO: 375799 - RNA, 32 nt, Homo Sapiens
auuauauaauuugaaagcaaaaagaagggccu

SEQ ID NO: 375800 - RNA, 32 nt, Homo Sapiens
cuugugguaucaguuuccuucucggaaaugag

SEQ ID NO: 375801 - RNA, 32 nt, Homo Sapiens
caacuaaaaugaaacuuguugacugcacaaga

SEQ ID NO: 375802 - RNA, 31 nt, Homo Sapiens
uugcucuguuugacuugucagauacaaagac

SEQ ID NO: 375803 - RNA, 32 nt, Homo Sapiens
gaauguaccaaauaaaccacagcuggacuguu

SEQ ID NO: 375804 - RNA, 32 nt, Homo Sapiens
cuggggagggcagggagaaggggggugggcgu

SEQ ID NO: 375805 - RNA, 32 nt, Homo Sapiens
aggugacaagccuggguuucucccaggauagg

SEQ ID NO: 375806 - RNA, 32 nt, Homo Sapiens
aguuaucacuuauguuuuuagagcaugcaauc

SEQ ID NO: 375807 - RNA, 32 nt, Homo Sapiens
aaugaagauaaagggacaaaggcauggacacc

SEQ ID NO: 375808 - RNA, 32 nt, Homo Sapiens
cggauucccggcacgcagagcugaccugccug

SEQ ID NO: 375809 - RNA, 32 nt, Homo Sapiens
guaaauacuacaaaaacuuauuuauacuguuc

SEQ ID NO: 375810 - RNA, 30 nt, Homo Sapiens
gacaaaggcaggcacgguccccaccagccg

SEQ ID NO: 375811 - RNA, 32 nt, Homo Sapiens
ugcggacggcggugcugguggcggcggcggcg

SEQ ID NO: 375812 - RNA, 32 nt, Homo Sapiens
ucccuggaaugggacaggcagcucuagucagu

SEQ ID NO: 375813 - RNA, 32 nt, Homo Sapiens
cagcccugucuccuccccaccucccaaagguc

SEQ ID NO: 375814 - RNA, 32 nt, Homo Sapiens
gacagggcggcggcagcugggaugcuggagag

SEQ ID NO: 375815 - RNA, 32 nt, Homo Sapiens
gcuagcaaacucccugccuagcaaggcccagc

SEQ ID NO: 375816 - RNA, 28 nt, Homo Sapiens
uuuucugggcggccgcugcgacccggga

SEQ ID NO: 375817 - RNA, 32 nt, Homo Sapiens
aaaacuauaaaauaaacuuaagagauaaaauu

SEQ ID NO: 375818 - RNA, 32 nt, Homo Sapiens
uuccccgcuccugacuccugaccuccaggaug

SEQ ID NO: 375819 - RNA, 32 nt, Homo Sapiens
cacugccugccuggcccacgcugcugggacgg

SEQ ID NO: 375820 - RNA, 32 nt, Homo Sapiens
aauuuaaccaauuuuucuuaauacccagaagg

SEQ ID NO: 375821 - RNA, 32 nt, Homo Sapiens
aaaacuaagaagaucaaagagaaauacauuga

SEQ ID NO: 375822 - RNA, 32 nt, Homo Sapiens
ggcccugggaugcugcaucuccaggcaacuau

SEQ ID NO: 375823 - RNA, 32 nt, Homo Sapiens
aaacaauguuuaaugugaaaagaaauuaaaac

SEQ ID NO: 375824 - RNA, 32 nt, Homo Sapiens
gcgccgaucaccagauuaagcacauguccuau

SEQ ID NO: 375825 - RNA, 32 nt, Homo Sapiens
uggagauccauucaccaagacuuucugggcag

SEQ ID NO: 375826 - RNA, 32 nt, Homo Sapiens
acgcagccagugccuccacccuaccccccauc

SEQ ID NO: 375827 - RNA, 32 nt, Homo Sapiens
gcccagggcaggaagcgcacggccugcgccgg

SEQ ID NO: 375828 - RNA, 32 nt, Homo Sapiens
ugggggugaggggacagacucugcucucacug

SEQ ID NO: 375829 - RNA, 32 nt, Homo Sapiens
gaacuuacugauucuugagaacaaagacuaaa

SEQ ID NO: 375830 - RNA, 32 nt, Homo Sapiens
uacaaccucacagaagcugcuuaacccaugga

SEQ ID NO: 375831 - RNA, 32 nt, Homo Sapiens
aaaaagggacaggaggcaugggauagcagguc

SEQ ID NO: 375832 - RNA, 32 nt, Homo Sapiens
cuccgucacccgccccuccccccacuccaggc

SEQ ID NO: 375833 - RNA, 32 nt, Homo Sapiens
agaccuauuguaaaaaugauuaaauauuguaa

SEQ ID NO: 375834 - RNA, 32 nt, Homo Sapiens
uauuucagacaagugcaaauaguucuuucgaa

SEQ ID NO: 375835 - RNA, 32 nt, Homo Sapiens
aaauuuacaaaaaguugcaaaaauaaaaacca

SEQ ID NO: 375836 - RNA, 32 nt, Homo Sapiens
uccccaaggcaggccauagaaacuaaaaguau

SEQ ID NO: 375837 - RNA, 32 nt, Homo Sapiens
cuucugacaagucugucuucucuucuugguuu

SEQ ID NO: 375838 - RNA, 32 nt, Homo Sapiens
aucccuacccccaccccagugucuccugaggc

SEQ ID NO: 375839 - RNA, 32 nt, Homo Sapiens
uucaucauuucccucauuugucuuuuauuuuc

SEQ ID NO: 375840 - RNA, 32 nt, Homo Sapiens
aguaguucccccuuaucuucgggagauacauu

SEQ ID NO: 375841 - RNA, 32 nt, Homo Sapiens
ccuuuuuuauuuuuauuuuuuaucagaaucaa

SEQ ID NO: 375842 - RNA, 32 nt, Homo Sapiens
gcacuccuagggugaaugggcucagcaccaaa

SEQ ID NO: 375843 - RNA, 32 nt, Homo Sapiens
uccaaggugcugucaccccucugcuggcgagc

SEQ ID NO: 375844 - RNA, 32 nt, Homo Sapiens
gcuuuuugugguuuuucuuaaaaaaaaaaaaa

SEQ ID NO: 375845 - RNA, 30 nt, Homo Sapiens
ggcccagagaagcgaagcgacugugucugu

SEQ ID NO: 375846 - RNA, 32 nt, Homo Sapiens
ucagcuccucucggcuccuccuccuccucccg

SEQ ID NO: 375847 - RNA, 32 nt, Homo Sapiens
cagaccugggucaaguucccacuccugcuccc

SEQ ID NO: 375848 - RNA, 32 nt, Homo Sapiens
accuuccgcauccgccugggggcccaccgagg

SEQ ID NO: 375849 - RNA, 32 nt, Homo Sapiens
gaugguagguagcacaguggacagucuuugau

SEQ ID NO: 375850 - RNA, 32 nt, Homo Sapiens
aaaauacaaaaauuagcugugcauauaguccc

SEQ ID NO: 375851 - RNA, 32 nt, Homo Sapiens
cccucgcucccucccugcgcgccgccucucac

SEQ ID NO: 375852 - RNA, 32 nt, Homo Sapiens
aacuaccacaccaaccaccuccacuucaaagc

SEQ ID NO: 375853 - RNA, 32 nt, Homo Sapiens
aaucacuuugguuuuuuuguccucucuauaua

SEQ ID NO: 375854 - RNA, 32 nt, Homo Sapiens
uacugguucucuucuuuugcucugaggugugg

SEQ ID NO: 375855 - RNA, 32 nt, Homo Sapiens
gucaggaacugcgccucaugggcgaggugaag

SEQ ID NO: 375856 - RNA, 32 nt, Homo Sapiens
ccauuaaaaguacuaaugaaaaaacaugacau

SEQ ID NO: 375857 - RNA, 32 nt, Homo Sapiens
agcucuuuguauuuccuccccuugguggugug

SEQ ID NO: 375858 - RNA, 32 nt, Homo Sapiens
uucuuuauuuuccaucuuuguuuucuguucua

SEQ ID NO: 375859 - RNA, 32 nt, Homo Sapiens
cagagcgaaugucugccaacuacccguucauu

SEQ ID NO: 375860 - RNA, 32 nt, Homo Sapiens
acugaagguggcucccuggugaaccuagcgcu

SEQ ID NO: 375861 - RNA, 32 nt, Homo Sapiens
aggagggagagccagcccaguguaugccaugg

SEQ ID NO: 375862 - RNA, 32 nt, Homo Sapiens
ucaguggcccuccagucagguucuguggguuu

SEQ ID NO: 375863 - RNA, 32 nt, Homo Sapiens
uucuuucuuuuuucuuuuuuuuucuuccagaa

SEQ ID NO: 375864 - RNA, 32 nt, Homo Sapiens
cuacaaaacacuuuuaaaaaauguacaccugu

SEQ ID NO: 375865 - RNA, 32 nt, Homo Sapiens
gaucucacagccccuucaccccggccugugac

SEQ ID NO: 375866 - RNA, 32 nt, Homo Sapiens
ggcaggggcuccuggcucagagccguauccag

SEQ ID NO: 375867 - RNA, 32 nt, Homo Sapiens
uauugacauuuucaaagaaaguaaaugcaauu

SEQ ID NO: 375868 - RNA, 32 nt, Homo Sapiens
gaccagggaugcugugcugcucucccaugagc

SEQ ID NO: 375869 - RNA, 32 nt, Homo Sapiens
gugagccugcuaucaggccugccccuccaaua

SEQ ID NO: 375870 - RNA, 32 nt, Homo Sapiens
gaugucaaugcaaguaucugaccaacaggggg

SEQ ID NO: 375871 - RNA, 32 nt, Homo Sapiens
uagaaaagucagucucuguuaaaauuacucau

SEQ ID NO: 375872 - RNA, 32 nt, Homo Sapiens
gcugaucuuggaggcagaguggcugccugcau

SEQ ID NO: 375873 - RNA, 32 nt, Homo Sapiens
caaggcgaagcucgcggggggcgacagcgacg

SEQ ID NO: 375874 - RNA, 32 nt, Homo Sapiens
ggcacccccguccccuccuuccagcggcugca

SEQ ID NO: 375875 - RNA, 32 nt, Homo Sapiens
guggccggcgggcacuggggccccguguuuuc

SEQ ID NO: 375876 - RNA, 32 nt, Homo Sapiens
aggguggaggccucucaagaagagggaagcau

SEQ ID NO: 375877 - RNA, 32 nt, Homo Sapiens
ugcacaaugaauugggcgccccaaggacagug

SEQ ID NO: 375878 - RNA, 32 nt, Homo Sapiens
ggcgggccugggucucgcgcgcguauugcugg

SEQ ID NO: 375879 - RNA, 32 nt, Homo Sapiens
guccggagaaggaagaagaggacgccgggcgc

SEQ ID NO: 375880 - RNA, 32 nt, Homo Sapiens
ccacugaacaaauccauggcacugccccacug

SEQ ID NO: 375881 - RNA, 32 nt, Homo Sapiens
ucaaguucuguaucaauccaucuuacauugcc

SEQ ID NO: 375882 - RNA, 32 nt, Homo Sapiens
cugucaguggcgucggaggccggcgcugcggu

SEQ ID NO: 375883 - RNA, 32 nt, Homo Sapiens
gaaauggacauuccaguggccccugggguucc

SEQ ID NO: 375884 - RNA, 32 nt, Homo Sapiens
uaguuggagauuacaaauugaaacaaccauug

SEQ ID NO: 375885 - RNA, 32 nt, Homo Sapiens
auccccucugaagaaaaucaacuuacaaagga

SEQ ID NO: 375886 - RNA, 32 nt, Homo Sapiens
cccccgguguggucacccggcgcgccccaggu

SEQ ID NO: 375887 - RNA, 30 nt, Homo Sapiens
aaaagugucugugcauugugcaaaaaguaa

SEQ ID NO: 375888 - RNA, 32 nt, Homo Sapiens
uaguuuaaagauuguauauguacuguacuaua

SEQ ID NO: 375889 - RNA, 32 nt, Homo Sapiens
ggcagcaaggcacaaaagcccugcuugcuuuu

SEQ ID NO: 375890 - RNA, 32 nt, Homo Sapiens
aaaaaaaaaaagacauaaaauaagcgaaacaa

SEQ ID NO: 375891 - RNA, 32 nt, Homo Sapiens
agggaugggcccuggagguucccggccggaga

SEQ ID NO: 375892 - RNA, 32 nt, Homo Sapiens
ucaaggugucagcagagcugugcuccuucuga

SEQ ID NO: 375893 - RNA, 31 nt, Homo Sapiens
agugggaaauaaaagggaaaagucagcuagu

SEQ ID NO: 375894 - RNA, 32 nt, Homo Sapiens
cuuuaauauauucgguuuguauguaauggaag

SEQ ID NO: 375895 - RNA, 32 nt, Homo Sapiens
gggauaggggagauuccagagaggcccgugac

SEQ ID NO: 375896 - RNA, 32 nt, Homo Sapiens
gagcgcggagcggcagccggcuggggcgggug

SEQ ID NO: 375897 - RNA, 31 nt, Homo Sapiens
auggggcugccgggcgcguaggggccaugcc

SEQ ID NO: 375898 - RNA, 32 nt, Homo Sapiens
uuuggucuguucuccuuccuuacaggcuaagc

SEQ ID NO: 375899 - RNA, 32 nt, Homo Sapiens
cugcggccacuaccuaauuuauugccgugcgu

SEQ ID NO: 375900 - RNA, 30 nt, Homo Sapiens
ccacugcuaauucgggcccaucuuccuccc

SEQ ID NO: 375901 - RNA, 32 nt, Homo Sapiens
ccucagcagggccagacaaggcucaguggauc

SEQ ID NO: 375902 - RNA, 28 nt, Homo Sapiens
accaugcgcggcugccugcggcucgcgc

SEQ ID NO: 375903 - RNA, 32 nt, Homo Sapiens
caaggaaauaggaaaaguaaauccaacuagaa

SEQ ID NO: 375904 - RNA, 32 nt, Homo Sapiens
uaucuucugauccuggaggucaaaggucuaga

SEQ ID NO: 375905 - RNA, 32 nt, Homo Sapiens
ccuguucccuccccaaacccuaucccuccuac

SEQ ID NO: 375906 - RNA, 32 nt, Homo Sapiens
ccuucagcucccugagcccugucacccuucca

SEQ ID NO: 375907 - RNA, 32 nt, Homo Sapiens
ggaagugggcguuugaggaaaacaaaguucug

SEQ ID NO: 375908 - RNA, 32 nt, Homo Sapiens
gcucuucggggaagagcauggcaggcagagau

SEQ ID NO: 375909 - RNA, 32 nt, Homo Sapiens
acauccuagcagccgccucccagcccugccua

SEQ ID NO: 375910 - RNA, 32 nt, Homo Sapiens
augcuacucauaagagcugguuuggggcuaua

SEQ ID NO: 375911 - RNA, 32 nt, Homo Sapiens
agcccuuggauguagggaaaagaaagagagau

SEQ ID NO: 375912 - RNA, 32 nt, Homo Sapiens
cuuugccuuuaaagaauggguuacaaccauca

SEQ ID NO: 375913 - RNA, 32 nt, Homo Sapiens
uccuucaaauggauuccuucugcauuuuaccc

SEQ ID NO: 375914 - RNA, 30 nt, Homo Sapiens
gccagaggucggcgcgcgcacacccgcacc

SEQ ID NO: 375915 - RNA, 32 nt, Homo Sapiens
guccagguccugguggggcagcuccucugucu

SEQ ID NO: 375916 - RNA, 32 nt, Homo Sapiens
auuuguaggugaaaguguaauacuguugguug

SEQ ID NO: 375917 - RNA, 32 nt, Homo Sapiens
uuucagauauaaaagacugaccaauauuguac

SEQ ID NO: 375918 - RNA, 32 nt, Homo Sapiens
acggaggcauccuacccuuuucuggggaaaga

SEQ ID NO: 375919 - RNA, 32 nt, Homo Sapiens
aacagccccuccccaccuccaguuuuacaaca

SEQ ID NO: 375920 - RNA, 32 nt, Homo Sapiens
gccugguucaacaguauuauuucacucacgcu

SEQ ID NO: 375921 - RNA, 32 nt, Homo Sapiens
auuagaaaaaucaccauuuucuagaccuuaau

SEQ ID NO: 375922 - RNA, 32 nt, Homo Sapiens
ccuccucaacucuuuuuuuuuaaagcaucuga

SEQ ID NO: 375923 - RNA, 32 nt, Homo Sapiens
aacccuuuucuuuucuuuuuugaaaaguccaa

SEQ ID NO: 375924 - RNA, 32 nt, Homo Sapiens
agggaaaggaccaaaaucaaaccgcaauuucu

SEQ ID NO: 375925 - RNA, 32 nt, Homo Sapiens
aggccuuguggaaguuucuacucucaggagcu

SEQ ID NO: 375926 - RNA, 32 nt, Homo Sapiens
gucauguggagcaaaggggaccugaggagugu

SEQ ID NO: 375927 - RNA, 32 nt, Homo Sapiens
ccgccgcguuccccgaccccaggccgcgcucu

SEQ ID NO: 375928 - RNA, 32 nt, Homo Sapiens
uucuuagguucuuuuccauuaugucaaagguc

SEQ ID NO: 375929 - RNA, 32 nt, Homo Sapiens
gcuuuaaaugccuuccuucucugcccccagcc

SEQ ID NO: 375930 - RNA, 32 nt, Homo Sapiens
ugccccgcggugugaccccggccggugccuug

SEQ ID NO: 375931 - RNA, 32 nt, Homo Sapiens
ggguaaugcuugcucugauuauagaaguaggg

SEQ ID NO: 375932 - RNA, 32 nt, Homo Sapiens
gugccggugcgggcgccggcauguggcugugg

SEQ ID NO: 375933 - RNA, 32 nt, Homo Sapiens
aggaguggggacgaagagcagccuaaacuuag

SEQ ID NO: 375934 - RNA, 32 nt, Homo Sapiens
aaguacacugagagccuuuuugaaaguaauug

SEQ ID NO: 375935 - RNA, 30 nt, Homo Sapiens
ccuuaugucugugugugaucaguuucuggc

SEQ ID NO: 375936 - RNA, 32 nt, Homo Sapiens
cccagcgucauguccugccccaucccuauccu

SEQ ID NO: 375937 - RNA, 32 nt, Homo Sapiens
gcccaagguguguguagcacaaacaguucuca

SEQ ID NO: 375938 - RNA, 32 nt, Homo Sapiens
gcugcccuccaucccuuccccagagauggcuc

SEQ ID NO: 375939 - RNA, 32 nt, Homo Sapiens
agaagcaaacuuauauaugaaucauauaccuu

SEQ ID NO: 375940 - RNA, 32 nt, Homo Sapiens
cuuacacaaaucuauuuaauuaggaaaaaaaa

SEQ ID NO: 375941 - RNA, 32 nt, Homo Sapiens
gcacgacugugucccaaacaaacaaaaaaaac

SEQ ID NO: 375942 - RNA, 32 nt, Homo Sapiens
guucucucacuacuuuuuccuccucugugagu

SEQ ID NO: 375943 - RNA, 32 nt, Homo Sapiens
gcggcugcgcgaggaugcgcggugcccggugu

SEQ ID NO: 375944 - RNA, 32 nt, Homo Sapiens
gaaucauaaugaaaaguuacuacauaauuguu

SEQ ID NO: 375945 - RNA, 32 nt, Homo Sapiens
gaggacaucuuacuccugcugcugggccucau

SEQ ID NO: 375946 - RNA, 32 nt, Homo Sapiens
gaagacaaccucagggagacgauguauuugcc

SEQ ID NO: 375947 - RNA, 32 nt, Homo Sapiens
aggugucaucuuccugcucugcgacuuucucu

SEQ ID NO: 375948 - RNA, 32 nt, Homo Sapiens
ucuauuugagcacugauuuacucuguaaaaag

SEQ ID NO: 375949 - RNA, 32 nt, Homo Sapiens
cacacacacacacacacacacacacacaccag

SEQ ID NO: 375950 - RNA, 32 nt, Homo Sapiens
uacgcgccugcccacacccuccuccccuccuu

SEQ ID NO: 375951 - RNA, 32 nt, Homo Sapiens
cagugggcucuccaggcccaccucuuucucac

SEQ ID NO: 375952 - RNA, 32 nt, Homo Sapiens
gaaauguccccuucuucagugucagaccucag

SEQ ID NO: 375953 - RNA, 32 nt, Homo Sapiens
cgcgggcccccuccuuccccuacgaggguccg

SEQ ID NO: 375954 - RNA, 32 nt, Homo Sapiens
acccagccaucggcugcgguaugacagcagga

SEQ ID NO: 375955 - RNA, 32 nt, Homo Sapiens
aaggccgggaagggcaguaacugcacacgcgg

SEQ ID NO: 375956 - RNA, 27 nt, Homo Sapiens
ggcgcuuccuucuucucuuccggcgga

SEQ ID NO: 375957 - RNA, 32 nt, Homo Sapiens
gacagcgcugccugcaaaauagaccuaggccc

SEQ ID NO: 375958 - RNA, 32 nt, Homo Sapiens
uccucccaggauacgcccgagcggaagaagcg

SEQ ID NO: 375959 - RNA, 32 nt, Homo Sapiens
ucuguccaaucagagaauaaacaucauaguuu

SEQ ID NO: 375960 - RNA, 32 nt, Homo Sapiens
aggagauuuguuuggaggaaacaggaaagaga

SEQ ID NO: 375961 - RNA, 32 nt, Homo Sapiens
gagugcggagaggcgccggucgccacccgcgg

SEQ ID NO: 375962 - RNA, 32 nt, Homo Sapiens
ucccaaacacacagacagacucauguaaauuu

SEQ ID NO: 375963 - RNA, 32 nt, Homo Sapiens
gaaguuauuaaauaauacuuuuaaaaaucaga

SEQ ID NO: 375964 - RNA, 32 nt, Homo Sapiens
aagaaugcaagggcauaauguuagcugugaac

SEQ ID NO: 375965 - RNA, 28 nt, Homo Sapiens
aauagcugaaguuaacauuugggggaaa

SEQ ID NO: 375966 - RNA, 32 nt, Homo Sapiens
cugucuaggaaggaagccccccugcagccucc

SEQ ID NO: 375967 - RNA, 32 nt, Homo Sapiens
ccgaaacagaggaggaggagggaggggagugc

SEQ ID NO: 375968 - RNA, 32 nt, Homo Sapiens
aaagguagagguaugugauuugaaagaguagg

SEQ ID NO: 375969 - RNA, 32 nt, Homo Sapiens
aaaggcaggggagggaggguguguguagguau

SEQ ID NO: 375970 - RNA, 32 nt, Homo Sapiens
cugaugugucguggugugggggaccagaggag

SEQ ID NO: 375971 - RNA, 32 nt, Homo Sapiens
caggggccgcccccggccucuucuccauccug

SEQ ID NO: 375972 - RNA, 32 nt, Homo Sapiens
aaguuuacauaaacagaaauaaaagauacuau

SEQ ID NO: 375973 - RNA, 30 nt, Homo Sapiens
agcgagcccugcucacacucggcgcucugg

SEQ ID NO: 375974 - RNA, 32 nt, Homo Sapiens
ugcacugugucugcugaguguaucuuuuguuu

SEQ ID NO: 375975 - RNA, 32 nt, Homo Sapiens
acauacuuuuuuggauauaaaugaccauauuu

SEQ ID NO: 375976 - RNA, 32 nt, Homo Sapiens
cccuucagauuccaccccauccccucagggcc

SEQ ID NO: 375977 - RNA, 32 nt, Homo Sapiens
ucggauagacuuauuucuuuaguucugcacuu

SEQ ID NO: 375978 - RNA, 32 nt, Homo Sapiens
cugucggauuguaggagccucaccagagaggg

SEQ ID NO: 375979 - RNA, 32 nt, Homo Sapiens
caucaccuaaaaugaacuuauggcaggucuaa

SEQ ID NO: 375980 - RNA, 32 nt, Homo Sapiens
cuugugguuuagucuuuuuuuuuuuuaaauuc

SEQ ID NO: 375981 - RNA, 32 nt, Homo Sapiens
cucagugcucggggccuuggggugcaugggug

SEQ ID NO: 375982 - RNA, 32 nt, Homo Sapiens
agguggaggcggagccggaugucagagguccu

SEQ ID NO: 375983 - RNA, 32 nt, Homo Sapiens
acuacgaacugggaguucugaagaauggguaa

SEQ ID NO: 375984 - RNA, 32 nt, Homo Sapiens
cccccgcccagcugggaacccccagaacgccu

SEQ ID NO: 375985 - RNA, 32 nt, Homo Sapiens
caacaaauuuaaaguaauauuucuuucuaaua

SEQ ID NO: 375986 - RNA, 32 nt, Homo Sapiens
acguggcggaagcugcacgaggcggugcgggc

SEQ ID NO: 375987 - RNA, 32 nt, Homo Sapiens
ccugugguuccagcugaggugggaggaucacu

SEQ ID NO: 375988 - RNA, 32 nt, Homo Sapiens
gccgcagccacccacccuccggaccgcggcag

SEQ ID NO: 375989 - RNA, 32 nt, Homo Sapiens
cagcucugaaagcaggagguguucucagacuu

SEQ ID NO: 375990 - RNA, 32 nt, Homo Sapiens
ccuggacguggcgggcagccgcgaggguaacc

SEQ ID NO: 375991 - RNA, 30 nt, Homo Sapiens
cccugugugacagagggggaaacugaggcc

SEQ ID NO: 375992 - RNA, 32 nt, Homo Sapiens
aagagaaguuuaagaaugaaccacugaauguu

SEQ ID NO: 375993 - RNA, 32 nt, Homo Sapiens
uauauuuuuauacugugacuuaauuugucauu

SEQ ID NO: 375994 - RNA, 32 nt, Homo Sapiens
ggcugaaggugaugcuaaaggagauaaaacca

SEQ ID NO: 375995 - RNA, 32 nt, Homo Sapiens
uuucgacucgcgcuccggcugcugucacuugg

SEQ ID NO: 375996 - RNA, 32 nt, Homo Sapiens
ccccuagugguuuucuuuccauuuguguuaug

SEQ ID NO: 375997 - RNA, 32 nt, Homo Sapiens
uuuggggggcggggcugucaccacgugcagua

SEQ ID NO: 375998 - RNA, 32 nt, Homo Sapiens
ccagggaauuguaggauguuuagcagcaucac

SEQ ID NO: 375999 - RNA, 32 nt, Homo Sapiens
aaaaucuggugccucucccuucccuuucccug

SEQ ID NO: 376000 - RNA, 32 nt, Homo Sapiens
agaucaguucccauuugaguuccuccuugcac

SEQ ID NO: 376001 - RNA, 32 nt, Homo Sapiens
ggagagugacuugauuugcuuuuggaaaaaga

SEQ ID NO: 376002 - RNA, 32 nt, Homo Sapiens
acgagagaggguggaugagaagcaaaaacagc

SEQ ID NO: 376003 - RNA, 32 nt, Homo Sapiens
uucaucuuucaaucuuuugauuguuggcauua

SEQ ID NO: 376004 - RNA, 32 nt, Homo Sapiens
uccaaauaaacuaaauauaauauugagcugca

SEQ ID NO: 376005 - RNA, 32 nt, Homo Sapiens
gggugaguucccugggcagcccccaggaaggc

SEQ ID NO: 376006 - RNA, 27 nt, Homo Sapiens
acugcuguccucuucagcucaagaugg

SEQ ID NO: 376007 - RNA, 32 nt, Homo Sapiens
agaucuacacagaacaacaaggaacuaaagga

SEQ ID NO: 376008 - RNA, 32 nt, Homo Sapiens
ucaaucaacuugaagaaaaaggugauauauua

SEQ ID NO: 376009 - RNA, 32 nt, Homo Sapiens
cgcugauuucgcccacccaccucccuccaccc

SEQ ID NO: 376010 - RNA, 32 nt, Homo Sapiens
cuggucagucacaucuuacggcgaagggagag

SEQ ID NO: 376011 - RNA, 32 nt, Homo Sapiens
gcugcuugccgagcuggagauguuggagugcu

SEQ ID NO: 376012 - RNA, 32 nt, Homo Sapiens
agauuucugggcaucacccaucuacaaauuca

SEQ ID NO: 376013 - RNA, 32 nt, Homo Sapiens
acaaucagcucuuucugcaugugcuggucaaa

SEQ ID NO: 376014 - RNA, 32 nt, Homo Sapiens
gacccaggaaagggcagaccugccccuccaaa

SEQ ID NO: 376015 - RNA, 32 nt, Homo Sapiens
cccuccccgccgccgcugcaguggccgcuccc

SEQ ID NO: 376016 - RNA, 32 nt, Homo Sapiens
cauacuggccuugggugaguggcucaggaaca

SEQ ID NO: 376017 - RNA, 32 nt, Homo Sapiens
uuaauuaccauuuuauuuuuuauacuucuucc

SEQ ID NO: 376018 - RNA, 32 nt, Homo Sapiens
uucuggcggcaccucccgggugcuguguugag

SEQ ID NO: 376019 - RNA, 32 nt, Homo Sapiens
auguuuagcauuaucuuuauggaauuuauauu

SEQ ID NO: 376020 - RNA, 32 nt, Homo Sapiens
ccuauuuuuuaaaauuugauguguuaagucuc

SEQ ID NO: 376021 - RNA, 30 nt, Homo Sapiens
uccucaguguaccacuacuuagagauaugu

SEQ ID NO: 376022 - RNA, 32 nt, Homo Sapiens
agcggagggccucuucuuggugcccugccccc

SEQ ID NO: 376023 - RNA, 32 nt, Homo Sapiens
auuguuucauuauucaguuuccucuguaaagg

SEQ ID NO: 376024 - RNA, 32 nt, Homo Sapiens
cugacuaauuuucgggagcuggugaggcaagc

SEQ ID NO: 376025 - RNA, 32 nt, Homo Sapiens
uuucaauaugccacaauuuaggacacauuuaa

SEQ ID NO: 376026 - RNA, 32 nt, Homo Sapiens
ccuuggguccauguuuacucucuucuauuugg

SEQ ID NO: 376027 - RNA, 32 nt, Homo Sapiens
ugucucacaauuuuguagaaucuuacagcauc

SEQ ID NO: 376028 - RNA, 32 nt, Homo Sapiens
uccagcugccagcaugcuacugccaugccccg

SEQ ID NO: 376029 - RNA, 32 nt, Homo Sapiens
gaggagggccuggccucagucccggguguggc

SEQ ID NO: 376030 - RNA, 32 nt, Homo Sapiens
gccugggaaggggguaggccccuggcaaguag

SEQ ID NO: 376031 - RNA, 32 nt, Homo Sapiens
ccccugcccucccucuggacccccagccaggg

SEQ ID NO: 376032 - RNA, 32 nt, Homo Sapiens
uggcgagggacagacguaggccaagagagggg

SEQ ID NO: 376033 - RNA, 31 nt, Homo Sapiens
accuaugaauaaaaauacuuauuaaaugauu

SEQ ID NO: 376034 - RNA, 32 nt, Homo Sapiens
agcugaggggacagggaggagcagaagccauc

SEQ ID NO: 376035 - RNA, 32 nt, Homo Sapiens
ucuccgugccacauuccuccaguucccacacg

SEQ ID NO: 376036 - RNA, 32 nt, Homo Sapiens
ggugggucuuggauugguaccagagccuaugg

SEQ ID NO: 376037 - RNA, 32 nt, Homo Sapiens
cguuuuuugucaucuguaaauuauguacuaca

SEQ ID NO: 376038 - RNA, 32 nt, Homo Sapiens
gaaaggacaaaauaaacacauuuucaaaauuu

SEQ ID NO: 376039 - RNA, 32 nt, Homo Sapiens
aauaaaauguauaaagggcaacacaugagcug

SEQ ID NO: 376040 - RNA, 32 nt, Homo Sapiens
uuaacauuccuccuccaauugguuuaaugcug

SEQ ID NO: 376041 - RNA, 32 nt, Homo Sapiens
ucuucagaggcuuccagggcgaggggaaacca

SEQ ID NO: 376042 - RNA, 32 nt, Homo Sapiens
agaugguugcugccauugcugcugccucugcc

SEQ ID NO: 376043 - RNA, 32 nt, Homo Sapiens
uucugcuuuccacggcgugugcugggcccgga

SEQ ID NO: 376044 - RNA, 32 nt, Homo Sapiens
gagcguggagaggcagugcugcugcucccgcc

SEQ ID NO: 376045 - RNA, 32 nt, Homo Sapiens
uuuuugagugcaaauacagguacuguuggagu

SEQ ID NO: 376046 - RNA, 32 nt, Homo Sapiens
ccuagggacugugaggggcgcuucugacuuug

SEQ ID NO: 376047 - RNA, 31 nt, Homo Sapiens
cagcccggccgcaccaccugggucuccgcca

SEQ ID NO: 376048 - RNA, 32 nt, Homo Sapiens
aauuagccaggugugguggugcaugccuguca

SEQ ID NO: 376049 - RNA, 32 nt, Homo Sapiens
auuuugauguguuacaaaauacuacuguguua

SEQ ID NO: 376050 - RNA, 32 nt, Homo Sapiens
acaguggucguggaaguuggacuucguguuca

SEQ ID NO: 376051 - RNA, 32 nt, Homo Sapiens
guagaaugcuugaggccuggaauuuaaaccug

SEQ ID NO: 376052 - RNA, 32 nt, Homo Sapiens
uggcucagcagccgagccuggcaccgaggguc

SEQ ID NO: 376053 - RNA, 32 nt, Homo Sapiens
uuuucuacauuugacauguauucaucauugag

SEQ ID NO: 376054 - RNA, 32 nt, Homo Sapiens
uccaguggccacuguaguauaaaccaugguca

SEQ ID NO: 376055 - RNA, 31 nt, Homo Sapiens
gcucggcggggccccacucagagcagcuggc

SEQ ID NO: 376056 - RNA, 32 nt, Homo Sapiens
ucauuccauuugagucuuucugaugaacuugg

SEQ ID NO: 376057 - RNA, 32 nt, Homo Sapiens
ccuuuaaguauuuucauauuuuuaaucauuua

SEQ ID NO: 376058 - RNA, 32 nt, Homo Sapiens
ucagagggacuugcuguggggguggcccugac

SEQ ID NO: 376059 - RNA, 32 nt, Homo Sapiens
gcccuucugagaacugugacuuuaccaggagc

SEQ ID NO: 376060 - RNA, 32 nt, Homo Sapiens
aggacaagagaagggacacaccccugagagau

SEQ ID NO: 376061 - RNA, 32 nt, Homo Sapiens
ggccacagaaaagagcagauagugccaauauc

SEQ ID NO: 376062 - RNA, 32 nt, Homo Sapiens
uuuacagguucaauguuauuccuaucaaacca

SEQ ID NO: 376063 - RNA, 32 nt, Homo Sapiens
aaugcuguccuguguccccacuuccuccagaa

SEQ ID NO: 376064 - RNA, 32 nt, Homo Sapiens
cuuaguaaaaauuuugaaaggaugaccacuca

SEQ ID NO: 376065 - RNA, 32 nt, Homo Sapiens
cuccgccuuguaaaccacuggacagagggcca

SEQ ID NO: 376066 - RNA, 32 nt, Homo Sapiens
guuuugggaggggacauggguucucuccuucc

SEQ ID NO: 376067 - RNA, 32 nt, Homo Sapiens
uuccgggauuccugggguccagccacacuucc

SEQ ID NO: 376068 - RNA, 32 nt, Homo Sapiens
cacuugaucucauugggauaaugagaaaagcu

SEQ ID NO: 376069 - RNA, 32 nt, Homo Sapiens
ggguccaaaaguugacaaaaccauuaguagga

SEQ ID NO: 376070 - RNA, 32 nt, Homo Sapiens
gaaaugagaacaaagaggaaaaugguaaaaac

SEQ ID NO: 376071 - RNA, 32 nt, Homo Sapiens
uggucacugccagcuggauuggccagugcacc

SEQ ID NO: 376072 - RNA, 32 nt, Homo Sapiens
ggacagagagauauaaaaccaaugcaccuggg

SEQ ID NO: 376073 - RNA, 32 nt, Homo Sapiens
uauuuauauaaaauuaguagugagauguaaca

SEQ ID NO: 376074 - RNA, 32 nt, Homo Sapiens
uuguaaaaacaaagugcuaaauaauauuuauu

SEQ ID NO: 376075 - RNA, 32 nt, Homo Sapiens
auaaaaaugggugcaaaugaaaacacucucuu

SEQ ID NO: 376076 - RNA, 31 nt, Homo Sapiens
ugaagcucacggagaccaagucccagcagaa

SEQ ID NO: 376077 - RNA, 32 nt, Homo Sapiens
gaugcaacacaaguuucauuugagccugaacc

SEQ ID NO: 376078 - RNA, 32 nt, Homo Sapiens
ucuuuagguggaagaaaguaaaguucuuauug

SEQ ID NO: 376079 - RNA, 32 nt, Homo Sapiens
acccagaagcaggaagcagacaguaagugaca

SEQ ID NO: 376080 - RNA, 32 nt, Homo Sapiens
aaguuacgagacugggcauccuugcuuuguuc

SEQ ID NO: 376081 - RNA, 32 nt, Homo Sapiens
cuccggguucgggaugcugaggagaccgcggg

SEQ ID NO: 376082 - RNA, 32 nt, Homo Sapiens
cccucuuccuuccucugcagacgcuggcgcug

SEQ ID NO: 376083 - RNA, 32 nt, Homo Sapiens
agcucccugaggugggggcgaggcagggucug

SEQ ID NO: 376084 - RNA, 32 nt, Homo Sapiens
uauuuuguaaugauuaggaugaaaauuuuauc

SEQ ID NO: 376085 - RNA, 32 nt, Homo Sapiens
guguuuuuuaaccaaaauggcauuuguuuggc

SEQ ID NO: 376086 - RNA, 32 nt, Homo Sapiens
caggacguguggaugccugccugcccugcccu

SEQ ID NO: 376087 - RNA, 32 nt, Homo Sapiens
ggccuagcgcccggcgccgccugccgcgucaa

SEQ ID NO: 376088 - RNA, 32 nt, Homo Sapiens
ggagaagugcaaagucgcggggagggccguau

SEQ ID NO: 376089 - RNA, 32 nt, Homo Sapiens
uuguauaugauucacgagcuuuuuuagaguuu

SEQ ID NO: 376090 - RNA, 32 nt, Homo Sapiens
cucgcuucaaccuggacagccaucgcuccaca

SEQ ID NO: 376091 - RNA, 32 nt, Homo Sapiens
cggguugcguccucgggaccuuucucugcagc

SEQ ID NO: 376092 - RNA, 32 nt, Homo Sapiens
uuagagguuugacuuuuaaauaauuacuuauu

SEQ ID NO: 376093 - RNA, 32 nt, Homo Sapiens
accuccaugccgcugccuggggucuugcucga

SEQ ID NO: 376094 - RNA, 32 nt, Homo Sapiens
gguugaaugguaguucugucuguagguauuug

SEQ ID NO: 376095 - RNA, 32 nt, Homo Sapiens
gagcugcugaccacccugcgggacgccagcga

SEQ ID NO: 376096 - RNA, 32 nt, Homo Sapiens
cacaccccacccaaagcauacaccgcugagcu

SEQ ID NO: 376097 - RNA, 32 nt, Homo Sapiens
uuauuaaauaaucaugcccugaccauaauaaa

SEQ ID NO: 376098 - RNA, 32 nt, Homo Sapiens
gaagauauauuuaugauauuucugcagacugc

SEQ ID NO: 376099 - RNA, 32 nt, Homo Sapiens
cuaaaaagggcuuauuuccgaggaaugaaagg

SEQ ID NO: 376100 - RNA, 32 nt, Homo Sapiens
uuaauuaauucuuuuuaauauagcuuggauuu

SEQ ID NO: 376101 - RNA, 32 nt, Homo Sapiens
gcuuucuagguccucaagugcucgugacacau

SEQ ID NO: 376102 - RNA, 32 nt, Homo Sapiens
aggaccauucccaggaggaaaagguggcagag

SEQ ID NO: 376103 - RNA, 29 nt, Homo Sapiens
ucucccauauguaugcuguaugcuaugcu

SEQ ID NO: 376104 - RNA, 32 nt, Homo Sapiens
agcaacugguauauaguaacuagguggcccga

SEQ ID NO: 376105 - RNA, 32 nt, Homo Sapiens
cggagcugcucgcgccccgcccagucgcccca

SEQ ID NO: 376106 - RNA, 32 nt, Homo Sapiens
uaggcaaguaauuuaauuuuuguugcgucaga

SEQ ID NO: 376107 - RNA, 32 nt, Homo Sapiens
cuccaagucaguuguaaaugucuugagaacag

SEQ ID NO: 376108 - RNA, 32 nt, Homo Sapiens
caacccaguggaggcccggcuugggacauugu

SEQ ID NO: 376109 - RNA, 32 nt, Homo Sapiens
ggguuuuuaauugaucaguuuucaugugggau

SEQ ID NO: 376110 - RNA, 32 nt, Homo Sapiens
cugaugcucauauguuuagaauggucaagcaa

SEQ ID NO: 376111 - RNA, 32 nt, Homo Sapiens
guauuaaaaucuuuaaaucauaaaaaaaaaaa

SEQ ID NO: 376112 - RNA, 32 nt, Homo Sapiens
aagcggacccuccugcccucagcuuggguuug

SEQ ID NO: 376113 - RNA, 32 nt, Homo Sapiens
uggccgcugggcaaagagacuggagaaggaua

SEQ ID NO: 376114 - RNA, 32 nt, Homo Sapiens
gggacgaguccauguucccaagggcagcccuu

SEQ ID NO: 376115 - RNA, 32 nt, Homo Sapiens
uuacuuuaaaacugugauugucaauauauaua

SEQ ID NO: 376116 - RNA, 32 nt, Homo Sapiens
cccgcgcccgacggagccuguucgcgucgacu

SEQ ID NO: 376117 - RNA, 32 nt, Homo Sapiens
ccccaccgacuggcagcugcacuauccccaac

SEQ ID NO: 376118 - RNA, 27 nt, Homo Sapiens
cuuuggcccuucuucagcuuacucuua

SEQ ID NO: 376119 - RNA, 32 nt, Homo Sapiens
aaaagaggcgcuucuccccuccccuacaccua

SEQ ID NO: 376120 - RNA, 32 nt, Homo Sapiens
guuuugaaaaagacuugaaauacacauaggaa

SEQ ID NO: 376121 - RNA, 32 nt, Homo Sapiens
ucuccuuccccauuccucccccaguuggaagc

SEQ ID NO: 376122 - RNA, 32 nt, Homo Sapiens
uuccuccugccaggggagagccacccacaggc

SEQ ID NO: 376123 - RNA, 32 nt, Homo Sapiens
ccuggccucgcacaggcgcacacacaccgcca

SEQ ID NO: 376124 - RNA, 32 nt, Homo Sapiens
ggagcuguagugccauuagaaacugugaauuu

SEQ ID NO: 376125 - RNA, 32 nt, Homo Sapiens
gcucucuuuuaaaaauaaaugucuccuucugu

SEQ ID NO: 376126 - RNA, 32 nt, Homo Sapiens
gcgaaggcggcacccaagccagcugcaagcgg

SEQ ID NO: 376127 - RNA, 32 nt, Homo Sapiens
ucuaccaaaaauacaaaaauuagccaggcaua

SEQ ID NO: 376128 - RNA, 32 nt, Homo Sapiens
gaaaauauugauagcaucauccuaaugaaacu

SEQ ID NO: 376129 - RNA, 32 nt, Homo Sapiens
ucccgucccacagugcaagaccccgaggccac

SEQ ID NO: 376130 - RNA, 32 nt, Homo Sapiens
cgaguucucggugcgcucagcggccgccgacg

SEQ ID NO: 376131 - RNA, 32 nt, Homo Sapiens
gcuucugggguggccugggcggaggcuauggu

SEQ ID NO: 376132 - RNA, 32 nt, Homo Sapiens
agagcuccaaaggaccccucccugcccagcgu

SEQ ID NO: 376133 - RNA, 32 nt, Homo Sapiens
aaauaaaugugaaaaauaacuaugauauuuug

SEQ ID NO: 376134 - RNA, 32 nt, Homo Sapiens
ggguucucggucucacuaacuucaagaaugaa

SEQ ID NO: 376135 - RNA, 28 nt, Homo Sapiens
aguauggcgucccuggucucgcuggagc

SEQ ID NO: 376136 - RNA, 30 nt, Homo Sapiens
uguucugccuucaugggggagagacuggau

SEQ ID NO: 376137 - RNA, 32 nt, Homo Sapiens
agcaacaaggugguccguguuugaauucugca

SEQ ID NO: 376138 - RNA, 32 nt, Homo Sapiens
aagccaaagaaagaaaaacuaaagaugaugaa

SEQ ID NO: 376139 - RNA, 32 nt, Homo Sapiens
gcccagcgcgcccagcgacgugcgggcggccu

SEQ ID NO: 376140 - RNA, 32 nt, Homo Sapiens
ccugggauccgggaguccaucccggcccagca

SEQ ID NO: 376141 - RNA, 32 nt, Homo Sapiens
caugccguugagcuuggcuacccaggcagugg

SEQ ID NO: 376142 - RNA, 32 nt, Homo Sapiens
ccugcaccaagcgaccccgcuggggcgccgcu

SEQ ID NO: 376143 - RNA, 32 nt, Homo Sapiens
uuuguggaauuugaaacaaaagaacaagcagc

SEQ ID NO: 376144 - RNA, 32 nt, Homo Sapiens
ccacccuggacugggcugucuccggagcccag

SEQ ID NO: 376145 - RNA, 32 nt, Homo Sapiens
cacgcgucccgcucgggcgcacucuccagccu

SEQ ID NO: 376146 - RNA, 32 nt, Homo Sapiens
auguucacauaaauuugggaaauucuggacua

SEQ ID NO: 376147 - RNA, 32 nt, Homo Sapiens
uccaccugcagccccaggccucccucccccgg

SEQ ID NO: 376148 - RNA, 32 nt, Homo Sapiens
aagccggcgagggggagccagcagcggcgguc

SEQ ID NO: 376149 - RNA, 32 nt, Homo Sapiens
cuaacacaaccuggcuuggacaugaagacccu

SEQ ID NO: 376150 - RNA, 32 nt, Homo Sapiens
cugcuggagcccaccaggcaagaggggccagc

SEQ ID NO: 376151 - RNA, 32 nt, Homo Sapiens
acuguaauauuguaguugcuccagaaugucaa

SEQ ID NO: 376152 - RNA, 32 nt, Homo Sapiens
acauaccuuccacagcucugggagcaccgccu

SEQ ID NO: 376153 - RNA, 32 nt, Homo Sapiens
cugugucucugaggccguagggggcgacgacg

SEQ ID NO: 376154 - RNA, 32 nt, Homo Sapiens
aagggaaguauacacaaacuuacuacauaaac

SEQ ID NO: 376155 - RNA, 32 nt, Homo Sapiens
ucucuuuauucccuuugauccucccccaaggu

SEQ ID NO: 376156 - RNA, 32 nt, Homo Sapiens
uaccaugggauuuuuggauaucaguguauuuu

SEQ ID NO: 376157 - RNA, 32 nt, Homo Sapiens
ggauccccuggcccaccuucucuuggcucagc

SEQ ID NO: 376158 - RNA, 32 nt, Homo Sapiens
uggcagcgaugauggcugcugucauucaagcc

SEQ ID NO: 376159 - RNA, 31 nt, Homo Sapiens
cucugaccagggacauccugaguuugguggc

SEQ ID NO: 376160 - RNA, 32 nt, Homo Sapiens
ccaggccacugugagggugggugcuggcugac

SEQ ID NO: 376161 - RNA, 32 nt, Homo Sapiens
acaugacaaugaagauacgaaacuggacauca

SEQ ID NO: 376162 - RNA, 32 nt, Homo Sapiens
gagcuaguuuguugauaaauaguucccauuuc

SEQ ID NO: 376163 - RNA, 31 nt, Homo Sapiens
uuucuucuugguauuaaagagacaaguuuau

SEQ ID NO: 376164 - RNA, 32 nt, Homo Sapiens
agcucagcagagcuaugcggauguaugagagg

SEQ ID NO: 376165 - RNA, 32 nt, Homo Sapiens
gaggugcccagccugccccugggacugacagg

SEQ ID NO: 376166 - RNA, 30 nt, Homo Sapiens
ccccgcuuccugccaaacgcccugaucagu

SEQ ID NO: 376167 - RNA, 30 nt, Homo Sapiens
aggugggaagguggcaugggaugaaguugu

SEQ ID NO: 376168 - RNA, 32 nt, Homo Sapiens
uauacaaaaacuguaguugaaaaaagaugaca

SEQ ID NO: 376169 - RNA, 32 nt, Homo Sapiens
gcccaggcggggggcggggccagcacgaugag

SEQ ID NO: 376170 - RNA, 32 nt, Homo Sapiens
cagagaggcauuccuuucuccuccucucaucc

SEQ ID NO: 376171 - RNA, 32 nt, Homo Sapiens
gccuuguuuuugauaccuccuggcagcuucca

SEQ ID NO: 376172 - RNA, 32 nt, Homo Sapiens
ucagcuuuuuccccacagacaccuaccucaca

SEQ ID NO: 376173 - RNA, 32 nt, Homo Sapiens
cuuucccucccuccccuccccccgaacccuga

SEQ ID NO: 376174 - RNA, 32 nt, Homo Sapiens
ugacggaggagcuagcugaguaugcugaaauc

SEQ ID NO: 376175 - RNA, 32 nt, Homo Sapiens
uaucuguaaucccagcacuuugagaggccaag

SEQ ID NO: 376176 - RNA, 32 nt, Homo Sapiens
ccuggugccggccugcugccccggccgcacac

SEQ ID NO: 376177 - RNA, 32 nt, Homo Sapiens
ggcacccacucacccuagaauaaacuuaacag

SEQ ID NO: 376178 - RNA, 32 nt, Homo Sapiens
guagaguuaugaaaacgaagaaacuggucaga

SEQ ID NO: 376179 - RNA, 32 nt, Homo Sapiens
uucccauuguucuaucaucucuaggaccggaa

SEQ ID NO: 376180 - RNA, 32 nt, Homo Sapiens
acucggggagcgcaggcaggacaggcuuagag

SEQ ID NO: 376181 - RNA, 32 nt, Homo Sapiens
uuugggagcaaaaaccaaguauccuugugguu

SEQ ID NO: 376182 - RNA, 32 nt, Homo Sapiens
cgacucagaaugccgaugccugcccgaggcuu

SEQ ID NO: 376183 - RNA, 32 nt, Homo Sapiens
auacagugaauacauauauaucuaacucccag

SEQ ID NO: 376184 - RNA, 32 nt, Homo Sapiens
acaagagaaaacuacuaagcuugacaucugug

SEQ ID NO: 376185 - RNA, 32 nt, Homo Sapiens
gauuugaaaguuggaaguuuguaccaucuguu

SEQ ID NO: 376186 - RNA, 32 nt, Homo Sapiens
ccacugaggagcuacagcccugugcucccggg

SEQ ID NO: 376187 - RNA, 32 nt, Homo Sapiens
agagacgaugaccacagcauauggaaaggaag

SEQ ID NO: 376188 - RNA, 32 nt, Homo Sapiens
gugagaggcagaccagcagauggacuugaucc

SEQ ID NO: 376189 - RNA, 32 nt, Homo Sapiens
cucguacaauuaauagugauauuuuggacaag

SEQ ID NO: 376190 - RNA, 32 nt, Homo Sapiens
cagucugcaggugcugccccugggaaccugcg

SEQ ID NO: 376191 - RNA, 30 nt, Homo Sapiens
ucugcucugcuaaguuuggagaaaacagaa

SEQ ID NO: 376192 - RNA, 32 nt, Homo Sapiens
aggggauagagaugagaugucuggguuggaug

SEQ ID NO: 376193 - RNA, 32 nt, Homo Sapiens
aauggcuccuuaaggaugaacuuuuuagagaa

SEQ ID NO: 376194 - RNA, 32 nt, Homo Sapiens
cuaacuugaugaugauauaaaauucauuuuua

SEQ ID NO: 376195 - RNA, 32 nt, Homo Sapiens
agcuccuagggggugacgccugcccuccccag

SEQ ID NO: 376196 - RNA, 30 nt, Homo Sapiens
aagcgucuggacuagaucacguaggcaaug

SEQ ID NO: 376197 - RNA, 32 nt, Homo Sapiens
auuguguuugugguuuaggagcugcugacacu

SEQ ID NO: 376198 - RNA, 32 nt, Homo Sapiens
gcuaggcgggggaggggcguugcuauggcgac

SEQ ID NO: 376199 - RNA, 32 nt, Homo Sapiens
ggcggugugcucagcacagagcccccggaacu

SEQ ID NO: 376200 - RNA, 32 nt, Homo Sapiens
cgccuguaaucccagcacuuugagaggcugag

SEQ ID NO: 376201 - RNA, 32 nt, Homo Sapiens
acagcucuugacaacucuuagagcacuauuuc

SEQ ID NO: 376202 - RNA, 32 nt, Homo Sapiens
cccuguuuguaaaggggaguuuguucauuggg

SEQ ID NO: 376203 - RNA, 32 nt, Homo Sapiens
guggcugugggaaguaaaccggaugggauaag

SEQ ID NO: 376204 - RNA, 32 nt, Homo Sapiens
uccacucuccugcgguuaccagcccugcacca

SEQ ID NO: 376205 - RNA, 32 nt, Homo Sapiens
gagcacugcugggcuccuggacugagaauagu

SEQ ID NO: 376206 - RNA, 32 nt, Homo Sapiens
ugaugggcaggcuuugccccagcccaccccug

SEQ ID NO: 376207 - RNA, 32 nt, Homo Sapiens
gggauuuggaagcucagcagaagugacuucug

SEQ ID NO: 376208 - RNA, 32 nt, Homo Sapiens
ggacuaauugaagaaaaauguaaacuacuuga

SEQ ID NO: 376209 - RNA, 32 nt, Homo Sapiens
cagaguacaaaacgugagaaugcugaaugugu

SEQ ID NO: 376210 - RNA, 32 nt, Homo Sapiens
ccugggagggagaauaagaguaagugaacagu

SEQ ID NO: 376211 - RNA, 32 nt, Homo Sapiens
ucugagaccagggcugucacuuuucugccagg

SEQ ID NO: 376212 - RNA, 32 nt, Homo Sapiens
ucggagagggcggcugggcggcggcggggcuc

SEQ ID NO: 376213 - RNA, 32 nt, Homo Sapiens
gccuccucagcaugcaggaggcugcccuguag

SEQ ID NO: 376214 - RNA, 32 nt, Homo Sapiens
gggggcguggaaggcgggaggggcugacagug

SEQ ID NO: 376215 - RNA, 32 nt, Homo Sapiens
aauuugcauccaccuucccuucugacucaggu

SEQ ID NO: 376216 - RNA, 32 nt, Homo Sapiens
gagugggccacuccacacccagcccuguugaa

SEQ ID NO: 376217 - RNA, 32 nt, Homo Sapiens
ucuuuuucaugacauggcacauagagaaaaua

SEQ ID NO: 376218 - RNA, 32 nt, Homo Sapiens
ucaccucuuuguuacaaccuggauaugaugcc

SEQ ID NO: 376219 - RNA, 32 nt, Homo Sapiens
uauuaggacuuuucuuuuucuucuuccucuuc

SEQ ID NO: 376220 - RNA, 31 nt, Homo Sapiens
ugucaucccaagaaaaaauauauuaaaaaga

SEQ ID NO: 376221 - RNA, 32 nt, Homo Sapiens
uagaaggaauucagcucugauguuuuuaaaga

SEQ ID NO: 376222 - RNA, 32 nt, Homo Sapiens
ugggggagagagaggagaccaggacagcugcu

SEQ ID NO: 376223 - RNA, 32 nt, Homo Sapiens
gccugucaccggaaaccccucccgcggugccg

SEQ ID NO: 376224 - RNA, 32 nt, Homo Sapiens
ucaaguccugacugaggucuccaauuaccuuc

SEQ ID NO: 376225 - RNA, 32 nt, Homo Sapiens
cccugguguugcauuuagcccuggggcaugga

SEQ ID NO: 376226 - RNA, 32 nt, Homo Sapiens
uuccuuagcucaaggccacacaaaaucagaac

SEQ ID NO: 376227 - RNA, 32 nt, Homo Sapiens
gcugugaccugcggcagcacagccgccugcgu

SEQ ID NO: 376228 - RNA, 32 nt, Homo Sapiens
uaaagucguuuaauguggugcuaaaaaguaaa

SEQ ID NO: 376229 - RNA, 32 nt, Homo Sapiens
agccaacgugguguauuucucauucaauauuu

SEQ ID NO: 376230 - RNA, 32 nt, Homo Sapiens
ggauuuucacugaguuuaccucagcaacuuuu

SEQ ID NO: 376231 - RNA, 32 nt, Homo Sapiens
caguccuguguggugcccaugauccuucuggu

SEQ ID NO: 376232 - RNA, 32 nt, Homo Sapiens
aacuaaaauuuauaugacuuugaauuuaagaa

SEQ ID NO: 376233 - RNA, 32 nt, Homo Sapiens
agcccaauagaaguacagagccagcugacaag

SEQ ID NO: 376234 - RNA, 32 nt, Homo Sapiens
ccccuccccucccccgccgccucgcagauagc

SEQ ID NO: 376235 - RNA, 32 nt, Homo Sapiens
aaauauucucaauaauguaaaauaauuaaggu

SEQ ID NO: 376236 - RNA, 32 nt, Homo Sapiens
acagccaccauucuaaugcuugacuuuacaua

SEQ ID NO: 376237 - RNA, 32 nt, Homo Sapiens
cucaggugccagcucuguucugauucaccagg

SEQ ID NO: 376238 - RNA, 32 nt, Homo Sapiens
uucaguccuuuauuagauaacauuugaaguaa

SEQ ID NO: 376239 - RNA, 32 nt, Homo Sapiens
agcacuagaaugagaaaucauguuguucgauc

SEQ ID NO: 376240 - RNA, 32 nt, Homo Sapiens
acccaccuggagacuccacgggcucccggcag

SEQ ID NO: 376241 - RNA, 32 nt, Homo Sapiens
ggcugcggccgcgggacgggguagugagcgcg

SEQ ID NO: 376242 - RNA, 32 nt, Homo Sapiens
cgccagcagcauagacuggacuggaccagaca

SEQ ID NO: 376243 - RNA, 32 nt, Homo Sapiens
gccaccacaaaacaaacauguucacuagcgga

SEQ ID NO: 376244 - RNA, 32 nt, Homo Sapiens
gccacugggaccagaacggcccggcccagcgc

SEQ ID NO: 376245 - RNA, 32 nt, Homo Sapiens
acagcuaaauacauuuaugauuucauaaaauc

SEQ ID NO: 376246 - RNA, 32 nt, Homo Sapiens
ucaacugcagcaucaacagaucagugccgaca

SEQ ID NO: 376247 - RNA, 32 nt, Homo Sapiens
ccaacauggcugggccugggacaggcuccucc

SEQ ID NO: 376248 - RNA, 32 nt, Homo Sapiens
cgcaccuucccgcucccugcuugcaaaguggu

SEQ ID NO: 376249 - RNA, 32 nt, Homo Sapiens
gcucccaggguccgccgcgcgcgcgccucgcg

SEQ ID NO: 376250 - RNA, 30 nt, Homo Sapiens
cagugaugcaggacuucuggaggaggagcu

SEQ ID NO: 376251 - RNA, 32 nt, Homo Sapiens
aagugcccauuguucaggauucuaauagcuac

SEQ ID NO: 376252 - RNA, 32 nt, Homo Sapiens
cuccacuugccccuccuucucuuucgggcucc

SEQ ID NO: 376253 - RNA, 31 nt, Homo Sapiens
uuuuggccgagguccgcuguauccauggcuc

SEQ ID NO: 376254 - RNA, 32 nt, Homo Sapiens
ggagcucugaguccucagguccacccauuucc

SEQ ID NO: 376255 - RNA, 32 nt, Homo Sapiens
ccccaccaauuguuaaugcaaguuuuuauuug

SEQ ID NO: 376256 - RNA, 32 nt, Homo Sapiens
uagauucccagcaucaccccccgcccggccau

SEQ ID NO: 376257 - RNA, 32 nt, Homo Sapiens
gauucuucuggugauguuuacuuaaaaaguga

SEQ ID NO: 376258 - RNA, 32 nt, Homo Sapiens
gccacaugagagagggagaaggaccgcguuua

SEQ ID NO: 376259 - RNA, 31 nt, Homo Sapiens
ugaacuguucagccuuuucaagauuucuuua

SEQ ID NO: 376260 - RNA, 32 nt, Homo Sapiens
uauauguagauauauauuuuagcagugacauu

SEQ ID NO: 376261 - RNA, 32 nt, Homo Sapiens
gaaccugggagguggggguuucagugagcuga

SEQ ID NO: 376262 - RNA, 32 nt, Homo Sapiens
ggaaccuguccucccuuucuccccaacuaugc

SEQ ID NO: 376263 - RNA, 32 nt, Homo Sapiens
guggauugaugagacuccuccaguggaccagc

SEQ ID NO: 376264 - RNA, 32 nt, Homo Sapiens
uacagagauaaugaaaucaaaugguuuccugg

SEQ ID NO: 376265 - RNA, 32 nt, Homo Sapiens
guuaugagggauacaagugaaauacuggggaa

SEQ ID NO: 376266 - RNA, 32 nt, Homo Sapiens
uccccucucuacaacccucucuccucagcgcu

SEQ ID NO: 376267 - RNA, 32 nt, Homo Sapiens
caggcuaaacacaaacacggaaccagagugag

SEQ ID NO: 376268 - RNA, 32 nt, Homo Sapiens
agccugacuuggggagauggaguucuugugcc

SEQ ID NO: 376269 - RNA, 32 nt, Homo Sapiens
caucccguccugagagccccagccccacucug

SEQ ID NO: 376270 - RNA, 32 nt, Homo Sapiens
acccugagaagcucugcugucuggggcaagcu

SEQ ID NO: 376271 - RNA, 32 nt, Homo Sapiens
gagacuccagugacugcugccuccccccacaa

SEQ ID NO: 376272 - RNA, 32 nt, Homo Sapiens
gcugcugugcuugaagaagacacaacggauga

SEQ ID NO: 376273 - RNA, 32 nt, Homo Sapiens
cugauaugucauugucuuuuuagcaccaaaga

SEQ ID NO: 376274 - RNA, 32 nt, Homo Sapiens
cucgggacgguucucgccuccucccacagccc

SEQ ID NO: 376275 - RNA, 32 nt, Homo Sapiens
aauuacaaacaaaaaugacuacauaaaauaua

SEQ ID NO: 376276 - RNA, 32 nt, Homo Sapiens
accuuuuaacaccugauguguacaucccaugu

SEQ ID NO: 376277 - RNA, 32 nt, Homo Sapiens
caccugggacccaggcccuuucuuugggaucc

SEQ ID NO: 376278 - RNA, 32 nt, Homo Sapiens
cucuguuuaauucaccaucuugaaagaaacau

SEQ ID NO: 376279 - RNA, 32 nt, Homo Sapiens
ucucccccaugcuuacuaauacauucccuucc

SEQ ID NO: 376280 - RNA, 32 nt, Homo Sapiens
ugccguccccacucaggcgugggcugcagcgc

SEQ ID NO: 376281 - RNA, 32 nt, Homo Sapiens
uuaaggcugugcuacugcugcagauaacuagc

SEQ ID NO: 376282 - RNA, 32 nt, Homo Sapiens
acuaagcuagcgaaaauaaaauuuaaggcaac

SEQ ID NO: 376283 - RNA, 32 nt, Homo Sapiens
gugaauaucuuccugcuucuagucaaagcuuu

SEQ ID NO: 376284 - RNA, 32 nt, Homo Sapiens
cagagaguuaaaccuaugauggaaagacugaa

SEQ ID NO: 376285 - RNA, 32 nt, Homo Sapiens
acugagugccagggguccgcucccucaguggg

SEQ ID NO: 376286 - RNA, 32 nt, Homo Sapiens
aucugccaacuuuaauccaaauaaguaucaag

SEQ ID NO: 376287 - RNA, 32 nt, Homo Sapiens
cuacuucucgugacaccaccaaggcugcggga

SEQ ID NO: 376288 - RNA, 32 nt, Homo Sapiens
guguuccaggccccggcggcgucuggaggagg

SEQ ID NO: 376289 - RNA, 32 nt, Homo Sapiens
cagcgagagucugggcaccguccccgagcacg

SEQ ID NO: 376290 - RNA, 32 nt, Homo Sapiens
uggccaaaauaaaaaaucauggggcuggaaau

SEQ ID NO: 376291 - RNA, 32 nt, Homo Sapiens
uacccaguacgcauuagcugguguuggguuga

SEQ ID NO: 376292 - RNA, 32 nt, Homo Sapiens
ggauggaguuggaggggcggggugcuggcggu

SEQ ID NO: 376293 - RNA, 32 nt, Homo Sapiens
uuuucuuggcccaugauuaauggaauguaugu

SEQ ID NO: 376294 - RNA, 32 nt, Homo Sapiens
uuuccuagauuaaaaucuuaauugauuuugaa

SEQ ID NO: 376295 - RNA, 32 nt, Homo Sapiens
aaguuauaagugucugucuuaucuuuacuaca

SEQ ID NO: 376296 - RNA, 31 nt, Homo Sapiens
uaaucccaagccaccuuugguucauuaacaa

SEQ ID NO: 376297 - RNA, 32 nt, Homo Sapiens
agguguuuuuaaauagcagugauucagaauuu

SEQ ID NO: 376298 - RNA, 32 nt, Homo Sapiens
augagguuaggagagcgagaccauccuggcua

SEQ ID NO: 376299 - RNA, 32 nt, Homo Sapiens
aaaguuuugugauuuucuuauaugaguacauc

SEQ ID NO: 376300 - RNA, 32 nt, Homo Sapiens
ugggagcuccgcgggggcagcaggcaggcccc

SEQ ID NO: 376301 - RNA, 32 nt, Homo Sapiens
gcgcagcucccucagcuucgcagcgccgcccg

SEQ ID NO: 376302 - RNA, 32 nt, Homo Sapiens
aggauuuagcagaaaaaguagauuugucccca

SEQ ID NO: 376303 - RNA, 32 nt, Homo Sapiens
ccaaugcaucuuccaugaugcauuagaaguaa

SEQ ID NO: 376304 - RNA, 32 nt, Homo Sapiens
ggcacgaggcggccucccugccccuucacggc

SEQ ID NO: 376305 - RNA, 32 nt, Homo Sapiens
auuaaaaccuauaaaggguugagcugucccaa

SEQ ID NO: 376306 - RNA, 32 nt, Homo Sapiens
accuguguuguuauuucagaaaauauuauuuc

SEQ ID NO: 376307 - RNA, 32 nt, Homo Sapiens
aggacuacaauuccagcaugcacggggcgccg

SEQ ID NO: 376308 - RNA, 32 nt, Homo Sapiens
uugcugcagacacccuugcuccugagucauua

SEQ ID NO: 376309 - RNA, 32 nt, Homo Sapiens
uuuuugaguaagcuacuauuugaacauuaguu

SEQ ID NO: 376310 - RNA, 32 nt, Homo Sapiens
cucagugacauccaugaggccuuauuagcaaa

SEQ ID NO: 376311 - RNA, 31 nt, Homo Sapiens
cgcgcgccaggcugcauuccccgcgccggac

SEQ ID NO: 376312 - RNA, 32 nt, Homo Sapiens
aauuuuauuuuugccuuuauaagauuuucuug

SEQ ID NO: 376313 - RNA, 32 nt, Homo Sapiens
aggcagcucggcucggcuccgcgcucagcucc

SEQ ID NO: 376314 - RNA, 32 nt, Homo Sapiens
aaaugugugauccauccuaguauuuucuguuc

SEQ ID NO: 376315 - RNA, 32 nt, Homo Sapiens
uuaaagcaaagucacuucuccaucacaaccag

SEQ ID NO: 376316 - RNA, 32 nt, Homo Sapiens
guguauauguagaccauggccuugaaugucca

SEQ ID NO: 376317 - RNA, 32 nt, Homo Sapiens
gcuugggguucugcuccuuuuacuucaggcga

SEQ ID NO: 376318 - RNA, 32 nt, Homo Sapiens
uuuauauauuuguguauggaaaacacuugaua

SEQ ID NO: 376319 - RNA, 32 nt, Homo Sapiens
uuaacaguggugucaguccggaggaaguccug

SEQ ID NO: 376320 - RNA, 32 nt, Homo Sapiens
cauacuuuuuuuuucucaguacuaucuaacaa

SEQ ID NO: 376321 - RNA, 32 nt, Homo Sapiens
cucucuuuuucaguuggcugacuuccacaccu

SEQ ID NO: 376322 - RNA, 32 nt, Homo Sapiens
uuaaaucacauacuggcauauuuaagcugaau

SEQ ID NO: 376323 - RNA, 32 nt, Homo Sapiens
uccuguaguuacccagcccgcuccagcagugc

SEQ ID NO: 376324 - RNA, 32 nt, Homo Sapiens
ccgcucgcgccccagaggccucauggaguccc

SEQ ID NO: 376325 - RNA, 32 nt, Homo Sapiens
aguuguggggguacagaaugcuaagcugccuu

SEQ ID NO: 376326 - RNA, 32 nt, Homo Sapiens
uuguuuucagauaguuuguuguuaguguauag

SEQ ID NO: 376327 - RNA, 32 nt, Homo Sapiens
uuaauuuauuuucucuuauuucauguacacug

SEQ ID NO: 376328 - RNA, 32 nt, Homo Sapiens
acaguacgugccuggcgcucuuuacguguauu

SEQ ID NO: 376329 - RNA, 32 nt, Homo Sapiens
uaauauuuccugagcaucuacuaaaugcaagg

SEQ ID NO: 376330 - RNA, 32 nt, Homo Sapiens
cgccggagaguugggcucagugcggagcucgg

SEQ ID NO: 376331 - RNA, 28 nt, Homo Sapiens
uuuagaaucacaggaccaagggauaaug

SEQ ID NO: 376332 - RNA, 32 nt, Homo Sapiens
agcuccaaaaacaaaaauauacuuguauaugu

SEQ ID NO: 376333 - RNA, 32 nt, Homo Sapiens
agauauuguuuuaaauuauuuucauuuuaaac

SEQ ID NO: 376334 - RNA, 32 nt, Homo Sapiens
acugugugcacauacacacacacacaccacac

SEQ ID NO: 376335 - RNA, 32 nt, Homo Sapiens
ugcucgccagccccggccccagccauggaaga

SEQ ID NO: 376336 - RNA, 32 nt, Homo Sapiens
gugccccguucacccacccccaggcaagcauc

SEQ ID NO: 376337 - RNA, 32 nt, Homo Sapiens
uuucucaauuuaaaaaguucuauggcaaauuu

SEQ ID NO: 376338 - RNA, 32 nt, Homo Sapiens
gggcagccaggugcccuggugcccaccccugu

SEQ ID NO: 376339 - RNA, 29 nt, Homo Sapiens
cagucugcaauaaagaaugcauugguuuc

SEQ ID NO: 376340 - RNA, 32 nt, Homo Sapiens
cucacuccugugcugcagccaccuugucagga

SEQ ID NO: 376341 - RNA, 32 nt, Homo Sapiens
caggucgcagcuguggcucgggugcuggcagg

SEQ ID NO: 376342 - RNA, 32 nt, Homo Sapiens
ucaguuacgugccagaccuggaccgcauucuc

SEQ ID NO: 376343 - RNA, 32 nt, Homo Sapiens
uuccuugguaaaaagaaaagauucucagaguc

SEQ ID NO: 376344 - RNA, 32 nt, Homo Sapiens
uuccgaaaacaucacuggcgugauguaagaca

SEQ ID NO: 376345 - RNA, 32 nt, Homo Sapiens
gccgucccaggcuccgcccccggaagccucac

SEQ ID NO: 376346 - RNA, 32 nt, Homo Sapiens
uuaagaagugaacuauucagucuuuguauacu

SEQ ID NO: 376347 - RNA, 32 nt, Homo Sapiens
ugguuccggggacaguuagggcggcggaugga

SEQ ID NO: 376348 - RNA, 32 nt, Homo Sapiens
cagucugcaauaaaagcacuuccuaacucugg

SEQ ID NO: 376349 - RNA, 32 nt, Homo Sapiens
ggcuugaaggauuaguccugcuuuguucaacu

SEQ ID NO: 376350 - RNA, 32 nt, Homo Sapiens
uccugguugggaauauucugugaugcucugac

SEQ ID NO: 376351 - RNA, 32 nt, Homo Sapiens
gcccgcugcgcgcgcauguuuccucuuuuccu

SEQ ID NO: 376352 - RNA, 32 nt, Homo Sapiens
aguguuuugaaaauauucacuaacauaauauu

SEQ ID NO: 376353 - RNA, 32 nt, Homo Sapiens
aucauuuucuucccuuucagucauaauaaaug

SEQ ID NO: 376354 - RNA, 32 nt, Homo Sapiens
uaggaauuuacuacauuuugguagucuguuuu

SEQ ID NO: 376355 - RNA, 32 nt, Homo Sapiens
caccuguaaucucagcacuuugggaggccaag

SEQ ID NO: 376356 - RNA, 32 nt, Homo Sapiens
cacuuguaaucccagcacuuugggaggccaag

SEQ ID NO: 376357 - RNA, 32 nt, Homo Sapiens
cccgauucuugcugggacaacaaaauugggaa

SEQ ID NO: 376358 - RNA, 32 nt, Homo Sapiens
auguuaauuucaggcagcauucccuaugggaa

SEQ ID NO: 376359 - RNA, 32 nt, Homo Sapiens
uaagucuuaagugaugccccuuccaaaccauc

SEQ ID NO: 376360 - RNA, 32 nt, Homo Sapiens
gauuuccgcguaggagggacucgggggcaacg

SEQ ID NO: 376361 - RNA, 32 nt, Homo Sapiens
ccuaugcucuacagcuuccagacaucucugcc

SEQ ID NO: 376362 - RNA, 32 nt, Homo Sapiens
agaaaccaguugauugguugcuuccgugcugc

SEQ ID NO: 376363 - RNA, 32 nt, Homo Sapiens
ccuccuccuuccuccgccccaugcccagccuu

SEQ ID NO: 376364 - RNA, 32 nt, Homo Sapiens
cacagcaaggaccggacgcuugcuagccaccc

SEQ ID NO: 376365 - RNA, 32 nt, Homo Sapiens
caaagaacugguuuauuuuauagucagucaaa

SEQ ID NO: 376366 - RNA, 32 nt, Homo Sapiens
aaauaacuuuuuuguuugauaacuugagaauu

SEQ ID NO: 376367 - RNA, 32 nt, Homo Sapiens
cgagacaaugaaacaagacaaugaagcacuga

SEQ ID NO: 376368 - RNA, 32 nt, Homo Sapiens
acacgccagaggaggaggccggggaauggccg

SEQ ID NO: 376369 - RNA, 32 nt, Homo Sapiens
uccugucucugucuuccaacccccaauaauau

SEQ ID NO: 376370 - RNA, 32 nt, Homo Sapiens
ccaagacaacaggcccacuccucuguuaccuc

SEQ ID NO: 376371 - RNA, 32 nt, Homo Sapiens
cuggucaucuucaugucguuuccucucuguau

SEQ ID NO: 376372 - RNA, 32 nt, Homo Sapiens
gccaacucuguucccuucuccuuucaucccag

SEQ ID NO: 376373 - RNA, 32 nt, Homo Sapiens
uuuaauaugcaaacacaggggcccugauguuc

SEQ ID NO: 376374 - RNA, 32 nt, Homo Sapiens
ugauaguuggagcauuuuuuuauuuuuuuaau

SEQ ID NO: 376375 - RNA, 32 nt, Homo Sapiens
ucuauggcucugcggagucccagcagaggcua

SEQ ID NO: 376376 - RNA, 32 nt, Homo Sapiens
uagaacccauggaacccuuguuuaucgccaug

SEQ ID NO: 376377 - RNA, 32 nt, Homo Sapiens
uuuaacguauuggaccugauauuuuuaguggg

SEQ ID NO: 376378 - RNA, 32 nt, Homo Sapiens
aagcuagugagaguauggaacaauggcccaua

SEQ ID NO: 376379 - RNA, 32 nt, Homo Sapiens
cuuggggagcagcagaccugcucugaguccag

SEQ ID NO: 376380 - RNA, 32 nt, Homo Sapiens
agcugccauuaacacaucugguuacugcugua

SEQ ID NO: 376381 - RNA, 32 nt, Homo Sapiens
cacacaguagccaccaggggucucuguuucca

SEQ ID NO: 376382 - RNA, 32 nt, Homo Sapiens
aauuuuaaauuaaauuccagcauauuuuguuu

SEQ ID NO: 376383 - RNA, 32 nt, Homo Sapiens
gcccuauuauuuuaacuuaacaaaauaaauac

SEQ ID NO: 376384 - RNA, 32 nt, Homo Sapiens
agagcaggguaaggaaggaaugugcuagaagu

SEQ ID NO: 376385 - RNA, 32 nt, Homo Sapiens
uccaucacauucaagcugguuuaugucacucc

SEQ ID NO: 376386 - RNA, 32 nt, Homo Sapiens
uaacuuaaaaauuugauagauuaauuucuaaa

SEQ ID NO: 376387 - RNA, 32 nt, Homo Sapiens
auccugcccagcugcugagcaaggcagaugac

SEQ ID NO: 376388 - RNA, 32 nt, Homo Sapiens
gacacaagcacuuuaauggccuggagggacuu

SEQ ID NO: 376389 - RNA, 32 nt, Homo Sapiens
auuucuacagcuuuguagauucuaacauuuau

SEQ ID NO: 376390 - RNA, 32 nt, Homo Sapiens
ccucagcgcgcggcgugugcggugcccgaggc

SEQ ID NO: 376391 - RNA, 32 nt, Homo Sapiens
aggggucgcggcggcucgcgggccugggcugc

SEQ ID NO: 376392 - RNA, 32 nt, Homo Sapiens
gauccaguucccucaucucuggcaggaaagau

SEQ ID NO: 376393 - RNA, 32 nt, Homo Sapiens
uccuggagaaaguccuagagguuaucucagga

SEQ ID NO: 376394 - RNA, 32 nt, Homo Sapiens
aaaccuagcccagcagguuaaucuucacacau

SEQ ID NO: 376395 - RNA, 32 nt, Homo Sapiens
gccccccaggagagggcagaggugguuguccc

SEQ ID NO: 376396 - RNA, 32 nt, Homo Sapiens
uagaaaguugcuuuauuuaaauuuguacugua

SEQ ID NO: 376397 - RNA, 32 nt, Homo Sapiens
gccaggccucugcaggccccagcccuggccuc

SEQ ID NO: 376398 - RNA, 32 nt, Homo Sapiens
gcuacauuuuguauuuuucaaacaaguauaaa

SEQ ID NO: 376399 - RNA, 32 nt, Homo Sapiens
gggccaccucggcugcugcagccugcccagca

SEQ ID NO: 376400 - RNA, 32 nt, Homo Sapiens
aacuauuuucucuuccaaaucuaaguacuaag

SEQ ID NO: 376401 - RNA, 32 nt, Homo Sapiens
cucauuguguguggucauaucuagucacuugc

SEQ ID NO: 376402 - RNA, 32 nt, Homo Sapiens
auagagaaaauauuuuagaauuuaauguuucu

SEQ ID NO: 376403 - RNA, 32 nt, Homo Sapiens
gggacuccaaugacuguugugcucucccccga

SEQ ID NO: 376404 - RNA, 32 nt, Homo Sapiens
gagcuggaagugagagcagaucccuaaccaug

SEQ ID NO: 376405 - RNA, 32 nt, Homo Sapiens
auugggcacgcccuucaccuuaucccccacca

SEQ ID NO: 376406 - RNA, 32 nt, Homo Sapiens
cucuggauucagccuucuuuuucuggacucug

SEQ ID NO: 376407 - RNA, 32 nt, Homo Sapiens
gccagggcggggcugaccugcccgcgaaguug

SEQ ID NO: 376408 - RNA, 32 nt, Homo Sapiens
gcugccagccaggcugcccggcaagcggcgcc

SEQ ID NO: 376409 - RNA, 32 nt, Homo Sapiens
guggcagcugggagcaggccccugcccguggu

SEQ ID NO: 376410 - RNA, 32 nt, Homo Sapiens
caaccuguugugucuuuauuuaauuuuacauc

SEQ ID NO: 376411 - RNA, 32 nt, Homo Sapiens
aucagcugucggcgcgcacucgcucccggccc

SEQ ID NO: 376412 - RNA, 32 nt, Homo Sapiens
ccaggaagugaccacauccucagguuguggug

SEQ ID NO: 376413 - RNA, 32 nt, Homo Sapiens
aaacuaguacuauuauggaauuacucuacugu

SEQ ID NO: 376414 - RNA, 32 nt, Homo Sapiens
uuuggauguauacuuucuuuuaugaaccugau

SEQ ID NO: 376415 - RNA, 32 nt, Homo Sapiens
accucguggcgaauucuuggccucgagggcca

SEQ ID NO: 376416 - RNA, 32 nt, Homo Sapiens
aacuaguuuuaaaaaauauauucuggauuuua

SEQ ID NO: 376417 - RNA, 32 nt, Homo Sapiens
aacacccuugcugugcccuuuaaugggauuga

SEQ ID NO: 376418 - RNA, 32 nt, Homo Sapiens
ugacgauucuuacaauaacgauacaaauuugg

SEQ ID NO: 376419 - RNA, 32 nt, Homo Sapiens
gcacggauauugccuggacacacacacacaca

SEQ ID NO: 376420 - RNA, 32 nt, Homo Sapiens
cuccuagcuagcugcuuggguaaguuauagaa

SEQ ID NO: 376421 - RNA, 32 nt, Homo Sapiens
gucgggcgcuccuuccucagcggcgggaagcu

SEQ ID NO: 376422 - RNA, 32 nt, Homo Sapiens
cagggagacagagggagguaagccaucccccg

SEQ ID NO: 376423 - RNA, 32 nt, Homo Sapiens
aauaaguuagacagaacuuuggcacuuuagaa

SEQ ID NO: 376424 - RNA, 32 nt, Homo Sapiens
cgggcacacgugccgccugaccgggcgacccu

SEQ ID NO: 376425 - RNA, 32 nt, Homo Sapiens
cacauucaguuauguacaguauguaauacuga

SEQ ID NO: 376426 - RNA, 32 nt, Homo Sapiens
uacccggauugaguggagacaccuggaugcug

SEQ ID NO: 376427 - RNA, 32 nt, Homo Sapiens
guggugagaagacuuccccaagccuggcaggg

SEQ ID NO: 376428 - RNA, 32 nt, Homo Sapiens
auaugccccccgcccaucccaugugugaggac

SEQ ID NO: 376429 - RNA, 28 nt, Homo Sapiens
augugaguggcuauaggaguguuuccuu

SEQ ID NO: 376430 - RNA, 32 nt, Homo Sapiens
gagccugucuaaaaaacuacugccccacuuca

SEQ ID NO: 376431 - RNA, 32 nt, Homo Sapiens
uggccauguuuccucuucauugcuggagaaug

SEQ ID NO: 376432 - RNA, 32 nt, Homo Sapiens
caacuuauaaauaacauauuucuucagacuaa

SEQ ID NO: 376433 - RNA, 32 nt, Homo Sapiens
gagcgcccagcgccgcgccgggagaguugaga

SEQ ID NO: 376434 - RNA, 32 nt, Homo Sapiens
uaacuuuuacuuuagguuuagggguacaugug

SEQ ID NO: 376435 - RNA, 32 nt, Homo Sapiens
uuuaagacaauuucuuuuuucuuuugguuuaa

SEQ ID NO: 376436 - RNA, 32 nt, Homo Sapiens
ugaagcacaggaucaaggaauuaggguggucu

SEQ ID NO: 376437 - RNA, 32 nt, Homo Sapiens
gaaaccccgucucuacuaaaaauagaaaaaug

SEQ ID NO: 376438 - RNA, 32 nt, Homo Sapiens
guuuacucuauggaaauagaagcuggagugau

SEQ ID NO: 376439 - RNA, 32 nt, Homo Sapiens
ugaaaauggaaaucugcaguuguuucaguugu

SEQ ID NO: 376440 - RNA, 32 nt, Homo Sapiens
gggaccccuguccacacccacccuauuuauuu

SEQ ID NO: 376441 - RNA, 32 nt, Homo Sapiens
uauauuacaaugcuguauuuuaaaagaaugau

SEQ ID NO: 376442 - RNA, 32 nt, Homo Sapiens
gcacuaggagucaucagaucuaggcuucauca

SEQ ID NO: 376443 - RNA, 32 nt, Homo Sapiens
uugggcugcccccaucucucccaacaaggugu

SEQ ID NO: 376444 - RNA, 32 nt, Homo Sapiens
agaggguugacagcccuuuggaccucaaagga

SEQ ID NO: 376445 - RNA, 32 nt, Homo Sapiens
auuugaccaaaauaaugcugguuaaauuugua

SEQ ID NO: 376446 - RNA, 32 nt, Homo Sapiens
auuuguaaugaagugaauccacuguuuaauca

SEQ ID NO: 376447 - RNA, 32 nt, Homo Sapiens
ggggaauaauuuccuucaggcagcugaaauuc

SEQ ID NO: 376448 - RNA, 32 nt, Homo Sapiens
uagcugccugguuucacuccccgguuuuacgc

SEQ ID NO: 376449 - RNA, 32 nt, Homo Sapiens
guacuggggaagggcugggcgcuuuuccugga

SEQ ID NO: 376450 - RNA, 32 nt, Homo Sapiens
uuuaauuuuguguuuacagucaucucuuguac

SEQ ID NO: 376451 - RNA, 32 nt, Homo Sapiens
uuaaaggcaccacacauguaaaacaguuauua

SEQ ID NO: 376452 - RNA, 32 nt, Homo Sapiens
agaaccugcuucucugaucuguguguuuccuc

SEQ ID NO: 376453 - RNA, 32 nt, Homo Sapiens
ggaaugucuucccacccagccaucacaaaugu

SEQ ID NO: 376454 - RNA, 32 nt, Homo Sapiens
ccccuccuccucagcccucccccacccauuaa

SEQ ID NO: 376455 - RNA, 32 nt, Homo Sapiens
gguuuucugaaacuuaaaaugcugccccgaaa

SEQ ID NO: 376456 - RNA, 32 nt, Homo Sapiens
auccugcugcugcugcugcugcuaaaaacaac

SEQ ID NO: 376457 - RNA, 32 nt, Homo Sapiens
uucuccugcccccaagcaccuccagcggugau

SEQ ID NO: 376458 - RNA, 32 nt, Homo Sapiens
cucacacuucauuuugucccaacagcaucuga

SEQ ID NO: 376459 - RNA, 32 nt, Homo Sapiens
cggagugcccaacauggcggcggccguaaggu

SEQ ID NO: 376460 - RNA, 32 nt, Homo Sapiens
cgcacaugccgcgggcggccaggcaacgugcg

SEQ ID NO: 376461 - RNA, 32 nt, Homo Sapiens
gagcaagacuccaucucaaaaaaauaauaaua

SEQ ID NO: 376462 - RNA, 32 nt, Homo Sapiens
accuaugcaaggaagccccaauaaaaaugaca

SEQ ID NO: 376463 - RNA, 32 nt, Homo Sapiens
cagcaaacagaccuguggccccugcccggcuc

SEQ ID NO: 376464 - RNA, 32 nt, Homo Sapiens
caggaccagaaguccuguucucuucuauggca

SEQ ID NO: 376465 - RNA, 32 nt, Homo Sapiens
ccaccggagggcggcccgugggccgggccuca

SEQ ID NO: 376466 - RNA, 32 nt, Homo Sapiens
ugaaagggccgcggagucgcgugucagggcug

SEQ ID NO: 376467 - RNA, 32 nt, Homo Sapiens
caagguuaucagaaagaucaaauuaaauaaua

SEQ ID NO: 376468 - RNA, 32 nt, Homo Sapiens
gaucccgagccaacuuguuuccuccguuagug

SEQ ID NO: 376469 - RNA, 32 nt, Homo Sapiens
gggaggucaggagguggaagugagaggagauc

SEQ ID NO: 376470 - RNA, 32 nt, Homo Sapiens
uccuuccuuccacuccccucccugccagaguc

SEQ ID NO: 376471 - RNA, 32 nt, Homo Sapiens
gcugggcgcugggcugugcaccgacggcuaac

SEQ ID NO: 376472 - RNA, 32 nt, Homo Sapiens
acccuggguaccaagcucccaggcccuuccuc

SEQ ID NO: 376473 - RNA, 32 nt, Homo Sapiens
gcagaaacugagcccaagaaucugaaagcauu

SEQ ID NO: 376474 - RNA, 32 nt, Homo Sapiens
cuuguggguuucugggguggaaggcagggagg

SEQ ID NO: 376475 - RNA, 32 nt, Homo Sapiens
gcccgggugacagagcgagacucuggcucaaa

SEQ ID NO: 376476 - RNA, 32 nt, Homo Sapiens
ucaugaugcuuggccuggcaggaugacucaaa

SEQ ID NO: 376477 - RNA, 32 nt, Homo Sapiens
ggcagauacucuagaugcuuuauggacaauau

SEQ ID NO: 376478 - RNA, 32 nt, Homo Sapiens
caugccuccccugcaccuggggguacccgcau

SEQ ID NO: 376479 - RNA, 32 nt, Homo Sapiens
uagguucugcuucugcuucucucugcuccacu

SEQ ID NO: 376480 - RNA, 32 nt, Homo Sapiens
guaccgcucccucaguccugugcugcagcccc

SEQ ID NO: 376481 - RNA, 32 nt, Homo Sapiens
auccccaaacucugguuaaauaaaccucuauc

SEQ ID NO: 376482 - RNA, 32 nt, Homo Sapiens
agguggugaaaacaaaccccguguaucucuca

SEQ ID NO: 376483 - RNA, 32 nt, Homo Sapiens
aaaaugugcccauuuuaugguuuccaugcuuu

SEQ ID NO: 376484 - RNA, 32 nt, Homo Sapiens
gccggcggcaggauuagcuggugcugaacuuu

SEQ ID NO: 376485 - RNA, 32 nt, Homo Sapiens
uucuguggggagaggguacuggggaggcagcg

SEQ ID NO: 376486 - RNA, 30 nt, Homo Sapiens
aaauggucucucccugccaauuuugguauc

SEQ ID NO: 376487 - RNA, 32 nt, Homo Sapiens
gcuccauaggagggcugguggcugggaggucg

SEQ ID NO: 376488 - RNA, 32 nt, Homo Sapiens
gugcugggauaccaauggaaguuggcaguuau

SEQ ID NO: 376489 - RNA, 32 nt, Homo Sapiens
cucccugcucagugcuugggcuccacgggcag

SEQ ID NO: 376490 - RNA, 32 nt, Homo Sapiens
ccuccauagcagccuucccuuuagucucuggu

SEQ ID NO: 376491 - RNA, 32 nt, Homo Sapiens
ugucccucgguggccuccccaggccccuggac

SEQ ID NO: 376492 - RNA, 32 nt, Homo Sapiens
ggcuggggagcguucgccguagucuuuggaag

SEQ ID NO: 376493 - RNA, 32 nt, Homo Sapiens
uuacaaaaaauauugcuguuaaaaaacuaaga

SEQ ID NO: 376494 - RNA, 32 nt, Homo Sapiens
gugcccugugaaaucagcucaggccgcguccc

SEQ ID NO: 376495 - RNA, 32 nt, Homo Sapiens
uccuguggcccucuaguccaccccccgcccca

SEQ ID NO: 376496 - RNA, 32 nt, Homo Sapiens
aacugggcuggguaggguugcucagucuuugg

SEQ ID NO: 376497 - RNA, 32 nt, Homo Sapiens
ccuccgcccuccccgcgaugcgcucggccuga

SEQ ID NO: 376498 - RNA, 32 nt, Homo Sapiens
ggggcauauauagaguaaggcuuuuguguauu

SEQ ID NO: 376499 - RNA, 32 nt, Homo Sapiens
aacaaucucucuaucaugauauucccccguug

SEQ ID NO: 376500 - RNA, 32 nt, Homo Sapiens
caaacucagggaagaggaagcuaaagugacga

SEQ ID NO: 376501 - RNA, 32 nt, Homo Sapiens
ucacgcagggccgggaacggccgugccucugg

SEQ ID NO: 376502 - RNA, 32 nt, Homo Sapiens
gauauuuaaggguccccaggcaaagaaugcaa

SEQ ID NO: 376503 - RNA, 32 nt, Homo Sapiens
cagaacagaacgcuugcaucuaccuccucuuc

SEQ ID NO: 376504 - RNA, 32 nt, Homo Sapiens
aucuaaaacacuuaaaauguuagaacguuugg

SEQ ID NO: 376505 - RNA, 32 nt, Homo Sapiens
aauguggguaagacauucaaaccugguuuuga

SEQ ID NO: 376506 - RNA, 32 nt, Homo Sapiens
agccaguaacccggugccuccuccuccccagg

SEQ ID NO: 376507 - RNA, 32 nt, Homo Sapiens
augcuguguaagucugcuuuaauacccucaga

SEQ ID NO: 376508 - RNA, 32 nt, Homo Sapiens
cauuuuauuauguacauauaucaugugcauuc

SEQ ID NO: 376509 - RNA, 32 nt, Homo Sapiens
gauccgcuuccccuuucucccuccucaguugg

SEQ ID NO: 376510 - RNA, 32 nt, Homo Sapiens
ugggcgcccuguaugggaucacuuugauuccu

SEQ ID NO: 376511 - RNA, 32 nt, Homo Sapiens
uuccuagccaagggaaggcaugacagacugua

SEQ ID NO: 376512 - RNA, 32 nt, Homo Sapiens
ggguccggacuuaugaaaauaugcaucaguuu

SEQ ID NO: 376513 - RNA, 32 nt, Homo Sapiens
cgagugguguuggagcgccggaggcuaguggg

SEQ ID NO: 376514 - RNA, 32 nt, Homo Sapiens
aaccugagaugaagaauuuacaauugaagaca

SEQ ID NO: 376515 - RNA, 32 nt, Homo Sapiens
ccucucccugucacucccugaaacacuauuaa

SEQ ID NO: 376516 - RNA, 32 nt, Homo Sapiens
uccagcccugucugcugucuacgugguggguu

SEQ ID NO: 376517 - RNA, 32 nt, Homo Sapiens
cuucagagcccccgccuuugccugcacuccuc

SEQ ID NO: 376518 - RNA, 31 nt, Homo Sapiens
cuugccuucuugggagcuccaagcggcggga

SEQ ID NO: 376519 - RNA, 32 nt, Homo Sapiens
uagcccacagaaauacaaacagccaucagaga

SEQ ID NO: 376520 - RNA, 32 nt, Homo Sapiens
gggcguugaccaagcccgcuuuucugcggguc

SEQ ID NO: 376521 - RNA, 32 nt, Homo Sapiens
uggugccgcaugccuguaaucccagcuacuug

SEQ ID NO: 376522 - RNA, 32 nt, Homo Sapiens
ugucuuugaacugaaaauaaacauggaucuag

SEQ ID NO: 376523 - RNA, 32 nt, Homo Sapiens
aagucacaguggccuuguuggugcccacaggg

SEQ ID NO: 376524 - RNA, 32 nt, Homo Sapiens
aagcccauguaccagcagccaauuggaucuuu

SEQ ID NO: 376525 - RNA, 32 nt, Homo Sapiens
aguuuaauuuccuucagcuguggugauguuga

SEQ ID NO: 376526 - RNA, 32 nt, Homo Sapiens
aauauuggguugaaucuccuggugagauuaua

SEQ ID NO: 376527 - RNA, 32 nt, Homo Sapiens
aacuaggaagacagacgagaaaaaagaaaaca

SEQ ID NO: 376528 - RNA, 32 nt, Homo Sapiens
agauauuugaagaucauguuccucggcuccau

SEQ ID NO: 376529 - RNA, 32 nt, Homo Sapiens
uaggagagaaguguggauuagauucuuccuca

SEQ ID NO: 376530 - RNA, 32 nt, Homo Sapiens
gacauaaaauuccauguuagauaagcauaugu

SEQ ID NO: 376531 - RNA, 32 nt, Homo Sapiens
cugucccuucagcaccacggaccuuggcgccc

SEQ ID NO: 376532 - RNA, 32 nt, Homo Sapiens
uccgccauugagcuccacgguuuacagacaau

SEQ ID NO: 376533 - RNA, 32 nt, Homo Sapiens
gcagauggucugaguucuuguguccugguaau

SEQ ID NO: 376534 - RNA, 32 nt, Homo Sapiens
auaaaauuaugagauugguuuuccuguggcau

SEQ ID NO: 376535 - RNA, 32 nt, Homo Sapiens
cagugggccggccccaggcuccccuggucucc

SEQ ID NO: 376536 - RNA, 32 nt, Homo Sapiens
cugauggugccugacauguguuuguauggggc

SEQ ID NO: 376537 - RNA, 27 nt, Homo Sapiens
ggggcucuucuggucagccccacccug

SEQ ID NO: 376538 - RNA, 32 nt, Homo Sapiens
caaugaacacuggcuuuuuaacaccuuuguuu

SEQ ID NO: 376539 - RNA, 31 nt, Homo Sapiens
aaagccuucaaugaucgcucaacccuuagua

SEQ ID NO: 376540 - RNA, 32 nt, Homo Sapiens
uaaaagggcuccugggguacacaagcccagca

SEQ ID NO: 376541 - RNA, 32 nt, Homo Sapiens
gucuaauugugccuggauuucuccaggacagc

SEQ ID NO: 376542 - RNA, 32 nt, Homo Sapiens
uugacacagucaauagaaugaagaaaauuaga

SEQ ID NO: 376543 - RNA, 32 nt, Homo Sapiens
ugcaaaauuuuucuagcuuccauccuuucucc

SEQ ID NO: 376544 - RNA, 32 nt, Homo Sapiens
cucgaaacuuguuucauaaaucuuucaaaagu

SEQ ID NO: 376545 - RNA, 32 nt, Homo Sapiens
gaugaacaggguucgccccaguccuccugccu

SEQ ID NO: 376546 - RNA, 32 nt, Homo Sapiens
ugcucguaauggcugaauaaacugagcaaagu

SEQ ID NO: 376547 - RNA, 32 nt, Homo Sapiens
uagacgugcccauuuggugcugcaaguacuga

SEQ ID NO: 376548 - RNA, 32 nt, Homo Sapiens
aggaagugaacaggccugacccugaugcccaa

SEQ ID NO: 376549 - RNA, 32 nt, Homo Sapiens
cgcagcgaggggccggucacugcuacggagcc

SEQ ID NO: 376550 - RNA, 32 nt, Homo Sapiens
gauagaaaaaucaagaccauguuaaugaucgu

SEQ ID NO: 376551 - RNA, 32 nt, Homo Sapiens
uuaucccuaaaaugagagaggacugggauuga

SEQ ID NO: 376552 - RNA, 32 nt, Homo Sapiens
uggggguguaauguuaucauauaucacucuac

SEQ ID NO: 376553 - RNA, 32 nt, Homo Sapiens
cuuuggccacaagaauaagcagcaaauaaaca

SEQ ID NO: 376554 - RNA, 32 nt, Homo Sapiens
gcagccgccggggcucggggcugugagcggcc

SEQ ID NO: 376555 - RNA, 32 nt, Homo Sapiens
acccccucaaccccuuccuccucccucugggg

SEQ ID NO: 376556 - RNA, 32 nt, Homo Sapiens
cuggcccgggacuggacgagcaguagauccag

SEQ ID NO: 376557 - RNA, 32 nt, Homo Sapiens
cucauugagugaccuacccaaaaguuacccaa

SEQ ID NO: 376558 - RNA, 32 nt, Homo Sapiens
gcaccaaauugucaaguaaaucugucuaaauu

SEQ ID NO: 376559 - RNA, 32 nt, Homo Sapiens
ugacccucacucagcacccccaccccaggccu

SEQ ID NO: 376560 - RNA, 32 nt, Homo Sapiens
cgguauaagacuuggaggaaaugcagggaccc

SEQ ID NO: 376561 - RNA, 32 nt, Homo Sapiens
cgcucagagcugugucccugaacauccacccu

SEQ ID NO: 376562 - RNA, 32 nt, Homo Sapiens
uaguuaaaguucccuugggaacuagcuacuug

SEQ ID NO: 376563 - RNA, 32 nt, Homo Sapiens
uuuuuggcauauaaguucuuaagaauguccgu

SEQ ID NO: 376564 - RNA, 32 nt, Homo Sapiens
ggcccgggcgcgcgcggucgugugggaguugu

SEQ ID NO: 376565 - RNA, 32 nt, Homo Sapiens
gcugccugccagcugcccuuccccagaucccg

SEQ ID NO: 376566 - RNA, 32 nt, Homo Sapiens
gggauaugacugacaaggaaaggcuguggcca

SEQ ID NO: 376567 - RNA, 32 nt, Homo Sapiens
uagucaaccaucugggggagaaguugcucacu

SEQ ID NO: 376568 - RNA, 32 nt, Homo Sapiens
accagaugauugagucuaccuucuuuccuugg

SEQ ID NO: 376569 - RNA, 32 nt, Homo Sapiens
caauaagguuguauagaaauagauauuucuuu

SEQ ID NO: 376570 - RNA, 32 nt, Homo Sapiens
cuguuacuuuggcacuauucuuguuugccucu

SEQ ID NO: 376571 - RNA, 32 nt, Homo Sapiens
ucagugugacuuccuuucccacccacccccag

SEQ ID NO: 376572 - RNA, 32 nt, Homo Sapiens
gaaucuucuucuuggcagcugcagucugucag

SEQ ID NO: 376573 - RNA, 32 nt, Homo Sapiens
gguugguuuuaaaaucugguaacuccaugaug

SEQ ID NO: 376574 - RNA, 32 nt, Homo Sapiens
gagugugaaaauaaaaaucucuuuucaugcag

SEQ ID NO: 376575 - RNA, 32 nt, Homo Sapiens
guucucaucuucugccacagucucucagauag

SEQ ID NO: 376576 - RNA, 31 nt, Homo Sapiens
ccagacuggcugugccugccugugcccagca

SEQ ID NO: 376577 - RNA, 28 nt, Homo Sapiens
gccauggagggcggcuucggcuccgauu

SEQ ID NO: 376578 - RNA, 32 nt, Homo Sapiens
cagcccagcugcugaccuuguuaaguaaaccu

SEQ ID NO: 376579 - RNA, 32 nt, Homo Sapiens
aaaaauuuucccucccugcccaaggugauugg

SEQ ID NO: 376580 - RNA, 32 nt, Homo Sapiens
uaaccccguugcuuguucugcagcccugucua

SEQ ID NO: 376581 - RNA, 32 nt, Homo Sapiens
ccagcuaaauuaacucagacccaaucaccucu

SEQ ID NO: 376582 - RNA, 32 nt, Homo Sapiens
aaaacccgcgccccacauaccugcaucuuccg

SEQ ID NO: 376583 - RNA, 31 nt, Homo Sapiens
ugccagugccccugccugccgugccaggccc

SEQ ID NO: 376584 - RNA, 32 nt, Homo Sapiens
gucccugcagugccugccuuccacugugaguu

SEQ ID NO: 376585 - RNA, 32 nt, Homo Sapiens
agcugagcgcgggggagaagagugcgcagguc

SEQ ID NO: 376586 - RNA, 32 nt, Homo Sapiens
ggccaggaaggggaggagagugagggccaaga

SEQ ID NO: 376587 - RNA, 32 nt, Homo Sapiens
uucguacugcugcuguuggacaacaggacugg

SEQ ID NO: 376588 - RNA, 32 nt, Homo Sapiens
aaacacuguaauugcuacucagcaaaugugaa

SEQ ID NO: 376589 - RNA, 32 nt, Homo Sapiens
gacauucacauuuaaccuguauacaaguuaua

SEQ ID NO: 376590 - RNA, 32 nt, Homo Sapiens
gagccgcauccacgagcgccuugcgcaccucc

SEQ ID NO: 376591 - RNA, 32 nt, Homo Sapiens
gagcuccuggcgugggcaaggcuggccaagga

SEQ ID NO: 376592 - RNA, 32 nt, Homo Sapiens
cuccuucaaugugccuuuaccuuguagcuuua

SEQ ID NO: 376593 - RNA, 32 nt, Homo Sapiens
uuucguuguaagucacagcucauuguacaucu

SEQ ID NO: 376594 - RNA, 32 nt, Homo Sapiens
uuucucacgcuagcccucuuugguccuccuug

SEQ ID NO: 376595 - RNA, 32 nt, Homo Sapiens
acauauguccccacaagaacucgugcaugaau

SEQ ID NO: 376596 - RNA, 32 nt, Homo Sapiens
aucuacccuccgcuccugggcgcgcucucauu

SEQ ID NO: 376597 - RNA, 32 nt, Homo Sapiens
ugagggcucucggagaaaguguguguauuccu

SEQ ID NO: 376598 - RNA, 32 nt, Homo Sapiens
aggcugguggagaacucuggcuuuuggaagcg

SEQ ID NO: 376599 - RNA, 32 nt, Homo Sapiens
ccuccugugagaucagcaguggcauuagauuc

SEQ ID NO: 376600 - RNA, 32 nt, Homo Sapiens
acccaggaaggccgcccuccccuggcucuguc

SEQ ID NO: 376601 - RNA, 32 nt, Homo Sapiens
aaaguuauagagauuauauugugaugcuggaa

SEQ ID NO: 376602 - RNA, 32 nt, Homo Sapiens
ucggggguacauguuaaaggcuuuuuauauag

SEQ ID NO: 376603 - RNA, 32 nt, Homo Sapiens
auguaagguuuaaaaaaguauuuaucauuaua

SEQ ID NO: 376604 - RNA, 32 nt, Homo Sapiens
gagggcagguccagcucugugggcccuacccu

SEQ ID NO: 376605 - RNA, 32 nt, Homo Sapiens
ugacuccuguguucuggacuugcagaguacau

SEQ ID NO: 376606 - RNA, 32 nt, Homo Sapiens
uccuggggcgccuccccggcccagggccaacu

SEQ ID NO: 376607 - RNA, 32 nt, Homo Sapiens
uccugagcuuuucaggcucuaauggcugaaga

SEQ ID NO: 376608 - RNA, 32 nt, Homo Sapiens
acugggagguggacggaggacacaauaaaagg

SEQ ID NO: 376609 - RNA, 32 nt, Homo Sapiens
aguggucuuauuuuacacacaaugaaacugag

SEQ ID NO: 376610 - RNA, 32 nt, Homo Sapiens
aguggggagcgcggcguggaggugccacccgg

SEQ ID NO: 376611 - RNA, 32 nt, Homo Sapiens
ccugcaggagaccccuggggccuucuccgucc

SEQ ID NO: 376612 - RNA, 32 nt, Homo Sapiens
aagauuuuuuaaauuccuguaaaugugaagau

SEQ ID NO: 376613 - RNA, 32 nt, Homo Sapiens
gcuguguccuccccggcagcagaagauguguc

SEQ ID NO: 376614 - RNA, 32 nt, Homo Sapiens
aagcccuuguugcuguagaugugcgugcaguc

SEQ ID NO: 376615 - RNA, 32 nt, Homo Sapiens
auggcaagcuucucaugguaagaaaggaaugc

SEQ ID NO: 376616 - RNA, 32 nt, Homo Sapiens
auaaauaaauuuaugaaaaguaaccuggcugc

SEQ ID NO: 376617 - RNA, 32 nt, Homo Sapiens
cacuuucggaagcugaggugggcagauagcuu

SEQ ID NO: 376618 - RNA, 32 nt, Homo Sapiens
aacgcugcggccgccugcgcgcggcgggguuu

SEQ ID NO: 376619 - RNA, 32 nt, Homo Sapiens
cagggacacacacgggggccggcauugcuccu

SEQ ID NO: 376620 - RNA, 32 nt, Homo Sapiens
gaaaaugucaauuaguagcuuaccacagauac

SEQ ID NO: 376621 - RNA, 32 nt, Homo Sapiens
cgaaaaauacuagauuuguuuugagaguucuu

SEQ ID NO: 376622 - RNA, 32 nt, Homo Sapiens
caaggagagggagagagagguaagggucuggu

SEQ ID NO: 376623 - RNA, 32 nt, Homo Sapiens
accacaaauguuucacuucuaaauuuuugcag

SEQ ID NO: 376624 - RNA, 32 nt, Homo Sapiens
uguaugcuuuccauccacuucaccuuacccca

SEQ ID NO: 376625 - RNA, 32 nt, Homo Sapiens
ugucucugaggccguagggggcgacgacgaga

SEQ ID NO: 376626 - RNA, 32 nt, Homo Sapiens
agauuaugaaguuaagugaaauuuauggcucu

SEQ ID NO: 376627 - RNA, 32 nt, Homo Sapiens
uuaucagaauagaaacacgaggccccguacuc

SEQ ID NO: 376628 - RNA, 32 nt, Homo Sapiens
caggaaagcuccaugcacauagcccagcaaag

SEQ ID NO: 376629 - RNA, 32 nt, Homo Sapiens
uccucccggagcaagugagggaaggggcagcu

SEQ ID NO: 376630 - RNA, 32 nt, Homo Sapiens
uccaccuggagggaggcaaaggugauggauuc

SEQ ID NO: 376631 - RNA, 32 nt, Homo Sapiens
uuagagcugcacuagccuggcuuucuuauuuu

SEQ ID NO: 376632 - RNA, 32 nt, Homo Sapiens
gucaggcugugccccaccuccagccucaccac

SEQ ID NO: 376633 - RNA, 32 nt, Homo Sapiens
guuccauuucuagauugugaaucuucagauaa

SEQ ID NO: 376634 - RNA, 28 nt, Homo Sapiens
cagucaguggucuccaggauggaggaga

SEQ ID NO: 376635 - RNA, 32 nt, Homo Sapiens
ccgcguucuaacuuaaggcagccuggugauua

SEQ ID NO: 376636 - RNA, 32 nt, Homo Sapiens
guaugucaaacacaaugcugugagcuggaauc

SEQ ID NO: 376637 - RNA, 32 nt, Homo Sapiens
uggagagguuccugggguggauuccuaagcag

SEQ ID NO: 376638 - RNA, 32 nt, Homo Sapiens
ccggacauuuagccgcucgucuucgcagcaca

SEQ ID NO: 376639 - RNA, 32 nt, Homo Sapiens
cccuggcccagccccagcaggcccucagccug

SEQ ID NO: 376640 - RNA, 32 nt, Homo Sapiens
ggcagcucggugugcgcccccgcgagagccgg

SEQ ID NO: 376641 - RNA, 32 nt, Homo Sapiens
ggaucugguguggggaaggcggcgggacucag

SEQ ID NO: 376642 - RNA, 32 nt, Homo Sapiens
augacucaucgcauauuuccuguucacgucca

SEQ ID NO: 376643 - RNA, 32 nt, Homo Sapiens
caacaucuuuaauuaucagggacauggagauu

SEQ ID NO: 376644 - RNA, 32 nt, Homo Sapiens
gggaccuggccccccaccucaugaugcagagc

SEQ ID NO: 376645 - RNA, 32 nt, Homo Sapiens
cgggguggggguggagugggggcuuccaggug

SEQ ID NO: 376646 - RNA, 32 nt, Homo Sapiens
cagaaagcccccagccccacagcccugagaga

SEQ ID NO: 376647 - RNA, 32 nt, Homo Sapiens
gguguaguugcuagcucugugccauccuuggc

SEQ ID NO: 376648 - RNA, 32 nt, Homo Sapiens
gccaggcagggucguguguggguguggggcug

SEQ ID NO: 376649 - RNA, 31 nt, Homo Sapiens
aaauccuguuuggaucaucuaacuggaggcu

SEQ ID NO: 376650 - RNA, 32 nt, Homo Sapiens
aacggcaggacacaacucagcuuagcuuuucg

SEQ ID NO: 376651 - RNA, 32 nt, Homo Sapiens
ucugcgccugcgccgcgcgggauucgcggucc

SEQ ID NO: 376652 - RNA, 30 nt, Homo Sapiens
ucgccgcgcgcgcccucgcagucaccgcca

SEQ ID NO: 376653 - RNA, 32 nt, Homo Sapiens
guuacucucuaaagcauagaaccuguaauuuu

SEQ ID NO: 376654 - RNA, 32 nt, Homo Sapiens
ucuaaaaauuugcaaacugccuucuugucagu

SEQ ID NO: 376655 - RNA, 32 nt, Homo Sapiens
gggccucucacccgccccccagccucccgcuc

SEQ ID NO: 376656 - RNA, 32 nt, Homo Sapiens
uggccuggcccucgggucuucggaggacguag

SEQ ID NO: 376657 - RNA, 32 nt, Homo Sapiens
cccucaggccagcagcacccugcccgccucug

SEQ ID NO: 376658 - RNA, 32 nt, Homo Sapiens
cccaguguugccuuaacagggugucugucgug

SEQ ID NO: 376659 - RNA, 32 nt, Homo Sapiens
guaaaauagucuucuuuuauacuguaaaaaaa

SEQ ID NO: 376660 - RNA, 32 nt, Homo Sapiens
gggaaguccguuagccucucugggccucuguc

SEQ ID NO: 376661 - RNA, 32 nt, Homo Sapiens
ccagaaaaaauauuuguauuuauuuugucuuu

SEQ ID NO: 376662 - RNA, 31 nt, Homo Sapiens
ugcagaaaagaaccacagguauucaguuucu

SEQ ID NO: 376663 - RNA, 32 nt, Homo Sapiens
ugaaaugaaaagccuuccuucuccugaagccu

SEQ ID NO: 376664 - RNA, 32 nt, Homo Sapiens
gcuaaaugaugagaacucaugaacacaaugaa

SEQ ID NO: 376665 - RNA, 32 nt, Homo Sapiens
auguggccagcuccauucuuccacacugcgua

SEQ ID NO: 376666 - RNA, 32 nt, Homo Sapiens
cgggaggcggggguuggcgugccugaggguga

SEQ ID NO: 376667 - RNA, 32 nt, Homo Sapiens
agcagcaccuggggcuccagcugcuggaaucc

SEQ ID NO: 376668 - RNA, 32 nt, Homo Sapiens
agcuccuggacucaccugaggcucccuggggg

SEQ ID NO: 376669 - RNA, 32 nt, Homo Sapiens
uggcuuugaagaaagaaaauguucaacuucau

SEQ ID NO: 376670 - RNA, 32 nt, Homo Sapiens
agggaaagaggagaggcaccugacauauguuc

SEQ ID NO: 376671 - RNA, 32 nt, Homo Sapiens
ugcauuuaucccaagaaaaacagcuuuaaucu

SEQ ID NO: 376672 - RNA, 32 nt, Homo Sapiens
cucugaagaucuggacugaggacccugcuacu

SEQ ID NO: 376673 - RNA, 32 nt, Homo Sapiens
aauugccggccgcggcggcucaugccuguaau

SEQ ID NO: 376674 - RNA, 32 nt, Homo Sapiens
uaugacuauuuaaauuuaaaguaaauuguaug

SEQ ID NO: 376675 - RNA, 32 nt, Homo Sapiens
ccuggaacgcguauccugcuucuguuaagaac

SEQ ID NO: 376676 - RNA, 30 nt, Homo Sapiens
aggggcugucacgcggcgggucccaccucc

SEQ ID NO: 376677 - RNA, 32 nt, Homo Sapiens
uggauaauacugaaucuguuucccuaagugac

SEQ ID NO: 376678 - RNA, 32 nt, Homo Sapiens
aggcauggcucagaucggccacagggcgguac

SEQ ID NO: 376679 - RNA, 32 nt, Homo Sapiens
ccaccaccaucaucaucauugucaucgucauc

SEQ ID NO: 376680 - RNA, 32 nt, Homo Sapiens
gucuccccugguuugugaagugcggaaaacca

SEQ ID NO: 376681 - RNA, 32 nt, Homo Sapiens
uuccaaguuucccuuuuuccagaugggauuau

SEQ ID NO: 376682 - RNA, 32 nt, Homo Sapiens
gauuuuagaggggggaaauuauaggaggaaag

SEQ ID NO: 376683 - RNA, 31 nt, Homo Sapiens
auuauugcaagguuuaugguuguacuaaaca

SEQ ID NO: 376684 - RNA, 32 nt, Homo Sapiens
accacucugugcaccuucuugagggaguucau

SEQ ID NO: 376685 - RNA, 32 nt, Homo Sapiens
ggaacguugguaguccuaagucuguuuuccug

SEQ ID NO: 376686 - RNA, 32 nt, Homo Sapiens
ggcccggcccgugcagcccgcggcccauggug

SEQ ID NO: 376687 - RNA, 32 nt, Homo Sapiens
cgugccaggcacgcgccggggagcuccgggau

SEQ ID NO: 376688 - RNA, 32 nt, Homo Sapiens
ggaguugugggaaauaagaagaaugaaagccu

SEQ ID NO: 376689 - RNA, 32 nt, Homo Sapiens
auaacaaaaaauuuaaaaguaaagaauaugau

SEQ ID NO: 376690 - RNA, 32 nt, Homo Sapiens
uuuugccuuuuaaauuuauacuucagccaggc

SEQ ID NO: 376691 - RNA, 32 nt, Homo Sapiens
gcgcgggcgggugagccgucggggcacagucc

SEQ ID NO: 376692 - RNA, 32 nt, Homo Sapiens
uaacauuagcuaaaacugcuuugaguuguuug

SEQ ID NO: 376693 - RNA, 32 nt, Homo Sapiens
cuucccucucugggccuggcugccgggaucug

SEQ ID NO: 376694 - RNA, 32 nt, Homo Sapiens
gggaaugcggugcgggcggggguccgggagaa

SEQ ID NO: 376695 - RNA, 32 nt, Homo Sapiens
uucugcggggccugaggcaagccauggaguga

SEQ ID NO: 376696 - RNA, 32 nt, Homo Sapiens
uuacaaaaacaaacauagaagaaaauaaaugc

SEQ ID NO: 376697 - RNA, 32 nt, Homo Sapiens
ucuaguggcagagcagcucacacucccuccgc

SEQ ID NO: 376698 - RNA, 32 nt, Homo Sapiens
cauuuucauuggggaucuccauuuggaaucca

SEQ ID NO: 376699 - RNA, 32 nt, Homo Sapiens
accaguagcugaucuuaaggcuuuuuuaaaaa

SEQ ID NO: 376700 - RNA, 32 nt, Homo Sapiens
cucccagccucccuggccccagguggccguca

SEQ ID NO: 376701 - RNA, 32 nt, Homo Sapiens
caacaagagacuuuucugaggaggaacauuug

SEQ ID NO: 376702 - RNA, 32 nt, Homo Sapiens
aucacacuugcuuugucuuguauguuaauugc

SEQ ID NO: 376703 - RNA, 32 nt, Homo Sapiens
aauuauaggauacaauuucaaaucuaggcagc

SEQ ID NO: 376704 - RNA, 32 nt, Homo Sapiens
caccaagcaggagaggaagaaugauuuucuuu

SEQ ID NO: 376705 - RNA, 32 nt, Homo Sapiens
ucgguuucucagagucucauggcaucauaguu

SEQ ID NO: 376706 - RNA, 32 nt, Homo Sapiens
gguuacaaggggcugcugcugcugcugggaau

SEQ ID NO: 376707 - RNA, 32 nt, Homo Sapiens
uugucuguaggccagcacucauccuccacccc

SEQ ID NO: 376708 - RNA, 32 nt, Homo Sapiens
uuacuauucucauauuuauuuaucucucauuc

SEQ ID NO: 376709 - RNA, 32 nt, Homo Sapiens
cugagccccgcgccugggaugccggggaugcg

SEQ ID NO: 376710 - RNA, 32 nt, Homo Sapiens
uagcagaugaaauggacaguaaugugaguuca

SEQ ID NO: 376711 - RNA, 32 nt, Homo Sapiens
cucaaaggggagacagaggcagugcucccugu

SEQ ID NO: 376712 - RNA, 32 nt, Homo Sapiens
agugucaguucuaauggggaaauauauuccau

SEQ ID NO: 376713 - RNA, 32 nt, Homo Sapiens
gauaaacaggacaaaauaguuguacagguuau

SEQ ID NO: 376714 - RNA, 32 nt, Homo Sapiens
cagagguagggccagagacaacucuccugcau

SEQ ID NO: 376715 - RNA, 32 nt, Homo Sapiens
uaacccacuccagcugccuuggguagggugga

SEQ ID NO: 376716 - RNA, 32 nt, Homo Sapiens
acacccuuucccuucauagaucuuuuuucuuu

SEQ ID NO: 376717 - RNA, 32 nt, Homo Sapiens
uuuuuucuuggaaauuauaagaaugauuugau

SEQ ID NO: 376718 - RNA, 32 nt, Homo Sapiens
uaaaaggggcgggacgcgccgcgcucgggaug

SEQ ID NO: 376719 - RNA, 32 nt, Homo Sapiens
ucuggagcaguucaugaccagcccuuugguca

SEQ ID NO: 376720 - RNA, 32 nt, Homo Sapiens
caacaggucugugcccaugcagagugagcagg

SEQ ID NO: 376721 - RNA, 32 nt, Homo Sapiens
caccgcuccgcgggagggaaagccaaagcaug

SEQ ID NO: 376722 - RNA, 32 nt, Homo Sapiens
gguguauguugaauauuuauuugcuaugauau

SEQ ID NO: 376723 - RNA, 32 nt, Homo Sapiens
cuugcaaaaaaguuuucuggaauagaauuaac

SEQ ID NO: 376724 - RNA, 32 nt, Homo Sapiens
uuuuggucauaguggguggauuuguugccaug

SEQ ID NO: 376725 - RNA, 32 nt, Homo Sapiens
caagaagcuuaaaggucguaaauaucaguauc

SEQ ID NO: 376726 - RNA, 32 nt, Homo Sapiens
cugaugaaagacuggaggcugaaggagaacuu

SEQ ID NO: 376727 - RNA, 32 nt, Homo Sapiens
cuccucugaacuugcaccugggccucucugug

SEQ ID NO: 376728 - RNA, 32 nt, Homo Sapiens
agcaacagacuucucaauaaaagcaggucguc

SEQ ID NO: 376729 - RNA, 32 nt, Homo Sapiens
ccauccagaaaauaaaugcugaggggacacaa

SEQ ID NO: 376730 - RNA, 32 nt, Homo Sapiens
gaguucuggcagcacuaguguuagaacaccaa

SEQ ID NO: 376731 - RNA, 32 nt, Homo Sapiens
aaagcaaaguuuuuauucuaaaacagaauaaa

SEQ ID NO: 376732 - RNA, 32 nt, Homo Sapiens
gugugaugauaaacaccacugcuccgggugua

SEQ ID NO: 376733 - RNA, 32 nt, Homo Sapiens
uuauuauauuaagcucuuucugcaguugauau

SEQ ID NO: 376734 - RNA, 32 nt, Homo Sapiens
gaggcccuggugacucugcugcugcagugucu

SEQ ID NO: 376735 - RNA, 32 nt, Homo Sapiens
uggacugccugccggcuuagggaggguugaug

SEQ ID NO: 376736 - RNA, 32 nt, Homo Sapiens
uugcuccugugcuagaugguagccagagaauu

SEQ ID NO: 376737 - RNA, 32 nt, Homo Sapiens
aggccaccagggggcgccagagaaccacagga

SEQ ID NO: 376738 - RNA, 32 nt, Homo Sapiens
gccuugcagacaccauccgugcuccugguaaa

SEQ ID NO: 376739 - RNA, 32 nt, Homo Sapiens
ugagcuccacccaaagcuguuggggauaccac

SEQ ID NO: 376740 - RNA, 32 nt, Homo Sapiens
cagauggacacaggccguuucucauccaguuu

SEQ ID NO: 376741 - RNA, 32 nt, Homo Sapiens
ucaacagugccacuucugcauucucuguucuc

SEQ ID NO: 376742 - RNA, 32 nt, Homo Sapiens
agcauuuauacuugagaagaaauguacaaaua

SEQ ID NO: 376743 - RNA, 32 nt, Homo Sapiens
agccgugugucuagggcccggggugcggaacg

SEQ ID NO: 376744 - RNA, 32 nt, Homo Sapiens
uccucugcucacucuuuuccugcucccaggcu

SEQ ID NO: 376745 - RNA, 32 nt, Homo Sapiens
gggcacugucuccugaggccagugccagcacg

SEQ ID NO: 376746 - RNA, 32 nt, Homo Sapiens
ugagccugucuccuuccuucaauuuucacuuu

SEQ ID NO: 376747 - RNA, 32 nt, Homo Sapiens
agggucagaccguagcgacgcgggaaguccgg

SEQ ID NO: 376748 - RNA, 32 nt, Homo Sapiens
aucagcauuuucucuuuuacuaauauacucau

SEQ ID NO: 376749 - RNA, 32 nt, Homo Sapiens
gguugggccaagggccaggacuucccgucaca

SEQ ID NO: 376750 - RNA, 32 nt, Homo Sapiens
caugaaaugggaugccaggggucagucucuga

SEQ ID NO: 376751 - RNA, 32 nt, Homo Sapiens
ccgccugcucgcguccugggugccgccucuga

SEQ ID NO: 376752 - RNA, 32 nt, Homo Sapiens
gccauacagagauaggagccgaggggacauag

SEQ ID NO: 376753 - RNA, 32 nt, Homo Sapiens
aaaaggccagacagggcggggugugguggcuc

SEQ ID NO: 376754 - RNA, 32 nt, Homo Sapiens
cucaggugcuccugcuggccugcccaagcccu

SEQ ID NO: 376755 - RNA, 32 nt, Homo Sapiens
cugcugggcuauucccugaggacaccucuacc

SEQ ID NO: 376756 - RNA, 32 nt, Homo Sapiens
cuuccucgccuggcagccccugagcggcucag

SEQ ID NO: 376757 - RNA, 32 nt, Homo Sapiens
gaacccgacgccacagccggugacgcggaccc

SEQ ID NO: 376758 - RNA, 30 nt, Homo Sapiens
agaucccaugcucgcuugcucacacacccu

SEQ ID NO: 376759 - RNA, 32 nt, Homo Sapiens
ccaucacacauguucagaaagggccaaauucc

SEQ ID NO: 376760 - RNA, 32 nt, Homo Sapiens
acacagcgcauggagggcaucuacacacauac

SEQ ID NO: 376761 - RNA, 32 nt, Homo Sapiens
cuauucccauucucuuuuacaaaacuaguuuu

SEQ ID NO: 376762 - RNA, 32 nt, Homo Sapiens
gguggucuacccccggccccgcuccugcccau

SEQ ID NO: 376763 - RNA, 32 nt, Homo Sapiens
uuuuuauauugaggaacaauauuggguguuug

SEQ ID NO: 376764 - RNA, 32 nt, Homo Sapiens
gaauaaugcccccaggccccagguuuugacau

SEQ ID NO: 376765 - RNA, 32 nt, Homo Sapiens
gcgcauccggaguuguucauuccuccugucug

SEQ ID NO: 376766 - RNA, 32 nt, Homo Sapiens
gauucauuucccaaauuccccagacugaaaau

SEQ ID NO: 376767 - RNA, 32 nt, Homo Sapiens
gucagacaggcugcccuagagccccacccagu

SEQ ID NO: 376768 - RNA, 30 nt, Homo Sapiens
auggaggacucugccacccacucuugggaa

SEQ ID NO: 376769 - RNA, 32 nt, Homo Sapiens
ugcggccuucggcaagcgacugagauggcgag

SEQ ID NO: 376770 - RNA, 31 nt, Homo Sapiens
auuucagaguagaaaaaaugcuuauuauuuu

SEQ ID NO: 376771 - RNA, 32 nt, Homo Sapiens
cucguguucuuugucgaaggccuguggugaga

SEQ ID NO: 376772 - RNA, 32 nt, Homo Sapiens
gggauauguuuauuaguguaagaguaucacug

SEQ ID NO: 376773 - RNA, 32 nt, Homo Sapiens
aguugaaaaucauaggcaccuuuuacugugau

SEQ ID NO: 376774 - RNA, 30 nt, Homo Sapiens
gcugaagccuccgagaugccggcgcguacc

SEQ ID NO: 376775 - RNA, 32 nt, Homo Sapiens
cggcgguggcgcggcggagacccggcugguau

SEQ ID NO: 376776 - RNA, 32 nt, Homo Sapiens
gaggagagaagcuggacuccaggcaugaccca

SEQ ID NO: 376777 - RNA, 32 nt, Homo Sapiens
ucucagggguaccccaccuacuuagggaucug

SEQ ID NO: 376778 - RNA, 32 nt, Homo Sapiens
ugugaugucuguagucaguuguuuacaaacuc

SEQ ID NO: 376779 - RNA, 32 nt, Homo Sapiens
uugaagaggauauucuucucuugcuuuauacu

SEQ ID NO: 376780 - RNA, 32 nt, Homo Sapiens
gaaacuugugaaugaucugcugauuugugcua

SEQ ID NO: 376781 - RNA, 32 nt, Homo Sapiens
auuguuucaaggauuuugagucauaggucugu

SEQ ID NO: 376782 - RNA, 32 nt, Homo Sapiens
uucauuaccguguaccuuucccauugugguca

SEQ ID NO: 376783 - RNA, 32 nt, Homo Sapiens
cuugaaaguauuuugugacauuguuauguaca

SEQ ID NO: 376784 - RNA, 32 nt, Homo Sapiens
caugggccaagagccgccguggcuauaccugg

SEQ ID NO: 376785 - RNA, 32 nt, Homo Sapiens
cccucgugguggaaacuuuucuuaaaaaguua

SEQ ID NO: 376786 - RNA, 32 nt, Homo Sapiens
gaggggcggaggggaccgcgucgcggaggaga

SEQ ID NO: 376787 - RNA, 32 nt, Homo Sapiens
uccuguuggcagcaccuagagagagcaucuga

SEQ ID NO: 376788 - RNA, 32 nt, Homo Sapiens
uuuccccugucccccaaccccauccccaccuc

SEQ ID NO: 376789 - RNA, 32 nt, Homo Sapiens
cugaagaggcaguggcgcccgcggccgcagcg

SEQ ID NO: 376790 - RNA, 32 nt, Homo Sapiens
aacuaucaaauuauaggcaaccacugacuaga

SEQ ID NO: 376791 - RNA, 32 nt, Homo Sapiens
cuucagcccuccccaguccuccccagccuucu

SEQ ID NO: 376792 - RNA, 32 nt, Homo Sapiens
ucuggguaaugaucaaagaugccugaaguguu

SEQ ID NO: 376793 - RNA, 32 nt, Homo Sapiens
agccgccgcccggagcugcccuuuccucuucg

SEQ ID NO: 376794 - RNA, 32 nt, Homo Sapiens
gggcggggcuccugugcugcugcgcgcgcuuc

SEQ ID NO: 376795 - RNA, 32 nt, Homo Sapiens
cugccugcgccgccggccgggcaugaguuagu

SEQ ID NO: 376796 - RNA, 32 nt, Homo Sapiens
cuugggcaaaaauacaguccaauggggaguau

SEQ ID NO: 376797 - RNA, 32 nt, Homo Sapiens
cucgaaucaucccacuuccucagccccaucug

SEQ ID NO: 376798 - RNA, 32 nt, Homo Sapiens
cuuggucugaagaagaccucaggacucacauc

SEQ ID NO: 376799 - RNA, 30 nt, Homo Sapiens
gacccgccgcccgugccgccgccaugguga

SEQ ID NO: 376800 - RNA, 32 nt, Homo Sapiens
aaugauuucuguggaaauacagaugaggauuu

SEQ ID NO: 376801 - RNA, 32 nt, Homo Sapiens
gcagaggucagaaggggugucugggaccugga

SEQ ID NO: 376802 - RNA, 32 nt, Homo Sapiens
uagguccugguuuaaagcaagcggaaacacca

SEQ ID NO: 376803 - RNA, 32 nt, Homo Sapiens
uugugacuuugaauuugacucuauuauuucac

SEQ ID NO: 376804 - RNA, 32 nt, Homo Sapiens
ucgcgccuccgcguccacccagcccaggagga

SEQ ID NO: 376805 - RNA, 32 nt, Homo Sapiens
uagcaaaaaaaauuuuuuuuuauauuugcaca

SEQ ID NO: 376806 - RNA, 32 nt, Homo Sapiens
caauugcaacaaaagcaaaaaauugacaaaug

SEQ ID NO: 376807 - RNA, 32 nt, Homo Sapiens
ugcccuucuucgcugacuccgccccgcaucug

SEQ ID NO: 376808 - RNA, 32 nt, Homo Sapiens
acuugauaauuucuucccauucuuguacaaua

SEQ ID NO: 376809 - RNA, 32 nt, Homo Sapiens
agaagaaaaaauuugcauuuuggaaaauuggg

SEQ ID NO: 376810 - RNA, 32 nt, Homo Sapiens
uaguguuuagguucuuuuuuuuuucaggaaua

SEQ ID NO: 376811 - RNA, 31 nt, Homo Sapiens
gccucgccccuuccagcuccaagggcuacau

SEQ ID NO: 376812 - RNA, 32 nt, Homo Sapiens
aagaggacagugaaugaacauggcauuacuuu

SEQ ID NO: 376813 - RNA, 32 nt, Homo Sapiens
ggggaugggaagcucaugagagaaggaaauau

SEQ ID NO: 376814 - RNA, 32 nt, Homo Sapiens
agggaaagugugaagaauaaaguagaucugag

SEQ ID NO: 376815 - RNA, 32 nt, Homo Sapiens
guaaacugagaagcuaaguuaacugguauuuu

SEQ ID NO: 376816 - RNA, 32 nt, Homo Sapiens
auaauuugagcuguugagcagaugagaaguca

SEQ ID NO: 376817 - RNA, 32 nt, Homo Sapiens
gaccuggcucugcugcucugaagcaccggagu

SEQ ID NO: 376818 - RNA, 32 nt, Homo Sapiens
acuccaaagagauaggaaaacuugccgccucu

SEQ ID NO: 376819 - RNA, 32 nt, Homo Sapiens
aagggagggugacaugcuggcuuuugugccca

SEQ ID NO: 376820 - RNA, 32 nt, Homo Sapiens
cuccugucuuauagauuuuauauccucuuuca

SEQ ID NO: 376821 - RNA, 32 nt, Homo Sapiens
guaaucaagaaaggcuggaaaacuacugaaaa

SEQ ID NO: 376822 - RNA, 32 nt, Homo Sapiens
cauacuggguaguccaugucugauuguaauug

SEQ ID NO: 376823 - RNA, 32 nt, Homo Sapiens
gccacagacacccaccgccaccccggcugggu

SEQ ID NO: 376824 - RNA, 32 nt, Homo Sapiens
guugggcucgcggcgagcggacggggucgagu

SEQ ID NO: 376825 - RNA, 32 nt, Homo Sapiens
cuuggaaggagacaggaauggggcgaggaagg

SEQ ID NO: 376826 - RNA, 32 nt, Homo Sapiens
gagcccggguccagcccugccacccaggcccc

SEQ ID NO: 376827 - RNA, 32 nt, Homo Sapiens
aagcauuugcugaguucuugcuauaugccagg

SEQ ID NO: 376828 - RNA, 32 nt, Homo Sapiens
cccagccccagcuccuagagccaggcccgggc

SEQ ID NO: 376829 - RNA, 32 nt, Homo Sapiens
cugcuugccugccucggagaggacagaggccu

SEQ ID NO: 376830 - RNA, 32 nt, Homo Sapiens
caaacucugccaaauuuguggaacuaugaaau

SEQ ID NO: 376831 - RNA, 32 nt, Homo Sapiens
ugagugggccuagccccuccccccuuuucucc

SEQ ID NO: 376832 - RNA, 29 nt, Homo Sapiens
gcagcccggggacagaggccagcugggau

SEQ ID NO: 376833 - RNA, 32 nt, Homo Sapiens
gguguucaggugagccgggcaaggcugccucc

SEQ ID NO: 376834 - RNA, 32 nt, Homo Sapiens
cggaaggcuaauggggcacccuggacaaagaa

SEQ ID NO: 376835 - RNA, 32 nt, Homo Sapiens
ucacaaacuaaauuauuguauauucauauaau

SEQ ID NO: 376836 - RNA, 32 nt, Homo Sapiens
uuuaguucuaucuauuuagaaauauguaaaac

SEQ ID NO: 376837 - RNA, 32 nt, Homo Sapiens
aucuuucaugguacuaguguuuuuuagauaca

SEQ ID NO: 376838 - RNA, 32 nt, Homo Sapiens
cccaaagccggauucuuaauucucugcaacac

SEQ ID NO: 376839 - RNA, 32 nt, Homo Sapiens
gagagguaauuuauuggaaugaacuaacugac

SEQ ID NO: 376840 - RNA, 32 nt, Homo Sapiens
aagccuuaugaguguggccagugugggaaauc

SEQ ID NO: 376841 - RNA, 32 nt, Homo Sapiens
ggccgcggcugugcccucuccuacuccucacc

SEQ ID NO: 376842 - RNA, 32 nt, Homo Sapiens
ugggguguccccagccagaccugcgcguccug

SEQ ID NO: 376843 - RNA, 32 nt, Homo Sapiens
uauuguaauaauauguaucauaaaauaguugu

SEQ ID NO: 376844 - RNA, 32 nt, Homo Sapiens
aaguguguucuucucauucuaucggugccaca

SEQ ID NO: 376845 - RNA, 32 nt, Homo Sapiens
gcccccagccccacacaagaugucagaggauu

SEQ ID NO: 376846 - RNA, 32 nt, Homo Sapiens
uccuuccucugucucccugucacuaaugugag

SEQ ID NO: 376847 - RNA, 32 nt, Homo Sapiens
ucaugaaacaauuauugagcaucuuuauuuaa

SEQ ID NO: 376848 - RNA, 32 nt, Homo Sapiens
aagauggaaaauugcaauaacccaugcacuga

SEQ ID NO: 376849 - RNA, 32 nt, Homo Sapiens
aauagcacauucaguguauucagugaugucau

SEQ ID NO: 376850 - RNA, 32 nt, Homo Sapiens
aagaauacugucuauaaagaugucuagaauaa

SEQ ID NO: 376851 - RNA, 32 nt, Homo Sapiens
guaaguuaaacacuuaacauuuuuuaggucug

SEQ ID NO: 376852 - RNA, 32 nt, Homo Sapiens
uagcugggacuacaggugcgcgccaccgugcc

SEQ ID NO: 376853 - RNA, 32 nt, Homo Sapiens
aaaauugugaacuaaggcccccugcccccuuu

SEQ ID NO: 376854 - RNA, 32 nt, Homo Sapiens
cgaggucggcgcgcagcuccgccgcgggucgc

SEQ ID NO: 376855 - RNA, 32 nt, Homo Sapiens
gcguccggccucagcccucuuccuccccauca

SEQ ID NO: 376856 - RNA, 32 nt, Homo Sapiens
gggacgccgggagaccccggccguccuuuauc

SEQ ID NO: 376857 - RNA, 32 nt, Homo Sapiens
acauuuaaaaauuuaaaaauugaagugcaaaa

SEQ ID NO: 376858 - RNA, 32 nt, Homo Sapiens
cacggaguuccugagcccuuucuguagugggg

SEQ ID NO: 376859 - RNA, 32 nt, Homo Sapiens
aagcuauagucauagauuucuuccagaaacua

SEQ ID NO: 376860 - RNA, 32 nt, Homo Sapiens
gcggaugcagguuuuguggggccugggcuucu

SEQ ID NO: 376861 - RNA, 32 nt, Homo Sapiens
cacaggccauggagaagcugguggggaccaga

SEQ ID NO: 376862 - RNA, 32 nt, Homo Sapiens
aaagcccgcgcgcagcugcaucccgcauccag

SEQ ID NO: 376863 - RNA, 32 nt, Homo Sapiens
cugcgcccgcggcuccccagugccccgagugc

SEQ ID NO: 376864 - RNA, 32 nt, Homo Sapiens
uuugcaaucacguauuuuuaaauuaaguaugu

SEQ ID NO: 376865 - RNA, 32 nt, Homo Sapiens
cugucucuguucuccuuggcguuuccuucaug

SEQ ID NO: 376866 - RNA, 32 nt, Homo Sapiens
agugggagccccacggaccggaccccauuucu

SEQ ID NO: 376867 - RNA, 32 nt, Homo Sapiens
cguugucagggagugagugcuccaucaucggg

SEQ ID NO: 376868 - RNA, 32 nt, Homo Sapiens
uguggccuagcaggacucccccugcaguucuu

SEQ ID NO: 376869 - RNA, 32 nt, Homo Sapiens
cucugcucaccccucccucacuccaugggcaa

SEQ ID NO: 376870 - RNA, 32 nt, Homo Sapiens
gggcuuacagagaggagaggggguacgggcag

SEQ ID NO: 376871 - RNA, 32 nt, Homo Sapiens
ccagaaugaagaugagaaggugaauauaauca

SEQ ID NO: 376872 - RNA, 32 nt, Homo Sapiens
uuccguuuucuuugaaggaucagaaguguuua

SEQ ID NO: 376873 - RNA, 32 nt, Homo Sapiens
gaccaaaauguaaaagauuacaugacaaacug

SEQ ID NO: 376874 - RNA, 32 nt, Homo Sapiens
ugcccugggcuggcaacaccauucuggccuug

SEQ ID NO: 376875 - RNA, 32 nt, Homo Sapiens
uguggauggagucggguauccugacuguugga

SEQ ID NO: 376876 - RNA, 32 nt, Homo Sapiens
cugauucaggacccggggaagccaggggcaug

SEQ ID NO: 376877 - RNA, 32 nt, Homo Sapiens
acauccacccucugggguguggccaggaaaag

SEQ ID NO: 376878 - RNA, 32 nt, Homo Sapiens
uguggcacgcuguccggcgaaacuacaaccag

SEQ ID NO: 376879 - RNA, 32 nt, Homo Sapiens
ugcuaggccagcccugcaggggcccccaggca

SEQ ID NO: 376880 - RNA, 32 nt, Homo Sapiens
uguaacucaccuaaagacccaagaccugcgac

SEQ ID NO: 376881 - RNA, 32 nt, Homo Sapiens
gggcaaugaaacccugaucauguuguugaugg

SEQ ID NO: 376882 - RNA, 32 nt, Homo Sapiens
ugcauuuguugaccuugcacuccaacuauagu

SEQ ID NO: 376883 - RNA, 32 nt, Homo Sapiens
gcccucgaggcccucacagaugucuaggcagg

SEQ ID NO: 376884 - RNA, 32 nt, Homo Sapiens
gcccacccagccaaaaauacagcugggcugaa

SEQ ID NO: 376885 - RNA, 32 nt, Homo Sapiens
gaccccugugcggugcggagggggcggcggcc

SEQ ID NO: 376886 - RNA, 32 nt, Homo Sapiens
agggcucuggggaacuggaaaaggggguuugu

SEQ ID NO: 376887 - RNA, 32 nt, Homo Sapiens
ggagggcuugguaaaacacagauuuuugggcu

SEQ ID NO: 376888 - RNA, 32 nt, Homo Sapiens
guggagggugggaagagaagggagucagcucu

SEQ ID NO: 376889 - RNA, 32 nt, Homo Sapiens
cuuacaauuuuucauuuuucugaugaagauuu

SEQ ID NO: 376890 - RNA, 32 nt, Homo Sapiens
ccucauccggcuuugacccccauccuugcaga

SEQ ID NO: 376891 - RNA, 32 nt, Homo Sapiens
cuugggaacagaugcugcuuguguugcucaga

SEQ ID NO: 376892 - RNA, 32 nt, Homo Sapiens
agcucugcagggugggggcaauugaaggccca

SEQ ID NO: 376893 - RNA, 32 nt, Homo Sapiens
gcccggcgcgccccgcccccgcuguagaaagg

SEQ ID NO: 376894 - RNA, 32 nt, Homo Sapiens
caauggucaagcgugcagcuuguucagcgguu

SEQ ID NO: 376895 - RNA, 32 nt, Homo Sapiens
ccggaggcugcggcugcagaaguaccgcugcg

SEQ ID NO: 376896 - RNA, 32 nt, Homo Sapiens
ugcauccuaucagauuguugagguggguguga

SEQ ID NO: 376897 - RNA, 32 nt, Homo Sapiens
gugggggucucagggucuuaggugauacggga

SEQ ID NO: 376898 - RNA, 32 nt, Homo Sapiens
cagcgucggccacucugucgguccgcugaaug

SEQ ID NO: 376899 - RNA, 32 nt, Homo Sapiens
agaccggcucugggagaauggguuucauccca

SEQ ID NO: 376900 - RNA, 30 nt, Homo Sapiens
cuccuacuccucaccgcgcgcgcgcgggga

SEQ ID NO: 376901 - RNA, 32 nt, Homo Sapiens
uguccccggggcccccgugaggaggcggcggc

SEQ ID NO: 376902 - RNA, 32 nt, Homo Sapiens
ccgcagccgccgcagcagcagcagccgccgcc

SEQ ID NO: 376903 - RNA, 32 nt, Homo Sapiens
cccugcgcggggaggagaaccagcggggccgc

SEQ ID NO: 376904 - RNA, 32 nt, Homo Sapiens
aucuugcccucccccuccucccaccagcuuua

SEQ ID NO: 376905 - RNA, 32 nt, Homo Sapiens
gaaucuugauaaacacuuaauauuugggccug

SEQ ID NO: 376906 - RNA, 32 nt, Homo Sapiens
ucccuggccccucccaccgcccgccccccuug

SEQ ID NO: 376907 - RNA, 32 nt, Homo Sapiens
ccgcugcugcgcaccgcucccgggcucccucc

SEQ ID NO: 376908 - RNA, 32 nt, Homo Sapiens
cgccguggauuucaguuuuucugacuguuaca

SEQ ID NO: 376909 - RNA, 32 nt, Homo Sapiens
gcgguggcggcgggaccauggaggcggcgguc

SEQ ID NO: 376910 - RNA, 32 nt, Homo Sapiens
aagauguaaaagauuuguuuaacaucaauaaa

SEQ ID NO: 376911 - RNA, 32 nt, Homo Sapiens
ggggagcccggcggcucugggaagcucacucc

SEQ ID NO: 376912 - RNA, 32 nt, Homo Sapiens
uacugucucuacaguuuugccuuuuccaaaau

SEQ ID NO: 376913 - RNA, 32 nt, Homo Sapiens
cucacugcaaccuccgccucccagguucacgc

SEQ ID NO: 376914 - RNA, 32 nt, Homo Sapiens
gguugggagguggaggcccagcaucccgcgca

SEQ ID NO: 376915 - RNA, 32 nt, Homo Sapiens
aggcuguccuccccgccucucugcagccuuuc

SEQ ID NO: 376916 - RNA, 32 nt, Homo Sapiens
gagcucaaaauauuuuugcucuuugcaauggu

SEQ ID NO: 376917 - RNA, 32 nt, Homo Sapiens
agcagaaaaugaacacauugcaggggccagug

SEQ ID NO: 376918 - RNA, 32 nt, Homo Sapiens
ugcuguccuuuuuaaccuguguuguccuagac

SEQ ID NO: 376919 - RNA, 32 nt, Homo Sapiens
ucugcuggggagggacugggggugcuucaggg

SEQ ID NO: 376920 - RNA, 32 nt, Homo Sapiens
uuucacauuuuucucuuuaucaaagaaaccua

SEQ ID NO: 376921 - RNA, 32 nt, Homo Sapiens
uccccucccucgcgcugucauucaccccgcuc

SEQ ID NO: 376922 - RNA, 32 nt, Homo Sapiens
ucgcuggcucugcugcugccgccggcgaagga

SEQ ID NO: 376923 - RNA, 32 nt, Homo Sapiens
agaugccauuugucuguuucauuuucagacuc

SEQ ID NO: 376924 - RNA, 32 nt, Homo Sapiens
gagguggaagccagaguggggcugggaccacc

SEQ ID NO: 376925 - RNA, 32 nt, Homo Sapiens
cucccagcuccgucacuagcagggcgaccccc

SEQ ID NO: 376926 - RNA, 32 nt, Homo Sapiens
aggcuagaacagagaagcccuuacuccugguu

SEQ ID NO: 376927 - RNA, 32 nt, Homo Sapiens
agggugcgcgccgagccccgguccggccaggc

SEQ ID NO: 376928 - RNA, 31 nt, Homo Sapiens
agaggggagccccaggacccauuaagccacc

SEQ ID NO: 376929 - RNA, 32 nt, Homo Sapiens
ugggcaggaaaauggaagaaagaguggggugg

SEQ ID NO: 376930 - RNA, 32 nt, Homo Sapiens
caacauggugaaaucucaucuguacuaaaaau

SEQ ID NO: 376931 - RNA, 32 nt, Homo Sapiens
gugaaauacacuuuucccucacuacgacugcu

SEQ ID NO: 376932 - RNA, 32 nt, Homo Sapiens
uagacaggcagaccauggcagaguucucccag

SEQ ID NO: 376933 - RNA, 32 nt, Homo Sapiens
uuuucuggggaguuuggcuguuguggugaagg

SEQ ID NO: 376934 - RNA, 32 nt, Homo Sapiens
uuaucuugugcacaugauacaaaauauguucc

SEQ ID NO: 376935 - RNA, 32 nt, Homo Sapiens
aggcuuggggcccccgucugcugcuggacgca

SEQ ID NO: 376936 - RNA, 32 nt, Homo Sapiens
uuuauuuacugccacgcuacugauauucagac

SEQ ID NO: 376937 - RNA, 32 nt, Homo Sapiens
guuaguccucucccggccgccgucgccuccga

SEQ ID NO: 376938 - RNA, 32 nt, Homo Sapiens
agugggguggagaggagaaaggacggggccuu

SEQ ID NO: 376939 - RNA, 32 nt, Homo Sapiens
uggaaaucuagacaagaagagaauccauggau

SEQ ID NO: 376940 - RNA, 32 nt, Homo Sapiens
gucuuauccuuuuuuuuuuuuaaaaaaaaaac

SEQ ID NO: 376941 - RNA, 32 nt, Homo Sapiens
ggccaggcgcgguggcucacgccuguaauccc

SEQ ID NO: 376942 - RNA, 32 nt, Homo Sapiens
agccaggcacgguggcucacgccuguaauccc

SEQ ID NO: 376943 - RNA, 32 nt, Homo Sapiens
ggcuaggugcgguggcucaugccuguaauccu

SEQ ID NO: 376944 - RNA, 32 nt, Homo Sapiens
cugccucuggguccauucugugggccacucuc

SEQ ID NO: 376945 - RNA, 29 nt, Homo Sapiens
agguuaucgggacagagguuccggauaac

SEQ ID NO: 376946 - RNA, 32 nt, Homo Sapiens
uccucuuacugcaaguuuaucuggguacuuuu

SEQ ID NO: 376947 - RNA, 32 nt, Homo Sapiens
caggcagagaguacagacugcagacauucuca

SEQ ID NO: 376948 - RNA, 32 nt, Homo Sapiens
caccuggccuuuucuuuuuuauucuuugaccu

SEQ ID NO: 376949 - RNA, 32 nt, Homo Sapiens
uggacucucuguuuuuaaaaccuucugaacca

SEQ ID NO: 376950 - RNA, 32 nt, Homo Sapiens
gauuuaguuauacauaccuuaauaguuuuaua

SEQ ID NO: 376951 - RNA, 32 nt, Homo Sapiens
gucuaauuuacauaaucuauguuucuuguuca

SEQ ID NO: 376952 - RNA, 32 nt, Homo Sapiens
gugaacacacucagcagcccccugcccgaccc

SEQ ID NO: 376953 - RNA, 32 nt, Homo Sapiens
auuuucaacccuuaaucugaaaacagaagaca

SEQ ID NO: 376954 - RNA, 32 nt, Homo Sapiens
gcuugguaaggggacuguuugcagagacauag

SEQ ID NO: 376955 - RNA, 32 nt, Homo Sapiens
aauuagucgugugugguggcgcgugccuguaa

SEQ ID NO: 376956 - RNA, 32 nt, Homo Sapiens
ucaggucuuuuccaucuucaguuucuaugacu

SEQ ID NO: 376957 - RNA, 32 nt, Homo Sapiens
aucaugaacucuucuuuaaguuuuuugaaccu

SEQ ID NO: 376958 - RNA, 31 nt, Homo Sapiens
auggcguggcacugcauccuugguucuugcu

SEQ ID NO: 376959 - RNA, 30 nt, Homo Sapiens
uauuaggccguucuuggauugcuauaaaga

SEQ ID NO: 376960 - RNA, 32 nt, Homo Sapiens
aaauacaaaaauauaaagaaaugacugaaagu

SEQ ID NO: 376961 - RNA, 31 nt, Homo Sapiens
uuuggggggagaaguaaccaggcggggggag

SEQ ID NO: 376962 - RNA, 32 nt, Homo Sapiens
uuugcuguggcagcugcuggagcggcggccgc

SEQ ID NO: 376963 - RNA, 32 nt, Homo Sapiens
auagaaccaacuugaaaagcuggccacagcuu

SEQ ID NO: 376964 - RNA, 32 nt, Homo Sapiens
gugagccagcucaagacuuugcucuccaccag

SEQ ID NO: 376965 - RNA, 32 nt, Homo Sapiens
cagcccgccucggccacccccaccccccggga

SEQ ID NO: 376966 - RNA, 32 nt, Homo Sapiens
gggaccuugccagcuggggcuggggauggugc

SEQ ID NO: 376967 - RNA, 32 nt, Homo Sapiens
acauucaaagauuuucugauugacaauugguu

SEQ ID NO: 376968 - RNA, 32 nt, Homo Sapiens
cucagaugaagaggaugacagugacuuagaug

SEQ ID NO: 376969 - RNA, 32 nt, Homo Sapiens
uuacuggugugagccaccacggccagcugcua

SEQ ID NO: 376970 - RNA, 32 nt, Homo Sapiens
gccagggggagcugggaugcagugggagaggg

SEQ ID NO: 376971 - RNA, 32 nt, Homo Sapiens
cacccgcuguuccgcggcagcggcgagacaug

SEQ ID NO: 376972 - RNA, 32 nt, Homo Sapiens
guuucgcuuuccugcgcagagucugcggaggg

SEQ ID NO: 376973 - RNA, 32 nt, Homo Sapiens
ggccuucccucacaccaucuccuuccagggga

SEQ ID NO: 376974 - RNA, 32 nt, Homo Sapiens
uucgcccacuuuuugaugggguuguuuguuuu

SEQ ID NO: 376975 - RNA, 32 nt, Homo Sapiens
cuuaauuuaaacaguuauugcaugaaguagcg

SEQ ID NO: 376976 - RNA, 32 nt, Homo Sapiens
auucacgcuccagccuccuucuugguugucau

SEQ ID NO: 376977 - RNA, 32 nt, Homo Sapiens
cccacugagaggauggagguguccgcacagcu

SEQ ID NO: 376978 - RNA, 32 nt, Homo Sapiens
cuuauguaaaauggugcaguauuugcauauaa

SEQ ID NO: 376979 - RNA, 32 nt, Homo Sapiens
uggcccugccccacccaccuuuccucccaccc

SEQ ID NO: 376980 - RNA, 32 nt, Homo Sapiens
gaaauggguaguccccgcggcgucucccaguc

SEQ ID NO: 376981 - RNA, 32 nt, Homo Sapiens
cacuacacuccagccugggugacaaagcaaga

SEQ ID NO: 376982 - RNA, 32 nt, Homo Sapiens
guaacuucuaaaauauaacaauacuaaauauc

SEQ ID NO: 376983 - RNA, 32 nt, Homo Sapiens
ucugcagaacgcgccacugaagguuccccagc

SEQ ID NO: 376984 - RNA, 32 nt, Homo Sapiens
ucaucaucucaacccagagugucuggucuccc

SEQ ID NO: 376985 - RNA, 32 nt, Homo Sapiens
ccugagaaaaaagaaaacgaaaagugggguuu

SEQ ID NO: 376986 - RNA, 32 nt, Homo Sapiens
ugcaggaagaucuggcucagucuacuaugggc

SEQ ID NO: 376987 - RNA, 32 nt, Homo Sapiens
ugcagccuaccuaaaaaucaggcauuccuccu

SEQ ID NO: 376988 - RNA, 32 nt, Homo Sapiens
gcacccaugacccgauaacucuucaggggaca

SEQ ID NO: 376989 - RNA, 31 nt, Homo Sapiens
guacuguaaaguuccgcagggcuucgaggga

SEQ ID NO: 376990 - RNA, 32 nt, Homo Sapiens
caaguaaugaauuuuaugugacuaugaaacga

SEQ ID NO: 376991 - RNA, 32 nt, Homo Sapiens
aaggggaggcugccucacuuugaaggaauggu

SEQ ID NO: 376992 - RNA, 32 nt, Homo Sapiens
auucaugggaugcaagguugguucaacauaca

SEQ ID NO: 376993 - RNA, 32 nt, Homo Sapiens
guauuauuugaaauaggauaucaagguugaau

SEQ ID NO: 376994 - RNA, 32 nt, Homo Sapiens
gucuggaggggggacaucggcugagcucagag

SEQ ID NO: 376995 - RNA, 32 nt, Homo Sapiens
gcuucggccccggccggccgggcggggaagac

SEQ ID NO: 376996 - RNA, 32 nt, Homo Sapiens
caagaucaggaguucaagaccaggcugggcaa

SEQ ID NO: 376997 - RNA, 31 nt, Homo Sapiens
caggaggagcccccgcacaggaccuaagaau

SEQ ID NO: 376998 - RNA, 32 nt, Homo Sapiens
ccuuggagguggaggagaaugaugggcguaca

SEQ ID NO: 376999 - RNA, 32 nt, Homo Sapiens
aguuggcuuuuuuuuuuuuuuaauugcaagca

SEQ ID NO: 377000 - RNA, 32 nt, Homo Sapiens
cuuuguguuguagcagaugaaauggacaguaa

SEQ ID NO: 377001 - RNA, 32 nt, Homo Sapiens
auauuuuacaguuauagcacaucucaauuuac

SEQ ID NO: 377002 - RNA, 30 nt, Homo Sapiens
augugcugguggaagggggaaacgagugac

SEQ ID NO: 377003 - RNA, 32 nt, Homo Sapiens
agggaugaggauguuggauaagcagcucagca

SEQ ID NO: 377004 - RNA, 28 nt, Homo Sapiens
gugguuggcacugucaggaugauguugu

SEQ ID NO: 377005 - RNA, 32 nt, Homo Sapiens
cacccaccacagaaaagcacaaaccucuggga

SEQ ID NO: 377006 - RNA, 32 nt, Homo Sapiens
agcgaccgccggggccagggcgcuggcccucg

SEQ ID NO: 377007 - RNA, 32 nt, Homo Sapiens
cugggcucgaguuucugccccagguugugugc

SEQ ID NO: 377008 - RNA, 32 nt, Homo Sapiens
auuuccacagauugacaaggauaagucaguug

SEQ ID NO: 377009 - RNA, 32 nt, Homo Sapiens
agcaaagagaguaggguuuauuuuauaaacau

SEQ ID NO: 377010 - RNA, 32 nt, Homo Sapiens
gcugggcccucccugccacacuagcuucccag

SEQ ID NO: 377011 - RNA, 32 nt, Homo Sapiens
cagcagcagggcccaccuugucuugcugggag

SEQ ID NO: 377012 - RNA, 32 nt, Homo Sapiens
ucauucagcccgucgguaccgccccgagccuu

SEQ ID NO: 377013 - RNA, 32 nt, Homo Sapiens
aguaguggcaaggcccaggcaguuccagaucc

SEQ ID NO: 377014 - RNA, 32 nt, Homo Sapiens
agacauuggggauacaguaguaaaccaggcug

SEQ ID NO: 377015 - RNA, 32 nt, Homo Sapiens
auuuaagaacagagggcuccagaccaggugug

SEQ ID NO: 377016 - RNA, 32 nt, Homo Sapiens
uuauuuuuauuuucucuuuguggguguuauau

SEQ ID NO: 377017 - RNA, 32 nt, Homo Sapiens
acagugcaguccugcuugggggagccuggcug

SEQ ID NO: 377018 - RNA, 32 nt, Homo Sapiens
cuuuggaguguaaaucuucaugauguuguaaa

SEQ ID NO: 377019 - RNA, 32 nt, Homo Sapiens
uuguggauauuaaaauugacugauggaauaga

SEQ ID NO: 377020 - RNA, 32 nt, Homo Sapiens
caggccuucuucuggaggugagccgauggaga

SEQ ID NO: 377021 - RNA, 32 nt, Homo Sapiens
uugaaauagcugugucccaaccuguugccauu

SEQ ID NO: 377022 - RNA, 32 nt, Homo Sapiens
agccgguucccucucuggugucuguggacccu

SEQ ID NO: 377023 - RNA, 32 nt, Homo Sapiens
cccugucagcuacauaaagaugggagguuuuc

SEQ ID NO: 377024 - RNA, 32 nt, Homo Sapiens
acagcuuuuuaaaaauacuucuacucuuaaca

SEQ ID NO: 377025 - RNA, 32 nt, Homo Sapiens
ugugacuggguugccugaauuugugggagacc

SEQ ID NO: 377026 - RNA, 32 nt, Homo Sapiens
agggacaugcucuccugggcuuacuccuagcu

SEQ ID NO: 377027 - RNA, 32 nt, Homo Sapiens
gucguucuugggcccaggauggggccucuaga

SEQ ID NO: 377028 - RNA, 32 nt, Homo Sapiens
cgggauccggcgcuguggggcuggggugggcg

SEQ ID NO: 377029 - RNA, 32 nt, Homo Sapiens
aaauuggggaugacgguugucuggagaagaua

SEQ ID NO: 377030 - RNA, 32 nt, Homo Sapiens
auuaguguauaaauauguuuuaauugccaacc

SEQ ID NO: 377031 - RNA, 32 nt, Homo Sapiens
ugcccuuguuuuauacauuuccagaccauuca

SEQ ID NO: 377032 - RNA, 32 nt, Homo Sapiens
uagguggccaaggcuuccugcauugcuucccu

SEQ ID NO: 377033 - RNA, 32 nt, Homo Sapiens
agaaauccuggagaggauauuuuuguagagug

SEQ ID NO: 377034 - RNA, 32 nt, Homo Sapiens
cgagguucggccuuccucucgccccugugcac

SEQ ID NO: 377035 - RNA, 32 nt, Homo Sapiens
aggcaaaggggaggcucagaaggagguggugu

SEQ ID NO: 377036 - RNA, 32 nt, Homo Sapiens
cuccuccucucuccuuucuccuccggcagcca

SEQ ID NO: 377037 - RNA, 32 nt, Homo Sapiens
gccauggagcacgccucccagcccuggccugc

SEQ ID NO: 377038 - RNA, 32 nt, Homo Sapiens
caugaggcuguaguguaagaauacuaacuugu

SEQ ID NO: 377039 - RNA, 32 nt, Homo Sapiens
cuuaucagagauaauugcaguuucacaagguu

SEQ ID NO: 377040 - RNA, 32 nt, Homo Sapiens
gaacacuggacuugcuuuuuucugggagcagg

SEQ ID NO: 377041 - RNA, 32 nt, Homo Sapiens
ccuggauauaagauuucugaaaacacucagac

SEQ ID NO: 377042 - RNA, 32 nt, Homo Sapiens
ugcuuccauuuucuuacguggaaaaugaggug

SEQ ID NO: 377043 - RNA, 32 nt, Homo Sapiens
cgagacggcgaccggacuggcugccccggaac

SEQ ID NO: 377044 - RNA, 32 nt, Homo Sapiens
uguaaauaaaauuagucuuaacccaaaauugc

SEQ ID NO: 377045 - RNA, 32 nt, Homo Sapiens
uggcgaggggagaggcgcagaaacggcgugau

SEQ ID NO: 377046 - RNA, 32 nt, Homo Sapiens
cuuaguuuuuaccuuguuuucucuauagguca

SEQ ID NO: 377047 - RNA, 32 nt, Homo Sapiens
cuaacuuaaaauucaccuggaacuuuaaaugg

SEQ ID NO: 377048 - RNA, 32 nt, Homo Sapiens
cuccccugcccccaggacugggccacuucugg

SEQ ID NO: 377049 - RNA, 32 nt, Homo Sapiens
ucaaucugaacaaaagauaauauaaaaauaac

SEQ ID NO: 377050 - RNA, 32 nt, Homo Sapiens
cuucuguguuuccaaacagcauugcauugauu

SEQ ID NO: 377051 - RNA, 27 nt, Homo Sapiens
ugauuguuccuccccagcccccuggca

SEQ ID NO: 377052 - RNA, 32 nt, Homo Sapiens
cauuaguuuuuuuuuucuuuauauaauauguc

SEQ ID NO: 377053 - RNA, 32 nt, Homo Sapiens
acgaggccugcagcugcacagccagacccgcc

SEQ ID NO: 377054 - RNA, 32 nt, Homo Sapiens
ucagacaggugagaaacauaguuguaacauag

SEQ ID NO: 377055 - RNA, 32 nt, Homo Sapiens
cuaggcccagcggcccucuccuccauagggac

SEQ ID NO: 377056 - RNA, 32 nt, Homo Sapiens
ccaaagccucauggcugacacccauuucauag

SEQ ID NO: 377057 - RNA, 32 nt, Homo Sapiens
ggguagucaaggaaagaagcaaagggaauacc

SEQ ID NO: 377058 - RNA, 30 nt, Homo Sapiens
gcagcccaggcccagcaccagcggucuucc

SEQ ID NO: 377059 - RNA, 32 nt, Homo Sapiens
ccgucucccaucgccguccccccguccccguc

SEQ ID NO: 377060 - RNA, 32 nt, Homo Sapiens
acuggauucuuugcaugccacauagcaggauu

SEQ ID NO: 377061 - RNA, 32 nt, Homo Sapiens
gagcugagccuggccacagggcccgccugcag

SEQ ID NO: 377062 - RNA, 32 nt, Homo Sapiens
gugcccaugcgugccgccugcuccucacugga

SEQ ID NO: 377063 - RNA, 32 nt, Homo Sapiens
ugaagggucccccgccagcccgcggccgcgcc

SEQ ID NO: 377064 - RNA, 32 nt, Homo Sapiens
gcaccgggaccagcgccuccccgcuucgcgcu

SEQ ID NO: 377065 - RNA, 32 nt, Homo Sapiens
agaugcaagcacacaagaaugcacuuggcaca

SEQ ID NO: 377066 - RNA, 32 nt, Homo Sapiens
gaaaugaaaaggaaacuugaaaccugggcaug

SEQ ID NO: 377067 - RNA, 32 nt, Homo Sapiens
uguucauaaaaauuaaccuuuuguauuaaaau

SEQ ID NO: 377068 - RNA, 32 nt, Homo Sapiens
acugauuuagcuuuuucuuuucuuugaacaau

SEQ ID NO: 377069 - RNA, 32 nt, Homo Sapiens
gaggaagaugaugggaggaaaagcccaggaga

SEQ ID NO: 377070 - RNA, 32 nt, Homo Sapiens
uuaaaaacaaagugcagucagauucuaagccc

SEQ ID NO: 377071 - RNA, 32 nt, Homo Sapiens
ucugguggaugggugcagcggcggcgggagga

SEQ ID NO: 377072 - RNA, 32 nt, Homo Sapiens
gguaagaggucugggggcugggacauaggagg

SEQ ID NO: 377073 - RNA, 32 nt, Homo Sapiens
uuacaggugugagccaccaugcccagccucuu

SEQ ID NO: 377074 - RNA, 32 nt, Homo Sapiens
aauggaagcugaugugaacagguaauuaauau

SEQ ID NO: 377075 - RNA, 32 nt, Homo Sapiens
uccagggccccggagcacagcgcccccuggag

SEQ ID NO: 377076 - RNA, 32 nt, Homo Sapiens
caaacauacaacaauuauuuuaguggaucuca

SEQ ID NO: 377077 - RNA, 32 nt, Homo Sapiens
gggcuaguuccuggcgcgagcggccgcgggcc

SEQ ID NO: 377078 - RNA, 32 nt, Homo Sapiens
ccugcccggggagcugcagagcagcagcaccu

SEQ ID NO: 377079 - RNA, 32 nt, Homo Sapiens
gcgcucagcaccaccagcggcgccagaugcag

SEQ ID NO: 377080 - RNA, 32 nt, Homo Sapiens
acccccagcaauaaaaagugggucacucuaug

SEQ ID NO: 377081 - RNA, 32 nt, Homo Sapiens
gacugccaguguucuggagaaaacaaccacga

SEQ ID NO: 377082 - RNA, 31 nt, Homo Sapiens
aaagagauggaccucccggacucggccucga

SEQ ID NO: 377083 - RNA, 32 nt, Homo Sapiens
guugugagccacugcgcccagccccuaaccua

SEQ ID NO: 377084 - RNA, 32 nt, Homo Sapiens
ggccgucugcccguggaccuggcugaggagcu

SEQ ID NO: 377085 - RNA, 32 nt, Homo Sapiens
ggcaggaccaucggggacuuggucaaguuuga

SEQ ID NO: 377086 - RNA, 32 nt, Homo Sapiens
aaacacgaauuuggaugaaccuuguguuacau

SEQ ID NO: 377087 - RNA, 32 nt, Homo Sapiens
aggcacaagguuuuuucuuuuuuguuuuuugu

SEQ ID NO: 377088 - RNA, 32 nt, Homo Sapiens
ucccaaagagcugaagucaucaucagugucag

SEQ ID NO: 377089 - RNA, 32 nt, Homo Sapiens
uuaagauagaggcucaagaacaaugcaaggaa

SEQ ID NO: 377090 - RNA, 32 nt, Homo Sapiens
gcugauuuucuuuuuccaguguuguuuuuacg

SEQ ID NO: 377091 - RNA, 32 nt, Homo Sapiens
ccagggcccucccaggccaucucuguuccucu

SEQ ID NO: 377092 - RNA, 32 nt, Homo Sapiens
aauguaauugguuagccccagacuugggcuag

SEQ ID NO: 377093 - RNA, 32 nt, Homo Sapiens
gugacugcagcugcucagcuccccucccccgc

SEQ ID NO: 377094 - RNA, 32 nt, Homo Sapiens
ucccaacaaauauuuuuguagcuuuuacuugu

SEQ ID NO: 377095 - RNA, 32 nt, Homo Sapiens
agcagagaggggcgcaggagcugccgcggcca

SEQ ID NO: 377096 - RNA, 32 nt, Homo Sapiens
uaucauuuaaacagcaaggagguucagggaag

SEQ ID NO: 377097 - RNA, 32 nt, Homo Sapiens
gaguugcccgccgcgccgccgccguccgcggu

SEQ ID NO: 377098 - RNA, 32 nt, Homo Sapiens
cccuucugauugucguucuacuguauauauau

SEQ ID NO: 377099 - RNA, 32 nt, Homo Sapiens
uauguguuuaucugugucaaguauuucuggua

SEQ ID NO: 377100 - RNA, 29 nt, Homo Sapiens
ggucaugcgggacgcggaugcagacgcag

SEQ ID NO: 377101 - RNA, 32 nt, Homo Sapiens
cuaaucaauuuggccuucugcugcuggaagua

SEQ ID NO: 377102 - RNA, 32 nt, Homo Sapiens
uucugaauuaagaucucacauucuugaaggug

SEQ ID NO: 377103 - RNA, 32 nt, Homo Sapiens
ggcugcggagaaagggcgggaggccgcggggc

SEQ ID NO: 377104 - RNA, 32 nt, Homo Sapiens
cauagcccuuuacccugagcaccaccccaaca

SEQ ID NO: 377105 - RNA, 32 nt, Homo Sapiens
uuuuuuuuuuugucuuuuuuuuuuuuauaaug

SEQ ID NO: 377106 - RNA, 32 nt, Homo Sapiens
uguuuuggugagcucuuaaacaacacacagaa

SEQ ID NO: 377107 - RNA, 32 nt, Homo Sapiens
ucuugcaugguucaaaccaccauucuguagcc

SEQ ID NO: 377108 - RNA, 32 nt, Homo Sapiens
ccaggggcagcacaacuuugaugaagaugaaa

SEQ ID NO: 377109 - RNA, 32 nt, Homo Sapiens
agcuccaugccagagcaggagccccggucaau

SEQ ID NO: 377110 - RNA, 32 nt, Homo Sapiens
gcggacccaagcagugagggccugcagccggc

SEQ ID NO: 377111 - RNA, 32 nt, Homo Sapiens
ccagucucaggccugcuuaccuccucacagcc

SEQ ID NO: 377112 - RNA, 32 nt, Homo Sapiens
ggagccggcaggagguggccccugcccucccu

SEQ ID NO: 377113 - RNA, 32 nt, Homo Sapiens
ugggacauccugugacaaaaccaccgcuguug

SEQ ID NO: 377114 - RNA, 32 nt, Homo Sapiens
caaccccuccccagccuugccccuuucuccuc

SEQ ID NO: 377115 - RNA, 32 nt, Homo Sapiens
augaagaaaaggaaauaugauccaucuuaacu

SEQ ID NO: 377116 - RNA, 32 nt, Homo Sapiens
cuuuguaguccagggcagcaguucuuaacauu

SEQ ID NO: 377117 - RNA, 32 nt, Homo Sapiens
uuacacgcuuggaugacaggcuugcacuugcc

SEQ ID NO: 377118 - RNA, 32 nt, Homo Sapiens
ccuugucucucuaaaagcaaaaagcacaguaa

SEQ ID NO: 377119 - RNA, 32 nt, Homo Sapiens
acaacuaccuaauacaaauauuucugauaaga

SEQ ID NO: 377120 - RNA, 32 nt, Homo Sapiens
uccccagagaggaggauguggugagccccgga

SEQ ID NO: 377121 - RNA, 32 nt, Homo Sapiens
gggggaaauuucgcuuaggagcaggauauuag

SEQ ID NO: 377122 - RNA, 31 nt, Homo Sapiens
cgugacaucucgugccugcccggugcgggug

SEQ ID NO: 377123 - RNA, 32 nt, Homo Sapiens
cucgccuccucccucgguggcgcuagggcucc

SEQ ID NO: 377124 - RNA, 32 nt, Homo Sapiens
uuuauugcgaguuuuuuguuuacuuuucaggu

SEQ ID NO: 377125 - RNA, 32 nt, Homo Sapiens
agacgcgcuuugugcugggcgccggccgcgcc

SEQ ID NO: 377126 - RNA, 31 nt, Homo Sapiens
ucaauaaaacaaaacauagucuagcaauuac

SEQ ID NO: 377127 - RNA, 32 nt, Homo Sapiens
aucauuugccuugaaaguuuccucugcauugg

SEQ ID NO: 377128 - RNA, 32 nt, Homo Sapiens
uuuuuccuucuacuccucccucugacucuaag

SEQ ID NO: 377129 - RNA, 32 nt, Homo Sapiens
uaggaugccgugcaugugugaaaggggguuua

SEQ ID NO: 377130 - RNA, 32 nt, Homo Sapiens
cccacucaacugacucauaccuguuuccggcu

SEQ ID NO: 377131 - RNA, 32 nt, Homo Sapiens
uuaccccucacagguuuaagagaccaggucuu

SEQ ID NO: 377132 - RNA, 32 nt, Homo Sapiens
gcagcugcgcccggcuccuccccucccaggcc

SEQ ID NO: 377133 - RNA, 32 nt, Homo Sapiens
cggucccucagcgcgccgcgccacccggaaca

SEQ ID NO: 377134 - RNA, 32 nt, Homo Sapiens
gcgccgcggagcagcuggccccaggccccuag

SEQ ID NO: 377135 - RNA, 32 nt, Homo Sapiens
auuuacaaaaaaccaacuucaacugauucugc

SEQ ID NO: 377136 - RNA, 32 nt, Homo Sapiens
acaggagcacauagguagaugccaaguuaugc

SEQ ID NO: 377137 - RNA, 32 nt, Homo Sapiens
cauugaugagagaaucacauucagggcaggcu

SEQ ID NO: 377138 - RNA, 32 nt, Homo Sapiens
uuuguauuuuuguagagacaagguuucacuau

SEQ ID NO: 377139 - RNA, 31 nt, Homo Sapiens
aauuuugugaauuuucaagugcuguuuuguu

SEQ ID NO: 377140 - RNA, 32 nt, Homo Sapiens
agcaaaauuacuaccagagccguuacuacaca

SEQ ID NO: 377141 - RNA, 32 nt, Homo Sapiens
augcagaaaauauuuuaaaauauuaaaagagu

SEQ ID NO: 377142 - RNA, 32 nt, Homo Sapiens
cuguaauuccuggccugaaagccucccuuggu

SEQ ID NO: 377143 - RNA, 32 nt, Homo Sapiens
cguggaucuccuucccuucucuugggggccgg

SEQ ID NO: 377144 - RNA, 32 nt, Homo Sapiens
cugucaauauuuuuauuuuuaacucuggauuu

SEQ ID NO: 377145 - RNA, 32 nt, Homo Sapiens
cgggaucuuuugcuucaugcaaaaaacuugga

SEQ ID NO: 377146 - RNA, 32 nt, Homo Sapiens
ggauguauauauaucgaaaugucaaauuaauu

SEQ ID NO: 377147 - RNA, 32 nt, Homo Sapiens
ucuucaaagucuuuuuucaaucucauaaaaaa

SEQ ID NO: 377148 - RNA, 32 nt, Homo Sapiens
uucccagcaccucggcugcugcccggcagcgg

SEQ ID NO: 377149 - RNA, 32 nt, Homo Sapiens
gaccacugcaagcucgagaccuugcuugguga

SEQ ID NO: 377150 - RNA, 32 nt, Homo Sapiens
gugugagauacuguguauauaaacuauauaua

SEQ ID NO: 377151 - RNA, 32 nt, Homo Sapiens
ucucaagugucuauuagauaggcaauaagaac

SEQ ID NO: 377152 - RNA, 32 nt, Homo Sapiens
gccugccacucugggcaccggccagcacccuc

SEQ ID NO: 377153 - RNA, 32 nt, Homo Sapiens
cgagucaggcaaaaguauuugauuugacuuua

SEQ ID NO: 377154 - RNA, 32 nt, Homo Sapiens
aaaauguuuucauuuuaacauguuuuauaauu

SEQ ID NO: 377155 - RNA, 32 nt, Homo Sapiens
caucagugaacgcaaugcaaucucaacagugu

SEQ ID NO: 377156 - RNA, 32 nt, Homo Sapiens
ggucuuucaccgucuggacucaucucugggua

SEQ ID NO: 377157 - RNA, 28 nt, Homo Sapiens
ccuugaauauuagcccauuugaaaacgc

SEQ ID NO: 377158 - RNA, 32 nt, Homo Sapiens
agucacugucagccccucaucuccccccacac

SEQ ID NO: 377159 - RNA, 32 nt, Homo Sapiens
acacaccaggaccaccugcagaugauguuuau

SEQ ID NO: 377160 - RNA, 32 nt, Homo Sapiens
gggaggccaccccaaaccccagccccaacucc

SEQ ID NO: 377161 - RNA, 32 nt, Homo Sapiens
gggagcaucgacgugaagucccacguguccgg

SEQ ID NO: 377162 - RNA, 32 nt, Homo Sapiens
uugauuccagcacccucaggaauaccuauauu

SEQ ID NO: 377163 - RNA, 32 nt, Homo Sapiens
aauuaacacacacaugaacugcacaccuuccc

SEQ ID NO: 377164 - RNA, 32 nt, Homo Sapiens
acccaggagguagaggcugcagugagcuggga

SEQ ID NO: 377165 - RNA, 32 nt, Homo Sapiens
uguguaagagagcggacuguggagggggaaug

SEQ ID NO: 377166 - RNA, 32 nt, Homo Sapiens
gagguugccgugagccgagaucgugccauugc

SEQ ID NO: 377167 - RNA, 32 nt, Homo Sapiens
ccucagccucucagacuugaugaugaaguagg

SEQ ID NO: 377168 - RNA, 32 nt, Homo Sapiens
gcagugcccuguagaguuccuagauuaccuca

SEQ ID NO: 377169 - RNA, 32 nt, Homo Sapiens
acggcuucuuggcuuuuuguuucuuuuaagca

SEQ ID NO: 377170 - RNA, 32 nt, Homo Sapiens
uaugcuuuauuggaaaaaauguuguaauaauu

SEQ ID NO: 377171 - RNA, 32 nt, Homo Sapiens
uuaaaacacacacacacacacacacacacaca

SEQ ID NO: 377172 - RNA, 32 nt, Homo Sapiens
cucggcgcugggaagaagccgggagcuucccu

SEQ ID NO: 377173 - RNA, 32 nt, Homo Sapiens
uggccgccccagcagacagugcuacagagcca

SEQ ID NO: 377174 - RNA, 32 nt, Homo Sapiens
ucgcacagguauacacaugugggaugagugga

SEQ ID NO: 377175 - RNA, 32 nt, Homo Sapiens
gguuucgccauguuggccaggcuggucucaaa

SEQ ID NO: 377176 - RNA, 32 nt, Homo Sapiens
gggcaggagacggagcugagcggcggggggca

SEQ ID NO: 377177 - RNA, 32 nt, Homo Sapiens
guaugcugggaucccugccuggaccggaggga

SEQ ID NO: 377178 - RNA, 32 nt, Homo Sapiens
auuauguuugagaggguaaaaauguaugagca

SEQ ID NO: 377179 - RNA, 32 nt, Homo Sapiens
augcauuugugcucuuuuuuuuuuuauggugc

SEQ ID NO: 377180 - RNA, 27 nt, Homo Sapiens
gcuccccuuaagaacugguauaguuau

SEQ ID NO: 377181 - RNA, 32 nt, Homo Sapiens
cguggaauauauuuuauuuucauuaauucagu

SEQ ID NO: 377182 - RNA, 32 nt, Homo Sapiens
uagauagcauuauauaaguuuauauuuuugug

SEQ ID NO: 377183 - RNA, 32 nt, Homo Sapiens
aaucccgagauuguaggcaagagggugaggaa

SEQ ID NO: 377184 - RNA, 32 nt, Homo Sapiens
uuucauaaauuaacaaagugucacuccauaaa

SEQ ID NO: 377185 - RNA, 32 nt, Homo Sapiens
uaauaaacacauauuucugcuuuaaauuuuua

SEQ ID NO: 377186 - RNA, 32 nt, Homo Sapiens
uggaaaauaagaggaagugcugcuguaauugg

SEQ ID NO: 377187 - RNA, 32 nt, Homo Sapiens
cuaggccucugucugcagcugcugcugccugg

SEQ ID NO: 377188 - RNA, 32 nt, Homo Sapiens
accugacacacagauaccucacucaucccucc

SEQ ID NO: 377189 - RNA, 32 nt, Homo Sapiens
uaaauguggcaaauuuuucagacauuguucau

SEQ ID NO: 377190 - RNA, 32 nt, Homo Sapiens
ucauaaacgaucucuugagucucuuucuuguc

SEQ ID NO: 377191 - RNA, 32 nt, Homo Sapiens
cacauaucugaauggguaacaugaugagguac

SEQ ID NO: 377192 - RNA, 32 nt, Homo Sapiens
agcccugccgugggcccagccccugccagcuu

SEQ ID NO: 377193 - RNA, 32 nt, Homo Sapiens
aaaacuauuaugaaagucaauaaaauagauaa

SEQ ID NO: 377194 - RNA, 32 nt, Homo Sapiens
gguuugaauaauuuauaugugagcaaaacggu

SEQ ID NO: 377195 - RNA, 32 nt, Homo Sapiens
ugggccauaaggaaacagcaggacuggcucaa

SEQ ID NO: 377196 - RNA, 32 nt, Homo Sapiens
gaaggagcuccuuagcccaccugguuugcagg

SEQ ID NO: 377197 - RNA, 32 nt, Homo Sapiens
gguaaagagaguuuggaggaaaaaagacacca

SEQ ID NO: 377198 - RNA, 32 nt, Homo Sapiens
uaguucugcccuuuggagaacaaaagaaagca

SEQ ID NO: 377199 - RNA, 32 nt, Homo Sapiens
gccuguuggccaugggugaccucucaucuuug

SEQ ID NO: 377200 - RNA, 32 nt, Homo Sapiens
ccacaagggggagaggcagcugggccagaccg

SEQ ID NO: 377201 - RNA, 32 nt, Homo Sapiens
aaucuuuauaugcaguauagaaaaguuaacac

SEQ ID NO: 377202 - RNA, 32 nt, Homo Sapiens
aagucccuaucccacaccugccugucacguuc

SEQ ID NO: 377203 - RNA, 32 nt, Homo Sapiens
uuccuguuugugucauccuuguucugcucccc

SEQ ID NO: 377204 - RNA, 32 nt, Homo Sapiens
uccuucuggcuuuggcccaagcuuggcaggug

SEQ ID NO: 377205 - RNA, 32 nt, Homo Sapiens
auggugcauuauuuuuaacaaaugguauuggc

SEQ ID NO: 377206 - RNA, 32 nt, Homo Sapiens
ggaggguagugggaugggggucccgcggcagc

SEQ ID NO: 377207 - RNA, 32 nt, Homo Sapiens
cgcggaaccggggcucgagucccggcccgagc

SEQ ID NO: 377208 - RNA, 32 nt, Homo Sapiens
acaaucuugagcauagaagucaauguaaacga

SEQ ID NO: 377209 - RNA, 32 nt, Homo Sapiens
auggggugagacuuaaaguuaugcuggcagau

SEQ ID NO: 377210 - RNA, 29 nt, Homo Sapiens
cagggucggggacugcgcgcggugccagg

SEQ ID NO: 377211 - RNA, 32 nt, Homo Sapiens
cauuuuaaugaaaugugagucauaugcaauga

SEQ ID NO: 377212 - RNA, 32 nt, Homo Sapiens
auaaaaacaaagaugagacugugugaaauauu

SEQ ID NO: 377213 - RNA, 32 nt, Homo Sapiens
uggauggccaguuaaggaugacacuucauucu

SEQ ID NO: 377214 - RNA, 32 nt, Homo Sapiens
agaguuuucuauuucagacaucucugugugga

SEQ ID NO: 377215 - RNA, 32 nt, Homo Sapiens
uaucuuuacugauaaaauauuuagucaaucac

SEQ ID NO: 377216 - RNA, 32 nt, Homo Sapiens
ucauuuuuguuaggugauuugggauagggaua

SEQ ID NO: 377217 - RNA, 32 nt, Homo Sapiens
aguguuguugugagccuggcugucugcuugga

SEQ ID NO: 377218 - RNA, 32 nt, Homo Sapiens
ccgagucgcugggauugcagauaaggaaauug

SEQ ID NO: 377219 - RNA, 32 nt, Homo Sapiens
gagcaugacaagcuuauccucccaugguaaca

SEQ ID NO: 377220 - RNA, 32 nt, Homo Sapiens
gguuucgccauauuggccaggcuggucuugaa

SEQ ID NO: 377221 - RNA, 32 nt, Homo Sapiens
agacggccgggcgggcggcauggaggcggcgc

SEQ ID NO: 377222 - RNA, 32 nt, Homo Sapiens
gaaugcuuuacuaguucuccuugguuuuaucu

SEQ ID NO: 377223 - RNA, 32 nt, Homo Sapiens
ggagugucugucugcugagcggcgcugugacc

SEQ ID NO: 377224 - RNA, 32 nt, Homo Sapiens
ccuuauguuagagucauuucugauguuccagc

SEQ ID NO: 377225 - RNA, 32 nt, Homo Sapiens
gagccacugcaccuggccuguguauuguuuga

SEQ ID NO: 377226 - RNA, 32 nt, Homo Sapiens
ggccaauaaaauguaucugcauauguuuucca

SEQ ID NO: 377227 - RNA, 32 nt, Homo Sapiens
aguagacaugaaaacuacuuugaaauuccuug

SEQ ID NO: 377228 - RNA, 32 nt, Homo Sapiens
aguacaagacaucaaagugaaguaaagcccaa

SEQ ID NO: 377229 - RNA, 32 nt, Homo Sapiens
caggugacgggcgggcgcgggcgucgcagcug

SEQ ID NO: 377230 - RNA, 32 nt, Homo Sapiens
agaagugcuuuuaaugugaacaaccuuauaug

SEQ ID NO: 377231 - RNA, 32 nt, Homo Sapiens
ucugggugagagauaaaucuuauagggguggg

SEQ ID NO: 377232 - RNA, 32 nt, Homo Sapiens
ccacuccuguauucuuuuuuuuuuuuuuuaga

SEQ ID NO: 377233 - RNA, 32 nt, Homo Sapiens
aggcuggggcccgggggcgggugcucugccgg

SEQ ID NO: 377234 - RNA, 31 nt, Homo Sapiens
gcagcgcagcgcagcucagcgcaccgacugc

SEQ ID NO: 377235 - RNA, 32 nt, Homo Sapiens
ccucauaugauuguccugccucauggagcugu

SEQ ID NO: 377236 - RNA, 32 nt, Homo Sapiens
agguaaauguguuugcuucagaaacuuguuaa

SEQ ID NO: 377237 - RNA, 30 nt, Homo Sapiens
cagugucuuccugugggggaagagcacagc

SEQ ID NO: 377238 - RNA, 32 nt, Homo Sapiens
gccgugcacaccccaaacccugagcuucacac

SEQ ID NO: 377239 - RNA, 32 nt, Homo Sapiens
cucuuccccuugccccucccccagagggacuu

SEQ ID NO: 377240 - RNA, 32 nt, Homo Sapiens
gacccagagucuuugggcccagaucuuuaaac

SEQ ID NO: 377241 - RNA, 32 nt, Homo Sapiens
cccuucuugccaggcuucuccucucuccugcc

SEQ ID NO: 377242 - RNA, 32 nt, Homo Sapiens
gaagauuuucaaguaacauuggcagagaggua

SEQ ID NO: 377243 - RNA, 32 nt, Homo Sapiens
aacuaaauauauauguguauauguauacacau

SEQ ID NO: 377244 - RNA, 32 nt, Homo Sapiens
ggcggcuuugggcucaggcggcggcggcucgc

SEQ ID NO: 377245 - RNA, 32 nt, Homo Sapiens
uacuuuaauuuaaagaaaaguuguguucuguu

SEQ ID NO: 377246 - RNA, 32 nt, Homo Sapiens
cgggaggauuacccaggagaccgcugguggga

SEQ ID NO: 377247 - RNA, 32 nt, Homo Sapiens
aauauuuaguguucauaaauaaaguuuguuga

SEQ ID NO: 377248 - RNA, 32 nt, Homo Sapiens
ugagcaggacagcccugcuccuggacagggac

SEQ ID NO: 377249 - RNA, 32 nt, Homo Sapiens
acccaaauuauuuuuucuuuguuuuucuuuuu

SEQ ID NO: 377250 - RNA, 32 nt, Homo Sapiens
uuugacuggccguagagucugcgcaguuggug

SEQ ID NO: 377251 - RNA, 32 nt, Homo Sapiens
ccucagucccacucagccuccuccugccugcu

SEQ ID NO: 377252 - RNA, 32 nt, Homo Sapiens
cucugggagguggucccuggcccccuccuccu

SEQ ID NO: 377253 - RNA, 32 nt, Homo Sapiens
cagcgcggagccgacaugugucugcgccucgg

SEQ ID NO: 377254 - RNA, 32 nt, Homo Sapiens
cuagacgcaccucuccaccgaagccguucuga

SEQ ID NO: 377255 - RNA, 32 nt, Homo Sapiens
cauacauuuuuagaacagaaaccuuauguuau

SEQ ID NO: 377256 - RNA, 32 nt, Homo Sapiens
gaaaagcaggcuagucuaaccauggugcuauu

SEQ ID NO: 377257 - RNA, 32 nt, Homo Sapiens
auaucucaguaagacgaggauaccuucaguuu

SEQ ID NO: 377258 - RNA, 31 nt, Homo Sapiens
caggauuuuaaucuuuuucuaacuggacugg

SEQ ID NO: 377259 - RNA, 32 nt, Homo Sapiens
gggggagcagugcuggaccgcgcgcauccgcg

SEQ ID NO: 377260 - RNA, 32 nt, Homo Sapiens
acucauuccaguuaaaagacguccaucuucaa

SEQ ID NO: 377261 - RNA, 32 nt, Homo Sapiens
cuccuaucuuuuauuucauucauauccuccgc

SEQ ID NO: 377262 - RNA, 32 nt, Homo Sapiens
cgccgagaggccgcuugcgcaggcuccuucuu

SEQ ID NO: 377263 - RNA, 32 nt, Homo Sapiens
accuuuguaaccauuuaaaaauguaaaaacga

SEQ ID NO: 377264 - RNA, 32 nt, Homo Sapiens
uuguguugcuguucuccugucugcaguguguc

SEQ ID NO: 377265 - RNA, 32 nt, Homo Sapiens
agucgccgccgggcccuuggccgucgaaggag

SEQ ID NO: 377266 - RNA, 32 nt, Homo Sapiens
ucuuuguuauacauuuaaagauuuaaagugcc

SEQ ID NO: 377267 - RNA, 32 nt, Homo Sapiens
ggugcucugugucaaggugaagcacauacggc

SEQ ID NO: 377268 - RNA, 32 nt, Homo Sapiens
auauauauggcaaaaauaccaauauugguauu

SEQ ID NO: 377269 - RNA, 32 nt, Homo Sapiens
cgaagacgaacagugacccagcccuuucaagg

SEQ ID NO: 377270 - RNA, 32 nt, Homo Sapiens
ggcggcaggugcuggaggucaagaugcaggug

SEQ ID NO: 377271 - RNA, 32 nt, Homo Sapiens
ugugacguuagcuucaguggcuccgccgcauc

SEQ ID NO: 377272 - RNA, 32 nt, Homo Sapiens
agacccgcgcccgcuccgcccgcagcucggcc

SEQ ID NO: 377273 - RNA, 32 nt, Homo Sapiens
caucuucaaccuucuucagaagcucacugcuu

SEQ ID NO: 377274 - RNA, 30 nt, Homo Sapiens
aguguuucugcuuuggaagaagcucuaccu

SEQ ID NO: 377275 - RNA, 32 nt, Homo Sapiens
agcugaacuggcagcuaugaacaucaaaguga

SEQ ID NO: 377276 - RNA, 32 nt, Homo Sapiens
gcauguguauuaggaacaaucaagccauccuu

SEQ ID NO: 377277 - RNA, 32 nt, Homo Sapiens
uguguagcaauuaugaaugggauuguguucuu

SEQ ID NO: 377278 - RNA, 32 nt, Homo Sapiens
cagucggggauaucaacaaagagacucccaca

SEQ ID NO: 377279 - RNA, 32 nt, Homo Sapiens
ggacagucagaucaagcaguaaaauuagcucu

SEQ ID NO: 377280 - RNA, 32 nt, Homo Sapiens
caagauaugcuuuuggcaaagauaguaccuug

SEQ ID NO: 377281 - RNA, 32 nt, Homo Sapiens
ggccuucugcguuuccucacucucacauacca

SEQ ID NO: 377282 - RNA, 32 nt, Homo Sapiens
cgcucuucuccucugccccgggcccgcgaggc

SEQ ID NO: 377283 - RNA, 32 nt, Homo Sapiens
agaagagauaucuguggaugcuaugcaugucu

SEQ ID NO: 377284 - RNA, 32 nt, Homo Sapiens
aagcgggagagccagagacuccucggcgcuga

SEQ ID NO: 377285 - RNA, 32 nt, Homo Sapiens
gagaucacguuuggagcugcugauugguuuuc

SEQ ID NO: 377286 - RNA, 32 nt, Homo Sapiens
ugggagguggagguugcagugagcugagaucg

SEQ ID NO: 377287 - RNA, 32 nt, Homo Sapiens
gcguuuuccgccgugccccgaggcuccccagc

SEQ ID NO: 377288 - RNA, 29 nt, Homo Sapiens
caucaugcccaccguggaugacauucugg

SEQ ID NO: 377289 - RNA, 32 nt, Homo Sapiens
gccgacauugccggcgucuuggcgauucggcc

SEQ ID NO: 377290 - RNA, 32 nt, Homo Sapiens
uuguauugcuuuuaaaguuuccucugcucagc

SEQ ID NO: 377291 - RNA, 32 nt, Homo Sapiens
uggagucucgcacugucacccgggcuggagug

SEQ ID NO: 377292 - RNA, 32 nt, Homo Sapiens
uaugcggagaugcuacugccacugcugcuguc

SEQ ID NO: 377293 - RNA, 32 nt, Homo Sapiens
cucucuguagccaggcuggagggcaauuguac

SEQ ID NO: 377294 - RNA, 32 nt, Homo Sapiens
aagagcccuccagcccuaacuacuuuacucag

SEQ ID NO: 377295 - RNA, 32 nt, Homo Sapiens
acuacugaugaaauaauguuacuaguagcuga

SEQ ID NO: 377296 - RNA, 32 nt, Homo Sapiens
agcugccggucugcgccugcgcggcgacgggg

SEQ ID NO: 377297 - RNA, 32 nt, Homo Sapiens
auauaaaauaccauuguuaaagaaugguacuu

SEQ ID NO: 377298 - RNA, 32 nt, Homo Sapiens
uaccuacaagauaccuucuugaggaugugcca

SEQ ID NO: 377299 - RNA, 32 nt, Homo Sapiens
ccaccuccccuccuccccgcgccgggcaugcg

SEQ ID NO: 377300 - RNA, 32 nt, Homo Sapiens
uguugaugguaaacugagaacucuguagcuua

SEQ ID NO: 377301 - RNA, 32 nt, Homo Sapiens
auauaaaaugggauuuauaaaaauauuagauu

SEQ ID NO: 377302 - RNA, 32 nt, Homo Sapiens
cuggcgccgcccaagcccgugccucgucgccg

SEQ ID NO: 377303 - RNA, 32 nt, Homo Sapiens
cucucaccucuagauagcaaauagcucucaga

SEQ ID NO: 377304 - RNA, 32 nt, Homo Sapiens
caggagcaucuuaaaauguaaauaugcuggga

SEQ ID NO: 377305 - RNA, 32 nt, Homo Sapiens
ccaggacagaaccccaggaacaccgccacuca

SEQ ID NO: 377306 - RNA, 32 nt, Homo Sapiens
gguuguuuaaaagagccuggaacuuccuccuc

SEQ ID NO: 377307 - RNA, 32 nt, Homo Sapiens
aagacacuuuuccacccuccaccaccccaacc

SEQ ID NO: 377308 - RNA, 32 nt, Homo Sapiens
gcuugggcgccgccgcgcgagcgcuucccuuc

SEQ ID NO: 377309 - RNA, 32 nt, Homo Sapiens
gguauuaaaaauuaaaugugguuuuaaaaguu

SEQ ID NO: 377310 - RNA, 32 nt, Homo Sapiens
gagcgcaggaggaaacaguaccggcuggaggc

SEQ ID NO: 377311 - RNA, 32 nt, Homo Sapiens
agguggugggacucaccgcuccggccagggug

SEQ ID NO: 377312 - RNA, 32 nt, Homo Sapiens
aucacgauuuuaaagaaaaauguuucaucuug

SEQ ID NO: 377313 - RNA, 32 nt, Homo Sapiens
cuugcuuauaauacaucagggauuauuauucu

SEQ ID NO: 377314 - RNA, 32 nt, Homo Sapiens
caccgcugcccucagcuccgaguccagggcga

SEQ ID NO: 377315 - RNA, 32 nt, Homo Sapiens
cggagaggacaguggauuguuuauacuccagu

SEQ ID NO: 377316 - RNA, 32 nt, Homo Sapiens
ucucuucccuugguuugccagagcagcuaaag

SEQ ID NO: 377317 - RNA, 25 nt, Homo Sapiens
augagccccugcgggcgggcccggc

SEQ ID NO: 377318 - RNA, 32 nt, Homo Sapiens
uuuacaugaaaucaguaugaaaauaguuuuuu

SEQ ID NO: 377319 - RNA, 32 nt, Homo Sapiens
ggcugucuauucaauuccauugguuuuuaugc

SEQ ID NO: 377320 - RNA, 32 nt, Homo Sapiens
cgucgucgccuggagcggcgguuuagagagcc

SEQ ID NO: 377321 - RNA, 32 nt, Homo Sapiens
aucuuugucccgaugcuagccgugccggucuc

SEQ ID NO: 377322 - RNA, 32 nt, Homo Sapiens
gaggggucgcggggcgggaguggugagcgcag

SEQ ID NO: 377323 - RNA, 32 nt, Homo Sapiens
ggaguuuauuuaaugauguaauuuauuguugc

SEQ ID NO: 377324 - RNA, 32 nt, Homo Sapiens
ugggccacugcgccuggccauaaacuuucaau

SEQ ID NO: 377325 - RNA, 32 nt, Homo Sapiens
uuguuacuagguccccaccuucccucuuuucu

SEQ ID NO: 377326 - RNA, 32 nt, Homo Sapiens
uuuccaucaaggacacugagaacaagagucuu

SEQ ID NO: 377327 - RNA, 32 nt, Homo Sapiens
ugugccugaaagauagcggcggcugguggccc

SEQ ID NO: 377328 - RNA, 32 nt, Homo Sapiens
gcaacccacgguggccucuccucucucugcgg

SEQ ID NO: 377329 - RNA, 32 nt, Homo Sapiens
guaagaucuucagagcucucuaucuuuaaagu

SEQ ID NO: 377330 - RNA, 32 nt, Homo Sapiens
cauguauaaaaggauuggcucgucaauauucc

SEQ ID NO: 377331 - RNA, 32 nt, Homo Sapiens
ucuugagaggggcuguuaggcugugcugugcu

SEQ ID NO: 377332 - RNA, 32 nt, Homo Sapiens
acacccggccaugaauuaacuccguuaaaaaa

SEQ ID NO: 377333 - RNA, 32 nt, Homo Sapiens
gacggaggucccugguccacucauggaggugc

SEQ ID NO: 377334 - RNA, 32 nt, Homo Sapiens
ucuccuuuuagaaagcacuuccugaauuauuu

SEQ ID NO: 377335 - RNA, 32 nt, Homo Sapiens
uuuuaauaagaugaccuuuuuaaaagaagcug

SEQ ID NO: 377336 - RNA, 32 nt, Homo Sapiens
gguugacuugagaucuuaauuuguuuaauagg

SEQ ID NO: 377337 - RNA, 32 nt, Homo Sapiens
ccaguauguuuccaaguccugaccucucagac

SEQ ID NO: 377338 - RNA, 32 nt, Homo Sapiens
uugaguccacagaaaucugucgaccugggcac

SEQ ID NO: 377339 - RNA, 32 nt, Homo Sapiens
uuugguccuuccccucugccauccccuugggg

SEQ ID NO: 377340 - RNA, 32 nt, Homo Sapiens
gccucugauaagcacuuuuuaaauggcucuaa

SEQ ID NO: 377341 - RNA, 32 nt, Homo Sapiens
uauaugaaaauaaaugaugaaaaaagaacuau

SEQ ID NO: 377342 - RNA, 32 nt, Homo Sapiens
uaaauauauggacguuuuucauugaaucaaaa

SEQ ID NO: 377343 - RNA, 32 nt, Homo Sapiens
auuaaugacagaacaaggaaaauggcacaacu

SEQ ID NO: 377344 - RNA, 32 nt, Homo Sapiens
uuuaaaaagcuacaaucacaucauguaacuac

SEQ ID NO: 377345 - RNA, 32 nt, Homo Sapiens
uucacugacaccuugauggcucuugauggcuc

SEQ ID NO: 377346 - RNA, 32 nt, Homo Sapiens
uugagcggcuggcgcgguuguccuggagcagg

SEQ ID NO: 377347 - RNA, 32 nt, Homo Sapiens
cuucucugcccccacccccacaaagcccagac

SEQ ID NO: 377348 - RNA, 32 nt, Homo Sapiens
accgcgaccacguguacauggugcuggaguac

SEQ ID NO: 377349 - RNA, 32 nt, Homo Sapiens
uauuugcaugaauaauuuugugagaugauacc

SEQ ID NO: 377350 - RNA, 32 nt, Homo Sapiens
auucugucaacacaaaucuaugaauuuaguuu

SEQ ID NO: 377351 - RNA, 32 nt, Homo Sapiens
aaauacaguuagugccuauuaauagcuuuuua

SEQ ID NO: 377352 - RNA, 32 nt, Homo Sapiens
aaugugugaaauggaaaguugauggcagcagg

SEQ ID NO: 377353 - RNA, 32 nt, Homo Sapiens
augaacgagaugugccugaguaccagccacag

SEQ ID NO: 377354 - RNA, 32 nt, Homo Sapiens
cacccuggcugcagggccccccugugucccca

SEQ ID NO: 377355 - RNA, 29 nt, Homo Sapiens
agcugcuuuauccaaucuucagagaggug

SEQ ID NO: 377356 - RNA, 32 nt, Homo Sapiens
cuuuuggaauaauuuaucagacauugaacuuc

SEQ ID NO: 377357 - RNA, 32 nt, Homo Sapiens
cuuuucaaauugcaguugaaacuauuauuccg

SEQ ID NO: 377358 - RNA, 32 nt, Homo Sapiens
uaaugaagcugaugugagagcccuggagagaa

SEQ ID NO: 377359 - RNA, 32 nt, Homo Sapiens
uaacugcaucagggaagaauucuuaucucuag

SEQ ID NO: 377360 - RNA, 32 nt, Homo Sapiens
uauguaucaguucuaaaauuuccauuuuguuc

SEQ ID NO: 377361 - RNA, 32 nt, Homo Sapiens
cuggggagggaagaggauuacuuuaaagcacc

SEQ ID NO: 377362 - RNA, 31 nt, Homo Sapiens
auuguuuugugcucaacuuguguuuuguauu

SEQ ID NO: 377363 - RNA, 32 nt, Homo Sapiens
gaagacuucauaagcucaucacaggggaggga

SEQ ID NO: 377364 - RNA, 32 nt, Homo Sapiens
gacggcagcgguuggcgggcggguccuccgcu

SEQ ID NO: 377365 - RNA, 32 nt, Homo Sapiens
guacugaaaugaaacguguauuaacaagaaaa

SEQ ID NO: 377366 - RNA, 32 nt, Homo Sapiens
agaaucaugggacuuugagaagagggaggaca

SEQ ID NO: 377367 - RNA, 32 nt, Homo Sapiens
gaacacguaggccccaggggaggccucagcag

SEQ ID NO: 377368 - RNA, 31 nt, Homo Sapiens
caaccacaccacugccuggcgccgugcccuu

SEQ ID NO: 377369 - RNA, 32 nt, Homo Sapiens
uuccuccugaccaacccacugcugauaaucug

SEQ ID NO: 377370 - RNA, 32 nt, Homo Sapiens
ggcucccuugcaaggcagcagugacaugaacc

SEQ ID NO: 377371 - RNA, 32 nt, Homo Sapiens
gggugcguggccuccgccccaggccccucucc

SEQ ID NO: 377372 - RNA, 32 nt, Homo Sapiens
cucuucgagaaacacccacagaugaucaauaa

SEQ ID NO: 377373 - RNA, 31 nt, Homo Sapiens
ccucgauuugugaauuaauagaauugggggg

SEQ ID NO: 377374 - RNA, 32 nt, Homo Sapiens
ugagcauuaauuuuugaaaguuuuacagaguu

SEQ ID NO: 377375 - RNA, 32 nt, Homo Sapiens
auuuuuaaaaauugcucacauaaagaaguucu

SEQ ID NO: 377376 - RNA, 32 nt, Homo Sapiens
uggaaaaagauucagucuuuuaucacaggccc

SEQ ID NO: 377377 - RNA, 32 nt, Homo Sapiens
uugcccccuccacccacccccacgaccccacu

SEQ ID NO: 377378 - RNA, 32 nt, Homo Sapiens
acaaggucaggagaucaagacuauccuggcua

SEQ ID NO: 377379 - RNA, 32 nt, Homo Sapiens
gugggaagacuucagcacaaaggaaagacuaa

SEQ ID NO: 377380 - RNA, 32 nt, Homo Sapiens
aagaaugauaacacuggaagauauauucuuau

SEQ ID NO: 377381 - RNA, 32 nt, Homo Sapiens
aauuuuauuuaguucuugaguagaucugcuuc

SEQ ID NO: 377382 - RNA, 32 nt, Homo Sapiens
augaugggaaaggcuauuuagccacucugcau

SEQ ID NO: 377383 - RNA, 32 nt, Homo Sapiens
uguguguauguggccaagcgucugcaggugag

SEQ ID NO: 377384 - RNA, 32 nt, Homo Sapiens
ugagacuggggugcaucuccagagccacucac

SEQ ID NO: 377385 - RNA, 32 nt, Homo Sapiens
ugauuuguuuuucugaaauuuacguuucucuc

SEQ ID NO: 377386 - RNA, 32 nt, Homo Sapiens
cuggccuuggcaagugagccugcaccauggag

SEQ ID NO: 377387 - RNA, 32 nt, Homo Sapiens
accgccucaacacaguucucaacugcgaucac

SEQ ID NO: 377388 - RNA, 31 nt, Homo Sapiens
aacgacucacggaggauggcuucugucucca

SEQ ID NO: 377389 - RNA, 32 nt, Homo Sapiens
gagccccugccaggggcgccuggcaagugcug

SEQ ID NO: 377390 - RNA, 32 nt, Homo Sapiens
acuauggaaaauugaauuuucuucaaacaaaa

SEQ ID NO: 377391 - RNA, 32 nt, Homo Sapiens
ccaaacagggcccucugcagcccagccuuucc

SEQ ID NO: 377392 - RNA, 32 nt, Homo Sapiens
acuggagcugccuggugaccagaaguuuggag

SEQ ID NO: 377393 - RNA, 32 nt, Homo Sapiens
uuuccccaaagccccagggcaccauccuuaag

SEQ ID NO: 377394 - RNA, 32 nt, Homo Sapiens
cugugacggggaggauggucacacucacaugg

SEQ ID NO: 377395 - RNA, 32 nt, Homo Sapiens
ggugggaggagcuucuaaagaggugacuggua

SEQ ID NO: 377396 - RNA, 32 nt, Homo Sapiens
uuucuagguaguaacuuauccaaacaauacuu

SEQ ID NO: 377397 - RNA, 32 nt, Homo Sapiens
uauuuuugacaauaaaacuaugcugaacucaa

SEQ ID NO: 377398 - RNA, 32 nt, Homo Sapiens
caauuguuauagccagaggaacaaagaugaua

SEQ ID NO: 377399 - RNA, 32 nt, Homo Sapiens
gcgauuugcaucguuucaaaguaucucuccau

SEQ ID NO: 377400 - RNA, 32 nt, Homo Sapiens
uuguaguacuguaucauaggguugcuacuagg

SEQ ID NO: 377401 - RNA, 32 nt, Homo Sapiens
ggaauuggcaauuuugucauuuauaugggaga

SEQ ID NO: 377402 - RNA, 31 nt, Homo Sapiens
aauauucaauagaaaaaaccacguauuauau

SEQ ID NO: 377403 - RNA, 32 nt, Homo Sapiens
uuuaugcuaucuauuucuuuuccuuuuuuuuu

SEQ ID NO: 377404 - RNA, 32 nt, Homo Sapiens
ggcaccgugucgucgcccagcucgucgcccac

SEQ ID NO: 377405 - RNA, 32 nt, Homo Sapiens
uugcauuuuguaguuuuaugugaauggaauca

SEQ ID NO: 377406 - RNA, 32 nt, Homo Sapiens
caaauccaccccacccgcguacucccuccuga

SEQ ID NO: 377407 - RNA, 32 nt, Homo Sapiens
agggccgugucuccaggaccucauggaggcaa

SEQ ID NO: 377408 - RNA, 32 nt, Homo Sapiens
ccaggcagcagagggacaagugaccucgugga

SEQ ID NO: 377409 - RNA, 27 nt, Homo Sapiens
ggaacgucccgccucagccccccagua

SEQ ID NO: 377410 - RNA, 32 nt, Homo Sapiens
ggaggaagacucuggagccaaggcagagggga

SEQ ID NO: 377411 - RNA, 32 nt, Homo Sapiens
ccauggacacugggauacgguggccgcacggc

SEQ ID NO: 377412 - RNA, 32 nt, Homo Sapiens
gaaauauguuuccaucacacaauuuguuacuu

SEQ ID NO: 377413 - RNA, 32 nt, Homo Sapiens
ggcaggugcgucuuucaguuccccucacacuu

SEQ ID NO: 377414 - RNA, 32 nt, Homo Sapiens
gccacuucauuccagccugggcgacagagcaa

SEQ ID NO: 377415 - RNA, 32 nt, Homo Sapiens
cggagucucgcucugucgcccaggcugaagug

SEQ ID NO: 377416 - RNA, 32 nt, Homo Sapiens
ggaagcgaagucgaagcagagaggcgacggag

SEQ ID NO: 377417 - RNA, 32 nt, Homo Sapiens
gguccucgacggaccgcccaucggacuuuuau

SEQ ID NO: 377418 - RNA, 32 nt, Homo Sapiens
gcgcaguauggauagcuaucucauacuucuuu

SEQ ID NO: 377419 - RNA, 32 nt, Homo Sapiens
cccaggcucugucuccucagcucauuucuuac

SEQ ID NO: 377420 - RNA, 32 nt, Homo Sapiens
uaauucuuaaggcaaggcaaauccauggauga

SEQ ID NO: 377421 - RNA, 32 nt, Homo Sapiens
uugauucuggggagccgagcgcgcggcgcgag

SEQ ID NO: 377422 - RNA, 32 nt, Homo Sapiens
accucagauaaugugcuuuuuagcucaguaca

SEQ ID NO: 377423 - RNA, 32 nt, Homo Sapiens
acaggugaugcauucuccugcuguugcuucuc

SEQ ID NO: 377424 - RNA, 32 nt, Homo Sapiens
cccuagucagcccacaccccuagggccuaaag

SEQ ID NO: 377425 - RNA, 32 nt, Homo Sapiens
agagcccggauucgugaagcaguugagugcug

SEQ ID NO: 377426 - RNA, 28 nt, Homo Sapiens
gguugggggcggcugcccagugaguccu

SEQ ID NO: 377427 - RNA, 32 nt, Homo Sapiens
auaguacuggaagucucgccacagcaaucagg

SEQ ID NO: 377428 - RNA, 32 nt, Homo Sapiens
guuuaauguaaaacuuaccagaugaaccuugu

SEQ ID NO: 377429 - RNA, 32 nt, Homo Sapiens
caaagcaaaaugguggcccggaaacguuucca

SEQ ID NO: 377430 - RNA, 32 nt, Homo Sapiens
cgacggcacccggccccgagcgccucgacgcc

SEQ ID NO: 377431 - RNA, 32 nt, Homo Sapiens
cuggaugugguucuauuuuuuaucggucuccu

SEQ ID NO: 377432 - RNA, 32 nt, Homo Sapiens
cuauauauaaacuguacaaucuguaaaguuuu

SEQ ID NO: 377433 - RNA, 32 nt, Homo Sapiens
gcgccggcucugccuccaggccuggggugcgg

SEQ ID NO: 377434 - RNA, 31 nt, Homo Sapiens
uuuucauuaaagauuacauuuaagguuuuau

SEQ ID NO: 377435 - RNA, 32 nt, Homo Sapiens
uguuccuguuggccccagcugcacucgcaggg

SEQ ID NO: 377436 - RNA, 30 nt, Homo Sapiens
ccagcgggcaggcgggcggagccuguauau

SEQ ID NO: 377437 - RNA, 32 nt, Homo Sapiens
guggagcauaaaacagcauauuucuuaguauu

SEQ ID NO: 377438 - RNA, 32 nt, Homo Sapiens
acugugauugaaauuugguuuugauaaaauua

SEQ ID NO: 377439 - RNA, 32 nt, Homo Sapiens
agaacgacugcugaaggggaaauauuuaaacu

SEQ ID NO: 377440 - RNA, 32 nt, Homo Sapiens
aaccccucgcgcccgcgcguucgcggauccag

SEQ ID NO: 377441 - RNA, 32 nt, Homo Sapiens
gagugcaguggcacgaacacggcucacugccg

SEQ ID NO: 377442 - RNA, 32 nt, Homo Sapiens
aggagagaaaucagacuuuguuuuuugaaauc

SEQ ID NO: 377443 - RNA, 32 nt, Homo Sapiens
acggugccccugacgcacaucuacgccuucgg

SEQ ID NO: 377444 - RNA, 32 nt, Homo Sapiens
aucucagaaggggaugguguugucacaaacug

SEQ ID NO: 377445 - RNA, 32 nt, Homo Sapiens
uuaucaggccccaaaaaaccuguucugcagug

SEQ ID NO: 377446 - RNA, 32 nt, Homo Sapiens
agcuugccugcuucucaaaggucaugauuucc

SEQ ID NO: 377447 - RNA, 32 nt, Homo Sapiens
uucccccgcuggcccccuccccggagggauaa

SEQ ID NO: 377448 - RNA, 32 nt, Homo Sapiens
ucuucaggccccacauccccuaccccccggac

SEQ ID NO: 377449 - RNA, 32 nt, Homo Sapiens
cagaucaugcaugcgccauuuuuuacuuaaug

SEQ ID NO: 377450 - RNA, 32 nt, Homo Sapiens
gagaggugcugagcccuuccucauggauacgg

SEQ ID NO: 377451 - RNA, 32 nt, Homo Sapiens
uaauauguacuuugaguauaacaucaagcuuu

SEQ ID NO: 377452 - RNA, 32 nt, Homo Sapiens
agggggcgggucuggcgcuagguccagccccu

SEQ ID NO: 377453 - RNA, 32 nt, Homo Sapiens
uuuaccuagaaagucaccaagacugucaauuu

SEQ ID NO: 377454 - RNA, 32 nt, Homo Sapiens
cuuguuuaugugauuagcucagagcaucucua

SEQ ID NO: 377455 - RNA, 32 nt, Homo Sapiens
ucccuuauuuauucucuuuucuauuuauaugu

SEQ ID NO: 377456 - RNA, 32 nt, Homo Sapiens
cuguacauauuuacaagaaacuuuauauucgu

SEQ ID NO: 377457 - RNA, 32 nt, Homo Sapiens
agagacugacuucaagguuuuauuccagagac

SEQ ID NO: 377458 - RNA, 32 nt, Homo Sapiens
ucaaauuccaguucuccuacuuaucucuuggg

SEQ ID NO: 377459 - RNA, 32 nt, Homo Sapiens
ugacaaucuaaccugccauccaaaugauaaau

SEQ ID NO: 377460 - RNA, 32 nt, Homo Sapiens
agauguaaugcaugucacagugacggagauaa

SEQ ID NO: 377461 - RNA, 32 nt, Homo Sapiens
ugaacuauuguuaauucuuccuauuuuaauga

SEQ ID NO: 377462 - RNA, 32 nt, Homo Sapiens
gaaaaaauaaacgagugaauguugauaaaaaa

SEQ ID NO: 377463 - RNA, 32 nt, Homo Sapiens
uucauguacagcuguggucugaaugugugugu

SEQ ID NO: 377464 - RNA, 32 nt, Homo Sapiens
ucagcgucagcuucugggaggaggaaggucag

SEQ ID NO: 377465 - RNA, 32 nt, Homo Sapiens
uugggcgccccccacccucccccggacucgac

SEQ ID NO: 377466 - RNA, 32 nt, Homo Sapiens
ucauauaaggacaguaaagaaacuugugcagu

SEQ ID NO: 377467 - RNA, 32 nt, Homo Sapiens
acuagaauuuuaagcgaugaaguacaugugga

SEQ ID NO: 377468 - RNA, 32 nt, Homo Sapiens
uccagggggaggaggaagcccaagcagcccag

SEQ ID NO: 377469 - RNA, 32 nt, Homo Sapiens
gauacuuacugugggauucagaguggggugca

SEQ ID NO: 377470 - RNA, 32 nt, Homo Sapiens
gcaccuguccuuuuuucuucuauuuuucagaa

SEQ ID NO: 377471 - RNA, 32 nt, Homo Sapiens
gcccccaggaggagugacggagugacacaaau

SEQ ID NO: 377472 - RNA, 32 nt, Homo Sapiens
cuaauuaauuuucaacuugcauaacgugaaaa

SEQ ID NO: 377473 - RNA, 32 nt, Homo Sapiens
aaauaaaccaauuuaggaguccgccagggucu

SEQ ID NO: 377474 - RNA, 32 nt, Homo Sapiens
uaaaauuggcugucacaucuccauuuuguuua

SEQ ID NO: 377475 - RNA, 32 nt, Homo Sapiens
uuccccagcaugucugccaccauccucaugca

SEQ ID NO: 377476 - RNA, 32 nt, Homo Sapiens
cugcugugaccucacaaacacccaggcugagu

SEQ ID NO: 377477 - RNA, 32 nt, Homo Sapiens
uaucagcucacuaauaauaccaguguuguuaa

SEQ ID NO: 377478 - RNA, 32 nt, Homo Sapiens
ggugccacuuaaugccaacagcccuuaccaaa

SEQ ID NO: 377479 - RNA, 32 nt, Homo Sapiens
caggaagcgcaugcgcaaccgguucuccgaaa

SEQ ID NO: 377480 - RNA, 32 nt, Homo Sapiens
gggaaguagaauuucauguaugcugaagacug

SEQ ID NO: 377481 - RNA, 30 nt, Homo Sapiens
uucuuuaccagugccacccaugucccuagc

SEQ ID NO: 377482 - RNA, 30 nt, Homo Sapiens
ccccaauuaaagguagaaaaccacccugcu

SEQ ID NO: 377483 - RNA, 32 nt, Homo Sapiens
auaauagagcuaauuacaacuuucaagucaug

SEQ ID NO: 377484 - RNA, 32 nt, Homo Sapiens
ccagcaggggagaggggccaucugaugcuucc

SEQ ID NO: 377485 - RNA, 32 nt, Homo Sapiens
uugauuaugauuuuaauguuugaaagauugca

SEQ ID NO: 377486 - RNA, 32 nt, Homo Sapiens
ggguuuuuuuuuucuuuuuuuuuuuuuuaaug

SEQ ID NO: 377487 - RNA, 32 nt, Homo Sapiens
auccugcuggcaucaccuccagagcccugcau

SEQ ID NO: 377488 - RNA, 32 nt, Homo Sapiens
ggagcugaggccuccagugaacagccaagauu

SEQ ID NO: 377489 - RNA, 32 nt, Homo Sapiens
cuccuggaggccggcuggagcgagugugggac

SEQ ID NO: 377490 - RNA, 32 nt, Homo Sapiens
cuuugucgucagaaguuuuuauaucgauuuaa

SEQ ID NO: 377491 - RNA, 32 nt, Homo Sapiens
gaaggugugcguucuuuuuguuugaacaucua

SEQ ID NO: 377492 - RNA, 32 nt, Homo Sapiens
auuauuaaaaacaagggggguggguaauaaau

SEQ ID NO: 377493 - RNA, 32 nt, Homo Sapiens
aauauauaaugaacacguggguauuuaauaag

SEQ ID NO: 377494 - RNA, 32 nt, Homo Sapiens
uguguauacacacacacacacacacacacaca

SEQ ID NO: 377495 - RNA, 32 nt, Homo Sapiens
gagacguuggccccgcucgcguuucugcagcu

SEQ ID NO: 377496 - RNA, 32 nt, Homo Sapiens
accauugaaaauagacugcucauccccucuuc

SEQ ID NO: 377497 - RNA, 32 nt, Homo Sapiens
uugcaggugugagccacugcacccggcccuug

SEQ ID NO: 377498 - RNA, 31 nt, Homo Sapiens
gcagugaaguagacucucagaggacacaagg

SEQ ID NO: 377499 - RNA, 32 nt, Homo Sapiens
ccaugguuccagugcucuggugucacccagga

SEQ ID NO: 377500 - RNA, 32 nt, Homo Sapiens
gucacaaauuuaauggcuuguucaacuguaaa

SEQ ID NO: 377501 - RNA, 32 nt, Homo Sapiens
ccugcgcccccgcuccccccgcauccccucga

SEQ ID NO: 377502 - RNA, 32 nt, Homo Sapiens
gagugcaauggugcaaucuuggcucacuauag

SEQ ID NO: 377503 - RNA, 32 nt, Homo Sapiens
ggcugaucucgaacucuugaccucaggugauc

SEQ ID NO: 377504 - RNA, 32 nt, Homo Sapiens
aaagaaagugaagucagcacauccgcuucugc

SEQ ID NO: 377505 - RNA, 32 nt, Homo Sapiens
ccggccaaaacccaccaauaccaagauggcga

SEQ ID NO: 377506 - RNA, 32 nt, Homo Sapiens
ccgggcucggagccucggcggaccuugcugcc

SEQ ID NO: 377507 - RNA, 32 nt, Homo Sapiens
ccgaccccacccaaaggggccuggagcugcag

SEQ ID NO: 377508 - RNA, 29 nt, Homo Sapiens
caaccugggggacagaggaggcccugucc

SEQ ID NO: 377509 - RNA, 32 nt, Homo Sapiens
ugaugcugaucuuuaacccaccuaaaauuuua

SEQ ID NO: 377510 - RNA, 32 nt, Homo Sapiens
gggggugcggggcuguuguucuucggcgacac

SEQ ID NO: 377511 - RNA, 32 nt, Homo Sapiens
acuuggucucuguccugccccauccucgucac

SEQ ID NO: 377512 - RNA, 32 nt, Homo Sapiens
ggggacagacagagccggaagcgcagucggcc

SEQ ID NO: 377513 - RNA, 32 nt, Homo Sapiens
gccacccaagccugcuggcugcggcccccucu

SEQ ID NO: 377514 - RNA, 32 nt, Homo Sapiens
uugcccugcuaaggaggaucaagacccguaau

SEQ ID NO: 377515 - RNA, 32 nt, Homo Sapiens
cuguccuugccugacaucaguuucaccuccac

SEQ ID NO: 377516 - RNA, 32 nt, Homo Sapiens
ucaccaggccuggcccccaagugcccugggcc

SEQ ID NO: 377517 - RNA, 32 nt, Homo Sapiens
cuagcagugguauuagcuuaugccaaauacag

SEQ ID NO: 377518 - RNA, 32 nt, Homo Sapiens
ggcagaucaaggaucauuucacugauuacaag

SEQ ID NO: 377519 - RNA, 32 nt, Homo Sapiens
aagagaguugacaagaguuacaaaagacagac

SEQ ID NO: 377520 - RNA, 32 nt, Homo Sapiens
uccauaaaaaauuuguucuuuugucaugaauu

SEQ ID NO: 377521 - RNA, 32 nt, Homo Sapiens
caacugcugugaaaaugagguguaauccuacu

SEQ ID NO: 377522 - RNA, 32 nt, Homo Sapiens
cucagauuuuucuuuucuuauuuugugugaaa

SEQ ID NO: 377523 - RNA, 32 nt, Homo Sapiens
gaggguugcagcucccaccucaguuuaguuuu

SEQ ID NO: 377524 - RNA, 32 nt, Homo Sapiens
ccgccacaggccccucacggggcggcagaggc

SEQ ID NO: 377525 - RNA, 32 nt, Homo Sapiens
gaugggaggaagaggggggugggugagcugaa

SEQ ID NO: 377526 - RNA, 32 nt, Homo Sapiens
cgcggggcccccugcacccccagcagcccaca

SEQ ID NO: 377527 - RNA, 32 nt, Homo Sapiens
ugucaugaggaugaaagaauggcauuaaagca

SEQ ID NO: 377528 - RNA, 32 nt, Homo Sapiens
aaaccaucgaugaccgaaagugccaagaccaa

SEQ ID NO: 377529 - RNA, 32 nt, Homo Sapiens
guaagcuagcuaauucuuguuuucugauuuaa

SEQ ID NO: 377530 - RNA, 30 nt, Homo Sapiens
aucuccuguccuuuggcagaagcuccuuua

SEQ ID NO: 377531 - RNA, 32 nt, Homo Sapiens
cucaauucaggccccaggaagcucagaguguu

SEQ ID NO: 377532 - RNA, 32 nt, Homo Sapiens
auucugauuucaggaucugugcuuugauuccu

SEQ ID NO: 377533 - RNA, 32 nt, Homo Sapiens
aaaaucucaccuuguuucaucugucuuacaac

SEQ ID NO: 377534 - RNA, 32 nt, Homo Sapiens
gccugggguagcugcgcagcaggugggucggu

SEQ ID NO: 377535 - RNA, 30 nt, Homo Sapiens
guccugcugcccgugccucggcuggaaggc

SEQ ID NO: 377536 - RNA, 31 nt, Homo Sapiens
gcaccuuccccaucagcucagccaaccauag

SEQ ID NO: 377537 - RNA, 32 nt, Homo Sapiens
ugggaccuggauuuguuuuucuaaauaaaguu

SEQ ID NO: 377538 - RNA, 32 nt, Homo Sapiens
uaccauuccuucccugccccuaggaguggggu

SEQ ID NO: 377539 - RNA, 32 nt, Homo Sapiens
cguccacuagguuuccuguccccugcugcucc

SEQ ID NO: 377540 - RNA, 32 nt, Homo Sapiens
ggucuuggggacgggaagggaacccucuucca

SEQ ID NO: 377541 - RNA, 32 nt, Homo Sapiens
guucauccguugcugccuuaacaagucaccca

SEQ ID NO: 377542 - RNA, 32 nt, Homo Sapiens
aggaggggccgcggcuggcccaggagagaaca

SEQ ID NO: 377543 - RNA, 32 nt, Homo Sapiens
gaaacaggucaaugauggaggcuguggucaga

SEQ ID NO: 377544 - RNA, 31 nt, Homo Sapiens
agcaggcugccggagccagcagcggcaaccc

SEQ ID NO: 377545 - RNA, 32 nt, Homo Sapiens
ccucugguacguggucuccauggcaucugacu

SEQ ID NO: 377546 - RNA, 32 nt, Homo Sapiens
ggaaaacauuuuauggcagucuuaugugcaaa

SEQ ID NO: 377547 - RNA, 32 nt, Homo Sapiens
gcgcuuuguguuccgcuuugacuaccugccca

SEQ ID NO: 377548 - RNA, 32 nt, Homo Sapiens
aggaaaaguuaaaguguagaaaauauugucuu

SEQ ID NO: 377549 - RNA, 32 nt, Homo Sapiens
ugccggcuccgguccccggcgcggcuguccga

SEQ ID NO: 377550 - RNA, 32 nt, Homo Sapiens
agggggagcgcagaggcgacggcccccaugcc

SEQ ID NO: 377551 - RNA, 32 nt, Homo Sapiens
ucccacuuucuuuuuucuuuccuggaauggag

SEQ ID NO: 377552 - RNA, 32 nt, Homo Sapiens
gucucuccaguguccugauucccacaacagug

SEQ ID NO: 377553 - RNA, 32 nt, Homo Sapiens
ggcuaguuuucaacuucaguacucaaauucaa

SEQ ID NO: 377554 - RNA, 32 nt, Homo Sapiens
accaugugcuucaaggcuagaggucuuggcgg

SEQ ID NO: 377555 - RNA, 32 nt, Homo Sapiens
ccccacagauuaaauuuaauuaauuaauucaa

SEQ ID NO: 377556 - RNA, 32 nt, Homo Sapiens
guucccccuaaaaccagcaacuggaguauaag

SEQ ID NO: 377557 - RNA, 32 nt, Homo Sapiens
uaagcugcuuuuuucuucuauuaauuggauca

SEQ ID NO: 377558 - RNA, 32 nt, Homo Sapiens
uuauguggcauuaagacaaucaaguccucaca

SEQ ID NO: 377559 - RNA, 32 nt, Homo Sapiens
ggcauaaaauaaauuugaaauaaaauauuuug

SEQ ID NO: 377560 - RNA, 32 nt, Homo Sapiens
aaugcugcugguuucgcagagcgaccgguugg

SEQ ID NO: 377561 - RNA, 32 nt, Homo Sapiens
auucagggaagacacuggcguccauagucaga

SEQ ID NO: 377562 - RNA, 32 nt, Homo Sapiens
aaggucuccuuuauucuuuuggaccaaggcug

SEQ ID NO: 377563 - RNA, 32 nt, Homo Sapiens
agcucggguucccaggguucguagcuuccaac

SEQ ID NO: 377564 - RNA, 32 nt, Homo Sapiens
aaaauauaauauauuuuuuuaccaaucgguag

SEQ ID NO: 377565 - RNA, 32 nt, Homo Sapiens
gucgcagacucgccgcgggagccccagcccaa

SEQ ID NO: 377566 - RNA, 32 nt, Homo Sapiens
acagcacuucggagacgggcucugccggaugc

SEQ ID NO: 377567 - RNA, 32 nt, Homo Sapiens
ccugccccugucugccagcagaggcaguaggg

SEQ ID NO: 377568 - RNA, 32 nt, Homo Sapiens
acaguauucuaccauucaguaauuuugguuaa

SEQ ID NO: 377569 - RNA, 32 nt, Homo Sapiens
gguggccccagcucagaaucugcagaagugca

SEQ ID NO: 377570 - RNA, 32 nt, Homo Sapiens
agcagguggcagagccgggacaucgcgugauu

SEQ ID NO: 377571 - RNA, 32 nt, Homo Sapiens
ggggggaccuagcucugucuucccagccccuu

SEQ ID NO: 377572 - RNA, 32 nt, Homo Sapiens
gcucccgggcccggccgcgguuccccacucgg

SEQ ID NO: 377573 - RNA, 32 nt, Homo Sapiens
agaugcuuugggggcccagcucugcagauucc

SEQ ID NO: 377574 - RNA, 32 nt, Homo Sapiens
gaguuucuuccuucugguggguucguggucuc

SEQ ID NO: 377575 - RNA, 32 nt, Homo Sapiens
aucuccucuaguauuuuccauguaucaggaca

SEQ ID NO: 377576 - RNA, 32 nt, Homo Sapiens
caccccuccccuccccuccucagagcccaccc

SEQ ID NO: 377577 - RNA, 32 nt, Homo Sapiens
cucuacaaaaagacacaaaaauuagacaggug

SEQ ID NO: 377578 - RNA, 32 nt, Homo Sapiens
ggcugccggaggagaccccacuaacccagccu

SEQ ID NO: 377579 - RNA, 32 nt, Homo Sapiens
auggaugaacucucuuaucucuggcuucuaga

SEQ ID NO: 377580 - RNA, 32 nt, Homo Sapiens
cacagaacuaguccaacucuuaaaaggagaga

SEQ ID NO: 377581 - RNA, 32 nt, Homo Sapiens
aauguaaaugacugagucauugcuuugcuaag

SEQ ID NO: 377582 - RNA, 32 nt, Homo Sapiens
uucuauuucuuacucuauguauggcuuuguuu

SEQ ID NO: 377583 - RNA, 32 nt, Homo Sapiens
uuaagaaaaucuauuuuguaacuuucucuaug

SEQ ID NO: 377584 - RNA, 32 nt, Homo Sapiens
gcgaggagaagcucggcggcgucccggggccg

SEQ ID NO: 377585 - RNA, 32 nt, Homo Sapiens
aaguguuuucuuuugcgcacuuaauaaagcuc

SEQ ID NO: 377586 - RNA, 32 nt, Homo Sapiens
auggugcuauccuggugcuauuggggugggga

SEQ ID NO: 377587 - RNA, 32 nt, Homo Sapiens
gucgucccgcggccgccggcggcaaggucggc

SEQ ID NO: 377588 - RNA, 32 nt, Homo Sapiens
uggggggccucgcucugcccucauggggcggc

SEQ ID NO: 377589 - RNA, 32 nt, Homo Sapiens
cgccggcguccgcggcagcugauaccagaguc

SEQ ID NO: 377590 - RNA, 32 nt, Homo Sapiens
caaagcagcauuaaaauuucugaacugccaaa

SEQ ID NO: 377591 - RNA, 32 nt, Homo Sapiens
acucauucuuugauguucagaugguuguggcc

SEQ ID NO: 377592 - RNA, 32 nt, Homo Sapiens
gauuuggcgcuccuccgaaggcacaaaacucc

SEQ ID NO: 377593 - RNA, 32 nt, Homo Sapiens
aaaguagaagugauaaaugcaaguuauguuuu

SEQ ID NO: 377594 - RNA, 32 nt, Homo Sapiens
ugccucaccgcccagacauugauuuguucaga

SEQ ID NO: 377595 - RNA, 32 nt, Homo Sapiens
guugacaaagcauuuucacauguaucucaugu

SEQ ID NO: 377596 - RNA, 32 nt, Homo Sapiens
auuggguucaguggcgggcggcgugggaggcu

SEQ ID NO: 377597 - RNA, 32 nt, Homo Sapiens
guuucagguucaguauuauguaguuguucguu

SEQ ID NO: 377598 - RNA, 32 nt, Homo Sapiens
uucucugcuucauauucaugugacccacuaau

SEQ ID NO: 377599 - RNA, 32 nt, Homo Sapiens
gggacuggcggcucggagguugcguccacccu

SEQ ID NO: 377600 - RNA, 32 nt, Homo Sapiens
gcucccagccgccccaggaccucccagcuccu

SEQ ID NO: 377601 - RNA, 32 nt, Homo Sapiens
cgccuuggggagaggacggguggggaccgccg

SEQ ID NO: 377602 - RNA, 32 nt, Homo Sapiens
aacauacuuugcugucaaaauuacaauuguaa

SEQ ID NO: 377603 - RNA, 32 nt, Homo Sapiens
aaccacucaguacccacugggcagugggaagg

SEQ ID NO: 377604 - RNA, 32 nt, Homo Sapiens
aggaaauucuacaggauuaggauuucuaagac

SEQ ID NO: 377605 - RNA, 32 nt, Homo Sapiens
cccagccugggcagccugcgcugcugaccacc

SEQ ID NO: 377606 - RNA, 32 nt, Homo Sapiens
ugagcugagggcccgcggcggccgcggccggu

SEQ ID NO: 377607 - RNA, 32 nt, Homo Sapiens
auggggggucauuugcaguaguagaaccuguu

SEQ ID NO: 377608 - RNA, 32 nt, Homo Sapiens
gucuaguguucucauucacugauucagucagu

SEQ ID NO: 377609 - RNA, 32 nt, Homo Sapiens
aaacaaaagcaaaaacaaacauugaauuaaau

SEQ ID NO: 377610 - RNA, 32 nt, Homo Sapiens
ugucuaauucuauguguuuugucuuuuucuua

SEQ ID NO: 377611 - RNA, 32 nt, Homo Sapiens
guggaaaaaauauaauuauuuucaucagacuu

SEQ ID NO: 377612 - RNA, 32 nt, Homo Sapiens
ccucccaccggccugcccuuccccgcgggacu

SEQ ID NO: 377613 - RNA, 32 nt, Homo Sapiens
ugccaaaguucagaaaacauaaucuuaucuga

SEQ ID NO: 377614 - RNA, 28 nt, Homo Sapiens
caagugaaaaauuaacauguggacugga

SEQ ID NO: 377615 - RNA, 32 nt, Homo Sapiens
uuuaaucauaaucaacaucaguuuuugaccca

SEQ ID NO: 377616 - RNA, 32 nt, Homo Sapiens
gauaugaagcaauacaguacucuucaaagaag

SEQ ID NO: 377617 - RNA, 32 nt, Homo Sapiens
ugauaggagggauauuuacauauuuuagugga

SEQ ID NO: 377618 - RNA, 32 nt, Homo Sapiens
gguacauguuccaaaaacuuugaaaagcuaaa

SEQ ID NO: 377619 - RNA, 32 nt, Homo Sapiens
gcugaagggcuuuggggagccaaagcagcaua

SEQ ID NO: 377620 - RNA, 32 nt, Homo Sapiens
aagacagaaaaagaagaacucaaagauacaca

SEQ ID NO: 377621 - RNA, 28 nt, Homo Sapiens
gaggugccgguguccaggauggccugac

SEQ ID NO: 377622 - RNA, 32 nt, Homo Sapiens
cccccaggcagacagugaagagaaucagaaaa

SEQ ID NO: 377623 - RNA, 32 nt, Homo Sapiens
uucagaagugaagagggggcuagaaggacucu

SEQ ID NO: 377624 - RNA, 32 nt, Homo Sapiens
guguuugugggaaagccaggaggaaaagcucc

SEQ ID NO: 377625 - RNA, 32 nt, Homo Sapiens
aaguuuauuguuaaugguucuuacagaguauc

SEQ ID NO: 377626 - RNA, 32 nt, Homo Sapiens
ggggcugccggcagccggggcuggggagagac

SEQ ID NO: 377627 - RNA, 32 nt, Homo Sapiens
cucuggugcaagauaaaaggucuugggaaaac

SEQ ID NO: 377628 - RNA, 32 nt, Homo Sapiens
aagucuuuuuauuuuuccucuuuucauaaaug

SEQ ID NO: 377629 - RNA, 32 nt, Homo Sapiens
uagcgguaggucggcgggacuuccguguuggc

SEQ ID NO: 377630 - RNA, 32 nt, Homo Sapiens
ucuccuuguucuaccuaucaccacauuuucuc

SEQ ID NO: 377631 - RNA, 32 nt, Homo Sapiens
gagguuguacuauuuuggccaagucuguagaa

SEQ ID NO: 377632 - RNA, 32 nt, Homo Sapiens
gaauuucaaaggcaauaugaaaaaauggaguu

SEQ ID NO: 377633 - RNA, 32 nt, Homo Sapiens
cacuacuacuuuuuguauucuagacaguuuuc

SEQ ID NO: 377634 - RNA, 31 nt, Homo Sapiens
agaagacuugguaauugacuauuugggagug

SEQ ID NO: 377635 - RNA, 32 nt, Homo Sapiens
aucaagcauuaauauggaaauaaaccagccca

SEQ ID NO: 377636 - RNA, 32 nt, Homo Sapiens
cgcuguacacgacauugcuaaugaggacaccg

SEQ ID NO: 377637 - RNA, 32 nt, Homo Sapiens
agcuagacuccaucuuuccaauaaaaaugagc

SEQ ID NO: 377638 - RNA, 32 nt, Homo Sapiens
agugaaaugaggcucuccgcccggggccggcc

SEQ ID NO: 377639 - RNA, 32 nt, Homo Sapiens
ccuccucuuccuccuccuccuccaccuccggc

SEQ ID NO: 377640 - RNA, 32 nt, Homo Sapiens
gauuuagaugacuguggcaucauagacuccca

SEQ ID NO: 377641 - RNA, 32 nt, Homo Sapiens
cagcugcuacuaccggagguguguggcaccuu

SEQ ID NO: 377642 - RNA, 32 nt, Homo Sapiens
uccgcucugugacaguccaugacgggcacacu

SEQ ID NO: 377643 - RNA, 32 nt, Homo Sapiens
cuuccugcuucacuccuccccacugcugacau

SEQ ID NO: 377644 - RNA, 32 nt, Homo Sapiens
cuuauguuuauuuuccaauuuagaugauuaac

SEQ ID NO: 377645 - RNA, 31 nt, Homo Sapiens
caacaguauugagccaaaagaagacugugug

SEQ ID NO: 377646 - RNA, 31 nt, Homo Sapiens
cuggccaugggcccggcccagccccgacucc

SEQ ID NO: 377647 - RNA, 32 nt, Homo Sapiens
ggagugguuuggggucgccggaucucgaggcu

SEQ ID NO: 377648 - RNA, 32 nt, Homo Sapiens
gaggccagaaaguuguuaggccugccgcaggc

SEQ ID NO: 377649 - RNA, 32 nt, Homo Sapiens
cucaaaacacaugggcuaguacuugagguguu

SEQ ID NO: 377650 - RNA, 32 nt, Homo Sapiens
caggugcggagaggaggcuccgugagaugggg

SEQ ID NO: 377651 - RNA, 32 nt, Homo Sapiens
uuccgggucccgagacgaccgcacgcugccga

SEQ ID NO: 377652 - RNA, 32 nt, Homo Sapiens
guaaauuugugaucuucccacaauacuugccu

SEQ ID NO: 377653 - RNA, 32 nt, Homo Sapiens
uuauuuuuaacccauuuauccuguuugugcau

SEQ ID NO: 377654 - RNA, 32 nt, Homo Sapiens
auuggugcucaacuacagccugccuggauaug

SEQ ID NO: 377655 - RNA, 32 nt, Homo Sapiens
uacuggucuucagauuaugagacucgaugaua

SEQ ID NO: 377656 - RNA, 32 nt, Homo Sapiens
gccacuaaucccaacauuuuaggaggccuagg

SEQ ID NO: 377657 - RNA, 32 nt, Homo Sapiens
acagccccgcggccaccagagggccgucccug

SEQ ID NO: 377658 - RNA, 32 nt, Homo Sapiens
gcccugagcgucgcagucaugccggccggacc

SEQ ID NO: 377659 - RNA, 32 nt, Homo Sapiens
cuugugugucaggcccucugccugcacucccu

SEQ ID NO: 377660 - RNA, 32 nt, Homo Sapiens
ugugagugacacuugcuggggguggagggugg

SEQ ID NO: 377661 - RNA, 32 nt, Homo Sapiens
gggacccccacacacaucccagcccuccggcc

SEQ ID NO: 377662 - RNA, 32 nt, Homo Sapiens
cuggcggggcuuugggcuguagauuccugucu

SEQ ID NO: 377663 - RNA, 32 nt, Homo Sapiens
caaaaccugccagcuaguggaacagccuucua

SEQ ID NO: 377664 - RNA, 32 nt, Homo Sapiens
cuacccuaaugguaaagggcugacuggggagg

SEQ ID NO: 377665 - RNA, 32 nt, Homo Sapiens
guagaggccuaccuugaauuaaggguuauacu

SEQ ID NO: 377666 - RNA, 32 nt, Homo Sapiens
aaagaaugaugaugguacauugauaggaauug

SEQ ID NO: 377667 - RNA, 32 nt, Homo Sapiens
caguugcccuggccuuggggcccccaggaugc

SEQ ID NO: 377668 - RNA, 32 nt, Homo Sapiens
uauucuuuuggauauaaauuucaacagugaga

SEQ ID NO: 377669 - RNA, 32 nt, Homo Sapiens
ggcguagcccucgcucgccugggucagggggu

SEQ ID NO: 377670 - RNA, 32 nt, Homo Sapiens
gcugggucuucgucccuguguacaucgcagca

SEQ ID NO: 377671 - RNA, 31 nt, Homo Sapiens
uugaagaaauaaaugguauguugcugcugac

SEQ ID NO: 377672 - RNA, 32 nt, Homo Sapiens
uguuuuauucuguuuucuuaacuguuacauga

SEQ ID NO: 377673 - RNA, 32 nt, Homo Sapiens
ugcccuggguugacccugguggcauauuuccu

SEQ ID NO: 377674 - RNA, 32 nt, Homo Sapiens
gcucagaugcuguuuacggauauuuauauucu

SEQ ID NO: 377675 - RNA, 32 nt, Homo Sapiens
auuagugauguccuuaaaauguggucugccaa

SEQ ID NO: 377676 - RNA, 32 nt, Homo Sapiens
gaucauacaaauaaucuaagauuuuacagucu

SEQ ID NO: 377677 - RNA, 31 nt, Homo Sapiens
agcaggacuacaucgaacucugaugugccgg

SEQ ID NO: 377678 - RNA, 32 nt, Homo Sapiens
ggaaagggcuccugaagcagcugcagccgagc

SEQ ID NO: 377679 - RNA, 32 nt, Homo Sapiens
ugcacuguagcggugucagccacauucccggu

SEQ ID NO: 377680 - RNA, 32 nt, Homo Sapiens
uagaaacaguguaguaaaaauaugguauaaaa

SEQ ID NO: 377681 - RNA, 32 nt, Homo Sapiens
cuccgggaccccagcccucaggauuccugaug

SEQ ID NO: 377682 - RNA, 32 nt, Homo Sapiens
gucagcccagggagaagaagaagaugguccac

SEQ ID NO: 377683 - RNA, 32 nt, Homo Sapiens
caaggcucugguuuuuaugaguuuuaugucau

SEQ ID NO: 377684 - RNA, 32 nt, Homo Sapiens
cugcuccgagaccucgaggguccgcugugggg

SEQ ID NO: 377685 - RNA, 32 nt, Homo Sapiens
guugcuguguaccuaagaguauaguaagguca

SEQ ID NO: 377686 - RNA, 32 nt, Homo Sapiens
cugaacucaagccccagcagcccgugccugcg

SEQ ID NO: 377687 - RNA, 32 nt, Homo Sapiens
ggccgcugcccccaugcucgcgcugggcaggg

SEQ ID NO: 377688 - RNA, 32 nt, Homo Sapiens
aauggagcuuucuguauauaaacguggagauu

SEQ ID NO: 377689 - RNA, 32 nt, Homo Sapiens
cccuuccucacucguuuguaaucgccgucugu

SEQ ID NO: 377690 - RNA, 32 nt, Homo Sapiens
uuuugugugauuuaaagacacuuuuuggacuc

SEQ ID NO: 377691 - RNA, 32 nt, Homo Sapiens
gcaugugccauggccuggggcaggagcagcaa

SEQ ID NO: 377692 - RNA, 32 nt, Homo Sapiens
aguguuuaauuuccgauuuuuuccucugcauu

SEQ ID NO: 377693 - RNA, 32 nt, Homo Sapiens
auucuuguauuuaugugagacuugcccaucua

SEQ ID NO: 377694 - RNA, 32 nt, Homo Sapiens
ccuuuuguucacauuuaggacucucagugcca

SEQ ID NO: 377695 - RNA, 32 nt, Homo Sapiens
acuaaaaaagugaggacgagaguaagaacucc

SEQ ID NO: 377696 - RNA, 32 nt, Homo Sapiens
gaacugucacgacuggaagggcgugaggccuc

SEQ ID NO: 377697 - RNA, 32 nt, Homo Sapiens
cacccgcgguggggcgggggcgcucugccagc

SEQ ID NO: 377698 - RNA, 32 nt, Homo Sapiens
ucagcaguaguacuuuguauguguugagaguu

SEQ ID NO: 377699 - RNA, 32 nt, Homo Sapiens
aacuaaguggcuuuucuucuguccucuucuca

SEQ ID NO: 377700 - RNA, 32 nt, Homo Sapiens
gaggaaaauguugcaauaaaagaauauguugu

SEQ ID NO: 377701 - RNA, 32 nt, Homo Sapiens
gcgcgggcugcugcggcugcugccgggacgcg

SEQ ID NO: 377702 - RNA, 32 nt, Homo Sapiens
gaguuggauugcugaauuacaaugaaacaugu

SEQ ID NO: 377703 - RNA, 32 nt, Homo Sapiens
cgcauccugcagggcuucuccuccucugucuu

SEQ ID NO: 377704 - RNA, 32 nt, Homo Sapiens
acuugcuccugauuaugaugcuuucgauguug

SEQ ID NO: 377705 - RNA, 32 nt, Homo Sapiens
uggguccugcccugcccucccaggaguccagc

SEQ ID NO: 377706 - RNA, 32 nt, Homo Sapiens
uuuguaauucuuuucucucaaaugaaaauuua

SEQ ID NO: 377707 - RNA, 32 nt, Homo Sapiens
ccauggcccaaucagcaugcacuuccucccuu

SEQ ID NO: 377708 - RNA, 32 nt, Homo Sapiens
gaggcaggagaauggcgggaaccugggaggcg

SEQ ID NO: 377709 - RNA, 32 nt, Homo Sapiens
auaaaauccaaaguuccuaucauggcaugcaa

SEQ ID NO: 377710 - RNA, 32 nt, Homo Sapiens
cccccugcccucgccuggaaucaguguuacug

SEQ ID NO: 377711 - RNA, 32 nt, Homo Sapiens
ggcaggucuauucucaucuuauaauucauaau

SEQ ID NO: 377712 - RNA, 31 nt, Homo Sapiens
cuggggcggaaccuggaggugcuguuucuua

SEQ ID NO: 377713 - RNA, 32 nt, Homo Sapiens
guuuccggguggccagaggagcaaagcugccu

SEQ ID NO: 377714 - RNA, 32 nt, Homo Sapiens
ugcuugaguaaaaaggaaauaguugcugaaga

SEQ ID NO: 377715 - RNA, 32 nt, Homo Sapiens
guuaauauauauaauacuuaaaaauaugugag

SEQ ID NO: 377716 - RNA, 32 nt, Homo Sapiens
ugcuggacugucagccagucgcagggccggcc

SEQ ID NO: 377717 - RNA, 32 nt, Homo Sapiens
uguuuaaaauugcuuugagugauucauacaga

SEQ ID NO: 377718 - RNA, 32 nt, Homo Sapiens
auugguuccaguaugaaagugauucaucuuug

SEQ ID NO: 377719 - RNA, 32 nt, Homo Sapiens
auuagcugggcgugcuggcacgugccuauagu

SEQ ID NO: 377720 - RNA, 32 nt, Homo Sapiens
auaugaagaauaaaguuaagauuuggucaaac

SEQ ID NO: 377721 - RNA, 32 nt, Homo Sapiens
uagaauuguagcaauaaguaaauuucagccau

SEQ ID NO: 377722 - RNA, 32 nt, Homo Sapiens
uguauguuuauaaacuaaaugaagauaagaua

SEQ ID NO: 377723 - RNA, 32 nt, Homo Sapiens
cccaaauguggguggaggaaaccuguaauuuc

SEQ ID NO: 377724 - RNA, 32 nt, Homo Sapiens
gucagugaacaaagggcagcauguguggcugg

SEQ ID NO: 377725 - RNA, 32 nt, Homo Sapiens
caacuaaacaacauuucagugggugaggcugc

SEQ ID NO: 377726 - RNA, 32 nt, Homo Sapiens
aauagauuuccugugaguaaucuugcaaauau

SEQ ID NO: 377727 - RNA, 32 nt, Homo Sapiens
augcauacagaaauauaauaaaauguguugaa

SEQ ID NO: 377728 - RNA, 31 nt, Homo Sapiens
cuacuuguacauaauuaauggaauuggcuua

SEQ ID NO: 377729 - RNA, 32 nt, Homo Sapiens
uucugcccaccccgccucugggcucacaccag

SEQ ID NO: 377730 - RNA, 32 nt, Homo Sapiens
ucccaaaaggcggcacccagcuccucaaucga

SEQ ID NO: 377731 - RNA, 32 nt, Homo Sapiens
uaaugacauguauaguauacucuugccuuccu

SEQ ID NO: 377732 - RNA, 32 nt, Homo Sapiens
gccaaggcuuggcagcgcuagaggcugaagga

SEQ ID NO: 377733 - RNA, 32 nt, Homo Sapiens
gaagcauggcuucggggugcugccucucccuc

SEQ ID NO: 377734 - RNA, 32 nt, Homo Sapiens
caaauagguagucaaggcagccucaucucccc

SEQ ID NO: 377735 - RNA, 32 nt, Homo Sapiens
ggagccccagccagcccuucccaggccagcga

SEQ ID NO: 377736 - RNA, 32 nt, Homo Sapiens
uaaguugaaaauuuaauaagccugaaggucga

SEQ ID NO: 377737 - RNA, 32 nt, Homo Sapiens
ucuggaagacggcagagcugccgccauuuugc

SEQ ID NO: 377738 - RNA, 32 nt, Homo Sapiens
uucuucuuucuuucuuuuuuuuuuuuuuuuuu

SEQ ID NO: 377739 - RNA, 32 nt, Homo Sapiens
cccagaagucccuacucuuggaccuccuggag

SEQ ID NO: 377740 - RNA, 32 nt, Homo Sapiens
cccaugccuggaagaggagcugguggcugcca

SEQ ID NO: 377741 - RNA, 32 nt, Homo Sapiens
ccccgcuccagaucugcacuggguguggcccc

SEQ ID NO: 377742 - RNA, 32 nt, Homo Sapiens
gacagcgggcuccugucucgggacgcugggac

SEQ ID NO: 377743 - RNA, 32 nt, Homo Sapiens
ccaugcacgcaccucacugccaggccauuaaa

SEQ ID NO: 377744 - RNA, 32 nt, Homo Sapiens
agggugcgggcucuucgcccuuuguguccucc

SEQ ID NO: 377745 - RNA, 31 nt, Homo Sapiens
ggggaggggcagcagaaccaaggcaaauauu

SEQ ID NO: 377746 - RNA, 32 nt, Homo Sapiens
gcguuucugagcggcgggcgcagggaggucgc

SEQ ID NO: 377747 - RNA, 32 nt, Homo Sapiens
aggacaaaacacgcgugcgcgcggcgggcgag

SEQ ID NO: 377748 - RNA, 32 nt, Homo Sapiens
gccggguguucccuuccacuccugguugccuc

SEQ ID NO: 377749 - RNA, 32 nt, Homo Sapiens
gagcugccgcgacgcccggcccgcagggcagg

SEQ ID NO: 377750 - RNA, 32 nt, Homo Sapiens
uguauaguauuuacauucucuuuuagguagaa

SEQ ID NO: 377751 - RNA, 32 nt, Homo Sapiens
ccgccccucagcucgccgcagccccggcuccu

SEQ ID NO: 377752 - RNA, 32 nt, Homo Sapiens
ccaggagagaagcauggcgcccugcccaccca

SEQ ID NO: 377753 - RNA, 32 nt, Homo Sapiens
ccauggagcucuggaagcugggcugggggagg

SEQ ID NO: 377754 - RNA, 32 nt, Homo Sapiens
ucuacaugacauucaggacacacacacacaca

SEQ ID NO: 377755 - RNA, 32 nt, Homo Sapiens
uuuagaggaaaacaguuauuuugcagcauuac

SEQ ID NO: 377756 - RNA, 32 nt, Homo Sapiens
agcaagaccacagccaugacaaacaccaggau

SEQ ID NO: 377757 - RNA, 32 nt, Homo Sapiens
ggaaucuccagaugaacuauuaaugcacuguc

SEQ ID NO: 377758 - RNA, 32 nt, Homo Sapiens
cagugaaucauuauauuuuaaaacagaaaagg

SEQ ID NO: 377759 - RNA, 32 nt, Homo Sapiens
uaaaggugcaaauaucucugcugcugaugggg

SEQ ID NO: 377760 - RNA, 32 nt, Homo Sapiens
gggagaaaccaucuucacagacuguaggagaa

SEQ ID NO: 377761 - RNA, 32 nt, Homo Sapiens
gcuagcucgugcuacauugaaacuugaguuug

SEQ ID NO: 377762 - RNA, 32 nt, Homo Sapiens
ccacuucugugccuuuccagcuucuagaggcu

SEQ ID NO: 377763 - RNA, 32 nt, Homo Sapiens
uaacaauggcagccuuuuuguugcugggacau

SEQ ID NO: 377764 - RNA, 32 nt, Homo Sapiens
agaagaaccuguccucccgcccggggccccau

SEQ ID NO: 377765 - RNA, 32 nt, Homo Sapiens
aagggggcaggagaggacaggcgucugaagac

SEQ ID NO: 377766 - RNA, 32 nt, Homo Sapiens
acuacuguucuccucacugccucuuccuauua

SEQ ID NO: 377767 - RNA, 32 nt, Homo Sapiens
acagucucucucugucacccaggcuggcgugc

SEQ ID NO: 377768 - RNA, 32 nt, Homo Sapiens
gguggggcugcaggacgauaagaauucggaag

SEQ ID NO: 377769 - RNA, 32 nt, Homo Sapiens
gagguaaaauauuuauaacauaaaacugacca

SEQ ID NO: 377770 - RNA, 32 nt, Homo Sapiens
gucuuacuuaggaggccccggguguagaugcc

SEQ ID NO: 377771 - RNA, 32 nt, Homo Sapiens
cugggucuugcugcauugcccgggcuagucuc

SEQ ID NO: 377772 - RNA, 32 nt, Homo Sapiens
agcugccuccugucucagaaauccauucauuu

SEQ ID NO: 377773 - RNA, 32 nt, Homo Sapiens
uuguucugcuacuuccuucucuggaaguaaua

SEQ ID NO: 377774 - RNA, 32 nt, Homo Sapiens
ugugcacguucguuuauuucugcaucuucccu

SEQ ID NO: 377775 - RNA, 32 nt, Homo Sapiens
ccggaggaaaauuuguguugggcccacuaucc

SEQ ID NO: 377776 - RNA, 32 nt, Homo Sapiens
cucacccccaaccgucggcccagucggacggu

SEQ ID NO: 377777 - RNA, 32 nt, Homo Sapiens
accauaguuuacaauauuauguuuccuaauua

SEQ ID NO: 377778 - RNA, 32 nt, Homo Sapiens
ugucuuaaggcuuuuugaagcuuauuuuacug

SEQ ID NO: 377779 - RNA, 32 nt, Homo Sapiens
ccagcaggcccgcggcuguuuccccucggucc

SEQ ID NO: 377780 - RNA, 32 nt, Homo Sapiens
gcuguucugaccauucucuguguuggggcugu

SEQ ID NO: 377781 - RNA, 32 nt, Homo Sapiens
ucccucugccccagccggccccgcgccaccau

SEQ ID NO: 377782 - RNA, 32 nt, Homo Sapiens
agagcucaguuucccucucccccuccccaaac

SEQ ID NO: 377783 - RNA, 32 nt, Homo Sapiens
aauaagggcauuggaccugagaacuugaugcc

SEQ ID NO: 377784 - RNA, 32 nt, Homo Sapiens
acgggcauuuuuuuuucuuugcuucauggaau

SEQ ID NO: 377785 - RNA, 32 nt, Homo Sapiens
uaauuuggcuucaaagacaaauuuuugaccac

SEQ ID NO: 377786 - RNA, 32 nt, Homo Sapiens
ggcucggaagcagccccggaaacgacggcauu

SEQ ID NO: 377787 - RNA, 32 nt, Homo Sapiens
guuuuguauguuaacaguacuuuauugaggug

SEQ ID NO: 377788 - RNA, 32 nt, Homo Sapiens
gccugcuuuuuggaggaaacuagcuagauuuu

SEQ ID NO: 377789 - RNA, 32 nt, Homo Sapiens
cugggcgugguggcucacgccuauaucccagc

SEQ ID NO: 377790 - RNA, 32 nt, Homo Sapiens
aaucgcugccuccuuuccccagccccaccuug

SEQ ID NO: 377791 - RNA, 32 nt, Homo Sapiens
uggaauacagaaaaagggcaugaaaguuguuu

SEQ ID NO: 377792 - RNA, 32 nt, Homo Sapiens
caggagacacgcgaccggcagcuccuggagcg

SEQ ID NO: 377793 - RNA, 32 nt, Homo Sapiens
cugcacuugaacaucagacuccagguucuuca

SEQ ID NO: 377794 - RNA, 32 nt, Homo Sapiens
gugagcgugcagggcaaaaaccacgugagcug

SEQ ID NO: 377795 - RNA, 32 nt, Homo Sapiens
ugagaggagcagccacaucugcuuuuggauuu

SEQ ID NO: 377796 - RNA, 32 nt, Homo Sapiens
aagguguuuuuggggaaaaaaaucacaaucug

SEQ ID NO: 377797 - RNA, 32 nt, Homo Sapiens
ugcauuuuccacucaugcagcugguucuauaa

SEQ ID NO: 377798 - RNA, 32 nt, Homo Sapiens
aggcgucgggccugggccgucagggcagcugu

SEQ ID NO: 377799 - RNA, 32 nt, Homo Sapiens
gcaccugcgccgggcggccauggacuuguaca

SEQ ID NO: 377800 - RNA, 32 nt, Homo Sapiens
ccucucugggucucuaucuccuccucuuacaa

SEQ ID NO: 377801 - RNA, 32 nt, Homo Sapiens
uaguggguguggaaccgagccccuaguucaca

SEQ ID NO: 377802 - RNA, 32 nt, Homo Sapiens
aaugcacucagggucagcaguggaguuuaaaa

SEQ ID NO: 377803 - RNA, 32 nt, Homo Sapiens
gaucuguuucuacuauggauuggaaacuuguu

SEQ ID NO: 377804 - RNA, 32 nt, Homo Sapiens
cauuucuagguggucuuuuccuuauuugacau

SEQ ID NO: 377805 - RNA, 29 nt, Homo Sapiens
cucgagggaagauggcggacgaggagaag

SEQ ID NO: 377806 - RNA, 32 nt, Homo Sapiens
cuccggaggccaugccggcguuggcgcgcgac

SEQ ID NO: 377807 - RNA, 32 nt, Homo Sapiens
gccaugugucacugaggccuggauuugagcuu

SEQ ID NO: 377808 - RNA, 32 nt, Homo Sapiens
ggaaggacuccaugggccaucgugggccaagg

SEQ ID NO: 377809 - RNA, 32 nt, Homo Sapiens
cugcuucugcccgagcccgcggccucacgcgc

SEQ ID NO: 377810 - RNA, 32 nt, Homo Sapiens
aaaaggcaacagugguguccaauauacuuuug

SEQ ID NO: 377811 - RNA, 32 nt, Homo Sapiens
uucaaugaaacacucacgaugacuacugcgcc

SEQ ID NO: 377812 - RNA, 32 nt, Homo Sapiens
ccuccccuggggaugaggguuggguguccaug

SEQ ID NO: 377813 - RNA, 32 nt, Homo Sapiens
ucucccaagcccgcguccccucacgcguggcc

SEQ ID NO: 377814 - RNA, 32 nt, Homo Sapiens
ggagagaacucuucuuugucucucccaguuuc

SEQ ID NO: 377815 - RNA, 32 nt, Homo Sapiens
ucccccaugcuguucuagugauaguucucaga

SEQ ID NO: 377816 - RNA, 32 nt, Homo Sapiens
acggccagggagaggagguggccuagcgcugg

SEQ ID NO: 377817 - RNA, 32 nt, Homo Sapiens
aguuuucaauuucaaaucacuccuugaaauac

SEQ ID NO: 377818 - RNA, 32 nt, Homo Sapiens
agacaagaaaucauggccccuugcuugauucu

SEQ ID NO: 377819 - RNA, 32 nt, Homo Sapiens
gggcuguggagcagccggcgucacugcccagg

SEQ ID NO: 377820 - RNA, 32 nt, Homo Sapiens
gccccucaucuccccccacaccuccuagccag

SEQ ID NO: 377821 - RNA, 32 nt, Homo Sapiens
cuuacucuaccuugcuccuacuuuucucuaag

SEQ ID NO: 377822 - RNA, 32 nt, Homo Sapiens
cauuaguuauauuuaaugguuauuuucaucac

SEQ ID NO: 377823 - RNA, 32 nt, Homo Sapiens
gcacaugcauucaaaaauaggcauuugguaca

SEQ ID NO: 377824 - RNA, 31 nt, Homo Sapiens
aagaauugauaaaaacagugugacauauuaa

SEQ ID NO: 377825 - RNA, 32 nt, Homo Sapiens
aauuuccaauucuccuacacucugucagaagc

SEQ ID NO: 377826 - RNA, 32 nt, Homo Sapiens
ucuaccaaaauuacaaaaauuagccgagcaug

SEQ ID NO: 377827 - RNA, 32 nt, Homo Sapiens
agccaucgccuggccccggcucucuggaccuu

SEQ ID NO: 377828 - RNA, 32 nt, Homo Sapiens
uaauacucaagagaaugguggaagguuaaaca

SEQ ID NO: 377829 - RNA, 32 nt, Homo Sapiens
aguggaggaaauguggcugauuuucuuaauua

SEQ ID NO: 377830 - RNA, 32 nt, Homo Sapiens
aucuggaagauaacugccugcagucuaggugg

SEQ ID NO: 377831 - RNA, 32 nt, Homo Sapiens
cucacacaugcacuccuucuccccaaggccag

SEQ ID NO: 377832 - RNA, 32 nt, Homo Sapiens
caggagccacuugaagugugggacacaguuga

SEQ ID NO: 377833 - RNA, 32 nt, Homo Sapiens
augacuuccccugccuccuacuccaguaugac

SEQ ID NO: 377834 - RNA, 32 nt, Homo Sapiens
ucuggaaugugcucuucuggaaguggaucugc

SEQ ID NO: 377835 - RNA, 32 nt, Homo Sapiens
gaaaaaggauauguggagaaucaucaagauau

SEQ ID NO: 377836 - RNA, 32 nt, Homo Sapiens
cuuggagggaggaacaacgagcagaaggcccu

SEQ ID NO: 377837 - RNA, 32 nt, Homo Sapiens
ucgaaccuuucacuuuuuguuuguuuuaccua

SEQ ID NO: 377838 - RNA, 32 nt, Homo Sapiens
uuucccccaaaaaacuguaagugggcccucag

SEQ ID NO: 377839 - RNA, 32 nt, Homo Sapiens
gcccugccccaccccaccucacagcuacucag

SEQ ID NO: 377840 - RNA, 32 nt, Homo Sapiens
aucccaagggaagaggaggagcaggggugccc

SEQ ID NO: 377841 - RNA, 32 nt, Homo Sapiens
ggaggaggcgcggguuccuucuuuuccggaga

SEQ ID NO: 377842 - RNA, 32 nt, Homo Sapiens
aaauuuuaaaagacaauagccuauauuugugu

SEQ ID NO: 377843 - RNA, 32 nt, Homo Sapiens
ccuucaaaaugaaauuuuuaaaagggacuuua

SEQ ID NO: 377844 - RNA, 32 nt, Homo Sapiens
aaugugaauaaaaugggaaucuucuugguauu

SEQ ID NO: 377845 - RNA, 29 nt, Homo Sapiens
cucauauaaaguuuauguacccuaaaauc

SEQ ID NO: 377846 - RNA, 32 nt, Homo Sapiens
cucuggauggcccugcccugacuggggcugcu

SEQ ID NO: 377847 - RNA, 32 nt, Homo Sapiens
gacgcccgaguuagccucacccggugaccucu

SEQ ID NO: 377848 - RNA, 32 nt, Homo Sapiens
aauaaggacuuccugcagaaagucuuuucuuu

SEQ ID NO: 377849 - RNA, 32 nt, Homo Sapiens
gugauuuagaagauuauaacagcuguauuuca

SEQ ID NO: 377850 - RNA, 32 nt, Homo Sapiens
gagagauauaauuaagcuuacacaaugaaaug

SEQ ID NO: 377851 - RNA, 32 nt, Homo Sapiens
ggaaagcgguguagguguugugagcuuuugcu

SEQ ID NO: 377852 - RNA, 32 nt, Homo Sapiens
acaaaaaccccgcucugucuuuguuuaaugcu

SEQ ID NO: 377853 - RNA, 32 nt, Homo Sapiens
gagagagugaauggauacagagcugaaugagu

SEQ ID NO: 377854 - RNA, 31 nt, Homo Sapiens
aacugugauuccucuaccagagccuuuccug

SEQ ID NO: 377855 - RNA, 32 nt, Homo Sapiens
auggcuugcaggagcaagagccagacaggacu

SEQ ID NO: 377856 - RNA, 32 nt, Homo Sapiens
ccgggcuggcggccggccggcgcccccucauu

SEQ ID NO: 377857 - RNA, 32 nt, Homo Sapiens
cgcccuccccggcuccuccggaccuccucggc

SEQ ID NO: 377858 - RNA, 32 nt, Homo Sapiens
gugcgccccccuccgcggugggggcuuggagg

SEQ ID NO: 377859 - RNA, 32 nt, Homo Sapiens
cagcaggagcagcagcuguuccggcgccugga

SEQ ID NO: 377860 - RNA, 27 nt, Homo Sapiens
guauuugcauuacuuuaaguacaaagu

SEQ ID NO: 377861 - RNA, 32 nt, Homo Sapiens
cguaucugccagcguuucucaccacacuggag

SEQ ID NO: 377862 - RNA, 32 nt, Homo Sapiens
gcucuacucugccccagggcuuguggccagcc

SEQ ID NO: 377863 - RNA, 32 nt, Homo Sapiens
uucgguagguggggcggggcaggggcggggcc

SEQ ID NO: 377864 - RNA, 32 nt, Homo Sapiens
ggaggaagcuggaucuugaacugcacacacuu

SEQ ID NO: 377865 - RNA, 32 nt, Homo Sapiens
accuggcuggaaagcuuugccccgcugcucug

SEQ ID NO: 377866 - RNA, 32 nt, Homo Sapiens
cccaucacgccacagcacgacgccugccaaaa

SEQ ID NO: 377867 - RNA, 29 nt, Homo Sapiens
ggccacuggggacagaagggcccauguac

SEQ ID NO: 377868 - RNA, 32 nt, Homo Sapiens
uaaauucugcccggugcugugaaggcuggacg

SEQ ID NO: 377869 - RNA, 32 nt, Homo Sapiens
agggcaaggggauauagugauggggcucagau

SEQ ID NO: 377870 - RNA, 32 nt, Homo Sapiens
auacgagacccggccgcaccccgagucacaca

SEQ ID NO: 377871 - RNA, 32 nt, Homo Sapiens
accugugucugcacuguuuaauuuuaguguug

SEQ ID NO: 377872 - RNA, 32 nt, Homo Sapiens
uaauuuuggaaaugcuucaauaaucgaguaga

SEQ ID NO: 377873 - RNA, 32 nt, Homo Sapiens
gagcugaagaucugcaccaggccaggggccau

SEQ ID NO: 377874 - RNA, 32 nt, Homo Sapiens
uccccuggaaaccccaggaccacauccaaaga

SEQ ID NO: 377875 - RNA, 32 nt, Homo Sapiens
ccgcgggcuagcgggcggugggggcgccagca

SEQ ID NO: 377876 - RNA, 32 nt, Homo Sapiens
uucucuucaggggcccagcagugacuucauug

SEQ ID NO: 377877 - RNA, 32 nt, Homo Sapiens
ggaccgagccggagagccccggagcccccgua

SEQ ID NO: 377878 - RNA, 32 nt, Homo Sapiens
auugaacucacagauggauaccaacacgguca

SEQ ID NO: 377879 - RNA, 32 nt, Homo Sapiens
ccgcuggcaggauggcagcagaugaaagcuca

SEQ ID NO: 377880 - RNA, 32 nt, Homo Sapiens
uccccagauugucauucuucagggauggcagc

SEQ ID NO: 377881 - RNA, 32 nt, Homo Sapiens
gcuauauugccccaggcuggucucgaacuccu

SEQ ID NO: 377882 - RNA, 32 nt, Homo Sapiens
ucaugggagucuuuuuaacuuggugccugagu

SEQ ID NO: 377883 - RNA, 32 nt, Homo Sapiens
aaaccauuuauaacacaugaaaaugaguaagc

SEQ ID NO: 377884 - RNA, 32 nt, Homo Sapiens
gggucagggugagacgugaugggcuaggccuc

SEQ ID NO: 377885 - RNA, 32 nt, Homo Sapiens
auuucuccaccugcaaggucuuucagguagaa

SEQ ID NO: 377886 - RNA, 32 nt, Homo Sapiens
aguuaaaaugggccacaacaaacaagacugag

SEQ ID NO: 377887 - RNA, 32 nt, Homo Sapiens
uaacugaacagcaagggauuguagccauaaug

SEQ ID NO: 377888 - RNA, 32 nt, Homo Sapiens
gggguccgagucgcggccggcgcggggcgggg

SEQ ID NO: 377889 - RNA, 32 nt, Homo Sapiens
uauuugcugucauuucugggcuagggcuccuu

SEQ ID NO: 377890 - RNA, 32 nt, Homo Sapiens
cauccaauauaucauucaaaugcaucugauuu

SEQ ID NO: 377891 - RNA, 32 nt, Homo Sapiens
cacugagccaaggugauggacuguauauuuga

SEQ ID NO: 377892 - RNA, 32 nt, Homo Sapiens
accagacuuuuauauuuuaauuuuacagauuu

SEQ ID NO: 377893 - RNA, 32 nt, Homo Sapiens
cuguauucuguauagacaccaggccgauacac

SEQ ID NO: 377894 - RNA, 32 nt, Homo Sapiens
cagccuuccuucccucuccuugucucauguug

SEQ ID NO: 377895 - RNA, 32 nt, Homo Sapiens
aacaauuuuuauucuuaugugugcuuuaaggg

SEQ ID NO: 377896 - RNA, 32 nt, Homo Sapiens
uauuuccagaucccuuucaacccagguaccau

SEQ ID NO: 377897 - RNA, 32 nt, Homo Sapiens
cugagacgcgcugcugccccccgcgcgggcgc

SEQ ID NO: 377898 - RNA, 32 nt, Homo Sapiens
ccuuugaacuuucuccccacuccucacccccu

SEQ ID NO: 377899 - RNA, 32 nt, Homo Sapiens
uuuaaugugggaaguacuuaagugguauuaua

SEQ ID NO: 377900 - RNA, 32 nt, Homo Sapiens
cgggccucaggguccugcccuccggaggagca

SEQ ID NO: 377901 - RNA, 32 nt, Homo Sapiens
uaaguucacaauaccuuugucuggauauggag

SEQ ID NO: 377902 - RNA, 32 nt, Homo Sapiens
ccucauaagcauaaaaagaaaaucuuuguugc

SEQ ID NO: 377903 - RNA, 32 nt, Homo Sapiens
uaggagccaaguaggaggaggcugggauccgu

SEQ ID NO: 377904 - RNA, 29 nt, Homo Sapiens
uaagucauagugaggacuacgagauaagu

SEQ ID NO: 377905 - RNA, 32 nt, Homo Sapiens
uuacaucucuggcauagcacaaaaaaaaaaaa

SEQ ID NO: 377906 - RNA, 32 nt, Homo Sapiens
acuccuuccuucuuccuucucccgcagccggu

SEQ ID NO: 377907 - RNA, 32 nt, Homo Sapiens
uagaauuaaaaauaauagcuguguauaacacu

SEQ ID NO: 377908 - RNA, 31 nt, Homo Sapiens
ugagaggcagcgugccugccgaacgcuucgu

SEQ ID NO: 377909 - RNA, 32 nt, Homo Sapiens
ucuccaagaaugcuuaaucagugucuggaguc

SEQ ID NO: 377910 - RNA, 32 nt, Homo Sapiens
aggaaaucagaugcacaggaaauaaaggaaag

SEQ ID NO: 377911 - RNA, 32 nt, Homo Sapiens
ucaguaaagaaugaagugaaaacacuuauuua

SEQ ID NO: 377912 - RNA, 32 nt, Homo Sapiens
acuuguugauaaaauggucauauuugaaauau

SEQ ID NO: 377913 - RNA, 32 nt, Homo Sapiens
cuucucccugucauucucaacgcuucuccuuu

SEQ ID NO: 377914 - RNA, 32 nt, Homo Sapiens
caucugggagacuguaaacauggauuccacug

SEQ ID NO: 377915 - RNA, 32 nt, Homo Sapiens
uccauguuguacaacugaaauauaaauaauuu

SEQ ID NO: 377916 - RNA, 32 nt, Homo Sapiens
caggcuguggcccaggccuccugggugacagg

SEQ ID NO: 377917 - RNA, 32 nt, Homo Sapiens
accaggaggccuucguguauggcugccgccuc

SEQ ID NO: 377918 - RNA, 32 nt, Homo Sapiens
ugaaaugguugcuuccuccugauucccuaauu

SEQ ID NO: 377919 - RNA, 32 nt, Homo Sapiens
ucuagugguggaccggccggucacugcagggg

SEQ ID NO: 377920 - RNA, 32 nt, Homo Sapiens
cggaacgaggcaaagaugcuggaaggagaucu

SEQ ID NO: 377921 - RNA, 32 nt, Homo Sapiens
cgcugagucccgcgcguccgccugccgugccc

SEQ ID NO: 377922 - RNA, 32 nt, Homo Sapiens
ugagauguucccucugcuguaaaugcaggucu

SEQ ID NO: 377923 - RNA, 32 nt, Homo Sapiens
gugccugggugcccggccugcucagcacaccc

SEQ ID NO: 377924 - RNA, 32 nt, Homo Sapiens
uagaaauacggguuuugacuuaacucacaaga

SEQ ID NO: 377925 - RNA, 32 nt, Homo Sapiens
cugaucaagacaccaaagcuacaggauucugg

SEQ ID NO: 377926 - RNA, 32 nt, Homo Sapiens
cugcccccauuccugcugcugcugcugcugcu

SEQ ID NO: 377927 - RNA, 31 nt, Homo Sapiens
aaagggcaaucagauaauggauauguuuuau

SEQ ID NO: 377928 - RNA, 32 nt, Homo Sapiens
cacaauuauaaacucauuuugcuuguggcucc

SEQ ID NO: 377929 - RNA, 32 nt, Homo Sapiens
uugguacuuaucucaaggcugucuagucucuu

SEQ ID NO: 377930 - RNA, 32 nt, Homo Sapiens
aaccauuucuucauuguaacgaagcugagcgu

SEQ ID NO: 377931 - RNA, 32 nt, Homo Sapiens
cuauucaaugggaaagcugcuucuuucuuuaa

SEQ ID NO: 377932 - RNA, 32 nt, Homo Sapiens
cacuccgcccgcgaccccugccggggccccga

SEQ ID NO: 377933 - RNA, 32 nt, Homo Sapiens
cagauccaacuuuuuugaaagcugguggucua

SEQ ID NO: 377934 - RNA, 32 nt, Homo Sapiens
acaagguacggauaguucagacaauucagaaa

SEQ ID NO: 377935 - RNA, 29 nt, Homo Sapiens
agccgagggacacagaggaugccagacac

SEQ ID NO: 377936 - RNA, 30 nt, Homo Sapiens
agcacuggcaggcgagggcucucguucaua

SEQ ID NO: 377937 - RNA, 29 nt, Homo Sapiens
gggguguauuuuuaauaccacaaaaacuu

SEQ ID NO: 377938 - RNA, 32 nt, Homo Sapiens
auuucaauggaagaaggagaaaaaagagaaga

SEQ ID NO: 377939 - RNA, 32 nt, Homo Sapiens
gaagccuucaugaaugguuuggcaccgucccc

SEQ ID NO: 377940 - RNA, 32 nt, Homo Sapiens
uccauuugaagacaauguugcaauguugaaug

SEQ ID NO: 377941 - RNA, 32 nt, Homo Sapiens
gggccccaagccaaugggggcuccacaaggca

SEQ ID NO: 377942 - RNA, 32 nt, Homo Sapiens
guuuacaaaauucaggcauacauuucaguuug

SEQ ID NO: 377943 - RNA, 32 nt, Homo Sapiens
ccaccuuauacacacgaggcuuucucaggaag

SEQ ID NO: 377944 - RNA, 32 nt, Homo Sapiens
auugaaauuguacagguccauaauuucauuuu

SEQ ID NO: 377945 - RNA, 32 nt, Homo Sapiens
gcaaucagccccuuccuccccacucccauugc

SEQ ID NO: 377946 - RNA, 32 nt, Homo Sapiens
aaaaaaguuuucugcccucaagucuucugggg

SEQ ID NO: 377947 - RNA, 32 nt, Homo Sapiens
augguggaagcagucgcuaugaugauuacagc

SEQ ID NO: 377948 - RNA, 32 nt, Homo Sapiens
gcuacaauauaaauucuacucuuggguuacaa

SEQ ID NO: 377949 - RNA, 32 nt, Homo Sapiens
aggaguuuuguuccagaggagcucucccccuu

SEQ ID NO: 377950 - RNA, 32 nt, Homo Sapiens
caaggaugaauuaaguuuuuuuuuaaaaaaga

SEQ ID NO: 377951 - RNA, 32 nt, Homo Sapiens
cuaacacggcagcccauccuucgagacuguga

SEQ ID NO: 377952 - RNA, 32 nt, Homo Sapiens
acaggugacaucaaccugaggguggcgucuuu

SEQ ID NO: 377953 - RNA, 32 nt, Homo Sapiens
auggugaagaacugcagccgggcuugugugca

SEQ ID NO: 377954 - RNA, 32 nt, Homo Sapiens
uguuuucauuuccuguuggaaauauuauccug

SEQ ID NO: 377955 - RNA, 32 nt, Homo Sapiens
cagccauccccugccaggucuacuucacagga

SEQ ID NO: 377956 - RNA, 32 nt, Homo Sapiens
gcuguggugguuugcuguaucuaucaacccau

SEQ ID NO: 377957 - RNA, 32 nt, Homo Sapiens
cguccaccucgggucccggcgcucaguggccu

SEQ ID NO: 377958 - RNA, 28 nt, Homo Sapiens
aggggugcgcggccgccgagagaccccg

SEQ ID NO: 377959 - RNA, 32 nt, Homo Sapiens
uaaucagaucacauuuugauaaacccugggaa

SEQ ID NO: 377960 - RNA, 32 nt, Homo Sapiens
ucuugaaaacaaagacccuucgguguccaucu

SEQ ID NO: 377961 - RNA, 32 nt, Homo Sapiens
aucccuugaacauguagcacaacuuccuuucc

SEQ ID NO: 377962 - RNA, 32 nt, Homo Sapiens
cuucaguuacuuuguaauuuauuguggcauga

SEQ ID NO: 377963 - RNA, 32 nt, Homo Sapiens
guaaccaaaaaccaccuguacccccaaaacua

SEQ ID NO: 377964 - RNA, 32 nt, Homo Sapiens
uuucuuaugagcaugcucaguauggcauaugg

SEQ ID NO: 377965 - RNA, 32 nt, Homo Sapiens
cgccuguuaucccagcacuuugggaggcugag

SEQ ID NO: 377966 - RNA, 30 nt, Homo Sapiens
ggucucugguuugcugcagagccguaggac

SEQ ID NO: 377967 - RNA, 32 nt, Homo Sapiens
uccuaagguucaggaaagaacaguggucccuu

SEQ ID NO: 377968 - RNA, 31 nt, Homo Sapiens
uuugguuuuuauuauuaauagagauagaacu

SEQ ID NO: 377969 - RNA, 32 nt, Homo Sapiens
uuuauagcggcugauuuuugguaguccauuga

SEQ ID NO: 377970 - RNA, 32 nt, Homo Sapiens
ucagauuguguuugcauagaaaagguuaaaau

SEQ ID NO: 377971 - RNA, 32 nt, Homo Sapiens
aguagcugcuggaggcuggggaggcccggacc

SEQ ID NO: 377972 - RNA, 32 nt, Homo Sapiens
auccugaggaugugaggcaggguauaucuggg

SEQ ID NO: 377973 - RNA, 32 nt, Homo Sapiens
guaacguuugaaaaccaaagaaauaaagugau

SEQ ID NO: 377974 - RNA, 32 nt, Homo Sapiens
cugagucggagcaacccccggcaggagcuuuc

SEQ ID NO: 377975 - RNA, 32 nt, Homo Sapiens
cugaacaauggaagauauuuguuguaaauuaa

SEQ ID NO: 377976 - RNA, 32 nt, Homo Sapiens
uaggugcccuuaucccucccaaggcugcacug

SEQ ID NO: 377977 - RNA, 32 nt, Homo Sapiens
caagagcgucccagcccauucagacccaggcc

SEQ ID NO: 377978 - RNA, 32 nt, Homo Sapiens
ugccaccucacaggguuagcgugaggauuaaa

SEQ ID NO: 377979 - RNA, 32 nt, Homo Sapiens
cugaacuguaauuuuuaccaacucuugcucau

SEQ ID NO: 377980 - RNA, 32 nt, Homo Sapiens
cauucauauauacucaaugagcacuaaaggaa

SEQ ID NO: 377981 - RNA, 32 nt, Homo Sapiens
caauccuuaagcaaucacugauuugcuuucug

SEQ ID NO: 377982 - RNA, 32 nt, Homo Sapiens
uucagcaggggauggcgcuaggggacuugggg

SEQ ID NO: 377983 - RNA, 32 nt, Homo Sapiens
agaggugcagagcgaggaggccggcaaauccc

SEQ ID NO: 377984 - RNA, 32 nt, Homo Sapiens
guauuauuuucaguuauauaaaacaguaccug

SEQ ID NO: 377985 - RNA, 32 nt, Homo Sapiens
ucagugccaagaagcugaaacugugagcugga

SEQ ID NO: 377986 - RNA, 32 nt, Homo Sapiens
uaggugaggaaauuauuuuuuaauuuugauaa

SEQ ID NO: 377987 - RNA, 32 nt, Homo Sapiens
ggccucgagcgccccggcgggagguuuuucua

SEQ ID NO: 377988 - RNA, 32 nt, Homo Sapiens
accuuuuauccugugucucucccgucgcccuu

SEQ ID NO: 377989 - RNA, 32 nt, Homo Sapiens
uggucgccggggcugcgccguccccagcucag

SEQ ID NO: 377990 - RNA, 32 nt, Homo Sapiens
aagucuggcuuauuccucucucagcaggucca

SEQ ID NO: 377991 - RNA, 32 nt, Homo Sapiens
cugcugcugccaccgcgccgcgaugagccgcg

SEQ ID NO: 377992 - RNA, 32 nt, Homo Sapiens
ggagguggggguugcaccgagcagagauugca

SEQ ID NO: 377993 - RNA, 32 nt, Homo Sapiens
aauacccucuccaguuucacucuucuuucuug

SEQ ID NO: 377994 - RNA, 32 nt, Homo Sapiens
uccucaggcccauuuuaaacugaacuuaugcu

SEQ ID NO: 377995 - RNA, 32 nt, Homo Sapiens
ucauggaggagcugggcccugcagaucgacca

SEQ ID NO: 377996 - RNA, 32 nt, Homo Sapiens
gaaaagagugagagaaugguauucccagauac

SEQ ID NO: 377997 - RNA, 32 nt, Homo Sapiens
uaaaaucaagacaaugacaugggggcuuugug

SEQ ID NO: 377998 - RNA, 31 nt, Homo Sapiens
cugcaggguaggcccgcaggaaaugaggaau

SEQ ID NO: 377999 - RNA, 32 nt, Homo Sapiens
agggcaucugucugcugacgcccccuggccug

SEQ ID NO: 378000 - RNA, 32 nt, Homo Sapiens
gcccuaugacuacuaucuuugcauuaguuaaa

SEQ ID NO: 378001 - RNA, 32 nt, Homo Sapiens
cacagauauucuagagaacuuaucuuucacuc

SEQ ID NO: 378002 - RNA, 32 nt, Homo Sapiens
uucuuagccaaggguaaguacugcaacugucg

SEQ ID NO: 378003 - RNA, 32 nt, Homo Sapiens
ggucugcauuuuucuuuuugauuacaaaauuu

SEQ ID NO: 378004 - RNA, 32 nt, Homo Sapiens
agccgagauugugccccugcacuccagccuga

SEQ ID NO: 378005 - RNA, 32 nt, Homo Sapiens
uccucuaguguuucauguacauucuguggggg

SEQ ID NO: 378006 - RNA, 32 nt, Homo Sapiens
agcugagauugugccacuguacugcagccugg

SEQ ID NO: 378007 - RNA, 32 nt, Homo Sapiens
uccguggggcccuccgccccagccccagccag

SEQ ID NO: 378008 - RNA, 32 nt, Homo Sapiens
ccuaggugccauuuccuuuccuccucagucaa

SEQ ID NO: 378009 - RNA, 32 nt, Homo Sapiens
uucuaaguauaagaaugugaagaauauuugaa

SEQ ID NO: 378010 - RNA, 32 nt, Homo Sapiens
gaagauggaaaaccgcugcuugccuuucuccg

SEQ ID NO: 378011 - RNA, 32 nt, Homo Sapiens
gucucugcuauuuucuaucucuguaaauguuc

SEQ ID NO: 378012 - RNA, 32 nt, Homo Sapiens
gauuucuuccuccucuucagugugguagauga

SEQ ID NO: 378013 - RNA, 32 nt, Homo Sapiens
auaacaucucccucacagggaugaggggaugc

SEQ ID NO: 378014 - RNA, 32 nt, Homo Sapiens
guggucacagaaaugaaaggacaagagaguug

SEQ ID NO: 378015 - RNA, 32 nt, Homo Sapiens
agauauuuaacccuauuuuguuugaauuauga

SEQ ID NO: 378016 - RNA, 32 nt, Homo Sapiens
ccagaguugcugucaguucauugguagagaug

SEQ ID NO: 378017 - RNA, 32 nt, Homo Sapiens
uacucuguuuuaaaguaagucucugaaaacug

SEQ ID NO: 378018 - RNA, 32 nt, Homo Sapiens
uuacauuugucaagaucuaacacuaaacaaaa

SEQ ID NO: 378019 - RNA, 32 nt, Homo Sapiens
aaacuggaaaugggcauuguagucuuuaauua

SEQ ID NO: 378020 - RNA, 32 nt, Homo Sapiens
aguuucaugcuuauaccaaagaauuaaaucug

SEQ ID NO: 378021 - RNA, 32 nt, Homo Sapiens
augagguacaaccaccugggggcuagcuaauc

SEQ ID NO: 378022 - RNA, 32 nt, Homo Sapiens
aauuauguauaaaguuuuuuuauuuauuugaa

SEQ ID NO: 378023 - RNA, 32 nt, Homo Sapiens
ucagaugauggugaugaauuauagaaauaaac

SEQ ID NO: 378024 - RNA, 32 nt, Homo Sapiens
aagauguuauuuauuuugagaaaugcuuauuu

SEQ ID NO: 378025 - RNA, 32 nt, Homo Sapiens
cuggagcugacgugaggcacccgccccggcca

SEQ ID NO: 378026 - RNA, 32 nt, Homo Sapiens
cccaguuccacagugggaaauuuugcacacuu

SEQ ID NO: 378027 - RNA, 32 nt, Homo Sapiens
auggcagagacgcagaagagaggaacagaaau

SEQ ID NO: 378028 - RNA, 32 nt, Homo Sapiens
guaaugguggccuggggcuucugaggcuucug

SEQ ID NO: 378029 - RNA, 32 nt, Homo Sapiens
agggaggaggcgcgccgcgccaugguguccug

SEQ ID NO: 378030 - RNA, 32 nt, Homo Sapiens
acuucaccaaaauagcccugugcgccuacuuu

SEQ ID NO: 378031 - RNA, 32 nt, Homo Sapiens
aaugugcucuucuguaucuacuccucaauaaa

SEQ ID NO: 378032 - RNA, 32 nt, Homo Sapiens
uaaacggcccgcaucuuaauuuuucucccuuc

SEQ ID NO: 378033 - RNA, 32 nt, Homo Sapiens
caacgaggccgcgggcggccgagggcuggucg

SEQ ID NO: 378034 - RNA, 32 nt, Homo Sapiens
cggcgcagacaccgcgcguguggagacgggag

SEQ ID NO: 378035 - RNA, 32 nt, Homo Sapiens
gccacacugucuccccaggggcgucgaccugg

SEQ ID NO: 378036 - RNA, 32 nt, Homo Sapiens
gcgucgggggaggacaacaaagggccgcgggc

SEQ ID NO: 378037 - RNA, 32 nt, Homo Sapiens
ccccagcugggaccggccaccggcgccucagc

SEQ ID NO: 378038 - RNA, 32 nt, Homo Sapiens
cucaucucaaaaaaacaaaaaaacccugaaau

SEQ ID NO: 378039 - RNA, 32 nt, Homo Sapiens
uacauucaugcaauauuuauauuuucaggggg

SEQ ID NO: 378040 - RNA, 32 nt, Homo Sapiens
ugaauaggucucuccuucuccuccuccuccuc

SEQ ID NO: 378041 - RNA, 32 nt, Homo Sapiens
gggcucaggaagcucgcccaggggccaaugug

SEQ ID NO: 378042 - RNA, 32 nt, Homo Sapiens
cccucccccguccugagcucccacuuccacac

SEQ ID NO: 378043 - RNA, 32 nt, Homo Sapiens
cagccucccaaguagcugggaauacaggcacg

SEQ ID NO: 378044 - RNA, 32 nt, Homo Sapiens
acagccagaggaaccagcacuccaucacugag

SEQ ID NO: 378045 - RNA, 32 nt, Homo Sapiens
acauuuuauuuuuucuuaauccaguucugcaa

SEQ ID NO: 378046 - RNA, 32 nt, Homo Sapiens
gguguuuuauuacaaucaaagaagaggaaagc

SEQ ID NO: 378047 - RNA, 32 nt, Homo Sapiens
gccauuuuggaaagauuucugaaucguagcca

SEQ ID NO: 378048 - RNA, 29 nt, Homo Sapiens
uauuuuauauguauggaucuauauuuuca

SEQ ID NO: 378049 - RNA, 32 nt, Homo Sapiens
cugcugugacaagugagcacaaacugcauagc

SEQ ID NO: 378050 - RNA, 32 nt, Homo Sapiens
cuccauaggguaaaccagacuugaauacaaca

SEQ ID NO: 378051 - RNA, 32 nt, Homo Sapiens
guuauuacugucacuaucacucaggaugaaau

SEQ ID NO: 378052 - RNA, 31 nt, Homo Sapiens
ugacagucaucuuuaaacugaguuaaaagau

SEQ ID NO: 378053 - RNA, 32 nt, Homo Sapiens
uggcuucaguaugagaucuuuuucaaaacuau

SEQ ID NO: 378054 - RNA, 32 nt, Homo Sapiens
acuucggcagguccagcuccugccugccagug

SEQ ID NO: 378055 - RNA, 32 nt, Homo Sapiens
aacccgggagguggaggucgcggugagccgag

SEQ ID NO: 378056 - RNA, 32 nt, Homo Sapiens
aucaucuggaucuuuuucuuuaucucccuucc

SEQ ID NO: 378057 - RNA, 32 nt, Homo Sapiens
acaacauguguguucugacauguuucuaauau

SEQ ID NO: 378058 - RNA, 32 nt, Homo Sapiens
cugugggaauacuggggucaguuauggaacag

SEQ ID NO: 378059 - RNA, 32 nt, Homo Sapiens
aaaauacaaaaauuagcugggcaugguggugg

SEQ ID NO: 378060 - RNA, 32 nt, Homo Sapiens
aaaauacaaaaauuagcugggugugguggcag

SEQ ID NO: 378061 - RNA, 32 nt, Homo Sapiens
caccuuaacugaugacauuccaccacaaaaga

SEQ ID NO: 378062 - RNA, 32 nt, Homo Sapiens
ccaacuggcagcgacagcugcagacgggcuga

SEQ ID NO: 378063 - RNA, 32 nt, Homo Sapiens
uggcaaauuuucauugguuuuaucuuauucau

SEQ ID NO: 378064 - RNA, 32 nt, Homo Sapiens
aaagcaaaaaucaucccauuccccaguggauu

SEQ ID NO: 378065 - RNA, 32 nt, Homo Sapiens
cuugcaugauugcaugagauguuuaaucacaa

SEQ ID NO: 378066 - RNA, 32 nt, Homo Sapiens
cccuggcagcugagaaauuguuuucuauaugu

SEQ ID NO: 378067 - RNA, 32 nt, Homo Sapiens
cauaccccauucucuuuuucaucucggccccu

SEQ ID NO: 378068 - RNA, 32 nt, Homo Sapiens
aaaggugaagcagugcuggccgacauaggagc

SEQ ID NO: 378069 - RNA, 32 nt, Homo Sapiens
uuuuaguaaaaggaguaacaaacaagauugug

SEQ ID NO: 378070 - RNA, 32 nt, Homo Sapiens
uggcagcccacugcaccgccucaggguuuugg

SEQ ID NO: 378071 - RNA, 32 nt, Homo Sapiens
guucugaguaaccucacuucaagcauucuuca

SEQ ID NO: 378072 - RNA, 32 nt, Homo Sapiens
cagcaggagcagccccggcugcgggucgcgac

SEQ ID NO: 378073 - RNA, 32 nt, Homo Sapiens
ucaaacugacuauucaagucaccuggagaucu

SEQ ID NO: 378074 - RNA, 32 nt, Homo Sapiens
auauaaucuccuauuauuuuuaucuuauguuu

SEQ ID NO: 378075 - RNA, 32 nt, Homo Sapiens
gcccugguuugugugaacugggauguuggggg

SEQ ID NO: 378076 - RNA, 32 nt, Homo Sapiens
aacguauguauuagucggcuggcaggaauugu

SEQ ID NO: 378077 - RNA, 32 nt, Homo Sapiens
aauccaguggaaucuuuaaucuuguuaauacu

SEQ ID NO: 378078 - RNA, 32 nt, Homo Sapiens
auagauuggccauuuuaauguucagcaaccug

SEQ ID NO: 378079 - RNA, 32 nt, Homo Sapiens
ccuaagguagaggccucacagcccuugaguaa

SEQ ID NO: 378080 - RNA, 32 nt, Homo Sapiens
aaagccugggaaugccagcgcgugccaagccu

SEQ ID NO: 378081 - RNA, 32 nt, Homo Sapiens
cugcagaaaauugauuaaauggcuguccuuuu

SEQ ID NO: 378082 - RNA, 32 nt, Homo Sapiens
cagccugcgggggcucucggcccagcagaccc

SEQ ID NO: 378083 - RNA, 32 nt, Homo Sapiens
uucugcuauuuuuugcuuucucucccuccccc

SEQ ID NO: 378084 - RNA, 32 nt, Homo Sapiens
ucccucauuggcugccagcagucugggggaau

SEQ ID NO: 378085 - RNA, 32 nt, Homo Sapiens
ucaugucucaaccacaucuacucugugaaccc

SEQ ID NO: 378086 - RNA, 32 nt, Homo Sapiens
acuaaugugcaaaauguaaaacgcuaaauuaa

SEQ ID NO: 378087 - RNA, 32 nt, Homo Sapiens
gcugcugaccgaucucccuccuccucacccca

SEQ ID NO: 378088 - RNA, 32 nt, Homo Sapiens
uccugggccccgggcggcggucgccaggucuc

SEQ ID NO: 378089 - RNA, 32 nt, Homo Sapiens
ugucucugcuaagggcgcuagucccauucuug

SEQ ID NO: 378090 - RNA, 32 nt, Homo Sapiens
gauuuguuucugcccucuguguuuccuguugu

SEQ ID NO: 378091 - RNA, 32 nt, Homo Sapiens
aaggcuuuauuaaauuuguacuucagcauaaa

SEQ ID NO: 378092 - RNA, 32 nt, Homo Sapiens
ucagccauaagaaagcacuauuaauacucugc

SEQ ID NO: 378093 - RNA, 32 nt, Homo Sapiens
accgcuggggacgauggcgcugcucgccuugc

SEQ ID NO: 378094 - RNA, 32 nt, Homo Sapiens
acagccagcagaggccuaucagaguuagaggg

SEQ ID NO: 378095 - RNA, 32 nt, Homo Sapiens
cccacaccuuccccggccugagcuuccccuac

SEQ ID NO: 378096 - RNA, 32 nt, Homo Sapiens
ggccaggauuccaggcagcagguuggagugac

SEQ ID NO: 378097 - RNA, 32 nt, Homo Sapiens
agccacucuugucugugggaaccacacaucuu

SEQ ID NO: 378098 - RNA, 32 nt, Homo Sapiens
uaaugaaauaguuuauguguaacuggcucuga

SEQ ID NO: 378099 - RNA, 32 nt, Homo Sapiens
auaaagaauguuuuaaauguaacuguuuucau

SEQ ID NO: 378100 - RNA, 32 nt, Homo Sapiens
acgggcuggggcagccugcagcugcccaccca

SEQ ID NO: 378101 - RNA, 32 nt, Homo Sapiens
auggcuuugagccucggggacucaucaagucc

SEQ ID NO: 378102 - RNA, 32 nt, Homo Sapiens
ccuggccucacagccgucccagauguuaggug

SEQ ID NO: 378103 - RNA, 32 nt, Homo Sapiens
aaucuacuacacacauugcuauuugaacacuc

SEQ ID NO: 378104 - RNA, 32 nt, Homo Sapiens
gcaugugcucgcgcuccguggcucuguuggug

SEQ ID NO: 378105 - RNA, 32 nt, Homo Sapiens
ucccuguccuuccccaacuccccagcuccaag

SEQ ID NO: 378106 - RNA, 32 nt, Homo Sapiens
ccgcucugauguugcuagaccuccucagcacu

SEQ ID NO: 378107 - RNA, 32 nt, Homo Sapiens
auaucugggaaauaaacgcaugcccagaggag

SEQ ID NO: 378108 - RNA, 32 nt, Homo Sapiens
agccggggcucgccgcgccugacgcgucccga

SEQ ID NO: 378109 - RNA, 32 nt, Homo Sapiens
uguccuggcugucgaaaaccacuuccucgaug

SEQ ID NO: 378110 - RNA, 32 nt, Homo Sapiens
agucucuacaauuaucagacaccugcauccaa

SEQ ID NO: 378111 - RNA, 32 nt, Homo Sapiens
ccugcccacucugcuuccaccccucccuggag

SEQ ID NO: 378112 - RNA, 32 nt, Homo Sapiens
gccuggauucacgcccucuuguuuccuuuugg

SEQ ID NO: 378113 - RNA, 32 nt, Homo Sapiens
gccagccagccagcugcagguggcaucugcca

SEQ ID NO: 378114 - RNA, 32 nt, Homo Sapiens
aggacugcgggaaggcgcgggagccaggggcc

SEQ ID NO: 378115 - RNA, 32 nt, Homo Sapiens
gaaauaccaaaauagagcagaaaccaagcuaa

SEQ ID NO: 378116 - RNA, 32 nt, Homo Sapiens
ggaaagcaagcaucuggcuucuguggaguugu

SEQ ID NO: 378117 - RNA, 32 nt, Homo Sapiens
uuuuuguggcuguauuugauugauaugugcuu

SEQ ID NO: 378118 - RNA, 32 nt, Homo Sapiens
ggcuucguucgcucucacgggacacacgcagg

SEQ ID NO: 378119 - RNA, 29 nt, Homo Sapiens
agagagucguguuucguaagugccugagc

SEQ ID NO: 378120 - RNA, 32 nt, Homo Sapiens
agaauaaucaaauacauuuuaagcaaguuaag

SEQ ID NO: 378121 - RNA, 32 nt, Homo Sapiens
cacuuggaaacgguauccucccugcccauccg

SEQ ID NO: 378122 - RNA, 32 nt, Homo Sapiens
caccagaaggcacaagccucccacugccccuu

SEQ ID NO: 378123 - RNA, 31 nt, Homo Sapiens
cugcugugaaacaaucaaaucaaagccuugu

SEQ ID NO: 378124 - RNA, 32 nt, Homo Sapiens
gggcuaagaaagggggcgcccagccaugcaga

SEQ ID NO: 378125 - RNA, 32 nt, Homo Sapiens
aaugccaaccucagcgucaugccagaaugcac

SEQ ID NO: 378126 - RNA, 32 nt, Homo Sapiens
augcucccugucagagcucuccagaauaugcu

SEQ ID NO: 378127 - RNA, 32 nt, Homo Sapiens
guuaauuuccaauugcacacauaagcaaaaag

SEQ ID NO: 378128 - RNA, 32 nt, Homo Sapiens
uauauguuuaaacauuuuaugcucuuauuuaa

SEQ ID NO: 378129 - RNA, 32 nt, Homo Sapiens
guaacauucuaaugagaauaucucuaaggaga

SEQ ID NO: 378130 - RNA, 32 nt, Homo Sapiens
cugugauacaguuuugaguaaaaagacauuuu

SEQ ID NO: 378131 - RNA, 32 nt, Homo Sapiens
guguaaguaaaaguacaaacauuauuuccacc

SEQ ID NO: 378132 - RNA, 32 nt, Homo Sapiens
cagauguugcaucccugaaacaucucaacaac

SEQ ID NO: 378133 - RNA, 32 nt, Homo Sapiens
ucuaggaguuagaaaugaauuuuuuagaccuu

SEQ ID NO: 378134 - RNA, 32 nt, Homo Sapiens
ggcuuuccaaaacaacagaaauccuucaccaa

SEQ ID NO: 378135 - RNA, 32 nt, Homo Sapiens
cuacacaaaauacagcacuuugacauauugaa

SEQ ID NO: 378136 - RNA, 32 nt, Homo Sapiens
gaaucccaaccuggauccaccacagccgugua

SEQ ID NO: 378137 - RNA, 32 nt, Homo Sapiens
uccuccaagcuaaacaagcaugcucuaaccca

SEQ ID NO: 378138 - RNA, 32 nt, Homo Sapiens
ucucauccaaagacauauuaaauaaaaugagu

SEQ ID NO: 378139 - RNA, 32 nt, Homo Sapiens
uagaaucccacuuuuggugauuucaagucaag

SEQ ID NO: 378140 - RNA, 32 nt, Homo Sapiens
uuuugagcagcuuuuggaaccacaguguuugc

SEQ ID NO: 378141 - RNA, 32 nt, Homo Sapiens
gcaagaacagcuuuggaaauggcuguugagcc

SEQ ID NO: 378142 - RNA, 28 nt, Homo Sapiens
gggccugugcggccgcccuggaggcggu

SEQ ID NO: 378143 - RNA, 32 nt, Homo Sapiens
cagaagaccccguccaccuccuccugcuuaga

SEQ ID NO: 378144 - RNA, 32 nt, Homo Sapiens
cauaauaaaaauuauauacgaguauaaaugaa

SEQ ID NO: 378145 - RNA, 32 nt, Homo Sapiens
ggcuguccuaaaaccagaagcuuggagcagaa

SEQ ID NO: 378146 - RNA, 32 nt, Homo Sapiens
ccggcccuuccuuguggcccagcccugacccc

SEQ ID NO: 378147 - RNA, 32 nt, Homo Sapiens
gaaccugaaacacuucaugguaguaauuuccu

SEQ ID NO: 378148 - RNA, 32 nt, Homo Sapiens
ucaagauggaaauuuuaaaaacuuuugaaaug

SEQ ID NO: 378149 - RNA, 32 nt, Homo Sapiens
ggggagcccguuuguuccgcccgugucgagcc

SEQ ID NO: 378150 - RNA, 32 nt, Homo Sapiens
gccuccucaagagcugcuuguuaaauguuucc

SEQ ID NO: 378151 - RNA, 32 nt, Homo Sapiens
gcuuuccugaugaacugaccuucuuucauuau

SEQ ID NO: 378152 - RNA, 32 nt, Homo Sapiens
uuuaaggaauuaaaaguguuucuggaagucaa

SEQ ID NO: 378153 - RNA, 32 nt, Homo Sapiens
ccggcuauuuuuguauuuuuaguagagauggg

SEQ ID NO: 378154 - RNA, 32 nt, Homo Sapiens
gcugcaggagcaggcuucggacauuaaaggag

SEQ ID NO: 378155 - RNA, 32 nt, Homo Sapiens
aacaggaauuguugcauuuucuuauaaauguu

SEQ ID NO: 378156 - RNA, 32 nt, Homo Sapiens
ggcgcgaggcgagacucgggagcgugagcggg

SEQ ID NO: 378157 - RNA, 32 nt, Homo Sapiens
cauuccuuuuauucucuauucuauccugguuc

SEQ ID NO: 378158 - RNA, 32 nt, Homo Sapiens
aauuuaacuaaaaauaugacugcucucucuuc

SEQ ID NO: 378159 - RNA, 32 nt, Homo Sapiens
aacacucgggagaacaaagagacagugcacau

SEQ ID NO: 378160 - RNA, 32 nt, Homo Sapiens
aaaugugaugaccaaaugaacaaaauucuuaa

SEQ ID NO: 378161 - RNA, 32 nt, Homo Sapiens
auucuagagcuaaaagugaaggaaacgucuca

SEQ ID NO: 378162 - RNA, 31 nt, Homo Sapiens
uuucauucucugacuuuggucagacuuuugc

SEQ ID NO: 378163 - RNA, 32 nt, Homo Sapiens
ugcuggggaaggucagcacacccaagaacuuu

SEQ ID NO: 378164 - RNA, 32 nt, Homo Sapiens
aaucuggaaugggagggucuggcuucagcuau

SEQ ID NO: 378165 - RNA, 32 nt, Homo Sapiens
uucaagaccagccugcccaacauggugaaacc

SEQ ID NO: 378166 - RNA, 32 nt, Homo Sapiens
cuccucagcccucgacaugugccucgcaagga

SEQ ID NO: 378167 - RNA, 32 nt, Homo Sapiens
uugaaggcaaaauugcaaaucuugaaauuaag

SEQ ID NO: 378168 - RNA, 32 nt, Homo Sapiens
cgaggcuaugaucugagcaagcaggagauaac

SEQ ID NO: 378169 - RNA, 32 nt, Homo Sapiens
ccaguccccugccugugcuccugcuggggaag

SEQ ID NO: 378170 - RNA, 30 nt, Homo Sapiens
gagugggaggcgcgcgcggaggccgcgacg

SEQ ID NO: 378171 - RNA, 32 nt, Homo Sapiens
ggggugucggggugaagggcugucccagcuac

SEQ ID NO: 378172 - RNA, 32 nt, Homo Sapiens
cacaggcagaggaggacgaggacgacugggaa

SEQ ID NO: 378173 - RNA, 32 nt, Homo Sapiens
uucaacccugaggucuuaauugugagauggau

SEQ ID NO: 378174 - RNA, 32 nt, Homo Sapiens
ccaggugguagcugugaguaccucuuucuacu

SEQ ID NO: 378175 - RNA, 32 nt, Homo Sapiens
aauuuuucaaccccacccuguuuggauuuuua

SEQ ID NO: 378176 - RNA, 32 nt, Homo Sapiens
cagacucuuccccuccucucccucugccucgg

SEQ ID NO: 378177 - RNA, 32 nt, Homo Sapiens
aauuucugacgagagguguucuucuagaauua

SEQ ID NO: 378178 - RNA, 32 nt, Homo Sapiens
cugcgcgucccggcccggccccgggcucugag

SEQ ID NO: 378179 - RNA, 32 nt, Homo Sapiens
ugacuuucuuaaaaauauuuuuucuguaccua

SEQ ID NO: 378180 - RNA, 32 nt, Homo Sapiens
uuaaaaauauauccuauauauagauaucuaga

SEQ ID NO: 378181 - RNA, 32 nt, Homo Sapiens
gccuggaagaauaacacugaaaaaaccugacg

SEQ ID NO: 378182 - RNA, 32 nt, Homo Sapiens
agagagucugagaauuaaaauauuuuaguaua

SEQ ID NO: 378183 - RNA, 32 nt, Homo Sapiens
ccagggacagcgaagcuggggguggcgggggg

SEQ ID NO: 378184 - RNA, 32 nt, Homo Sapiens
gaagagagaaccuaacagaacaauaacaaugg

SEQ ID NO: 378185 - RNA, 32 nt, Homo Sapiens
gguauuucggaacggcugcgucucccgagaaa

SEQ ID NO: 378186 - RNA, 32 nt, Homo Sapiens
acguggcgcgaggcccgggcccugagcaccua

SEQ ID NO: 378187 - RNA, 28 nt, Homo Sapiens
gggcagucgcggccgccagagggggcag

SEQ ID NO: 378188 - RNA, 32 nt, Homo Sapiens
aacuuuccuuucauaucaucuucccaauguug

SEQ ID NO: 378189 - RNA, 32 nt, Homo Sapiens
ugcucuuuuuucucggugggguguggguaaua

SEQ ID NO: 378190 - RNA, 32 nt, Homo Sapiens
acucucucagcugguaaauuguuccauccaga

SEQ ID NO: 378191 - RNA, 32 nt, Homo Sapiens
aagaaucaagaugaaaucuuaacuaggagauu

SEQ ID NO: 378192 - RNA, 32 nt, Homo Sapiens
ugccauuguaaaugggucugaugugauaugac

SEQ ID NO: 378193 - RNA, 32 nt, Homo Sapiens
guaaagaauuguagucucaguuaaaaggggua

SEQ ID NO: 378194 - RNA, 32 nt, Homo Sapiens
uuuauuuuuuaaacuugccugaauuuguucua

SEQ ID NO: 378195 - RNA, 32 nt, Homo Sapiens
auggagagaggccaucaacauauuuuacauaa

SEQ ID NO: 378196 - RNA, 32 nt, Homo Sapiens
gaguuuuaaccaauaugagacacacgaagagg

SEQ ID NO: 378197 - RNA, 32 nt, Homo Sapiens
aaguugaugugcggaaaauguuuucuuggcuu

SEQ ID NO: 378198 - RNA, 32 nt, Homo Sapiens
uucgcaggcgcccgcccgccucucggccaccu

SEQ ID NO: 378199 - RNA, 32 nt, Homo Sapiens
cgcacaccugcgccuggguguugagagccauc

SEQ ID NO: 378200 - RNA, 32 nt, Homo Sapiens
ccguggggagacgcugggccucaacggcuuug

SEQ ID NO: 378201 - RNA, 32 nt, Homo Sapiens
uuuagaauuggaaaagugagaccaggcacagu

SEQ ID NO: 378202 - RNA, 32 nt, Homo Sapiens
cauggggcagggccggagccgcggcggcggag

SEQ ID NO: 378203 - RNA, 30 nt, Homo Sapiens
uauagugugcuguucauggaaaccgagggc

SEQ ID NO: 378204 - RNA, 32 nt, Homo Sapiens
cccagcuauucaggaggcugaggugggaggau

SEQ ID NO: 378205 - RNA, 29 nt, Homo Sapiens
cagaguggggugcagaggacgacccugca

SEQ ID NO: 378206 - RNA, 32 nt, Homo Sapiens
ugccagccuuggaguugccagucagugcacuc

SEQ ID NO: 378207 - RNA, 32 nt, Homo Sapiens
uuagggcucagguucuugccuuagcacauagc

SEQ ID NO: 378208 - RNA, 32 nt, Homo Sapiens
acaggucccgcaccucaugccugucugccaua

SEQ ID NO: 378209 - RNA, 32 nt, Homo Sapiens
ugagauuacuuauugucuuuucugggaagaca

SEQ ID NO: 378210 - RNA, 32 nt, Homo Sapiens
uucaaaccaaggaaacacugccaucuucaaga

SEQ ID NO: 378211 - RNA, 32 nt, Homo Sapiens
agguggaauucuugcgucugagcacucacgag

SEQ ID NO: 378212 - RNA, 32 nt, Homo Sapiens
ggccaguccuccccucuugauugcugggaaug

SEQ ID NO: 378213 - RNA, 32 nt, Homo Sapiens
cgaugaaugugagaaagccuucugccuucugu

SEQ ID NO: 378214 - RNA, 32 nt, Homo Sapiens
uucagugauagcccaagcuggucaggagagac

SEQ ID NO: 378215 - RNA, 32 nt, Homo Sapiens
gauaaaauauggagugccauccugcuagguga

SEQ ID NO: 378216 - RNA, 32 nt, Homo Sapiens
ugcagcaggcucucuuguuuccgaggugcugc

SEQ ID NO: 378217 - RNA, 32 nt, Homo Sapiens
caugugacuguucuaaauccaguguuugaccc

SEQ ID NO: 378218 - RNA, 32 nt, Homo Sapiens
gaagcaggaacucguggugccucaaggaacgu

SEQ ID NO: 378219 - RNA, 32 nt, Homo Sapiens
uugaugaaguagauugguuggaguagaaaaau

SEQ ID NO: 378220 - RNA, 32 nt, Homo Sapiens
cgggagcggcggugauggacggguccggggag

SEQ ID NO: 378221 - RNA, 32 nt, Homo Sapiens
aaacuugagagaaugagauuugugcuuguaua

SEQ ID NO: 378222 - RNA, 32 nt, Homo Sapiens
guggucugccccaccccugcugaccaagacug

SEQ ID NO: 378223 - RNA, 32 nt, Homo Sapiens
aguuuuccggacuuaaaaguuuacagcacacu

SEQ ID NO: 378224 - RNA, 32 nt, Homo Sapiens
cucagagaugacccugagucuugauucgaguc

SEQ ID NO: 378225 - RNA, 32 nt, Homo Sapiens
acgagcggcagcagagcauccuggccaguaac

SEQ ID NO: 378226 - RNA, 32 nt, Homo Sapiens
ugaguaaaaucaucagaaacugaauccaugua

SEQ ID NO: 378227 - RNA, 32 nt, Homo Sapiens
cacgcgccacuacacucggauuucugacaguc

SEQ ID NO: 378228 - RNA, 32 nt, Homo Sapiens
uaccuugcuccuacuuuucucuaagucaacau

SEQ ID NO: 378229 - RNA, 27 nt, Homo Sapiens
ccauggcggcgguugucgcggcgacga

SEQ ID NO: 378230 - RNA, 32 nt, Homo Sapiens
cccucaacacccugcuucucccggggacgcuu

SEQ ID NO: 378231 - RNA, 32 nt, Homo Sapiens
uuuguuuagggguggggaagugucagcaaggu

SEQ ID NO: 378232 - RNA, 32 nt, Homo Sapiens
uguagugaugucucucucccagcccuuauaug

SEQ ID NO: 378233 - RNA, 32 nt, Homo Sapiens
guucucuccuucugccucccccuguaaccugu

SEQ ID NO: 378234 - RNA, 32 nt, Homo Sapiens
caccaaaaggauuagaaagaaauauggacaac

SEQ ID NO: 378235 - RNA, 31 nt, Homo Sapiens
cggccgcauccuugcacgccccgcggagcuc

SEQ ID NO: 378236 - RNA, 32 nt, Homo Sapiens
uacauucaggcagucagcacaaauuuacuaag

SEQ ID NO: 378237 - RNA, 27 nt, Homo Sapiens
agcgcuuccucccgcagcccccgcgac

SEQ ID NO: 378238 - RNA, 32 nt, Homo Sapiens
uuuaaaggauacuauuugauaaguuuugacau

SEQ ID NO: 378239 - RNA, 32 nt, Homo Sapiens
aaauggggaaaagaagaggaggcuuaggaugg

SEQ ID NO: 378240 - RNA, 32 nt, Homo Sapiens
guuuucauuucaagauguuuccuuccaauggg

SEQ ID NO: 378241 - RNA, 32 nt, Homo Sapiens
cgacacaccccaaaacagagcucugucuccaa

SEQ ID NO: 378242 - RNA, 32 nt, Homo Sapiens
ccagaacagggcauggcauauuguuggugcau

SEQ ID NO: 378243 - RNA, 32 nt, Homo Sapiens
uguuuguuuuuuccuuugaugggcuuaaaaga

SEQ ID NO: 378244 - RNA, 30 nt, Homo Sapiens
ugcugguguccaagugggccggcgcccacc

SEQ ID NO: 378245 - RNA, 32 nt, Homo Sapiens
auuacauauuagaaacauuaagacuaugucuu

SEQ ID NO: 378246 - RNA, 32 nt, Homo Sapiens
cauaauuucuucacucaaucucugauucuguc

SEQ ID NO: 378247 - RNA, 31 nt, Homo Sapiens
auaguuuugucacaauuauagauuagaucaa

SEQ ID NO: 378248 - RNA, 32 nt, Homo Sapiens
uggauuuucuaaaaagugauguuuuauuguuu

SEQ ID NO: 378249 - RNA, 32 nt, Homo Sapiens
acgucgguuucccuguuugaugaugaagauga

SEQ ID NO: 378250 - RNA, 32 nt, Homo Sapiens
ccaaaagacuaccaccugccggauauuggaug

SEQ ID NO: 378251 - RNA, 32 nt, Homo Sapiens
ggcaccccaugaggacaugcagagcaccugca

SEQ ID NO: 378252 - RNA, 32 nt, Homo Sapiens
cggaaggaagcagcaggcagagacgauagacg

SEQ ID NO: 378253 - RNA, 32 nt, Homo Sapiens
cguccggagcagccgcagccuucuggaagcuc

SEQ ID NO: 378254 - RNA, 32 nt, Homo Sapiens
aauucaugaaaggacacaaacacacguaagaa

SEQ ID NO: 378255 - RNA, 32 nt, Homo Sapiens
guguugggccaccuguacugaacgcugaaucg

SEQ ID NO: 378256 - RNA, 32 nt, Homo Sapiens
ucugacccgcccucgcagcccgcggccccgac

SEQ ID NO: 378257 - RNA, 32 nt, Homo Sapiens
ucauaguagaaaguacuagaaaaagcgacacu

SEQ ID NO: 378258 - RNA, 32 nt, Homo Sapiens
aggcuaccagguuuaucacauaaaaaacauuc

SEQ ID NO: 378259 - RNA, 32 nt, Homo Sapiens
ugaguccuccccugcuggccccugcagcccca

SEQ ID NO: 378260 - RNA, 32 nt, Homo Sapiens
gagcccgagccgccgccucugcguccgcgcgu

SEQ ID NO: 378261 - RNA, 32 nt, Homo Sapiens
gucuaauuauauauacauauuuauacaugugu

SEQ ID NO: 378262 - RNA, 32 nt, Homo Sapiens
ugcuauggagucugagaaaaaaugucaaagau

SEQ ID NO: 378263 - RNA, 32 nt, Homo Sapiens
cugggguuuccacacaggcccaugcccuccgu

SEQ ID NO: 378264 - RNA, 32 nt, Homo Sapiens
gaguuugcucuuguugaugaggcuggagugca

SEQ ID NO: 378265 - RNA, 32 nt, Homo Sapiens
acaguccacccauguuugucagaaagaggaug

SEQ ID NO: 378266 - RNA, 32 nt, Homo Sapiens
agaacagggagagccucggagagacgaaaguc

SEQ ID NO: 378267 - RNA, 32 nt, Homo Sapiens
agauuuugccccagcuggacucugcagcucca

SEQ ID NO: 378268 - RNA, 32 nt, Homo Sapiens
uuuucugaugguggcuggggcuggggugagcu

SEQ ID NO: 378269 - RNA, 30 nt, Homo Sapiens
cgcgaaacugcaggcggcggcagcggcagc

SEQ ID NO: 378270 - RNA, 32 nt, Homo Sapiens
gacggcgccgccagcaggccaggcggacuggg

SEQ ID NO: 378271 - RNA, 31 nt, Homo Sapiens
ugcccuugcagcgccgcaggaacucggccag

SEQ ID NO: 378272 - RNA, 32 nt, Homo Sapiens
ucaauguauuauauuucuuuugaaaaauauaa

SEQ ID NO: 378273 - RNA, 32 nt, Homo Sapiens
guucuaaaaugucaaggcaguugcuuguguuu

SEQ ID NO: 378274 - RNA, 32 nt, Homo Sapiens
cucucucauggcuacuaacaagugucgagucc

SEQ ID NO: 378275 - RNA, 32 nt, Homo Sapiens
agcgaugcucggagggcggccggaaguggcgu

SEQ ID NO: 378276 - RNA, 32 nt, Homo Sapiens
ggaacaggccuuagaaacaauugauuuauucc

SEQ ID NO: 378277 - RNA, 32 nt, Homo Sapiens
cccuuccuggagcguugacucccuucucgucu

SEQ ID NO: 378278 - RNA, 32 nt, Homo Sapiens
cucggguggccgccggcccaggcgcuggacgg

SEQ ID NO: 378279 - RNA, 30 nt, Homo Sapiens
agaguucagggaggggcugagucuggcuag

SEQ ID NO: 378280 - RNA, 32 nt, Homo Sapiens
uggucauauaugacagucuacugcauauauau

SEQ ID NO: 378281 - RNA, 32 nt, Homo Sapiens
gccuugacuucccccaccuccuccucaaacaa

SEQ ID NO: 378282 - RNA, 32 nt, Homo Sapiens
cccauuugcucuugcagcccuagggacugugc

SEQ ID NO: 378283 - RNA, 32 nt, Homo Sapiens
cguggcaguggggaagccauggaggcugggaa

SEQ ID NO: 378284 - RNA, 32 nt, Homo Sapiens
uggaaguacuaaaagacuauuuuauacuuguu

SEQ ID NO: 378285 - RNA, 32 nt, Homo Sapiens
cauuucaaguugauuugcuaucuggugugagc

SEQ ID NO: 378286 - RNA, 32 nt, Homo Sapiens
cagagaccuguuugaagggaaggucugaauaa

SEQ ID NO: 378287 - RNA, 32 nt, Homo Sapiens
agaguaaaugucacuuacguuucucauagaug

SEQ ID NO: 378288 - RNA, 32 nt, Homo Sapiens
ggcaaaaauauguuacuuuacgauuuaccugu

SEQ ID NO: 378289 - RNA, 32 nt, Homo Sapiens
uaccaucuugccagcucugucuuuccagcugu

SEQ ID NO: 378290 - RNA, 32 nt, Homo Sapiens
guccgcaguccucggcgggaaggcugucccgg

SEQ ID NO: 378291 - RNA, 32 nt, Homo Sapiens
cagaacaacuaucuuuguauuuuguuuuuaaa

SEQ ID NO: 378292 - RNA, 32 nt, Homo Sapiens
aaggagcauccaugcacccccacaguacccag

SEQ ID NO: 378293 - RNA, 32 nt, Homo Sapiens
cuacagcuggcuccgagacagggcaggggccg

SEQ ID NO: 378294 - RNA, 32 nt, Homo Sapiens
ugcacggcacccacgcaggugucccggucugc

SEQ ID NO: 378295 - RNA, 32 nt, Homo Sapiens
uaguguuagacuguuaauauauguugcaaaug

SEQ ID NO: 378296 - RNA, 32 nt, Homo Sapiens
aaugacucauacugugaugauaccuuuugcuu

SEQ ID NO: 378297 - RNA, 32 nt, Homo Sapiens
cacccuguuuugagcccugaggaggccuuggg

SEQ ID NO: 378298 - RNA, 32 nt, Homo Sapiens
cuucuccaaccauuuuacccauuuccuguccc

SEQ ID NO: 378299 - RNA, 32 nt, Homo Sapiens
cuccgagagcggggcgggguugggggcgggcg

SEQ ID NO: 378300 - RNA, 32 nt, Homo Sapiens
uccuuuggccauaaauguguaauugucauuaa

SEQ ID NO: 378301 - RNA, 32 nt, Homo Sapiens
aaagaauaauuuggaaucagcuaugcaaauca

SEQ ID NO: 378302 - RNA, 32 nt, Homo Sapiens
ucuccaccuguucgggaguuggagaugugcac

SEQ ID NO: 378303 - RNA, 32 nt, Homo Sapiens
ugaaaaaacgcacaagagccccugcccugccc

SEQ ID NO: 378304 - RNA, 32 nt, Homo Sapiens
cccgcaggccccagcccuucccugaagcagcc

SEQ ID NO: 378305 - RNA, 32 nt, Homo Sapiens
caacauuguccccuacugggaauaacagaacu

SEQ ID NO: 378306 - RNA, 31 nt, Homo Sapiens
guugccauggagccggccgggcccuguggcu

SEQ ID NO: 378307 - RNA, 32 nt, Homo Sapiens
ucuggccucccgugacccccaggccgaggguc

SEQ ID NO: 378308 - RNA, 32 nt, Homo Sapiens
uagaggcagcuauuuuaccaucugguauuuau

SEQ ID NO: 378309 - RNA, 32 nt, Homo Sapiens
aauucuauagaaauaaaaccucagaugagucu

SEQ ID NO: 378310 - RNA, 32 nt, Homo Sapiens
uaccgcugucuccucacaaucggccaggccug

SEQ ID NO: 378311 - RNA, 32 nt, Homo Sapiens
uggugccgauggccccacccucaccagccugg

SEQ ID NO: 378312 - RNA, 32 nt, Homo Sapiens
gaaagguggguucccuugcaucuucgcagaca

SEQ ID NO: 378313 - RNA, 30 nt, Homo Sapiens
aggguucagcugugcggcgcccugauuucc

SEQ ID NO: 378314 - RNA, 32 nt, Homo Sapiens
guguguuuugaaaaaggcuuaaugaagagaau

SEQ ID NO: 378315 - RNA, 32 nt, Homo Sapiens
cuccucuguggcggcaggaccuuuguggggcu

SEQ ID NO: 378316 - RNA, 32 nt, Homo Sapiens
accugccggcugacaaggacagcuuucuugga

SEQ ID NO: 378317 - RNA, 32 nt, Homo Sapiens
cagguggggaggaugacaaaccacugauaaca

SEQ ID NO: 378318 - RNA, 32 nt, Homo Sapiens
aaaguuuugcuacuaacaguagcauugugaug

SEQ ID NO: 378319 - RNA, 32 nt, Homo Sapiens
ccagaggagacggugacugggaagccucccac

SEQ ID NO: 378320 - RNA, 32 nt, Homo Sapiens
gcagaggaauccacaauggauuugcagcaggc

SEQ ID NO: 378321 - RNA, 32 nt, Homo Sapiens
aauucuauauauacuaugcaugaauuucuuuu

SEQ ID NO: 378322 - RNA, 32 nt, Homo Sapiens
cuuggucgcuggcuccgagaucgcgcggggcc

SEQ ID NO: 378323 - RNA, 32 nt, Homo Sapiens
ccacccaucggguuuuggguguguguuuucau

SEQ ID NO: 378324 - RNA, 32 nt, Homo Sapiens
uuuaaaaguauuuuugaaaugcaauguguccc

SEQ ID NO: 378325 - RNA, 32 nt, Homo Sapiens
cucugguccuccccagcucuguuuccucuacu

SEQ ID NO: 378326 - RNA, 32 nt, Homo Sapiens
uuuuauauguauauauuuguauuuuuguaugc

SEQ ID NO: 378327 - RNA, 32 nt, Homo Sapiens
cagacgcugcugucacaaccaagaauguuaug

SEQ ID NO: 378328 - RNA, 32 nt, Homo Sapiens
ugauccucuuauuauuucugauucuuuuauuc

SEQ ID NO: 378329 - RNA, 32 nt, Homo Sapiens
ucgauacuugucaaaucaguuacuguucaggg

SEQ ID NO: 378330 - RNA, 32 nt, Homo Sapiens
auuacuuaaguagucuguguauuccccaucca

SEQ ID NO: 378331 - RNA, 32 nt, Homo Sapiens
cuagggauugggccacccuacccaggaucucc

SEQ ID NO: 378332 - RNA, 32 nt, Homo Sapiens
uucccagcuugcauuccaccggaucauaacaa

SEQ ID NO: 378333 - RNA, 32 nt, Homo Sapiens
caccacuuagccuguuuuuuuaucccuuuuuu

SEQ ID NO: 378334 - RNA, 32 nt, Homo Sapiens
ccauucugccccagcuuccuccaguggccuuc

SEQ ID NO: 378335 - RNA, 32 nt, Homo Sapiens
aagauccuccacucacacauguagacaaacau

SEQ ID NO: 378336 - RNA, 30 nt, Homo Sapiens
gggggaggcaggcucacuggccauuuuccc

SEQ ID NO: 378337 - RNA, 32 nt, Homo Sapiens
uaugcccuagacccaagcaagaaaccaccaca

SEQ ID NO: 378338 - RNA, 32 nt, Homo Sapiens
agcagcggccgcgcgcgccuccccucccaaug

SEQ ID NO: 378339 - RNA, 32 nt, Homo Sapiens
cugaggucaggaguucaagaccagucuggcca

SEQ ID NO: 378340 - RNA, 32 nt, Homo Sapiens
uuuaauauccucaccuuaucuaaucuuugaau

SEQ ID NO: 378341 - RNA, 32 nt, Homo Sapiens
auugccuggugcccucugaugaggcuaucccu

SEQ ID NO: 378342 - RNA, 32 nt, Homo Sapiens
augugaaauguauaauuacacauggaagcaau

SEQ ID NO: 378343 - RNA, 32 nt, Homo Sapiens
auuuuguggaaauaauuuacuaucauaauguu

SEQ ID NO: 378344 - RNA, 32 nt, Homo Sapiens
agcuuucuuuuuguuggacuagugguguggug

SEQ ID NO: 378345 - RNA, 32 nt, Homo Sapiens
gcaagcuguuugggaagcuaaauaucaucuau

SEQ ID NO: 378346 - RNA, 32 nt, Homo Sapiens
cuagcccgcccggguuuccuucgcagucgcgc

SEQ ID NO: 378347 - RNA, 32 nt, Homo Sapiens
cgaguggaacaaaaaccaacacauaguuuuaa

SEQ ID NO: 378348 - RNA, 32 nt, Homo Sapiens
gggcaaaugaggggcggcgggguggcgggucg

SEQ ID NO: 378349 - RNA, 32 nt, Homo Sapiens
cggcaggucccggcccggcggcggcagccaug

SEQ ID NO: 378350 - RNA, 32 nt, Homo Sapiens
cccucccccugccccaccuccucccuugggac

SEQ ID NO: 378351 - RNA, 32 nt, Homo Sapiens
agccaaggacaaaggggccucgcagaggcucc

SEQ ID NO: 378352 - RNA, 32 nt, Homo Sapiens
agucuuacugaacauucuccaucacaucugag

SEQ ID NO: 378353 - RNA, 32 nt, Homo Sapiens
cggggccgccggggccgccauggagcccgacu

SEQ ID NO: 378354 - RNA, 31 nt, Homo Sapiens
aauuaaagugaauuaguaguauaucauuuua

SEQ ID NO: 378355 - RNA, 32 nt, Homo Sapiens
ggugcugccggggcagcgggagguggcuggac

SEQ ID NO: 378356 - RNA, 32 nt, Homo Sapiens
ccuugcggggcugaguguaacuuuaggaaauu

SEQ ID NO: 378357 - RNA, 32 nt, Homo Sapiens
aagaggccgcguggggcgaaggcggcgcuugg

SEQ ID NO: 378358 - RNA, 32 nt, Homo Sapiens
gggcaagggcuuugggcaagaagcacuggugg

SEQ ID NO: 378359 - RNA, 32 nt, Homo Sapiens
aggcacuguuuuaucucugugaaucuugaaua

SEQ ID NO: 378360 - RNA, 32 nt, Homo Sapiens
ugcauuuccucuacgcccagguuccggaaggu

SEQ ID NO: 378361 - RNA, 32 nt, Homo Sapiens
aacaagcaaauucaaaucuuugaaagaauuca

SEQ ID NO: 378362 - RNA, 32 nt, Homo Sapiens
cuuauuauuuuagcucuuucuguaauauuuac

SEQ ID NO: 378363 - RNA, 32 nt, Homo Sapiens
cccggugccagguccagauuucccuccaugau

SEQ ID NO: 378364 - RNA, 32 nt, Homo Sapiens
cucggccuccgcgggcccggcccgcgucagca

SEQ ID NO: 378365 - RNA, 32 nt, Homo Sapiens
uucccgggccccaaggucccugccaccucuuc

SEQ ID NO: 378366 - RNA, 32 nt, Homo Sapiens
ggggccucggggggcaucggcgcggccguggc

SEQ ID NO: 378367 - RNA, 32 nt, Homo Sapiens
cucaggcucugcaacacuagauucgaauauga

SEQ ID NO: 378368 - RNA, 32 nt, Homo Sapiens
cacagcuuagguuuuucugucauccucagauc

SEQ ID NO: 378369 - RNA, 32 nt, Homo Sapiens
ugaaggcagcgaagccucggggcccaagcccc

SEQ ID NO: 378370 - RNA, 32 nt, Homo Sapiens
uucagaagaaaguucaucaggugcuucuuuuu

SEQ ID NO: 378371 - RNA, 32 nt, Homo Sapiens
auaucugauccauuuuaaugguuggaacagaa

SEQ ID NO: 378372 - RNA, 32 nt, Homo Sapiens
ucauuuuccuuccacauuaccucugcuguuag

SEQ ID NO: 378373 - RNA, 32 nt, Homo Sapiens
auuuuugcaccauuaauuuagcaaaggccauc

SEQ ID NO: 378374 - RNA, 32 nt, Homo Sapiens
uugcuuuucuuuucuuuuuuuuuaguuuuuau

SEQ ID NO: 378375 - RNA, 32 nt, Homo Sapiens
agggagggcgaccuccuuguccgggugugguc

SEQ ID NO: 378376 - RNA, 32 nt, Homo Sapiens
uacuuucgucauagugauucauacucuauguu

SEQ ID NO: 378377 - RNA, 32 nt, Homo Sapiens
cuuugcccggggagccgagcggcagcggggcu

SEQ ID NO: 378378 - RNA, 32 nt, Homo Sapiens
cagcugggccguggugggccugucugcuugau

SEQ ID NO: 378379 - RNA, 32 nt, Homo Sapiens
uaauuucugugauuuccaaccaacaugaaaug

SEQ ID NO: 378380 - RNA, 32 nt, Homo Sapiens
uuuguaaacacuaucaugauauuuucaauuuu

SEQ ID NO: 378381 - RNA, 32 nt, Homo Sapiens
ccuaaagagagagaccacaggaacuguaaggg

SEQ ID NO: 378382 - RNA, 32 nt, Homo Sapiens
cagaaauucacagcaucaauaucaccauugag

SEQ ID NO: 378383 - RNA, 32 nt, Homo Sapiens
uacuuaguaaaaauugauuacaauugagggaa

SEQ ID NO: 378384 - RNA, 32 nt, Homo Sapiens
gggcccucgguccgcccucccggcgcguccau

SEQ ID NO: 378385 - RNA, 32 nt, Homo Sapiens
ggcccggcgcgguggcucccgccuguaauccc

SEQ ID NO: 378386 - RNA, 32 nt, Homo Sapiens
cacucagaaugaugagaggagaucugagaccu

SEQ ID NO: 378387 - RNA, 32 nt, Homo Sapiens
gugagacgaugccacugcgccacgcucgcccc

SEQ ID NO: 378388 - RNA, 32 nt, Homo Sapiens
aacuucaaggacauuauaucacuuacuguaua

SEQ ID NO: 378389 - RNA, 32 nt, Homo Sapiens
aaacauauuuauucuccucuuucuucccuuag

SEQ ID NO: 378390 - RNA, 32 nt, Homo Sapiens
gauggcuggguugaggguggacugugcgaggc

SEQ ID NO: 378391 - RNA, 32 nt, Homo Sapiens
guucucacaaaauaacuggugcuagcucaaga

SEQ ID NO: 378392 - RNA, 32 nt, Homo Sapiens
uggccacauucaccaaccaaagggggacagug

SEQ ID NO: 378393 - RNA, 32 nt, Homo Sapiens
ugaaugagacagaggcugccccugcccuggcu

SEQ ID NO: 378394 - RNA, 32 nt, Homo Sapiens
cuuaacuuuuaguggaggaaacagaccaccac

SEQ ID NO: 378395 - RNA, 32 nt, Homo Sapiens
ccccugucuucuuuuccaucuuuuuuguuguu

SEQ ID NO: 378396 - RNA, 32 nt, Homo Sapiens
agcagaugagagacacaaagagaagugguaau

SEQ ID NO: 378397 - RNA, 31 nt, Homo Sapiens
gccagacugcgcagccaggacugggguaugg

SEQ ID NO: 378398 - RNA, 31 nt, Homo Sapiens
cuuccaaaauaaaaguguucauuuuauuuua

SEQ ID NO: 378399 - RNA, 32 nt, Homo Sapiens
uuguacuacaagguuuaauaauaaaaacaaag

SEQ ID NO: 378400 - RNA, 32 nt, Homo Sapiens
gauccacccacuuugaccucccaaagugcugg

SEQ ID NO: 378401 - RNA, 32 nt, Homo Sapiens
cucaugaagagcaucuggcugcuguuaccagg

SEQ ID NO: 378402 - RNA, 32 nt, Homo Sapiens
ugaucugggccacuucccuccuuccagucaug

SEQ ID NO: 378403 - RNA, 32 nt, Homo Sapiens
augaggggcaaaaggggagaaauacugcuaaa

SEQ ID NO: 378404 - RNA, 32 nt, Homo Sapiens
uucagcaguccuggggacccaggcgugccgag

SEQ ID NO: 378405 - RNA, 32 nt, Homo Sapiens
cucuggggcagcccccaccuccguccugaccc

SEQ ID NO: 378406 - RNA, 32 nt, Homo Sapiens
ccacucagcucaccucucccuccaccuccucu

SEQ ID NO: 378407 - RNA, 32 nt, Homo Sapiens
ccccguuguuaagcaaugcauuacuguauuau

SEQ ID NO: 378408 - RNA, 32 nt, Homo Sapiens
agaauucugacuuacuuaaccagguuugggau

SEQ ID NO: 378409 - RNA, 32 nt, Homo Sapiens
cacgugcgcuggcguagccaggagcucugcuc

SEQ ID NO: 378410 - RNA, 32 nt, Homo Sapiens
gggccuuuaucuccagagcagagggucugaaa

SEQ ID NO: 378411 - RNA, 32 nt, Homo Sapiens
cgggugccagcaugcuaugggcuccugcguga

SEQ ID NO: 378412 - RNA, 32 nt, Homo Sapiens
uguggugagaacaacaacagugccuggagaau

SEQ ID NO: 378413 - RNA, 32 nt, Homo Sapiens
ggagcagguucacaguuuuucagaauacauca

SEQ ID NO: 378414 - RNA, 32 nt, Homo Sapiens
ucucucccauucucuaguacugcuccccuacc

SEQ ID NO: 378415 - RNA, 32 nt, Homo Sapiens
acaguguguuugugauuguuugcucugagagu

SEQ ID NO: 378416 - RNA, 32 nt, Homo Sapiens
uugaguaugcuugauuuguauauuggaacuca

SEQ ID NO: 378417 - RNA, 32 nt, Homo Sapiens
gcaaaaaguccccaauaaauggucaggacaaa

SEQ ID NO: 378418 - RNA, 32 nt, Homo Sapiens
cagagcaagacucuaucuccaaaaaacaaaaa

SEQ ID NO: 378419 - RNA, 31 nt, Homo Sapiens
agcaaugaagguagucauccauagacuugaa

SEQ ID NO: 378420 - RNA, 32 nt, Homo Sapiens
gccaccuccgagugcuuugucuccacucagua

SEQ ID NO: 378421 - RNA, 32 nt, Homo Sapiens
caaguccucuguggccagcugcaucugucuga

SEQ ID NO: 378422 - RNA, 32 nt, Homo Sapiens
ccacugcugccccaagcucacucaggaauuca

SEQ ID NO: 378423 - RNA, 32 nt, Homo Sapiens
guccugacgcccucuccaugccccacaguaau

SEQ ID NO: 378424 - RNA, 32 nt, Homo Sapiens
ugccccugucuggaagacguggcucuggguga

SEQ ID NO: 378425 - RNA, 32 nt, Homo Sapiens
cuuucuuuaaaacuagggacuuucaagauuaa

SEQ ID NO: 378426 - RNA, 30 nt, Homo Sapiens
acgggguuucacuguguuagccacgauggu

SEQ ID NO: 378427 - RNA, 32 nt, Homo Sapiens
ucucauucuguuauccaguucauuccagcaau

SEQ ID NO: 378428 - RNA, 32 nt, Homo Sapiens
gucucgcuccaucuugguccuccggaguccca

SEQ ID NO: 378429 - RNA, 32 nt, Homo Sapiens
gguaguccggugccccccgugccggagcgcag

SEQ ID NO: 378430 - RNA, 32 nt, Homo Sapiens
uggcucugcccccaggucgucuugcacaccuu

SEQ ID NO: 378431 - RNA, 32 nt, Homo Sapiens
cuuuuuuuaaguuuuguuuuuaucuugccugu

SEQ ID NO: 378432 - RNA, 32 nt, Homo Sapiens
ggcggcgggggaggagaggggaaagagacauu

SEQ ID NO: 378433 - RNA, 32 nt, Homo Sapiens
guuugaauucucucaugguuaccaaaacucug

SEQ ID NO: 378434 - RNA, 32 nt, Homo Sapiens
ucugacaucaucaucaccauuaacagcugaaa

SEQ ID NO: 378435 - RNA, 32 nt, Homo Sapiens
auuaauuuugaaaagauguaccugguggauau

SEQ ID NO: 378436 - RNA, 32 nt, Homo Sapiens
aagggcagucguuugaggcagcuuggggugaa

SEQ ID NO: 378437 - RNA, 32 nt, Homo Sapiens
cgccuguaaucccagcacuuugggagaccaag

SEQ ID NO: 378438 - RNA, 32 nt, Homo Sapiens
cucugugccugccugccuccaggagcaggacg

SEQ ID NO: 378439 - RNA, 32 nt, Homo Sapiens
ucauaauuuuuaaagguuggaaucuuuuauaa

SEQ ID NO: 378440 - RNA, 32 nt, Homo Sapiens
ccccucuccaugaauuggaacuugguacaggu

SEQ ID NO: 378441 - RNA, 29 nt, Homo Sapiens
aucuuccuggauuucagagggaaaagccu

SEQ ID NO: 378442 - RNA, 32 nt, Homo Sapiens
cccgcacggaugccgaaggugaaggcgcugca

SEQ ID NO: 378443 - RNA, 32 nt, Homo Sapiens
uagaggccccacuacuaccacuagcaccguug

SEQ ID NO: 378444 - RNA, 32 nt, Homo Sapiens
ccuugaagacacugaggccuacgucgagguag

SEQ ID NO: 378445 - RNA, 32 nt, Homo Sapiens
acacugaguuaguuucguucaagcugccucuu

SEQ ID NO: 378446 - RNA, 32 nt, Homo Sapiens
agcggacugaugauaucccgcauauuagggug

SEQ ID NO: 378447 - RNA, 32 nt, Homo Sapiens
uaauggucauacugaggucucagauagugugg

SEQ ID NO: 378448 - RNA, 32 nt, Homo Sapiens
gagacaaggcagcucucuggggccucuuuuua

SEQ ID NO: 378449 - RNA, 32 nt, Homo Sapiens
cgaugagggaccaucguuucucucccgggccu

SEQ ID NO: 378450 - RNA, 32 nt, Homo Sapiens
cauguauacauccagauggccugaagcaagug

SEQ ID NO: 378451 - RNA, 32 nt, Homo Sapiens
gagagggaccuggcucugcugcucugaagcac

SEQ ID NO: 378452 - RNA, 32 nt, Homo Sapiens
gcuuaucugggaaucacgcaaaaguuggccag

SEQ ID NO: 378453 - RNA, 32 nt, Homo Sapiens
uacuaucuuuaacucaugcauggccacugaac

SEQ ID NO: 378454 - RNA, 32 nt, Homo Sapiens
cuucauggacacgcugcccuucugccccugcc

SEQ ID NO: 378455 - RNA, 32 nt, Homo Sapiens
ucacgugcucccugaugaccgccaggcuccuu

SEQ ID NO: 378456 - RNA, 32 nt, Homo Sapiens
gcggagcccgucgagaggccccguguucgucc

SEQ ID NO: 378457 - RNA, 32 nt, Homo Sapiens
accuguacagcacguuacuguacuggauacug

SEQ ID NO: 378458 - RNA, 32 nt, Homo Sapiens
gcgagaacaucccaccccccaccccccugcag

SEQ ID NO: 378459 - RNA, 32 nt, Homo Sapiens
ccguuugucugcaagagcugccacgcccaguu

SEQ ID NO: 378460 - RNA, 32 nt, Homo Sapiens
cuguugauuuuuuuuucuugguguguguggug

SEQ ID NO: 378461 - RNA, 32 nt, Homo Sapiens
acagauucaagugcaauccauguaucuguaug

SEQ ID NO: 378462 - RNA, 32 nt, Homo Sapiens
aagccaggucgucuucaguggcacaaaccaac

SEQ ID NO: 378463 - RNA, 32 nt, Homo Sapiens
ccuagaauuuugagauacuaagagaaugcaau

SEQ ID NO: 378464 - RNA, 32 nt, Homo Sapiens
gugagcgccaugcggcgccgcgcagcccgggg

SEQ ID NO: 378465 - RNA, 32 nt, Homo Sapiens
auacgccccuccccagccaguccugagccucc

SEQ ID NO: 378466 - RNA, 32 nt, Homo Sapiens
uuuuugaggaaauuauuggggaaugaauggau

SEQ ID NO: 378467 - RNA, 32 nt, Homo Sapiens
auguuggacacuuaguuauuuaccaaagccuc

SEQ ID NO: 378468 - RNA, 32 nt, Homo Sapiens
uuccugcuacugcuacugcugcugcugccacc

SEQ ID NO: 378469 - RNA, 32 nt, Homo Sapiens
gcuagaauuuaaaauuggaagaguuuaauuug

SEQ ID NO: 378470 - RNA, 32 nt, Homo Sapiens
ucccgagcgcgcucgagccagccccggcccca

SEQ ID NO: 378471 - RNA, 32 nt, Homo Sapiens
uuuuagugaacaggccguuuucaacacuugug

SEQ ID NO: 378472 - RNA, 32 nt, Homo Sapiens
cagcgggggguguggggugcaggugccagagc

SEQ ID NO: 378473 - RNA, 32 nt, Homo Sapiens
auagacugcuaaggugagauggggaauaucag

SEQ ID NO: 378474 - RNA, 32 nt, Homo Sapiens
cggaggcaccuggaacccguggcaagcgccga

SEQ ID NO: 378475 - RNA, 32 nt, Homo Sapiens
acuccaguauuauguuuacaauccauuggaug

SEQ ID NO: 378476 - RNA, 32 nt, Homo Sapiens
gacugccccuccccuccucacggcuucuccac

SEQ ID NO: 378477 - RNA, 32 nt, Homo Sapiens
aaaggacucuguguaacacuaacauuuccagu

SEQ ID NO: 378478 - RNA, 32 nt, Homo Sapiens
gugccugcuuagcuucccguccccacccccca

SEQ ID NO: 378479 - RNA, 32 nt, Homo Sapiens
gucuugaugggaaaaauggagaauuaaaaagu

SEQ ID NO: 378480 - RNA, 32 nt, Homo Sapiens
guggggugggggugucaugccaugguggagga

SEQ ID NO: 378481 - RNA, 32 nt, Homo Sapiens
aguuguaaaacauuauuaauagcagccaucca

SEQ ID NO: 378482 - RNA, 32 nt, Homo Sapiens
ucuucaaguuaaaaagcuucugcacagcaaac

SEQ ID NO: 378483 - RNA, 32 nt, Homo Sapiens
cucccggcuuugcagggagaccaggcuuccca

SEQ ID NO: 378484 - RNA, 32 nt, Homo Sapiens
gggcagcgccgcggcgcgcgcgauccggcuga

SEQ ID NO: 378485 - RNA, 32 nt, Homo Sapiens
cuugcgaggcuggggugagaggugauagaggc

SEQ ID NO: 378486 - RNA, 32 nt, Homo Sapiens
gucaucaauggcaguucucaugcugucaccaa

SEQ ID NO: 378487 - RNA, 32 nt, Homo Sapiens
gcgaugagccggcuucuguuccuggccgcaga

SEQ ID NO: 378488 - RNA, 32 nt, Homo Sapiens
ugccauugaugcuguugcucucguccgccucc

SEQ ID NO: 378489 - RNA, 32 nt, Homo Sapiens
aucccgcccuccccggcuccuccggaccuccu

SEQ ID NO: 378490 - RNA, 32 nt, Homo Sapiens
cucuggccgccuuuccucucaggacauacuuc

SEQ ID NO: 378491 - RNA, 32 nt, Homo Sapiens
cuggagcuuggggugaggaagagggagggaug

SEQ ID NO: 378492 - RNA, 32 nt, Homo Sapiens
cccaggaugaggaggaacaggcagaagcucuc

SEQ ID NO: 378493 - RNA, 32 nt, Homo Sapiens
uuaaauauauaaauaaagcaaauaaaguugag

SEQ ID NO: 378494 - RNA, 32 nt, Homo Sapiens
gcacugcgcccucuccaccacugcguucccuc

SEQ ID NO: 378495 - RNA, 32 nt, Homo Sapiens
agagagacuaucuggaggaaaguacagacucc

SEQ ID NO: 378496 - RNA, 32 nt, Homo Sapiens
uauuuuggucacuucuagucaaugaaaaaugu

SEQ ID NO: 378497 - RNA, 32 nt, Homo Sapiens
ucaaaacagcuauuuaaccuugugcagaaaaa

SEQ ID NO: 378498 - RNA, 32 nt, Homo Sapiens
gcugggugggcuuaucgucgagaggguucaga

SEQ ID NO: 378499 - RNA, 32 nt, Homo Sapiens
cauacugggccaggugcaccccgaggugcccc

SEQ ID NO: 378500 - RNA, 32 nt, Homo Sapiens
caguuuauauugcauucaccuccuauuuuaca

SEQ ID NO: 378501 - RNA, 32 nt, Homo Sapiens
gcgcccuccgcgggccucccaauuuucucgcu

SEQ ID NO: 378502 - RNA, 32 nt, Homo Sapiens
gaaaguggaggccugaaguccuggguuccagu

SEQ ID NO: 378503 - RNA, 32 nt, Homo Sapiens
cugguugcauggcagcgcugcccgggcgcggg

SEQ ID NO: 378504 - RNA, 32 nt, Homo Sapiens
caacuauauuguuugcuaagcauuccaacuau

SEQ ID NO: 378505 - RNA, 32 nt, Homo Sapiens
uagacagcgucaaugcagcaucaauuauauga

SEQ ID NO: 378506 - RNA, 32 nt, Homo Sapiens
auguuuuugaauuucguauucuuucauuccac

SEQ ID NO: 378507 - RNA, 32 nt, Homo Sapiens
aauuuuccagggccuuucuccucccaggaucu

SEQ ID NO: 378508 - RNA, 32 nt, Homo Sapiens
uaaccaacccucuuccuccccgucauuguacu

SEQ ID NO: 378509 - RNA, 32 nt, Homo Sapiens
gccugccagccacuucuuaccuccucaccuac

SEQ ID NO: 378510 - RNA, 26 nt, Homo Sapiens
acuuccaccucuucauccagacuuag

SEQ ID NO: 378511 - RNA, 32 nt, Homo Sapiens
acgagggaagcuggggcuccccugcccacagg

SEQ ID NO: 378512 - RNA, 32 nt, Homo Sapiens
ccacgugugaaugggugaggcugauguggaug

SEQ ID NO: 378513 - RNA, 32 nt, Homo Sapiens
gcaucagucaacagagaggggcagggaaggag

SEQ ID NO: 378514 - RNA, 32 nt, Homo Sapiens
ccuucuaucccauaauuuauuaaaucacuguu

SEQ ID NO: 378515 - RNA, 31 nt, Homo Sapiens
gcuguggggaacuccauucaguuuuaucucc

SEQ ID NO: 378516 - RNA, 32 nt, Homo Sapiens
ccuggcugccgggaacacaguggugaucaagc

SEQ ID NO: 378517 - RNA, 32 nt, Homo Sapiens
uguuuccugggaucuuggggcugggggugccc

SEQ ID NO: 378518 - RNA, 32 nt, Homo Sapiens
agcaagaaccuacagcacagauuaugcccugc

SEQ ID NO: 378519 - RNA, 32 nt, Homo Sapiens
gcgcccuagggcugagggaggggccgugacac

SEQ ID NO: 378520 - RNA, 32 nt, Homo Sapiens
agcacagacagcagagagggccaggcagugcu

SEQ ID NO: 378521 - RNA, 32 nt, Homo Sapiens
uuuuuguuugguugagguuucacgcuagaagg

SEQ ID NO: 378522 - RNA, 32 nt, Homo Sapiens
aaaaaggugauggguuguguuaugcuuguauu

SEQ ID NO: 378523 - RNA, 29 nt, Homo Sapiens
uaaaucagguaugagugaaacucugggua

SEQ ID NO: 378524 - RNA, 32 nt, Homo Sapiens
uuggagggcugggaagacccaugcuguaucug

SEQ ID NO: 378525 - RNA, 32 nt, Homo Sapiens
acauggacaaagggcugccuucacccaccagu

SEQ ID NO: 378526 - RNA, 32 nt, Homo Sapiens
gccacggcgggggcuggggcgaguggccggca

SEQ ID NO: 378527 - RNA, 32 nt, Homo Sapiens
agccaguaaaaugaacuuggcacccagcgcau

SEQ ID NO: 378528 - RNA, 32 nt, Homo Sapiens
ugugccacagggcggggccgacacccugagcu

SEQ ID NO: 378529 - RNA, 32 nt, Homo Sapiens
aaccagauaaaaguagcacaugugcuuuuguu

SEQ ID NO: 378530 - RNA, 32 nt, Homo Sapiens
acuguauaauuuuaaaauaguuuaccuggcca

SEQ ID NO: 378531 - RNA, 32 nt, Homo Sapiens
gagagagaaacaaacuuuucaaggcuuauauu

SEQ ID NO: 378532 - RNA, 32 nt, Homo Sapiens
gcggucgggaacucggugggaggcggcaacau

SEQ ID NO: 378533 - RNA, 32 nt, Homo Sapiens
cuugguguguucaagcagaaauccacacaugg

SEQ ID NO: 378534 - RNA, 32 nt, Homo Sapiens
ccaaaucuacugagccacggaccgcauccucc

SEQ ID NO: 378535 - RNA, 32 nt, Homo Sapiens
aggugggcgcaucaccugaggucaggaguucg

SEQ ID NO: 378536 - RNA, 32 nt, Homo Sapiens
gggggcgggaacaggaucggcccgcgggcugg

SEQ ID NO: 378537 - RNA, 31 nt, Homo Sapiens
uuaagucuuaaccacagucagaauuaucuua

SEQ ID NO: 378538 - RNA, 32 nt, Homo Sapiens
auguacaauauuuuaagcauuacucuuguaag

SEQ ID NO: 378539 - RNA, 32 nt, Homo Sapiens
acauauguauauauuucccaaucuauuauagg

SEQ ID NO: 378540 - RNA, 32 nt, Homo Sapiens
cugcuggcuuuuugcuguagcuccacauuccu

SEQ ID NO: 378541 - RNA, 32 nt, Homo Sapiens
gcggguugcugagaggacgccacgcugacugg

SEQ ID NO: 378542 - RNA, 32 nt, Homo Sapiens
agagucagggccgggggcgcacgccggaacac

SEQ ID NO: 378543 - RNA, 32 nt, Homo Sapiens
aauaaagacagaggguucucaugauucacauu

SEQ ID NO: 378544 - RNA, 32 nt, Homo Sapiens
aagguuuggaauguuggaaugaccaagagaca

SEQ ID NO: 378545 - RNA, 32 nt, Homo Sapiens
cccugaacucgggcccugagcuccucacugcc

SEQ ID NO: 378546 - RNA, 32 nt, Homo Sapiens
gugaugagcuucacccuggagcuccucccggg

SEQ ID NO: 378547 - RNA, 32 nt, Homo Sapiens
guaggccuuuguuuuccaauggugcuauauuc

SEQ ID NO: 378548 - RNA, 32 nt, Homo Sapiens
uuuucucacggcccuggccuuaacucauaucu

SEQ ID NO: 378549 - RNA, 29 nt, Homo Sapiens
gaccagccugaccaacauggcaaaacccc

SEQ ID NO: 378550 - RNA, 32 nt, Homo Sapiens
agcggugggcaccggggcagggcgcgcugacc

SEQ ID NO: 378551 - RNA, 32 nt, Homo Sapiens
ucccgcaccgccggccgccuccccucgcccuc

SEQ ID NO: 378552 - RNA, 32 nt, Homo Sapiens
cuccaccaugcaggacaaacaucuucucaagc

SEQ ID NO: 378553 - RNA, 32 nt, Homo Sapiens
cccccgacuuccucaaaacaaacaagagaugg

SEQ ID NO: 378554 - RNA, 32 nt, Homo Sapiens
ugcuaucuauccaaaaaucaauaaaauagaau

SEQ ID NO: 378555 - RNA, 28 nt, Homo Sapiens
acagugucagauuaacauuugaaaggug

SEQ ID NO: 378556 - RNA, 32 nt, Homo Sapiens
auucauagaugacugucacauuuuaaaauguu

SEQ ID NO: 378557 - RNA, 32 nt, Homo Sapiens
ggcccagagcaagugcagcauccugacccuga

SEQ ID NO: 378558 - RNA, 32 nt, Homo Sapiens
uguacuugaguagacacgacagacggggaagg

SEQ ID NO: 378559 - RNA, 32 nt, Homo Sapiens
caggccucggucaucacccucuacaccauguu

SEQ ID NO: 378560 - RNA, 32 nt, Homo Sapiens
agcaaagaagaaaaaguaaaacaaaugaccag

SEQ ID NO: 378561 - RNA, 32 nt, Homo Sapiens
gcugcgcagccugcccuucgggacgcuggagc

SEQ ID NO: 378562 - RNA, 32 nt, Homo Sapiens
uuaauguccaagucacagggagccucagccuu

SEQ ID NO: 378563 - RNA, 32 nt, Homo Sapiens
uuuccucuuucugccaccucccaaggcagaaa

SEQ ID NO: 378564 - RNA, 32 nt, Homo Sapiens
uggggucagcgagaccccauccccucagcccu

SEQ ID NO: 378565 - RNA, 32 nt, Homo Sapiens
gcuugaaugcccuucuuuccauauaacacuua

SEQ ID NO: 378566 - RNA, 32 nt, Homo Sapiens
agauauguauaaaugagcuguguguguaucug

SEQ ID NO: 378567 - RNA, 32 nt, Homo Sapiens
cuguuguaaaccauucagaauuuuccugcuag

SEQ ID NO: 378568 - RNA, 32 nt, Homo Sapiens
cuggagagugagggccggcgcugcugucccgc

SEQ ID NO: 378569 - RNA, 32 nt, Homo Sapiens
gugccuuccauggagcaagcccggggcuccgc

SEQ ID NO: 378570 - RNA, 32 nt, Homo Sapiens
uagaauaugccacuaacacuaucugccuuuca

SEQ ID NO: 378571 - RNA, 32 nt, Homo Sapiens
agaaaggcaaaauaacugaagaagaauuugag

SEQ ID NO: 378572 - RNA, 32 nt, Homo Sapiens
gcuauaggaugcuauaggaaugucuaauguac

SEQ ID NO: 378573 - RNA, 32 nt, Homo Sapiens
cucccgcuuguaguauuuuaaauuuaccuuca

SEQ ID NO: 378574 - RNA, 32 nt, Homo Sapiens
auuguaaguccuuuguuguucuuucaacaaug

SEQ ID NO: 378575 - RNA, 32 nt, Homo Sapiens
uacucuagauuuuuacuuucauuugaacaggu

SEQ ID NO: 378576 - RNA, 32 nt, Homo Sapiens
ccgucccgcucccgccgccagcggaggcccua

SEQ ID NO: 378577 - RNA, 32 nt, Homo Sapiens
acaucaccuuuuuauagcauuaaauucauuuu

SEQ ID NO: 378578 - RNA, 32 nt, Homo Sapiens
augcccagcuaauauuuuuuuauuuucgugga

SEQ ID NO: 378579 - RNA, 32 nt, Homo Sapiens
gagcacuucuccacagcgggugucacagguua

SEQ ID NO: 378580 - RNA, 32 nt, Homo Sapiens
agauaugugaagaucucugugcuuggacuucc

SEQ ID NO: 378581 - RNA, 32 nt, Homo Sapiens
uggggacugguuuguaucugguuauaucucuu

SEQ ID NO: 378582 - RNA, 32 nt, Homo Sapiens
acgcccugccccagcccgucucuccgagcuac

SEQ ID NO: 378583 - RNA, 32 nt, Homo Sapiens
guuaaacuaccuaaaauaaauaccaaagauaa

SEQ ID NO: 378584 - RNA, 32 nt, Homo Sapiens
gcacgagaguccucaugggcacucacagacug

SEQ ID NO: 378585 - RNA, 32 nt, Homo Sapiens
cggcuguuucggcggccgcgggaugccccugc

SEQ ID NO: 378586 - RNA, 32 nt, Homo Sapiens
ccgcgcgcacgaggaggacgcgggcgugcgcu

SEQ ID NO: 378587 - RNA, 32 nt, Homo Sapiens
gucaccccauucuacuccauggccucucugcu

SEQ ID NO: 378588 - RNA, 32 nt, Homo Sapiens
aauggggcugaauuucagauuauuuguuacau

SEQ ID NO: 378589 - RNA, 32 nt, Homo Sapiens
ugggguguucuucuugggacccccacuaagac

SEQ ID NO: 378590 - RNA, 32 nt, Homo Sapiens
gccgagcuucccgggaugagggcccccggugu

SEQ ID NO: 378591 - RNA, 32 nt, Homo Sapiens
cuugcugccugccugucugcugagguaaggug

SEQ ID NO: 378592 - RNA, 32 nt, Homo Sapiens
cagccccgacagagugucuggaacaggugauu

SEQ ID NO: 378593 - RNA, 32 nt, Homo Sapiens
uaucuuguacccucuuuuuuuuuuuuuuuuuu

SEQ ID NO: 378594 - RNA, 32 nt, Homo Sapiens
guucaccgcccugauuccacagauguggguca

SEQ ID NO: 378595 - RNA, 32 nt, Homo Sapiens
cacgcagggcagcggguauucuccucccaccu

SEQ ID NO: 378596 - RNA, 32 nt, Homo Sapiens
uuucucacagaagaagaaccagcaagccagac

SEQ ID NO: 378597 - RNA, 30 nt, Homo Sapiens
ggaggaggugguggcggcgggaagaugccg

SEQ ID NO: 378598 - RNA, 32 nt, Homo Sapiens
ucugagcaauuucaauuagaggguuacauuuu

SEQ ID NO: 378599 - RNA, 30 nt, Homo Sapiens
uuccgaccgcugcgcgcggcuccugggcug

SEQ ID NO: 378600 - RNA, 30 nt, Homo Sapiens
ugucuugacaggguugcagaagccaaggag

SEQ ID NO: 378601 - RNA, 32 nt, Homo Sapiens
cgugaucuccacucacugcaacuuccgccucc

SEQ ID NO: 378602 - RNA, 32 nt, Homo Sapiens
cccccugacaacacucauugaccugaggcccu

SEQ ID NO: 378603 - RNA, 32 nt, Homo Sapiens
agcuauggaugggacaggaagcugccaaccuu

SEQ ID NO: 378604 - RNA, 32 nt, Homo Sapiens
uccacgagaagaagcugaggcucugagcggau

SEQ ID NO: 378605 - RNA, 32 nt, Homo Sapiens
cugccacagcuccacucagggaucaugguugg

SEQ ID NO: 378606 - RNA, 32 nt, Homo Sapiens
acauuuuugcaccucuugugcauucugcaaga

SEQ ID NO: 378607 - RNA, 32 nt, Homo Sapiens
auuuuauuugaaaaaaguuacugcaacuuaac

SEQ ID NO: 378608 - RNA, 32 nt, Homo Sapiens
cuagauuaagaaaaaacagaagacaaauacug

SEQ ID NO: 378609 - RNA, 32 nt, Homo Sapiens
ugccugccucccaggcagcugcugccucacaa

SEQ ID NO: 378610 - RNA, 32 nt, Homo Sapiens
aacccuguauaaauaauccaugcuguugguca

SEQ ID NO: 378611 - RNA, 32 nt, Homo Sapiens
cauuauaagaaacuggaacuauauccuugcaa

SEQ ID NO: 378612 - RNA, 32 nt, Homo Sapiens
guaaaaccuucuauuugaugucauuccauuua

SEQ ID NO: 378613 - RNA, 32 nt, Homo Sapiens
auccagggcgccugcgcggaggaggcgggcuc

SEQ ID NO: 378614 - RNA, 32 nt, Homo Sapiens
ugcugcgggguggaaguggggggcugcccacu

SEQ ID NO: 378615 - RNA, 30 nt, Homo Sapiens
uuccaggccaggcgcgguggcucacgccug

SEQ ID NO: 378616 - RNA, 28 nt, Homo Sapiens
aaaucugaagauuaauguugaggaaauu

SEQ ID NO: 378617 - RNA, 32 nt, Homo Sapiens
ccacagcagccucuguccagccugcagguggc

SEQ ID NO: 378618 - RNA, 32 nt, Homo Sapiens
uucucuuauuuuuugcuuccucugaggacauc

SEQ ID NO: 378619 - RNA, 32 nt, Homo Sapiens
auguaagaaaaaagcuuauuaaaaacuugauc

SEQ ID NO: 378620 - RNA, 32 nt, Homo Sapiens
cccgggcuggcgcgcgugcaagcccccugcug

SEQ ID NO: 378621 - RNA, 32 nt, Homo Sapiens
cgcugccucccgaggccuggaacugaagcaaa

SEQ ID NO: 378622 - RNA, 32 nt, Homo Sapiens
ggugacugccgcggcgggcacaguccggggcc

SEQ ID NO: 378623 - RNA, 32 nt, Homo Sapiens
agguagcuggcggcugcccuugggugacaccu

SEQ ID NO: 378624 - RNA, 32 nt, Homo Sapiens
ggcggugugagcgcggugggugcggaggggcg

SEQ ID NO: 378625 - RNA, 32 nt, Homo Sapiens
gacacucuauguauuaaugucuccauugucuu

SEQ ID NO: 378626 - RNA, 32 nt, Homo Sapiens
ugagcugccaugcuuccaacccuucaaaccca

SEQ ID NO: 378627 - RNA, 32 nt, Homo Sapiens
ccaguccccugucaucgaguucugggagaaca

SEQ ID NO: 378628 - RNA, 31 nt, Homo Sapiens
cuuguuauggacgagcaaauaaagugguuuc

SEQ ID NO: 378629 - RNA, 32 nt, Homo Sapiens
cugaggaagggagagggagggccugggguggg

SEQ ID NO: 378630 - RNA, 32 nt, Homo Sapiens
acguggaggccucucacgguccuccuuccugg

SEQ ID NO: 378631 - RNA, 32 nt, Homo Sapiens
ccgcuuccugcaugccuggcccggggcacuag

SEQ ID NO: 378632 - RNA, 32 nt, Homo Sapiens
ccgccccaccccagccccuggcaaccacugau

SEQ ID NO: 378633 - RNA, 32 nt, Homo Sapiens
uaugcguuuuccacuuuuuucuuuuuuaagaa

SEQ ID NO: 378634 - RNA, 30 nt, Homo Sapiens
ugggaaggcaggcugauggggcacacccuu

SEQ ID NO: 378635 - RNA, 32 nt, Homo Sapiens
guuccagugcucuggugucacccaggacacag

SEQ ID NO: 378636 - RNA, 32 nt, Homo Sapiens
gcauauucuuucguuuugguuuucaaaagaug

SEQ ID NO: 378637 - RNA, 32 nt, Homo Sapiens
uuauuuuccuuccucucuggcagggcacuuga

SEQ ID NO: 378638 - RNA, 32 nt, Homo Sapiens
cuccagccaagccccagcauccaaggaccggc

SEQ ID NO: 378639 - RNA, 32 nt, Homo Sapiens
ucccuguggugacaccaguggagaugagggaa

SEQ ID NO: 378640 - RNA, 32 nt, Homo Sapiens
acggaggggauugugucgugugagauuuccca

SEQ ID NO: 378641 - RNA, 32 nt, Homo Sapiens
ucaacagguucagggaacuugagcagaauaag

SEQ ID NO: 378642 - RNA, 32 nt, Homo Sapiens
ugcaaggaauggauucaggauguuguuggaga

SEQ ID NO: 378643 - RNA, 32 nt, Homo Sapiens
accagccguccucucuuggaggauaaacagcc

SEQ ID NO: 378644 - RNA, 32 nt, Homo Sapiens
gggccccgcucggcgccggcggugaccgggaa

SEQ ID NO: 378645 - RNA, 32 nt, Homo Sapiens
aauggcuuggaagauuuggaggcaaccuaaau

SEQ ID NO: 378646 - RNA, 32 nt, Homo Sapiens
ccuucacagacaccucuccugucuucagcaca

SEQ ID NO: 378647 - RNA, 32 nt, Homo Sapiens
cccaccccauccccugaacuacuugggaggug

SEQ ID NO: 378648 - RNA, 32 nt, Homo Sapiens
uuuuucuucccauuuuaacuuaucugaaauug

SEQ ID NO: 378649 - RNA, 32 nt, Homo Sapiens
cucuugggcucuuuuccccaccugucucuaac

SEQ ID NO: 378650 - RNA, 32 nt, Homo Sapiens
cccaccagucuucgccgacagccccuuccagc

SEQ ID NO: 378651 - RNA, 32 nt, Homo Sapiens
aguguuauauauaauauguuaaaaacauuuug

SEQ ID NO: 378652 - RNA, 32 nt, Homo Sapiens
cugccgaggucuccggccccuucccccuuccc

SEQ ID NO: 378653 - RNA, 32 nt, Homo Sapiens
gaagcugaacagcagcagcagcuccucauugg

SEQ ID NO: 378654 - RNA, 32 nt, Homo Sapiens
uggcauuuuuaaaguuguuaaucacuauacau

SEQ ID NO: 378655 - RNA, 32 nt, Homo Sapiens
auuuauuuaauucuaacugaauguagaaccag

SEQ ID NO: 378656 - RNA, 32 nt, Homo Sapiens
aaacaaaaacaaaaaagacugauaucgcaccu

SEQ ID NO: 378657 - RNA, 32 nt, Homo Sapiens
uuuuggcuggggugggggcauuggucacauau

SEQ ID NO: 378658 - RNA, 32 nt, Homo Sapiens
cccaggcacagccacugaccugucccauggcu

SEQ ID NO: 378659 - RNA, 30 nt, Homo Sapiens
cuucugaagaagcuuucuggucugcuuucc

SEQ ID NO: 378660 - RNA, 32 nt, Homo Sapiens
cugcuauaaauauaauaaaggguuauguagaa

SEQ ID NO: 378661 - RNA, 32 nt, Homo Sapiens
caucugcaggcuuuuucuuaguguuccuauua

SEQ ID NO: 378662 - RNA, 32 nt, Homo Sapiens
auguguguacauccugugauauuauuuguaau

SEQ ID NO: 378663 - RNA, 32 nt, Homo Sapiens
uacauaaaacaaauagaugggcuggauguggu

SEQ ID NO: 378664 - RNA, 32 nt, Homo Sapiens
uccagaauauccagaaauccaaaggggcuguu

SEQ ID NO: 378665 - RNA, 32 nt, Homo Sapiens
acgauaauacuucuuuuccacaucucauuguc

SEQ ID NO: 378666 - RNA, 32 nt, Homo Sapiens
auggaugcaauaauguagagcaauacauaagc

SEQ ID NO: 378667 - RNA, 32 nt, Homo Sapiens
ugccuuugacauuuugggcugaaguguucuuu

SEQ ID NO: 378668 - RNA, 32 nt, Homo Sapiens
gcuuuaaaagaugaauaagaaaaaagaucaag

SEQ ID NO: 378669 - RNA, 32 nt, Homo Sapiens
uguggggugcaggugccagagccccaggggcu

SEQ ID NO: 378670 - RNA, 32 nt, Homo Sapiens
ucccuucaaggaaacauuaaauuguauggacu

SEQ ID NO: 378671 - RNA, 32 nt, Homo Sapiens
gacucacugagaugacaagacuugcggucucc

SEQ ID NO: 378672 - RNA, 32 nt, Homo Sapiens
acauuaaaucuguuuccauuuuagucacagaa

SEQ ID NO: 378673 - RNA, 32 nt, Homo Sapiens
cuuagcaggaccacaucuuuggagccucggga

SEQ ID NO: 378674 - RNA, 32 nt, Homo Sapiens
aggacccagggagaguguggggacaggacagc

SEQ ID NO: 378675 - RNA, 32 nt, Homo Sapiens
ugagcugugaaauagaucauggcggucuggaa

SEQ ID NO: 378676 - RNA, 32 nt, Homo Sapiens
gcugcggggggaggacacacggaugcucaggc

SEQ ID NO: 378677 - RNA, 32 nt, Homo Sapiens
agccucacuaucaguguggacacacaucugug

SEQ ID NO: 378678 - RNA, 32 nt, Homo Sapiens
cagacuugaagaacagagggcaguauguggcc

SEQ ID NO: 378679 - RNA, 32 nt, Homo Sapiens
ucaacagggcuaaugagaagauaaggcaucua

SEQ ID NO: 378680 - RNA, 32 nt, Homo Sapiens
ucauuggccccuuccccaaucccggcccugcu

SEQ ID NO: 378681 - RNA, 32 nt, Homo Sapiens
aaggccucugcgggcucuggccugagacagcg

SEQ ID NO: 378682 - RNA, 32 nt, Homo Sapiens
ggcuggguccaguucugccugagcacgguuuu

SEQ ID NO: 378683 - RNA, 32 nt, Homo Sapiens
uucccguccagccccagcccugggccugggcu

SEQ ID NO: 378684 - RNA, 31 nt, Homo Sapiens
ggagagcgcgggagccaaccugggcgcauca

SEQ ID NO: 378685 - RNA, 32 nt, Homo Sapiens
aaaaaaggguauuucauccagaauagaucagu

SEQ ID NO: 378686 - RNA, 32 nt, Homo Sapiens
ggagcccccgccccgcgccauggccggagcuc

SEQ ID NO: 378687 - RNA, 32 nt, Homo Sapiens
uggaaaaagagaugaaauuuuaucaaggaagu

SEQ ID NO: 378688 - RNA, 32 nt, Homo Sapiens
ccggaaaaacugacacugacacaggggcccuu

SEQ ID NO: 378689 - RNA, 32 nt, Homo Sapiens
cuaaguuccucacuccuucuguggucaauguc

SEQ ID NO: 378690 - RNA, 32 nt, Homo Sapiens
auucuacaucaaaggaauuuguagcacagugu

SEQ ID NO: 378691 - RNA, 32 nt, Homo Sapiens
auuaguaaauuauuagaauccaauuaaugauu

SEQ ID NO: 378692 - RNA, 32 nt, Homo Sapiens
agggguaucuuacagcacuuuggggaggggug

SEQ ID NO: 378693 - RNA, 32 nt, Homo Sapiens
aaacaaucacacaggacacuuuucuacauugg

SEQ ID NO: 378694 - RNA, 32 nt, Homo Sapiens
uaggccacuuuucucuuguaacuuuggaaaac

SEQ ID NO: 378695 - RNA, 32 nt, Homo Sapiens
gaauuccuuuuuuaacugauccaaauacuagu

SEQ ID NO: 378696 - RNA, 32 nt, Homo Sapiens
aguuuaugcuuuuuagauuuugguugcuuucu

SEQ ID NO: 378697 - RNA, 32 nt, Homo Sapiens
gcgcucugcccggcuuccucagucuccucgcc

SEQ ID NO: 378698 - RNA, 32 nt, Homo Sapiens
ugagcgagcagaggcgugggcggcugaggggc

SEQ ID NO: 378699 - RNA, 32 nt, Homo Sapiens
gcucuuguuguccaggcuggagugcaauggca

SEQ ID NO: 378700 - RNA, 32 nt, Homo Sapiens
aggaagugaguaauucacugaauugaugguua

SEQ ID NO: 378701 - RNA, 32 nt, Homo Sapiens
caguucugugucccaaauaaauguagacuuuc

SEQ ID NO: 378702 - RNA, 32 nt, Homo Sapiens
aggacucucaggcuuuuauccuagaucaccac

SEQ ID NO: 378703 - RNA, 32 nt, Homo Sapiens
guuguuguuguuuucuucuucuugagacagag

SEQ ID NO: 378704 - RNA, 32 nt, Homo Sapiens
uguuuuccuugaccagggucucacacccugga

SEQ ID NO: 378705 - RNA, 32 nt, Homo Sapiens
gacccuagaggcagaugcugcacugcacuacu

SEQ ID NO: 378706 - RNA, 32 nt, Homo Sapiens
gagaccuggcagcugugucccgcggcuugcgc

SEQ ID NO: 378707 - RNA, 31 nt, Homo Sapiens
ugggcuccgcgcagccgaugacauucugagu

SEQ ID NO: 378708 - RNA, 32 nt, Homo Sapiens
augcucagaauggagcaguggacaaaggagac

SEQ ID NO: 378709 - RNA, 32 nt, Homo Sapiens
agaugcuuuguuuuuauuuuuuaaguaccaaa

SEQ ID NO: 378710 - RNA, 32 nt, Homo Sapiens
uucccuauaaauccauucuccucucccgugua

SEQ ID NO: 378711 - RNA, 32 nt, Homo Sapiens
acuggccacgauccccuccccggagcggagga

SEQ ID NO: 378712 - RNA, 32 nt, Homo Sapiens
cuuugggcauccgcccggggugaggggacccg

SEQ ID NO: 378713 - RNA, 32 nt, Homo Sapiens
uaucuguuuuuuagguucuccucucucuccca

SEQ ID NO: 378714 - RNA, 32 nt, Homo Sapiens
aagaaaaauugaauggaacauaaaaacauugu

SEQ ID NO: 378715 - RNA, 32 nt, Homo Sapiens
cugugaucuuaccacuucaaauggguguaauu

SEQ ID NO: 378716 - RNA, 32 nt, Homo Sapiens
gccagagucaggcuggaaaguaagucacaaua

SEQ ID NO: 378717 - RNA, 32 nt, Homo Sapiens
ugagaauucagagaagcagccagaaggagacu

SEQ ID NO: 378718 - RNA, 32 nt, Homo Sapiens
uguugggauuuuuucaguucuguuaaggaaaa

SEQ ID NO: 378719 - RNA, 32 nt, Homo Sapiens
cgggcccucgaguuagcaguccgugcgcagag

SEQ ID NO: 378720 - RNA, 32 nt, Homo Sapiens
aguuuucaaugaggcacaguucuaagcacuuc

SEQ ID NO: 378721 - RNA, 31 nt, Homo Sapiens
aaaaaaguauuguguaguucagugggaaaaa

SEQ ID NO: 378722 - RNA, 32 nt, Homo Sapiens
guccaaacaaaguccaaugccaugagacugaa

SEQ ID NO: 378723 - RNA, 32 nt, Homo Sapiens
gacauaauauuaucuguaaaagcauuauuugg

SEQ ID NO: 378724 - RNA, 32 nt, Homo Sapiens
uuaucugguacuucauuuuucuuaacuaaaau

SEQ ID NO: 378725 - RNA, 31 nt, Homo Sapiens
gcccugcugcacugccuccccuaaccaaagu

SEQ ID NO: 378726 - RNA, 32 nt, Homo Sapiens
augaaaaauaaaauaaaauaaaacggggauuc

SEQ ID NO: 378727 - RNA, 32 nt, Homo Sapiens
auaauuuucuucaucucuugcuaaucucuaua

SEQ ID NO: 378728 - RNA, 32 nt, Homo Sapiens
cgcggugcuccguggcugcgcugcuggaaccc

SEQ ID NO: 378729 - RNA, 32 nt, Homo Sapiens
cuuauuuaacuccguuuacuacauucuacaug

SEQ ID NO: 378730 - RNA, 32 nt, Homo Sapiens
agccugucacugcccccuccccagccuguguc

SEQ ID NO: 378731 - RNA, 32 nt, Homo Sapiens
ccccgacccuggccuagccgggacccaggguc

SEQ ID NO: 378732 - RNA, 32 nt, Homo Sapiens
uccucacaccgggucagcucuuccuuauguuc

SEQ ID NO: 378733 - RNA, 32 nt, Homo Sapiens
aauucuuacccauuuuaguuuuaaguaucuaa

SEQ ID NO: 378734 - RNA, 32 nt, Homo Sapiens
cuagagaggagcucauuggccaaugcuuaccu

SEQ ID NO: 378735 - RNA, 32 nt, Homo Sapiens
ucaaucaauguuauugugaaaacugggaaugu

SEQ ID NO: 378736 - RNA, 32 nt, Homo Sapiens
aaagcuacuuaguggugacugguuucugccua

SEQ ID NO: 378737 - RNA, 32 nt, Homo Sapiens
gauguugguauaguauccuuaauacaguguag

SEQ ID NO: 378738 - RNA, 32 nt, Homo Sapiens
acuauguaauacugagacuuuguugacucaaa

SEQ ID NO: 378739 - RNA, 32 nt, Homo Sapiens
aguggcacagaaaacaaagugaauuuguuagc

SEQ ID NO: 378740 - RNA, 32 nt, Homo Sapiens
uggccacuuccuccugccccagcccaaccucu

SEQ ID NO: 378741 - RNA, 32 nt, Homo Sapiens
gaaucucaaauuguauuuuaauuaauaugcug

SEQ ID NO: 378742 - RNA, 32 nt, Homo Sapiens
uagaaauauagagcauuaacaaaggaaaauua

SEQ ID NO: 378743 - RNA, 32 nt, Homo Sapiens
uagccagugaacauaauucuuauuacuagacu

SEQ ID NO: 378744 - RNA, 32 nt, Homo Sapiens
ggcaguccugggauccucuccuuuagacccac

SEQ ID NO: 378745 - RNA, 32 nt, Homo Sapiens
uggcagccaaggaaacaguagugccuguuuga

SEQ ID NO: 378746 - RNA, 32 nt, Homo Sapiens
gugcccagccagagcgcgaccagcacugaaac

SEQ ID NO: 378747 - RNA, 27 nt, Homo Sapiens
cugucuuccucuugcagccccccaaac

SEQ ID NO: 378748 - RNA, 32 nt, Homo Sapiens
caggucaucugcuccagccuguccucucguca

SEQ ID NO: 378749 - RNA, 32 nt, Homo Sapiens
cguugaagcuuaaaaucuaaauuuauguaugu

SEQ ID NO: 378750 - RNA, 32 nt, Homo Sapiens
caucacgggaggaggcagcugcggcggggccg

SEQ ID NO: 378751 - RNA, 32 nt, Homo Sapiens
uaaaauucacuauuuuaaccaaaaaaaaaaaa

SEQ ID NO: 378752 - RNA, 32 nt, Homo Sapiens
uauuggugucagaacaucuuuuuucaucccca

SEQ ID NO: 378753 - RNA, 32 nt, Homo Sapiens
aggaggcugaggaggagguggccuaagccuuc

SEQ ID NO: 378754 - RNA, 32 nt, Homo Sapiens
aaaguaauauccaaauuguaagacauaugaaa

SEQ ID NO: 378755 - RNA, 32 nt, Homo Sapiens
ucaguggccugccugaggccuuccagccagaa

SEQ ID NO: 378756 - RNA, 32 nt, Homo Sapiens
agcucaucuagaccucuuuacugcuuuggaag

SEQ ID NO: 378757 - RNA, 32 nt, Homo Sapiens
agagagugaagaaccauaaaacgcuaugcaga

SEQ ID NO: 378758 - RNA, 32 nt, Homo Sapiens
gugacaggcgcauaaacugaaaugaauggcgg

SEQ ID NO: 378759 - RNA, 32 nt, Homo Sapiens
cuuauaaagcuacuauuguagauuauaguguu

SEQ ID NO: 378760 - RNA, 32 nt, Homo Sapiens
gcuccgcggacgggaagguaaacugagcuccc

SEQ ID NO: 378761 - RNA, 32 nt, Homo Sapiens
ucuaugcagcgccccaguggcuuugaaaugca

SEQ ID NO: 378762 - RNA, 32 nt, Homo Sapiens
uauuccaucaucugcccuuuuauucacuuuua

SEQ ID NO: 378763 - RNA, 31 nt, Homo Sapiens
ccugggucccaaauggaguccacuuuagcac

SEQ ID NO: 378764 - RNA, 32 nt, Homo Sapiens
guacuugcuucuuuaucugucucucuaugaac

SEQ ID NO: 378765 - RNA, 32 nt, Homo Sapiens
uucaggucaccaucagaaaagcuaaguuugcu

SEQ ID NO: 378766 - RNA, 32 nt, Homo Sapiens
ccgcgcccggcggaccucgugccucgggcugu

SEQ ID NO: 378767 - RNA, 32 nt, Homo Sapiens
cuccgaugggacgagggacgccggccccaggg

SEQ ID NO: 378768 - RNA, 32 nt, Homo Sapiens
cccccgcucuucuucuggccuaguucucacga

SEQ ID NO: 378769 - RNA, 32 nt, Homo Sapiens
cugcaggaaaaguuuuuucuuuauauccaguu

SEQ ID NO: 378770 - RNA, 32 nt, Homo Sapiens
uuuuuaacaauauuauuuuaaucuguuuuaag

SEQ ID NO: 378771 - RNA, 32 nt, Homo Sapiens
uuuuuuguagcgggggcggggaguaaggugca

SEQ ID NO: 378772 - RNA, 32 nt, Homo Sapiens
ucuaaccacaguguaguaauuuuaucaagagc

SEQ ID NO: 378773 - RNA, 32 nt, Homo Sapiens
cgcgugagggucacggccaccuagugaccgcc

SEQ ID NO: 378774 - RNA, 32 nt, Homo Sapiens
cugaacccucuggcuucagagagagugccugu

SEQ ID NO: 378775 - RNA, 32 nt, Homo Sapiens
uugucguacuaaaaauguguuauuuuucucau

SEQ ID NO: 378776 - RNA, 32 nt, Homo Sapiens
cuugcaucuaauuucacccccaccccacccuc

SEQ ID NO: 378777 - RNA, 32 nt, Homo Sapiens
aguuccaguuccccuuuccccaccacggagcc

SEQ ID NO: 378778 - RNA, 32 nt, Homo Sapiens
acucggcagccuggggcgcccggcggagcuga

SEQ ID NO: 378779 - RNA, 32 nt, Homo Sapiens
uuagccaauggcaaucaaauucuuucagcucc

SEQ ID NO: 378780 - RNA, 32 nt, Homo Sapiens
gccgcuggucuucgcuggacaccaugagucac

SEQ ID NO: 378781 - RNA, 32 nt, Homo Sapiens
uacaggugcacaccaccacaccuggcuaauuu

SEQ ID NO: 378782 - RNA, 32 nt, Homo Sapiens
gcaugaagaaggaacgaugccuuuuucaaugg

SEQ ID NO: 378783 - RNA, 32 nt, Homo Sapiens
gauuccuaacccagggagccccggccccucuc

SEQ ID NO: 378784 - RNA, 32 nt, Homo Sapiens
uccuuuccacccugguguggguucuccuguuc

SEQ ID NO: 378785 - RNA, 32 nt, Homo Sapiens
uuauuagcaucauaauucuuuguuauguaagu

SEQ ID NO: 378786 - RNA, 32 nt, Homo Sapiens
gguuagagcacauugaagcuaauccuaaguug

SEQ ID NO: 378787 - RNA, 32 nt, Homo Sapiens
aaaggucuguauuaucaaagaguauucuagua

SEQ ID NO: 378788 - RNA, 32 nt, Homo Sapiens
ucucaggucccuccggcccccucccuggaguc

SEQ ID NO: 378789 - RNA, 32 nt, Homo Sapiens
gaccauccaaauaauuuuccugucucugccuc

SEQ ID NO: 378790 - RNA, 31 nt, Homo Sapiens
guuuucaaauaaaaacuaucucaaaauuuua

SEQ ID NO: 378791 - RNA, 32 nt, Homo Sapiens
aggacuauaucgucucaguaaaaaccuugaag

SEQ ID NO: 378792 - RNA, 30 nt, Homo Sapiens
aguaaagauaucccugcucuagacuccaug

SEQ ID NO: 378793 - RNA, 32 nt, Homo Sapiens
ucaugccuggcuaugaaguaaaucuuaaaagu

SEQ ID NO: 378794 - RNA, 32 nt, Homo Sapiens
gcauggccaugagcaagaccagcaaauaacag

SEQ ID NO: 378795 - RNA, 32 nt, Homo Sapiens
cugcuucuuuccuggggggagguggggagguc

SEQ ID NO: 378796 - RNA, 32 nt, Homo Sapiens
auaauguuuucauaauuuucuauuugaaaaug

SEQ ID NO: 378797 - RNA, 32 nt, Homo Sapiens
agccagacggagagccaccuccucucccaggg

SEQ ID NO: 378798 - RNA, 32 nt, Homo Sapiens
cgucucaccaggcuccuccccacagcuguugg

SEQ ID NO: 378799 - RNA, 32 nt, Homo Sapiens
ugauaacuggaacacaugacucugggucugua

SEQ ID NO: 378800 - RNA, 32 nt, Homo Sapiens
ggggagccgggcggcugcggaggagccggcug

SEQ ID NO: 378801 - RNA, 32 nt, Homo Sapiens
gaauagagagauaaaaauaaacuuguucugag

SEQ ID NO: 378802 - RNA, 32 nt, Homo Sapiens
uguccacagaugccuccaccccccagaaccug

SEQ ID NO: 378803 - RNA, 32 nt, Homo Sapiens
cuccccgcccgcccaggccguccccaggaugc

SEQ ID NO: 378804 - RNA, 32 nt, Homo Sapiens
gggcacgggaggggguggggcugggcgugaag

SEQ ID NO: 378805 - RNA, 32 nt, Homo Sapiens
aaaaaucaucuuggacauaauuaauauuauag

SEQ ID NO: 378806 - RNA, 32 nt, Homo Sapiens
caguguuagcuacuccaggcaguacuacaucc

SEQ ID NO: 378807 - RNA, 32 nt, Homo Sapiens
aaucuccauacuguuucuuuuuuuuuuuucca

SEQ ID NO: 378808 - RNA, 32 nt, Homo Sapiens
guauuuaaauguuaaaucaauauguuguugca

SEQ ID NO: 378809 - RNA, 32 nt, Homo Sapiens
ggucuuuagagcauucuuuguacacuuuuucu

SEQ ID NO: 378810 - RNA, 32 nt, Homo Sapiens
uugaggacagcagcugcagcauucggcguaua

SEQ ID NO: 378811 - RNA, 32 nt, Homo Sapiens
uauauagaaccacuuuuuguagauuaguauaa

SEQ ID NO: 378812 - RNA, 32 nt, Homo Sapiens
caggcagcccacugcccucccagagcucacug

SEQ ID NO: 378813 - RNA, 32 nt, Homo Sapiens
aacauauuugauagauuuuucuuaacaaguua

SEQ ID NO: 378814 - RNA, 32 nt, Homo Sapiens
auguggucugugaaaucuaaaauauuuacuac

SEQ ID NO: 378815 - RNA, 32 nt, Homo Sapiens
gcguccugcccccauccuccaccccccgcgcu

SEQ ID NO: 378816 - RNA, 32 nt, Homo Sapiens
uuuaaauucggcauguuuuucuuaaguagcaa

SEQ ID NO: 378817 - RNA, 32 nt, Homo Sapiens
cuaaaugaaauuauauuauuucaacuacuaaa

SEQ ID NO: 378818 - RNA, 32 nt, Homo Sapiens
ggggcacugugcuggcccagagcuaggcugag

SEQ ID NO: 378819 - RNA, 29 nt, Homo Sapiens
ugauugggcaaaguuuauuuucuauguca

SEQ ID NO: 378820 - RNA, 32 nt, Homo Sapiens
ccggcgaccccgaacuccgcuccggagccuca

SEQ ID NO: 378821 - RNA, 32 nt, Homo Sapiens
gcgugguguuucugcuggauccgguuucaucg

SEQ ID NO: 378822 - RNA, 32 nt, Homo Sapiens
gcccggguccagcccugccacccaggccccau

SEQ ID NO: 378823 - RNA, 32 nt, Homo Sapiens
ggugaccaccgccgccgccgcgucgagccgaa

SEQ ID NO: 378824 - RNA, 32 nt, Homo Sapiens
uauugcaaggagugggggccgcgggcagccgc

SEQ ID NO: 378825 - RNA, 32 nt, Homo Sapiens
aaagcacaaggugggaucaggcugccuccugg

SEQ ID NO: 378826 - RNA, 32 nt, Homo Sapiens
ucuuccugcccccggguaccacaguccaccuu

SEQ ID NO: 378827 - RNA, 32 nt, Homo Sapiens
ucaggacacacacacacacacacacacacaca

SEQ ID NO: 378828 - RNA, 32 nt, Homo Sapiens
uaguaagucaauccaggaacaguuauuuagaa

SEQ ID NO: 378829 - RNA, 32 nt, Homo Sapiens
gguuuuucuuuuucuuuuuuaaauaaacaugu

SEQ ID NO: 378830 - RNA, 32 nt, Homo Sapiens
ucugcgcugaggugcugggacagccaugguuu

SEQ ID NO: 378831 - RNA, 32 nt, Homo Sapiens
ugccugcccccucccccuucuccugggacccu

SEQ ID NO: 378832 - RNA, 29 nt, Homo Sapiens
aaaauuaaaaauaccagaacauacacuuu

SEQ ID NO: 378833 - RNA, 32 nt, Homo Sapiens
uaacuuuugucaaccauaacccuagugaguuu

SEQ ID NO: 378834 - RNA, 32 nt, Homo Sapiens
ucuaguauuggaucugaaaauaaagugucauc

SEQ ID NO: 378835 - RNA, 30 nt, Homo Sapiens
gccagcugcucguccccgccggcgucugug

SEQ ID NO: 378836 - RNA, 31 nt, Homo Sapiens
acccgcgccccugugcguccccgcgcgccuc

SEQ ID NO: 378837 - RNA, 32 nt, Homo Sapiens
agacccaccucccagcgccgggaagcccgucu

SEQ ID NO: 378838 - RNA, 32 nt, Homo Sapiens
agccugauugggugggggugcagcuauaaaaa

SEQ ID NO: 378839 - RNA, 32 nt, Homo Sapiens
gaaggccaugagaaggcagagaaguaggccag

SEQ ID NO: 378840 - RNA, 32 nt, Homo Sapiens
uaucucaaaaaauuauugcacauauuaaauaa

SEQ ID NO: 378841 - RNA, 32 nt, Homo Sapiens
uuccacauuuacaauuaguacauauuacaauu

SEQ ID NO: 378842 - RNA, 32 nt, Homo Sapiens
uagcuaugugcagcugcacaacacaguccuuc

SEQ ID NO: 378843 - RNA, 32 nt, Homo Sapiens
ggcuuucagggggucaugucaggagccuggcc

SEQ ID NO: 378844 - RNA, 32 nt, Homo Sapiens
cugggaucuaauguacaagugaagggcuuggu

SEQ ID NO: 378845 - RNA, 32 nt, Homo Sapiens
guggaugcauuuuuugucuguuuacugcucuu

SEQ ID NO: 378846 - RNA, 32 nt, Homo Sapiens
cccuaggaaggggauuguauauauggcaggcu

SEQ ID NO: 378847 - RNA, 32 nt, Homo Sapiens
gccuuacagcuaucuuagaugcgaucugacuc

SEQ ID NO: 378848 - RNA, 32 nt, Homo Sapiens
aaccuuaaaaaguaaacuuauuuuuucuaacu

SEQ ID NO: 378849 - RNA, 32 nt, Homo Sapiens
agcaugcaacauagaacagauaccuuuaaauu

SEQ ID NO: 378850 - RNA, 32 nt, Homo Sapiens
ggucucuuuccacagcggauaaauguuuuuuc

SEQ ID NO: 378851 - RNA, 32 nt, Homo Sapiens
acuugggagggagagguugcagugagcccaga

SEQ ID NO: 378852 - RNA, 32 nt, Homo Sapiens
gagcugggugcagacauacacacacacauaca

SEQ ID NO: 378853 - RNA, 32 nt, Homo Sapiens
uuaaaguaacaagagggaaaaggaugacuaau

SEQ ID NO: 378854 - RNA, 32 nt, Homo Sapiens
ucuaauuuuaucauuuccaucugucugguuau

SEQ ID NO: 378855 - RNA, 32 nt, Homo Sapiens
cccccgccuccgagaccccgcccugccucuga

SEQ ID NO: 378856 - RNA, 32 nt, Homo Sapiens
uggagccuuuuuggcucuggcuuuuaaacauu

SEQ ID NO: 378857 - RNA, 32 nt, Homo Sapiens
acucacucccucccggccccucacagggcccu

SEQ ID NO: 378858 - RNA, 31 nt, Homo Sapiens
ggaacgagggcggagcuaaagucccagaaua

SEQ ID NO: 378859 - RNA, 32 nt, Homo Sapiens
auggaguagcucuacagccuggccucaacucu

SEQ ID NO: 378860 - RNA, 32 nt, Homo Sapiens
uacuucugucuccugagcccaaggcaaaguaa

SEQ ID NO: 378861 - RNA, 29 nt, Homo Sapiens
uauguaugaaguuaauauuuucaaguaag

SEQ ID NO: 378862 - RNA, 32 nt, Homo Sapiens
ugggcagacgcacuguugaaucugguagccag

SEQ ID NO: 378863 - RNA, 32 nt, Homo Sapiens
gacagguugacuguguaggugacagggaggga

SEQ ID NO: 378864 - RNA, 32 nt, Homo Sapiens
guuagagacagagcgacagagcaguugagagg

SEQ ID NO: 378865 - RNA, 32 nt, Homo Sapiens
aaaacuccuuucaaaacaaaaaagaacuaccu

SEQ ID NO: 378866 - RNA, 32 nt, Homo Sapiens
gaauuccgcgggaggccacgggcuuuccacag

SEQ ID NO: 378867 - RNA, 32 nt, Homo Sapiens
ugaagggaggacccuuggggaccgccauucua

SEQ ID NO: 378868 - RNA, 32 nt, Homo Sapiens
cuccuccguaucccccucuccugaagcccugc

SEQ ID NO: 378869 - RNA, 32 nt, Homo Sapiens
aacugggagaaauaaacuucuguuguuugcau

SEQ ID NO: 378870 - RNA, 32 nt, Homo Sapiens
aagagcauaauuaacuuuuuaaaagaagcuag

SEQ ID NO: 378871 - RNA, 32 nt, Homo Sapiens
uuaaguaugcuuuaguuuuucuuuaaauauuu

SEQ ID NO: 378872 - RNA, 32 nt, Homo Sapiens
uuuuuuccaucucccuucucccuugucaucag

SEQ ID NO: 378873 - RNA, 31 nt, Homo Sapiens
gcgggcaggcacugcccgggcuggacgacgu

SEQ ID NO: 378874 - RNA, 32 nt, Homo Sapiens
cugggcugccucggggucuucgacggccgcgu

SEQ ID NO: 378875 - RNA, 32 nt, Homo Sapiens
caggcaagaacggggagcuucuguggauuucu

SEQ ID NO: 378876 - RNA, 32 nt, Homo Sapiens
uggagcgccacagccgcauacacacaggggag

SEQ ID NO: 378877 - RNA, 32 nt, Homo Sapiens
agacaugcgcagugcggccgucccuagaggcg

SEQ ID NO: 378878 - RNA, 32 nt, Homo Sapiens
gaauggacgagagaggcggccguccauuaguu

SEQ ID NO: 378879 - RNA, 32 nt, Homo Sapiens
gcuugcaggacacaggcagagauacgagggaa

SEQ ID NO: 378880 - RNA, 32 nt, Homo Sapiens
ugguaaucauuguggcacccacagcaagcagu

SEQ ID NO: 378881 - RNA, 32 nt, Homo Sapiens
cgcgcgcgcucccccacggccacgcgcgcacc

SEQ ID NO: 378882 - RNA, 32 nt, Homo Sapiens
gguccgcgcgcccccggagucuggggagcagg

SEQ ID NO: 378883 - RNA, 32 nt, Homo Sapiens
ucggcagaaaucagcucucucgugagucaggg

SEQ ID NO: 378884 - RNA, 32 nt, Homo Sapiens
acaugacuagcuuaccuguuuccuggcuuuua

SEQ ID NO: 378885 - RNA, 32 nt, Homo Sapiens
caugaagcuucuguuuauuguuuuccauauuu

SEQ ID NO: 378886 - RNA, 32 nt, Homo Sapiens
cuuccccuuucugucccgggauaccuggcggc

SEQ ID NO: 378887 - RNA, 32 nt, Homo Sapiens
agaaaaguggauaaagagucccagaagaaguu

SEQ ID NO: 378888 - RNA, 32 nt, Homo Sapiens
gcagaugcaaguuuggaagagaaaagcaaaua

SEQ ID NO: 378889 - RNA, 32 nt, Homo Sapiens
uggugacucaaucccagugucugguuuggggc

SEQ ID NO: 378890 - RNA, 32 nt, Homo Sapiens
cgcgcguccccgagcccuccuagcccugacac

SEQ ID NO: 378891 - RNA, 26 nt, Homo Sapiens
cauguccaugcucguggucuuucucu

SEQ ID NO: 378892 - RNA, 32 nt, Homo Sapiens
cauccuaaaaauucuuaauauuuucauaaaau

SEQ ID NO: 378893 - RNA, 32 nt, Homo Sapiens
aauacgagaucgaaucacauuuuuaagggaaa

SEQ ID NO: 378894 - RNA, 32 nt, Homo Sapiens
ugcgcggggaggaggcgcggcugcgggaccug

SEQ ID NO: 378895 - RNA, 32 nt, Homo Sapiens
accauagguguauauauagguauauaauuuua

SEQ ID NO: 378896 - RNA, 32 nt, Homo Sapiens
cuuaugccaaaugauaaugauacugacuucug

SEQ ID NO: 378897 - RNA, 32 nt, Homo Sapiens
uggcccagaaccagcucugcagugucccaucc

SEQ ID NO: 378898 - RNA, 32 nt, Homo Sapiens
acuuuuggggguaaugaucauuguuuuguauc

SEQ ID NO: 378899 - RNA, 32 nt, Homo Sapiens
gagacgguguaccagcagugugucaggugcug

SEQ ID NO: 378900 - RNA, 32 nt, Homo Sapiens
uguuacuguucucauucagauucuuauuacau

SEQ ID NO: 378901 - RNA, 32 nt, Homo Sapiens
ggcguggcaccuguagucccagcuacucugga

SEQ ID NO: 378902 - RNA, 32 nt, Homo Sapiens
ccccccuucaacccucccggaagugaggacca

SEQ ID NO: 378903 - RNA, 32 nt, Homo Sapiens
auaauaaacuaaacuuuuuuuugucucccguu

SEQ ID NO: 378904 - RNA, 32 nt, Homo Sapiens
ccuauacuuuuccauaugguauaccuugaaaa

SEQ ID NO: 378905 - RNA, 32 nt, Homo Sapiens
ccuuuaggccugccuccccaggacuccuuaga

SEQ ID NO: 378906 - RNA, 32 nt, Homo Sapiens
gugcucucugcagcuacaaaacaucuuggcau

SEQ ID NO: 378907 - RNA, 32 nt, Homo Sapiens
uacuguauuuuugcuauuggaaaugaaauauu

SEQ ID NO: 378908 - RNA, 32 nt, Homo Sapiens
cuacugcccuucacugggccagcccugccucc

SEQ ID NO: 378909 - RNA, 32 nt, Homo Sapiens
aucgcuggagcgcucgccgcuccggcgacauc

SEQ ID NO: 378910 - RNA, 32 nt, Homo Sapiens
uugggcccacugaguuugagaugccuuugaga

SEQ ID NO: 378911 - RNA, 32 nt, Homo Sapiens
ccugugaaggcacgacccaguucagcugucug

SEQ ID NO: 378912 - RNA, 32 nt, Homo Sapiens
cccagcccuuguuagauucagaggagcggcca

SEQ ID NO: 378913 - RNA, 32 nt, Homo Sapiens
uacaucuccaaugugcuuucuaaucuccugcc

SEQ ID NO: 378914 - RNA, 32 nt, Homo Sapiens
agucuuauuugugucaccacaaugacaaguaa

SEQ ID NO: 378915 - RNA, 32 nt, Homo Sapiens
ccuucuguggauuguuuucaguuucuuguugg

SEQ ID NO: 378916 - RNA, 28 nt, Homo Sapiens
gucaugaagauaagagcaaaaguccugc

SEQ ID NO: 378917 - RNA, 32 nt, Homo Sapiens
gaaucagaugcauccuuucauaagaagugaga

SEQ ID NO: 378918 - RNA, 32 nt, Homo Sapiens
gcacuuugcccccaaggucuuugacuucauuu

SEQ ID NO: 378919 - RNA, 30 nt, Homo Sapiens
agaggggccguuccgggcucgaacccggca

SEQ ID NO: 378920 - RNA, 32 nt, Homo Sapiens
gaaauacugucauggaggugcugaacacaggg

SEQ ID NO: 378921 - RNA, 32 nt, Homo Sapiens
ggaaaagacauaaaaacugaagaacauugaug

SEQ ID NO: 378922 - RNA, 32 nt, Homo Sapiens
cacacgugccccugugggucccagggaggucu

SEQ ID NO: 378923 - RNA, 32 nt, Homo Sapiens
cugcccaacccggcugcuccucugccccgaag

SEQ ID NO: 378924 - RNA, 32 nt, Homo Sapiens
gagaagaggaagagucuuggucuuuggaaaua

SEQ ID NO: 378925 - RNA, 32 nt, Homo Sapiens
uucucuuaaacaaaacaaaacuuucuaaguac

SEQ ID NO: 378926 - RNA, 32 nt, Homo Sapiens
acaguuucaucauuugagucaaguggagaacu

SEQ ID NO: 378927 - RNA, 32 nt, Homo Sapiens
aggauuuugacaggugaccauaaaaaccagag

SEQ ID NO: 378928 - RNA, 32 nt, Homo Sapiens
ucccuuucccccuccccacccccuccccaaca

SEQ ID NO: 378929 - RNA, 32 nt, Homo Sapiens
ucucuacuaaaaguacaaaaauuagccaggcg

SEQ ID NO: 378930 - RNA, 32 nt, Homo Sapiens
uagcuuauaaauaacaugucauauacaacaga

SEQ ID NO: 378931 - RNA, 32 nt, Homo Sapiens
ucuacaaaaaauacaaaaauuagccagucaug

SEQ ID NO: 378932 - RNA, 32 nt, Homo Sapiens
uaaagacuugcaaagauugagagagaaagaga

SEQ ID NO: 378933 - RNA, 32 nt, Homo Sapiens
ccugcugcccuugccuuguccucgucccaacc

SEQ ID NO: 378934 - RNA, 32 nt, Homo Sapiens
ugauagugggugaguucucacaagaucugaug

SEQ ID NO: 378935 - RNA, 32 nt, Homo Sapiens
gucuaaccgggaagaugcugccgagaaggcag

SEQ ID NO: 378936 - RNA, 32 nt, Homo Sapiens
gcacggccuccauggcggcuggcacccgccgg

SEQ ID NO: 378937 - RNA, 32 nt, Homo Sapiens
uucagaucagacuccugaaacuuaauggcucu

SEQ ID NO: 378938 - RNA, 32 nt, Homo Sapiens
uaguuuugauaaaagauuuuccuauuccuugg

SEQ ID NO: 378939 - RNA, 32 nt, Homo Sapiens
caagugguguugccucuuagggcaggcaugag

SEQ ID NO: 378940 - RNA, 32 nt, Homo Sapiens
ccaaaaacaaaaaucauaugaucagcucaaua

SEQ ID NO: 378941 - RNA, 32 nt, Homo Sapiens
gcccagaguguuccccaugcuccaccuggugc

SEQ ID NO: 378942 - RNA, 32 nt, Homo Sapiens
cucuugggaaagcuggugcugcugcugccuga

SEQ ID NO: 378943 - RNA, 32 nt, Homo Sapiens
cuggggggcggcgcgagcgucuggccuguguu

SEQ ID NO: 378944 - RNA, 32 nt, Homo Sapiens
aauugugugguaucuaauaaaagggaagguaa

SEQ ID NO: 378945 - RNA, 32 nt, Homo Sapiens
uuugcacuguagccucgccgucugugaauugg

SEQ ID NO: 378946 - RNA, 32 nt, Homo Sapiens
cccaagcugugcguucuggaccagcuacugaa

SEQ ID NO: 378947 - RNA, 32 nt, Homo Sapiens
gcccaagucugguagagcagucgggcagcuag

SEQ ID NO: 378948 - RNA, 32 nt, Homo Sapiens
gcauuugguuggcaagggcucucguccugucc

SEQ ID NO: 378949 - RNA, 32 nt, Homo Sapiens
cucuuuacugucacgucaucucuaggaaaccu

SEQ ID NO: 378950 - RNA, 32 nt, Homo Sapiens
guaagaauggccugugguauuauauucucaua

SEQ ID NO: 378951 - RNA, 32 nt, Homo Sapiens
gcagcuugauaaaacacaguggcucauaauca

SEQ ID NO: 378952 - RNA, 32 nt, Homo Sapiens
gaauuguguccucuccucucagagccccauca

SEQ ID NO: 378953 - RNA, 32 nt, Homo Sapiens
acuuugacugguuguuugagggcguugaagau

SEQ ID NO: 378954 - RNA, 32 nt, Homo Sapiens
ccgccgcccccuccccugcagcgacucggacc

SEQ ID NO: 378955 - RNA, 32 nt, Homo Sapiens
auacuucuuuuccacaucucauugucacugac

SEQ ID NO: 378956 - RNA, 32 nt, Homo Sapiens
ccuuagaaucugauuuaaaacauauuacuagu

SEQ ID NO: 378957 - RNA, 32 nt, Homo Sapiens
gcauggugccccuuccugaggacuuccagagg

SEQ ID NO: 378958 - RNA, 32 nt, Homo Sapiens
cuacuuaugcaaaccucagauaaccacuaauu

SEQ ID NO: 378959 - RNA, 32 nt, Homo Sapiens
gagagaagccgccgcccgggcugcugagaggc

SEQ ID NO: 378960 - RNA, 32 nt, Homo Sapiens
gcauuagaaaaauuacuuuaaaaguagcuaua

SEQ ID NO: 378961 - RNA, 32 nt, Homo Sapiens
ggcugcugacuucugacuggcugagcaguggg

SEQ ID NO: 378962 - RNA, 32 nt, Homo Sapiens
ggacuguggccacccgcccacagccaggccga

SEQ ID NO: 378963 - RNA, 32 nt, Homo Sapiens
cugggcaauagcaaagucugcacaggauuccu

SEQ ID NO: 378964 - RNA, 32 nt, Homo Sapiens
agcaaagcacaccacagcaccuuugauaaccu

SEQ ID NO: 378965 - RNA, 32 nt, Homo Sapiens
gacccucagaucucagucuagugaaggagaga

SEQ ID NO: 378966 - RNA, 32 nt, Homo Sapiens
caaagagauaaaaauaaaagcagaauguauau

SEQ ID NO: 378967 - RNA, 32 nt, Homo Sapiens
aggguccuguggcgagcugugagcaccgccag

SEQ ID NO: 378968 - RNA, 32 nt, Homo Sapiens
acuuuccccgcagcugcagggccucgcgcucg

SEQ ID NO: 378969 - RNA, 32 nt, Homo Sapiens
auaaagaccggaagcugaguuuuuauccauuu

SEQ ID NO: 378970 - RNA, 32 nt, Homo Sapiens
uguuagcauaucuauuucuccauacauuguaa

SEQ ID NO: 378971 - RNA, 32 nt, Homo Sapiens
cgugcagguggagcucugggaugcuauguugg

SEQ ID NO: 378972 - RNA, 32 nt, Homo Sapiens
agaacuuuuuaaugucuuuucuuuuucauuaa

SEQ ID NO: 378973 - RNA, 32 nt, Homo Sapiens
agagucagacugcucccggugccaugaacgga

SEQ ID NO: 378974 - RNA, 32 nt, Homo Sapiens
aguacaguuucucuaaagaucagacauggcac

SEQ ID NO: 378975 - RNA, 32 nt, Homo Sapiens
acguggaucugcucccgccgccgccgccgccg

SEQ ID NO: 378976 - RNA, 32 nt, Homo Sapiens
auuguauuaagauaacaaaacauguucagcuu

SEQ ID NO: 378977 - RNA, 32 nt, Homo Sapiens
ccgcccccagccccaucgcccccuuccccucc

SEQ ID NO: 378978 - RNA, 32 nt, Homo Sapiens
uuuuaacuuuguuuuaugcaaaaaaguaucuu

SEQ ID NO: 378979 - RNA, 32 nt, Homo Sapiens
ugaggcccugucaggguccuuacccccagcca

SEQ ID NO: 378980 - RNA, 32 nt, Homo Sapiens
ucccacuugagcgcuuccuguugaauaaagca

SEQ ID NO: 378981 - RNA, 32 nt, Homo Sapiens
uaugggaaucacugaaauauuuuuguagauua

SEQ ID NO: 378982 - RNA, 32 nt, Homo Sapiens
guauccgcagagcggccggguggcgggaggaa

SEQ ID NO: 378983 - RNA, 32 nt, Homo Sapiens
cuagggguguucuauguagcgcagcaguucgc

SEQ ID NO: 378984 - RNA, 32 nt, Homo Sapiens
gaggaagguggccaagggccccaugagcuggg

SEQ ID NO: 378985 - RNA, 32 nt, Homo Sapiens
cucuggccacugcugcagacaccugccuuaac

SEQ ID NO: 378986 - RNA, 32 nt, Homo Sapiens
uuauaucaucuuacauguuaauuuuuaugauu

SEQ ID NO: 378987 - RNA, 31 nt, Homo Sapiens
cauuucugggacugaauccaggcaagagaaa

SEQ ID NO: 378988 - RNA, 32 nt, Homo Sapiens
ccuuuauacaauuggacgcauuuugguuuuuc

SEQ ID NO: 378989 - RNA, 32 nt, Homo Sapiens
ucugaaagacaauugucaggugagauuuucaa

SEQ ID NO: 378990 - RNA, 32 nt, Homo Sapiens
gucucuccucuuucauuuucuaugcauuucga

SEQ ID NO: 378991 - RNA, 32 nt, Homo Sapiens
gaugccacuggccacuguaucugcuuuuguaa

SEQ ID NO: 378992 - RNA, 32 nt, Homo Sapiens
uacggacgcacugaaccgcggcugggacagac

SEQ ID NO: 378993 - RNA, 32 nt, Homo Sapiens
ccccccuuaccgggcugcgcaggccgcccagg

SEQ ID NO: 378994 - RNA, 32 nt, Homo Sapiens
ccaugacauuuaaaaacugaagaaauggaaag

SEQ ID NO: 378995 - RNA, 32 nt, Homo Sapiens
ugguuggguuggguuuacauuuaggcggucuu

SEQ ID NO: 378996 - RNA, 31 nt, Homo Sapiens
cagacagcagaugcucucagauuugguggug

SEQ ID NO: 378997 - RNA, 32 nt, Homo Sapiens
uuauuuugcacacuuuucucauuuuccugaga

SEQ ID NO: 378998 - RNA, 32 nt, Homo Sapiens
ggcagguagugucaaugcaaauugugcccuaa

SEQ ID NO: 378999 - RNA, 32 nt, Homo Sapiens
gccaugaagggccagaggggcuccaaucgcaa

SEQ ID NO: 379000 - RNA, 32 nt, Homo Sapiens
gccuccuuagagacauaaauuuagugucaaaa

SEQ ID NO: 379001 - RNA, 32 nt, Homo Sapiens
ggccuguuuucuaaauaaucccacaucauguc

SEQ ID NO: 379002 - RNA, 32 nt, Homo Sapiens
aaacugaccacauaguuggaaguaaagcacuc

SEQ ID NO: 379003 - RNA, 32 nt, Homo Sapiens
gacugggcgugguggcucaugccuguaguccc

SEQ ID NO: 379004 - RNA, 32 nt, Homo Sapiens
cucuucaucauuccccagugaaauagcaaaau

SEQ ID NO: 379005 - RNA, 32 nt, Homo Sapiens
uucucaguucccuuagccgucuuacucaacug

SEQ ID NO: 379006 - RNA, 32 nt, Homo Sapiens
gggcacguguggaugagcgugcacuccccgug

SEQ ID NO: 379007 - RNA, 32 nt, Homo Sapiens
cccagugcagacagcaucagcucugagguuca

SEQ ID NO: 379008 - RNA, 32 nt, Homo Sapiens
aauggggcggacaguguuuccuugacugacua

SEQ ID NO: 379009 - RNA, 32 nt, Homo Sapiens
aaaagaaaaaaguauauaucaauaaguauaca

SEQ ID NO: 379010 - RNA, 32 nt, Homo Sapiens
ugucugaagugcucagcauccuccucuuccuc

SEQ ID NO: 379011 - RNA, 32 nt, Homo Sapiens
ugugaagggugccaccugagggagccgccugc

SEQ ID NO: 379012 - RNA, 32 nt, Homo Sapiens
cuaugucuuucaggaaaaauaauuauagcagc

SEQ ID NO: 379013 - RNA, 32 nt, Homo Sapiens
aggcuguccauuggugaugaugacuguaacuu

SEQ ID NO: 379014 - RNA, 32 nt, Homo Sapiens
uacuuggagccugguccacgugcaucccaccu

SEQ ID NO: 379015 - RNA, 32 nt, Homo Sapiens
aacgggcgcccggcugggggagccccgggcau

SEQ ID NO: 379016 - RNA, 32 nt, Homo Sapiens
aacuaaugaaaauaaugcaugaauauaaaucu

SEQ ID NO: 379017 - RNA, 32 nt, Homo Sapiens
agaaagccccagccccuuagcccaggaaccug

SEQ ID NO: 379018 - RNA, 32 nt, Homo Sapiens
gucccgggacccggggucgggcggcugggagg

SEQ ID NO: 379019 - RNA, 32 nt, Homo Sapiens
gccaaaggcagacgugcuuuauagcuaaauga

SEQ ID NO: 379020 - RNA, 32 nt, Homo Sapiens
uguagcagugauucuaaaguggcguuugcugu

SEQ ID NO: 379021 - RNA, 32 nt, Homo Sapiens
gcggccgcggauccgcggccgcggagaagcug

SEQ ID NO: 379022 - RNA, 32 nt, Homo Sapiens
gcaagcugcaaagggaagucgacgaaauaaaa

SEQ ID NO: 379023 - RNA, 32 nt, Homo Sapiens
cugcaacgcgcccuggcacucaccggugggcg

SEQ ID NO: 379024 - RNA, 32 nt, Homo Sapiens
gggaggaucauuugagcccaggaguuugagac

SEQ ID NO: 379025 - RNA, 32 nt, Homo Sapiens
ugucgccuuagaucccgcccaagccccucauu

SEQ ID NO: 379026 - RNA, 32 nt, Homo Sapiens
cacucugggauguuaucuuucauuuucauuuc

SEQ ID NO: 379027 - RNA, 32 nt, Homo Sapiens
aggcagauauccacuuaacuuuucuuaaaaau

SEQ ID NO: 379028 - RNA, 32 nt, Homo Sapiens
agcuguaucuguaaucacagcauuccuacagu

SEQ ID NO: 379029 - RNA, 32 nt, Homo Sapiens
guccuuucguccagugcagaucuauggccaua

SEQ ID NO: 379030 - RNA, 32 nt, Homo Sapiens
cuuugacguaauuaaauccaacuuuucacagu

SEQ ID NO: 379031 - RNA, 32 nt, Homo Sapiens
ugcacacgucccgcggccaggagggacaggag

SEQ ID NO: 379032 - RNA, 32 nt, Homo Sapiens
ccucucucauccacuuuccaauaaagaguucc

SEQ ID NO: 379033 - RNA, 32 nt, Homo Sapiens
gacaucucuaauggaaucaugggggaaacggg

SEQ ID NO: 379034 - RNA, 32 nt, Homo Sapiens
aagaaagcacauaaacccaaagggcaaacaau

SEQ ID NO: 379035 - RNA, 32 nt, Homo Sapiens
aucugaugaugaugaagaugaagaugaugaag

SEQ ID NO: 379036 - RNA, 32 nt, Homo Sapiens
uacagcucugcccugaccccagccccugcccc

SEQ ID NO: 379037 - RNA, 32 nt, Homo Sapiens
ccaauucguacguggagaagugggaaugcaaa

SEQ ID NO: 379038 - RNA, 32 nt, Homo Sapiens
cagugacauuaaaagaggcucuuuggaaguau

SEQ ID NO: 379039 - RNA, 32 nt, Homo Sapiens
cuccgcuaggcguuaucagggacugugcucgu

SEQ ID NO: 379040 - RNA, 32 nt, Homo Sapiens
aggcaaccccgacagacaguggcacuccuggu

SEQ ID NO: 379041 - RNA, 32 nt, Homo Sapiens
cgaaugcuuccuucucggcccgcgccgcagcc

SEQ ID NO: 379042 - RNA, 32 nt, Homo Sapiens
uuaugcuaaaacaauuuugaaaaaagaacaca

SEQ ID NO: 379043 - RNA, 32 nt, Homo Sapiens
aucccuguuugugaaagagggaacugaggugc

SEQ ID NO: 379044 - RNA, 32 nt, Homo Sapiens
augagagggagccgcuccugguucuggagucu

SEQ ID NO: 379045 - RNA, 32 nt, Homo Sapiens
agauaguauuaaaauauuaucauuuggaacaa

SEQ ID NO: 379046 - RNA, 32 nt, Homo Sapiens
agcugacaggguaccugcuccgggccagcgcc

SEQ ID NO: 379047 - RNA, 32 nt, Homo Sapiens
cugccaccuuugccucccagggugcugggacu

SEQ ID NO: 379048 - RNA, 32 nt, Homo Sapiens
ggaggcggugaccagcagcaggaggagaaaga

SEQ ID NO: 379049 - RNA, 32 nt, Homo Sapiens
uauacacagacccaggauuaugcugugagccu

SEQ ID NO: 379050 - RNA, 32 nt, Homo Sapiens
gccucggugugcccgcgccgccagcccgcucc

SEQ ID NO: 379051 - RNA, 32 nt, Homo Sapiens
ccaaguaacugacguuuccccucccccucccc

SEQ ID NO: 379052 - RNA, 32 nt, Homo Sapiens
ucuaccuuuuaaaauugaauaguuuauuucug

SEQ ID NO: 379053 - RNA, 32 nt, Homo Sapiens
gacaguuugacgaugcugaagauuggugugga

SEQ ID NO: 379054 - RNA, 32 nt, Homo Sapiens
guugagccaagcccccagccccgaucugcaga

SEQ ID NO: 379055 - RNA, 32 nt, Homo Sapiens
aaauguggaaaacaaacccucccaucccuugu

SEQ ID NO: 379056 - RNA, 32 nt, Homo Sapiens
ucuuccagcgucucuccucccuccuggggaag

SEQ ID NO: 379057 - RNA, 32 nt, Homo Sapiens
gugagacgugagcguagugugccgcgcaaggc

SEQ ID NO: 379058 - RNA, 32 nt, Homo Sapiens
ccuggggaggcgcuggccuccugggccuugcc

SEQ ID NO: 379059 - RNA, 32 nt, Homo Sapiens
agcgagaaaaagaggaaaucuaucuuccuuag

SEQ ID NO: 379060 - RNA, 32 nt, Homo Sapiens
ggggaagcgcuuuauacagacaucaguuccau

SEQ ID NO: 379061 - RNA, 32 nt, Homo Sapiens
ccaaaaccauuuuuuauagaaacaguauuuaa

SEQ ID NO: 379062 - RNA, 32 nt, Homo Sapiens
uugcuuaccaucagcaucugcaaugggccaaa

SEQ ID NO: 379063 - RNA, 32 nt, Homo Sapiens
uuuuuacacacguaucacagggagaaucagua

SEQ ID NO: 379064 - RNA, 32 nt, Homo Sapiens
gagguugcggugagccgagauggugccguugc

SEQ ID NO: 379065 - RNA, 32 nt, Homo Sapiens
accuguuccucgcgcgccacugcgcugcgccc

SEQ ID NO: 379066 - RNA, 32 nt, Homo Sapiens
ccagcaguugguuuuucucuguuucuaggggu

SEQ ID NO: 379067 - RNA, 32 nt, Homo Sapiens
agccuauuuucauuguggauuauuuaaauguc

SEQ ID NO: 379068 - RNA, 32 nt, Homo Sapiens
gcgccaucaaucgccgccgccucgucccgcuu

SEQ ID NO: 379069 - RNA, 32 nt, Homo Sapiens
ucggcacugccuaugcccacuaccuccucgug

SEQ ID NO: 379070 - RNA, 32 nt, Homo Sapiens
cugggcuugggaauuuuauuauuuaaaaggua

SEQ ID NO: 379071 - RNA, 32 nt, Homo Sapiens
gagguuuucuucaugucuucuguucccggcug

SEQ ID NO: 379072 - RNA, 32 nt, Homo Sapiens
caaagcuucagcaaacacuuagagaaaacaaa

SEQ ID NO: 379073 - RNA, 32 nt, Homo Sapiens
ccccauuaaaacaguucuuuuguuaagaaaua

SEQ ID NO: 379074 - RNA, 32 nt, Homo Sapiens
cuuccgccaaccccaucagcccagcccguuaa

SEQ ID NO: 379075 - RNA, 32 nt, Homo Sapiens
ucuccucuagccuguuuguugugggguggggg

SEQ ID NO: 379076 - RNA, 32 nt, Homo Sapiens
gggucugugaagggcgggaacugggugagcac

SEQ ID NO: 379077 - RNA, 32 nt, Homo Sapiens
augaggcccuggcuccccaccacagccccagc

SEQ ID NO: 379078 - RNA, 32 nt, Homo Sapiens
uaagaagcagagcuaccuuacgugccugccca

SEQ ID NO: 379079 - RNA, 30 nt, Homo Sapiens
aaucugggagguggagguugcagugagcca

SEQ ID NO: 379080 - RNA, 32 nt, Homo Sapiens
agcgcggaaaucuggaaccgggauggcgacgu

SEQ ID NO: 379081 - RNA, 31 nt, Homo Sapiens
ucccugcagccccaggagccuggaggagccc

SEQ ID NO: 379082 - RNA, 32 nt, Homo Sapiens
uucuuuauagaaaaaagucuggaagaguuuac

SEQ ID NO: 379083 - RNA, 32 nt, Homo Sapiens
ccuccgcccuccccaacagcaggccgaguccc

SEQ ID NO: 379084 - RNA, 32 nt, Homo Sapiens
ugugaauguugcuugcagaaauaugaagaucu

SEQ ID NO: 379085 - RNA, 32 nt, Homo Sapiens
uuccccucggccccggccgucucagacucauc

SEQ ID NO: 379086 - RNA, 32 nt, Homo Sapiens
cgucgcuucuggcugaagacguuugaggacga

SEQ ID NO: 379087 - RNA, 30 nt, Homo Sapiens
gggggagaagauggcggcggcgggggaggc

SEQ ID NO: 379088 - RNA, 32 nt, Homo Sapiens
gucuuacaagcacuuugucuugucucugcaag

SEQ ID NO: 379089 - RNA, 32 nt, Homo Sapiens
auggagaggaagaucuugacuuauauucugua

SEQ ID NO: 379090 - RNA, 32 nt, Homo Sapiens
gacauugaaaauuuauaacccauuaaauaccu

SEQ ID NO: 379091 - RNA, 32 nt, Homo Sapiens
aaccauuuauuguugaauaaguagagaaaauc

SEQ ID NO: 379092 - RNA, 32 nt, Homo Sapiens
aaugccuaaaaauggaaacguuaagaaguugg

SEQ ID NO: 379093 - RNA, 32 nt, Homo Sapiens
ccagccauguggaacuguaaguccauuaaaug

SEQ ID NO: 379094 - RNA, 32 nt, Homo Sapiens
gaagccagcagagguguguguaugucuuuaug

SEQ ID NO: 379095 - RNA, 32 nt, Homo Sapiens
ccuguucaggcccgugcuggggacgccgcuua

SEQ ID NO: 379096 - RNA, 32 nt, Homo Sapiens
ccgcggccgaagcccaccacuggccaugcuca

SEQ ID NO: 379097 - RNA, 32 nt, Homo Sapiens
gggaugaacuaaaagugucugaauuuugcuga

SEQ ID NO: 379098 - RNA, 32 nt, Homo Sapiens
uagcccuaggggugguaugacccaaagguucc

SEQ ID NO: 379099 - RNA, 32 nt, Homo Sapiens
ccuguacacaguguuuauugugguuaggaagc

SEQ ID NO: 379100 - RNA, 32 nt, Homo Sapiens
gagagagcucgcgucucgcucggcuucagggu

SEQ ID NO: 379101 - RNA, 32 nt, Homo Sapiens
cacuguacuccagccugggugacagagugagg

SEQ ID NO: 379102 - RNA, 32 nt, Homo Sapiens
gagcaaagccccacaguuuaguccuuuggagu

SEQ ID NO: 379103 - RNA, 32 nt, Homo Sapiens
uccguccaaugggccuggccagggcccuacgc

SEQ ID NO: 379104 - RNA, 32 nt, Homo Sapiens
uauccauuucccuggaggcgggccccccuggc

SEQ ID NO: 379105 - RNA, 32 nt, Homo Sapiens
cugcccuuuccugccaggcccacacauacccu

SEQ ID NO: 379106 - RNA, 32 nt, Homo Sapiens
agucuccuugcugaccagcaguggccacuucu

SEQ ID NO: 379107 - RNA, 32 nt, Homo Sapiens
gccuguuaguaguucugcaucgguugaugaag

SEQ ID NO: 379108 - RNA, 32 nt, Homo Sapiens
cugguguggaccgccgggcgcagagcggcucc

SEQ ID NO: 379109 - RNA, 30 nt, Homo Sapiens
uggccugucccugcugcagcgccaggaccc

SEQ ID NO: 379110 - RNA, 32 nt, Homo Sapiens
ggccgccagggugacacaggccacgcuuccuu

SEQ ID NO: 379111 - RNA, 32 nt, Homo Sapiens
uggauggauugagagaugauagauaacagaua

SEQ ID NO: 379112 - RNA, 32 nt, Homo Sapiens
cgccgggauggcuccgcgacugcuacaccagg

SEQ ID NO: 379113 - RNA, 32 nt, Homo Sapiens
gccugcuugcgaaggcccucuccggucccuuu

SEQ ID NO: 379114 - RNA, 32 nt, Homo Sapiens
ucaaggcugccauggauaaagaauagaaaacu

SEQ ID NO: 379115 - RNA, 32 nt, Homo Sapiens
guccucgaguggacuuagagccaggagcccug

SEQ ID NO: 379116 - RNA, 32 nt, Homo Sapiens
aggagaaguauuuucaaggaauaucagaagaa

SEQ ID NO: 379117 - RNA, 32 nt, Homo Sapiens
caauguuuugaaacaaauacuauuuuuccuac

SEQ ID NO: 379118 - RNA, 32 nt, Homo Sapiens
agaguagaaaauaaauauguuugucaugaguc

SEQ ID NO: 379119 - RNA, 32 nt, Homo Sapiens
aacacgccccccuccccacaccuccaggaacu

SEQ ID NO: 379120 - RNA, 32 nt, Homo Sapiens
aaccugaaggauuuuuaagaugaccaagguuc

SEQ ID NO: 379121 - RNA, 32 nt, Homo Sapiens
uugaaaaagcaucuuuucuugagaucaugguc

SEQ ID NO: 379122 - RNA, 32 nt, Homo Sapiens
aauuuuuuuuucugauucuaaacuuauuguga

SEQ ID NO: 379123 - RNA, 32 nt, Homo Sapiens
uuggguuucucgcauucaguggccuaucucca

SEQ ID NO: 379124 - RNA, 32 nt, Homo Sapiens
guuuggcccugcagugaccagagcagcccaag

SEQ ID NO: 379125 - RNA, 32 nt, Homo Sapiens
auggaggcgccggggcucgggcgguggaggcg

SEQ ID NO: 379126 - RNA, 32 nt, Homo Sapiens
acagccaggaccaacucugacagcugcgagag

SEQ ID NO: 379127 - RNA, 32 nt, Homo Sapiens
uuaaaaugacauguauuuaucagagaauucac

SEQ ID NO: 379128 - RNA, 32 nt, Homo Sapiens
aauuuagccuguauguacugcuuuaacuccug

SEQ ID NO: 379129 - RNA, 32 nt, Homo Sapiens
ggaagaacaggugcgcacaaaggcacaauggc

SEQ ID NO: 379130 - RNA, 32 nt, Homo Sapiens
acccucuagccugacguugaaguaaccucgcc

SEQ ID NO: 379131 - RNA, 32 nt, Homo Sapiens
cacgguuuguuauggagggaaagccacaaaag

SEQ ID NO: 379132 - RNA, 32 nt, Homo Sapiens
ccacucgccugacuccccuuggaccucaguua

SEQ ID NO: 379133 - RNA, 32 nt, Homo Sapiens
aaaggggaaccuucuuccuuucugcgccagga

SEQ ID NO: 379134 - RNA, 32 nt, Homo Sapiens
uggcuguagugucaacgauguuuccaguagug

SEQ ID NO: 379135 - RNA, 32 nt, Homo Sapiens
gagccgagaaaucaacguagagcuuccucugu

SEQ ID NO: 379136 - RNA, 30 nt, Homo Sapiens
ggaagccaugcucugcauacucagaauaag

SEQ ID NO: 379137 - RNA, 32 nt, Homo Sapiens
agcccggcucugccuggugcucccugcagugc

SEQ ID NO: 379138 - RNA, 32 nt, Homo Sapiens
ggaaaaggguucagcccaaagcagaagggacu

SEQ ID NO: 379139 - RNA, 32 nt, Homo Sapiens
gcugauuuuuaaaguuugggguaauuauagac

SEQ ID NO: 379140 - RNA, 32 nt, Homo Sapiens
gcugugccugacuagggagcccucccauugcc

SEQ ID NO: 379141 - RNA, 32 nt, Homo Sapiens
gcagagguuuggauuucagcucccucacuucc

SEQ ID NO: 379142 - RNA, 32 nt, Homo Sapiens
uuuaaaaacaaaucuuggcagcuguccuuuga

SEQ ID NO: 379143 - RNA, 32 nt, Homo Sapiens
aaaccucgucucuacugaaaauaaaaaaguua

SEQ ID NO: 379144 - RNA, 32 nt, Homo Sapiens
uggagugccgggcgcgcaccguccgggcgcgg

SEQ ID NO: 379145 - RNA, 32 nt, Homo Sapiens
aauucagcuacaaaacaaaauacuggacccac

SEQ ID NO: 379146 - RNA, 32 nt, Homo Sapiens
guugcugcuggguggggugccacagggcgggg

SEQ ID NO: 379147 - RNA, 32 nt, Homo Sapiens
cagggugccgggcgagggagggggcccggggu

SEQ ID NO: 379148 - RNA, 32 nt, Homo Sapiens
cuguagcucaaguuuaaaagccauguauaacc

SEQ ID NO: 379149 - RNA, 32 nt, Homo Sapiens
uguagaaauaaaaagugcagauuuaugagagg

SEQ ID NO: 379150 - RNA, 32 nt, Homo Sapiens
ugucuuaauuuaaaauuuaaaugccuuuauau

SEQ ID NO: 379151 - RNA, 32 nt, Homo Sapiens
cggcuguauauccaugagcgccgcuggcagcc

SEQ ID NO: 379152 - RNA, 32 nt, Homo Sapiens
ggugcggccgcggccgggagggacuggauuau

SEQ ID NO: 379153 - RNA, 32 nt, Homo Sapiens
cgcuugccuuggccuccuagggugcugggauu

SEQ ID NO: 379154 - RNA, 32 nt, Homo Sapiens
ugggagugagcuggggguuuuguccauagcuu

SEQ ID NO: 379155 - RNA, 32 nt, Homo Sapiens
ugcugccccugccgcgcgauggagacgagcuc

SEQ ID NO: 379156 - RNA, 32 nt, Homo Sapiens
aauggcggccuggccuaaccaggggugcagcc

SEQ ID NO: 379157 - RNA, 32 nt, Homo Sapiens
aggugauuuuaaaauauuacugugcuucuuug

SEQ ID NO: 379158 - RNA, 32 nt, Homo Sapiens
cuuggaaaaaaauaaacaaauauaaaaauagg

SEQ ID NO: 379159 - RNA, 32 nt, Homo Sapiens
ucauaucccuucccugccccucgcugucuuua

SEQ ID NO: 379160 - RNA, 32 nt, Homo Sapiens
aucuucuggaauuuuuucgucagcuguggcaa

SEQ ID NO: 379161 - RNA, 32 nt, Homo Sapiens
uauaucucccaaugcuaucccucccccauccc

SEQ ID NO: 379162 - RNA, 32 nt, Homo Sapiens
ucccuccgcgccucccucccccucgagccgcc

SEQ ID NO: 379163 - RNA, 32 nt, Homo Sapiens
ggccgggcgugguggcucaugccuguaauucc

SEQ ID NO: 379164 - RNA, 32 nt, Homo Sapiens
ugcgcugggcccggcucucccgcccugcacga

SEQ ID NO: 379165 - RNA, 32 nt, Homo Sapiens
cuuagcuuucccugugccacuuugacucagag

SEQ ID NO: 379166 - RNA, 32 nt, Homo Sapiens
acuuuguuuuaagccguuuucuuagugauucu

SEQ ID NO: 379167 - RNA, 32 nt, Homo Sapiens
ucccagccaggagagugcagcugagcagggag

SEQ ID NO: 379168 - RNA, 32 nt, Homo Sapiens
cucacacccagcucggaauagaucuucccuga

SEQ ID NO: 379169 - RNA, 32 nt, Homo Sapiens
agcagaggacuuggccugcagcuccuugggag

SEQ ID NO: 379170 - RNA, 32 nt, Homo Sapiens
gcagccuccgccuccugcugcuccggacuauu

SEQ ID NO: 379171 - RNA, 32 nt, Homo Sapiens
ccgguuccaguggaucagaaaccugguuccag

SEQ ID NO: 379172 - RNA, 32 nt, Homo Sapiens
aaucuaacucccucagugaacaacuugcaaua

SEQ ID NO: 379173 - RNA, 32 nt, Homo Sapiens
cagagucacaguguaaaguuagauguugaaac

SEQ ID NO: 379174 - RNA, 29 nt, Homo Sapiens
cucaaugaagucaucuauuuucugggcua

SEQ ID NO: 379175 - RNA, 32 nt, Homo Sapiens
aaauaauaaaauuuaucucacaauaaguuaac

SEQ ID NO: 379176 - RNA, 32 nt, Homo Sapiens
uuuggaauaaagccuuugccucauggaggaag

SEQ ID NO: 379177 - RNA, 32 nt, Homo Sapiens
cgacggacgccaaagggucccgggccgccuga

SEQ ID NO: 379178 - RNA, 32 nt, Homo Sapiens
cccagacccacccccagaagccaugugaccuc

SEQ ID NO: 379179 - RNA, 32 nt, Homo Sapiens
ggcggcagcugaggaagaaagacgcagugccc

SEQ ID NO: 379180 - RNA, 32 nt, Homo Sapiens
augcauauauauacauacaugaaauaaauaca

SEQ ID NO: 379181 - RNA, 32 nt, Homo Sapiens
cagaucuuuaaucuggaagugacaaaagguaa

SEQ ID NO: 379182 - RNA, 32 nt, Homo Sapiens
cuggaaauacuagauuugggagaagggcagag

SEQ ID NO: 379183 - RNA, 32 nt, Homo Sapiens
cuggaugaauucccgggucuuuuuuaguucca

SEQ ID NO: 379184 - RNA, 32 nt, Homo Sapiens
caugcccuuccacucugccucccaggacagga

SEQ ID NO: 379185 - RNA, 32 nt, Homo Sapiens
guagguaaaaauuuuauggucacaaaucucag

SEQ ID NO: 379186 - RNA, 32 nt, Homo Sapiens
uuguugcugucaucauguucacuguggcuuuu

SEQ ID NO: 379187 - RNA, 32 nt, Homo Sapiens
uucgagaccagccugcccaaauggugaaaccc

SEQ ID NO: 379188 - RNA, 32 nt, Homo Sapiens
ucucaagaacuuuggaaauauuuuauauauau

SEQ ID NO: 379189 - RNA, 32 nt, Homo Sapiens
gucauuacaaccuggcuuuuuauuguauuugu

SEQ ID NO: 379190 - RNA, 32 nt, Homo Sapiens
uggacgcuacuggccaccuggaggaacugcuu

SEQ ID NO: 379191 - RNA, 32 nt, Homo Sapiens
accaucacccccucagcccccagaagaccagg

SEQ ID NO: 379192 - RNA, 32 nt, Homo Sapiens
guuaagugccccacagagacacuuuaccagga

SEQ ID NO: 379193 - RNA, 32 nt, Homo Sapiens
gucuuuauuggaaaaguccuauguaaaacuaa

SEQ ID NO: 379194 - RNA, 32 nt, Homo Sapiens
uggaggugggcagaguaacauaaaacugauga

SEQ ID NO: 379195 - RNA, 32 nt, Homo Sapiens
gcugcagaugacuggaaacaaggaaggacauu

SEQ ID NO: 379196 - RNA, 32 nt, Homo Sapiens
caugacugguuucuaugcacaagaaaauacua

SEQ ID NO: 379197 - RNA, 28 nt, Homo Sapiens
cgaacacugccucggccuccugguauag

SEQ ID NO: 379198 - RNA, 32 nt, Homo Sapiens
aacaugaagaccuuuuucugcacuauaugcaa

SEQ ID NO: 379199 - RNA, 32 nt, Homo Sapiens
uuccugugcugcaucacccacucagccuucca

SEQ ID NO: 379200 - RNA, 28 nt, Homo Sapiens
gagggauggcucaaugacauagcuuugg

SEQ ID NO: 379201 - RNA, 32 nt, Homo Sapiens
cuucauggaguugggaacaggcugggaaggau

SEQ ID NO: 379202 - RNA, 32 nt, Homo Sapiens
gaaaaaagcagugcuaacaggauauuguucug

SEQ ID NO: 379203 - RNA, 32 nt, Homo Sapiens
ggccgggugugguggcucacgcuuguaaucuc

SEQ ID NO: 379204 - RNA, 32 nt, Homo Sapiens
ggccgggugugguggcucacgccuguaauccc

SEQ ID NO: 379205 - RNA, 32 nt, Homo Sapiens
ggcugggugugguggcucaugccuguaauccc

SEQ ID NO: 379206 - RNA, 32 nt, Homo Sapiens
ggccgggcgugguggcucacgccuguaauccu

SEQ ID NO: 379207 - RNA, 32 nt, Homo Sapiens
gccugaccaacauggugaaaccccguuucuac

SEQ ID NO: 379208 - RNA, 32 nt, Homo Sapiens
aaaauguuuugccucaucgugugcuaggaaau

SEQ ID NO: 379209 - RNA, 32 nt, Homo Sapiens
uuguaaaauaccaucaucagugagagucuuga

SEQ ID NO: 379210 - RNA, 32 nt, Homo Sapiens
gcugugguuuccugaguugcugcugcugcggc

SEQ ID NO: 379211 - RNA, 32 nt, Homo Sapiens
auggauacccgcacuccuccuccugggccgga

SEQ ID NO: 379212 - RNA, 32 nt, Homo Sapiens
gcggacagggacccccuuccccggcuccccug

SEQ ID NO: 379213 - RNA, 32 nt, Homo Sapiens
uuuuuauuguuuguuuuugaaauguacagucu

SEQ ID NO: 379214 - RNA, 29 nt, Homo Sapiens
uguucuaagaagguguugguacucuguuu

SEQ ID NO: 379215 - RNA, 32 nt, Homo Sapiens
uugugauccguaaaauggacaaauucgaagcu

SEQ ID NO: 379216 - RNA, 32 nt, Homo Sapiens
uuaaaagacaccuucccacaccuguaaucuca

SEQ ID NO: 379217 - RNA, 32 nt, Homo Sapiens
ugaggagaaagccuuuccuucugcugcuacug

SEQ ID NO: 379218 - RNA, 32 nt, Homo Sapiens
guucaucuguuuuucaauaccuuuaaguucag

SEQ ID NO: 379219 - RNA, 32 nt, Homo Sapiens
cuaagaguuuccucagagaucauaccucccca

SEQ ID NO: 379220 - RNA, 32 nt, Homo Sapiens
ggccacccucugauugauaagacauaucauuu

SEQ ID NO: 379221 - RNA, 32 nt, Homo Sapiens
ucaucuuucuucaaguggcuuuugcucaucug

SEQ ID NO: 379222 - RNA, 32 nt, Homo Sapiens
auccuaacuauaucacacaaagggauacaacu

SEQ ID NO: 379223 - RNA, 32 nt, Homo Sapiens
acuuucuggaugcuaugaaaccucaagggaac

SEQ ID NO: 379224 - RNA, 32 nt, Homo Sapiens
auaaggucuagggucugagaccaaguuuuuuc

SEQ ID NO: 379225 - RNA, 32 nt, Homo Sapiens
cucauccuggaacauauacagaguugagaguu

SEQ ID NO: 379226 - RNA, 32 nt, Homo Sapiens
uguuauguuuucgaaaaucaaaugguaucuuu

SEQ ID NO: 379227 - RNA, 32 nt, Homo Sapiens
ugccccagcccucuuucuucagcccucccuuu

SEQ ID NO: 379228 - RNA, 32 nt, Homo Sapiens
cugcaacacaaaccuuguaaaauacauauaua

SEQ ID NO: 379229 - RNA, 32 nt, Homo Sapiens
accaggcgccugcagguggagccccggcuccu

SEQ ID NO: 379230 - RNA, 32 nt, Homo Sapiens
aauaaguuaucagcaauuuagcacuuuacuuc

SEQ ID NO: 379231 - RNA, 30 nt, Homo Sapiens
gcguccuucuucccgccgccggugccgaac

SEQ ID NO: 379232 - RNA, 32 nt, Homo Sapiens
augugcuuuuuccgccaaucagaacuguggac

SEQ ID NO: 379233 - RNA, 32 nt, Homo Sapiens
gucugccuuaccuuuacccguccuugagaaca

SEQ ID NO: 379234 - RNA, 32 nt, Homo Sapiens
cugaccggguggcgagaugucagccaggcccc

SEQ ID NO: 379235 - RNA, 30 nt, Homo Sapiens
ggcugugucugugucugcaagauaaauuag

SEQ ID NO: 379236 - RNA, 32 nt, Homo Sapiens
gcggagggaggggacagcuggacccgcagggg

SEQ ID NO: 379237 - RNA, 32 nt, Homo Sapiens
gcgggucaggggcggccgcggaggcggaagca

SEQ ID NO: 379238 - RNA, 32 nt, Homo Sapiens
ucuccguaauuuccacugcuugaaggcugcuc

SEQ ID NO: 379239 - RNA, 32 nt, Homo Sapiens
ccugucccaucccgcgggcgcggccguugcgg

SEQ ID NO: 379240 - RNA, 32 nt, Homo Sapiens
ccaugcccuggccuauucugucucuccuucuu

SEQ ID NO: 379241 - RNA, 32 nt, Homo Sapiens
gcagggauaaaacuuuugagguggccagaccc

SEQ ID NO: 379242 - RNA, 32 nt, Homo Sapiens
gacaagaaaguggaauugaaaacuacaacaug

SEQ ID NO: 379243 - RNA, 32 nt, Homo Sapiens
uaauuucuaaugaugaggacauguaaaaguug

SEQ ID NO: 379244 - RNA, 32 nt, Homo Sapiens
cguucaagaccauggagaagacaacuccucau

SEQ ID NO: 379245 - RNA, 32 nt, Homo Sapiens
acuuuggcucugcuaccugcuccugaagcccc

SEQ ID NO: 379246 - RNA, 32 nt, Homo Sapiens
cgccccugcccuggccgcacaggguuggguua

SEQ ID NO: 379247 - RNA, 32 nt, Homo Sapiens
auuagcuuacuauaauuuuacuauuuacuuuu

SEQ ID NO: 379248 - RNA, 32 nt, Homo Sapiens
gcugggggagcugcccugcaggucuuggcaca

SEQ ID NO: 379249 - RNA, 32 nt, Homo Sapiens
auucauaguauuaggaucuuuaugauuuauca

SEQ ID NO: 379250 - RNA, 32 nt, Homo Sapiens
uaucaauuuucaucuuguuuuguuuguuuuga

SEQ ID NO: 379251 - RNA, 32 nt, Homo Sapiens
caccaaaugccuaugugcaccacacauuccag

SEQ ID NO: 379252 - RNA, 32 nt, Homo Sapiens
uuuuacaagcccacccucccccugccuugguu

SEQ ID NO: 379253 - RNA, 32 nt, Homo Sapiens
ccaaggaagcccagcacagaccaucucagcuc

SEQ ID NO: 379254 - RNA, 32 nt, Homo Sapiens
gcuugaguccccggcgugauguguucauggac

SEQ ID NO: 379255 - RNA, 32 nt, Homo Sapiens
ugagccccgcagaccuccccagccccuagccc

SEQ ID NO: 379256 - RNA, 32 nt, Homo Sapiens
uccugccgucacugcuggcuccagccacagac

SEQ ID NO: 379257 - RNA, 32 nt, Homo Sapiens
ggccggcguggcggcgccugggaccgacugag

SEQ ID NO: 379258 - RNA, 32 nt, Homo Sapiens
gcgggcgggaacugcgcaggacccggccagga

SEQ ID NO: 379259 - RNA, 32 nt, Homo Sapiens
ggcacgaggcggaauugccggugccgccgcca

SEQ ID NO: 379260 - RNA, 32 nt, Homo Sapiens
gagcauccuugacgccuguguacuucccaggc

SEQ ID NO: 379261 - RNA, 32 nt, Homo Sapiens
auugagcuucaguggagaauaaaccagcugag

SEQ ID NO: 379262 - RNA, 32 nt, Homo Sapiens
cggcagcccuguggcuuuuggacucggccuug

SEQ ID NO: 379263 - RNA, 30 nt, Homo Sapiens
cugggaguccuggugccgccggcugcacuu

SEQ ID NO: 379264 - RNA, 29 nt, Homo Sapiens
gaauugcugaagauuugcccaaggggcau

SEQ ID NO: 379265 - RNA, 32 nt, Homo Sapiens
cuuaugaaacaguauguaugauucaaaaaguu

SEQ ID NO: 379266 - RNA, 32 nt, Homo Sapiens
gccuaaauuuguuuuacuguacacuuacgcaa

SEQ ID NO: 379267 - RNA, 32 nt, Homo Sapiens
aaauuggggaggagggggccgggcgcggugcu

SEQ ID NO: 379268 - RNA, 32 nt, Homo Sapiens
gcaugggcagagagggccacggggcagggccc

SEQ ID NO: 379269 - RNA, 32 nt, Homo Sapiens
agauguuuaucaucagagauggguuauggaag

SEQ ID NO: 379270 - RNA, 32 nt, Homo Sapiens
ccgaggcucccucuuuaggucggagauuggcc

SEQ ID NO: 379271 - RNA, 32 nt, Homo Sapiens
acugucugaaagaugacaugaguaguaauuca

SEQ ID NO: 379272 - RNA, 32 nt, Homo Sapiens
agucagcgugccaucuugauguguguauguac

SEQ ID NO: 379273 - RNA, 32 nt, Homo Sapiens
acaaguagcagcagcuccugcuugaguucuga

SEQ ID NO: 379274 - RNA, 32 nt, Homo Sapiens
gcuaugucucuacuccaggcucuguuuugugu

SEQ ID NO: 379275 - RNA, 32 nt, Homo Sapiens
gaagcagccacagguuggccaagcacccucga

SEQ ID NO: 379276 - RNA, 32 nt, Homo Sapiens
agaaugaguuaaaacuuugagggcuuugggga

SEQ ID NO: 379277 - RNA, 32 nt, Homo Sapiens
aguguaaaggcacagguuacucaugaugcuuc

SEQ ID NO: 379278 - RNA, 32 nt, Homo Sapiens
aggguagggaggaggcggccgaaccgcgucgc

SEQ ID NO: 379279 - RNA, 32 nt, Homo Sapiens
agugaaacccaccaggcuccugacacccaugg

SEQ ID NO: 379280 - RNA, 32 nt, Homo Sapiens
aagcgaauauauuauaauauguauagagcgcc

SEQ ID NO: 379281 - RNA, 32 nt, Homo Sapiens
gagggaagcauuaagagcuaacuccagagauc

SEQ ID NO: 379282 - RNA, 32 nt, Homo Sapiens
caucuguggggcaggcacacacaccucccgcc

SEQ ID NO: 379283 - RNA, 32 nt, Homo Sapiens
gcuuuuuaaggaaguucucaacccuuauuaca

SEQ ID NO: 379284 - RNA, 32 nt, Homo Sapiens
uuaaguauuuuguaggaggaagaauaucaagg

SEQ ID NO: 379285 - RNA, 32 nt, Homo Sapiens
auugccaaaaaguuagaugcaaauguauuacu

SEQ ID NO: 379286 - RNA, 32 nt, Homo Sapiens
gaugcccugcaacuaacccuggucuuucccau

SEQ ID NO: 379287 - RNA, 32 nt, Homo Sapiens
gugccaggaccaccccaccucucuugcugccu

SEQ ID NO: 379288 - RNA, 32 nt, Homo Sapiens
cgggaagaggaaagucgcggcgggggcgcggc

SEQ ID NO: 379289 - RNA, 32 nt, Homo Sapiens
aacaaugccagaugaauggaagagggaacaca

SEQ ID NO: 379290 - RNA, 32 nt, Homo Sapiens
ggcugggaauggggacacgguguccaccaucc

SEQ ID NO: 379291 - RNA, 32 nt, Homo Sapiens
augucucuucauuuccucucaaaucuucaacu

SEQ ID NO: 379292 - RNA, 32 nt, Homo Sapiens
acacuuuuuaagaaauacaauucuacauuguc

SEQ ID NO: 379293 - RNA, 32 nt, Homo Sapiens
cagcaugcauagugcuaagaaagcaagccaau

SEQ ID NO: 379294 - RNA, 32 nt, Homo Sapiens
ugaugucagacaccaucuguagugagcagcgc

SEQ ID NO: 379295 - RNA, 32 nt, Homo Sapiens
uuucaaauuggacuuucaaaauuaaaucuguc

SEQ ID NO: 379296 - RNA, 32 nt, Homo Sapiens
uuuuauuuuuaaauaaacgccaaaaaauguca

SEQ ID NO: 379297 - RNA, 32 nt, Homo Sapiens
auaucucccuggcaggguccucuucuuuuccc

SEQ ID NO: 379298 - RNA, 32 nt, Homo Sapiens
acuacagcuguaaaaugaaaucucgucuugua

SEQ ID NO: 379299 - RNA, 32 nt, Homo Sapiens
cugcgcggugaacgaggcggccugcgcggcgg

SEQ ID NO: 379300 - RNA, 32 nt, Homo Sapiens
cuggugagagcuccuuuacagggacuuuaugu

SEQ ID NO: 379301 - RNA, 28 nt, Homo Sapiens
aaaaaagaaaacugacauuugaacagga

SEQ ID NO: 379302 - RNA, 31 nt, Homo Sapiens
aagugucagcucuggaaccagguggcccuag

SEQ ID NO: 379303 - RNA, 32 nt, Homo Sapiens
ccugauggcuccgacaggccugcuccagagca

SEQ ID NO: 379304 - RNA, 32 nt, Homo Sapiens
caguugcugcugucauaccccuggcagggcca

SEQ ID NO: 379305 - RNA, 32 nt, Homo Sapiens
gccugccuuuccagcgagaauucuucauccuc

SEQ ID NO: 379306 - RNA, 32 nt, Homo Sapiens
gcccggagcgagccagggagcggcuaaccggg

SEQ ID NO: 379307 - RNA, 32 nt, Homo Sapiens
gacuuaacgaacaauucugacuaugaaaaaug

SEQ ID NO: 379308 - RNA, 32 nt, Homo Sapiens
ccugucaugcuucaagaguuccagcuggccug

SEQ ID NO: 379309 - RNA, 32 nt, Homo Sapiens
guacuagagggcccgcgccgcggccggccgcc

SEQ ID NO: 379310 - RNA, 31 nt, Homo Sapiens
gaggccuccccuucagcucaggcacagcaac

SEQ ID NO: 379311 - RNA, 32 nt, Homo Sapiens
acaaaccucacagacuuugaggaccuggaugg

SEQ ID NO: 379312 - RNA, 32 nt, Homo Sapiens
caaagcaacuuucccucccuccccuccccccg

SEQ ID NO: 379313 - RNA, 32 nt, Homo Sapiens
gagccgagccgggucgggcccgggccaugcug

SEQ ID NO: 379314 - RNA, 32 nt, Homo Sapiens
acaaaugacaacacguugggaaggguuuaaaa

SEQ ID NO: 379315 - RNA, 32 nt, Homo Sapiens
guugcuuaauacuccuuucccccucccucacu

SEQ ID NO: 379316 - RNA, 32 nt, Homo Sapiens
ccgagagcgcacguucgcgcgcggugcgucgg

SEQ ID NO: 379317 - RNA, 32 nt, Homo Sapiens
ccuguagcuuugcucagaaucuguaaauauuc

SEQ ID NO: 379318 - RNA, 32 nt, Homo Sapiens
aaggaaggcuggcaucaaaauauuuugaucaa

SEQ ID NO: 379319 - RNA, 32 nt, Homo Sapiens
aaacauuucugugccugcuggguaggggcacg

SEQ ID NO: 379320 - RNA, 32 nt, Homo Sapiens
cugaggcugcgcaagccccggggucugggcgg

SEQ ID NO: 379321 - RNA, 32 nt, Homo Sapiens
cccuuccuggacuuaagagugcaaacucuucu

SEQ ID NO: 379322 - RNA, 32 nt, Homo Sapiens
ggggugacagcgaaaccuccuaccucccggca

SEQ ID NO: 379323 - RNA, 32 nt, Homo Sapiens
uuauuaacucuccuuuauucuauauggaaaua

SEQ ID NO: 379324 - RNA, 32 nt, Homo Sapiens
aaagcuccugggacaccuccaguguccagcac

SEQ ID NO: 379325 - RNA, 32 nt, Homo Sapiens
aaccucaaggccagcucaaugccugguaucug

SEQ ID NO: 379326 - RNA, 32 nt, Homo Sapiens
acucugucucgggaauguuuugucuguugccg

SEQ ID NO: 379327 - RNA, 32 nt, Homo Sapiens
ugccccggaguagcugcaggugccccggaccu

SEQ ID NO: 379328 - RNA, 32 nt, Homo Sapiens
caggguucgcgcgggccggguggaggcuugag

SEQ ID NO: 379329 - RNA, 32 nt, Homo Sapiens
gaaaauauaucuugcaccuuauugcaaauuca

SEQ ID NO: 379330 - RNA, 32 nt, Homo Sapiens
acggccccgcagagcagcucgggccgcuggcg

SEQ ID NO: 379331 - RNA, 32 nt, Homo Sapiens
gccccagcuccgucucggcggcggcgggcagu

SEQ ID NO: 379332 - RNA, 32 nt, Homo Sapiens
caacuuccaaaaaaugugauuaugggaccuac

SEQ ID NO: 379333 - RNA, 32 nt, Homo Sapiens
aagguagaacuaaaaacuccuuaacuuacugu

SEQ ID NO: 379334 - RNA, 32 nt, Homo Sapiens
auggcuuagcuacuuguguuuuucccuuuugg

SEQ ID NO: 379335 - RNA, 32 nt, Homo Sapiens
aacuuccagguacacaaugaaguuuuaaaugu

SEQ ID NO: 379336 - RNA, 32 nt, Homo Sapiens
uguacuaguuugucgugguuauaaaacaauua

SEQ ID NO: 379337 - RNA, 32 nt, Homo Sapiens
cacagaggagacggaggccaggagugaggccc

SEQ ID NO: 379338 - RNA, 32 nt, Homo Sapiens
cuuccugccugccagcagccucaacaggcaca

SEQ ID NO: 379339 - RNA, 32 nt, Homo Sapiens
uggauuuugucaacaacaguuccagcguuuag

SEQ ID NO: 379340 - RNA, 32 nt, Homo Sapiens
gagccaucucuuccucauauuucagcagugca

SEQ ID NO: 379341 - RNA, 32 nt, Homo Sapiens
cuuuccuucugagccuccauggagaccagccu

SEQ ID NO: 379342 - RNA, 32 nt, Homo Sapiens
ggcauaaauggaaaacaaaaacccuacuauuu

SEQ ID NO: 379343 - RNA, 32 nt, Homo Sapiens
cugugcccuguggccuggccgcagugaggcau

SEQ ID NO: 379344 - RNA, 32 nt, Homo Sapiens
ccacuucuuccacuccuccccgcaggccccaa

SEQ ID NO: 379345 - RNA, 32 nt, Homo Sapiens
aaauaguaaaaugaacaaaacccuacgaaaga

SEQ ID NO: 379346 - RNA, 32 nt, Homo Sapiens
auacuccagccucuuuccuccuccucccgcag

SEQ ID NO: 379347 - RNA, 32 nt, Homo Sapiens
ugcugcccugaagaaaguguaaggauagauau

SEQ ID NO: 379348 - RNA, 32 nt, Homo Sapiens
gguuugaggguuuuaauaccuguagucaaaug

SEQ ID NO: 379349 - RNA, 28 nt, Homo Sapiens
gucaggaguucaggaccagccuggccaa

SEQ ID NO: 379350 - RNA, 32 nt, Homo Sapiens
gccaaccuugacuaccccggcccagggcucac

SEQ ID NO: 379351 - RNA, 32 nt, Homo Sapiens
agaugagucagagguuucugcuuaaugcucac

SEQ ID NO: 379352 - RNA, 32 nt, Homo Sapiens
uccagggccggggaaccccaggaggaagcugc

SEQ ID NO: 379353 - RNA, 32 nt, Homo Sapiens
cggccacgccccgcgacacaccccggcggcuc

SEQ ID NO: 379354 - RNA, 32 nt, Homo Sapiens
gguuaggguguagaagagucauguccuacaaa

SEQ ID NO: 379355 - RNA, 32 nt, Homo Sapiens
gauggaggcagcagacgugcagugccauaagg

SEQ ID NO: 379356 - RNA, 32 nt, Homo Sapiens
agagggcgcagccgaugcgggcggcggcggcg

SEQ ID NO: 379357 - RNA, 32 nt, Homo Sapiens
cgguccgcgcucuccgggcgcauaggaagccc

SEQ ID NO: 379358 - RNA, 32 nt, Homo Sapiens
gcuccguaguggacuccgcgggccuucggcag

SEQ ID NO: 379359 - RNA, 32 nt, Homo Sapiens
agaaauguccuguauuccagugaucauccugu

SEQ ID NO: 379360 - RNA, 32 nt, Homo Sapiens
gcccuacgcgcgcggcccggagcucuguuccc

SEQ ID NO: 379361 - RNA, 31 nt, Homo Sapiens
acggucaugcugcggcguggacacuuggcau

SEQ ID NO: 379362 - RNA, 32 nt, Homo Sapiens
gaccccaaggaccugccuccccggaagugccu

SEQ ID NO: 379363 - RNA, 32 nt, Homo Sapiens
ccagucccugucaccacccaguuuuucccucu

SEQ ID NO: 379364 - RNA, 32 nt, Homo Sapiens
uuuagaaauauuaauuuacuugaagagaugua

SEQ ID NO: 379365 - RNA, 32 nt, Homo Sapiens
caugcuguucucaugauagcggugauagugag

SEQ ID NO: 379366 - RNA, 30 nt, Homo Sapiens
augaaggauaaaagccccaaauggugguaa

SEQ ID NO: 379367 - RNA, 32 nt, Homo Sapiens
uuuugaggcuucuccuucuccuucccauuucu

SEQ ID NO: 379368 - RNA, 32 nt, Homo Sapiens
cgcgcccgcccccauuucaggugcuguccucu

SEQ ID NO: 379369 - RNA, 32 nt, Homo Sapiens
gaaccaugagagagagucuaggagccaaacac

SEQ ID NO: 379370 - RNA, 32 nt, Homo Sapiens
uguguguaaauuuuguaacauaaacuguggua

SEQ ID NO: 379371 - RNA, 32 nt, Homo Sapiens
ugaguggugucaacuuuacuugaaugaauuuu

SEQ ID NO: 379372 - RNA, 32 nt, Homo Sapiens
ccuugucuccccuccucccccaucuggggaug

SEQ ID NO: 379373 - RNA, 32 nt, Homo Sapiens
uaauagcggcaacuaaaugugaugaaugcgug

SEQ ID NO: 379374 - RNA, 32 nt, Homo Sapiens
gaggggaugggcggggcgcgcggccguuagcg

SEQ ID NO: 379375 - RNA, 32 nt, Homo Sapiens
ggugcagcugggccccugugcccuaguccacg

SEQ ID NO: 379376 - RNA, 32 nt, Homo Sapiens
gcugagaggcugcggcggcugacuagguuuuc

SEQ ID NO: 379377 - RNA, 32 nt, Homo Sapiens
aggcucaggcugugcuggcauaagugcucugc

SEQ ID NO: 379378 - RNA, 32 nt, Homo Sapiens
uuagccagggucgaugauccuggggcucuugg

SEQ ID NO: 379379 - RNA, 32 nt, Homo Sapiens
uaaaauuuguauuuguuuuucuuacuuaguga

SEQ ID NO: 379380 - RNA, 32 nt, Homo Sapiens
aggagggcucuagagggaaagguuacaugggg

SEQ ID NO: 379381 - RNA, 32 nt, Homo Sapiens
guagucccauagucaguguuaauuacacacau

SEQ ID NO: 379382 - RNA, 32 nt, Homo Sapiens
ugauucuguuguucaccauuaagggguagaca

SEQ ID NO: 379383 - RNA, 32 nt, Homo Sapiens
acuucuuccucuucagcccgcugaguagcugg

SEQ ID NO: 379384 - RNA, 32 nt, Homo Sapiens
gcucccucagcuucgcagcgccgcccgccacc

SEQ ID NO: 379385 - RNA, 32 nt, Homo Sapiens
ucauacucagauaaccaaauuaaaagaauuag

SEQ ID NO: 379386 - RNA, 32 nt, Homo Sapiens
accucgguaucuuuaaguucuccacauaacag

SEQ ID NO: 379387 - RNA, 32 nt, Homo Sapiens
agccuccacaggaauccccucuggagagcccg

SEQ ID NO: 379388 - RNA, 32 nt, Homo Sapiens
acagaaggguucuuuacaagcuuauuuuacau

SEQ ID NO: 379389 - RNA, 32 nt, Homo Sapiens
agacacgcaccgugagcggcagcgccgccggc

SEQ ID NO: 379390 - RNA, 28 nt, Homo Sapiens
aacauggauugucagcucuccauccucc

SEQ ID NO: 379391 - RNA, 32 nt, Homo Sapiens
gugaggggggccgggucugggaggcggccugg

SEQ ID NO: 379392 - RNA, 32 nt, Homo Sapiens
acaaagcuggugaacaucaaguuggugcuaug

SEQ ID NO: 379393 - RNA, 32 nt, Homo Sapiens
uuucuaaaaaaguuuuagaagaaaaagaugua

SEQ ID NO: 379394 - RNA, 32 nt, Homo Sapiens
cagggacucugcuggggugugcagggccgggg

SEQ ID NO: 379395 - RNA, 32 nt, Homo Sapiens
agauaaauuggaaagguuaauguucuaguuuc

SEQ ID NO: 379396 - RNA, 32 nt, Homo Sapiens
gcccauucauuagaccacuuguaaagauuacu

SEQ ID NO: 379397 - RNA, 32 nt, Homo Sapiens
agaaugugaaacaacagugugaaaauuggcug

SEQ ID NO: 379398 - RNA, 32 nt, Homo Sapiens
cacaggcucuggggagggagggggcaaggguc

SEQ ID NO: 379399 - RNA, 32 nt, Homo Sapiens
gcguuccggaagcccgcucccggggccauggg

SEQ ID NO: 379400 - RNA, 32 nt, Homo Sapiens
auuuucaguuuaguguagcagcacacuuguuc

SEQ ID NO: 379401 - RNA, 32 nt, Homo Sapiens
agucuuggauagaaaaucauguguccuuggau

SEQ ID NO: 379402 - RNA, 32 nt, Homo Sapiens
ccagacuuuucucuagaagccgucugcguuua

SEQ ID NO: 379403 - RNA, 32 nt, Homo Sapiens
gguagacuuaggaauuuucuacuugguaaaag

SEQ ID NO: 379404 - RNA, 32 nt, Homo Sapiens
agauguggacucaaguggaaagaaaugcaaag

SEQ ID NO: 379405 - RNA, 32 nt, Homo Sapiens
cccaauuguaaauuuaaugugauuuugacugu

SEQ ID NO: 379406 - RNA, 32 nt, Homo Sapiens
augagccacugcacccggccaagucuuugguc

SEQ ID NO: 379407 - RNA, 32 nt, Homo Sapiens
caaagacaauuucaaagaacaaugacaguaaa

SEQ ID NO: 379408 - RNA, 32 nt, Homo Sapiens
agaggggagaauaaaguuaugcuguguacauc

SEQ ID NO: 379409 - RNA, 32 nt, Homo Sapiens
uacaggugugagccuccacaccuggcuguuuu

SEQ ID NO: 379410 - RNA, 32 nt, Homo Sapiens
uacaguccuugcucccaccccauccaggaugg

SEQ ID NO: 379411 - RNA, 32 nt, Homo Sapiens
gucagaccgggcgggcgcaggaugggcgggaa

SEQ ID NO: 379412 - RNA, 32 nt, Homo Sapiens
ggacgucggggcgcccucggggaacgugcggg

SEQ ID NO: 379413 - RNA, 32 nt, Homo Sapiens
aaggcuggggacgccgcauccccgggugcgga

SEQ ID NO: 379414 - RNA, 32 nt, Homo Sapiens
cucuuaaaauauugauuuguucuuauaagauu

SEQ ID NO: 379415 - RNA, 32 nt, Homo Sapiens
caaagaggccccgccccggcccuggccccggc

SEQ ID NO: 379416 - RNA, 32 nt, Homo Sapiens
ucccccagccuggccuggcucuggccuggucc

SEQ ID NO: 379417 - RNA, 32 nt, Homo Sapiens
gcacguauuccucagcacaucuagagcugaag

SEQ ID NO: 379418 - RNA, 32 nt, Homo Sapiens
caauuaccucccacugcgucccucccacaaca

SEQ ID NO: 379419 - RNA, 31 nt, Homo Sapiens
guuccugcgcacugccuguuccuccugggug

SEQ ID NO: 379420 - RNA, 32 nt, Homo Sapiens
uguugaagaggguaucuuggggaaugaguuua

SEQ ID NO: 379421 - RNA, 32 nt, Homo Sapiens
ccugucugccagccugccugaccuggauucug

SEQ ID NO: 379422 - RNA, 32 nt, Homo Sapiens
ucuugauccccucugagugacugagggagguu

SEQ ID NO: 379423 - RNA, 32 nt, Homo Sapiens
aggccccucccucuccagcaggcccaugggag

SEQ ID NO: 379424 - RNA, 32 nt, Homo Sapiens
cagagaaggggccuccuccacccagaguccug

SEQ ID NO: 379425 - RNA, 32 nt, Homo Sapiens
cuugguacugucacuccccuucccacucccug

SEQ ID NO: 379426 - RNA, 32 nt, Homo Sapiens
ugcaggccccagccgcucucgggcgcggcgug

SEQ ID NO: 379427 - RNA, 32 nt, Homo Sapiens
ccggguagaggcucgagccgggacccccgagc

SEQ ID NO: 379428 - RNA, 32 nt, Homo Sapiens
gaugggaggggaggggagcaguguugaugcca

SEQ ID NO: 379429 - RNA, 32 nt, Homo Sapiens
gaagcgcaaggcagccgccgccgugccgcucc

SEQ ID NO: 379430 - RNA, 32 nt, Homo Sapiens
gucguuuugugauuacccauaauauuggaagc

SEQ ID NO: 379431 - RNA, 32 nt, Homo Sapiens
agagccggagcccaggaagcugcccgaauaga

SEQ ID NO: 379432 - RNA, 32 nt, Homo Sapiens
auaaacauuuccccuaagacuccccucucaga

SEQ ID NO: 379433 - RNA, 32 nt, Homo Sapiens
gacuugauaauuacuuauuuguguuuuucaug

SEQ ID NO: 379434 - RNA, 32 nt, Homo Sapiens
gaaacgaaacccacucuagaaaacgcgaccuu

SEQ ID NO: 379435 - RNA, 32 nt, Homo Sapiens
cuaguccuguguccuccuccacuucccaugcc

SEQ ID NO: 379436 - RNA, 32 nt, Homo Sapiens
aacaacgcugcagauuuaucugcacaaacauc

SEQ ID NO: 379437 - RNA, 27 nt, Homo Sapiens
ggaugucucgccgcaagcaagcgaaac

SEQ ID NO: 379438 - RNA, 32 nt, Homo Sapiens
agguguguuucccagacaaucuccaggguuuc

SEQ ID NO: 379439 - RNA, 32 nt, Homo Sapiens
acuguuggcugauuggaaaauaauaaaagaau

SEQ ID NO: 379440 - RNA, 32 nt, Homo Sapiens
gaggaggaaugugcuuaauguuuuaggaacca

SEQ ID NO: 379441 - RNA, 32 nt, Homo Sapiens
auacuugccuguaaaaaguaaaugcauuuuac

SEQ ID NO: 379442 - RNA, 32 nt, Homo Sapiens
ccugucagcuuccuccucccugccaaccuucu

SEQ ID NO: 379443 - RNA, 32 nt, Homo Sapiens
gaggagcaaggugccucccagcccgcaggggc

SEQ ID NO: 379444 - RNA, 30 nt, Homo Sapiens
ccuuuacaguuaauaaauuugauugccacu

SEQ ID NO: 379445 - RNA, 32 nt, Homo Sapiens
acauccaaaaccagccuggauuucauacaugg

SEQ ID NO: 379446 - RNA, 32 nt, Homo Sapiens
cucccacagaucuugccccuuaccacaaugaa

SEQ ID NO: 379447 - RNA, 32 nt, Homo Sapiens
cugaguuccuggagaccccuuuuuugccccca

SEQ ID NO: 379448 - RNA, 32 nt, Homo Sapiens
cccagaagcuggaaguuugggaaaggcccaag

SEQ ID NO: 379449 - RNA, 32 nt, Homo Sapiens
uaauauuaugauuuugauaaaaacagaagauu

SEQ ID NO: 379450 - RNA, 32 nt, Homo Sapiens
auccccuaaccugguucauuccacaccggcac

SEQ ID NO: 379451 - RNA, 32 nt, Homo Sapiens
auugauuugaaagacacuggcucugccacuua

SEQ ID NO: 379452 - RNA, 32 nt, Homo Sapiens
cacacggggccgagagcugagcaagaauuugg

SEQ ID NO: 379453 - RNA, 32 nt, Homo Sapiens
ucuccuccuccuuuccagcagugagccccaug

SEQ ID NO: 379454 - RNA, 32 nt, Homo Sapiens
cgccuguaaucccagcacuuugggagguagag

SEQ ID NO: 379455 - RNA, 32 nt, Homo Sapiens
gggaucuguggaaaaacacaucugcaaauguc

SEQ ID NO: 379456 - RNA, 32 nt, Homo Sapiens
gucucaguucaagcagcuuugcuuagguucuu

SEQ ID NO: 379457 - RNA, 32 nt, Homo Sapiens
cucugaggcucccaugcugggggugcccacuu

SEQ ID NO: 379458 - RNA, 32 nt, Homo Sapiens
guaaugggacgccccacccauuugccaggcug

SEQ ID NO: 379459 - RNA, 32 nt, Homo Sapiens
uggaugcaucucuaauaccauguuugagcacc

SEQ ID NO: 379460 - RNA, 32 nt, Homo Sapiens
acauacaccaucacacuuuaauuccaaucugu

SEQ ID NO: 379461 - RNA, 30 nt, Homo Sapiens
uggcagggagguggcagagagcucacuggg

SEQ ID NO: 379462 - RNA, 32 nt, Homo Sapiens
acacugaugguuugaugagugauucagcuguu

SEQ ID NO: 379463 - RNA, 32 nt, Homo Sapiens
caauucaugauuauacuuaaucuaauuugauu

SEQ ID NO: 379464 - RNA, 32 nt, Homo Sapiens
gucaauuccaacaaaaauauuaauuuacaacc

SEQ ID NO: 379465 - RNA, 32 nt, Homo Sapiens
uuagugcugugcggcggggccucugggugcga

SEQ ID NO: 379466 - RNA, 32 nt, Homo Sapiens
caaaaagcuccuggggcguccaggccgcgccc

SEQ ID NO: 379467 - RNA, 32 nt, Homo Sapiens
auaagaauugguuauuugggggcuuuuuuacu

SEQ ID NO: 379468 - RNA, 32 nt, Homo Sapiens
ugcccgggagcgccagcugcgugaggaggccg

SEQ ID NO: 379469 - RNA, 32 nt, Homo Sapiens
cuuccgccuccucuccuucuacuacagcccgg

SEQ ID NO: 379470 - RNA, 32 nt, Homo Sapiens
cccagucauuuguaccucuucauauggcuaug

SEQ ID NO: 379471 - RNA, 32 nt, Homo Sapiens
guguucccacccaacaaaugugauaagugauc

SEQ ID NO: 379472 - RNA, 32 nt, Homo Sapiens
ucguucuggaaacgauucuguaggucugucug

SEQ ID NO: 379473 - RNA, 32 nt, Homo Sapiens
gcgcugcccaaccgcgcucuccgccuaccucc

SEQ ID NO: 379474 - RNA, 32 nt, Homo Sapiens
aucucucaggaaaaccaguuucccuuuuguua

SEQ ID NO: 379475 - RNA, 32 nt, Homo Sapiens
uauuuauagaaaguacagugauucugguuuuu

SEQ ID NO: 379476 - RNA, 32 nt, Homo Sapiens
uaguuuaauguuuuauagucucauaguaguag

SEQ ID NO: 379477 - RNA, 32 nt, Homo Sapiens
uuuaaucagguggaaaugaucuuccuggcuca

SEQ ID NO: 379478 - RNA, 32 nt, Homo Sapiens
gacaggcuggcgccuccacccacccuccugcc

SEQ ID NO: 379479 - RNA, 32 nt, Homo Sapiens
aaaaagcuuuguaaauaaaaucuuaacauuuu

SEQ ID NO: 379480 - RNA, 32 nt, Homo Sapiens
auauaaaguacauagaaauuccuuacuuguaa

SEQ ID NO: 379481 - RNA, 32 nt, Homo Sapiens
agguucuaguucccuuucccuccuuuuauauc

SEQ ID NO: 379482 - RNA, 32 nt, Homo Sapiens
cagagagucaaucccugcagccacccugcagc

SEQ ID NO: 379483 - RNA, 32 nt, Homo Sapiens
agccaaaaaugaacaaagaaaugaugaagaac

SEQ ID NO: 379484 - RNA, 32 nt, Homo Sapiens
cuccgccccucgcgcuccagccacucggccgc

SEQ ID NO: 379485 - RNA, 32 nt, Homo Sapiens
uguugcaguaccuuuuucugguaaauuuugua

SEQ ID NO: 379486 - RNA, 28 nt, Homo Sapiens
ccaacaguggcuaauaaaaugacggcua

SEQ ID NO: 379487 - RNA, 32 nt, Homo Sapiens
cacagccccaccuuggccccaggaacccuggg

SEQ ID NO: 379488 - RNA, 32 nt, Homo Sapiens
aucggcagggagaggaaggcgcgggaggggga

SEQ ID NO: 379489 - RNA, 32 nt, Homo Sapiens
gccgggcgcagagcggcuccgcggcgggagcu

SEQ ID NO: 379490 - RNA, 32 nt, Homo Sapiens
gaggcuccagaguugagcuuguccuuaucuag

SEQ ID NO: 379491 - RNA, 32 nt, Homo Sapiens
aaugcucugcccucccucccccgaaguucucu

SEQ ID NO: 379492 - RNA, 32 nt, Homo Sapiens
auuucugcaaguagucaugacugcugaagaaa

SEQ ID NO: 379493 - RNA, 32 nt, Homo Sapiens
gguacucaguaaaugaucaucucuagguuggg

SEQ ID NO: 379494 - RNA, 32 nt, Homo Sapiens
ccgcggcccgcaccugccgcccgcaccugcag

SEQ ID NO: 379495 - RNA, 32 nt, Homo Sapiens
auaccuuaguaguagucagaaccucuuugaga

SEQ ID NO: 379496 - RNA, 32 nt, Homo Sapiens
cacauuuuaaaaauaauaaacacuauuuuuag

SEQ ID NO: 379497 - RNA, 32 nt, Homo Sapiens
uccgcccgcaccgagauccaccugcucuucga

SEQ ID NO: 379498 - RNA, 32 nt, Homo Sapiens
agaagggagguagucgcccuccgucguggccu

SEQ ID NO: 379499 - RNA, 32 nt, Homo Sapiens
ggcagcugcagaacccaaagacguggagccgg

SEQ ID NO: 379500 - RNA, 31 nt, Homo Sapiens
cgcugugggcacugccucagccgcccaagua

SEQ ID NO: 379501 - RNA, 32 nt, Homo Sapiens
gcccggcgaagcgcgccgcugucgcccgcacg

SEQ ID NO: 379502 - RNA, 29 nt, Homo Sapiens
aacuaugaacaaacgggacuauaugaaca

SEQ ID NO: 379503 - RNA, 27 nt, Homo Sapiens
ugcuaauacuuuuucagccccagcugu

SEQ ID NO: 379504 - RNA, 32 nt, Homo Sapiens
augccugcaggcugggacugcugcuggggacg

SEQ ID NO: 379505 - RNA, 32 nt, Homo Sapiens
ucgaauugacauuccuucuggaguuuguuuuu

SEQ ID NO: 379506 - RNA, 32 nt, Homo Sapiens
acuucccucccucuguucugcccuaugcccau

SEQ ID NO: 379507 - RNA, 32 nt, Homo Sapiens
uuuuggaaaaucaaugauuuuaaugcauagca

SEQ ID NO: 379508 - RNA, 31 nt, Homo Sapiens
gacaggagggcggaucagguggccuccugag

SEQ ID NO: 379509 - RNA, 31 nt, Homo Sapiens
aggucaucuugaaauuugccaaauauaugag

SEQ ID NO: 379510 - RNA, 32 nt, Homo Sapiens
uaacagcaguuugacuuuguuguacaauacag

SEQ ID NO: 379511 - RNA, 32 nt, Homo Sapiens
ucaauucacauagauuucuucucuuuaguaua

SEQ ID NO: 379512 - RNA, 32 nt, Homo Sapiens
caggagcuggaacccagagagcguccuguccc

SEQ ID NO: 379513 - RNA, 32 nt, Homo Sapiens
augcucaucucuauuugcagccaggaauggaa

SEQ ID NO: 379514 - RNA, 32 nt, Homo Sapiens
ccgccaccugcguacgagcauuuuaaacucua

SEQ ID NO: 379515 - RNA, 32 nt, Homo Sapiens
uugcugugugauugcaguuuuaaauuauaaca

SEQ ID NO: 379516 - RNA, 32 nt, Homo Sapiens
gagcucaggaccagucuucucuccagguuccc

SEQ ID NO: 379517 - RNA, 32 nt, Homo Sapiens
acucgccccucgcccacccgcucgcugcccgg

SEQ ID NO: 379518 - RNA, 32 nt, Homo Sapiens
agaagacccgggcucccguccucccccaggac

SEQ ID NO: 379519 - RNA, 32 nt, Homo Sapiens
guccccaaggaccagaacuaggccaauaggca

SEQ ID NO: 379520 - RNA, 32 nt, Homo Sapiens
ucuacaaaaaauuuaaaaauuaaccaugugug

SEQ ID NO: 379521 - RNA, 32 nt, Homo Sapiens
ccccuuuuugcugacaaaaagaagagcaagag

SEQ ID NO: 379522 - RNA, 32 nt, Homo Sapiens
acaaauuccaaauauaauuucaucuguaaaua

SEQ ID NO: 379523 - RNA, 32 nt, Homo Sapiens
ccuguggcccccacccaccuggauucccuguu

SEQ ID NO: 379524 - RNA, 32 nt, Homo Sapiens
ggggcacuuucugccacaguagaacacagaca

SEQ ID NO: 379525 - RNA, 32 nt, Homo Sapiens
acugucaaggccagguagccggcugcccucug

SEQ ID NO: 379526 - RNA, 32 nt, Homo Sapiens
cgccaggcaaaagaagaggaaggaauuuaauc

SEQ ID NO: 379527 - RNA, 32 nt, Homo Sapiens
auccuacaaaacaaaaaaaugcuuauuuuuac

SEQ ID NO: 379528 - RNA, 32 nt, Homo Sapiens
acauauuuuaaauucuaaaagcauacacaaug

SEQ ID NO: 379529 - RNA, 32 nt, Homo Sapiens
gaggaacugaguacaguggacaauggcuuccg

SEQ ID NO: 379530 - RNA, 32 nt, Homo Sapiens
caaaggugguggccaugguaccggggacuugg

SEQ ID NO: 379531 - RNA, 32 nt, Homo Sapiens
aaagagauaguacuuuuuucaguuaguacuuu

SEQ ID NO: 379532 - RNA, 32 nt, Homo Sapiens
cuggcgcauuggcaugguagaugccacaaugu

SEQ ID NO: 379533 - RNA, 32 nt, Homo Sapiens
cauucauucagcaaguauguacugaacaccaa

SEQ ID NO: 379534 - RNA, 32 nt, Homo Sapiens
acucaggagcuccggugcugcagccgccacga

SEQ ID NO: 379535 - RNA, 32 nt, Homo Sapiens
caggaugaagcagauuaacagaagagugauca

SEQ ID NO: 379536 - RNA, 32 nt, Homo Sapiens
agucagcacuguauauauucuuggaguuugua

SEQ ID NO: 379537 - RNA, 32 nt, Homo Sapiens
auggugucaggaaccaugucaaacccucaccu

SEQ ID NO: 379538 - RNA, 32 nt, Homo Sapiens
ggccagauaugacgcccgcugcucuccgcggu

SEQ ID NO: 379539 - RNA, 32 nt, Homo Sapiens
gcuauaguguauggccgcucuugggaugcaga

SEQ ID NO: 379540 - RNA, 32 nt, Homo Sapiens
uucuauugauucagcuguaauuucaccugaua

SEQ ID NO: 379541 - RNA, 30 nt, Homo Sapiens
cugcaguggggcgggccgccagccccagca

SEQ ID NO: 379542 - RNA, 32 nt, Homo Sapiens
cccuuagcgaugugucccauccguugccuaca

SEQ ID NO: 379543 - RNA, 32 nt, Homo Sapiens
gcauaagcccaacuucugugugccagaaaccg

SEQ ID NO: 379544 - RNA, 32 nt, Homo Sapiens
ggggccaccucuggagguguccugcuguuccu

SEQ ID NO: 379545 - RNA, 32 nt, Homo Sapiens
ccacaagcauguuccugcuuguccuccccaac

SEQ ID NO: 379546 - RNA, 32 nt, Homo Sapiens
ggugccaggguuacagauagauauaucgcuag

SEQ ID NO: 379547 - RNA, 32 nt, Homo Sapiens
uuuuuuuagcauuucuuuuuuauuuuucaauc

SEQ ID NO: 379548 - RNA, 32 nt, Homo Sapiens
cacugcauggucauccuguugaacugugcuca

SEQ ID NO: 379549 - RNA, 32 nt, Homo Sapiens
uggagggguacacugcgccgucccugguggau

SEQ ID NO: 379550 - RNA, 32 nt, Homo Sapiens
acaucagcaucaccagcucccucaccaccaau

SEQ ID NO: 379551 - RNA, 32 nt, Homo Sapiens
uguuguuaauaaaaugaaaugauuacuuuuua

SEQ ID NO: 379552 - RNA, 32 nt, Homo Sapiens
cuaauuuacccaugauauuuuaaagagagaca

SEQ ID NO: 379553 - RNA, 32 nt, Homo Sapiens
uaucuuuuucuuucuuuuuuuaaagugaggag

SEQ ID NO: 379554 - RNA, 32 nt, Homo Sapiens
ggaacucagggugcccuuacccccuccccaga

SEQ ID NO: 379555 - RNA, 32 nt, Homo Sapiens
uuucagcuggagaaagguccacagcacaauga

SEQ ID NO: 379556 - RNA, 32 nt, Homo Sapiens
uugaggaaucagagacccccaacacuacucac

SEQ ID NO: 379557 - RNA, 32 nt, Homo Sapiens
aauucuugguggugugucaccauuccacuaga

SEQ ID NO: 379558 - RNA, 32 nt, Homo Sapiens
gucccugguccuguggucccuccaccuucaaa

SEQ ID NO: 379559 - RNA, 32 nt, Homo Sapiens
ggaaguagugagagaagcugguaauucuggac

SEQ ID NO: 379560 - RNA, 32 nt, Homo Sapiens
gaccuucacuugcagcagugguaaaugcccaa

SEQ ID NO: 379561 - RNA, 32 nt, Homo Sapiens
gcugcuauaaugucauuuucccauucuuccuu

SEQ ID NO: 379562 - RNA, 32 nt, Homo Sapiens
cagcuaauuuuuuguauuugguagagauggag

SEQ ID NO: 379563 - RNA, 32 nt, Homo Sapiens
gaggggauauuguggagaacaugacaggcauu

SEQ ID NO: 379564 - RNA, 32 nt, Homo Sapiens
aaagaguaauucacgcagagccggcuuugcag

SEQ ID NO: 379565 - RNA, 29 nt, Homo Sapiens
cuuuuuaaaugugcagauuuucuauauuu

SEQ ID NO: 379566 - RNA, 32 nt, Homo Sapiens
uagggaaaagaaacuuuuuuuuuuuuuuuaau

SEQ ID NO: 379567 - RNA, 32 nt, Homo Sapiens
ugcaaucugcuguugagucagggcuuucacuu

SEQ ID NO: 379568 - RNA, 32 nt, Homo Sapiens
gucugucuggguguggauuggaugcugggggu

SEQ ID NO: 379569 - RNA, 32 nt, Homo Sapiens
agcccauuucucuccauuuccuccucauuagc

SEQ ID NO: 379570 - RNA, 32 nt, Homo Sapiens
ccagcacuuggcuucgccuggaggaagaagca

SEQ ID NO: 379571 - RNA, 32 nt, Homo Sapiens
uggggucugccaccauccugcugcuguguuuu

SEQ ID NO: 379572 - RNA, 32 nt, Homo Sapiens
acauuuccuaacaauucuguauggaggaaggu

SEQ ID NO: 379573 - RNA, 32 nt, Homo Sapiens
ugguuauguacauuuuaauuuacauguugugu

SEQ ID NO: 379574 - RNA, 30 nt, Homo Sapiens
gaucggaggggcgauggggugguaaugggg

SEQ ID NO: 379575 - RNA, 32 nt, Homo Sapiens
cuggaacuuuuuucuuuuuuuuucagcugaag

SEQ ID NO: 379576 - RNA, 32 nt, Homo Sapiens
auccaucuguguuucccuggaaugggacaggc

SEQ ID NO: 379577 - RNA, 32 nt, Homo Sapiens
uauuggaguuuuugaguuauuuauuuuuacag

SEQ ID NO: 379578 - RNA, 32 nt, Homo Sapiens
acauauuguaaaauaaacauguuuuuuaacaa

SEQ ID NO: 379579 - RNA, 32 nt, Homo Sapiens
agagccaccaaaaaccuucuuagcaggacagc

SEQ ID NO: 379580 - RNA, 32 nt, Homo Sapiens
guucucacagccucccccuuccccucagcagg

SEQ ID NO: 379581 - RNA, 32 nt, Homo Sapiens
uugggagcuggguuuaggccccuggugucuga

SEQ ID NO: 379582 - RNA, 32 nt, Homo Sapiens
guuuggaggggagaggggaagguggcuggccg

SEQ ID NO: 379583 - RNA, 30 nt, Homo Sapiens
cccucccaugcuccuuggcuucugaaggcu

SEQ ID NO: 379584 - RNA, 32 nt, Homo Sapiens
gacaagacacaucaaaaaggggagggaaucua

SEQ ID NO: 379585 - RNA, 32 nt, Homo Sapiens
ggaaggagcuagaaauagaacaauccaucagc

SEQ ID NO: 379586 - RNA, 32 nt, Homo Sapiens
cggggcugagccgggguccagcagccgccgcu

SEQ ID NO: 379587 - RNA, 32 nt, Homo Sapiens
ugcgugcgggcggaggccggcccccgagagcc

SEQ ID NO: 379588 - RNA, 32 nt, Homo Sapiens
agcagaugaugaugaugauccagaauauaauu

SEQ ID NO: 379589 - RNA, 32 nt, Homo Sapiens
uuagaaagaaaauuauauucuguuuauuauga

SEQ ID NO: 379590 - RNA, 32 nt, Homo Sapiens
ccaccucauacacacacaauucaguuaaaaca

SEQ ID NO: 379591 - RNA, 32 nt, Homo Sapiens
ccggggcccucacuggccuccuccagggauga

SEQ ID NO: 379592 - RNA, 32 nt, Homo Sapiens
uaggcgaccggcgggggcacgcggagucccgg

SEQ ID NO: 379593 - RNA, 32 nt, Homo Sapiens
ggccagaggcauccuggauauuagaccuauua

SEQ ID NO: 379594 - RNA, 32 nt, Homo Sapiens
ggauuauugcacccgcauggcuccaccaaggc

SEQ ID NO: 379595 - RNA, 32 nt, Homo Sapiens
agacacuggcauuucagugggauuguaagcau

SEQ ID NO: 379596 - RNA, 30 nt, Homo Sapiens
caggcccaugcucggcugucuucaaguccc

SEQ ID NO: 379597 - RNA, 32 nt, Homo Sapiens
uagaacaaggacccuggcauggcauacagaca

SEQ ID NO: 379598 - RNA, 32 nt, Homo Sapiens
cagucucgcucuuucacccaggccggacugca

SEQ ID NO: 379599 - RNA, 32 nt, Homo Sapiens
cuagaggaagaggacgaggccuuguuggcacu

SEQ ID NO: 379600 - RNA, 32 nt, Homo Sapiens
aguccuggugcucuccuuucccgggguccugg

SEQ ID NO: 379601 - RNA, 32 nt, Homo Sapiens
caggcuggggagagaagggugaccaggcgagg

SEQ ID NO: 379602 - RNA, 32 nt, Homo Sapiens
aaacacaggcuucaugggcuguggccucugca

SEQ ID NO: 379603 - RNA, 32 nt, Homo Sapiens
ugcccuuggcuucuccucccucuacucagccu

SEQ ID NO: 379604 - RNA, 32 nt, Homo Sapiens
ucgcuuggcuuacuugcaaaauccacaugcau

SEQ ID NO: 379605 - RNA, 32 nt, Homo Sapiens
uucgcaguggggagaagugcuggguaacuggc

SEQ ID NO: 379606 - RNA, 32 nt, Homo Sapiens
ugugcugccccgagggaccuggagcaccuggg

SEQ ID NO: 379607 - RNA, 32 nt, Homo Sapiens
aacgcguccgccccggcccgcaccauggcacg

SEQ ID NO: 379608 - RNA, 32 nt, Homo Sapiens
ggcuacuacaguguuuuaaaaaguguuucaga

SEQ ID NO: 379609 - RNA, 32 nt, Homo Sapiens
agcguuugcgcggcggcugcgcgucucucucg

SEQ ID NO: 379610 - RNA, 32 nt, Homo Sapiens
acgcugaccccuccgcgccucccugaagccgu

SEQ ID NO: 379611 - RNA, 32 nt, Homo Sapiens
cagggcugcuucuuuuggcucucugacagcca

SEQ ID NO: 379612 - RNA, 32 nt, Homo Sapiens
aacaacaggaccagcgauggcucucccugcug

SEQ ID NO: 379613 - RNA, 32 nt, Homo Sapiens
uucugaaaaugaaucuccugaauuauuaucuu

SEQ ID NO: 379614 - RNA, 32 nt, Homo Sapiens
uucuuauguccacccuuuuaaaaauuauuauu

SEQ ID NO: 379615 - RNA, 32 nt, Homo Sapiens
gcacacagugauuguaugcaugccuuuuggua

SEQ ID NO: 379616 - RNA, 32 nt, Homo Sapiens
guuuaauuuguugcuaaagaaauaaugcccug

SEQ ID NO: 379617 - RNA, 32 nt, Homo Sapiens
aaucacaucucagugcccagaauggggaccaa

SEQ ID NO: 379618 - RNA, 32 nt, Homo Sapiens
aauaaaacauugauugauacaagauaaauagu

SEQ ID NO: 379619 - RNA, 29 nt, Homo Sapiens
cuccuuuguagacagagggccacggcugc

SEQ ID NO: 379620 - RNA, 32 nt, Homo Sapiens
auugauuuaaacaauucgacagaggcucuagu

SEQ ID NO: 379621 - RNA, 32 nt, Homo Sapiens
gaggaggccggggcgggagugggggcugucac

SEQ ID NO: 379622 - RNA, 32 nt, Homo Sapiens
ggugccccccaagcccuaucugaugggcaaag

SEQ ID NO: 379623 - RNA, 32 nt, Homo Sapiens
uucaaagccaauacucuuaauaaaguguugca

SEQ ID NO: 379624 - RNA, 32 nt, Homo Sapiens
agccugggcugcuccuccugcucuggggaguc

SEQ ID NO: 379625 - RNA, 32 nt, Homo Sapiens
auuacagaaaaauaccauuaaggggaacccuc

SEQ ID NO: 379626 - RNA, 32 nt, Homo Sapiens
ugaaucagucacuacuggaacugcacaaacug

SEQ ID NO: 379627 - RNA, 32 nt, Homo Sapiens
aaucuuaaaaacaggaaaaacccaaaggagag

SEQ ID NO: 379628 - RNA, 32 nt, Homo Sapiens
cuucuggcggcaccucccgggugcuguguuga

SEQ ID NO: 379629 - RNA, 28 nt, Homo Sapiens
gcuaugucgagcucacccgugaagcguc

SEQ ID NO: 379630 - RNA, 32 nt, Homo Sapiens
ccaggaaguuuuucuuuuuuauauuuaaaaug

SEQ ID NO: 379631 - RNA, 32 nt, Homo Sapiens
ugugccaaggaauuaaucuugguuucacuaca

SEQ ID NO: 379632 - RNA, 32 nt, Homo Sapiens
ccugggcgccggcaguucggcugcugguguuu

SEQ ID NO: 379633 - RNA, 32 nt, Homo Sapiens
ucaaagaaaaacccuguaaauguaauaaauuu

SEQ ID NO: 379634 - RNA, 32 nt, Homo Sapiens
auuuggacaacaaaaaacuagaaauaacacuc

SEQ ID NO: 379635 - RNA, 32 nt, Homo Sapiens
aacaacgucgaucauuuggggauuguacaagu

SEQ ID NO: 379636 - RNA, 32 nt, Homo Sapiens
uaaaauugguguccucauaacuuuaacaaaga

SEQ ID NO: 379637 - RNA, 32 nt, Homo Sapiens
cugcccagcccgacccugccccggccccacuu

SEQ ID NO: 379638 - RNA, 32 nt, Homo Sapiens
acugcuuccuguuucgucugguaacuccuaag

SEQ ID NO: 379639 - RNA, 32 nt, Homo Sapiens
cuauaauacaucuuagauuccuuauaucuaau

SEQ ID NO: 379640 - RNA, 32 nt, Homo Sapiens
aagugucucuagauggaugugaacuccuuaac

SEQ ID NO: 379641 - RNA, 32 nt, Homo Sapiens
acagaccugcauucaaccaacuguaaugcagg

SEQ ID NO: 379642 - RNA, 32 nt, Homo Sapiens
caucccgcaucgcuguuggaccucugagacuu

SEQ ID NO: 379643 - RNA, 32 nt, Homo Sapiens
ccaggaauugucuccaacuccaggcgcucagg

SEQ ID NO: 379644 - RNA, 32 nt, Homo Sapiens
cuuguucuaagcuaauauauagcaauuaaaaa

SEQ ID NO: 379645 - RNA, 32 nt, Homo Sapiens
ugggugagagagugagacacugucccaaggaa

SEQ ID NO: 379646 - RNA, 32 nt, Homo Sapiens
uuucucuauuuuucuuuuuuuccuucuuuuuu

SEQ ID NO: 379647 - RNA, 32 nt, Homo Sapiens
ugacaaaaaggugcuacgguagugaugaaauu

SEQ ID NO: 379648 - RNA, 32 nt, Homo Sapiens
ggcaauuccugguccuauucucugcuuuauuu

SEQ ID NO: 379649 - RNA, 32 nt, Homo Sapiens
caguaccucccuccccuccccuccagcauggu

SEQ ID NO: 379650 - RNA, 32 nt, Homo Sapiens
uuuuuuggagacggagucucgcucagcugccc

SEQ ID NO: 379651 - RNA, 32 nt, Homo Sapiens
agccgggcggcgccucagcugcacugcgcgga

SEQ ID NO: 379652 - RNA, 32 nt, Homo Sapiens
auacuaaauauauaauacagagguaguaaagc

SEQ ID NO: 379653 - RNA, 32 nt, Homo Sapiens
gucaugaggcuguggccaugggugcuggugug

SEQ ID NO: 379654 - RNA, 32 nt, Homo Sapiens
aaggagggugagaggagcaaagaagccaugac

SEQ ID NO: 379655 - RNA, 32 nt, Homo Sapiens
aguuuaaaauuccagaauuuguuauugccaua

SEQ ID NO: 379656 - RNA, 32 nt, Homo Sapiens
aaagguuuaaauuuauaguugugaacauugcu

SEQ ID NO: 379657 - RNA, 32 nt, Homo Sapiens
ugaugaauugccagaggggaaccaccagcucg

SEQ ID NO: 379658 - RNA, 32 nt, Homo Sapiens
ccacuugaaagagcuuucuuuagccaaggucu

SEQ ID NO: 379659 - RNA, 32 nt, Homo Sapiens
ggccgagggcgggcggacgcgggagcugcgga

SEQ ID NO: 379660 - RNA, 32 nt, Homo Sapiens
gcccgccgcgugagaggacgggcuccgcgcgc

SEQ ID NO: 379661 - RNA, 32 nt, Homo Sapiens
aauaacaggcaaaaggaagcaggguugguuuc

SEQ ID NO: 379662 - RNA, 32 nt, Homo Sapiens
acaaauuguccccaagccuauauguauuaaaa

SEQ ID NO: 379663 - RNA, 32 nt, Homo Sapiens
gguggguauucuccccaauaaagacuuagagc

SEQ ID NO: 379664 - RNA, 30 nt, Homo Sapiens
uuucuaggcaggccacuggcaucugaauuc

SEQ ID NO: 379665 - RNA, 32 nt, Homo Sapiens
uaauuuugauaaaauuaacacaaaaucaguca

SEQ ID NO: 379666 - RNA, 32 nt, Homo Sapiens
ugcuguuccaccaaauacaauucaaaugcuuu

SEQ ID NO: 379667 - RNA, 32 nt, Homo Sapiens
gaguugggggccugggguucugguuaggaauu

SEQ ID NO: 379668 - RNA, 32 nt, Homo Sapiens
cauaaaagugauucuuuuuuugugacuagaaa

SEQ ID NO: 379669 - RNA, 32 nt, Homo Sapiens
ucuucuccaagcauaaaggacuggugggcagc

SEQ ID NO: 379670 - RNA, 32 nt, Homo Sapiens
acuguaauggugcuauuaacaaacagucaaca

SEQ ID NO: 379671 - RNA, 32 nt, Homo Sapiens
uuguguuacauacauagcugcaagcaaaccau

SEQ ID NO: 379672 - RNA, 32 nt, Homo Sapiens
uggauggccgcuguccggcagcugcucuuugu

SEQ ID NO: 379673 - RNA, 32 nt, Homo Sapiens
ugacuuuccuuccuuccccucccagguugcug

SEQ ID NO: 379674 - RNA, 32 nt, Homo Sapiens
guccagauguguuugugucaccugcugcaacg

SEQ ID NO: 379675 - RNA, 32 nt, Homo Sapiens
gcggcgcauaacuucguauagcauacauuaua

SEQ ID NO: 379676 - RNA, 30 nt, Homo Sapiens
aacaauugguuaaugggggagccuaauugg

SEQ ID NO: 379677 - RNA, 32 nt, Homo Sapiens
aaacaaggugucgccguccaaauguacugucc

SEQ ID NO: 379678 - RNA, 32 nt, Homo Sapiens
cccguggcguuaccgccaccuugccucggggg

SEQ ID NO: 379679 - RNA, 32 nt, Homo Sapiens
uuuccucuauuuuuauauccuuuccuguugug

SEQ ID NO: 379680 - RNA, 32 nt, Homo Sapiens
ucaagcauuuuuccuuugaauuacagauaauc

SEQ ID NO: 379681 - RNA, 32 nt, Homo Sapiens
cuuggacgcccagugcuggccuuggaggacgg

SEQ ID NO: 379682 - RNA, 32 nt, Homo Sapiens
ugccccugucuccaguuuuucuccaucuccug

SEQ ID NO: 379683 - RNA, 32 nt, Homo Sapiens
uacagagcauuuuugcagaaauuauguuugaa

SEQ ID NO: 379684 - RNA, 32 nt, Homo Sapiens
caggaacuggugcauggaggcugcugggaccu

SEQ ID NO: 379685 - RNA, 32 nt, Homo Sapiens
acccuaaaacaucucaucugugcaaaaaagag

SEQ ID NO: 379686 - RNA, 32 nt, Homo Sapiens
aauaugugguguucuuuuuuuuacacaagcau

SEQ ID NO: 379687 - RNA, 32 nt, Homo Sapiens
gucacuauaucuucccauuuaacauuguuuuu

SEQ ID NO: 379688 - RNA, 32 nt, Homo Sapiens
ucuucguacucgguuauuaaauggccuagccc

SEQ ID NO: 379689 - RNA, 31 nt, Homo Sapiens
acauauuagugcagccaaguagccucuccug

SEQ ID NO: 379690 - RNA, 32 nt, Homo Sapiens
ggaagaagcaggagggaggguggcuuugcugu

SEQ ID NO: 379691 - RNA, 32 nt, Homo Sapiens
uuaggacacuucugugagaggaccccugcaca

SEQ ID NO: 379692 - RNA, 32 nt, Homo Sapiens
uuuucauuuguuuuguuuuucuuaugaaucag

SEQ ID NO: 379693 - RNA, 32 nt, Homo Sapiens
gagucucggcccggcaugguggcucaugccug

SEQ ID NO: 379694 - RNA, 32 nt, Homo Sapiens
acgggaagggccggcugcggcccgccauguuu

SEQ ID NO: 379695 - RNA, 32 nt, Homo Sapiens
caccgaggggagagggaaaguaagccuguauc

SEQ ID NO: 379696 - RNA, 32 nt, Homo Sapiens
ggaggaaccagcugcaaaucacuuuuuugcuc

SEQ ID NO: 379697 - RNA, 32 nt, Homo Sapiens
uacccggggaggaggaggcgcaggagugagcu

SEQ ID NO: 379698 - RNA, 32 nt, Homo Sapiens
cacguccagcuaauuuuuguauuuucaguaga

SEQ ID NO: 379699 - RNA, 32 nt, Homo Sapiens
cggggcuggcaggagcucucgggcgcccgccu

SEQ ID NO: 379700 - RNA, 32 nt, Homo Sapiens
gggggguggggguggggccacaaaaggaaaac

SEQ ID NO: 379701 - RNA, 32 nt, Homo Sapiens
uuccaggacagagggaacauggauggaucaag

SEQ ID NO: 379702 - RNA, 32 nt, Homo Sapiens
uccauucaagcaugcacauaacuagcagacac

SEQ ID NO: 379703 - RNA, 32 nt, Homo Sapiens
uaugcauugccaaaguuuuuguuagucuugca

SEQ ID NO: 379704 - RNA, 32 nt, Homo Sapiens
gcccgucccguccagcccgggcugcccggcuc

SEQ ID NO: 379705 - RNA, 32 nt, Homo Sapiens
gagcuguccacuggagcagcucauugccagag

SEQ ID NO: 379706 - RNA, 32 nt, Homo Sapiens
ugccauugaagauaaagcuacuguauauaaga

SEQ ID NO: 379707 - RNA, 32 nt, Homo Sapiens
aaagauuuuaaaguacuucucuagucauugaa

SEQ ID NO: 379708 - RNA, 32 nt, Homo Sapiens
ucagaaggaaaacagcccgugaucuucuacca

SEQ ID NO: 379709 - RNA, 32 nt, Homo Sapiens
cugcguucugucgaggaagccacgcguaggua

SEQ ID NO: 379710 - RNA, 32 nt, Homo Sapiens
ggugcgaggggagcaggacgcccggccgggca

SEQ ID NO: 379711 - RNA, 32 nt, Homo Sapiens
ggcuuugcuguaaugcuugaaaaggcguuggu

SEQ ID NO: 379712 - RNA, 32 nt, Homo Sapiens
aggaagagucagaggggugaccagagagccca

SEQ ID NO: 379713 - RNA, 32 nt, Homo Sapiens
cguauggccuggcccagggugccguagcugag

SEQ ID NO: 379714 - RNA, 32 nt, Homo Sapiens
aagaccagaaaagauggggcgggguuaagaca

SEQ ID NO: 379715 - RNA, 32 nt, Homo Sapiens
uaccgguucuucccuugccucaugcuggggua

SEQ ID NO: 379716 - RNA, 32 nt, Homo Sapiens
uggaacccggaagcggcagcgcggcgcgaccc

SEQ ID NO: 379717 - RNA, 32 nt, Homo Sapiens
acugugaaauccaucagaugugccaaauggag

SEQ ID NO: 379718 - RNA, 29 nt, Homo Sapiens
ccagucauaaacguuuauuuucuuuugga

SEQ ID NO: 379719 - RNA, 32 nt, Homo Sapiens
accaguuguuaaauaaauaauuuuuaaaaucu

SEQ ID NO: 379720 - RNA, 32 nt, Homo Sapiens
ugggagaauggggaaaguuguggggacaguga

SEQ ID NO: 379721 - RNA, 32 nt, Homo Sapiens
ugucugguuucacuucguguguuuccuaaaca

SEQ ID NO: 379722 - RNA, 32 nt, Homo Sapiens
gggcuuagccugggcuuuucuggugugggucc

SEQ ID NO: 379723 - RNA, 32 nt, Homo Sapiens
auuaugaugauuacgauguugauuauaacauu

SEQ ID NO: 379724 - RNA, 32 nt, Homo Sapiens
guucuccacauuuguccugacucuucagguga

SEQ ID NO: 379725 - RNA, 32 nt, Homo Sapiens
cucauggugucauggguggaugccuggacucc

SEQ ID NO: 379726 - RNA, 32 nt, Homo Sapiens
cugugccaggacuaccagggcggcacgcuggc

SEQ ID NO: 379727 - RNA, 32 nt, Homo Sapiens
guccugcccugcugguggccugccgggccugg

SEQ ID NO: 379728 - RNA, 32 nt, Homo Sapiens
agagcgcaggccugggcgaggcggcggcgggc

SEQ ID NO: 379729 - RNA, 32 nt, Homo Sapiens
accaccaccgucugcuugguggccgcugcccu

SEQ ID NO: 379730 - RNA, 32 nt, Homo Sapiens
uuagaaacaauuaugacgguccugucauugcu

SEQ ID NO: 379731 - RNA, 32 nt, Homo Sapiens
agcucagcacgguggcaauuucccuccagaca

SEQ ID NO: 379732 - RNA, 32 nt, Homo Sapiens
ggauauuaauuucaaggggaguugaaauagug

SEQ ID NO: 379733 - RNA, 32 nt, Homo Sapiens
guggaaggaccccuugaauccaagaccaguca

SEQ ID NO: 379734 - RNA, 32 nt, Homo Sapiens
ugcuggucucuauacuggagaagugacugaaa

SEQ ID NO: 379735 - RNA, 32 nt, Homo Sapiens
ugggauguagcggugaagaguacagauguaaa

SEQ ID NO: 379736 - RNA, 32 nt, Homo Sapiens
accacaauaaaugcaaaaaauaaaaagucugu

SEQ ID NO: 379737 - RNA, 32 nt, Homo Sapiens
cauuauguaaauacuucuuuucaccaacuucu

SEQ ID NO: 379738 - RNA, 32 nt, Homo Sapiens
gagauguucagcuucaguccccggcccuaugg

SEQ ID NO: 379739 - RNA, 32 nt, Homo Sapiens
gcacuucucgcacauccucacguggcccuuau

SEQ ID NO: 379740 - RNA, 32 nt, Homo Sapiens
ccucccuccagcaagcccucccugcccagaag

SEQ ID NO: 379741 - RNA, 30 nt, Homo Sapiens
gcguuggauaaaaugauugaugaggcaggc

SEQ ID NO: 379742 - RNA, 32 nt, Homo Sapiens
uuuacuauuugggcucugaaauaaaaauuaug

SEQ ID NO: 379743 - RNA, 32 nt, Homo Sapiens
uugaguuucccauuuuaaaaucuaaacuagac

SEQ ID NO: 379744 - RNA, 32 nt, Homo Sapiens
aaggcaaaauuccguaauguugagaauuauuu

SEQ ID NO: 379745 - RNA, 32 nt, Homo Sapiens
gccucccuugcugaugccaggaucucggcgca

SEQ ID NO: 379746 - RNA, 32 nt, Homo Sapiens
aagaccaauacagauagcaugaagccaacuga

SEQ ID NO: 379747 - RNA, 32 nt, Homo Sapiens
cggccacugcgcacgcgcgggacgacgucacg

SEQ ID NO: 379748 - RNA, 32 nt, Homo Sapiens
agucugcccuccccucucccccaggcucuuuc

SEQ ID NO: 379749 - RNA, 32 nt, Homo Sapiens
ccagaguaauuggaguuuuucuuuaaaaaaaa

SEQ ID NO: 379750 - RNA, 32 nt, Homo Sapiens
aacauaaaauuugcaagaaaauguagaaauua

SEQ ID NO: 379751 - RNA, 32 nt, Homo Sapiens
uuccuucaacugagugcugcacaucaugggcu

SEQ ID NO: 379752 - RNA, 32 nt, Homo Sapiens
agucggauuugucagaugaagagcuaaaugau

SEQ ID NO: 379753 - RNA, 32 nt, Homo Sapiens
ugugaaagagggugccucuacaguguugguga

SEQ ID NO: 379754 - RNA, 32 nt, Homo Sapiens
ggacucgaacuuaagcucuugcucuuaggcug

SEQ ID NO: 379755 - RNA, 32 nt, Homo Sapiens
ggauuuggagacgggguuggggugcuucuccg

SEQ ID NO: 379756 - RNA, 32 nt, Homo Sapiens
uuucuuuucuuuucuuuuuuuuuaaagcgggg

SEQ ID NO: 379757 - RNA, 32 nt, Homo Sapiens
gacacuuaauauuuuuuaauuacaauggaaau

SEQ ID NO: 379758 - RNA, 32 nt, Homo Sapiens
aacaaaaaccauguuucuuuuucuuguauaac

SEQ ID NO: 379759 - RNA, 32 nt, Homo Sapiens
gggcuggcccaucauggccacggaguaagucg

SEQ ID NO: 379760 - RNA, 32 nt, Homo Sapiens
ggacccggccccaccccgaauaccccggccac

SEQ ID NO: 379761 - RNA, 32 nt, Homo Sapiens
cuguuggagaaccagcugggaguggcaggagc

SEQ ID NO: 379762 - RNA, 32 nt, Homo Sapiens
caccucccucccugccugccagcccuagacuu

SEQ ID NO: 379763 - RNA, 32 nt, Homo Sapiens
cgaccauccuggcuaacagugaaacccugucu

SEQ ID NO: 379764 - RNA, 32 nt, Homo Sapiens
uggguuacaaauacaucagauaucgagcaaau

SEQ ID NO: 379765 - RNA, 32 nt, Homo Sapiens
acucaggucuacaggcucuuagaacuagaacu

SEQ ID NO: 379766 - RNA, 32 nt, Homo Sapiens
aauucauuaaaauaaauuuacauuauagugcc

SEQ ID NO: 379767 - RNA, 32 nt, Homo Sapiens
uucacagacaccucuccugucuucagcacaaa

SEQ ID NO: 379768 - RNA, 32 nt, Homo Sapiens
cccagcaccgcggagcugcacugcacaccugu

SEQ ID NO: 379769 - RNA, 32 nt, Homo Sapiens
ucccaugcagccgaggcccgggccccucagga

SEQ ID NO: 379770 - RNA, 32 nt, Homo Sapiens
cgggacccucaggcccgggcccaccgccccca

SEQ ID NO: 379771 - RNA, 32 nt, Homo Sapiens
aggaaacaugucgagaucaggcuuccugcuug

SEQ ID NO: 379772 - RNA, 32 nt, Homo Sapiens
gcgcccgccccgaggccccgaagaggccuucc

SEQ ID NO: 379773 - RNA, 30 nt, Homo Sapiens
gcguaggcgcccgccgcaggccaugcugcc

SEQ ID NO: 379774 - RNA, 32 nt, Homo Sapiens
ucauaccauucccauuuucucagccucuucuc

SEQ ID NO: 379775 - RNA, 32 nt, Homo Sapiens
ccauccauguugcugcaaaagacauuaucuca

SEQ ID NO: 379776 - RNA, 30 nt, Homo Sapiens
acgcgguucugugcuauaggagucucccgu

SEQ ID NO: 379777 - RNA, 32 nt, Homo Sapiens
ugccacagaaaaugagcugcucugccagcaag

SEQ ID NO: 379778 - RNA, 32 nt, Homo Sapiens
augcaauuucccuuuuuuaacccacauuacuu

SEQ ID NO: 379779 - RNA, 32 nt, Homo Sapiens
ccuccccaaagaaaagauuugcugcugaccau

SEQ ID NO: 379780 - RNA, 32 nt, Homo Sapiens
uucuuuuccuuccuuuuaaucaaaacuacccg

SEQ ID NO: 379781 - RNA, 32 nt, Homo Sapiens
cugaaugcccccggccccggcuccuccgacgc

SEQ ID NO: 379782 - RNA, 32 nt, Homo Sapiens
ccucaaaugacccaaagaccaauauucaaaug

SEQ ID NO: 379783 - RNA, 32 nt, Homo Sapiens
gacaauucaaggaccagccuuuuuaccacugc

SEQ ID NO: 379784 - RNA, 32 nt, Homo Sapiens
acacaguuccugagcuggugccaggcagguga

SEQ ID NO: 379785 - RNA, 30 nt, Homo Sapiens
cuucugagaagaauggagauuuacagacag

SEQ ID NO: 379786 - RNA, 32 nt, Homo Sapiens
uuuaauuuaguagaugggaaaauugacuucgu

SEQ ID NO: 379787 - RNA, 32 nt, Homo Sapiens
ggauaacauuuuaauuugaagguuuggaauau

SEQ ID NO: 379788 - RNA, 32 nt, Homo Sapiens
gaaaaacaaaaaugaugaaucaagagugauuu

SEQ ID NO: 379789 - RNA, 30 nt, Homo Sapiens
auuacucuggacuuuauuguccuguuucua

SEQ ID NO: 379790 - RNA, 32 nt, Homo Sapiens
gcaucccggggcuccccacgggcuggaugacg

SEQ ID NO: 379791 - RNA, 32 nt, Homo Sapiens
ugcgauugagcugcgggucgcggccggcgccg

SEQ ID NO: 379792 - RNA, 32 nt, Homo Sapiens
gcaauaaaaaauacaccccuaaaucuaugugu

SEQ ID NO: 379793 - RNA, 32 nt, Homo Sapiens
gguggagaguuccauagaugucuguuaggucc

SEQ ID NO: 379794 - RNA, 32 nt, Homo Sapiens
aggcagcagguggcagaauggggugcaugaag

SEQ ID NO: 379795 - RNA, 32 nt, Homo Sapiens
gcccauaucuuuucuuuuuuaucuuccuuagu

SEQ ID NO: 379796 - RNA, 32 nt, Homo Sapiens
guucaacauggaaaugauccugauugacuaau

SEQ ID NO: 379797 - RNA, 32 nt, Homo Sapiens
caaugaaauuugaguucucccaacauauacau

SEQ ID NO: 379798 - RNA, 32 nt, Homo Sapiens
ggagccaucucuaaaacaaaccucaagggauu

SEQ ID NO: 379799 - RNA, 32 nt, Homo Sapiens
auacugugugguauaacaggcuuaauaaauuc

SEQ ID NO: 379800 - RNA, 32 nt, Homo Sapiens
gugaggcucccucccucccugcucccugcucc

SEQ ID NO: 379801 - RNA, 31 nt, Homo Sapiens
cugugagaggagaaagaguccacuccaggac

SEQ ID NO: 379802 - RNA, 32 nt, Homo Sapiens
gcuucagccagggccagugcuccuaaacugag

SEQ ID NO: 379803 - RNA, 32 nt, Homo Sapiens
caugaugguauguagaagggucugucagcaca

SEQ ID NO: 379804 - RNA, 32 nt, Homo Sapiens
uaaaccacuuagaugcugggguugccacagcc

SEQ ID NO: 379805 - RNA, 32 nt, Homo Sapiens
aauuuaugugguuuuuauacauuuuuuaauaa

SEQ ID NO: 379806 - RNA, 32 nt, Homo Sapiens
agagagccaaacuuguagaggugggcagucca

SEQ ID NO: 379807 - RNA, 32 nt, Homo Sapiens
cugugacuggccuugucuucuagggcagggac

SEQ ID NO: 379808 - RNA, 32 nt, Homo Sapiens
cuuauccugugcuuguaaauaaauaaggucau

SEQ ID NO: 379809 - RNA, 32 nt, Homo Sapiens
guaguuuuuaauguggggguagagugggucag

SEQ ID NO: 379810 - RNA, 32 nt, Homo Sapiens
agcccuggagacggcgcuccuagccgcaccug

SEQ ID NO: 379811 - RNA, 32 nt, Homo Sapiens
agccaaacggcauugaaguugaagauacaacc

SEQ ID NO: 379812 - RNA, 32 nt, Homo Sapiens
gcgguguuucuuaauguuugcacaaauuuccu

SEQ ID NO: 379813 - RNA, 32 nt, Homo Sapiens
auaguuuuacuucuuucuuucugauuuggaug

SEQ ID NO: 379814 - RNA, 32 nt, Homo Sapiens
ucaaaagaaaaauaaacauaaaaaauaaguug

SEQ ID NO: 379815 - RNA, 32 nt, Homo Sapiens
gaguggaaugggaagggaauggucaaucccug

SEQ ID NO: 379816 - RNA, 32 nt, Homo Sapiens
uucugguagaaggcgggguucuccucguacgc

SEQ ID NO: 379817 - RNA, 32 nt, Homo Sapiens
acucuggcaggccaggguaucaucugcgugcu

SEQ ID NO: 379818 - RNA, 32 nt, Homo Sapiens
caugguuuuacaccccacccuaccuuagggaa

SEQ ID NO: 379819 - RNA, 32 nt, Homo Sapiens
aaauagguauucuccucauuuugugaaagaaa

SEQ ID NO: 379820 - RNA, 32 nt, Homo Sapiens
cacucugcccagcugcccuccccucgccccuu

SEQ ID NO: 379821 - RNA, 32 nt, Homo Sapiens
gauaugcuugauaugcuuuuccuuccacaugu

SEQ ID NO: 379822 - RNA, 32 nt, Homo Sapiens
aauuguuucuucauuaaaugcagccugagaua

SEQ ID NO: 379823 - RNA, 32 nt, Homo Sapiens
uguggugccgggccuccuggggagcagccugg

SEQ ID NO: 379824 - RNA, 32 nt, Homo Sapiens
guauaauucagaucauauuagcuuguugcuga

SEQ ID NO: 379825 - RNA, 32 nt, Homo Sapiens
cuucuucuucuuccuuaaagacauuuaagcua

SEQ ID NO: 379826 - RNA, 32 nt, Homo Sapiens
guucauuucuuugccaauugaucuaagcauag

SEQ ID NO: 379827 - RNA, 32 nt, Homo Sapiens
uaguaaugugggccaaugcauuuuggaaaugu

SEQ ID NO: 379828 - RNA, 32 nt, Homo Sapiens
ugucucccacccaccccaucuuugcugggauu

SEQ ID NO: 379829 - RNA, 32 nt, Homo Sapiens
cuaucgggucauuugggaaugggcaggauacu

SEQ ID NO: 379830 - RNA, 32 nt, Homo Sapiens
uggauguuggaacaccuggucuugcugcuucc

SEQ ID NO: 379831 - RNA, 32 nt, Homo Sapiens
cauauguguaugcauguauacgcccauacaga

SEQ ID NO: 379832 - RNA, 32 nt, Homo Sapiens
acauuucguugcuucauaacaccugggagggg

SEQ ID NO: 379833 - RNA, 32 nt, Homo Sapiens
aaaugcugcauaaucucacuguggaaucuuaa

SEQ ID NO: 379834 - RNA, 32 nt, Homo Sapiens
cagcaggcaccaagcugccagaagcccagggg

SEQ ID NO: 379835 - RNA, 32 nt, Homo Sapiens
ggguccuggcugcagagcugucugcuccccac

SEQ ID NO: 379836 - RNA, 32 nt, Homo Sapiens
ccguguuccuuccuggucaguucccccagcua

SEQ ID NO: 379837 - RNA, 32 nt, Homo Sapiens
ugguccuucucccucccacaggccuguguucu

SEQ ID NO: 379838 - RNA, 32 nt, Homo Sapiens
acuucaguagcaugugaaaaaauacaucuuau

SEQ ID NO: 379839 - RNA, 30 nt, Homo Sapiens
uccucguccugugcugcgggcucaggcgga

SEQ ID NO: 379840 - RNA, 32 nt, Homo Sapiens
cugauccggcugcuccuccagcccuucagacg

SEQ ID NO: 379841 - RNA, 32 nt, Homo Sapiens
uuuccucuccaacuccucuuuggccauugucu

SEQ ID NO: 379842 - RNA, 32 nt, Homo Sapiens
cuugcuaguauuuuaaauaugucuuuaacaca

SEQ ID NO: 379843 - RNA, 32 nt, Homo Sapiens
caacuuuuauagaaauacaaagccauuacuuu

SEQ ID NO: 379844 - RNA, 32 nt, Homo Sapiens
cagguuuauagagauguauauagaauuauagu

SEQ ID NO: 379845 - RNA, 32 nt, Homo Sapiens
cauuuuuauuuuuucuauaaauugcaauuggu

SEQ ID NO: 379846 - RNA, 32 nt, Homo Sapiens
auauauauuguuaaauccuuugcuucauucca

SEQ ID NO: 379847 - RNA, 32 nt, Homo Sapiens
cagccagcgcgccuagcggcggccccaaccgg

SEQ ID NO: 379848 - RNA, 32 nt, Homo Sapiens
ccguguuuccaagucagcuuuccugcaagaag

SEQ ID NO: 379849 - RNA, 32 nt, Homo Sapiens
ugacacuggaugacgaccuggauacuuagaaa

SEQ ID NO: 379850 - RNA, 32 nt, Homo Sapiens
ccaccccaacucagaguuaagcauacauggca

SEQ ID NO: 379851 - RNA, 32 nt, Homo Sapiens
gagcccgggagguaauugggggugaggaagau

SEQ ID NO: 379852 - RNA, 32 nt, Homo Sapiens
cacuccccaacccccaacuccgugugguaagc

SEQ ID NO: 379853 - RNA, 32 nt, Homo Sapiens
guugccaagguagagagcugcccgcuccugcc

SEQ ID NO: 379854 - RNA, 32 nt, Homo Sapiens
uugcagcaagcacucuccuacucccuguccau

SEQ ID NO: 379855 - RNA, 32 nt, Homo Sapiens
ucaguacccaaguuugcaaguaaaaauuagca

SEQ ID NO: 379856 - RNA, 32 nt, Homo Sapiens
ucuuuaucaaccccaagccccacuuccucccu

SEQ ID NO: 379857 - RNA, 32 nt, Homo Sapiens
ugaagggaguaagggauugcugagauuuguua

SEQ ID NO: 379858 - RNA, 32 nt, Homo Sapiens
aauguuuacccauucagccagaauuuaaaucc

SEQ ID NO: 379859 - RNA, 32 nt, Homo Sapiens
auaaauugcagauacuauaacacaucacaucu

SEQ ID NO: 379860 - RNA, 32 nt, Homo Sapiens
acagcacagccuaaggacaauuuuaaacaaaa

SEQ ID NO: 379861 - RNA, 32 nt, Homo Sapiens
agggaaaggggaggagaugggacuuugaccac

SEQ ID NO: 379862 - RNA, 32 nt, Homo Sapiens
ggauauugcauucuguccucacugucuugagg

SEQ ID NO: 379863 - RNA, 32 nt, Homo Sapiens
aaacagaaauuccagagaugucuuaaacauug

SEQ ID NO: 379864 - RNA, 32 nt, Homo Sapiens
aaagcaaaauaaugaauggccacugugaaaaa

SEQ ID NO: 379865 - RNA, 32 nt, Homo Sapiens
cggcuaagcucuggcaucaucaucccagaaca

SEQ ID NO: 379866 - RNA, 32 nt, Homo Sapiens
cacuggcgggcucgcguguguacauagagacc

SEQ ID NO: 379867 - RNA, 28 nt, Homo Sapiens
gccauggacgagcaggcgggucccggcg

SEQ ID NO: 379868 - RNA, 32 nt, Homo Sapiens
uguuguuauuuuuguugcuucuuucagugagg

SEQ ID NO: 379869 - RNA, 32 nt, Homo Sapiens
ucccccggccgugccccucccccguggagccg

SEQ ID NO: 379870 - RNA, 32 nt, Homo Sapiens
guugauuccuagagguggaauccauuaaacug

SEQ ID NO: 379871 - RNA, 32 nt, Homo Sapiens
aauaaaauauuuuaagcaauuguggaaauaaa

SEQ ID NO: 379872 - RNA, 32 nt, Homo Sapiens
cgcucugccugccauggacuaauuguucugaa

SEQ ID NO: 379873 - RNA, 32 nt, Homo Sapiens
agagucuucccucagcuuuguacaucagcacu

SEQ ID NO: 379874 - RNA, 32 nt, Homo Sapiens
gaaauuugcuguuguauuacuuauucuuugcc

SEQ ID NO: 379875 - RNA, 32 nt, Homo Sapiens
uaagggucuugcucaugguuacacagacacug

SEQ ID NO: 379876 - RNA, 32 nt, Homo Sapiens
ccaguccgagguuggauauuguucaaaugagc

SEQ ID NO: 379877 - RNA, 32 nt, Homo Sapiens
ccugcaaugaacugcucccacguccugcacug

SEQ ID NO: 379878 - RNA, 32 nt, Homo Sapiens
uagguauacacacacacacacacacacauaca

SEQ ID NO: 379879 - RNA, 32 nt, Homo Sapiens
gaauauuggccaaggaaaggcacaugucaccu

SEQ ID NO: 379880 - RNA, 30 nt, Homo Sapiens
cagacguggggcgaugcuugugacccugca

SEQ ID NO: 379881 - RNA, 32 nt, Homo Sapiens
guacagcagaacugcaugaucagcuguauggu

SEQ ID NO: 379882 - RNA, 32 nt, Homo Sapiens
uuguuauggggccaccaaauggcugcucuuuc

SEQ ID NO: 379883 - RNA, 32 nt, Homo Sapiens
acuaguugggguuugguggccauguuuucuac

SEQ ID NO: 379884 - RNA, 32 nt, Homo Sapiens
aagaaacugaagauggacucuauuuugugaag

SEQ ID NO: 379885 - RNA, 32 nt, Homo Sapiens
agaagauaauuuccuuuucuagagguacauau

SEQ ID NO: 379886 - RNA, 32 nt, Homo Sapiens
gugaaggagccuguauccacccugcccagucg

SEQ ID NO: 379887 - RNA, 32 nt, Homo Sapiens
gaaugguaauaaugucuaaaucuuuuuccuuu

SEQ ID NO: 379888 - RNA, 32 nt, Homo Sapiens
uugugcagccagccuucuggaagguaggcuuu

SEQ ID NO: 379889 - RNA, 32 nt, Homo Sapiens
uguuacuacauauugagagucauuuuaugcau

SEQ ID NO: 379890 - RNA, 29 nt, Homo Sapiens
agccauggaagagcucacggcuuuuguau

SEQ ID NO: 379891 - RNA, 27 nt, Homo Sapiens
agguuugguuccuucagcccucuaaaa

SEQ ID NO: 379892 - RNA, 32 nt, Homo Sapiens
ggaaagauauuuaauauuuaauacuaagcuuu

SEQ ID NO: 379893 - RNA, 32 nt, Homo Sapiens
ucagaagucagccuacauaacacauuuuuaaa

SEQ ID NO: 379894 - RNA, 32 nt, Homo Sapiens
ucaggcgaccucaggacccugugauuggcgcc

SEQ ID NO: 379895 - RNA, 32 nt, Homo Sapiens
cccacgcugagcgcuccgccugcgacccuccg

SEQ ID NO: 379896 - RNA, 32 nt, Homo Sapiens
uucuguuaucuaaaaauguauaaaaugggaau

SEQ ID NO: 379897 - RNA, 32 nt, Homo Sapiens
uguacuguaucuuauuugaugauauuuauuuu

SEQ ID NO: 379898 - RNA, 32 nt, Homo Sapiens
ucccugaccucccaggcugcggcucagguggc

SEQ ID NO: 379899 - RNA, 32 nt, Homo Sapiens
gauggcuugagcccaggagauugaggcugagg

SEQ ID NO: 379900 - RNA, 32 nt, Homo Sapiens
cccugcagucccagccccgcguggcucgcgcu

SEQ ID NO: 379901 - RNA, 32 nt, Homo Sapiens
gucucuguccuucuccuuccacccgcucccag

SEQ ID NO: 379902 - RNA, 32 nt, Homo Sapiens
ucacagggaaggagauuggaggugauaccagc

SEQ ID NO: 379903 - RNA, 32 nt, Homo Sapiens
augacacaucuucucaccuucguuuuuuauuu

SEQ ID NO: 379904 - RNA, 32 nt, Homo Sapiens
ggguuucuucuuucccaauguauguacgugcc

SEQ ID NO: 379905 - RNA, 30 nt, Homo Sapiens
gucuaucauaaaagaauguuuauguacauu

SEQ ID NO: 379906 - RNA, 31 nt, Homo Sapiens
gauguggggcacugccucacagcucugcaga

SEQ ID NO: 379907 - RNA, 32 nt, Homo Sapiens
cucucggggucuuuccucagccucgaaaacug

SEQ ID NO: 379908 - RNA, 32 nt, Homo Sapiens
gaguccaggaggagagcuggagccgccgcgcu

SEQ ID NO: 379909 - RNA, 28 nt, Homo Sapiens
auacuauaauaaaaguuaugugaaugug

SEQ ID NO: 379910 - RNA, 32 nt, Homo Sapiens
gucucaaaacaaacacaaauacaguauccaaa

SEQ ID NO: 379911 - RNA, 32 nt, Homo Sapiens
ugcccgaggcccagucggggcccuuucugcag

SEQ ID NO: 379912 - RNA, 32 nt, Homo Sapiens
gcuugagggaaguucuccccuugcagacacac

SEQ ID NO: 379913 - RNA, 32 nt, Homo Sapiens
ccugcccugaagaucuuccauuugcuuccacu

SEQ ID NO: 379914 - RNA, 32 nt, Homo Sapiens
cucccagguucaagugauucucuugccucagc

SEQ ID NO: 379915 - RNA, 32 nt, Homo Sapiens
gcugaggcggguggaucacgaggucaggaguu

SEQ ID NO: 379916 - RNA, 32 nt, Homo Sapiens
uugaggcaguugauggaguuaaaccaucugcu

SEQ ID NO: 379917 - RNA, 32 nt, Homo Sapiens
aggaagguacacugaggcuacugcagggucca

SEQ ID NO: 379918 - RNA, 32 nt, Homo Sapiens
auuuuaaagcuacugugauugauagcauugua

SEQ ID NO: 379919 - RNA, 32 nt, Homo Sapiens
cugaguauggaaagaugaacuguugcucucua

SEQ ID NO: 379920 - RNA, 32 nt, Homo Sapiens
gucucagugcaucuccuucuccucucugccug

SEQ ID NO: 379921 - RNA, 32 nt, Homo Sapiens
gagcccccuggcauuucugcaaugcaaauaaa

SEQ ID NO: 379922 - RNA, 32 nt, Homo Sapiens
ccaacucaauuuccacuugaauuuacaaccaa

SEQ ID NO: 379923 - RNA, 32 nt, Homo Sapiens
uucauuuuccccuuauggauauuuaugguagu

SEQ ID NO: 379924 - RNA, 32 nt, Homo Sapiens
gauauuacuucgcuauuaaauaaagaaaauug

SEQ ID NO: 379925 - RNA, 32 nt, Homo Sapiens
uugugacaauuguuuuccucccugccccugga

SEQ ID NO: 379926 - RNA, 32 nt, Homo Sapiens
uggcacagcucagggcacccaggcuggacccc

SEQ ID NO: 379927 - RNA, 31 nt, Homo Sapiens
agcuuugugagacagaaccaaguaaaaggaa

SEQ ID NO: 379928 - RNA, 32 nt, Homo Sapiens
acuuacaauguguucagguaguguuuuauaca

SEQ ID NO: 379929 - RNA, 32 nt, Homo Sapiens
cuuaaacccagggcaucaggaugugcuugggc

SEQ ID NO: 379930 - RNA, 32 nt, Homo Sapiens
gcugcgcggagaccgaggccagcgccccggag

SEQ ID NO: 379931 - RNA, 32 nt, Homo Sapiens
agacccaaguuuccuuucuccuccgccgcaaa

SEQ ID NO: 379932 - RNA, 32 nt, Homo Sapiens
agaccaaagggaggaaaaucggugggaauaaa

SEQ ID NO: 379933 - RNA, 32 nt, Homo Sapiens
gcagaccuagauuggcauaaccagagaucagu

SEQ ID NO: 379934 - RNA, 32 nt, Homo Sapiens
gccgaggcucgcgacugcuggggugggcggag

SEQ ID NO: 379935 - RNA, 32 nt, Homo Sapiens
uugcacacagauuuuacauauuugcagaccaa

SEQ ID NO: 379936 - RNA, 30 nt, Homo Sapiens
ugguggagcggagccugcgcagcgagcugg

SEQ ID NO: 379937 - RNA, 32 nt, Homo Sapiens
cacuguuuucuuuauuuucuuauucauuugcu

SEQ ID NO: 379938 - RNA, 32 nt, Homo Sapiens
cugccuuugacaaaaauccaguuucucuugau

SEQ ID NO: 379939 - RNA, 32 nt, Homo Sapiens
cgaacugcccacggccggcagcgcuuccaggc

SEQ ID NO: 379940 - RNA, 32 nt, Homo Sapiens
caccucacuccagccugggcaacauagugaga

SEQ ID NO: 379941 - RNA, 32 nt, Homo Sapiens
cucccuguuugacuucacacacacucauaacu

SEQ ID NO: 379942 - RNA, 32 nt, Homo Sapiens
agcuuccauggcggccucucagguccuggggg

SEQ ID NO: 379943 - RNA, 32 nt, Homo Sapiens
gccaauauaauuuuuguaagaaggcaguaacc

SEQ ID NO: 379944 - RNA, 32 nt, Homo Sapiens
uuauguauaugauugucuguuuaaguguuuga

SEQ ID NO: 379945 - RNA, 32 nt, Homo Sapiens
auaaaggauggaagucaagaacuuuuuguugu

SEQ ID NO: 379946 - RNA, 32 nt, Homo Sapiens
aaacaagugcaguguggcagcugcugaaucug

SEQ ID NO: 379947 - RNA, 32 nt, Homo Sapiens
ugagcaccuuuaaaauguucguauguguguug

SEQ ID NO: 379948 - RNA, 32 nt, Homo Sapiens
ucuugcacugcccuacacuaccuaccaucucc

SEQ ID NO: 379949 - RNA, 32 nt, Homo Sapiens
acugggagaagaugccuggggguccaggaguc

SEQ ID NO: 379950 - RNA, 32 nt, Homo Sapiens
ccccagguggcccucaggauccucagccaggc

SEQ ID NO: 379951 - RNA, 32 nt, Homo Sapiens
cuguuuugcuuaacccacccaacagccaauuu

SEQ ID NO: 379952 - RNA, 32 nt, Homo Sapiens
agugugugcaggggagcgccucgccagcgguc

SEQ ID NO: 379953 - RNA, 32 nt, Homo Sapiens
cagagagccuccccggucccaacccccucggg

SEQ ID NO: 379954 - RNA, 32 nt, Homo Sapiens
gguucuggguccaucacugccuuacaugugac

SEQ ID NO: 379955 - RNA, 32 nt, Homo Sapiens
uuugcuugcuuacguggacuggggcauggccu

SEQ ID NO: 379956 - RNA, 32 nt, Homo Sapiens
uaucuuucugccaguuacggagacagccucgu

SEQ ID NO: 379957 - RNA, 32 nt, Homo Sapiens
ugacgaggcucuuaucccacuccauuuuuccc

SEQ ID NO: 379958 - RNA, 32 nt, Homo Sapiens
ccgggcgcgggccccugcguaaggugggcgca

SEQ ID NO: 379959 - RNA, 32 nt, Homo Sapiens
ggcuccgagagcggggcgggguugggggcggg

SEQ ID NO: 379960 - RNA, 32 nt, Homo Sapiens
guccucugacauucgagagauggauuuuuugg

SEQ ID NO: 379961 - RNA, 32 nt, Homo Sapiens
acuagaggaaaauaaugaacaaaugaaagugu

SEQ ID NO: 379962 - RNA, 32 nt, Homo Sapiens
agggagaaaaggaagcaaaugagcugauggaa

SEQ ID NO: 379963 - RNA, 32 nt, Homo Sapiens
uuguugugugguuuuuuguuugugauuuuuuu

SEQ ID NO: 379964 - RNA, 30 nt, Homo Sapiens
gcggcagagaagcucugagagccccuuccc

SEQ ID NO: 379965 - RNA, 32 nt, Homo Sapiens
aauacacuuuuugauuaaagcucuucaaucca

SEQ ID NO: 379966 - RNA, 32 nt, Homo Sapiens
aaccuaaaacugcagaaggaucugaaagaucu

SEQ ID NO: 379967 - RNA, 32 nt, Homo Sapiens
uuaaagauaauggcccauuagauacaacagca

SEQ ID NO: 379968 - RNA, 32 nt, Homo Sapiens
ugguguucagcaugcacauuccauaaauaucu

SEQ ID NO: 379969 - RNA, 32 nt, Homo Sapiens
caagcggaaaauuucaaaaauguuucaaauuc

SEQ ID NO: 379970 - RNA, 32 nt, Homo Sapiens
uccagccccguccaguuguucuccugauugac

SEQ ID NO: 379971 - RNA, 32 nt, Homo Sapiens
uguugaaaugucaauugcaggaugcugauguu

SEQ ID NO: 379972 - RNA, 32 nt, Homo Sapiens
aacuuuuccucucgcuucuccuccgucuguuu

SEQ ID NO: 379973 - RNA, 32 nt, Homo Sapiens
caguauuacugaugguacuguuauucauaagu

SEQ ID NO: 379974 - RNA, 32 nt, Homo Sapiens
acaccaugaaaauaaacuugaauaaacugaaa

SEQ ID NO: 379975 - RNA, 32 nt, Homo Sapiens
agugcuaauuaagggagggagcagcggggagc

SEQ ID NO: 379976 - RNA, 32 nt, Homo Sapiens
ugucugacacauagugagugcuccaucaauau

SEQ ID NO: 379977 - RNA, 32 nt, Homo Sapiens
cgcuccggacucccaagucuccgccggacccu

SEQ ID NO: 379978 - RNA, 32 nt, Homo Sapiens
uucaauguaaacacuaaaaacaaaauggacaa

SEQ ID NO: 379979 - RNA, 32 nt, Homo Sapiens
caacucuuuuuguaacaccuuaauuuucucuc

SEQ ID NO: 379980 - RNA, 32 nt, Homo Sapiens
ucaguuuuguaucugcgccgugaggacuuguc

SEQ ID NO: 379981 - RNA, 32 nt, Homo Sapiens
gaaggccagaagaucucaaaagacucuuugaa

SEQ ID NO: 379982 - RNA, 32 nt, Homo Sapiens
cacugaaaccagguggccggcuccucggacuc

SEQ ID NO: 379983 - RNA, 32 nt, Homo Sapiens
uccugaguagccaggacuauggcauguaccac

SEQ ID NO: 379984 - RNA, 32 nt, Homo Sapiens
aucaauugaaagauugacuucaaucucaugag

SEQ ID NO: 379985 - RNA, 32 nt, Homo Sapiens
aaggcucugcuccucccugggccugaaaguuc

SEQ ID NO: 379986 - RNA, 31 nt, Homo Sapiens
ugcccggcagcgaguuugccccgcugccgaa

SEQ ID NO: 379987 - RNA, 32 nt, Homo Sapiens
accccgggggcuggcaugagcggccgcucggc

SEQ ID NO: 379988 - RNA, 32 nt, Homo Sapiens
acccugauccgacuccucuccgccucucuccc

SEQ ID NO: 379989 - RNA, 32 nt, Homo Sapiens
aguuucacagaaauagggcaagggauagggcg

SEQ ID NO: 379990 - RNA, 32 nt, Homo Sapiens
accccauucccccugcccugcccgcccccagc

SEQ ID NO: 379991 - RNA, 32 nt, Homo Sapiens
agggaugacacagcaaggaugauucagcacug

SEQ ID NO: 379992 - RNA, 32 nt, Homo Sapiens
ugaagccgccgggugccgcuguguagaaagaa

SEQ ID NO: 379993 - RNA, 32 nt, Homo Sapiens
ucuagccuuuuuuuuuuuuuuaaucucuauuu

SEQ ID NO: 379994 - RNA, 32 nt, Homo Sapiens
acugccaucgccauccaucgcauuccaccgac

SEQ ID NO: 379995 - RNA, 31 nt, Homo Sapiens
ccgcggccccgcugccugcccugcuccaggc

SEQ ID NO: 379996 - RNA, 32 nt, Homo Sapiens
auacagagaaaagagagaaguagaacauacug

SEQ ID NO: 379997 - RNA, 32 nt, Homo Sapiens
aagaaaauauucuauuugguagaauacaaaug

SEQ ID NO: 379998 - RNA, 32 nt, Homo Sapiens
aaagugccauggguuucuucuacucagacucc

SEQ ID NO: 379999 - RNA, 32 nt, Homo Sapiens
aaccaccacaggcuaccauacugggcccucac

SEQ ID NO: 380000 - RNA, 32 nt, Homo Sapiens
ggagcaggggugcaccugcugcucaccuucau

SEQ ID NO: 380001 - RNA, 32 nt, Homo Sapiens
guuaucuguaaauuccagacacuguaugagaa

SEQ ID NO: 380002 - RNA, 32 nt, Homo Sapiens
acaacagguauguuuuuguuucagaaauaugu

SEQ ID NO: 380003 - RNA, 32 nt, Homo Sapiens
cagugaucacuuuaaccaaacuuacuuuacaa

SEQ ID NO: 380004 - RNA, 32 nt, Homo Sapiens
guuacagcugucagcccuccucauuccuaaau

SEQ ID NO: 380005 - RNA, 32 nt, Homo Sapiens
ggguucauacacgugcacacacacgcauacac

SEQ ID NO: 380006 - RNA, 32 nt, Homo Sapiens
uucuuggaguggugauuuuucucuaaauaaaa

SEQ ID NO: 380007 - RNA, 32 nt, Homo Sapiens
ccacuaggaacaaaauguaacugaggacguug

SEQ ID NO: 380008 - RNA, 32 nt, Homo Sapiens
ucugggauaacgcgucucaucgaacuggaucu

SEQ ID NO: 380009 - RNA, 32 nt, Homo Sapiens
gaggauccccgcccugccccgccccgcggugu

SEQ ID NO: 380010 - RNA, 32 nt, Homo Sapiens
ugcggggucgggcucggccaguccuggccagc

SEQ ID NO: 380011 - RNA, 31 nt, Homo Sapiens
uauuuauuuuauuuagugccaaauguauucc

SEQ ID NO: 380012 - RNA, 32 nt, Homo Sapiens
ugagccacugcgccuggccuaguuugguuuuu

SEQ ID NO: 380013 - RNA, 32 nt, Homo Sapiens
aaaaauaaaaauacagugguguggaauacucc

SEQ ID NO: 380014 - RNA, 32 nt, Homo Sapiens
ugucagacagaaaaaagaggcuagaagaacaa

SEQ ID NO: 380015 - RNA, 32 nt, Homo Sapiens
cacagugggcuuucgugagccauggauugagg

SEQ ID NO: 380016 - RNA, 32 nt, Homo Sapiens
cugcccugccccacccccaccaccugucccca

SEQ ID NO: 380017 - RNA, 32 nt, Homo Sapiens
cagagaggucaaggggaaguauuuucuaguuc

SEQ ID NO: 380018 - RNA, 32 nt, Homo Sapiens
acuuucucuuucgcaccugccucucaucucaa

SEQ ID NO: 380019 - RNA, 32 nt, Homo Sapiens
gacaccuuggaaagagguuagcugugaguuuu

SEQ ID NO: 380020 - RNA, 32 nt, Homo Sapiens
uguuaauguauuuguucauguuuggugcauag

SEQ ID NO: 380021 - RNA, 32 nt, Homo Sapiens
gguuccugccucggggaaguccuggcgcagau

SEQ ID NO: 380022 - RNA, 32 nt, Homo Sapiens
ugcgccuggcguuguucaucgcaguugcuccg

SEQ ID NO: 380023 - RNA, 32 nt, Homo Sapiens
cccguggcgaggggagaggagcugaaggggcc

SEQ ID NO: 380024 - RNA, 32 nt, Homo Sapiens
cuggugaaaacagauaggaaaaggaaguugcc

SEQ ID NO: 380025 - RNA, 32 nt, Homo Sapiens
uccuugguaugcugagcgccgguccccuaggc

SEQ ID NO: 380026 - RNA, 32 nt, Homo Sapiens
auuuauuuuacuguggagcgcuaacaucugga

SEQ ID NO: 380027 - RNA, 32 nt, Homo Sapiens
cugcagggauaaaacuuuugagguggccagac

SEQ ID NO: 380028 - RNA, 32 nt, Homo Sapiens
auacaguacuuugaaucuaguuguuagauucu

SEQ ID NO: 380029 - RNA, 32 nt, Homo Sapiens
uaauuuaaauguucagauaaaugaagcugacu

SEQ ID NO: 380030 - RNA, 32 nt, Homo Sapiens
uucaauaaaaauuuagcucuuaaaaaaauaac

SEQ ID NO: 380031 - RNA, 32 nt, Homo Sapiens
uuggacggcagcuccccuccccgccacgcccc

SEQ ID NO: 380032 - RNA, 32 nt, Homo Sapiens
cccgccaccccgcucucucaggcucuucagga

SEQ ID NO: 380033 - RNA, 27 nt, Homo Sapiens
ggcacuuccuucuugcucccaccccug

SEQ ID NO: 380034 - RNA, 32 nt, Homo Sapiens
aggaagaggaggaggcggcgaagcguuuuccc

SEQ ID NO: 380035 - RNA, 32 nt, Homo Sapiens
cuggugucugaguggcucucucgggggaggga

SEQ ID NO: 380036 - RNA, 32 nt, Homo Sapiens
accauuuuuaaauuauugugaaaagauuaacu

SEQ ID NO: 380037 - RNA, 32 nt, Homo Sapiens
ccaguaaaauugccauauugcacaugucuuaa

SEQ ID NO: 380038 - RNA, 32 nt, Homo Sapiens
gagcuauuauugcacuacugcauuccagccug

SEQ ID NO: 380039 - RNA, 32 nt, Homo Sapiens
ccccugaccccauggaggagugggacgugcca

SEQ ID NO: 380040 - RNA, 32 nt, Homo Sapiens
acagcugauauuauggaugacaacugcuaagg

SEQ ID NO: 380041 - RNA, 27 nt, Homo Sapiens
gaaugaaagauucugaaaauaaaggug

SEQ ID NO: 380042 - RNA, 32 nt, Homo Sapiens
aaaaauuagcuaggcgugguggcugggaccug

SEQ ID NO: 380043 - RNA, 29 nt, Homo Sapiens
agacauuuuaaauauauuuccagacaucu

SEQ ID NO: 380044 - RNA, 29 nt, Homo Sapiens
auuaaaucaaaggucgacgcgcggccgcg

SEQ ID NO: 380045 - RNA, 32 nt, Homo Sapiens
gggccgccgggcggugcuggaggugacugugu

SEQ ID NO: 380046 - RNA, 32 nt, Homo Sapiens
ccaggugccguggagcagcaggcuggcuuugg

SEQ ID NO: 380047 - RNA, 27 nt, Homo Sapiens
ugcgaauacuuuuucagccccagcugu

SEQ ID NO: 380048 - RNA, 32 nt, Homo Sapiens
cauucccauuuucucagccucuucucugccuc

SEQ ID NO: 380049 - RNA, 32 nt, Homo Sapiens
agguuuuuggcaaagcacaucaauguuagacu

SEQ ID NO: 380050 - RNA, 32 nt, Homo Sapiens
ccaucuugugauuccuuuuuccuccugaaccc

SEQ ID NO: 380051 - RNA, 32 nt, Homo Sapiens
uuauuuaacuucccuuuuuuuuuaacuucacc

SEQ ID NO: 380052 - RNA, 32 nt, Homo Sapiens
auuaacuuguuuucuucauccaaaaaaguuua

SEQ ID NO: 380053 - RNA, 32 nt, Homo Sapiens
uagauucacucuguaguuuucuguaaagcaca

SEQ ID NO: 380054 - RNA, 32 nt, Homo Sapiens
acaagaaaaaaaaacaaacaaacacuucuuuc

SEQ ID NO: 380055 - RNA, 32 nt, Homo Sapiens
ccaccaggcagaccugagugccgagggguuau

SEQ ID NO: 380056 - RNA, 32 nt, Homo Sapiens
gaagugugcagguucuucuauguuuuugaaaa

SEQ ID NO: 380057 - RNA, 32 nt, Homo Sapiens
uguugaugucugagcagcaugcuugcaucacc

SEQ ID NO: 380058 - RNA, 32 nt, Homo Sapiens
agcagugauaacuaccugccagugucucuuag

SEQ ID NO: 380059 - RNA, 32 nt, Homo Sapiens
uaaaaucugccauaguuggauuaugcagcuuu

SEQ ID NO: 380060 - RNA, 32 nt, Homo Sapiens
cucaugugccagguguuguucuaagcacagau

SEQ ID NO: 380061 - RNA, 32 nt, Homo Sapiens
cuuugagggauucugaugugcuaggcaugguu

SEQ ID NO: 380062 - RNA, 32 nt, Homo Sapiens
ucggcuggaagaacaucaagauaccuuugcgu

SEQ ID NO: 380063 - RNA, 32 nt, Homo Sapiens
gccauaaauuccuacuuguacuuguucuauuu

SEQ ID NO: 380064 - RNA, 32 nt, Homo Sapiens
ucuugccgaggcccgggcgggcgggagcaacg

SEQ ID NO: 380065 - RNA, 32 nt, Homo Sapiens
ugccaguguaauguggagguggucagagcgcu

SEQ ID NO: 380066 - RNA, 32 nt, Homo Sapiens
ugagaugcuuguauauuuugaaaauaugauua

SEQ ID NO: 380067 - RNA, 32 nt, Homo Sapiens
uuuuugcugaaucacgucaaguauucacaagu

SEQ ID NO: 380068 - RNA, 32 nt, Homo Sapiens
aaacagucuggugacgucaugcccuucucaug

SEQ ID NO: 380069 - RNA, 32 nt, Homo Sapiens
cgagggguggugcuggaguccaggugacaguu

SEQ ID NO: 380070 - RNA, 32 nt, Homo Sapiens
ucacuugagcccagaagcucaaggcugcagug

SEQ ID NO: 380071 - RNA, 32 nt, Homo Sapiens
uuuugagaaaucauauaucuuacacaguucca

SEQ ID NO: 380072 - RNA, 32 nt, Homo Sapiens
gcaagaugcggaagaggaugugggaccaggac

SEQ ID NO: 380073 - RNA, 32 nt, Homo Sapiens
gcugcaaagcuacauggcuccggcaacaagga

SEQ ID NO: 380074 - RNA, 32 nt, Homo Sapiens
uguaccuuguacuuuauaaauaaaccucaagc

SEQ ID NO: 380075 - RNA, 32 nt, Homo Sapiens
cuccaaggggaccuggugacagacgaggcugc

SEQ ID NO: 380076 - RNA, 32 nt, Homo Sapiens
ugucguguucucucuugucccccauggaugag

SEQ ID NO: 380077 - RNA, 32 nt, Homo Sapiens
cugccguggagccgcauccacuguggauuaua

SEQ ID NO: 380078 - RNA, 32 nt, Homo Sapiens
acauguccagcauggacagagccagaguuaag

SEQ ID NO: 380079 - RNA, 32 nt, Homo Sapiens
uccccaucuucuucuuucagaucauuaaugag

SEQ ID NO: 380080 - RNA, 32 nt, Homo Sapiens
aggccccgcgcgccggugccgagggccgagga

SEQ ID NO: 380081 - RNA, 32 nt, Homo Sapiens
caguagcccuguuuuacaaaugcagaaacagg

SEQ ID NO: 380082 - RNA, 32 nt, Homo Sapiens
uguggaugaucaggauuaaaucaagauauaua

SEQ ID NO: 380083 - RNA, 32 nt, Homo Sapiens
cauuggguaaaucuggugguuuuuacacaugg

SEQ ID NO: 380084 - RNA, 32 nt, Homo Sapiens
auaauuuucuauuugaaaaugugcugauucuu

SEQ ID NO: 380085 - RNA, 32 nt, Homo Sapiens
gggaggcugagguggguggaucaugaggucgg

SEQ ID NO: 380086 - RNA, 32 nt, Homo Sapiens
gaagggaguugucugccauucaauguuuacau

SEQ ID NO: 380087 - RNA, 32 nt, Homo Sapiens
gucccugcugcugggcaggacccggccacaug

SEQ ID NO: 380088 - RNA, 32 nt, Homo Sapiens
cagggaggugcugugagaagugcaccaggcag

SEQ ID NO: 380089 - RNA, 32 nt, Homo Sapiens
ugacugauuuuuuuuucuuuucuuuccuuuuu

SEQ ID NO: 380090 - RNA, 32 nt, Homo Sapiens
ggauauuuaagugaacauguuuacaauuuuug

SEQ ID NO: 380091 - RNA, 32 nt, Homo Sapiens
caagccccccaccuccucccuucccagcccca

SEQ ID NO: 380092 - RNA, 32 nt, Homo Sapiens
gagaauuauagcaacuugcuuucaguggguaa

SEQ ID NO: 380093 - RNA, 32 nt, Homo Sapiens
cucuguccugcaucugcccccugcgccuggcc

SEQ ID NO: 380094 - RNA, 32 nt, Homo Sapiens
uggcugagcucaguccucuggaggaagccgcc

SEQ ID NO: 380095 - RNA, 32 nt, Homo Sapiens
agagcccccggagcccucccagcccucaggcc

SEQ ID NO: 380096 - RNA, 32 nt, Homo Sapiens
cugccugccugccagcagccucaacaggcaua

SEQ ID NO: 380097 - RNA, 32 nt, Homo Sapiens
acuccgcugcucgccucuccgccccgcgucca

SEQ ID NO: 380098 - RNA, 32 nt, Homo Sapiens
cuaaugaaaaauuuuuugauaauauaguagua

SEQ ID NO: 380099 - RNA, 32 nt, Homo Sapiens
aaaccuuguucuauuuuucaaucaucaaaaag

SEQ ID NO: 380100 - RNA, 32 nt, Homo Sapiens
agugguucuuagaaacaaacccucagcaccca

SEQ ID NO: 380101 - RNA, 32 nt, Homo Sapiens
cuaauuuaaaaauaaaaaugacuuuguauuga

SEQ ID NO: 380102 - RNA, 32 nt, Homo Sapiens
guaauuuagacaauacaucaccuguaguucaa

SEQ ID NO: 380103 - RNA, 32 nt, Homo Sapiens
aaacccgaaguacauuuccguguggaacuuuu

SEQ ID NO: 380104 - RNA, 32 nt, Homo Sapiens
gcggcggcggaucccggagagccccggaguga

SEQ ID NO: 380105 - RNA, 32 nt, Homo Sapiens
gaagaggaaaauuugcagcugccagugcuuuc

SEQ ID NO: 380106 - RNA, 32 nt, Homo Sapiens
gcuuugaguaauaaacuugauuguagggaaaa

SEQ ID NO: 380107 - RNA, 32 nt, Homo Sapiens
gcucuuccuccagggcguggcggccgucuuca

SEQ ID NO: 380108 - RNA, 32 nt, Homo Sapiens
agaagcaauaguauuucuuagaaauguaucac

SEQ ID NO: 380109 - RNA, 32 nt, Homo Sapiens
acuaucacaguugacugacagcuccugggguu

SEQ ID NO: 380110 - RNA, 32 nt, Homo Sapiens
ccucacagcuuccuugcaaggcugucacaagg

SEQ ID NO: 380111 - RNA, 32 nt, Homo Sapiens
uugggauuauaugcaccccuuuccagagucca

SEQ ID NO: 380112 - RNA, 32 nt, Homo Sapiens
gcgagggacgcacaaccccagccccuguccca

SEQ ID NO: 380113 - RNA, 32 nt, Homo Sapiens
uaagcuuugcuaaagaguuguaugcacaaagg

SEQ ID NO: 380114 - RNA, 32 nt, Homo Sapiens
agcgggugcgcaaaucagaaggauuaguuggg

SEQ ID NO: 380115 - RNA, 32 nt, Homo Sapiens
ggagugggagguacauggggcuggggacuccc

SEQ ID NO: 380116 - RNA, 32 nt, Homo Sapiens
uucagugaagauuuggggggccacuuuucuac

SEQ ID NO: 380117 - RNA, 32 nt, Homo Sapiens
cagguaaacaguuggucaagacuuuguaaaga

SEQ ID NO: 380118 - RNA, 32 nt, Homo Sapiens
uuccagccgucucauggcuagggaaguuucca

SEQ ID NO: 380119 - RNA, 32 nt, Homo Sapiens
aaaauuuguuuuuucuugaucuuagcuggaaa

SEQ ID NO: 380120 - RNA, 32 nt, Homo Sapiens
uuuuguaaugaaaaccucuaagaucugcugac

SEQ ID NO: 380121 - RNA, 32 nt, Homo Sapiens
caagcccaccucggcccucccugcgcuuccug

SEQ ID NO: 380122 - RNA, 32 nt, Homo Sapiens
accuggacuuuugucugcuuaagggaaaugag

SEQ ID NO: 380123 - RNA, 32 nt, Homo Sapiens
agucugaccaacguggagaaaccccgucuuua

SEQ ID NO: 380124 - RNA, 32 nt, Homo Sapiens
auccccuuccucccgcaccacuccaugugcgu

SEQ ID NO: 380125 - RNA, 32 nt, Homo Sapiens
ccugugucagccauuuaccuuuuuuauacaaa

SEQ ID NO: 380126 - RNA, 32 nt, Homo Sapiens
gacuggauggagguggggagugugguguguaa

SEQ ID NO: 380127 - RNA, 32 nt, Homo Sapiens
acugaacaaggcuggcugagaagugccuacuc

SEQ ID NO: 380128 - RNA, 32 nt, Homo Sapiens
ggcaguugagcacuucuguuuuguguuggaaa

SEQ ID NO: 380129 - RNA, 32 nt, Homo Sapiens
cuccucuggacuccaccuuggaccucagugac

SEQ ID NO: 380130 - RNA, 32 nt, Homo Sapiens
acaaccacagaaacaaacaaauaauggaugug

SEQ ID NO: 380131 - RNA, 32 nt, Homo Sapiens
acaaaggaggaggugccgcagauguccaugag

SEQ ID NO: 380132 - RNA, 32 nt, Homo Sapiens
aguuguauaucagaaucuucagagcacugcga

SEQ ID NO: 380133 - RNA, 32 nt, Homo Sapiens
augauuaugauuauuauugaaugauagcugau

SEQ ID NO: 380134 - RNA, 32 nt, Homo Sapiens
gacacaaggggaggggacuugucaggugucca

SEQ ID NO: 380135 - RNA, 32 nt, Homo Sapiens
gcucagauggccugggugcuauguggagcagg

SEQ ID NO: 380136 - RNA, 32 nt, Homo Sapiens
caaauuuagauauuuuaccauuccuauucuuu

SEQ ID NO: 380137 - RNA, 32 nt, Homo Sapiens
ucaucucccgcaaauaaauguauuggugauuu

SEQ ID NO: 380138 - RNA, 32 nt, Homo Sapiens
cuaugugugggaaaagaggcagggaggaauga

SEQ ID NO: 380139 - RNA, 32 nt, Homo Sapiens
gugugaugaggagaggaagagauacaacagau

SEQ ID NO: 380140 - RNA, 32 nt, Homo Sapiens
ugaaugcagaagggcugugcuggaccccucuu

SEQ ID NO: 380141 - RNA, 32 nt, Homo Sapiens
guuauauaucauuaauaaaaauaucuagcugg

SEQ ID NO: 380142 - RNA, 32 nt, Homo Sapiens
guuuuacaagacaaaaggauuauggggguagu

SEQ ID NO: 380143 - RNA, 32 nt, Homo Sapiens
acugagugguggccuggggaaguugggagcuc

SEQ ID NO: 380144 - RNA, 32 nt, Homo Sapiens
ccgaugguacuauuuagauauaacacuauguu

SEQ ID NO: 380145 - RNA, 32 nt, Homo Sapiens
ccccuggcucuggccuggugggcggaggcaaa

SEQ ID NO: 380146 - RNA, 32 nt, Homo Sapiens
cggcugugcccucuccuacuccucaccgcgcg

SEQ ID NO: 380147 - RNA, 32 nt, Homo Sapiens
agggcuucgaggguggugauuacgguggcgcc

SEQ ID NO: 380148 - RNA, 32 nt, Homo Sapiens
ugggagaaaaagauaugaugaauauuaaugca

SEQ ID NO: 380149 - RNA, 32 nt, Homo Sapiens
gaacccgggaggaggaggaggagguugcagug

SEQ ID NO: 380150 - RNA, 32 nt, Homo Sapiens
acgggcgggcgcgggcgucgcagcugagggag

SEQ ID NO: 380151 - RNA, 32 nt, Homo Sapiens
cucuuggcccagccuuccucccagagaggcgg

SEQ ID NO: 380152 - RNA, 32 nt, Homo Sapiens
cuccagcuagaggagcucaacugaucuguuuu

SEQ ID NO: 380153 - RNA, 30 nt, Homo Sapiens
guaacagggaggugcgcggguggggggagg

SEQ ID NO: 380154 - RNA, 32 nt, Homo Sapiens
uuguuuugucucagcuauuuuguagcagacuc

SEQ ID NO: 380155 - RNA, 32 nt, Homo Sapiens
uugcccuggggggcuuggaaccucugaaggug

SEQ ID NO: 380156 - RNA, 32 nt, Homo Sapiens
cucgaucaccccagcccccuuccuggucuccc

SEQ ID NO: 380157 - RNA, 32 nt, Homo Sapiens
gcagaccuuucugucaugcugggaaguaucca

SEQ ID NO: 380158 - RNA, 32 nt, Homo Sapiens
ugguuuggaguagaauggcaacuaauucuaau

SEQ ID NO: 380159 - RNA, 32 nt, Homo Sapiens
gacacaggacaaggugcaaacacagacaagcc

SEQ ID NO: 380160 - RNA, 32 nt, Homo Sapiens
aaggaccuaccaaagcaagaccacugaugcag

SEQ ID NO: 380161 - RNA, 32 nt, Homo Sapiens
aacaacuguaauugacuguucuguaaaguuau

SEQ ID NO: 380162 - RNA, 32 nt, Homo Sapiens
cuuccuuccuuccagucagccugagagagaac

SEQ ID NO: 380163 - RNA, 32 nt, Homo Sapiens
agcccgcgcgccggccggcuccguuauggcga

SEQ ID NO: 380164 - RNA, 32 nt, Homo Sapiens
ggaggaggagacagagaaggcuuuccaagcag

SEQ ID NO: 380165 - RNA, 32 nt, Homo Sapiens
acucccugccuugugaguggccugcugccuca

SEQ ID NO: 380166 - RNA, 32 nt, Homo Sapiens
gaccaugaaugauaugcuagaauagaagaaag

SEQ ID NO: 380167 - RNA, 32 nt, Homo Sapiens
uccgggcugccuugugcugucuggccugaggc

SEQ ID NO: 380168 - RNA, 32 nt, Homo Sapiens
cucaccgcugcccggcggccgcuccgaggagc

SEQ ID NO: 380169 - RNA, 32 nt, Homo Sapiens
gagcaccagccuuggggacccuggaccacuau

SEQ ID NO: 380170 - RNA, 32 nt, Homo Sapiens
caccagcugcuguuaaaauguacaaugaacuc

SEQ ID NO: 380171 - RNA, 32 nt, Homo Sapiens
ucacaugggagcuucuggucucuuuguaauaa

SEQ ID NO: 380172 - RNA, 32 nt, Homo Sapiens
cccagacaaagaggcagacaugagcagaugag

SEQ ID NO: 380173 - RNA, 32 nt, Homo Sapiens
agggagggugggagcuggagggggaugucaca

SEQ ID NO: 380174 - RNA, 32 nt, Homo Sapiens
agggcacccucuuuaacccaucccucagcaaa

SEQ ID NO: 380175 - RNA, 32 nt, Homo Sapiens
gcagcucgccuggccacaccguuggagugaac

SEQ ID NO: 380176 - RNA, 32 nt, Homo Sapiens
gagaaugucauuucucauaguguuucuguuuc

SEQ ID NO: 380177 - RNA, 32 nt, Homo Sapiens
ccucagaggaggaggaggaggaggcagcuccg

SEQ ID NO: 380178 - RNA, 32 nt, Homo Sapiens
cacgguuggccauugugaccccugcgacacac

SEQ ID NO: 380179 - RNA, 30 nt, Homo Sapiens
ucuaagcagggggacaugcaaaaacaauca

SEQ ID NO: 380180 - RNA, 32 nt, Homo Sapiens
aucuugggccaacuuccacagcagccaugcgu

SEQ ID NO: 380181 - RNA, 32 nt, Homo Sapiens
agacaaaaaaugggaaauaaaaagccauuuau

SEQ ID NO: 380182 - RNA, 32 nt, Homo Sapiens
auccacccaccaaucuuaggcaucauaaugug

SEQ ID NO: 380183 - RNA, 32 nt, Homo Sapiens
agagcagaucacauuguaaaacuauggauggu

SEQ ID NO: 380184 - RNA, 30 nt, Homo Sapiens
ugcagaugaagaugagauucuucaguucuc

SEQ ID NO: 380185 - RNA, 32 nt, Homo Sapiens
uuaauuugaagaaaaaucaucagucuuggaau

SEQ ID NO: 380186 - RNA, 32 nt, Homo Sapiens
gaaguuaaacaguacuuuucugagguuuuuca

SEQ ID NO: 380187 - RNA, 32 nt, Homo Sapiens
agcuguuauuagauugaaaucuacacaucauu

SEQ ID NO: 380188 - RNA, 32 nt, Homo Sapiens
gaggucgugaagaaggugaaugagaugaucgu

SEQ ID NO: 380189 - RNA, 32 nt, Homo Sapiens
agcccggagcguggcacgugggcccccuccgc

SEQ ID NO: 380190 - RNA, 31 nt, Homo Sapiens
ggcauucacugccugggucaggcaaguucuu

SEQ ID NO: 380191 - RNA, 32 nt, Homo Sapiens
guggagcguccccuuccaucaagcagccugcc

SEQ ID NO: 380192 - RNA, 32 nt, Homo Sapiens
gaaaugccaguuccuccuguauuccauugaga

SEQ ID NO: 380193 - RNA, 32 nt, Homo Sapiens
uuaucugcgcaugcgagaacaucaccuuccuc

SEQ ID NO: 380194 - RNA, 32 nt, Homo Sapiens
cacagacccacccgcccccucagccggagcag

SEQ ID NO: 380195 - RNA, 32 nt, Homo Sapiens
cucuuauauucucccacuagccugaagcaaug

SEQ ID NO: 380196 - RNA, 32 nt, Homo Sapiens
guggcuguaaaaaguuuguauuuauuauguau

SEQ ID NO: 380197 - RNA, 32 nt, Homo Sapiens
uuuagggguggggaagugucagcaaggugucu

SEQ ID NO: 380198 - RNA, 32 nt, Homo Sapiens
ccaaggauuugugcuggaugacaggauucccu

SEQ ID NO: 380199 - RNA, 32 nt, Homo Sapiens
aaacugcugccgccgcgccgaggagacucgca

SEQ ID NO: 380200 - RNA, 32 nt, Homo Sapiens
uggaacaccuccccguccagcucuaaucaagc

SEQ ID NO: 380201 - RNA, 32 nt, Homo Sapiens
agaaagcacagcuggacaagcuaacuggagua

SEQ ID NO: 380202 - RNA, 32 nt, Homo Sapiens
gcaggggcagagcgcuccuguggggaugaagg

SEQ ID NO: 380203 - RNA, 32 nt, Homo Sapiens
ccacuccuccccucacuccccugcucccccga

SEQ ID NO: 380204 - RNA, 28 nt, Homo Sapiens
ggggcggggcggccauuggggcuccuca

SEQ ID NO: 380205 - RNA, 32 nt, Homo Sapiens
uuugagcagcauaugcugugauuggcugcccu

SEQ ID NO: 380206 - RNA, 32 nt, Homo Sapiens
gugaaauacaucucaagaaagcugcugcaaaa

SEQ ID NO: 380207 - RNA, 32 nt, Homo Sapiens
cugaaagcaauaaccaaacaccugacucuuau

SEQ ID NO: 380208 - RNA, 32 nt, Homo Sapiens
guggggcuugguuauccucuuguuuugugacu

SEQ ID NO: 380209 - RNA, 32 nt, Homo Sapiens
cuagauauaaaugcuaaugauacuuggguuua

SEQ ID NO: 380210 - RNA, 32 nt, Homo Sapiens
uacccagcgaggaggaggcggggagagaaacu

SEQ ID NO: 380211 - RNA, 32 nt, Homo Sapiens
cccucuuccuuccagcuuucacuucugccggu

SEQ ID NO: 380212 - RNA, 32 nt, Homo Sapiens
uuucuuacaaguuccgaauuccaaauacagag

SEQ ID NO: 380213 - RNA, 32 nt, Homo Sapiens
gcuaaaguaaguuaaaagauuaugauaaacuc

SEQ ID NO: 380214 - RNA, 32 nt, Homo Sapiens
uuaacucuuauuggacaagcuccuccugugag

SEQ ID NO: 380215 - RNA, 32 nt, Homo Sapiens
cuuuuuaauuuuuucuaacaaagaaaagaaua

SEQ ID NO: 380216 - RNA, 32 nt, Homo Sapiens
aaauuuaaugagaauuucuacaauuaauggaa

SEQ ID NO: 380217 - RNA, 25 nt, Homo Sapiens
ggauuuuaauaaauauuuaaaacug

SEQ ID NO: 380218 - RNA, 32 nt, Homo Sapiens
ggcucuugggcauuuuaaacaaaaugaaguau

SEQ ID NO: 380219 - RNA, 32 nt, Homo Sapiens
gauuguuucugugucccuguaucugcccaccc

SEQ ID NO: 380220 - RNA, 32 nt, Homo Sapiens
gguuuucacucaaucuuuccugucacaguaac

SEQ ID NO: 380221 - RNA, 30 nt, Homo Sapiens
gccccuggcggagacggcggcaggagcugg

SEQ ID NO: 380222 - RNA, 32 nt, Homo Sapiens
gguuguuggaaauugcaaaucuuagugugaau

SEQ ID NO: 380223 - RNA, 32 nt, Homo Sapiens
ccauugugugucugugucauguaaaaauguuu

SEQ ID NO: 380224 - RNA, 32 nt, Homo Sapiens
agagucuuuguugcuaucaucaucaucaucau

SEQ ID NO: 380225 - RNA, 29 nt, Homo Sapiens
agacaguaaaaauaaacguguuuauauug

SEQ ID NO: 380226 - RNA, 32 nt, Homo Sapiens
augugacuguaaacuuugaauuccucaaaauu

SEQ ID NO: 380227 - RNA, 32 nt, Homo Sapiens
gcacucggggggcacgcgcggccaccgcuaga

SEQ ID NO: 380228 - RNA, 32 nt, Homo Sapiens
aagucugguggcagcgcagagcccaaucauuc

SEQ ID NO: 380229 - RNA, 32 nt, Homo Sapiens
gccaggggucccagcccgucuaccuccccauc

SEQ ID NO: 380230 - RNA, 32 nt, Homo Sapiens
gaaauggcugugguaacacugauccuucagaa

SEQ ID NO: 380231 - RNA, 32 nt, Homo Sapiens
ccacccuccuacuucacacccauuugagucca

SEQ ID NO: 380232 - RNA, 32 nt, Homo Sapiens
gaggaggucaaacaaacuaaacuguagcagug

SEQ ID NO: 380233 - RNA, 32 nt, Homo Sapiens
ggggcagagagagggcgcccccugccccacca

SEQ ID NO: 380234 - RNA, 32 nt, Homo Sapiens
gaggagcacucagcucacggggagggagcucu

SEQ ID NO: 380235 - RNA, 32 nt, Homo Sapiens
gucuuauguuuccaucuguuuucuucguggca

SEQ ID NO: 380236 - RNA, 32 nt, Homo Sapiens
cuuauuauuauuauuuuaaacccugcucuuug

SEQ ID NO: 380237 - RNA, 32 nt, Homo Sapiens
cucucccuccuuucagcccucuccaggugucu

SEQ ID NO: 380238 - RNA, 32 nt, Homo Sapiens
gcgagacccggaaugcgcagggcccccgccuc

SEQ ID NO: 380239 - RNA, 32 nt, Homo Sapiens
gggguggggagcuggaggaggggguggcagcu

SEQ ID NO: 380240 - RNA, 32 nt, Homo Sapiens
uaaaguuuaagugcacaucccgauccacugua

SEQ ID NO: 380241 - RNA, 32 nt, Homo Sapiens
ugucauggaccgagaagcuggaugugcucugg

SEQ ID NO: 380242 - RNA, 32 nt, Homo Sapiens
gacgggccgccugaggccccagaacucgucug

SEQ ID NO: 380243 - RNA, 32 nt, Homo Sapiens
ucaacuguuuucuuugcuaaaaucacagaaag

SEQ ID NO: 380244 - RNA, 32 nt, Homo Sapiens
uccagaguagccacucaaaaacugguggucuc

SEQ ID NO: 380245 - RNA, 31 nt, Homo Sapiens
gcucaggcagucugccugccucagccuccua

SEQ ID NO: 380246 - RNA, 32 nt, Homo Sapiens
aucaguggugucugaaaucauauuaaauaccc

SEQ ID NO: 380247 - RNA, 32 nt, Homo Sapiens
gcuugccugcugcugcugcugcugccucccca

SEQ ID NO: 380248 - RNA, 32 nt, Homo Sapiens
agcaucuuuuuuauguagaaaaaauugaguua

SEQ ID NO: 380249 - RNA, 32 nt, Homo Sapiens
ugcccuuccaucccuuuuuuuauucaaaaggc

SEQ ID NO: 380250 - RNA, 32 nt, Homo Sapiens
auaugugauaucaaugaagaaauauuuguagc

SEQ ID NO: 380251 - RNA, 32 nt, Homo Sapiens
cuaacuuggggucuuuucccaagguggaugua

SEQ ID NO: 380252 - RNA, 32 nt, Homo Sapiens
gguucugacagcugcgcgcgauccugcucucu

SEQ ID NO: 380253 - RNA, 32 nt, Homo Sapiens
gaaguuuuucuuuuuuauauuuaaaauguuac

SEQ ID NO: 380254 - RNA, 32 nt, Homo Sapiens
uagagaguuuagcuguaacaguucuuuuugau

SEQ ID NO: 380255 - RNA, 32 nt, Homo Sapiens
caacugcagccaggcugggcagagcacuccgg

SEQ ID NO: 380256 - RNA, 32 nt, Homo Sapiens
ccaaaaacagaaaaaugcacaacagagggaca

SEQ ID NO: 380257 - RNA, 32 nt, Homo Sapiens
uguggcgggaggugagacauguuggcaguaau

SEQ ID NO: 380258 - RNA, 32 nt, Homo Sapiens
agucaggaaaauuuuauguaaccagugauagu

SEQ ID NO: 380259 - RNA, 32 nt, Homo Sapiens
guuuaauaacaaccgaaugucuaguaaaugac

SEQ ID NO: 380260 - RNA, 32 nt, Homo Sapiens
agaagcaauuuucacuccaccggaaauaguuc

SEQ ID NO: 380261 - RNA, 32 nt, Homo Sapiens
acucucacauaaaccaaugggacccuuaaaug

SEQ ID NO: 380262 - RNA, 32 nt, Homo Sapiens
aguuauuuuuaaaaauuguauuguaauuccau

SEQ ID NO: 380263 - RNA, 32 nt, Homo Sapiens
uucuuucugucccaggcuguugaucuuaaaac

SEQ ID NO: 380264 - RNA, 32 nt, Homo Sapiens
aagcaugcaauaauaaaucucaaacacugauu

SEQ ID NO: 380265 - RNA, 32 nt, Homo Sapiens
ggaaaccggccgcccacgcccggagcauccuc

SEQ ID NO: 380266 - RNA, 32 nt, Homo Sapiens
gcauccagaaaaguaucaggguaguucuguuu

SEQ ID NO: 380267 - RNA, 32 nt, Homo Sapiens
cccgucaggccaggcagcugcccucagggucu

SEQ ID NO: 380268 - RNA, 32 nt, Homo Sapiens
auuagucugaagaguauacauuggauaggaaa

SEQ ID NO: 380269 - RNA, 31 nt, Homo Sapiens
gcagcucccgugaagauguccacuccagacc

SEQ ID NO: 380270 - RNA, 32 nt, Homo Sapiens
ggucugugucaguauuaccaccagacugacuc

SEQ ID NO: 380271 - RNA, 32 nt, Homo Sapiens
agcagcuggugccccaccugccuggugcauug

SEQ ID NO: 380272 - RNA, 32 nt, Homo Sapiens
agccagcggggguggggaccacgggcacccag

SEQ ID NO: 380273 - RNA, 32 nt, Homo Sapiens
cauucccuugugugacucauacuuguuuuguu

SEQ ID NO: 380274 - RNA, 32 nt, Homo Sapiens
ucuuaagaugacccggcaagaccugacccgca

SEQ ID NO: 380275 - RNA, 32 nt, Homo Sapiens
cucacacacaucccaaccugucacacacaaug

SEQ ID NO: 380276 - RNA, 32 nt, Homo Sapiens
gacaggaugguaaguauaaucaaccuagcuag

SEQ ID NO: 380277 - RNA, 32 nt, Homo Sapiens
uaaagugggcccuggugaagcagggugguccu

SEQ ID NO: 380278 - RNA, 32 nt, Homo Sapiens
acgguguuuauuuuccaaucaagugaagauau

SEQ ID NO: 380279 - RNA, 32 nt, Homo Sapiens
aaauuuuugugaaagaaaauacaguuuuaaag

SEQ ID NO: 380280 - RNA, 32 nt, Homo Sapiens
uaaccccccagcggggaccccaaagcagcccc

SEQ ID NO: 380281 - RNA, 32 nt, Homo Sapiens
caagaaguucccucagaugaccucauaucacc

SEQ ID NO: 380282 - RNA, 32 nt, Homo Sapiens
acuccugaccacaugaugugcccgccuuggcc

SEQ ID NO: 380283 - RNA, 32 nt, Homo Sapiens
gcgcgucuguucccagcgcucugcgaggccua

SEQ ID NO: 380284 - RNA, 32 nt, Homo Sapiens
gggacggggugggucgggagggagguauauug

SEQ ID NO: 380285 - RNA, 32 nt, Homo Sapiens
cuauguucuuugauuaguuuuagauaguauaa

SEQ ID NO: 380286 - RNA, 32 nt, Homo Sapiens
acccaagacaucauguaucgcauauuaguuaa

SEQ ID NO: 380287 - RNA, 32 nt, Homo Sapiens
ggagucauggccagcccuuccggcagcuccga

SEQ ID NO: 380288 - RNA, 28 nt, Homo Sapiens
ucauuaaaaaucaagaaaguuuuauugu

SEQ ID NO: 380289 - RNA, 32 nt, Homo Sapiens
ccagggaggggaggggaugggaagcaccacca

SEQ ID NO: 380290 - RNA, 32 nt, Homo Sapiens
auuucugaacaggggaguuuguaucaugaaug

SEQ ID NO: 380291 - RNA, 32 nt, Homo Sapiens
aaaggagguuaagacgugucgcacuuuucagu

SEQ ID NO: 380292 - RNA, 32 nt, Homo Sapiens
ugaucuuugcaaucuuuuuuuuguuuucaaua

SEQ ID NO: 380293 - RNA, 32 nt, Homo Sapiens
uacacuugcaucuuuguugaaagcagaagaag

SEQ ID NO: 380294 - RNA, 32 nt, Homo Sapiens
auuauuugaagaagagagagccuguggggaua

SEQ ID NO: 380295 - RNA, 32 nt, Homo Sapiens
cuuauuuuauuacaaaggaguagggaugauag

SEQ ID NO: 380296 - RNA, 32 nt, Homo Sapiens
gaugaaaacugaagaaaaaugccaaugugacg

SEQ ID NO: 380297 - RNA, 32 nt, Homo Sapiens
ugccuuugcagcucagaaccacagcaacgauc

SEQ ID NO: 380298 - RNA, 32 nt, Homo Sapiens
acacaagcucuuuuauuagagauaauauaaag

SEQ ID NO: 380299 - RNA, 32 nt, Homo Sapiens
ucaaggugccuccuccucuccuuagcuggccc

SEQ ID NO: 380300 - RNA, 32 nt, Homo Sapiens
agcccugcccaccccagccccuggaccugcuu

SEQ ID NO: 380301 - RNA, 32 nt, Homo Sapiens
cuuucccuucucaagacuuugagcaguuagaa

SEQ ID NO: 380302 - RNA, 32 nt, Homo Sapiens
gggcuggaggccagugcugcagggccagcccc

SEQ ID NO: 380303 - RNA, 32 nt, Homo Sapiens
uuagaaguguucugaggccgggcguguggcuc

SEQ ID NO: 380304 - RNA, 32 nt, Homo Sapiens
gacucgcgggccucaucuccaaugauucagaa

SEQ ID NO: 380305 - RNA, 32 nt, Homo Sapiens
uaagccacaggguggggcagccaaggcagggg

SEQ ID NO: 380306 - RNA, 32 nt, Homo Sapiens
uuugagauucuaugaaauguuuaaaucugaac

SEQ ID NO: 380307 - RNA, 32 nt, Homo Sapiens
gaugcuaauuuucaggguucuccauuacagug

SEQ ID NO: 380308 - RNA, 32 nt, Homo Sapiens
uaaaacaauucugugacauacauauuaucuca

SEQ ID NO: 380309 - RNA, 32 nt, Homo Sapiens
uagaaucuuuuuucuuuuuugucauucugcca

SEQ ID NO: 380310 - RNA, 32 nt, Homo Sapiens
aacaugaaaauuaaaaugaacaauauaggaaa

SEQ ID NO: 380311 - RNA, 32 nt, Homo Sapiens
gcaggugccccucacacccccaggaugucagu

SEQ ID NO: 380312 - RNA, 32 nt, Homo Sapiens
gaaaggaguuuggggaggauucguggucuuca

SEQ ID NO: 380313 - RNA, 32 nt, Homo Sapiens
aaaauguaucuguccagaaaaaugugcauguc

SEQ ID NO: 380314 - RNA, 32 nt, Homo Sapiens
aauggccagcgccagcugcagccccggcugcc

SEQ ID NO: 380315 - RNA, 32 nt, Homo Sapiens
uucauugcaguguugcuccauuccuagcuugg

SEQ ID NO: 380316 - RNA, 31 nt, Homo Sapiens
uaagaggagccccgagcagggaggcuggggc

SEQ ID NO: 380317 - RNA, 32 nt, Homo Sapiens
gccagcccgcugcuuuuucuauccucccaguc

SEQ ID NO: 380318 - RNA, 29 nt, Homo Sapiens
cugggccgugggcuccggacgccgggcca

SEQ ID NO: 380319 - RNA, 32 nt, Homo Sapiens
cacaaguguuccuacauaacaaaccugaacau

SEQ ID NO: 380320 - RNA, 32 nt, Homo Sapiens
gaauugcuggugcuggagcaguucuugacuau

SEQ ID NO: 380321 - RNA, 32 nt, Homo Sapiens
cuuuuuauuuagauucuuucugucccaggcug

SEQ ID NO: 380322 - RNA, 32 nt, Homo Sapiens
ggacacugccuuggguggaccaggcuuccaag

SEQ ID NO: 380323 - RNA, 32 nt, Homo Sapiens
agauguuacaaaucgacaguuuuauucuuaga

SEQ ID NO: 380324 - RNA, 32 nt, Homo Sapiens
aaggcugaagauauucuacuuuaguuaguaug

SEQ ID NO: 380325 - RNA, 32 nt, Homo Sapiens
cgccgccucccucccgcacagcagccgccagc

SEQ ID NO: 380326 - RNA, 32 nt, Homo Sapiens
guggugggucugaugcaccagcagccagauga

SEQ ID NO: 380327 - RNA, 31 nt, Homo Sapiens
auggauugcaauuauaauggauauguugcgg

SEQ ID NO: 380328 - RNA, 32 nt, Homo Sapiens
aaaaagaaauaaggucugagauaauacuaagc

SEQ ID NO: 380329 - RNA, 32 nt, Homo Sapiens
ggaaagacaucccuggcaggcaucagaacuau

SEQ ID NO: 380330 - RNA, 32 nt, Homo Sapiens
ucugaccuuucuguucuuuuuaucugaaggaa

SEQ ID NO: 380331 - RNA, 32 nt, Homo Sapiens
caugcgcagcggguggucgcggagguccugcu

SEQ ID NO: 380332 - RNA, 32 nt, Homo Sapiens
gcagaugugggcggggguugugggggacggca

SEQ ID NO: 380333 - RNA, 32 nt, Homo Sapiens
aaaccugugaaaccucuuuuuauaaaaaucag

SEQ ID NO: 380334 - RNA, 32 nt, Homo Sapiens
acuuccuuuccacguguacgcgcacaccaaca

SEQ ID NO: 380335 - RNA, 32 nt, Homo Sapiens
caugccuagcuaauuuuuguauuuuuuguaga

SEQ ID NO: 380336 - RNA, 32 nt, Homo Sapiens
cauggaagugucuacaagucugaguucauaga

SEQ ID NO: 380337 - RNA, 30 nt, Homo Sapiens
guagaggauaaaagauaauguuauccaguu

SEQ ID NO: 380338 - RNA, 32 nt, Homo Sapiens
gacuggucucauuugcagaagucuaagaaugu

SEQ ID NO: 380339 - RNA, 32 nt, Homo Sapiens
gggaggcccagcugggaggaucccuugagccu

SEQ ID NO: 380340 - RNA, 32 nt, Homo Sapiens
aauggagaccaaaagagggaaggagggaugcc

SEQ ID NO: 380341 - RNA, 32 nt, Homo Sapiens
guugucaagucggccuguccagggccagcucc

SEQ ID NO: 380342 - RNA, 32 nt, Homo Sapiens
cuuaaagaaaucaguccuuccuuuccgacuua

SEQ ID NO: 380343 - RNA, 32 nt, Homo Sapiens
acugugguuguggacaaaugugaaaguaacuu

SEQ ID NO: 380344 - RNA, 31 nt, Homo Sapiens
ugugcuuggccacagaaccacccagcgucuc

SEQ ID NO: 380345 - RNA, 32 nt, Homo Sapiens
gccucccgccgggauccgacgcgcccggguga

SEQ ID NO: 380346 - RNA, 32 nt, Homo Sapiens
cuggagguguugguuuaaugggauuguggaag

SEQ ID NO: 380347 - RNA, 32 nt, Homo Sapiens
uggcugaggaagauccuuggguugugaagaga

SEQ ID NO: 380348 - RNA, 32 nt, Homo Sapiens
uauauauagauauauauagauauauaccaaug

SEQ ID NO: 380349 - RNA, 32 nt, Homo Sapiens
cgucagacaccugucgacagcccagaugacgc

SEQ ID NO: 380350 - RNA, 32 nt, Homo Sapiens
gguggacauaucuauauaucaauaaggacuaa

SEQ ID NO: 380351 - RNA, 30 nt, Homo Sapiens
gcagcgcgucuccuuccgccggcgcgggcg

SEQ ID NO: 380352 - RNA, 32 nt, Homo Sapiens
cuuagagauugugaagagucacugaggaauuu

SEQ ID NO: 380353 - RNA, 32 nt, Homo Sapiens
uucauuucccuuccccgcaccccuugacacuc

SEQ ID NO: 380354 - RNA, 32 nt, Homo Sapiens
gcaccaccacacuccagccugcgcgacagauc

SEQ ID NO: 380355 - RNA, 32 nt, Homo Sapiens
ggggcugcgccgaggacgcccggggcucgaga

SEQ ID NO: 380356 - RNA, 32 nt, Homo Sapiens
guccgcggcugcccccggggcccuagucguug

SEQ ID NO: 380357 - RNA, 32 nt, Homo Sapiens
cccggacccugcaggguaaaagaaugucacau

SEQ ID NO: 380358 - RNA, 32 nt, Homo Sapiens
uuggaagggaucuucagauggugcuggugacu

SEQ ID NO: 380359 - RNA, 32 nt, Homo Sapiens
ccuguugagcucgcgcgggcugccgggagugg

SEQ ID NO: 380360 - RNA, 32 nt, Homo Sapiens
cucuggcugucucucagagaucuugcauuucu

SEQ ID NO: 380361 - RNA, 32 nt, Homo Sapiens
agagcuuauuaaaaauaaacaacugcuaguuc

SEQ ID NO: 380362 - RNA, 32 nt, Homo Sapiens
uuccugccugaaauugcugcugcccaucgcau

SEQ ID NO: 380363 - RNA, 32 nt, Homo Sapiens
ugcuuagcucuuuggccugugagaugcuuuga

SEQ ID NO: 380364 - RNA, 32 nt, Homo Sapiens
aucauggcccgaggacaagggcuguaagacag

SEQ ID NO: 380365 - RNA, 32 nt, Homo Sapiens
uuacacaaggaaucucaaaaucuuaaguugga

SEQ ID NO: 380366 - RNA, 32 nt, Homo Sapiens
auaguuuuuaaauuaauuuagagcagaaccuu

SEQ ID NO: 380367 - RNA, 32 nt, Homo Sapiens
guuaaaaacaauaccaguauuugauccaguuu

SEQ ID NO: 380368 - RNA, 32 nt, Homo Sapiens
ucuggauuuucccacccugcucuucuuggcag

SEQ ID NO: 380369 - RNA, 32 nt, Homo Sapiens
aggugggacccacccacccccauccaggaacc

SEQ ID NO: 380370 - RNA, 32 nt, Homo Sapiens
cuauguuguaaaaaugggaagguuguaaacua

SEQ ID NO: 380371 - RNA, 32 nt, Homo Sapiens
aacggcgggccucaccuggacccggggacucu

SEQ ID NO: 380372 - RNA, 32 nt, Homo Sapiens
cgccauggcuuuacuuacugcggccgcccggc

SEQ ID NO: 380373 - RNA, 32 nt, Homo Sapiens
gguucuccagaaaaacugaaauaauaagauga

SEQ ID NO: 380374 - RNA, 32 nt, Homo Sapiens
cugcagaggggaggcuggcagggacaaauucc

SEQ ID NO: 380375 - RNA, 32 nt, Homo Sapiens
auuauaaaagcaaacuaaguugugaagcuaua

SEQ ID NO: 380376 - RNA, 32 nt, Homo Sapiens
cugaugcgccgcuccuucuccuuugcccucuc

SEQ ID NO: 380377 - RNA, 32 nt, Homo Sapiens
uuaacuaauuuccucacuccaagcucuuuucu

SEQ ID NO: 380378 - RNA, 32 nt, Homo Sapiens
uuggcuguacuacuccaugaagggccgggggc

SEQ ID NO: 380379 - RNA, 32 nt, Homo Sapiens
cuuuuuuguguguucuuuucaccaccccuuug

SEQ ID NO: 380380 - RNA, 32 nt, Homo Sapiens
ugugaagaggggcacgccugggcugucccaca

SEQ ID NO: 380381 - RNA, 32 nt, Homo Sapiens
uguuguuuguuuuuagauccacaguacaugag

SEQ ID NO: 380382 - RNA, 32 nt, Homo Sapiens
guaacuauaguuuagaaauguacagugaauac

SEQ ID NO: 380383 - RNA, 32 nt, Homo Sapiens
ucauccaucauucugggagaaggcauauucaa

SEQ ID NO: 380384 - RNA, 32 nt, Homo Sapiens
guguaugaaacacuggaagaggucaccuagga

SEQ ID NO: 380385 - RNA, 30 nt, Homo Sapiens
aaggcuccggggggcgcgggugucccccgc

SEQ ID NO: 380386 - RNA, 32 nt, Homo Sapiens
ccugaagaaaguguaaggauagauauuuaaug

SEQ ID NO: 380387 - RNA, 32 nt, Homo Sapiens
auaugcuagaaaaggcauuuugggguuauguu

SEQ ID NO: 380388 - RNA, 32 nt, Homo Sapiens
caacuugccuucuguauguggcuuugagaugg

SEQ ID NO: 380389 - RNA, 32 nt, Homo Sapiens
caggagcgguggccagggcugauggggcgugu

SEQ ID NO: 380390 - RNA, 32 nt, Homo Sapiens
uuucccuuuggugcucccuccuccccauguac

SEQ ID NO: 380391 - RNA, 32 nt, Homo Sapiens
ccuugaccaaaaucagcuuuguaacuguuuuc

SEQ ID NO: 380392 - RNA, 32 nt, Homo Sapiens
aaaacgacaaucuaauaaaauaaaacaaggaa

SEQ ID NO: 380393 - RNA, 32 nt, Homo Sapiens
cugggccgggguggaaggagggggauaaaccu

SEQ ID NO: 380394 - RNA, 32 nt, Homo Sapiens
gagacaugggcgggcgcugguggauuccucug

SEQ ID NO: 380395 - RNA, 32 nt, Homo Sapiens
ugccaaguugccuuacagagccaggacagcuu

SEQ ID NO: 380396 - RNA, 32 nt, Homo Sapiens
aacagauaacaccaaaccaaaccccguagcuc

SEQ ID NO: 380397 - RNA, 32 nt, Homo Sapiens
aaugucuuagaagucagacuucuuuuucaagg

SEQ ID NO: 380398 - RNA, 32 nt, Homo Sapiens
aaaguuuuaaguggcagguccagauauguaaa

SEQ ID NO: 380399 - RNA, 32 nt, Homo Sapiens
aacuucuuccuggccugggcuccgugccgcuc

SEQ ID NO: 380400 - RNA, 32 nt, Homo Sapiens
cucccgcucccucugcuccaccaggacacaug

SEQ ID NO: 380401 - RNA, 32 nt, Homo Sapiens
ugagggugaaguugcuaacauaagaaacgagu

SEQ ID NO: 380402 - RNA, 32 nt, Homo Sapiens
aagagauuuaaaccucuucuuggagaagacug

SEQ ID NO: 380403 - RNA, 32 nt, Homo Sapiens
ggcaccagcaccaccaugucgcgcucagugcu

SEQ ID NO: 380404 - RNA, 32 nt, Homo Sapiens
acugaacuagcacuucugaauauccugaggcg

SEQ ID NO: 380405 - RNA, 32 nt, Homo Sapiens
gcaauuaucaguuaugaauguuaggaacacuu

SEQ ID NO: 380406 - RNA, 32 nt, Homo Sapiens
cguuauuuuuauuuuaccuuuuucauuuuaca

SEQ ID NO: 380407 - RNA, 32 nt, Homo Sapiens
uuaaccuuccccacuggugaugaccuaggcag

SEQ ID NO: 380408 - RNA, 32 nt, Homo Sapiens
guauguguguguaaauauaaaggucucacauu

SEQ ID NO: 380409 - RNA, 32 nt, Homo Sapiens
cgaaggucugcgguccuguaucuacagacacg

SEQ ID NO: 380410 - RNA, 32 nt, Homo Sapiens
ugcgggagccgaggaggacggcgugggcccug

SEQ ID NO: 380411 - RNA, 32 nt, Homo Sapiens
guuaggggaucuuuauuggaaaacuuuuuugg

SEQ ID NO: 380412 - RNA, 32 nt, Homo Sapiens
aaaauaaauuuucacuguauuugagaugggag

SEQ ID NO: 380413 - RNA, 32 nt, Homo Sapiens
ggcagcugugggcaaugcuggaggcugugcau

SEQ ID NO: 380414 - RNA, 32 nt, Homo Sapiens
cuacccaguuccaugauauuucuugcccuguu

SEQ ID NO: 380415 - RNA, 32 nt, Homo Sapiens
cuuucuccagggaaggcccacucugcccugaa

SEQ ID NO: 380416 - RNA, 32 nt, Homo Sapiens
acucaacaauacugaugccuuguuuuuuuugc

SEQ ID NO: 380417 - RNA, 32 nt, Homo Sapiens
agcgggagcggacuacgugccgggccauggcc

SEQ ID NO: 380418 - RNA, 32 nt, Homo Sapiens
agugccuggugcccagugaccugggggagccu

SEQ ID NO: 380419 - RNA, 32 nt, Homo Sapiens
ucucuauccccaggaauagaauuuaagggaug

SEQ ID NO: 380420 - RNA, 32 nt, Homo Sapiens
ugauaguuuuugcagaugaaaaucacuucucu

SEQ ID NO: 380421 - RNA, 32 nt, Homo Sapiens
aggaagaaggcacaacuaucucaggccuuaaa

SEQ ID NO: 380422 - RNA, 32 nt, Homo Sapiens
caagggagaaugauaagguuucaacuggguga

SEQ ID NO: 380423 - RNA, 32 nt, Homo Sapiens
uaagugaacgugugggagaaaaacacuuuuag

SEQ ID NO: 380424 - RNA, 32 nt, Homo Sapiens
uuugaaauagacugaaaauuaagggucaccac

SEQ ID NO: 380425 - RNA, 32 nt, Homo Sapiens
aguuuuaacuuuucuuuuuuuuuuuuaaguuu

SEQ ID NO: 380426 - RNA, 32 nt, Homo Sapiens
uaaaacuguacuguugaauucuguaaauaguu

SEQ ID NO: 380427 - RNA, 31 nt, Homo Sapiens
cagccaggggcgugugcgccccgcgcggagc

SEQ ID NO: 380428 - RNA, 32 nt, Homo Sapiens
cucggacccucugcugccccgggggcagcgug

SEQ ID NO: 380429 - RNA, 32 nt, Homo Sapiens
ccuuuugucuugguguucaugaucucccucua

SEQ ID NO: 380430 - RNA, 32 nt, Homo Sapiens
ccagucugagccucgccgcgggcgccuucggc

SEQ ID NO: 380431 - RNA, 32 nt, Homo Sapiens
aggccugccccagcugaucucgcucgcucgcc

SEQ ID NO: 380432 - RNA, 32 nt, Homo Sapiens
guuugcagacagaaaaaguaaacugucaagga

SEQ ID NO: 380433 - RNA, 32 nt, Homo Sapiens
agugugcaucuuccucucuggguuucaguuuu

SEQ ID NO: 380434 - RNA, 32 nt, Homo Sapiens
gcauacuuucacaacuaacucagcauaagaaa

SEQ ID NO: 380435 - RNA, 32 nt, Homo Sapiens
aaguugagacuuuauuuuuuuaucaccaaccu

SEQ ID NO: 380436 - RNA, 32 nt, Homo Sapiens
cagugcuuucuggagcucacaccuggcgcuca

SEQ ID NO: 380437 - RNA, 32 nt, Homo Sapiens
guacugcuuacaauaucuuuagguuccugaaa

SEQ ID NO: 380438 - RNA, 32 nt, Homo Sapiens
uuucucccugccaaccuccuccucuccugcca

SEQ ID NO: 380439 - RNA, 32 nt, Homo Sapiens
guccacuuucccgugagucuccaggucuccag

SEQ ID NO: 380440 - RNA, 32 nt, Homo Sapiens
uuuuuuauuucugcaaguucaaauuaauguau

SEQ ID NO: 380441 - RNA, 32 nt, Homo Sapiens
uuuuucuaaaagagaaaugauuuaaugaaucu

SEQ ID NO: 380442 - RNA, 32 nt, Homo Sapiens
ugcccgcuucgcgcccgaggccugcgccccga

SEQ ID NO: 380443 - RNA, 32 nt, Homo Sapiens
ccuaaaaagggagccgcgaagggcgcugggca

SEQ ID NO: 380444 - RNA, 32 nt, Homo Sapiens
gaugaggaaaagauuaacuaauagaugcauag

SEQ ID NO: 380445 - RNA, 32 nt, Homo Sapiens
cucuauaacaugacaagaacuacuucacagua

SEQ ID NO: 380446 - RNA, 32 nt, Homo Sapiens
ugacugagaaaguuaguuacaaugcacuuaac

SEQ ID NO: 380447 - RNA, 32 nt, Homo Sapiens
agcccagacucagucagacauguucacuaaug

SEQ ID NO: 380448 - RNA, 32 nt, Homo Sapiens
gccacaggcuguaugaaaggccacuuuggaaa

SEQ ID NO: 380449 - RNA, 32 nt, Homo Sapiens
ggcggagggucucaagcuuuccccggugucgg

SEQ ID NO: 380450 - RNA, 32 nt, Homo Sapiens
acccaggcaucuuggcccccagccccucgucg

SEQ ID NO: 380451 - RNA, 32 nt, Homo Sapiens
agguucccauugauugugagcaagauauuuau

SEQ ID NO: 380452 - RNA, 32 nt, Homo Sapiens
ucaaaguacuaaaacuagauaacuuaaauaau

SEQ ID NO: 380453 - RNA, 32 nt, Homo Sapiens
cauuaaguucccuccgcgggaugcugcauugu

SEQ ID NO: 380454 - RNA, 32 nt, Homo Sapiens
gagagguuguacacacauugguaguuauuuug

SEQ ID NO: 380455 - RNA, 32 nt, Homo Sapiens
agcuuauguuucuuauucucuguuugcuuuug

SEQ ID NO: 380456 - RNA, 32 nt, Homo Sapiens
uuccaacaguuuugagacauuaaugaggagaa

SEQ ID NO: 380457 - RNA, 32 nt, Homo Sapiens
ugaacgucgcuaaacaggauaggacuaaaauu

SEQ ID NO: 380458 - RNA, 32 nt, Homo Sapiens
uuaauguaucuuaaaggacauaaaauuuaaaa

SEQ ID NO: 380459 - RNA, 32 nt, Homo Sapiens
gugaugugauucacuaaccuuuucucuuaauu

SEQ ID NO: 380460 - RNA, 32 nt, Homo Sapiens
ggaggugcuuguuggguccuagacccagggac

SEQ ID NO: 380461 - RNA, 32 nt, Homo Sapiens
auccggacuuuuuaaauaaaaacaaguaaaau

SEQ ID NO: 380462 - RNA, 32 nt, Homo Sapiens
uuacagagaagcugucaaugaggccuggggca

SEQ ID NO: 380463 - RNA, 32 nt, Homo Sapiens
gacccuucggcucaccaagaacggggcccagg

SEQ ID NO: 380464 - RNA, 32 nt, Homo Sapiens
ccacccugaggaaagagcauggagagccagca

SEQ ID NO: 380465 - RNA, 32 nt, Homo Sapiens
gagcucugguggagacaaaugaggucuauuac

SEQ ID NO: 380466 - RNA, 32 nt, Homo Sapiens
ucuggcgcuuccuugcugggaagcccgggaca

SEQ ID NO: 380467 - RNA, 32 nt, Homo Sapiens
gauagauuuuugggaguuugaccagagaugca

SEQ ID NO: 380468 - RNA, 32 nt, Homo Sapiens
uccuuuuaaccauuuuaaccuagauguuuaac

SEQ ID NO: 380469 - RNA, 32 nt, Homo Sapiens
aucucugcuuaauggaaaaaauacuaaucuuu

SEQ ID NO: 380470 - RNA, 32 nt, Homo Sapiens
cgccugugguggccagcuacucaggaggcuga

SEQ ID NO: 380471 - RNA, 32 nt, Homo Sapiens
ucucucgggggccaggggucaucgguuugacc

SEQ ID NO: 380472 - RNA, 32 nt, Homo Sapiens
uucuggaaaauauuuuucagacucccucaaac

SEQ ID NO: 380473 - RNA, 32 nt, Homo Sapiens
cagggaaagagaccuuuaaauauuuugcuaua

SEQ ID NO: 380474 - RNA, 32 nt, Homo Sapiens
ugcagacaaaaaugugacaauaugcuuugaaa

SEQ ID NO: 380475 - RNA, 32 nt, Homo Sapiens
auuauacaaggguaaaauuaagcaauauauua

SEQ ID NO: 380476 - RNA, 32 nt, Homo Sapiens
gacuuauuuaguauuucauuuaacuuuauugu

SEQ ID NO: 380477 - RNA, 32 nt, Homo Sapiens
guggagacuggcacucucccagcccuguccuu

SEQ ID NO: 380478 - RNA, 30 nt, Homo Sapiens
gaggcucuggacugcauccuaccaccaacu

SEQ ID NO: 380479 - RNA, 32 nt, Homo Sapiens
cugucuauuuaguauaucaaaguuuuaguagu

SEQ ID NO: 380480 - RNA, 32 nt, Homo Sapiens
acgcucucucuuucucucuuuaauuuugguuu

SEQ ID NO: 380481 - RNA, 32 nt, Homo Sapiens
cgggggacgaguccggagcagcagccagcagc

SEQ ID NO: 380482 - RNA, 32 nt, Homo Sapiens
guggaugguuugucuguaaaugagcugaaugu

SEQ ID NO: 380483 - RNA, 28 nt, Homo Sapiens
ccuggggugccccugccgagguggccug

SEQ ID NO: 380484 - RNA, 32 nt, Homo Sapiens
gacccaggccccaggaccuccaggaccuggca

SEQ ID NO: 380485 - RNA, 32 nt, Homo Sapiens
gccccacuauucuccucuuuaucacagaugaa

SEQ ID NO: 380486 - RNA, 32 nt, Homo Sapiens
cuaccccggccgcggagccggcucacugcacu

SEQ ID NO: 380487 - RNA, 32 nt, Homo Sapiens
cuggguguguugucaucagcugugauauguuu

SEQ ID NO: 380488 - RNA, 32 nt, Homo Sapiens
ggacgaguucuaugaugcgcugucagauuccg

SEQ ID NO: 380489 - RNA, 32 nt, Homo Sapiens
ugcuggcuuagggucagaaguaccucacagug

SEQ ID NO: 380490 - RNA, 32 nt, Homo Sapiens
guuagacaagccuggaggacaaaacagcggga

SEQ ID NO: 380491 - RNA, 32 nt, Homo Sapiens
cuccucccacguuuugaauauuucgugccuuu

SEQ ID NO: 380492 - RNA, 32 nt, Homo Sapiens
cuuaacagcucuuuugggauuggguguuucau

SEQ ID NO: 380493 - RNA, 32 nt, Homo Sapiens
caauucuaaaagaccaguaucuauguauacuu

SEQ ID NO: 380494 - RNA, 32 nt, Homo Sapiens
uacucuuuuagcguguuagaaaucacuuguuu

SEQ ID NO: 380495 - RNA, 32 nt, Homo Sapiens
gcagcccuuucugcauggggugcucuguugac

SEQ ID NO: 380496 - RNA, 32 nt, Homo Sapiens
agugaccauagcuccuucucucuuacauugaa

SEQ ID NO: 380497 - RNA, 32 nt, Homo Sapiens
gaauuuuguaaaacagauguuguauguaauuu

SEQ ID NO: 380498 - RNA, 32 nt, Homo Sapiens
agccugccccaugcuuccagccugcagaacac

SEQ ID NO: 380499 - RNA, 32 nt, Homo Sapiens
ucacacgcccucuucccuggccccacacacag

SEQ ID NO: 380500 - RNA, 32 nt, Homo Sapiens
auuuguuuuuaaaaguauugggaaucagauua

SEQ ID NO: 380501 - RNA, 32 nt, Homo Sapiens
ccgagggcugggcuacuggggugucugucagu

SEQ ID NO: 380502 - RNA, 29 nt, Homo Sapiens
ucccauucacgucaauaccaagaaccaug

SEQ ID NO: 380503 - RNA, 32 nt, Homo Sapiens
uaaauccugaccaauccaacucugaauuuuaa

SEQ ID NO: 380504 - RNA, 32 nt, Homo Sapiens
gguggcugccagcccuggggcccggcacaggc

SEQ ID NO: 380505 - RNA, 32 nt, Homo Sapiens
ggcagcccagccccggccucccagcuuacacu

SEQ ID NO: 380506 - RNA, 32 nt, Homo Sapiens
accccaguucugcuccucuccaggcacccuuc

SEQ ID NO: 380507 - RNA, 32 nt, Homo Sapiens
gcuaauuaaauuauaaaguugcuaugauggua

SEQ ID NO: 380508 - RNA, 32 nt, Homo Sapiens
ucaacucccgucucggccgccucgaagucccc

SEQ ID NO: 380509 - RNA, 32 nt, Homo Sapiens
cucgaccgcgguccgcagcugcaccgccucuc

SEQ ID NO: 380510 - RNA, 32 nt, Homo Sapiens
gcucccaacgucuacuucuccuaccucaacag

SEQ ID NO: 380511 - RNA, 32 nt, Homo Sapiens
guaaaacuuugucuucaaguaaucugacagca

SEQ ID NO: 380512 - RNA, 32 nt, Homo Sapiens
gaacuauuuuacucagaaaugaaugucccaaa

SEQ ID NO: 380513 - RNA, 32 nt, Homo Sapiens
aacaaaaaaaauuuuuuuaaaaaaaaaaaaaa

SEQ ID NO: 380514 - RNA, 32 nt, Homo Sapiens
aggggccccguggaaggcaggauacccagcag

SEQ ID NO: 380515 - RNA, 32 nt, Homo Sapiens
ugccccuccagaguccagagccaggaaggggc

SEQ ID NO: 380516 - RNA, 32 nt, Homo Sapiens
ucuucaggcaaccagccgccucaggagcuggg

SEQ ID NO: 380517 - RNA, 32 nt, Homo Sapiens
aagugaaguccauuaucuccaggagguagcaa

SEQ ID NO: 380518 - RNA, 32 nt, Homo Sapiens
ucgaggaccugccuuucccauuugcugccuga

SEQ ID NO: 380519 - RNA, 32 nt, Homo Sapiens
ucugcgggccgcggggccgcguucccagugga

SEQ ID NO: 380520 - RNA, 28 nt, Homo Sapiens
ccaagaucgcggcugccgaggucagucc

SEQ ID NO: 380521 - RNA, 29 nt, Homo Sapiens
uuuguguaaaguuugucauuucauacucc

SEQ ID NO: 380522 - RNA, 32 nt, Homo Sapiens
gcugugcucccuauuucaacccuaacagcucu

SEQ ID NO: 380523 - RNA, 32 nt, Homo Sapiens
aaucuccguuugcaugauacgcuuuguuagaa

SEQ ID NO: 380524 - RNA, 32 nt, Homo Sapiens
cuaauggacuaggaagaacugcucuugagccg

SEQ ID NO: 380525 - RNA, 32 nt, Homo Sapiens
uuuggggugaaugaaaauuauuccuugcuuuc

SEQ ID NO: 380526 - RNA, 32 nt, Homo Sapiens
cccgccgcugacgcgcagccuccgccugcagc

SEQ ID NO: 380527 - RNA, 32 nt, Homo Sapiens
aaacacagauggauaagcaauauguuggacua

SEQ ID NO: 380528 - RNA, 32 nt, Homo Sapiens
ggaugaaaaucuaggacuguauggaaguaagc

SEQ ID NO: 380529 - RNA, 32 nt, Homo Sapiens
caguuuccaaauauuuguuucauaaguuaaga

SEQ ID NO: 380530 - RNA, 32 nt, Homo Sapiens
cuggacucacccaaaagaaagagaccgaaauc

SEQ ID NO: 380531 - RNA, 32 nt, Homo Sapiens
gcaccgccgagcugcgagcggcugcgagcgag

SEQ ID NO: 380532 - RNA, 32 nt, Homo Sapiens
cuucuuuaucccaccauauagucuuauuaguu

SEQ ID NO: 380533 - RNA, 32 nt, Homo Sapiens
cuuccaaauaaagccuggguccucuugcggua

SEQ ID NO: 380534 - RNA, 32 nt, Homo Sapiens
uuuuauuccaaggcaggguaauccccgucaac

SEQ ID NO: 380535 - RNA, 32 nt, Homo Sapiens
gggcaugucauuguacauccacacugaugaaa

SEQ ID NO: 380536 - RNA, 32 nt, Homo Sapiens
uuuucuuugugauguuuucugcaaauauugaa

SEQ ID NO: 380537 - RNA, 32 nt, Homo Sapiens
augggcagcucuuuuaaguguaggugugaagg

SEQ ID NO: 380538 - RNA, 32 nt, Homo Sapiens
cccacugccuggagaaugaucuguugccagaa

SEQ ID NO: 380539 - RNA, 32 nt, Homo Sapiens
ccccccgcgccuaguguccgggacgcgccuga

SEQ ID NO: 380540 - RNA, 32 nt, Homo Sapiens
cugcucaggccaguugugagccagggagaaug

SEQ ID NO: 380541 - RNA, 32 nt, Homo Sapiens
gcaaccucucugagccucaguugucucuucug

SEQ ID NO: 380542 - RNA, 32 nt, Homo Sapiens
cuuugaugcuuaguuauguugcuggagaaaag

SEQ ID NO: 380543 - RNA, 32 nt, Homo Sapiens
auuacaaaaccagacacuuuuacauucauggu

SEQ ID NO: 380544 - RNA, 32 nt, Homo Sapiens
accccucugagccccaguccggucuaagaaag

SEQ ID NO: 380545 - RNA, 30 nt, Homo Sapiens
cccgugcggcccgugcgcagccgcgcucug

SEQ ID NO: 380546 - RNA, 32 nt, Homo Sapiens
aacacuggaugaugaugauaugaauguagaca

SEQ ID NO: 380547 - RNA, 28 nt, Homo Sapiens
cuuuguguugugaugauguguuuuaaaa

SEQ ID NO: 380548 - RNA, 32 nt, Homo Sapiens
gacacucuguggauugugaccuguuggugggc

SEQ ID NO: 380549 - RNA, 32 nt, Homo Sapiens
ugugguaagcacuaaauauagaugcaaaagug

SEQ ID NO: 380550 - RNA, 32 nt, Homo Sapiens
uggccaucuuggcuccucuccccuuguuccug

SEQ ID NO: 380551 - RNA, 32 nt, Homo Sapiens
gaccugacugggaguuuuauccagucacuucu

SEQ ID NO: 380552 - RNA, 32 nt, Homo Sapiens
aaacaaaaaccuguuguguacacacacccacu

SEQ ID NO: 380553 - RNA, 32 nt, Homo Sapiens
uguuggucaggcugcucuccaacuccuggccu

SEQ ID NO: 380554 - RNA, 32 nt, Homo Sapiens
cugagcccgucggguaggcucuccucgaguuc

SEQ ID NO: 380555 - RNA, 32 nt, Homo Sapiens
cccauggcagguuuccuguuuuccaucguccc

SEQ ID NO: 380556 - RNA, 32 nt, Homo Sapiens
acaagauuuaugaagaaaaauaugcugacacu

SEQ ID NO: 380557 - RNA, 32 nt, Homo Sapiens
gguuaaagggacgagucugccuuccuggcugu

SEQ ID NO: 380558 - RNA, 32 nt, Homo Sapiens
cauuuccaguaaaauuucguaacuggucacag

SEQ ID NO: 380559 - RNA, 32 nt, Homo Sapiens
caugggccuggccaccucucuccuuugcugag

SEQ ID NO: 380560 - RNA, 32 nt, Homo Sapiens
ccccagaguccacguggaggaaaaggacccau

SEQ ID NO: 380561 - RNA, 32 nt, Homo Sapiens
ccugugaugcccucggauuaucagcacuccag

SEQ ID NO: 380562 - RNA, 32 nt, Homo Sapiens
agacagaaucucucugaauccauuacuccaug

SEQ ID NO: 380563 - RNA, 32 nt, Homo Sapiens
cccauucucugcugcguagaugcccuggccca

SEQ ID NO: 380564 - RNA, 32 nt, Homo Sapiens
acguccugcacuuucucggaccagucccccca

SEQ ID NO: 380565 - RNA, 32 nt, Homo Sapiens
auugugguaucguggaguuuuaaaagaucaag

SEQ ID NO: 380566 - RNA, 32 nt, Homo Sapiens
gcuuagggguagucauuccaucuuuagauuau

SEQ ID NO: 380567 - RNA, 32 nt, Homo Sapiens
accgcgccuggccagggacuauacucuuuuua

SEQ ID NO: 380568 - RNA, 32 nt, Homo Sapiens
auaucgaaacaucacauuguacccuguaaauu

SEQ ID NO: 380569 - RNA, 32 nt, Homo Sapiens
ggcuugaaaaggaggagaauugggggugguug

SEQ ID NO: 380570 - RNA, 32 nt, Homo Sapiens
auauaugucuguuuauuucaguuugugguuuc

SEQ ID NO: 380571 - RNA, 31 nt, Homo Sapiens
uuuucccuuugagaugaagugcuguucuuuu

SEQ ID NO: 380572 - RNA, 32 nt, Homo Sapiens
uucuauguaaaaacuggccauaaagaaauuau

SEQ ID NO: 380573 - RNA, 30 nt, Homo Sapiens
acaagaggagguggaaggccauacagaaug

SEQ ID NO: 380574 - RNA, 32 nt, Homo Sapiens
aaauuucuguugcaugagaacucucugcauua

SEQ ID NO: 380575 - RNA, 32 nt, Homo Sapiens
aacugagacauucuggagcuggaaagccuguc

SEQ ID NO: 380576 - RNA, 32 nt, Homo Sapiens
uuuggggaguuuuaguuuauauucccauagua

SEQ ID NO: 380577 - RNA, 32 nt, Homo Sapiens
aauggguaacuuuuauucuuuaugaugucuac

SEQ ID NO: 380578 - RNA, 32 nt, Homo Sapiens
cuccugguuggaacuacaggaauagaacugga

SEQ ID NO: 380579 - RNA, 32 nt, Homo Sapiens
gggggcugacuucccugacaucucucuccaaa

SEQ ID NO: 380580 - RNA, 32 nt, Homo Sapiens
gcaugguggggcacgccuguauucccagcuac

SEQ ID NO: 380581 - RNA, 32 nt, Homo Sapiens
gagacacuggugguggcggacccggccgccgg

SEQ ID NO: 380582 - RNA, 32 nt, Homo Sapiens
cuucguggacuguguccugguccauguggugc

SEQ ID NO: 380583 - RNA, 32 nt, Homo Sapiens
gagacuuuuguuucuauuuaauguuuucgaga

SEQ ID NO: 380584 - RNA, 32 nt, Homo Sapiens
aucagagcacacccucggaggaagggauacau

SEQ ID NO: 380585 - RNA, 32 nt, Homo Sapiens
cauuauuaaacuucagaaaagcagcagccaug

SEQ ID NO: 380586 - RNA, 32 nt, Homo Sapiens
acacauugccuggccguggcaggugguuggaa

SEQ ID NO: 380587 - RNA, 32 nt, Homo Sapiens
cuuuccuguagcccauguucgaccacaugcac

SEQ ID NO: 380588 - RNA, 32 nt, Homo Sapiens
uuuauuaauguuuagauuuuucauuuggugug

SEQ ID NO: 380589 - RNA, 32 nt, Homo Sapiens
acauaauuuuuaaggccaaggcacauuugacu

SEQ ID NO: 380590 - RNA, 32 nt, Homo Sapiens
ugugacaugaagacauaauauguauucacuua

SEQ ID NO: 380591 - RNA, 32 nt, Homo Sapiens
uugaaaaaugucuguuaugcaaugcuggagac

SEQ ID NO: 380592 - RNA, 32 nt, Homo Sapiens
guggccaguacuccggccuccuagcugcuacu

SEQ ID NO: 380593 - RNA, 32 nt, Homo Sapiens
auucccguacguguucauuuuauuuucaugcu

SEQ ID NO: 380594 - RNA, 32 nt, Homo Sapiens
aauauggcugggugcaguggcucacaccggua

SEQ ID NO: 380595 - RNA, 31 nt, Homo Sapiens
agccagccagccagccaacugggcgggggca

SEQ ID NO: 380596 - RNA, 32 nt, Homo Sapiens
uuggucccagcuuuugagagauaaaucccuua

SEQ ID NO: 380597 - RNA, 32 nt, Homo Sapiens
ggucccugggguggggauagggagcagaugca

SEQ ID NO: 380598 - RNA, 32 nt, Homo Sapiens
ucuuaauuuaauuuucuuucugagcuggagaa

SEQ ID NO: 380599 - RNA, 32 nt, Homo Sapiens
ucggggacgacggggcccuggaggacauucgc

SEQ ID NO: 380600 - RNA, 32 nt, Homo Sapiens
cuguaccaaacacucaaaacaugcauugggcu

SEQ ID NO: 380601 - RNA, 32 nt, Homo Sapiens
ucucggguguccugggucgguggggagcccag

SEQ ID NO: 380602 - RNA, 32 nt, Homo Sapiens
ggaugggggcaggagaguuagcaaaggugaca

SEQ ID NO: 380603 - RNA, 32 nt, Homo Sapiens
ccgcgggagaggaggccaugggcgcgcgcggg

SEQ ID NO: 380604 - RNA, 32 nt, Homo Sapiens
aagucgccgcucucgggcugcucacgucucuu

SEQ ID NO: 380605 - RNA, 31 nt, Homo Sapiens
ucucauugccagugguguccaagggcccccg

SEQ ID NO: 380606 - RNA, 32 nt, Homo Sapiens
cagccagaggaccuuccuggcuaugcaggugc

SEQ ID NO: 380607 - RNA, 32 nt, Homo Sapiens
cuguccauacaauggaauauuauuuggccaua

SEQ ID NO: 380608 - RNA, 32 nt, Homo Sapiens
guuaaauugauugcaguuugcauauugccuaa

SEQ ID NO: 380609 - RNA, 32 nt, Homo Sapiens
cacuuuuaacuguguuccuuacugcugccaca

SEQ ID NO: 380610 - RNA, 32 nt, Homo Sapiens
uacuagcaacuuucauccuuugaaacgugugc

SEQ ID NO: 380611 - RNA, 31 nt, Homo Sapiens
guaauuuuggauugccugcccuuggcugaaa

SEQ ID NO: 380612 - RNA, 32 nt, Homo Sapiens
gacucuggagggucuuccuucuugcuccuccc

SEQ ID NO: 380613 - RNA, 32 nt, Homo Sapiens
cugaauuccaacucuccauacaucccaauguc

SEQ ID NO: 380614 - RNA, 32 nt, Homo Sapiens
acuugcauaugugccguauuaaggguugacaa

SEQ ID NO: 380615 - RNA, 32 nt, Homo Sapiens
aacucagguucggccgguccccggcccgccug

SEQ ID NO: 380616 - RNA, 32 nt, Homo Sapiens
auugaaugcuguaagacuacacaaaugcugua

SEQ ID NO: 380617 - RNA, 32 nt, Homo Sapiens
ccccugugacuggagugcauguugacaccagc

SEQ ID NO: 380618 - RNA, 32 nt, Homo Sapiens
gaacccugaaauuuauauaggugagacaauag

SEQ ID NO: 380619 - RNA, 32 nt, Homo Sapiens
gccuauuuucuuuucguuuagauacauugccu

SEQ ID NO: 380620 - RNA, 32 nt, Homo Sapiens
accaauguguggcaguucagccugcagcagag

SEQ ID NO: 380621 - RNA, 32 nt, Homo Sapiens
uauaaaauaaaacuuguuagcuucgaugaagu

SEQ ID NO: 380622 - RNA, 32 nt, Homo Sapiens
acaauugcacuuuaaguauuacacagaaguaa

SEQ ID NO: 380623 - RNA, 32 nt, Homo Sapiens
gccaccgcgaugccgaaggcgcccaagcagca

SEQ ID NO: 380624 - RNA, 32 nt, Homo Sapiens
ccgggccugaggaggugaugggcgcgcagggg

SEQ ID NO: 380625 - RNA, 32 nt, Homo Sapiens
uccccgaggacugugacacauacccauucugg

SEQ ID NO: 380626 - RNA, 32 nt, Homo Sapiens
ggaguccggccagggccggcgcggcgaugaug

SEQ ID NO: 380627 - RNA, 32 nt, Homo Sapiens
uuuauccucuaaaauauguuaagggauaaauu

SEQ ID NO: 380628 - RNA, 32 nt, Homo Sapiens
ugguuagcacaccauguaaccucuggaacacu

SEQ ID NO: 380629 - RNA, 32 nt, Homo Sapiens
ugccuccaggaugaaaaugagaaggaguuguc

SEQ ID NO: 380630 - RNA, 32 nt, Homo Sapiens
uuccuuagcacauaucacuauuucauauacca

SEQ ID NO: 380631 - RNA, 32 nt, Homo Sapiens
cuccuucuucuuccugcuguccugcccaagaa

SEQ ID NO: 380632 - RNA, 32 nt, Homo Sapiens
cacuaauaacuguguucuaauuaacacaguaa

SEQ ID NO: 380633 - RNA, 32 nt, Homo Sapiens
uguucugagccauaguucucuaacaucuccgu

SEQ ID NO: 380634 - RNA, 32 nt, Homo Sapiens
auagcucgagaaagaauuuuuuccaaggaaau

SEQ ID NO: 380635 - RNA, 32 nt, Homo Sapiens
cuccccaaagugcaugagacacaugcuaaaau

SEQ ID NO: 380636 - RNA, 32 nt, Homo Sapiens
ucucacuugcacccacuuucacuuccuauauc

SEQ ID NO: 380637 - RNA, 32 nt, Homo Sapiens
ccucugucaccauggugccggcucggcugggc

SEQ ID NO: 380638 - RNA, 32 nt, Homo Sapiens
agaggcgguggcggcggcggcugcggcauccu

SEQ ID NO: 380639 - RNA, 32 nt, Homo Sapiens
ugcuaacaucaacacaauccauucuucuuguu

SEQ ID NO: 380640 - RNA, 32 nt, Homo Sapiens
cacagcgaggucggcagcggcacagcgagguc

SEQ ID NO: 380641 - RNA, 32 nt, Homo Sapiens
acugagccugaaguuauggggcguguauacag

SEQ ID NO: 380642 - RNA, 32 nt, Homo Sapiens
uuaaauucucuaaccgaauauucauggauggc

SEQ ID NO: 380643 - RNA, 32 nt, Homo Sapiens
ccgcgcgccugcccugcacgccgggcggcaac

SEQ ID NO: 380644 - RNA, 32 nt, Homo Sapiens
guuuaacuucccuuuuucuucuauccugucag

SEQ ID NO: 380645 - RNA, 32 nt, Homo Sapiens
uguuggacgcguugcauuugcagcgucugugg

SEQ ID NO: 380646 - RNA, 32 nt, Homo Sapiens
aucauggagcuccuuuuuccuuucuccacuaa

SEQ ID NO: 380647 - RNA, 32 nt, Homo Sapiens
guguagugacuuaguggcuguuuucugucuuc

SEQ ID NO: 380648 - RNA, 32 nt, Homo Sapiens
cugccggacaccuggucacagggagccacggg

SEQ ID NO: 380649 - RNA, 32 nt, Homo Sapiens
gccaaaggcgacgugccggccgccagcuccag

SEQ ID NO: 380650 - RNA, 32 nt, Homo Sapiens
aguugagcuuuucagcugggaagccuuuccau

SEQ ID NO: 380651 - RNA, 32 nt, Homo Sapiens
ccagaggaggggcuccguaccuguuggcuccu

SEQ ID NO: 380652 - RNA, 32 nt, Homo Sapiens
cuaugcucaggggcccuggagcagccacccca

SEQ ID NO: 380653 - RNA, 32 nt, Homo Sapiens
ucacucaguuuaauuucuuuuaaugguuaguu

SEQ ID NO: 380654 - RNA, 32 nt, Homo Sapiens
ugccuaagucuauuuagccucacagaugacuu

SEQ ID NO: 380655 - RNA, 32 nt, Homo Sapiens
acucugguucccucgccaaguguggcagccug

SEQ ID NO: 380656 - RNA, 32 nt, Homo Sapiens
ggcuugaggugcccgagggccucuauaugucc

SEQ ID NO: 380657 - RNA, 32 nt, Homo Sapiens
uucccuccugucauaauuccaucccuccucca

SEQ ID NO: 380658 - RNA, 32 nt, Homo Sapiens
caugugccugcugcgcugggcagacuuccaug

SEQ ID NO: 380659 - RNA, 32 nt, Homo Sapiens
uuuauuucagaauugauauuuugagaaaaaua

SEQ ID NO: 380660 - RNA, 32 nt, Homo Sapiens
guucauggucagaugucauacauucucagcug

SEQ ID NO: 380661 - RNA, 32 nt, Homo Sapiens
accugguguguuuucuauaaaucuucauaggu

SEQ ID NO: 380662 - RNA, 32 nt, Homo Sapiens
aaguggccccugcccacccccauccuaauccc

SEQ ID NO: 380663 - RNA, 32 nt, Homo Sapiens
ucuagaccagccugggcaacguggugaaaccc

SEQ ID NO: 380664 - RNA, 32 nt, Homo Sapiens
ugcucuggucugacaugguuucucucugucuu

SEQ ID NO: 380665 - RNA, 32 nt, Homo Sapiens
agguccccgccagcccccagcggccuuccccg

SEQ ID NO: 380666 - RNA, 32 nt, Homo Sapiens
agcuacaguuuuccuuccuuaaccaugggugc

SEQ ID NO: 380667 - RNA, 32 nt, Homo Sapiens
aauuagccgggcguauuggcgugcgccuguaa

SEQ ID NO: 380668 - RNA, 32 nt, Homo Sapiens
cuucugccccacucuauuccuuauccugcugc

SEQ ID NO: 380669 - RNA, 32 nt, Homo Sapiens
ggaccuuggaggaugaaggcgaguaugugaca

SEQ ID NO: 380670 - RNA, 32 nt, Homo Sapiens
gcagaagugguuucuucaguaggaaaugguua

SEQ ID NO: 380671 - RNA, 30 nt, Homo Sapiens
uccgcgaugguaggcggcggcggggucggc

SEQ ID NO: 380672 - RNA, 32 nt, Homo Sapiens
cuucuucccacggcacuuucugauguaacaau

SEQ ID NO: 380673 - RNA, 32 nt, Homo Sapiens
cuggggaaagccugaguuugcaaccaguugua

SEQ ID NO: 380674 - RNA, 32 nt, Homo Sapiens
ccaacuuuuggauuguaauaaaacaauugaaa

SEQ ID NO: 380675 - RNA, 30 nt, Homo Sapiens
uggaaaucacuggugaccuauaggauauua

SEQ ID NO: 380676 - RNA, 31 nt, Homo Sapiens
uguauucucaaugacaaauucacugaugccc

SEQ ID NO: 380677 - RNA, 32 nt, Homo Sapiens
aggucauuagcaugcauaucgaguuugcccuu

SEQ ID NO: 380678 - RNA, 32 nt, Homo Sapiens
uggcagauauagcauagcacaaaauuguuauu

SEQ ID NO: 380679 - RNA, 28 nt, Homo Sapiens
guguuugguguucacauguguuucuucu

SEQ ID NO: 380680 - RNA, 32 nt, Homo Sapiens
uuuguuucucaucaacauuuugacucucagaa

SEQ ID NO: 380681 - RNA, 32 nt, Homo Sapiens
gguggagaacagaaauccacgcucaaucucag

SEQ ID NO: 380682 - RNA, 32 nt, Homo Sapiens
ccuuuggagcaaagcugaugacaacuucccag

SEQ ID NO: 380683 - RNA, 32 nt, Homo Sapiens
uccuucuugguugucauagugauaggguagcc

SEQ ID NO: 380684 - RNA, 32 nt, Homo Sapiens
ucucuuuccaaaagucacuuugauucaacuuc

SEQ ID NO: 380685 - RNA, 32 nt, Homo Sapiens
ggaggggugcugggcucuggccuucucaugca

SEQ ID NO: 380686 - RNA, 32 nt, Homo Sapiens
cuaggucccugacugagcaccucccccgccuc

SEQ ID NO: 380687 - RNA, 32 nt, Homo Sapiens
aggaaaugacauuuggugucugcccacugcag

SEQ ID NO: 380688 - RNA, 32 nt, Homo Sapiens
acaaggggaaggaaaaugaggucaacaaaaaa

SEQ ID NO: 380689 - RNA, 32 nt, Homo Sapiens
gggacccaguaugggccaccccugcccacagu

SEQ ID NO: 380690 - RNA, 32 nt, Homo Sapiens
ccccugcgccccuccccuccccccugaccgca

SEQ ID NO: 380691 - RNA, 32 nt, Homo Sapiens
agggugccugacguguggggaacccucaguaa

SEQ ID NO: 380692 - RNA, 32 nt, Homo Sapiens
ugcugacugagaugugaagcagucggcccaug

SEQ ID NO: 380693 - RNA, 32 nt, Homo Sapiens
cacugcacuccagccugggugacagagcaagu

SEQ ID NO: 380694 - RNA, 32 nt, Homo Sapiens
ugcuagaggcuacuauauugaacaacacaguc

SEQ ID NO: 380695 - RNA, 32 nt, Homo Sapiens
ccuggcugagccccuguccuccccucuguccc

SEQ ID NO: 380696 - RNA, 32 nt, Homo Sapiens
ggaguggccauggugcugcugcugcugguggc

SEQ ID NO: 380697 - RNA, 32 nt, Homo Sapiens
cgcggccccagcuucaggacaagccccugcuu

SEQ ID NO: 380698 - RNA, 32 nt, Homo Sapiens
aagaccaaccggcaaacuuucagaugaaugcu

SEQ ID NO: 380699 - RNA, 32 nt, Homo Sapiens
cucaaccaauacuuuuuucuguuuucuugaug

SEQ ID NO: 380700 - RNA, 32 nt, Homo Sapiens
caacguagcgccccgcggacugcagugcgcuu

SEQ ID NO: 380701 - RNA, 32 nt, Homo Sapiens
aaaaauuagcccggcgugguggcaugcgccug

SEQ ID NO: 380702 - RNA, 32 nt, Homo Sapiens
aaucagacauuuccaaacaggagagagauggg

SEQ ID NO: 380703 - RNA, 32 nt, Homo Sapiens
gggacgugaacaugcgcuugcgguuugaggua

SEQ ID NO: 380704 - RNA, 32 nt, Homo Sapiens
aacccagccucugcucacacccgccccagcuu

SEQ ID NO: 380705 - RNA, 32 nt, Homo Sapiens
ccugccugaguugcuacuucugcacaaccccu

SEQ ID NO: 380706 - RNA, 32 nt, Homo Sapiens
uguuuugacaucuggucuccuagagaugagug

SEQ ID NO: 380707 - RNA, 32 nt, Homo Sapiens
cuuguuuaaugguaguuuuacaguguuucugg

SEQ ID NO: 380708 - RNA, 32 nt, Homo Sapiens
ggaaggcugagcuguaugcugcugccccuuug

SEQ ID NO: 380709 - RNA, 32 nt, Homo Sapiens
cguggaugaaagaacagaaguuguuuggaccu

SEQ ID NO: 380710 - RNA, 27 nt, Homo Sapiens
aaaagcaaauaguucugguauguuagc

SEQ ID NO: 380711 - RNA, 32 nt, Homo Sapiens
caguugaaaauggauuuuuaaauuauacugua

SEQ ID NO: 380712 - RNA, 32 nt, Homo Sapiens
ugggccggccccaggcuccccuggucuccucc

SEQ ID NO: 380713 - RNA, 32 nt, Homo Sapiens
guuugguccuauauuucuagucaugaugaaug

SEQ ID NO: 380714 - RNA, 32 nt, Homo Sapiens
cacacacaaucacaauauacaauauaagcuuu

SEQ ID NO: 380715 - RNA, 32 nt, Homo Sapiens
aguacuggguacaagugguccaaacuaagaua

SEQ ID NO: 380716 - RNA, 32 nt, Homo Sapiens
aauagcuguuuuuuuuuuuuuaaccauaacuc

SEQ ID NO: 380717 - RNA, 32 nt, Homo Sapiens
auuguccugauucuauuuuguaaauggagaaa

SEQ ID NO: 380718 - RNA, 32 nt, Homo Sapiens
ugcauuuuaccccaaccgaaggugacuuccau

SEQ ID NO: 380719 - RNA, 32 nt, Homo Sapiens
cuccugggcuccuggcuucccccuggagcugg

SEQ ID NO: 380720 - RNA, 32 nt, Homo Sapiens
ugagacugggacgcaacccauguccuggugac

SEQ ID NO: 380721 - RNA, 32 nt, Homo Sapiens
agaaacacccucacaggaacacucagaauaau

SEQ ID NO: 380722 - RNA, 32 nt, Homo Sapiens
ucuccggccuccugguucccacaacauauaag

SEQ ID NO: 380723 - RNA, 32 nt, Homo Sapiens
cagagaggggccugugggaggggcugggaaaa

SEQ ID NO: 380724 - RNA, 32 nt, Homo Sapiens
ggccaaccuuggccgacaugcagcauccaccc

SEQ ID NO: 380725 - RNA, 32 nt, Homo Sapiens
cacccgcuccgucucuagaacgggucgggccg

SEQ ID NO: 380726 - RNA, 32 nt, Homo Sapiens
cauuaguuccuggguaucuggauggguucuag

SEQ ID NO: 380727 - RNA, 32 nt, Homo Sapiens
gagucaauuaaaccucuuuucuucauaaaaaa

SEQ ID NO: 380728 - RNA, 32 nt, Homo Sapiens
ucuccgcggcgaaggugaggagcugucucggc

SEQ ID NO: 380729 - RNA, 32 nt, Homo Sapiens
auggauguuggugaaaauuaaagggaaacaga

SEQ ID NO: 380730 - RNA, 32 nt, Homo Sapiens
cccugccccuaccccacccuggcuccucaccc

SEQ ID NO: 380731 - RNA, 32 nt, Homo Sapiens
uugagauuucuuuuaaagaaguaaauuugucc

SEQ ID NO: 380732 - RNA, 32 nt, Homo Sapiens
acaaccugcauacuuugagucuccauccccag

SEQ ID NO: 380733 - RNA, 32 nt, Homo Sapiens
agcucacagaggagacggaggugcuggcacau

SEQ ID NO: 380734 - RNA, 32 nt, Homo Sapiens
aaggccucccccagcccagacccugugguccc

SEQ ID NO: 380735 - RNA, 32 nt, Homo Sapiens
guuuaaugugcauauugaaucuuccaaauuga

SEQ ID NO: 380736 - RNA, 31 nt, Homo Sapiens
ucggcgcagcgcagcgccgcgcgcguccccu

SEQ ID NO: 380737 - RNA, 32 nt, Homo Sapiens
aacuguugcuuuuuugcaguugucuuuguucu

SEQ ID NO: 380738 - RNA, 29 nt, Homo Sapiens
uuaguauaaaguuuuugcuguuaaauauu

SEQ ID NO: 380739 - RNA, 32 nt, Homo Sapiens
agagguuuguaaugcaguuuucuucauaaugu

SEQ ID NO: 380740 - RNA, 32 nt, Homo Sapiens
caaguauaauuacauccuccaauguaccguuu

SEQ ID NO: 380741 - RNA, 32 nt, Homo Sapiens
cagcugggagugggccgccucaugcucugcug

SEQ ID NO: 380742 - RNA, 32 nt, Homo Sapiens
ccuugaaaugucucucuucucaucuccuaucu

SEQ ID NO: 380743 - RNA, 32 nt, Homo Sapiens
ucucgccccagguccuuucucagccuccagcu

SEQ ID NO: 380744 - RNA, 32 nt, Homo Sapiens
gauauccggccgcugggcguccccgcgccccc

SEQ ID NO: 380745 - RNA, 32 nt, Homo Sapiens
caccugacuccagcacaccuggcgaguaguag

SEQ ID NO: 380746 - RNA, 32 nt, Homo Sapiens
gaaguacuguguggacuagaaauguacccugu

SEQ ID NO: 380747 - RNA, 32 nt, Homo Sapiens
cggucuggggaggcuccucccuggugcgcaga

SEQ ID NO: 380748 - RNA, 32 nt, Homo Sapiens
cagggccaugucccuuucuccucuccccucaa

SEQ ID NO: 380749 - RNA, 32 nt, Homo Sapiens
ccucacucccagcuccuccugcagcucaacau

SEQ ID NO: 380750 - RNA, 32 nt, Homo Sapiens
ugagccaauccacauuccauuauuucacugac

SEQ ID NO: 380751 - RNA, 31 nt, Homo Sapiens
cagacaagugaaugccugcccugccgcuagc

SEQ ID NO: 380752 - RNA, 32 nt, Homo Sapiens
auagauuuuuggaaacaagacuuuauugagau

SEQ ID NO: 380753 - RNA, 26 nt, Homo Sapiens
gauggcgaccccagccucggccccag

SEQ ID NO: 380754 - RNA, 30 nt, Homo Sapiens
cuugagaucuucgugguauuaggcucucuc

SEQ ID NO: 380755 - RNA, 28 nt, Homo Sapiens
ucaggcuguguucucaggaugaccgagu

SEQ ID NO: 380756 - RNA, 32 nt, Homo Sapiens
gugucuggacgaaaacaucaaugugaauaagg

SEQ ID NO: 380757 - RNA, 32 nt, Homo Sapiens
uucuuuagacccucgggccccauccucauccc

SEQ ID NO: 380758 - RNA, 32 nt, Homo Sapiens
gguggcgaugacccgggcgcucugcucagcgc

SEQ ID NO: 380759 - RNA, 32 nt, Homo Sapiens
cuaaagggcuugggggccuggggggcggcgaa

SEQ ID NO: 380760 - RNA, 32 nt, Homo Sapiens
ccguuuuucuccuuuccuuucauuccaaaaag

SEQ ID NO: 380761 - RNA, 32 nt, Homo Sapiens
cguaacacucaccgugaggguccgcggcuucg

SEQ ID NO: 380762 - RNA, 32 nt, Homo Sapiens
uacaucagccuaacagcagcacugccguuuuc

SEQ ID NO: 380763 - RNA, 32 nt, Homo Sapiens
aacuguuuuugucuacacucuuucucuuuucc

SEQ ID NO: 380764 - RNA, 28 nt, Homo Sapiens
augaguuaaccaggaccaaguggccauu

SEQ ID NO: 380765 - RNA, 32 nt, Homo Sapiens
ucuuagaagggccagauaacacuucgcuguga

SEQ ID NO: 380766 - RNA, 32 nt, Homo Sapiens
gacugcagugcuuuggcaaggugcuuccgcag

SEQ ID NO: 380767 - RNA, 32 nt, Homo Sapiens
agugaagcugggaggagaaggcggcggaaggu

SEQ ID NO: 380768 - RNA, 32 nt, Homo Sapiens
cugaccuuggacucccagccugccagagaaug

SEQ ID NO: 380769 - RNA, 32 nt, Homo Sapiens
uacauaugcugaucucuuaaaaucaugauccu

SEQ ID NO: 380770 - RNA, 32 nt, Homo Sapiens
uuaaaagcugaaugaagacaacuuagguugcu

SEQ ID NO: 380771 - RNA, 32 nt, Homo Sapiens
uaccacuuuuguucuugguuuguaaauuaacu

SEQ ID NO: 380772 - RNA, 32 nt, Homo Sapiens
ggcggcgcgggccuggccccgggauggcuaug

SEQ ID NO: 380773 - RNA, 32 nt, Homo Sapiens
ccagaauguaaacagcagcagaugaacaaaaa

SEQ ID NO: 380774 - RNA, 32 nt, Homo Sapiens
auaugaaaaguaaauuaaugugaaaccuggcc

SEQ ID NO: 380775 - RNA, 32 nt, Homo Sapiens
gaaagccuagggaaaaaacuaauuuauacuua

SEQ ID NO: 380776 - RNA, 32 nt, Homo Sapiens
ucguguguuagaagcugauucuaggcugagga

SEQ ID NO: 380777 - RNA, 32 nt, Homo Sapiens
guuggaaacucacagcuacaagggcaggugag

SEQ ID NO: 380778 - RNA, 32 nt, Homo Sapiens
uuuucuuuuacaugcauauauauauauuuuau

SEQ ID NO: 380779 - RNA, 32 nt, Homo Sapiens
ggguaacauaucuuugguaugguugccuuaga

SEQ ID NO: 380780 - RNA, 32 nt, Homo Sapiens
gcucagugcccguuuuaccaauaaacugagcg

SEQ ID NO: 380781 - RNA, 32 nt, Homo Sapiens
gaauuauaaaauguauaugucuaugaagcuuc

SEQ ID NO: 380782 - RNA, 32 nt, Homo Sapiens
uagcagacagagugaagcuggcuggggggcac

SEQ ID NO: 380783 - RNA, 32 nt, Homo Sapiens
auaaagccgcgcccggccggcccgagccacuc

SEQ ID NO: 380784 - RNA, 32 nt, Homo Sapiens
cccagcugacauggaaauacaguuguuggccu

SEQ ID NO: 380785 - RNA, 32 nt, Homo Sapiens
gaaggaaauggaugcaagcagcuccgggggcc

SEQ ID NO: 380786 - RNA, 32 nt, Homo Sapiens
uuuuugaaauguuccugaaacuaauuuggguu

SEQ ID NO: 380787 - RNA, 32 nt, Homo Sapiens
cccugagcccacaggaccccuacuucacagcu

SEQ ID NO: 380788 - RNA, 31 nt, Homo Sapiens
ugagauuuggcaugaaggauauggugcucua

SEQ ID NO: 380789 - RNA, 32 nt, Homo Sapiens
agucauuuacuuuuucuuuugauauaccaugg

SEQ ID NO: 380790 - RNA, 32 nt, Homo Sapiens
uaguuccugagagauagcaaacaugcccaaca

SEQ ID NO: 380791 - RNA, 32 nt, Homo Sapiens
gaaaaauccaaauauaagccacuuuggggaaa

SEQ ID NO: 380792 - RNA, 32 nt, Homo Sapiens
cugcccccuaagcuggcuguaccuguuccucc

SEQ ID NO: 380793 - RNA, 32 nt, Homo Sapiens
cuguggacaaccucgucauugucaggcacaga

SEQ ID NO: 380794 - RNA, 30 nt, Homo Sapiens
uagccgggaggugcagggcagcagggggca

SEQ ID NO: 380795 - RNA, 32 nt, Homo Sapiens
gacgaggacagugcgagcaagcagauguuauu

SEQ ID NO: 380796 - RNA, 32 nt, Homo Sapiens
uaaaucaauuauugaaauaggaugcacacaau

SEQ ID NO: 380797 - RNA, 32 nt, Homo Sapiens
caaaucauucuguuaaccaccauuccaacagg

SEQ ID NO: 380798 - RNA, 30 nt, Homo Sapiens
ccucaagagaagcucauaaguguguguggg

SEQ ID NO: 380799 - RNA, 32 nt, Homo Sapiens
uccagaaaguaauaaucagggauuuuauuuua

SEQ ID NO: 380800 - RNA, 32 nt, Homo Sapiens
ucccagugaagcuuccccuugccggcuuagcu

SEQ ID NO: 380801 - RNA, 32 nt, Homo Sapiens
uuccagugguggccguagacuuggcucggaac

SEQ ID NO: 380802 - RNA, 32 nt, Homo Sapiens
acccgggagacggagcuugcaguaagccgaga

SEQ ID NO: 380803 - RNA, 32 nt, Homo Sapiens
gugaagccucugcugcagacagcccggcucga

SEQ ID NO: 380804 - RNA, 32 nt, Homo Sapiens
agccucccuggauugauaauauauacacauuu

SEQ ID NO: 380805 - RNA, 32 nt, Homo Sapiens
uauguugccauaaaauucaagagcagccuaaa

SEQ ID NO: 380806 - RNA, 32 nt, Homo Sapiens
cuguuuagugcauuuaaguuaaguuaaaaaau

SEQ ID NO: 380807 - RNA, 30 nt, Homo Sapiens
uucgggcggggcgauugcagggaacggggc

SEQ ID NO: 380808 - RNA, 32 nt, Homo Sapiens
ugggcaggaagcccggcccguggagcagguuu

SEQ ID NO: 380809 - RNA, 32 nt, Homo Sapiens
aaugagaaaaauuuaaauuuuguuggcacauc

SEQ ID NO: 380810 - RNA, 32 nt, Homo Sapiens
agacaccccccgcccgcucccggggcacgugg

SEQ ID NO: 380811 - RNA, 32 nt, Homo Sapiens
cuguuagaaaucacaccauuuccaaagaaccc

SEQ ID NO: 380812 - RNA, 29 nt, Homo Sapiens
ugagaaucuaaaacauaccacaaaaauac

SEQ ID NO: 380813 - RNA, 32 nt, Homo Sapiens
ugacacuauucauagacuuucauuuuauuuau

SEQ ID NO: 380814 - RNA, 32 nt, Homo Sapiens
acuacauaaaagacucaaaauaaguuuaacac

SEQ ID NO: 380815 - RNA, 32 nt, Homo Sapiens
caauaaauagcuuuugaguuaggccaggcacu

SEQ ID NO: 380816 - RNA, 32 nt, Homo Sapiens
ucuaaaaguugccagugccacuuuuaagaagu

SEQ ID NO: 380817 - RNA, 32 nt, Homo Sapiens
ggagaucagagguauaaaaguaaggaugggca

SEQ ID NO: 380818 - RNA, 32 nt, Homo Sapiens
aucgcaccuaaauuauuauuauauuaaaagaa

SEQ ID NO: 380819 - RNA, 32 nt, Homo Sapiens
auggucccaacacuucaucauccaccaccucc

SEQ ID NO: 380820 - RNA, 32 nt, Homo Sapiens
accuccaccaggaccaggauccugggccacag

SEQ ID NO: 380821 - RNA, 32 nt, Homo Sapiens
auccucagcaagaaacaaaacuaaacuggacu

SEQ ID NO: 380822 - RNA, 32 nt, Homo Sapiens
ggggacucuucaacgaggggcgcuagccuggc

SEQ ID NO: 380823 - RNA, 32 nt, Homo Sapiens
ugcuugaaguucuucggaaacuucugacuuug

SEQ ID NO: 380824 - RNA, 32 nt, Homo Sapiens
cagaaaggaaaugagaugacaguauuuaaucg

SEQ ID NO: 380825 - RNA, 27 nt, Homo Sapiens
ccaugucccaucuucagcaucccuccc

SEQ ID NO: 380826 - RNA, 32 nt, Homo Sapiens
gggcgggguggccggggcuggcgcuccacuug

SEQ ID NO: 380827 - RNA, 32 nt, Homo Sapiens
acaaacagaugauacgcuuaacuuuuuggaca

SEQ ID NO: 380828 - RNA, 32 nt, Homo Sapiens
gauggccaguguuuucaacagagauuuaaaau

SEQ ID NO: 380829 - RNA, 32 nt, Homo Sapiens
cuaagguguacaugugcaugugcauggaagga

SEQ ID NO: 380830 - RNA, 32 nt, Homo Sapiens
uuagaaugaugaacaggaagcagggcaaacuc

SEQ ID NO: 380831 - RNA, 32 nt, Homo Sapiens
gauauugggauuuuuuuccagcccuucuugau

SEQ ID NO: 380832 - RNA, 32 nt, Homo Sapiens
cgcgagaacacuuuacaacgacgaggagauuc

SEQ ID NO: 380833 - RNA, 32 nt, Homo Sapiens
acagucauucuauacagaaucuguacaacagu

SEQ ID NO: 380834 - RNA, 32 nt, Homo Sapiens
gggcacccucccuuccucccccaugugauaaa

SEQ ID NO: 380835 - RNA, 32 nt, Homo Sapiens
ccacaccugggagagggauagaggagggagag

SEQ ID NO: 380836 - RNA, 32 nt, Homo Sapiens
cacccgagcccggcgccucagcugcccccggc

SEQ ID NO: 380837 - RNA, 32 nt, Homo Sapiens
ugagccaccgcgcccagccucaucucuuuguu

SEQ ID NO: 380838 - RNA, 32 nt, Homo Sapiens
cagagaucgugccacugcacuccagcuugggc

SEQ ID NO: 380839 - RNA, 32 nt, Homo Sapiens
acuuauagcuggaaccgaaaugcauggcagau

SEQ ID NO: 380840 - RNA, 32 nt, Homo Sapiens
caaaggaucagcacguucuuccucugagaacu

SEQ ID NO: 380841 - RNA, 30 nt, Homo Sapiens
accugggcuggcugcgcggguuuccggcug

SEQ ID NO: 380842 - RNA, 32 nt, Homo Sapiens
gugcguuuuuagcaacacaucuaccaacccug

SEQ ID NO: 380843 - RNA, 32 nt, Homo Sapiens
cuucuucuccagcuccuccugcucccucugaa

SEQ ID NO: 380844 - RNA, 32 nt, Homo Sapiens
agcacaccuugccccaccugggaccaucacac

SEQ ID NO: 380845 - RNA, 32 nt, Homo Sapiens
guuaugugcucugauuugauauagauaacaga

SEQ ID NO: 380846 - RNA, 32 nt, Homo Sapiens
agcagggcccuggagagauggccacgguccca

SEQ ID NO: 380847 - RNA, 32 nt, Homo Sapiens
cuggccucuccauggacgugcggccccuugcu

SEQ ID NO: 380848 - RNA, 32 nt, Homo Sapiens
gaggggaugucagagacuuuauugccguccug

SEQ ID NO: 380849 - RNA, 32 nt, Homo Sapiens
cauuaucuuagguuuguuuguuugguuugagu

SEQ ID NO: 380850 - RNA, 32 nt, Homo Sapiens
guuuggaguucugaacccaugauguuguauua

SEQ ID NO: 380851 - RNA, 32 nt, Homo Sapiens
acacaugaucccaauaucacauggagcacucg

SEQ ID NO: 380852 - RNA, 32 nt, Homo Sapiens
uauaagcccaauaucagcucuuucucuuugua

SEQ ID NO: 380853 - RNA, 32 nt, Homo Sapiens
agauuuguccaggcugccccuggcccuccaug

SEQ ID NO: 380854 - RNA, 32 nt, Homo Sapiens
cuguuaccuugacucgucucagauuucauuga

SEQ ID NO: 380855 - RNA, 32 nt, Homo Sapiens
auugugcuuuauccaacaaaauguaaggagcc

SEQ ID NO: 380856 - RNA, 32 nt, Homo Sapiens
augguuacacgacgaaguagcuuuugaauaau

SEQ ID NO: 380857 - RNA, 32 nt, Homo Sapiens
ggggcaggacuuucccuuccaagcacaugcau

SEQ ID NO: 380858 - RNA, 32 nt, Homo Sapiens
uuagcaaaacaauagauaaauuagguaguggc

SEQ ID NO: 380859 - RNA, 32 nt, Homo Sapiens
gaagccgcaagaagaaauuagaugagaaagag

SEQ ID NO: 380860 - RNA, 32 nt, Homo Sapiens
ugugccaagagacagacagagaaggcugcagg

SEQ ID NO: 380861 - RNA, 32 nt, Homo Sapiens
ugaagaagaugaugauaaauaguugcuucuag

SEQ ID NO: 380862 - RNA, 32 nt, Homo Sapiens
uguaaaccaaggaaauagaucucuuucccuga

SEQ ID NO: 380863 - RNA, 32 nt, Homo Sapiens
ugcaguagcuaauuuucugauuuccuauuuua

SEQ ID NO: 380864 - RNA, 32 nt, Homo Sapiens
aggaggaaaaggaagacuaaagccugcauacu

SEQ ID NO: 380865 - RNA, 30 nt, Homo Sapiens
ugucaguggcgucggaggccggcgcugcgg

SEQ ID NO: 380866 - RNA, 32 nt, Homo Sapiens
aggacacguggcccagcagagccccugaacag

SEQ ID NO: 380867 - RNA, 27 nt, Homo Sapiens
gaaugaccccucacccuccccccgcuu

SEQ ID NO: 380868 - RNA, 32 nt, Homo Sapiens
caggacaacgggcgucgccggcgccgugugac

SEQ ID NO: 380869 - RNA, 32 nt, Homo Sapiens
ggaagcucucccugaacauccccaucaucacu

SEQ ID NO: 380870 - RNA, 32 nt, Homo Sapiens
cacugcccaauauaaaaggcaaauguguacau

SEQ ID NO: 380871 - RNA, 32 nt, Homo Sapiens
acacagaaaaacagaaacugagugugagaguu

SEQ ID NO: 380872 - RNA, 32 nt, Homo Sapiens
ugguggucccggcaggaaaggguuccuucagc

SEQ ID NO: 380873 - RNA, 32 nt, Homo Sapiens
auuuccguccuccacccacgugucuguggcug

SEQ ID NO: 380874 - RNA, 32 nt, Homo Sapiens
gcugugggaugguaguggcaucaggcuucuga

SEQ ID NO: 380875 - RNA, 32 nt, Homo Sapiens
gccacaccccuccugcuccccccaccccuagc

SEQ ID NO: 380876 - RNA, 32 nt, Homo Sapiens
aagcccaaauuuaauuugcaaccaucagaauu

SEQ ID NO: 380877 - RNA, 32 nt, Homo Sapiens
gaaucuucuucaucuuccuccuccuccucauc

SEQ ID NO: 380878 - RNA, 32 nt, Homo Sapiens
uaauggccuggucccccggccccugccccauc

SEQ ID NO: 380879 - RNA, 32 nt, Homo Sapiens
cagcugaggggcuggaggaaaacagguauagc

SEQ ID NO: 380880 - RNA, 32 nt, Homo Sapiens
agaaguuauuacuuuggucauuauuggaauau

SEQ ID NO: 380881 - RNA, 32 nt, Homo Sapiens
ugcccaggaggacgcuccugugcugcugacca

SEQ ID NO: 380882 - RNA, 30 nt, Homo Sapiens
ggaucgcacgucggcggccgguggaacgcg

SEQ ID NO: 380883 - RNA, 32 nt, Homo Sapiens
aggcucuagagggugaacaacuucugcuugug

SEQ ID NO: 380884 - RNA, 32 nt, Homo Sapiens
uagugaugugacucauuacgugaucccagacu

SEQ ID NO: 380885 - RNA, 32 nt, Homo Sapiens
acgccucauuuucuuuccauccccaugccauu

SEQ ID NO: 380886 - RNA, 32 nt, Homo Sapiens
cagagaaggaugagagaauugccaaguuguac

SEQ ID NO: 380887 - RNA, 32 nt, Homo Sapiens
aagaggauguaagucaguuugauuccaaguuu

SEQ ID NO: 380888 - RNA, 32 nt, Homo Sapiens
uucugcauuauuugugcauuuugguuuaguuc

SEQ ID NO: 380889 - RNA, 32 nt, Homo Sapiens
cccugcauuuccagcuaaucucuucugcucua

SEQ ID NO: 380890 - RNA, 32 nt, Homo Sapiens
cuguugaaugcuucuuuguagcuacacaaaag

SEQ ID NO: 380891 - RNA, 32 nt, Homo Sapiens
aaguauccuuauuuuuuuuuuaaaagagcaca

SEQ ID NO: 380892 - RNA, 30 nt, Homo Sapiens
gcucaggacccggaggcgccggcggaggag

SEQ ID NO: 380893 - RNA, 32 nt, Homo Sapiens
aauugucccucugaggccgccgugggugaccu

SEQ ID NO: 380894 - RNA, 32 nt, Homo Sapiens
uuagucguaaccaaauaguuaaaaaauucugc

SEQ ID NO: 380895 - RNA, 32 nt, Homo Sapiens
acagcucgcucuuggguccucacaaagcuacu

SEQ ID NO: 380896 - RNA, 32 nt, Homo Sapiens
gaagcauccaggcacccaaaccccggggcucc

SEQ ID NO: 380897 - RNA, 32 nt, Homo Sapiens
gcgcggcggucacugcgccgggguagugggcc

SEQ ID NO: 380898 - RNA, 32 nt, Homo Sapiens
cuggccuucagggaaucugauuccuuggucug

SEQ ID NO: 380899 - RNA, 32 nt, Homo Sapiens
cacaccucuagccccagcuacucaggcugggg

SEQ ID NO: 380900 - RNA, 32 nt, Homo Sapiens
gagcugugaucgugccacuguacucuagccug

SEQ ID NO: 380901 - RNA, 32 nt, Homo Sapiens
ugguuuuuaauuauagagagcaaaaguauuga

SEQ ID NO: 380902 - RNA, 32 nt, Homo Sapiens
guguuagcagguuacucucaguccucagcacu

SEQ ID NO: 380903 - RNA, 32 nt, Homo Sapiens
ccaaaacccagccccgggucccaaccuaggca

SEQ ID NO: 380904 - RNA, 32 nt, Homo Sapiens
ucucccugccccaccugaaggcgauauuuuag

SEQ ID NO: 380905 - RNA, 32 nt, Homo Sapiens
cggccuccagggcccgcuggccccacagcagg

SEQ ID NO: 380906 - RNA, 32 nt, Homo Sapiens
cugauaagggaagccacaaggagacgaucgag

SEQ ID NO: 380907 - RNA, 32 nt, Homo Sapiens
accuaucgcggggauccccggcgccaggaggg

SEQ ID NO: 380908 - RNA, 32 nt, Homo Sapiens
ucaucuauacacaacccagcaauggagagcac

SEQ ID NO: 380909 - RNA, 32 nt, Homo Sapiens
uguguugggaggcguccuggggagggugagga

SEQ ID NO: 380910 - RNA, 32 nt, Homo Sapiens
auuaauuacuucacuauacaaacaaauuaaga

SEQ ID NO: 380911 - RNA, 32 nt, Homo Sapiens
ccaggaguagguggcagacaugagggagcuca

SEQ ID NO: 380912 - RNA, 32 nt, Homo Sapiens
gagggaagggaagucaggcuugggcacgggag

SEQ ID NO: 380913 - RNA, 32 nt, Homo Sapiens
gcugcgacggccuggacgaccgcggcuggggc

SEQ ID NO: 380914 - RNA, 32 nt, Homo Sapiens
aucacccgccgggcgcucgggcugaaugggcc

SEQ ID NO: 380915 - RNA, 32 nt, Homo Sapiens
ucuggacagucaacuucccaugaaauaaaguc

SEQ ID NO: 380916 - RNA, 32 nt, Homo Sapiens
gacccugccucagcugacccggccucucugcc

SEQ ID NO: 380917 - RNA, 32 nt, Homo Sapiens
caauuuauuuuuggagcacuucuuggagccag

SEQ ID NO: 380918 - RNA, 32 nt, Homo Sapiens
uguuuuauucagauugggaaauccauucuauu

SEQ ID NO: 380919 - RNA, 32 nt, Homo Sapiens
auuucacuuuaugacugacaauuaaaaaauau

SEQ ID NO: 380920 - RNA, 32 nt, Homo Sapiens
uccgggagcaguagucauuguuguuuuaaccu

SEQ ID NO: 380921 - RNA, 32 nt, Homo Sapiens
auaguuugcuucucuuucccccaaggccaagg

SEQ ID NO: 380922 - RNA, 32 nt, Homo Sapiens
ggauugaauggacuuacaggaaggauuucaag

SEQ ID NO: 380923 - RNA, 32 nt, Homo Sapiens
gaacugcaaccucaaaggagcaagccuugaaa

SEQ ID NO: 380924 - RNA, 32 nt, Homo Sapiens
gaaugcagauagaaaaucaugggaauuauuca

SEQ ID NO: 380925 - RNA, 32 nt, Homo Sapiens
uccuaaccagcggccaguggguuucccauacc

SEQ ID NO: 380926 - RNA, 32 nt, Homo Sapiens
augcuuucugggcagggacuugguuuuuuguu

SEQ ID NO: 380927 - RNA, 32 nt, Homo Sapiens
gaaaaauuggaggugcuggugguauggcugac

SEQ ID NO: 380928 - RNA, 32 nt, Homo Sapiens
cgaguguggcugucuuggggccccaccuggcc

SEQ ID NO: 380929 - RNA, 32 nt, Homo Sapiens
cucagcccuuccucccucucccugugggauug

SEQ ID NO: 380930 - RNA, 32 nt, Homo Sapiens
cgcucuguuuugggaauaaacuucuauagaaa

SEQ ID NO: 380931 - RNA, 31 nt, Homo Sapiens
uagggaacagcugcuuugccauagacccaau

SEQ ID NO: 380932 - RNA, 32 nt, Homo Sapiens
cucugagccgcugcugccccugugggaaggga

SEQ ID NO: 380933 - RNA, 32 nt, Homo Sapiens
agcuuuauauuuuguuguuaguuucuuuuauu

SEQ ID NO: 380934 - RNA, 32 nt, Homo Sapiens
aguagugaugaaaaguacauguugauacuguc

SEQ ID NO: 380935 - RNA, 32 nt, Homo Sapiens
ucaagccagcugcuccuccuccguucauuuuc

SEQ ID NO: 380936 - RNA, 32 nt, Homo Sapiens
ccaggccuggggacaggaaagccacugaccca

SEQ ID NO: 380937 - RNA, 32 nt, Homo Sapiens
aaaaggagaaagugagaggagaguucucugca

SEQ ID NO: 380938 - RNA, 32 nt, Homo Sapiens
cuggaagcauguuaggucuuuauuuuucccca

SEQ ID NO: 380939 - RNA, 32 nt, Homo Sapiens
cccaggcuuccauccucaguagccugucuaca

SEQ ID NO: 380940 - RNA, 32 nt, Homo Sapiens
uacauugaaggaagaaaagaaggaagcaguug

SEQ ID NO: 380941 - RNA, 32 nt, Homo Sapiens
agaaggggcugggcccgggguccugcaggcgg

SEQ ID NO: 380942 - RNA, 32 nt, Homo Sapiens
auuuccagaagauuauuuuguuuuuggauuuc

SEQ ID NO: 380943 - RNA, 32 nt, Homo Sapiens
agguuaaauuauugauacaacaggauuuucaa

SEQ ID NO: 380944 - RNA, 32 nt, Homo Sapiens
ggcaguggccgcggcagcggcggugguagcgg

SEQ ID NO: 380945 - RNA, 32 nt, Homo Sapiens
caagguaauguuuuaaauguauauagcuuuag

SEQ ID NO: 380946 - RNA, 32 nt, Homo Sapiens
cuggagcaccucagcacguguauugaaauccu

SEQ ID NO: 380947 - RNA, 32 nt, Homo Sapiens
ugcaggguuuggggaaaggaaggcuggcuugg

SEQ ID NO: 380948 - RNA, 32 nt, Homo Sapiens
accugccagugccgagucaggacuugaggugg

SEQ ID NO: 380949 - RNA, 32 nt, Homo Sapiens
ugaauguucaugaagguccuagcuuuauauug

SEQ ID NO: 380950 - RNA, 30 nt, Homo Sapiens
uauugcagagaaugugaugaguuaucacug

SEQ ID NO: 380951 - RNA, 32 nt, Homo Sapiens
agguaaggggagaaagcuggagggaggggcuu

SEQ ID NO: 380952 - RNA, 32 nt, Homo Sapiens
uauagaaaagaggagaggaaaacuauuccaug

SEQ ID NO: 380953 - RNA, 32 nt, Homo Sapiens
uuaaagacuggaacauucuguggauguuguca

SEQ ID NO: 380954 - RNA, 30 nt, Homo Sapiens
accugucuggacugagcauuucucugacuu

SEQ ID NO: 380955 - RNA, 32 nt, Homo Sapiens
acuuaguucuuuguggauuguucuagacuuuu

SEQ ID NO: 380956 - RNA, 32 nt, Homo Sapiens
gucccuacaccuggaguccucugcuccuuucu

SEQ ID NO: 380957 - RNA, 32 nt, Homo Sapiens
ugauaagaacuugaauuuuaaaugguuugaau

SEQ ID NO: 380958 - RNA, 32 nt, Homo Sapiens
uuugagacuuugugugaacaaagggaaauuca

SEQ ID NO: 380959 - RNA, 32 nt, Homo Sapiens
acacggcggccgcgcgcacgcugggggcgugg

SEQ ID NO: 380960 - RNA, 32 nt, Homo Sapiens
gacgggcugccggccgugcgccgccccaccug

SEQ ID NO: 380961 - RNA, 32 nt, Homo Sapiens
uuuucuuuuaucaugucucgcuaauaacccca

SEQ ID NO: 380962 - RNA, 32 nt, Homo Sapiens
aggacccaggccucccaccccacuacggaccg

SEQ ID NO: 380963 - RNA, 32 nt, Homo Sapiens
gauccuggcucccagacacguagcugggcugg

SEQ ID NO: 380964 - RNA, 32 nt, Homo Sapiens
gcuagacaaaucaaccucgugccuaauggagg

SEQ ID NO: 380965 - RNA, 32 nt, Homo Sapiens
gcaagagacccgcggcagcagcuccccgccac

SEQ ID NO: 380966 - RNA, 32 nt, Homo Sapiens
gcugcaacagacccuccccgcgccccucccca

SEQ ID NO: 380967 - RNA, 32 nt, Homo Sapiens
cauguccaguaaacaauuuagagcagguccuu

SEQ ID NO: 380968 - RNA, 32 nt, Homo Sapiens
cuuccugagacacauucagagaaggaucagag

SEQ ID NO: 380969 - RNA, 32 nt, Homo Sapiens
caucugugugugacagaagagauuuuaaaaaa

SEQ ID NO: 380970 - RNA, 32 nt, Homo Sapiens
ugggggaguugaggagugaagaaacacacauc

SEQ ID NO: 380971 - RNA, 32 nt, Homo Sapiens
auugccauggcaaugcggugggcgcgcgcuug

SEQ ID NO: 380972 - RNA, 32 nt, Homo Sapiens
uuuguauuuuaaaggaaaaaugacuuucauuc

SEQ ID NO: 380973 - RNA, 32 nt, Homo Sapiens
gaaaaugauauuaguuaucaacuuugcaguuu

SEQ ID NO: 380974 - RNA, 32 nt, Homo Sapiens
uaucaugguguaaaaaacacacacauacacaa

SEQ ID NO: 380975 - RNA, 32 nt, Homo Sapiens
ccccaacugcaaacaaagugaaugcccauuaa

SEQ ID NO: 380976 - RNA, 32 nt, Homo Sapiens
augguuuucaguauccucuuuggccuccuggc

SEQ ID NO: 380977 - RNA, 32 nt, Homo Sapiens
cagggcuggacguggcggcucuugccuguaau

SEQ ID NO: 380978 - RNA, 32 nt, Homo Sapiens
gcagcccgccuuggcuuucucccucacccaag

SEQ ID NO: 380979 - RNA, 32 nt, Homo Sapiens
gcugccgaggcaaaaaggagccaggcgcuccc

SEQ ID NO: 380980 - RNA, 32 nt, Homo Sapiens
auggagauggagccgccaaggaggcggggacc

SEQ ID NO: 380981 - RNA, 32 nt, Homo Sapiens
cagcucugacaaguccuaucauccucugcuca

SEQ ID NO: 380982 - RNA, 32 nt, Homo Sapiens
gagcuggggcgcggccgccugucugcaccggc

SEQ ID NO: 380983 - RNA, 32 nt, Homo Sapiens
uuucagaaggauuucuuaguucuuuuaaugug

SEQ ID NO: 380984 - RNA, 32 nt, Homo Sapiens
gucuguuugcugaucuucagcgugggaauaau

SEQ ID NO: 380985 - RNA, 32 nt, Homo Sapiens
gcucgcgggccgggcccggcauggugcggcgu

SEQ ID NO: 380986 - RNA, 32 nt, Homo Sapiens
ucccagggauacugaggaauggcuuguuuucu

SEQ ID NO: 380987 - RNA, 32 nt, Homo Sapiens
uucuuaugaaccuuccugauuuuuuaacuuag

SEQ ID NO: 380988 - RNA, 32 nt, Homo Sapiens
ccggucgccgcaagaagcuggagaggauguac

SEQ ID NO: 380989 - RNA, 32 nt, Homo Sapiens
auggagaggacuugguggauuuuuguuucuug

SEQ ID NO: 380990 - RNA, 32 nt, Homo Sapiens
cacuuugggauucuuuccauuaugauucuuug

SEQ ID NO: 380991 - RNA, 32 nt, Homo Sapiens
cguucaguucccuccuuuucuugcauguaagu

SEQ ID NO: 380992 - RNA, 32 nt, Homo Sapiens
auauuuucucauaauaaaauccaagugaacag

SEQ ID NO: 380993 - RNA, 32 nt, Homo Sapiens
gugugaacgcucuucgggcucgcgucgucgac

SEQ ID NO: 380994 - RNA, 32 nt, Homo Sapiens
ccauugcccucccucucuuuuuccucuguaga

SEQ ID NO: 380995 - RNA, 32 nt, Homo Sapiens
guugacaccuacuggugacuucuagggcacug

SEQ ID NO: 380996 - RNA, 32 nt, Homo Sapiens
acggcccuggggacuguggcccuggcccuggc

SEQ ID NO: 380997 - RNA, 32 nt, Homo Sapiens
aacacaggaggaaaagugaaccgaccaucaag

SEQ ID NO: 380998 - RNA, 32 nt, Homo Sapiens
cccauccucucccacacacauuccagaaguca

SEQ ID NO: 380999 - RNA, 32 nt, Homo Sapiens
guggaccagggugguaagugucugcacaucug

SEQ ID NO: 381000 - RNA, 32 nt, Homo Sapiens
agauucugacuucuggcuacauuucaccugca

SEQ ID NO: 381001 - RNA, 32 nt, Homo Sapiens
uucucaccggccucggccccaacgugucaugu

SEQ ID NO: 381002 - RNA, 27 nt, Homo Sapiens
ugauucuucugcuucagccucccaaag

SEQ ID NO: 381003 - RNA, 32 nt, Homo Sapiens
ggagguggccagugcuccugccagcugugcac

SEQ ID NO: 381004 - RNA, 32 nt, Homo Sapiens
acugccagacugcuuccuaaagcagcugcacc

SEQ ID NO: 381005 - RNA, 32 nt, Homo Sapiens
gaaaaaaugcaagguuuugguuauucuaauuu

SEQ ID NO: 381006 - RNA, 32 nt, Homo Sapiens
ccauuccugcgucguucuguccuuccgaacgc

SEQ ID NO: 381007 - RNA, 32 nt, Homo Sapiens
ggccaagaaauagauuaaaauauuuucaagac

SEQ ID NO: 381008 - RNA, 32 nt, Homo Sapiens
agugggggccuugauguccuucugccucuguc

SEQ ID NO: 381009 - RNA, 32 nt, Homo Sapiens
uuuuaguagagacagaguuuugccauguuggc

SEQ ID NO: 381010 - RNA, 32 nt, Homo Sapiens
uucaggacauguaucugcugaaauguauuuua

SEQ ID NO: 381011 - RNA, 30 nt, Homo Sapiens
agccggguucuggcugcagaaguucugccu

SEQ ID NO: 381012 - RNA, 32 nt, Homo Sapiens
ccuuuugugucugccuucuuugacuuaauaug

SEQ ID NO: 381013 - RNA, 32 nt, Homo Sapiens
uaacucuuaggaccagggauugucuugcacca

SEQ ID NO: 381014 - RNA, 32 nt, Homo Sapiens
agaaacacuccuuagcacuuuaagaaagugag

SEQ ID NO: 381015 - RNA, 32 nt, Homo Sapiens
cacccuaagccauucuuggccuccucacccac

SEQ ID NO: 381016 - RNA, 32 nt, Homo Sapiens
ccuuggaccugccuucugacggggccggggug

SEQ ID NO: 381017 - RNA, 32 nt, Homo Sapiens
uguaauauuuuuccuacuacauuggaguuuag

SEQ ID NO: 381018 - RNA, 32 nt, Homo Sapiens
gugccccccgucccaccuuuuuccugugcucu

SEQ ID NO: 381019 - RNA, 32 nt, Homo Sapiens
gguagccuucaaucacuggacuccauggccuu

SEQ ID NO: 381020 - RNA, 32 nt, Homo Sapiens
agggccagcucuugccucccggcggccucugc

SEQ ID NO: 381021 - RNA, 32 nt, Homo Sapiens
ccuugggaugaagaggguagagugggcugcug

SEQ ID NO: 381022 - RNA, 32 nt, Homo Sapiens
aaguagagacucccaagaaaaagcagaaugac

SEQ ID NO: 381023 - RNA, 32 nt, Homo Sapiens
ugaaucccacccaaaaauacugccucucgcuc

SEQ ID NO: 381024 - RNA, 32 nt, Homo Sapiens
uguauguacaguguuauucaugucaucaugag

SEQ ID NO: 381025 - RNA, 32 nt, Homo Sapiens
aaauauuuuuggccugcaacugggaaggggau

SEQ ID NO: 381026 - RNA, 32 nt, Homo Sapiens
uuuccucuggcgccggccgcaggccucgguca

SEQ ID NO: 381027 - RNA, 32 nt, Homo Sapiens
aguggcauacacuguuauucaugguuaaggua

SEQ ID NO: 381028 - RNA, 32 nt, Homo Sapiens
ggcggcuccugaagcgcacgcgggcgggcggc

SEQ ID NO: 381029 - RNA, 32 nt, Homo Sapiens
ugaaugcuauaaaauuuuaaaucuguagccug

SEQ ID NO: 381030 - RNA, 32 nt, Homo Sapiens
guccugacccuuauuauuaacaugggaucugc

SEQ ID NO: 381031 - RNA, 32 nt, Homo Sapiens
ggcccucgcugcgcaagccgggacgccucucc

SEQ ID NO: 381032 - RNA, 32 nt, Homo Sapiens
agauugcagguguggaauuugcuggaguuugg

SEQ ID NO: 381033 - RNA, 32 nt, Homo Sapiens
gaaaaaagaaaagaaaagggagggcucugcgg

SEQ ID NO: 381034 - RNA, 32 nt, Homo Sapiens
cagcagcgcuggcaugcaggcuuugccuggcu

SEQ ID NO: 381035 - RNA, 32 nt, Homo Sapiens
gaggaugaaugggaacaagugggcccccggaa

SEQ ID NO: 381036 - RNA, 32 nt, Homo Sapiens
uuccuuuuuuuuucuuuuuucuuuuuuuuuuu

SEQ ID NO: 381037 - RNA, 32 nt, Homo Sapiens
gagaaaggguggcagccgggagccucagagcu

SEQ ID NO: 381038 - RNA, 32 nt, Homo Sapiens
ucuacucccacccacaccugccucccucuuac

SEQ ID NO: 381039 - RNA, 32 nt, Homo Sapiens
gaacaauucagcaagcuacuuaaaaagagacc

SEQ ID NO: 381040 - RNA, 32 nt, Homo Sapiens
gguucucuagcgcaucucuggugcccaauaaa

SEQ ID NO: 381041 - RNA, 32 nt, Homo Sapiens
uagcgcugcuggcggccccggcggccgggcgu

SEQ ID NO: 381042 - RNA, 32 nt, Homo Sapiens
caauugguaacuuucuguuuuguucuuccuaa

SEQ ID NO: 381043 - RNA, 32 nt, Homo Sapiens
cuguaaaacuaaauauagcauggaaaauccaa

SEQ ID NO: 381044 - RNA, 32 nt, Homo Sapiens
ucagcuguggguggaggaugacccaggugccc

SEQ ID NO: 381045 - RNA, 32 nt, Homo Sapiens
acacagcugcccaaaauuuagcucuggccccc

SEQ ID NO: 381046 - RNA, 32 nt, Homo Sapiens
uccucacgccucagccucccaaaguguugaug

SEQ ID NO: 381047 - RNA, 32 nt, Homo Sapiens
cugcaagggucucggcuuggccgcggauuaau

SEQ ID NO: 381048 - RNA, 32 nt, Homo Sapiens
gcacagagcugccugcucccucccggggcucu

SEQ ID NO: 381049 - RNA, 32 nt, Homo Sapiens
cccagcggcccucuccuccauagggaccagaa

SEQ ID NO: 381050 - RNA, 32 nt, Homo Sapiens
aggcugucaccaugccggccugcugcagcugc

SEQ ID NO: 381051 - RNA, 32 nt, Homo Sapiens
acgagggacacugaggagaggugcugggcacc

SEQ ID NO: 381052 - RNA, 32 nt, Homo Sapiens
ucgcugcgcgcccagcguucuucugcgguucu

SEQ ID NO: 381053 - RNA, 32 nt, Homo Sapiens
agagggcagcggggaaguggucgcagugucug

SEQ ID NO: 381054 - RNA, 32 nt, Homo Sapiens
acucuacuuugaaaauggaacuuguuugauuc

SEQ ID NO: 381055 - RNA, 32 nt, Homo Sapiens
uggcaagggcuuuuucagcaucucguuuaugu

SEQ ID NO: 381056 - RNA, 32 nt, Homo Sapiens
ucccguggugugagggcggggcuggugcucau

SEQ ID NO: 381057 - RNA, 31 nt, Homo Sapiens
gacuuuccagaaugaccuugaguuaacagga

SEQ ID NO: 381058 - RNA, 32 nt, Homo Sapiens
cuauugaggaggggguuccucccgcugggguu

SEQ ID NO: 381059 - RNA, 32 nt, Homo Sapiens
uuggggagaccgucccacagcuccauccucag

SEQ ID NO: 381060 - RNA, 32 nt, Homo Sapiens
ucaucuuuauccuuuuucuaucccucugagug

SEQ ID NO: 381061 - RNA, 32 nt, Homo Sapiens
aauucaguuaucauuugacagauucuuaucug

SEQ ID NO: 381062 - RNA, 32 nt, Homo Sapiens
gccugaggucacagagagcggcaggccuggga

SEQ ID NO: 381063 - RNA, 32 nt, Homo Sapiens
uaggaccucccucuccugaggccaccacuggg

SEQ ID NO: 381064 - RNA, 32 nt, Homo Sapiens
aucugggucugaugagaugaugcaaaaugagg

SEQ ID NO: 381065 - RNA, 32 nt, Homo Sapiens
ucugcagcaccucaccugagaccuccacucca

SEQ ID NO: 381066 - RNA, 32 nt, Homo Sapiens
ccgccucucgcucaccccggcccacuccagcg

SEQ ID NO: 381067 - RNA, 32 nt, Homo Sapiens
ccaugcaguggggccccuggggugcccucggc

SEQ ID NO: 381068 - RNA, 32 nt, Homo Sapiens
agaaagggaggcaaacggccccugccucccgc

SEQ ID NO: 381069 - RNA, 32 nt, Homo Sapiens
cggguucugagugaucccauccagcugcuccu

SEQ ID NO: 381070 - RNA, 32 nt, Homo Sapiens
cuauuaacuguauucaccaugcugugcaauag

SEQ ID NO: 381071 - RNA, 32 nt, Homo Sapiens
ggcaguccucacccccaccucucuaaaagaca

SEQ ID NO: 381072 - RNA, 32 nt, Homo Sapiens
aagcuccugauuuuauacaauuuugaaauuag

SEQ ID NO: 381073 - RNA, 32 nt, Homo Sapiens
gucccggagcccggcguguggcgccucggagc

SEQ ID NO: 381074 - RNA, 32 nt, Homo Sapiens
aaaaugccaaggaaaaggaaguaccacuggag

SEQ ID NO: 381075 - RNA, 32 nt, Homo Sapiens
agagaagaaaugcagucugcacuuuuuaugua

SEQ ID NO: 381076 - RNA, 32 nt, Homo Sapiens
gcguucugacuauaaaaagugugaacaaauca

SEQ ID NO: 381077 - RNA, 32 nt, Homo Sapiens
uuguuccccacccccacccccacucccgcccc

SEQ ID NO: 381078 - RNA, 32 nt, Homo Sapiens
guccccuuguucucgcacaaucucucuaaccu

SEQ ID NO: 381079 - RNA, 32 nt, Homo Sapiens
ccagguguuguaacacaacuuuauugauugaa

SEQ ID NO: 381080 - RNA, 32 nt, Homo Sapiens
uggguguucuguacaauguuuauuacagucaa

SEQ ID NO: 381081 - RNA, 32 nt, Homo Sapiens
ucacuuuuguugcgcaggcuggagugcaaugg

SEQ ID NO: 381082 - RNA, 32 nt, Homo Sapiens
cugacauuagaaucauaaggcuuuuguuuaag

SEQ ID NO: 381083 - RNA, 32 nt, Homo Sapiens
agggcuggacauuuguggcagugcugaagggg

SEQ ID NO: 381084 - RNA, 32 nt, Homo Sapiens
uguugaauuuucuucuuccucuggccuccuuc

SEQ ID NO: 381085 - RNA, 32 nt, Homo Sapiens
gaggaggggcuccccacgcauucuuuuagcgg

SEQ ID NO: 381086 - RNA, 32 nt, Homo Sapiens
gcucagcugugcuacagccccgagucaccgcu

SEQ ID NO: 381087 - RNA, 32 nt, Homo Sapiens
ccucuaggcuggaagcuugggcuugcaagugg

SEQ ID NO: 381088 - RNA, 32 nt, Homo Sapiens
uccuagaggcggcugagccggaggcggucgca

SEQ ID NO: 381089 - RNA, 32 nt, Homo Sapiens
gcgcccgcugcauggcgcugagauggcggggg

SEQ ID NO: 381090 - RNA, 32 nt, Homo Sapiens
caagccucucugcccaucuacuuccaaucccu

SEQ ID NO: 381091 - RNA, 32 nt, Homo Sapiens
ccaggaagcacagguccaaggcuggucccaca

SEQ ID NO: 381092 - RNA, 32 nt, Homo Sapiens
gauacgcaaacacaccgaugcacacgcacaua

SEQ ID NO: 381093 - RNA, 32 nt, Homo Sapiens
cucguucacccuguccccacuccccacaguuu

SEQ ID NO: 381094 - RNA, 32 nt, Homo Sapiens
cuccagucaaggaaagguagcuuaaagauauc

SEQ ID NO: 381095 - RNA, 32 nt, Homo Sapiens
caucugaggucaucugauuauaaggccauguu

SEQ ID NO: 381096 - RNA, 32 nt, Homo Sapiens
caccauugcauuccagccugggugacagagcg

SEQ ID NO: 381097 - RNA, 32 nt, Homo Sapiens
agacuauuucuaggauuaacugagagauuaaa

SEQ ID NO: 381098 - RNA, 32 nt, Homo Sapiens
uccuuggcuggugcaccuagaauuggcugaac

SEQ ID NO: 381099 - RNA, 32 nt, Homo Sapiens
gucuggcccucccucuccagcaagcaggguuu

SEQ ID NO: 381100 - RNA, 32 nt, Homo Sapiens
auuagccgggagugguggugcgugccuguagu

SEQ ID NO: 381101 - RNA, 32 nt, Homo Sapiens
guggucacaguguucucaacagcaaauagugg

SEQ ID NO: 381102 - RNA, 32 nt, Homo Sapiens
cuguccagggccagcuccugccucccggugcc

SEQ ID NO: 381103 - RNA, 32 nt, Homo Sapiens
cugggcacaggaggagcagcugcuuuggucgg

SEQ ID NO: 381104 - RNA, 32 nt, Homo Sapiens
uuugagcaguguuuuguaauucuucuagagau

SEQ ID NO: 381105 - RNA, 32 nt, Homo Sapiens
uggcuggcgcugggcuucuucguggcccgcga

SEQ ID NO: 381106 - RNA, 32 nt, Homo Sapiens
ugggccagguuuucgacuccacugcuaacaaa

SEQ ID NO: 381107 - RNA, 32 nt, Homo Sapiens
gaguuagaucuagguccuucuaucucgucccu

SEQ ID NO: 381108 - RNA, 32 nt, Homo Sapiens
caucaaugaaaauuauauuuuaacuucauauu

SEQ ID NO: 381109 - RNA, 31 nt, Homo Sapiens
accgaaccggcgcuccugcccccggggugac

SEQ ID NO: 381110 - RNA, 32 nt, Homo Sapiens
agccgccgcgcccagacaguucuuucguuuua

SEQ ID NO: 381111 - RNA, 32 nt, Homo Sapiens
ugggcugccccuuggggugccccccgcuccca

SEQ ID NO: 381112 - RNA, 32 nt, Homo Sapiens
ucauggcccuguaguuaggccuggcucauucu

SEQ ID NO: 381113 - RNA, 32 nt, Homo Sapiens
ugucauuguauguaaguuuacuuuuuauggag

SEQ ID NO: 381114 - RNA, 32 nt, Homo Sapiens
aagcugcugcgcgccccggcgcccagcuggcu

SEQ ID NO: 381115 - RNA, 32 nt, Homo Sapiens
aaaucaggcuuguguucuuaauccaaauuagu

SEQ ID NO: 381116 - RNA, 32 nt, Homo Sapiens
ugcccaccaaccccccaccuccacucugccau

SEQ ID NO: 381117 - RNA, 32 nt, Homo Sapiens
guccccuguguccucagccaucccaagaaggg

SEQ ID NO: 381118 - RNA, 32 nt, Homo Sapiens
caauucguuguaaucagcaacauauucccaac

SEQ ID NO: 381119 - RNA, 32 nt, Homo Sapiens
uuuaaaaauaaauaccaauuauggaaauagua

SEQ ID NO: 381120 - RNA, 32 nt, Homo Sapiens
ugagagaggguggaugguggugaguggaucau

SEQ ID NO: 381121 - RNA, 32 nt, Homo Sapiens
cagagguuaaagagcaggcugacauggcuggc

SEQ ID NO: 381122 - RNA, 32 nt, Homo Sapiens
ggacuugugaguacuuggcaaguuuugcagcc

SEQ ID NO: 381123 - RNA, 32 nt, Homo Sapiens
ccgcccagucgccccagggcuuccccacaccc

SEQ ID NO: 381124 - RNA, 32 nt, Homo Sapiens
ggagacccgagugaccccgggguccggguggg

SEQ ID NO: 381125 - RNA, 32 nt, Homo Sapiens
gaguuuagcauugauauugugaaaauaagugc

SEQ ID NO: 381126 - RNA, 32 nt, Homo Sapiens
uccucgcagagaggccaggugcagguugggaa

SEQ ID NO: 381127 - RNA, 32 nt, Homo Sapiens
uucucaccugcuagucacuggacguacaacuc

SEQ ID NO: 381128 - RNA, 32 nt, Homo Sapiens
aucuacuccuucuccuucucauacaugagguu

SEQ ID NO: 381129 - RNA, 32 nt, Homo Sapiens
gguccguagugggcuaagggggaggguuucaa

SEQ ID NO: 381130 - RNA, 32 nt, Homo Sapiens
cugaagggcccuuccccucccccacuccucua

SEQ ID NO: 381131 - RNA, 32 nt, Homo Sapiens
uuugaaaugaacuuguuggcccaucuauuaca

SEQ ID NO: 381132 - RNA, 32 nt, Homo Sapiens
ugugccugccccccucuuacauaaccaugcug

SEQ ID NO: 381133 - RNA, 32 nt, Homo Sapiens
aaugacccuccagagcugggaaaccuaccaca

SEQ ID NO: 381134 - RNA, 32 nt, Homo Sapiens
acaauguauguacaauccaaauagaggagcuu

SEQ ID NO: 381135 - RNA, 32 nt, Homo Sapiens
acuuuguaugcaacaaguagaauggggccuug

SEQ ID NO: 381136 - RNA, 32 nt, Homo Sapiens
uuacagucuauuuucacacaguuucuguuguu

SEQ ID NO: 381137 - RNA, 32 nt, Homo Sapiens
ugucccuaacagcagcccugggcccccaccuc

SEQ ID NO: 381138 - RNA, 32 nt, Homo Sapiens
aauugcuaguuguauauaaaauuuaaucucac

SEQ ID NO: 381139 - RNA, 32 nt, Homo Sapiens
auguugaaaaggaagguggaaaaccaagaauu

SEQ ID NO: 381140 - RNA, 32 nt, Homo Sapiens
auccuguuacucugucccacguccaaucaugg

SEQ ID NO: 381141 - RNA, 32 nt, Homo Sapiens
ggaguucucgggcgcgcacaggcagcucgguu

SEQ ID NO: 381142 - RNA, 32 nt, Homo Sapiens
agcaauucagugcauccauugcagcaaauaau

SEQ ID NO: 381143 - RNA, 32 nt, Homo Sapiens
gacaaaaugucugguccagcaugguauuauaa

SEQ ID NO: 381144 - RNA, 32 nt, Homo Sapiens
caaugcuggaaaucguuacauuguuuagaaca

SEQ ID NO: 381145 - RNA, 32 nt, Homo Sapiens
uacuuacacaagcagucaagcagucaacaaag

SEQ ID NO: 381146 - RNA, 32 nt, Homo Sapiens
cacagaaaagcaaguaagauuaugucaacuac

SEQ ID NO: 381147 - RNA, 32 nt, Homo Sapiens
caauauaauugucuagaaccacagggagucug

SEQ ID NO: 381148 - RNA, 32 nt, Homo Sapiens
gcuggucugaggaaggggagaauggguggcca

SEQ ID NO: 381149 - RNA, 32 nt, Homo Sapiens
ggcugagauuuucuccuucaguggacugucug

SEQ ID NO: 381150 - RNA, 32 nt, Homo Sapiens
uuguuugcaucuccagagacaccugaggcccc

SEQ ID NO: 381151 - RNA, 32 nt, Homo Sapiens
cuccagcauccgacaagaagcuucagccaugc

SEQ ID NO: 381152 - RNA, 32 nt, Homo Sapiens
auggcaccuaauuauuuuuucuuuuaaaaugc

SEQ ID NO: 381153 - RNA, 32 nt, Homo Sapiens
accuaaaggucagcaugggcuccaucauacag

SEQ ID NO: 381154 - RNA, 32 nt, Homo Sapiens
ugggaagcucuuccuccugccccucccauucc

SEQ ID NO: 381155 - RNA, 32 nt, Homo Sapiens
acgccgaguuuaggagaagagagugagaggag

SEQ ID NO: 381156 - RNA, 32 nt, Homo Sapiens
acaugcaaagauuauuccugguaaaggaggua

SEQ ID NO: 381157 - RNA, 32 nt, Homo Sapiens
auuaagcccucuauaaagacuuccuguugagg

SEQ ID NO: 381158 - RNA, 32 nt, Homo Sapiens
cuccagguaggguaguugggggaaauaaaggg

SEQ ID NO: 381159 - RNA, 32 nt, Homo Sapiens
cccacugugcggcucacgacugagaugucauc

SEQ ID NO: 381160 - RNA, 32 nt, Homo Sapiens
gauuacaggcgcccaccaccacgucuggcuag

SEQ ID NO: 381161 - RNA, 32 nt, Homo Sapiens
guuaagggcaguaacguuaagaugcgugggca

SEQ ID NO: 381162 - RNA, 32 nt, Homo Sapiens
auaauauaaaauguaucuccaugggaggcuga

SEQ ID NO: 381163 - RNA, 32 nt, Homo Sapiens
ugugccggcgugggcaucccccggggcagugg

SEQ ID NO: 381164 - RNA, 32 nt, Homo Sapiens
ucuaagaucaggggauacaacaaaaucuacaa

SEQ ID NO: 381165 - RNA, 32 nt, Homo Sapiens
gguggcucaggguucucagagccccuggcaga

SEQ ID NO: 381166 - RNA, 32 nt, Homo Sapiens
ggguaagucgcgccugacccaggcugcuaaga

SEQ ID NO: 381167 - RNA, 32 nt, Homo Sapiens
ucugcacggccccucggcacccaggccgaccu

SEQ ID NO: 381168 - RNA, 32 nt, Homo Sapiens
uuguggaccacuuugguuuucuuucuuugcau

SEQ ID NO: 381169 - RNA, 32 nt, Homo Sapiens
uccccuuccccucccugccccaggacuuaaag

SEQ ID NO: 381170 - RNA, 32 nt, Homo Sapiens
uaaguacuaagcuccuaguauaagguguuguu

SEQ ID NO: 381171 - RNA, 32 nt, Homo Sapiens
caaauuuggaagccucuuucugaaaucauuag

SEQ ID NO: 381172 - RNA, 32 nt, Homo Sapiens
guuugagaugugcugccuuagaucaucuuuaa

SEQ ID NO: 381173 - RNA, 32 nt, Homo Sapiens
gagcgggcggagaggaaaggccgcucaguaag

SEQ ID NO: 381174 - RNA, 32 nt, Homo Sapiens
cuuucugcccccacccacgcugccuccguagu

SEQ ID NO: 381175 - RNA, 32 nt, Homo Sapiens
cuggcuucugcuuuuguuuuaagggauuaacu

SEQ ID NO: 381176 - RNA, 32 nt, Homo Sapiens
uucucaggacaaagccccggggcuggcgcauc

SEQ ID NO: 381177 - RNA, 32 nt, Homo Sapiens
agcagccccuccccaccaucccuccacaugcu

SEQ ID NO: 381178 - RNA, 30 nt, Homo Sapiens
augcuggauaaaaugucaguaaugcaaauu

SEQ ID NO: 381179 - RNA, 32 nt, Homo Sapiens
ggacuccuggcuugcuuuuggcuacagaauca

SEQ ID NO: 381180 - RNA, 32 nt, Homo Sapiens
caagaagaaaauuuuaaaaccaaaccucguuu

SEQ ID NO: 381181 - RNA, 32 nt, Homo Sapiens
ucuuguugucucuauuugacaggugaggaaga

SEQ ID NO: 381182 - RNA, 32 nt, Homo Sapiens
cagaauccauucuuuacaauaugcagugagau

SEQ ID NO: 381183 - RNA, 32 nt, Homo Sapiens
ucuaugccuuuuuuuucuuuuuuagagauggg

SEQ ID NO: 381184 - RNA, 32 nt, Homo Sapiens
cugcccugggguuccgcccagcccaaacgggc

SEQ ID NO: 381185 - RNA, 32 nt, Homo Sapiens
gauuguaagcacuuggaggugugacuuacagg

SEQ ID NO: 381186 - RNA, 32 nt, Homo Sapiens
ggccuccugccggcuccacgggcacuuucuac

SEQ ID NO: 381187 - RNA, 32 nt, Homo Sapiens
auguugggucuggggugcagaccugggagcgc

SEQ ID NO: 381188 - RNA, 32 nt, Homo Sapiens
aauguaaaguagugauaauuucaauuugggua

SEQ ID NO: 381189 - RNA, 32 nt, Homo Sapiens
uagaagaaaaagagagggagaugcagcagcug

SEQ ID NO: 381190 - RNA, 32 nt, Homo Sapiens
agccuggaaggggugugugcuugggcugcugg

SEQ ID NO: 381191 - RNA, 32 nt, Homo Sapiens
aauuagcugggguugguggcacaugccuguaa

SEQ ID NO: 381192 - RNA, 32 nt, Homo Sapiens
cuucugagcaagcagcucagggucugcaucag

SEQ ID NO: 381193 - RNA, 32 nt, Homo Sapiens
gcgcggcggcgguggcggcggggaaaauggcg

SEQ ID NO: 381194 - RNA, 32 nt, Homo Sapiens
ggaaauagaaaagaauuuuugaggacucuuaa

SEQ ID NO: 381195 - RNA, 32 nt, Homo Sapiens
caccaugaacuaagcaggacaccuggagggga

SEQ ID NO: 381196 - RNA, 32 nt, Homo Sapiens
gguuuuacaaggggugaccagucccggaagag

SEQ ID NO: 381197 - RNA, 32 nt, Homo Sapiens
ucacuuacuuggauuggaugucuuucauuccu

SEQ ID NO: 381198 - RNA, 32 nt, Homo Sapiens
auuacuuuuacgacaacuacuuugaccugcca

SEQ ID NO: 381199 - RNA, 32 nt, Homo Sapiens
gcauggggguggcacugagcuaggcagaggag

SEQ ID NO: 381200 - RNA, 32 nt, Homo Sapiens
guuacauuaaaauaaaccaaauauguuaaagu

SEQ ID NO: 381201 - RNA, 32 nt, Homo Sapiens
uagccuuaaaagacuuaaacuaaucguuuugu

SEQ ID NO: 381202 - RNA, 32 nt, Homo Sapiens
acacagccgaaguggaauguggggacgucugc

SEQ ID NO: 381203 - RNA, 32 nt, Homo Sapiens
cuggucccucaucgucauucccauuggccaaa

SEQ ID NO: 381204 - RNA, 32 nt, Homo Sapiens
uagcagggagcaucgugaaugcgaaguauuga

SEQ ID NO: 381205 - RNA, 32 nt, Homo Sapiens
cgaauccugccccuuguuuccacaccuaccau

SEQ ID NO: 381206 - RNA, 32 nt, Homo Sapiens
aaaauaaaaugaaagaaacugaauugucuaau

SEQ ID NO: 381207 - RNA, 32 nt, Homo Sapiens
aaggccaauuuuuucuggcaacuguaaaugga

SEQ ID NO: 381208 - RNA, 32 nt, Homo Sapiens
auuuguugauaccacuaacaaaaugcuuugua

SEQ ID NO: 381209 - RNA, 32 nt, Homo Sapiens
cgguggcagcggcagcggaggaggaagcugag

SEQ ID NO: 381210 - RNA, 32 nt, Homo Sapiens
cucagaugacagaguucuccucgccuuccaga

SEQ ID NO: 381211 - RNA, 32 nt, Homo Sapiens
aggugcuucucgcggagaccgcgggacccgcc

SEQ ID NO: 381212 - RNA, 32 nt, Homo Sapiens
cuguggcggcggcggcggcugggggcggugag

SEQ ID NO: 381213 - RNA, 32 nt, Homo Sapiens
cauauacacacacacacacacacacacacaca

SEQ ID NO: 381214 - RNA, 31 nt, Homo Sapiens
ugauggcuaaaauaaaugaagggggaaaagc

SEQ ID NO: 381215 - RNA, 32 nt, Homo Sapiens
cuuuguauccgaaagggucuaaguggauuaau

SEQ ID NO: 381216 - RNA, 32 nt, Homo Sapiens
agaacucaguuauauggugguuacucaugacu

SEQ ID NO: 381217 - RNA, 32 nt, Homo Sapiens
cuucccccggcaccccucccccucgggcgcca

SEQ ID NO: 381218 - RNA, 32 nt, Homo Sapiens
uugggcugguggggaggccuaguuugggugca

SEQ ID NO: 381219 - RNA, 32 nt, Homo Sapiens
uaucuauguccaauuugauugggauaguaguu

SEQ ID NO: 381220 - RNA, 32 nt, Homo Sapiens
cccagccccagccccaggcccagcugccuuug

SEQ ID NO: 381221 - RNA, 32 nt, Homo Sapiens
cauuuucucauaggauuuuucuuuuaguagug

SEQ ID NO: 381222 - RNA, 32 nt, Homo Sapiens
ggcccucuuuacugucacgucaucucuaggaa

SEQ ID NO: 381223 - RNA, 32 nt, Homo Sapiens
auguucuuaaggaaacaacuuauguaacauuu

SEQ ID NO: 381224 - RNA, 32 nt, Homo Sapiens
cauguggaaucucgugggggucggggaucccc

SEQ ID NO: 381225 - RNA, 32 nt, Homo Sapiens
cguguggccagagugguccgucguccccaaca

SEQ ID NO: 381226 - RNA, 32 nt, Homo Sapiens
ucuugggccuggggccacguggcacggagaga

SEQ ID NO: 381227 - RNA, 32 nt, Homo Sapiens
aucuuggguuauuuuguagcggugccaguauu

SEQ ID NO: 381228 - RNA, 32 nt, Homo Sapiens
aaacugagccccacggggugaagccuauugcc

SEQ ID NO: 381229 - RNA, 32 nt, Homo Sapiens
gaacacuggcgcccacagauucuccuuugaug

SEQ ID NO: 381230 - RNA, 32 nt, Homo Sapiens
ucaggggcacaucgccaggaccacgugugaga

SEQ ID NO: 381231 - RNA, 31 nt, Homo Sapiens
auccacauuugucaucgucuauugguaaaga

SEQ ID NO: 381232 - RNA, 32 nt, Homo Sapiens
ggggugaaguauuaaaaauaacuuuuuuguuu

SEQ ID NO: 381233 - RNA, 32 nt, Homo Sapiens
ccccaauugucuuuuuauuuuggguuaugacg

SEQ ID NO: 381234 - RNA, 32 nt, Homo Sapiens
uuacaacaagguggcaauuauuuucagaaaaa

SEQ ID NO: 381235 - RNA, 32 nt, Homo Sapiens
cugccagcguccccggccacgucugugcucug

SEQ ID NO: 381236 - RNA, 32 nt, Homo Sapiens
guucucgaggugcccuggccccggugcugggc

SEQ ID NO: 381237 - RNA, 32 nt, Homo Sapiens
gagcuuaauuuuaaguguagcauaaaacagaa

SEQ ID NO: 381238 - RNA, 32 nt, Homo Sapiens
uugauauaauuucagucuucuuaaauuugcca

SEQ ID NO: 381239 - RNA, 32 nt, Homo Sapiens
uagauuuugcccuuuuucuuccagguuaggac

SEQ ID NO: 381240 - RNA, 32 nt, Homo Sapiens
agcugcgggucgcggccggcgccggccucucc

SEQ ID NO: 381241 - RNA, 32 nt, Homo Sapiens
caccuguaaucccagcacuuugggauuacucc

SEQ ID NO: 381242 - RNA, 32 nt, Homo Sapiens
caagcccacaccugggcaggcuguuggugucu

SEQ ID NO: 381243 - RNA, 32 nt, Homo Sapiens
cgugugacaucuccagggaggccguccgaagu

SEQ ID NO: 381244 - RNA, 32 nt, Homo Sapiens
acugggagauaaaacucugugguuuuaaucuu

SEQ ID NO: 381245 - RNA, 32 nt, Homo Sapiens
uucagagagaacaacaggaauugaagaaguaa

SEQ ID NO: 381246 - RNA, 32 nt, Homo Sapiens
aagcagaagaucgagcaggagcuccgggucaa

SEQ ID NO: 381247 - RNA, 32 nt, Homo Sapiens
gaugguuuuauuuuuuaauuguuacaguaagu

SEQ ID NO: 381248 - RNA, 32 nt, Homo Sapiens
auuacauauuuuauuuuuuuuacaauggugga

SEQ ID NO: 381249 - RNA, 32 nt, Homo Sapiens
cccgggcgcaacgcaaacauggcggcgggugg

SEQ ID NO: 381250 - RNA, 32 nt, Homo Sapiens
agaggaggaagguuggaccuucaucagaccac

SEQ ID NO: 381251 - RNA, 32 nt, Homo Sapiens
ugcccagagugcagaccuccccugccucccau

SEQ ID NO: 381252 - RNA, 32 nt, Homo Sapiens
aucugccucaagucuauguacaguguuugcug

SEQ ID NO: 381253 - RNA, 32 nt, Homo Sapiens
ugacugugguuggaaacacacacacacacuca

SEQ ID NO: 381254 - RNA, 32 nt, Homo Sapiens
uuucuuugguaaaucaagauccagucaggguu

SEQ ID NO: 381255 - RNA, 32 nt, Homo Sapiens
aaaacacagagcuuagacacucuuccccuccu

SEQ ID NO: 381256 - RNA, 32 nt, Homo Sapiens
cuuacacacacugccagagauacucuaggcau

SEQ ID NO: 381257 - RNA, 32 nt, Homo Sapiens
ucccugcagggccuggccucgccucccagggc

SEQ ID NO: 381258 - RNA, 32 nt, Homo Sapiens
agcacaaccgcaggcucuacgucuacuacuca

SEQ ID NO: 381259 - RNA, 32 nt, Homo Sapiens
cagaucagggccauuggugacaaugcuuguuu

SEQ ID NO: 381260 - RNA, 32 nt, Homo Sapiens
ccugcaccagaaccugccccccggcuuccccg

SEQ ID NO: 381261 - RNA, 32 nt, Homo Sapiens
ucccgguucgguggcggcggcuccucccacug

SEQ ID NO: 381262 - RNA, 32 nt, Homo Sapiens
ggaaucuggugccuguuccacuagagacaagg

SEQ ID NO: 381263 - RNA, 32 nt, Homo Sapiens
gcucuuagcucuuuuuugaucgaugaagcacu

SEQ ID NO: 381264 - RNA, 32 nt, Homo Sapiens
gagaagguggacagcccugcucuuaguaggug

SEQ ID NO: 381265 - RNA, 32 nt, Homo Sapiens
uuauugagacagagucccacucugucacccag

SEQ ID NO: 381266 - RNA, 32 nt, Homo Sapiens
guuuuuaaauguuuucacaaaacuguuacggg

SEQ ID NO: 381267 - RNA, 32 nt, Homo Sapiens
uguguugugauucauaguacauuaaaaagaga

SEQ ID NO: 381268 - RNA, 30 nt, Homo Sapiens
guugggcagccugugccgccgccgccgcuu

SEQ ID NO: 381269 - RNA, 32 nt, Homo Sapiens
agaaaaggagggaggacuggcuggggaaaauc

SEQ ID NO: 381270 - RNA, 32 nt, Homo Sapiens
ccuagguaacaagagggaaacuccaucucaaa

SEQ ID NO: 381271 - RNA, 32 nt, Homo Sapiens
agcccaguccucucugccuccuccuggcugaa

SEQ ID NO: 381272 - RNA, 32 nt, Homo Sapiens
ggaggagggagagaaggagggaggcgcuccug

SEQ ID NO: 381273 - RNA, 32 nt, Homo Sapiens
uccaaccugcuggugaucagggugcugcagcc

SEQ ID NO: 381274 - RNA, 32 nt, Homo Sapiens
uccccucauuuccaucucccagcccccagggg

SEQ ID NO: 381275 - RNA, 32 nt, Homo Sapiens
aaccacccaucccccuaccacuaccaugcagc

SEQ ID NO: 381276 - RNA, 28 nt, Homo Sapiens
guucauccagcaaccaggaugaucuugu

SEQ ID NO: 381277 - RNA, 32 nt, Homo Sapiens
aagucagcuggaccucauggggccuggggcuc

SEQ ID NO: 381278 - RNA, 32 nt, Homo Sapiens
ugggagguggagguugcagugaguugagauca

SEQ ID NO: 381279 - RNA, 32 nt, Homo Sapiens
aagaaacaaccugaaggccaucccgucggucu

SEQ ID NO: 381280 - RNA, 32 nt, Homo Sapiens
auuauaacaauuuugcuaaaccauuacaaugu

SEQ ID NO: 381281 - RNA, 32 nt, Homo Sapiens
auuauaggccccagugggccacuuggguuuug

SEQ ID NO: 381282 - RNA, 32 nt, Homo Sapiens
uguaaauguacugguaauuguacaauacuugc

SEQ ID NO: 381283 - RNA, 32 nt, Homo Sapiens
cuugaccaugcucugaaaaaagaaauuucugg

SEQ ID NO: 381284 - RNA, 32 nt, Homo Sapiens
ucuuucuuucuuucuuuuuuuuuuuuuuugag

SEQ ID NO: 381285 - RNA, 32 nt, Homo Sapiens
ugaggacuagggcaucaaggucgugugugugg

SEQ ID NO: 381286 - RNA, 32 nt, Homo Sapiens
gagccagcuccuccugcagagcccccaggugg

SEQ ID NO: 381287 - RNA, 32 nt, Homo Sapiens
cuguacccacugacauccaacuucugugaacu

SEQ ID NO: 381288 - RNA, 32 nt, Homo Sapiens
acuuguguuucaucaauaaaguuguguuuuaa

SEQ ID NO: 381289 - RNA, 32 nt, Homo Sapiens
uguaauuuuuauucuuuuuucuccugauuauu

SEQ ID NO: 381290 - RNA, 32 nt, Homo Sapiens
guagagagggucaccuacuagaagagaaaugc

SEQ ID NO: 381291 - RNA, 32 nt, Homo Sapiens
auuuuucccugauguuuccaauaaagauuuac

SEQ ID NO: 381292 - RNA, 32 nt, Homo Sapiens
ugguuuauaugauuaaauuaauauuugcuuaa

SEQ ID NO: 381293 - RNA, 32 nt, Homo Sapiens
acagacagacaccacagccuccccuucccaga

SEQ ID NO: 381294 - RNA, 32 nt, Homo Sapiens
agagcaguuauuaacagaaucacagucuuucu

SEQ ID NO: 381295 - RNA, 32 nt, Homo Sapiens
gggccuguugcuuuugagcccagcgguucacc

SEQ ID NO: 381296 - RNA, 32 nt, Homo Sapiens
aagcucugggugugccagaggacccccagaac

SEQ ID NO: 381297 - RNA, 32 nt, Homo Sapiens
ccaggcgagcgcgggggacucggacccacaga

SEQ ID NO: 381298 - RNA, 32 nt, Homo Sapiens
uucuaauuggaaugccaggguucaguagccgu

SEQ ID NO: 381299 - RNA, 32 nt, Homo Sapiens
ggcuggggacuccagggguggcugggagacug

SEQ ID NO: 381300 - RNA, 32 nt, Homo Sapiens
aaagauggaaacugaggagacuggagcaaaau

SEQ ID NO: 381301 - RNA, 30 nt, Homo Sapiens
aagcugaguaaaauuccuucugaugauguu

SEQ ID NO: 381302 - RNA, 32 nt, Homo Sapiens
auuuaagaacgaauuauaauuaugguuuacac

SEQ ID NO: 381303 - RNA, 32 nt, Homo Sapiens
accauggaaacuacagaacaaacaauuuaguu

SEQ ID NO: 381304 - RNA, 31 nt, Homo Sapiens
aggcuggcgucgagacuugaggccguugcag

SEQ ID NO: 381305 - RNA, 32 nt, Homo Sapiens
uuccgaaauggacuucucugcaagccugacuc

SEQ ID NO: 381306 - RNA, 32 nt, Homo Sapiens
ucugaucugaugcaagcaagaaacacugggcu

SEQ ID NO: 381307 - RNA, 32 nt, Homo Sapiens
aggaggucaggucucugggaacccucagaaua

SEQ ID NO: 381308 - RNA, 32 nt, Homo Sapiens
ucagugaccuuuucuucacguggaggucaacu

SEQ ID NO: 381309 - RNA, 32 nt, Homo Sapiens
caugggcuaggccuguucuccuccuccagacc

SEQ ID NO: 381310 - RNA, 32 nt, Homo Sapiens
ggaucugaugucuugucugccccgcccagcuu

SEQ ID NO: 381311 - RNA, 32 nt, Homo Sapiens
cuagugaagaggucgccauaaaauauuagagu

SEQ ID NO: 381312 - RNA, 32 nt, Homo Sapiens
acgguaacuagaucuaauauauaucaucagaa

SEQ ID NO: 381313 - RNA, 32 nt, Homo Sapiens
gaagauacagaaaaagagggccggggcugggc

SEQ ID NO: 381314 - RNA, 31 nt, Homo Sapiens
augacauugaaauuguuuagagccugauauu

SEQ ID NO: 381315 - RNA, 32 nt, Homo Sapiens
ugaucagcgcgaccccggcccgcgcccgcccc

SEQ ID NO: 381316 - RNA, 32 nt, Homo Sapiens
cuccuucuacaaaacauagaucagcugguuua

SEQ ID NO: 381317 - RNA, 32 nt, Homo Sapiens
caaagaauuucaucaaaauauuuuaaauuaug

SEQ ID NO: 381318 - RNA, 32 nt, Homo Sapiens
cugaacagggaaggaaaauaugucaagaacaa

SEQ ID NO: 381319 - RNA, 32 nt, Homo Sapiens
ugguggcagcguugagaaggggguuacuugcu

SEQ ID NO: 381320 - RNA, 32 nt, Homo Sapiens
uguauugggggguggggguggguacauauugu

SEQ ID NO: 381321 - RNA, 32 nt, Homo Sapiens
uuuggcugaaauuaaacuuaucauuagucuag

SEQ ID NO: 381322 - RNA, 32 nt, Homo Sapiens
ggggcugugugcuugcuaggugugggcgcgcu

SEQ ID NO: 381323 - RNA, 32 nt, Homo Sapiens
uagcuaaguccaccccaccugcugccucacau

SEQ ID NO: 381324 - RNA, 32 nt, Homo Sapiens
uuuuuuaaacaaaaaaugaaauauaacaagac

SEQ ID NO: 381325 - RNA, 32 nt, Homo Sapiens
uuuaccaucuguacaauuauuugcuuuauauu

SEQ ID NO: 381326 - RNA, 32 nt, Homo Sapiens
aagcauugagauuuagaacugauuuuucagag

SEQ ID NO: 381327 - RNA, 32 nt, Homo Sapiens
aaagcaguuuaguaggcuuagaucucaaauuc

SEQ ID NO: 381328 - RNA, 32 nt, Homo Sapiens
agcgcccggggagggggcgcccggcuuggaau

SEQ ID NO: 381329 - RNA, 32 nt, Homo Sapiens
ugcucgccgggcggcgcaggccggagaaguua

SEQ ID NO: 381330 - RNA, 32 nt, Homo Sapiens
uuagcgauaaaauuauuuuucuaugauauaau

SEQ ID NO: 381331 - RNA, 32 nt, Homo Sapiens
cacaauuauaugccaguaacacucauuuuaac

SEQ ID NO: 381332 - RNA, 32 nt, Homo Sapiens
auugagauacuuugaacuauuuauagagaaaa

SEQ ID NO: 381333 - RNA, 32 nt, Homo Sapiens
caaggagccauggauauuagaggaaaaauuuc

SEQ ID NO: 381334 - RNA, 32 nt, Homo Sapiens
auauuaagauaaugauaaagauaccucagcaa

SEQ ID NO: 381335 - RNA, 32 nt, Homo Sapiens
gagcuuugggguuccuugagaugaaugaacau

SEQ ID NO: 381336 - RNA, 32 nt, Homo Sapiens
aaucaucucuacagagaacugaaauuucuucu

SEQ ID NO: 381337 - RNA, 31 nt, Homo Sapiens
gguccugggcacugccugagcagggcacagu

SEQ ID NO: 381338 - RNA, 27 nt, Homo Sapiens
cuggcucuuuuugacagcccccagugc

SEQ ID NO: 381339 - RNA, 32 nt, Homo Sapiens
ccccaucgccuggcggguccaaggcuggccac

SEQ ID NO: 381340 - RNA, 32 nt, Homo Sapiens
gacauggucaaucccgggcaagggaccugcca

SEQ ID NO: 381341 - RNA, 32 nt, Homo Sapiens
uuguauuaugaaucaaauuaaguuuuauguau

SEQ ID NO: 381342 - RNA, 32 nt, Homo Sapiens
agggugcgaagaacugcaauggcugcugcaac

SEQ ID NO: 381343 - RNA, 32 nt, Homo Sapiens
ugauuccaggggacccaaaaacgucauguggu

SEQ ID NO: 381344 - RNA, 32 nt, Homo Sapiens
acccucucaggccuuuuccgcuucucuuuuac

SEQ ID NO: 381345 - RNA, 28 nt, Homo Sapiens
uguuagaaagauuguagcguuuuacucu

SEQ ID NO: 381346 - RNA, 32 nt, Homo Sapiens
gggcaggcaacuuugggugcugcugaugccug

SEQ ID NO: 381347 - RNA, 32 nt, Homo Sapiens
ggaaaaaaucuucaaaaacuauuaaauggaua

SEQ ID NO: 381348 - RNA, 32 nt, Homo Sapiens
agcagaagccccaccagccucugguggaccug

SEQ ID NO: 381349 - RNA, 32 nt, Homo Sapiens
cccgccucuuucguccgcgggccgguucaaga

SEQ ID NO: 381350 - RNA, 32 nt, Homo Sapiens
gagcgcgcgggccagcgcucagccagcgccuc

SEQ ID NO: 381351 - RNA, 32 nt, Homo Sapiens
ggagggggaggcgggaugggacacccaacacu

SEQ ID NO: 381352 - RNA, 32 nt, Homo Sapiens
uccuggggugcagcugcaaaaggccagacgug

SEQ ID NO: 381353 - RNA, 30 nt, Homo Sapiens
ucaguaauuaaaauaagugcugaucuacug

SEQ ID NO: 381354 - RNA, 32 nt, Homo Sapiens
cucguauucuaccuaugucuuuucuguaaauu

SEQ ID NO: 381355 - RNA, 32 nt, Homo Sapiens
gcucuacaaccuggaccagcaugugguuaaag

SEQ ID NO: 381356 - RNA, 32 nt, Homo Sapiens
uaaaacaguagggccucuguaaaauuggagac

SEQ ID NO: 381357 - RNA, 32 nt, Homo Sapiens
uguguaucaucucccuaggagaugaccuaaca

SEQ ID NO: 381358 - RNA, 32 nt, Homo Sapiens
agcaacaggaggacgaggggccggggcggugc

SEQ ID NO: 381359 - RNA, 32 nt, Homo Sapiens
aaaacaaguggaagaaaagaggaagcaugacu

SEQ ID NO: 381360 - RNA, 32 nt, Homo Sapiens
gauggauuugagauuugccuucugucucucag

SEQ ID NO: 381361 - RNA, 32 nt, Homo Sapiens
cugagggcaucaucuuccucaucugggaggcc

SEQ ID NO: 381362 - RNA, 31 nt, Homo Sapiens
ugggcaggggucagugccacggccuccuugu

SEQ ID NO: 381363 - RNA, 32 nt, Homo Sapiens
gucuucauaugccaacaggggcgcucuugaca

SEQ ID NO: 381364 - RNA, 32 nt, Homo Sapiens
caaggcuggguuuuuaccccuugcugcuaccu

SEQ ID NO: 381365 - RNA, 32 nt, Homo Sapiens
ccugggcagcacucugucuccuccccuccugc

SEQ ID NO: 381366 - RNA, 32 nt, Homo Sapiens
cgucgcccgcaccauguccgcggccgccuaca

SEQ ID NO: 381367 - RNA, 32 nt, Homo Sapiens
aggcuaggaagguacacugaggcuacugcagg

SEQ ID NO: 381368 - RNA, 32 nt, Homo Sapiens
ggccagccagcgccaacagcugcgaguacuug

SEQ ID NO: 381369 - RNA, 32 nt, Homo Sapiens
ggauggacagugagcaagugaacgcuuagaga

SEQ ID NO: 381370 - RNA, 32 nt, Homo Sapiens
gccucccgcagccgccgagaugcugcgaacag

SEQ ID NO: 381371 - RNA, 32 nt, Homo Sapiens
uuuaccuguauaucuaauuuauauuuucauau

SEQ ID NO: 381372 - RNA, 32 nt, Homo Sapiens
agccaggcgugguggcgggcgccuguaauccc

SEQ ID NO: 381373 - RNA, 32 nt, Homo Sapiens
cccgcccgcgcgcaaaacgcacucgccccaga

SEQ ID NO: 381374 - RNA, 32 nt, Homo Sapiens
auuccagcucacugcgcagccugggaggaggc

SEQ ID NO: 381375 - RNA, 32 nt, Homo Sapiens
guguggacauuccaaguucauaugcgugaaca

SEQ ID NO: 381376 - RNA, 32 nt, Homo Sapiens
gaggaggugggaggaagaagucagacucagcc

SEQ ID NO: 381377 - RNA, 32 nt, Homo Sapiens
uguaaaaugacagagauguaacaagcucauag

SEQ ID NO: 381378 - RNA, 32 nt, Homo Sapiens
agacacaaaauauuauacuaauauguuguaca

SEQ ID NO: 381379 - RNA, 32 nt, Homo Sapiens
uuauagcuauuaaacuaacaaaggagaucaaa

SEQ ID NO: 381380 - RNA, 32 nt, Homo Sapiens
ccgacgcccucacucccgagccccacacccac

SEQ ID NO: 381381 - RNA, 32 nt, Homo Sapiens
ucagaguucugaauaauuacuuugaaacugua

SEQ ID NO: 381382 - RNA, 32 nt, Homo Sapiens
gcugcagccuugggcccuccccggcccacguc

SEQ ID NO: 381383 - RNA, 32 nt, Homo Sapiens
cucuccguucccgacccccggcguggauucgu

SEQ ID NO: 381384 - RNA, 32 nt, Homo Sapiens
ccaaggcaguguggagauggacccacaccgcc

SEQ ID NO: 381385 - RNA, 32 nt, Homo Sapiens
ccugcucccugccuuaacuccuccucccacug

SEQ ID NO: 381386 - RNA, 32 nt, Homo Sapiens
uucccagcgggaaggugagaggcaaaaggaug

SEQ ID NO: 381387 - RNA, 32 nt, Homo Sapiens
gcagagccaggcccagguggcuccagcugccu

SEQ ID NO: 381388 - RNA, 32 nt, Homo Sapiens
aaagaucaagacauucauguacagucuggaau

SEQ ID NO: 381389 - RNA, 32 nt, Homo Sapiens
ggcuucccugucagcaauaaccggcauccguu

SEQ ID NO: 381390 - RNA, 32 nt, Homo Sapiens
gcugggcgggcaccugucggccucgucggcgc

SEQ ID NO: 381391 - RNA, 32 nt, Homo Sapiens
cggccccggaagcacccgccucccggcauggu

SEQ ID NO: 381392 - RNA, 32 nt, Homo Sapiens
cuucauucccacugcacuuggugcugcuuugg

SEQ ID NO: 381393 - RNA, 32 nt, Homo Sapiens
uguuuuuguuuuauuuucuaccaggcccagcu

SEQ ID NO: 381394 - RNA, 32 nt, Homo Sapiens
uagcaaucuaggaaacuguauuuuggaagaua

SEQ ID NO: 381395 - RNA, 32 nt, Homo Sapiens
aagcuugcggugagugugugccacugauggag

SEQ ID NO: 381396 - RNA, 32 nt, Homo Sapiens
uguagaagggaagagaauuggugcugcagaag

SEQ ID NO: 381397 - RNA, 32 nt, Homo Sapiens
gagguugucaggggcuaugaugagaugagugg

SEQ ID NO: 381398 - RNA, 32 nt, Homo Sapiens
cugugccacuaccaccugaaaaacuccuccca

SEQ ID NO: 381399 - RNA, 32 nt, Homo Sapiens
ucggcaccgccuugggcucccgcggccacucg

SEQ ID NO: 381400 - RNA, 32 nt, Homo Sapiens
uuccaggcucagggugggcuguguguuaguuc

SEQ ID NO: 381401 - RNA, 32 nt, Homo Sapiens
aaaccccucuucuccccgcccucccccagcuc

SEQ ID NO: 381402 - RNA, 32 nt, Homo Sapiens
ugcugcaccucugaccagucucuucuggaaga

SEQ ID NO: 381403 - RNA, 32 nt, Homo Sapiens
aaucauggguccaggcugauagcaauggacag

SEQ ID NO: 381404 - RNA, 32 nt, Homo Sapiens
gagggcggugacauauuggaccagaagaggca

SEQ ID NO: 381405 - RNA, 32 nt, Homo Sapiens
ggauugucuguacaagauuaacuauccauugu

SEQ ID NO: 381406 - RNA, 32 nt, Homo Sapiens
ugcgcuucggacgaggagcccaaguccuccga

SEQ ID NO: 381407 - RNA, 30 nt, Homo Sapiens
ccagcaggcaggcgggaagggccaaguaca

SEQ ID NO: 381408 - RNA, 32 nt, Homo Sapiens
ccuuuccugcggcaccaccucccuuuuuauau

SEQ ID NO: 381409 - RNA, 32 nt, Homo Sapiens
cugggcugucuccucaccccucccugugcugg

SEQ ID NO: 381410 - RNA, 32 nt, Homo Sapiens
gggaagaggcgugacggagauuccugaggugu

SEQ ID NO: 381411 - RNA, 32 nt, Homo Sapiens
caaggcccugucaccaccuauuuuccugauca

SEQ ID NO: 381412 - RNA, 32 nt, Homo Sapiens
auggccuaaauauauauggcaaaaauaccaau

SEQ ID NO: 381413 - RNA, 32 nt, Homo Sapiens
ccacgcgguucuggaaaggcacuugccucugc

SEQ ID NO: 381414 - RNA, 32 nt, Homo Sapiens
ccaggccccggucauuggggugacccccucac

SEQ ID NO: 381415 - RNA, 32 nt, Homo Sapiens
cuccuccuacugagcaggccacgugacuugcu

SEQ ID NO: 381416 - RNA, 32 nt, Homo Sapiens
ggcagaggaacaaggacacagacauucccuca

SEQ ID NO: 381417 - RNA, 32 nt, Homo Sapiens
acaguaagauacagaagaaguaccuucgagcu

SEQ ID NO: 381418 - RNA, 32 nt, Homo Sapiens
aauaaagacaccugguugcuaaccugaaaaaa

SEQ ID NO: 381419 - RNA, 32 nt, Homo Sapiens
gucccgccugcccgcccucccccacguggccc

SEQ ID NO: 381420 - RNA, 32 nt, Homo Sapiens
gucgaagggaaaguacaagggagcugacccug

SEQ ID NO: 381421 - RNA, 32 nt, Homo Sapiens
gaauaaugccuagccuuaguagauaaagcggc

SEQ ID NO: 381422 - RNA, 32 nt, Homo Sapiens
aggcgcgcuugcaggagggcaagccccuuggu

SEQ ID NO: 381423 - RNA, 32 nt, Homo Sapiens
ugcuuuaccaaaacuugguuuauguaagugga

SEQ ID NO: 381424 - RNA, 32 nt, Homo Sapiens
aacuggugcugugacuccugcugcuggggauu

SEQ ID NO: 381425 - RNA, 32 nt, Homo Sapiens
caaaaagaacaaauacacguauguuauaacca

SEQ ID NO: 381426 - RNA, 32 nt, Homo Sapiens
acccuguugcaggcaaagguacacuugaccuu

SEQ ID NO: 381427 - RNA, 32 nt, Homo Sapiens
gucaguguaguguaugcuguguuccauguugc

SEQ ID NO: 381428 - RNA, 32 nt, Homo Sapiens
agaaggugaaaacuuuuuuggcucucauuuca

SEQ ID NO: 381429 - RNA, 32 nt, Homo Sapiens
acagggugggagaggggacacaugggugucca

SEQ ID NO: 381430 - RNA, 32 nt, Homo Sapiens
cuucaccccccgaaaggcuaauccccacuucc

SEQ ID NO: 381431 - RNA, 32 nt, Homo Sapiens
acuaaugugcaaauacaguggugauauauuga

SEQ ID NO: 381432 - RNA, 32 nt, Homo Sapiens
acaacaacaaaauaaagcuguuguuaaauuuu

SEQ ID NO: 381433 - RNA, 32 nt, Homo Sapiens
uggggcugcaucuccgggacaccuggggcuga

SEQ ID NO: 381434 - RNA, 32 nt, Homo Sapiens
gucaacaaguaucuuugauuuguuuucagcag

SEQ ID NO: 381435 - RNA, 32 nt, Homo Sapiens
accuuuaauucccaguuuuaaaacagauauaa

SEQ ID NO: 381436 - RNA, 32 nt, Homo Sapiens
agcuguaauuuaacccagagcagcuccacgug

SEQ ID NO: 381437 - RNA, 32 nt, Homo Sapiens
agagccagcgcaggccugggcuccucagaggc

SEQ ID NO: 381438 - RNA, 32 nt, Homo Sapiens
cgugauaguccaaagcacucagcuaaaacgga

SEQ ID NO: 381439 - RNA, 32 nt, Homo Sapiens
ccucaugcuggcgccgauggcugcuggggaca

SEQ ID NO: 381440 - RNA, 30 nt, Homo Sapiens
guaccccagcucaugggggacucagcaagc

SEQ ID NO: 381441 - RNA, 32 nt, Homo Sapiens
auugaugucaggcuguggccauagguagcaug

SEQ ID NO: 381442 - RNA, 32 nt, Homo Sapiens
aggaggcgccgggagcggagccgccgggaguc

SEQ ID NO: 381443 - RNA, 32 nt, Homo Sapiens
gaccuccacuuuucaggagacuuggggacgac

SEQ ID NO: 381444 - RNA, 32 nt, Homo Sapiens
uggcaugcuugacuauuucuuauuucaaaugu

SEQ ID NO: 381445 - RNA, 32 nt, Homo Sapiens
ucuaaucuaaucacuagaguuauuauauucug

SEQ ID NO: 381446 - RNA, 32 nt, Homo Sapiens
ccuucaugccuuccccacccuccagcuccucu

SEQ ID NO: 381447 - RNA, 32 nt, Homo Sapiens
acuuccggcgcucgcaccgccccgcucuccag

SEQ ID NO: 381448 - RNA, 32 nt, Homo Sapiens
cugcaggguucggcuccgccccugccccccag

SEQ ID NO: 381449 - RNA, 32 nt, Homo Sapiens
uuuccauaggcgugcugcacuugcuugguaaa

SEQ ID NO: 381450 - RNA, 32 nt, Homo Sapiens
augcuggaguacaauggcacaaacacugcuca

SEQ ID NO: 381451 - RNA, 32 nt, Homo Sapiens
gaaagucugagcaguuuugauuagauuuccca

SEQ ID NO: 381452 - RNA, 32 nt, Homo Sapiens
ccugcugcguccccacucccuugguggugggg

SEQ ID NO: 381453 - RNA, 32 nt, Homo Sapiens
cuaagcaucuucugccagaauucugugaguau

SEQ ID NO: 381454 - RNA, 32 nt, Homo Sapiens
uggauagcuuucaggaaagauaaagagaacau

SEQ ID NO: 381455 - RNA, 32 nt, Homo Sapiens
caaccaaaucauguuuuccucuuggauggaag

SEQ ID NO: 381456 - RNA, 32 nt, Homo Sapiens
aaaguugcaguaaauuuuauuuggauauuuua

SEQ ID NO: 381457 - RNA, 32 nt, Homo Sapiens
gcugauuccuauaagcacuuuagaguuugaga

SEQ ID NO: 381458 - RNA, 32 nt, Homo Sapiens
ugagcaggacguuaggcccgggccccuggcac

SEQ ID NO: 381459 - RNA, 32 nt, Homo Sapiens
gggaucucaaaagauuugguucagauccaaac

SEQ ID NO: 381460 - RNA, 32 nt, Homo Sapiens
accauuguccguagucaggauaucuuugggaa

SEQ ID NO: 381461 - RNA, 32 nt, Homo Sapiens
ccagaagaaaucacuccacuccuaccagccau

SEQ ID NO: 381462 - RNA, 32 nt, Homo Sapiens
cccaugccaaagcuaggguggcccuugcaguu

SEQ ID NO: 381463 - RNA, 32 nt, Homo Sapiens
cccgggcucccacaggacgaauguagacggug

SEQ ID NO: 381464 - RNA, 32 nt, Homo Sapiens
uagacgcaggauuguuuuuguuuguaaaaauu

SEQ ID NO: 381465 - RNA, 32 nt, Homo Sapiens
ugggagucaggagaccuggauuugaggacuag

SEQ ID NO: 381466 - RNA, 32 nt, Homo Sapiens
aacucggggaagcuccagaagguggggagagg

SEQ ID NO: 381467 - RNA, 32 nt, Homo Sapiens
uccuaggcugggcuggcccacccucaccccca

SEQ ID NO: 381468 - RNA, 32 nt, Homo Sapiens
aacaacgaaaaguauggagucuggagaaucgc

SEQ ID NO: 381469 - RNA, 29 nt, Homo Sapiens
ccccuuucuaaauacccucagauuccuaa

SEQ ID NO: 381470 - RNA, 32 nt, Homo Sapiens
cuagcuggcuguccauauugaauguugaccca

SEQ ID NO: 381471 - RNA, 32 nt, Homo Sapiens
ggcuuccccgagugcuggcccccugcccgcuc

SEQ ID NO: 381472 - RNA, 31 nt, Homo Sapiens
acuccgagcugcagcacuccaaggcugucag

SEQ ID NO: 381473 - RNA, 30 nt, Homo Sapiens
uaucuuaaugcauauggggaaacugaggcc

SEQ ID NO: 381474 - RNA, 32 nt, Homo Sapiens
ccacucuggugcccccagacccugggccccca

SEQ ID NO: 381475 - RNA, 32 nt, Homo Sapiens
cccgagccagccccagacccagccccgguggc

SEQ ID NO: 381476 - RNA, 32 nt, Homo Sapiens
guaacaucuauuugccuucauuaguuucuaaa

SEQ ID NO: 381477 - RNA, 32 nt, Homo Sapiens
ucucggucacauguuuuuccuucagcuugaaa

SEQ ID NO: 381478 - RNA, 32 nt, Homo Sapiens
cauguccucgggcagcugcaacuccccgcgag

SEQ ID NO: 381479 - RNA, 32 nt, Homo Sapiens
gugauuuuuuaaauuuuuguuuuaucugaauu

SEQ ID NO: 381480 - RNA, 32 nt, Homo Sapiens
agcugcuauauuguuugacauaaaaggcuuuu

SEQ ID NO: 381481 - RNA, 32 nt, Homo Sapiens
acuaugcagcucaucacccuagguucuacagg

SEQ ID NO: 381482 - RNA, 32 nt, Homo Sapiens
cgccgaggguggugccuuuucgcuaggggugc

SEQ ID NO: 381483 - RNA, 32 nt, Homo Sapiens
cucgccacuugccugagcuggugcugaccucu

SEQ ID NO: 381484 - RNA, 32 nt, Homo Sapiens
uugcaggggagcuucugagccacccugcuugu

SEQ ID NO: 381485 - RNA, 32 nt, Homo Sapiens
uuuuaugucuuaaucuaacucuauaguaggca

SEQ ID NO: 381486 - RNA, 32 nt, Homo Sapiens
gagugcaguggcaaaaucauggcucacugcag

SEQ ID NO: 381487 - RNA, 32 nt, Homo Sapiens
aaauaaagauaaaaguuauuguggccaucucu

SEQ ID NO: 381488 - RNA, 32 nt, Homo Sapiens
aucucaaacuacuuuauuuucuggaguauaga

SEQ ID NO: 381489 - RNA, 32 nt, Homo Sapiens
ugggggacagguccagccugugguguccacaa

SEQ ID NO: 381490 - RNA, 32 nt, Homo Sapiens
aauauguauugaauuucuuucauaaacuuuuc

SEQ ID NO: 381491 - RNA, 32 nt, Homo Sapiens
ucuauguucucugaggccccagcaauaaagug

SEQ ID NO: 381492 - RNA, 32 nt, Homo Sapiens
gaaagccgccggcggggaaucccggccguaga

SEQ ID NO: 381493 - RNA, 32 nt, Homo Sapiens
uuuugcaauaaaacugguuaugacuugaucca

SEQ ID NO: 381494 - RNA, 32 nt, Homo Sapiens
auugguucagcacuguccugcugcuccccacc

SEQ ID NO: 381495 - RNA, 32 nt, Homo Sapiens
ggaugguggggguagauaauccauucagccag

SEQ ID NO: 381496 - RNA, 32 nt, Homo Sapiens
augccaaacacuuaaagcaauucgauguuuaa

SEQ ID NO: 381497 - RNA, 32 nt, Homo Sapiens
ccugguugugacauugugguauaauauugcaa

SEQ ID NO: 381498 - RNA, 32 nt, Homo Sapiens
ggcuagagggagaaaaaggaaaugucuugugu

SEQ ID NO: 381499 - RNA, 32 nt, Homo Sapiens
caguuauuucuaucuagugaaaugguacagag

SEQ ID NO: 381500 - RNA, 31 nt, Homo Sapiens
gguggcaagauggcugcaggaguucagguau

SEQ ID NO: 381501 - RNA, 32 nt, Homo Sapiens
gccugcuucccggugagcugcccccgacacgu

SEQ ID NO: 381502 - RNA, 32 nt, Homo Sapiens
gugcucugccagcagcacagacaucugcucca

SEQ ID NO: 381503 - RNA, 32 nt, Homo Sapiens
uucccaagcccuccaauccccaucccaggcuu

SEQ ID NO: 381504 - RNA, 32 nt, Homo Sapiens
uaaacucgugguuuuucucucauuuucuuccc

SEQ ID NO: 381505 - RNA, 32 nt, Homo Sapiens
ggcucauaccugccgcgccagccccucuucag

SEQ ID NO: 381506 - RNA, 32 nt, Homo Sapiens
gagcuggcagaggccucuggcuccaggaaccu

SEQ ID NO: 381507 - RNA, 32 nt, Homo Sapiens
gcugucaccacccacuaggauccaccauaacc

SEQ ID NO: 381508 - RNA, 32 nt, Homo Sapiens
cuugggccugcucuccuuuccauccucuaagg

SEQ ID NO: 381509 - RNA, 32 nt, Homo Sapiens
uuucugaaucaguuuucuuaacuuucucccaa

SEQ ID NO: 381510 - RNA, 32 nt, Homo Sapiens
ccaucuguucuucuggcugacaucuggcuguu

SEQ ID NO: 381511 - RNA, 32 nt, Homo Sapiens
gaugaguugcuuuuaggcuugcuggcccgcgg

SEQ ID NO: 381512 - RNA, 32 nt, Homo Sapiens
cgagcggggcagcaugcagagccucggcagug

SEQ ID NO: 381513 - RNA, 32 nt, Homo Sapiens
ucauaauguauuauuuaaauguuuaacaucau

SEQ ID NO: 381514 - RNA, 32 nt, Homo Sapiens
uccuugugucuaaugugagaugaccuugauuu

SEQ ID NO: 381515 - RNA, 32 nt, Homo Sapiens
aaggugucggcuaugagccggagccuccuucc

SEQ ID NO: 381516 - RNA, 32 nt, Homo Sapiens
auggcagaggggcguggcguggugcuacugag

SEQ ID NO: 381517 - RNA, 32 nt, Homo Sapiens
gaccugcccucccucagccgucagccaucagc

SEQ ID NO: 381518 - RNA, 32 nt, Homo Sapiens
uaaaucaauguuguuuuaaugcacuaaucuga

SEQ ID NO: 381519 - RNA, 32 nt, Homo Sapiens
cgagcguugaggcaggggcccgggccgagggc

SEQ ID NO: 381520 - RNA, 32 nt, Homo Sapiens
uuuugggcugggcgcaguggcucacgccugua

SEQ ID NO: 381521 - RNA, 32 nt, Homo Sapiens
cccguggucuuugaauaaagucugagugggcg

SEQ ID NO: 381522 - RNA, 32 nt, Homo Sapiens
uuuguuuugcaaacaggagaaaccugugcugc

SEQ ID NO: 381523 - RNA, 32 nt, Homo Sapiens
uggcuuuauuucuuucaucauucauaaaaguu

SEQ ID NO: 381524 - RNA, 32 nt, Homo Sapiens
gggcagcuaagugggcgcauccugucuucagc

SEQ ID NO: 381525 - RNA, 32 nt, Homo Sapiens
gccagccuaggauguggguucuguggaggaga

SEQ ID NO: 381526 - RNA, 32 nt, Homo Sapiens
acauaucucuuaucuuacgaaaaaaugguagc

SEQ ID NO: 381527 - RNA, 28 nt, Homo Sapiens
ucugggggaaauuagcauuugaaucagu

SEQ ID NO: 381528 - RNA, 32 nt, Homo Sapiens
ugagcauaaaagacaaaaccccugcccuauug

SEQ ID NO: 381529 - RNA, 32 nt, Homo Sapiens
cugaggcagcugggauggucuuucuugugucu

SEQ ID NO: 381530 - RNA, 32 nt, Homo Sapiens
gccauaaagauugcuguaaauauuaagauuua

SEQ ID NO: 381531 - RNA, 32 nt, Homo Sapiens
gacaagugaaaauuauaugaaauuuaagaguc

SEQ ID NO: 381532 - RNA, 32 nt, Homo Sapiens
cccuugcugccgccucucgccucacgccccca

SEQ ID NO: 381533 - RNA, 32 nt, Homo Sapiens
ugaccuugguaugguggugauggucagucuug

SEQ ID NO: 381534 - RNA, 32 nt, Homo Sapiens
ugugcuggcuuagacuccaaaaggauuauaaa

SEQ ID NO: 381535 - RNA, 32 nt, Homo Sapiens
aguuguacguaaggcuuucauaaugugacuuc

SEQ ID NO: 381536 - RNA, 32 nt, Homo Sapiens
aguuaauagagcauacucuguuaauggugcuc

SEQ ID NO: 381537 - RNA, 32 nt, Homo Sapiens
gcaccucaugcaaguguaggaaggcacgcugg

SEQ ID NO: 381538 - RNA, 32 nt, Homo Sapiens
aacagagaauacugacgguauacuuaaccaua

SEQ ID NO: 381539 - RNA, 32 nt, Homo Sapiens
auucaguacuuuguaaucaagugaaauauaac

SEQ ID NO: 381540 - RNA, 32 nt, Homo Sapiens
ccgggccgcugaggggcuccccugccccuccu

SEQ ID NO: 381541 - RNA, 32 nt, Homo Sapiens
cagcgucgcuccccgcgccgccucgccuccac

SEQ ID NO: 381542 - RNA, 32 nt, Homo Sapiens
uuuuguuaaggguggaaauauuuagugacaug

SEQ ID NO: 381543 - RNA, 32 nt, Homo Sapiens
gagcugggcggucaugguuuugaaauaaaugu

SEQ ID NO: 381544 - RNA, 32 nt, Homo Sapiens
auuucucuagaauguuuauccuaagcacuugu

SEQ ID NO: 381545 - RNA, 32 nt, Homo Sapiens
uuaauguuucuaaaguuuuucauaugaacuug

SEQ ID NO: 381546 - RNA, 32 nt, Homo Sapiens
cagcccugaauaauucauucuugcuaagcuuc

SEQ ID NO: 381547 - RNA, 32 nt, Homo Sapiens
uagaaagagcacaauuaaugcuuaagcgauca

SEQ ID NO: 381548 - RNA, 32 nt, Homo Sapiens
agagagaaaacgcaggagggagacagacuggc

SEQ ID NO: 381549 - RNA, 32 nt, Homo Sapiens
auuuucccaggaggaguuacagaugcagccac

SEQ ID NO: 381550 - RNA, 32 nt, Homo Sapiens
cauaauauuuuuucuuuuucaucuacaauuac

SEQ ID NO: 381551 - RNA, 32 nt, Homo Sapiens
ugugaacugaacagacggagaagaugugcuag

SEQ ID NO: 381552 - RNA, 32 nt, Homo Sapiens
cuucugcagguggugcuggaucuccuucaggu

SEQ ID NO: 381553 - RNA, 32 nt, Homo Sapiens
cuucacugccuugggcccagcccuggccucug

SEQ ID NO: 381554 - RNA, 32 nt, Homo Sapiens
auuucuguuucuccacauccacagugcuuuuu

SEQ ID NO: 381555 - RNA, 32 nt, Homo Sapiens
cuagaaguacugggcuggccuggguacugcau

SEQ ID NO: 381556 - RNA, 32 nt, Homo Sapiens
cuuuuauagucucuguugcugcugcugaacuc

SEQ ID NO: 381557 - RNA, 32 nt, Homo Sapiens
ggcgccacugaguaauccggaccucaccaccu

SEQ ID NO: 381558 - RNA, 32 nt, Homo Sapiens
aggaggagacccaguugcuacugcaaaaacca

SEQ ID NO: 381559 - RNA, 32 nt, Homo Sapiens
auagauguagggaacaaaauugguuuuuccau

SEQ ID NO: 381560 - RNA, 32 nt, Homo Sapiens
aaugcccaagaugaggcaaagaaggacauugg

SEQ ID NO: 381561 - RNA, 32 nt, Homo Sapiens
aaugaagaauacuuguccuaauagcucauaaa

SEQ ID NO: 381562 - RNA, 32 nt, Homo Sapiens
ccagagaagaaccucuucccaagaaaguucga

SEQ ID NO: 381563 - RNA, 32 nt, Homo Sapiens
acuuuauauuauuuaaacuucucuaaaagaua

SEQ ID NO: 381564 - RNA, 32 nt, Homo Sapiens
aaccuauguaaauuucugugguugcuaucuua

SEQ ID NO: 381565 - RNA, 32 nt, Homo Sapiens
auauucuccccuauugggucuuucuccaugac

SEQ ID NO: 381566 - RNA, 32 nt, Homo Sapiens
gaggggaaaggucuauaaagcucugaucucuc

SEQ ID NO: 381567 - RNA, 32 nt, Homo Sapiens
ucagaacuggaaaaacaaaaucacaccaaauu

SEQ ID NO: 381568 - RNA, 32 nt, Homo Sapiens
uuauuauccuugggggcucccagggcaagggu

SEQ ID NO: 381569 - RNA, 32 nt, Homo Sapiens
gcagaggcgagaccgaguauagccagcggcuc

SEQ ID NO: 381570 - RNA, 32 nt, Homo Sapiens
ggaaugacucccauccucuccucaucuccccu

SEQ ID NO: 381571 - RNA, 32 nt, Homo Sapiens
guccagagccaggccuggcgcagggcccaagc

SEQ ID NO: 381572 - RNA, 32 nt, Homo Sapiens
agggaaagggaagcaggguaggaguccuucug

SEQ ID NO: 381573 - RNA, 32 nt, Homo Sapiens
acuuuuaauuuaugauuauacuuagccuccuc

SEQ ID NO: 381574 - RNA, 32 nt, Homo Sapiens
acacccuuucgucuucagccgccacgucaaga

SEQ ID NO: 381575 - RNA, 32 nt, Homo Sapiens
caccucgggccccgguguccccggccagcacu

SEQ ID NO: 381576 - RNA, 32 nt, Homo Sapiens
acggucaguccaugucucggagaaacggguga

SEQ ID NO: 381577 - RNA, 32 nt, Homo Sapiens
ccgagcccgggcggcggcggcggcacaucuaa

SEQ ID NO: 381578 - RNA, 32 nt, Homo Sapiens
cuugaaauuguaauuaaaauggcaagcuaauc

SEQ ID NO: 381579 - RNA, 32 nt, Homo Sapiens
agccuuugccuuaauguaucucugccuggaca

SEQ ID NO: 381580 - RNA, 29 nt, Homo Sapiens
auuguugccuauuuccugcugaaaguaaa

SEQ ID NO: 381581 - RNA, 32 nt, Homo Sapiens
ugacauggcuucugggguggagggugggggug

SEQ ID NO: 381582 - RNA, 32 nt, Homo Sapiens
acauaguuugaaaagcacuuggccgucuucug

SEQ ID NO: 381583 - RNA, 32 nt, Homo Sapiens
cuccagcucugcgccucagcgggggaggaaga

SEQ ID NO: 381584 - RNA, 32 nt, Homo Sapiens
caaaaacuccuaagagaaugaauagaaauuuu

SEQ ID NO: 381585 - RNA, 32 nt, Homo Sapiens
aagacugucaaauacuggccgaggccaaggga

SEQ ID NO: 381586 - RNA, 32 nt, Homo Sapiens
gauuucaacaaugcauuaaaagaaugugcuuu

SEQ ID NO: 381587 - RNA, 32 nt, Homo Sapiens
accucgccuugcgggaccccaccuggaacccg

SEQ ID NO: 381588 - RNA, 32 nt, Homo Sapiens
cuguaauucuccuuguuaccgacgagagauca

SEQ ID NO: 381589 - RNA, 32 nt, Homo Sapiens
ugugaagaguaguuuuaccuguaaauauuagc

SEQ ID NO: 381590 - RNA, 32 nt, Homo Sapiens
agugguuucauugaaaagaaauuagaaggggu

SEQ ID NO: 381591 - RNA, 32 nt, Homo Sapiens
guggcuguggccgauguccacccucucggggc

SEQ ID NO: 381592 - RNA, 32 nt, Homo Sapiens
ccugguggcucuggccucggcccugcuggauc

SEQ ID NO: 381593 - RNA, 32 nt, Homo Sapiens
gcugcucagggcccuccuccugaaggugagcc

SEQ ID NO: 381594 - RNA, 32 nt, Homo Sapiens
aucagggacuuccugcagagcgacgaggcccg

SEQ ID NO: 381595 - RNA, 32 nt, Homo Sapiens
acccucugagcccaccaguccugggcacagcu

SEQ ID NO: 381596 - RNA, 32 nt, Homo Sapiens
ugguccucucccgggaucccaggcccaggaaa

SEQ ID NO: 381597 - RNA, 30 nt, Homo Sapiens
ucggggccauggcugccgccggcaccugcc

SEQ ID NO: 381598 - RNA, 32 nt, Homo Sapiens
auaaugaguauuuuaaucuuguucuuguucag

SEQ ID NO: 381599 - RNA, 32 nt, Homo Sapiens
aaaggauugaaguuccaaaaauacaucagcag

SEQ ID NO: 381600 - RNA, 32 nt, Homo Sapiens
gaagugcgccccaaaccucuucauauugaaga

SEQ ID NO: 381601 - RNA, 32 nt, Homo Sapiens
cuauaauuacaccuaugggaucaauaagcaug

SEQ ID NO: 381602 - RNA, 32 nt, Homo Sapiens
gacuguggccuggccugcuccaggauggugcu

SEQ ID NO: 381603 - RNA, 32 nt, Homo Sapiens
uacagcaggaccacguauuggucugcaguaga

SEQ ID NO: 381604 - RNA, 32 nt, Homo Sapiens
acugaauaaaugucuuuuuuuuuaaugugcug

SEQ ID NO: 381605 - RNA, 32 nt, Homo Sapiens
ucaccccaggcucagcccaaagcugugaggac

SEQ ID NO: 381606 - RNA, 32 nt, Homo Sapiens
agcaccugccaccgaggcgcgcguggggccac

SEQ ID NO: 381607 - RNA, 32 nt, Homo Sapiens
ugucagucuucagauguuacauaaacucaaac

SEQ ID NO: 381608 - RNA, 32 nt, Homo Sapiens
aguauuaaagagaacagaaaucucuaaaaaau

SEQ ID NO: 381609 - RNA, 32 nt, Homo Sapiens
ugggcgcgcgccccgcgucccgggcaggaaga

SEQ ID NO: 381610 - RNA, 32 nt, Homo Sapiens
ccacgccuagaugugaagugggacauagucuu

SEQ ID NO: 381611 - RNA, 32 nt, Homo Sapiens
gcgcucggcgcguccagacccgcggcgcgaug

SEQ ID NO: 381612 - RNA, 32 nt, Homo Sapiens
acagagacacaguggaauagaccuugacacua

SEQ ID NO: 381613 - RNA, 32 nt, Homo Sapiens
agaaaaggggcaacucuucuuuuuagcauucu

SEQ ID NO: 381614 - RNA, 31 nt, Homo Sapiens
ggcggcugaggaacggggcaggcaaggucac

SEQ ID NO: 381615 - RNA, 32 nt, Homo Sapiens
cucuugugguggccagccuccaagaugagccc

SEQ ID NO: 381616 - RNA, 30 nt, Homo Sapiens
ugccuguggggcgcucuuccagagugaggc

SEQ ID NO: 381617 - RNA, 32 nt, Homo Sapiens
cugugccccggcaggccuggggucugcagucc

SEQ ID NO: 381618 - RNA, 32 nt, Homo Sapiens
uacagcgcuucuuccagcaggcacaugaaugg

SEQ ID NO: 381619 - RNA, 32 nt, Homo Sapiens
uuggucaccccggccaggccccggaagcagca

SEQ ID NO: 381620 - RNA, 32 nt, Homo Sapiens
gcgggcuccggacgagacccagcccagccggg

SEQ ID NO: 381621 - RNA, 32 nt, Homo Sapiens
caucagauaaccucaagucacaugagaaucuu

SEQ ID NO: 381622 - RNA, 31 nt, Homo Sapiens
cugucccaagccacagcuauggcguuaaugu

SEQ ID NO: 381623 - RNA, 32 nt, Homo Sapiens
cucagcccucccagcccacuucugccuguuuu

SEQ ID NO: 381624 - RNA, 32 nt, Homo Sapiens
uguuuuccaaacaauguuacuuugaaaauuga

SEQ ID NO: 381625 - RNA, 32 nt, Homo Sapiens
ugagcggcgccgcgagucggcccgaggccucc

SEQ ID NO: 381626 - RNA, 32 nt, Homo Sapiens
ucuccgcccucccgcucgccaguccauuugau

SEQ ID NO: 381627 - RNA, 32 nt, Homo Sapiens
ugcuguauucuucuuugguggagauaaagauu

SEQ ID NO: 381628 - RNA, 32 nt, Homo Sapiens
gaaccaaaaaauuuauguuggguggugggaug

SEQ ID NO: 381629 - RNA, 32 nt, Homo Sapiens
aaaauacaaaaaugauuguuaaugauuggugc

SEQ ID NO: 381630 - RNA, 32 nt, Homo Sapiens
auuaaauuaauagaaaagagaacaaacugcag

SEQ ID NO: 381631 - RNA, 32 nt, Homo Sapiens
uuuugaugacuucuagcaagccucgcuaaccu

SEQ ID NO: 381632 - RNA, 32 nt, Homo Sapiens
caggguucaccucggugggggaccccacucac

SEQ ID NO: 381633 - RNA, 32 nt, Homo Sapiens
gggcucugccccagcucuggcuuccagaaaac

SEQ ID NO: 381634 - RNA, 32 nt, Homo Sapiens
ggcugggagcccauucccagugcuucccaagg

SEQ ID NO: 381635 - RNA, 32 nt, Homo Sapiens
ccagcaaggaagagugggguauggaagucauc

SEQ ID NO: 381636 - RNA, 32 nt, Homo Sapiens
ggcuuguggggcgggggcuggcccacucucag

SEQ ID NO: 381637 - RNA, 32 nt, Homo Sapiens
caggcggagaccacucuaggacgcucuuccag

SEQ ID NO: 381638 - RNA, 32 nt, Homo Sapiens
cuucccugcggagggagggccugggcggucgc

SEQ ID NO: 381639 - RNA, 32 nt, Homo Sapiens
guggcauaauuguuacagucuuuacucuugau

SEQ ID NO: 381640 - RNA, 31 nt, Homo Sapiens
gugauuucuuggaaauaauagaugaggauaa

SEQ ID NO: 381641 - RNA, 32 nt, Homo Sapiens
uugaagcccuccccagauccccuuggagccuc

SEQ ID NO: 381642 - RNA, 32 nt, Homo Sapiens
cuuacggaguuugccaugggaugugugauauc

SEQ ID NO: 381643 - RNA, 32 nt, Homo Sapiens
uaucuuuguauaauucauauuugggaauaugg

SEQ ID NO: 381644 - RNA, 32 nt, Homo Sapiens
ucguauuuuuuacuuuugucuuguauauguau

SEQ ID NO: 381645 - RNA, 32 nt, Homo Sapiens
auucagaaccaucaaugaauucagauauggga

SEQ ID NO: 381646 - RNA, 32 nt, Homo Sapiens
gaggagggggagccccggacacacugugggga

SEQ ID NO: 381647 - RNA, 32 nt, Homo Sapiens
uauugguuucuuuuuccaacuuaauagguuua

SEQ ID NO: 381648 - RNA, 32 nt, Homo Sapiens
uaaaaauguacaaagguuuuauauugucauag

SEQ ID NO: 381649 - RNA, 32 nt, Homo Sapiens
acacgaaaugacugaucucacccuuucccagu

SEQ ID NO: 381650 - RNA, 32 nt, Homo Sapiens
aguaguuuucccuugugacuucagggguugug

SEQ ID NO: 381651 - RNA, 32 nt, Homo Sapiens
gaggaagacaaacccagcugcagaucaugcuu

SEQ ID NO: 381652 - RNA, 32 nt, Homo Sapiens
uuuaauagcauuaagauuaccuucaaaugaaa

SEQ ID NO: 381653 - RNA, 31 nt, Homo Sapiens
ucccccuccacucagcacugaguuagagcug

SEQ ID NO: 381654 - RNA, 32 nt, Homo Sapiens
ugaaacuuuccaaaacaaagugccaggaccag

SEQ ID NO: 381655 - RNA, 32 nt, Homo Sapiens
cuucgucuguaaguaauuugucuuaaagcccu

SEQ ID NO: 381656 - RNA, 32 nt, Homo Sapiens
ugaaaaucuucagguuauacuccuuaaguuau

SEQ ID NO: 381657 - RNA, 32 nt, Homo Sapiens
uaaacuaaaaauuuuuacaaauccacugcuau

SEQ ID NO: 381658 - RNA, 32 nt, Homo Sapiens
ccaggagcggacccgggaguguuucaagagcc

SEQ ID NO: 381659 - RNA, 32 nt, Homo Sapiens
aaacaggauaacacugaugucccaaaguagca

SEQ ID NO: 381660 - RNA, 32 nt, Homo Sapiens
gcuagucaaaugaaacugaauuuuaaacuuuu

SEQ ID NO: 381661 - RNA, 32 nt, Homo Sapiens
ugaaacugaacacaacaaaaguauggauaugg

SEQ ID NO: 381662 - RNA, 32 nt, Homo Sapiens
auauaucuauauaaaauauagugucaaagaaa

SEQ ID NO: 381663 - RNA, 32 nt, Homo Sapiens
ucgggcacuccagcuuucuucuagccccgagc

SEQ ID NO: 381664 - RNA, 32 nt, Homo Sapiens
agcuguuaaaagacaaugcuauuacuacuucu

SEQ ID NO: 381665 - RNA, 32 nt, Homo Sapiens
ucugacauuauguaaaggugguauuaauauug

SEQ ID NO: 381666 - RNA, 32 nt, Homo Sapiens
cccacagugucugagcccucugacuuccuuuc

SEQ ID NO: 381667 - RNA, 32 nt, Homo Sapiens
uacugugcccagagccucgaggagguaaugaa

SEQ ID NO: 381668 - RNA, 32 nt, Homo Sapiens
cgggggaccugccugcuccuuuggcuugggcu

SEQ ID NO: 381669 - RNA, 32 nt, Homo Sapiens
gcaggcacuccagccagcgcucaccuggccuu

SEQ ID NO: 381670 - RNA, 32 nt, Homo Sapiens
ccggcugcugcagcugcugaacaaggccuugc

SEQ ID NO: 381671 - RNA, 32 nt, Homo Sapiens
gaacuuaaagcuaauuuacaugcugaaccuga

SEQ ID NO: 381672 - RNA, 32 nt, Homo Sapiens
acucgucugcugaacaaauccucugaccucag

SEQ ID NO: 381673 - RNA, 32 nt, Homo Sapiens
ggcucauccauucuccaccgugucucauucau

SEQ ID NO: 381674 - RNA, 27 nt, Homo Sapiens
caggaugaccucuucagcuucuggggc

SEQ ID NO: 381675 - RNA, 32 nt, Homo Sapiens
ccuuggcccccuccccucccccagaccuccac

SEQ ID NO: 381676 - RNA, 32 nt, Homo Sapiens
ugugaagggggaggaggcuguggcaggcaggg

SEQ ID NO: 381677 - RNA, 32 nt, Homo Sapiens
ugauggaguaugugauaaagugaauguacaug

SEQ ID NO: 381678 - RNA, 32 nt, Homo Sapiens
cgaaaaaccauuacauuaagauaauauuggac

SEQ ID NO: 381679 - RNA, 32 nt, Homo Sapiens
gcuucacggugaugauauggcaucugccagcu

SEQ ID NO: 381680 - RNA, 32 nt, Homo Sapiens
augauauaaaauguuaaguaccaugaaugaug

SEQ ID NO: 381681 - RNA, 32 nt, Homo Sapiens
uguuaacauucaggcuuuugucuugaugcccg

SEQ ID NO: 381682 - RNA, 32 nt, Homo Sapiens
cugcuggggcuccacgacccugagagaagggu

SEQ ID NO: 381683 - RNA, 32 nt, Homo Sapiens
uagaugaaacaucaguuggugaagcagaggac

SEQ ID NO: 381684 - RNA, 31 nt, Homo Sapiens
aggguuucaaagaaaaaggauuuuguuuaaa

SEQ ID NO: 381685 - RNA, 32 nt, Homo Sapiens
cuguauacgcuucaguuuuuccacauugucca

SEQ ID NO: 381686 - RNA, 31 nt, Homo Sapiens
agacggcacucaagccugcccccgaggcgug

SEQ ID NO: 381687 - RNA, 32 nt, Homo Sapiens
uuuagaaaauuugaaaaaguaauuucuauucu

SEQ ID NO: 381688 - RNA, 32 nt, Homo Sapiens
cccauccuggggagcccucuggccccucguug

SEQ ID NO: 381689 - RNA, 32 nt, Homo Sapiens
gucuucaggucccacguuuccucccccuuuuu

SEQ ID NO: 381690 - RNA, 32 nt, Homo Sapiens
acugcucaaauuaauuagcugaagauacuuag

SEQ ID NO: 381691 - RNA, 32 nt, Homo Sapiens
augaguuuuuaaaauaaugcuacaaucuucau

SEQ ID NO: 381692 - RNA, 32 nt, Homo Sapiens
cugggcugcgcgcgcuuuugggcugcgccacc

SEQ ID NO: 381693 - RNA, 32 nt, Homo Sapiens
uucaagcuuuuacucuuaauuccuaaaugaga

SEQ ID NO: 381694 - RNA, 32 nt, Homo Sapiens
uuaagcuaaauuaaagggacuccauccuguua

SEQ ID NO: 381695 - RNA, 32 nt, Homo Sapiens
ugcauuacauugguaacugcaauauaaaauag

SEQ ID NO: 381696 - RNA, 32 nt, Homo Sapiens
gcuccggcaacgccaaccgcuccgcugcgcgc

SEQ ID NO: 381697 - RNA, 32 nt, Homo Sapiens
gcaaugcuccucagcccucuucucccugcucc

SEQ ID NO: 381698 - RNA, 32 nt, Homo Sapiens
auccauccuccgcgcgcacgagcucagucccu

SEQ ID NO: 381699 - RNA, 32 nt, Homo Sapiens
ucggguucugcccggggacgcagcccaguugg

SEQ ID NO: 381700 - RNA, 32 nt, Homo Sapiens
guggggugcagcgggagugcgaggggacugga

SEQ ID NO: 381701 - RNA, 32 nt, Homo Sapiens
accccuucuaccaagcucccucguggccacga

SEQ ID NO: 381702 - RNA, 32 nt, Homo Sapiens
uucaauggucugaaacaugauucugagcuuca

SEQ ID NO: 381703 - RNA, 32 nt, Homo Sapiens
ccucaacacacccuuaaaucuggaagcagcua

SEQ ID NO: 381704 - RNA, 32 nt, Homo Sapiens
cgcaccugcccccaccucugcuccaucccugc

SEQ ID NO: 381705 - RNA, 32 nt, Homo Sapiens
uaaauucuggaaaugucuuucuauucauaaua

SEQ ID NO: 381706 - RNA, 32 nt, Homo Sapiens
uagcccccuuuuugcuuggugguacucugucu

SEQ ID NO: 381707 - RNA, 32 nt, Homo Sapiens
aggaacucaccaucuaugcuccucugggccgu

SEQ ID NO: 381708 - RNA, 32 nt, Homo Sapiens
gagacuguagcagccagcugccccccguggag

SEQ ID NO: 381709 - RNA, 30 nt, Homo Sapiens
uuuacguguauugacaugcaaaacauucac

SEQ ID NO: 381710 - RNA, 32 nt, Homo Sapiens
cgcaugccuguuguagccccagcuacucaaga

SEQ ID NO: 381711 - RNA, 32 nt, Homo Sapiens
ggaagcaagggacuccgaguugugaaaauuag

SEQ ID NO: 381712 - RNA, 32 nt, Homo Sapiens
guccucuccguggaagacccugggcccucacc

SEQ ID NO: 381713 - RNA, 32 nt, Homo Sapiens
cauguuaacaccuugcuacuaccaaggcauaa

SEQ ID NO: 381714 - RNA, 32 nt, Homo Sapiens
gccgagcggcggcgcggcgcggcaacauggcg

SEQ ID NO: 381715 - RNA, 27 nt, Homo Sapiens
cuauggcggcgguggauucggaugucg

SEQ ID NO: 381716 - RNA, 32 nt, Homo Sapiens
agugcagccccuccccacagcaugcugggggc

SEQ ID NO: 381717 - RNA, 32 nt, Homo Sapiens
uggagaugguacaguuuuauuguacaggugcu

SEQ ID NO: 381718 - RNA, 32 nt, Homo Sapiens
aggggaggggaagagacuggaauauuaauuug

SEQ ID NO: 381719 - RNA, 32 nt, Homo Sapiens
uucaaagaggggcuaggcugauggggaagggg

SEQ ID NO: 381720 - RNA, 32 nt, Homo Sapiens
caugggaccgcccacaugggaccgcccacaug

SEQ ID NO: 381721 - RNA, 32 nt, Homo Sapiens
cgccucccgugcauggcguggucggcugggca

SEQ ID NO: 381722 - RNA, 32 nt, Homo Sapiens
ccagcugccacuucuuuugccucaugaagaac

SEQ ID NO: 381723 - RNA, 32 nt, Homo Sapiens
guccacuagggcucagcccugcugagaaagga

SEQ ID NO: 381724 - RNA, 32 nt, Homo Sapiens
agaggaccuugacuggguucauuuuaugucca

SEQ ID NO: 381725 - RNA, 32 nt, Homo Sapiens
cuagcgcggagcugcgagccugaccggccgcg

SEQ ID NO: 381726 - RNA, 32 nt, Homo Sapiens
ucuauaaucuauagaaacuaugcuuaucauug

SEQ ID NO: 381727 - RNA, 32 nt, Homo Sapiens
ccgugcugcccccggguuucaggccacacuuc

SEQ ID NO: 381728 - RNA, 32 nt, Homo Sapiens
uguacauauauuauuuugauguauuaagauga

SEQ ID NO: 381729 - RNA, 31 nt, Homo Sapiens
gagggaggaacggaagaacggagggagcuac

SEQ ID NO: 381730 - RNA, 32 nt, Homo Sapiens
uuuaauugacauucucuuauuaaaugcccuau

SEQ ID NO: 381731 - RNA, 32 nt, Homo Sapiens
ugcguggccgccucacuucgcgcacgcgccgc

SEQ ID NO: 381732 - RNA, 32 nt, Homo Sapiens
gcgcagguuggccccugaacuguucuuuguuu

SEQ ID NO: 381733 - RNA, 32 nt, Homo Sapiens
acuugcuugggggcugcagaagugcccucucc

SEQ ID NO: 381734 - RNA, 32 nt, Homo Sapiens
cuguugcuauuuaaaaaucagggagaggaggg

SEQ ID NO: 381735 - RNA, 32 nt, Homo Sapiens
ggaaggguuagcccggugggcggcagaggagc

SEQ ID NO: 381736 - RNA, 32 nt, Homo Sapiens
aggcagggcaacaugaaguaacuuacauaauu

SEQ ID NO: 381737 - RNA, 32 nt, Homo Sapiens
ccgucgccuugauguaucgccuauacauggca

SEQ ID NO: 381738 - RNA, 32 nt, Homo Sapiens
ugggcuagagaaaucagcugcuaugcggguug

SEQ ID NO: 381739 - RNA, 32 nt, Homo Sapiens
cucgggcacgcagggccugagaucuggccgcc

SEQ ID NO: 381740 - RNA, 32 nt, Homo Sapiens
gaccaauuuucaaacuuggauaaagaaaaaga

SEQ ID NO: 381741 - RNA, 32 nt, Homo Sapiens
uagucaauuuuccgggaaagugcugaaaucug

SEQ ID NO: 381742 - RNA, 32 nt, Homo Sapiens
ccacaggcggggaggaagcaugcucaagcagc

SEQ ID NO: 381743 - RNA, 32 nt, Homo Sapiens
ugcguggcaccggugcggaugcggcuguaaag

SEQ ID NO: 381744 - RNA, 32 nt, Homo Sapiens
ggauuccguuuccccgcggagccccggccgcu

SEQ ID NO: 381745 - RNA, 32 nt, Homo Sapiens
ucucuggagcagcguucuuuuaucuccguccg

SEQ ID NO: 381746 - RNA, 32 nt, Homo Sapiens
aacacuuucagaaaaacaaaugugaaggggag

SEQ ID NO: 381747 - RNA, 32 nt, Homo Sapiens
uguguuuaugauguuauucaaauauuuucuuu

SEQ ID NO: 381748 - RNA, 32 nt, Homo Sapiens
caggacuaaucaaggaucaaugggugacauga

SEQ ID NO: 381749 - RNA, 32 nt, Homo Sapiens
aaauguaucugaaagcacaaggugauacucau

SEQ ID NO: 381750 - RNA, 32 nt, Homo Sapiens
accugagacuggguaauuuauaaagaaaaaua

SEQ ID NO: 381751 - RNA, 32 nt, Homo Sapiens
gcccaguggaaaguacuagagaaaccucgucc

SEQ ID NO: 381752 - RNA, 32 nt, Homo Sapiens
ugauuugguagugaagccaggacaucuacccu

SEQ ID NO: 381753 - RNA, 32 nt, Homo Sapiens
gaacuucuguccuuccuccccccucccuggga

SEQ ID NO: 381754 - RNA, 32 nt, Homo Sapiens
ugccgugcgggcucagccugggcuuguugcag

SEQ ID NO: 381755 - RNA, 32 nt, Homo Sapiens
cagaaggcucugccgucugugucuucacaaug

SEQ ID NO: 381756 - RNA, 32 nt, Homo Sapiens
ccuacuaguuuauuuuggucagcugaguacca

SEQ ID NO: 381757 - RNA, 32 nt, Homo Sapiens
gaccaaggagauggggagggcgcuuuuguacg

SEQ ID NO: 381758 - RNA, 32 nt, Homo Sapiens
auucgagccaucuggagaaugcucuggggagu

SEQ ID NO: 381759 - RNA, 32 nt, Homo Sapiens
guuuagguaacugguuccuaauaaaaagaauu

SEQ ID NO: 381760 - RNA, 32 nt, Homo Sapiens
accugcuggugcccuugcaccagggugaggcc

SEQ ID NO: 381761 - RNA, 32 nt, Homo Sapiens
gaaggugaagucccaugaugacugucugcaag

SEQ ID NO: 381762 - RNA, 32 nt, Homo Sapiens
aaggcugagugucuucugccucaugugggugg

SEQ ID NO: 381763 - RNA, 32 nt, Homo Sapiens
ucuauauguauauauaaaugcauuauuacaca

SEQ ID NO: 381764 - RNA, 32 nt, Homo Sapiens
uccgaaggauccagcucuccucuaccaguggg

SEQ ID NO: 381765 - RNA, 32 nt, Homo Sapiens
auaucuccuuaccagaaaaaucucuaaauaaa

SEQ ID NO: 381766 - RNA, 32 nt, Homo Sapiens
uggcccaaggucacgcaacucugagaugccac

SEQ ID NO: 381767 - RNA, 32 nt, Homo Sapiens
acagugagcugaugugcccaccaccgugucau

SEQ ID NO: 381768 - RNA, 30 nt, Homo Sapiens
accugcccccgcaucucgccggcgccaggc

SEQ ID NO: 381769 - RNA, 32 nt, Homo Sapiens
cuuaauuuguauauuucuaaucaaguguugau

SEQ ID NO: 381770 - RNA, 32 nt, Homo Sapiens
gauuaauccaguuuuaccagacuuccaaaaag

SEQ ID NO: 381771 - RNA, 32 nt, Homo Sapiens
gaagcacaaacacacaugcugacagggccuga

SEQ ID NO: 381772 - RNA, 32 nt, Homo Sapiens
uacuaaaaauacaacaacaacaaaauuagcug

SEQ ID NO: 381773 - RNA, 32 nt, Homo Sapiens
uuagauuuaaaauaaacauuauguccaccuuu

SEQ ID NO: 381774 - RNA, 32 nt, Homo Sapiens
gcgugcagggaucggaagccgguuggagugug

SEQ ID NO: 381775 - RNA, 32 nt, Homo Sapiens
uguauuuauaauuuauauuuacaaguugucac

SEQ ID NO: 381776 - RNA, 32 nt, Homo Sapiens
guuugacagaagugugauauauguaacuugug

SEQ ID NO: 381777 - RNA, 32 nt, Homo Sapiens
ucucgcugccagcacagcagucugauguccac

SEQ ID NO: 381778 - RNA, 32 nt, Homo Sapiens
uaacuuaaaaucaaccacuucgugcuuaaaug

SEQ ID NO: 381779 - RNA, 32 nt, Homo Sapiens
ccuccagcgccagccuggcccugagugcgaac

SEQ ID NO: 381780 - RNA, 32 nt, Homo Sapiens
ggccacgaugagccaguacagacuccagacag

SEQ ID NO: 381781 - RNA, 32 nt, Homo Sapiens
cccugaggcgcaggagggccucaugggcaucg

SEQ ID NO: 381782 - RNA, 32 nt, Homo Sapiens
cguauguguucuguuauacaguugaaauauug

SEQ ID NO: 381783 - RNA, 32 nt, Homo Sapiens
uaagccaguuagaucaggggguugcaacaauu

SEQ ID NO: 381784 - RNA, 32 nt, Homo Sapiens
auugcggggagacagcucucucucccaccucc

SEQ ID NO: 381785 - RNA, 32 nt, Homo Sapiens
uccguucccaguccacuucucuagggccagua

SEQ ID NO: 381786 - RNA, 32 nt, Homo Sapiens
acaggauggaggaggccagggaacaggcaggg

SEQ ID NO: 381787 - RNA, 32 nt, Homo Sapiens
gggcugaggggugaguuggucuguggguaaaa

SEQ ID NO: 381788 - RNA, 32 nt, Homo Sapiens
uauugaauguucugaucuuucauuuauaacuu

SEQ ID NO: 381789 - RNA, 32 nt, Homo Sapiens
ucagauauugucagcaugugcuuugugaaacu

SEQ ID NO: 381790 - RNA, 32 nt, Homo Sapiens
ggcaaaacucgcugcccagaaaacauuagaac

SEQ ID NO: 381791 - RNA, 32 nt, Homo Sapiens
uaccgcgugcccggcguccucgucgcgcgagu

SEQ ID NO: 381792 - RNA, 32 nt, Homo Sapiens
ccuuagugcaaggggaaaccugugaaagcugc

SEQ ID NO: 381793 - RNA, 32 nt, Homo Sapiens
ucacccaccuccgcgcgccggagcgcaggcaa

SEQ ID NO: 381794 - RNA, 32 nt, Homo Sapiens
ucaugugaagaaauuucaugugaauguuuuag

SEQ ID NO: 381795 - RNA, 32 nt, Homo Sapiens
uuugcagcaauacagcagcaucaggaggagga

SEQ ID NO: 381796 - RNA, 31 nt, Homo Sapiens
agagagaaauaaacgcaguaaugcaugaaga

SEQ ID NO: 381797 - RNA, 32 nt, Homo Sapiens
agaggcuucucggccgcggagccacuuggggc

SEQ ID NO: 381798 - RNA, 32 nt, Homo Sapiens
cccugccucgggcagcccccagcccuccuccu

SEQ ID NO: 381799 - RNA, 32 nt, Homo Sapiens
gacuguaaauguuuaauaugaauauaguguuc

SEQ ID NO: 381800 - RNA, 32 nt, Homo Sapiens
ccaguacucugggccugguucuuucuucaaaa

SEQ ID NO: 381801 - RNA, 32 nt, Homo Sapiens
auccuauuacauaguuugaaaaauaguauuuu

SEQ ID NO: 381802 - RNA, 32 nt, Homo Sapiens
gugugagugauauauuucuauguuuuuaaugu

SEQ ID NO: 381803 - RNA, 32 nt, Homo Sapiens
aaaguugccauuucuuuuuuuuccccagaaau

SEQ ID NO: 381804 - RNA, 32 nt, Homo Sapiens
uagaguaugacaccccucugcccuuggucccg

SEQ ID NO: 381805 - RNA, 32 nt, Homo Sapiens
cauacucccuucuuccacccagaugggucccc

SEQ ID NO: 381806 - RNA, 32 nt, Homo Sapiens
gcgccacugagggcaccgcgcaccagagcgug

SEQ ID NO: 381807 - RNA, 32 nt, Homo Sapiens
gagaagccuuauuuuauuucucucuucuuuac

SEQ ID NO: 381808 - RNA, 32 nt, Homo Sapiens
gugcuucuuuaaagcaagagauuuagagaguc

SEQ ID NO: 381809 - RNA, 32 nt, Homo Sapiens
uaaggaaaaugaauucuuacggucuguauauc

SEQ ID NO: 381810 - RNA, 32 nt, Homo Sapiens
ccgacgacacagagacucuucugauccaaccc

SEQ ID NO: 381811 - RNA, 32 nt, Homo Sapiens
cccucucggcccggcucggcgccucggcggga

SEQ ID NO: 381812 - RNA, 32 nt, Homo Sapiens
uuuuccaacguuauguugaugaagguuuacau

SEQ ID NO: 381813 - RNA, 32 nt, Homo Sapiens
guuaacauuuagcaccuugguugucuuucaau

SEQ ID NO: 381814 - RNA, 32 nt, Homo Sapiens
uugcugcaugaccaaaauagccccacucaaaa

SEQ ID NO: 381815 - RNA, 32 nt, Homo Sapiens
cagaugugagccacuucgcccagcugaggcau

SEQ ID NO: 381816 - RNA, 32 nt, Homo Sapiens
uguggauaauuuacuauuaaguaaauuauuac

SEQ ID NO: 381817 - RNA, 32 nt, Homo Sapiens
aguaagguuuuuuuuuuuuuuaauucugcugc

SEQ ID NO: 381818 - RNA, 32 nt, Homo Sapiens
guagccggacaggcggaggggcugggacuacc

SEQ ID NO: 381819 - RNA, 32 nt, Homo Sapiens
ccaguggaggcaucuuacauuuaggcuacuuc

SEQ ID NO: 381820 - RNA, 32 nt, Homo Sapiens
ccuuuuacaaacgagggaacggaggcucuaga

SEQ ID NO: 381821 - RNA, 32 nt, Homo Sapiens
auagaugccucucccccuccagcccuagccga

SEQ ID NO: 381822 - RNA, 32 nt, Homo Sapiens
aagcauccuaggaugccucuacauguauuuca

SEQ ID NO: 381823 - RNA, 32 nt, Homo Sapiens
gggggaggccccaauggcaucuucgcuucucc

SEQ ID NO: 381824 - RNA, 23 nt, Homo Sapiens
gcauguaugugaucugcagaagc

SEQ ID NO: 381825 - RNA, 32 nt, Homo Sapiens
ggagaacggcucgggcagccggcggcccagca

SEQ ID NO: 381826 - RNA, 32 nt, Homo Sapiens
ugccugcccuccccucccccacucuauacuag

SEQ ID NO: 381827 - RNA, 32 nt, Homo Sapiens
ggaaguuaggugggaauugcaagauuaaggag

SEQ ID NO: 381828 - RNA, 32 nt, Homo Sapiens
caaaucuccugcuggcucaugaaacagcagaa

SEQ ID NO: 381829 - RNA, 32 nt, Homo Sapiens
augaaaaaaaaauuauuugccuuuuaaauucu

SEQ ID NO: 381830 - RNA, 32 nt, Homo Sapiens
gugguuggggagaggggaccgaugugccucau

SEQ ID NO: 381831 - RNA, 32 nt, Homo Sapiens
cgucuccucagggcagcuggacaggcuuggca

SEQ ID NO: 381832 - RNA, 32 nt, Homo Sapiens
agccaggugaggaggagccaggaaggcaguug

SEQ ID NO: 381833 - RNA, 32 nt, Homo Sapiens
aagguagcagcugccuccuucucugugagcug

SEQ ID NO: 381834 - RNA, 32 nt, Homo Sapiens
cuuuccuggcccccaggcccagccccuuuuua

SEQ ID NO: 381835 - RNA, 32 nt, Homo Sapiens
ugucucuugucuccuucaguuaauuuucagaa

SEQ ID NO: 381836 - RNA, 32 nt, Homo Sapiens
aagccccgcgguugccucuuggugcugccuug

SEQ ID NO: 381837 - RNA, 32 nt, Homo Sapiens
augauuguuucaucugagcagagcaauucaga

SEQ ID NO: 381838 - RNA, 32 nt, Homo Sapiens
acgacccgccggggcuuucccgggcgcugcuc

SEQ ID NO: 381839 - RNA, 32 nt, Homo Sapiens
guagaaaaagacaaguagaccuuuuucauuca

SEQ ID NO: 381840 - RNA, 32 nt, Homo Sapiens
aggcugacccgcguccccgcccagccugcucc

SEQ ID NO: 381841 - RNA, 32 nt, Homo Sapiens
aguguucuugcaugcauauauaauaaauguuu

SEQ ID NO: 381842 - RNA, 32 nt, Homo Sapiens
accucgggcugaccccaccuccuccauggaca

SEQ ID NO: 381843 - RNA, 32 nt, Homo Sapiens
cccgccugcgucccgcgcucccgccccagcau

SEQ ID NO: 381844 - RNA, 32 nt, Homo Sapiens
caacauguugugaguucguguacaccgaccau

SEQ ID NO: 381845 - RNA, 32 nt, Homo Sapiens
auuggagucuuaggcaucucugguacaguggg

SEQ ID NO: 381846 - RNA, 30 nt, Homo Sapiens
ugugcaauuaaauuauuuuuaacuauauuc

SEQ ID NO: 381847 - RNA, 32 nt, Homo Sapiens
agcuuugcaagcaggcuccgccggcgaccgcu

SEQ ID NO: 381848 - RNA, 31 nt, Homo Sapiens
ggccaucuguggagccccagagccugcggcu

SEQ ID NO: 381849 - RNA, 32 nt, Homo Sapiens
acccuugccucaccccucccccuggccucacc

SEQ ID NO: 381850 - RNA, 31 nt, Homo Sapiens
gacagugauggaugacucagagcgucugucu

SEQ ID NO: 381851 - RNA, 32 nt, Homo Sapiens
aauucuaaaaauuaauacagagcugaucuucu

SEQ ID NO: 381852 - RNA, 32 nt, Homo Sapiens
ucuguguccuacauccuucucuggccaucucc

SEQ ID NO: 381853 - RNA, 32 nt, Homo Sapiens
aauauuuauuuuaagaggcaucuuacaaauuu

SEQ ID NO: 381854 - RNA, 32 nt, Homo Sapiens
uaaagggaaauaucagacaauauuuuauuauu

SEQ ID NO: 381855 - RNA, 32 nt, Homo Sapiens
cacagagucgcuggcauguuucacuccugcuu

SEQ ID NO: 381856 - RNA, 32 nt, Homo Sapiens
uuuaaugucuuuucuuuuucauuaaaacuuuu

SEQ ID NO: 381857 - RNA, 32 nt, Homo Sapiens
cuuauaauuuaguuuggugaagauguuaguuu

SEQ ID NO: 381858 - RNA, 32 nt, Homo Sapiens
cagggagguggacacuuauuuauucuucacaa

SEQ ID NO: 381859 - RNA, 32 nt, Homo Sapiens
gaaaaagcccagaaacccaggugcuggaccag

SEQ ID NO: 381860 - RNA, 32 nt, Homo Sapiens
cgagagccgcggggcgcagagccggcccggcu

SEQ ID NO: 381861 - RNA, 32 nt, Homo Sapiens
ucagcaucucuuaaaguugccugcaggaauga

SEQ ID NO: 381862 - RNA, 32 nt, Homo Sapiens
gaagcagggaccagagggagccaggcagcugu

SEQ ID NO: 381863 - RNA, 32 nt, Homo Sapiens
ccuuucucucugaaucucucuccugucucuga

SEQ ID NO: 381864 - RNA, 32 nt, Homo Sapiens
ggguggggguauguugggaggcguggcgggau

SEQ ID NO: 381865 - RNA, 32 nt, Homo Sapiens
cugccagcuauugacacagcugcgaagugccc

SEQ ID NO: 381866 - RNA, 32 nt, Homo Sapiens
cuuuauaauuuuauaaaaauuauucaucggga

SEQ ID NO: 381867 - RNA, 32 nt, Homo Sapiens
ucuugacuuuagucugucuuaauuuucaugag

SEQ ID NO: 381868 - RNA, 32 nt, Homo Sapiens
caccaccucccucacccuccccgcgcuuccuc

SEQ ID NO: 381869 - RNA, 32 nt, Homo Sapiens
cugcggggugaugacgucagggggcggugucg

SEQ ID NO: 381870 - RNA, 31 nt, Homo Sapiens
auucgcaggaagaaaaaucauaguguuaaug

SEQ ID NO: 381871 - RNA, 32 nt, Homo Sapiens
ugagggagggagaggaggggagccaagacacu

SEQ ID NO: 381872 - RNA, 32 nt, Homo Sapiens
guucgaaaauacagcugaaaccccgcgggccc

SEQ ID NO: 381873 - RNA, 32 nt, Homo Sapiens
ccggagccagauuuccucuguuccagagccug

SEQ ID NO: 381874 - RNA, 32 nt, Homo Sapiens
aaacagaccuccggggaagugauuuauugggg

SEQ ID NO: 381875 - RNA, 32 nt, Homo Sapiens
gaaauguuuuacaugauucuuaaacugaaacu

SEQ ID NO: 381876 - RNA, 32 nt, Homo Sapiens
gaacaccuuaguaauaaauuuaucuuuugagg

SEQ ID NO: 381877 - RNA, 32 nt, Homo Sapiens
uaagagacuuaaaagcacucauaaauagcacg

SEQ ID NO: 381878 - RNA, 32 nt, Homo Sapiens
gggguguguggcaacuuuuccucucgcuucuc

SEQ ID NO: 381879 - RNA, 32 nt, Homo Sapiens
gauuuugccucccagccaaaaugcuccagggu

SEQ ID NO: 381880 - RNA, 31 nt, Homo Sapiens
ucauuuuuacccucuuuacaaacacacgcuu

SEQ ID NO: 381881 - RNA, 32 nt, Homo Sapiens
aauacaaauaaaauaauaaagaaaugacccac

SEQ ID NO: 381882 - RNA, 32 nt, Homo Sapiens
acacaucagaaaaguucucacgaaggugguag

SEQ ID NO: 381883 - RNA, 30 nt, Homo Sapiens
uggcgggcgccugggccgccggcuguuuaa

SEQ ID NO: 381884 - RNA, 32 nt, Homo Sapiens
auuguaagucuguaacuuaauuuuuucccugu

SEQ ID NO: 381885 - RNA, 32 nt, Homo Sapiens
uuccuuuccuuuucuucagugaaucggagcuc

SEQ ID NO: 381886 - RNA, 32 nt, Homo Sapiens
gacuuuucccauauauuucacacuggagugaa

SEQ ID NO: 381887 - RNA, 32 nt, Homo Sapiens
agcuacaccaaaauugcauugagccaaacuug

SEQ ID NO: 381888 - RNA, 32 nt, Homo Sapiens
ucuaccaucuugcaauaaagugacaauugaau

SEQ ID NO: 381889 - RNA, 32 nt, Homo Sapiens
aaaguuuagccuuuuuagauugagagauacag

SEQ ID NO: 381890 - RNA, 32 nt, Homo Sapiens
cuacuauugcguuucaaugugaacuuugaaau

SEQ ID NO: 381891 - RNA, 31 nt, Homo Sapiens
caagagaaauaaagaaaaauaaaguauuaau

SEQ ID NO: 381892 - RNA, 32 nt, Homo Sapiens
gguagauuacuugcaaagauggcugccaagga

SEQ ID NO: 381893 - RNA, 32 nt, Homo Sapiens
aguaaugaaaauacauaauuaucuagcagaua

SEQ ID NO: 381894 - RNA, 32 nt, Homo Sapiens
aaaaaaaaaaagacauucaacuugaggcuccu

SEQ ID NO: 381895 - RNA, 32 nt, Homo Sapiens
gaauucuccgagacugucuccucccuccccgc

SEQ ID NO: 381896 - RNA, 32 nt, Homo Sapiens
acuguuguuucauuuaauaagauggcaucucc

SEQ ID NO: 381897 - RNA, 32 nt, Homo Sapiens
cuucgauugugcuucucaacuccaccccauaa

SEQ ID NO: 381898 - RNA, 32 nt, Homo Sapiens
gccuuuugaguuaugggugaaguaagguaugg

SEQ ID NO: 381899 - RNA, 32 nt, Homo Sapiens
uaguuauccgguacugcagagagacaccuggu

SEQ ID NO: 381900 - RNA, 32 nt, Homo Sapiens
ccuaccugcccccaacccacccuccaccccgu

SEQ ID NO: 381901 - RNA, 32 nt, Homo Sapiens
gguuagauuaaaaagaggcugagaugagcagu

SEQ ID NO: 381902 - RNA, 32 nt, Homo Sapiens
uuuugcaauauuuaauuuguucaucauuauua

SEQ ID NO: 381903 - RNA, 32 nt, Homo Sapiens
uaauuuuguacaguauaguguaugaauugcug

SEQ ID NO: 381904 - RNA, 32 nt, Homo Sapiens
ggcugacacacugccuccccagccuuccugcu

SEQ ID NO: 381905 - RNA, 32 nt, Homo Sapiens
guuucuacuacugaugaaucuuugaaaagcug

SEQ ID NO: 381906 - RNA, 32 nt, Homo Sapiens
uaucucuucuucaucaccgccacugggccuuc

SEQ ID NO: 381907 - RNA, 32 nt, Homo Sapiens
augcugacuaauaagucuuuuacucuucaucu

SEQ ID NO: 381908 - RNA, 32 nt, Homo Sapiens
ucccaaaugaaagaagcaggcaaagggaagga

SEQ ID NO: 381909 - RNA, 32 nt, Homo Sapiens
guuuauauaaaaucaagcaguuuuaaccacuu

SEQ ID NO: 381910 - RNA, 32 nt, Homo Sapiens
ucucuccagcaucagucccugcagcagcuggg

SEQ ID NO: 381911 - RNA, 32 nt, Homo Sapiens
ucuuucccugaacucucccccagguucuagga

SEQ ID NO: 381912 - RNA, 32 nt, Homo Sapiens
gcuggacaugcaaauacaucauauuauguuuu

SEQ ID NO: 381913 - RNA, 32 nt, Homo Sapiens
cucuccugggcucagcagcugcguccuccuuc

SEQ ID NO: 381914 - RNA, 32 nt, Homo Sapiens
uccaggggagaugaccugggggaggaagugug

SEQ ID NO: 381915 - RNA, 31 nt, Homo Sapiens
acuugaagcaugucuuucagagcccggcacc

SEQ ID NO: 381916 - RNA, 32 nt, Homo Sapiens
acaaggugcaggguuaauacucuugccaguuu

SEQ ID NO: 381917 - RNA, 32 nt, Homo Sapiens
aaauuauaagccaguuaucuuuuuuagauagu

SEQ ID NO: 381918 - RNA, 32 nt, Homo Sapiens
aaaaaugcggugagaugacccuugcgaagccu

SEQ ID NO: 381919 - RNA, 31 nt, Homo Sapiens
cccagccccaugugccugccgccugcccucc

SEQ ID NO: 381920 - RNA, 32 nt, Homo Sapiens
uuugacauuuuucccucuuuuacauugagauc

SEQ ID NO: 381921 - RNA, 32 nt, Homo Sapiens
ugacagagaaaauaaacagaugucaaacuucu

SEQ ID NO: 381922 - RNA, 32 nt, Homo Sapiens
agcccuauguggauuagcaaguuaaguaauga

SEQ ID NO: 381923 - RNA, 32 nt, Homo Sapiens
uaagcuuucacuuuuccuuuagcuucccuuuc

SEQ ID NO: 381924 - RNA, 32 nt, Homo Sapiens
auaagagaaaccgcgaucggaguacggcgcgu

SEQ ID NO: 381925 - RNA, 32 nt, Homo Sapiens
cccuagcagaacugauaccuaccuguaucucu

SEQ ID NO: 381926 - RNA, 32 nt, Homo Sapiens
ccuguccccgcggcuuggcgggcuagggcagg

SEQ ID NO: 381927 - RNA, 32 nt, Homo Sapiens
cacagacacacacagagaccacagcuuccugu

SEQ ID NO: 381928 - RNA, 30 nt, Homo Sapiens
gcagcauggcgggcaucgcggccaagcugg

SEQ ID NO: 381929 - RNA, 32 nt, Homo Sapiens
aggaccacccucgccgacagcaaggcaggcgg

SEQ ID NO: 381930 - RNA, 32 nt, Homo Sapiens
ucccugcagggccaagcaccuagccucgcucu

SEQ ID NO: 381931 - RNA, 32 nt, Homo Sapiens
ccagggcucucugggcagcugaugucugcacu

SEQ ID NO: 381932 - RNA, 32 nt, Homo Sapiens
gcccggcgcggcuggugacuuugcggugugaa

SEQ ID NO: 381933 - RNA, 32 nt, Homo Sapiens
acuaaccggaagcuucugcaacaggaggacau

SEQ ID NO: 381934 - RNA, 32 nt, Homo Sapiens
aauaacaaaaauaucacauacguugcuauuag

SEQ ID NO: 381935 - RNA, 32 nt, Homo Sapiens
ccgccucaccagccuucuugcgccggagacga

SEQ ID NO: 381936 - RNA, 32 nt, Homo Sapiens
ucuggccgccgggagccggggacggagccgcc

SEQ ID NO: 381937 - RNA, 32 nt, Homo Sapiens
auaauguguguauguuuauauguguacauaua

SEQ ID NO: 381938 - RNA, 32 nt, Homo Sapiens
gaccuucuccugccacuagcccggcccugccc

SEQ ID NO: 381939 - RNA, 32 nt, Homo Sapiens
uaauaagaggugcuacugacuuucucagccuc

SEQ ID NO: 381940 - RNA, 32 nt, Homo Sapiens
cacuucacuccagccugggugacggagugaga

SEQ ID NO: 381941 - RNA, 32 nt, Homo Sapiens
cuugccaggcucaagcaguucuccugccucag

SEQ ID NO: 381942 - RNA, 32 nt, Homo Sapiens
aauggugcaauaauuuaaguggcaucuucucu

SEQ ID NO: 381943 - RNA, 32 nt, Homo Sapiens
ggcugaccucaaacuccugaccucaggugauc

SEQ ID NO: 381944 - RNA, 32 nt, Homo Sapiens
uuuaaauuaauuuacccuuaagaguauguuag

SEQ ID NO: 381945 - RNA, 32 nt, Homo Sapiens
gaugcccccucccccgacacagacucucaauc

SEQ ID NO: 381946 - RNA, 32 nt, Homo Sapiens
uuuuucuuuuuuucuucaguggugacuuccuu

SEQ ID NO: 381947 - RNA, 32 nt, Homo Sapiens
uuuuaguguuguguagccaaaaauuacaaaug

SEQ ID NO: 381948 - RNA, 32 nt, Homo Sapiens
aucaccaaaggagccucuguauggaaacaugu

SEQ ID NO: 381949 - RNA, 32 nt, Homo Sapiens
aaucccucaggacuagggacagggcugugccg

SEQ ID NO: 381950 - RNA, 32 nt, Homo Sapiens
ggaccugccguggagggugcccagcagacgug

SEQ ID NO: 381951 - RNA, 32 nt, Homo Sapiens
cgccgccuucgccgggagccaagcccgccggg

SEQ ID NO: 381952 - RNA, 32 nt, Homo Sapiens
ggguccaggcaggagacagaaaucacacaagc

SEQ ID NO: 381953 - RNA, 32 nt, Homo Sapiens
cacugcacuccagccugggugacaaaagugaa

SEQ ID NO: 381954 - RNA, 32 nt, Homo Sapiens
cuggcugaauccugaggccacugugaauuugc

SEQ ID NO: 381955 - RNA, 32 nt, Homo Sapiens
uuguuauuuucuguauagaaagguugagauau

SEQ ID NO: 381956 - RNA, 32 nt, Homo Sapiens
uaccgcgcuuggcggcagcuggccccagacuu

SEQ ID NO: 381957 - RNA, 30 nt, Homo Sapiens
cagguaggucaccgcgcggguccgggagcc

SEQ ID NO: 381958 - RNA, 32 nt, Homo Sapiens
uugauugaaaauaaagguagggcuucuaaaaa

SEQ ID NO: 381959 - RNA, 32 nt, Homo Sapiens
gcugcguucauaggcuggcacucucaauccua

SEQ ID NO: 381960 - RNA, 32 nt, Homo Sapiens
ugaauaagauacacucuaauggcauuugaaca

SEQ ID NO: 381961 - RNA, 32 nt, Homo Sapiens
cccaucuuuccacuggaaucugagccuuguga

SEQ ID NO: 381962 - RNA, 32 nt, Homo Sapiens
agacagguggguggagagagggcaggaccugc

SEQ ID NO: 381963 - RNA, 32 nt, Homo Sapiens
gcgaggaggcgggucccggccccggcgaaccc

SEQ ID NO: 381964 - RNA, 32 nt, Homo Sapiens
aaaaauaguguuuguucugaauguugguagac

SEQ ID NO: 381965 - RNA, 32 nt, Homo Sapiens
uucugcccggcgcuucggcccgggccgcucag

SEQ ID NO: 381966 - RNA, 32 nt, Homo Sapiens
uuuugcugccugcgagcgcguccgcgggcugg

SEQ ID NO: 381967 - RNA, 32 nt, Homo Sapiens
aggguggggcaucaccaccucacuggccuugc

SEQ ID NO: 381968 - RNA, 32 nt, Homo Sapiens
gagagugaugaacuuuagaaugucuagguacc

SEQ ID NO: 381969 - RNA, 32 nt, Homo Sapiens
ucacuggcauuugauggggaauaacauaagcc

SEQ ID NO: 381970 - RNA, 32 nt, Homo Sapiens
cccagcucccggggguggggucgggugagggc

SEQ ID NO: 381971 - RNA, 32 nt, Homo Sapiens
ugagaaccccacucagacuagcuuaggucauc

SEQ ID NO: 381972 - RNA, 32 nt, Homo Sapiens
guccggaaaugguggguucuuggucucgcuga

SEQ ID NO: 381973 - RNA, 32 nt, Homo Sapiens
acagugguccccccaccgccaaucuggccagu

SEQ ID NO: 381974 - RNA, 29 nt, Homo Sapiens
acggagcggggacaggcugccgagcaucc

SEQ ID NO: 381975 - RNA, 32 nt, Homo Sapiens
ugcuggguacgcugcgcgccauggagggcgag

SEQ ID NO: 381976 - RNA, 32 nt, Homo Sapiens
gcccuagccaaggagaaguuucagucacgugc

SEQ ID NO: 381977 - RNA, 32 nt, Homo Sapiens
acgggcacugggcgacucugugccucgcugag

SEQ ID NO: 381978 - RNA, 27 nt, Homo Sapiens
auccuggcuuuccacagcccccuccca

SEQ ID NO: 381979 - RNA, 32 nt, Homo Sapiens
acagcuuuucccuuucagaaacacucacauuc

SEQ ID NO: 381980 - RNA, 32 nt, Homo Sapiens
agcaggcaguggccaccugguacaccacacug

SEQ ID NO: 381981 - RNA, 32 nt, Homo Sapiens
agggggcaaggcuggaggaaaauguugaggug

SEQ ID NO: 381982 - RNA, 32 nt, Homo Sapiens
augccuaccccacuguggagagcaucagggau

SEQ ID NO: 381983 - RNA, 32 nt, Homo Sapiens
guaccucucugugcuuaugucaucucuguuau

SEQ ID NO: 381984 - RNA, 32 nt, Homo Sapiens
cuaauggcagaacuggcacuagguccaaaucu

SEQ ID NO: 381985 - RNA, 32 nt, Homo Sapiens
guagaggaacagaguacaacuuccauccucuu

SEQ ID NO: 381986 - RNA, 32 nt, Homo Sapiens
ggacccuucaccaucaggaauuccuuccuguc

SEQ ID NO: 381987 - RNA, 32 nt, Homo Sapiens
gccggcuucagugggaggugcuucucggcuuc

SEQ ID NO: 381988 - RNA, 32 nt, Homo Sapiens
cccauaguugguuuuuuuuuuauuuggggcag

SEQ ID NO: 381989 - RNA, 32 nt, Homo Sapiens
ucuauuuucuuacucuaucauucugguguuuu

SEQ ID NO: 381990 - RNA, 32 nt, Homo Sapiens
aagaauauucuuuucaacaaaugaugcuggga

SEQ ID NO: 381991 - RNA, 30 nt, Homo Sapiens
uuguggggagguggcuucagaggcucacaa

SEQ ID NO: 381992 - RNA, 32 nt, Homo Sapiens
gccguccccucuaccaucaguccaguccggcc

SEQ ID NO: 381993 - RNA, 32 nt, Homo Sapiens
uguauccucuggcgcgaaugcucucuguuggc

SEQ ID NO: 381994 - RNA, 32 nt, Homo Sapiens
auguuuaccuguugguccccagccucacucuu

SEQ ID NO: 381995 - RNA, 32 nt, Homo Sapiens
ugugugcggcgguggacaggcgccagcacauu

SEQ ID NO: 381996 - RNA, 32 nt, Homo Sapiens
aaccccaucucuacuaaaaauacagaaauuag

SEQ ID NO: 381997 - RNA, 32 nt, Homo Sapiens
ggcuacuuuuggcgaguugccgggcacaggca

SEQ ID NO: 381998 - RNA, 32 nt, Homo Sapiens
aagacagauauaaaagugaacuaaggaaauca

SEQ ID NO: 381999 - RNA, 32 nt, Homo Sapiens
uuauuuguuuauaugaauuacuuuuuaacaag

SEQ ID NO: 382000 - RNA, 32 nt, Homo Sapiens
ugcaaguugacuauauaucuuguacuuaauaa

SEQ ID NO: 382001 - RNA, 32 nt, Homo Sapiens
caggggagcagagggagcagucauggcggagc

SEQ ID NO: 382002 - RNA, 32 nt, Homo Sapiens
aauuccucuuucccaaggugugucacagaaac

SEQ ID NO: 382003 - RNA, 32 nt, Homo Sapiens
auuugguguggcuguauucagaucguauuaau

SEQ ID NO: 382004 - RNA, 32 nt, Homo Sapiens
cugcugaauagauggauagcgguauuaugcau

SEQ ID NO: 382005 - RNA, 32 nt, Homo Sapiens
gguaucuuaauuuuuauguugugggugggagg

SEQ ID NO: 382006 - RNA, 32 nt, Homo Sapiens
ugauguguauuuuuauuauguuuguuucuuuc

SEQ ID NO: 382007 - RNA, 32 nt, Homo Sapiens
aaggggagaaugagugucgccugcuaaagaaa

SEQ ID NO: 382008 - RNA, 32 nt, Homo Sapiens
uucccugcgucuccucgucccgagggcgccug

SEQ ID NO: 382009 - RNA, 32 nt, Homo Sapiens
ugagugccagcuuauuugugaugccccuuccc

SEQ ID NO: 382010 - RNA, 32 nt, Homo Sapiens
uaacaaaaugugcuuuggggucagguguggag

SEQ ID NO: 382011 - RNA, 32 nt, Homo Sapiens
uucugccugccagcugcacugaugcugccccu

SEQ ID NO: 382012 - RNA, 32 nt, Homo Sapiens
agacuccuccugggggcuggcucccagggugg

SEQ ID NO: 382013 - RNA, 32 nt, Homo Sapiens
ggacucugcguucgcgggcgcggugcccccgc

SEQ ID NO: 382014 - RNA, 32 nt, Homo Sapiens
cugcaggguaguccgcccccuccuccccacca

SEQ ID NO: 382015 - RNA, 32 nt, Homo Sapiens
agccuucgcaccaggaccgcggagaagugcaa

SEQ ID NO: 382016 - RNA, 32 nt, Homo Sapiens
ugaagaugguuuuuaaaacuuuuguuuuauug

SEQ ID NO: 382017 - RNA, 32 nt, Homo Sapiens
aacuuguaacaaguaacaacagagcucagguc

SEQ ID NO: 382018 - RNA, 32 nt, Homo Sapiens
ugcucuaaauuaagacagcauugaucuccugg

SEQ ID NO: 382019 - RNA, 32 nt, Homo Sapiens
uguggccugccagucaucgaguggcccaacag

SEQ ID NO: 382020 - RNA, 30 nt, Homo Sapiens
aaagcggucuucggccuccgggaguagcgg

SEQ ID NO: 382021 - RNA, 32 nt, Homo Sapiens
cauccucuuuguuuccucuuuucaccagccua

SEQ ID NO: 382022 - RNA, 32 nt, Homo Sapiens
cggaucccgcggccgcgguucggacccgccgg

SEQ ID NO: 382023 - RNA, 32 nt, Homo Sapiens
aauagggaaaagacacaacaguagggacuagc

SEQ ID NO: 382024 - RNA, 32 nt, Homo Sapiens
gccccaccccacccucaaccacuuccccagua

SEQ ID NO: 382025 - RNA, 32 nt, Homo Sapiens
uacaagcaacgcgccaccacacuaaaucuuua

SEQ ID NO: 382026 - RNA, 32 nt, Homo Sapiens
cugucccuguguuccucugagaguggacuguc

SEQ ID NO: 382027 - RNA, 31 nt, Homo Sapiens
aguaucauuugagccaggagguugagguugc

SEQ ID NO: 382028 - RNA, 32 nt, Homo Sapiens
auaccccagcauaccuucuccuugcuuagagu

SEQ ID NO: 382029 - RNA, 32 nt, Homo Sapiens
uaaauauuuuuccuuucaaaucagaugaugag

SEQ ID NO: 382030 - RNA, 32 nt, Homo Sapiens
uacacucuagcuuaagaaaacauugccauuuu

SEQ ID NO: 382031 - RNA, 32 nt, Homo Sapiens
ugugaaaaauggugguuguaauguuugugcuu

SEQ ID NO: 382032 - RNA, 32 nt, Homo Sapiens
ugacucaugcuucguggguacugaacacgagg

SEQ ID NO: 382033 - RNA, 32 nt, Homo Sapiens
gcucaggcucugcuucacuguccagccuugga

SEQ ID NO: 382034 - RNA, 32 nt, Homo Sapiens
accuggcggacgaggcgcugcugcuaccgcug

SEQ ID NO: 382035 - RNA, 32 nt, Homo Sapiens
uaggaacacucgggaugacaccccuuaucaca

SEQ ID NO: 382036 - RNA, 32 nt, Homo Sapiens
gccaagggggaggggaggcgucguccagggaa

SEQ ID NO: 382037 - RNA, 32 nt, Homo Sapiens
caccugugauauauggcaagugucccccugcc

SEQ ID NO: 382038 - RNA, 32 nt, Homo Sapiens
augacaaggccucuaucuccaggcacaauguc

SEQ ID NO: 382039 - RNA, 32 nt, Homo Sapiens
ccuaccucuuucuccuuacugacuucaaggga

SEQ ID NO: 382040 - RNA, 32 nt, Homo Sapiens
ccccuaaccccaccccaggcagcggaaggggc

SEQ ID NO: 382041 - RNA, 32 nt, Homo Sapiens
cauuuuuaucuguauacauuucaccaauuuau

SEQ ID NO: 382042 - RNA, 32 nt, Homo Sapiens
uuccuuaaacacauuccagaccaaacacuguu

SEQ ID NO: 382043 - RNA, 32 nt, Homo Sapiens
gccaacaaacacacaguaaucacucuguacac

SEQ ID NO: 382044 - RNA, 32 nt, Homo Sapiens
ccagauuccucauagagauuccuaaucacuag

SEQ ID NO: 382045 - RNA, 32 nt, Homo Sapiens
gcucagcggaauuuauauagacaugugauguu

SEQ ID NO: 382046 - RNA, 32 nt, Homo Sapiens
cacaccggcccugcuccuuccuccucuagguc

SEQ ID NO: 382047 - RNA, 32 nt, Homo Sapiens
ucucaagcaagccuccugaaccacuggcccca

SEQ ID NO: 382048 - RNA, 32 nt, Homo Sapiens
ccuguccccgggggcgccauggcgaccggagc

SEQ ID NO: 382049 - RNA, 32 nt, Homo Sapiens
cuaccccagggcccucaaagcuuauccagaac

SEQ ID NO: 382050 - RNA, 32 nt, Homo Sapiens
auuuaaaaggauuuucuuaaaaagcucucagc

SEQ ID NO: 382051 - RNA, 32 nt, Homo Sapiens
guauguguacuaugaucccaacaggcuuguga

SEQ ID NO: 382052 - RNA, 32 nt, Homo Sapiens
ugccugaucccucuccucgccugccuucugga

SEQ ID NO: 382053 - RNA, 32 nt, Homo Sapiens
ugcuggcuccaggaaccggccgugccgcgcgg

SEQ ID NO: 382054 - RNA, 32 nt, Homo Sapiens
acccacuccuccaucucaugggcucacggccu

SEQ ID NO: 382055 - RNA, 32 nt, Homo Sapiens
uguugcccuggguguccccaguucuugaaaag

SEQ ID NO: 382056 - RNA, 32 nt, Homo Sapiens
guccccagcugcaguggcugcccgguaucguu

SEQ ID NO: 382057 - RNA, 32 nt, Homo Sapiens
uccaaacuuuccagagauuuuaccagagguuu

SEQ ID NO: 382058 - RNA, 32 nt, Homo Sapiens
acccuccccgcgaggcgccgccgcccuggagc

SEQ ID NO: 382059 - RNA, 32 nt, Homo Sapiens
uagagauggcuuucccaguguguguucauugu

SEQ ID NO: 382060 - RNA, 32 nt, Homo Sapiens
cccuggugcucuaugaugagccaccagucagu

SEQ ID NO: 382061 - RNA, 32 nt, Homo Sapiens
agccuguucccugcccuucucugugcucuuag

SEQ ID NO: 382062 - RNA, 32 nt, Homo Sapiens
agguaauguucuucuuuugucuuauugaaaca

SEQ ID NO: 382063 - RNA, 32 nt, Homo Sapiens
auuccaccuuguagugucaacaauuaaggugu

SEQ ID NO: 382064 - RNA, 32 nt, Homo Sapiens
caggaaaagggaggguuggagcccaggcguuu

SEQ ID NO: 382065 - RNA, 32 nt, Homo Sapiens
aagauguauauuuaugggauagauacaugacu

SEQ ID NO: 382066 - RNA, 32 nt, Homo Sapiens
ucccacccucuuccuacuggucucucuaugcc

SEQ ID NO: 382067 - RNA, 32 nt, Homo Sapiens
cccagccuccuccuucccuccccuccccgucc

SEQ ID NO: 382068 - RNA, 32 nt, Homo Sapiens
cagacacacagacacacacacacacacccaua

SEQ ID NO: 382069 - RNA, 32 nt, Homo Sapiens
cccagccucuacucuucccagccccuaauccc

SEQ ID NO: 382070 - RNA, 32 nt, Homo Sapiens
cuggccaaucccaacuacucuggaagcugaag

SEQ ID NO: 382071 - RNA, 32 nt, Homo Sapiens
uuguggaaagggggcugcuagugacacccucu

SEQ ID NO: 382072 - RNA, 32 nt, Homo Sapiens
ugcccaacagcccccuucuccuccuuucccuu

SEQ ID NO: 382073 - RNA, 32 nt, Homo Sapiens
cucgcugccucccaggucagggucccggagcc

SEQ ID NO: 382074 - RNA, 32 nt, Homo Sapiens
cucugcagguccccagcgugggagugaacugg

SEQ ID NO: 382075 - RNA, 30 nt, Homo Sapiens
cauagaaaaaguuuguuuucucgaaauaau

SEQ ID NO: 382076 - RNA, 32 nt, Homo Sapiens
ggcuccagaaaagaaguggaaaugaaggggug

SEQ ID NO: 382077 - RNA, 32 nt, Homo Sapiens
gguugccugagguccgauggcccgagagcugg

SEQ ID NO: 382078 - RNA, 32 nt, Homo Sapiens
gcccuucccgagucuugagaggucuugagagg

SEQ ID NO: 382079 - RNA, 32 nt, Homo Sapiens
ugauaugacauaguaguagcgguggucagaca

SEQ ID NO: 382080 - RNA, 32 nt, Homo Sapiens
uaaaguaggcagauuauacauguguugcuuag

SEQ ID NO: 382081 - RNA, 32 nt, Homo Sapiens
aaucugggcuugucuuccuaaugcuaccuuug

SEQ ID NO: 382082 - RNA, 32 nt, Homo Sapiens
aaccugucagagaauguucuuaggcaucaaaa

SEQ ID NO: 382083 - RNA, 32 nt, Homo Sapiens
aguauuuccucuggcagcuggugcugugggca

SEQ ID NO: 382084 - RNA, 32 nt, Homo Sapiens
aaguguauauauauuaccuuagugugcauuuu

SEQ ID NO: 382085 - RNA, 32 nt, Homo Sapiens
caaauugcucuggcuaccauauagaaaauuga

SEQ ID NO: 382086 - RNA, 32 nt, Homo Sapiens
cuuuagaaacaucaguuuuuguauggaagcca

SEQ ID NO: 382087 - RNA, 32 nt, Homo Sapiens
gcgauggagcucagaggauggcacucuuccag

SEQ ID NO: 382088 - RNA, 32 nt, Homo Sapiens
cgccgagcgcgagggcgggcgugcucggagug

SEQ ID NO: 382089 - RNA, 32 nt, Homo Sapiens
caucugcaggccccaaacggccuccgguuggu

SEQ ID NO: 382090 - RNA, 32 nt, Homo Sapiens
uucugaauaagagcguccacgcaucauggacc

SEQ ID NO: 382091 - RNA, 32 nt, Homo Sapiens
cugcucuguauauuuuucccuuuuauaaugug

SEQ ID NO: 382092 - RNA, 32 nt, Homo Sapiens
uuuguuuggguacuguauaugagaucaggaaa

SEQ ID NO: 382093 - RNA, 32 nt, Homo Sapiens
aaaugccacgucugcucuucagugaagaagcu

SEQ ID NO: 382094 - RNA, 30 nt, Homo Sapiens
cuccuaggagguggcuccagcagaggaagu

SEQ ID NO: 382095 - RNA, 32 nt, Homo Sapiens
cauccaugaacauggaauguguuuccauuugu

SEQ ID NO: 382096 - RNA, 32 nt, Homo Sapiens
ccccgccucaggcuccuccuccucgcucuccg

SEQ ID NO: 382097 - RNA, 32 nt, Homo Sapiens
gggcagagggaagauugauuugcucauuaugc

SEQ ID NO: 382098 - RNA, 32 nt, Homo Sapiens
ccccaaaaaaucacuugcguuuuugaggcuua

SEQ ID NO: 382099 - RNA, 32 nt, Homo Sapiens
auggaacaggcguuggaggguaccucaguuca

SEQ ID NO: 382100 - RNA, 31 nt, Homo Sapiens
ugccgcugcuuuugaaaguccacuccuuuca

SEQ ID NO: 382101 - RNA, 32 nt, Homo Sapiens
cgcgcccgcccggugcagccgcugugcgagag

SEQ ID NO: 382102 - RNA, 32 nt, Homo Sapiens
aaaacaucucuuaaaaaugcugggauggggcc

SEQ ID NO: 382103 - RNA, 32 nt, Homo Sapiens
gugaaaguggaucagacacaaaaacugacccc

SEQ ID NO: 382104 - RNA, 32 nt, Homo Sapiens
uaguauauccaguaugauugguaaaugggaaa

SEQ ID NO: 382105 - RNA, 32 nt, Homo Sapiens
aauauuuaaaggcccuaucuguuuacaguguu

SEQ ID NO: 382106 - RNA, 32 nt, Homo Sapiens
gcggggcugaggaugccuccgcugggcaucuc

SEQ ID NO: 382107 - RNA, 32 nt, Homo Sapiens
agaaagaaaaauuuaucaaaaagaaaacacaa

SEQ ID NO: 382108 - RNA, 32 nt, Homo Sapiens
accaugcgcagcuaauuuuuuguauuuuuagu

SEQ ID NO: 382109 - RNA, 32 nt, Homo Sapiens
uggccuggagccugggcccaccugcuucuggg

SEQ ID NO: 382110 - RNA, 32 nt, Homo Sapiens
ucuguacucuagucuccugccuccucaguucu

SEQ ID NO: 382111 - RNA, 32 nt, Homo Sapiens
ggccgcgggaugccccugcgcugaccgccagg

SEQ ID NO: 382112 - RNA, 32 nt, Homo Sapiens
augaucaaauccaaucccuuuauuuucuaaag

SEQ ID NO: 382113 - RNA, 32 nt, Homo Sapiens
uucccacuccggguugguuuuguguuugcuuu

SEQ ID NO: 382114 - RNA, 32 nt, Homo Sapiens
cagaucaguggcuggggugccuguugugggug

SEQ ID NO: 382115 - RNA, 32 nt, Homo Sapiens
aaacuccaaagcaauugguaauccccaaaaug

SEQ ID NO: 382116 - RNA, 32 nt, Homo Sapiens
gauccaaguguauugcagcccacaaaaaagcu

SEQ ID NO: 382117 - RNA, 32 nt, Homo Sapiens
gaugauugucucagcacucacgcacugcacaa

SEQ ID NO: 382118 - RNA, 32 nt, Homo Sapiens
cuuagcauucuaccaccaugugucucacccau

SEQ ID NO: 382119 - RNA, 29 nt, Homo Sapiens
ccugggugaggagagcgagacucuuucug

SEQ ID NO: 382120 - RNA, 32 nt, Homo Sapiens
cauggcccacccaggccuggagcugggaugca

SEQ ID NO: 382121 - RNA, 32 nt, Homo Sapiens
cucaggguggcugggugagcgcucaucagucc

SEQ ID NO: 382122 - RNA, 32 nt, Homo Sapiens
caacuccuagcuaccaguggcuucuacaggcc

SEQ ID NO: 382123 - RNA, 32 nt, Homo Sapiens
accuucucagggcucuggagggggaggggaga

SEQ ID NO: 382124 - RNA, 32 nt, Homo Sapiens
guucuagaggcuagauguuuaauuguaaauau

SEQ ID NO: 382125 - RNA, 32 nt, Homo Sapiens
acagcucugacuuucauucucauuccaguuua

SEQ ID NO: 382126 - RNA, 32 nt, Homo Sapiens
ucucggcaggggagcaggauucccggcccagc

SEQ ID NO: 382127 - RNA, 32 nt, Homo Sapiens
gguuagaugcaaacacguuggaugaguuugaa

SEQ ID NO: 382128 - RNA, 32 nt, Homo Sapiens
gcucuuagcugugguuacuuggaccagcggca

SEQ ID NO: 382129 - RNA, 32 nt, Homo Sapiens
ugugagcagaugcuggagaacuagccagggag

SEQ ID NO: 382130 - RNA, 32 nt, Homo Sapiens
aagccaaugaauuuuaaucuauagauucuuua

SEQ ID NO: 382131 - RNA, 32 nt, Homo Sapiens
ccagucagguaauuauuuucuauuggggaacu

SEQ ID NO: 382132 - RNA, 32 nt, Homo Sapiens
aguagagguauuuuauauuagcaguaacagac

SEQ ID NO: 382133 - RNA, 32 nt, Homo Sapiens
ugcaaauggugaccaucccagcccuuguuuga

SEQ ID NO: 382134 - RNA, 32 nt, Homo Sapiens
cuuaacaaguauuuuuucaucacugaaagguu

SEQ ID NO: 382135 - RNA, 32 nt, Homo Sapiens
cccggcccagcccggcccggccgggcccuggc

SEQ ID NO: 382136 - RNA, 32 nt, Homo Sapiens
ggggcgcccgcugagccccggcgcccgcagaa

SEQ ID NO: 382137 - RNA, 32 nt, Homo Sapiens
aaaauuccaucccaucaucuugguacuacuag

SEQ ID NO: 382138 - RNA, 32 nt, Homo Sapiens
acggcuugcucuucuuucuagaauguccaugc

SEQ ID NO: 382139 - RNA, 32 nt, Homo Sapiens
ccccggccuggcugccccuccccuccggcccu

SEQ ID NO: 382140 - RNA, 32 nt, Homo Sapiens
agccaucuugugauuauaaccaaagaggaaga

SEQ ID NO: 382141 - RNA, 29 nt, Homo Sapiens
ugauuuuggcuacagaggagucucuuccc

SEQ ID NO: 382142 - RNA, 32 nt, Homo Sapiens
aaaccuccaaaaaguuauacaucagguaucuc

SEQ ID NO: 382143 - RNA, 32 nt, Homo Sapiens
gccuucaguauaugcauagaaugcugcuagaa

SEQ ID NO: 382144 - RNA, 32 nt, Homo Sapiens
ugggaacaaaaauaucuaauugagauauucuu

SEQ ID NO: 382145 - RNA, 32 nt, Homo Sapiens
agguaguuauucacaaaaauugacuccccauu

SEQ ID NO: 382146 - RNA, 32 nt, Homo Sapiens
ugccaaaccaugucuuuuuuucuguuucagag

SEQ ID NO: 382147 - RNA, 32 nt, Homo Sapiens
cgccucagccccagccccagcuccagcccuga

SEQ ID NO: 382148 - RNA, 32 nt, Homo Sapiens
ggaaacacccucauuuuugaauggaguaugga

SEQ ID NO: 382149 - RNA, 32 nt, Homo Sapiens
ucccagccaugccggccuccucauaugcaaua

SEQ ID NO: 382150 - RNA, 32 nt, Homo Sapiens
cuggguauuugcaaaguuugcuuauuuugaug

SEQ ID NO: 382151 - RNA, 32 nt, Homo Sapiens
gguuggagugcucuucccacuccagcugacag

SEQ ID NO: 382152 - RNA, 32 nt, Homo Sapiens
gauucugguaccuuuacccaaaccuacugggc

SEQ ID NO: 382153 - RNA, 32 nt, Homo Sapiens
uacaguauuuuuguauuuuuuauuaaaggcua

SEQ ID NO: 382154 - RNA, 32 nt, Homo Sapiens
uaaagcucaguuaguuuuuuuauuauuauuau

SEQ ID NO: 382155 - RNA, 32 nt, Homo Sapiens
aaucuugcugcuaaaguugcaagugauugaua

SEQ ID NO: 382156 - RNA, 32 nt, Homo Sapiens
acacaagaauaccaccuaugaccucauugcca

SEQ ID NO: 382157 - RNA, 32 nt, Homo Sapiens
aggcuccgucagugccagcagcuggcgccacu

SEQ ID NO: 382158 - RNA, 32 nt, Homo Sapiens
acauugcacgcgacaguuucaggcacagaacu

SEQ ID NO: 382159 - RNA, 32 nt, Homo Sapiens
auaucuuuaagugugcuguaugcugaguuaca

SEQ ID NO: 382160 - RNA, 32 nt, Homo Sapiens
uucaguauucugucuguaagacuuaccugugc

SEQ ID NO: 382161 - RNA, 32 nt, Homo Sapiens
cuggcuaaggcacaguuuucuagaaauaaaac

SEQ ID NO: 382162 - RNA, 32 nt, Homo Sapiens
gguccagaagcaguuuaugagacagcugagug

SEQ ID NO: 382163 - RNA, 32 nt, Homo Sapiens
cuguguuuagucccucaacacaucagucaaag

SEQ ID NO: 382164 - RNA, 27 nt, Homo Sapiens
ugauuuuguuaauucuguauaaugagc

SEQ ID NO: 382165 - RNA, 32 nt, Homo Sapiens
augaaucuguauguaaaaauagagucuuauuu

SEQ ID NO: 382166 - RNA, 32 nt, Homo Sapiens
aucuccaggaggagccagaagcugggagaggc

SEQ ID NO: 382167 - RNA, 28 nt, Homo Sapiens
ugccggugugggaccaggaugucuuuuc

SEQ ID NO: 382168 - RNA, 32 nt, Homo Sapiens
ugucucuggaaauucuauuuacuuuaaggaca

SEQ ID NO: 382169 - RNA, 32 nt, Homo Sapiens
ggccccugggaaagaucuucuucguugucuag

SEQ ID NO: 382170 - RNA, 32 nt, Homo Sapiens
cccccaccaaagccaccuacucuucuucugug

SEQ ID NO: 382171 - RNA, 32 nt, Homo Sapiens
ggguuuuuuguuuacuuuuuuaauuuuucaag

SEQ ID NO: 382172 - RNA, 32 nt, Homo Sapiens
ccccucaaccucaccauugugaagcaccuacu

SEQ ID NO: 382173 - RNA, 32 nt, Homo Sapiens
guugucccgggggcuccuguggggcagcuggg

SEQ ID NO: 382174 - RNA, 32 nt, Homo Sapiens
cccgcccccuuggaccugucagcccucggagc

SEQ ID NO: 382175 - RNA, 32 nt, Homo Sapiens
cauggacaaaaauuucaccuugagauugagcu

SEQ ID NO: 382176 - RNA, 32 nt, Homo Sapiens
gaggaggcauuucaggaugcugagguuuccag

SEQ ID NO: 382177 - RNA, 32 nt, Homo Sapiens
ugcaccaaaaauuuuaaugaauaaucaucuuc

SEQ ID NO: 382178 - RNA, 32 nt, Homo Sapiens
agcccgcggaggagggcggcaugcagcuccgc

SEQ ID NO: 382179 - RNA, 32 nt, Homo Sapiens
agacagguacgucuguuuuuuauuuuaaaaga

SEQ ID NO: 382180 - RNA, 32 nt, Homo Sapiens
auuucaagauaaauuuuaguauuucaaccauu

SEQ ID NO: 382181 - RNA, 32 nt, Homo Sapiens
ugcaggaaggcgugcucugugugccccaguga

SEQ ID NO: 382182 - RNA, 32 nt, Homo Sapiens
gcgcgugucggcugagcccaccccgcugcuga

SEQ ID NO: 382183 - RNA, 32 nt, Homo Sapiens
ggcgggaggggagguggcaggcgcguuugcag

SEQ ID NO: 382184 - RNA, 32 nt, Homo Sapiens
acaaggggagcgugcauguuguccuugguuua

SEQ ID NO: 382185 - RNA, 32 nt, Homo Sapiens
gcauauugcuaaucuauagacaccacaguuuc

SEQ ID NO: 382186 - RNA, 32 nt, Homo Sapiens
aacauccuacugauuucaguacugagauuaug

SEQ ID NO: 382187 - RNA, 32 nt, Homo Sapiens
guuaggcugccagccuuuuauuguggcaucca

SEQ ID NO: 382188 - RNA, 32 nt, Homo Sapiens
cugcccccgccccgccccaacccggcguccua

SEQ ID NO: 382189 - RNA, 32 nt, Homo Sapiens
aaaacagauuuaggaacaaaaauugggagggu

SEQ ID NO: 382190 - RNA, 32 nt, Homo Sapiens
cagcggcgaacgccaggcucugggcuccggcg

SEQ ID NO: 382191 - RNA, 32 nt, Homo Sapiens
aggccgcgcuccugggggccgccgccugggag

SEQ ID NO: 382192 - RNA, 32 nt, Homo Sapiens
aaagaccuaaagggaauuguaauuugguuaua

SEQ ID NO: 382193 - RNA, 32 nt, Homo Sapiens
uuauuuucccaaagaaagaaaagggggaaaau

SEQ ID NO: 382194 - RNA, 32 nt, Homo Sapiens
agugagcaagcaguggcaguuuuucacagcuc

SEQ ID NO: 382195 - RNA, 32 nt, Homo Sapiens
gggcccgccuccccagcugaccgcgaacuccu

SEQ ID NO: 382196 - RNA, 32 nt, Homo Sapiens
ucuccugccugccggaaggauggguggggcuu

SEQ ID NO: 382197 - RNA, 32 nt, Homo Sapiens
gccaggacccacagcccuccccagcugcccag

SEQ ID NO: 382198 - RNA, 32 nt, Homo Sapiens
cccucggcucccgaguccacgccugccugggc

SEQ ID NO: 382199 - RNA, 32 nt, Homo Sapiens
ucaaaauauaaaauguggaagaaaagccucuu

SEQ ID NO: 382200 - RNA, 32 nt, Homo Sapiens
uauaaggggcgcccggcgccccgggccccacc

SEQ ID NO: 382201 - RNA, 32 nt, Homo Sapiens
agugugugaccuguggcuacaugauucccuga

SEQ ID NO: 382202 - RNA, 32 nt, Homo Sapiens
gaaacccucaaaaauacuuucuuaauuucaca

SEQ ID NO: 382203 - RNA, 30 nt, Homo Sapiens
uaagcaaaucaugucuauucucugaguguc

SEQ ID NO: 382204 - RNA, 32 nt, Homo Sapiens
ccggcccugcuccagaacccagcccagaucgg

SEQ ID NO: 382205 - RNA, 32 nt, Homo Sapiens
aucuacuccaaauuauuuucaagagaguguga

SEQ ID NO: 382206 - RNA, 32 nt, Homo Sapiens
uggauccagaacacaauuuuccccucagaaca

SEQ ID NO: 382207 - RNA, 32 nt, Homo Sapiens
aauauggcuauaaauauauaaaaagaaaagau

SEQ ID NO: 382208 - RNA, 32 nt, Homo Sapiens
aggaaguggccuccagccucccucguggucug

SEQ ID NO: 382209 - RNA, 32 nt, Homo Sapiens
cccucaucugugguaguagugaaggcuaggug

SEQ ID NO: 382210 - RNA, 32 nt, Homo Sapiens
caaucaagccacaggccuuauuucauauguuu

SEQ ID NO: 382211 - RNA, 31 nt, Homo Sapiens
cagggcgcggauuuaaaguccaauuucucau

SEQ ID NO: 382212 - RNA, 32 nt, Homo Sapiens
gcucgucuggagggcggugcgaggggccgagc

SEQ ID NO: 382213 - RNA, 32 nt, Homo Sapiens
gcagaggagcagccgaccaugccccgagacaa

SEQ ID NO: 382214 - RNA, 32 nt, Homo Sapiens
cuggagcuuuguauucugugacugcuauggcu

SEQ ID NO: 382215 - RNA, 32 nt, Homo Sapiens
uccgugggccuguuucccaaucugcaaagugu

SEQ ID NO: 382216 - RNA, 32 nt, Homo Sapiens
ggcccggagcccagcgcccuccucuucuccuc

SEQ ID NO: 382217 - RNA, 32 nt, Homo Sapiens
caccucaccucuuaauaaaggucagacacugg

SEQ ID NO: 382218 - RNA, 32 nt, Homo Sapiens
uucacuacuuuuucuaucuuaauauagugugg

SEQ ID NO: 382219 - RNA, 32 nt, Homo Sapiens
gguugcauucuccaccaagggaguuaaccuac

SEQ ID NO: 382220 - RNA, 32 nt, Homo Sapiens
gaaggggcagaggcucaccucccuccuggggc

SEQ ID NO: 382221 - RNA, 32 nt, Homo Sapiens
cacaucuuaaacuugaauaauaguaugaguaa

SEQ ID NO: 382222 - RNA, 32 nt, Homo Sapiens
uugauguuuaucauuccuguguuguuguacuu

SEQ ID NO: 382223 - RNA, 32 nt, Homo Sapiens
cugggaaagggagugagaggaggcucaggcca

SEQ ID NO: 382224 - RNA, 32 nt, Homo Sapiens
aggcuuggggccccugucugcugcuggacgca

SEQ ID NO: 382225 - RNA, 32 nt, Homo Sapiens
gcucuccuuucugaucuaaaaacucaucuuug

SEQ ID NO: 382226 - RNA, 32 nt, Homo Sapiens
acugcagccccacuucuguuucccuggagucu

SEQ ID NO: 382227 - RNA, 32 nt, Homo Sapiens
guuucggaguuugguaaaguuuacaggguagc

SEQ ID NO: 382228 - RNA, 32 nt, Homo Sapiens
cucugcccuggccacguucacagauccuucuc

SEQ ID NO: 382229 - RNA, 32 nt, Homo Sapiens
ucuugauaacuuuuugauacuucuuucuugau

SEQ ID NO: 382230 - RNA, 32 nt, Homo Sapiens
aaaaaaaacaaaaaacaaaaccaucugcccuc

SEQ ID NO: 382231 - RNA, 32 nt, Homo Sapiens
ugaccugauguaaacagugucuucuuaaaauc

SEQ ID NO: 382232 - RNA, 32 nt, Homo Sapiens
uacaaauaauuuuuaaaaauuagccaggcaug

SEQ ID NO: 382233 - RNA, 32 nt, Homo Sapiens
cucaaucuuucauuuccuuucaaaaaacagag

SEQ ID NO: 382234 - RNA, 32 nt, Homo Sapiens
ggaaauucaaagcaggguucugaggcaaaugg

SEQ ID NO: 382235 - RNA, 32 nt, Homo Sapiens
gcaguucucuucucuuuuuuuuuuuuuuugag

SEQ ID NO: 382236 - RNA, 32 nt, Homo Sapiens
agaggaacugcuuuugagugagauggucccag

SEQ ID NO: 382237 - RNA, 32 nt, Homo Sapiens
cguccccaugugugagcgugcacagagggagu

SEQ ID NO: 382238 - RNA, 32 nt, Homo Sapiens
uuucuuggaaaacaauacuuauagggcuuaaa

SEQ ID NO: 382239 - RNA, 32 nt, Homo Sapiens
cagcuaauuuuuguauuuuuuauuuuuuuuuu

SEQ ID NO: 382240 - RNA, 32 nt, Homo Sapiens
cccucugccaggacuugcugcagagcugcuga

SEQ ID NO: 382241 - RNA, 32 nt, Homo Sapiens
caccacaggggcaccugcaggcugggagacca

SEQ ID NO: 382242 - RNA, 32 nt, Homo Sapiens
cuuuuccuuuucucuuuuuuguuucucauccu

SEQ ID NO: 382243 - RNA, 32 nt, Homo Sapiens
uuagacuacggcuauuugaaaaaaugugcuua

SEQ ID NO: 382244 - RNA, 32 nt, Homo Sapiens
uccucuugacuguuauuuuucuuaguaggggg

SEQ ID NO: 382245 - RNA, 32 nt, Homo Sapiens
auguuucugucuuaaucuccucuucuuauaag

SEQ ID NO: 382246 - RNA, 32 nt, Homo Sapiens
ccaugugugugcggcccgcccgaggccgcccg

SEQ ID NO: 382247 - RNA, 32 nt, Homo Sapiens
gcgccgggcuugggggcggggagcaggcggug

SEQ ID NO: 382248 - RNA, 32 nt, Homo Sapiens
caacccagccgggaacagcugcgauggggaag

SEQ ID NO: 382249 - RNA, 32 nt, Homo Sapiens
agagaagguauuacaaguggauaaauaaugug

SEQ ID NO: 382250 - RNA, 32 nt, Homo Sapiens
uugacuuaguguccugucccccuuggacguuc

SEQ ID NO: 382251 - RNA, 32 nt, Homo Sapiens
ggcgccggguggcaaaggacucacccccgcac

SEQ ID NO: 382252 - RNA, 32 nt, Homo Sapiens
aaauauuuuuaugggagaaaaauacauuugaa

SEQ ID NO: 382253 - RNA, 32 nt, Homo Sapiens
ccagaggaacuuccgcaaacaccugcgcaugg

SEQ ID NO: 382254 - RNA, 32 nt, Homo Sapiens
uuuuuuaacagugguccuuaugcuggauucau

SEQ ID NO: 382255 - RNA, 32 nt, Homo Sapiens
gaggccuucucgcauuuucucuagcugaucag

SEQ ID NO: 382256 - RNA, 32 nt, Homo Sapiens
cagauccuggagaacuuugagaaggacgagac

SEQ ID NO: 382257 - RNA, 32 nt, Homo Sapiens
gagguccacacugacacacacccauuggguca

SEQ ID NO: 382258 - RNA, 32 nt, Homo Sapiens
gcuuuuggccuuggccucccaaggugcuggga

SEQ ID NO: 382259 - RNA, 32 nt, Homo Sapiens
auuuuccaacucaggagaugaacuugcuguuu

SEQ ID NO: 382260 - RNA, 32 nt, Homo Sapiens
caggagaaaaguaaauauaaaaacuuugcucu

SEQ ID NO: 382261 - RNA, 32 nt, Homo Sapiens
ugcgagccgcucagcucccgggacguuuggag

SEQ ID NO: 382262 - RNA, 32 nt, Homo Sapiens
gggagaagccgucuccacuccgcggccuugcg

SEQ ID NO: 382263 - RNA, 32 nt, Homo Sapiens
gugcuugaaaauacucauuagguaauugucaa

SEQ ID NO: 382264 - RNA, 32 nt, Homo Sapiens
uggacguucacuuggugacuggugccucugca

SEQ ID NO: 382265 - RNA, 32 nt, Homo Sapiens
agagcuccuuacaaaccuuuaauuguaauaua

SEQ ID NO: 382266 - RNA, 32 nt, Homo Sapiens
gcugcuggugucaacgugaugucuucuggggc

SEQ ID NO: 382267 - RNA, 32 nt, Homo Sapiens
cgcgcggcgcggcuaccaugggcgugcgguga

SEQ ID NO: 382268 - RNA, 32 nt, Homo Sapiens
uauugcaacgugcaggaccauuuuaaaccugu

SEQ ID NO: 382269 - RNA, 32 nt, Homo Sapiens
uuguguguauuuacuuuuuuuauuucuuaauu

SEQ ID NO: 382270 - RNA, 32 nt, Homo Sapiens
cacuguuucucucuucucuuuggaagcaccuc

SEQ ID NO: 382271 - RNA, 32 nt, Homo Sapiens
ggacugaucagacccggcaccacggaaaggaa

SEQ ID NO: 382272 - RNA, 32 nt, Homo Sapiens
gcuuccuucccuugccuucucucaauggcucc

SEQ ID NO: 382273 - RNA, 32 nt, Homo Sapiens
aacuuagauccucauucuuaauauuuauaugu

SEQ ID NO: 382274 - RNA, 32 nt, Homo Sapiens
aagguuuaaggugacccaaugauucagcuauu

SEQ ID NO: 382275 - RNA, 32 nt, Homo Sapiens
augaugauaauuauaauguaucuguacagcac

SEQ ID NO: 382276 - RNA, 32 nt, Homo Sapiens
ugaugaugaagaugaugcuaaguaaacagaaa

SEQ ID NO: 382277 - RNA, 32 nt, Homo Sapiens
cgagcugcauuuccggccuuccgugggccaac

SEQ ID NO: 382278 - RNA, 32 nt, Homo Sapiens
guuuuuguucaaccucuuccugaggcccaaga

SEQ ID NO: 382279 - RNA, 32 nt, Homo Sapiens
auguaccuuuaugcuuugugauugugaaacau

SEQ ID NO: 382280 - RNA, 32 nt, Homo Sapiens
ggggcagagccucagccccgcggccccugagu

SEQ ID NO: 382281 - RNA, 32 nt, Homo Sapiens
gaacacaccccuuuuccauuuaagacccugcu

SEQ ID NO: 382282 - RNA, 32 nt, Homo Sapiens
gugagccccacuuccagccccacucccaccau

SEQ ID NO: 382283 - RNA, 32 nt, Homo Sapiens
auuuacccucuuccuuguugguuuucuuuuuc

SEQ ID NO: 382284 - RNA, 32 nt, Homo Sapiens
uagccauccuuggccuggcgcgguggcucaca

SEQ ID NO: 382285 - RNA, 32 nt, Homo Sapiens
ugucaaaauuuuaacuccuuaauacaaagcaa

SEQ ID NO: 382286 - RNA, 32 nt, Homo Sapiens
gaaggcccugcccuaacagccugcgagucuaa

SEQ ID NO: 382287 - RNA, 32 nt, Homo Sapiens
ugucucaaaaaaacaaaacaaacaaacaaaaa

SEQ ID NO: 382288 - RNA, 32 nt, Homo Sapiens
ccuugauggaggagggagggcuucaggacggg

SEQ ID NO: 382289 - RNA, 32 nt, Homo Sapiens
aagaauaguuuaugaguugaacaaaaggaaaa

SEQ ID NO: 382290 - RNA, 30 nt, Homo Sapiens
gugcaguggugcgaucacagcccagugcag

SEQ ID NO: 382291 - RNA, 32 nt, Homo Sapiens
uauauaauuauaaaaaugaugcacuuucuaca

SEQ ID NO: 382292 - RNA, 32 nt, Homo Sapiens
gagugugcaauccagcugggagauaagacaag

SEQ ID NO: 382293 - RNA, 32 nt, Homo Sapiens
gggcagcacugggccuggccccccggguauuu

SEQ ID NO: 382294 - RNA, 32 nt, Homo Sapiens
cuauaggggguggaaaaggugauggugcuggg

SEQ ID NO: 382295 - RNA, 32 nt, Homo Sapiens
aaggccaagagaagccauaggauacugugacc

SEQ ID NO: 382296 - RNA, 32 nt, Homo Sapiens
gagcaaagucucuccauucuccagguccaagg

SEQ ID NO: 382297 - RNA, 32 nt, Homo Sapiens
aggacuguaaugaaagaucauugcauauuuau

SEQ ID NO: 382298 - RNA, 32 nt, Homo Sapiens
cggaguggagggcacgccagggugucugaagc

SEQ ID NO: 382299 - RNA, 32 nt, Homo Sapiens
ccuggguucauuuuccagacacugaaagagca

SEQ ID NO: 382300 - RNA, 32 nt, Homo Sapiens
gaccugugagcagcugcuguuugucgugcucc

SEQ ID NO: 382301 - RNA, 28 nt, Homo Sapiens
aggagggcggcgccgccgaggcccagau

SEQ ID NO: 382302 - RNA, 32 nt, Homo Sapiens
gguggcugugcucauggaugcugauuugacaa

SEQ ID NO: 382303 - RNA, 32 nt, Homo Sapiens
ggcacaaaaacgccaguguuugcggucaagga

SEQ ID NO: 382304 - RNA, 32 nt, Homo Sapiens
augauugucugaaaacaucacuuuuuguggau

SEQ ID NO: 382305 - RNA, 32 nt, Homo Sapiens
aguagggucggacgucucuggcuggggguggg

SEQ ID NO: 382306 - RNA, 32 nt, Homo Sapiens
acucuauaaaggaaaaggaauguagcucaacu

SEQ ID NO: 382307 - RNA, 32 nt, Homo Sapiens
uaaacccuggugcucacuucucuucuuuacua

SEQ ID NO: 382308 - RNA, 32 nt, Homo Sapiens
acugucaggagcuugccaguauuucuguuggg

SEQ ID NO: 382309 - RNA, 32 nt, Homo Sapiens
uacugaaguuuauuuuaccauugacugcugcc

SEQ ID NO: 382310 - RNA, 32 nt, Homo Sapiens
uucuuaccuuggaugccugagacuaggggagu

SEQ ID NO: 382311 - RNA, 32 nt, Homo Sapiens
gcuauuuagaaaaagugauaaugggucaguuu

SEQ ID NO: 382312 - RNA, 32 nt, Homo Sapiens
augaagcagacacacacacacacacacacaca

SEQ ID NO: 382313 - RNA, 28 nt, Homo Sapiens
aagcaggggcggccgcagcucucaccca

SEQ ID NO: 382314 - RNA, 32 nt, Homo Sapiens
cucggcggcgcuuuagcuccgccucucuccuc

SEQ ID NO: 382315 - RNA, 32 nt, Homo Sapiens
caaggccccacuuuuuugucaacacuccuugg

SEQ ID NO: 382316 - RNA, 32 nt, Homo Sapiens
auguuuaccuugcuccacggagcugcugaccu

SEQ ID NO: 382317 - RNA, 32 nt, Homo Sapiens
uaaauuggauaucuuuuuuuuacaaauacgac

SEQ ID NO: 382318 - RNA, 32 nt, Homo Sapiens
gagcaggaccagcugccuuucucaccaccaca

SEQ ID NO: 382319 - RNA, 32 nt, Homo Sapiens
uauucugccuacuguaaauauggguuccucug

SEQ ID NO: 382320 - RNA, 32 nt, Homo Sapiens
auaaaaagggacauuuucugcggccgcgaauu

SEQ ID NO: 382321 - RNA, 32 nt, Homo Sapiens
gcagagauaaaacgcuuaaaaaauucugauga

SEQ ID NO: 382322 - RNA, 32 nt, Homo Sapiens
ggcuuuguccacucugacaaacugaagauggg

SEQ ID NO: 382323 - RNA, 32 nt, Homo Sapiens
auuguagaaaguguacagcauacugacucaau

SEQ ID NO: 382324 - RNA, 32 nt, Homo Sapiens
gccgcagccccggccccacacaaaagccuccc

SEQ ID NO: 382325 - RNA, 32 nt, Homo Sapiens
guccaguguccucauucugaagacauucacca

SEQ ID NO: 382326 - RNA, 32 nt, Homo Sapiens
cuuuuuggggugcuggauauuuuuguauuccu

SEQ ID NO: 382327 - RNA, 32 nt, Homo Sapiens
acguugaaacuuuuucuggugucuacaugaag

SEQ ID NO: 382328 - RNA, 32 nt, Homo Sapiens
augaguugguaaagagagaggcugggaugaag

SEQ ID NO: 382329 - RNA, 32 nt, Homo Sapiens
ccgucuccaggccccaggccucuuuguggacc

SEQ ID NO: 382330 - RNA, 32 nt, Homo Sapiens
uuuugguuacuuaugauagaguacuuuucuug

SEQ ID NO: 382331 - RNA, 32 nt, Homo Sapiens
cugggcuguuuuagugccaggcugcggugggc

SEQ ID NO: 382332 - RNA, 32 nt, Homo Sapiens
gcugagccugcagaccccgguuucuauuuugc

SEQ ID NO: 382333 - RNA, 32 nt, Homo Sapiens
ccacgcccccucccggccccucccugcccucc

SEQ ID NO: 382334 - RNA, 32 nt, Homo Sapiens
uggccucucuacauccagcucaugccucacag

SEQ ID NO: 382335 - RNA, 32 nt, Homo Sapiens
ugguuguauuggguagcauugggauaagauuu

SEQ ID NO: 382336 - RNA, 32 nt, Homo Sapiens
cucgcucccacgcuccuccugccccagcccuc

SEQ ID NO: 382337 - RNA, 32 nt, Homo Sapiens
ggagggcucugggcugaggagcucagugggug

SEQ ID NO: 382338 - RNA, 32 nt, Homo Sapiens
ugaauauuuuucuguagugugaaacagcugcc

SEQ ID NO: 382339 - RNA, 32 nt, Homo Sapiens
aauuguuguguauaucucugguagauaugugu

SEQ ID NO: 382340 - RNA, 32 nt, Homo Sapiens
uauauaauggauguuaaccaguaucaauaaau

SEQ ID NO: 382341 - RNA, 32 nt, Homo Sapiens
cccccaaccacccaccagaggaguucuggucc

SEQ ID NO: 382342 - RNA, 32 nt, Homo Sapiens
uagugcuuuccacagaugcugguccucagugg

SEQ ID NO: 382343 - RNA, 32 nt, Homo Sapiens
cuccagucuuacugccuucuuaaugaugggau

SEQ ID NO: 382344 - RNA, 32 nt, Homo Sapiens
aguuagagacaauuuuuaucuugcuuauagua

SEQ ID NO: 382345 - RNA, 32 nt, Homo Sapiens
gugcagcuuaggaggcugcuaguuaggaagau

SEQ ID NO: 382346 - RNA, 32 nt, Homo Sapiens
uauuggauaauuuucaguaccugcgcaauccu

SEQ ID NO: 382347 - RNA, 32 nt, Homo Sapiens
uauuauuaauaaaugugguccuauaauuuaua

SEQ ID NO: 382348 - RNA, 32 nt, Homo Sapiens
augucagcuauuuaaagagauaccagacuuca

SEQ ID NO: 382349 - RNA, 32 nt, Homo Sapiens
uguggggccuguugagauauuccuucuaaggu

SEQ ID NO: 382350 - RNA, 32 nt, Homo Sapiens
gcccagugcugcgcuucgcggcagaggcgucu

SEQ ID NO: 382351 - RNA, 32 nt, Homo Sapiens
cauucaccaaaauuauccugaacucuucugca

SEQ ID NO: 382352 - RNA, 32 nt, Homo Sapiens
uuaccaaauuuucaggggacuaugaaucacug

SEQ ID NO: 382353 - RNA, 32 nt, Homo Sapiens
gaauguuggggaguggggcacaagaaaaaaua

SEQ ID NO: 382354 - RNA, 32 nt, Homo Sapiens
ugaaccagaaccagcucugguucugaccugcc

SEQ ID NO: 382355 - RNA, 32 nt, Homo Sapiens
gccagccuccuccugcgcacagaucgggaggu

SEQ ID NO: 382356 - RNA, 32 nt, Homo Sapiens
ccagggagccgagggcgggcguggacgggacc

SEQ ID NO: 382357 - RNA, 32 nt, Homo Sapiens
agagaguuagacagcaacuuaccuacucugaa

SEQ ID NO: 382358 - RNA, 32 nt, Homo Sapiens
cuccccugcuggaagugcuuuuccucccagag

SEQ ID NO: 382359 - RNA, 32 nt, Homo Sapiens
cacuguguuucuuuucuuuucuucugguuuaa

SEQ ID NO: 382360 - RNA, 32 nt, Homo Sapiens
uuuuuuucuuuuucuuuuuuuuuuuuugagac

SEQ ID NO: 382361 - RNA, 32 nt, Homo Sapiens
uagccaugccgaggccggggcccccaccccuc

SEQ ID NO: 382362 - RNA, 32 nt, Homo Sapiens
augaauuccacauuaaauuuucuggcaaagua

SEQ ID NO: 382363 - RNA, 32 nt, Homo Sapiens
auggggagccagcagaguuccugcccaugguc

SEQ ID NO: 382364 - RNA, 32 nt, Homo Sapiens
uggugacugcggggcaggccgggggcagcugu

SEQ ID NO: 382365 - RNA, 32 nt, Homo Sapiens
aaagauuaauguguauuaaaacacauuaugua

SEQ ID NO: 382366 - RNA, 32 nt, Homo Sapiens
cccgcccccugcccccuccccccgugccugca

SEQ ID NO: 382367 - RNA, 32 nt, Homo Sapiens
auuuuaugcuuuuuuauuuuaguuuugauguu

SEQ ID NO: 382368 - RNA, 31 nt, Homo Sapiens
ugcuuucauuugaauauuaaaagugaauuuu

SEQ ID NO: 382369 - RNA, 32 nt, Homo Sapiens
auuugaauauaaagcuauuuuaguuuugaugg

SEQ ID NO: 382370 - RNA, 32 nt, Homo Sapiens
uagacccuuacucuuuuuguuuguuuuuugaa

SEQ ID NO: 382371 - RNA, 32 nt, Homo Sapiens
uaauuagaaaucaacaguuugaugaguuuuuu

SEQ ID NO: 382372 - RNA, 32 nt, Homo Sapiens
auaguaugucguguguaguggaugccaguaga

SEQ ID NO: 382373 - RNA, 32 nt, Homo Sapiens
gcgguguauaaaaacuaaugugaguuuaauuu

SEQ ID NO: 382374 - RNA, 31 nt, Homo Sapiens
uuccugagaggugacgccugaguugagucua

SEQ ID NO: 382375 - RNA, 32 nt, Homo Sapiens
guuuucuccgguucgggagagagacggagucc

SEQ ID NO: 382376 - RNA, 32 nt, Homo Sapiens
caugcacaaccacccagcaucuuucuuuguga

SEQ ID NO: 382377 - RNA, 32 nt, Homo Sapiens
aaguuuuacuuuuauaaagaugguguccggaa

SEQ ID NO: 382378 - RNA, 32 nt, Homo Sapiens
accguggacaaucauuucuacaugucaaagaa

SEQ ID NO: 382379 - RNA, 28 nt, Homo Sapiens
aauauggucagugugcuuuuugaaaggg

SEQ ID NO: 382380 - RNA, 32 nt, Homo Sapiens
aagaugaaggggcccaugagccaaggaaugcc

SEQ ID NO: 382381 - RNA, 32 nt, Homo Sapiens
cagguggauaagaaggugaaaagggggucccu

SEQ ID NO: 382382 - RNA, 32 nt, Homo Sapiens
aucggguuuaccuuaagcuucucuagugaggc

SEQ ID NO: 382383 - RNA, 32 nt, Homo Sapiens
ccgucaauuacaucugguauuuguacacagag

SEQ ID NO: 382384 - RNA, 32 nt, Homo Sapiens
gcaggcaagcuggcccuuggugggccucgccc

SEQ ID NO: 382385 - RNA, 32 nt, Homo Sapiens
ucuuucgcaccaagagcugcaacgguggcucc

SEQ ID NO: 382386 - RNA, 32 nt, Homo Sapiens
acgggaaaucauagaccuuuugauuuuaucuu

SEQ ID NO: 382387 - RNA, 32 nt, Homo Sapiens
ucacccugucuucgccuguccccaccccaagc

SEQ ID NO: 382388 - RNA, 32 nt, Homo Sapiens
ggaccugcugucauccccaucuguggccuggg

SEQ ID NO: 382389 - RNA, 32 nt, Homo Sapiens
cgccggaggaggagccgcgggcaacgagguuu

SEQ ID NO: 382390 - RNA, 32 nt, Homo Sapiens
caguuaaguauuuuguaacccguuacacugug

SEQ ID NO: 382391 - RNA, 32 nt, Homo Sapiens
ugcgugcugagcugggccgccggcccgggugg

SEQ ID NO: 382392 - RNA, 32 nt, Homo Sapiens
acgggugguuugggggugcuaucaggguaaca

SEQ ID NO: 382393 - RNA, 32 nt, Homo Sapiens
cccugaggcccugaggguggaaguggacacgu

SEQ ID NO: 382394 - RNA, 32 nt, Homo Sapiens
uuuaucaaaaauuuuauaaacacagccuuucu

SEQ ID NO: 382395 - RNA, 32 nt, Homo Sapiens
cgccggcugccgcgcagacccagcugcguccu

SEQ ID NO: 382396 - RNA, 32 nt, Homo Sapiens
uaaauuuuggaagaauucaugaugcuaguucu

SEQ ID NO: 382397 - RNA, 32 nt, Homo Sapiens
ggcaaacagcaggcugugugcacggauuacua

SEQ ID NO: 382398 - RNA, 30 nt, Homo Sapiens
acucuuuuucugcagacagaagcuucgucg

SEQ ID NO: 382399 - RNA, 32 nt, Homo Sapiens
gaaaauauuccagaucccuccuccuccccgca

SEQ ID NO: 382400 - RNA, 32 nt, Homo Sapiens
acagaugcugggcugggacauggcauccugca

SEQ ID NO: 382401 - RNA, 32 nt, Homo Sapiens
cuggcccagcccagccagacagaguguggaca

SEQ ID NO: 382402 - RNA, 32 nt, Homo Sapiens
cucuuguguagauugucucuaaacaaugugug

SEQ ID NO: 382403 - RNA, 32 nt, Homo Sapiens
agugggccaccauaucuggaaacuacagucua

SEQ ID NO: 382404 - RNA, 32 nt, Homo Sapiens
aucuuuccccuucucccuucucucccagcaga

SEQ ID NO: 382405 - RNA, 32 nt, Homo Sapiens
uccccuuggcugugaggccccuggacaagcag

SEQ ID NO: 382406 - RNA, 32 nt, Homo Sapiens
acaggguuucuccaugcuggacaggcuggucu

SEQ ID NO: 382407 - RNA, 29 nt, Homo Sapiens
aauugucugaagauucuguugggaggaau

SEQ ID NO: 382408 - RNA, 32 nt, Homo Sapiens
accacuauugaacuauacuauuucauauaauu

SEQ ID NO: 382409 - RNA, 32 nt, Homo Sapiens
uuggacccaggagaguggaagagagauuggga

SEQ ID NO: 382410 - RNA, 32 nt, Homo Sapiens
aggccgcacugucagcuggccgguccaagccu

SEQ ID NO: 382411 - RNA, 32 nt, Homo Sapiens
gagcuacaacgcgguucggauuuggcgggggu

SEQ ID NO: 382412 - RNA, 32 nt, Homo Sapiens
ccgucucuacuaaaaauacaaacaaaauuagc

SEQ ID NO: 382413 - RNA, 32 nt, Homo Sapiens
cccuccccauggccgggagcgggccgcggcga

SEQ ID NO: 382414 - RNA, 32 nt, Homo Sapiens
uucuuauugaucuuuaaagaugugcuaaauga

SEQ ID NO: 382415 - RNA, 32 nt, Homo Sapiens
caaguucucugccugcaaaaccuggggaccag

SEQ ID NO: 382416 - RNA, 32 nt, Homo Sapiens
cuccugccagcucugucacccuggccaccacc

SEQ ID NO: 382417 - RNA, 32 nt, Homo Sapiens
gagagugugcgcgaccccggagccacgugcca

SEQ ID NO: 382418 - RNA, 32 nt, Homo Sapiens
cguucccuccccggaccccccggacccgcucu

SEQ ID NO: 382419 - RNA, 32 nt, Homo Sapiens
aggcaaaggggaguaguucuugguaggugcag

SEQ ID NO: 382420 - RNA, 32 nt, Homo Sapiens
agaauccuaaaaugaaguuggauggaaaacuu

SEQ ID NO: 382421 - RNA, 32 nt, Homo Sapiens
gggagggaggcgggaccggccgcgucuccaug

SEQ ID NO: 382422 - RNA, 32 nt, Homo Sapiens
ggaccuuggcucagcucugccgccucagguag

SEQ ID NO: 382423 - RNA, 32 nt, Homo Sapiens
cugaagcucguaaagaugauguuguaacagug

SEQ ID NO: 382424 - RNA, 32 nt, Homo Sapiens
gccgucaagacuugaguucugccucgcuuccc

SEQ ID NO: 382425 - RNA, 32 nt, Homo Sapiens
ccugggguguaccccaccccuucccacuuuaa

SEQ ID NO: 382426 - RNA, 32 nt, Homo Sapiens
ccaccggccuccuggaggaggguuggauaccu

SEQ ID NO: 382427 - RNA, 32 nt, Homo Sapiens
caucggacuuuuauugguccauuugaaaggcc

SEQ ID NO: 382428 - RNA, 32 nt, Homo Sapiens
uuaagaauauaaacuguaaauuuugucuuaaa

SEQ ID NO: 382429 - RNA, 32 nt, Homo Sapiens
ggcugcaggggaagaaagaacaugaccgggag

SEQ ID NO: 382430 - RNA, 32 nt, Homo Sapiens
cuuaccugauuauucuuacaaguuuuaaguug

SEQ ID NO: 382431 - RNA, 32 nt, Homo Sapiens
cgcuccucccggcccgagccugcccuacccgg

SEQ ID NO: 382432 - RNA, 32 nt, Homo Sapiens
cugcugaaucaucauaucuacuauauaugacu

SEQ ID NO: 382433 - RNA, 32 nt, Homo Sapiens
gaauguaaaguauauaugaugucauuaauacu

SEQ ID NO: 382434 - RNA, 32 nt, Homo Sapiens
ccguuuuucuucauuguguuucaguuacugua

SEQ ID NO: 382435 - RNA, 32 nt, Homo Sapiens
uccauuucgugccgcuuucccccuucaagaug

SEQ ID NO: 382436 - RNA, 32 nt, Homo Sapiens
gaucacagaccucagcaugggggugaccaggg

SEQ ID NO: 382437 - RNA, 32 nt, Homo Sapiens
ucuccagggcucuggggugucuggagcuaggc

SEQ ID NO: 382438 - RNA, 32 nt, Homo Sapiens
ccuaacucaaccccacagacaagcacgcacau

SEQ ID NO: 382439 - RNA, 32 nt, Homo Sapiens
ugggcauaaccacuguggcuucuugugcugca

SEQ ID NO: 382440 - RNA, 32 nt, Homo Sapiens
ugcggaggggagaggcagacguguccugcagc

SEQ ID NO: 382441 - RNA, 32 nt, Homo Sapiens
cagccuagauuucccugaaacucugggccagc

SEQ ID NO: 382442 - RNA, 32 nt, Homo Sapiens
caacagcccuguaagccagcuuucuucuauau

SEQ ID NO: 382443 - RNA, 31 nt, Homo Sapiens
augguccaaaauuguaauggagucuguauua

SEQ ID NO: 382444 - RNA, 32 nt, Homo Sapiens
agagcauggggcgaggggucagacaugagucu

SEQ ID NO: 382445 - RNA, 29 nt, Homo Sapiens
ggccucagggacgugaguuuaaccacagg

SEQ ID NO: 382446 - RNA, 32 nt, Homo Sapiens
gcccuucgcgucgagcuccuuuuuccccgccc

SEQ ID NO: 382447 - RNA, 32 nt, Homo Sapiens
uagaagagaaauuuaaaaguggaucaauccuc

SEQ ID NO: 382448 - RNA, 32 nt, Homo Sapiens
agacaucuuugccaagagacuguagcagccag

SEQ ID NO: 382449 - RNA, 32 nt, Homo Sapiens
cgagcggcccgcggagacccaggagcugccgg

SEQ ID NO: 382450 - RNA, 32 nt, Homo Sapiens
ccuccugaagagaaugucuuuguguguccgaa

SEQ ID NO: 382451 - RNA, 32 nt, Homo Sapiens
uaggacggacuguugcuauccaagcguuuggu

SEQ ID NO: 382452 - RNA, 32 nt, Homo Sapiens
gcuccaggacuacaguagaaaaguauagagca

SEQ ID NO: 382453 - RNA, 32 nt, Homo Sapiens
gacgcccugguggucacuguggcccuuuagaa

SEQ ID NO: 382454 - RNA, 32 nt, Homo Sapiens
ggcgcugcuauagcaacguccuggacgcccag

SEQ ID NO: 382455 - RNA, 32 nt, Homo Sapiens
acgguucccccagguguucucuaggacuaagg

SEQ ID NO: 382456 - RNA, 32 nt, Homo Sapiens
uaaaaaguccuagacaagagccaggagaggau

SEQ ID NO: 382457 - RNA, 32 nt, Homo Sapiens
cuguuacaaaugaaguugucuguacagacgac

SEQ ID NO: 382458 - RNA, 32 nt, Homo Sapiens
uuuccugucuccaaagugggccucugcacaag

SEQ ID NO: 382459 - RNA, 32 nt, Homo Sapiens
ugugcuggagucaccaucaucuuccucucccc

SEQ ID NO: 382460 - RNA, 32 nt, Homo Sapiens
auauaaugcuucaugauucauuuagggaccua

SEQ ID NO: 382461 - RNA, 32 nt, Homo Sapiens
uucucgcgcgcucuccuucuaaaucccgaaga

SEQ ID NO: 382462 - RNA, 32 nt, Homo Sapiens
ccucugaauauuaggugugaugucaacagcau

SEQ ID NO: 382463 - RNA, 32 nt, Homo Sapiens
ccugguggcuaacgggggacauccucauuacc

SEQ ID NO: 382464 - RNA, 32 nt, Homo Sapiens
gggagcucaguauuguguggacacuuacgaga

SEQ ID NO: 382465 - RNA, 32 nt, Homo Sapiens
gauguuuccagcugccaagugcucuuuguuac

SEQ ID NO: 382466 - RNA, 32 nt, Homo Sapiens
auccgccggcggcggcggcgccaggacaugga

SEQ ID NO: 382467 - RNA, 32 nt, Homo Sapiens
ucaagaagacgaggcccauuccccucaggcuc

SEQ ID NO: 382468 - RNA, 32 nt, Homo Sapiens
ccgacgugcgggacguggacaucuggggcgcc

SEQ ID NO: 382469 - RNA, 32 nt, Homo Sapiens
gcagugguguuuacuacuagcagugaaaacuu

SEQ ID NO: 382470 - RNA, 32 nt, Homo Sapiens
cucuagcuaggcuaaaauuugcuaaaugccuu

SEQ ID NO: 382471 - RNA, 32 nt, Homo Sapiens
ggccgaggaggagggcgcgggaggcggaggau

SEQ ID NO: 382472 - RNA, 32 nt, Homo Sapiens
cucaucccaagccaggaggguuucuggggagg

SEQ ID NO: 382473 - RNA, 32 nt, Homo Sapiens
cuugagaacuaaaagcuguuuaggaaaccuaa

SEQ ID NO: 382474 - RNA, 32 nt, Homo Sapiens
ucaaacuagagcagaauuguaugcuggaugug

SEQ ID NO: 382475 - RNA, 32 nt, Homo Sapiens
auuuguugauaaacauuuuaugcuugcauuua

SEQ ID NO: 382476 - RNA, 32 nt, Homo Sapiens
caaucccaaguccccaggaaacccaaucauga

SEQ ID NO: 382477 - RNA, 32 nt, Homo Sapiens
caacauaauaauuuauacacuucucccauuuu

SEQ ID NO: 382478 - RNA, 32 nt, Homo Sapiens
gcgggacugagccaaggaaggcguggggagcg

SEQ ID NO: 382479 - RNA, 32 nt, Homo Sapiens
ucaagugauccuccugccucagccuccuuagu

SEQ ID NO: 382480 - RNA, 32 nt, Homo Sapiens
gccuccucuuccacugucguccuuccucagag

SEQ ID NO: 382481 - RNA, 32 nt, Homo Sapiens
caucccugccagcugaugauguguguuacaug

SEQ ID NO: 382482 - RNA, 32 nt, Homo Sapiens
aaugacugacucgucccuuuggaccauagacg

SEQ ID NO: 382483 - RNA, 32 nt, Homo Sapiens
acugaaagcugauuucucugugagacugaaau

SEQ ID NO: 382484 - RNA, 32 nt, Homo Sapiens
aaauggaaaucaaauuauuaugcugaagggaa

SEQ ID NO: 382485 - RNA, 32 nt, Homo Sapiens
guguggaaagacaggagugagaucuggacuca

SEQ ID NO: 382486 - RNA, 32 nt, Homo Sapiens
auuagaagguauuuuuaccuucauacuggagu

SEQ ID NO: 382487 - RNA, 32 nt, Homo Sapiens
uggggagcacacucuuccauuaugcuuggcac

SEQ ID NO: 382488 - RNA, 32 nt, Homo Sapiens
uuauugugaugaugaagaacuaauuauauuug

SEQ ID NO: 382489 - RNA, 32 nt, Homo Sapiens
gcaacaaauaagauacauaaaacuacaaaaua

SEQ ID NO: 382490 - RNA, 32 nt, Homo Sapiens
aauguugaaaauaauguuuugaaaucaugacc

SEQ ID NO: 382491 - RNA, 32 nt, Homo Sapiens
auaauugcugaauaaagaaauaaaaucgacau

SEQ ID NO: 382492 - RNA, 32 nt, Homo Sapiens
cagacgcggcgcugcgcucggccaggccggca

SEQ ID NO: 382493 - RNA, 32 nt, Homo Sapiens
aacuccggccccaggcuggccugagcugccgg

SEQ ID NO: 382494 - RNA, 32 nt, Homo Sapiens
cccgcgcgcccggccccgacuccgggguaaag

SEQ ID NO: 382495 - RNA, 32 nt, Homo Sapiens
cuguugagggccacuuuuuuuuuauacugcac

SEQ ID NO: 382496 - RNA, 32 nt, Homo Sapiens
cccgcgccaugcggcgggagaggugcggcgcc

SEQ ID NO: 382497 - RNA, 32 nt, Homo Sapiens
cacccccacauucugaagauagagugaguucc

SEQ ID NO: 382498 - RNA, 32 nt, Homo Sapiens
uaaacaaguauuucuaaaagaaauauguacau

SEQ ID NO: 382499 - RNA, 32 nt, Homo Sapiens
cuguuucagaucuauuaauguagggaauuuuu

SEQ ID NO: 382500 - RNA, 32 nt, Homo Sapiens
cggacuggccaggccccgcgggccgggcucca

SEQ ID NO: 382501 - RNA, 32 nt, Homo Sapiens
uauaggucuauuuccugaacauuuucuugugu

SEQ ID NO: 382502 - RNA, 32 nt, Homo Sapiens
cucuuccccagcugcaaagacaauguugcucu

SEQ ID NO: 382503 - RNA, 32 nt, Homo Sapiens
gaagcagugucuaaaaauuagaucgguccuaa

SEQ ID NO: 382504 - RNA, 32 nt, Homo Sapiens
acugguuaaacauuaauauuuaccaaaguagg

SEQ ID NO: 382505 - RNA, 32 nt, Homo Sapiens
uggguuccucucuuuucuuuccaaauauccca

SEQ ID NO: 382506 - RNA, 32 nt, Homo Sapiens
ugggaauguaaauuaguucaaccauuguggaa

SEQ ID NO: 382507 - RNA, 32 nt, Homo Sapiens
uggaucauuuguuggcaguacauauuggcuga

SEQ ID NO: 382508 - RNA, 32 nt, Homo Sapiens
caucggcccgggguccgaggggcccgcugccc

SEQ ID NO: 382509 - RNA, 32 nt, Homo Sapiens
cagguuggauggggaaaggcuaauggggucag

SEQ ID NO: 382510 - RNA, 32 nt, Homo Sapiens
uuauggagucauuuuuacaauguaauuauuua

SEQ ID NO: 382511 - RNA, 32 nt, Homo Sapiens
gcgugacccagcugcggccggccagccaugga

SEQ ID NO: 382512 - RNA, 32 nt, Homo Sapiens
uaaaagauggggucuguaaaaucuuucuuucu

SEQ ID NO: 382513 - RNA, 32 nt, Homo Sapiens
guaagguuuuuaccaauuuauauucaagaaca

SEQ ID NO: 382514 - RNA, 32 nt, Homo Sapiens
gcccccuggacugauucccacccacgacucac

SEQ ID NO: 382515 - RNA, 32 nt, Homo Sapiens
uuuaaaaucugcaacauuucaucuggauucua

SEQ ID NO: 382516 - RNA, 32 nt, Homo Sapiens
ggacacaaaaguguuuuguaaacuauaaagua

SEQ ID NO: 382517 - RNA, 32 nt, Homo Sapiens
aggaugcugcggggcgguagcuccggcgcccc

SEQ ID NO: 382518 - RNA, 32 nt, Homo Sapiens
ggugccucagucuccuuccccuccccucgccu

SEQ ID NO: 382519 - RNA, 32 nt, Homo Sapiens
gaagcaaguucgguggacgccggcggcgcccu

SEQ ID NO: 382520 - RNA, 32 nt, Homo Sapiens
cccaccacagaaaagcacaaaccucugggaaa

SEQ ID NO: 382521 - RNA, 32 nt, Homo Sapiens
ccagggccccugccacugccucuucuuuuccc

SEQ ID NO: 382522 - RNA, 32 nt, Homo Sapiens
guuuacauauuuauauaugacuaccaagaugg

SEQ ID NO: 382523 - RNA, 32 nt, Homo Sapiens
cgccgcgcgccgggagcugcugagccuaccgc

SEQ ID NO: 382524 - RNA, 32 nt, Homo Sapiens
augaaaagugagaaaauauuugaaagggauua

SEQ ID NO: 382525 - RNA, 30 nt, Homo Sapiens
accuuccuggacugcaaaguguggaagccg

SEQ ID NO: 382526 - RNA, 31 nt, Homo Sapiens
cuuuuuaaaaagaaaagauauuaagccugcc

SEQ ID NO: 382527 - RNA, 32 nt, Homo Sapiens
cgaugucuauggcaauggucgccugguggaag

SEQ ID NO: 382528 - RNA, 32 nt, Homo Sapiens
accauccaguugcaggaaaacgagcuuaacac

SEQ ID NO: 382529 - RNA, 32 nt, Homo Sapiens
ucuuaagaauaaaauguugcucucugguuucg

SEQ ID NO: 382530 - RNA, 32 nt, Homo Sapiens
ucaaaacagcgaagaguaaugacaucgacugu

SEQ ID NO: 382531 - RNA, 32 nt, Homo Sapiens
augagacgccaccgugagaggccagguggcag

SEQ ID NO: 382532 - RNA, 32 nt, Homo Sapiens
gcggagccaagccccugcaccggugguccagg

SEQ ID NO: 382533 - RNA, 32 nt, Homo Sapiens
cccaggagccgggggacgacuucuucaacaug

SEQ ID NO: 382534 - RNA, 32 nt, Homo Sapiens
uuuauuccagcauucgaugcauuuuuauagaa

SEQ ID NO: 382535 - RNA, 32 nt, Homo Sapiens
gucauaaaauaaucauaaaauaauaaauugcc

SEQ ID NO: 382536 - RNA, 32 nt, Homo Sapiens
gaacauuuaauauuccacaauauauacgguuu

SEQ ID NO: 382537 - RNA, 32 nt, Homo Sapiens
accugaauaguuaauaacaucaaagauuguga

SEQ ID NO: 382538 - RNA, 32 nt, Homo Sapiens
cgaaucucuauuauuuuaugguauuuauugca

SEQ ID NO: 382539 - RNA, 32 nt, Homo Sapiens
ugagcccccaccccugccccagcuccaggacc

SEQ ID NO: 382540 - RNA, 32 nt, Homo Sapiens
cgaacagaacaaaacuagaccggguaugguag

SEQ ID NO: 382541 - RNA, 32 nt, Homo Sapiens
aauaagaaagcccuaaaauacuauuggagaga

SEQ ID NO: 382542 - RNA, 32 nt, Homo Sapiens
ggaagggugagcaggccuccucguccgagagu

SEQ ID NO: 382543 - RNA, 32 nt, Homo Sapiens
uuacaggcgugagccaccacgcccggccucuu

SEQ ID NO: 382544 - RNA, 32 nt, Homo Sapiens
gaccggaagggagauggugaaacugggagguu

SEQ ID NO: 382545 - RNA, 32 nt, Homo Sapiens
gggguucuguuucagagcauaaaaccuaaagg

SEQ ID NO: 382546 - RNA, 32 nt, Homo Sapiens
gaggcuucaugcggggacccggacagagcggg

SEQ ID NO: 382547 - RNA, 32 nt, Homo Sapiens
aaauuguugcaaacuaugcaucugagaaaggu

SEQ ID NO: 382548 - RNA, 32 nt, Homo Sapiens
gcaaaggaaguggguauaaacuaacaacuuug

SEQ ID NO: 382549 - RNA, 32 nt, Homo Sapiens
gaaggaugcugggagcuacagcaagaaagugg

SEQ ID NO: 382550 - RNA, 32 nt, Homo Sapiens
augugggagcagcaucucuaggcagcacaggg

SEQ ID NO: 382551 - RNA, 32 nt, Homo Sapiens
ccgccgcccguccacacccgccgccagcucac

SEQ ID NO: 382552 - RNA, 32 nt, Homo Sapiens
ggucugugcucucccugucucuaggucgcuga

SEQ ID NO: 382553 - RNA, 32 nt, Homo Sapiens
auauagaaaaacaaacagaaauaauauguugg

SEQ ID NO: 382554 - RNA, 32 nt, Homo Sapiens
uggaauauacagauguacuaagauagaaagaa

SEQ ID NO: 382555 - RNA, 32 nt, Homo Sapiens
cguguuuguaaaaauguagagcacaauggaau

SEQ ID NO: 382556 - RNA, 32 nt, Homo Sapiens
acuuccggccgccuccggaugcggggucaggg

SEQ ID NO: 382557 - RNA, 32 nt, Homo Sapiens
gguuuugaaaugugagcacgugagauuuggag

SEQ ID NO: 382558 - RNA, 32 nt, Homo Sapiens
aaaaaauaaaaauaaaaacccugaauaucuuc

SEQ ID NO: 382559 - RNA, 32 nt, Homo Sapiens
uaauuucacuuuccucuuccaggggcaaaggc

SEQ ID NO: 382560 - RNA, 32 nt, Homo Sapiens
ucccuggagacuucaccccagccccacagacu

SEQ ID NO: 382561 - RNA, 32 nt, Homo Sapiens
cugcgcccgggcgcccccagcggguuccggga

SEQ ID NO: 382562 - RNA, 32 nt, Homo Sapiens
aguugcuucuaaaaauguaggcgccuauaggu

SEQ ID NO: 382563 - RNA, 32 nt, Homo Sapiens
gcuccguccuucccucagcagccgcggcgcgc

SEQ ID NO: 382564 - RNA, 32 nt, Homo Sapiens
uuuacacaaaauuguguagauaccuugucucu

SEQ ID NO: 382565 - RNA, 32 nt, Homo Sapiens
agccuuauaacuccucuuaacauaugcuuacc

SEQ ID NO: 382566 - RNA, 32 nt, Homo Sapiens
aaugccaaggcugugcuucuauuaucugauac

SEQ ID NO: 382567 - RNA, 32 nt, Homo Sapiens
aauaucuugccaguuuuguuucguuucuccuu

SEQ ID NO: 382568 - RNA, 32 nt, Homo Sapiens
caucugggcuccuuggucuucccugccccucc

SEQ ID NO: 382569 - RNA, 32 nt, Homo Sapiens
guucugcuguuuagccucuuugguuucuguac

SEQ ID NO: 382570 - RNA, 32 nt, Homo Sapiens
uggagacuggcgggcgggagcgaaaggagguc

SEQ ID NO: 382571 - RNA, 32 nt, Homo Sapiens
guggauugauaccauggcuguagcugaugcaa

SEQ ID NO: 382572 - RNA, 32 nt, Homo Sapiens
acaucacuggggaaggagugggacaucacgac

SEQ ID NO: 382573 - RNA, 32 nt, Homo Sapiens
cagacuggaagcaggucuuugaggaaacaguc

SEQ ID NO: 382574 - RNA, 32 nt, Homo Sapiens
uaguacuacauauauauaacuauauauaguac

SEQ ID NO: 382575 - RNA, 30 nt, Homo Sapiens
gaaaaggaguugcuugaugugagagugaaa

SEQ ID NO: 382576 - RNA, 32 nt, Homo Sapiens
cgggacagggagaucauguuucacguuuccac

SEQ ID NO: 382577 - RNA, 32 nt, Homo Sapiens
cuaaaauauaaaagaugaauauacccauauua

SEQ ID NO: 382578 - RNA, 32 nt, Homo Sapiens
uuugcggaaucaccauggcggcugggacccug

SEQ ID NO: 382579 - RNA, 28 nt, Homo Sapiens
gcaaacucuguaaauauguguuuaaaca

SEQ ID NO: 382580 - RNA, 32 nt, Homo Sapiens
guuggggugcuugggugaucucugcuucauua

SEQ ID NO: 382581 - RNA, 32 nt, Homo Sapiens
gccucaugcccacuuuagcagauaguacuguu

SEQ ID NO: 382582 - RNA, 32 nt, Homo Sapiens
gauuccgcgggaagggcccugggaccucacac

SEQ ID NO: 382583 - RNA, 32 nt, Homo Sapiens
agcuuccccccuccccgggagccaggugggaa

SEQ ID NO: 382584 - RNA, 32 nt, Homo Sapiens
uccugguguugggaauucugugcccuaaagaa

SEQ ID NO: 382585 - RNA, 32 nt, Homo Sapiens
ucaucuuggccaugaucuucugggacucacca

SEQ ID NO: 382586 - RNA, 32 nt, Homo Sapiens
ucaaaguuaaauuuaugaugaaugacuaacug

SEQ ID NO: 382587 - RNA, 32 nt, Homo Sapiens
gucgccgauauuuggaguucuuacaacauggc

SEQ ID NO: 382588 - RNA, 32 nt, Homo Sapiens
ggagccgggcgucuacagaccgcggccaccuu

SEQ ID NO: 382589 - RNA, 32 nt, Homo Sapiens
uccuucccugggcugugcuaccuggguccuuu

SEQ ID NO: 382590 - RNA, 32 nt, Homo Sapiens
cauguacagcuguggucugaauguguguguuu

SEQ ID NO: 382591 - RNA, 32 nt, Homo Sapiens
agggaagugacuuugcuacaaauaauguugcu

SEQ ID NO: 382592 - RNA, 32 nt, Homo Sapiens
aauaggcucccgugcuuuuuuaauguuauugc

SEQ ID NO: 382593 - RNA, 32 nt, Homo Sapiens
cagcuucggaagagaagaaugaugugcagagu

SEQ ID NO: 382594 - RNA, 32 nt, Homo Sapiens
uguguaaaguagaagcagaacaaaaugaauuu

SEQ ID NO: 382595 - RNA, 32 nt, Homo Sapiens
ucauacagaaauaaaacuuauaugaagaguaa

SEQ ID NO: 382596 - RNA, 32 nt, Homo Sapiens
uuuucaacuccgcuggagccagugcccaggag

SEQ ID NO: 382597 - RNA, 32 nt, Homo Sapiens
cagcuccauggcaaccagcaucagcuuuuccu

SEQ ID NO: 382598 - RNA, 32 nt, Homo Sapiens
uuaauagcauuaaaagugcaauuacugucaaa

SEQ ID NO: 382599 - RNA, 32 nt, Homo Sapiens
gaagauacaaauauaugguagcuauuguuuaa

SEQ ID NO: 382600 - RNA, 32 nt, Homo Sapiens
cugccgcacugacuacggcugcugccgccuuu

SEQ ID NO: 382601 - RNA, 32 nt, Homo Sapiens
cugaauauauugcaggucaugcucccaugccc

SEQ ID NO: 382602 - RNA, 32 nt, Homo Sapiens
uugucccaaguguggaucauggccaaagcagc

SEQ ID NO: 382603 - RNA, 32 nt, Homo Sapiens
cagcucggacugugaacuccacugcagccgua

SEQ ID NO: 382604 - RNA, 32 nt, Homo Sapiens
aucaucacguauguuauacaaccuucauuuaa

SEQ ID NO: 382605 - RNA, 32 nt, Homo Sapiens
ucuaugggcuaaugaagcuggugcugcccagu

SEQ ID NO: 382606 - RNA, 32 nt, Homo Sapiens
gcucuuccucaauuaauuuuuguuguuaaugu

SEQ ID NO: 382607 - RNA, 32 nt, Homo Sapiens
uggcgucuggcccuuccugccguuuccaaggc

SEQ ID NO: 382608 - RNA, 32 nt, Homo Sapiens
gucuggguagaguauuacacguugcauacuac

SEQ ID NO: 382609 - RNA, 32 nt, Homo Sapiens
uccugauuuuuuucuuuuuuuugguuuauguc

SEQ ID NO: 382610 - RNA, 32 nt, Homo Sapiens
augcauaaagugccuuguggacacgggggagu

SEQ ID NO: 382611 - RNA, 32 nt, Homo Sapiens
ggaguuuuggggauugaauagauuucaccugg

SEQ ID NO: 382612 - RNA, 26 nt, Homo Sapiens
uaugagccaaaccagggauuuacagg

SEQ ID NO: 382613 - RNA, 32 nt, Homo Sapiens
guuauuuuuuggauguuccugagugguaucuu

SEQ ID NO: 382614 - RNA, 32 nt, Homo Sapiens
uauaaaagaaauguaucacuauaaaaaauuac

SEQ ID NO: 382615 - RNA, 32 nt, Homo Sapiens
gaugacuggaugucucuguacuguauguaucu

SEQ ID NO: 382616 - RNA, 32 nt, Homo Sapiens
uugcgagggcuuuggcaugcucugccacucuc

SEQ ID NO: 382617 - RNA, 29 nt, Homo Sapiens
uagcugaugaagauuuugaaagaguucau

SEQ ID NO: 382618 - RNA, 32 nt, Homo Sapiens
aacaucuugggaauuugagauuuaauaaguuu

SEQ ID NO: 382619 - RNA, 31 nt, Homo Sapiens
caguuugugaugacucucagaagccuuuugg

SEQ ID NO: 382620 - RNA, 32 nt, Homo Sapiens
cgcucucaguuuagggcucuguagaagauaca

SEQ ID NO: 382621 - RNA, 32 nt, Homo Sapiens
aauggacaacuugacggagauuugcccuugac

SEQ ID NO: 382622 - RNA, 31 nt, Homo Sapiens
uuuuucugcgcuuuucaguauguauguauuu

SEQ ID NO: 382623 - RNA, 32 nt, Homo Sapiens
gcucuacuuuugcugcauuaauuaaugacacc

SEQ ID NO: 382624 - RNA, 32 nt, Homo Sapiens
ggaaaagcucacgccucggccugggagccugg

SEQ ID NO: 382625 - RNA, 32 nt, Homo Sapiens
uucaccccaacaccucaccucccccaggacau

SEQ ID NO: 382626 - RNA, 32 nt, Homo Sapiens
cucugaaaaaaguaagcagaguuauuuguucc

SEQ ID NO: 382627 - RNA, 32 nt, Homo Sapiens
ggcugggggccguggauccugauuccagcugu

SEQ ID NO: 382628 - RNA, 32 nt, Homo Sapiens
gccgugcgcgcccucuggugucgccucucaca

SEQ ID NO: 382629 - RNA, 32 nt, Homo Sapiens
ccacccccauucucagcuccuccuucgcggcg

SEQ ID NO: 382630 - RNA, 32 nt, Homo Sapiens
ggaacuaagggguaucucugcuacaggaaugg

SEQ ID NO: 382631 - RNA, 32 nt, Homo Sapiens
acgggccccgccgcgcgccgcgagcacucacc

SEQ ID NO: 382632 - RNA, 32 nt, Homo Sapiens
cccagccucaggugaucugcccgccucggucu

SEQ ID NO: 382633 - RNA, 32 nt, Homo Sapiens
acgaagcccccuccuguauugacagcugggaa

SEQ ID NO: 382634 - RNA, 32 nt, Homo Sapiens
gggggugaggggcuccgggucacugcuguaua

SEQ ID NO: 382635 - RNA, 32 nt, Homo Sapiens
gcccggaaacuccacauccugugggaccuggg

SEQ ID NO: 382636 - RNA, 32 nt, Homo Sapiens
ucaaagcaccagcucucucgcuccauccuccc

SEQ ID NO: 382637 - RNA, 32 nt, Homo Sapiens
uucgcacgcggcggccggcgcgcuggaccgag

SEQ ID NO: 382638 - RNA, 32 nt, Homo Sapiens
gaggcaggggcacacggcgggaggaagggcuc

SEQ ID NO: 382639 - RNA, 32 nt, Homo Sapiens
aggcgccgccgggagaggccgcgacggagcuc

SEQ ID NO: 382640 - RNA, 32 nt, Homo Sapiens
cggcuacucagcagcccuccucacccgucugg

SEQ ID NO: 382641 - RNA, 32 nt, Homo Sapiens
ccaccuccccccaaaaaauagcucacaagggg

SEQ ID NO: 382642 - RNA, 32 nt, Homo Sapiens
ccaucuuggaaaagagaaaaacaauggaguua

SEQ ID NO: 382643 - RNA, 32 nt, Homo Sapiens
gaauggugagggugggagucaggagacaagac

SEQ ID NO: 382644 - RNA, 32 nt, Homo Sapiens
guccuugagcgcggaggggcgagcucgccggc

SEQ ID NO: 382645 - RNA, 32 nt, Homo Sapiens
aucugccuugugccuggcacucugccggugcc

SEQ ID NO: 382646 - RNA, 32 nt, Homo Sapiens
uuuuuauugacaaacaagaucauaguauuuca

SEQ ID NO: 382647 - RNA, 32 nt, Homo Sapiens
gugccuggcgccccugccccccgccccucucc

SEQ ID NO: 382648 - RNA, 32 nt, Homo Sapiens
augaaaaagcaucaaagcuagccagaagauuu

SEQ ID NO: 382649 - RNA, 32 nt, Homo Sapiens
cucuccacucagaugugggacaucagucgcca

SEQ ID NO: 382650 - RNA, 32 nt, Homo Sapiens
cagcuccucccugugcccccagccucagccca

SEQ ID NO: 382651 - RNA, 32 nt, Homo Sapiens
ggugccggagccccggccugccuggcccugug

SEQ ID NO: 382652 - RNA, 32 nt, Homo Sapiens
ucaauauaaaauguauuugugcaaauucuagu

SEQ ID NO: 382653 - RNA, 32 nt, Homo Sapiens
auggaugagugucaaagugaauuugauuugua

SEQ ID NO: 382654 - RNA, 32 nt, Homo Sapiens
cuagugggugaggcugaacaccaagagccuug

SEQ ID NO: 382655 - RNA, 32 nt, Homo Sapiens
cugcggcgaagggggcgugcgcggcgauccgc

SEQ ID NO: 382656 - RNA, 32 nt, Homo Sapiens
agucuucaugcugcccugcugcugcuggaagg

SEQ ID NO: 382657 - RNA, 32 nt, Homo Sapiens
ucuagucuacuucaaaauuuuuuacacguuug

SEQ ID NO: 382658 - RNA, 32 nt, Homo Sapiens
uggcugaggagcuacuagaaaagcugagugga

SEQ ID NO: 382659 - RNA, 32 nt, Homo Sapiens
ccgcgcgcacagcccgcacugccccacgccgc

SEQ ID NO: 382660 - RNA, 32 nt, Homo Sapiens
cccgggccgggcggcagcaugcggagcggcga

SEQ ID NO: 382661 - RNA, 32 nt, Homo Sapiens
ugcuggagugaugugguuuucuaauuucuuug

SEQ ID NO: 382662 - RNA, 29 nt, Homo Sapiens
ggcauucagggacagaggagccugggcau

SEQ ID NO: 382663 - RNA, 32 nt, Homo Sapiens
gcacuucugggcuucagcacacaucagugugg

SEQ ID NO: 382664 - RNA, 29 nt, Homo Sapiens
agaucuugggaacagaggaugcuacguga

SEQ ID NO: 382665 - RNA, 32 nt, Homo Sapiens
cccggcccgucucgcgaacucgcgguggucgc

SEQ ID NO: 382666 - RNA, 32 nt, Homo Sapiens
uccugccccccucucugcccuagggaugggca

SEQ ID NO: 382667 - RNA, 32 nt, Homo Sapiens
gagucaagaaugcaugugcuuaaggauuccaa

SEQ ID NO: 382668 - RNA, 32 nt, Homo Sapiens
gcuguuuuccucugauucuccucggccgacca

SEQ ID NO: 382669 - RNA, 32 nt, Homo Sapiens
ucucaucuucuuuuccaguagaaaauaguuug

SEQ ID NO: 382670 - RNA, 32 nt, Homo Sapiens
gcauuguccaaaauccccuguuguguggacuu

SEQ ID NO: 382671 - RNA, 32 nt, Homo Sapiens
cccuucgugcgcggggggcggcgagggucuuc

SEQ ID NO: 382672 - RNA, 32 nt, Homo Sapiens
gaucaccugccuuuuuggcugcugcaccugaa

SEQ ID NO: 382673 - RNA, 32 nt, Homo Sapiens
ucucaaggccccaagccacacuucacaugagu

SEQ ID NO: 382674 - RNA, 32 nt, Homo Sapiens
cuuagugccgauuccgcccacagagaguccug

SEQ ID NO: 382675 - RNA, 32 nt, Homo Sapiens
cuccuucuggcucaggugaaauccaugcccuu

SEQ ID NO: 382676 - RNA, 32 nt, Homo Sapiens
gcugagggcuaaaacuuuuuucacuuuucuuc

SEQ ID NO: 382677 - RNA, 32 nt, Homo Sapiens
uccugugucucaccauucccaagccccuggcc

SEQ ID NO: 382678 - RNA, 32 nt, Homo Sapiens
agguugcagugaggugagaucgugccauugca

SEQ ID NO: 382679 - RNA, 32 nt, Homo Sapiens
acguuuaacaagguuccccagugucccuagaa

SEQ ID NO: 382680 - RNA, 32 nt, Homo Sapiens
ucaguucauucauccuucucuccuuuccgcuc

SEQ ID NO: 382681 - RNA, 32 nt, Homo Sapiens
uggcacuauuccuucaucuacugugaagugaa

SEQ ID NO: 382682 - RNA, 32 nt, Homo Sapiens
cuacaaauagaaaagaauauacauaaggcacu

SEQ ID NO: 382683 - RNA, 32 nt, Homo Sapiens
cccaggcauucgagacuagccuggacagcaug

SEQ ID NO: 382684 - RNA, 32 nt, Homo Sapiens
gaaucagaccuuaaaaugcuuaccaacauuau

SEQ ID NO: 382685 - RNA, 32 nt, Homo Sapiens
uuuuuucuuuugcuauuguuaccacuugucac

SEQ ID NO: 382686 - RNA, 32 nt, Homo Sapiens
uguuccugggagcccuggccaggccgugugca

SEQ ID NO: 382687 - RNA, 32 nt, Homo Sapiens
ccccagaccugccugccuuccugacuucuguu

SEQ ID NO: 382688 - RNA, 32 nt, Homo Sapiens
auuaaauagaaauaaugucauuugaaugaaaa

SEQ ID NO: 382689 - RNA, 32 nt, Homo Sapiens
gaaguucuggcccauugcacaaacacuuggaa

SEQ ID NO: 382690 - RNA, 32 nt, Homo Sapiens
uucaaauaugacucccagaaggaggcagagcu

SEQ ID NO: 382691 - RNA, 32 nt, Homo Sapiens
agucuuuguuuuauguuuuuaaauacagaaau

SEQ ID NO: 382692 - RNA, 32 nt, Homo Sapiens
uacgauguucuuccagggcacugggggcugug

SEQ ID NO: 382693 - RNA, 32 nt, Homo Sapiens
uagggcaccaaaacuugggauuaaacacuucc

SEQ ID NO: 382694 - RNA, 32 nt, Homo Sapiens
caggcauuucucucuggugguucuggaggcug

SEQ ID NO: 382695 - RNA, 32 nt, Homo Sapiens
cagcggagucccgugcgcccuguggugacagc

SEQ ID NO: 382696 - RNA, 30 nt, Homo Sapiens
ggcccuggugaggggcugggucccgggugc

SEQ ID NO: 382697 - RNA, 32 nt, Homo Sapiens
auucuaguggauaaaaauucaacguauauuua

SEQ ID NO: 382698 - RNA, 32 nt, Homo Sapiens
auaaaacaaaggaaacaacaaaauggaaaggc

SEQ ID NO: 382699 - RNA, 32 nt, Homo Sapiens
uaguaugcaccuguaacaauaacugaguguug

SEQ ID NO: 382700 - RNA, 32 nt, Homo Sapiens
ccucgcuaaaagacaguagauaugcaacgccu

SEQ ID NO: 382701 - RNA, 32 nt, Homo Sapiens
ugggcacacacaggcaucgggcaccugcaugg

SEQ ID NO: 382702 - RNA, 32 nt, Homo Sapiens
acacccagggcagcugccaaucagaaaugcaa

SEQ ID NO: 382703 - RNA, 32 nt, Homo Sapiens
ggggaauaaaaagccaacaguaagccccagga

SEQ ID NO: 382704 - RNA, 32 nt, Homo Sapiens
uuauuuuaaauuauaaggacugcaugguaauu

SEQ ID NO: 382705 - RNA, 32 nt, Homo Sapiens
ugcagcgggacgggacuggcccugcccagcca

SEQ ID NO: 382706 - RNA, 32 nt, Homo Sapiens
uucccgagcuccggcgucgucccggccacgcu

SEQ ID NO: 382707 - RNA, 32 nt, Homo Sapiens
auauucuuaaaauggcaaaaaagaaaagaaaa

SEQ ID NO: 382708 - RNA, 32 nt, Homo Sapiens
cgggcguggggccuggcuggcggccgcugcag

SEQ ID NO: 382709 - RNA, 32 nt, Homo Sapiens
aagggugcacccacccauuucugugagagaga

SEQ ID NO: 382710 - RNA, 32 nt, Homo Sapiens
aaaugaugaugaugccuauuuaaacucaccau

SEQ ID NO: 382711 - RNA, 31 nt, Homo Sapiens
uuaguucagcgcagcgacucggggaccugga

SEQ ID NO: 382712 - RNA, 32 nt, Homo Sapiens
auuaccuuguauaacuaacaagcacaguuauu

SEQ ID NO: 382713 - RNA, 32 nt, Homo Sapiens
uagguauuuccugaaaguguauacaaauuauu

SEQ ID NO: 382714 - RNA, 32 nt, Homo Sapiens
ugggcugaggacuggaacauucuguggcaagc

SEQ ID NO: 382715 - RNA, 32 nt, Homo Sapiens
cuguccauuaaaccucuuuccuuuauaaauua

SEQ ID NO: 382716 - RNA, 32 nt, Homo Sapiens
aaacaauaaaaauuaacugagugugguggcau

SEQ ID NO: 382717 - RNA, 32 nt, Homo Sapiens
uuguuuauacacaacuuugcaaauuauuuauu

SEQ ID NO: 382718 - RNA, 32 nt, Homo Sapiens
ccucaccagacaaacucugugcuccuccaaaa

SEQ ID NO: 382719 - RNA, 32 nt, Homo Sapiens
auguuuaaaaauuauuuagauugauucucccc

SEQ ID NO: 382720 - RNA, 32 nt, Homo Sapiens
guaucaucccuaugccuuuccauccugguaca

SEQ ID NO: 382721 - RNA, 32 nt, Homo Sapiens
accuguucuuaaccagaaaacccacugacuuu

SEQ ID NO: 382722 - RNA, 32 nt, Homo Sapiens
caauguuuugacaucaaguacuauuuuccuuc

SEQ ID NO: 382723 - RNA, 32 nt, Homo Sapiens
cuuugccccuuuauaauagauuuuuuccccca

SEQ ID NO: 382724 - RNA, 29 nt, Homo Sapiens
cuguccauauguauuuguaaauagguugu

SEQ ID NO: 382725 - RNA, 32 nt, Homo Sapiens
cagcgggcucugaccuggccccugccccacca

SEQ ID NO: 382726 - RNA, 32 nt, Homo Sapiens
uacuucugcuuuacaggcuuuauuuaaaucug

SEQ ID NO: 382727 - RNA, 32 nt, Homo Sapiens
uagaaauacuuauauauacaauuccacacugg

SEQ ID NO: 382728 - RNA, 32 nt, Homo Sapiens
agcugaagccgaaguaugaacaguccauuuug

SEQ ID NO: 382729 - RNA, 32 nt, Homo Sapiens
ccugccauuucccuuccacuccuccuuucugg

SEQ ID NO: 382730 - RNA, 32 nt, Homo Sapiens
uggagcugcucaacuuagagugaggcaggaag

SEQ ID NO: 382731 - RNA, 32 nt, Homo Sapiens
agaagguagagauaaagacacuuuuucaaaaa

SEQ ID NO: 382732 - RNA, 32 nt, Homo Sapiens
uguaauucaaccaccuucggcacaucucagga

SEQ ID NO: 382733 - RNA, 32 nt, Homo Sapiens
gggagaaggggacucccaccccugcccugccc

SEQ ID NO: 382734 - RNA, 32 nt, Homo Sapiens
aucuuaaaaaagcagaauauaaaaaguccaaa

SEQ ID NO: 382735 - RNA, 32 nt, Homo Sapiens
cauuauguaaacauuuacaauuagguuacauu

SEQ ID NO: 382736 - RNA, 32 nt, Homo Sapiens
aauguacaaaugcuagcaacaacugucucccg

SEQ ID NO: 382737 - RNA, 32 nt, Homo Sapiens
augccacggaaauccuuguuggcugcccccga

SEQ ID NO: 382738 - RNA, 32 nt, Homo Sapiens
aaggagagagaugccucaggcuucagaccuua

SEQ ID NO: 382739 - RNA, 32 nt, Homo Sapiens
cagguccuaccuucugccuugcuuugguuucu

SEQ ID NO: 382740 - RNA, 32 nt, Homo Sapiens
ugcggggaagcagugauggcaaccuuucaccg

SEQ ID NO: 382741 - RNA, 32 nt, Homo Sapiens
acagcgguggugcccaggcagcuccugccccc

SEQ ID NO: 382742 - RNA, 32 nt, Homo Sapiens
auuugaaugcaugugaaaucgacgacuuucuc

SEQ ID NO: 382743 - RNA, 32 nt, Homo Sapiens
cuuucaggucccugguuacuuuucucaaaggc

SEQ ID NO: 382744 - RNA, 32 nt, Homo Sapiens
ccagccuggccuggcucuggccugguccuagg

SEQ ID NO: 382745 - RNA, 32 nt, Homo Sapiens
cuaaaaauuaaguuuaaacaugcugaaaauuc

SEQ ID NO: 382746 - RNA, 32 nt, Homo Sapiens
uuuuaaauacucauggagaaaguguguguuug

SEQ ID NO: 382747 - RNA, 32 nt, Homo Sapiens
ggcccagcagugagcgcggcugcccgacgcuu

SEQ ID NO: 382748 - RNA, 32 nt, Homo Sapiens
ggcaucaggaggaggacugcgccaacggcugc

SEQ ID NO: 382749 - RNA, 32 nt, Homo Sapiens
aggacaugcaauaaaauuuaaaaaauaaauaa

SEQ ID NO: 382750 - RNA, 32 nt, Homo Sapiens
uagcggccggguggagguggggagggaagacg

SEQ ID NO: 382751 - RNA, 32 nt, Homo Sapiens
cccuuuuguuuugaagaguugaaucuucuguu

SEQ ID NO: 382752 - RNA, 32 nt, Homo Sapiens
ggcaguacugucagaaauuucuuugagcugug

SEQ ID NO: 382753 - RNA, 32 nt, Homo Sapiens
uuaccuacagcuuuguacucagauaauuuaua

SEQ ID NO: 382754 - RNA, 32 nt, Homo Sapiens
gguacaaguggcaaccugcuuccauggccgug

SEQ ID NO: 382755 - RNA, 32 nt, Homo Sapiens
caaccaucuauuuauucacuucuuuuuaaagu

SEQ ID NO: 382756 - RNA, 32 nt, Homo Sapiens
gaauugcauuauguucucugguaacacguaga

SEQ ID NO: 382757 - RNA, 32 nt, Homo Sapiens
gggaacuuguuuuuaaauccaaagacuugaac

SEQ ID NO: 382758 - RNA, 32 nt, Homo Sapiens
gucguauuuuuuacuuuugucuuguauaugua

SEQ ID NO: 382759 - RNA, 32 nt, Homo Sapiens
cuaccuguuuaaaaucuugggaaucuacuuga

SEQ ID NO: 382760 - RNA, 32 nt, Homo Sapiens
cagaaaagauaaauacuuggcuaaucuuccau

SEQ ID NO: 382761 - RNA, 32 nt, Homo Sapiens
uucuauuuccccuuuauuaucauggccuugau

SEQ ID NO: 382762 - RNA, 32 nt, Homo Sapiens
auggccuuggguacaucacucagccuuucugg

SEQ ID NO: 382763 - RNA, 29 nt, Homo Sapiens
caaaauauuaaagucuauuuucuacugag

SEQ ID NO: 382764 - RNA, 32 nt, Homo Sapiens
ucacauccuaggaauagcacaauaauugggaa

SEQ ID NO: 382765 - RNA, 32 nt, Homo Sapiens
cgugcccccagccccagccuacccugagggcc

SEQ ID NO: 382766 - RNA, 32 nt, Homo Sapiens
cacacuggcaaaugucuacauuuuuuaaaaca

SEQ ID NO: 382767 - RNA, 32 nt, Homo Sapiens
aacccuggcuccugaggcugcggccagcagag

SEQ ID NO: 382768 - RNA, 32 nt, Homo Sapiens
uuuuuggcauacuguuuauguuagauacacug

SEQ ID NO: 382769 - RNA, 32 nt, Homo Sapiens
agccgggugggccugcugacucccagcccagu

SEQ ID NO: 382770 - RNA, 32 nt, Homo Sapiens
cuuacuaaaaauuuaaaaucuaggaauuuacu

SEQ ID NO: 382771 - RNA, 32 nt, Homo Sapiens
gucucuacuaaaaauacaaaauuuagccaggc

SEQ ID NO: 382772 - RNA, 32 nt, Homo Sapiens
uagggugaugugccaggcgccauguuggaggg

SEQ ID NO: 382773 - RNA, 32 nt, Homo Sapiens
uauuaauagauauguaaagaaagaaaucacac

SEQ ID NO: 382774 - RNA, 32 nt, Homo Sapiens
caacagcagcagcagcagcagcagcagcagca

SEQ ID NO: 382775 - RNA, 32 nt, Homo Sapiens
uaauuuggaaaacugagcuucuuucuuucauu

SEQ ID NO: 382776 - RNA, 32 nt, Homo Sapiens
caggaaucuuuguuguauauuaauuuuugaua

SEQ ID NO: 382777 - RNA, 32 nt, Homo Sapiens
gguucagacuugggaagaaucugucagugugc

SEQ ID NO: 382778 - RNA, 32 nt, Homo Sapiens
augugagaaugccgccgguuucugggaugucu

SEQ ID NO: 382779 - RNA, 32 nt, Homo Sapiens
accaaacucuccccgguccuuuuuucuccaac

SEQ ID NO: 382780 - RNA, 32 nt, Homo Sapiens
uguggccccucgccgcaucguugggguuuugu

SEQ ID NO: 382781 - RNA, 32 nt, Homo Sapiens
gaggaggccgcgggcccggcgcucggacgcug

SEQ ID NO: 382782 - RNA, 32 nt, Homo Sapiens
ggucuggcccccucccuguccaggccccgcag

SEQ ID NO: 382783 - RNA, 32 nt, Homo Sapiens
cucuuaagcgguggcgccccuccaccuggguc

SEQ ID NO: 382784 - RNA, 32 nt, Homo Sapiens
caggaggaggcccagcagcugcgggaugagau

SEQ ID NO: 382785 - RNA, 32 nt, Homo Sapiens
ugggcucugggagcagcccgcugaguggacug

SEQ ID NO: 382786 - RNA, 32 nt, Homo Sapiens
caccuccugacacccuucucccacucuccuag

SEQ ID NO: 382787 - RNA, 32 nt, Homo Sapiens
aguggcaggaggaggcggagcaucuugaaccu

SEQ ID NO: 382788 - RNA, 29 nt, Homo Sapiens
guuucuucuauccucucccacuccacguc

SEQ ID NO: 382789 - RNA, 32 nt, Homo Sapiens
cggcggaguuggcggcuuggagagcucgggag

SEQ ID NO: 382790 - RNA, 29 nt, Homo Sapiens
caggaguggggacagagggagagcuugug

SEQ ID NO: 382791 - RNA, 32 nt, Homo Sapiens
ggggggcgccuggagagcgaggaggcgcggcc

SEQ ID NO: 382792 - RNA, 32 nt, Homo Sapiens
aucgcccccacuuuuuaaccaucguccauuaa

SEQ ID NO: 382793 - RNA, 32 nt, Homo Sapiens
aauccacagcuauauccugaugcuggauggua

SEQ ID NO: 382794 - RNA, 29 nt, Homo Sapiens
gcgcuuccgguccccgugcuggugggacu

SEQ ID NO: 382795 - RNA, 32 nt, Homo Sapiens
gggaagauguacaguugcuguugugugaucaa

SEQ ID NO: 382796 - RNA, 32 nt, Homo Sapiens
ccugacugggagaccuugggcugggguucugg

SEQ ID NO: 382797 - RNA, 32 nt, Homo Sapiens
ccaaaugaguuaacauuaaaauucacaauuuu

SEQ ID NO: 382798 - RNA, 32 nt, Homo Sapiens
aauaauggauucgaacucuccaaacuacacca

SEQ ID NO: 382799 - RNA, 32 nt, Homo Sapiens
ucucucuuccuuucgcagcugcugccgcccac

SEQ ID NO: 382800 - RNA, 32 nt, Homo Sapiens
ucccccugccaccuccucccccaccuccccga

SEQ ID NO: 382801 - RNA, 32 nt, Homo Sapiens
gccagcgugagcucagcuuggaccaagacaaa

SEQ ID NO: 382802 - RNA, 32 nt, Homo Sapiens
uuuugucauaucgguaacaugcagcuuuuucc

SEQ ID NO: 382803 - RNA, 32 nt, Homo Sapiens
ggccccgggcaacagauugaagagagaucaug

SEQ ID NO: 382804 - RNA, 32 nt, Homo Sapiens
acauaaagauugaaaggagauauuuuaucaag

SEQ ID NO: 382805 - RNA, 31 nt, Homo Sapiens
cucucccaagccaccccugcaagcagcauag

SEQ ID NO: 382806 - RNA, 32 nt, Homo Sapiens
uaguguuguuugauagaugccacacaugcaua

SEQ ID NO: 382807 - RNA, 32 nt, Homo Sapiens
uacuuagccagggccucaagcucaagauacuu

SEQ ID NO: 382808 - RNA, 32 nt, Homo Sapiens
caagcugggcauuugggccugguggaugccaa

SEQ ID NO: 382809 - RNA, 32 nt, Homo Sapiens
accgccgacgcagaccccucucugcacgccag

SEQ ID NO: 382810 - RNA, 32 nt, Homo Sapiens
aacuauauauuucaauaaaucugucacaaaaa

SEQ ID NO: 382811 - RNA, 32 nt, Homo Sapiens
uucugauuucccuuuugauuucuucuuuuacc

SEQ ID NO: 382812 - RNA, 32 nt, Homo Sapiens
cuucuugacauccaccaagauaccagacauuu

SEQ ID NO: 382813 - RNA, 32 nt, Homo Sapiens
augucagugucugggcucaugacuuguaaaug

SEQ ID NO: 382814 - RNA, 32 nt, Homo Sapiens
uuucuggcuugagaugaauccaagcagcagaa

SEQ ID NO: 382815 - RNA, 32 nt, Homo Sapiens
ccuucucaaguuccucuuucagcugcacccag

SEQ ID NO: 382816 - RNA, 32 nt, Homo Sapiens
aaauacgcuuuugccauuucucuucuuuauua

SEQ ID NO: 382817 - RNA, 32 nt, Homo Sapiens
gccagcgagggcagcguucgccgccccucagg

SEQ ID NO: 382818 - RNA, 32 nt, Homo Sapiens
cggcagccgccccgucugagaagugaggagcc

SEQ ID NO: 382819 - RNA, 32 nt, Homo Sapiens
ccauccuauguuugucccacuauuguauuuug

SEQ ID NO: 382820 - RNA, 32 nt, Homo Sapiens
gauuaauuccuaaaaucauagcacuaacauuc

SEQ ID NO: 382821 - RNA, 32 nt, Homo Sapiens
cucuacguucuauaugcaauuguuauauaucu

SEQ ID NO: 382822 - RNA, 32 nt, Homo Sapiens
agagccggagcgggggccgccggcgccgcauc

SEQ ID NO: 382823 - RNA, 32 nt, Homo Sapiens
uugauauaccaauuuuaacuauuucugauaca

SEQ ID NO: 382824 - RNA, 32 nt, Homo Sapiens
uaucuacuuacacauacaccagcaacaguaua

SEQ ID NO: 382825 - RNA, 32 nt, Homo Sapiens
uguugcuucccucccaggaucccuuuggugag

SEQ ID NO: 382826 - RNA, 32 nt, Homo Sapiens
caggcuguuaggccccuuucugaucaggaggc

SEQ ID NO: 382827 - RNA, 32 nt, Homo Sapiens
uuaacuuaucccagcuuuacaaaaacucuuca

SEQ ID NO: 382828 - RNA, 32 nt, Homo Sapiens
acgaccuaacugugcccugcuggcugugaccu

SEQ ID NO: 382829 - RNA, 32 nt, Homo Sapiens
ggagcugaucguaauguuuaucauguuacuuc

SEQ ID NO: 382830 - RNA, 32 nt, Homo Sapiens
gggugcugugggcucaggagggggcggggcag

SEQ ID NO: 382831 - RNA, 32 nt, Homo Sapiens
uuccggaggccgugagaccugccggggcugac

SEQ ID NO: 382832 - RNA, 32 nt, Homo Sapiens
aggacugcagggcccgcggccgagggcucggc

SEQ ID NO: 382833 - RNA, 32 nt, Homo Sapiens
gggacacgugguucccuccacccaggucccca

SEQ ID NO: 382834 - RNA, 32 nt, Homo Sapiens
ucccugcccuguagauggugugcuccacagug

SEQ ID NO: 382835 - RNA, 32 nt, Homo Sapiens
uccaagcgucagcugaguuuccaagaagccgg

SEQ ID NO: 382836 - RNA, 32 nt, Homo Sapiens
ugcaguuguauuaguucucauuauugaacugu

SEQ ID NO: 382837 - RNA, 32 nt, Homo Sapiens
acuggagaagguccuugugacucagaucaaag

SEQ ID NO: 382838 - RNA, 32 nt, Homo Sapiens
accccagaaaacuacccaaaugacucuauguu

SEQ ID NO: 382839 - RNA, 32 nt, Homo Sapiens
uagcugacaaggaaaggaaggaaaacugugaa

SEQ ID NO: 382840 - RNA, 32 nt, Homo Sapiens
uuugaaacaaagucaaagccaaacucaugcac

SEQ ID NO: 382841 - RNA, 32 nt, Homo Sapiens
uuccagaacaaaucauuauguuuccuaacugu

SEQ ID NO: 382842 - RNA, 32 nt, Homo Sapiens
uuucucugugcagcuggagacgcuggugagga

SEQ ID NO: 382843 - RNA, 32 nt, Homo Sapiens
ggcucggccccgggccacuucacggggcggga

SEQ ID NO: 382844 - RNA, 32 nt, Homo Sapiens
gggcuguuggacagcugcuugugggcccggag

SEQ ID NO: 382845 - RNA, 32 nt, Homo Sapiens
acauaagauaauuuauacuggagagaagcccu

SEQ ID NO: 382846 - RNA, 32 nt, Homo Sapiens
uguaaggauacugauagcacaaccucuucccc

SEQ ID NO: 382847 - RNA, 32 nt, Homo Sapiens
gccaggaaaauagcaaaggaaaucacugugaa

SEQ ID NO: 382848 - RNA, 32 nt, Homo Sapiens
ggcugagcuuggaguacguguggucaccagga

SEQ ID NO: 382849 - RNA, 32 nt, Homo Sapiens
aggugcugagaggggagggagacucugcggcc

SEQ ID NO: 382850 - RNA, 32 nt, Homo Sapiens
uuuagguggugcauaguggggcuagggaggag

SEQ ID NO: 382851 - RNA, 32 nt, Homo Sapiens
ccugaguucuuccucaauccaagcuguccugu

SEQ ID NO: 382852 - RNA, 32 nt, Homo Sapiens
ugccggccucuagauggccucaucucuuccuu

SEQ ID NO: 382853 - RNA, 32 nt, Homo Sapiens
aauaagacccauuuaugcacagugaagauucu

SEQ ID NO: 382854 - RNA, 32 nt, Homo Sapiens
ugcuaaauauuucuuuuuugagguggagucuu

SEQ ID NO: 382855 - RNA, 32 nt, Homo Sapiens
cagcuggaucgcggcggggggcggaggugggg

SEQ ID NO: 382856 - RNA, 32 nt, Homo Sapiens
uguaacggggcugggaagaaaagcagagagag

SEQ ID NO: 382857 - RNA, 32 nt, Homo Sapiens
guucucgcaccagaauuauccacagcaacugc

SEQ ID NO: 382858 - RNA, 32 nt, Homo Sapiens
aggcuggaaggggacgguacucaccagaaugg

SEQ ID NO: 382859 - RNA, 32 nt, Homo Sapiens
cccaccccaagccacagggacucccaccaggg

SEQ ID NO: 382860 - RNA, 32 nt, Homo Sapiens
gaaugccuuccacuucccaacagcccccauca

SEQ ID NO: 382861 - RNA, 32 nt, Homo Sapiens
gaccucagcucuucuuguuucuacagauggca

SEQ ID NO: 382862 - RNA, 32 nt, Homo Sapiens
ccauuucgcacgaggagucccggcugcugcag

SEQ ID NO: 382863 - RNA, 32 nt, Homo Sapiens
gccauuuaugagaugaagaauaccguccgcuu

SEQ ID NO: 382864 - RNA, 32 nt, Homo Sapiens
agugcaaauggcagagcuagcaauuccuuuuu

SEQ ID NO: 382865 - RNA, 32 nt, Homo Sapiens
uggcaaaguguacuuucuuaauuucuauuuau

SEQ ID NO: 382866 - RNA, 32 nt, Homo Sapiens
cuuucuccuccuccuccugcgucccuuggcaa

SEQ ID NO: 382867 - RNA, 32 nt, Homo Sapiens
caucagauuguacaguuugguuguugcuguaa

SEQ ID NO: 382868 - RNA, 32 nt, Homo Sapiens
ccuaguaaauguuaaauauuguuauuaguguu

SEQ ID NO: 382869 - RNA, 32 nt, Homo Sapiens
cucuuaaauaaucaggugcuuuguaaccaagc

SEQ ID NO: 382870 - RNA, 32 nt, Homo Sapiens
gucuguccugcgccugcgccuccuccugcaug

SEQ ID NO: 382871 - RNA, 30 nt, Homo Sapiens
gaagcaugaaggacgcacaggucaggccau

SEQ ID NO: 382872 - RNA, 32 nt, Homo Sapiens
uauuaagcaaaauaagaauuuauuaagcaaaa

SEQ ID NO: 382873 - RNA, 32 nt, Homo Sapiens
gcccauggccccagcguucagaaggccagcau

SEQ ID NO: 382874 - RNA, 32 nt, Homo Sapiens
ucugaggagcagcacuucggccucucccugua

SEQ ID NO: 382875 - RNA, 32 nt, Homo Sapiens
uaggacccaacuucucuuaccgccauggaguu

SEQ ID NO: 382876 - RNA, 32 nt, Homo Sapiens
aagccccuccccagcccccucucccggacaga

SEQ ID NO: 382877 - RNA, 32 nt, Homo Sapiens
cuuccuuguaaauaauuuaaacaguauuuauu

SEQ ID NO: 382878 - RNA, 32 nt, Homo Sapiens
ucauguuguaaaacuaaagaauuucgcucugc

SEQ ID NO: 382879 - RNA, 27 nt, Homo Sapiens
ugauggcggugcgugaacgcgcggcgg

SEQ ID NO: 382880 - RNA, 32 nt, Homo Sapiens
cugcccacuggugccggagacggaguggagug

SEQ ID NO: 382881 - RNA, 32 nt, Homo Sapiens
auuucuugauaacuuuuugauacuucuuucuu

SEQ ID NO: 382882 - RNA, 32 nt, Homo Sapiens
uguucagccaaggaaacaucucuguauuuagu

SEQ ID NO: 382883 - RNA, 32 nt, Homo Sapiens
cgcuuuaaugaaaaugguuagacugaaaauaa

SEQ ID NO: 382884 - RNA, 32 nt, Homo Sapiens
ccuuucugcccccacuuucagacacaccccca

SEQ ID NO: 382885 - RNA, 32 nt, Homo Sapiens
ucaagauuguugauaggaacugucucaaaagg

SEQ ID NO: 382886 - RNA, 32 nt, Homo Sapiens
agaauaacagagcuuucuuaguuggugaagac

SEQ ID NO: 382887 - RNA, 30 nt, Homo Sapiens
aacaagccacuugcuuucucucgucuucag

SEQ ID NO: 382888 - RNA, 32 nt, Homo Sapiens
cacuaacuaaaauaggcacacaugacacagca

SEQ ID NO: 382889 - RNA, 32 nt, Homo Sapiens
ccuuuauacauuucauuuuuuauuugauauua

SEQ ID NO: 382890 - RNA, 32 nt, Homo Sapiens
uguagaugcacaucagugccagcaaaguccag

SEQ ID NO: 382891 - RNA, 32 nt, Homo Sapiens
cccuaggccccggaccaccggccccaggcccc

SEQ ID NO: 382892 - RNA, 32 nt, Homo Sapiens
gaaaaaaaccuuuuuucuuaacuuucaaaagu

SEQ ID NO: 382893 - RNA, 32 nt, Homo Sapiens
caugcuuuaaaaugucuguguaggagagaagu

SEQ ID NO: 382894 - RNA, 32 nt, Homo Sapiens
gguaggaaaaaaaguaggacauuauugccaua

SEQ ID NO: 382895 - RNA, 32 nt, Homo Sapiens
cugugggagcagccuguguccaggcuggggag

SEQ ID NO: 382896 - RNA, 32 nt, Homo Sapiens
aagggagggcucugcgggcggcggcggcgcgg

SEQ ID NO: 382897 - RNA, 32 nt, Homo Sapiens
aggaggaucauuugagcccagaaguuugagcc

SEQ ID NO: 382898 - RNA, 32 nt, Homo Sapiens
ccaagaucugcgccgcggggcggccgccaucu

SEQ ID NO: 382899 - RNA, 32 nt, Homo Sapiens
gacuagccuuucaucaguguccugccugauca

SEQ ID NO: 382900 - RNA, 32 nt, Homo Sapiens
agugcucgguuguuuacaaucaguggggaaaa

SEQ ID NO: 382901 - RNA, 32 nt, Homo Sapiens
cgugcaggggucgcggccggcuggagcuggga

SEQ ID NO: 382902 - RNA, 32 nt, Homo Sapiens
gaaaccuaaaauucuaaaggcaguuugaaaua

SEQ ID NO: 382903 - RNA, 32 nt, Homo Sapiens
aguuucaaaaauaguacaaagagcucucuuac

SEQ ID NO: 382904 - RNA, 32 nt, Homo Sapiens
gaggacaggaccgcgcgacuggccggccgauc

SEQ ID NO: 382905 - RNA, 32 nt, Homo Sapiens
agaguuucccuaggaaauaaacacggaggggc

SEQ ID NO: 382906 - RNA, 32 nt, Homo Sapiens
cuuccccgcccggggcgcucccagagcaaacg

SEQ ID NO: 382907 - RNA, 32 nt, Homo Sapiens
gaggggccauacugccuggcagggguucucaa

SEQ ID NO: 382908 - RNA, 32 nt, Homo Sapiens
cucuacaaugaaaaauguaaaauauugauuga

SEQ ID NO: 382909 - RNA, 32 nt, Homo Sapiens
gcaaggaggaggagucagaugaggcccugcac

SEQ ID NO: 382910 - RNA, 32 nt, Homo Sapiens
augaauggauuuuuuguuguuuuugcauguuu

SEQ ID NO: 382911 - RNA, 32 nt, Homo Sapiens
uugggcugcccaccccgacaccucugagggca

SEQ ID NO: 382912 - RNA, 32 nt, Homo Sapiens
caggaggagaaggaggucgcgcggccucaucc

SEQ ID NO: 382913 - RNA, 32 nt, Homo Sapiens
ccuuagucgucggcaggucccaggcgcgaagu

SEQ ID NO: 382914 - RNA, 32 nt, Homo Sapiens
ucccuccggccgcgcugucuauggcgcagccc

SEQ ID NO: 382915 - RNA, 32 nt, Homo Sapiens
cauuacacgccacaacuccaguguucccuucu

SEQ ID NO: 382916 - RNA, 32 nt, Homo Sapiens
ucuuugcauccacaauguggggucggagcuug

SEQ ID NO: 382917 - RNA, 32 nt, Homo Sapiens
cgucuggauggcaacgcggaacuccucccaga

SEQ ID NO: 382918 - RNA, 32 nt, Homo Sapiens
gccgggugugguggcaggcaucugcaaucuca

SEQ ID NO: 382919 - RNA, 32 nt, Homo Sapiens
uuugaaaaucauaaagauauaaguuggugugg

SEQ ID NO: 382920 - RNA, 32 nt, Homo Sapiens
cuacugaauuuuauugcuaaguaaauuuguac

SEQ ID NO: 382921 - RNA, 32 nt, Homo Sapiens
cacugcccgccuuacugccgccuaccccgccc

SEQ ID NO: 382922 - RNA, 32 nt, Homo Sapiens
acuacggagaugcucuugccuaugauaggaac

SEQ ID NO: 382923 - RNA, 32 nt, Homo Sapiens
gcggugccgagaccugggagcgagauccacgu

SEQ ID NO: 382924 - RNA, 32 nt, Homo Sapiens
ggucccacccgccugcccccuucuaggacaac

SEQ ID NO: 382925 - RNA, 32 nt, Homo Sapiens
gaaggggacugauguuaucagaggccuccugu

SEQ ID NO: 382926 - RNA, 28 nt, Homo Sapiens
cuuuaaaaaauauauguguguauacuuu

SEQ ID NO: 382927 - RNA, 30 nt, Homo Sapiens
uaaaaaugagcuuuugaggcaggcagucag

SEQ ID NO: 382928 - RNA, 32 nt, Homo Sapiens
uuuccugaaacuggguuaauucuuuauagaaa

SEQ ID NO: 382929 - RNA, 32 nt, Homo Sapiens
ggugucgcggggagccuggugcccuucuagau

SEQ ID NO: 382930 - RNA, 32 nt, Homo Sapiens
cgccgagaaccccacccccuuucuuugcggaa

SEQ ID NO: 382931 - RNA, 32 nt, Homo Sapiens
uuugcccaggacuggcgccgcgcacgcggauc

SEQ ID NO: 382932 - RNA, 32 nt, Homo Sapiens
uaauuguugggucuuuuuucuugagcuuauaa

SEQ ID NO: 382933 - RNA, 32 nt, Homo Sapiens
ccgggccgcgucuguggggucgagacugcgcg

SEQ ID NO: 382934 - RNA, 32 nt, Homo Sapiens
cuuccagaucuucagcagcaggaugacgaugg

SEQ ID NO: 382935 - RNA, 32 nt, Homo Sapiens
guuccugguuacuucacuuccagucuucauuc

SEQ ID NO: 382936 - RNA, 32 nt, Homo Sapiens
caccagcuccuaggcacugagagcacgagcau

SEQ ID NO: 382937 - RNA, 32 nt, Homo Sapiens
ccaccgccgccgcuaccucagcccuucgcgaa

SEQ ID NO: 382938 - RNA, 32 nt, Homo Sapiens
agaaacuaagaagguagcacaauauguggcau

SEQ ID NO: 382939 - RNA, 32 nt, Homo Sapiens
gcaaaaggaagccauugccaucuucaucacca

SEQ ID NO: 382940 - RNA, 32 nt, Homo Sapiens
gagcgagggccuuuuuacucaccuuuucuacc

SEQ ID NO: 382941 - RNA, 32 nt, Homo Sapiens
ccugaguugaagaggggagcucaguuuucaac

SEQ ID NO: 382942 - RNA, 32 nt, Homo Sapiens
ggaguggggcggggcgggggaggggcaccacg

SEQ ID NO: 382943 - RNA, 32 nt, Homo Sapiens
cgaccccggcccucucccugcggccgcagggc

SEQ ID NO: 382944 - RNA, 32 nt, Homo Sapiens
aauccucaggucuccaccaaggaggcaggauu

SEQ ID NO: 382945 - RNA, 29 nt, Homo Sapiens
ucucggaguaucugggaacugugccuuug

SEQ ID NO: 382946 - RNA, 32 nt, Homo Sapiens
uuuaacagggaggggaagagggggcgaucgcg

SEQ ID NO: 382947 - RNA, 32 nt, Homo Sapiens
aaacaaagacaugggauuuucuuacaugagau

SEQ ID NO: 382948 - RNA, 32 nt, Homo Sapiens
aagcagagauaaaacgcuuaaaaaauaacaac

SEQ ID NO: 382949 - RNA, 32 nt, Homo Sapiens
gacacugucccacuccaucacccaggcuggag

SEQ ID NO: 382950 - RNA, 32 nt, Homo Sapiens
aaaccucugcccgggggguuggggugggagcc

SEQ ID NO: 382951 - RNA, 32 nt, Homo Sapiens
cggggcagcucuucuaccuggcugcgucuagu

SEQ ID NO: 382952 - RNA, 32 nt, Homo Sapiens
ccuucccuuccuugaucccuggaccagacuca

SEQ ID NO: 382953 - RNA, 32 nt, Homo Sapiens
uggaagcugccagcugcccggcuggcaauggu

SEQ ID NO: 382954 - RNA, 32 nt, Homo Sapiens
ugaagaugggcagaagcucauuacugucucca

SEQ ID NO: 382955 - RNA, 32 nt, Homo Sapiens
gcgcccccaagccccaaguggccgugccaucc

SEQ ID NO: 382956 - RNA, 32 nt, Homo Sapiens
cugugcccagggugggugucuggcacccagcu

SEQ ID NO: 382957 - RNA, 32 nt, Homo Sapiens
uccccucccucccacacuucccacccccaggc

SEQ ID NO: 382958 - RNA, 32 nt, Homo Sapiens
caguuguuaagaccaugaugcuagaggcaaga

SEQ ID NO: 382959 - RNA, 32 nt, Homo Sapiens
ucgcagagacuuuugcagcaucagaucugagg

SEQ ID NO: 382960 - RNA, 32 nt, Homo Sapiens
acucuucccuccccacccgcucuucccauuag

SEQ ID NO: 382961 - RNA, 32 nt, Homo Sapiens
cuauccugaggaccuuugcugcuguuggacac

SEQ ID NO: 382962 - RNA, 32 nt, Homo Sapiens
ccuagcuauuugggaagcugaggugggagggu

SEQ ID NO: 382963 - RNA, 32 nt, Homo Sapiens
uuuacccucccagauagcugccccugccacgc

SEQ ID NO: 382964 - RNA, 32 nt, Homo Sapiens
cuucucugcccguucuuguccacacaucuauu

SEQ ID NO: 382965 - RNA, 32 nt, Homo Sapiens
gguuucaccaugucggccaggcuggucuccaa

SEQ ID NO: 382966 - RNA, 32 nt, Homo Sapiens
uuccaguugaagaucuaguaauuaaaggucuc

SEQ ID NO: 382967 - RNA, 32 nt, Homo Sapiens
ugagggaagggaguaggaaaagaaaagcauuu

SEQ ID NO: 382968 - RNA, 31 nt, Homo Sapiens
cucagaucugugucaaguucaaugugagccc

SEQ ID NO: 382969 - RNA, 32 nt, Homo Sapiens
cgcggccuccuccuccuccccguucccuucac

SEQ ID NO: 382970 - RNA, 32 nt, Homo Sapiens
ggugugaggggccggcggggcccggagcgguc

SEQ ID NO: 382971 - RNA, 32 nt, Homo Sapiens
cccaaggcuggcaaccugccucccauugccca

SEQ ID NO: 382972 - RNA, 32 nt, Homo Sapiens
gugagggguggauaaacuacccugccccaaac

SEQ ID NO: 382973 - RNA, 32 nt, Homo Sapiens
cucggugcccccagcuggauagagggaaccug

SEQ ID NO: 382974 - RNA, 32 nt, Homo Sapiens
cccuggcugggguugggcuggugcagcccagc

SEQ ID NO: 382975 - RNA, 32 nt, Homo Sapiens
ggcaacuuacuacugaaucucuaaucaauguu

SEQ ID NO: 382976 - RNA, 32 nt, Homo Sapiens
aagcugauaaaacuuucacuggacuggaaugu

SEQ ID NO: 382977 - RNA, 32 nt, Homo Sapiens
cauuggggccuugcuccucuuccuccuuucuu

SEQ ID NO: 382978 - RNA, 32 nt, Homo Sapiens
ccugugcacagugagccgauagcuuccuuuua

SEQ ID NO: 382979 - RNA, 32 nt, Homo Sapiens
cgaagucaaccucagggaauucaaauggggga

SEQ ID NO: 382980 - RNA, 32 nt, Homo Sapiens
aacagugaccaaguguaauuucacuggugaug

SEQ ID NO: 382981 - RNA, 32 nt, Homo Sapiens
auccuucucucccacaccucuccugguuuugu

SEQ ID NO: 382982 - RNA, 32 nt, Homo Sapiens
cccuuggcccccuccccucccccagaccucca

SEQ ID NO: 382983 - RNA, 32 nt, Homo Sapiens
cacagaaaacugaucuguagauaacgagggag

SEQ ID NO: 382984 - RNA, 32 nt, Homo Sapiens
gcugguguggaggugcucauggggugcggugc

SEQ ID NO: 382985 - RNA, 32 nt, Homo Sapiens
aagccucguuccuccuucugccuccccggagc

SEQ ID NO: 382986 - RNA, 32 nt, Homo Sapiens
gagcugccccggccggcccccgucucuuucua

SEQ ID NO: 382987 - RNA, 32 nt, Homo Sapiens
gguuaaaggcauuuuucccagacccugcucag

SEQ ID NO: 382988 - RNA, 32 nt, Homo Sapiens
guaaucuuuuaaaaauauuaucuugcagauaa

SEQ ID NO: 382989 - RNA, 30 nt, Homo Sapiens
gagcucugcuugcugccgccgcgcuccugg

SEQ ID NO: 382990 - RNA, 32 nt, Homo Sapiens
uuuauuaauuuuauuuuuuuuaauacagauuu

SEQ ID NO: 382991 - RNA, 32 nt, Homo Sapiens
cacugggcaacaacccuaggucaggagguucu

SEQ ID NO: 382992 - RNA, 28 nt, Homo Sapiens
gaaaaagaaagaaaacauuugagcucca

SEQ ID NO: 382993 - RNA, 32 nt, Homo Sapiens
acguuggcaguuagcaaagugcuccuacagcc

SEQ ID NO: 382994 - RNA, 32 nt, Homo Sapiens
accaccaggaucugaggcccaaauccuuccuc

SEQ ID NO: 382995 - RNA, 32 nt, Homo Sapiens
ugugccacuauccuccaguaugggugacagag

SEQ ID NO: 382996 - RNA, 32 nt, Homo Sapiens
augauguuaccugaaaucaaucucccauaugu

SEQ ID NO: 382997 - RNA, 32 nt, Homo Sapiens
gcaggaagcucgcgccgccgucgccgccgccg

SEQ ID NO: 382998 - RNA, 32 nt, Homo Sapiens
ccucccacucccucccuguccuugccaaccau

SEQ ID NO: 382999 - RNA, 32 nt, Homo Sapiens
cggagccuuccuugcuggccugagagagcugu

SEQ ID NO: 383000 - RNA, 32 nt, Homo Sapiens
gcaguucccacugccuucucccguccuccccu

SEQ ID NO: 383001 - RNA, 32 nt, Homo Sapiens
agccgugguggggaccggguaugccaacugga

SEQ ID NO: 383002 - RNA, 32 nt, Homo Sapiens
auaaaacaaaauuuauaauuuuaaccauuuuu

SEQ ID NO: 383003 - RNA, 32 nt, Homo Sapiens
uuuacgggaucaaagugggucuacaccagugc

SEQ ID NO: 383004 - RNA, 32 nt, Homo Sapiens
uucauauguucauauagagaccaucugguugc

SEQ ID NO: 383005 - RNA, 32 nt, Homo Sapiens
aagaacuauggaauaaaacuacugaugcagug

SEQ ID NO: 383006 - RNA, 29 nt, Homo Sapiens
ccggguuugcgguggaggacgcugaggcc

SEQ ID NO: 383007 - RNA, 32 nt, Homo Sapiens
agagauuugugauaauacaacuuguuauaaaa

SEQ ID NO: 383008 - RNA, 32 nt, Homo Sapiens
gucucauacaagcugucugauagagaacuuuc

SEQ ID NO: 383009 - RNA, 32 nt, Homo Sapiens
ugaggaauuggauagcacuauaaggugccuca

SEQ ID NO: 383010 - RNA, 32 nt, Homo Sapiens
aauggggccagcaagagcugcccuguguccau

SEQ ID NO: 383011 - RNA, 32 nt, Homo Sapiens
ugccauguuguccaggcuggugucgaaauccu

SEQ ID NO: 383012 - RNA, 32 nt, Homo Sapiens
auguaucuguugucuuuggccuacucagggau

SEQ ID NO: 383013 - RNA, 32 nt, Homo Sapiens
aguguucugaccagggagugacagguuaugac

SEQ ID NO: 383014 - RNA, 32 nt, Homo Sapiens
accuuggcucugccaguggauccccugcgguc

SEQ ID NO: 383015 - RNA, 32 nt, Homo Sapiens
cugggcagggacccggggucuccuggaccuug

SEQ ID NO: 383016 - RNA, 32 nt, Homo Sapiens
augauuacuauuacuauuauuauggaaaaauu

SEQ ID NO: 383017 - RNA, 32 nt, Homo Sapiens
ccuccucggaagcucgcugcccagagccaugu

SEQ ID NO: 383018 - RNA, 32 nt, Homo Sapiens
cagggcuggcagcugccgcugcaccggagagc

SEQ ID NO: 383019 - RNA, 32 nt, Homo Sapiens
uuuucaggauucuccuccuuuguccucaaccc

SEQ ID NO: 383020 - RNA, 32 nt, Homo Sapiens
cuuuucuuuucucugguaauauugacuuguau

SEQ ID NO: 383021 - RNA, 32 nt, Homo Sapiens
cugagaugagaggaucacuugagccugaggag

SEQ ID NO: 383022 - RNA, 32 nt, Homo Sapiens
cacugauaaaauucagcuauauuguugacacu

SEQ ID NO: 383023 - RNA, 32 nt, Homo Sapiens
aguccauuucuuuugugaaugugcuaaauaaa

SEQ ID NO: 383024 - RNA, 32 nt, Homo Sapiens
gccguccuccccugucuacccggagcugucuc

SEQ ID NO: 383025 - RNA, 32 nt, Homo Sapiens
agcagaaaaugaaucuacuaggauaccugaau

SEQ ID NO: 383026 - RNA, 32 nt, Homo Sapiens
ugggauuauaaaauguaucucacaagguaguu

SEQ ID NO: 383027 - RNA, 32 nt, Homo Sapiens
aagugcaccuugagcagguucuccuggcagcg

SEQ ID NO: 383028 - RNA, 32 nt, Homo Sapiens
agaaugcccccucccugcugagcugggucucu

SEQ ID NO: 383029 - RNA, 32 nt, Homo Sapiens
ccaucaaacaaaucauuuugauguauuauuau

SEQ ID NO: 383030 - RNA, 32 nt, Homo Sapiens
uggggagggcgcugagggucacgcgaacaccg

SEQ ID NO: 383031 - RNA, 32 nt, Homo Sapiens
ccccaaugucucucuuuuuuuuuuuuuuuacu

SEQ ID NO: 383032 - RNA, 32 nt, Homo Sapiens
ugccccgcgggcuggaagaggcggcggcguga

SEQ ID NO: 383033 - RNA, 32 nt, Homo Sapiens
guggcugccuccaaugugaugugaguacaugu

SEQ ID NO: 383034 - RNA, 32 nt, Homo Sapiens
cuuacaggggagaaggaaaugcagggcacaug

SEQ ID NO: 383035 - RNA, 32 nt, Homo Sapiens
auuuaucuguaguaaacuauuuaucuguguuu

SEQ ID NO: 383036 - RNA, 25 nt, Homo Sapiens
auguuagggcagcagcagcagcaac

SEQ ID NO: 383037 - RNA, 32 nt, Homo Sapiens
ugugaggccacuuuuucuuucuuucuuucuuu

SEQ ID NO: 383038 - RNA, 32 nt, Homo Sapiens
cuuaaaccaauauuauaaguagauaacaugua

SEQ ID NO: 383039 - RNA, 32 nt, Homo Sapiens
ugcggggccuagaaaagaaucucaugucacuc

SEQ ID NO: 383040 - RNA, 32 nt, Homo Sapiens
cugcaggugcuguucugagggaaucacacugu

SEQ ID NO: 383041 - RNA, 32 nt, Homo Sapiens
ccuuuacagucugcagccuauaaacaguggug

SEQ ID NO: 383042 - RNA, 32 nt, Homo Sapiens
ugaggugacaauggaggcagagauuggagcaa

SEQ ID NO: 383043 - RNA, 32 nt, Homo Sapiens
uucuugguccucuggagagcagaggacucacu

SEQ ID NO: 383044 - RNA, 31 nt, Homo Sapiens
aucccucaaaucacuacuaacugaagccaaa

SEQ ID NO: 383045 - RNA, 32 nt, Homo Sapiens
aaugagagaaacaaacacagguuuuauugucc

SEQ ID NO: 383046 - RNA, 32 nt, Homo Sapiens
auaaauggguguuuuucuuuucaagaaauuuu

SEQ ID NO: 383047 - RNA, 32 nt, Homo Sapiens
ccuuucccuucaggcccauccgcuagcuggcc

SEQ ID NO: 383048 - RNA, 32 nt, Homo Sapiens
uaucacacucuggggacugugguggggucggg

SEQ ID NO: 383049 - RNA, 32 nt, Homo Sapiens
uuuagcucccacuuauaagugagaacauccag

SEQ ID NO: 383050 - RNA, 32 nt, Homo Sapiens
uuuucuuuaaagccagucaucaucucuugaua

SEQ ID NO: 383051 - RNA, 32 nt, Homo Sapiens
cuugcuucagaauugaaauggaagggagggug

SEQ ID NO: 383052 - RNA, 32 nt, Homo Sapiens
uacaagucauauauuuaauucugacauuuaga

SEQ ID NO: 383053 - RNA, 32 nt, Homo Sapiens
ccccagcccacuccgccgcgggacgccucauc

SEQ ID NO: 383054 - RNA, 32 nt, Homo Sapiens
gaacugaggagaugaccagggaugcugggcug

SEQ ID NO: 383055 - RNA, 32 nt, Homo Sapiens
ccccggcugccgucugcgcccccgucgacccc

SEQ ID NO: 383056 - RNA, 32 nt, Homo Sapiens
caucuccgcccggcagccgccccgucugagaa

SEQ ID NO: 383057 - RNA, 31 nt, Homo Sapiens
acgcuaacggcggucgugccccgccgcugcu

SEQ ID NO: 383058 - RNA, 30 nt, Homo Sapiens
uccuggguucugugcauccgucugucugac

SEQ ID NO: 383059 - RNA, 32 nt, Homo Sapiens
ggguacuuugcagguuuauuacauggguguau

SEQ ID NO: 383060 - RNA, 32 nt, Homo Sapiens
gagcgggacuaggauccuccccgcggcgcgca

SEQ ID NO: 383061 - RNA, 32 nt, Homo Sapiens
aauuuaugugaacacaaagcccucugaaaaau

SEQ ID NO: 383062 - RNA, 32 nt, Homo Sapiens
aaugggcacugccugcccuucuagugaaaagg

SEQ ID NO: 383063 - RNA, 32 nt, Homo Sapiens
uaacugaggugcuaugcaggccugccugugug

SEQ ID NO: 383064 - RNA, 32 nt, Homo Sapiens
aagucucuuuugccauguaaggcaacauucac

SEQ ID NO: 383065 - RNA, 32 nt, Homo Sapiens
cagaccagcgcccgaaggccgacacgcuggcc

SEQ ID NO: 383066 - RNA, 32 nt, Homo Sapiens
uugaacagaaauuuuucuuuuuaauuuuauuu

SEQ ID NO: 383067 - RNA, 32 nt, Homo Sapiens
gccuggccaacaauggcaaaaccccgucucua

SEQ ID NO: 383068 - RNA, 32 nt, Homo Sapiens
cagugcucuuucguuguauuuuucucauuuuu

SEQ ID NO: 383069 - RNA, 32 nt, Homo Sapiens
gcggaaaggaucucgaucucugcagcggaguu

SEQ ID NO: 383070 - RNA, 32 nt, Homo Sapiens
ggagggccggcgaggcuagcgaggggacagga

SEQ ID NO: 383071 - RNA, 32 nt, Homo Sapiens
auuggccggggcccgcgcgagccugcgagcga

SEQ ID NO: 383072 - RNA, 32 nt, Homo Sapiens
ccagucaaacacauagcaguguuccauagacu

SEQ ID NO: 383073 - RNA, 32 nt, Homo Sapiens
ggcgccguggggccgggacagcagcagugccg

SEQ ID NO: 383074 - RNA, 32 nt, Homo Sapiens
cgaggggucccagggugcugcaguggcucaca

SEQ ID NO: 383075 - RNA, 32 nt, Homo Sapiens
agccgagauugugccacugcacuccaaccugg

SEQ ID NO: 383076 - RNA, 32 nt, Homo Sapiens
caguucugugagauagcacauaaaaauagagu

SEQ ID NO: 383077 - RNA, 32 nt, Homo Sapiens
uggaguaucuucaucuccucucauuuucccau

SEQ ID NO: 383078 - RNA, 32 nt, Homo Sapiens
acuguacaugggacuaugcuuuucucaaagcc

SEQ ID NO: 383079 - RNA, 32 nt, Homo Sapiens
augucuguccucacagcagaauguagaaguca

SEQ ID NO: 383080 - RNA, 32 nt, Homo Sapiens
gguuggaaagucucuuuuuuguaauuuguuuu

SEQ ID NO: 383081 - RNA, 32 nt, Homo Sapiens
agaugcaguucccuauuuuguuuaaugaaggg

SEQ ID NO: 383082 - RNA, 32 nt, Homo Sapiens
cuccccccgccgggcuacgaugacauguaccu

SEQ ID NO: 383083 - RNA, 32 nt, Homo Sapiens
acgaagccgccgagccgagaccgaguccugaa

SEQ ID NO: 383084 - RNA, 32 nt, Homo Sapiens
gggagcagagaagaagcaaccaggggcccuga

SEQ ID NO: 383085 - RNA, 32 nt, Homo Sapiens
aggacaacuaaugugagugaggaagugacugu

SEQ ID NO: 383086 - RNA, 32 nt, Homo Sapiens
gccgcggccuccccgggcuccagagaaggccc

SEQ ID NO: 383087 - RNA, 32 nt, Homo Sapiens
gacuaauagaaaggaggcuguggcuaaagcag

SEQ ID NO: 383088 - RNA, 32 nt, Homo Sapiens
uuuuuguuauaagauaaauguuaucuuuguac

SEQ ID NO: 383089 - RNA, 32 nt, Homo Sapiens
ugauauaggcauuugggauuugcugcaaaaug

SEQ ID NO: 383090 - RNA, 32 nt, Homo Sapiens
ccuccgccccccacccgguuguuuuucggagc

SEQ ID NO: 383091 - RNA, 32 nt, Homo Sapiens
gaacaucaucaaggcacugccugauggaccug

SEQ ID NO: 383092 - RNA, 32 nt, Homo Sapiens
gauuccuggauaaaaugacacccauuuuucuu

SEQ ID NO: 383093 - RNA, 32 nt, Homo Sapiens
uucugccaagggugggggcccacgcggaggcg

SEQ ID NO: 383094 - RNA, 32 nt, Homo Sapiens
caggauuugaggaggagaagggaggagguggg

SEQ ID NO: 383095 - RNA, 32 nt, Homo Sapiens
ccagauacaccgggccgccuccccuuccccgu

SEQ ID NO: 383096 - RNA, 32 nt, Homo Sapiens
ggagucccgaguccgacgcgccgcuggccuca

SEQ ID NO: 383097 - RNA, 32 nt, Homo Sapiens
cauuuuacuuauggaaaacagugugcauauuc

SEQ ID NO: 383098 - RNA, 32 nt, Homo Sapiens
uguucaucuaaagaacaaaacuuagagacucc

SEQ ID NO: 383099 - RNA, 28 nt, Homo Sapiens
gcauucagaaagcagcauuugaagcuga

SEQ ID NO: 383100 - RNA, 32 nt, Homo Sapiens
guagccaggggaggggucugcacagcgagaag

SEQ ID NO: 383101 - RNA, 32 nt, Homo Sapiens
ggcaucccuggggcagacgugcuuuggcucaa

SEQ ID NO: 383102 - RNA, 32 nt, Homo Sapiens
uggggacucagggcuggaccgacguccuagug

SEQ ID NO: 383103 - RNA, 32 nt, Homo Sapiens
gacccggaugaacucaaugcaugaugacucuu

SEQ ID NO: 383104 - RNA, 32 nt, Homo Sapiens
ccaaccuugccagcuggcccagcuucaccucu

SEQ ID NO: 383105 - RNA, 32 nt, Homo Sapiens
ucccucccaccagcugacgaaugguggaccca

SEQ ID NO: 383106 - RNA, 32 nt, Homo Sapiens
cgucgauccagcugccagcgcagccgccagcg

SEQ ID NO: 383107 - RNA, 32 nt, Homo Sapiens
ggguguuaggcccgccauucgcuugacucacg

SEQ ID NO: 383108 - RNA, 32 nt, Homo Sapiens
ugggggcuuccucuccuuccacccucugguuc

SEQ ID NO: 383109 - RNA, 32 nt, Homo Sapiens
gauugggaaacuuaaccguuacccaggcaaua

SEQ ID NO: 383110 - RNA, 32 nt, Homo Sapiens
auguaaauauauuguuaccauuuguguuaagg

SEQ ID NO: 383111 - RNA, 32 nt, Homo Sapiens
uccuuguugugagccccggcccggcagugucc

SEQ ID NO: 383112 - RNA, 32 nt, Homo Sapiens
uuuaagaacagaaacaacuauuuuaaaagaac

SEQ ID NO: 383113 - RNA, 32 nt, Homo Sapiens
ccacuuacauauauuuuuaaaaaaugaaaucc

SEQ ID NO: 383114 - RNA, 32 nt, Homo Sapiens
gcagcauccaaugaacaagauccuacaagcug

SEQ ID NO: 383115 - RNA, 32 nt, Homo Sapiens
uacaggugugugacaccagacccggcuaauuu

SEQ ID NO: 383116 - RNA, 32 nt, Homo Sapiens
auuccagacacuuuaaauuuggaugcuuucau

SEQ ID NO: 383117 - RNA, 32 nt, Homo Sapiens
ggagccccuguccacccucccccaggggccuc

SEQ ID NO: 383118 - RNA, 32 nt, Homo Sapiens
aaaguccuuggaauaagggaagagacucauag

SEQ ID NO: 383119 - RNA, 32 nt, Homo Sapiens
aaucuuuguauacuuguuugggacauuuuagu

SEQ ID NO: 383120 - RNA, 32 nt, Homo Sapiens
agagguuuucauugcugaaaagaaaaucguaa

SEQ ID NO: 383121 - RNA, 32 nt, Homo Sapiens
acuauuaaaaauuuuaacguaauaguuuuuac

SEQ ID NO: 383122 - RNA, 32 nt, Homo Sapiens
uucuucaaccucauugacaagaacugaaacca

SEQ ID NO: 383123 - RNA, 32 nt, Homo Sapiens
ucuuauuuuuaugcagcucauuuuuucuuuaa

SEQ ID NO: 383124 - RNA, 32 nt, Homo Sapiens
aggccuuacaucuggcuggaaagcagagccuc

SEQ ID NO: 383125 - RNA, 32 nt, Homo Sapiens
gggugggucuggacaaggagcggcaggaauca

SEQ ID NO: 383126 - RNA, 32 nt, Homo Sapiens
aaaggaucccggauugugagaccuacagaaga

SEQ ID NO: 383127 - RNA, 30 nt, Homo Sapiens
agguaaggcaggcggacgcgcggaccccuc

SEQ ID NO: 383128 - RNA, 32 nt, Homo Sapiens
uuaucgucuaugaugggagaaaaggagaaaug

SEQ ID NO: 383129 - RNA, 32 nt, Homo Sapiens
auuuuuaccugaaagcacaauguauugagucu

SEQ ID NO: 383130 - RNA, 32 nt, Homo Sapiens
uccgucugcgucgggagcucccgggcacguga

SEQ ID NO: 383131 - RNA, 32 nt, Homo Sapiens
agguuaccaaaaugcccugcucugaagccuug

SEQ ID NO: 383132 - RNA, 32 nt, Homo Sapiens
gaggagaaguuauuaucuccauugggcacaug

SEQ ID NO: 383133 - RNA, 32 nt, Homo Sapiens
auuauggagguuaaguucauucugccuucauu

SEQ ID NO: 383134 - RNA, 32 nt, Homo Sapiens
cuuuggauaaaguucucauuuuucucaugaac

SEQ ID NO: 383135 - RNA, 32 nt, Homo Sapiens
augcggcgcgcccaggaugcugccgugccucg

SEQ ID NO: 383136 - RNA, 32 nt, Homo Sapiens
acuuuugucugcuuaagggaaaugagggaagu

SEQ ID NO: 383137 - RNA, 32 nt, Homo Sapiens
uucaccccugucauucuaguccaugguugggu

SEQ ID NO: 383138 - RNA, 32 nt, Homo Sapiens
uuggcuguacagcucgaucuagguucugcggc

SEQ ID NO: 383139 - RNA, 32 nt, Homo Sapiens
cggggcgccgacgaggagugcaggacucagga

SEQ ID NO: 383140 - RNA, 30 nt, Homo Sapiens
cugccaugguugugcuauucucaucucaac

SEQ ID NO: 383141 - RNA, 32 nt, Homo Sapiens
acagaaggggguacucgucuuggugagagcgu

SEQ ID NO: 383142 - RNA, 32 nt, Homo Sapiens
gaccaucuuucugccuuaagggcaggagccca

SEQ ID NO: 383143 - RNA, 32 nt, Homo Sapiens
cacuugcucauuuuuuaauuggguuauuuguc

SEQ ID NO: 383144 - RNA, 32 nt, Homo Sapiens
uuauuuauugacugucuuucccccuguccucg

SEQ ID NO: 383145 - RNA, 32 nt, Homo Sapiens
aguaauccaccaucaguagagguaauaguucu

SEQ ID NO: 383146 - RNA, 32 nt, Homo Sapiens
ccuagguuagagagggguggccuggggugcuu

SEQ ID NO: 383147 - RNA, 32 nt, Homo Sapiens
ggaaggugggucuaguugguacgggaauuagu

SEQ ID NO: 383148 - RNA, 32 nt, Homo Sapiens
ccagcuguaaccauggauaccacacauuucuc

SEQ ID NO: 383149 - RNA, 32 nt, Homo Sapiens
ccccgcaccagccccaguccagguaccuggaa

SEQ ID NO: 383150 - RNA, 30 nt, Homo Sapiens
ggggacaugcuugucagggaaaccuuaaaa

SEQ ID NO: 383151 - RNA, 32 nt, Homo Sapiens
agcugccaauuaguuuucuuuguuuuuacuuu

SEQ ID NO: 383152 - RNA, 32 nt, Homo Sapiens
agaugguacauguucccaccucaugggaucuc

SEQ ID NO: 383153 - RNA, 32 nt, Homo Sapiens
cucgcccgccggggccucggaggugacuaacu

SEQ ID NO: 383154 - RNA, 32 nt, Homo Sapiens
gacaggggagcccagcgcacagagacaaagug

SEQ ID NO: 383155 - RNA, 32 nt, Homo Sapiens
ggguaagacugaaagcauuccaaauuaggcuu

SEQ ID NO: 383156 - RNA, 32 nt, Homo Sapiens
uuuugggauucuguguggugacugcugaggaa

SEQ ID NO: 383157 - RNA, 29 nt, Homo Sapiens
aagcaucuaaaauaaacacacguggaugg

SEQ ID NO: 383158 - RNA, 32 nt, Homo Sapiens
aguuuucaccaccagcaccaccagcaccuacc

SEQ ID NO: 383159 - RNA, 32 nt, Homo Sapiens
uauucaagauaaaauaagacauacaguuuucu

SEQ ID NO: 383160 - RNA, 32 nt, Homo Sapiens
uuugauucugucaucauucuuaguucaacaga

SEQ ID NO: 383161 - RNA, 30 nt, Homo Sapiens
gguaacccagaggcugaugaguguguuggg

SEQ ID NO: 383162 - RNA, 28 nt, Homo Sapiens
ugaaugacagauuugggaccagaagcua

SEQ ID NO: 383163 - RNA, 32 nt, Homo Sapiens
acggcaggugggucgccggcccggaggccugc

SEQ ID NO: 383164 - RNA, 32 nt, Homo Sapiens
ccccuuccaucccaccagcugccaguggcucc

SEQ ID NO: 383165 - RNA, 32 nt, Homo Sapiens
uaaauuucagacuguagagccacauuuacaau

SEQ ID NO: 383166 - RNA, 32 nt, Homo Sapiens
ccaucccacacuguucacccaggcugcggaga

SEQ ID NO: 383167 - RNA, 32 nt, Homo Sapiens
gagacggguucccccagcccagcccuggaagg

SEQ ID NO: 383168 - RNA, 32 nt, Homo Sapiens
accuuggaaaauuuauaauuauaauaccaugg

SEQ ID NO: 383169 - RNA, 32 nt, Homo Sapiens
uggggaggaaagggaugcggagguacccucua

SEQ ID NO: 383170 - RNA, 32 nt, Homo Sapiens
ucccaaauuguguuuauaauuauuuucuugac

SEQ ID NO: 383171 - RNA, 32 nt, Homo Sapiens
uuaaacaauauuuagagcaaguguccucaugu

SEQ ID NO: 383172 - RNA, 32 nt, Homo Sapiens
gagcaucauggcaaccguuacagccacaacca

SEQ ID NO: 383173 - RNA, 32 nt, Homo Sapiens
ugcuuggcagaaaagaaaauaaggucuaaagg

SEQ ID NO: 383174 - RNA, 32 nt, Homo Sapiens
gcugacuccugggggagggaggagucauguug

SEQ ID NO: 383175 - RNA, 32 nt, Homo Sapiens
guauauccuuccacccucuggcugccuagauc

SEQ ID NO: 383176 - RNA, 32 nt, Homo Sapiens
gcccuguuuuaccuccucccuaaucuuaaaua

SEQ ID NO: 383177 - RNA, 32 nt, Homo Sapiens
cauaagaucucauuugcagaaagcagauuaaa

SEQ ID NO: 383178 - RNA, 32 nt, Homo Sapiens
ucggcuccccccagcgcuccccgggcccaaag

SEQ ID NO: 383179 - RNA, 32 nt, Homo Sapiens
guagacauauaauuugugauauuuucuguaug

SEQ ID NO: 383180 - RNA, 32 nt, Homo Sapiens
auaacuuuauuaugaauaugcugugucuucau

SEQ ID NO: 383181 - RNA, 32 nt, Homo Sapiens
uguuguacaucauuaaagaucuaaauacaaag

SEQ ID NO: 383182 - RNA, 32 nt, Homo Sapiens
cauaguaaugaaacuuuguaaaguguuuccuu

SEQ ID NO: 383183 - RNA, 32 nt, Homo Sapiens
uuuccuuuacuuuagagcuauauauuugccug

SEQ ID NO: 383184 - RNA, 32 nt, Homo Sapiens
uacagagcagcgucuucuguguuuccuucaug

SEQ ID NO: 383185 - RNA, 30 nt, Homo Sapiens
cgugagcgugagcgcgcggaggccggaagc

SEQ ID NO: 383186 - RNA, 32 nt, Homo Sapiens
acauuguaugcuuuuucuuuuguucaaucucu

SEQ ID NO: 383187 - RNA, 32 nt, Homo Sapiens
uauuugugguggccauguggugagggcgguga

SEQ ID NO: 383188 - RNA, 32 nt, Homo Sapiens
aggaggacaaaauaaaccguguauuuauuaca

SEQ ID NO: 383189 - RNA, 32 nt, Homo Sapiens
augugguuauuuauauaauuaaaguuccaugg

SEQ ID NO: 383190 - RNA, 32 nt, Homo Sapiens
accucguucaucuccuucaccuccgaaaugau

SEQ ID NO: 383191 - RNA, 32 nt, Homo Sapiens
uuagcagaagcaguagcagccaacuggcccuc

SEQ ID NO: 383192 - RNA, 32 nt, Homo Sapiens
gccugaggaggcggcggcggcgcgggaagcug

SEQ ID NO: 383193 - RNA, 32 nt, Homo Sapiens
caggaaagguggugacaaaugguagccauaau

SEQ ID NO: 383194 - RNA, 32 nt, Homo Sapiens
uguauuuuucuuccuuuuuuuguaauauugaa

SEQ ID NO: 383195 - RNA, 32 nt, Homo Sapiens
caaaaugguugccaaggcaacauaaaauuaua

SEQ ID NO: 383196 - RNA, 32 nt, Homo Sapiens
gugcuucugcaccgggcgucccugcaucugac

SEQ ID NO: 383197 - RNA, 32 nt, Homo Sapiens
gggacccgagguugggcggggcgcaggaggug

SEQ ID NO: 383198 - RNA, 32 nt, Homo Sapiens
ugugaacaggcacgcagcugcagauuuuauuc

SEQ ID NO: 383199 - RNA, 32 nt, Homo Sapiens
acugaguguuuguuucuuuaaaggaucuuaua

SEQ ID NO: 383200 - RNA, 32 nt, Homo Sapiens
aggccugguuugcucuuaauuaauauaugaac

SEQ ID NO: 383201 - RNA, 32 nt, Homo Sapiens
auuggaaggagaaaugauucaugugugaaaaa

SEQ ID NO: 383202 - RNA, 32 nt, Homo Sapiens
aaaauccugaugagguuucuacugggaccaca

SEQ ID NO: 383203 - RNA, 32 nt, Homo Sapiens
gaggacugccauugguagagcuggggugcucu

SEQ ID NO: 383204 - RNA, 32 nt, Homo Sapiens
uggaauaaauuaauaugugauugguuucaagg

SEQ ID NO: 383205 - RNA, 32 nt, Homo Sapiens
agaaaaaaaaaauuauuucuuuuggagggaag

SEQ ID NO: 383206 - RNA, 32 nt, Homo Sapiens
cggcuguggcgguggcugaggcggcugggccu

SEQ ID NO: 383207 - RNA, 27 nt, Homo Sapiens
cagauccuugucuucagcaccuuccaa

SEQ ID NO: 383208 - RNA, 32 nt, Homo Sapiens
uccaucauuuuaauguggcaggcuguucaguu

SEQ ID NO: 383209 - RNA, 32 nt, Homo Sapiens
gaagcagccagcuccccacaccuuccagggcc

SEQ ID NO: 383210 - RNA, 32 nt, Homo Sapiens
uuccuuaaggucuuuuaccaccucccccccaa

SEQ ID NO: 383211 - RNA, 32 nt, Homo Sapiens
ugcugcugucuuguugcggauggauggaaggu

SEQ ID NO: 383212 - RNA, 32 nt, Homo Sapiens
ugaaacaauuuucucuagcugccugaugucaa

SEQ ID NO: 383213 - RNA, 32 nt, Homo Sapiens
uuuguaaaacuguguagcauuuaaauuuccua

SEQ ID NO: 383214 - RNA, 32 nt, Homo Sapiens
aggaaugggaaaugaagaagaccuagaagagg

SEQ ID NO: 383215 - RNA, 32 nt, Homo Sapiens
ccacaggcgccuuccucuguccuuccugcucu

SEQ ID NO: 383216 - RNA, 32 nt, Homo Sapiens
agacauggcuccaggugcuuagcaaucaaugg

SEQ ID NO: 383217 - RNA, 32 nt, Homo Sapiens
gcgaugcucugggaacccuugggguuugggga

SEQ ID NO: 383218 - RNA, 32 nt, Homo Sapiens
ugauuuaaaaacagaaaaugcaaaguuggacu

SEQ ID NO: 383219 - RNA, 32 nt, Homo Sapiens
uauuauaaucaucccucuauuauucuuaaaug

SEQ ID NO: 383220 - RNA, 32 nt, Homo Sapiens
aauuagucgggcgugcuggugcaugccuguaa

SEQ ID NO: 383221 - RNA, 32 nt, Homo Sapiens
caaugaacucgcucuucaaauaccauaguuca

SEQ ID NO: 383222 - RNA, 32 nt, Homo Sapiens
aaaaauguaggauacuuuuuauuuggggcuca

SEQ ID NO: 383223 - RNA, 32 nt, Homo Sapiens
gcgagugcugcuggccggcgaggccgcgcggg

SEQ ID NO: 383224 - RNA, 32 nt, Homo Sapiens
uuuauaacauauauauuaguugauguuuaccu

SEQ ID NO: 383225 - RNA, 32 nt, Homo Sapiens
uucccauaugcugucuuaauucuuuucacuca

SEQ ID NO: 383226 - RNA, 32 nt, Homo Sapiens
auccgguacugcagagagacaccuggucagcc

SEQ ID NO: 383227 - RNA, 32 nt, Homo Sapiens
cacaaugagcagccacgcucaccgggaagcag

SEQ ID NO: 383228 - RNA, 32 nt, Homo Sapiens
cauauuuuuauguacuuguuucauguacuugu

SEQ ID NO: 383229 - RNA, 32 nt, Homo Sapiens
cugagaccuggccgcggcucggaggcucccgc

SEQ ID NO: 383230 - RNA, 32 nt, Homo Sapiens
cuccgcccugccggcgucuggggccgcgaggg

SEQ ID NO: 383231 - RNA, 32 nt, Homo Sapiens
gguuucaccgugcuggccaggcuggucuagaa

SEQ ID NO: 383232 - RNA, 32 nt, Homo Sapiens
gcgccucagguggaauccugcccugugccuca

SEQ ID NO: 383233 - RNA, 32 nt, Homo Sapiens
uuugaaaggaugugaaucauggauggaaggcc

SEQ ID NO: 383234 - RNA, 32 nt, Homo Sapiens
uuucuuuagagcauugccauucccugccuggg

SEQ ID NO: 383235 - RNA, 32 nt, Homo Sapiens
ccaaguccaagcauaccaacacgagcaggcua

SEQ ID NO: 383236 - RNA, 29 nt, Homo Sapiens
gcucuccauaugcugucuauaaugagaau

SEQ ID NO: 383237 - RNA, 32 nt, Homo Sapiens
uguagcuucaaucaugucugguaaccgggugc

SEQ ID NO: 383238 - RNA, 32 nt, Homo Sapiens
gugaccuuuuucugcuguaggaagugauguug

SEQ ID NO: 383239 - RNA, 32 nt, Homo Sapiens
uuuuggcucccucgcccuaagaggcucuuccu

SEQ ID NO: 383240 - RNA, 32 nt, Homo Sapiens
cggggggccaugccgugccggagggaggagga

SEQ ID NO: 383241 - RNA, 32 nt, Homo Sapiens
cauaacaugaguguacuaacuaccuucuaugc

SEQ ID NO: 383242 - RNA, 32 nt, Homo Sapiens
ucugcucugugcagcuggcccgcaauggggcc

SEQ ID NO: 383243 - RNA, 32 nt, Homo Sapiens
aauauuuucuucugcacccacuucuaaauuua

SEQ ID NO: 383244 - RNA, 32 nt, Homo Sapiens
uuccuaggggaaaaaggggggcugggagugau

SEQ ID NO: 383245 - RNA, 32 nt, Homo Sapiens
agaggagacagaggccugaagcaaagacaucu

SEQ ID NO: 383246 - RNA, 32 nt, Homo Sapiens
caauucaccugccccucccccaucccagguug

SEQ ID NO: 383247 - RNA, 32 nt, Homo Sapiens
cuuuauuucuauuaugaauauuuuagcgauua

SEQ ID NO: 383248 - RNA, 32 nt, Homo Sapiens
auagaagaacuaaaggauaacuucaaacuaau

SEQ ID NO: 383249 - RNA, 32 nt, Homo Sapiens
gauagggaccagcacuguacauuuguucccaa

SEQ ID NO: 383250 - RNA, 32 nt, Homo Sapiens
aaaaucuaaaagaaaacagacacagagcaaga

SEQ ID NO: 383251 - RNA, 32 nt, Homo Sapiens
cgcccucggugacacacauuuaugccaucugc

SEQ ID NO: 383252 - RNA, 32 nt, Homo Sapiens
uccccuggcaccuuuacucuucgcccuuccuc

SEQ ID NO: 383253 - RNA, 30 nt, Homo Sapiens
cgccccuugcuaaugggcggaccagugaaa

SEQ ID NO: 383254 - RNA, 32 nt, Homo Sapiens
ggugaagaggggcugcuauggguggaaucuga

SEQ ID NO: 383255 - RNA, 32 nt, Homo Sapiens
uccaaagugaaaauaagauacacaauaaucau

SEQ ID NO: 383256 - RNA, 32 nt, Homo Sapiens
aauuaaagauaaaaaucuuuucuacuuuucuu

SEQ ID NO: 383257 - RNA, 32 nt, Homo Sapiens
ucagcuauuuagugauauauuuuauggguggg

SEQ ID NO: 383258 - RNA, 29 nt, Homo Sapiens
caaaagucauauguguggcaagaucuuua

SEQ ID NO: 383259 - RNA, 28 nt, Homo Sapiens
ccccugggccugccaaggaugacacugc

SEQ ID NO: 383260 - RNA, 32 nt, Homo Sapiens
gcucaaaagucaccuuucggaggggucuccac

SEQ ID NO: 383261 - RNA, 32 nt, Homo Sapiens
ugccacuuuaaaugucuuaaauuuguuuccug

SEQ ID NO: 383262 - RNA, 32 nt, Homo Sapiens
cuaaagaaguauuuuaacaaaaaucuauuaug

SEQ ID NO: 383263 - RNA, 32 nt, Homo Sapiens
gaccaucucgcugcuggugggcuucucagcgg

SEQ ID NO: 383264 - RNA, 32 nt, Homo Sapiens
gacuggaugaauuaugccaucuuaccaaggca

SEQ ID NO: 383265 - RNA, 32 nt, Homo Sapiens
ccagacccugcaggggccccccugcuuggcuc

SEQ ID NO: 383266 - RNA, 32 nt, Homo Sapiens
aaaaaacuaaucuuggcauccuaucacuaugu

SEQ ID NO: 383267 - RNA, 32 nt, Homo Sapiens
gguguggcgggcuggggcuggugcuggccagc

SEQ ID NO: 383268 - RNA, 32 nt, Homo Sapiens
uccgaggccccgggacgugggcccauggucgg

SEQ ID NO: 383269 - RNA, 32 nt, Homo Sapiens
gaguaaauaaauauacuagaaaagcaaauucu

SEQ ID NO: 383270 - RNA, 32 nt, Homo Sapiens
auggcccaggaaugggggcgcugguugggcuu

SEQ ID NO: 383271 - RNA, 32 nt, Homo Sapiens
gcugugcaguggggcgcugggugcuggcggug

SEQ ID NO: 383272 - RNA, 32 nt, Homo Sapiens
ucccuccugcugcuaccacugaugcgagggaa

SEQ ID NO: 383273 - RNA, 32 nt, Homo Sapiens
auuuuacaugcuuuugaguuaauguuggaaaa

SEQ ID NO: 383274 - RNA, 32 nt, Homo Sapiens
uaaaauauuauguacauuauaaaacauacaca

SEQ ID NO: 383275 - RNA, 32 nt, Homo Sapiens
acaggguggggguggggaggggcgguguuaac

SEQ ID NO: 383276 - RNA, 32 nt, Homo Sapiens
cggcucaugcugccggcccugcgccugcccag

SEQ ID NO: 383277 - RNA, 32 nt, Homo Sapiens
aggguguuggaaaaugcuauauuaauaaaucu

SEQ ID NO: 383278 - RNA, 32 nt, Homo Sapiens
ggcucuaguuuaucuauggggcuauaaaaaca

SEQ ID NO: 383279 - RNA, 32 nt, Homo Sapiens
gaggacuuuguggaagggaaaagcaucuuguc

SEQ ID NO: 383280 - RNA, 32 nt, Homo Sapiens
cugaugucaggagagggagagggggcugagga

SEQ ID NO: 383281 - RNA, 32 nt, Homo Sapiens
caucccagacaagaaaucauggccccuugcuu

SEQ ID NO: 383282 - RNA, 32 nt, Homo Sapiens
ggauuuaugcauggaauuuaauguaguacaag

SEQ ID NO: 383283 - RNA, 32 nt, Homo Sapiens
aggcgggguuaaaguucagcucauggagcggc

SEQ ID NO: 383284 - RNA, 32 nt, Homo Sapiens
ucaucuugauucagacugucagucuauuccug

SEQ ID NO: 383285 - RNA, 32 nt, Homo Sapiens
ggucuaccacggagggcugugcuguuaggcug

SEQ ID NO: 383286 - RNA, 31 nt, Homo Sapiens
cagaugaaauaaaaaagcaggcuuuauuuaa

SEQ ID NO: 383287 - RNA, 32 nt, Homo Sapiens
gcgcgcuccgcggcugcaccggccccaugagc

SEQ ID NO: 383288 - RNA, 32 nt, Homo Sapiens
auauuuuuaagugucauaacuucuaacuauuu

SEQ ID NO: 383289 - RNA, 32 nt, Homo Sapiens
aaaaacauaacuuucuaggagcuauaaaucaa

SEQ ID NO: 383290 - RNA, 32 nt, Homo Sapiens
cugguucuauuuaauggacaugagauaauguu

SEQ ID NO: 383291 - RNA, 27 nt, Homo Sapiens
gucugcuuguccuucagcccaugccca

SEQ ID NO: 383292 - RNA, 32 nt, Homo Sapiens
caaagcaugaagauauucccagugucugucug

SEQ ID NO: 383293 - RNA, 32 nt, Homo Sapiens
cucagcacuuuaagagcacauugacaagcaug

SEQ ID NO: 383294 - RNA, 32 nt, Homo Sapiens
cuucaagauccagauaaacuuuccugucaugu

SEQ ID NO: 383295 - RNA, 32 nt, Homo Sapiens
uagacacucuguaucuagcuacucuggugggg

SEQ ID NO: 383296 - RNA, 32 nt, Homo Sapiens
aguagagacagaggggcaguguuugcaaggga

SEQ ID NO: 383297 - RNA, 32 nt, Homo Sapiens
auuccacgcucgccgcccucccuuggccgccc

SEQ ID NO: 383298 - RNA, 32 nt, Homo Sapiens
aaaccuauguuugccaaauaccagcuacugug

SEQ ID NO: 383299 - RNA, 32 nt, Homo Sapiens
uuuuuguuguuguuaacuuguucauuuaguaa

SEQ ID NO: 383300 - RNA, 32 nt, Homo Sapiens
uauguggaagcagguugcuucaagaaugugua

SEQ ID NO: 383301 - RNA, 32 nt, Homo Sapiens
ugcuggcuccugggccucccagcccuccagug

SEQ ID NO: 383302 - RNA, 32 nt, Homo Sapiens
uucuccccacgacaaccccacugcacagcaga

SEQ ID NO: 383303 - RNA, 30 nt, Homo Sapiens
ugcaggcgcgcgccaccaggccaggcuaau

SEQ ID NO: 383304 - RNA, 32 nt, Homo Sapiens
uuugguggagacgggguuucaccguguuggcc

SEQ ID NO: 383305 - RNA, 32 nt, Homo Sapiens
aggaaguacuuaccuuccuuuccagagcaauu

SEQ ID NO: 383306 - RNA, 32 nt, Homo Sapiens
gaccagacccagggaggacggcaccgcuccgc

SEQ ID NO: 383307 - RNA, 32 nt, Homo Sapiens
aggcuugcucuguagaaaacuacuucauuuua

SEQ ID NO: 383308 - RNA, 32 nt, Homo Sapiens
uucuaugcaauaacacaauaguauuacucuaa

SEQ ID NO: 383309 - RNA, 32 nt, Homo Sapiens
aaaaucgacucuucuuuuuacugucucuucug

SEQ ID NO: 383310 - RNA, 32 nt, Homo Sapiens
aaauguguucuucaguaccaucagaucagaaa

SEQ ID NO: 383311 - RNA, 32 nt, Homo Sapiens
augaaugccauuuaaucugugugauuucacca

SEQ ID NO: 383312 - RNA, 32 nt, Homo Sapiens
ugagagugccugcuagaggagcucuguguucc

SEQ ID NO: 383313 - RNA, 32 nt, Homo Sapiens
cauuauagacauugaggaccucauccaaacaa

SEQ ID NO: 383314 - RNA, 32 nt, Homo Sapiens
guaauuuuauuagcuucuuuuggacccucuaa

SEQ ID NO: 383315 - RNA, 32 nt, Homo Sapiens
cuaauggcuucucuauaucuuuuacauggaga

SEQ ID NO: 383316 - RNA, 32 nt, Homo Sapiens
ggcccaggagucaagaaaagcuuuugugaaag

SEQ ID NO: 383317 - RNA, 32 nt, Homo Sapiens
auauuacaaaauuuauggcaauuuuuaaaucu

SEQ ID NO: 383318 - RNA, 32 nt, Homo Sapiens
auguuaggucacaaagcaagucuuaaaacauu

SEQ ID NO: 383319 - RNA, 32 nt, Homo Sapiens
uuuugauuuagugaauggcauuugcugguuau

SEQ ID NO: 383320 - RNA, 32 nt, Homo Sapiens
uccccuccugcccugcauuccauccauccuca

SEQ ID NO: 383321 - RNA, 32 nt, Homo Sapiens
cuaugauuugcacuuuuuauuucuaugugugc

SEQ ID NO: 383322 - RNA, 32 nt, Homo Sapiens
uaggaccccguccgggcugccgucgccucguc

SEQ ID NO: 383323 - RNA, 32 nt, Homo Sapiens
uacauaggguuaacuucuauuuauugaugaga

SEQ ID NO: 383324 - RNA, 32 nt, Homo Sapiens
gugacgucauaguggagcgcugagggcuuggu

SEQ ID NO: 383325 - RNA, 32 nt, Homo Sapiens
aaccuaaaagggaaacaaacucugacagcguc

SEQ ID NO: 383326 - RNA, 32 nt, Homo Sapiens
ugagaccucggugauguuaccuggugugguca

SEQ ID NO: 383327 - RNA, 32 nt, Homo Sapiens
cuuguuccccgaugcuggaaagaaauagcacu

SEQ ID NO: 383328 - RNA, 32 nt, Homo Sapiens
aacacccacccuccccccaaucaguguucuua

SEQ ID NO: 383329 - RNA, 32 nt, Homo Sapiens
agugcgccugcgcagcuacgaccgcagcagga

SEQ ID NO: 383330 - RNA, 32 nt, Homo Sapiens
aggagcuacuuagcgccgcggcuccuccgagg

SEQ ID NO: 383331 - RNA, 32 nt, Homo Sapiens
ggaggcugccagcaagcucugggcaugcccag

SEQ ID NO: 383332 - RNA, 32 nt, Homo Sapiens
ucggcagagcaaccccaccuccaggcauuaug

SEQ ID NO: 383333 - RNA, 32 nt, Homo Sapiens
cagaugggggccucucuggaagagggaggggc

SEQ ID NO: 383334 - RNA, 32 nt, Homo Sapiens
uauuuauggucgugcccuucccucuccucagc

SEQ ID NO: 383335 - RNA, 32 nt, Homo Sapiens
ccgccugugagcgggcccgcgcggccggcucu

SEQ ID NO: 383336 - RNA, 32 nt, Homo Sapiens
caaacaaauggcauucgcccucaucacggccu

SEQ ID NO: 383337 - RNA, 32 nt, Homo Sapiens
caauugaugugauuauuuuucuuuuaaagauu

SEQ ID NO: 383338 - RNA, 32 nt, Homo Sapiens
uauuuacuauacauuguugaagaucuauaaca

SEQ ID NO: 383339 - RNA, 32 nt, Homo Sapiens
gauagucuggucuucagaccaggaggacuccc

SEQ ID NO: 383340 - RNA, 32 nt, Homo Sapiens
aaucucuauccugaugucaugggaguccuagc

SEQ ID NO: 383341 - RNA, 32 nt, Homo Sapiens
ugcugguuguuagaacucaucuccagguagcc

SEQ ID NO: 383342 - RNA, 32 nt, Homo Sapiens
ugaagauuuggggggcgccuucucuuucuucc

SEQ ID NO: 383343 - RNA, 28 nt, Homo Sapiens
accagcaaagauuaaagcaugaaaugua

SEQ ID NO: 383344 - RNA, 32 nt, Homo Sapiens
agccaccaguucucauggguggcacucagucu

SEQ ID NO: 383345 - RNA, 32 nt, Homo Sapiens
uuugaucuaguuauuuuaauaaaggaacucua

SEQ ID NO: 383346 - RNA, 32 nt, Homo Sapiens
uguugcacauaaauaaauacaguggguacuau

SEQ ID NO: 383347 - RNA, 32 nt, Homo Sapiens
uuacgaagagugaaauauguuuuuguaccucu

SEQ ID NO: 383348 - RNA, 32 nt, Homo Sapiens
ccaucucucccgcccuugugccccacaaccug

SEQ ID NO: 383349 - RNA, 32 nt, Homo Sapiens
gcccagaugaacuggccucugccuuugguuua

SEQ ID NO: 383350 - RNA, 32 nt, Homo Sapiens
gcucauuucaaagggaaauucagaugauccag

SEQ ID NO: 383351 - RNA, 32 nt, Homo Sapiens
uguccuugcauucguggccuccuucacagccu

SEQ ID NO: 383352 - RNA, 32 nt, Homo Sapiens
augagcccaggcauagaggacuagagcccagg

SEQ ID NO: 383353 - RNA, 32 nt, Homo Sapiens
guuaguuaaaagaucauuuguaauauuaugau

SEQ ID NO: 383354 - RNA, 32 nt, Homo Sapiens
gccugguauccauggccgcugaccaggaagcu

SEQ ID NO: 383355 - RNA, 32 nt, Homo Sapiens
uuuguucucuguuguauccccagccccaaaga

SEQ ID NO: 383356 - RNA, 32 nt, Homo Sapiens
gcucagccuuuccaaugagcucuaagcaugua

SEQ ID NO: 383357 - RNA, 32 nt, Homo Sapiens
gcugagcuugcagggccgcuccccucacccgc

SEQ ID NO: 383358 - RNA, 32 nt, Homo Sapiens
cucacuaauaauaccaguguuguuaagaugcu

SEQ ID NO: 383359 - RNA, 32 nt, Homo Sapiens
accaaauucuuugcugucguuuggaaaaaaug

SEQ ID NO: 383360 - RNA, 32 nt, Homo Sapiens
gcucccugccccacccuccagugccugaggca

SEQ ID NO: 383361 - RNA, 32 nt, Homo Sapiens
ugcacccacuuccagcugcucuggccaaaauc

SEQ ID NO: 383362 - RNA, 32 nt, Homo Sapiens
uccaugauucugcccaggauccuaggccccuc

SEQ ID NO: 383363 - RNA, 32 nt, Homo Sapiens
uggcagccagcuuggaucuuccuaagagccuc

SEQ ID NO: 383364 - RNA, 32 nt, Homo Sapiens
agagcccuccaagguaccagacucuucuuacu

SEQ ID NO: 383365 - RNA, 32 nt, Homo Sapiens
gccccgagaaacaaaagcgaagaugaggacga

SEQ ID NO: 383366 - RNA, 32 nt, Homo Sapiens
caaacacccucauagacgcacccagaaagaau

SEQ ID NO: 383367 - RNA, 32 nt, Homo Sapiens
gcugcuguaggaaauaaaugaauggcucagaa

SEQ ID NO: 383368 - RNA, 32 nt, Homo Sapiens
gucaucuuuuauucuauuuccucuuugcuguu

SEQ ID NO: 383369 - RNA, 32 nt, Homo Sapiens
uauaaguuuauuaguugugauguaucaguaac

SEQ ID NO: 383370 - RNA, 32 nt, Homo Sapiens
ggccccgcgcugcagcagcagcucggccaccc

SEQ ID NO: 383371 - RNA, 32 nt, Homo Sapiens
gggugcgcgggcgggcaggggaccuuggcuaa

SEQ ID NO: 383372 - RNA, 32 nt, Homo Sapiens
agccuuuuaaagcuagaaaacugucaaagggc

SEQ ID NO: 383373 - RNA, 32 nt, Homo Sapiens
cuaugacacaaguuuaccuauguaacaaaccu

SEQ ID NO: 383374 - RNA, 32 nt, Homo Sapiens
aggcgaauccggcggguaucagagccaucaga

SEQ ID NO: 383375 - RNA, 32 nt, Homo Sapiens
gcuguggaugacuuccagcuuggucccccugu

SEQ ID NO: 383376 - RNA, 32 nt, Homo Sapiens
ggagggagcgcugggagcgagcaagcgagcgu

SEQ ID NO: 383377 - RNA, 32 nt, Homo Sapiens
gagcccaagauggugaucugcccgagacuccc

SEQ ID NO: 383378 - RNA, 32 nt, Homo Sapiens
ggccucgccaucuuggcaccgccccgcggcaa

SEQ ID NO: 383379 - RNA, 32 nt, Homo Sapiens
acugggcgguuaaagucuguguaaucugaaag

SEQ ID NO: 383380 - RNA, 32 nt, Homo Sapiens
gaugcugcagcaacuggagaaaguccucaucg

SEQ ID NO: 383381 - RNA, 32 nt, Homo Sapiens
ugaauauuuaaaaaguuaacgaaacucaaaga

SEQ ID NO: 383382 - RNA, 32 nt, Homo Sapiens
ccgaggacaucuuacuccugcugcugggccuc

SEQ ID NO: 383383 - RNA, 32 nt, Homo Sapiens
gacuccugcuccagaauugcuagacuaagaau

SEQ ID NO: 383384 - RNA, 32 nt, Homo Sapiens
gauaguguaaaauaaacuucucuguucucuau

SEQ ID NO: 383385 - RNA, 32 nt, Homo Sapiens
uguucaaguagagaaaaauacaguagagucug

SEQ ID NO: 383386 - RNA, 32 nt, Homo Sapiens
ccugaugguuugcauuugcuguuuuucacucu

SEQ ID NO: 383387 - RNA, 32 nt, Homo Sapiens
ccuuuacucugcaagaauggggaaagaaugca

SEQ ID NO: 383388 - RNA, 32 nt, Homo Sapiens
auucuucaggcuucaguaaaucuuuuuuucuu

SEQ ID NO: 383389 - RNA, 32 nt, Homo Sapiens
ggugccguccggcugcucagcugcuggcugga

SEQ ID NO: 383390 - RNA, 32 nt, Homo Sapiens
acaaacaaaaaacaaauugaccaagguuccuu

SEQ ID NO: 383391 - RNA, 32 nt, Homo Sapiens
cagggccgcccggcgcucggcagccgcccgca

SEQ ID NO: 383392 - RNA, 32 nt, Homo Sapiens
uacugguagaaaguggcagagcgaggacuaag

SEQ ID NO: 383393 - RNA, 32 nt, Homo Sapiens
ugccaagaauaaagaagugcgcggaagugacc

SEQ ID NO: 383394 - RNA, 32 nt, Homo Sapiens
aggaugaccugccacucaguccaggggcagga

SEQ ID NO: 383395 - RNA, 32 nt, Homo Sapiens
uuggagagcaguaaaagacugaagauaauguu

SEQ ID NO: 383396 - RNA, 32 nt, Homo Sapiens
ccuuuuuuaaacaaguguuacuugugccggga

SEQ ID NO: 383397 - RNA, 32 nt, Homo Sapiens
cuuugccacauucagcacauauauaacgucuc

SEQ ID NO: 383398 - RNA, 32 nt, Homo Sapiens
acgcucauggaaccucuuucuuugaucuucuu

SEQ ID NO: 383399 - RNA, 32 nt, Homo Sapiens
gcgggucggugagcgcggcccgggccggacau

SEQ ID NO: 383400 - RNA, 32 nt, Homo Sapiens
ggcugcagccucaggaugaggcagaaggaagg

SEQ ID NO: 383401 - RNA, 32 nt, Homo Sapiens
ugcucgcgcgaaggcugcggcgcggcgcucgc

SEQ ID NO: 383402 - RNA, 32 nt, Homo Sapiens
cuccagccugcgccugggguuggaggugccca

SEQ ID NO: 383403 - RNA, 32 nt, Homo Sapiens
cuuuagucuugaaugucuuaugcucaauuauu

SEQ ID NO: 383404 - RNA, 32 nt, Homo Sapiens
gggagguggagcuucaagaugccugcuguguu

SEQ ID NO: 383405 - RNA, 32 nt, Homo Sapiens
cccugcaagcacuaugaauggaccuuacuacu

SEQ ID NO: 383406 - RNA, 32 nt, Homo Sapiens
cuaccagugucugcuauuuugaagaagcuagg

SEQ ID NO: 383407 - RNA, 32 nt, Homo Sapiens
gugguguucuuggucuuaaauuuaacagcaaa

SEQ ID NO: 383408 - RNA, 32 nt, Homo Sapiens
gcgcuccugccgcagagcuugccgcgccaaau

SEQ ID NO: 383409 - RNA, 32 nt, Homo Sapiens
auuuaguaaacuucuuuuuuguuuguuuauuu

SEQ ID NO: 383410 - RNA, 32 nt, Homo Sapiens
ccaaagaaugagaaaggacagaauuaaccaag

SEQ ID NO: 383411 - RNA, 32 nt, Homo Sapiens
cgcgucgccggugcggccgccauuguccggcg

SEQ ID NO: 383412 - RNA, 32 nt, Homo Sapiens
gcagcacugugcuuguaucuaggguggggggu

SEQ ID NO: 383413 - RNA, 32 nt, Homo Sapiens
uuugauugauaaaaaguuaccucucaguauuu

SEQ ID NO: 383414 - RNA, 32 nt, Homo Sapiens
uuaaacauuuccccugaaaguccaccucaaag

SEQ ID NO: 383415 - RNA, 32 nt, Homo Sapiens
uuugaaaauaaaucuuuauuuugaacuuuaua

SEQ ID NO: 383416 - RNA, 32 nt, Homo Sapiens
aauugagcagugcugcaacauguacuguauga

SEQ ID NO: 383417 - RNA, 30 nt, Homo Sapiens
cgggccaagcggaugggggaccccgaaggc

SEQ ID NO: 383418 - RNA, 32 nt, Homo Sapiens
agagagaugcacuuaagaauagagugaacugc

SEQ ID NO: 383419 - RNA, 32 nt, Homo Sapiens
uauauuuuuagacucaucaaucaaauaaguau

SEQ ID NO: 383420 - RNA, 30 nt, Homo Sapiens
augggguuucaccggguuagccaggauggu

SEQ ID NO: 383421 - RNA, 31 nt, Homo Sapiens
cgggggcagcgcagcugugcucaagacugga

SEQ ID NO: 383422 - RNA, 32 nt, Homo Sapiens
cuguggcuuuucugaucuaacuucuagcuaaa

SEQ ID NO: 383423 - RNA, 29 nt, Homo Sapiens
gacauugugugggccagaggcagggaugg

SEQ ID NO: 383424 - RNA, 32 nt, Homo Sapiens
cuaaagauauaaaaauuagucguguguggugg

SEQ ID NO: 383425 - RNA, 32 nt, Homo Sapiens
ccccuucuagaaugcaaagauaacccagggcu

SEQ ID NO: 383426 - RNA, 32 nt, Homo Sapiens
uuugucggccccauccacagccgcugcguccu

SEQ ID NO: 383427 - RNA, 32 nt, Homo Sapiens
guacauuuguucaacucugagcuaggagaaaa

SEQ ID NO: 383428 - RNA, 32 nt, Homo Sapiens
guggacuagacaaaguuguaucuagacccuua

SEQ ID NO: 383429 - RNA, 32 nt, Homo Sapiens
ucucugaggugggucgggcgcccucugcccgc

SEQ ID NO: 383430 - RNA, 32 nt, Homo Sapiens
caaacucaugauuuuguagucacaccacuuca

SEQ ID NO: 383431 - RNA, 32 nt, Homo Sapiens
ccaauagggaaauuauuuuaaguuauuacauu

SEQ ID NO: 383432 - RNA, 32 nt, Homo Sapiens
guuggccgcgcgcucggggaccgugcucgugg

SEQ ID NO: 383433 - RNA, 32 nt, Homo Sapiens
ccgggcgcccgggccuuugcuaucucgccguc

SEQ ID NO: 383434 - RNA, 32 nt, Homo Sapiens
aagcugcccaggaagaagacuggccauuaugc

SEQ ID NO: 383435 - RNA, 31 nt, Homo Sapiens
augauuuccacaucaugagcgaaguucuuug

SEQ ID NO: 383436 - RNA, 27 nt, Homo Sapiens
gcuuggauuuccuacagcccccguggg

SEQ ID NO: 383437 - RNA, 32 nt, Homo Sapiens
agacagcaaagaggggcaauggcugcuuucag

SEQ ID NO: 383438 - RNA, 30 nt, Homo Sapiens
acgggguuucaccguguuagccaggguggu

SEQ ID NO: 383439 - RNA, 32 nt, Homo Sapiens
cccgcucccgccgccaccuccuccccugccgc

SEQ ID NO: 383440 - RNA, 32 nt, Homo Sapiens
ggcagcgaggcggggcgggcugaggccagcgc

SEQ ID NO: 383441 - RNA, 32 nt, Homo Sapiens
cucuucuccuuccccugccugcaacaggcugc

SEQ ID NO: 383442 - RNA, 32 nt, Homo Sapiens
gcacgcugcggacgccuauccucccccaggcc

SEQ ID NO: 383443 - RNA, 32 nt, Homo Sapiens
ccugugacguuugcggcaccaggccgucgacg

SEQ ID NO: 383444 - RNA, 32 nt, Homo Sapiens
cucuuccauuuuugcaagcuguagaaggaaau

SEQ ID NO: 383445 - RNA, 32 nt, Homo Sapiens
ggagaugucaggggaaagauagauaguuguaa

SEQ ID NO: 383446 - RNA, 32 nt, Homo Sapiens
gcucggaagauaauugaaaccaagucugacuu

SEQ ID NO: 383447 - RNA, 32 nt, Homo Sapiens
ccccucuucucugcuccuuccaucccgcccag

SEQ ID NO: 383448 - RNA, 28 nt, Homo Sapiens
uuguauaugguaaagauuauaaaaauac

SEQ ID NO: 383449 - RNA, 32 nt, Homo Sapiens
uuuuuuccuauggaauggcauucuauauuauc

SEQ ID NO: 383450 - RNA, 32 nt, Homo Sapiens
uuagugaucaguggucaguaaucuucaaaguc

SEQ ID NO: 383451 - RNA, 32 nt, Homo Sapiens
ccuagaucccucgcaugcgcaguucacaauac

SEQ ID NO: 383452 - RNA, 32 nt, Homo Sapiens
ggggggcuuuugaggacccagcugcgucagga

SEQ ID NO: 383453 - RNA, 32 nt, Homo Sapiens
gauugcuuuuugcugccucucaucaccucugc

SEQ ID NO: 383454 - RNA, 32 nt, Homo Sapiens
uguuugagggucacaccagaagguugagucca

SEQ ID NO: 383455 - RNA, 32 nt, Homo Sapiens
uagauguguauguuuucuauuugagaguuaaa

SEQ ID NO: 383456 - RNA, 32 nt, Homo Sapiens
uguaucaugugacaggcauugggcuaaacucu

SEQ ID NO: 383457 - RNA, 32 nt, Homo Sapiens
ccguagaggggaggaaucacgugaagaugggg

SEQ ID NO: 383458 - RNA, 32 nt, Homo Sapiens
cuuauggcaaccuccgccucccggguucaagu

SEQ ID NO: 383459 - RNA, 32 nt, Homo Sapiens
gcguggguccgcgagcgccgcgcagccucccg

SEQ ID NO: 383460 - RNA, 32 nt, Homo Sapiens
gugggucguggcgguggcggcagcggcgguua

SEQ ID NO: 383461 - RNA, 32 nt, Homo Sapiens
uagccucucgaguagcugggaguacagaugca

SEQ ID NO: 383462 - RNA, 32 nt, Homo Sapiens
uuguguucucagcauucagagagcagcggugu

SEQ ID NO: 383463 - RNA, 32 nt, Homo Sapiens
auggaguuggucauggaaugggcugggcuccu

SEQ ID NO: 383464 - RNA, 32 nt, Homo Sapiens
uucacugacaggagagcagagacaggacgugu

SEQ ID NO: 383465 - RNA, 32 nt, Homo Sapiens
ugcgcaggaacagcuggugccuccgagggcgg

SEQ ID NO: 383466 - RNA, 32 nt, Homo Sapiens
acuacgacgaggccgauggcccgggcagcggg

SEQ ID NO: 383467 - RNA, 32 nt, Homo Sapiens
auguuuuacauuugauuucuaccaagaguuga

SEQ ID NO: 383468 - RNA, 32 nt, Homo Sapiens
cggcuguagcggggcuguagccgggcguugag

SEQ ID NO: 383469 - RNA, 32 nt, Homo Sapiens
gcucugagggguucauggaggcagaugcuggu

SEQ ID NO: 383470 - RNA, 32 nt, Homo Sapiens
ggcagggccggugauggugccucccccuugcu

SEQ ID NO: 383471 - RNA, 32 nt, Homo Sapiens
cggaggcuggcagggggcgcuggaagcuggag

SEQ ID NO: 383472 - RNA, 32 nt, Homo Sapiens
ugaaucaucacauucuucugguaaauauuuuc

SEQ ID NO: 383473 - RNA, 32 nt, Homo Sapiens
agagaaaaauggugaagaaaacaaagaugaug

SEQ ID NO: 383474 - RNA, 32 nt, Homo Sapiens
ggauugccuuuccccaggaucugugucggcca

SEQ ID NO: 383475 - RNA, 32 nt, Homo Sapiens
aggcaccggccgcgcggcgggaggaggugccg

SEQ ID NO: 383476 - RNA, 32 nt, Homo Sapiens
cugaauccuaucaauuauucugaugcugggac

SEQ ID NO: 383477 - RNA, 32 nt, Homo Sapiens
accaucaccucucgggcagaucagcacagaga

SEQ ID NO: 383478 - RNA, 32 nt, Homo Sapiens
uauacuacagcuuugugacuguauauaaagga

SEQ ID NO: 383479 - RNA, 32 nt, Homo Sapiens
acggaucguuuuugucagaugacacugguggc

SEQ ID NO: 383480 - RNA, 32 nt, Homo Sapiens
ugaggaauuggaaaagaaccugcuguuguacc

SEQ ID NO: 383481 - RNA, 32 nt, Homo Sapiens
agagcuuggccaacuguaaucuuaaccaagaa

SEQ ID NO: 383482 - RNA, 30 nt, Homo Sapiens
cagcacuggaaaggaggggaaaccaaacuu

SEQ ID NO: 383483 - RNA, 32 nt, Homo Sapiens
uuccgguaugugaugacgguaugucauguaug

SEQ ID NO: 383484 - RNA, 32 nt, Homo Sapiens
agcccacccacuuuccucugcuucccuggcac

SEQ ID NO: 383485 - RNA, 32 nt, Homo Sapiens
aucugcuuagccauugaugaugaugacaaaac

SEQ ID NO: 383486 - RNA, 30 nt, Homo Sapiens
gagugagucaucccugcccaucugcugagc

SEQ ID NO: 383487 - RNA, 29 nt, Homo Sapiens
guaaauauagugauuuauaccaauaauua

SEQ ID NO: 383488 - RNA, 32 nt, Homo Sapiens
ucuauaggugggcaucucacuccaccaaagga

SEQ ID NO: 383489 - RNA, 32 nt, Homo Sapiens
auuucucuguggaacguguucggucccgagug

SEQ ID NO: 383490 - RNA, 32 nt, Homo Sapiens
aaucaaggaguuuuaauauuuucagaagugca

SEQ ID NO: 383491 - RNA, 32 nt, Homo Sapiens
gcuaaaaguauuugguauacagucuggaaaau

SEQ ID NO: 383492 - RNA, 32 nt, Homo Sapiens
ggcaucuggcagcaagaaggugaggcaucagg

SEQ ID NO: 383493 - RNA, 32 nt, Homo Sapiens
uggccuccaaccagagaaaacaaccugccaag

SEQ ID NO: 383494 - RNA, 32 nt, Homo Sapiens
uguaauuuaugaaaaagaugucuguacuaaca

SEQ ID NO: 383495 - RNA, 32 nt, Homo Sapiens
ugaggcauacuguguccagcggcgucuccggg

SEQ ID NO: 383496 - RNA, 32 nt, Homo Sapiens
cugaaaucuuggacuguuuaugaccuacuggc

SEQ ID NO: 383497 - RNA, 32 nt, Homo Sapiens
auuaaucuccaaguaauuuccuugauggcacu

SEQ ID NO: 383498 - RNA, 32 nt, Homo Sapiens
caucggauccuucauuggguacuccugaaauc

SEQ ID NO: 383499 - RNA, 32 nt, Homo Sapiens
uuuaucuuugaccaaccgaacaugaccaaaaa

SEQ ID NO: 383500 - RNA, 32 nt, Homo Sapiens
cucugcucucugagcuuuccguugcuucccug

SEQ ID NO: 383501 - RNA, 30 nt, Homo Sapiens
ggcgcggcgcccgggagcaggugugcagga

SEQ ID NO: 383502 - RNA, 32 nt, Homo Sapiens
gacuuuugaggccuuugggaugagaugaauau

SEQ ID NO: 383503 - RNA, 32 nt, Homo Sapiens
agaucaacacuacucucccagcaucucuuauu

SEQ ID NO: 383504 - RNA, 32 nt, Homo Sapiens
aaauuagcugggugugguggcaugcgccugua

SEQ ID NO: 383505 - RNA, 30 nt, Homo Sapiens
uuacgcgucugugccgucagcucucgugca

SEQ ID NO: 383506 - RNA, 32 nt, Homo Sapiens
aaaaacaucgacgauacauugaaaugugugaa

SEQ ID NO: 383507 - RNA, 32 nt, Homo Sapiens
gaagcccgaagagcaggaggccaggcacucgc

SEQ ID NO: 383508 - RNA, 32 nt, Homo Sapiens
ccuccuuuguuuuuguaauaauuaaaauacuu

SEQ ID NO: 383509 - RNA, 32 nt, Homo Sapiens
gccccagugacaugugcugauccuccugccuu

SEQ ID NO: 383510 - RNA, 32 nt, Homo Sapiens
cccgugggcacguguccacuuuuaaucagggg

SEQ ID NO: 383511 - RNA, 32 nt, Homo Sapiens
aggggacagcugccucccaccuugccugggug

SEQ ID NO: 383512 - RNA, 32 nt, Homo Sapiens
agucuaugacgauacuuacuucugaacacaaa

SEQ ID NO: 383513 - RNA, 32 nt, Homo Sapiens
agaucauguuaaagcucuuaauuuauauuaaa

SEQ ID NO: 383514 - RNA, 32 nt, Homo Sapiens
cagguccgcgcgcccagcggaaccugcuuccc

SEQ ID NO: 383515 - RNA, 32 nt, Homo Sapiens
agccaccccuccguccuccccagggccgguau

SEQ ID NO: 383516 - RNA, 32 nt, Homo Sapiens
gcugcccaccucguuccccagcccucaccccu

SEQ ID NO: 383517 - RNA, 32 nt, Homo Sapiens
agacaaaauuuuucuaaaacuccaucaaggcu

SEQ ID NO: 383518 - RNA, 32 nt, Homo Sapiens
uggaggucggcgccggcccccgccuuccgcgc

SEQ ID NO: 383519 - RNA, 32 nt, Homo Sapiens
ugaaucaagaugcagaacacagaggaauaauc

SEQ ID NO: 383520 - RNA, 32 nt, Homo Sapiens
caugacgcucguccaaggccacuuccugaggg

SEQ ID NO: 383521 - RNA, 32 nt, Homo Sapiens
uguuuacaguaguuuugaaaucucuaaguccu

SEQ ID NO: 383522 - RNA, 32 nt, Homo Sapiens
cuuugauuccuccucaguucuaccuaguuuca

SEQ ID NO: 383523 - RNA, 32 nt, Homo Sapiens
gagaccugggcucuagucuacucugugacucg

SEQ ID NO: 383524 - RNA, 32 nt, Homo Sapiens
acauuucuguuucacugaauguaaauuuugaa

SEQ ID NO: 383525 - RNA, 32 nt, Homo Sapiens
cuucugugccacccccggucuaugucgagagc

SEQ ID NO: 383526 - RNA, 32 nt, Homo Sapiens
uguaaaaccuucuauuugaugucauuccauuu

SEQ ID NO: 383527 - RNA, 32 nt, Homo Sapiens
gugcccugaugccccagcuagcaggagcuacu

SEQ ID NO: 383528 - RNA, 32 nt, Homo Sapiens
aguauuuuauauuuuugcuguuguuauauaug

SEQ ID NO: 383529 - RNA, 32 nt, Homo Sapiens
uaggaaaagauauuuuuauaggcuuggauguu

SEQ ID NO: 383530 - RNA, 32 nt, Homo Sapiens
ggcagggcggagaggagcggccggagucagcg

SEQ ID NO: 383531 - RNA, 31 nt, Homo Sapiens
caccgccccccucauucccaggcaagggcuu

SEQ ID NO: 383532 - RNA, 32 nt, Homo Sapiens
agaaaugugugagcauuugucacacagggaga

SEQ ID NO: 383533 - RNA, 32 nt, Homo Sapiens
ccugugugggucuuaccugugcaggucuccug

SEQ ID NO: 383534 - RNA, 32 nt, Homo Sapiens
aaagccaccucauuuccaaacaucucacucag

SEQ ID NO: 383535 - RNA, 32 nt, Homo Sapiens
augagcagaaacaaaacauuguguaacauguu

SEQ ID NO: 383536 - RNA, 32 nt, Homo Sapiens
cagcccuucuccagcaucacagaugaccucca

SEQ ID NO: 383537 - RNA, 32 nt, Homo Sapiens
gacuucuuuccacacgauuuccuaucucccuu

SEQ ID NO: 383538 - RNA, 32 nt, Homo Sapiens
aggaaaggggcuacuagagucuuaccaacagc

SEQ ID NO: 383539 - RNA, 32 nt, Homo Sapiens
aaauaaaauaaaucccucuuuguuuaaaaaaa

SEQ ID NO: 383540 - RNA, 32 nt, Homo Sapiens
gcacaucugccugucccuguaucagcggcuac

SEQ ID NO: 383541 - RNA, 32 nt, Homo Sapiens
uugaaacaguugcaggagucacuaucaucuaa

SEQ ID NO: 383542 - RNA, 32 nt, Homo Sapiens
guaaauauaauguauuggucuuucuccguguu

SEQ ID NO: 383543 - RNA, 32 nt, Homo Sapiens
gaguucaaauuaacuugcuuaagugucauacu

SEQ ID NO: 383544 - RNA, 32 nt, Homo Sapiens
auggcuucaggaggcgacuagucuaugaaaga

SEQ ID NO: 383545 - RNA, 32 nt, Homo Sapiens
gcccaucucauguuuuuauucccuuuauucuu

SEQ ID NO: 383546 - RNA, 32 nt, Homo Sapiens
uugugacaucacauucauccccugggcgaugg

SEQ ID NO: 383547 - RNA, 32 nt, Homo Sapiens
agcccggcuguggcuccaccuccagcucuccg

SEQ ID NO: 383548 - RNA, 32 nt, Homo Sapiens
gaccacccuccugucacccggaccucagugga

SEQ ID NO: 383549 - RNA, 32 nt, Homo Sapiens
ccacggugauggagacggcagcucaacaggag

SEQ ID NO: 383550 - RNA, 32 nt, Homo Sapiens
uaacuacaauuuauuauuguccaauuauaugu

SEQ ID NO: 383551 - RNA, 32 nt, Homo Sapiens
augccucccucauuggcucugggguucccuuu

SEQ ID NO: 383552 - RNA, 32 nt, Homo Sapiens
uacucuauuacuuguucuuaauucucuguucu

SEQ ID NO: 383553 - RNA, 32 nt, Homo Sapiens
acagguaaccauguuguguucuucuaggcauu

SEQ ID NO: 383554 - RNA, 32 nt, Homo Sapiens
ugggcugcagcaagccgcaccuggagaagcug

SEQ ID NO: 383555 - RNA, 31 nt, Homo Sapiens
uucaaaaaugguaauuaagucauuaggauaa

SEQ ID NO: 383556 - RNA, 32 nt, Homo Sapiens
augaugucaggagaucgaaaucagccuggcca

SEQ ID NO: 383557 - RNA, 32 nt, Homo Sapiens
augcacagaauaugaauggcagcaaaucuuug

SEQ ID NO: 383558 - RNA, 32 nt, Homo Sapiens
ccauuuggaucuauuuuaaaucuuuuagaaau

SEQ ID NO: 383559 - RNA, 32 nt, Homo Sapiens
uguacaggggccaugccccaccccccuccucc

SEQ ID NO: 383560 - RNA, 32 nt, Homo Sapiens
ugccagaaaaauuuggggcuaggcaagcccca

SEQ ID NO: 383561 - RNA, 32 nt, Homo Sapiens
aaaauauauauucuguacuuaaucccuuuauu

SEQ ID NO: 383562 - RNA, 32 nt, Homo Sapiens
agucuguuucugaugcguuggcguggggggug

SEQ ID NO: 383563 - RNA, 32 nt, Homo Sapiens
ggcugggccgugguagacucauaguuccucuu

SEQ ID NO: 383564 - RNA, 32 nt, Homo Sapiens
ccagaacaguggcagggggcccggggcgcacg

SEQ ID NO: 383565 - RNA, 32 nt, Homo Sapiens
caacugagcagccaaaguacuuugagaacacg

SEQ ID NO: 383566 - RNA, 32 nt, Homo Sapiens
guccaacccccuccccgcuuuucacagacugg

SEQ ID NO: 383567 - RNA, 32 nt, Homo Sapiens
cacggcccgcagccuggcaucugugcgugugg

SEQ ID NO: 383568 - RNA, 32 nt, Homo Sapiens
aaacagaaaccugguuauaaccugacgcuaaa

SEQ ID NO: 383569 - RNA, 32 nt, Homo Sapiens
uccaaaugcuuuucuuuuuugaguuguauauu

SEQ ID NO: 383570 - RNA, 32 nt, Homo Sapiens
ccuggccagugcugaagggcuguugugauguu

SEQ ID NO: 383571 - RNA, 32 nt, Homo Sapiens
gcagaugcaaagccugaaaguuuaaugaagag

SEQ ID NO: 383572 - RNA, 32 nt, Homo Sapiens
ggggcagguguagccucugugccucguugucc

SEQ ID NO: 383573 - RNA, 32 nt, Homo Sapiens
ggacacuuuucuuggagugcuacuucagaagc

SEQ ID NO: 383574 - RNA, 32 nt, Homo Sapiens
aggcauaacuggaugccuggauuguccugcca

SEQ ID NO: 383575 - RNA, 32 nt, Homo Sapiens
uccuccagccccagcugcccuggcuuccccag

SEQ ID NO: 383576 - RNA, 32 nt, Homo Sapiens
ucagcgugguggccgucuggcugaccugggcc

SEQ ID NO: 383577 - RNA, 32 nt, Homo Sapiens
auuaaaaagcuauauuuuccugagagacugau

SEQ ID NO: 383578 - RNA, 32 nt, Homo Sapiens
ggaacagggcgacaaugcacagacugucucug

SEQ ID NO: 383579 - RNA, 32 nt, Homo Sapiens
agcagcccuuuuuacagucuaguuaggagaga

SEQ ID NO: 383580 - RNA, 32 nt, Homo Sapiens
auucuguuugaagauuuccgguccuggcuuuc

SEQ ID NO: 383581 - RNA, 32 nt, Homo Sapiens
agaucaggaguucgggaccagccugggcaaca

SEQ ID NO: 383582 - RNA, 32 nt, Homo Sapiens
acaugcuguauaugcaauguccagcagucuga

SEQ ID NO: 383583 - RNA, 32 nt, Homo Sapiens
uuauuuccuccucccgugccagcccuucuuuu

SEQ ID NO: 383584 - RNA, 32 nt, Homo Sapiens
uuucuguagccccuuacccagccaugucugga

SEQ ID NO: 383585 - RNA, 32 nt, Homo Sapiens
auacuuaugucuucuuucauuuuuuaaauuaa

SEQ ID NO: 383586 - RNA, 32 nt, Homo Sapiens
cuuguccgaguugccucccacuggaggucagg

SEQ ID NO: 383587 - RNA, 32 nt, Homo Sapiens
acuugagacugaguaauuuauaaagaaaagag

SEQ ID NO: 383588 - RNA, 32 nt, Homo Sapiens
aagugggaaggggguauggugagugcggcaau

SEQ ID NO: 383589 - RNA, 32 nt, Homo Sapiens
caugugguucucguccucuccugucccuucca

SEQ ID NO: 383590 - RNA, 32 nt, Homo Sapiens
ccucuagacaggcagccuccucagcuguggag

SEQ ID NO: 383591 - RNA, 32 nt, Homo Sapiens
ucaucccuuugcaaccucucuucuaucaucac

SEQ ID NO: 383592 - RNA, 32 nt, Homo Sapiens
gggaaauaaaauuuaaacucuagagauaaaug

SEQ ID NO: 383593 - RNA, 32 nt, Homo Sapiens
cuauaacaaaagacagauugacaagagaaaaa

SEQ ID NO: 383594 - RNA, 32 nt, Homo Sapiens
uuguccuggugcccccgccccuggucccaacc

SEQ ID NO: 383595 - RNA, 32 nt, Homo Sapiens
ucuacagccugacccagcugcccgcuaucgca

SEQ ID NO: 383596 - RNA, 32 nt, Homo Sapiens
ggcaucuuccuuacuuuguccauccuccggac

SEQ ID NO: 383597 - RNA, 32 nt, Homo Sapiens
cccuagaaaaggaaagccuuuuccuguuugau

SEQ ID NO: 383598 - RNA, 32 nt, Homo Sapiens
uucugauuuuuuaacuaaauuuucauuagaaa

SEQ ID NO: 383599 - RNA, 32 nt, Homo Sapiens
uagagaggccacgguucagacaaugguauaua

SEQ ID NO: 383600 - RNA, 32 nt, Homo Sapiens
auuugauuuugaugaaauuacaaauacaugca

SEQ ID NO: 383601 - RNA, 32 nt, Homo Sapiens
cauuuagaggagccagugaaagaaucaaucug

SEQ ID NO: 383602 - RNA, 32 nt, Homo Sapiens
ggggguaaggauuuuuauucuugggcuuauag

SEQ ID NO: 383603 - RNA, 32 nt, Homo Sapiens
caggagguccguacaagauacaggucauaaag

SEQ ID NO: 383604 - RNA, 32 nt, Homo Sapiens
cucaggaacugggaaggggagggaaggccacg

SEQ ID NO: 383605 - RNA, 32 nt, Homo Sapiens
aguacuuaagcacuucugaacuuggguuucau

SEQ ID NO: 383606 - RNA, 32 nt, Homo Sapiens
caguagaguaaaaauaaaaaacagugucauuu

SEQ ID NO: 383607 - RNA, 32 nt, Homo Sapiens
auuacucuggagcuuuguauuauucuuuaaaa

SEQ ID NO: 383608 - RNA, 32 nt, Homo Sapiens
cgccccgccucgucgaucuccccuucuacccc

SEQ ID NO: 383609 - RNA, 32 nt, Homo Sapiens
aucccacuggugacuccaacccuaccaccaug

SEQ ID NO: 383610 - RNA, 32 nt, Homo Sapiens
augagaaaguggacauuuaagguccaaguaga

SEQ ID NO: 383611 - RNA, 32 nt, Homo Sapiens
accaaaucucaaagcaaugagaagcauuccua

SEQ ID NO: 383612 - RNA, 32 nt, Homo Sapiens
ucguagcuuguacagaucaagagaauauacug

SEQ ID NO: 383613 - RNA, 32 nt, Homo Sapiens
acacccccaaccccaggcagccucuagagccu

SEQ ID NO: 383614 - RNA, 32 nt, Homo Sapiens
ugcaaauuaccuuguaugcugcuaugcaaauu

SEQ ID NO: 383615 - RNA, 32 nt, Homo Sapiens
ccugacccccuccaagagcaucaggacaacaa

SEQ ID NO: 383616 - RNA, 32 nt, Homo Sapiens
aaaauucuuuugcuaccauuuuccuguguacu

SEQ ID NO: 383617 - RNA, 32 nt, Homo Sapiens
cgcucucgcucuucucuucuuuguuaagccaa

SEQ ID NO: 383618 - RNA, 32 nt, Homo Sapiens
cuaugguuuggaagagcagccuuuuucaucag

SEQ ID NO: 383619 - RNA, 32 nt, Homo Sapiens
ugugcccgugcagcuggcaccaacagaacguu

SEQ ID NO: 383620 - RNA, 32 nt, Homo Sapiens
cauuccccuccccacaccuacccauuugaggg

SEQ ID NO: 383621 - RNA, 32 nt, Homo Sapiens
uccaacccuuugcauuugauuucuaaacauuc

SEQ ID NO: 383622 - RNA, 32 nt, Homo Sapiens
gaacaauuuauaacuguguuuucaugguugcg

SEQ ID NO: 383623 - RNA, 32 nt, Homo Sapiens
ugguucuccaugccuauaaucccggcuacucg

SEQ ID NO: 383624 - RNA, 32 nt, Homo Sapiens
ggcccaagcucccuccucucccucuguagagc

SEQ ID NO: 383625 - RNA, 32 nt, Homo Sapiens
acaguuuucucaaaucaacaaacagccuucuc

SEQ ID NO: 383626 - RNA, 32 nt, Homo Sapiens
guguccgguuuucuauugcauuuuuucaagug

SEQ ID NO: 383627 - RNA, 32 nt, Homo Sapiens
aaccuguccaggcacaguggcuccucaagccu

SEQ ID NO: 383628 - RNA, 32 nt, Homo Sapiens
gccugaugguuaguguuaaugauccugucuua

SEQ ID NO: 383629 - RNA, 32 nt, Homo Sapiens
aauaaaaggagaaaugauauuuuucuaaaaaa

SEQ ID NO: 383630 - RNA, 32 nt, Homo Sapiens
gacuccgggguugggugcccuguccuucccug

SEQ ID NO: 383631 - RNA, 32 nt, Homo Sapiens
ugauuccaccccagccugccuggacaacccuc

SEQ ID NO: 383632 - RNA, 32 nt, Homo Sapiens
acuugucuagggaugccuggaaguguauaaaa

SEQ ID NO: 383633 - RNA, 32 nt, Homo Sapiens
gggaggaugaggccauggcauucuuccccuag

SEQ ID NO: 383634 - RNA, 32 nt, Homo Sapiens
auuacaggcgugagccacucugcccggccugu

SEQ ID NO: 383635 - RNA, 32 nt, Homo Sapiens
ggccucggccccaccuaccucccacccggucu

SEQ ID NO: 383636 - RNA, 32 nt, Homo Sapiens
gcagcugacgcauuaaaugagauggaagacau

SEQ ID NO: 383637 - RNA, 32 nt, Homo Sapiens
acuguucaccugguggaacaguucuugcucug

SEQ ID NO: 383638 - RNA, 28 nt, Homo Sapiens
uuaaagaaagauuugaaaaguauacaca

SEQ ID NO: 383639 - RNA, 32 nt, Homo Sapiens
uucuuuuuaauuaaaaaacaaacaaaaaaaaa

SEQ ID NO: 383640 - RNA, 32 nt, Homo Sapiens
accuuuauaaugucugucuguuucaacacaau

SEQ ID NO: 383641 - RNA, 32 nt, Homo Sapiens
gaaaggccuggccacgaaaucuuuccuccacg

SEQ ID NO: 383642 - RNA, 32 nt, Homo Sapiens
acacccacccaacuccucccucuccgccccau

SEQ ID NO: 383643 - RNA, 32 nt, Homo Sapiens
caucacuggaccagcucauaguugucccuugg

SEQ ID NO: 383644 - RNA, 32 nt, Homo Sapiens
ccuugcauagauuucucuuuuaccaauuugag

SEQ ID NO: 383645 - RNA, 32 nt, Homo Sapiens
caaugaacugugcauguaaauuuuaaaugggu

SEQ ID NO: 383646 - RNA, 32 nt, Homo Sapiens
cacagguggcuucucucuugccugcuccuguc

SEQ ID NO: 383647 - RNA, 32 nt, Homo Sapiens
uuuuaucuagucacauaaauggauuaauuacu

SEQ ID NO: 383648 - RNA, 32 nt, Homo Sapiens
cauguccaguugccaagcacaaugaaaaagau

SEQ ID NO: 383649 - RNA, 32 nt, Homo Sapiens
ccacuucagacagggacaaggcuuccugcugu

SEQ ID NO: 383650 - RNA, 32 nt, Homo Sapiens
agcauguagaugggggagaaaugggugggggg

SEQ ID NO: 383651 - RNA, 32 nt, Homo Sapiens
acaucuuaaaauuuagauccagcacacaaaau

SEQ ID NO: 383652 - RNA, 32 nt, Homo Sapiens
ccagggggaccacacacacacacacacacaca

SEQ ID NO: 383653 - RNA, 32 nt, Homo Sapiens
ccguggaccccggccaggaaccacuccuguug

SEQ ID NO: 383654 - RNA, 32 nt, Homo Sapiens
uuuggucgggguggagacucgcagcagcugcu

SEQ ID NO: 383655 - RNA, 32 nt, Homo Sapiens
acagagaacuaaaaaauugcugcuggagaagg

SEQ ID NO: 383656 - RNA, 32 nt, Homo Sapiens
ucccgaagccccaguaucucaggauaugauug

SEQ ID NO: 383657 - RNA, 31 nt, Homo Sapiens
agagugagggcggguccgcgcguccucagag

SEQ ID NO: 383658 - RNA, 30 nt, Homo Sapiens
ccgaaggcgcccguaggcccucgggacucc

SEQ ID NO: 383659 - RNA, 32 nt, Homo Sapiens
gaacaagaauacugaauauuucaucauuaaaa

SEQ ID NO: 383660 - RNA, 32 nt, Homo Sapiens
uuuuuuaaauuuucuucaguugguguguuuuu

SEQ ID NO: 383661 - RNA, 32 nt, Homo Sapiens
gggggguuggccugggagccuccuccgcuucc

SEQ ID NO: 383662 - RNA, 32 nt, Homo Sapiens
gacucucggccgcgcucgcccucggcccgccc

SEQ ID NO: 383663 - RNA, 32 nt, Homo Sapiens
uuaacaagcaucuauuucuuuauucuucuggg

SEQ ID NO: 383664 - RNA, 32 nt, Homo Sapiens
cagaucaaaugaucugaagggacauggugugg

SEQ ID NO: 383665 - RNA, 32 nt, Homo Sapiens
auggaaacaaaguggaaggaaagaugcucagg

SEQ ID NO: 383666 - RNA, 32 nt, Homo Sapiens
ucaggcucuccaggcuuucagaauaauuguuu

SEQ ID NO: 383667 - RNA, 32 nt, Homo Sapiens
ugagcaaccacaaauaggcucuccaugaaacu

SEQ ID NO: 383668 - RNA, 32 nt, Homo Sapiens
uaaauuaccaaucaggcacauuuuauaauguu

SEQ ID NO: 383669 - RNA, 32 nt, Homo Sapiens
gacaguaggaucucaaacccugcauccauccu

SEQ ID NO: 383670 - RNA, 32 nt, Homo Sapiens
caggguucucugaaucuguuauuguuuuugcu

SEQ ID NO: 383671 - RNA, 32 nt, Homo Sapiens
ugaggcaaucuugccucccaggggaaauuuug

SEQ ID NO: 383672 - RNA, 32 nt, Homo Sapiens
cucccucugccuuuccucucaagcccccaaag

SEQ ID NO: 383673 - RNA, 32 nt, Homo Sapiens
ugcugguaacuacauagguauuucauugcgga

SEQ ID NO: 383674 - RNA, 32 nt, Homo Sapiens
auucaagaacaaaaccacagaugccauacaga

SEQ ID NO: 383675 - RNA, 31 nt, Homo Sapiens
uccgcagcucgcagccaccccaaagggagga

SEQ ID NO: 383676 - RNA, 32 nt, Homo Sapiens
aauccaaauggcagccgggcuccccgggaccc

SEQ ID NO: 383677 - RNA, 32 nt, Homo Sapiens
uuuuaaagacguagaagauuuauuuaauuuga

SEQ ID NO: 383678 - RNA, 32 nt, Homo Sapiens
ugucucccugucaauuucuaccccuuguagca

SEQ ID NO: 383679 - RNA, 32 nt, Homo Sapiens
cagccaauauuaauuugagcuaauggauuguu

SEQ ID NO: 383680 - RNA, 32 nt, Homo Sapiens
uggugugugacccagcaagggcccuguguggg

SEQ ID NO: 383681 - RNA, 32 nt, Homo Sapiens
ugugccggaaggaggaaggcguggggcauucg

SEQ ID NO: 383682 - RNA, 32 nt, Homo Sapiens
gaagaccugcaacuguaauuugaaauaaggaa

SEQ ID NO: 383683 - RNA, 32 nt, Homo Sapiens
acuggaccaacccacccaccuugacuauacca

SEQ ID NO: 383684 - RNA, 32 nt, Homo Sapiens
gaaaaccuguugcugcaaaauuuuacauguuc

SEQ ID NO: 383685 - RNA, 32 nt, Homo Sapiens
auguuaacuaaaacgaguuaaauauuuaggag

SEQ ID NO: 383686 - RNA, 32 nt, Homo Sapiens
cugccucucucuccuccuccccucugggaauu

SEQ ID NO: 383687 - RNA, 32 nt, Homo Sapiens
uaagcucccaggguguuucaaacuuagagaag

SEQ ID NO: 383688 - RNA, 32 nt, Homo Sapiens
ugucccagaaaagcggcccugcaaguuugagg

SEQ ID NO: 383689 - RNA, 32 nt, Homo Sapiens
uccccggcgcccaggcuccucucugcacgccu

SEQ ID NO: 383690 - RNA, 32 nt, Homo Sapiens
aggagaaaaugcaauuugauaaucaguuucca

SEQ ID NO: 383691 - RNA, 32 nt, Homo Sapiens
aucagggccuuucccaccugugcugaucacca

SEQ ID NO: 383692 - RNA, 32 nt, Homo Sapiens
agggccaggaggaacaugaggugaggcagggc

SEQ ID NO: 383693 - RNA, 32 nt, Homo Sapiens
ggcucccgaggguccaggccccgcccccaaag

SEQ ID NO: 383694 - RNA, 32 nt, Homo Sapiens
uauuuggcacauucuaucaaaauuuugugaau

SEQ ID NO: 383695 - RNA, 32 nt, Homo Sapiens
cggucggagacggcagcagcucccgacgcugc

SEQ ID NO: 383696 - RNA, 32 nt, Homo Sapiens
gaaaaaagcuaggcaaauaaaaaaggaaauga

SEQ ID NO: 383697 - RNA, 32 nt, Homo Sapiens
uucagaaagggccagcaucagccuuggaaaaa

SEQ ID NO: 383698 - RNA, 32 nt, Homo Sapiens
uggcucaggacacccuuucgggggcgugucuc

SEQ ID NO: 383699 - RNA, 32 nt, Homo Sapiens
acgugccaucaucuucgucuccuggggguuuu

SEQ ID NO: 383700 - RNA, 28 nt, Homo Sapiens
ggcauggcacugacugcccaccccuccu

SEQ ID NO: 383701 - RNA, 32 nt, Homo Sapiens
ugacgaagucaauacaugauaauagcaauccu

SEQ ID NO: 383702 - RNA, 32 nt, Homo Sapiens
aaacagacucuuuucugagacuauuuauccaa

SEQ ID NO: 383703 - RNA, 32 nt, Homo Sapiens
uuccuggaccagcccagcugcccccaaacccu

SEQ ID NO: 383704 - RNA, 32 nt, Homo Sapiens
auaucaagauaaagaaaaaugugucuaaaagc

SEQ ID NO: 383705 - RNA, 28 nt, Homo Sapiens
ugcuagaaagauuccuuuggggagaugg

SEQ ID NO: 383706 - RNA, 32 nt, Homo Sapiens
caguuucagucccaggucauacucuccaacag

SEQ ID NO: 383707 - RNA, 32 nt, Homo Sapiens
uauuugguuaguagguacuuuuuaaaauuuuu

SEQ ID NO: 383708 - RNA, 32 nt, Homo Sapiens
gguggcuuucccuaccugacacagccauggcc

SEQ ID NO: 383709 - RNA, 32 nt, Homo Sapiens
uguuacugucucuucugguuauaaagcagaca

SEQ ID NO: 383710 - RNA, 32 nt, Homo Sapiens
ucccgugcucugcggaucuccccugaccgcuc

SEQ ID NO: 383711 - RNA, 32 nt, Homo Sapiens
agccucuuguggaccccgccugcccgaaugaa

SEQ ID NO: 383712 - RNA, 32 nt, Homo Sapiens
cucccgggcuccuggcuuugccucugggaucc

SEQ ID NO: 383713 - RNA, 32 nt, Homo Sapiens
uuacccgcccucggggggucgggcuguggggg

SEQ ID NO: 383714 - RNA, 32 nt, Homo Sapiens
uacuaacauguuuagcaaauggcucugacagg

SEQ ID NO: 383715 - RNA, 32 nt, Homo Sapiens
agggacucgccuagggucucacagugaguagg

SEQ ID NO: 383716 - RNA, 32 nt, Homo Sapiens
gaggccugcccggcucccggaagcaggcugug

SEQ ID NO: 383717 - RNA, 32 nt, Homo Sapiens
uugccccucagcccccuucucuggccaggacc

SEQ ID NO: 383718 - RNA, 32 nt, Homo Sapiens
uccaggcgucagugaggggcuaucucgaggcg

SEQ ID NO: 383719 - RNA, 32 nt, Homo Sapiens
cccuauagaaugaucuguaauaaaauaguaua

SEQ ID NO: 383720 - RNA, 32 nt, Homo Sapiens
cugaauacagugaucacguuguccuccuagga

SEQ ID NO: 383721 - RNA, 32 nt, Homo Sapiens
guuucucaauagcaaaucuuacagaagguccu

SEQ ID NO: 383722 - RNA, 32 nt, Homo Sapiens
gaggagguagagaggagaaagagagcagcccg

SEQ ID NO: 383723 - RNA, 32 nt, Homo Sapiens
gguaguguucuuucuuuuuuuuuuuuuuuuaa

SEQ ID NO: 383724 - RNA, 32 nt, Homo Sapiens
uccuccuaacaguccuucucuucuuuccucug

SEQ ID NO: 383725 - RNA, 32 nt, Homo Sapiens
auguaaaaauuuguaaggaaaauuuucaccau

SEQ ID NO: 383726 - RNA, 32 nt, Homo Sapiens
cauggguccaaggcccuggcccugcccagccu

SEQ ID NO: 383727 - RNA, 32 nt, Homo Sapiens
uccuucccaagccuuagggccuacccuggagu

SEQ ID NO: 383728 - RNA, 32 nt, Homo Sapiens
gggaggcgcagcgguuagguggaccggucagc

SEQ ID NO: 383729 - RNA, 32 nt, Homo Sapiens
gccggccgguagucccuggcgcugcugaccca

SEQ ID NO: 383730 - RNA, 32 nt, Homo Sapiens
agagaagcaaacauguaggaaaaaauauaaau

SEQ ID NO: 383731 - RNA, 32 nt, Homo Sapiens
cuggguguggaggcucacaccuguaaucucag

SEQ ID NO: 383732 - RNA, 32 nt, Homo Sapiens
uacuggagguaacacugucucucccagugaca

SEQ ID NO: 383733 - RNA, 32 nt, Homo Sapiens
cacagcaggguucaguuucauguaucuuuguc

SEQ ID NO: 383734 - RNA, 32 nt, Homo Sapiens
caugaccaacuuuuaaauggaaaauauguaaa

SEQ ID NO: 383735 - RNA, 32 nt, Homo Sapiens
ucuucgggaccccuuucaggcuuguguuaucc

SEQ ID NO: 383736 - RNA, 32 nt, Homo Sapiens
aaagcugugucugagaucuggaucugcccauc

SEQ ID NO: 383737 - RNA, 32 nt, Homo Sapiens
accaaaugaaucacuuuuuuuuuuaagaaaaa

SEQ ID NO: 383738 - RNA, 32 nt, Homo Sapiens
gggcggguguucuggggugucugcccucuguc

SEQ ID NO: 383739 - RNA, 32 nt, Homo Sapiens
ggcccgcggcgguggagccgagcggggagcca

SEQ ID NO: 383740 - RNA, 32 nt, Homo Sapiens
ucuuguuugucaauaaaaagcagcuaucugug

SEQ ID NO: 383741 - RNA, 32 nt, Homo Sapiens
aaucuuguuucauuauauguccccuuuuuaua

SEQ ID NO: 383742 - RNA, 32 nt, Homo Sapiens
aaaggugguggccugccccucucucugggagc

SEQ ID NO: 383743 - RNA, 32 nt, Homo Sapiens
gguguuuuucuuuuugcaguuuuaccuagugc

SEQ ID NO: 383744 - RNA, 32 nt, Homo Sapiens
gccaaauauuagaggucuccugauggaagugu

SEQ ID NO: 383745 - RNA, 32 nt, Homo Sapiens
guaaaacauuuuaaucauuguuaucuuauugu

SEQ ID NO: 383746 - RNA, 32 nt, Homo Sapiens
acuggcaaacuaaaacaacuccauaguccuua

SEQ ID NO: 383747 - RNA, 32 nt, Homo Sapiens
gaaguggauugucccugaauacaggaugaaau

SEQ ID NO: 383748 - RNA, 32 nt, Homo Sapiens
uuauaaucuauuuuaucuuguuuaccuaaaau

SEQ ID NO: 383749 - RNA, 32 nt, Homo Sapiens
auauauuugugauuccccauguaauucuucaa

SEQ ID NO: 383750 - RNA, 32 nt, Homo Sapiens
ucaaagacgcagacaaggccugagcagugcuc

SEQ ID NO: 383751 - RNA, 32 nt, Homo Sapiens
gccuucgcacccuggcgcucuccucccagguc

SEQ ID NO: 383752 - RNA, 32 nt, Homo Sapiens
gucugcauauugcauagccuuguccuccugug

SEQ ID NO: 383753 - RNA, 32 nt, Homo Sapiens
acaccagcacaaacgacagccucaagucuccu

SEQ ID NO: 383754 - RNA, 32 nt, Homo Sapiens
cugagugcugcuaccgaggagugguguuugau

SEQ ID NO: 383755 - RNA, 32 nt, Homo Sapiens
caaaaauagaaagugaccaugaaaaauaaauu

SEQ ID NO: 383756 - RNA, 32 nt, Homo Sapiens
gcuuccuuuuacuuauacauuaacucauguaa

SEQ ID NO: 383757 - RNA, 32 nt, Homo Sapiens
uggagguuccucaaaaaacaaaaaauagaaug

SEQ ID NO: 383758 - RNA, 32 nt, Homo Sapiens
gguuggaaaaggaggaacuauauagcagccuu

SEQ ID NO: 383759 - RNA, 28 nt, Homo Sapiens
gccaugcgcucucuccuucugggcaccu

SEQ ID NO: 383760 - RNA, 32 nt, Homo Sapiens
caagccccugcagcucugcugcaccgcagcuu

SEQ ID NO: 383761 - RNA, 32 nt, Homo Sapiens
aaaaagccuaaauuauuuaaaguugcauuaaa

SEQ ID NO: 383762 - RNA, 32 nt, Homo Sapiens
uuuuuaguggcaaggucuuguuuugucaccca

SEQ ID NO: 383763 - RNA, 32 nt, Homo Sapiens
uuagccaggguugaugauccuggggcucuugg

SEQ ID NO: 383764 - RNA, 32 nt, Homo Sapiens
agaaguuuuuccucuuuuuuggcccguuguua

SEQ ID NO: 383765 - RNA, 32 nt, Homo Sapiens
uccugggcugucacucucuucuuuagaccccu

SEQ ID NO: 383766 - RNA, 32 nt, Homo Sapiens
gcuuauuuuuauuguugcuauuuucaguguau

SEQ ID NO: 383767 - RNA, 32 nt, Homo Sapiens
ugagcuugucuucaggaaaccagagcguugcu

SEQ ID NO: 383768 - RNA, 32 nt, Homo Sapiens
gugggagugcagagaaagaaagggaaacuggc

SEQ ID NO: 383769 - RNA, 32 nt, Homo Sapiens
cuuaacugguuauuuucuuaaaagucagaauu

SEQ ID NO: 383770 - RNA, 32 nt, Homo Sapiens
acaaauaaaaaauaaaaaaauaaaaacccaca

SEQ ID NO: 383771 - RNA, 32 nt, Homo Sapiens
cgcagcgcuuaccgcgcggcgccgcaccaugg

SEQ ID NO: 383772 - RNA, 32 nt, Homo Sapiens
uaaagucuugucuuggagucacaugaggucca

SEQ ID NO: 383773 - RNA, 32 nt, Homo Sapiens
uucucucuuucuuuuucuuuguuguuguaaaa

SEQ ID NO: 383774 - RNA, 32 nt, Homo Sapiens
guggccugaggguggccauggugggaaauggg

SEQ ID NO: 383775 - RNA, 32 nt, Homo Sapiens
aguagacauuuaauaaguauuuauugauaaac

SEQ ID NO: 383776 - RNA, 32 nt, Homo Sapiens
cuccacagucccacaagcggaaguauucuacc

SEQ ID NO: 383777 - RNA, 32 nt, Homo Sapiens
gaaauauaauuuauaguauuuucaaaugugcu

SEQ ID NO: 383778 - RNA, 32 nt, Homo Sapiens
gcccgguacgauuugggagugacauuucugua

SEQ ID NO: 383779 - RNA, 32 nt, Homo Sapiens
uugcccuugcucagguucuuggaccccaggca

SEQ ID NO: 383780 - RNA, 32 nt, Homo Sapiens
cucuuuuucucucggcgaccccgccccgcacg

SEQ ID NO: 383781 - RNA, 32 nt, Homo Sapiens
ggcagccaccgccgccgcucggugcggcucuc

SEQ ID NO: 383782 - RNA, 32 nt, Homo Sapiens
gaaacguccguaacacacggaccuccaggagc

SEQ ID NO: 383783 - RNA, 32 nt, Homo Sapiens
auuauguaucuguccagaaaaaugugcauguc

SEQ ID NO: 383784 - RNA, 32 nt, Homo Sapiens
uguauuuuauauuuuguuucaauuagagaaug

SEQ ID NO: 383785 - RNA, 32 nt, Homo Sapiens
caaaauuguaguacuuuuuuuuguuuucuuuu

SEQ ID NO: 383786 - RNA, 32 nt, Homo Sapiens
ucuugucccuucccugcucugcugcauggggc

SEQ ID NO: 383787 - RNA, 32 nt, Homo Sapiens
caggaauguuugcaugaccuaccucaggaggg

SEQ ID NO: 383788 - RNA, 32 nt, Homo Sapiens
guguuuuguucgcuccuccaggcgcggccccu

SEQ ID NO: 383789 - RNA, 32 nt, Homo Sapiens
agaugaagaggaagaagaagagucuuuuauga

SEQ ID NO: 383790 - RNA, 32 nt, Homo Sapiens
uggaugcuuuugggucaccuugaaagauaaag

SEQ ID NO: 383791 - RNA, 32 nt, Homo Sapiens
aacgaaaagggagucgcguauagaggagaggc

SEQ ID NO: 383792 - RNA, 32 nt, Homo Sapiens
ugguggccauucucugccuuuuuacagucacc

SEQ ID NO: 383793 - RNA, 32 nt, Homo Sapiens
ucugacugucggugcccucccaggaacgggga

SEQ ID NO: 383794 - RNA, 32 nt, Homo Sapiens
gggaagggaagcacaauggaaauaccccugaa

SEQ ID NO: 383795 - RNA, 32 nt, Homo Sapiens
uuuuguuuaccagagaaaaagggagggggaga

SEQ ID NO: 383796 - RNA, 32 nt, Homo Sapiens
uuucccagaggaaugccuggaauggccggaau

SEQ ID NO: 383797 - RNA, 32 nt, Homo Sapiens
uugauuccgguuccaaaaggugucaccuaccu

SEQ ID NO: 383798 - RNA, 32 nt, Homo Sapiens
ugcuuuucauuuauuacuucuucuuuccagga

SEQ ID NO: 383799 - RNA, 32 nt, Homo Sapiens
uaaauguggcaaauuuuucagacaucguucau

SEQ ID NO: 383800 - RNA, 32 nt, Homo Sapiens
uuguguguguguguuuuuuuuaauuugguuga

SEQ ID NO: 383801 - RNA, 32 nt, Homo Sapiens
gugcccugucccagcccaaacugggggcucug

SEQ ID NO: 383802 - RNA, 32 nt, Homo Sapiens
ucacugucaaacuuugucacccuaacuucgua

SEQ ID NO: 383803 - RNA, 32 nt, Homo Sapiens
uggggccugacaggcgggaggaggagaggccu

SEQ ID NO: 383804 - RNA, 32 nt, Homo Sapiens
gaauuuacagaaaaauagagaaaauaaacaca

SEQ ID NO: 383805 - RNA, 32 nt, Homo Sapiens
cucuguacccccagcccuacugcccaccaggu

SEQ ID NO: 383806 - RNA, 32 nt, Homo Sapiens
ucaauaggagaugcugaucuugaguuguaaug

SEQ ID NO: 383807 - RNA, 32 nt, Homo Sapiens
ugggucugaaaccccaggaccgggucaaaggc

SEQ ID NO: 383808 - RNA, 32 nt, Homo Sapiens
uuaaaggucaguuucucuuaaucugauuaugu

SEQ ID NO: 383809 - RNA, 30 nt, Homo Sapiens
aaccugggagguggagacugcagugagccg

SEQ ID NO: 383810 - RNA, 32 nt, Homo Sapiens
aucgcacacuuggcccuugguuacguccucau

SEQ ID NO: 383811 - RNA, 32 nt, Homo Sapiens
ugaaaggacaccuuguaaagaagccuugaaac

SEQ ID NO: 383812 - RNA, 32 nt, Homo Sapiens
gcauuugacaaaggugaugaucgaagacuugg

SEQ ID NO: 383813 - RNA, 32 nt, Homo Sapiens
ggagggaggcaaguguccuuugaaaguuguga

SEQ ID NO: 383814 - RNA, 32 nt, Homo Sapiens
gcuccauccuuccgucccacucugucuccguu

SEQ ID NO: 383815 - RNA, 32 nt, Homo Sapiens
uaccaacagggcuucucucuggcagccaugca

SEQ ID NO: 383816 - RNA, 32 nt, Homo Sapiens
aaauacaaacuuaaaugugccuauuggugucu

SEQ ID NO: 383817 - RNA, 32 nt, Homo Sapiens
agggaggaguccacgcauccugaugcugccug

SEQ ID NO: 383818 - RNA, 32 nt, Homo Sapiens
caaggcggagaaugaaggugguggcggcagag

SEQ ID NO: 383819 - RNA, 32 nt, Homo Sapiens
auagauggaugggaaaaugucaggcucuuugc

SEQ ID NO: 383820 - RNA, 32 nt, Homo Sapiens
cccgcccucauuauuuauguccagguguuugu

SEQ ID NO: 383821 - RNA, 32 nt, Homo Sapiens
guggcggcgccggaggucgccauggcuaccga

SEQ ID NO: 383822 - RNA, 32 nt, Homo Sapiens
ugcauaaugcaaaccuccuagguuaaaauagu

SEQ ID NO: 383823 - RNA, 32 nt, Homo Sapiens
gccacugcacucaagccugggcgacagagcga

SEQ ID NO: 383824 - RNA, 32 nt, Homo Sapiens
gaaagagccccaucccuucucucucugccacc

SEQ ID NO: 383825 - RNA, 32 nt, Homo Sapiens
ugguuucagauucagguggacaaaggacaagu

SEQ ID NO: 383826 - RNA, 32 nt, Homo Sapiens
aauuuaaaaauuucuguaaaacuuugucuuca

SEQ ID NO: 383827 - RNA, 32 nt, Homo Sapiens
agacaauacugaagauuguacuaugaaguuua

SEQ ID NO: 383828 - RNA, 32 nt, Homo Sapiens
ugauuuccaauuaaaaauuugcuggcauuaaa

SEQ ID NO: 383829 - RNA, 32 nt, Homo Sapiens
aaaguuagcucuuuucuauccccuguaaguca

SEQ ID NO: 383830 - RNA, 32 nt, Homo Sapiens
cucgggucccuucugcccuugugggaguugcc

SEQ ID NO: 383831 - RNA, 32 nt, Homo Sapiens
cagagugggaggaaggcggggaguccagguuc

SEQ ID NO: 383832 - RNA, 32 nt, Homo Sapiens
uucuucuucuuuuauguaaaucauuauaaaua

SEQ ID NO: 383833 - RNA, 32 nt, Homo Sapiens
gcuuccaggcugcaugaggcucauggaccagc

SEQ ID NO: 383834 - RNA, 32 nt, Homo Sapiens
ugaggccagggacgucacccaaggcugguggu

SEQ ID NO: 383835 - RNA, 32 nt, Homo Sapiens
aagcgguccccgcugggcggccccaccccugu

SEQ ID NO: 383836 - RNA, 32 nt, Homo Sapiens
ugagcaccacccaacagacuggggaccagccc

SEQ ID NO: 383837 - RNA, 32 nt, Homo Sapiens
ggcucauggaccagcucugaucccaugcaugu

SEQ ID NO: 383838 - RNA, 32 nt, Homo Sapiens
ccaaauggauugcaagagaaauacuaaauuga

SEQ ID NO: 383839 - RNA, 29 nt, Homo Sapiens
cuggguuggggacagggauaguuuccagc

SEQ ID NO: 383840 - RNA, 32 nt, Homo Sapiens
gugaaggaagggggcugagcuucgcugcagac

SEQ ID NO: 383841 - RNA, 30 nt, Homo Sapiens
uuaugugucugugggugagggcuucugagg

SEQ ID NO: 383842 - RNA, 32 nt, Homo Sapiens
auccuggaggaacuguacuucucuaagaucua

SEQ ID NO: 383843 - RNA, 32 nt, Homo Sapiens
uuuucagauaaaaucugcuugugucuugaaua

SEQ ID NO: 383844 - RNA, 32 nt, Homo Sapiens
ccgacugccugcguccagccgcgccccauccc

SEQ ID NO: 383845 - RNA, 30 nt, Homo Sapiens
aggcuucuggacuuaggagguccgggcagc

SEQ ID NO: 383846 - RNA, 32 nt, Homo Sapiens
cuuauaugagaauaauacguucaaucaaagua

SEQ ID NO: 383847 - RNA, 32 nt, Homo Sapiens
ucucccaaccucagaucagucagacagggagc

SEQ ID NO: 383848 - RNA, 31 nt, Homo Sapiens
cuacguuuuguguccgauucaguguguaaac

SEQ ID NO: 383849 - RNA, 32 nt, Homo Sapiens
uugggcaugaaggagcuuuuugcaucuagugg

SEQ ID NO: 383850 - RNA, 31 nt, Homo Sapiens
aggcgacguacuguaagacgauauuacuuua

SEQ ID NO: 383851 - RNA, 32 nt, Homo Sapiens
cuagcgaaauauuuuuccacuuugcucguccu

SEQ ID NO: 383852 - RNA, 32 nt, Homo Sapiens
gggugcagggagaggggaggcggggacggugu

SEQ ID NO: 383853 - RNA, 30 nt, Homo Sapiens
acacuugucugugaguuugaagcccugagu

SEQ ID NO: 383854 - RNA, 31 nt, Homo Sapiens
aacuggcagcuauucaagauggauaaucagu

SEQ ID NO: 383855 - RNA, 32 nt, Homo Sapiens
gaucuugggaaaccagaugacucucccuguca

SEQ ID NO: 383856 - RNA, 32 nt, Homo Sapiens
augguagcaauagggagagugaaaauauguau

SEQ ID NO: 383857 - RNA, 32 nt, Homo Sapiens
uaagacacagucugccgacgcucccggcugaa

SEQ ID NO: 383858 - RNA, 32 nt, Homo Sapiens
ugugcagaaguggcagcagagagggaccaucc

SEQ ID NO: 383859 - RNA, 32 nt, Homo Sapiens
gcuuggucuagcaguaacaccagugucuggga

SEQ ID NO: 383860 - RNA, 32 nt, Homo Sapiens
uacgaauaaacgcagaagagggggaggggaag

SEQ ID NO: 383861 - RNA, 32 nt, Homo Sapiens
cagugagcuuauguucaugacucuguauucca

SEQ ID NO: 383862 - RNA, 32 nt, Homo Sapiens
uuauaaugcguaaagauauugaaaauauaaug

SEQ ID NO: 383863 - RNA, 32 nt, Homo Sapiens
ugcuagccucucuuacuaauggaauuauauac

SEQ ID NO: 383864 - RNA, 32 nt, Homo Sapiens
aucuaagaaaccagguaaaauaaagaaacauu

SEQ ID NO: 383865 - RNA, 32 nt, Homo Sapiens
cugagaccugucucggauuuucuggguucaca

SEQ ID NO: 383866 - RNA, 32 nt, Homo Sapiens
uggaaguaggggugggggaggggagggugaca

SEQ ID NO: 383867 - RNA, 32 nt, Homo Sapiens
gcgacgaggaccagguuacggccuccucgcca

SEQ ID NO: 383868 - RNA, 32 nt, Homo Sapiens
agcgccgaggccagcagccacccgagauaccu

SEQ ID NO: 383869 - RNA, 32 nt, Homo Sapiens
cgguauaaugaaaauauuaagacaguuuccca

SEQ ID NO: 383870 - RNA, 32 nt, Homo Sapiens
cuaaaaucuaauauacauaauuccauuaagug

SEQ ID NO: 383871 - RNA, 32 nt, Homo Sapiens
agcauccgccgaggcccacccgggccaccccc

SEQ ID NO: 383872 - RNA, 32 nt, Homo Sapiens
cgucuggccaccuacugcggcggccgcugcug

SEQ ID NO: 383873 - RNA, 32 nt, Homo Sapiens
uauguggaggucuggaacgauuucaugaaccg

SEQ ID NO: 383874 - RNA, 32 nt, Homo Sapiens
aauuugaaaaauauuaugaagccugaguguaa

SEQ ID NO: 383875 - RNA, 32 nt, Homo Sapiens
uacacauuuaugaugaugugggaguauagcca

SEQ ID NO: 383876 - RNA, 32 nt, Homo Sapiens
cagggauacguuuugagaaaugugucauuagg

SEQ ID NO: 383877 - RNA, 32 nt, Homo Sapiens
acuauguacuuuuuuauaaauacuguauggac

SEQ ID NO: 383878 - RNA, 32 nt, Homo Sapiens
uuuuauuaauaaaucugcuggaacauucuugc

SEQ ID NO: 383879 - RNA, 32 nt, Homo Sapiens
ucuaagccccucagggucuccuccucacccca

SEQ ID NO: 383880 - RNA, 32 nt, Homo Sapiens
agcagugauacccaccugagagauccuguguu

SEQ ID NO: 383881 - RNA, 32 nt, Homo Sapiens
aaagcgaacggcggccgcggcgcgggccccgc

SEQ ID NO: 383882 - RNA, 32 nt, Homo Sapiens
uccaccaaaagggcuccugagggucugggcaa

SEQ ID NO: 383883 - RNA, 32 nt, Homo Sapiens
gaaggucccauggccugcugggcuuggcucgg

SEQ ID NO: 383884 - RNA, 32 nt, Homo Sapiens
ccuuugaaguggcaguaaauauguaguaauug

SEQ ID NO: 383885 - RNA, 31 nt, Homo Sapiens
ggcacgauguccgacgcgggcggcggaaaga

SEQ ID NO: 383886 - RNA, 32 nt, Homo Sapiens
guuggugaugaaauucccagugguguuucuua

SEQ ID NO: 383887 - RNA, 32 nt, Homo Sapiens
acagugcugaaauugcaagugauguaggccug

SEQ ID NO: 383888 - RNA, 32 nt, Homo Sapiens
agacagcgccugggcuuuuucccgcccgcggu

SEQ ID NO: 383889 - RNA, 32 nt, Homo Sapiens
uaguagauggauuuaggaauauguaagaaacu

SEQ ID NO: 383890 - RNA, 31 nt, Homo Sapiens
gcccaccuuccccagaaccaggggaggccug

SEQ ID NO: 383891 - RNA, 32 nt, Homo Sapiens
uggggugggggcgcucuccgcccgguguugcg

SEQ ID NO: 383892 - RNA, 32 nt, Homo Sapiens
aacaugauauauauuuauuuagccuucuuuaa

SEQ ID NO: 383893 - RNA, 32 nt, Homo Sapiens
gggcauccugucaugcgccugucaucccagcu

SEQ ID NO: 383894 - RNA, 30 nt, Homo Sapiens
gaaaauggcaggcgcugggcucccacgacc

SEQ ID NO: 383895 - RNA, 32 nt, Homo Sapiens
gcauucuuguuaccagauguuuggcccauucc

SEQ ID NO: 383896 - RNA, 32 nt, Homo Sapiens
ucugcaacacaagcaauggaccugcggaggcg

SEQ ID NO: 383897 - RNA, 32 nt, Homo Sapiens
uauguuucacugaugcugagccaguuuguaug

SEQ ID NO: 383898 - RNA, 32 nt, Homo Sapiens
cuaggaauuuuuauacuaaaagcaaaauguuu

SEQ ID NO: 383899 - RNA, 32 nt, Homo Sapiens
gaugcacaccgaccuaaauuaaaugaaggggu

SEQ ID NO: 383900 - RNA, 32 nt, Homo Sapiens
ugcagcugccagcacuuggucagucacucuca

SEQ ID NO: 383901 - RNA, 32 nt, Homo Sapiens
uugggguugucaacaugaguauuacauuaaca

SEQ ID NO: 383902 - RNA, 32 nt, Homo Sapiens
uauuuuuauaugcacauuuagcauuccucuuu

SEQ ID NO: 383903 - RNA, 32 nt, Homo Sapiens
gccucgcugcugucaucccacuccggcuccuc

SEQ ID NO: 383904 - RNA, 32 nt, Homo Sapiens
ugggggugggucuggcagaaggcagaguuauc

SEQ ID NO: 383905 - RNA, 32 nt, Homo Sapiens
gcagcagaaagaugagcaguuuagggaauggu

SEQ ID NO: 383906 - RNA, 32 nt, Homo Sapiens
gagggugucuuacuuucuuguggcaauugauu

SEQ ID NO: 383907 - RNA, 32 nt, Homo Sapiens
agggcugggggaagggcagggguguggagagg

SEQ ID NO: 383908 - RNA, 32 nt, Homo Sapiens
acccaaccagagacuucguacacaucauuugg

SEQ ID NO: 383909 - RNA, 32 nt, Homo Sapiens
gugggugcuggugaugggaugguguggcgcuc

SEQ ID NO: 383910 - RNA, 32 nt, Homo Sapiens
acuggcggaugaagcagcugguggggcucuac

SEQ ID NO: 383911 - RNA, 32 nt, Homo Sapiens
uggcuuuuuuaaaacugguuuuauuuuaauuu

SEQ ID NO: 383912 - RNA, 32 nt, Homo Sapiens
cgaguaccgagcgcggguggccgcgguguccg

SEQ ID NO: 383913 - RNA, 32 nt, Homo Sapiens
aagcagacuccagccccuggaccccuggggug

SEQ ID NO: 383914 - RNA, 30 nt, Homo Sapiens
ugugugcgcgcgcuaguguguggacaagga

SEQ ID NO: 383915 - RNA, 32 nt, Homo Sapiens
ucccuuagcagagcugacgugcugugcuggga

SEQ ID NO: 383916 - RNA, 32 nt, Homo Sapiens
cauuuucggguaucuuuacagcagcaccccac

SEQ ID NO: 383917 - RNA, 32 nt, Homo Sapiens
cggaggaggguggcaaguagaggugagccauu

SEQ ID NO: 383918 - RNA, 32 nt, Homo Sapiens
gggcucuagcggcguugcgcgcggugccggcu

SEQ ID NO: 383919 - RNA, 32 nt, Homo Sapiens
gaaucugaaacacuuguacuuccaauuuucuu

SEQ ID NO: 383920 - RNA, 32 nt, Homo Sapiens
gcgauaucacuuuaacuuucugaaccucagag

SEQ ID NO: 383921 - RNA, 32 nt, Homo Sapiens
cccggcgcugcugcccgggggucuccuucagg

SEQ ID NO: 383922 - RNA, 32 nt, Homo Sapiens
gggcgccggagacgcgcaagggcgccgaugga

SEQ ID NO: 383923 - RNA, 29 nt, Homo Sapiens
aauuccauauguaaugccauugggagagu

SEQ ID NO: 383924 - RNA, 32 nt, Homo Sapiens
uuaaaaccaaaauauaugcuggcuaaugucau

SEQ ID NO: 383925 - RNA, 32 nt, Homo Sapiens
caggcaucaugucggcggcgcagguguccucg

SEQ ID NO: 383926 - RNA, 32 nt, Homo Sapiens
uuccagaacaaaagugugaaaacacaguguug

SEQ ID NO: 383927 - RNA, 32 nt, Homo Sapiens
gauauuugguggccccaagcgaaugaagcauc

SEQ ID NO: 383928 - RNA, 32 nt, Homo Sapiens
ugcugaauaucuuuaaacucugcacaagcaag

SEQ ID NO: 383929 - RNA, 32 nt, Homo Sapiens
uuuccaguguauugcucauauuaucagaagga

SEQ ID NO: 383930 - RNA, 32 nt, Homo Sapiens
uuaccuuagaaauaaugaaauauaguguaaca

SEQ ID NO: 383931 - RNA, 32 nt, Homo Sapiens
aucgggucgucuccgaagauuuggcaggggca

SEQ ID NO: 383932 - RNA, 32 nt, Homo Sapiens
guuauuauaaacaaaauuaacccuuugaauac

SEQ ID NO: 383933 - RNA, 32 nt, Homo Sapiens
augagacccagcugauugcacuaagcccugcc

SEQ ID NO: 383934 - RNA, 32 nt, Homo Sapiens
aacagagucucaggacagaaccacugagucuu

SEQ ID NO: 383935 - RNA, 32 nt, Homo Sapiens
guuuauguuggauacucaauucuuaaccaaaa

SEQ ID NO: 383936 - RNA, 32 nt, Homo Sapiens
ccgcagugccugcccugauccacgcgcacaca

SEQ ID NO: 383937 - RNA, 32 nt, Homo Sapiens
uccauuaggaggagaggggugcugggccuugg

SEQ ID NO: 383938 - RNA, 32 nt, Homo Sapiens
ucggacccagggaccuucagggcccgcagacc

SEQ ID NO: 383939 - RNA, 32 nt, Homo Sapiens
gggugucccagccccagcccuuccccaggccu

SEQ ID NO: 383940 - RNA, 32 nt, Homo Sapiens
ggggcggcgggggcggcggcggggagaacuac

SEQ ID NO: 383941 - RNA, 32 nt, Homo Sapiens
gccccaggucuuuggguacaggcuugguggga

SEQ ID NO: 383942 - RNA, 32 nt, Homo Sapiens
agcaagcaccggccaugcugcagaggcaagac

SEQ ID NO: 383943 - RNA, 32 nt, Homo Sapiens
uucauaguauugguuuuaaaucuuuuuaaguu

SEQ ID NO: 383944 - RNA, 32 nt, Homo Sapiens
auuguagauaucuauuuauauuuaaaguuuau

SEQ ID NO: 383945 - RNA, 32 nt, Homo Sapiens
uccauggcauaaaaauaagugauuucuggggg

SEQ ID NO: 383946 - RNA, 32 nt, Homo Sapiens
cgcuccgcccccucccucucccuugagaagcu

SEQ ID NO: 383947 - RNA, 32 nt, Homo Sapiens
cuggcaaugcaaacacaaagaucuggauuucu

SEQ ID NO: 383948 - RNA, 32 nt, Homo Sapiens
uuuuuuggaggcccgucucuugcuguggggaa

SEQ ID NO: 383949 - RNA, 32 nt, Homo Sapiens
cucuaggagucacaacucucagucauucauuu

SEQ ID NO: 383950 - RNA, 32 nt, Homo Sapiens
gcagagcagggcugaggccuggggguaggagc

SEQ ID NO: 383951 - RNA, 32 nt, Homo Sapiens
ggcuagugguuccuggagcuagugguuaccug

SEQ ID NO: 383952 - RNA, 32 nt, Homo Sapiens
uuauauugcccauuuuguagcaacuuauuuug

SEQ ID NO: 383953 - RNA, 32 nt, Homo Sapiens
gaaauaaugaaaauauaaagaaaguaaaaacu

SEQ ID NO: 383954 - RNA, 32 nt, Homo Sapiens
gagaagaaaguguagauaguuaaaagacugca

SEQ ID NO: 383955 - RNA, 32 nt, Homo Sapiens
augaugcucugcaaaaccuggauaagaagauu

SEQ ID NO: 383956 - RNA, 32 nt, Homo Sapiens
gaugggguuuuaccauguuacccaggcugguc

SEQ ID NO: 383957 - RNA, 32 nt, Homo Sapiens
aguccuggccuucaaucggccaucgccacggc

SEQ ID NO: 383958 - RNA, 32 nt, Homo Sapiens
gucgaggcagcuucccuuugccugcugauauu

SEQ ID NO: 383959 - RNA, 30 nt, Homo Sapiens
gcgugugucuguguugagcgugcgucugug

SEQ ID NO: 383960 - RNA, 32 nt, Homo Sapiens
uaucugcuaaccgaaaucuaccacagcagaga

SEQ ID NO: 383961 - RNA, 32 nt, Homo Sapiens
caugccuguauccagcacuuugggaggcccag

SEQ ID NO: 383962 - RNA, 32 nt, Homo Sapiens
cgagcccccucccccagcccgucacccggggc

SEQ ID NO: 383963 - RNA, 32 nt, Homo Sapiens
auagcugguucuauuuuuuuuaaaccuagaaa

SEQ ID NO: 383964 - RNA, 32 nt, Homo Sapiens
aagcaguguuguccucacgggaggaggacuga

SEQ ID NO: 383965 - RNA, 32 nt, Homo Sapiens
guauuuugaaacacugaagagcaaaaggggcu

SEQ ID NO: 383966 - RNA, 32 nt, Homo Sapiens
acucccguucgggaacccaacggcagacaggu

SEQ ID NO: 383967 - RNA, 32 nt, Homo Sapiens
ccuccucaucuggccugcccagggcuuggugc

SEQ ID NO: 383968 - RNA, 32 nt, Homo Sapiens
cuguauucacuaaugucugacucucguaaaga

SEQ ID NO: 383969 - RNA, 32 nt, Homo Sapiens
cuuguaacuggaaaaugaaguaugucacauuu

SEQ ID NO: 383970 - RNA, 32 nt, Homo Sapiens
uucugggucaacuggcuuagguuuagguuaac

SEQ ID NO: 383971 - RNA, 32 nt, Homo Sapiens
acuuuuaaaaauuuaagguaagauaguaauag

SEQ ID NO: 383972 - RNA, 32 nt, Homo Sapiens
ugagcugcuguaaggcugggcugcugcgacac

SEQ ID NO: 383973 - RNA, 32 nt, Homo Sapiens
caccugucuccaugugaaggcagauccauuug

SEQ ID NO: 383974 - RNA, 32 nt, Homo Sapiens
ccaauaaauaauauuauauuguauuuaaccca

SEQ ID NO: 383975 - RNA, 32 nt, Homo Sapiens
aagugauucuaagauuugguuugggaucaaua

SEQ ID NO: 383976 - RNA, 32 nt, Homo Sapiens
ucaggccugcucuacaaaaguaccuguucuug

SEQ ID NO: 383977 - RNA, 32 nt, Homo Sapiens
ucuagaccagaagaggaugacaauggcaacaa

SEQ ID NO: 383978 - RNA, 32 nt, Homo Sapiens
aucuagaauggcagguggugcauaaaaguuaa

SEQ ID NO: 383979 - RNA, 32 nt, Homo Sapiens
cuacaauuuuaguauaaugacauuugagucua

SEQ ID NO: 383980 - RNA, 32 nt, Homo Sapiens
ggaggaugguggccugcagcggccaagaagcc

SEQ ID NO: 383981 - RNA, 32 nt, Homo Sapiens
uugccaagaaucacagaauguuagagcugaca

SEQ ID NO: 383982 - RNA, 32 nt, Homo Sapiens
acuuaaucauucaaaucacuaucugaaggguc

SEQ ID NO: 383983 - RNA, 30 nt, Homo Sapiens
cuaagggucuuugcugcagagcccaccaga

SEQ ID NO: 383984 - RNA, 32 nt, Homo Sapiens
cugaaguucguaaagaugauguuguaacagug

SEQ ID NO: 383985 - RNA, 30 nt, Homo Sapiens
uacauggcugugaugggggagguggugcug

SEQ ID NO: 383986 - RNA, 32 nt, Homo Sapiens
uuaaaaaacugaaaagugacuacucagauaug

SEQ ID NO: 383987 - RNA, 32 nt, Homo Sapiens
uugauagauaucuauuuuuaaacauggaaaga

SEQ ID NO: 383988 - RNA, 32 nt, Homo Sapiens
guaguaugucauaaguacuuuguaaagauuug

SEQ ID NO: 383989 - RNA, 32 nt, Homo Sapiens
auuuauuucuguuugaauuugaaacaguguua

SEQ ID NO: 383990 - RNA, 32 nt, Homo Sapiens
cuccggagccccagccccaaggcuuugacaac

SEQ ID NO: 383991 - RNA, 32 nt, Homo Sapiens
auauggcagaaucugucuccauuggucaaacc

SEQ ID NO: 383992 - RNA, 32 nt, Homo Sapiens
ccauuaacccgucaucuacauuagguauuucu

SEQ ID NO: 383993 - RNA, 32 nt, Homo Sapiens
agaaucuaauuugaaauuagucaauaaaaagu

SEQ ID NO: 383994 - RNA, 32 nt, Homo Sapiens
ucaaccacuguaaaaugaaauuacuacaaaau

SEQ ID NO: 383995 - RNA, 32 nt, Homo Sapiens
agggcugaaggaucaugggugccaagucucug

SEQ ID NO: 383996 - RNA, 32 nt, Homo Sapiens
uucagguuuguccuugcccagcccugccagcc

SEQ ID NO: 383997 - RNA, 32 nt, Homo Sapiens
ucgucuuuguuuucuuuuuugucuugaaugaa

SEQ ID NO: 383998 - RNA, 32 nt, Homo Sapiens
agggaggaagacuguaaauacgaacccaaucu

SEQ ID NO: 383999 - RNA, 32 nt, Homo Sapiens
gcccaggaagcuuuugugaauuccuagcaucu

SEQ ID NO: 384000 - RNA, 32 nt, Homo Sapiens
uuccauccaggauccacuaucuacacaccuau

SEQ ID NO: 384001 - RNA, 32 nt, Homo Sapiens
ucccuggcuuccccggcuuucuccccacggag

SEQ ID NO: 384002 - RNA, 32 nt, Homo Sapiens
aaagucuccagaugcaguagcucacacuguaa

SEQ ID NO: 384003 - RNA, 32 nt, Homo Sapiens
cucacugcaaccuccgccucccggguucaagc

SEQ ID NO: 384004 - RNA, 32 nt, Homo Sapiens
cucacuacaaccuccgccucccagguucaagc

SEQ ID NO: 384005 - RNA, 32 nt, Homo Sapiens
cucacugcaaccuccgccucccagguucaaac

SEQ ID NO: 384006 - RNA, 32 nt, Homo Sapiens
agggucggcccucagcucagcccgccaggagu

SEQ ID NO: 384007 - RNA, 32 nt, Homo Sapiens
uuccucucaaggaaaggugaccuuucuccugu

SEQ ID NO: 384008 - RNA, 32 nt, Homo Sapiens
cacuugaggguggaggacagcagggaggaagg

SEQ ID NO: 384009 - RNA, 32 nt, Homo Sapiens
agacccagcaaccuugugaccaagcuaaaacc

SEQ ID NO: 384010 - RNA, 32 nt, Homo Sapiens
ucaacuuuggccaaauacaaaugcgaaauuag

SEQ ID NO: 384011 - RNA, 32 nt, Homo Sapiens
uuguccugccccagccucccaaguagcuggga

SEQ ID NO: 384012 - RNA, 32 nt, Homo Sapiens
cccucggcucugcgggugucaguucguccggc

SEQ ID NO: 384013 - RNA, 32 nt, Homo Sapiens
uccgagucucgugcagugcugcguagguuagc

SEQ ID NO: 384014 - RNA, 32 nt, Homo Sapiens
caaguaccacugacagggagucuggggccauu

SEQ ID NO: 384015 - RNA, 32 nt, Homo Sapiens
cuccccauccgccccaggcccccugccugugc

SEQ ID NO: 384016 - RNA, 32 nt, Homo Sapiens
agcagggagcacuuguccuucucuccucugcu

SEQ ID NO: 384017 - RNA, 32 nt, Homo Sapiens
gcaagaacagagccagcacacacauuggagca

SEQ ID NO: 384018 - RNA, 32 nt, Homo Sapiens
uccaggucucccagccccuccuucucugucuc

SEQ ID NO: 384019 - RNA, 32 nt, Homo Sapiens
cuaggccuuccacuaccuccuuucuuucuccc

SEQ ID NO: 384020 - RNA, 32 nt, Homo Sapiens
aagaaagugucugcucuaggguuggggagggu

SEQ ID NO: 384021 - RNA, 32 nt, Homo Sapiens
gcugacccuguuauaugguuauaguggugucc

SEQ ID NO: 384022 - RNA, 32 nt, Homo Sapiens
uccaauuuuuaaaaauguugagguaaucuuuc

SEQ ID NO: 384023 - RNA, 32 nt, Homo Sapiens
uccuuuugauaaaaacuguugaauacuauuga

SEQ ID NO: 384024 - RNA, 32 nt, Homo Sapiens
gcucgguguuucucaccuggggccugggacgu

SEQ ID NO: 384025 - RNA, 32 nt, Homo Sapiens
gcaggcugggacgaggaagccaagccucccug

SEQ ID NO: 384026 - RNA, 32 nt, Homo Sapiens
gaaguuuggcccggccacuggcccugcagcug

SEQ ID NO: 384027 - RNA, 32 nt, Homo Sapiens
acagugaaaccccaucucuaauaaaaauacaa

SEQ ID NO: 384028 - RNA, 32 nt, Homo Sapiens
caccucuugacaaugggaaacugggugguuaa

SEQ ID NO: 384029 - RNA, 32 nt, Homo Sapiens
ggggaccuuuugggggagggcugcgacgcuug

SEQ ID NO: 384030 - RNA, 32 nt, Homo Sapiens
cugagacaggccccugaguccuggcucauguu

SEQ ID NO: 384031 - RNA, 32 nt, Homo Sapiens
gggcuggggagagacauguggacacguggccu

SEQ ID NO: 384032 - RNA, 32 nt, Homo Sapiens
uguguaauuagaaauaaccucuggagaggagu

SEQ ID NO: 384033 - RNA, 32 nt, Homo Sapiens
uaauugucaauaccccuguuaagcaauuccuu

SEQ ID NO: 384034 - RNA, 32 nt, Homo Sapiens
ugaagcucaaaauuuacugaccucaaauaauc

SEQ ID NO: 384035 - RNA, 32 nt, Homo Sapiens
gaucgacuggaacaaagugaccgcuguguaaa

SEQ ID NO: 384036 - RNA, 30 nt, Homo Sapiens
agaagucucuguuaacucuauaggaagcuu

SEQ ID NO: 384037 - RNA, 32 nt, Homo Sapiens
uucuccucagaauuugaaacaaucgcguggag

SEQ ID NO: 384038 - RNA, 32 nt, Homo Sapiens
uuaccuugaaaaaauaaaaauguuaacaggaa

SEQ ID NO: 384039 - RNA, 32 nt, Homo Sapiens
cacuccagccugggugacagcguaagacucuc

SEQ ID NO: 384040 - RNA, 32 nt, Homo Sapiens
gguuuccuggcgacgcggcccugcaggcgguu

SEQ ID NO: 384041 - RNA, 32 nt, Homo Sapiens
acucggccuccucuccugggacucggccuccc

SEQ ID NO: 384042 - RNA, 32 nt, Homo Sapiens
ccuuguauuuaggaucuuaagguguauaaaaa

SEQ ID NO: 384043 - RNA, 32 nt, Homo Sapiens
uaacuaucacagaaacaaaauaaucaauauag

SEQ ID NO: 384044 - RNA, 32 nt, Homo Sapiens
gaugucaagccaccgggcaaaccccgucaaua

SEQ ID NO: 384045 - RNA, 32 nt, Homo Sapiens
aaaaggaaaauaaaaguguauugcacaaugag

SEQ ID NO: 384046 - RNA, 32 nt, Homo Sapiens
uuuuucauucauauaccauuuuaugaguucug

SEQ ID NO: 384047 - RNA, 32 nt, Homo Sapiens
ucuugaaggugauuccagagacucugugcucu

SEQ ID NO: 384048 - RNA, 32 nt, Homo Sapiens
gcaguauuaaccguucuagaaagccacuguuu

SEQ ID NO: 384049 - RNA, 32 nt, Homo Sapiens
uguacccacauauauugaugucuccaggggcu

SEQ ID NO: 384050 - RNA, 32 nt, Homo Sapiens
ccuuaauagauauuuuugaaauuaaaaucuuu

SEQ ID NO: 384051 - RNA, 32 nt, Homo Sapiens
uuuaaaaaauagagugaagauauuuuacugua

SEQ ID NO: 384052 - RNA, 32 nt, Homo Sapiens
ucauucuuuucucuuggaaagguaggaggcug

SEQ ID NO: 384053 - RNA, 32 nt, Homo Sapiens
cacaauaaugucaaugcccuauggaaaagaua

SEQ ID NO: 384054 - RNA, 32 nt, Homo Sapiens
cgucuaaauaucuuguauauuuuuuagcauca

SEQ ID NO: 384055 - RNA, 32 nt, Homo Sapiens
acuagcugccagcaggauggagacccagcagc

SEQ ID NO: 384056 - RNA, 32 nt, Homo Sapiens
agcccggcucugcugcagcggcagggaggaag

SEQ ID NO: 384057 - RNA, 32 nt, Homo Sapiens
guggguguuucuccgagagggggaugugucag

SEQ ID NO: 384058 - RNA, 32 nt, Homo Sapiens
gaauaaaauggcgcagacgugcuugugcggcu

SEQ ID NO: 384059 - RNA, 32 nt, Homo Sapiens
auaacguuugcaaaacaaaccuuuaaaaaccc

SEQ ID NO: 384060 - RNA, 32 nt, Homo Sapiens
ggagggaaacugugucucccacagccccagug

SEQ ID NO: 384061 - RNA, 32 nt, Homo Sapiens
ugaauauggcacagcucugugauucaucuccu

SEQ ID NO: 384062 - RNA, 32 nt, Homo Sapiens
gaagugcagcgguggcggcggcugguugcggg

SEQ ID NO: 384063 - RNA, 32 nt, Homo Sapiens
ggccucucccagccuggcaugauagggggguc

SEQ ID NO: 384064 - RNA, 32 nt, Homo Sapiens
aacaucaauuuaacuaguuuuguaauuucugu

SEQ ID NO: 384065 - RNA, 32 nt, Homo Sapiens
ggaaacaguuguuagcaaacccuuucaaccau

SEQ ID NO: 384066 - RNA, 32 nt, Homo Sapiens
gaucgcgagguacccauagccgacagaccgga

SEQ ID NO: 384067 - RNA, 32 nt, Homo Sapiens
ggguguggagggcagguucugugucaccacuu

SEQ ID NO: 384068 - RNA, 32 nt, Homo Sapiens
agagccugacuaggaauauaaaacacgaaaga

SEQ ID NO: 384069 - RNA, 32 nt, Homo Sapiens
ggaugccaagcuuggaucauggcccuaauccc

SEQ ID NO: 384070 - RNA, 32 nt, Homo Sapiens
gccaccgugcaacuugcccaacaucaaucuuc

SEQ ID NO: 384071 - RNA, 32 nt, Homo Sapiens
uguuuuaguuuaaugucuccuaagcuuuucuc

SEQ ID NO: 384072 - RNA, 31 nt, Homo Sapiens
cagagagcugucuagaacucgagaaucaugg

SEQ ID NO: 384073 - RNA, 32 nt, Homo Sapiens
gacacugcuccuugugcagcucugguaccucc

SEQ ID NO: 384074 - RNA, 32 nt, Homo Sapiens
acuauguugaaccauccuugcaucccagaaau

SEQ ID NO: 384075 - RNA, 32 nt, Homo Sapiens
agcacgggaugaauucaucugcuuuuuggacu

SEQ ID NO: 384076 - RNA, 32 nt, Homo Sapiens
gcggagcccggucaucaagaucuccuacagca

SEQ ID NO: 384077 - RNA, 32 nt, Homo Sapiens
cggguacccgcggcugugggggaggaggaggg

SEQ ID NO: 384078 - RNA, 32 nt, Homo Sapiens
uucaacuccagaaguggggcucugggagggau

SEQ ID NO: 384079 - RNA, 29 nt, Homo Sapiens
gacuggauaaugaugucuuucaugagaga

SEQ ID NO: 384080 - RNA, 32 nt, Homo Sapiens
aaguuuauacgagaccuaguuuccaaggaaga

SEQ ID NO: 384081 - RNA, 32 nt, Homo Sapiens
guuuguuguuuauuaauaauuagcuuuugcag

SEQ ID NO: 384082 - RNA, 32 nt, Homo Sapiens
cuagaaucuaaugcagaagagaucuuuuaaaa

SEQ ID NO: 384083 - RNA, 26 nt, Homo Sapiens
gcaucugauauuaaacgggagguuuu

SEQ ID NO: 384084 - RNA, 32 nt, Homo Sapiens
uuuguucuaggaugccaggcugugagguaaga

SEQ ID NO: 384085 - RNA, 32 nt, Homo Sapiens
aggagcugucuccucucuaccuggcuaguaag

SEQ ID NO: 384086 - RNA, 32 nt, Homo Sapiens
gagacuguagggugggcggugcgagcggcggu

SEQ ID NO: 384087 - RNA, 32 nt, Homo Sapiens
caggcuccauucucccucccuuuccaccagug

SEQ ID NO: 384088 - RNA, 32 nt, Homo Sapiens
aucuguaacugcacaacccugggguuugcugc

SEQ ID NO: 384089 - RNA, 32 nt, Homo Sapiens
auguggccaaccuggggacucuggccggacgg

SEQ ID NO: 384090 - RNA, 32 nt, Homo Sapiens
aguuuuucccuugccuggcccacugcaccugu

SEQ ID NO: 384091 - RNA, 32 nt, Homo Sapiens
cugcccuggcacacgcguuuccgccgcguaug

SEQ ID NO: 384092 - RNA, 32 nt, Homo Sapiens
auaaaauacugaguccagucccggguauggag

SEQ ID NO: 384093 - RNA, 32 nt, Homo Sapiens
ugcuaacaauuaauuuuaucaaaccuaacugu

SEQ ID NO: 384094 - RNA, 32 nt, Homo Sapiens
gagcagcgcggcccgcgccuccgccucggugg

SEQ ID NO: 384095 - RNA, 32 nt, Homo Sapiens
ugccuugggcccagcccuggccucuggcuuaa

SEQ ID NO: 384096 - RNA, 32 nt, Homo Sapiens
gugucuuaguucgggcuucucuaacaccguac

SEQ ID NO: 384097 - RNA, 32 nt, Homo Sapiens
aaaucuuuuuagugcacaaaacuaauuuuguu

SEQ ID NO: 384098 - RNA, 32 nt, Homo Sapiens
uacucaaaaugguucuauuaacuuugcaguca

SEQ ID NO: 384099 - RNA, 31 nt, Homo Sapiens
cuguagggcaccucccugccccuagccuccc

SEQ ID NO: 384100 - RNA, 32 nt, Homo Sapiens
aacaauccaucccacagauccucaggcauucc

SEQ ID NO: 384101 - RNA, 32 nt, Homo Sapiens
ggacaaauuuucugcugcugccuucgacauca

SEQ ID NO: 384102 - RNA, 32 nt, Homo Sapiens
aaucagaauuguagccaguuucuuuggccaga

SEQ ID NO: 384103 - RNA, 32 nt, Homo Sapiens
accagcaggaggggagaagagaguaggaaaaa

SEQ ID NO: 384104 - RNA, 32 nt, Homo Sapiens
aaccccaggaggccaggcaagcauggacagga

SEQ ID NO: 384105 - RNA, 32 nt, Homo Sapiens
auugguaauuauauuucacuuaaaggguaaau

SEQ ID NO: 384106 - RNA, 32 nt, Homo Sapiens
guccgucaggccgcccggggcuccucuguccc

SEQ ID NO: 384107 - RNA, 32 nt, Homo Sapiens
auacuuaacuaaauaaaaaacuaagcagauau

SEQ ID NO: 384108 - RNA, 32 nt, Homo Sapiens
aaggagcaguuuuauugcuuauagaaagccgu

SEQ ID NO: 384109 - RNA, 32 nt, Homo Sapiens
ggccagcgccgggagcugcagcgcugagaccc

SEQ ID NO: 384110 - RNA, 32 nt, Homo Sapiens
gaguuuaguaauaaaaagcauaaaucucuucu

SEQ ID NO: 384111 - RNA, 32 nt, Homo Sapiens
cugaggggcucaggaaggggccccucgagccu

SEQ ID NO: 384112 - RNA, 32 nt, Homo Sapiens
aucaaggccugccccucugugcucccacggag

SEQ ID NO: 384113 - RNA, 32 nt, Homo Sapiens
gcuuguauaccguguaaauauuuuauauauac

SEQ ID NO: 384114 - RNA, 32 nt, Homo Sapiens
uaaaacuaaaagaggaaggagaagcggcaaac

SEQ ID NO: 384115 - RNA, 32 nt, Homo Sapiens
augucucugaaucgaagacuuuaugcauggcu

SEQ ID NO: 384116 - RNA, 32 nt, Homo Sapiens
ggggucaggaccgggccugauuugagccuccu

SEQ ID NO: 384117 - RNA, 32 nt, Homo Sapiens
ugccgcggccccagccuugaccuguuugacuu

SEQ ID NO: 384118 - RNA, 32 nt, Homo Sapiens
guaggaacuaaauaaaggacuuuguaagccaa

SEQ ID NO: 384119 - RNA, 32 nt, Homo Sapiens
uguggagaauacuucggguuauuacauggguu

SEQ ID NO: 384120 - RNA, 32 nt, Homo Sapiens
cccucaaacccucucccucucugccugaauuu

SEQ ID NO: 384121 - RNA, 32 nt, Homo Sapiens
gaggacgcagggacaggcugugcggagaagcc

SEQ ID NO: 384122 - RNA, 32 nt, Homo Sapiens
ucauauuuaggcaauucccagaucucguucuu

SEQ ID NO: 384123 - RNA, 32 nt, Homo Sapiens
agacggcaccgcgugcccacgggggcggucga

SEQ ID NO: 384124 - RNA, 32 nt, Homo Sapiens
gcuauguaaaauguugccauucuguuagauug

SEQ ID NO: 384125 - RNA, 32 nt, Homo Sapiens
agcugccuuguugugaguuacucuguggagag

SEQ ID NO: 384126 - RNA, 32 nt, Homo Sapiens
aaagggagggguggagauggguguggcagugu

SEQ ID NO: 384127 - RNA, 32 nt, Homo Sapiens
cuaucacacacacacacacacacacacacaca

SEQ ID NO: 384128 - RNA, 32 nt, Homo Sapiens
gagaagaggucuuuugggaugcauggugcucc

SEQ ID NO: 384129 - RNA, 32 nt, Homo Sapiens
aggcuagccgaagcggcugcaucuggcgccgc

SEQ ID NO: 384130 - RNA, 32 nt, Homo Sapiens
ucuuuaaguugcuuuuagaaauccugaagaau

SEQ ID NO: 384131 - RNA, 32 nt, Homo Sapiens
ccagggugugccaggagaagggcaugaagcga

SEQ ID NO: 384132 - RNA, 32 nt, Homo Sapiens
uacaucucaccgucaagauggugcugcugaga

SEQ ID NO: 384133 - RNA, 32 nt, Homo Sapiens
cuuuuaagcaaaugcaggacuugucugcaaca

SEQ ID NO: 384134 - RNA, 32 nt, Homo Sapiens
guuuuucuccagcacuuuacucuucuuaagug

SEQ ID NO: 384135 - RNA, 32 nt, Homo Sapiens
gaccugcuuuccugccccccagcccccucaau

SEQ ID NO: 384136 - RNA, 32 nt, Homo Sapiens
gcgagugacaccacugaugacgaugaugcacu

SEQ ID NO: 384137 - RNA, 32 nt, Homo Sapiens
caaaaaugaaggaccucauuucuuauagccuc

SEQ ID NO: 384138 - RNA, 32 nt, Homo Sapiens
uuuaaaggauuacuaucugugugacaaauaac

SEQ ID NO: 384139 - RNA, 32 nt, Homo Sapiens
ccuggcggggcgggcgcugaaagaugaugccg

SEQ ID NO: 384140 - RNA, 32 nt, Homo Sapiens
cauggcaccucauuuucuuuugccugcuguua

SEQ ID NO: 384141 - RNA, 32 nt, Homo Sapiens
uaaagaaaugggggcuccgagcagucaagaag

SEQ ID NO: 384142 - RNA, 32 nt, Homo Sapiens
uggaacaaacaauggucuuaguuuuuuaagag

SEQ ID NO: 384143 - RNA, 32 nt, Homo Sapiens
caacuaccaaaauaaaucagcuguagcauguu

SEQ ID NO: 384144 - RNA, 30 nt, Homo Sapiens
ucccaaucugcagagggggaaauggaggcc

SEQ ID NO: 384145 - RNA, 32 nt, Homo Sapiens
cugugcgguaaugagagauccaaacaccaagc

SEQ ID NO: 384146 - RNA, 32 nt, Homo Sapiens
gcugucuccccuccccaccccauccuugcaaa

SEQ ID NO: 384147 - RNA, 32 nt, Homo Sapiens
agugccuugaagagggagcagcgggcacgauc

SEQ ID NO: 384148 - RNA, 32 nt, Homo Sapiens
augguggacauccaguccaggggcaagagaug

SEQ ID NO: 384149 - RNA, 32 nt, Homo Sapiens
caacucuuuguuuuccucuccaucuacuuuuc

SEQ ID NO: 384150 - RNA, 32 nt, Homo Sapiens
gcguuaaugucgucacuugaaaacgagaaaaa

SEQ ID NO: 384151 - RNA, 32 nt, Homo Sapiens
agugguaggaggagggggaguggaggggcaua

SEQ ID NO: 384152 - RNA, 32 nt, Homo Sapiens
agcaucuccccgcucuucuaaguacacugagc

SEQ ID NO: 384153 - RNA, 32 nt, Homo Sapiens
aaauauguuucucccccuuuccaaaaacuguu

SEQ ID NO: 384154 - RNA, 32 nt, Homo Sapiens
uaguguucucccuguuuugcugaugagacaca

SEQ ID NO: 384155 - RNA, 32 nt, Homo Sapiens
uuucccauccucaaaaggcacggggaccaaug

SEQ ID NO: 384156 - RNA, 32 nt, Homo Sapiens
caacuuuaugaguaaugcuuggaauaaaaaac

SEQ ID NO: 384157 - RNA, 32 nt, Homo Sapiens
uuagaaucuucccuuuuuuacuccauucaaga

SEQ ID NO: 384158 - RNA, 32 nt, Homo Sapiens
cuuuaguguuuguuaaaagaauugauuuuggg

SEQ ID NO: 384159 - RNA, 32 nt, Homo Sapiens
ggcccccggcaggcugcagauucccuccggcu

SEQ ID NO: 384160 - RNA, 32 nt, Homo Sapiens
gcuuguuggcucgcuauauaaaggagagaagc

SEQ ID NO: 384161 - RNA, 32 nt, Homo Sapiens
aacuuacuuuuguaaguuuuuauuguguaagu

SEQ ID NO: 384162 - RNA, 32 nt, Homo Sapiens
cccugccgcaugcccuuccacucugccuccca

SEQ ID NO: 384163 - RNA, 31 nt, Homo Sapiens
uuucuuaagccccagaaagccaaaaagaaca

SEQ ID NO: 384164 - RNA, 32 nt, Homo Sapiens
gagacgcacaggaaacaagcccucacugaacc

SEQ ID NO: 384165 - RNA, 32 nt, Homo Sapiens
ucuucuuuacuaucuuaauaaaacagauauug

SEQ ID NO: 384166 - RNA, 32 nt, Homo Sapiens
gggugugcgaggggaacuggggaugcuuaaug

SEQ ID NO: 384167 - RNA, 32 nt, Homo Sapiens
ucugagaaugggcauuuuuguauuuuguuguu

SEQ ID NO: 384168 - RNA, 32 nt, Homo Sapiens
cuucagcccuuaaguucacuaagaaggucuga

SEQ ID NO: 384169 - RNA, 32 nt, Homo Sapiens
accugcggggguacgggccugggggcugccag

SEQ ID NO: 384170 - RNA, 32 nt, Homo Sapiens
accgccugcagcagcaucuacuucaccaugga

SEQ ID NO: 384171 - RNA, 32 nt, Homo Sapiens
aauggcggagaacagcgagagucugggcaccg

SEQ ID NO: 384172 - RNA, 32 nt, Homo Sapiens
acuacaaagcuacauuuuuacuugcuuguagc

SEQ ID NO: 384173 - RNA, 28 nt, Homo Sapiens
uugaagguggcuacaaagaugacugugg

SEQ ID NO: 384174 - RNA, 32 nt, Homo Sapiens
aauucccugguuuuccagcagaugaaacaggc

SEQ ID NO: 384175 - RNA, 32 nt, Homo Sapiens
gacuuauagacuucuuguucugaugucacguc

SEQ ID NO: 384176 - RNA, 32 nt, Homo Sapiens
uguccccagcccaggaggucuuucugcuccau

SEQ ID NO: 384177 - RNA, 32 nt, Homo Sapiens
cagcgucccccuccgccccucggguccuggcg

SEQ ID NO: 384178 - RNA, 32 nt, Homo Sapiens
aggcagcggcgccgcguccgcucucgcccgcu

SEQ ID NO: 384179 - RNA, 32 nt, Homo Sapiens
ggccaggugcagugacucacaucuguaaucca

SEQ ID NO: 384180 - RNA, 32 nt, Homo Sapiens
agaugcagaacaaaauggauaaaagguauuuc

SEQ ID NO: 384181 - RNA, 32 nt, Homo Sapiens
gccccgggccccagcccgcggcacuaacgaca

SEQ ID NO: 384182 - RNA, 32 nt, Homo Sapiens
cuucuuaaaaauuagacacacuuuaaaccuuc

SEQ ID NO: 384183 - RNA, 32 nt, Homo Sapiens
guucucuauauuuuaaauuucuuggcuuauau

SEQ ID NO: 384184 - RNA, 32 nt, Homo Sapiens
cagacacagccacaggcaugucauugaauggc

SEQ ID NO: 384185 - RNA, 32 nt, Homo Sapiens
gguucagggaaggaggggaaaagggaggugca

SEQ ID NO: 384186 - RNA, 32 nt, Homo Sapiens
uguggaggaaagggaagcugcuuuugucuuca

SEQ ID NO: 384187 - RNA, 32 nt, Homo Sapiens
auguuugaagacaaaaucaguaguugucauuu

SEQ ID NO: 384188 - RNA, 32 nt, Homo Sapiens
aggggagacugggaaggcuggcguggaagggg

SEQ ID NO: 384189 - RNA, 32 nt, Homo Sapiens
ggcggcggugacggaggcgccgcugccagggg

SEQ ID NO: 384190 - RNA, 32 nt, Homo Sapiens
aaauuuugacuugaaaaauauucauguagauc

SEQ ID NO: 384191 - RNA, 32 nt, Homo Sapiens
cacucccuaagccccacagccaguucugcauc

SEQ ID NO: 384192 - RNA, 32 nt, Homo Sapiens
ucacacagcgucugcuuguaaccgcggucccc

SEQ ID NO: 384193 - RNA, 32 nt, Homo Sapiens
gugagauuucuacuuuuuaguuuuuauccuau

SEQ ID NO: 384194 - RNA, 32 nt, Homo Sapiens
ggucagcagacacaucacugcgucaguucagu

SEQ ID NO: 384195 - RNA, 32 nt, Homo Sapiens
uuacacauuuuucagauauaaaagacugacca

SEQ ID NO: 384196 - RNA, 32 nt, Homo Sapiens
uauauaaaguauucuuuuucuuuuuuaaauua

SEQ ID NO: 384197 - RNA, 32 nt, Homo Sapiens
cccucacuggcacuucucccuccggccacacg

SEQ ID NO: 384198 - RNA, 32 nt, Homo Sapiens
cuaauuuguugggguagagauuuuacaaguca

SEQ ID NO: 384199 - RNA, 32 nt, Homo Sapiens
aguggauaaaauguacuuuugaugaaucaggg

SEQ ID NO: 384200 - RNA, 32 nt, Homo Sapiens
aaaugcuuaggacuuuguggcuuguuacauuu

SEQ ID NO: 384201 - RNA, 32 nt, Homo Sapiens
guucacugcccccaauuccuaaagcaaguuag

SEQ ID NO: 384202 - RNA, 32 nt, Homo Sapiens
aauucagccuuacauuuuccuguuugaccaaa

SEQ ID NO: 384203 - RNA, 32 nt, Homo Sapiens
uuuaccuagcuaaggccacugcuuccugcuuu

SEQ ID NO: 384204 - RNA, 32 nt, Homo Sapiens
gugcccuccguuauaagucccucccccagccc

SEQ ID NO: 384205 - RNA, 32 nt, Homo Sapiens
cuaauggcauuuggcugugugagugguucugu

SEQ ID NO: 384206 - RNA, 32 nt, Homo Sapiens
agaaaaguaaauauuucuuaugccuauuuuuu

SEQ ID NO: 384207 - RNA, 32 nt, Homo Sapiens
agaggccagauggucagauaugauuucugcaa

SEQ ID NO: 384208 - RNA, 32 nt, Homo Sapiens
cuuggaacuaguguuaaguaucuggcagagaa

SEQ ID NO: 384209 - RNA, 32 nt, Homo Sapiens
ggaaguucugaauuucuuuuguuuccuuuuuu

SEQ ID NO: 384210 - RNA, 32 nt, Homo Sapiens
gcuucuuuucuuucuuuuuuccuuccuuuuuu

SEQ ID NO: 384211 - RNA, 32 nt, Homo Sapiens
gacagcagccagacccugucccggcccaugca

SEQ ID NO: 384212 - RNA, 32 nt, Homo Sapiens
auaguuacaaugaauugcauaugaagaaggca

SEQ ID NO: 384213 - RNA, 32 nt, Homo Sapiens
gaaucccgcagccccaguacaccucccuccgu

SEQ ID NO: 384214 - RNA, 32 nt, Homo Sapiens
uaaaaugaguuauacuuacauaaaaaaaaaaa

SEQ ID NO: 384215 - RNA, 32 nt, Homo Sapiens
gggaggaggaggaggacaaggacuccugaacg

SEQ ID NO: 384216 - RNA, 32 nt, Homo Sapiens
uggaggagaaaacaaccuucucagcucucugu

SEQ ID NO: 384217 - RNA, 32 nt, Homo Sapiens
cggcggcggcccggcuuccgcugcccgugagc

SEQ ID NO: 384218 - RNA, 32 nt, Homo Sapiens
guugagaagacagaucuagucaggaccaccag

SEQ ID NO: 384219 - RNA, 32 nt, Homo Sapiens
uaaaccucccccacccuuuuccugaaagcuuu

SEQ ID NO: 384220 - RNA, 32 nt, Homo Sapiens
gggcucacuccagcuucauauggugccaagac

SEQ ID NO: 384221 - RNA, 32 nt, Homo Sapiens
gauuguguuuuaaccagguuuuaaaugugucu

SEQ ID NO: 384222 - RNA, 32 nt, Homo Sapiens
caacacacagaagaauugguccaguuaagugc

SEQ ID NO: 384223 - RNA, 32 nt, Homo Sapiens
ggcucuccggugcugcugggcuggguugagca
